United States Patent Application Publication US 2007/0083945 A1 - sequence listing, part 10

SEQ ID NO: 62327 - DNA, 396 bp, Glycine max
tggcagtgatattattgaccagccctctgaaaccttctaccgagatgtcttgggccacatgggcctcgttcaaaaccttcactatcagagcccgatgaggctcggagctcatgagtaactccaacagcgagaccctggccggggttgtgttgagctgttcgataaccttgaattcgctctgctgaattatacggaggaactcactggcttcctctagtgacacctcctttttaccatcctttttctctggaagacctttcgcacgaatgtctttattcgaagtgaggggtgcttcatcatcttgttcctccaccacttttgctttccccttgacgttcgcgggtaggactggcagatccgcgggtgcaaacacgcgacagctacaggtcacaccac

SEQ ID NO: 62328 - DNA, 328 bp, Glycine max
aaagctcaagagaatcaaagaacatgcatctcaagaagatctagaacaagtcaaagagttcaagaatcaagaagaattcaagactcatgaagaaagcctacaaacaagaatcaagatcaagaattcagactcaagattcaagattgaagaagagactctatccagataagtattaaaaagtttttcaaaactttgaatagcacatgagtttttgacaaaaccttttccaaagagtttttactctctggtaattgattaccatactgttgtaatcgattaccagtagcaaaatgagtttgaaaatgttttgcaactgaatttacaacgt

SEQ ID NO: 62329 - DNA, 233 bp, Glycine max
  unsure (1)..(233): unsure at all n locations
agcttggtgatgaaatgctatntagagggtgccctcttgacaatattacatataacggccttatcanagctctgtgtaaaactggggcagtcgaaaaaggattgngattgnttgaagaaatgctcgggaaagggatttttcctactattatctctcgcaatatactgatcagtggcttgtgtagaactggaaaaagaaatgacgctctannaattcttcaggatatgaatcat

SEQ ID NO: 62330 - DNA, 391 bp, Glycine max
  unsure (1)..(391): unsure at all n locations
atattcttttatatcacanatatatagaatagaatgatgactttacaatggcaaccggaaattaactttattcatgccaaccttgggtaccaaatataataaaaagcgtgacatgaggggtttttttttatgtcgtggtgaactaattacccatgaacttcgatcattattccctgggtcacatgaaaaaggaaatggattatcaatttaataatgattagcaataccaattcccttgcataaccccaacgtaatgtcaccttggaagcatgaaataacctgcgggcgcttcacaaccctcgttttcttccacagcaacaacagattcccccattttccgcaactttcaagagttttctgcactcagcaccctgttgcatccgtttccata

SEQ ID NO: 62331 - DNA, 450 bp, Glycine max
  unsure (1)..(450): unsure at all n locations
agctntntggagtagaaacatgggacctacttattntatttcaaaaaggaagtcgtatctagtcaaggtctgagagaccatacaagtttcctaacgatttctaattatgtgggccattaagtctatcatatgctgacaatagccgagaagcccatgaatctcttcgggggcggagtaggtgtctgccatcgccttggccttggctaacaatcggggaagttcttgactcccgttcaaagtaagagcaaaccgatccatccacatggttgcctcttggtgtaaagagtcgatcacccttcctctagcctctttttccgcatacacttgagcatactcatccgcgattctatgctcgtgggccgtggctagacctaactcttcttggtacttggcgatgatagctagcatgttggtctccgtctcgcataaacgctgagacaagcttctttt

SEQ ID NO: 62332 - DNA, 407 bp, Glycine max
tataatatatcgataggctcgaaattattcatcttaaactctcgcgaaattcaaatgggcataaattttcacacggatgtccgattcgggcgcataatatgtcaagagtctcgaaattgaacaacggaagctcttgagaatatcaaatggttataaaatttcacacggatgaccgattaaggcaaatcacatatcgagacgatcagaatttgaacaacggaagcgtctgagaaattcaaatggtcataacatttatctccgaagtgcacattacgcgcactacatatagcgatattcgaattgaacaacagaagctcttggaaattcaaatggtcataacttttcacactgagggccgattcacggttataatatatcgatacgctcgaaattaaacatcggaaact

SEQ ID NO: 62333 - DNA, 419 bp, Glycine max
  unsure (1)..(419): unsure at all n locations
gttcttaanactggactgattcatttgctttcaaagtttcatggcctcgcaggtgaagacccgcacaaacatttgaaagaatttcacattgtctgctccaccatgaaacccccagatgttcaagaggatcacatatttctgaaggcttttcctcattcattagagggagatgtccaaggtccatcacgagctgggatgaccttaagagagtattattagaaaaatntttccctgcttccaggaccacagccatcaggaaggatatctcatgtattagacaactcattggagagagcctgtatgagtactgggagagatttaataaactatgtgccagttgcccccaccatcagaattcagaatagcttcttctcccatatttttatgaaggactcactaatatggagagaagtatgatt

SEQ ID NO: 62334 - DNA, 422 bp, Glycine max
  unsure (1)..(422): unsure at all n locations
tgttcttgattnttccttagttctagaacaagctttgaactatattctaggccttcatttaactgtctttgcgcttggcggccacgctcaacaaagtactttcgacacctactgtacgttgatttgaccaatgctgttatgggaatgtttcgacaatccttcaaaaccttattgatacattctgaaaggttggttgtcatgtggccatatcgacgtccttctctatcataagccatcgtccatttttcctttgaaattcgatcaacccatgtggctatggctggactcagttcacgaaatttttgtaaattctgatcaaaaatgtgcttgcaaggagtgtaggctgcataaaaatagttatgaataacaattttaagtatataggaaacttaaataaacgtcaccaacaaataggaaatctt

SEQ ID NO: 62335 - DNA, 226 bp, Glycine max
  unsure (1)..(226): unsure at all n locations
gtatgtttttaaccgcggatcaactcaaaccagaatatttcactagcagctctagtggcacggatgttctattatttaaaggaagctagatgaaaacatgacttgcaagccgaagctcagcaaatgtgcaaccacgaattacaatctcaagctatgacgcgactaatgcaccaaatacttgcttatagttgctactncaagcagtgacgtgactaatgctcattaa

SEQ ID NO: 62336 - DNA, 312 bp, Glycine max
aaatatctttgagttacaacaaattaaaccaaatgactatcccatctagttcgtaggttgaacccaatacctgacctatgttgcaatatttaaccatactctaaggtttatgaacatataattctcatagtaataaatacgtcacatcataccatgttaatactgatatggtagttttcagggtcgtatatccccttttccttcctttacctaaaaccccataatttcaacacacaacatggcatagaattgatatgatgaatgcgttatcatatatccaagaaagcaaacttgcgaatatgtgctctacac

SEQ ID NO: 62337 - DNA, 335 bp, Glycine max
  unsure (1)..(335): unsure at all n locations
aaaactaagctctgccagacactgaaaagccaagctacttatctttgctactaagagnggaatgatttgagatgcatgaataatttatgtgtcctgataatactactaaaactggcaatgatcagttgatttcggcaagatatcgtcaattttgcactttatcaagcctctacactcttggtttaacctaatatttatgtggctaaagtggtttcaggataatcttttaaatgtatttttcaaaatccatatgttgattccctttttgtcgatctggatgtccttttgaatatgtgcctgtgtgattgacacttattactaataatacttttttt

SEQ ID NO: 62338 - DNA, 415 bp, Glycine max
  unsure (1)..(415): unsure at all n locations
ctagagagctagtagtttgaaacatatatcagacggaagaagatgcttaatttgaagctccataagaacttgcacatcaatggagtccttttgagttacttattattcaaaagatggacgctatgcttcaccttcatatttcgttggaaaatataactacccggctggaaaacattgagactaggctaacctttatcaacctctttaaccttgatgaggataaagcttagttatgttttaagtgcttatttcaattgtttgattggcctttctgattatgtntatttctggttttgtgtctatgatcacttgctatgtgatgtttgattaagtagttatgttttcttacaatagttgtaatgattaaggtgtattgttttttctatgaatgaaatgctatgatcttttccttttt

SEQ ID NO: 62339 - DNA, 426 bp, Glycine max
  unsure (1)..(426): unsure at all n locations
ngagatgaggaagtgttgaatggtgaaacttcctgcttttattgttgatcacagagnggtacctggagatatgtcgcgggggtcaagagacctttggggacgtcagggtggggtgctattgcccaaaaaccaagcttgaccaatccccacctaaccccggcataatcggtcagtgagaacctgtgatgtacctaaacaggcgaagctctggcagtcaacagataaaaggaacacagaccacaaagcaaggaggcttgtggtggctggccagctgtgaatnttgtgtgacatgtggaattgggccctttggtaatcgattaccaagggtgggtaatggatacaaggcttaaaaatgaagataggaggctaagatggtctctggtaatcgattaccatggngtgtaagtgattaccangattgaaaac

SEQ ID NO: 62340 - DNA, 439 bp, Glycine max
  unsure (1)..(439): unsure at all n locations
agctntccaaagnnttctgtttttctaaactcttaaaacttattcatcttttcattctcttctccctttgccaaaaagaattcgccaaggactaaccgcctgaattctntttgtgtctctcttctccctttttcaaaagaacaaaggactaaccgcctgaattcttttgtgtctcccttctcccttgtcaaagaattcaataagacacagtctgagaattcttttgattcttccctttcccttatacaaaattattcaaaggactaaccccctgagaattcttttgtatccccattcacaaagtatcaaagggttaaccgcctgagatctttgtcttaacacattggaaggtacatcctttgtggacaagtagagggtacatctactcgngtttgactgagaacaggagagggtacatctcttgtggatcaattctagt

SEQ ID NO: 62341 - DNA, 448 bp, Glycine max
  unsure (1)..(448): unsure at all n locations
actatgaaactaagctttatccaactntgatcaatggttcccctatgctgtcatgctcataagggtatcccacatgcatgaaaacctcacttttttaattaaaggaatggccctatcccattcaagaagaaattttttatagtagattgataagtgacatgaaagtggtgacatgaattccatcataatcaagtatgcacccagagaacaaagtgaaatgcactatgtcgtaacctacccttcggtgggagggcgacgcgagggctcacgagtgcatcttccaagaaaggaaaatgcgcggagtcgccaccaacgtttattcgaggaaaacgtctgaaaaaccgaaaaagtgtggtctacgaactntaagtgtgaaaggttcaggagttgtatttacgcacggggaaggtattagcaccccacgcgtccatcacaaaggacgatagcc

SEQ ID NO: 62342 - DNA, 447 bp, Glycine max
agcttgccatgccattaccatttcttgttctattactcatttcggctcatacccatcccttagcatgactcgcaccaccatcaaggaggcaccaaataaacgtggttgcaccggagaagcctccacataagcattgttcataatttctagtgcttgaaaagatgtttccaatgactcttctgcagcttccatatagggtgtagaggatggacaactcactagtatatcttcttcactcgacactataaccaactatcctttcaccacaaacttcaatttctagtgcaacgttgatggaaccaccccaacagaatggatccatagccgacctagcaggcaactgtatgcagggtttatgtccattacttggaatgttatttggcacgtgtgtggcccaatttgaatcgtgagatcgatctctcctctcatgtcacgtcgactatcatc

SEQ ID NO: 62343 - DNA, 415 bp, Glycine max
  unsure (1)..(415): unsure at all n locations
tgtaagaatctgttntagaatttctaacaagtacacaattctttagttggatattccatgaagggttagaatcatcaacagcatcacagaggtttatgtgctttttttctacattgtgcaaaaggcatgactggttattttcttttatccatattgctgtctgaacttgtcgtgcaatgagtctccagcacattgctgtagtcaaattcatcaacttatcccanattacaggataatctttgtcttttctataagcagggggagctgaataaacaaagtacccattgaagcgaagaaggcgattcaactccttcagtaaaatcccatctgcaaaaaacaaaataaattgacaataaacaagtctgtcagaataacgtgcagtttcatgaatcacttgaacaaaataaacaagtct

SEQ ID NO: 62344 - DNA, 206 bp, Glycine max
atccttaagtcacctgcggcatgcagctagggctaccatagagatcgtacaagtcctatctatgtgactcctgcatgtgtcattttaccaacacgtacagacgggataacccttaattctagcaaatctatacatgttgtagccacaacatgttgttccaagtcttcaatgccattcattttcttgcaccgactaagaaatattga

SEQ ID NO: 62345 - DNA, 323 bp, Glycine max
gcctgtctctagcacgcgcgcactggaagtctcatggagaagaagaggacaaaggagggtgccttattgagaaaaaaggaaaagtgactttagtgtgctccaagatcttttcttaagttccacatgttccatcttctttttaactaggggcttggagaacttttgaaaacctcctggaacttttgaaaacttctgaaagctagcttctcaccaccctttaactactccctcctggactctggagctagcttctcccccctcaatctaccactctggtggagcaaacttccccgccttatactaccccccgacatctgaatcaa

SEQ ID NO: 62346 - DNA, 149 bp, Glycine max
  unsure (1)..(149): unsure at all n locations
aatatctcataaagtgcagcaagccatatattaacaacaccaattaagtattataatagaaagaacatagacataacttanatcaaaatatattgattgaatcacaccaaacatcaacaatagcgatttcaatcacacanaataaatga

SEQ ID NO: 62347 - DNA, 77 bp, Glycine max
tgatgaaataaaatctggattagattagattagattggatgaaatacaatctggataagataagatttgattaaata

SEQ ID NO: 62348 - DNA, 127 bp, Glycine max
ggagctcttagaactgcttaagcaagtatttcctttttaaaaagccctctggagcttctggaatctggagaggttttcccgcccttatgtactactctggagagggagctactcccccctattgtag

SEQ ID NO: 62349 - DNA, 328 bp, Glycine max
  unsure (1)..(328): unsure at all n locations
agcttctgtatgtctagagagttctagagagagaattgtnctatttctataaagtatgagagaaatttgtgtgtgaagatctgcacagaccacagctngagatgagtttgtgagtgactgtaaagtcttataagtggaggagacatccccactacttctatttctgcaanctttcatctttctctttctcttttttgtaaagaagcttcccagttatggaaagctcaatcctctcgtggatctctccttgctcgtaccttgatgtaaatatccttttatctatctaatgatgtttcgcgtgtctctgtgctatcagtatttcactcta

SEQ ID NO: 62350 - DNA, 336 bp, Glycine max
  unsure (1)..(336): unsure at all n locations
ttactcttttgtaatcgattaccagattgctgtaatcgattaccagtagcacaattggtttgaaaaagttntcaaattgaatttacaacgttccaattaatttcaaaaagctgtaatcgattacaatggcttggtaatcgattaccagtacctttgaacattgtaattcacattcagatgtgaagagtcacatcctttcacataaaagctttgtgtaaatcgatacactgatttggtaatcgataccagtgattgtnctgaatcattaaangatgtacccttcanacgggtttgattttcaaatggtttaagtttctaaagtatactctctaatgg

SEQ ID NO: 62351 - DNA, 475 bp, Glycine max
  unsure (1)..(475): unsure at all n locations
agctgtagtgaggcttggcttcaaaattcataggtttttctagcattcanatgcttagattctaagagaacacaaattctagacttatccaagtgatctttttcatgtgcttagcttgctcattaactttctcactttcatttgcttntgaccttattacatcatcacaccctttccttttntgctttccttttccttcctcttctcnttttttttaaacatataacttatgtgttgggtgtgtgatgccttatctctttctatgcatcccaactaagttcactcccccacatntgaagtaaatttctttgaccatatgctttctagatctaacatggatctggagatatattaagtcacgttcaaattttgccaatcttcactataagggtgcaagatacatatattcaagaagcttttgtcaaaagttgatatgctaacatggcttcatatgtctcattatcattcatctaaa

SEQ ID NO: 62352 - DNA, 351 bp, Glycine max
  unsure (1)..(351): unsure at all n locations
ttcttcatttttctccaagtatctcctcacatgtctcgcgataatgttgntaacatgattctttagagttttcaccgattaaacttgctatagaagatnagatttattttctatggntcacaattcttggtcttggtcttgaaccatgaatttgtgtngagttagggtcctttgatttttgnnctgtatttttttggctgaacctaaaccataaattcttacaaaatatttagtagaagaaacctcaaaatctcagtgacttgtcacctatgtagtttgcatagaagcatgtctagcataaacttgcacatagattctatgtgngcgatttttttctgttcttgctactca

SEQ ID NO: 62353 - DNA, 364 bp, Glycine max
  unsure (1)..(364): unsure at all n locations
agctttcattcattctatgaccctggaggccacataggtttcttgcattttattctcgtttgtttactttttatacccnctcttgacgtgcttaagccattntacttaatngtcatttcttcgctctatacttagagaatagagagtaaacttccacccgaacggttagaattgtattatcccgtaacttcagttaaaataaattccgaccggttggtcgtgccgtaaccacgttggaaattaaaaaagaggtaaaaaatgatataattataaataaagaacatcttttagtaaaataaagcggaaaatcaatcgaaccgtttctctttgggatntctcattcttaatcgaattggataataac

SEQ ID NO: 62354 - DNA, 419 bp, Glycine max
tatctcagcttcatattctatgtccgggggccgatttgttatgattttatttcgtttattacttttataccctttgcggctaaccttattagcatttcgtaataaaaaaaaaattcaccgacgttgaatgatcatcgtaattcggtaaatgatccacgtcgcggcgacccgtggataaaagagaaatatattatataaaatcctttagtaataagcaatacataacgttctttggattttatctaatgaatgctatactaaggaactaagtaaatcactgctatcagctcgccaaatagattgaagtatttttgtttataataatgacattcaggcacgctaatgaacttaagaaagatactgtccgctaaaactactggattctatcatggatctgacaagaccctgtacccaaagaa

SEQ ID NO: 62355 - DNA, 375 bp, Glycine max
  unsure (1)..(375): unsure at all n locations
agcttnctctaccgaaaanaacattgtcgcaagcgcttgtnaataattgcgcaatgtcggcgtgaaaatatcagttggggctatttaactaccgatgctggctctggttttctattccacccctagattattacttgaccatgtccacttggcaatgttcgatccgagtcatcacgtcatgcttcttattaagacctcgatctgtcatcttttccttggcgacgtcggctagcattattgtcgatcaatatcggtgatatatgctctctgccaaagtgggcttacgttntcgcggctgatgaaatgagagcatgccaatgtctgccgaaacacaatctcgcacgaaaaaccctatcccacctacattgtatattt

SEQ ID NO: 62356 - DNA, 410 bp, Glycine max
  unsure (1)..(410): unsure at all n locations
ctgcagctagatttatatgcacctaagccgtgctacatgttttctggtctgggaatgtatcctccattccaacatacaccggagctaagggaagctgggtgcaatgaggactaactccattattggttgcctcctgcccgcttcatcgggaacctgtggcctctgattatgaatcgtcacgcaacaccttggagctgcctggcggntaccaattcttatgtagaagctatattgattctgcatcatcggtattatacttatcagcgacaccagcgttatggaccatactgcttaaaaaacacccgctgccctatgcatatgtgtttatatctttgcgactgagctcacacgtgtaactgatgcccggtagacttgccttgttatttgctgggaacgggcaaagtgccttg

SEQ ID NO: 62357 - DNA, 257 bp, Glycine max
ctgcactttaacagggaaaatactaatatattttagcatcctgctaaggcctggcgtacaatatctatgctaggagacatcctaccccaccacatgtgaggccctacagaactgctagccaaacctctgattgcatatggatggctaggagctgtactacacaagttctttctacacatttgcctcaacaaaacttttgctaacccattatggtacggctacgtaccaacttttaatgatgctacaacttatacccc

SEQ ID NO: 62358 - DNA, 371 bp, Glycine max
cagctgcacttattaattttctcttgtacgcatactcacttattgaatctctgtaacaaagattgaggtctttccatgaaagaaataggatccatatataccctcctagattaggcctgaattacttatcgaacataaacatttattgtttatatttttcttattatcaaaatcatcttttcggtgaaagctatacacttatttttcaaccccttctaaattgcaaaagtactgatactgtgacagcagataatagatggaactgttttatgtgatacctaggaggagtaaatggtgaccttgacataaccgatctgtgaataacttattgagtctggcaaatgtaaatcatgcttttactaaatgacgct

SEQ ID NO: 62359 - DNA, 115 bp, Glycine max
  unsure (1)..(115): unsure at all n locations
agctttcananagccnnctttccataactctcatagagcatgntccttaatgctacatgtctgtatattacaannggggttgatgggttggtggtcattcacatttcacaacatt

SEQ ID NO: 62360 - DNA, 227 bp, Glycine max
  unsure (1)..(227): unsure at all n locations
cgtttactcggatggtcgatngagtcacgttatacattattactctcgaaattgaaacagaagctctgtgcaaattcanacgacaatacatcttaactcggatgtgcgattgagtcccgtaatatatcaagacanctcgaatngagaataanagctctgaacaaattcanacgacaataacttnttactcggatggtcgattgagtccagtaatatatctagacact

SEQ ID NO: 62361 - DNA, 255 bp, Glycine max
gcttaaacttaaagagatgcactctatggaaccaataatattgaagcactgaaccactgatgatacagactttaccagtgtgttctctcatatatccttgtccattatatatcatatcattttctgggtggggggagggctcttatcatgattatctcatcagatgattgaaaacttaagcgacacagactgatttctttatgctctattaacatgtagtaataacaaagtcttttcaagacatcacataaactg

SEQ ID NO: 62362 - DNA, 396 bp, Glycine max
cagctaccggcgacactgagccaagagcggactgctctctccttgaacaacaccctttgacgctgtacctatcacacatagatcgttcctggtgttccaccttttgcaagaaggcctgcccctctgattcatgagggaccataacatatgcatcactcaagtgttccattcctatgacacatcatttttcttttgacttcctctcctcttacacaagaggtcaaacgcctttcattttggggactctgacctcgtctgcgcgcctgacattgtttgtggatcgataaagtgcgcaacacacaatcacgcacgtgtgatcatcgacaccgctcacacacatgtacgagctattacgacttatgtgttgaacagaaaccacttgctacgtggagggga

SEQ ID NO: 62363 - DNA, 172 bp, Glycine max
gcttataagcttcacaaatgttccatatgctaaatatgacacccatgatctcgatgttttcattgtattaataacatcttcattatgtacgttgctctacatattgagtcatccctcttctctagaagaacatacccatgtgtctaaactgagtgtctgcttcagaataaca

SEQ ID NO: 62364 - DNA, 198 bp, Glycine max
ctaagaaacctggcatcattcgagatgttgaagttgatgagtatgcttctcggaattgcgatgaacataaagtggaaaagaacgttcttatacctgctcaactacctcaagaagaagctgatgaagaagacccaagtgaaccaccttcgccttctccactactacgagatcaagaactatcatcaccagaggctactt

SEQ ID NO: 62365 - DNA, 174 bp, Glycine max
ttaagggttgagacaatatttttctgcattttatttttaagccatcgagcgggtctgaaacgttaatccgtaattttttagttatgatagaaaatattcttgatagtctataagactgtctagaagagcccctctaaacgttagtgtactttagggttatgtgcgtcggttgag

SEQ ID NO: 62366 - DNA, 251 bp, Glycine max
cttgatctcagctttactgattgcacgttcaatatttttaatggtgaatcgatacaattattggtatcgattccagtgatctgaacgtgaaattcaattcattgtaagagcacatcttttctaaatgcattgtgaattgttacatggtatggaatcgataccagtgcaagtttgaataaaaatcaaaatgaactcttcaatggcttctaagatttctaaagatatactcttcatggtctttgactaacatg

SEQ ID NO: 62367 - DNA, 158 bp, Glycine max
agcaccgcgctcactgaatgggaaccttgaaagattttatgttttagataaacgaatgaagaatggtttactatgatcaaaactgaaacaggacaaaatgtcactccatacaaacatgtatggaaccatccacttcctcctttttataataataaccc

SEQ ID NO: 62368 - DNA, 241 bp, Glycine max
  unsure (1)..(241): unsure at all n locations
ttatcattngataatagcacaactctcttttacaaaataggtagtgtagctaaactgaattctaatctaattattaaataataatcatcctccgatttaatttctgattggtaaatgaatttagaattttgtgcagggaatagcaaccaagcattatttgaagacagaatacagcatgatgtgcctttcacacaacatgttgtatatgctcagcanattcctcaatctcatatcatatcta

SEQ ID NO: 62369 - DNA, 486 bp, Glycine max
  unsure (1)..(486): unsure at all n locations
agagcgacctgaccatgcagcttctcggccattctgcaagcaacatttggaagttattttactctcgaaggcgacncttaagacaaaaatggcgtacaacctccttcaataaacacaaacatcaatggtaaattagagcaaacttatgcacatatntccttacgaacattcactcgcacaagatattcttctaactaagataaatgcacccatgcacaatcaaggcacctttcgtacctagattatntgtacgtaccttcaaggtgtactacctacatcacatgcatctncttggctaatntacatacatgcatactcaaagcattctggctaccaataattgcacacgtgcacatactgggtattctaatacctatgcatatacanactttgtgatgaatcttggtatctacacaataaggggtacatttcatgctctncttttttcaagtgttgtactacctaaagccgatgcaaatcaagata

SEQ ID NO: 62370 - DNA, 118 bp, Glycine max
gattctatttagtttattcttcagcatctctctcattacgtaccaatctcctaccttctctctgtacctgtgcgtgcgccgatccttgattgtccctccgaagacattgacacctgtc

SEQ ID NO: 62371 - DNA, 195 bp, Glycine max
  unsure (1)..(195): unsure at all n locations
gatccctaagcaccgagctgcaacttgcggttgatctcacaggcgaatgatctaagtgggtttantagatgcatatccgatcatcatgctctgatacatgcaaataaccatactggcgcnaatgaacaaggtgagaatgatggaaatacccatgccgtgactgtcattcccatacagccgaagttcccacccacc

SEQ ID NO: 62372 - DNA, 345 bp, Glycine max
  unsure (1)..(345): unsure at all n locations
atcaagacanactatatacaagatgatagcacgttcacacaaccctttactcccctatcttttggatgtatgccttancttacctaatgaaaaatntctaaagtgatttctacccaagctctagctctctcaaggtctctcccgctttggaacatcaaaaagaactaagcaatacaaacataatccaaacatagcgcaacatgaacccaaataatccacacattgcataaccaccaaagcanagcctgaatattatataggcagagtcgatacttgagcacaaaaccaataccggcgataaacaagtctagaatcttantactaatagactcgcatatataatac

SEQ ID NO: 62373 - DNA, 301 bp, Glycine max
cacgttctatagcatctatctgagcgtttggaagattcaattgcatagctcactactctcaacttgcttgaactccaagattgatatcttctaatctaatgtcttagctcgagcgaatcagcagaaccgcttctcctgttcgtcgttcgcagacacatgtggactctcaaacactcttcacctgtgaagcttgtgtgccagatttgtagtttgatcatcggtcgaccttaaatatcacatccttgattatgctcgcggatactaagtatacattgctcttaatgatgacatgcttgctgtt

SEQ ID NO: 62374 - DNA, 495 bp, Glycine max
  unsure (1)..(495): unsure at all n locations
ctctggtctcccaccatgacttgtccataatcattccggcaacggaggaaatcagaacttgtgagaggttattaatgactntataccagaaccatctganacaaattaagaagatcgaacaaaatataagtgaattaatattgcacatctatactaaatcaaatgatntgaacaaaggcttaactaactaattatgagtataccttgtagctgcatcttcttgaagaatttagaatcgatcacagatatgattggtggttacagcgtgaatggaagaagacttgaaatgcctatgatggagtagctatccatacttgatcattctattggttgatcaaactctcgtgggtatatcaggatgggcntggatcnatcaaatgaaaccactcanaacagtggcggtctcatgcggcaacaagggatatgccggctcactagcattttttggtacagcccatatnnttatagtctaaaacaataaattaaaaaaagaag

SEQ ID NO: 62375 - DNA, 356 bp, Glycine max
  unsure (1)..(356): unsure at all n locations
agcttnctctaccgtaaaaaacatagtcagcaagcgctagtaaaattattgcgcaatgtcagctgaaaaaatatcagtggagctatntaactaccgatgctggctactggtttttctattcccacccctgatataatacttggacgaatgtcgatnttggcaatagttcgatctggagtcatcagagtcatgcccttcttttatagacctcgatctgacattctttcctggccgacgtcggctagcattttnttcgatcaatatcggagaatcatgctctctgccaaggtgggctaacgtnttcgtggctgatgatatgagagcatgccagtgtcngccgatacacaatctcgcac

SEQ ID NO: 62376 - DNA, 302 bp, Glycine max
  unsure (1)..(302): unsure at all n locations
ttactcggatgtctgattgagttccgaatatatcgacacgctcgaaatagaatcctgatgctctgagcataattcacacgaccataactctttactcngatatctgaatgagtccctgtatatatcgagactctcgaaattgaatacggagctctgaccaattcaacacaataactttactcgatgtcgatgagcccgaatatatcaacctcgaatgatgtgagcctagaatcaacacatactttacccgagcgatgagctgatattcaacctcaatgattcgacttgcaatcaacacatac

SEQ ID NO: 62377 - DNA, 439 bp, Glycine max
  unsure (1)..(439): unsure at all n locations
gcagctntcacaagagtcttcacanataaccatcatgaagcagataacttactgaacttcctatcatatctcccagaatcccatacccacgagattnatgagagatagaagtccacccatacctgaaagttcgaagtcccactcggtgacacgcactttacgactgcgagaatgctctcctttcacgatttcgggcagaaatgaaggccaaatgttgaaactttgtttggagcttccatggagaatgaaagagaatagaatggctacgtgatggatagagagagctgtctgaaaagtgagctgctgagtgaagagagaacaaagcttttggtctaaataaaaagggttctctgtcttttattatttatttaatcaatgcacatgtttcatttgagtgagccaaagggccactttcctttgactggagcatactcaccca

SEQ ID NO: 62378 - DNA, 165 bp, Glycine max
  unsure (1)..(165): unsure at all n locations
tactcagctnggactcacagncgtgctaagccatattctgcccctcccggcatattgatgcatgctccttggagcttgtaggcctaagatcnttcttatcaatggattcctttgcttcttggaagatgaatggccgcggaatggagaatgaagagagagaggaga

SEQ ID NO: 62379 - DNA, 428 bp, Glycine max
  unsure (1)..(428): unsure at all n locations
atccttaagtcacctgcggcatgcaagctgangattatggggtactcatgatatgtggtactatgtggttatctgtcgatggcgcaagncgactctgcacatgcagaaatcacacataagtacaccgtcctcaggtgcccaccttcaactgagctcacgtacattcacgtagatcttatactctgtcttctcaacaccggggccccatcaatccctccaagctgacacaacatccaggcgattcaacatccaaacatcatgagctatccaaaccaagataataaggcagaggcagaaaactctgccctaacacattgcaatgccacaactttgtctactcagataccgcagtaacattatcttgcttccgattcgttaccagtggatcgactcanaactttactggaggtccctagacataagtctac

SEQ ID NO: 62380 - DNA, 278 bp, Glycine max
ttgagacatacaatcattggtgggccatttcatacactctcatggaatggtcaacaatatcttatatcattcatagacgactactccagatatgcatacttgtatcttatacatgaggagtcacaatctctggatgtactcagaacatttaaagctgaagttgaacatcaactccacaaacaaataaagtgtgttatagctaaccatggtggtgaatactattgcagatatgaccgtatacgggaacaacatcctggtgctctttgcatgtacctaga

SEQ ID NO: 62381 - DNA, 387 bp, Glycine max
ctgcaacttgaaaacagactgatacctagcatcatctttttaatctcctgaaatctagaaagaacttgcttcaaacaccttgttccttggaaaaaactaacatgtgatgattatcttctataaagatcataatgtatcaggtgccatttcaaaaacttgtgtttgttttaccacagtgcttgtaggataaaacactaatttatgcagctatgataacttgcaagtgtagattaaatggagtgaaatcttgatttgaaccaaagggatgaaatttgtattgaaatagcgaactagggtataaatggatatcctgttgaaaacataaatcttggactcctctttttacacaagattgatatttatttatatctttgttacaaattgtga

SEQ ID NO: 62382 - DNA, 203 bp, Glycine max
  unsure (1)..(203): unsure at all n locations
tctcagctctattagctgaccatttatcaataacacaagttgagtttattcttaatttagagttatctctttatcttaggagagtgctttctaagttctgagtaancaagaacccttggctgatcagaggatttcaaacctttggtgtgccctcgccggaaatgatctttccttccttcatttcaaccttgtctttcaaccac

SEQ ID NO: 62383 - DNA, 318 bp, Glycine max
  unsure (1)..(318): unsure at all n locations
ctcagctatgctgcaacatctcaacanacttctaacctcacagcaaaatcttcacatatattaattatgacctctctagcaataggtacaatcccgggtggaggaatcatcccaaccttagatggtcgagtcctacacaacaacagcaacaacaacaaccttatttncagaatgctgctagctcaagcagaccatacgttcctctatccaatcagcagcaacaaccccagaaacagcanacagctgaagttcctctgcaatcttcccttgaagaacttgtgagacanatgactatgcanaacatgcagtttcaacaag

SEQ ID NO: 62384 - DNA, 459 bp, Glycine max
ctcgaaatagaatggtgaagctcttgagccaattaaacgacaataactctttactcggatgtctgattgaggcccgtaatatatcgatacgctcgaaattgaatgttgaagctcctaacatattcacacgcacatatacttttactcggatgtctgattgaggcccgtaatatatcgagacgctcgaacatgaatgttgaagctctgagcgaattcacacgacaatatacttttactcagatgtctgatataggctcgtcatatatcgagacgctccaaattgatgttgagctctgaactaattcaacgacactacttttactcggatgtctgatgagtctgcatatatgagaccgtcaaataatgtgaactctgacaatcaacacatacctttctcgatgctgatgagcctgattatgaacctcaatgatgtaactttacaataacacatactttatc

SEQ ID NO: 62385 - DNA, 198 bp, Glycine max
cacaatgatcaatatgcacagaatgatcatgatgctcactatgcctaactaatctatgaaagggtctatctatctcatgatcaaagggttgaaatcacctggattgcccctagtcatgcactatatgcagcacattatgtgttctcatacatgccccactggagggtgtaaacttaaactataggcatatgatatcca

SEQ ID NO: 62386 - DNA, 460 bp, Glycine max
  unsure (1)..(460): unsure at all n locations
cgttcacttgcacaagacatcctattaactattattaatgcacccatatacaatcaaggtagcttcattacctagattatntacatgtacttccaaagagtatttgttatttacatcatacacgccatcttgtcaaaatttacacacatgcatactcaaagcatttcggnngtaccaaaaatgcacatgcgctcatcttggtatttctaatatctatacatatacaaacttcatgatgaatcttgactacctacgcaataaggtgctacatttcatgctctttnttttcaagtttttgtacctaaagcatatgcanattcagcatatcttcctttgtgactaaattgattcaaatagaaggatatantttttgtatatgttccttacataacatgcacacattatattatatttngtgagaatttgactaccaaatattatacatacatcaagtatttgt

SEQ ID NO: 62387 - DNA, 54 bp, Glycine max
  unsure (1)..(54): unsure at all n locations
acttttatacccnccttttgacgtgcttaagccatcttatttaagtcatttctc

SEQ ID NO: 62388 - DNA, 422 bp, Glycine max
  unsure (1)..(422): unsure at all n locations
caatctaaacgtcaattcccaaaccannaatgtctntcccatatctaagaaaggcaaaacgttgaaggtccacgaatagtaacatanatgaacaagtgggtttatattatgagccgcagaggactatgaatggctcctatcaagggggtgaaattccaattnttctttccattcaaaaatntgcggcaccctnccttcttctcttcttcttcctccaccaacaacaacatacctttgcttncccaatctttccttctccttctttccactaatttacaatggaaatcatattatgtggtnaaaattttttatcaaacaaaatataatttattgtgaatggaaaactaaacaacaaatattgattcattgtgtaagcgtgtaaaaatacaatgaatacaattcatacttatcttgacaaaaaa

SEQ ID NO: 62389 - DNA, 319 bp, Glycine max
  unsure (1)..(319): unsure at all n locations
tactcagcttatcttcttacccacaacanaaccacaacctacacatncaccacactggccattactcttacctcttnctatctttcaggagcctgaaatggcggaagaagaacatcctataaagacacttggagactatatngcacatgcagtgcaaaggcacttcatattggaatgtgttattttggctattaaagggtgtagnttcaatctattaatacgattgctcccttcaattggtcttagcacatctctcaatntcatggtaaaaaagctaatggaccggattgngtaatgctcaccactacttactaatata

SEQ ID NO: 62390 - DNA, 334 bp, Glycine max
  unsure (1)..(334): unsure at all n locations
atcttcgcttatcatgtcgtngctagctctatacaaatcatacatatttgttgacttctagcacaangantaactcttaattgtcttatagaaagatatacaacgctatcactntagtcttttctttcaaagagtttgagagctctttagaactatacaaaaatatatagaaagctctttgcataaagaatttgaatgagagcgtgtaacgtcgtatccatgtcttcaaagattctagtatatataggctntcttcaacaagtgtctgttgttataaatgaataaatttctcacttgagctcgtgtctaaagattgtggcattggagcattaat

SEQ ID NO: 62391 - DNA, 235 bp, Glycine max
  unsure (1)..(235): unsure at all n locations
ctgcactatttgttttagctcaatcnagtgagtcatttttttggtctctatattaagatatattctgtaatctttgaaatctatcaaatgcttgttttagtcattctgctcagcatgaatcatatatganataaaaattttattttgcaacacctttgaccgcttaatattaattgttctatgttacattttaaagtatacttctagtgattacagagatcctatattaaccctg

SEQ ID NO: 62392 - DNA, 454 bp, Glycine max
  unsure (1)..(454): unsure at all n locations
tactcagcttacacactctatgtacgnaggatntcaatcatggaccatatgtatatatatacgcttctcttcatacctgtcatgaaagggtcactccaccattccacgacctatatggaagcacattgntatgtgaacacattgtgtgtgtgtgtgtttgttttaaggtgaagctgtacattctaatattattntatgcataattaactatgcatgcacgaggcangcattatagaatttgagtttattgatttataactagtaatttaagagttaattttatccataatttgttaaaattaattggattactatattttgatagtgtattaatacatttacacatattaatattaattatatgattccatgattattatgataataaactcttatctatttcaaatgaaactttctcttaaaaatgaaaataattaaatatatatatattttc

SEQ ID NO: 62393 - DNA, 211 bp, Glycine max
  unsure (1)..(211): unsure at all n locations
tagagatcatgggatcttctagacctaatagccttaacatcctccactcttcaaatttgctcgtggagtgtgtagttcccacacaaaagcctcttatacatcanaactctcactttcaaaatcttccagtcatttataggtggtgttcgaatcactagatgacccctgtgcttcaaccaaagttctccacatacacattntctaactacca

SEQ ID NO: 62394 - DNA, 451 bp, Glycine max
  unsure (1)..(451): unsure at all n locations
caataacannncaataagattcttagtcacctctattatcaagaaatatcttaagacttccaagtctttaacataaaaacatgcactcaaacatcgnttgatagtatagattatatcactatntgtccaaaaatatattatgtcaccaacataaaccaatatactgagctgtaagcatacgtactgcaatgaggagagagagtatttggaataattaagaatgttgacaactataccatntcaacgcacccactatatataacttagtgaaccacacatctagaatgatattaaaataaacctaacattttcaaactagaatgnaccaagatgtggaaggaacttttcaagggtggaagcnataagtgtggagttggtcagttaataacgggaatgagctcagatgagaatgatactgtagtaggtgagagtggagtgatgtaccaacaat

SEQ ID NO: 62395 - DNA, 346 bp, Glycine max
  unsure (1)..(346): unsure at all n locations
ttgggtacttaagaccatttnttatcaaagggttataaagccacgaatgaaggaaataggccaacctggcataattggcctaatttgacttctatgtatggatatataaatcaatgcacataactctacaagttgttgaatttgtattcttagcgctactggtaagagaatggaaatagttattgagtcacatgggagggaggaggaaggctactgatatagaaacctcgcttaagacactacctactgacattaatatggacatatagttcttgattatacattacaacgtatccctgattttctatgttacacagcacttgtctgatgaatgaaagacatctgc

SEQ ID NO: 62396 - DNA, 469 bp, Glycine max
  unsure (1)..(469): unsure at all n locations
ctctaaacacaccactttngcctctaaacataccaataaattcgttgtaagttgattgcacacagataaagctatatcgtcttacaaatgataatctaacttaagcgcattgtctctctatccctcaagatgtactggatgttttgagagctctttacgaactaggaatatacagaagaaagatcgaatggttaagagaataatatattcaaattcaaagggttctttaactcaactcttcaaaattttggatttatagacttcttaacaagtattccttgttctaaatggtatattgtttcgactaatcttgttcatgagaacgagattgttggtgctcttttacataacaaagaatatgcgtcaagaattatgtctatttatatatttctgctctataatttaaatataattactntccttatatatatgaagtcgctcttaatgttatgttatgtcttcctccact

SEQ ID NO: 62397 - DNA, 299 bp, Glycine max
  unsure (1)..(299): unsure at all n locations
taagcttgatgtgcttggactctaaagaaattgagacagccatgtggtaaaaattctaaacactgtttgtctttgtttncagctgttactattttcaacttatttcacttctttgatgaaatgatatcttttcaacaaaagtgtaagattgaaatgtttttcaacttatttcaccttcactgcagtgataagaataatactaacatagtatacagtatatagtagtagtcagtagtatatttagtagtacagtagtatatttattactcaatattactctgaccatctgtacaatacta

SEQ ID NO: 62398 - DNA, 238 bp, Glycine max
  unsure (1)..(238): unsure at all n locations
gcatgtgctaggcacaatgactattgtccatggtcacgtatcacgtcctctatatgtttactgatggtgacatcaacatactcagcgcnggacactatgagaatgattgacgaatcaccatctcatacncactttgtacaattcggaatgatcctctcacatatgagatgcgaccttattccgtccctacatgtgctccattctacataacaatgatagaatattttcactcatacta

SEQ ID NO: 62399 - DNA, 239 bp, Glycine max
actcagctaatgtatgccgagacccttggaaagcttctttaggcgcacgtttataccactcgatgggggcgagcctttatggtctcgcgggaatgatgggaatcacattccattcaatatgcccccacttgcacgggtgttcagtatgatataatcccctatactgctctgggaaaccgggattatccctggagggcccttaatgcttaccaaattgagttccagtggggactttatga

SEQ ID NO: 62400 - DNA, 432 bp, Glycine max
  unsure (1)..(432): unsure at all n locations
cctgatctaagcacgagctgcactggcaggcttggtaccttctccttcggancacgtatctacttntctaatgtcacagcgaacaggttgctgcttctctcaacaaagatcctcactctcaaatccccaactatcccaatctaccttccaagcttctctgtctcctncacaatctcactttgcttgctgatcccgaaactgatgaagtctacgctcagatcactcttcagccaagcccttctgtaacaatccattcttctcttcctcccttcctccctccattcatcatctttgcttctaatcacattgcctttcctttcttttcagtttgacgaggatgctctcttgcgatctgatctcgccctcaagtcctccaagccacaacccgacttttcttgaaacaactcaccgccagcgatactagcactcacg

SEQ ID NO: 62401 - DNA, 339 bp, Glycine max
  unsure (1)..(339): unsure at all n locations
tcctttcctctctcttacatagcanaagtgccaacatatacttgagttntcagattttttcttaatgagaccactatctttcactatgggtattaattaatcatctagatcttagattcttatttgggaatcttatgactatctcacagcctaatatttcatttaaattcatttatactttaaattataatatatatacaaatatgttttttcacttacaaataagggaaataaatattgatggtaagatttactatttatgaatgataattcanactactcatcactctcgtgtacaatatcaactcattagagatgcctcctattatcatgtgaata

SEQ ID NO: 62402 - DNA, 346 bp, Glycine max
  unsure (1)..(346): unsure at all n locations
catcctactaggacgactgagaagactgtggcatatgaagagggtgataaagagggagaaacccatgctgtgactgccattcctatacagtcaagtttcccaccaacccaacaatgtcattactcagccaataacaaacctcctccttacccaccacccagttatgcacaaaggccatccctaaaatcaaccacaaagcctacctaccgcacttcctatgacaaacaccacctttagctgtaaccanagaacaccaaccaagaagtgatatttgcagcgagaaagcctgtagaantcaaacccagttcagtgtcctatgctgacttgctnccatatctacttgata

SEQ ID NO: 62403 - DNA, 117 bp, Glycine max
atgacgctaagcgccagtcatggaagctaagcgagattctttgcggcagtatgagcgctaagcgagtacctctcagctaagcgcgtgctcctatgtacttaagatgcatcattttag

SEQ ID NO: 62404 - DNA, 109 bp, Glycine max
ccatcatatctccccagaaccccatacccacgaaattaagagaaaagaagtcacccaacctgaatttcaaagcccactcgagccacgcacttcacgaactcgaaatgcc

SEQ ID NO: 62405 - DNA, 271 bp, Glycine max
  unsure (1)..(271): unsure at all n locations
ctcttagttctgaacgcatgataataatatgttccttaacatacaaagcatgataatatgttggacagagctcttcatatttctgcttaggtgtaataatgaanaggtggtgcgtttggttaagtgtttattaactagatttgaaattatttgattntatatatgagattgactcttattaaaaatgaaattaanataaagtgtctgtttattaatattcattttaaaagtaagttatattacaacttaatatgattctttaactaaaatg

SEQ ID NO: 62406 - DNA, 494 bp, Glycine max
  unsure (1)..(494): unsure at all n locations
atccttaaagtcacctgcaagctgcagcttcctaatagcctgnatggagagaaatgattatatacactctatatgtaaatactaactatctattacctatacttaatagaaaatacttatgacactacanaataaccataaattgtgagatgttgatacaatttatacaagttntatacacaaaagtaagtcgtnttcatcgactaacaacttccccaattacagttttgcttgtcctcaagcaaaaagagaacagctcacttgttctcaagtgactatgacatgcagtgactatgtacaaaggtgtatgctataaagttactgattgcatgataagagagcggagtaaaatgctctcatcactggtctttcacaacggttgcactantcgaaagagaagagtaatatttatcctatacacgtagatggagttaggcataagacagatatcaaggagagtagcttatactatagtctcatggcttactatttac

SEQ ID NO: 62407 - DNA, 228 bp, Glycine max
cccaacaatgtcattactcagccaataacaacctgtctctatacccaccacccagttatccacaaaggccatccctaaatcaaccacaaaacccacctaccacacaaccaatgctatacaccacctgtagcacgaaccataacaccaaccatgatatgaattttgcagcagaaaagcctatagaattcacccgcattccggtgtctatgctgacttgctccgtattac

SEQ ID NO: 62408 - DNA, 391 bp, Glycine max
atcatccaccatgaaacaatccagcccaatacaatgacaactacaaatgggtggttgtcattctgaggccatacataccaatatgttaacttatcccaacacaaattaccatcacaactccagagcccaattcatatatatgaataaccatgggcgcaaaaaaactgactcattagcatcctacaagaacatacaacatatatgatttcaaaaagaaacataaagtctaattaagagaaacaatgttctacaagacaaaagatagttggaataagaaaaccaaaaaggtgagcaaggcgatgtgagacaccacaacaaaatagactaaaattgatcgtcagactaaattctagagtgcaagactctagtatgcaacacgaaaaatcaaaat

SEQ ID NO: 62409 - DNA, 113 bp, Glycine max
  unsure (1)..(113): unsure at all n locations
ctcagctgttagtcccaattatgggtatttggagtaatntntaataaatattgttttatgggtaataggtgctctagaatatttccattggattaatgatgaaatctgtgcat

SEQ ID NO: 62410 - DNA, 335 bp, Glycine max
  unsure (1)..(335): unsure at all n locations
caacatcggtttcttggaaaaccgatgtaatggtataacttaacatcggttntgatgaaaccgatgtaacaaattaatgatagcatcgggtgttaaaaaaaccgatggtaacatcaactagttcacattagtttnttcaaaatcgatgtcaattaaccgaatntattaccaccatgctcttggtaacatcaagttttagaataaccgatgttaacatattgcgttaacatcggtttttttaaaaatcgatgttaaaagtctcgtatttacacatttgcactccatttttgtaacatcgatcttataanatcgatgtaacttaacgatgttaatat

SEQ ID NO: 62411 - DNA, 444 bp, Glycine max
  unsure (1)..(444): unsure at all n locations
ggatcctctaagcacctgagctgcagctatgccggaaatgtattatgannatgagatgcccgaagaatcaccatntcctagttaaccatgcattaggtgccatgtncaattattttgttttaagtgaaacgggtttatgatcccaacacggttggctcgtggtgcctaacacatgatactaagaatgtagtgtgatagttcacgccttcancctttctgttntatgtttgtagatgaaaacgcaaggatgagcatacatgataacaaatggtatgcaattntgcagatcaaagagtttgttgaacgcatatgcatgatgatgccatgatctcatgcaaatgtgatgctggaatatgattacggacaaatgcaggatatgtccattatgaatgtatgaagagatgcttatgcgatgcatgatatgaatgcantttacggacacga

SEQ ID NO: 62412 - DNA, 237 bp, Glycine max
  unsure (1)..(237): unsure at all n locations
acaatactgatatggctctcgatcggaaccagcttcagagtatgactaagcgagagcatgagtccattaaggaatatgcccaaagatggagagatctcgcaagccaagtcctaccgcccatgacngagagggagatgatcacaactatggtagatacgttacccacgttctactatgaatagcttataagctacatgccagcttactttgcggatctcgtctatgccggagaaaaga

SEQ ID NO: 62413 - DNA, 202 bp, Glycine max
  unsure (1)..(202): unsure at all n locations
tcatattaattatttttngtataaattaaaattattatgttatttagccatagctatttctacactgcaaaaaactccctcattatcaaaatcaatcaatctaggagggaactgttcataagctgatactccacaagaagaacatagtaagacttctagattattacgagctattgctaagctatatacanaatctaatatt

SEQ ID NO: 62414 - DNA, 271 bp, Glycine max
ctaaattgagtgtttgtacagtctgaacatttcgataattaagctgacttgatgattaagtagtataatcatttgaataattcaaagcataaaattattttaaaccattttttatccctaatatttaagcagctcaaaatattataccataacgtctctgcggcgctgaaacctagaactccaaaaaaaaaaaagggcgaatgtgatcagaggacttcttttataagtgaaatctgaacaatatgagtcataatgggagttttttataaat

SEQ ID NO: 62415 - DNA, 257 bp, Glycine max
  unsure (1)..(257): unsure at all n locations
tttaacatgacctgatccttttcatggatgactaaccaacccactagtgcacctttntgttgtgtatcantttcacaacccaattatatgatcatgagaattttcttttaaaagaaaatctctacgaaaggtatacaatcataaactcttagttggcatgccatagtttgttgatacgatcgagaactatcaagcatgtaaaatgaatattgcatgactatgagtgagaccacttatgtaagggctgctgaacacag

SEQ ID NO: 62416 - DNA, 340 bp, Glycine max
  unsure (1)..(340): unsure at all n locations
ctcagcctcacctttgtcctcctantagtagtgcatgagaaaacatgctctattntcatcttccactctaagtaagcctncngatcattctttcctttaaagggaggaatgtcgagttaataccatcaattcagctttgtctaagaacaccatcattcctcttctcctccattcttcatcattatgatctctagtctgcatttgatccaacctctcatagagcacatcatctcggtgcttcattaacctctcacaatgttgcgtaaaagcttgcatttggacttgcgaaagnctacttcattattaagatattacctgcntctcaacaaacaatcaacat

SEQ ID NO: 62417 - DNA, 104 bp, Glycine max
atttctcttaccatctggcggattcacaccgatatggtgcctctcagacatctgtctgagcgatagtaagcagccacaccgcacaccgtgaccgaaccttgggg

SEQ ID NO: 62418 - DNA, 487 bp, Glycine max
  unsure (1)..(487): unsure at all n locations
agctngcttctaaatctccctattttatgatatcttttctgatatctananacacatacacanttcttttnctagtctatcactcacttaattctccctattctccgcctctatttgtgaggttaagcttcacttgaaattaagtcatttaattatatgagtgcttgatgtaatacctattatctctccctctttggcatcaacataaagccaaagtgcgtaaagcatacatgatttaaacacatacacatagcatgcattgttaatctatcataaaagattctaaactaatcatggagcaagacatgaataaaccacatcaatatatagaccacatagtcatataacattattcataaatggccagtcatactaagcgactattaaaaggagatactacatgttcatatgtcataataatatagccacatacactgctagaaatcanagtactaataatattaacaattaaataatctaagatgat

SEQ ID NO: 62419 - DNA, 326 bp, Glycine max
  unsure (1)..(326): unsure at all n locations
tcagctgctgtcatgccagtatgatggccagtatgtngggaactgttacattctctctgatgggttangcaaagacaaccgtggcataactagcctgatanatgccanaggacatcgtgtgaagtatgggttaggctataagcccactcatgcagatataaagagaagcatcatgggaaggaagagtggtagtcaaaactcgcggttaagacaagaaggtgaaggaagcccaccctgccacataagtaggagctttataagtgcnggtcttgggacgaaggtcaagtggtcgcgatatatgaagatggtgttccgagtacattggg

SEQ ID NO: 62420 - DNA, 354 bp, Glycine max
  unsure (1)..(354): unsure at all n locations
gggatttggatatgattgccgttatgtatattaaaatactaccggattgatttttatggggactgtgttctacatggagtactaagaagcaaggcatcgtgacactttctacttgtgaagccgagtatgtagttacaacttgtagcacatgtcatgccatctggctaatataattgttggacgaacttcagntgttgcaaaatgaatgcacaaacatctatgttgattatagatctgtacacgagcttgcctagaatccggtgttccatgaacgaagaaagcttatatatacaaagtaccattccattagagtgtgcattacttagtaagagtagaattgactcatgtgataac

SEQ ID NO: 62421 - DNA, 84 bp, Glycine max
  unsure (1)..(84): unsure at all n locations
aagcacctgaagctgctctgagattcatantgcacctaatagctaggcgaagctggtctatatgtttcttggcgaatagatatc

SEQ ID NO: 62422 - DNA, 345 bp, Glycine max
tacctctcggataatgctaaaaggatccttcacagccagacgtatgattccaagagttctttaatcaccccataaatatagaaacatgactgaaggtatgatacacactaattgctaagcgccaccactatcaaattgtccaacttacccataaaatgtcacagaagatcataattgtatgaaacattatgacatgcaattatagtcagaaagaagtaactaacatgttaagtacacactggtgatacctcacatatttgggctctagcatataaaacactagtgcatggctatggtacaaaatatactttgataaaccaagaacaactcgataagccaaaatct

SEQ ID NO: 62423 - DNA, 231 bp, Glycine max
  unsure (1)..(231): unsure at all n locations
acactcattncatacataacaatccactacatatcatattctaccagtgcactagtcaaacaagctntctgtacaagcaatcaactcagagtattgaaatgtatatgattgaacatatatcataaaatatctgaataaacttgaatggtcataatggataaactcatatgtcctactcatgtgattgctcctgtgcatgctcattgagatccaacacatgagcagctggtg

SEQ ID NO: 62424 - DNA, 275 bp, Glycine max
  unsure (1)..(275): unsure at all n locations
gcttgactccanatgtgattctannatcttactcgaatactctgtatcatccattgcatatagaggggacaactctagaaccttgactgcagaagaagccattcatgttatatttaatgacaacaagcctaacactacaatgtcagaattggatgagtctctttgtgtgatgaaatagataataccatcttgttttgtgctgcggtcagtcaagataagcttgcatccaacacatcgatggacgatcaacctaaagaagttagagaacctactag

SEQ ID NO: 62425 - DNA, 417 bp, Glycine max
  unsure (1)..(417): unsure at all n locations
ctaagctttacccatgactacctgataatccttgatacctttgagcctttttcttttttgtttgaactcctacagccttaatgaaaaccatgattcacctatctttagaattnggagcttggaattgtttggaatagtggagggtgttgttcattgatacatgtttgtggcttgctcatatgatttgggcatcttatgtcattgatattggtaatgtggactctgatgaatgtgttctaaagctacccgtaanaaaatcgcaaagaaaaaaaacattaagtggggatatatcttaagacaaagttgaaaacttggtctcttttaggtaaatttacttactcttcattctattttctaaagcctattccatgctccattcttggataccctatctatttctactgctggcctacacta

SEQ ID NO: 62426 - DNA, 237 bp, Glycine max
  unsure (1)..(237): unsure at all n locations
actcagcttgacgatgctaagtatantcttnacacgagttaaagcttgatgtattaagatagcttggcatctgctcacaccatctaaaaacaggcttacactgactatgccaagcatggacattatcattctcagtttaaagaatctcaaagacatctggagaacattccctagccaaagaagtaatgctgctgcttcatctttgctatcttaagtgattaatgcctaagcacttac

SEQ ID NO: 62427 - DNA, 252 bp, Glycine max
agctttactcggatgtccgattgagtcccgtaatatatcgagatgctcctaattgtttatagtttctcctagcaaaatcaaaccataataactctttactcggatgtccgattgtgtgccgtagtatatcgtgaagctcgaaaatgaaaacattaggtctgagcaaattcaaacgacaatatacttttactcagatggtcgattgagtcccgtaatatatcgagatgcttcaaattgaaatatgaacttcta

SEQ ID NO: 62428 - DNA, 243 bp, Glycine max
  unsure (1)..(243): unsure at all n locations
acacttgatgaattctttttcttcaatctctctttgatgattaaagtgcaagtggccacacataggaagggatttccatgcttaaacggaagcacgtaaacacaatgcaaaggaaagaaggttctacactacaaaaaggcgaaattttccatttaagttatttgaaagttattgcatttaatagaaactaccaattntattggntattaatatgatcatgaggttttcttatttctattttta

SEQ ID NO: 62429 - DNA, 400 bp, Glycine max
gaagctcactacaagcctttagtgagaaccatgatataccatattcttaagaagtttggagctttgaattggtctgggaataatgtgagggttatggtcattagaaacatgtttagtggcctgcttatgaatattttgagcctactgatggacattgctattggtaaatgttgactgccgatttgatgggttttcaaaagaatacacaaaatttttcttaataattaaaaaagataagaaagcgtaaggtgagtgaaaaaacttaatgaacaaaatgtgaactctggtctaccttatggtaaattaacttactgcttttatttctatgttcataaagactattcccttgtcctctgtcttggatcagcactattcatatttctactggcttgccatacac

SEQ ID NO: 62430 - DNA, 256 bp, Glycine max
agagaagttgaactttgacttgtgtctcacaagactgtcattcatcaaagttacaacaagtggtacacatgcttctatttatagactagggtagcttcttgagaaactttcttgagaaagcttccttgagaagctagagcttagctacacacacccctctcataactaagctcaccttcttgagaagcttccttaagaagattcctaaagaatctagagtttagctacacatacctctcttatagctaagctcacc

SEQ ID NO: 62431 - DNA, 168 bp, Glycine max
  unsure (1)..(168): unsure at all n locations
aacaccataactaaacgcgccgcaagggatccctatcgcaccagatccaaatctagaacgatgggtgatcaagaggagacgcatgaacagatgaaagctgacatgtcggctctgaaagaacaaatggcctncatgatggaaggccatgtaagtatgaagcagctcata

SEQ ID NO: 62432 - DNA, 460 bp, Glycine max
  unsure (1)..(460): unsure at all n locations
agctagtngctgtgtgctgagtgtgtgagcaagtcttgtatagtggttctattgttcctgngnntatagnagntngagcgtaggtgctggtccttgtttgtaagggttggtgtaaccttgtagataattcccggcttatanataataggtgggagcttagagataatgttagagacaaacatttgaattattaataaagagtagatgataatcatacctcgtagataatgtggcattatagataatttaatacctgccaatagataagatattcaaatacatttgaatattagttacgttagagataactcttgttgtagagaagcccgactactaagggtcaaacgtctattgctctagtagtaaggctgacatgganagatgacacatgtcctcgggtgccatgtggatgccacatatatttgtgggcatggatggacattagccccaagctctaact

SEQ ID NO: 62433 - DNA, 456 bp, Glycine max
  unsure (1)..(456): unsure at all n locations
tcagctctttaggacctgacaggcactaactcctctntcaaaccatgccatgtgctttctactggtccctttcttnccttcgcaacttgagttcactatagctaccccatagagctccgtgaaanttgttccggccatactcttncttgcgagccctcctaggtctcttgntcaagggctcttgcgataattgcattctcttcccgtaacccggcacactccttncgaacgtgtgtagcggccaacttgaacttctccttggcaagtttacctttcctaactcgctnttgagagctnggacttctttgcttcttcggtgcttcaaattctttcgctgcgactttaactggcagccatctaacctcgatatgaccttcagcattcgggtaccaccatgatccttacgatgctctaactctgatcttcctaacggttccatcctatgatcttgatagc

SEQ ID NO: 62434 - DNA, 170 bp, Glycine max
  unsure (1)..(170): unsure at all n locations
aatcaatataagagaatatgttaaagaatatgtcccttctntcttgagaaaataaagaatatgtcctaatactccttgctaaataatgctcttcatgataatttcatattaacctgtgcatcaacanttataacgacatatgattcattattgcgactagttgaatggat

SEQ ID NO: 62435 - DNA, 390 bp, Glycine max
tcagctgacgatatgggaccctccatgggtcttgtggcgcggcatgttccacagtttccatcacaaggccaaaccactcctgtgccactcacgactactctcccggccaatctgtttctcacacgggtccatcatcctcaactcccacatcagcaacacattcacaggcacgatcctgcactaacaacagagcgaacttgtcaacccaccaaaaacagttttactaagacccgaacattcttgatcattcgtaccgtgatgatccaatttctgggtatgtcaagcacttggccgtggacatgcaactcaaacatcgataacttcagcaccaccacttttgacagcaatctgtgccttgacgaattgtaggcattaaatactcttttcatt

SEQ ID NO: 62436 - DNA, 268 bp, Glycine max
ttacatgacgaacattatctattatactccggaactacttctccaacattaaatttggcactgaaaaatcatatattgtaatatagtcctgaccgaactacctaatcttgaatgtccacttcacgaattgagaactatcatttacgcactcaatttctcttatttctgctcagaaccctcaatttcacagtcattctatctaaaattattctaaccaggctgacatatagaagtattttatttttgcccaacaagtatttattttaag

SEQ ID NO: 62437 - DNA, 93 bp, Glycine max
  unsure (1)..(93): unsure at all n locations
ctgcagctagagcnattcaacgacaataccttttactcgatgtctgttgtttttgtattatcgagacgcttgaaatggaatatcagagctctg

SEQ ID NO: 62438 - DNA, 195 bp, Glycine max
  unsure (1)..(195): unsure at all n locations
tcagcttaccttctggtcctctatagttgtagatgagaaacatgctctattttcatcttccacttcaagtaagcctncggatcattctcttctttaaatggaggaatgttgagtctaataccatcaattagagttttgctaagaacaccatcatttcctcttctttctctttcttcttcattatgatctctattc

SEQ ID NO: 62439 - DNA, 259 bp, Glycine max
agcgcctgggctgcagctatgctgcatcattataaaaccccttttttttattttatttaaaaagatgaattcgagaacagatcaatccgatggagaacatcacactggagggcagcctcccacaacacagctgccctctttcaaagctgtggccagcagccttgtcctctcaaacttacacagcacacaaacacagcactgggctctctaccttcttaaaagtggagcaatacctcaaattcattcacaaaaaaacctc

SEQ ID NO: 62440 - DNA, 65 bp, Glycine max
gttttatacagttacatttttttttatttttttttaaaatcatcaaaaaaacctttgataacgtc

SEQ ID NO: 62441 - DNA, 300 bp, Glycine max
  unsure (1)..(300): unsure at all n locations
cttctgnggatgcttgtaatgttgaattcttttntcaaatgctaagcattnttttactcacaaacctacatggctgctacganatattttctttngaaaaattttgatgattntttgcaagtctatttgtcagtcttggtgaacaatcattntnttaattgctcaagtcttaactaagtaatggactaacacgtgccattattctgtcctaaacattgattgattttatgaatggccatccatgtttgtggtacctctattatattggtgagataacttantgacaattcaaaagcttat

SEQ ID NO: 62442 - DNA, 446 bp, Glycine max
  unsure (1)..(446): unsure at all n locations
ccttaatctcacttctgggctcaagcctgatttcaccaagctatttgaattctggactcatactaagagggaagaatagttcaaatttccctacaattatcttcttaaagattagcaactaatatgcagaaaagaagcatgaataatntattcgacgctctttaaatgtgccaaataactttatatggaaataatgtcaatgagatatcggaagagagatatgaaactcagttatactggtcgacccttcttggcctcatccatcctaacaatcacttgaattccctatctgtaattcttacactctgaccccaggatcatccctgttagaaactacaataaaccctgctttatacaaattgtttgaataagattttttctttaaaaatatcactggactaaaatctatggtgaggtgacaagttttgaaataacgaattgaactg

SEQ ID NO: 62443 - DNA, 206 bp, Glycine max
ctgagctgatctttattattgtcttacagcccatgtcgttgttctctgagggaacaggttatatcctctaaaaagaagcgacgaggctttgatctggatgaggcaggctttcctcttttgagtctaaccccaagtataattttaagttacaatggcgttgagtgttctcatgtcggtaggagactatattggaaactttggccact

SEQ ID NO: 62444 - DNA, 314 bp, Glycine max
  unsure (1)..(314): unsure at all n locations
agctaggtgacacgcggagatntatgtcatcttccgcgctcacatatatctgtcatactgacattngagtcacgctganggcggaatacccgatggtatccgataacttcttttctatctgaagacaaacgctgatgcatgcgaactgactcgcttctgcacctttgtcccncggngacaacaagtcanttacatgcggaggtatgttatggtcacccgcgactctcgtcaaccgagaggaacgaaattagtggcttatctttacttccctcttatctccaataaaagacaagtaaagaggggcaactgtcata

SEQ ID NO: 62445 - DNA, 248 bp, Glycine max
  unsure (1)..(248): unsure at all n locations
atgtatatatgtgaatataggtagcgcgataatgccttgcaaagagtgtgaatatatggcattacaataccttcgcaagtgtgaatgaatagcanaaatgcctttcataatatgcttatttatggataggtagcataaggagcctttcataaaaatgtcccatgtcagaatggcatgagatgcttccacataatatatgatgtggattncctctcagtgtaatagatggatgaaagtcctttcaaatg

SEQ ID NO: 62446 - DNA, 399 bp, Glycine max
  unsure (1)..(399): unsure at all n locations
tcacttaaatccatacacttacgtgaagagattgatattactaaggtacctatttgagaagttatcattggaatgatttactagtatcggctattatatattgaaatcctcttggtaaaataaaaataataagtaaattcttggatatattatagatattggtctntatcatgnaatgagtnttcaagagtgtatatatttttttcattgtgatgtaataaaaaacatgggacaatcattctataaaaaaagaagatagaatntagttaatgaacaaattacatacttacaatttaaaaatgggtacttttaaaaatgattttgcaaatgtaaattatatgaacatgtaatgtagactctacctctatgtatgccatgtatctagcttaacatatctcg

SEQ ID NO: 62447 - DNA, 358 bp, Glycine max
  unsure (1)..(358): unsure at all n locations
acgactataactttttactctgatgtctganagagtcccgtgggatatcaagacgctctaaatcgaatgctgaagctctgaccaaattcaaagacgataacttttagtccgatgtctgattgagtcctgtaaaattatcagacgcttgaaattgaatgttgaagctctcaaaaaattcaaaggacaataacttttttactcagatgtctgattgagtccgtaattcatcgagacgaacgatattgaattctgaagctttgagctaattcaaacgacaatatacttttgctctgaagtctagatgagttccggaataatattttaaccattcacatataattctggagttctgagcata

SEQ ID NO: 62448 - DNA, 380 bp, Glycine max
  unsure (1)..(380): unsure at all n locations
agctntacagtataccgcgggtctagatcctgtgatggactggatgnagctgtagtccggtagacaataactagggcgctgtcacctaccctaaaagcattgtcaatgggggctttcacccctgagcacaacatttcttgcttcgcctcacggccccatgaatctgaaaaaaacttcgagcaagaggggccctaaatccaaccgaagctcctacaaatgggaaaagtgccatcctataataaggataaggggccccttgtgacccatataccccaacatactcacctgaaaagaaccaacattaatgtgaactttgagcatctcgtgagaactgaaaaattgtgttcttactaaatacggtaaaaccaccctttgagaaa

SEQ ID NO: 62449 - DNA, 399 bp, Glycine max
  unsure (1)..(399): unsure at all n locations
agctatgatttactactgctatacaattttttagttggttgcnancnagncttaccattcttatcatcacccaacaatctcccccaaatctggggcagatttgctttgaatcgttatgctctcctacaacctaagaaaaggtggatggagattatgactttacaggctcaaggttcagcttattcaatgaaaaacaagctcaacatgggtgcgagggatttatcattcatgaacagggtaagctttttggctaagtggcttatttaatcaatcatggccttcatcatttccaaaattcatgcattcattcttaaaaattcatgcaaaagttggtacctaatgctagaccgtctctcacaataaaatcacacaactacatgggtgtggctaatgaatacc

SEQ ID NO: 62450 - DNA, 353 bp, Glycine max
agcttcgaaatccaaagatctaatccaaggtttatgttttataaatgtgattcccttacttatgttatttgattccggtgcaacccattcttttatatcatgttcgagcgtacggaaacataagctctctgtgtcttctttaaataaagatctggtgatagagaccccaacaagaggttttgtgataacctctgatgtgtgtctgaattgctctatggaaatttctggtaaaacattcttgattgatctgatttgtttgcctttgagccaaattgatgtcattctacgtatggactggttattttcaaccatgtcttgttaactattttgtaaaactgcggtgttgatgattt

SEQ ID NO: 62451 - DNA, 368 bp, Glycine max
  unsure (1)..(368): unsure at all n locations
ccttacttatgttatttgattccggcgcaacccaatcttttatatcatgttcgngtgtaaggaaacttaagctctctgtgtcttctttaaataaagatctgggatagaaccccaacagtggctntgtgataacctctaatgtgtgttcgaaatgtcctatggaaatntctggtacaacattcttgattgatctgaattgtttgcctttgagccaaattgatgtcattctaggtatggactgggtatcttccaaccatgtcttgttaaactatattgataaaactgtggtgtctgatgattctggaagtagtaaggatataatgtttatctctgccaaccaagttatgacatctgttaaagaaaatgct

SEQ ID NO: 62452 - DNA, 244 bp, Glycine max
  unsure (1)..(244): unsure at all n locations
tagtttttattcagtaccatatttcccttcatttgtggaattaatgtggttcaacttccatttcaggcgaaaagatgaaaaaaaagaacgttgccgtttgtggggtctcgctaagcgaggcatatgcgcttaacgagcaacatacgctaagcaaggcactcaactcacttactgagttatgagaatctggcaagcatgcacgccgtcagcgcgccatcagctnccccagagagtcaattgtctc

SEQ ID NO: 62453 - DNA, 435 bp, Glycine max
  unsure (1)..(435): unsure at all n locations
agcttgcttctacaagtccaactatatgaatctgatgatgatgcttgatcaggattaggctagactatcatgaggaatcgacgtttancatttcaggagacaccatagaacacatgagcattgttaagtagagaatatccttttaacatcaggcacctaataggaagaccaatttgttgtctacttgtctttacacatcattactcacgtgattttccttttaatagttagtttacatacctgtgcatagttgacacatctcttttcatactagacacctattcactgaatatagctttaccaagtaacacaagttccccgagagttcgatactcgattcttaccattttatactacttgcacgatctagtgcacttgtcgggtttaaacaagttnttggcgccgcttttggggaacttctctctatctggaaag

SEQ ID NO: 62454 - DNA, 144 bp, Glycine max
catgcaagctacatgactagccagtggcttatggttattgctggaaggagaagctgtagtgcgagaatcattataacgaattggctccgccattagttggacactctagtgctggaccactgactcaagctgaaaagacactta

SEQ ID NO: 62455 - DNA, 405 bp, Glycine max
  unsure (1)..(405): unsure at all n locations
gcttatatatatcgagatgctctaaattgttcaactttatctctanagaaagtacaatggtcattactgttcactcagaggcccgaatcacgcgtttaatatatatagacgctcgcaattggacaacggaagttctcaagatattcaaatggttttatcttttgacttggaagtcccattcaggcacatataatatccagacgcttgaaactaacaacagaagctctggagaaattcacatgggcattacttttcactcggaggtccgatataggccgttcatatatcgagacgctcgagattgaacaacggaagctctctataaacttcaatggccctaactttcactcagaagttcgatcatgtgtatatatatcgagacgctcaatttgaacatcgaacctc

SEQ ID NO: 62456 - DNA, 424 bp, Glycine max
tttttatatatatagatctttaaatctttatcccactcctaagggggcggagagaaagaagcgttttctagtttccagcaggttattaccttggcatcttccacaacaccttctctattgactcttatctctttctctctaaaaatgtgactttggtggacgtgtgagaagtgagccctaaaacaattccggatactctgggccacagagaactaaatatttgaagtgttcaatggcgtccagcaataccctttaatttactcttctcttaaaaaacaaaccattctctatcctctacactctagtctctcggtgtgtggtctctacttaactcacatctctaagctgtgtgcgtgaaccgctgatagcatggatgagtaaactagacatgatgaaaaagcaggtgcacacttgttactggtaa

SEQ ID NO: 62457 - DNA, 358 bp, Glycine max
ggtcatcctgctttgaagaaaattggggccagcgaagagggtgagaatgatggataaacaccatgttgtgacttccattcctttatggccaagttttccaaccacccaacaatgttattactcaaccaataacaacacatctccttacccaccacccagttattcacaaaggccatccctaaattaaactacaaaacccacctaccacactgaccaatgctaaacaccacttttatcacgaaccgaagcacctaccacaagggaattttgcagccaaaagcctgtaaattcacctcaattctggtgcatatgcttatggagccatacccttgctagtttctaaccccatttccgagat

SEQ ID NO: 62458 - DNA, 387 bp, Glycine max
tgtaggcaaactgtttttgatttgtactttgtcaacgagaattggcctgcgggtcgcagcctgatacacactacaacaaaagacagtacttagttctaaaataggaggaaattgaccctttggtatcagcaattccaccatttgtatttctcttggttacgcatgacatatgtgatatgtctagattgacaggaaaatacagtattaaggagatttttcttactaatttcctgttacacgatgttgtttggcaacattaattttctttgaggaattatatatatattagaaaatttcaaagatcatgtgtgtacgcacaagttagtttctgataaacaaaaccaaattctattgattaattcatacaaagaatatatactgaaaaaa

SEQ ID NO: 62459 - DNA, 365 bp, Glycine max
  unsure (1)..(365): unsure at all n locations
tgcaagcttaccatcattacgtatatggctgaattattgctctttacgagaaaccgatatatgatttcaccgccattctttatttcttcatacctgagtaggggaggggatagcatgtctggtggaggaccaaacctccaacgtcatcaccacacccaaatctttaagatntaaaaccagngacgattgagctattacatgaaattctaatgtcatcatggtcttggactattcttgtatgatgaagtcatgttttcaattttatcttggtagaaaagggttttgcctaatttgcgttctatattaaaagcattgtgtctggcgctactattaccggtgaaagaggagatatacaaaaatgattc

SEQ ID NO: 62460 - DNA, 441 bp, Glycine max
agcttctatagaagggtcgctcctaatttctttcaattgcctcacctctcaatgaactggtgaagaagaatgtggcatttacctgtggtgaaaaacaagagcaagcctttgctttgctcaaagaaaagcttactaaggcacctgttctagctcttcccgacttttctaaaacttttgagctagaatgtgatgcctctagagtgggagttggagctatattgttacaaggtggacactctattgcttattttagtgaaaaacttcatggtgccaccctcaactaccccacctatgataaagagctttatgcctcaataagagccatccaaacttgggaacattaccttgtttccaaggaatttgtcattcatagtgatcatcaatcacttaagtacattagagggcaaagcaagttaaacaaaaggcatacaaaatgggtag

SEQ ID NO: 62461 - DNA, 258 bp, Glycine max
ctatcaacttgttaaaaataaaaatttagttaacatagttgatgactaatttaagcatctgattatatgatatacaataattaaaataagttagagttataacaccttataaaatattaattcatattgataaagaaaactctatgttatgtcatcgatacatgtatgaatttaatttaagtaactatatgattttaatcatgaaattccgcgccatgtatgaatatatgtgtatttgatttgtttataaaacttgat

SEQ ID NO: 62462 - DNA, 389 bp, Glycine max
  unsure (1)..(389): unsure at all n locations
gcttgcttgtacaagaccaactttatgaatttgtngatcatgcctgaccaagactaggctagactattatgatgaatcgacgtctatcatttcacgagacaccatagaacacatgagcattgttaagtaaaaatatcctctttacattctggccaccttaataagaagaccaatttgatgtctacttgacttacacatcattattcacgtgattttccttttaatagttagtttacatacctgtgcatatgtgacacatcttctttcatactacacacctattcactgaatatagctttaccaagaaacacaagttccccgagaagtcgatactcgatcttacaatttatactattgcacgactaagcacttgtcgggttaaacaagtt

SEQ ID NO: 62463 - DNA, 438 bp, Glycine max
  unsure (1)..(438): unsure at all n locations
agcttatatgctttgcctcttaaaagcatattgcggatgttatctgcnatagcacaacagaatgtattcaaattcaaataaccaaaaaataagtaaattaacaagggcattcccaatgcctcgaattcccattctaacaagatattccaaaaatttcacttgaacaatgctattctagcacatcatatcaaagcagcacaagtaattcaaaatttaaattcagcattggagaacatttccagaatccagatcaggtttaaaaatatgatattattatttttgttgccaaaaataatatgcaaagttgaccaagccatataaatacgaaacccacatctccaaatcaactaatcaatatttctaatcatctataatgtgtacagtgcaaggaacaagaaacatcccaggtattcttatgcaattaagttggagatagct

SEQ ID NO: 62464 - DNA, 413 bp, Glycine max
tgcatgatgtctcacattttcttctgaatctccataagctcttgtggattgtttttgtaagctatcctattacgcaatgaagctcctggaagaaggtcaatttgatgttctatgcctcttgaacgtggcactccatgacgaatctcctatggaaaaacctctataaaatcttgccatacgagctcacacactatggagaacataatacgtcatctcattacaattatcagccaataatttattgtctctgcagtgtcatagatagagtggctcacgagcaagtagtaacttacccactttactcacctttgttaagcaaataaattttctctgatgtggatcactcttctttttcctattcctctttggagcgttactcttctctatctctaggctctactttctctcattcc

SEQ ID NO: 62465 - DNA, 349 bp, Glycine max
  unsure (1)..(349): unsure at all n locations
tttacaaggaaataccaatccttacaaacacagagcctaacacccttatatggtgcgagtggccacatgcactttacaaacaatcatattgggggcatgtgctaattntatgacacaatacctatatacatgcatttacacacaacacacacacaattttttttgggaaaggcatttatgacacatatncacgtatgtttttgacagcattttcctgctacatcccacatacatgcacatttttttgaaagatccttatgctcctactcacaaatatcatatttgaaagcattttacactacctatcaacatataccatttgaaagcattttagctatatatcacacac

SEQ ID NO: 62466 - DNA, 153 bp, Glycine max
ctgcagcttaaaaatctgttttcattttccaagagctcccgaaaggggttttcccaccgaccggttcgggacttttctttctaccaaactggaaaaaagtggaaaacggtttcttttaaacctgaaccttacgagccaaaaataaaaagggcc

SEQ ID NO: 62467 - DNA, 439 bp, Glycine max
cgcatgcgcgctggtatctgtaaaccaatcatagaaagtcttgttatgctttttcaagacccagttctttgacattcttggattactttgtttgactaaaccttcatgctgaagtatgtatggaaaaactttattactgttattcaacacatacaagtgaacttgtaacaaatcttctacacttggagtgataacatgcagtcctcttgaacctttatctcccactctgtcgtcatgacaagacttatgaaggccaacaggtttagccttttcaatgtactctgaacaaaattcaatggcttcttctacaatgtacctctcaacaatagatgcttccggatgatgtagattcttggtatacccttttaaaatcttcatgtatcgctcaactgggtacatccactgcaaattaataggaccacaacatttgatttctctg

SEQ ID NO: 62468 - DNA, 424 bp, Glycine max
agcttgagaccaatatatgacaaataacgtttcctacaatctaaatctcgcactaataaagtctatgttattgagcacacaaacgaattatacatacatgcttctcacaacatgggaggtaaaatccctcaaacgattccatataatcatatcaaaatcataggttcaaaattactaaaacaccaagaacactcaattatatcaaccaatccacattaaggcatcaattgacctctcaaacacaacaatcttgtgattataatcataaaggatgaattaaaatataataaacatcccaaaatataccccaatctgatcatctaaggattctctataaatattcattctaaccccaattgcgataaactcatctcttacctctaagtagcgcctctagcgattctctaaggtggcatttctctct

SEQ ID NO: 62469 - DNA, 380 bp, Glycine max
  unsure (1)..(380): unsure at all n locations
gcaagcttgaagaacttaaangtgtatctacatttttaaggtnnngaaaaanaacagnactacctgctgaattctctctctgagtcaccataaaatgtgtaatcaaaatttgttaaatgacaattttttacacgaggaagacgatattccttaatcccagctctgttaaaaacaacagcatcatttttttccttttcttttccacagagtgatatgcagngaacccaaagaacacccctttgaaataaaaattgataactacaacgctgtgcttggttgatcaatcaaatgagaaaaacgttacaagtctgtgttgaagtttaattcagaagactgaatatctaccaaaaatggttgctgacaatgtgttgctttgacta

SEQ ID NO: 62470 - DNA, 428 bp, Glycine max
  unsure (1)..(428): unsure at all n locations
atgcaagcttncattaaaataacactgttctagttctgtttagtctaaagtttaaacacaaatgtgttgctttggcacgctataacccctcccatanaacatcaaagcaaggacaaaggctaccgtggaccaatttcacaggtgatttatggtggatcatgtntattaaccgttgaattcatctaagattcacaatcatatcctgcgttcattgcaccaaaatagccctcaagacagtcttttcctctttcgaagccaaactgccataacctgcaacgccggacctccgtgagccgctttgacatctttgccgacgccgacgtgtcttgcttctccagccatcaattccccttcctgtgttgtaacttgcgaacttggaaaacccctccatgtgtggcttctgagattgctaactgagatttagcttc

SEQ ID NO: 62471 - DNA, 423 bp, Glycine max
  unsure (1)..(423): unsure at all n locations
accaaacttcacagtggagtgagttactgattttctgattctcancataaaccatagacacagaagcatcttctttatttctcacggattatactggatatctctggtgtcaaatgatacaaacaccacgttgccaatgtttaagtctggtgtgcttcatccacacttgaaaccaaattggctttgaaataattgtattattaatatgacaacaacttcccatttgaaataattgtattattaatatgagaacaacttcgcatttgaaataattgtattattaatatatgagaacaacttcgcagcggtatgattaactgattgactgatgcagacatataaccattgacacagaagcaacttctttatttttaataatatcaatgtttgataccaggatagcttttggcacattggaatccc

SEQ ID NO: 62472 - DNA, 359 bp, Glycine max
  unsure (1)..(359): unsure at all n locations
ccttgccacaaaattctaggaagtagacaaggagatggacgagaaaatccgccgtattgtgagtagcattttaaaaaacgcctcttgttcctgaaagctgatgaagatggtccaacatcttccaccccgaatgtttcttgtgctctgatgtcaaagaaagatgttccaacatcctccgctccaaatgctgaagtactctctttccccngcaaagagagatcaacagacgaagatgatcatgcgacaaaggagacccctgcaccaagggcaccagaacctgctccaggtgacctcattgacctggaagaagtagaatctgatgaggaacccattgccaacacggttgcacctggcgttgc

SEQ ID NO: 62473 - DNA, 399 bp, Glycine max
  unsure (1)..(399): unsure at all n locations
gcttaactnttaaagaccaccctaacattcttttcgatgaccactccctaactctaaaccccatgttgtctttttgacctttttaaacaccccattttttttcttaaaagaaaataaaaagggttatattttaaaattaattgaagtttaaaaaaattattgaggatttgggattaaactaattaattgggccaataaataaatatatggtctaaaaaatgtttaattatttcattgataggagtaaaataagttattttataaaagataaatcactccacaaaaaggtctctacatgcaggtttattatgttgacaaaactgatgcatagtaaagggtgaatttttgaacactgaaatttcaagaggtttatcaaatctcttgaaatgatacacatcg

SEQ ID NO: 62474 - DNA, 424 bp, Glycine max
  unsure (1)..(424): unsure at all n locations
catgcaagcttcataagtggaatatagccatttcttttttangcgctccttaaacctccattaatattttgttttaccttctcttccattgttgattcttcatttttctccatgtatctcctcacatgtcttatgctaaatgttgtttacatgattctttatagtttccaccgattagacttgctataaaagctagatatgattttctatggatcaaatttcttgttcttgctcttgaaccatgaattgagttaagtttacgttcctttgagttttgtcttgttattttttgtggctgaaacctacaccataaaattattacaaaaatattaaagtagaagaaaacctcaaaaatctagagtgacttgttcacctatcgtagttttgtcatacaagtcatgtctagtcatgaaacttgtcacat

SEQ ID NO: 62475 - DNA, 279 bp, Glycine max
gaatacccaatccgatgatatgactaacacaatcctggcttttctctaagagaaacaatattgccttatacgaagctaatccccctttagctcttacgcctttcaagagatcacggccacaacagatagacctttaccaatatgtgtaacgtcatgctagacattgaagatgttaaccaataaaaatgctaacgatgctcataggcaccaatgaaggaaagaaaattcataaattacgacttatgttacaatccttcgtgcaaacgatatagtacctat

SEQ ID NO: 62476 - DNA, 433 bp, Glycine max
  unsure (1)..(433): unsure at all n locations
agctngagtgtagagagaaaaattcatgggctccttccttctccggggaaggtcaagctgaactgtgatgctgcagtggacaacatggggaatgcagcaatagttggtgttattcgtgtttaaaatcggaagatgctccattactcaagctaaactttgagccattgtgctgtggcttcaagttgaaatatccagaggctttactgagttattagtggaatgtgatcccaagtttgctatttctctcattcgagatggttgtccttctacacacttatgatatcaggcgggtgcaataatcaatatacttctgaatgatgggggagttttctcgtggaagcatatctattgggatgcgaacgaacttgcagatcttctgcataatagtggtgtacattacataatgatgcagtgatcatcattttctaaattt

SEQ ID NO: 62477 - DNA, 391 bp, Glycine max
  unsure (1)..(391): unsure at all n locations
agcttcttctggtgtgtcaccatctctacttatatgcaagcgaggagagnagtaacttctttagtgtactcctataactctaagaagaagtccgtcgatttccgcttattctgtgtagggaggaaatattcttgcagaccagtataattccaattcaaatgattgaatttttcatagatgatttttttaaaaaatcccacaactcctgcactgcatcacaatgggtgataacagattgagtctgtttatcaatggaattgacgagaaaggctaaaattagtattgcacatcactgccttatatccatctggacatgttttttgtatataatcttccttagtcatcccaccaagacttaattctacccaattccttcctttccacataattc

SEQ ID NO: 62478 - DNA, 401 bp, Glycine max
  unsure (1)..(401): unsure at all n locations
agcttgaatggagcttaaatttgttatccatnccttaaagaaggtggattgggaattagatctttataagctattcacagatgtgttttttctgaaattcagttaggatgctattactacaaattcccagcttgctacaatgattcaagatagattttaaaaggaggttttcccatttcttactacattttcttttctatttaccctaggatcaaggattgtcttcatattattcaataaaactcttcatggtagtcaaggatgggagataatataaacttatgggtggacaaatgtttatcagatttcaatgtgaatcttcacaatattncatatcatttacatagcttggtgaaagctaatgtaacatattttatctcaggtaattcttcgtctcttct

SEQ ID NO: 62479 - DNA, 337 bp, Glycine max
tcttcaaatgtcaactcaaccacactatgtgtaggggagtttcacttctaacctcacgattcatgtgatggtgggactgttttgggatcatatgggtgtttggaaacataaaaaagctatgggtgtcatgctatgttgcttaaaatgataaaaacgcgtgtttttttagctatttctgaacagagatgtattgtattttagaaaattacaggcttcatattttcaaaaggttagacaattcctaaagtttttggagtccctacaatcataagtaattattgtaattctttcttacccactacatgaaatttttgtatgctacaatggaaattaagtt

SEQ ID NO: 62480 - DNA, 383 bp, Glycine max
ttttaaaattccacaaaaatcatcatcatcatcactttgatgattattatgggttggtaatcttttatccacttaactttcaaaaaaatttaaaaatccatttcttaagaatttggtttctgcaaaaaattataatttttttcacaaacacggctgttaattatctattaacattgacggtatctcatttattaatatatgttctaacataaccttctaacggtgatgctcttttgagagttctttcgaatgatggtgaaaggaactaatgaaatgtaccttcaaaagtactttgacagcatataagaatacacgttgaaataatagttggttttacttgaccttaagaccttttttataatagtggattgcaatatatactg

SEQ ID NO: 62481 - DNA, 145 bp, Glycine max
cgcagcttttcagctattgggggttttcttttcaggctatcccaaggaggcgcttctctacctcttactttgcttcgctggatcttcctggggggaaatcaccattaaaaggccccactgaaactcaaaaaatcaatcttcataa

SEQ ID NO: 62482 - DNA, 438 bp, Glycine max
  unsure (1)..(438): unsure at all n locations
tgcaagcttcacatggagctacatcatgngagatcttagcatcttcatctangtgangttcttttgcttcctctattttttgttcggacaattcactttaattccttgttattcatcttattcttcgtatatatcctccattgacttctggtttggtgctgcttagagtagattcaaaaaaataaaccgattaaatcttagatttacacttgttcttgcatttttatggttcaaattttataaatctactcttgaatcatgtatttgtgttgattttacgttctatcatttttcagtcataatattcttgtgctgaacctttagatctaaattttattccaaaatattgattataaaaaaaacacacaaatctaagtgtaaatcacttaatctatgttgtcttagagtcatgtttagtcatagtaattgtcacattat

SEQ ID NO: 62483 - DNA, 320 bp, Glycine max
gagcttgtacgcgacaacaccatttaagtctttattactttcataacaaagatgctcaatgacaacgcgctgtttctaactaatctctgtctctctagtatgattcgcaggaaagcatattggttatcatgaagtgttctcgcctttgagcttttagtcatcacctttgcgatcatcaacaactatgttgaattagtcctgattcattaagaagcttgcttatacaaatatgcttgtccatgtagtgcgtatgagattggctaagagtggctgcgttacggtagaaagttttgctatatgtgtcatcattattggttaga

SEQ ID NO: 62484 - DNA, 110 bp, Glycine max
  unsure (1)..(110): unsure at all n locations
gcatgcaagctgggtgaagcacatcgggagtgatgtattcttttgcatcaacancagaagaagcgaaagccgcaactaaatgatctcccctgtcacacttgtttagatgc

SEQ ID NO: 62485 - DNA, 386 bp, Glycine max
  unsure (1)..(386): unsure at all n locations
agcttgagatgaggaagtgtataatggtgtatcctcctgtttttattcgnngaccacagagtggtacctggagatatgtcgcacgggtcangagaccttggggacgtcaggtggggtgctattgcccaaaaccaatctggacctattctgacccaacccaggcatattcatccatcgataacctgtgatgtaccttaacctgcgagctcctgggcttaacagataaaaggaacaaagaccacacaccatggaggcttgtgtggtggctggccaactctgaattttgtgtgatatatgggttgtggcctctggtcatcaattaccaagggtgggtaatcgattacaacgcttaaaaacgaagacatgaggctatgatggtctctggt

SEQ ID NO: 62486 - DNA, 395 bp, Glycine max
  unsure (1)..(395): unsure at all n locations
agcttgaatcntgatacttgattcttgattcttgaaatcaaatttcctcttgaaccttggagtgtcttgattcaatcttgaactcattctttgagtcttgagatcatcatcttcgctatcatgaagtgctcttgatctttgagcttattgtcatcacctttgttatcatcaaaacttctttgaatcaatcttgattcatcatgaagcttgcttctacaaatatgcttgtccatgttgtggtcttgagattggctcaaagtggttgcgttatggtagaaagttttgctatatgtgtcataatcatcggttacagcccgatcataaatggtgatacaataaaagagattttgatggaacccatgagtctagagctccacctaatctacctaatggag

SEQ ID NO: 62487 - DNA, 429 bp, Glycine max
agcttagtccaacaagagggatctgaggattatgcttgatcacgattaggcttgactatcacgagggatcggggtttagcatttcaggagacaccatagaacatgttagtcgctttatacgactaacttttgtatagaaatcattttccaaagattgtatagttccccaatttatggttattttggagttaattttgtaaataaatcttgttttatggttaacattgtctctagaacatttccattggatttaatgatgaaatctgtgcatttttaggtgaaaaataggctaagttttgaattgccaaaaagtagcagttgggctaagcacatatccaccactaagcgcagcttcaacacacttagcgcaaaggagaatctggcagagcatcagcatcaaagttgcatgctaagtgcaagatcaatgcg

SEQ ID NO: 62488 - DNA, 425 bp, Glycine max
  unsure (1)..(425): unsure at all n locations
gcttacattgagctacatcatgtggaatcaagagcattttctctangngangntcntttgcttcctctattttttnttccagtcaattcactctaattccttgttattcatcttattctccatgtatatcctccattgtcttgtggtttggttctgtttagagtagattaaaaaatataaactgattaaatcttagatttacacttgttcatgcatttctatggttcaaattttatagatctactcttgaaccatgtttttgtgttgattttaggttctatcatttttcagtcataatattcttgtgttgaacctttagatctaaattttcttccaaaatattgattagaaaaaaacacaaaaatctaagtgtaaatcacttaatccatgcatgttatttagttcataacatgttctaaatcaat

SEQ ID NO: 62489 - DNA, 420 bp, Glycine max
ctgtgcctctcacggcagaagagatttgttctttttttccaagaccctcaggcgctttgctgatggcttcttctcgtagcaagcctcaataggagtcttgtctttacagacttagttggacatgctgtcgagtatgtcaaacaacgtgtgtgacactgcttcaacttcaaaatgtgctaacatagtctccttctctcttgagcatctatactatccatttttcgaactgtgcgattctttctctcggacactccatcttggtgaggagaatatgcaacttgtaagtcgccgctcaatgccttcatccttacaaaatctttcaaactcgcgagaggtgtactctttgccgcgaatacttggtagtacatttattcggcttccactttgatattcatcaagggcctggaactgtttgaatac

SEQ ID NO: 62490 - DNA, 233 bp, Glycine max
  unsure (1)..(233): unsure at all n locations
gccttgcatgncaaccacatcaggtggacgatcaacctaaagaagttagacaacctactagacgcttgctaagataacatcatccagagtcatatatcattggtgatcccaaggacaaagtgcatacaaggaactctcaagtatacaatactgctataagagattgagccaaaacacatagacgatgttatgtctgatgagcactatgttaaagcattgctataagagttgga

SEQ ID NO: 62491 - DNA, 412 bp, Glycine max
agcttatgcaaacaactctctgacctccttttgtatttcttaccttgttacctgatgcaatcctaccccccaagggcattggatagaagactctaagaagattgggccagagatgcaagagaaggccataaggttctcatgagccttatgtagattttgggcccatgggctaagtatgagcccatttatctttgtacatattagattaaggtttcattattattgggccttttatctaggtctccataatgtaggtagggtaccctaaaaatgtaagatttttcagcccttgtattttatggcatctagactagtttttgtcttaggggtagttttgtaatttcacatgcattacatgaatattagatgtgtgtgttgggaaataaatttaattgaattgtgagaagcccaa

SEQ ID NO: 62492 - DNA, 337 bp, Glycine max
  unsure (1)..(337): unsure at all n locations
agcttgctgctacaatctcccctttnttgattatgactttcctgaaancaaganacacatgcaagttctatcttctaatcgatcactcacttaattctccccctgtgtttctgagtgtaagcttcacttgaaactaagttatttaattatatgagttcttgaattaatcatcactttgtcttcccctctggcgtgaacaatcagctacacatattcacccatgcattctaatccatacaacaaacaacgaggacaataatttatacataatctaggcacggaagatggatatctatccataacgctattagaaaggtgtcataaagtatagagagct

SEQ ID NO: 62493 - DNA, 396 bp, Glycine max
agcttgccgcccagctcgcccattcgagcttgttgtcttctccagaaagaacagccttctggaggaatcttttggaaggcccaagtgggcatgattgctatttgcacacccatttttactaaatgcaccccccttctattttattggtaattgtttttccgtaacgttactaaacttcacgactttcgtaacgatacttattttccttccgcaaggttatgaatccttacggattatgtatttactcttctttagctttcgaagaagttacggaaacttacggattgcgcaaaaacacctcttttcgacttctgccacattaccgaatattacaggatcgcgcaagcctgctttctttatatttctgagaactctcaggacttcatttattgtgca

SEQ ID NO: 62494 - DNA, 423 bp, Glycine max
  unsure (1)..(423): unsure at all n locations
agcttatgaccattctaatttctcgagagtttccgttgttcaatntcgagcgtgtagatgagttatgtccccgaatcggacatctgtgtgaaaagttatgaccattcgattttctcgagagcttccgttgttcaatttcgagcgtctcgatatattatgaccccgaatcggacatctgtgtgaaaacgtatgaccattcgattttctcgagagcttccgttgttcaatatcgagcgtctagatgagttatgtccccgaattgaacattcgagtgagaacatatgaccattcgaatgtctcgagagcttccgttgttcaatttcgagcgtctcgatatataatgttcccgaatcgcgcatccgagtgacatgttgtgaccattcgattttctcgagagcttccgatggtcaatttcgagcgtct

SEQ ID NO: 62495 - DNA, 424 bp, Glycine max
  unsure (1)..(424): unsure at all n locations
agctntattcaagacaaagaaatttaagattttttgatggatgatcaagacagtctctagagtcttaggaagggtatattaaataggaagggaattcctaactgaagtagcaaaaggtttggccaagtaatttaagttaaaaagtgtttttcaagagatttactctctggtaatcgattaccataggatgtaatcgattaccagtggccaaaaatgatttacaacagctattaaaatttgaattcaaaatttgcaccatgtaatcgattacacatatatggtaatcgattaccagcagttattgaacgttgtaattcaaattttaaagcttgtaatcgattacacacatactgtaatcaattaccagagaagattttcaaaaaatattctcaacagtcacatcttttcattttgttcttgaatg

SEQ ID NO: 62496 - DNA, 319 bp, Glycine max
  unsure (1)..(319): unsure at all n locations
atgctcaaatcaaatattcaaatcccctcataaatgctcgatgctcaaatgcacacaatgaccangatgcacactatctatgaaaagttctatctatttaagatcaaagggtgtaaatcacctggattgcccctagtcatgcactatatgcagcaaatagtgtgtttctancaagcacctaacaaggtggtaaaactacaactatactcaaacaatatcaaaatgagcagaaatgttgtgaggaacaccctataatcattgaaagatagcacataaaatttcaaacaaaaattcaaagtctaactatgaaaaataccta

SEQ ID NO: 62497 - DNA, 386 bp, Glycine max
tactaagggtagactcagacatatcccgtgctggatgcaactgtttaaagctctatttcgatgcacaaacattgattgtacactacacttcatgtaatcaacaccaaccattgcaaaagcttcaactcagtaattgaagtaccttgattaaatgcctttgtaagagaaaaactgacaaatgatttatcgggacaaaatatattgaagcctatggtacattataagtaccacaatgttataacaagtcggcacctcaaaaaaaaaaaaacatgaactacaagcttggaggacaactgttttggaatattctaagagacttaataaggttcgatgatttgtcctcattagtaacttacagtaaagagtatagacaaaaaggctataat

SEQ ID NO: 62498 - DNA, 383 bp, Glycine max
  unsure (1)..(383): unsure at all n locations
agcttccttaagaagaggccttttttngtttctttctacacacaccccgcgtatagagaaggtgaccttcttgagatgagaagctagagcttagctacacacctcttataatagctgagctcacccccatgaaaaaatacaaaatataaatctctactacatagactacttataatgccttgttatacaacgctaaaaccctatactactgtaatgggcacaatatatggcccacacgaaggagaaacctattctaatatttacaaagataagcgggatcatacttagcccatgggctcaaaatctaccctaaggctcaagagaattctacggccttcgcttggatctctgacccaaacttactggagtcttctatccaatgc

SEQ ID NO: 62499 - DNA, 68 bp, Glycine max
aaaataagttaataaaagtaacttattaaactaccattgacttcttataaaaacatcactcccccaat

SEQ ID NO: 62500 - DNA, 146 bp, Glycine max
agcttcctttacagcaaagagaagagaatgttatattttatatatacaaggagtgcggatgtcttccgcaccgataagacctgactattactcacaaatctattgataagctaacaggacagctttctcatccacgtctggaatct

SEQ ID NO: 62501 - DNA, 437 bp, Glycine max
  unsure (1)..(437): unsure at all n locations
ctgcagcttgaaccatgtgatcttggctttcaaactttgtttgatcctttgnctacaaatatgtgttgggtcatcaattcacgatcctaactgatcactggagtttgaaggaattgatgtcacaagtggtgcacacccctgaacaacaactctatttgacaaaactattgngttttgactatcgaatctattgggcaattatttgtactaaccactcctaatttcatgttcttccaggacctaaagagtcaattacatattcatccaaaatatgtggccttccatgcaaaaatagaacatgaccctcacaatcatctagacggtgccattgtccaagacctgattctacacaaaggacgatatttgctccctaagggattattgttcattaatactcacctctaagaatttcactctacaccatcatgagttcacat

SEQ ID NO: 62502 - DNA, 432 bp, Glycine max
agctatggtcatgatgactgcatcttctctttcttgttcaatcatgtcaaggtctatctataatgcttcaatgttttcagcctcaacgaagtaatgtctttgaagagagacctctcttacctcgactggcaacattgtttctatcccatattttagccgaaaaggggtctcctatgttgtagattatgggttcacctatatgcccaaaggacctttgcgagctcttcgacccatcttcccttggctccatccacccgtttcttcaactcacccagaattaccttgttagatgccttggcttgtccattcgtctgagggtgctccaccgacatcaccctatgcttgatatcgaggccactcaagaactcattgagtttttggtctgtgaactacaaactattgtttgtgaccagcatattcataattttgaac

SEQ ID NO: 62503 - DNA, 384 bp, Glycine max
agcttcaagaatcaagatcatgattcatgtttcttgattcaagaatcaagagaagaattaatcatgataagtattaaaaagttttttcaaaaactgagtagcacatggatttttctctaaacatgtttaccaaagagattttactctctggtaatcgattaccagattgtcgtaatcgattaccagtaagcaaaatggtttccaaaaagttttcaactgaatttacgacgttccaattgatttcaaaaagctgtaatcgattacaatgttttggtaatcgattaccagagtgcttgaacgttgaaattcaaattcaaaagtgaagagtcacattctttcacaaaaaagccttgtgtaatactatacactgatttggttatccac

SEQ ID NO: 62504 - DNA, 432 bp, Glycine max
  unsure (1)..(432): unsure at all n locations
agctntgcttccacagtacttgaggagggttttccatccacttggattttagaagaaaatatgggatgagtattggtctcttatattttataacatcaatntattgcatttgtctgggaactttgcttcatgggaagccaataatcaattttcctcccaagacaatcgagctaagtaaggtggatttctacaccaaattggaatcagacttgtgtcttcaatgtaaggtgtagttccttcaaatttgtttacatcagctctaatcagtagtgtaatcatacatttntgtttctcttaaatagagaatccaggaatgtccttttgctaaagagattttaaacctagtgattacaaacacattatgataatggtagaagtaattttgtatttgtaggcagaagggatatatagccactaatatnggcagcctct

SEQ ID NO: 62505 - DNA, 358 bp, Glycine max
agcttccagaacccttgtctctatcttgatttccatatcaacttcacccacttgcattcatgaatcctacaaagacatacacttcacaccttctgtccagcagaggagcattcttctcacaccgtatatgtggggtcacggtatgtttctgtcacatgcccgtgaagcattgttgctggctcaagaattggagcttagaaatacaccgatttcgatgaaggtgtcactttcttacaccctctgtttgaactagggaaactaaactactccctttttggtcaaactttatattgacttgtgcactctgcaatgttgattatgcatttccgatgacttaaatgacttgtaacataaaaaa

SEQ ID NO: 62506 - DNA, 447 bp, Glycine max
  unsure (1)..(447): unsure at all n locations
gcaagctggttagaacaaggaagcagtccatttgagagaagtttttcttatgatatanacagggaatgtattagaattaaaattaaatccattgaatattatctaaatttaagaagagttaagaaaaaaaaatcttagagaacagatatacatgaatctacaaaccgtacgggttggtgcaaccatcattcacgttttaacgaaggccgaataaactatatatacataatacatggcgtgcatttgtgtcaaagctctcatccaacaaaagaaatatctntgcttttgatgtgatatttcacttgttactacctttaagggcgttttcaagtgcatataatcatgtttatcgatttcatttcttttattttattttcttaagagacatgtattaattggttttaaaattattattattattattattattatgctttgtgggtctga

SEQ ID NO: 62507 - DNA, 433 bp, Glycine max
agcttcatgatgaatcaagattgattcactgtgttttgatgataacaaagatgatgacaaaaggctcaaaagtcaagatcacttcatgataacaaagatgatgacattcatgaatgagttcaagattgagtcaagaacacttcaaggatcaagaggaaatttgatttctagaatccagaatcaagaatcaagaatcaagaatcaagattcaagaataatcaagatccagagtcaagactcaaagattcaagaatcaagagaagacttaatcaagataagtattaaaaaggttttcataacattgagtagcacaagaagtgttttacaaaatcattaccaaagagttttactctctggtaatcgattaccagattatagaaatcgattaccagcggtgttaaaacgctaagattttcaaaattcaaaatgaaga

SEQ ID NO: 62508 - DNA, 441 bp, Glycine max
  unsure (1)..(441): unsure at all n locations
gagacatctgaggcatgcaagcttncttaagaagattcctaaagaaggtagagcttagtttcacatacctctctaatagctaaactcaacttcctgagatgagaaactagagcttaactacaaccccctattataactaaactcacccccattgacaaaaaaacctggaaattacaaaaaaaagtctttattacaaagaaaaactaaaatggctcgaatacaaagctaataccctatactatagaaggccaaaatcatgcctagacgaatgagaaacctattctaatattntcaaagataagcgggctcatacttagcccatgggctcgaaatctaccctaaggctcatgagaaccctagggcctttccttggatctttagcccaatctacttggagtcttctagccaatgcccttgcggggtaggatngcatcattccct

SEQ ID NO: 62509 - DNA, 289 bp, Glycine max
cgggccgcagatgagaaataaagagttcaaatttcgcgccacgacacggaaattggccacataaacctcgccccaacataacaggagcaggtggaactaataacccaccaaaagacaggttaatttaagcgggaataaactagattgcgacgtagttaggagtaactacaggtcaacacaaagatggtgctcaacaccgcacatcctttaggagagaaacactacaattctggactccatgcttgaatggactggctcacgcttcactgacacacattgtgacaaaaag

SEQ ID NO: 62510 - DNA, 380 bp, Glycine max
agcttaatggctgacacagatgttcatctttttttgcaacacaaaaaggaacgtccataggttatgcttataaccatattttattctttattctgacctattatgacttttcaaccgtggtggtggggttagaacaaatggcatattttcgtcactgacctcagcttgagtgtatttcacttggcgcatatgtgcttccctccttctgggctgtgtttgtcgatatgtcacataaaacaaagcctctctttttaccaaaattgacactttgttgagaggcgaattgttgaatgtctgagcaatgtgctcattaaccgtggctcaatacaagacaccttgatcttcattaattttgatcacacggacctattattttttac

SEQ ID NO: 62511 - DNA, 394 bp, Glycine max
  unsure (1)..(394): unsure at all n locations
agctagngagaagnctctcaatcaagctctttttatattatagaaagcacaatgtgtgatagaaatactgagattgtgacaccctctaaactaaatgtgacaccctctgtccttacaattataactaactaactaaatatatcatacaaaatttatttaaaagtttataaactcctagtagagaagaggagataaaacatcctaataggaattataatttttctttcaacgtatgtaatttaaatcaattctaaaggagaaaaagttctcatccacttagtgaaaacataatatagatttttttgaataaaagacaaaaaatccctgctcataacaagattgtccaccctatgaaaccataactatataatcatagtagaaaaattttcgtttt

SEQ ID NO: 62512 - DNA, 435 bp, Glycine max
agcttggtaccaattgtataaatttatcttatgcaaccgagaagattatcaacataatgtgagatcaatgattaaagaaaagttcacatgctcaacaggtgtgaagtttttatttgaataaaaaagatttgatgagttatgttcatgaatatataaactttcatatgcttattatgtatgtataaatgtcacaaaattacaataaggttattatgttcactcagaagacagattatactctataatatagatgaaccaaaatagagattgacaatttacaagctatataaagaaaaataaaattgtgcaaactatacctgtctgtgtaccattctgcaaactgaacgttccaaatctgaaaacacctgtatgctatgcacaattaggagccacaactagaaaaaggaagtgattattaacgttaataaacattgc

SEQ ID NO: 62513 - DNA, 323 bp, Glycine max
ctgcgccgctgcctcaggaccatgttgttatgacttttctctcggcgaaaaattaactttgagttgtctacatggcaccttctagcaggactcgtaccaacgcattccgctcgaaactacgtttatttgagctgtgagatgcactatacatctaattatttgtatgcacgccttttcattacaaacatgggtgcactttacactcacttatacgaggaaacactcctctgctggactccatacttgaaggcaccgcttgaccctgcattgcggagagtgggatccccaagtaccattagtattatatcattgtagatgtatat

SEQ ID NO: 62514 - DNA, 431 bp, Glycine max
  unsure (1)..(431): unsure at all n locations
agctatgcttccactgtacttgatganggttttccatccacttggattttagagtaaaatatgggatgagtattggtctcttatattttataacatcaatttattgcatttgtctgggaactttgcttcatgggaagccaataatcaatttttctcccaagacaattgagctaagtaaggtggatttctacaccaaattggaatcagacttgtgtcttcaatgtaaggtgtagttccttcaaatttgtttacatcagctctaatcagtagtgtaatcatacatttttgtttctcttaaatagagaatccaggaatgtccttttgctaaagagatnttaaacctagtgattacaaacacattatgataatggtagaaagtaatttgtatttgtacgcagaagggatatatagccactaatattggcagcctc

SEQ ID NO: 62515 - DNA, 461 bp, Glycine max
  unsure (1)..(461): unsure at all n locations
tgatgcataatgatgagcgttaatgaacagggattttattgctgggtcagattcagactcattgaatgcctgtgccgtgacaatgtgctgtggtgccacgcataatcactactagctgcccagggcacctgacacttggccccgcgcttttcaatataatctttgtgtttaacattacaactactacataacataactaaacgcgccncacaaaatgcaattacgtggtttgctcaccacaaacaagatgcgacgtttcctggttcccacccacctttcctttcataatatgtcatcttgcatataggaatgggtattaaggtttattcaagattaggtcaaattntaacttaatttgcttattgctaatcaatctgaattgtgttgattntaaatataaatatatgtaataattctaatcgaatcaagttgatcattacactactcttntaaaatctata

SEQ ID NO: 62516 - DNA, 460 bp, Glycine max
  unsure (1)..(460): unsure at all n locations
ctaagctattgaagaatggaggagaagtagtcaaaagccgtttcttggtcgtggacgtggtcatggccaaggaagaggaggaagaggagatcgtgataattntgacaataatgaatggagagccatcaatccactagaagtcgtgaaagaggaagaggaagaggtagaaacaattatgaaaaagcatatgaaaggaggtatgataaatctaatgttgaatgtgttaattgtcataaatatggccattactcttggaagtgtagaacaaatgttgaagagaaggtcaatcttgttgatgataaagaagataaagaagttgaagagtcaacactactactatcacttaataatggtgagaaggaagacaaatgcttatggtatcttgacaatggagcaagcaatcacatgtgtggatgcaaagagaaatatgtggaacttgatgagaacgtgaaaggaaatg

SEQ ID NO: 62517 - DNA, 356 bp, Glycine max
  unsure (1)..(356): unsure at all n locations
atacctgttctggtatttaatggtgtgagacaagtacaagatgaaaaatttaaattttatttttaaatatgcagaaattggggtagattaattctttaaacaatttaataataaattgatttctaaaatttataatttaaagcttaattaattataaaaaatataaatttttattaaattaatccttataaaatgagttatgatcataaacttaacgggaataatntaattcgtgaaagaataacaattccaatttagctaataaatacatagaaaatgtgagaattatattttgtgtagataaatcgattcttaaaggttatacattaatgataaactggatgtacacaatatat

SEQ ID NO: 62518 - DNA, 499 bp, Glycine max
  unsure (1)..(499): unsure at all n locations
taatgganaacatgaacgtcatgtccattatgttggacaaaatatatttgatatgttagcttatgatcaataaggcatttgaactcaatattcagtgtccatgatggatcctactttcatccaaagttgaaatttcataacaagtgcccatgattaactctaactctcaatctgaaagtgtcggcgatgatatatattggcaatgaacgaagtaagaagctggatgttataagacattcaaagtttttttacatttcaagttattttataatcaatgtctaggcatatttagagttatatgaaattttgattattattaatttaataattntattgtcagcaatttatatttataattttatattattagataagatattgaacttagacttacgaaattgtcgttgcactaaggaatataacgaacttctcccactactaagtcattggctttgaaccacatctaagccatgactctcaatataatggttgcatattc

SEQ ID NO: 62519 - DNA, 438 bp, Glycine max
  unsure (1)..(438): unsure at all n locations
gtcacctgcggcatgcaagcttanagttnttttttctttnataagtttctactccattagagcatccaaaaacccaagttttttttttcctgcctcctctctgcttaatgaactaaatacaagcagtttaattatacactaagttcaattaaattttgtctgagtatgactaaaaacggttgggctgtacattctaatccaatgcacagtaagcccatccgagaataaagcttgaccaattatagatggagctctgttagtcctacaccccttatttctaagttcacctccacattgttatataaaatatcctaagctactagggatggaaaaaagatgcacacatgaggatattcacggataaaatctgcaatgaatagttaatgggcagctttaacgaggacatgtgagtaatgaatatgagcantttcattacct

SEQ ID NO: 62520 - DNA, 345 bp, Glycine max
tataaaactaagcttgctgagctaggaagaaaaaagggtgtgcgctgtgctttatatatatgccttagcatgtattctgatgaaagaatttcataaatccgatcacacatagttgatacgcgtgacatcaatagttccccgaacaatatatttatagcttgggaccacctatggtgagctcttattggatgttgtttctctacggttaagcttataggactcttacgtacttatatatgtgctcctatatggaaccataagttatatggtagcttttcttatgccggatatttaactgcatttgaccctctttaataaatgcttaaatattaatttcttagatgg

SEQ ID NO: 62521 - DNA, 475 bp, Glycine max
  unsure (1)..(475): unsure at all n locations
gcaagcttgtgattgacgtcctaagcatgtggatatctatagaacaagtttagagtctctatttcaatgcggtaagcatgagctangcatgttaagcctaacccaccaaaaaaaggatagtcataactattcttgagaatatttatatatgtttcttgggaattaaaaatttgaaggtttagtattaataaaactttcccaaatttttaattggttatcacattaaatgatttaataaaagtaaaatgatattttntatcgtagtaaaaaattttttccaactcanaaaagtacgattcctatctcttataagaaaaaaattgagggacaaaatcaattactcttttcaaaagcctatccctggaataagagaaaataataacattgaccttgccccaacatagacaaaaaagcatganactaccctttgttctcaatacgtgaacctctcacaacttgtgtcctttttggtcca

SEQ ID NO: 62522 - DNA, 429 bp, Glycine max
  unsure (1)..(429): unsure at all n locations
gtccatgggattggtacacgatatattattttgggattctttgacatttaaactacaaaaaaatgtgtcacgaatgttagtaatgtgttgaacataattttaaaaaaatgctgtacataggcacttaagctttgttgcgagagtccaaatcatacatttttaaatcttattatcctattttgaggcggttgtccatggagctggtgcacgatatttttagtttatttttttattatcctattagtaatgtgttgtacataatataagaaaattgtaaaacatgggcacttaagcattgatgtaacggtccacattatacnttttttntattatgttgcctattttaaggtggatgtgcataatattctttattttcatttaactacgataaaatgtgcacgaatattatatgtgtggacatatattaaa

SEQ ID NO: 62523 - DNA, 475 bp, Glycine max
  unsure (1)..(475): unsure at all n locations
agtcacctgcngcatgcaagctggttactgttctacccacagagctccgtgaaattgtacggccatactcttccttgcgagccctcttggtctcttgttcaagggctcttgcggtagttgcattctcttcccgtaatccggcacattccttccagatgtgtgtagcggctaacttgaacttctccttggcaagtttcgcctttcctaactcgtttttgagatcttggacttcttcgtcctctttcggtgcttcgaaactctcttcgttgacaacttttaacttggcgagccaatctaaacctcgtatatgaactcttagccattcatggtaaccaccaatgatgccattgcgaatgcccctaagttcttgatctttccttaacggngtttcccatgccttatggattctntgtatagccttgaaggttgcgcgccgaaatctctcacaaagaaaggagacatgctntcttccatc

SEQ ID NO: 62524 - DNA, 483 bp, Glycine max
  unsure (1)..(483): unsure at all n locations
tgtctcaacatttatgctagacggagaccaacatgctatctatcatctccaagtaccaagaagagttaggtctatccatggcccacaagcatataatctcggatgtatatgctcaatatatgcggatacagaggctataggaagggtgatcgactctttacaccaagaggcaaccatgtggatggaccggnttgctcttacactgaacgggagtcaagaacttccccgcttgttatccaacgccaaggcaatggcagacacctactccacccccgaagagaatcatgggcttctcggctattgtcagcatatgatagacttaatggcccacataattagatatcgataggatacatggatggtctctcataccttgactatatacgacttcctttctttcgaaataaatgagttggtccatgttctactacaaaagctgtgcaaataaataccctacattatctcagctgcttgatgtggttc

SEQ ID NO: 62525 - DNA, 465 bp, Glycine max
  unsure (1)..(465): unsure at all n locations
agcnttaacatatattttaaaanaaccgatgtttttatatacatacaacattggttnttattaaaaatcgatgttattttttaggattnttttaatatgttgtctattttttaataaccccagattaacctgcaaatttaaaagcagaaccacaacatataattttcattctgtttccaaacagttttttaccagaaattccatcaaaaatttattatttactatcaattaaaagaatatttaatgttaagaagacatgaattgtaaaaaatgtaaagtaactaaactacaattccaaaattgcttaaacactaattgtttcatttttaactntcaaataatangttgcctactggatgtgaagcaccttcaatctctctggttcaatggtctaacatcattgaatactgatgatataatnaacataactcataatatataatctaatcataaccaaatgaatac

SEQ ID NO: 62526 - DNA, 452 bp, Glycine max
  unsure (1)..(452): unsure at all n locations
gctgtaaaagcggaaataaggaaaccgaaagtgaagatattattatgatagcaagctaaacatgaaatgaattgaaagcctcgggttcgagcacttacccattgtagaccaaagagcggtgaagaacgacgaataatcttcatggaatcacccacgataatgtcttataagcgttatggaggcacctcggcttgtattttcttacagaaacacgttttttcatccaaaacaattcaaatgcataacataggggtcaggacccttttactacacctctntgcccttatttatagccaaaacagggaggagcttgccgcccagctcgcccaggcgtgcctaggctntcttaggaagtttcctgatgcaccctcaaaattactaagtncacccncctttttgtactttatggaaaagattcggaaccaatggaagcatttcgacttgattttctc

SEQ ID NO: 62527 - DNA, 439 bp, Glycine max
  unsure (1)..(439): unsure at all n locations
agctntgtgttgcggcatagatagattcttgttttatagtctacccctttcttttcttccttgtagatcgngatggcggcgcagctaatccgtgatcgagtagagatggagtgcctagagggagcttgggagaccctcgaaggcaacacgaggtgccgatttcggggcactattcgatttacggcgacttctttagtgcatccagatgagcccgcacagatgcttcagcgcacggtggagtggatactacccacgcctacaccatatcgtctagtggagcctgtccaagtgatcgaggtaacgtcatccgaggaagaccccgaggaggatctggaggagctacctcctgagcctgctgtggatgcccttgactttctagagggtgatgaggatccacttcttgatgtgggattctccgaggaagtcatgtcggcatctg

SEQ ID NO: 62528 - DNA, 475 bp, Glycine max
  unsure (1)..(475): unsure at all n locations
tgtgaagctcctggtttagctnntacccgatttactcaactcattgaagttgaatgtgatgctagtggagttggcattggggctgttttgatacaaaacaaaaggcctatagctatttctcggagaaatagggaggagccagattgaactattgcacctatgacaaagagttctatgccattgtgagagctcttgatcattggaatcattatgtgcgttctaatcactntatattgcattcagatcatgagtcattgaagtatatcaatgggcagcagaagttgagtccaaggcatgctaaatgggttgaatatcttcaatcttttaatttctcttcaaaatacaaggatggtaagagtaatgtggtggctgatgcactttcaggaggtatgcttaatttcattttgaaactcgtacttggtatgaacttgaaaatatataagagatgtggtttgggaataactctaatggagat

SEQ ID NO: 62529 - DNA, 472 bp, Glycine max
  unsure (1)..(472): unsure at all n locations
agcttaacatattattttaaaaaaaccgatgtattatatacatacaacattggttnttattaaaaatcgatgttattttttaggattnttttaatatgttgtctattttttaataaccccagattaacctgcaaatttaaaagcagaaccacaacatataattttcattctgtttccaaacagttttttaccagaaattccatcaaanatttattatttactatcaattaaaagaatatttaatgttaagaagacatgaattgtaaaaaatgtaaagtaactaaactaccaattccaaattgcttaaacactaattgtttcatttttaactatcaaataataggttgcctactggatgtgaagcaccttcaatctctctggttcaatggtctaacatattgaatactgatgattaataaacataactcataatatatatactaatctaacaaatgaatacatttgataaaca

SEQ ID NO: 62530 - DNA, 446 bp, Glycine max
  unsure (1)..(446): unsure at all n locations
gattgctcctttaatatagcgaagaattcattttgcggcgttgagatgagtagtggttggagtctccatgtatcgactaatgagtctaataccatatagaatgcctggtcttgtgcacatcaaatattgcagactacccatcaaactcttgaaatatgtagcatccaccttttctgcttcgtcgaactttgataacttcattttgcactccattggtgttccaattggcttgtagttatccatcttgaatttcttgagcatctcctttgcgtagttntgttgtgaaataaagattccatcttccttctgctttgcctcaataccaagatagtatgacactagtccaatatcagtcatctcaaactccttgatcattactttctttaactcttcaaacatagntggattaacttccatgaagatcaagtcattcatatatatgcaca

SEQ ID NO: 62531 - DNA, 459 bp, Glycine max
  unsure (1)..(459): unsure at all n locations
tctcccttctttccctataaatagggggaggtgggaagaacactaatgttcaaccctcccggtatctgagaatcacttaanattagtgagaaaaattgtttccgtgaagatatccaagctgaggcgcttccgagacgtttctgtgggtgatttcacgaagatattccatcggtcttcgttcgttcttcgtcggtcttcgggcttcaaccggtaagttcccgaaatcgaacttttcaattattctatgtacccttagtggtccccacttgtgtcgcatgcttttattttcattttatttacttttcgtaccctctttatgcgtgctttagtcatttattttaagtcattttttcgcctcatcatgaaataaaataaatattcaccgatcatttggattgtaacatcttttaattctgttaaatgagatcgaccgtcgatctgcgtaccacttttaaccaa

SEQ ID NO: 62532 - DNA, 83 bp, Glycine max
agcttcaccaccacaagagtgtcttgtataatatagcttacagaggaagcttcaatgaaggaagagaatgagagagatagagt

SEQ ID NO: 62533 - DNA, 373 bp, Glycine max
  unsure (1)..(373): unsure at all n locations
gcttacagaagcttctcattatcttaacatctaaatagaagcattttaattggagacccatgattgctaaccagacctttaaggcagatcccatccttattgcttctattagagcatgcactctacctttgtggtggataaaaccacaatgggctaaagagtttccttccaactatcaagagatttgncaatcatgaatgcgtgccttgtcatagatctccttgcatccaaatcttcagcatagtcaaaatctaaataaccaactagagcactagacgtgtctccatggtggacaagtccaatatcagttgtacccattagtacccaaatatacatatcacaacttaccaattgtcacaacctacccttcggc

SEQ ID NO: 62534 - DNA, 458 bp, Glycine max
  unsure (1)..(458): unsure at all n locations
tcatcacccttgtggccaaattcctttgatctctaagtacatcagcccatacacgttccatttncaaattccatgtaaaataacttctttgttcctcattatttttcctaanacttttcttttatccgtcattttntcattagatgactccattgaagttaatgtcacttattcaacctgcacataacaaatagtagatatgacctactntattcatttgactagtccactgcacaatcatagaanatatntcaagcanatgtnttatgcaatagcanagtacataanagtctatcttcaatagaaaagtacaatagtaacaaagcacacaaatgttgttagcaatagcaaattacatttaaaaaagaactatccctaagcaannagttctctaacttgatagttagcaaacatattcatagctaatgtatctcgaaatcttgtccattcctcggaag

SEQ ID NO: 62535 - DNA, 500 bp, Glycine max
  unsure (1)..(500): unsure at all n locations
tactaagctanttgtgacanaatggaagaatcttttcttagttnttcatgtgctactcacacgatccattttcatctntgtagtatcctatagtccctgcacaacacanataggtcaagtaagcacaaaatatgaaaataagccataattatcaattaagctcaatcaattgtctaagaccaaaactaagttaaagtgagaatataaggctcaaagagatgttaattgagctaagaagaatagaaaaatactaaactacaagtgatcaatcaatacatcatcattatcttttcaaaatgatttcgtcttaacaacaaaaaatatttctcaacaaatactataagtgtcttaatcaacaataaaatagtcatttctcccctttatggtaaatagaaacttgaagacaaaggtatattaaatatcaactttctccttaaagtcttacaatataaaaaataattctcttctttcaatcatagatatcttaaacaatggaaatg

SEQ ID NO: 62536 - DNA, 188 bp, Glycine max
  unsure (1)..(188): unsure at all n locations
tactaagcttcacacctccnctcgttcaaccaccaagtgacaacgaattcttctttatcataagctccaaaacacgacgaacaccaatgagaatgaggagactaatcaccttacgtgtctcacgttctaagattcagatttgggttcgtatttcctgatgatattttgggaatttaagaattatgggt

SEQ ID NO: 62537 - DNA, 361 bp, Glycine max
  unsure (1)..(361): unsure at all n locations
gctctntaaacctncattaattttcaactttaccttttcctccattgctgnttctttcattttctccatgtatttcctcacatgtcttgtgctatatgttattaacatgattctttagaatttccaccgattaatctcgctatagaagcttgatttgattttctatggntcagatttcttgttcatgttcttgaaccatgagttgngttaaagttaagttcctttgagttttgtcttgctatttttntgtggctgaaacctataccatacaattcttaataaaacattaaagtagaagacacctcacaattctagagtgacttgttcccctatttgtagtttgtcatagaagtcatgtcta

SEQ ID NO: 62538 - DNA, 486 bp, Glycine max
  unsure (1)..(486): unsure at all n locations
ctntacttatgtggcagggcgggcttccttcactttcttgtcttctacgtgagcttagaccactgctctttcttcctgcgatgcttcttttcatatacgcctgagtgggcttatagcctaaccatacttcccacgatttgctttggcatttatcatgctaattatgccgccggtgtccttgcctatacccattccgggttcttaatcgtgtccttacataactcgggccatcattactgctgcttcggacagacaatgctgcccatagaaggagtccacggaggatatgctgaccacctcaaaagactggatagcggtttctaacgattcttctgctgcttccacataaggcatagaggatgggcagctcaccaagatgtcttcctctcctgacacgatgaccaagtgcacctccactacgaatttcaacttattatggagtgtatgaggcacaacttccactgagtggatccacgggcgccccat

SEQ ID NO: 62539 - DNA, 457 bp, Glycine max
  unsure (1)..(457): unsure at all n locations
agctnggttacctccttcttcactacatcattattattcgtgntgagtcttctctgtggcttgcttactggtttaaccccatcttctaaatttattcgatgcatacctgtggatgggcttatactaagaattgtcgcccaggtccaccctatagccctcttatgcttcttaagaactgataacacgttcttctcttgctcatcagcaagggaggtagatataattactgggaaacttttgctctcatctaagtaagcataattttaaattgatggcagaggcttcaattctggtgtgggcgggctggataatagtaaaaagagatggnttctcagcctgtacctcataaagaaagtcagagtatgtgtacttncctgaacatgnngtagtctatcttgactctataaatcantctcaagaggtaaaacatcaccagacatgntatcaataacaaatt

SEQ ID NO: 62540 - DNA, 487 bp, Glycine max
  unsure (1)..(487): unsure at all n locations
tacccatcacatgtggtactaggtggttgtctggcgatggtgcacaacaagttntccacatccacaatgcgcgcataaacccaccatccnctggtgcccacctcatctgagctcacgtactcccacgtagcccatattctcgtttctctcaacaacgggttcccatcaatcctcccaagctttcacaatatccaagcataacaacattcaaacagcacaagctatcacagccaagcaaaatatggcaaaggcagaaaactctgccaaaacaccaaccaaatcacagcttttctcacttaaagaccccagtaacaattccttcgatccaattcgttaaccgttggatcaactccaaaattgtactggaagtctatagtacataatcctacattgtgaccgttgggatctactagcaaacatncagaactcattttacattactcttntcacaaccagcaaatacatagcattnttctgcacttgtgca

SEQ ID NO: 62541 - DNA, 447 bp, Glycine max
agcttctatttcaatttcggatgtttcgttttttacgagattcaatcgaacatccgagtaaaatgtattatcgcttgattcttcttagagcttctgctctgaatttcgagcatctcgatatattacgggacacaatcgaacatccgaagtaaaatttattggtcgttgaatttgatcatatgttttgttttcaatttcgagtctcggtatattacgggactcaatcggtcattcgagttaaaagtaattatcgttttatttatgtcagagcttctgttttgaatttcaagcgtctcgatatactattgaacacaatcggacatccgaacaaaaagttatagtcgattgaatatgctaagagcttgtattttaaatttctagcatttcgattattacaggactgaatcggacatccgagttaaaagttattggcatttgaatatgctt

SEQ ID NO: 62542 - DNA, 265 bp, Glycine max
ccgaagctctgagcaaatgcaaacgacaataaccgtcaggccgatgaccgaatgagtcccgtaatatatcgagatgctcgaaaggaataccgatgctatgagcaaattcaaaggacaagaagctttaactcgagggctgattgggatccgagatataactagacgcttgaatggaatagtgaagctctgaggaaaatgcgacgacaataaaatttaactcagatgtgcgattgaggcctgcaataatcgagacgctcaaatagaa

SEQ ID NO: 62543 - DNA, 495 bp, Glycine max
  unsure (1)..(495): unsure at all n locations
actaagctatgcgcatattccttacaacgtcactntacaagacgttctataactaagaaaaatgcaccctatacaatcaaggtagcttcattacctagattatatacatgtacttacaggtgtatttgttatttacatcacacacgcctccttggctgaatttacatacatgcatactcaaagcattttggggtaccaaaaactgcacatgcgctcatcttggtatttctaatacccatacatatacaaacttcacgatgaatcttgactacctacacaataaggagctacatttcatgctcttattttcaagttttggctacctaaagccacatgcaaattcaagcatattntcctttgctgactaannatgtattcaaattagaaggtatatatnntttgaatatgttttttcacataacatgcaacatatttatatatatttttgtgagacatttgactaccaaaattatatatacatacatccagtatttg

SEQ ID NO: 62544 - DNA, 491 bp, Glycine max
  unsure (1)..(491): unsure at all n locations
atacttagagtcacctgcggcatgaagcttcataagtggatcagagctcagttcttatgtaggtgctccttacacctccattaattttttgctttaccttctcttccattgntgnttcttcatttttctccatgtatctcttcacatgtctttntctaaatgttcttaacatgattatttatagtttccaccgattaaacttgctatagaagctagatttgattttctatggatcacatttcttgttcttgttctcgaaccatgaattgtgttgagtttaagttcctttgagttttgtcttgttattttttgtggctgagacctacaccatanaattctaacaaatatattatagtagaagaaaacctcacaaatctagagtgactcgttcacctattggtagtttgtcatagaagtcatgtctagtcatgaaaccttgcacataagatttctatgttgngctgatnttatttcttgttctttgctactca

SEQ ID NO: 62545 - DNA, 490 bp, Glycine max
  unsure (1)..(490): unsure at all n locations
actaagcttctatacagaaatgtccanacagaaggatntatccttagtttcccaagtaaatattaagacactctcaattagcaaactgaacaacttttcaaaagaagacaagtgcctggaggatacaataatgagtaatcctctgtattctaattctaatttcaaaattaaacaagcatcaaatatttgaggcatgaaaaatcagattacagaaccaaaatgaaaaatctttctgttgcaaaatataagaataaatataaagaatttaatctagtctcaatatatattcataaattgcaaaactaattggttttatcatttagcttttaacctctcgcanattggtctaagacatggaagatgaataaaatacttgattgatgaatgagagttgtaacataggattttatttaatagtagaatctcacttctgcacaatggtatttcttttgaccaatcttaactcttaagcctatattagtgaagcata

SEQ ID NO: 62546 - DNA, 361 bp, Glycine max
  unsure (1)..(361): unsure at all n locations
atggagaagncgccacagaggccattgccttcctcgcccagtattatgatcagccgatgatgtgcttcacctttggggacttccagctatcacctatggtagaagaatttgaagagatcctatgatgcactctaaggggaaggaaaccctacctcttctcagggttctatccctcattagctagaattaccaagatagtccacatctcagcgcaggaattataccataggaagcaagtcgaatatggtgtgggtggaataccaagaaaatatttggaggcaaaagcaagactcgtggcaggtaaaggcgagtgggccccgtcatagatattctcgcactggtgatctntagaggagtcctc

SEQ ID NO: 62547 - DNA, 479 bp, Glycine max
  unsure (1)..(479): unsure at all n locations
agcttattggtcagtattgactattgtgattctacagatccactttctagtgagggaattactctgcagtattgactgtcaatttttcacctgttcttttctttcatcatgctctaagaatccatttgataaaaaataattggacttagtggtattaggctaacgtatattctttcttttacttacataggcctaagtaggctagatgtggcactaccttacccaggctagatggnggagtgagactttctattntcaaggaacattgattcttactttaatatttttcttcatatctagaaacaaaaaaaaaagtgaatttttggtaatagtattggcaattntacaataacaaaatcatactaaccaganatgtataagcacaatctangtctagctcaactctttcacaattgatcctgtgttgttgtaaaaaaatatcatgatttattntaacaaccatcttagatcttcatata

SEQ ID NO: 62548 - DNA, 434 bp, Glycine max
  unsure (1)..(434): unsure at all n locations
taagcttttatcatattaacaaatatatactaatgaatctattgtatcatattagctgctaggaaatagtataccagtatgtatgtgcatggctgcacataaatgaaaatgtaaagaactagcatgccatactaccgctctagaatataagcgttccagacgtgctggttatcccttgtcaatgagctgctattattttatataactttgagtctatataatatatggcatgcatgggtggtccattaactacacatatatacaaaagatattgacgggccgggaatggacctaggaacatacataaacatttacatttaaaaaccctggttgtgagataatnctatatttattatatatatatattattacacaccgtctctgttgcctaataaaactatgcgttcaattaaataggaggattgtgtacatgg

SEQ ID NO: 62549 - DNA, 126 bp, Glycine max
agtcacctgcggctgcagctatatccggctttttgtggttatctctctcatgctattccagggtgcgcctcttaccttttctttgcttcgctgcatctcatggggaaataacataaggacctattg

SEQ ID NO: 62550 - DNA, 403 bp, Glycine max
  unsure (1)..(403): unsure at all n locations
agcttgatacaacactgctgttgttcatttaatgctgaccttttccaacctccgtcacccttattgcccaaattcctttgatctctaagtacatcagtcaatacacattccatttncaaattccatgtaaaataacttcttgtttcctcattatcttttcctaaaacttttcttttgcccgccattttttcattagatgactccattgaagttaatgtcacttattcaacctgcacataacatatattagatataacctactctattcatttgactagtccactgcacaatcatagaaaatatttcaagcatagtctttatgcaacaaccaagtacataacatgcccctgcacaatcatagaatatatttcatgctacagttttatgccacactcttagacat

SEQ ID NO: 62551 - DNA, 336 bp, Glycine max
  unsure (1)..(336): unsure at all n locations
ccaaggaaatctgcaatgtggagttttctcataacatatgtcacctgtgtattgccgcagcttatatattaatacagatagaatctgagaatcgaacatatggaactaatgttagcctgaattgactccagaattgatgcgtttgttatagaacatgtataattgataaattcatacaaaaggtaaactaaacgtgtctgctgcttactatcaaatgcagggggaataaaatgactcccgttggtagatatgttacgtccttctaacaatcaaaccgatgcatagaaataatttctctaaccaatccgcccttngtgctatgcatagccaaatact

SEQ ID NO: 62552 - DNA, 425 bp, Glycine max
  unsure (1)..(425): unsure at all n locations
actatgatactaagcttaggagacgagttacagtatcgccaaagctccttctcctatcttatcttggtgatttcggccgtgtcagtggcagctgtcactcaccaaaccaaattcaatgagtcattnttccaatcaaaagaagaaaactcttcaatattggaaagaaccaaaaatgatgttatgcatgacaacaaatgcataccttctttagttcggtcttatggggaggcccttcatagtaaaaacttggtactggatttgctttaattaccaagttcttctcaactgcttgatggctgcttcttgctcttcctatcattggttattattaaataaacaatatacaagttgtttgatcaatttaatgtgcacacaggtacatggcaatgggaggattaacataaaacaagaaaagaccactgttc

SEQ ID NO: 62553 - DNA, 344 bp, Glycine max
  unsure (1)..(344): unsure at all n locations
atggcttattccctaggggatggcgccgcctcttacctcttctcctttttcttgcgntgcatctncatggtggaaaattaccattaaaggaactcattgaagctcanagatccannnntcatagaagctccacaagcaagcttccatcatttatttcaggataattgatttaatgtctaatatcatttcaaaattttcatcacaacttaaaacaataagtttgctaatattggcaaaaaaaaaatgaagcattctacttgaaatgcttgccttaatctaatctcattgaacgtatactacctatttttaatttttgttacgttagtatactatctatactatac

SEQ ID NO: 62554 - DNA, 439 bp, Glycine max
  unsure (1)..(439): unsure at all n locations
gcgtagcccaccatcttttcatagtagagtatttatttgtgtctaccatcacgattatcgtctccctttccatcattgggggtaccacttgggccgccagatccctccacctttgggcgtgttctttgaaagatccgtccccctttttgcaaatggttctgtagtgcatcctatccagaaccatatnaaaattgtactaatactgcctaacaaaggcaaccattatgtccttccaagaatggactcgggaaggttccaagttagtgtaccaggtaacagctaccccagtaagactttcatggaatgaatgttnaacaattcctcatcttttgcgtattcccacatcttctgacaatacatctttagatggttcttgggacaagtagtccccttgtacttgtcaaagtccagcacctagaacttgggaggtgtgatgata

SEQ ID NO: 62555 - DNA, 488 bp, Glycine max
  unsure (1)..(488): unsure at all n locations
agtgactgcagctgcagctaatctccnattgggtgaagagaattaatttatctttgtttgcatgcaagnntaaattgtggtcagcattgatgtntttgtagtataaatgtcattcctacccttaatcaagcctttgttgttaagaaaactagaaattcaattatatagtggcttatggaggctatctggaagccgaatgcttggagaagacatggaggatcaaacaggaggcaataactcatgaagtagatatctcaagctcacggaaattatatgatattactttaccgggtgctactaatggattgcttgtattagtatcttaggttaggtcaacattatatttcttttgtaacttgtaatgttagtaatgaacttttcattttaacttcttcaatattgtggtattgatgcttcaatcaatcgtttcactagtacctactacatatgcttagatcattgaaatagacaattcttgatatgcttct

SEQ ID NO: 62556 - DNA, 397 bp, Glycine max
  unsure (1)..(397): unsure at all n locations
caatggctaggctnagagggcacttgctctcttatccgattatgcagaagctgaatttctgcaacttccgctaagcggatccatgtgtcgctaagcggtaggtgcttcttgtgaaggccagcataatgaactgtgtctcgctaagcgcatagtagtcttttcagtttaccttttttgtctttgaacctgataaatttggctctaaaaagatttgagttcttattagttgcagatggcatcaagaaaaagggctagaactgatggcatccctttatcatccatcccagcttctcagtcagcagccataggaccagatgtccaacactcgctaaccttaatccctatgctacaaagcttatncagaggacaacttattatcatgcacagtctgcgagag

SEQ ID NO: 62557 - DNA, 474 bp, Glycine max
  unsure (1)..(474): unsure at all n locations
gcaagcttatgctgcatacatctacaatagaccttctatttctatcagcanaatcagccacaactgaacaattatgacctctccagcaacaggtacaatcctgggtggaggaatcatgccaaccttagatggttgaatccttcacaacaacagcaacaagaacaacaaccttattttcagaatggtgctggcccaagcagaccatacgttcctccactaatctagtaacaacaacaacaacaaccccaaatacagcaaacagttgaggctcctccgcaaccttcccttgaagaacttgtgaggtaaatgactatgcaaaatatgcagtttcaacaagagaccacagcctccattcagagcttaactaatcagatgggacaattggctacacagttaaatcaacaacagtcccanaattctgacagaataccttctcaatctgtcagaatcttcaaaatgtgaatgcattacatt

SEQ ID NO: 62558 - DNA, 424 bp, Glycine max
  unsure (1)..(424): unsure at all n locations
tctactgatgtggctaggcggngccccttcggctagttgtcttctctctctggcttggccttagatcttcctttacgagatactttgtcttatgttagcttgcgtaagtctatagcctacccaaacttcccgcggtttcctctggtgcttaccaagctggtcctgccgccgttgttcttgctcatacccattcctggctcgtatccgtactccaatattaccggggccaacatcattgccatatcatacatgcaaggctgcccagagaggcaatctacggaggcaatgcttactacctctaaagattggaaagccatttccaatgacttcttcgctgctttcacatatggcatagaggaagggcaacttaccaagacatcttcctcacctgatactatgaccaaatgtccctccattagaactt

SEQ ID NO: 62559 - DNA, 65 bp, Glycine max
  unsure (1)..(65): unsure at all n locations
tagaaagaaatttttttttggggaangaggggggaaggagaaaacaaagagaaaggaggaggagg

SEQ ID NO: 62560 - DNA, 501 bp, Glycine max
  unsure (1)..(501): unsure at all n locations
tccttaagccacctgcggcatgcaagcttgtggagaagaaggaagacattttttttttgtctcacaagcaggngcgtcacatcctgtggtctggactaagattcggtgtgatcactgctggactattcttcaggctaacattctgggaattctcatgggatgtaatggaacctatcacatattgtaccacttccactggcctagtggtaggctatgcctactctttgttcacttcaagagaccccacttaccaagacttcatgaagaggctctttctctccatgcagaggaagctgcacatgaggtacacatttgatgttgacagatcaaggagcttcaatgtaagtgcaaaacacccttaaatgccacaaccattttgaagaacgcacagggttgaacttgatttggaggatgcttgaacaaagataacatcttctcccaggttgcttataatctattcattaaagttataacatacaatcttacagtaacctctgtccc

SEQ ID NO: 62561 - DNA, 433 bp, Glycine max
  unsure (1)..(433): unsure at all n locations
ntcaaacataggttcatcaagttgacaacaacgttctctgtttcattgagagattatagcttactcacgataggcagcgcgtattccttctagcactaatggtatatatgtcaaagtattatcattgctagctcgaatcagaaacaattcacggtttgtcctgacttgaaaatactttttggggcttgaaatcgcacgacccttcaaaagaatattccctctcacaagtcacatagggaatatacattctctttacatgaaaataatgattgtcttgaatgttgacccgaatgtgaaattaacacaatctgatggcggagagtctctattgatccgatcatggcatgtatatatagacatcttattggcaaattacttacctgactatatcaagaccaaacatcattcatgacctcatactgagtcaatcatg

SEQ ID NO: 62562 - DNA, 346 bp, Glycine max
aagcttcaaatcgaaactaatgggtgaagttatttaacaacgaagaacgagcgaagaacgacgaagaacgtccacagaattgatcgcagagatgttatggaagcattacggaagtgtgacatcctggaaatctctacccggaattttgtaagcgatatattctaaataattatatatataagtattattcagggcatatatatatatatatatatatatatatatatattcttggaagaagtatgtacattgcgggaaagatacacgggttaggctaattaacgaagagtaatccataactggacagctatagattaattctcaattaattagtctaaaaatgatc

SEQ ID NO: 62563 - DNA, 438 bp, Glycine max
  unsure (1)..(438): unsure at all n locations
tactaagcttgatggtaactagacaccttggttaacctagaaacccaactgtccatgaataanatatatgtacctgttgcaagactctgtggtttatgctcctctgccgaccaccatacagaccttactcttctgtggcataatcttgagcaattgaacaacctgtagcctatgctggatacatgtactatagacctctcaacctctgcgggaatttctaccaaagcagatctattatgacccgtccagcaacagatacaatcccggattgaggaatcaccctaatctcagatggtctagccctcaacaacaacaacgacaacaacctgctccttgcttccaaatgctgctagtccaagtagaccatacgttcctcctncagggcagcaacaacatcaacagcatcaacaacatcaatagagacaagcatccactact

SEQ ID NO: 62564 - DNA, 372 bp, Glycine max
aatgtgaaatattttactagctttgaaacctagaaagggggttactacatgtattgaaatagaaactaacttacttgaattggttcatagtgcatgtgatagtcatgatgtattaacacgtggtgggaagagatactttattaatttcatgatgatatctccaaatattgatatgtgtatttagtcaatcacaaaagtgagttgtttgattagttcaacgtttataaaacagaagtataatatctattagaatgaaaataataattcttcgttcttattgaggtggagaatacacatcattaattatgagtaattgttgcgaatgcatgatatttttcatgaagggacaccttccgttgctccacaatctaa

SEQ ID NO: 62565 - DNA, 457 bp, Glycine max
  unsure (1)..(457): unsure at all n locations
agctntnttgcataacttatactttcatgttttgaaanataannnngaagattttctggaccttcattattatatctcatatttntaagcatgagagtggatgatcataagaaagtaaagtattaaactcctgcttctggatataaacagcaataaaattagcactatcaagatggcataactttggcattattataattattggcacttanacatctgtgttctatttgtaccttgataccagcctcaaatatttcaaaagatgcgagctgatcttgcttccatgtggagtcctactagcagaacaggaaacccgagaaattatcaataaaaggcaacttgatacatntggacgagaacagttcaactgctttctgcaatggatccttgacattcaatgaggatgtanataggaaggtaagaaattttaagtgcacgggtcaatacttcattctac

SEQ ID NO: 62566 - DNA, 495 bp, Glycine max
  unsure (1)..(495): unsure at all n locations
ggacacttgatactaagctgtacaatttattccggctaggggttctttgttattatacattctcttcctaagaatgaataaaatgtttctcgaacacagagagagattggatgaatattataagagcaattgtgctaattcacgttcaacgaatatcactttattcacaccacagacccggagttagacaattcttctgggttatgaactttatacaggaccatacaaataccatgcatgaacatgtcggtgatggattagaaatgacagtcacaacatgtttttttttgtttacagttcttgtttatgtcaggcanattgctatctgtacaatgtaagcttgcagaatgcatgggttggcatattattaccgagctcgttcggcaccaagtgggttgaaagtcttctgtttcccaactgcatctggaatggcctgttcccgataatacttccttctcttgagcttcctgatcatcctgatctttttagccgttg

SEQ ID NO: 62567 - DNA, 414 bp, Glycine max
aagctgacgaagctcgtatagatgtggtgcctcaaacttatctcttatctaatgaacccaattgtactgtgaattatcattcatggtggataagaaatatttcttgccatcatgagtgtcataggaaatggtccccgaatgtcacagtgaatcaagtcaaaaggcaactcataaaaattatcatgagaatcaaaagacacaaccttcaaattttgacaaacgacatattgagcaataattagatgacaaatcatttggaagatgaaatgaaatttcattgctcacaattattagaacattgactgataaatgtcccattctggcatgccaaacattgacttctacaacattattacattgactcaacacaacattgtgcatggaactacacgcatatttcttgtgtggatggaa

SEQ ID NO: 62568 - DNA, 486 bp, Glycine max
  unsure (1)..(486): unsure at all n locations
ttaagtcacctgaggcatgcaagctntgagacgcatgtgatctttnggcatcttcatatcatcggcttgatcctttgnctacaaatatttgttgggtcatcaattcacgatcctaactgatcactggagtttgaaggaattgatgtcacaaggggcagaccctgacaacacttattgacaaactattgggttttgactatcgaatctattgggcaattattggtactaaccactcctaatttcatgttcttccaggacctaaagagtcaattacatattcatccaaaatatgtggcctttcatgcaaaaatagaacatgaccctcacaatcatctagacggtgccattgtccaagacctgattctacacataggacgaatttgcttccaaagggattctgtttattaaactcacctcgaaaattcactctacacatcangagtcacatgggatcacaaaactcttactcgataacgatacttacat

SEQ ID NO: 62569 - DNA, 451 bp, Glycine max
  unsure (1)..(451): unsure at all n locations
taagctttacnaagggttgccccatatatttctatacttgtagcactcacttattgagttggtgaggaaccatgttccttcatgggaagatgcccaggaaatgagttttcagaccttaccttgctcaacatactatacaccactaatacatatgttnttgttctttatacaggtgttgaggaaaaaagcccagcgtttcaagaacctctggattngaggacaaatccttttcaagggggagggaatgatgcaatcctaccctgcaagggcattggatagacaactccaagtagattgggccagagatgcaagtgaaggccctacggttcttatgagccttatggtagatatcgggcccatgggctaagtacgagcccacttatctatgtaaatattagattaagggatcattattcttgggccttgtatatacggctccataatgaaggta

SEQ ID NO: 62570 - DNA, 413 bp, Glycine max
  unsure (1)..(413): unsure at all n locations
ctaagcttagacacaagcaacatataatctaggtatccaaaatccctttatttatggtatttcaagggttgagaagcgaaattgagaatgaggtaatacttggagcaaactcttacctcacacaagtctattacatcaatgtaaacttgctcaaactggatttacacctaatattccaccgaatcaaaattttgacttctcaacactcaaatttgaccctaaaaatggctctttgttcacctttggcatttggttttctctctagcacagcccaagcttcctcataagtcctatatgacatntcaaactaggattaactcactttaacctccatattccactaaattcagatttggccttccaactctcaaagactcacttcttttgcactcataacaccatattctcacttt

SEQ ID NO: 62571 - DNA, 360 bp, Glycine max
  unsure (1)..(360): unsure at all n locations
ncagctngagcttcaacattctataactaagtatatatatttttctctttgctgcgaacattcgatatcactctaataaatccctaccggctccacgacatgatactggcagaaatgatgaatcctatagctagcaaggtatatgtaacactattatctttccttacgtatgtaagaagatatgaactcttgtactgctagccaacacggatactaataatcatagtcaatgctctgttcatcgccttcttgatgagaacaacaactcttgaggtactcgcacaacaggaagtaatagcacaaaaggtaaagagtcataacatgtcaagctactatcctattgacaaagaataaacctaa

SEQ ID NO: 62572 - DNA, 402 bp, Glycine max
  unsure (1)..(402): unsure at all n locations
cttgaagctagctgttaaatgtttgagataatattncttagtcctcatcactatcaattaccctaggttgagtgacacttgctctggccttatagtagtggaatccgagagggattcatacttccctttagccaagtagtaactgtagtcttaagggaaatgaaagactagttggcttttggccaaaccaataggatgagtatattgaagagatgtcttgccaacaattgtaatggttatacacattatatgcgtttgcacattttcgaaagagacacgatgcctatgtgccttggtattcaaaaaagccctcaagatagacataggtcgcacccttcttcaatcatttatccatgtatttgataaaaagatctatcgaccttgaaaagtgcatcctttcat

SEQ ID NO: 62573 - DNA, 289 bp, Glycine max
  unsure (1)..(289): unsure at all n locations
aaagagagaaaaaagaggaaaagaaggaaagaagggagaaaggggagaaaaaaagggaggngagaggagaaagaatgaaggagagaggggaaaaaggagagggaaggaaagaaaagaagaagaggagagaggagaaggaggggaaaggaagaagagaaaggaagaaaggaaggaaggaaaggagagaaggagagggagggagagggaaaaggaagaggggagaaaaaaaggggggaggaggcaaaagaaggaagaggaagggagggagggaaggaagaggggagaaaga

SEQ ID NO: 62574 - DNA, 271 bp, Glycine max
catatagaaccatggcgtgaaagacatttgctgaatcacagatcctaatgatgcctgacgagacgatttacctcgttggttctcctacggagactaagccacatactccagagatgcgacacccttcacgtgcatttcttgatccaggtgaaccacaaaaggatgctgctgctcatttccatgctatcaaaagaaatgggggttatactagagaacccgattctcctgtgacaagactcgtatgaacagctcatgacctctacaccctgga

SEQ ID NO: 62575 - DNA, 445 bp, Glycine max
agcttgccttaataccctacatgtttcctttttattatacgagctacaccaaggactgaccaccttgcagaccactctattacaacaacgaccccaccacactcctgttcatctttctcccctatgcagacatcgacaccaggcggcccataccgaccacgccttccatgctaactccacttccacgacccgaaatcatgcagcaacgctccacagtcttgtcggctccgcttaccatcagaggagacattatggggaagcgtgtagaccactccaccctacttgcctgtgagagcaatacaacaaccatcggagaccactcttctcttacatgctcagtgtaagtacagagtaccgtagaccatcttgagaaagtcttaacgacttacgagcctacagcgatcctgagttcataatgtttgatgttgagacaaaccacctgacc

SEQ ID NO: 62576 - DNA, 312 bp, Glycine max
  unsure (1)..(312): unsure at all n locations
cgtacaggtagatccgaagaagactggcctcatagcgataaaaaatgagaagagaagctattcctacttgggtgaagaacagttggagagcccgctttgactataggaggctgaaccaggttaccaaaaaggaccattctcccctgccattcattgatcatatgcttgaacgcctggcaggtaaatcccactactgattccttaatggtcgtctggttatatgcaaattactatctgtcctgaggatcaagaaaagaccacantcacctgcctcttcggaactcatgcctataagaggatgcntttcggtct

SEQ ID NO: 62577 - DNA, 476 bp, Glycine max
  unsure (1)..(476): unsure at all n locations
cttaacatcagaccacttccagggtgctggaactacttcacatggactngatggggcctatgcaagtcgaaagccttggaggaaagaggtatgcctatgttgttggtggatgatttctccagatttacctgtgtctactttatcagagagaaatcagacacctttgaagtattcaaggagtggagtctaagacttctaagagaaaaagactgtgtcatcaagagaatcaggagtgaccatggcagagaatttgaaaacagcaggtttactgaattctgcacatctgaaggcatcactcatgagttctctgcagccattacaccacaacagaatggcatagttgagaggaaaaacaggactntgcaagaggctgctatggtcatgcttcatgccaaagaacttacctataatctctgggctgaagccatgaacacagcatgctacatccacaacagagtcacactcagaagagggac

SEQ ID NO: 62578 - DNA, 471 bp, Glycine max
  unsure (1)..(471): unsure at all n locations
gatctctcatcacctgaggcatgcagcttgactcttgtggaggaacccttactctagctatcctattatgaatacaacanaccatanaaatttcatcacactcatagcaaatcagaaataaatggcgtgaatggtttatcattacagttacaacaaatcaaacacaagtggtgcacaaatcaaacatgaatggtgcgaatggtttttctttgcaactactatccacaaagtgagatagaggttagggattaaacaaatcaaagcacanaagtaataatgttatttgtagtgtgagaaaataacaattgaagattgctaaggcgcggaaaaaattcaattacacttctccaaanattgagataaagcttcaagattaagaaaatacaagtganaaattaanagtaataatgttatctgaggtgtgagaaatcacatttgaagatgggaaatgtgtggagaanaatcatgatt

SEQ ID NO: 62579 - DNA, 478 bp, Glycine max
ggtcactctacaagagttactgctatagccttctcatattcttcaaatattcttgtatctggagatgcaaatgcccaggttaataacttaatattaatattcattacatgcatgaacatggcaacaaatgcaattactatgtacaattagcttaccttttagatgaaaccatttagctacatttaataataactgatatatcacaacatatatgtgttccgtgtgttcagctattattacttttttggctaaaatatatttaaaatgtatcgaaattcaattttagttctggtaaaagtttaattaatacgctcttagtctgctatatattttatcaaaacacattgttatagtatgtgatgaaagattagattcacatcactgtcactaaatgtaatgactaacagtttgttaatttctatggaatttaatcaaattttagacttttatggataaacacatttatcctatttctttc

SEQ ID NO: 62580 - DNA, 469 bp, Glycine max
  unsure (1)..(469): unsure at all n locations
agctttacaacataatttatnatgacccattattctatattataataacttaatgccattaacctatggagataatataacttaatggctaagtgtaacagagattgtggcaaccaatattcacccccaacagccaacaagttagtcaccatttggtctcccaatagactgatgcctatgttgccaattggacccttattacaacttgaactatacctactaaagcccttttagttgattaacccacatcatatgtttggacagccaactttacaaggattgtgccattatttatacaaactaaatactctaaattgagacaaagcgttgccatttagtcctcctccattanggccatgatacaactcacacacacttggacttgtctccttgaacatacgcttgtatcaaatctatggacagacctgttaaaagcttcttggtttcctgcttaaccttgtatagccct

SEQ ID NO: 62581 - DNA, 405 bp, Glycine max
  unsure (1)..(405): unsure at all n locations
ctaagctagctcacatacctctctaatagctaagctcacctcctttatattagaagctagagcttagctacacacccnctataatagctaagctcacccccatgagaaaaaacatgaaaataacaaaaaaagtccttattacaaagacaactcataattccccgaaatacaatgctaaaaccctatactactagaatggccaaaatacaaggccttatactaaggaaaaacctattctaatatntacaaagattagcgggctcatacttagcccatgggctcgaaatctaccctaatgctcatgataaccctaaggcctttccttggatctctatcccaatctacttggagtcttctaaccaatgcacttgcggggtaagattgcttcattccccgtataagccg

SEQ ID NO: 62582 - DNA, 458 bp, Glycine max
agcttcaagataaagatggcctcagcaaatttcttattttcagaatggaattctatcaatagacctccaatctttaatggagagggttaccactactggaaaacccgaattgcaaattttatcgaggcaatagatctaaatatctgggaagccatataaatatggtcttatatacccaccacagtaaagagagtttaatagatggtagttcatcaagtgaaagcataaccatacaaaaacctagagatagatggtctgaagaggatagaaaacgagtacaatacaacttatcagccaaaaacatattagcatctgccctaggaatggatgaatatttcagggtttcaaattgtaagagtgctaaggaaatgtgtgacactcttcaattaacacatgaaggaactacagatgttaaaagatctaggatacatgcactaactcatgagtatgaattattt

SEQ ID NO: 62583 - DNA, 335 bp, Glycine max
  unsure (1)..(335): unsure at all n locations
cttanggatggaatacttacttgttggtgatgaacaaatcgctatccgaactataatgcgaaaggatacccttggctgcaattcctcatcccgcggtatgctttgaaggggaaaaagttttaatgtaaaacccccccttcgcatttataattgggcagggtgctcgccatcaagcctacttcccagcgactaaccgatttgttattatatattttttcgagggaattacatggtcctccctttatgattacaattgtctatcgactactaggtggaaagggtattactaattatataacttccttttaaaaaacatttttaatattccatcaagt

SEQ ID NO: 62584 - DNA, 311 bp, Glycine max
agtgatggtattattagtccggaatagtcaaccgtcccctatcctctagccttggtcagagataataaagacgaccgctgaaattgggaactgcctttttccacgtacctgttctgattgtcacctccatatatataactgctttttttctattgcactctcttactatctctctttgaattagggggtccactctatatcatccatagtgcccctccgaagttacttatcttaatggacactgatatctatatatctcatcctcttcaactctattcaatcttctttctcctgtatttttacctctaact

SEQ ID NO: 62585 - DNA, 454 bp, Glycine max
gacctatctcgatgggtcgatccacaaccccacaagcattgagcttgtatgcgtaagtgctaagtgtatcatagagccgaacctataaatattatcctggtaagatggtacaattttctaccaacaacttatcatgtatgagtaaatgcttaaatactgacctaacctaggactcatatacgtacctcggtcaaataatccatagtacaacaagtacttatctatataggcataagtgcttaatctttcttgatcaactgttccctagtaacatgagatttactttgatgagaatgacaccctaccccaacatgcatataaatgaataataaacataaaatgcgcgatctatataaagtcaatttcattcaatacaattgtaagtaaattcacatggataataggtccacatacgcttctctgttaccatatacaactcattagaaacatctcc

SEQ ID NO: 62586 - DNA, 324 bp, Glycine max
  unsure (1)..(324): unsure at all n locations
tcttaagngacgcagctgcacttttaattgagccattttttttgcgaaatatgaccattaattcacacgcttcttgtcaaccaacatcacgagatatgcccgtaacggactccggtgaaattaagacaattgattctcggagcatcgacgccatttctacctattcgataactatgcgccttaacggcacttctgtcgaaaagcgatgaccaattgaaatacatgagagcatacgatgatcaaagtcgagcgcttcgatgtaatatgcgcctgacacggactatcgcgtgacaataatgaccattgagtttctgagagctccgt

SEQ ID NO: 62587 - DNA, 310 bp, Glycine max
acacaagacactcatgtaatctagagatgaccctctatcagagatgagttaagattgatcacgacacttccggtctcccgtagttgatttaaaatttgaatcagttcaagattctggtccacatcacatcaagatcagactcagatcttatcaagagaagactcatcagatagtgttataattttcaaaactggtgccatgattttccaaaccttgaccagattttacttctggatcgttaccgatattgtatcctaccagtgcaatagattcaaagttcactgaatacccgtcattgttcaaagtttat

SEQ ID NO: 62588 - DNA, 82 bp, Glycine max
catttggagagacggcagacatctgggaaatttccgaaacagagcattttagtagcaacatatgcaacactaggcacttccg

SEQ ID NO: 62589 - DNA, 414 bp, Glycine max
  unsure (1)..(414): unsure at all n locations
catgcactatcaanaacaagagaacagggcagaggcagaaaactctgcccaaaacacaaaccaataccacaactttccttactcacataccccagtaacattctcttcgttccaatttgttcactgctggatcgactcacaaatattactggaggtccctagtacataagtctacattttgaccgttgggatctgctagaaaacgtccagaacccaatatgtactacccttttccacaaccagcaacacacaacactttctgcacaaacacaattttctgtngcacaaaatttgacagctttttgctacacaaattgggcagatttcgaaatcccccttgccataatccacattnttccaaatcggatcctacaagtcctaaatcaagtataaatcatacctaaaccaaagaca

SEQ ID NO: 62590 - DNA, 487 bp, Glycine max
  unsure (1)..(487): unsure at all n locations
ngtgacatgaggccattaagtgcctctgctccattttattattaagacgtgataganggtctccttgccttagtcctttctgaggtaggaactcagctgagggactaccttcaccaaaaatgaaacagatgctgattntatacacccctcaatccattgaattcatttgctgcaaaagcccatcctacccatcatataagtgagaaacttccaagacacaaaatcatatgccttgtcataatctacccttaagacaatgcaaggcttttggcatcttttggcctcttcaactacctcatttgtagtcaccacgctgtgtagcatatgtcttccttctataaatgctgattgcctctcatgaataataaaatgcatgaccttcttcaatctatttgccaatattttagccactatcttgtatgtgcatcctatcaatgatataagattgaagtcattcaacacttgctgatacactagtttatggatt

SEQ ID NO: 62591 - DNA, 438 bp, Glycine max
  unsure (1)..(438): unsure at all n locations
tactctgcagtattgactggcaatttttcacccggtcttttctttcatcatgccctaagaaccattttgattaaaaataattggacctaatgggattaagcttaccgatattctttcttttacctacatangcccaaagaggctagatgtggcactaccctacccaggctagatgggggagtgagactttctattttcaaggaacattgattcttactttaatatttttcttcatatctagaaacaaaaaaaaaagtgaatttttgtaatagtattgtcaatttacaataacanaatcatactaaccagaaatggtataagcacaatctatgtctagctcaactctttcacaatggatccctgtgtggtgtaaaanaaatatcaagtatttattntaaaaaacccatctagaatcttcaatatattttaaatttcttt

SEQ ID NO: 62592 - DNA, 482 bp, Glycine max
  unsure (1)..(482): unsure at all n locations
tagcttattcaatacaatataactaataattatataatctatntagctggctagtaaatgtataccagtatgtatgtgcatggctgcacataaatgaaaatgaaaagaaattacatgccaaactaccgctctagattaaaaagcataccaaactagcaatatatcacttctcacatgacttgcatattnattttatataaactnttaattctatattaatatagggtcatgcatgggtggtcctattaaactaacacataaatacaaaaagaatattgaacgtgccggtaaatggtacctagagaacatacaaaaaactatntacatnttaaaaatccctgtattgtgatataattccatatatatatatatatatatatatatatatatacacacagcgtctcttgttgccttaaaaaaactaatgctatttcaaataaataagaatggaatgttgtaaaatgttgaggtattgtagaaat

SEQ ID NO: 62593 - DNA, 52 bp, Glycine max
aagtcaccgcgctccgctgggtgctatgagtgactactcttatatttgtttt

SEQ ID NO: 62594 - DNA, 463 bp, Glycine max
  unsure (1)..(463): unsure at all n locations
agctngtaagtatnntgtggataantnttctgttccattatgctcttaatggctttagaggntatttcctcattgacatcttttgtcttgaatggaattgccatgacaggtttattgttactgtctttgatgtttggtagttgatattgtgttgcgggaggtaattccgattggattaactcaccatccttcacttgccaatttngtatgacatttgttgttggatcacctatgatgtcttgtttccaagggtaatctttgtgccatcagaaagggtaatcttgttagatcacaaaggatatagattgccatcagaaagggtaatcttgttggatcacctatgatggcttaagatattaatctaccatagcttanactntcatatggaatatctccattggcagattgactacnggatttatctctaacctctgtctcctaatgtcataccctaatttcgtct

SEQ ID NO: 62595 - DNA, 428 bp, Glycine max
  unsure (1)..(428): unsure at all n locations
agcttcttggcaatcctcattccagcgatcatgttgtgttntgcgtaagagtntgaacaacggctcacaaatggcggtgagctgcgatatgaatctggaaatataattcaagcgtcccaggaaacctcagacttgcctctctatacggngttctggcatctcaaggatagccttcaccttttcggngtctacctctatccctttctggcttacaacgaaaccaagcaatttccctgatttgaccccaaaggtacacttagcggngttcaaccttaattgatatttcttaagcctttcgaacaacttccgcaggttgacaaggtgttcttcctcagatttagatttagcaattatgtctgccacgtagaccttgatctcttgatgcatcatactattgaataaagctaccatggccccgtgatatgttg

SEQ ID NO: 62596 - DNA, 484 bp, Glycine max
  unsure (1)..(484): unsure at all n locations
tctatcaagtggtaatcagagcacatgagcttcaagtatgttcttcttaaacctccattatatttttgctgtaccttctcttccattgttgtttcttcattttttctccatgtatctcccacatgtattgtgctaaatagttttaacatgattctttagagtttacaccaattaaacttgctatagaagctagattngattttcctatggctcagattctcttttcttggtcttgaaccatgaattgtgctgagtttaagttcctttgagttttgtcttgttattttctgtggctgaaacccaaaccataaaattcttacgaaaatattatagtagaagaaaacctcagaaatctatagtgacttgttcacctattggatgtacgtcatagacgtcatgtctagtcatgaaatctgcacataagatctttatgttggctgaatttattgtcttattctcttctaaccatttgtcagagtgatga

SEQ ID NO: 62597 - DNA, 394 bp, Glycine max
  unsure (1)..(394): unsure at all n locations
taagtcacctgaggcatgcaagctngtaaatatatatatatatatactcnctattttttcttatatatgnctttccagatccatatcatnntttcttataatatatatgcttatggctgatttttctttgtgtaaaatatgttatgagaaggtgtcctttataactctttagttatatttaaataaaataaatttattttatctcattcttgacaatgggaagtgaataatgaatactaaatatcttcgctataggtttttcctatcaaagctgaattgctgaagccacatgaggaaatggaaagacacatacctgatctcattanaaaaggtatatataattgtcttccctcatttatttntatgacatcagttgctaatctattagtgttta

SEQ ID NO: 62598 - DNA, 280 bp, Glycine max
agttaacacaagtatcagagtattactttctatagaaaaattagtaaaacaatgttacctatatttaagcactcatctaagtatacgcattggagatactctatgggtttgactacactgagaacagtgcaacgttgcatcccttccaaacaattggaaatacatgatgggatcgaactcatagttatagaatattagaatttagaataatgcaaatagcatcccttcattttttaagagaatttttgttattgattccaaggcatatgcactgcacgtt

SEQ ID NO: 62599 - DNA, 462 bp, Glycine max
  unsure (1)..(462): unsure at all n locations
gtagagcttgcaagtgtaaaaattatatgtgacattgaacaatacttgtaactttaatgagttagtgaaaacttggtaattgtccacaactggacatagtcttgggaatgagacgaaccaatataaattccttgtgttttttttgttaactaataaagnggtttgaatttatttataggtcttatatcttcttttgtttttccaaagaaatctattnttttcatcgtctgatacaatttgtatcanaacctctctaagtgttttagagaattatattcattagacgataaatgtattttccagtcttaaaaaaattntaaatttctaaaacacaattcaaccnctcttcttgagttatttgcttctacatgactaactntannattatggatactctttaataaaattnatntatgacaatactaattaaaatgaaccaatttaactattttattggtattg

SEQ ID NO: 62600 - DNA, 399 bp, Glycine max
cccctttatatccaaccaagtgtgtcttatatattagatattcacaaatctaatatagccatgaaatgaattctcaaataacataatatcaaactatgtgtgttgttttttttttgttaataacaacagatataaagtgttaaaagaatgataaagaacgtataagaaattaagactgctaagacctaattttattcaaatacaaggtgatgtatctataaacctaataataataataaaaataactactaacaaagagataaaatcactaacagatcatgcctaaagaataggactaaaactgctatatcctattagtcaacatgacttttattatttctaaaaaatagcataaaaatttgatctactatagttcgtttgattgttccaacagtcaca

SEQ ID NO: 62601 - DNA, 276 bp, Glycine max
  unsure (1)..(276): unsure at all n locations
gattttatttttttgagngcgttgtctctacacgaataaaccactgactgacagcaagaaatcctatttttgggcacgaaacgcagggaagagggcgatcttatgaatgtgcacccctgattgttccatgggtaccagactacagttggaccatttaaaagcaaaaatacggggaacaaaacatctgggggaggactataagaccaaaaatccatacttttttttcaggccaaaaaagaactgacctcacaaattatggcggacgacaagaatgtg

SEQ ID NO: 62602 - DNA, 433 bp, Glycine max
  unsure (1)..(433): unsure at all n locations
atacttaagtcacctgcggcatgcaagctntntggagtagaaacatggaattctctcatttatttcanaaaaaaggttgtatctagtcaaggtctgagagaccatacaagtttcctagcgatttctaattatgtgggccattaagtctatcatatgttgacaatagccgagaagcccatgaatctcttcgggggcggagtaggtgtccgccatcgccttggccttggctaacaagcggngaagttcttgactcccgttcaaggtaagagcaaaccgatccatccacatggttgcctcttggtgtaaagagtcgatcacccttcctctagcctctttntccgcgtatacttgggcatactcgtccgcgatcctatgctcgtgagccgnggctagacctaactcttcttggactnggcgatgatagctagcatgg

SEQ ID NO: 62603 - DNA, 440 bp, Glycine max
ggctctatattacatagatgtttgatatatgggatgatgttgtatgtcatttttgtttttaagagtagtgtcccactggtaaaacttacttttcaaatgtttgccttcgcagagatggctccgaggaagcttgcctcgaagaggtccaggaaggacaaggcagccgaaggaactagttccgctccggagtatgatagtcaccgctttatgagtgctgtacaccatcagcgcttcgaggccatcaagggatggtcgtttctccgggagcgacgcgttcagctcagggacgacgagtatactgatttccaggaggaaatatggcgccggcggtgggcatcactggttactcccatggccaagtttgatccagatatagtccttgagttttatgccaatgcttggcccacagaggagggcgtgcgtgacatgagatcctgggt

SEQ ID NO: 62604 - DNA, 417 bp, Glycine max
  unsure (1)..(417): unsure at all n locations
ctgcaagctganggtaaagtctacgattgctttttcttatgcaaaattgntagccgnggctatacgagacatcttgctaaacaaagtcaggttagcgataactcgcctatgctttttcttccatgctatatgtagcaaagtcattgatcctgtcaagtttgaggaagtggaaaattgaaccgcaagtatactgtgccagttggagatgtattttccccctgctttctttgacatcatgattcacttgattgtgcatctgngcagagaaatcaaatggtgtggtcctgtttatctacagtggatgtacccgattgagcgatacatgaagatcttaatagggtatacatagaatctatatcgtccaaaagccgttattgtgagaggacattgcagacaaaccattgaatttgtcatata

SEQ ID NO: 62605 - DNA, 427 bp, Glycine max
  unsure (1)..(427): unsure at all n locations
tgcttgaatgaggaagngttaatgtnattttttctgctnttatncgntgaccacagagtggtacctggagatatatcgcggnggtcaagagaccttggggacgtcatgtggtgtgctatttgccacaaccaaacttgaccaatcccgacccaacccgggcatagtcagtcagtgagaacctgtgatgtacctaagtaggcgagctcctggcagtcaacagataaaaggaacaaagaccacaaagcaaggatgcttgtgtggtggctggcccagctgtgaacttgatngatatatgggatatggcctctggtaatcgattaccaagggtgggtaatcgattacaaggcttaaaaatgaagacaggaggctaagatggtctctggtaatcgattaccaagggagtgtaatcgattaccatgctttgaaa

SEQ ID NO: 62606 - DNA, 454 bp, Glycine max
  unsure (1)..(454): unsure at all n locations
gcttttatccaggctcatctttggggtgaatcttcttcttctatgacttattccctagtggatggcgcctcctctctcctattctcctttgtctttcactgcatattcatgtggaaaatcactcattaaaggacctcattgaagcttatagatccagcctccatagaagtaccacaagcaagctttcatcacctatgatgccaccaccaagaataatctatcttacttaacaaacaactcagctcatgaaatgattcatgttcaaggttatgcatatagatattacctattctttgtccaatatggacaacctcaccaaacatagcttcacttataagacaacaattcttgttgaaacaatgttgaagcctttgtcacatagttggcattacttaagaggtngtgcttcattccatccacatatagaacattctttatttgaggtttgtactga

SEQ ID NO: 62607 - DNA, 291 bp, Glycine max
tactttaccaaggcttattctttaatttttccttcgatagcccttatgagccttgattccctttccttgtattgaagctcactacaagccttatgtgaaaaaccatgatattaccatatccttaaggaatattggagctttggaattcgtctgggaataaacgtggggggattttgattcattggacaacttgatttcatagctatgcttcatgatgtattttgggccatacttgatgtacattgtatgattggttaaatgctggacatgcttgaatgaaatgtttgttct

SEQ ID NO: 62608 - DNA, 449 bp, Glycine max
  unsure (1)..(449): unsure at all n locations
ccgaagangcanagnngcttacacgcccaactccttgatgtgccttggacggatgccaaatagaaagntgcagcttcagccatatcatatcccttcttcatcatgcacatcaagagtgagttagaagaaaaatttagtagttagacaagtttcctctgaaagccaaactctctatattaatagagtaccaccctatcctaatccgaatacacaagtatttctgaagcctccacaattatgtctcgtatccagttaatcgattacaaccgtatcgcaatcgattacatagttggtctcggacaacggaatgattattcacgagtctctgctttaatcgattaccatgtgctataatcgaatactctttcttccacaagtgtntcagaagtgaacacaaacattctaattgataactatgagtatctaacggatcacatcattcttgagtt

SEQ ID NO: 62609 - DNA, 423 bp, Glycine max
  unsure (1)..(423): unsure at all n locations
gaattaatattataaaagtggatttaaagaaaataatactggatataaaagaattgattttatttaaataatataacagaatcattggtgaagtacaggtacatgaaatcctaatcacatatttagactttcctagtttactactgatgcaaatgccattcatagtttgacattcctattaaatccaacgtttctaaatttttatttggcaaatttatattntntagtcttttaagtttaattgcaatattatgaattatgataaccgaatatgtataanaaaatgataacggatttgtgtaccgtgtactggaaaaaatggtagatttcctactgtgtntgttattttatcaaaatatatcccaacaatgtntttttccttgagtggtcatatcatttcactaataagaacattaatataat

SEQ ID NO: 62610 - DNA, 436 bp, Glycine max
  unsure (1)..(436): unsure at all n locations
gaccgtggattcatgccctgggagtggttccttcatcgcttcaccagatattgaagttcgcagtgggtggactcttattgatagtgtcnggtgaagaggatatgttatgagctgcccctcctccgctgataggatatggcccggccgtattagccagtgtttcaccagcgctggaatggtgtncgatgaggatgtggccgcgatagaagaggagtttcctcaagacccaccaagttttgtgaaccatgccaccccgattcccagtggggaactggcgcgtgataagccagtcagaagtctataccgccgattcaatgtaattagagcctatagatttccgtcctctttggttntgtgaaacctaccttattaaataaacaaagagatcttggttcatctgttcttgcagtaccacctcttctcatatcaatttgca

SEQ ID NO: 62611 - DNA, 183 bp, Glycine max
  unsure (1)..(183): unsure at all n locations
agcttgtgtggcgcacgtgcggtactcgtgcttacgngttatcttgtggagtgcgcacattctggagatgtggtgtgtggggctacatcatggagcgaaaatatagggcaccatttcagctccccaagttaccgaagagttctccccactctaaatggagtggacgtttgattctgattgtca

SEQ ID NO: 62612 - DNA, 429 bp, Glycine max
  unsure (1)..(429): unsure at all n locations
ctaagcctgtcggtaaagtctcacgatngtcacgtgttgatgcaactattgttagccgtggccatacgagacanttttcctaacaaagtaaggttagccataactcgcctggtgcttttcttcctgacatatgtagcaaagtccttgatcctgtcaagtttgatgacctgcaaaataaggctgcaattatactatgctagttggagatgtatattcctcctggtttctttgacatcatgattcacttaattggtcattnggtcagagaaatcaaatgttgtggtcctgtttatatgaggtggatgtacccggttgagagatacatgaagatcttaaaagggtatgcaaagaatctacatctgtcggaagcatctattgttgaaagttacattgcagaataagccattatcatttgttcagactacattg

SEQ ID NO: 62613 - DNA, 322 bp, Glycine max
  unsure (1)..(322): unsure at all n locations
aagagtgtcttggataataatcttacatatgaagcttcaatgaaggaagagaatgagagagatagagtgatgcncnccnnccccntcntggcgttgggtacaatactcccataaaatttggctagatacgccagtaaaagccctactgttctcatgaaccttaccgtcgatattatgcccatgcctaggctaagaatgatcctacttatctttgatattagactactgctcattattcttgccctcgatctatgctcctcataatgatggtacctcgactatctctcttctacgtctttcttcttcgccttactttattttg

SEQ ID NO: 62614 - DNA, 457 bp, Glycine max
  unsure (1)..(457): unsure at all n locations
tactaagctnacaagaaagcttccataatattatacttagactatccttatttatgatagcttttcaattggaaacccaagattgctaaccagacctttaagtcagatcccattctttattgctttattatagcatgcactctacctttgtagtggataaaaccacaatgggctaagagtttcttccactatcaaagaggtgcaatcatgattgcgtaccttgtcatagttctccttgcatccaaatctacagcatagtcaaaatctaaataaccaacaagagcactagacgtgtctccatggtagacaagtccaatatcagttgtacccatnagtacccaaatatacatatcacaacttaccaattgtcacaacctacccttcggcgggaaagcgacgcggtgctcacgggtgtgtcatccaagaaaggaaaatgcgcggagtcggcaccaacgtt

SEQ ID NO: 62615 - DNA, 520 bp, Glycine max
  unsure (1)..(520): unsure at all n locations
acactatgaaactaagcttctatccaaagctcatcctggtggtgaagctccttcttctctcgcttattccctagaggatggcgcctcccctctcctcttatcctatgccttccgctgcatctccatggtgaaaaataccattgaaggacctcattgaagctcaaagatccagcctccatagaagctccacaagcaagcttccatcaagtggtatccagagcacaaagagctntaagttaggtgctccttaaacctccattaattntgtgctttaccttctcttccattgtttttttcttcatttttctccatgtatctcctcacatgtcttgttctaaattctggtaacatgattctttagagnttgcaccgattaaacttgctatagaagttagatttgagtttctatgggtcagatttcttgttcttggtcttgaaccatgaattgtgttgagtttaagctcctttgagttttgtcttgtattatttgtggctgaaacactaaccataagactcttac

SEQ ID NO: 62616 - DNA, 420 bp, Glycine max
ccctatctataacatccctccttcgtctggaccgaacataaacatgttgctgctcagtgacactcctgactaatattatgcagtgctcggtcagagtgtatgattcaattccagcagagaccatcctcatgttgatcatgtgtcccaaaatttttgctatcctttgccaagcatcctacaacattgacaacaaagtaaaaaataattatgggaatcttgacacaaaaaatgactaatagtgaattgaaataatattataccactgtgtgtcgaggcatgtctacatcaacagttgcaggtgcaggtagttctatcataactgctgtgtggacgggctgctgaagaagatatggtacaataaatgtatcatcatgcaccacacgtggatgtctatgaggctcctttgatggttcaactcat

SEQ ID NO: 62617 - DNA, 297 bp, Glycine max
  unsure (1)..(297): unsure at all n locations
ttaagttcatgtgcgtgagaatttcatctcttactaattactttgaaaactcatatcacaaaatgattgataacatgagtcaaactatcaccaatatanactcgacttttggatatgttctactaaacaaattcacatgtcgatataagtgccttattgaaaatcaacgaagtctctgaccatttttttggggggggggannntnnnnttntnntntntttttatatctttttttattatatatatattttatttttaatgaaaatattgtttcttttgtgtagatttaatagatta

SEQ ID NO: 62618 - DNA, 453 bp, Glycine max
  unsure (1)..(453): unsure at all n locations
gcctgtaatgcatacttntcctcttgagttctgacgaagttctttggttcttttctatcagtgaaatttctgatatttgatgttgaagtagggagagatatctggaaaaagaattctatgattgatattctgagttggttatgtgtctataattagaaatgaataaaaatgtagctggaatctttcctttggatctatatttacatgttgggtgtcatgagagtcatgctatcttagagtcacatttgtgaattgccacatgggagctccatgagccgaatacatgtcaagctntatgaaataatatttgggttagggtgacttgtaaataatcataaactacatgtttttatattactatgaagccgatctcaaagatgcgacatgataaaaaacgacaaatgatgcatagccacggcataatcataacatatgactaaaattgtgagagga

SEQ ID NO: 62619 - DNA, 344 bp, Glycine max
  unsure (1)..(344): unsure at all n locations
agctttgcatgcgcgaaggttctagagagatatatgtncaagttccggagagttctgagagaatttgctatgtgaagatctacagagacgcgagttttgaagtggaaagccgtctgagagcttgagatgagnttgcgagtgattgtgagatcctagaggtgaaggagacatcctcaccacttgtgtntttgcagnctttcatcttggtcttctctttgttgaaagganggttctggactatggaagctaatcctctgttgatcttcctgtcgtacctgtggaatatattttatctatgtatgatgttatggcgtctctggcttctgttttatccaggttgttta

SEQ ID NO: 62620 - DNA, 423 bp, Glycine max
  unsure (1)..(423): unsure at all n locations
agctctcgagaaattcanattgttataacttttcactcggatgtccgaatcaggtgaataatatatcgagacactcgatagtgaacaccggaagctatcagaaattcaaatggtcattagttntcactcaggtatccgattcaggcgcataatatatcgagacgctcgaaattgaacaacagaggctctcgagaaattcaaattgcctcacttttcacttagatgtccgattcaggcccataacatatcgagacgctcgaaattgaacaacggaagctatcgagaaatacaaatggtcatatactttcacacggatgtcagattccgggaaataatatatctagatgctcaaaattgaaaacggaagctctcgagaaatcaaatggcataacttttactcagtgtccgatcatgcaatatata

SEQ ID NO: 62621 - DNA, 487 bp, Glycine max
  unsure (1)..(487): unsure at all n locations
agcttgtatctgtaaaccaatcaattattgtcttgtatgctntntcaagacccagntctttgacatntttggattactttgtttgactaaaccttcatgctgaagtatgtatggaaaaactttattactggtattcaacacatacaagtgaacttgtaacaaatcttctacacttggagtgataacatgcagtcctcttgaacctttatctcccactctgtcgtcatgacaagacttatgaaggccaacaggtttagccttttcaatgtactctgaacaaaattcaatggcttcttctacaatgtacctttcaacaatagaatgcttcggatgatgtagattcttggtatanccctttaagatcttcatgtattgctcaactgggtacatncactgcanataaatangaccacaacatttgatttctctgaccaaatgaacaattatgtgaaccatgatgtcagagaaagcaggaggataatacatc

SEQ ID NO: 62622 - DNA, 432 bp, Glycine max
  unsure (1)..(432): unsure at all n locations
ctcagcttatacaatggagcaaaagatacaagtatcattcattgtattctttgtggtcaaaagagcctgtgtctatacaattcatggccttcatcatgtgttgagttatacaaatcattcttaattcagagatttatgcaaagatcattactcatatgtagtcgttcactcacagagtaaggtcacattcttaccggtgtgtggttcaagctttttttcacaatcagtctgtctagtgactaaccattctattatatagtcacactctagttctttctttgttcaacatgcacanttgctcaaatttatgaaaagaaacacacatctcatcataagcatgcattcaatttaaaacaaggcgtatcaccattttcacaatataaataaactacttcactggcataccatcaaaagttaaagtaaattggtcgc

SEQ ID NO: 62623 - DNA, 482 bp, Glycine max
  unsure (1)..(482): unsure at all n locations
agcttgtgtcttctactaactacaatgttaatattttcatcanatatttgtattttacaggataccaataccaaggcgaggattggtacagntgaagtgagtcgcggtctctatcagttcacacccgaaacaacaaaatcacataccatatgttccactattactcacccaaaatgtaaagtcattcccataaacctatggcactttcgtatgggccatccttccctcgaaaggttacaagccatgcagtcctattaatccattttgaacaataacaaaaacttcatatgtaatacatgtcattatgcanagcataanagattacctttctcttctagcatctctcatgcatcanatanatntgagctnttacatatncgatattaggggccatgttcaaagacatccatgcatgggcatcactattttttaactatcatagatgactactctncgtatacatggactcatctcatgcacac

SEQ ID NO: 62624 - DNA, 499 bp, Glycine max
  unsure (1)..(499): unsure at all n locations
tagccgattacgtgttcgcctgcgaaaggatagaactctgtttgataagatgcaaatttcataatcctattttgatgaataagaagcctgcggtaaatggagagaataagaaagaggaggaactcatgctatgactggcgttcctacaatgccaaattttccaccatctcagcaatatcaatatctaagcaataatagccctttttatttctcatcaccctatcagctaataacacccaatcatgcacaaaggccacgcctaaatcaaccacaaaacttgcctgttgcacatccaataccaaacaccaccctttacatgaaccataacaccgaccaaggaaagaattttccagataagaagcctatagaattcaccccaattcctgtgtcgatagctaacttactcgcatatctactcaataatgcaatggtagccataatctcagcaaatgtttctcgacctacatcttcccgatacataatgtgcanagtctaattg

SEQ ID NO: 62625 - DNA, 378 bp, Glycine max
  unsure (1)..(378): unsure at all n locations
agctntagtgactatgtgtgactcacttattttatattgagtgtccgcatggatatgttctacgattggttttgcatgaatttctaattgtcataacatatgattcatgaaattgatatgggcattctttatttctttacattttaagccattggccaaacagttttcccaatgtacattattttttccatttgtaagccctttgagccagacactctcattttatcggaatactaaacctatgatgaaagtttcctaccttaccttatgataggagagcaggagtattttcaagggatatttctatcattcttgtggctacgtgtgggttctgaacgacgtaatgcctttatcacataacctatcactctaaaatat

SEQ ID NO: 62626 - DNA, 458 bp, Glycine max
ataacttatacagaatgaagctctgatccacttgttttatctgtggcctcagatatcttaagaagggggggtgtgaataagatattccaaactacttgcgcaatgagaaatgtatgtcactttctgtttaaagtgtagattcccttaacaatgaacttcttatatattaatgtcaataaaacacatttggatattgaatgttaagcaattattatacacatggagattaatgggaagagaaagtgcatactcagatttttactggttcggccacacccttgtgcctatgtccagtccccaaggcaacccgcttgagagttccactatcttgtaaattccttttacaaggtctgaacacacaaggacaatccttcctttgtgtgtagagatcctgacaacaagagacccacgggcttttaatccttagagaatgagtagaagaagacgagtgaatctct

SEQ ID NO: 62627 - DNA, 365 bp, Glycine max
agcttgtaatcgactaaacttatacttgatttcttctctaccagcttagaccaacttgggtaatcgattatagcaaggccgtactacattaaaacagaaagcttaacattagaagaaattgtctaacttcagaacacttctctttactcctacatgatcatgcatgatacatatatgaaatgacaaagactaagatgcaacacataatacaacaatctatacaaattcgcactcatgttagttgcgcatgtaaaacacaaaaattcttcaagctcttcttctcgcttcaaggctaacgcttcatgtttctccctctatctctaacaatcttccccttttttggcttgatgatgtgaaacttgaat

SEQ ID NO: 62628 - DNA, 439 bp, Glycine max
  unsure (1)..(439): unsure at all n locations
agcacctgcggctgcagcttacatgcacagcttcaaacgagttagttttctataatgagatacagagaggccaatattaagaagaaaagaaatggaaaatacagtactttggtgaagaacaggaactttcctccttcttagtttgtctcacaacaaaggtaaaatccttaatatccttatcggntacttgcgccccgtcttttaatttatccattgctgaaatgaatgccttgaaataaatatatttgcatgataaatatgtctgttcctagcttcttntttttattatcaatttgatacccacaatatattataagattcaatttgacacccataatatattaaaattnttaattttatctcactttttttgtaaaattaatgtaatctaccaatcatttangaacaggccattattattcttttccgtccaataagt

SEQ ID NO: 62629 - DNA, 408 bp, Glycine max
  unsure (1)..(408): unsure at all n locations
cgaagaattctctttgcggctcttatatgaggagaggtatgagcctccataaagcgacacacactcccaccgcatatagaatatcgggccctgtattggttagataccttaaactccccacaagactctngaagatcgtggagtctagcttctctcctcatcaaactntgataacttcaagccaccttccataggtgtgttcacgggactgcaatcaagcatattaaatttcttcaacacttcttttgtgtacctttcttgtgagacaaagataccattctccgtttgcttcacttccattcccaagtaatatgacatgagtcccatatctgtcatatcaaattcacgagacatggactccttgaagtcttcaaacaaatatgggttattggccggtatagataagat

SEQ ID NO: 62630 - DNA, 366 bp, Glycine max
  unsure (1)..(366): unsure at all n locations
agcttcttttggaccttgaacaggcaatattcttctttttataaccatgccatgtgctcgcgactggtccctttcttcccttcgcaacttgagttcactattgctaccccatagagctccgcgaaatttggtccggccatactcttncttgcgagccctcttggtctcttgatcaagggctcttgcggtaattgcattcccgtaacccggcgcactccttccgaacgtgtgtagcagccaacttgaacttctccttggcgaagtttgcctttcctaactcgcttttgagagcttggacttcttcctcctcttccggtgcttcaaaatccttttgctgacgactttaacttggcgaagccatttaaa

SEQ ID NO: 62631 - DNA, 511 bp, Glycine max
  unsure (1)..(511): unsure at all n locations
aatactaagctntgccaattagttntcgccggcgataggatcgaagtgtgcttgataatatgcaaatttgattattctgctttgatgaataggaagccttgggcaaatggagagaatgagaaggagcgagaacccatgctgtgactgccgttcctatgtggccaaatttcccaccagctcaacaatatcaatactcagccaatattagcccttctcattaaacactgatggaagctngcttgtggagcttctatggaggctggatctttgagcttcaataaggccctttaatggtgattttccaccatggagatgtagtggaagacaaaggagaagaggtaagaggcggcgccatccactatggaataagccatggaagaagggagcttaccaccaagatgagccttggataagaagcttggagaggatgcttcaatggatgaatagacaganggagagaaagagagagggtggagcacgatattgactgaagataaagggagagaagttg

SEQ ID NO: 62632 - DNA, 414 bp, Glycine max
  unsure (1)..(414): unsure at all n locations
tcttggagataacttncttgagaagctagagcttagctactctctttcttctcataactaagctcacctgctggagaagctttcttaagaagattcctaatgaagctagagcttatgctcacataccctctctaatagctaagctgacctccttatgatgagaagctagagcttagctgcgcaccccctataatactaagcttaccctatggcaaaaacatgaaaatagaataaaaaaatgcctactacaaagactactcaaaatacctcgaaatacaaggctaaaaccctatactactagaatggccaatatacaaggcccaaacgaaggaaaaacctattctaatatttacatagataagcaggctcatacttagtccatgggctcaaaatctaccttagggtcatgagaac

SEQ ID NO: 62633 - DNA, 405 bp, Glycine max
  unsure (1)..(405): unsure at all n locations
tacaacatatgcatctacaatcttcttctttttgatgatgancacaatctgannacaagaataacgatatacgaattgcaatgggtcactcatcctactcccccaaaattggaattattactaattttaataaaactaccctagttctcttccctttggcacatcaaaagccaaacaaccgagaaatatctacncaaaaataccaaagcatagctcactcatcaaaacttatcaagcagatcatccaactagtatcaagcaatatagccagcatgataatatcaaccaagctaaccagcagtctaatatcgaaccaacaatataactaatatgaagcaaaacataaatgcattatcaaatcacaagctaatactagcaaatcagaaatagaaatgtaagatgaca

SEQ ID NO: 62634 - DNA, 368 bp, Glycine max
  unsure (1)..(368): unsure at all n locations
taagcttacctctnnttttgaaataggtcgagggaggctgttcctaatgttccctgacccctatgctatgcatttcagctggttttggtgaaaaaatgtgtttccgtgaagaaaatccaagtgaggtgcttccgttatgctgccgagacgttttcgtgagccaatccgtgaagattttccacctttcttcatcgntcttcagtcattcttcgggcttcaaccggtaagtgttcgaatccaaaactttcaattcatttcttgttgttttagctttcatcttcatttcattcactttcgggtttcttttcttccatttttaacgagctttaaccgatcgttaaaccgttatctcgcctaataatgataaa

SEQ ID NO: 62635 - DNA, 390 bp, Glycine max
  unsure (1)..(390): unsure at all n locations
agctnggttntgggcaatatcaccccacctgtctttcccaaggtctcctgacccccgcgacatatctccaggtaccactctgtggtcaacaataaaagcaggaagtttcacccttcaacacttcctcatctcaagcttgtaagattatggggtacccatcacatgtggtactaggtgtgcggcgggcgatggtgcacaacaagctttccacatccacaatgcgcgcataaacacaccatcccctgttgcccacctccaactgagctcacgtagcccatattctcgtttctctcaacaccgggtccccatcaatcctctcaagcttgcacaacatccaagcaatacaagcattatacagcacaagctatcacagccatgcaaaacagagca

SEQ ID NO: 62636 - DNA, 321 bp, Glycine max
actgagctcacgttctctcacgtataccatatcgctagttgtctcattatacaggtgcccatcaatagttcccatacatgctccaactttataggttgtacaagctttcaatactgtcaaactatcacagcccagataacagatcaaatgcggaaaactctgtcataacaccgaccaaaatcacagactgttctcacttaaagaccccatgaacaattccttcgatcaattcgttaaccgtggtcgactccaattttactgaagtccttttcttagccaccttagaccgtgggactactgcaacatcaaactcatttggct

SEQ ID NO: 62637 - DNA, 418 bp, Glycine max
  unsure (1)..(418): unsure at all n locations
ggatccttaagcacctgcagctgcactgattccaccttcttatgcttttttatcttgaggaaacctatgatctctatcagacactatgctagatggcacaccattgtaatctgacanatctcactatatataccagggagggtcaaaacttctccaanggaaaatatgaatattaatgtggaataaaagtgagcatacttggccagtctgtcaacaataacccagatagaattaaacctctaggttttagtagtctacaacaaatcatggaaactgccacttcactgngtatctcaagggttgtaacttccctgaaggtctctgatgttctatcttaaccttctgatagactaaacatgcatacacatgctcactaatctctctcttcatgtgngccaccaaaacatcatcttcaaat

SEQ ID NO: 62638 - DNA, 376 bp, Glycine max
  unsure (1)..(376): unsure at all n locations
ngagatgaggaagtgttgaagggtgaaacttcctgcttcatcgttgaccacagagtggtacctggagatatgtcgcggtggtcaggagaacctggggacgtcaggtggggtgctttgcccaaaaccaagcttgaccaatcccgacccaacccgggcatagtcggtcagtgagaacctgtgatgtacctaagcaggcgagctccttgcagtcaacagataaaaggaaaacaagaccacaaagcaaggaggcttgtggtggctggccagctgtgaaacttgattgatatgtgagatatggtctctggtaatcgattaccaagggtgggtaatcgattacaaggcttaaaaatgaagacagggggctaagatggtctct

SEQ ID NO: 62639 - DNA, 377 bp, Glycine max
cctatactgtatctggaggcaattagcgggcacttactgaagagagaggaacattcatcatattgatgcattaaatgttggcctgttatcttttccttttctcgggccaaccaatacaacactttctcctgtcaaaccgactcatttttttggaccttccttatttattttaaaaagagtagattcttattctttaaaagtattatgaagtctcctaaaatattatgattaatgtaaatattacaaactcaacataaaattcacaatcatttattcttaaaagattcataatggtaactcatcttgatctaagaatttaaataatcattaatcattcaattataaaattgacttttatcactgtattcaaaataaat

SEQ ID NO: 62640 - DNA, 441 bp, Glycine max
actatccatattctacaacgttcttgcacatatttttatctataaatgcacccatatacaatcaatgcagcttcgttacctaaattatttacacgtacctcaaagttattcgttacatacattacacacattttagtggctaaattcacatacatgcatactcaaagcattttggggcaccaaaaattgcacatgtgcacatttaggagattctaatacctatacatacgcaaacttcatgatgaatcttgactatccacacaataaggtgctacatgtcatgctctttattttcaagtatttgctacctaaagccgcatgcgaattcaagcatatcttcctttgctgactaaaattgttttcaattaaaaggtatattttctgtatatgatttcttcacataacatgcaacgtatgtatatatatatgttgtgagacatt

SEQ ID NO: 62641 - DNA, 327 bp, Glycine max
  unsure (1)..(327): unsure at all n locations
aataaaagtaaaaatttgcctttctataattgaatgtgtaattccattcaataaattaaaatttaaaccagcaaaanataaatatttcataatttttttcttcaggtctaatttttttaattcctataggttctacaaaaatgttttaatgaagaatgaanaattatcgtatcaaacattggcttataacaatatcaaacaaatataatntcagatgatgaaattaaatgaatttataaaattttcttaccctatcaaccattcccatatttctatcatttatcactattaatttttatgataactagctattttgtctatgcatta

SEQ ID NO: 62642 - DNA, 282 bp, Glycine max
  unsure (1)..(282): unsure at all n locations
tgcctttctntctaatcaacctgtctactgactaacaattctaattgcttgttcacaatcttngtctttctttgtctaacatacacacttgctcaaacttatgaaaagaaacacaatctcatcacaatcatgcatttgttggatcaagtggcctcagaataattaagaaaggggggggcgaatttaatcttccttaacctttactaattaaaaaantactcttctaaagctcttacttatgttgttaagagaatatggagtagaagagaaacttaacagaat

SEQ ID NO: 62643 - DNA, 406 bp, Glycine max
aatcttctagaatttgcaagttattaacttatgtctttaaccattcaaagtaaaaaggaagtttcatggagataaactgaattaaaccaaaattttgaaatgttgaaagcaatcaaacacttcatcatcaaagaaagctaagtctacgaacctatggtcgatcatggaacgaaaaaaataaagagaattgtaccggatacattgttcttttgaggaaaataatgtaggagattatatggagggagggaattgggttgtctgcgccttggatgattcgtgacttcgagttccagtgactgtggatgaagttaaactccttttcgcttcttcgatggttctgccatctgaaagagtttatgaaacagtttgatcggtggagatgaaagagagtgaaaatgatgaattt

SEQ ID NO: 62644 - DNA, 307 bp, Glycine max
gaccttaagcaccgcggctgcagcttgctgaaactcttacattgtcttttggtgcttataacacactctagaatcaccaatccactatctacacctctaattaagtgtgtgtggttaatatttcataacaacaatcatacgagagttcccaattgataataataaaagtttatggactcaattataaatgtttagggatcaaattaataattatgtaatattattacgactcatagaatatttaaaacaaacaaaaaattcacaacattctttacatataagctaaatgtatagcgcataaaaaaat

SEQ ID NO: 62645 - DNA, 327 bp, Glycine max
  unsure (1)..(327): unsure at all n locations
agcttgtccacaaaatagggttttgaaagttatcactncaattnnctattaagnanaatgggtcattnntagggccaacgcccttaaatgatcacctttcaagtaaaaagaatcacttgattcacgcataagaaagaactacgtaggtttgattttctcatccccattgaggaatacgtaggagccaaaggaaacacccttgtcgaccacaaaaagagaaaaaatataaaaagggtataaaggatataaggacataaaagggaacgtaaaagtcaaagtcatgtttgcacattcgattaaaggctgctgtcccttgtgacggatgtg

SEQ ID NO: 62646 - DNA, 347 bp, Glycine max
  unsure (1)..(347): unsure at all n locations
ntagcaactctntcttttggttagtcaagacttctaatgctcttaatctctcctcgnctaaatcaactaactcatttgacatatttccaatatggtcatcggaagtcatttgttttgtactctagctgattgcaaatgtatttcgaccggaagtatagcatcgtgcccataagtcagtcgaaatggggtagtattagttgattccttaggagaatatctacatgcccatagaacttgatctaacgttttattccaatttcttggctattgggcaatgtgttttttaatcaagttaattacaatcttattggctgcttcgacctgaccatttgcttgcgcgtaatatg

SEQ ID NO: 62647 - DNA, 373 bp, Glycine max
  unsure (1)..(373): unsure at all n locations
agctataacactgctagtgctatntattgatcaaacattaagcatctaaagaagttccaacataacagcaatagtccagatccaaacacaaaacaccaaatttctcgaaacccaaccaaatgaaattttgaaaaccatacacacataaaaggattgattggaatttgtatggtttaatgatgaaatttgtggtagacatttgcagatcatggttaagactaaaggattatgccgtgcgttatgtanggttggtgccaaaggtctggggagaggaanggatcgcgatgatactgacagtgcataggcagaggctattgcagccggggatgagcccatggtatatgctgccgcacaggacaccggtgcanagact

SEQ ID NO: 62648 - DNA, 447 bp, Glycine max
  unsure (1)..(447): unsure at all n locations
cttgatactactgaatgcttgggccctatttgatctccatgctttcctactatataaacagcccacatcctattttaaaaatcagatccatattcattggggcatctcaccgagcacttggtgggcgcatgtttagacataaatcgcaagagaatgggggcaatgtggcatgccccattgcttcataatacaccataggcctaaagccttctcacacaaatccttaactcaacaaatcaagcataaaaagcaaaccaaaactgccccacaagcatgagcatgttctcacaatttagagcaccaaaatgaacaaaatgcaccaacggaaagcaaanaactcaaggattgaatacttacttgttggagtgagtagaaacaacgaanatgaaagcaaaatgcaaccaaaagtggcttangggagcaaanaccacaagccttcgtgaattc

SEQ ID NO: 62649 - DNA, 347 bp, Glycine max
  unsure (1)..(347): unsure at all n locations
gcttgctctatcagaagtctaaagcatctttaatcatttttnttcactcaataacgacgcatcaaatggatgaaaggaacatctttaattcaatcagctctgattgccgaggtgcttcatacaataaactattcataaaaatgggatactgtacatatattcataactcagcaaactctaacaacaggttgtagccatatttgaaaatcatttacaaccttttcatcaatacgaagaagggcttgagaagactatagctgaggatttgctggtatcacccctgcctggtgattcacattcactaaagtcaagtgtttgtcactctatctgcaaacaaaaaaatccag

SEQ ID NO: 62650 - DNA, 410 bp, Glycine max
attgtgagatcctacaggttatttatacatcctcaccacttggatttgtgcatctttcatgatggtcttctctttttagttaagaaggctttctggtatggaaagctaaatccctctagttggatccttcctctgtagagtacgcctgcatgataaatataatttgctatctattttaaagaatgttttgtgggttctctgtgctatctgcttttcatttcagtatgcctttacctcgatcacgtagatgcatgctttgttagggtcattcaaccctgagttgtcgtgctttcacgatgaatcggggtgcgataatatacttactatgtgtgtcttaatgcggtccttgggagacctagtcctacaagaggagtctgctaactatgcttgatcaggcaccagctaaacta

SEQ ID NO: 62651 - DNA, 333 bp, Glycine max
  unsure (1)..(333): unsure at all n locations
accgcagcagcagctttggcgcagaacaaccagttttatctatatattataaggacccacacattattaaatagatttgcggtttactgtcttgataacctctaaactccttaggaattctatttggaatacctgtactttttcttactagtcaatgttccttaatgttttattataggacattaataaaaaatccttaaaattttatgtgaataaaaatttaatatgtgcccattttgtcctattcaactaagacgttaaaataaccaaaaatggggtctgagaatatttaaaanaaaggttcaggagttgttttttcactgtcaaagtata

SEQ ID NO: 62652 - DNA, 400 bp, Glycine max
  unsure (1)..(400): unsure at all n locations
agctntatgagntttctggtttccaatctttgttctttcacagaaanaaaagagtgttattcatctttttcattctcttctccctttgccaaaaagaattcgccaaggactaaccgcctgaattctttttgtgtccctcttctcccttttccaaaagaaacgaagagactacacccgcctcgaatttcttgtggtgtctccccttcttccttttcaaagaattcaaaatgacacagtctgagaattcttttgattcttnccttttccttagacaaaagatttcaaaggactaatcgcctgagctatattttgcttccccttcacanagtttcaaaggactaaccgcctgagaactttgtcttaacacattggagggtacatccttttgtggacaagtaga

SEQ ID NO: 62653 - DNA, 381 bp, Glycine max
acaactatggacgattttcagacattccctggaccaacaaccgttgtgtataaatagctatttctttcttccgatctttgatcgggaaaaatctttttctttcgccttcctccaacactttgatcggagataactcgctattcctttgctttcctccatacttgatggggaaaattctcttttctttcgcttttggaagcacattcacaactcaaccagaaatgaaactcctttttttgggagatccttctgttctgtctttctacggcaacggtaaaaatacctatcatgggtcaaggtttatggcccaacggttggggctttggctaacaagggctagcggaaagcaagacatggcgtacgttatggtatttgcttggc

SEQ ID NO: 62654 - DNA, 422 bp, Glycine max
  unsure (1)..(422): unsure at all n locations
agcttggcggatntggtcttcaccggcaaaatgatctttgtgggtctaaaaagaggcaaatttggtcatcctgctttgatgaaaattggggcaagtgaagagggtgagaatgatggagaaacccatgttgtgactaccattcctatatggccaagtttcccaccaacccaacaatgtcattactcatgcaataacaacccatctccttacccaccacccagttatccacaaaggccatccctaaataaaactacaaaacccacctaccacacgaccaatgctaaacaccacttttagcacgaaccgaagcaccaaccaaaagggaattttgcagcaaaaagcctgtagaattcacctcaaattctggtgtcatatgctaaatggtagccataacccttgctatgtttcctcaaccttccatt

SEQ ID NO: 62655 - DNA, 390 bp, Glycine max
  unsure (1)..(390): unsure at all n locations
ccttccctctcctcttctcctttgccttccgctgcatctccatggtgaaaaatgaccattgaaggacctcattgaagctcaaagatccagcctccatagaagctccacaagcaagcttccatcaagtggtatcagagcacaagagccttcagtaggtgctccttaaacctccattaattntttgctntaccttctcttccattgnttttttcttcatttttctccatgtatctcctcacatgtcttgttctaaattttgttaacatgattctttagagtttgcaccgattaaacttgctatagaagttagatttgaatttctatggttcaaatttcttgttcttgttcttgaaccatgaattgtgttgagtttaagttcctttgagtttt

SEQ ID NO: 62656 - DNA, 425 bp, Glycine max
  unsure (1)..(425): unsure at all n locations
agcttccgttgctaaatatcttgtgtctcttttagcaatgcgctgaattggacatgcgagtgaaaagttatggccatttgaatttctcgagaaaatccagtgttcaatttcgagcgtctcgatatgctatgcgcctgaatcggacatgcgattgataagttatgaccatttcaattcctcgaaaacatccattggttaatttcgagcgtctcgatatgttatgcgcctgaatcggacatgcgagtgaaaagntatgaccatttgaatttcttgagactttcgttggtaaatttctatcggctcgatacaatttgcgcctgaaaagatattaccatttgaatttttcgaaacattcgttgttcaaatccagcgttcgatttgtattcggcttgatcggactgccagtgaaaggtatgacctttgaa

SEQ ID NO: 62657 - DNA, 391 bp, Glycine max
  unsure (1)..(391): unsure at all n locations
tttattcacaaaattagagtttatctcttttatcttagtgagagtgattctcctaaattcttgagtgattcaagaacaccctggctgtatcaaaggactgtcacaacctttgtgtgttgccctcgctggaaagagngattctttccttcctttcatcttcacccttgttctttcataccacaattccagaaaatccacctctgcccagaattatcttgtggtcataactcccattttacgcacttaaattaagtgattcttgagcctaaattgactttcaaaacgagacctttcacctcgttttggaatcacctcatttggagccctgtagcttcagttattgccatttctatatttctgtccagccaccacttaacctacattgtaccat

SEQ ID NO: 62658 - DNA, 400 bp, Glycine max
  unsure (1)..(400): unsure at all n locations
agctntgagacgcattaaaaactttggcatcatcaaaacattcagcttgatcctttgtctacaattatgttctaagtttgtgttgaatttttattttgttgattgaattctagatacatttgttcatgtattcttgtcattcttagcctatcttttgaattttgagtctaattcatgcatgttatttagttcataacatgttctaaatcaattcctataagtattcttgttggtgaactctatttttttttgtttctaagtgtcctacatgatgcctatgatgaaattgagttgtggtgctgagatgtggtgctgagttgtggcatgatttgtgagtcatataaatcttacgatcttttgaattgtgttattcaagataattgagcatcagcaaactaaa

SEQ ID NO: 62659 - DNA, 432 bp, Glycine max
  unsure (1)..(432): unsure at all n locations
tatgcgcatatnttcttacgaacgttcacttgcacaagatattctattaactaagataaaatgcacccgtatacaatcaaggcagcttctttatctagattatttacatgtacttacaagttgtatttgatacttacattacacacatcttcttgggtaaatttacatacatgcatactcaaagcattttggggtaccaaaaattgcacatgtgcacatcttggtatttctaatacctatacatacacaaacttcatgatgaatcttgactatctacacaataaggtgctacatttcatgctcttttcaagtttttgctacctaaaggcgcatgcaaattcaagtatatttttctttgctgactaaaattgtattccaattaaaaggtatattttttgttggtatgatttaccttacataacatgcaacata

SEQ ID NO: 62660 - DNA, 435 bp, Glycine max
gaccggatccttaagcacctgcggcatgcaagcttaaaactttagctcctgactaatttcttcatcctagccacgggaactgtatccggtctatgctctgtcaataccattgacctcatgacaccagttgcttcacacaaatgtccattttcaacacacgaatcaatcatggcagtccatgaaaccacgttcctttgttccattcccatcaacaaatctcaaggaatactcaatcatgccacacttggagtgcaacaccatcaaggaagacactatcggcacattaggcagaagccaatgtctcatagcataagcatgaatctccttcccttgcttcaaagccctcaattgtgcacaaatcggaagcaaagaagcaaccggaacagcaccaggccggaacctcttcaaccgaacaatagacctcattttcacctc

SEQ ID NO: 62661 - DNA, 415 bp, Glycine max
attactccttatgcttctcactatgtctaataatgttctatgtcttcgttctgccataccattctgatccggagaaccaggcatagtgtattgggcaacaatctcatgttcttgaagaaatttcgcaaatgaacctggtgcttgtccatcctctgtgtatctaccataggactccccacctctatctgatctcacaatcttaatttgttttccacattgtttctcaacttcagccttaaaaacttaaaggcatctaaagcttcattcttagaatgaagtaagtagagatacatatatcgtgaataatcatctataaaggttatgaagtatttcggactatttgcatccatgtctggacaacatatgtctggatgtatgatttctaataaattagaactcctctttgccccatttt

SEQ ID NO: 62662 - DNA, 409 bp, Glycine max
agcttacaaaaatcatattataccttaagattttaaagaatattcatgagaagatttattgattactcataataatatttttatatccgagacaagaattaaatcctcatcttaatatgaattcgctctctattaattagattaatctttgctgacatatatttatatataagaatttttttaggagaaatttaaagagagtgtgacgcttatttaaagataggtggaggttcaaactcaaacctcttgtgttgttttactccatcaattgtttgggattatttataatttttaatttaatggataaatattcacttttaacttgtattttgtaagactttcacaatttacaacataaacgaaaataaattagaaatctgaccttaaatttatacaagtgcaataaatt

SEQ ID NO: 62663 - DNA, 410 bp, Glycine max
agcttctcgatatattatgctcctgaatctgttctttctgtgatatgttatgaccattggaatttctcgagagcttccgatgttctatttcgagcctctcgatatattatgctcctgaatcggacttccgtgtgacaagttatgaccatttgaattgctcgacaccatacgttgttcaatttcgagcgtgtcgatatattatgcgcctgaatcggacgtccgggtgataagttatgaccatttgagtttctcgagagcttccgttgttcaatttcaagccttctcgatatattatgctcctgaatcggacttccgtgtgacaagttatgatcattggaatttctcgagagctttcgatgttctatttccagcgtttcgatatattattcacctgaatcggacttccgtgt

SEQ ID NO: 62664 - DNA, 180 bp, Glycine max
tgagatccgcaaacttactttggtctgtcactctacatgatgtatgcttctttcttctggacaaactttatatgaattatgtataaggctcaacctttgcaattctctatagaagggcgtctcacgcatgtatacttctggcatcatttgcatcgtttggcaacaccatgtatgtcacaa

SEQ ID NO: 62665 - DNA, 373 bp, Glycine max
  unsure (1)..(373): unsure at all n locations
ctggtgggaagctagcaacatcttatcaattctcttctggacatttataatacattcgctaagaagctataagtcgagttctaaaccccctaaattccaacagtgtgttatatttcctaaatccccggtcccaccccctatgtaaatttatatagatagtacaaatctttttataacaaaatgcgagccctcgatattaaagatttctctattttttctttatgcaaattctctattgttatgcttatgccctcataaaccaaagaaagggcactaatcanggtgagaaaaattctgctagcacacagcaaagagtcactgaggctattagaatgtctagccatgctattcagacatatgcataaagagcgtg

SEQ ID NO: 62666 - DNA, 449 bp, Glycine max
  unsure (1)..(449): unsure at all n locations
agcttgtgaatcatctatgttatgatgatgctttaatttattttattatgatngncacgcatcgaggaaggtgggagatatgtgaatgctatgtatcacatatatattcgtatgactgtcatcagaagaatgcacacaggggccgcttcatataggataagcatcctgcttctcgtgtaatacatagatagctttaaccatacaatacttggatgcaagattttttacagaccaatctctgcctcacaaacatggggtgtacagtcatgctaagatctttttattgattaccatgaaatggcatcgactaccatcagggcagattgagagtcttctgttgaaaagggttctgaattttaatcttgatcttgtcactcaatactctttgtttgtattcgatcaccagcaacggtacttcggaattgtaactcaaatgcttatgccttcta

SEQ ID NO: 62667 - DNA, 395 bp, Glycine max
  unsure (1)..(395): unsure at all n locations
nagcttcngatccaacccatcacggtttcgatttttttattctgtttgatcggantccgaagcaagaagccgattcaactgcatgatggagttaacccgcactgtttttttcggatacacctgcagcatccactgctattcgtcttcaaggcgccacgccgccactccacgaaatgcaaactctaacattacggaccgggccagctcatcgagcctgagcccaaatttgcggagcgtgtcgcggttgtccgactaaggaaacccaattaccgtgagccttaacagtggaggcccaccgggccaaagcgccaatgcctgaatcagtcgggccactgtagcccctgcatgaggatgaaatcaatcacgtggacacaatcatggccggtgaaggcttt

SEQ ID NO: 62668 - DNA, 323 bp, Glycine max
gccctcttttttttctattccctagcggatgtttctcgctcttacctcttatcctttggggtccgctgcatctccatggcggaaaaacaccattaaaggacctcattgaagctcaaagatccagcctccctagaagctcctcaagccttgtgtccatcattagagatatctaattgttcatgcgatcagacttccataatgaacttttgagttatgctttacccagctcatggcaattggttttttcactccctgtgttctcagtttattcctaactttgccaacatcttttcgtctgccagccatagcatatatgttagaaa

SEQ ID NO: 62669 - DNA, 431 bp, Glycine max
  unsure (1)..(431): unsure at all n locations
agcttgatacanagaatattctcttgaggtttctcttgtttaaggtgtcgntacttgtttgagggtacagatttctttcgttctatcttttcaaaagaatattttcagaaacatcacttatgtctgtcattgggtatctattcccattttttcttggaagggttgaaccaaatgttgaggcagtaatgaaggaaaaaacaacagtggcagatttgatagtgaaaaggaatcaagaagagaagaccacataaaaagggttaaagtgccttatttcatgagtgaggatacctttggatggctgtacagagttgagtactgatngtaatcaaattccagaggcaaagaagtcttataatgtgagtttatgcctaactcaaccccaaaactagctcatagggtgagggttgccgttcacttatatactctatctt

SEQ ID NO: 62670 - DNA, 440 bp, Glycine max
  unsure (1)..(440): unsure at all n locations
tatgggtattttggagtanattttttaataaatattgggtnatggttaatgttgtctctagaatatttccattggatttaatgatgaaatctgtgcattttcatgtgaaatagaggctatgttttgaattgcaaaaagtagcagttgggctaagctcaacagtttggctaagcgcataaccaccactaagcgcaacttcagtgcgcttagcgcataggaaaatctgacagagcatcagcatcaaagtcgcgctttgcgtgagatgaatgtgctaagcgcatcaagtgcctttaaccaggctaagctcgagactggcgctaagcccaatttcacttactcgtgctaaacgcgaaggtggcactaagcacaacgttgcgattttagagccaatttaaagccttgtttgtgcataattaggccaaggcacagaatcacacaac

SEQ ID NO: 62671 - DNA, 345 bp, Glycine max
  unsure (1)..(345): unsure at all n locations
gctgcactgaactacaactttgatttgtggaancacagagggttgtggagctataaaggattttcatcccatgagcatatacgatagtaggcatctacagtgtacctaacaagagatgttctattaaaccaatatttgcagttagatagcagtcttttttggtgggaagaggagtatattgggactgtgaaagttattcttgtaaaaatattgagaatgattggtttcagaaaactaaatcatgagtgtgatgatggaaaatgatctttattttttactcgattattgaagcattgagtatatatttggaatggatagggtatgtagccttatgattgttaaggt

SEQ ID NO: 62672 - DNA, 268 bp, Glycine max
  unsure (1)..(268): unsure at all n locations
atatgaatntctttagagcattcgttgctcaatttcgagcgtctcgatataggaagagcgttaatcggacttccgtgtgacaagttatgaccattttgaattctcgagggcttccgttgttcaaattcaagctcctccattaattaagcccctcgatgaaacttccgggacaaaagttatgaccatatgaatatctcgagagccttctgtgttcaatttccagcgtcttgatatactatgcccctgaagcagacattcgtgtgataaa

SEQ ID NO: 62673 - DNA, 331 bp, Glycine max
  unsure (1)..(331): unsure at all n locations
agctngcatatggggagattgaggtggtgtttattctatttccacgccgagagaattggtcttattggatgtggctatcctctgtgtacatgagggtttatgtgtcgggcgagggtgtgtgtgctctaccaattctgctagatatgagaatgttatctcgtgtgaggatcatgaatagtattgttgtggcataatgtggtgcgaatgatgtagcatgttgggaggggacagtaatattctagattcacttgttgggtggtttggtattaataattaatgggcttttaaccaattacgggtaaaaataattgcaagtttctatttggggata

SEQ ID NO: 62674 - DNA, 295 bp, Glycine max
  unsure (1)..(295): unsure at all n locations
gctgcacttactataaacattttctttttttgtggncacgggccggttaatttaacctctaatgaaaaagaagctctgggcattggacacgataactttatctaggggcccattggtcccgagtatatcgtgagcttgaaatgaaaatgtagtttggaaagattccgacctaaactttctcggaggacgattgaggtcccaatatatgagacgtcgtattgaaaagagttttgggaaatcaaccggcgaaactatatcttggtgtccgatggcccgcctattcagacgctcgaat

SEQ ID NO: 62675 - DNA, 420 bp, Glycine max
  unsure (1)..(420): unsure at all n locations
acagcatattttattaatgacncactaacctagaatttaatttacttaatgccattaacctatggaattaaaacaaaattaatggctgaatgtaactgatattgtggcaaccaaaagtcaccctcaacagccaacaagtcaaccaccatttggtctcccaaaaggctgatgcctatgttgccaattgagcccttattacaacttgaactacatccctattagttgattaacccaaaacaatatatttggtcagccaacttcacaaggattgggccattatttagacaaactaaacactctaaaattgaaacaaagtggtgtcatttagtcctcctccatttgggccatgatacaactcacaaccttggacttttctccttgaaacttgtgcttgtattcaaataagatggacaacacttg

SEQ ID NO: 62676 - DNA, 412 bp, Glycine max
caagcttgagggtgcgtagcccactatcttttttattagagtatcgataatgtgtctaccatcacgatcatcgtctccttttccatcattgggggtaccacctgtgccgccagatccctccaccttttgggcgtgttctttgaaagatccgcccccctttttgcaaatgttctgtagttgcatccaatctggaaccatatcaaaattgtactgatactgcctaacaaaggcaaccattaggtccttccaagaatggactcgggaagattccaagttagtgtaccaggtaacagctaccccagtaagactttcttggaaggaatgtatcagcaattcctcatcttttgcgtattcccccatcttctgacaatacatctttagatggttcttgggacaagtagtccacttgtac

SEQ ID NO: 62677 - DNA, 408 bp, Glycine max
gaaatctcttcggatgtagtgatgagtttctaagagaatccatgagtgatattaaagatcatgagtggctctcctaagagactcaaggtcataaaaaattacctcattgtcctagtatgattcggatccattagaagttgtgtctgctatcaggcatatgtttgtttcttcatcgccttcatcaaacgaggtgtcatccaggtcttcccacatgcacataagccttttgttttctatagtcttaaagaatctcttcttatcttaaaatttctccacattaagacattctgacttgaagaggtcaagctttttgcactcatagctgactatggagctttcgtctatccttcttgtcccggggcattcttcttgaagagcttctccacttagacccactattagttctcg

SEQ ID NO: 62678 - DNA, 373 bp, Glycine max
  unsure (1)..(373): unsure at all n locations
agcttgagacttattttataatattctttttatattaacatntgatttgagtacatttatactgtatcttgagttgcaggctgagctatataccatatagatgtactgatgtagctagcaataggaattgtgaaatgtactatggtcaaaaaattgttcaccattatgatttattgtactttatgaagaatgcatcttacattcttaccaaaagcttttactgtcaaagctttaaggatggaaaatatatgcaggttatatgtttaagtatatataagaacatattcctagataccatgcctttgttcttattgtcagtatccagaattgttaaccacaactaatcattttttactatagatctgctgaacat

SEQ ID NO: 62679 - DNA, 382 bp, Glycine max
aacttcaacattcaacttctagcgtctcgttatattatacgactcagttagacatccgagtataatgttattgtcgctcgaattttctcagagcttcaacattcaatttcgagcgtcacaatatatgacgggactcaatcatacatcccattaaaaagatattggtgttttaattggctcagagctcttacattccaatatccgaacgctccgatatatgactggaactcaatcaagcattccgggaaaaagtaactgacgtttgagttggctcataactttaacatccaatctccagcgttttgatttttgacgggacttaatccggatcccgggaataaattattgtcgttcgatttgcttacaacctccaaattctatt

SEQ ID NO: 62680 - DNA, 413 bp, Glycine max
ttgagcagatttaaacgactataactttctagtcggatgtcttattgagtcctgttatatatagagacgctcaaaattgaatgacgaagctatgagcaaattccaacgacaataactttttactcggacgtctgattgagtcccgtaatatatcgagacactcgtaattgaatattgaagctctgagccaattccaacgacaataactttttactcggatgtctaattgagtcccgtaatatatcgagacgctcgaaagtgaattttgaagctttgagcaaattcaaacaacaataacgttttactcggatgtctgattgagtcctgtaatatatggagacgctcgaaattgaatggtgaagctctgagcaaattcaaacgacaataacttattactcggatgtctattgagt

SEQ ID NO: 62681 - DNA, 435 bp, Glycine max
  unsure (1)..(435): unsure at all n locations
agctntgatctaccaccaccaccgccaccattatcttagttntcaattatgtttaatattattagtactttgatttctagccgtgtatttggctatattattatgacatttgaacaatctagtatttcttttatttgcataatatgactgaacaattatgaattatgttatatgactatgtggtttttatatattggaactattcatgtttcttgcttcatgattggtttagattttccaatgaatgtcttgtgagtgattagttatttatgtatgttttatatttgttacgcactttggctttttgttgatgccaaagagggagagaaatagggattaaatcaagaactcacataattaattaacttaatttcaagtgaagcttaaactcaaaaacgaanggggagaatatggagaattaagtgagtgatcgac

SEQ ID NO: 62682 - DNA, 445 bp, Glycine max
  unsure (1)..(445): unsure at all n locations
acccgcngcctgcagctttacctttcattaaacccttaaactttcctgtctatatngacatagataaagcgatgttgatgttctaaggacactttaaatccctttctaatctactgacctacgcttagcaagttttggtcaatgttaagtacataaagaacatctgatactaatttgatacctgaacacgttgaaattgcaacagtctcttttgcttttataggaatatagccaccattcccaatgtctgaccttttgagacatttgttggcttcaaatccttgaataaaatcttatactatgtcatgtggttcgtacaaccactatcaatcaaccatctttcacttgattcactactcaaagaggataatgtctctttatatgcttacctctgatttggacgtcacactatattctctgcttgctggctggtcttcttgaaaaa

SEQ ID NO: 62683 - DNA, 137 bp, Glycine max
aaataccttgggtgcgcgcaatcttgcgcccccatgacttactggggaagcacccaaagggatcggtcctggcttgtatattcactggctctgaacccacctaaagttttcaacatcaagcctccaactgtggttct

SEQ ID NO: 62684 - DNA, 267 bp, Glycine max
tatattattgtatcgtatctaatatcatacttcctaccttattgttatggatccacatatatcttgaagtgataaatttttggataatatatgtccggaacccctcattaacgtcaaaaatattaaattcagtcctcactaaaaaattgtattaatttgacgtccataaaattaaaacatctttttgctggccctagtgataactttgttagacgattccatgatatgactaacataccttcaggattgtattgtactacgatttta

SEQ ID NO: 62685 - DNA, 362 bp, Glycine max
gccgcttaccagacgtatctgattttttcttatcttgtttactagaaaatcgtttgccatagacctgacagatattgtaaactatagggagaatctgcttagcggatctttatatgatccataaacttagttccgaccttatgaaacctatccggtatattccttacacagattatattttggaacggtactcaacttctatatagaatacatatacatcaacaaaaaccttatcccactatgtgtatgtctggcataaggtatcataagctgagttacttgatatctttatttgacatgagatatccaaaagggatggtcacttatgtcgtaggtcctcttagaaaaacattaatgctata

SEQ ID NO: 62686 - DNA, 284 bp, Glycine max
catacgggagattcttacttcagagttgcgccaaatgtcgtaggacaacacttgtccgagcgctggtcttgctcatcaaatgctggcttgccctgtactattcaagaaacacagactaatcaaaacttaagacgagattgcgagatcatacaataccatgggagaggtgttcctctgggattgatggtccctgaaaacggcgaccagtgagaatcctctttattcttctgccggaagaatgaaaaaaacaaaatcacgttcatccctggatcccgaaacagaac

SEQ ID NO: 62687 - DNA, 395 bp, Glycine max
agctttcaattatatatagtaattgtactttgtctttaaaaacccaagtgtatgatatatttcaacctgctttaacatacataaagctatacttattattcattctgaccacatgacctgaccaacatcatctatttgaagccaataaatgcaatagccatttaatcatatgggtggtacattgggatatataataatgaattcatgttacacataaggaacatgatgatatcaaaaggttctctgccaaactcactgaatactataaataatattatattaaagaatggacaaaacctgaagtgtatgaaggagattgtaagttagttcacagaatcctggacgaacaaccaatgctttgttatagctcttctcagcctcctttcatggtcact

SEQ ID NO: 62688 - DNA, 392 bp, Glycine max
  unsure (1)..(392): unsure at all n locations
cctcctagtatttaagattcacttaaaattagtgagaaaaattgttttcgtgaagaaaatccaagccgagacgcttccataacgcttccgagacgtttccgtgggttatttctcgaagattttccactggtctttcgcggtcttctgtcttcaaccggtaagttcctgaaaattgaacttttcaattcattctatgtaccattagtggtcctcatttgtttcgcgtgcttttatttttatttcatttactttccgtacccccttttgacgtgctttagtcatttatttaagtcattttctcgcctaatcacaaataaaataaattttcaccgatcatttatattgtaacatcttttaatttntgtaaaaatgaaatccaaccggtcggtcat

SEQ ID NO: 62689 - DNA, 417 bp, Glycine max
  unsure (1)..(417): unsure at all n locations
nngcagctttnggcgaagaggcaattttcaatcttatcttggtcgncagcatcctcaatgtgatgcattcattccatacttcagagattcatgcaataatcattacccagtgtgagtcggttctctcacaattaagaacacgctctcaccgggttacggtttactcattccttaacaatccatatgacgaaccgacttagcatttttagtcctaatcctaaatcatgttctttctctcttaatgactgcatgctcattcaaggcatatgatctacgcataccaatccactcaaatcatacgatatgatcatttaaaccaatcactaacgcgggatgcaaatcagacatcataccactgaatataatcaatggacctatcagacatgcttatatacaagctcctcaacagattatgac

SEQ ID NO: 62690 - DNA, 344 bp, Glycine max
cttgaagaattgtgacgtttggaaatatattttcgaaatcaaacactggtcatcgattaccatcaaggcgtaaccgtatacacatcagcaaacgtgactctttattttaaattgttgaacattaaaactatttctaagctctaattatcgattacacaaggtctcaaatgatttgagaatgtttaaacacaccctgtaactcttgaaatttgatatcctaacattttaaaacactagtaatcgattactaccttctggtgatcaattaccagagagtaaaactcctttgtaatgattttgtgaaaacttcttgtgctactcaaagttttgaaaaactcttttat

SEQ ID NO: 62691 - DNA, 415 bp, Glycine max
  unsure (1)..(415): unsure at all n locations
agcttgagggctgtagaactcgttctcctttgatcttggggtttatgaagtgagggggaaaagtnttgggtgaagaaaacattcccccttcacccctttatattgtcgtacaggggttgctcgtccatgcgaactaaactgttcccttttttttttttttgggaaacattaaaccatgcctttctcttccttactggctaagcgttagctctaccctaacctacttaagttaagatacgcgtcgattactttatttaaaacaaataatagtaataaatactgtgaattcaaaggatactgggctgccttgcattgacgttctttgcttgtctagcaccgggaagggacaacgatcggtctgtcgttaccctatcccccacttgcattctgtcctatgtacctgcagagaagaaac

SEQ ID NO: 62692 - DNA, 333 bp, Glycine max
ttgcaccggacgtattagtctgtggactatgttcttccgcagatcaccatacatactctatgtccttctttgcagctatttggagtcaatgagcaacctgaagccctgctatattcatgagcataccgcagtgtatgcctatgtccctactaatttattaattcctggaccattgtaatctacaaatgtggtgatacatttggcatatagaatgttatttaccccaatcgactatacaggatgtgccagtttcggttggtgaactatctttactgttgaatctatttccttatattagaagaggatatctcctggatcattccacatttttat

SEQ ID NO: 62693 - DNA, 328 bp, Glycine max
agcttaaaccgaatgttgttaactttaggataatcacaacttccacaaggagaaatgatgtgattcttgtaaggaccacagacgccattttatccttcataagctaattcaaataacctctaataactataattacatatatgttaccccacagctcaatgggaaaaatatttatagaggattatgcgcgtctaaaaaacatgttatatgtttatctatgaagtgagccacctcatgattggtttgctactatagtgagccacgcctataattatggtctggttaaatattgacaacagcttaatccaccattattaacagtgaaaat

SEQ ID NO: 62694 - DNA, 319 bp, Glycine max
  unsure (1)..(319): unsure at all n locations
attgttcatacggccgacagatgaatcctatcttctaggcattcggcaaactcattcgacatggcctttggtgttccccaacctattgtcacatactcatatgtacgcacatttgctatgttagaggggnnngcttccacacagggatggattatgcatatacacattgatatgactacctaccctctcttagctatggccaggagcatgtccattatagagccacatgcgggagagcccaccccgctgtatgaaggctttaatatttttcagagagattactcatatgggccttatagctacacaaactgtacctaat

SEQ ID NO: 62695 - DNA, 404 bp, Glycine max
  unsure (1)..(404): unsure at all n locations
agcttaataatatatcatatatattaaacttttcatncgncaatacaataatgagactattattatatgtataagatcttatattattaaattaacagttttcaatagaaaagacaaatataatttgataaaggaacatgtatgtatgtaataattatcaacaaaagaaaatttgagtaaataaagagtataataagttcttattttggcttttacttaatattgacacactcaaaaggaagaaatgccaatttttgttccctctaccctccaaatagagacacatgttcataagagatgagaataaacaaattggtattgaggaatgtgtcaaagtgaaataataatcaagtaaactgaagaattagctgagagacagtgagaaaataaacaatatcacaatt

SEQ ID NO: 62696 - DNA, 429 bp, Glycine max
  unsure (1)..(429): unsure at all n locations
agctntcaagaatgcaagaatgactcctccatcataccttctcataggtttccttaactctccatttttcatagacaataggtagctttctccctaatttctttggtgttcgaaaaatttcaagttagaagataagatgcatatatattagaaattgaaattttatcacaaagatttacgtgacttaaatataaagtgtaagattacattttactatatgaatcttagttgaataaatgcattggaagttatttatgtttcaacctctaaaagaacctatttattataatgtgtagcaatcttcactataaatagaagagataattaatagataaacagaacacatgaagagagagtatatgagaagatatattgtgaaacacagttattttgttgagagaaaagtgtttttgtgtgagaatgtatcat

SEQ ID NO: 62697 - DNA, 425 bp, Glycine max
  unsure (1)..(425): unsure at all n locations
atgccttcttatcagatgttatatcataaatcttctcgaacgcatcattatgcttgatagatgaggaagaaagctttcttgtctctctttcttgaatcctttaaagtatccttttgtgctagggataatgaagtctcattttgcgactccttatagactttttcaaccatttcccaaacatcatgtgctccaagaagggccttcactttgatgctccaaatgtcataggtgttcccctttataagtggaacttggaaggatgccactccattgcttgccataactatagaggaatttcttatctgaacctaagctccgatactactttgctgtatgaagtatttgagaaaaatggaggaggagagaatatttganagaatgctagttttaatgacttgagaaatgcttcttgtttggcttctttt

SEQ ID NO: 62698 - DNA, 439 bp, Glycine max
agctttaaaagaatggctaagattatgttatttcatattcacttagacaatgaaggaaagctggagttgctgcacatgatgtccaacgttatgtcaaggaatcagatcgggctgcacaatgcacaaggcaagataaaatgtcaaatgaagaattgaagttgcaagatccacgatgtcggatacaatgtccaggacatcctgcccgaaaatgcacagtgcaagataaaagaattgaagctgctcgatccacgatgtcggatacgatgtccaggacatcttgcccgaaaatactggacacataaatctgttatatctttaacagattattgtgcagttagcaaaagattagatgatctatcttttggaacgaattaaaagataattaaagtctgaattactaactaatagagttcgttcacggattaacgattatagataa

SEQ ID NO: 62699 - DNA, 416 bp, Glycine max
  unsure (1)..(416): unsure at all n locations
agcttgttgttgtaggaattgggaatattaatcaacctgttgtttttgntgctcacaggttaatctagctgcccaagagtgtacaaattacctgcatgcagtggaaattggacttctatgaactcaacggtttacttattcattgtttatgattgacatgcatcttttgaaagtgcatggtgattcatggcttcaagtattttttttattcttgcttgggttcatgtaaaacttaaatgtttttaagcttaaatatgtttaatctctgaaatatactcactttttatatagttatttataaaaaaaattaaaatagtccttgcaatattcaatatttcggcattgggctttgttcttacttaattttcattaattgtttgatgcttacacctgtcatgtgataacatgttacttgt

SEQ ID NO: 62700 - DNA, 405 bp, Glycine max
  unsure (1)..(405): unsure at all n locations
tgctcctcttaagcaccgctttctgttccatgtccaagtaagcttggttgctatttgcaccccctgtttactaaatacaccccctgtcttttttttgctgattctttttccgtaacgttacgaaactttacgaattctataacgatacttgttttccttccgcaatgttatggaaccttatggattacgtaatcatcccttnnttggctttcggaatgttacagaacctcacggattgtgtaacaatgcttccttttgattatcgacatgttacgaaacttcacagatcgggcaacaatgctcttctttgacttctggcacgttatggaacattacgtatcgtgcaacaatgggtgccaagtacctctaagcggtcaagcaaatgttgcatgccatctaacaatg

SEQ ID NO: 62701 - DNA, 413 bp, Glycine max
  unsure (1)..(413): unsure at all n locations
agcttattggtcatatgatngctacatgctttatgtgtgtgcaagagcctaagcatggagtagaggaggataggcaacaaaaggttttcaagtatgtgttgtaatgcccanatgaacctttcttggaagatgcacccgcgagccccgcgtcgccctcccgccgaagggtaggttgcgacagttggtggcttcactccggacaatttttagagagttaggccaatcaatcagtgtgctttccttaccacgacttccctttttgttctttttctttggctttctccttatgttcttgtgtatataaactcttttgatgcttttagtgtgttttaaaatgtatgcatgaggtaaatatttattcatttgatgcacacaaacaccaacactatttgcacacacggtgagttgaaaaa

SEQ ID NO: 62702 - DNA, 450 bp, Glycine max
  unsure (1)..(450): unsure at all n locations
tggacttaccttgacttaattcctttgatattctctctgagccttgtttccctttcctagtnttgaagctcactacaagccttaagtgaaaaaccatgatatcactatatccttaaggaattttggagctttggaattgttttgggaataagtgtgggggatnttgtttcattggataacatgttttgttggccatgcttcattatatattttgagccatacttgatacacattgcatattggttaaatgttggacatgctgaatatgatgttgtttctcaaaaggctacagaaaaaaaaatattataaaaaaaatcgaanaagaaaaacagtaaagttgagtgaataagaatagaatgatgagactcttggttctactctttatgtttaaaatttatctctacttctttntattttcttatgttntcttaatatgcacttattccccat

SEQ ID NO: 62703 - DNA, 390 bp, Glycine max
  unsure (1)..(390): unsure at all n locations
agctatgngtagaatctatgcctatcaatctaagacatcatggtatggtatgactacttgaagcattacaaaagtacaactccacctagttttgcaatcaagaatcaactttatcccaattggaatattcatttaaccacgtctctataaatttctcttcttttttgggtgttgtggctcaataactaacactttctctaacttttactatggcattagagattatgaaaaaccatctttgacaattaaattcagtatatgagcacaacaacacatgtgaaattgttgaccagccaaaataagagacctaggtagaattttttctataatgcgttcaatcataacatcatttgtctacagatatcatagtcacagagaaaagttgtctat

SEQ ID NO: 62704 - DNA, 431 bp, Glycine max
  unsure (1)..(431): unsure at all n locations
agcttggaatacattaagaccatttttattatttaattatggattntagactgcgctgcatattttgggctaaattgaggcctatatcatgattggtgatatttatttttcctttttaacgtgaaaaaacacattgatacggggaggttggttactattttgaaaattaacttttaatttctttcctcccctaggaggtaatcctatccccttatgttgtcccataataatcaacttgtgtcttgtgagtgaatattgaatttgggagtagaacttgtgagtgaatacaattatagaatttgggagtttctactcatacgtaaccaaaattaaatttaattcaagattatccatctgtctgtacctttatacattcatncatctatctttatcattaactctccattcatatatattatatcctattggat

SEQ ID NO: 62705 - DNA, 363 bp, Glycine max
atggatccctcatcactaggcttctccacctgcctcatttatagaaggatgagaatcccaccgatggagtggagacgtcagccatggattggtctcgaggaagaagaagtagtctcaacaacagaggaagtctagttggaaggagtggacgtcctcattgcacttattgcaagaggatgggtcaaacccaagagaattgttattcgttgcatgggttttctaacaaggacgcacaagtctctcgatcagagaaagataatctagattttctgtgaagagtattaggaatatttgaacctaattcgagaaacccaccaccaagtcaatcctcattggccatgtattcaacagctgttctctcaa

SEQ ID NO: 62706 - DNA, 416 bp, Glycine max
  unsure (1)..(416): unsure at all n locations
agctngctctanatatacattgatgtttgtttttattggaggaggntatatgccatttttgctttaaaagtaatgtcccactggtaaaactaactttccaaatggttgccttcacgggaatggccccgaggaagcttgcctcatagaggtccatgaaagacaaagcggccgaaagaactaattccgcccccgtagtacgacagtcaccgctttaggagcgttgtacaccagcagcgctttgaagccatcaagggatggtcgttctccgggagcgacgcgtccagctcagggacgacgagtatacatattttatgaggaaatanggcgccggcggtgggcaccactggttactcctatggccaagtttgatccacaaatagtccttgattttatgccaatgcttggccacagaggag

SEQ ID NO: 62707 - DNA, 386 bp, Glycine max
ggaagataggatggaactttgggcccactatgcacacatttctctcaccctgtatgcagttttacataatccgcaccaccttaaccctaaaaaccaacataaaacacatcaaaaccttgaaatagtacacctttatgaaacttctaatagtgcctatggaagataacaaaaatggaggatgagaggggaaaaaaaagggtttcttacctctaaaatcaatccaaattcgaaaaatcctttgtgctaaggtttcaagtcactaaaaactaagtgtatgactcttcctcttttttctatgcgcaccgcatagctttctaaactcacttacttcattctatatcactcaaggcccattcatcttagcctcaacattctaaacagaatat

SEQ ID NO: 62708 - DNA, 327 bp, Glycine max
tagcttcgaaacctcacgggaaatatttctttattatttcataagacgaggctgtgccaaagctggaaagaattccagatgttattggcatcaatgatgctccaagggttggtgaagataatcctgaagtttggcatgcacacgtaattaccttatctaattaatgctgagaaaatatcttgattttcttagagcaattattttcttcattgactctaaaatgaaataatcgattatgtctactttggaatgtacatatttcgttcaattgattcaaattccgttaatgggtttcctaaggatctcatagatgcaccgatctatgtg

SEQ ID NO: 62709 - DNA, 104 bp, Glycine max
caataacgacttactatgaagtatacccgataagatgttaataaacttgaagaatcttgtgaaaattattatgaataatgtggtcagtcggtacctttccttaa

SEQ ID NO: 62710 - DNA, 461 bp, Glycine max
ctcgtcccggatccttaagtcacctgcggcatgcaagctttgcctcaacacattgattccaacttatcattgcattggtaatggattaccaggcagtgtaattgattaccagaagataagtttgtaaatcagcttttcaaaagggttttgaaatttgaattttgaatcttgtaatcgattactaagatgtttgtaatcgattaccagtaatgacacttcaaaaaacacttttaaaaatcacgacccttcaaaatataactgtgtaatcgattaccaatgagaaaattttagaaaagctttttgaaaagacacatctctttaaaccattttgaaaaggcatgatggacttatatatatgtgtgtctgactttgaaaaacataagagagagatgttctaagagaacttaattgtcaaatgctctctcaacaactatggggcagacacttgctaatctattgag

SEQ ID NO: 62711 - DNA, 323 bp, Glycine max
atctgagttaaatgtcaattattggtgtctattttgcattctttacacagcattctaagcacccacgggtttgagtaaaaaaaagagggtgccctacacccaagttcattggaatttaaggagtggaggtgaatctatcatcatgctaggtcctccacttgcttgataatagtgaaacctcgtctagagcttcttctctctaaaatgcgttgtcgcttggattccataccgccccaacactattatattgagtgatgatacctctataaaacaaccgtgtgagttattaattgttggggagtagttattatagacccctagat

SEQ ID NO: 62712 - DNA, 362 bp, Glycine max
  unsure (1)..(362): unsure at all n locations
agctgcagcttaatgaaacaactgcgatgcctttttgtgaagncaacgagaacctagccgggggttatttagagactacgaccgaaccgccaacattcagctgaatgcacacaggcaggttccggacagcttgcaaaacgcttctactgtccttttcaaatcactgaccacgttggcaaagtcacatatcgcgtgaagctttcacaaggagcgcgggcacatactgtgatccttcgttccctcttaatacccttccacagcgaccctgattccagtaacactgtcccactcccgcaggacttcttcaatgatcatcctgctatcatctcctatacaatcctggaatatcgccgccattctaa

SEQ ID NO: 62713 - DNA, 405 bp, Glycine max
  unsure (1)..(405): unsure at all n locations
agctntgattacatattgaatttcatccatatttttgacatttttttgttactttcatcaatattgatattgtatcatgcttaattatatgcatttgcttattctgatcattgtgtgctgtgtgattatttcttccatgcaggcacatgattcctatttgttgtgagagtgaaatgatgtggcagcaacaccaactgaggtgaggatatattacctttgttttgactttatctttgttagtatgttatatattttctattttatatgcttgagttttaaatgtgtaaaaaataaaaatagtctcccctaccattgatatagtttttttggttcatttgaataatatggctacatatatcttgatcagtggtgttaaaacagaattaatcaaagtatccttccctg

SEQ ID NO: 62714 - DNA, 424 bp, Glycine max
agcttgcacaacaagtttctaaatctgtgtttgtactttatgaagtaactaactaaatatctaactaaatccattgatacatatagtgactactcataagaaaaggatgggcattgattaggccctactaatctacctaattaaaccaattacacaaagcaaagcccaattgtgcaacccaattattcaagtgcagagtttctaacatccaagcccatttgaccctcgaaatggcagaattggcccaaacttatttctaacaaattgaatatcttgttcttagctttccaaggactactcacatgctccatttggagttctgtagtatcctatatgccatgcctcttcaattattgtgtgaaatgatgccaaaccctccctatatacatggcttttctttgtctcttgacctaaggcttttaag

SEQ ID NO: 62715 - DNA, 416 bp, Glycine max
  unsure (1)..(416): unsure at all n locations
taagatgtgatcccacccagtcacactcattaagaactagctcttttcttcctctattgtccttattcgaatacaccttctgcttggttctctatttggatcttaaccctctcatgcatcttctttacaaatactgacctagattccccttcttatgtataaaacaagtgtccggtgggaagagaatgaggtctatctgtgttacgggattgaacccatatacaacctccaaaagggactccttggtggttctataaacccccctgttgtaggcaaattctacatgaggaagatactcattccaagacttatggttgcctntcagaacagcccttataagggtggataaagacctattcactacctctgtttgccatcattttgtggatgacaagtggcgagaaaagaaattattc

SEQ ID NO: 62716 - DNA, 264 bp, Glycine max
  unsure (1)..(264): unsure at all n locations
gtcttctatattgattcaattatctcatactcatacctgttttcccacttaacaatgaataattaagaatataagagaaatatttaatactttaattaatctattgatcttgttanaatgaccgcggaatattataccatactggcagaattaaatgatttcaaagagattatgactgaatttaattaaatgtataatgacatttaaaaacttgccacatatttataccctgtttatttgaatatggtacaatataattttacg

SEQ ID NO: 62717 - DNA, 434 bp, Glycine max
agcttgcctgtccgatgcagcagtaatgattgtcctatttatgttggggaacggctacgaacccggaatgggtttaggcaaagacaacggcggcataactagcctgataaatgccagaggaaatcgtgggaagtatggtttaagctataagcccactcatgcagatgtaaagagaaacattccgtgaaagaaagagtgggggtcatagctcgcggttgagacaagaaagtgaatgaagcccgccctgccacataagtagaagctctataagctcggctctgggagacgaatgtcaagtggtcgcgatatacgaagatgatgttccgatgtcattggaattggtacaaccatgccctcctgatttacagctgggaaattggcgagtggatgaacaccccatctattactcagcgagcattatgtaaacctttacg

SEQ ID NO: 62718 - DNA, 417 bp, Glycine max
  unsure (1)..(417): unsure at all n locations
actagaattcctgctagctctgcacttattgtgtgtcttttcagcaacctantataaatttattcgtgaatgaatgactcactggtgatattcgagtaaacacgatgaatttgatatacaatccgctaaagcatgctacatgatctaatttaaaacccttcaaacgctacaacagcttattcatgtttgtcacctcattcaaaagtgtaaacttgcatcaacacataatcgatactttacaataaaaggaaactttgatgaatgccttaaaaaggaagatattttgatatcgtatccccaaatacagatatacaccacattcacatgataaatagatcgacattttaacaactaattttgccaagtcgattctattgtatctgtatcctattcttttccatgaataaattacaagct

SEQ ID NO: 62719 - DNA, 430 bp, Glycine max
agcttctatataagctgaaccattttatcattttacacaagttgagatctattcacaagattagagtttatctcttttatcttagtgagagcgattctcctaaattcgtgagtgactcaagaacaccttggctgtatcaaaggacttccacaacctttgtgtgttgacctcgctggaaagagagattctttccttcctttcataatcacccttgttctttcaaaccacaattccagataatccacctttgcccagatatatctcgtggccataacttccattttacgcactctaattaagtgattcttgagcctaaattgaatttcaaaacgagacctttcacctcggtttggaatcatttcatctggagccctgtagattcagttattgacatttctatatttctgtccagccaccacttaacctacgt

SEQ ID NO: 62720 - DNA, 420 bp, Glycine max
agcttcattgcaacagccttgcatgaaattattgtgtggatctatcaatataaatgaagccaacttctgattacaaattccctccattcctagtgaagattcagtggaatgtagttttgaatcaactaagttccttctattgctttggcaaattgaattattttaacataataaagatttgtatatacgtattaacccaatcactaaccatcattgtatcaaaaaggtacatatttgggtattctttctaacaccacatctaagagttatttaattgatgaatgatgtaagttttcctataaaattacgttatggcccattttattcacgccccgttattacttcacagagtccattttttagtcttatttatacatccaaaaatccatttttttttttgactaaagatcctacttcctc

SEQ ID NO: 62721 - DNA, 170 bp, Glycine max
tgtggtcactgggtcctataccaatttttatgtttatcagttatcttcgattaattgtcatttattctggttttttttcttactcatgcgttgttatccatcctttaatggcacacttaaatgtcttaaaataattattctcccttggcgattatgaagtattggtgttt

SEQ ID NO: 62722 - DNA, 425 bp, Glycine max
  unsure (1)..(425): unsure at all n locations
agctntacaaacccatgacgtanaancttgatcatttcttgctccataacattcttgatgaacggctatntgacatctataaaatatataatgcattcttatattaattgcaacgaaattcaagatgaagagtaagaaaacaacaaccaacaaaaacttgccggataggtcaatcttgcagaagaaaaaaaaagggtttataagcaaatggtttcattgtcagcggtgatctgactgataaatgaggatggtaaggctgaaaaacttgttcggcaaaacacaatggagactgctgagcatggaattgaacaacataaaagagggggcatataattgtcaaatgtgttaaacaaaatgctggaagttcttcttgcttatatcatttcaagatgacattaattagatcgtttgttgattgctcaaac

SEQ ID NO: 62723 - DNA, 431 bp, Glycine max
  unsure (1)..(431): unsure at all n locations
agctggctaacttttataataattattctttatccaaaaagntattggccattggtattttacattattggctctcatcgttctttgttaaaaatagagccaacaatgtcagacttttcaagtatgtatgtgttcctcaaatcacaatcatgatgatatcataattcaaattctaactgtctcgcgtcaaacataatggttgtgctccctttatacagtcgtgctccatataacatggttgtgctagttccaaaacacccatgctaaatccaagaagatcattatctgtttttcacaaatggagccatcaacgttatactttttgagaatggtcatgctcctcaaaacacaaccatcctaatcttaaaatataaatttcaattgtcttgcctcaaatagcacgaatgttcttcctatagcatgagcatggg

SEQ ID NO: 62724 - DNA, 388 bp, Glycine max
tgagtggactgaaatttttgctgcccaagattatggtcctgcgggggaagatcctcattagcatcctaaggaggtccatattgtgtgttccaccatgaaaccctccgatgtccaagaagatcatatctttctaaaggcttcttctcattctttggagggagcgggataagaatggctatactacctgtgttccaggtccatcttcagctgggatgacctcaagagggtgctcttggagaaatactttcctgtttctaggaccactaacatcagtaaatatattttacgcgtcatgcaactcattggagaaagcttgtctgagttctgtgaaacatttcaaatattgtgtgctgctgtcctttcaccacatttttgaccacttcttctt

SEQ ID NO: 62725 - DNA, 426 bp, Glycine max
agctatcttgagaaaacttccttgagaagcttctttgagaaaacttccttgagaagctagagcttagctacacacacccctctcataactaagctcacctccttgacaaaaaaaacatgataatacgaaaaaaaagtccttactacaaagactactcaaaatgccccgaaatacaaggctaaaaccctatactactagaatggccaaaatacaaggcccaaacgaaggaaaaacctattctaatatttacaaagataagcgggctcatacttagcccatgggctcgaaatctaccctaaggctcatgagaaccctagggcctacccttggatctctagcccaatctacttggagtcttctacccaatgcccttgcgggataggattgcatcaagtgttttatcgtgggaaccccaatcttgatatc

SEQ ID NO: 62726 - DNA, 420 bp, Glycine max
  unsure (1)..(420): unsure at all n locations
cgctaaagtatgcccgagtcattcatccctatgagatggtgtttaagtattggcgatcagaattgccattccttggattatagggttgaaccaagctcatgcttttacaaaaaggttcatcaagtcaagtcgaaatatggaagtaaccgtcttgcaaaattggggcaaaagatgaatcgagtcacatcactacttcatctactggcaaacatatttaggagtggtgatgtccttgttacttccagtttcaccttaacaaagatgtcatggaccatgttgaaaatctaaattgattcaaccccatatcctggcgtaaaaatcgcaatacttcaactgtacatcattcgcatacatccatgcttttcattggttgcattgctcanttcattctttccttgagaaataaataaaataaaataa

SEQ ID NO: 62727 - DNA, 310 bp, Glycine max
  unsure (1)..(310): unsure at all n locations
agctagctctaaatatacattgatgtntgtatttatgggaggaggttatatgccatttgtgctttaagagtagtgtcccactggtaaaattaactttccaaatgtttgccttcgcaagaatggccccgaggaagcttgcctcaaagaggtccaagaaggacaatgcggccgaaagaactatttccgctctggagttcgacagttcccgcttcatgagcgttgtacaccaacagcgcttcgaagccatcaaaggatggttgtttcttcgggagcgactcgtccagctcatggacgaccaatatactgattt

SEQ ID NO: 62728 - DNA, 400 bp, Glycine max
tgatcaaaacaattatctaatcattccaatccactcaatatatacaattgctcattcaaatcattctcaaacactcatttcatgcaaaacaatccactacatatcattttcaatcaattcattgttcaaacacgcttttggtacaaacaaacaactcaaagtgctgaaatttatataattgaaatttaaaaaaattgaaatataaaatctgaaattaaaatgactgaacataaatcataaaataattgaaaataaactaaaatgttcgagatgcacaaatttaaatgtcctgctcctgtggttgctcctatgcatgctcattaaggtccaacacctgagcagctggtgcagatggtgtggcataatcaagtatgggtgctagggatggctttgggatctg

SEQ ID NO: 62729 - DNA, 412 bp, Glycine max
  unsure (1)..(412): unsure at all n locations
agctngccgcccagctcgcccaggcgagcatggttgcttccttcataagcaacagccttatggaggaatcttctggatggcccaagtgggcctggttgctatttgcaccccccttttactaaatgcacccctactatttttttggtaattcttcttccataacattacaaaactttacgaatttcgtaacgatacttatttttcttccgcagggttacgaatccttacggattatgtatttactcttttttagctttcgaagaagttacgaaaacttaccgattgcgcaaaaacacctcttttcgatttccgccacattacggaatttcacggattgcgcaagcctgcttccttttgatttttgacaggcctcgggacttcattcattgggcaaccaaggacgccaagtgtc

SEQ ID NO: 62730 - DNA, 363 bp, Glycine max
tgcataccaaatttcttgaagatcccacggctatccgaagctgtgaagcggttttaccgacgcagcttcatgtagttttctctacaagcttcattgagagacttctaaaacactccgcatattctttcaaagatccctacggtcagatcattggacaaatgtcttgtgaagtttcagattcaatttcgagaagatccaacgttttacgaacgctaagcagccgttttactgaggcagcttcatgtagtttctctagaagcttcattaagaagctttcctcaaaactttctctggtttctttgagaaatttctcagaggctttttgacgagttgatcctatctattcccccctctattactaat

SEQ ID NO: 62731 - DNA, 350 bp, Glycine max
  unsure (1)..(350): unsure at all n locations
agtcttatgtnagaacaaattcgtgagtgttttttggtatctaaatntacacatcgacacaccagggtgtatacattagccatacaaactcattgccgtattttttggaggtaactctaactattgtcccatgtactatccattaagattatgagtgaactttttattgtaaattataactaaacctgaaggacggggcgatgtgatataaatcatcccctcattagacctagtatttatacacctttggagtcgtgacccacaaaaaagtcactaaaggctatcctgtcaagcttaatgcgagtgtataatgtaaagaattggaaaagtgtgagtgtcgcctcactatc

SEQ ID NO: 62732 - DNA, 420 bp, Glycine max
agcttgtccccgattgtgaagaattttttcttctttatgaatcgatgcccatttgaggcatttttcctgatcacatctatgccccacatggagaatggccacggtgatgccaactcgttcaatgagtacaggtgagccattaacattatcaaccaacgtttggcgtttattggctttctctcaaattgaccacaacaattaattctgcatagtgagccattaatatccctccctcggaatctttcaagccatggcatgtccattggcatgggtaccaaatgattcctcatgcattttcactagcatctgttcggcctcttttgcattcacacatcagagctgcaccatgtcatggttttttttatacaagacactcccacttatgaggagactggctaccaacctccataatgtcctctt

SEQ ID NO: 62733 - DNA, 279 bp, Glycine max
  unsure (1)..(279): unsure at all n locations
cctgcggcatgctagctctgatgcancatatgtgagaggtaattttacttttttatgatgcgctccatgagaggttggatcaaatggataatacacatcacaatgcataacaaaggaggacactagggaatgatggtgtttctacacaaaaccgaattgatggtatgatactcaacattcccccctctaaaggaaaaataatccggaggccttcttggatgggagatggaatagagcatgttttctcatgcaacaactatgaggaggacaaaaaggtga

SEQ ID NO: 62734 - DNA, 429 bp, Glycine max
  unsure (1)..(429): unsure at all n locations
caagcttcaactgaattacaacgctccaatttatnttataatgttgtaatcgattacaatgtnttggtaatcgattacctgtgtgcttgaacgttgaaattcaaattcaaatgtgaagagtcacattctttcacaaaaaagctttgtgtaattgattacactattttggtaatcgattactagtgaaagtttctggacaaatcaaaatatgtaactcttcaaatagttgttgacttttacaaattgcttttaagtgttattaaaagtcataactcttttaatggttctcttgactagacatgaagagtctacaaaagcaagactttgtgttgcatgtttacatctatccaatctatcaatcaatcttttccaattcattctttacacaagcgaatttgtccactttgatttctgagtctctttgaattc

SEQ ID NO: 62735 - DNA, 448 bp, Glycine max
  unsure (1)..(448): unsure at all n locations
caaattctgactatcatagaccttgancccgtttgttaatgccaatcgntaccctcttaagctgaaaataaaataagagaaggaaaatttccaatcataggaaaaaggagaaggaaaatttccaatcacaggaaaaacgagaacgaaaattttcaatccaaggaaaaaagagaggaaaggaaattcccactcatagaatgggagaaagcatatagaatagaacggaaattcccattcacagaatgggataaagataaaaaaagaagaatatgaatgggatgaatgttcccgatcatagaatacagaataaacatgcataaaggtctttggaccggacaatatctgaacaatacaaaattgtctccatatgaacaactagaaggaaaggataccacgacctaatatggtcttcctcctttaattgccacccaaaatcttgagcgctatc

SEQ ID NO: 62736 - DNA, 433 bp, Glycine max
  unsure (1)..(433): unsure at all n locations
agcttcaaaccaaggtaaagcattatatatgtatcctaaacccaccaaatttagtgaattntcaagggttgaaaggtgaaaatgaaaattaggtgattttggggtaaactctcatcttcatcaagtctataacattgaattagacttgctcaaactaattttaaggtaaaatcttcacctattcaaaatttggacctctccacactcaatttacactataaatggctcttttctttcacatttgccacttattttcctcatttgctctgaccaagctttcctacaagtcctaattgacattctaaactagaataaactcaatctaaactcaaatttccaataaccccaaatttggctttctaaccctcaaaatctcacacttttccacctacaacactaccattctcacatttaactctaagctaactctccc

SEQ ID NO: 62737 - DNA, 410 bp, Glycine max
agctttatgtaaccttgtccagttatacctttatgatcactcttagaaaggtaaagtatagatgctatgctgaacgagtcgtgttgcttgtgagatcagctttcatttttttgcaaacctgctcctgctctgtatctataatctttcttccgggttcaagctaaatacattatgtggattgtactctgcggctcaaccagcctttcactctctcatgacatggatgaacggaatcactgcttattttcttccaaatatcctaagtgcatatcagtggcttggctaacttatcagattttgtttactgaggtttcatttattgtattgataagagcacaataatatctttctaccgatgtatacataagccataatccttgtgacttttgatcatcttgataccgccggct

SEQ ID NO: 62738 - DNA, 386 bp, Glycine max
  unsure (1)..(386): unsure at all n locations
tttttatctgagntacttttaatcttgagcttctttctactgagcttgacactgcgtgaaaaaagttccaatgtgtcttataattaacttattttgtcctcaaaaagctaatgatcaaaagcttactaatatgattagctctccatgtgggggtttctctgtaactaagaactccacggaagtatatttgtggtgttgtcctaacatattaacatcaatttataaacttaaacttgttgctcgaactcccatctataaaacattatccctcatagctctgctcagcactctccatgcttggggaatatcataggaggctaggagcacatgaatgtataatctatactaaatacagtctaatttgagatataggtctcagaaaagct

SEQ ID NO: 62739 - DNA, 423 bp, Glycine max
  unsure (1)..(423): unsure at all n locations
agcttgttacagaacttatgatatattcaattcatgcttgtncgcacatcgttcgcgtgtatgatatccactcgacatggtgtgaagtagaggagacctttaatcctataatgcaacgtggcggacaaaagtgggcagttaacttgaatggccattattgtcaatgcggaagggattctgcgttttactatccatgttcacacattattgcagcttgtggttacgtgagcatgaactactaccaatatatatatgttggttacaccaatgagcacatcttaaaagcatacttctcatagtggtggcctcttgggaatgaagcggcaagtcctccttctgatgaggcatggacactaatccttgaccaactacaacttgtgctaaaggtcggcctatatctacaaggatatggaatgagatgga

SEQ ID NO: 62740 - DNA, 429 bp, Glycine max
agcttagccagttgcccatacgtgcttagtctacacatgtgcacttagcctgcacttgtgcgcttactccaaatacgaaatattttaaaacatggaattctttgggcttatcgcagcgtgcaagcttagcgcaacaaaacaacatgtgcttgctaagcgaacacatgcacattgagcgcatagcataatcagacaacaaacaacaacaaacatttgcacttaaatcaactaacacaaatattcatagagtcatgagcataaccaaaatcaacctaacatcaacacacaaaccaactaacacaattattaaacaagttacagaaaagaggagaaagacacaaaccaactaacacaattattaaacaagttacaaaaaagaggagaaaaagggtagaaatcctgggttgtctcccactaagcgtttcttta

SEQ ID NO: 62741 - DNA, 414 bp, Glycine max
  unsure (1)..(414): unsure at all n locations
tactccacacaatggngactctctgtgaatgaagcggctattcctccttctgatgatgcatggacacatatccctgacccaattacaattcatgcgataagtcggccaatatcaacaaggataaggaatgagatggattggctcgaaccatctgagcactgacaaaaatgtagtagatgtggagcagaatggcacaacaagcgtcgatgtccaatgcaatctgaccgtgggagttgttcatttaattgatttatgtatgctacacgagtgacttgtattggtttaagttgtcttgaatgtatttactntgtggtcttcaatgaactcgttagttagaaacattacttattttggtttgcgtaatttagttattttttaacattacttattttggaatgtagcagtctcttaatg

SEQ ID NO: 62742 - DNA, 417 bp, Glycine max
agcttctagagaaagctacatgtagttgtctcggtaaaaacactgcccagccttcattaaccgttggatcttctcgaagattggtctgcaacttcacaaaataattgtaaatgatctgaccgttgggatctttgagaagatgtctggagtgtgctagaagcctcttaatgaagcttttggaggaagccttcttaatgaagcttctagagaaaactacatgaagctgcctcggtaaaaacgctgcccagctttcgttaaccgttggatcttctcgaaatttggtttacaacttcacatgacaatttaccatgatttaaccgttgggatcgttgagaaactatctggagtgtgattgaagcgtccgttcccgagagcatctcttatttaagcatttcagcctttgctttcttgtagctt

SEQ ID NO: 62743 - DNA, 410 bp, Glycine max
  unsure (1)..(410): unsure at all n locations
aaatctaaccttgcgatttggcttgctttagaaagatcatgtgtgtctgaaaaaaggcgaatttagtcatcctgcttggacgaatgagaaaactggggcacatgaaaagggtgagagttatggagaagcccatgctgtgactgccattcctatacaaccaagttgcccaccaacccaacaatgtcattactcagccgataacaaccttctccttaaccaccgcccagttatccacataggccatgcctaaaatcaaccacaaagcctacctaccgcactttcaatgacaaacaccacctttagcgtaaaccataacaccaaccaagaaatgaattttgcagcgagaataccttataattcaccccaattccagtgtcctatgctgactngctcccatatctacttgatat

SEQ ID NO: 62744 - DNA, 439 bp, Glycine max
agcttgcatgaattacattctccacctttctcaagcatattctttatgacatcatcaaaatcttcatgattgacagattatgcttatctaatctacctaattaaactaattacataaaacaaagcccaaactcgcagcccaattgttcaagtgcagatattttgacttctaagcttaatttgaccctcgaaatggcagaattggccaaattttatttgtgaaacaattgaagatatttttcttagcttgtgagggactactcacatgctccatttgtgcttgagtctttcaagaatcaagagataccatactcttgttcttatatgggatgccttacccttttcaaaaggtttaacaaagacaataagaactcactctctaatctacaggaaattgtacaaattgaagcacttgaatgctttccaataataagtgtatt

SEQ ID NO: 62745 - DNA, 339 bp, Glycine max
tactggagaactctcattctaccctgtggcgagtggacctcacatatgtcttctacaacacatctatcagctttacttgtaatctcgtactcattgaactcttattctcatcgaaccatgtattctaggtttgagaactcactactgaatagaggtcttatctgtttattaactttgaacatcaaatcatgttccttggtaatgactgctagaccgagtatggaatttatattattcggtcaatatctcccaagacccaaactcatcctcctttttctctatctccaagttatcaagcatcctctgatctggatacattaacaggtatagtgacacttg

SEQ ID NO: 62746 - DNA, 435 bp, Glycine max
  unsure (1)..(435): unsure at all n locations
agctntngcctcanacacattgtttgcaacatatcattgtattggtaatggattaccaggcggtgtgattgattaccagaagataagtttgtaaatcagcttttcaaaagggttttgaaatttgaattttgaatcttgtaatcgattactagatgtttgtaatcgattaccagtaatgacacttcaaaagacacctttaaaagtcacgaccctgcaaaatataactgtgtaatcgattaccaatgagaaaattttagaaaagctttttgaaaagacacatctctttaaaccattttgaaaaggcatgatggacttatatatatgtgtgtctgactttgaaaacataagagagagatgttctaagagaacttaattgtctaatgctctctcaacaactattgggcgaacacttgcaaatctatagagaattcatct

SEQ ID NO: 62747 - DNA, 388 bp, Glycine max
  unsure (1)..(388): unsure at all n locations
acatgtgagactaggtgttggtcgggcgatggtgcacaacaaagcgttccacatacacaaagcgcgcataaacccaccatctcctgttgcccacctccaactgagctcacgtactcccacgtagcccatatcctcgtttctctcaataccgggtccccataatcctcccaagcttccacacattcaagctaaaccacatacatacagcacatgctatcacagccaatcaaaacagagcaaggcagagaactctgctcaacacaccaactaaaatcatagcttgtctcacttaaagacccgaggaacaattccttcgatccaattcactaaccggtggatcgacttcaaaaatntactggaaatctatagtgcatcagcctacattttg

SEQ ID NO: 62748 - DNA, 340 bp, Glycine max
agcttatcgacctgaggtccttcaccaaaatttctatgtaccttgtggaaatgggaaaaacttttattggaggaggaggcattggtatacacattgattgaggaaaaagcacagtatctgtaggtgattgtgaagtaatatcaccgacaaactctctttcatgctttagcacaacaaaaaaaagtttttaccctaggaatggtttatgtttcattagtatgacttgagatttgataggtgcatagacattattgaggccacccaaaaatggatctcacagttatcttcacgttctttcttgagtttggagatgagcccacaagaacaagaactttaacat

SEQ ID NO: 62749 - DNA, 428 bp, Glycine max
  unsure (1)..(428): unsure at all n locations
agcttgaagaggatgctntaatggaggaaaataaagatatgaagggggagctcgaaatcgaacgaatataacatggaaagaagtggaactttgaagtgtatctcataagactttcattcatcagagttacaacaagtgttacacatgcttctagttatagactacgaagcttccttgagaagctttcttaagagaactctcttgagaagtttctttgagaaaacttccttgagaagctagagtttatctacacacacccatcttaaaactaagctcaccttcttgagaaacttcttgagaagctagagcttagctactcacacccatctaataactaagctcacctccttgagaagctctcttgagagctagagcttagctcacacccctataatatctaagctcacccccatgacaaaaaatacatg

SEQ ID NO: 62750 - DNA, 403 bp, Glycine max
  unsure (1)..(403): unsure at all n locations
tctcctaacttttttattgagatgatgcatgngcatgcgcgtagtcctatgatgtcacaaccaacaatcatctatcttaattatcagacaactcatctcatgagatgatgaatgctcaatgtttaacatattgatattacctaatttcttgccaatatggacaacctcaccggacatagcttcactaataagacaacgattcttactgaattcaattttgaagccttagtcacatagttgactaatgctcaagaagttatgctttagtccatccacatagaacattctttatctgcgttttgtactactttccaatatttccttctcccattatctttactttattgttggctcctgtcacaacctacccttcggcgggagggcgacgcgagactcacgtgtg

SEQ ID NO: 62751 - DNA, 424 bp, Glycine max
  unsure (1)..(424): unsure at all n locations
tacttcatncaatgaagatatgttcttgttttcttgtgggtgagagatgtaagagtgagtagtattaatagaagaggaggagatatgaaatactacctgcgtactttccccaaaagcagacatggttaaagcttattggatatatggcgggaaacagataacatacaacatcactgaaaaggagttcagccagaccacagctatatagataaaaatctcaaaggaatataccaagtggtatctacccaacccatgcaaaggaaccacgtgtccagtgattagcctaacgaaggttatcactcttggataaagcaacgagtgatccttcccttgcccaagtggcacctcatcctccgttttaataatatatattccactcacctcatgatatataacaaggatattttgtggatagctctcaccc

SEQ ID NO: 62752 - DNA, 248 bp, Glycine max
tcaaacaataccaccaatttatgttggttagaaccccacccactgaattttaaaataattgtgcactatttatccgatgaacgatcttctcagtataactccctgatttttgcatatttttcaaactagatcttaaactaagactaagaccacctgaatggtctctgtgtctcctacttaagaaacgattaaaaacatggaaataaaatttgcctacaacctatacaaaaggtgctagctcatttcta

SEQ ID NO: 62753 - DNA, 428 bp, Glycine max
agcttaactcgtggtgaggcgggttgactttcttatctcacctaaaaaataatctatagtattttgtaatattgcttaaaattttaatatattatgttcttttaaataaaaatataataaaactcacctaaaatacacttttaatattttataatattgttcaacattattttatttagtattttttaccagactatctctaacaaaaatggtcaccttataaatttgctgctttataactctaaataaaagttccatgcacatatacactattaaaaggcaccttaagatgttatttatttaacgttttctttgaaaattataatgttcatcgaggaaagacataaagtctaataatatttgtattttactctgttttaggcacacaagagaaaatatattataagtcttgaataagacacatgatg

SEQ ID NO: 62754 - DNA, 264 bp, Glycine max
gaatttaaagagtggagggaatctatatagcatgtctccacttgcttgataatagcgaatacctccactagagccttctctctttattaatgtgtagcccgtgggatgcatacccgccccacaaagtacctttgatgatgatgcctctaaaacaaactctgagttatatttgttgtgggcattattaggacccctacatttgccaagttccaatatgggaagagccaacctcctgcattactctctgattttggacttgctcca

SEQ ID NO: 62755 - DNA, 351 bp, Glycine max
  unsure (1)..(351): unsure at all n locations
agcttcggaagaaagtgatgaggtacaagctctatatgcagagcttgaaggagcctgngtagtcgaagagaagttcaagtccatagccatcaaagtctgaaaagagtatgatgaactaagggatgtcaatatggccaccgatgaagccttggaatgagaaaccaagatagcccgaatggaagaacaccgaccagagcaaagttttgaggggctttatatggcagcaatagtaagctcaagctccgaagagaggaaaggaatcatcacgggtcaaaggcatgatcttgaaggacgagctaaaggcttaccttatgtcgaaaagaaatttgtccccacagttaagcgagactg

SEQ ID NO: 62756 - DNA, 305 bp, Glycine max
atactctctgctacccttcttcaacataagtcaaactttattggttatgatcaagcttttctttcaccatgcacgctatctactgactaacaattctaactgtgacgctacttgcatgtcctttctcatctaacatacacactcgcttcacctcttgatcaaacatactctacatttcaatcatgcatttaattcatattcaccattccaaactcatatcatcactgcattttcaagagtcaagttaaaatgttcttatgcttcatgaactttaaaatggttcaaaactatgtgtgaaccatatt

SEQ ID NO: 62757 - DNA, 329 bp, Glycine max
cctatgccgtctctacatacaaaaccagacccaccataccaatcatgcaaaatcatatactgataacatcggggcattttaccaaacacttggtgggcgctcggtttgacataaattgcaatatatagggggcaatgtggcatgtcccatttgctttataaatccacatatgcctgaggccttcttattcaaatactcaattcaagaaaacataccttattacaaaccaaaactgtcccacaaatacagcacattctacaattttgaacaccaaaagatgaaaaaatataccatgggaagctaatatcatctacgattgaatacttact

SEQ ID NO: 62758 - DNA, 412 bp, Glycine max
agcttctaagaagcagaggatgataaatattatatataagttattgtggtccacacgctaagcgcatcccttgagctaaacaccatttccttcacacgctaagcaagctgttgttcgcgctaagttccttgacccctgctcattggttggatggtcccactaatcgagtgcttaacgctataccacaaaaacccctttggattttaattttatcgaattgcgcttagagcaaatgctcgctaagcgcaattccttctctggaattgcaattattagaattgcactaagcacgaatgacacgctaagtgtgggccactactgcatctaatgagcattaattcgctaagcgtagcctttggtggctaagcgcaaggtgcatgaccaatcaaagtacagtacccgttaagcgcaa

SEQ ID NO: 62759 - DNA, 405 bp, Glycine max
agcttcatacaatgaatatattacctatattctaatggcacatcctatcagaacgttgtgttcccgtgtcttctagcatgagactcttcatagtcatccacctattcatctgctcccccgaacacaagttcaagatcatcacatgatccaaacacaacaacacacagggagtgagttatcacactccctagctattagagaaacaagacaatgaaatatacatattatataaatgagataccacttgcttaaacatagctcacgtaacttcatcacttcatcattcaaaattcacttttcaattatcaatcacattacacaagaatctcacacttcgatcatgatataataacacatcaattagcaagcatatgcaatagctatgcttagactcaatcttatatg

SEQ ID NO: 62760 - DNA, 255 bp, Glycine max
  unsure (1)..(255): unsure at all n locations
ccaacgagagcaaggtcgagtcgatatgatggaagaagcagcttaagagatcttggacaccttctgagaaaggagaggcgaacataccctntgctagaggccattcaagccgatcctccgatatgctaagcttttaaacaatctgtgccccacaaaaggaagtttaagggcagtgaaaggattatcatgggctgaaacgtgtcagcaatgatagcgaaatctgttcctcatatactgagaaatgccacgacccag

SEQ ID NO: 62761 - DNA, 358 bp, Glycine max
gaaaatgagattttccaccatggggggtaggattgcatcatcctttccaccttggaaatgatttgacctcatatcccgaggttcttcatactctgggctctttccttgacacctataaaaagaataaaaacatatgtattagtggtgttgggtatgttagagtaggtaaggtctgaaaacccctctcatagagatattcccatgaggaaacatggttcctcaccaactcaatgagtggtgctacaagtatagaaaaatatgggacaaatcttttgtaaaagtttgttaagtcatggcagccccgaatttcccttatacttggtggagagggccaatcaagaatggtctttattctctt

SEQ ID NO: 62762 - DNA, 417 bp, Glycine max
agcttccacaacatccaagatattcaacattcaaacatcatgaactatccaaaaccaagaaaacagggcagaagcaaaaaactctgcccaatacataaaccaataccaccgctttccttactcaaataccccagtaacattctcttcgttccaattcgttcaccgttggatcgactcgaaaattttattggagggccctacaacataagtctacattttgaccgttgggatctgctagaaaacatccataacccaatatgtacaaccctttcctcaaccagccatgcataagctttttctgcacatacacaaaattctgctgcacattttaacagcaaaattctggataatagtgcacattttcgaaatcactcttgctctcatccaattgtgcgcacattggatcctacaagtcct

SEQ ID NO: 62763 - DNA, 314 bp, Glycine max
  unsure (1)..(314): unsure at all n locations
agcttgaagtgagaaagtatggaagagtcaattntcctacttttattcgttgaccacagtggtacctgcagatatgtcgcgagggtcatgagaccttgcggacgtcaggtggggtgctattgcccaaaaccaagcttgaccaatcccgaccgaacccgggcatagtcaggcagtgagaacctgtgacgtacctatacacgcgagctcctgtcagctaacctataaaagaatctagaccacccagcaagaaggcttgtgtggtggctggccagctatggatcttgagcgatatatggaatatgggctctgctgat

SEQ ID NO: 62764 - DNA, 238 bp, Glycine max
tattcgaaaataattgatccatgatttagattgatgtacgccttttataaaattacttgaaagccgacatttagccgaggtgatatttacttggggaacattctctttgccccttattttggaaggggaaactacgaactgtgtttttgaaactgatttaattataaaacaaatgggagttgccaatgggagttgcgacttgcccttaaatcgcaagtggcgctcgaaccccccttta

SEQ ID NO: 62765 - DNA, 374 bp, Glycine max
agcttctgttttcaattatgagcatctcgatatattactggactcaatcggacatccgagtaaaaagttattgtcgtttgatttttatcaaagcttcagttttcaatttcgagcgtctcgatatactactggacacaatcggacattcgagtcaaaagttattgtggttggaatttgctcagagctttttgttttcaattacgaagcgtctcgatatattatgggactcaatcggacattctagtaaaaagatattgtcgtttgatttttctcagagcttctattttcaatttcgagcgtctcgatatactacgagacacaattctacacccgagtaaaaaaagatggacgtttgaatttgctcccatcttctg

SEQ ID NO: 62766 - DNA, 421 bp, Glycine max
  unsure (1)..(421): unsure at all n locations
tcggatgtctaatcgagccctggaatatatctagacgctcgcaattgaaaacggaagcgctaagaaaagccaaacgacaataacntttaactcggatgtccgagcgagcccaataatatatcaagacgctcgaaattgaaaacggaagctctaaaaaaagtccaacgacaataacttttaactcggatgtcctaatgagccctgtaatatatcgagacgctcgaaatagaaaacggaagctctaagaaacgagaaacgacaataacttttaactcggatgtccgattgagcgccgcaatatagggagacgctctgaaatgaaaaccgaagctctagagaaagccaaacaacgataacttttaactcggatgtccgatcgagccctgtaggatatcaagacgctccgaattgaaaacggaag

SEQ ID NO: 62767 - DNA, 423 bp, Glycine max
  unsure (1)..(423): unsure at all n locations
agctntaaggttaacaaatatgaacaaacaatatttcatgcacgctatgactaaatttttctaanatgagaagaaataaaggagtttgatttactgtaccttttcacagtcttttccacagaaccaatttccaagatatcttgttgatatatctgcagctccattttccaggcacctaacatgatctacacaagtttgacaaagatgacaccaggtttacatatgcagacaaatatatactcaagatattcaggcatggataaaatattaaagtaaaaaaagagagtagctaacttacatttatgttcgcactgaatgcaaggaagtaattgttcaacctcatcatctctgtcaattttcctttggccacaaatcccacaacaacatgatggacaaaaccagtcaccattagggatgtcctat

SEQ ID NO: 62768 - DNA, 409 bp, Glycine max
  unsure (1)..(409): unsure at all n locations
tatgctttcttctggatttatataaataatctctgatgtggcggagatttcagtagaggatcataactcaactgtgtgaactttgtggtttatacactgtgattttacagagggagggggaaatgatttctgttgccactataacaatttttggcaagagggttgctganataccctttgtggctaccagggtgcagtgtacaaggattgtgtgacattttaatgaatgagattgagaagcagttgacttactttgaagtacatgagattcgtctgccttgaagtttgtatagttatgaaaaaggacaccaacctgaattcctcacagcttcaacatcatcacaggatagatgatgctacacgtngattgtcatctttcagatgtgcctcttaatccatcagataatat

SEQ ID NO: 62769 - DNA, 431 bp, Glycine max
  unsure (1)..(431): unsure at all n locations
agctntntgaatcctagnaaaacaatgatttgttggctgtccaacctcattacaagcctagaaaatccttcggattcattttgtgtgtttatttctgtatggtatgagatgaaatgcaaaggttaggacttgtgttagttgtttatgatggaatgagcctaaacacttgtgcttaagtgaaataatgactgtgaagctttgggtgatgatccttccttgatatttgtcattctcactagcttatttaagttgtgactctcatgcatacgttcctatctttgaaaagctgcatgtttgtgaagcgcatctgattgaagcattccatgatattcatttcatatgattaaaatttttctgtgaaacaaacatcactttgattaaccacttgtatttgtcacttgaggacaagtaaaatgttccttcttttcttg

SEQ ID NO: 62770 - DNA, 414 bp, Glycine max
  unsure (1)..(414): unsure at all n locations
cttattccctagnggattgttcctgctctcacctcttctcctttgtcttccgctgcatctccatgttggaaaatcaccattaaaggacctcattgaagctcaagatccagcctccatagaagccccacaagcaagctcccatcaatgtgcatggcatttgatgcgcaatgcaggtaaccatgtaagggacaaacatggcttaaaatgcttgtagagttttatgcttagttatattgaagtcgttgtgtcataccctaatnttgtccgaggattattacttgatgcttctctgttcgtaatgcaattttacctcctttccaagcttcttattcagagctntgntttanggttttcgtttttctgtttagatgcttctgagttcgtaatgcaattttacgttttctgcttctaatt

SEQ ID NO: 62771 - DNA, 417 bp, Glycine max
  unsure (1)..(417): unsure at all n locations
agcttcaacttacagtgtgtgattcaggcttaacgccactacctgcactaagcgcacttncaatgactttaaaactgaatgatgttggcgcttagcgcatccttccccactatgcctagcttgatagctcatcttatagaatgaatctggggcttagcgcaggatggtgcacttagcgcaactataataaattttcacagagaggaagtggcgtttagcgcaccatccatgcaaagctcattgcttaaagtgcaacttacagtgaagatgttcggcttagtgcaatgatgtgcgcttagctaaaccattcagcaattcaatcaggggtctttacgcttagcgcgagcaagctcggcatagcgcgtgaagagatggcgcttancggataagcaattcaaaaaatttctaagtcatttt

SEQ ID NO: 62772 - DNA, 400 bp, Glycine max
agcaagagatggtgggacatatgggtcggccttctatggaaccctgctacacgcattatacctctcttcgtgtgagtagatcccatatcttggaccaagctctaacagagctaacaccccacccaaggccatttttctaaacattgttggtccaccaaaatcgaggacactcaactataaagtgtggcatcctgaaggataatattgaggaccttatcaagttagaacatttgaaagattatattcacaagccttagttctaccgaccatacaacagccattggcaacaccacacagaggtagaaaaattgaaaattgaaaagaacacgagttggtgaaaagaaaatgaagaaaaaaccctcgaccaacaaggcgtgtatcaacataaccgaagaagatt

SEQ ID NO: 62773 - DNA, 370 bp, Glycine max
  unsure (1)..(370): unsure at all n locations
agctnggtgcatataatttatatgctccagctggagggggagtgttataattatgggtattattagatgtatctttagagtagatttccctattttatcttgttgtagaagacagcagtgtgtactgtcttgtcaaagcttgtaaagctgtctctctcctatttgtatatatatatggtatttgaatgaaataaaactaagcaagttagtgaaaagatttcctcctcacatattcaaagcttcaagtggacagactaccaacaaggatgaatctgcataggagacaagtacagattcaggatttgcgttgtcctttttgcaggggtgctgaagaggaggcatctcatctgttcttccattgcaatatgat

SEQ ID NO: 62774 - DNA, 401 bp, Glycine max
ttatattacaattaatcaatattatctgtgacatttgttttagctttgaactttgtttatcggaaaataaattgataatttatttaaatgtatgtatgtattctataatattacttgacagctgacatttagttttaattactaattacttaaaaaaaattatcatacatattatcttactggaaactacaacctaaaatattaaactaatttaattataaaacaaatgggagttgccaatgggagttgcaacttgcactcttatctcaagttgcagtcgcaactcccctttatgcctgcagctgggtaactcgccactcgtagtggcgttattcgtgccacctggcgcttttccacccgactcgccactatgacttgcggtttgttatattctccatgca

SEQ ID NO: 62775 - DNA, 379 bp, Glycine max
  unsure (1)..(379): unsure at all n locations
ngtctttaactaaatatgcaaagttccaatttatttttaaatagcggtatcgattacaatttattggtaatcgattaccagagtatctgatcgttgaaattctaatccgattgtgaagaggcacatcttttcataaaatgctttgcgtaatcgattacatggttatgggaatcatataccacggtctaagttttgaattcatatcaaaagattgagctcttccaatgggtttcaaggttttctcaaggtgataattcttccaatggattttttgaccacacataaagagtctattaaagcaagagctttacttgcattgcaaaaacttagatgatggcttgagggccgtccttatccttatctggccgaaagccttgct

SEQ ID NO: 62776 - DNA, 307 bp, Glycine max
  unsure (1)..(307): unsure at all n locations
gccgaccacaaacaccacgtacgggcaggcaaaggtacctcaggcgaccaccactttggcaatcccggcnccagaaatnaaataaagtgcggagcggaaccacggagcccagaaacagacccagcacgggcacgccccnaagccaaaagaacaacccagggagacgaagcggaccaggcacgggccncagggcaacggagaacaacaacccacgagggcaacagcgcaacggagaagagagcacgaacggggacacagagaagaagaaagcgcgagaggggcaacgaagaagaagggagcgcaagcg

SEQ ID NO: 62777 - DNA, 426 bp, Glycine max
agcttcttgaggaagctacatgagttgcctcttttaaaacactgcccagcctttgttaaccattggattgtctcaaactttggtctgcaacttcaaaagacacttgtccacaatctgaccgttgggatctttgagaagatgtctggagtgtgcgctaagctttcgtttccgagagcatttctcatttgaacggttcagcctttgcttttgtgtaccttaggaaaaacatcatttcttctcctttctttcttccaaaaccatttctaacgtcccaagcactttctccatcacccacaaccaccattagccaccacaaaccatcgttgttcttcgttgaaaccccacaccgagaggaacccttcaaccgaagccaaatctttcaacttggctcgcgggttccgtagagaatgaaaccctattctgtct

SEQ ID NO: 62778 - DNA, 383 bp, Glycine max
  unsure (1)..(383): unsure at all n locations
tctntcttttatggcttattccctaatggatggcgcctcctctcacctcttctcctttgtcttccgctgcatctccatggtggaaaaccaccattaaaggacctcattgaagctcaaagatccagcctccatagaagccccacaagcaagcttccatcaattccagaggctcgaagtgtcacccaatacggtccaaccacactatggaccactcctcgactttgtaggagaaagagtagaaactagaggctatgtagacttaatgaccacctttggtcaaggaagactctcaaggaaaatgttaaacgagcttggagccatcgtctctacaccacatctcaagatgaaattctcaaccttgatgggagaaatcttaactatca

SEQ ID NO: 62779 - DNA, 343 bp, Glycine max
gtcacctgcggcatgcaacttcctaataacaagaattgttgttttgattcttatcacacactagggaagtgctacgtattcattacctatgcttattatagaatgctcatagcactacacaatggccatagactaggagagtctgtgaactattatactagtcctatacactaaagctatattgttatcaccgactagcaggtattcgctcagtaaatccaacatgagattgggcctcttcccgaaatagaatggagaagactgtcatgaaatctatcctaaacgtgaaatcaaagaaagcgtacattactcggggagataacgacttatattcatctggaga

SEQ ID NO: 62780 - DNA, 183 bp, Glycine max
aagaacactttactctattgaaacgataatataatcgattacattgtacacagaattgatcacgagcggctttaacttttatctctctatatacccatcttgagctctcacatctatgcacaagttcatgaagtgcacaattgcctgagatgatatatgagataagtgagtcgagatactctc

SEQ ID NO: 62781 - DNA, 367 bp, Glycine max
  unsure (1)..(367): unsure at all n locations
aaaaaanaattaatgttgtcgttattttagagactaaaatgacatgttgaattattaaattaattgatgcttgtaatttgaagaactaatttgatgtattaccatgcttatctctttgtagtatttgtaattttcaatggttngaaaacactaaagcaatactcgaattgtgtttcgttgtattttaatattttgagaagaaaacatgtaaaacaagaaaaagagaagaacataaaagtcatctgtgtaactgatctgaatttnttttaattatattnaattgtttgtgagttcaaaaacaaatgtcattctcctaccgtgtaataatgcttgtactgcaccttctacaagcttctttgtgatatat

SEQ ID NO: 62782 - DNA, 446 bp, Glycine max
  unsure (1)..(446): unsure at all n locations
ngaaggtgtgtggtccaccatcttttcatagtagaatacttgttatgtgtctactatcattatcattttttctccgtcattgaggtgccacttgagctgccaggtctctccacctttgggcgtattcttttgaaagattcgttccccctttttgcacatgttctgtagttgcatcctatctgaagacattatactgacactgcctaacgaatgcaaccactaggtccttccaagaatggactcgagaaggttccaagttagtgtaccaggtaacagctaccccagtaagactttcttggaaggaatgtatcagcaattcctcatcttttgcgtatgcccccatcttccgataatacatctttaaatggttcttgggggaagtagtccccttgtacttgtcaaagtccagcaccttgaacttgggaggggtgataatattgggtact

SEQ ID NO: 62783 - DNA, 452 bp, Glycine max
  unsure (1)..(452): unsure at all n locations
tgcacgcttacacacattatctatctcagacttgatgtttcgaagttcttgtatgaagnctttcctaactagatgattgagatgatgcatgtgtatgtgtgtagtcctatgatgtcacaaccaagaatcatctatcttaattatcagacaactcatctcatgagatgatgaatgctcaatgtttaacatattgatattacctattctcttgccaatatggacaacctcaccggacatagcttcactaataagacaacgattcttacttgaattcaatttgaagccttagtcacatagttgactaatgctcaggaagttatgctctagtccatccacatagaacattctttatctgcgcttgtactaatttcaatatcccttctccattatctttactttaatgttgctcctgcacaacctacccttggcgggaggcnacgcgagactacgtg

SEQ ID NO: 62784 - DNA, 403 bp, Glycine max
  unsure (1)..(403): unsure at all n locations
cataaaacagccccaccatcccaattttgcaaaatcatattcatatatcattggggcatttcattgagcacttggtgggcgcacgtttagacataaattgcaagagaatgggagcaatgtggcatgccccatggcttcagaatacaaccttggcctaaggccttttcattcaaatcctcaattcaagaaaacaagcaccaaagcaaaccaaaactgccttacaaatataagcatgttctcacaattcgaggtaccaaaagatgaagaaagtacatcaatggaaagcaaaaacatcaaggatggaatacttacttgttggagtgaatngaaataccaaaaatgaaagcaaaatgcgatcaaaaggcttangggagcaagaaattgcaagccttcgtgttctcta

SEQ ID NO: 62785 - DNA, 360 bp, Glycine max
  unsure (1)..(360): unsure at all n locations
cgagatgcagctgactagtaaatggctgaatgtttgtggatctgattgtgtattgaaccatatactccacagaaagccttttgccaaggtcctcaactgggccccccgtggaaaatataatacgctgatattaaattgatatcaatatagaaaaggtttaagtgcaaaaaaaaaagatactacagacagtgaatttacactaaacanatgcacacatgaactgatgtggctccttttaggcaattattataatgactcaactcgctgatacgtggattgacttttactgatatagtcactgtttacacccgagatcagctgacataacttagcagttgacaatagtcacaaatatatgcc

SEQ ID NO: 62786 - DNA, 380 bp, Glycine max
  unsure (1)..(380): unsure at all n locations
acttcaaagatatatttcctttgatgcatgaaaatgcctttctcagtgtaggcaaattcaatccccagaaaataggatagaatgcccagatcaatcatctcaaattcactcttcaatccttgcttgagtgattcaataacagtcaaactactaccagtgatgagtaaatcatcaacatacaagcacaacatcacaatatcacaatctcagtttcacttattgttttgatatgcacaccatgctcaatngagcatttctgaaagccanaaccagtgagaaaggagttaatccttttggtccatgccctangtgcttgnttcaagccatacaaggccttcttcagtctcaaaaccttttattctttnaccttacatataaag

SEQ ID NO: 62787 - DNA, 304 bp, Glycine max
tacaatacggacatggcttccgatcggaaccaacttcagagtatgactatacgagagcatgagtcccgtaaggaatatgcccaaagatggagatgcccatgacggagagggagatgatcacaattatggtagatacgttacccacgttctactatgaaaagcttataggctacatgccagctaactttgcggatctcgtcttcgccggagaaaggattgaatccggactacgaaaaggcaagttcaaatatgctgtcaatatggcccccaacaacaacagaagagccccagtagtgggcgcgag

SEQ ID NO: 62788 - DNA, 461 bp, Glycine max
actatagcttaatcggacttgcatatgaaaagttatgactcattgaatttctcgagatcttccattgttcaatttcgagcgtctcgatatatgatgcgcctgaatcggacatccgagtgaaaatttgtgatcatttaaatttctcgagagcttccgtggttcaatttctggcatctcgatatattatgcgcctgaatcggacatgcgagtgaaaagttatgaccatttcaatttctcgagggcttccattgttcaatttcgagcgtctcgatatgtgatgttcctgaatcggacctccgtgtgataacttatgaaccattgaatttctcgagagcttccgttgttcaatttcgagcgtctcagtatgtgatgcgcttgaatcagacatccgagtgaaaagttatgaccatttgaatttctcgagagcatccgttgttgaataatcaacgtctcgatatact

SEQ ID NO: 62789 - DNA, 438 bp, Glycine max
ctacgctatgctgcaaattacaatagacctcctcaacctcagtagcaaaatcattctcagcagaacaattatgacctctccagcaacacatacaaccctggatggaggaatcaccctaacctcagatggtccagccctcatcaacaacaacagcagcctgctccttccttccaaaatgctgctggcccaagcagaccatacattcctccaccaatccaacaacagcaacaaccccagaaacatccaacagttgaggcccctccacaaccttccctcgaagaacttgtgaggcaaatgactatgcagaacatgcagtttcagcaagagaccagagcctccattcagagcttaaccaatcagatgggacaattggctacccaattgaatcaacaacagtcccagaaatctgacaagctgccttctcaagctggtcaaaat

SEQ ID NO: 62790 - DNA, 477 bp, Glycine max
  unsure (1)..(477): unsure at all n locations
cagcaagctctatagaaggtcgttcctaanttcttacaattgcatcacctctcaatgacctagagaagaagaatgcggcatttaactggggtgaaaaacaagaccaagcctttgctttgcttaaagaaaagcatactanagcacctgttctagctcgttctaactcttctgaaacttttgagctagaatgtgatgcctctggagtgggaagtggagcctgtttggtgcaaggtgggcaccctatcgcttaatttagtgaaaaacttcatggtgcgacccttaactaccccacctatgataaagagctntatgccttaataagagcactccgaactngggaacattaccttgtttccaggaatttgtcatcatagtgatcaacaatcacttaagttcattagagggcacagcaagttatacaaaaggcatgccaaatgggtagagtacctagagcaatntccatatgttatcacatac

SEQ ID NO: 62791 - DNA, 329 bp, Glycine max
  unsure (1)..(329): unsure at all n locations
gagctccgncggtcaatgtcgagaatctcgacatattatgcgctcgagtcgaacatccgtgtgaaaagttatgaccgcttgagtttctcgagagcttgcgacgttcaattacgagcatctcgacatattatgtgcccgaatctgaccttcgtgtgaaaagttatgaccattcgaatttctcgagagcttgcgatgtttaatttcgagcgtctcaatatattgtaagcctgaatcggagctcagtgtgaaaagatatgaccattcgtatttctcgaaagcttccttggttcagttccgagcatctctacatggtatgtgcccgaatctga

SEQ ID NO: 62792 - DNA, 396 bp, Glycine max
  unsure (1)..(396): unsure at all n locations
agcttgactaggcgagttgattntagccttaatttcactttagttattagtcaattcaattaagaatgagaaatcccaaagagaaaacgtccgattgattnttcgctttattttactaaaagggcattttttgattattattttacctcttttttgatttccaacgtggttacggcacgaccgaacggtcggaattcatttaaaccgaaattaacggatgatacgattcaaacgatcagtggaaatttattttatttttagattaggcgagaaatgacttanataaatggcttaagcacgtcaaaaggtggtataaaaagcgaatganaacaagaataaaaatacatganacanaatgtggaccaccacgggtacatagaatgaattgaaaagctc

SEQ ID NO: 62793 - DNA, 446 bp, Glycine max
  unsure (1)..(446): unsure at all n locations
tcttattntcagcanatgaagatgaatcagtgtccacattatggtttcctctaaggacaatagcatcatttcttgcactaaattgttgggagttggaagccatcttctcaatcagattcctagcctcagcaggagtcatatcaccaagagctccaccattggcagcatcaatcatactcctctccatgttgctaagtccctcatagaaatattattgaaggagttgctcagaaatctggtggtgagaacagcttgcacacaatttcttgaatctttcccagtactcatacaagctctctccaataagttgcctgatgcctggaatgtcttttctgatggcagtggtcctagatgcagggaagaatttcttcaagaacaccctcttaaggtcatcccagctagtaatggacctaggagcaaggtagtacagccaatctttcaccact

SEQ ID NO: 62794 - DNA, 348 bp, Glycine max
atcgagcgtcctctcgggcctgatatgcctcgaacgcataaacccttcgaccgaccggtctactccagacatgatactccatgatgtccaccactttatgctattaaatgatggtgatggctgaattcacacgacttttgtattgcatatatggtgctgaatctattaacaaaaaacacatttatatgatataaaaaaatgatgagatcctcacacccgatgagaataagataggactatctactggtgctaaactgagagatattacatacagatgtactcaagaacgagagatacatctacatcgtttgcaccgtgaattcaaatctacacacatcacaccatcta

SEQ ID NO: 62795 - DNA, 433 bp, Glycine max
  unsure (1)..(433): unsure at all n locations
ctaagctaatccgactgcatctgacattgtgggcaattaactatttttgatatatatatgcacaaaaagcgaattntgatatgatactgttattgtttataaagatctctttacatatgttgggtctgggtccttaattaaagtcttaagttaaaaacagtcacaacctaccctttggggggagggcgacgcgagactcacaggtgcgtcttccaaggaaggaaggcgcacggagtcgccaccaacgtttattcgaggaaaatgtcagaaaaaccagaacgtgtggtctacgaactttaatcgtgaaaggtttggaagttgttnttatgcacggcgaaggtattatcaccccacgcgtccatcacaagggacgacagccttcaatcaagtgtgcaaatatgacttctaaactatgtattttccctttcttctg

SEQ ID NO: 62796 - DNA, 387 bp, Glycine max
  unsure (1)..(387): unsure at all n locations
agctngagaagaggaagtgttgaagggcgaatttttctgttttcattgntgaccacagagtggtacctggagatatgtcgctggggtcaggagaccttggagacgtcaggtgcggtgctattgcctcaaaccaagcttgaccaatcccgacccaacccgtgcatagtcggtcagtgagaacctgtgatgtacctanacaggcgagctcctggcagtcaacagataaaaggaacaaagaccacatagcaaggaggcttgtggtagctggccagctgcgaaacttgattgatatgtgagatatggtctctggtaatcgattaccaagggtgggtaatcgaatacaaggctctaaaatgaagacaggaggctaagactggctcttgtaat

SEQ ID NO: 62797 - DNA, 441 bp, Glycine max
  unsure (1)..(441): unsure at all n locations
ntcttgagaaaacttccttgagaagcttctttgagaaaatttttcttgagaagctagagcttagctacacacacccctctcataactaagctcacctccttgagaagcttccttaagaagattcctaaagaagctaaagcttagctacacatacctctctaatagctaagctcacctccttgagatgagaagctagagcttagctacacaccccctataatagctaagctcacccccatgagaaaaaacatgaaaataacaaaaaaagtccttattacaaagacaactcanaatgccccgaaatacaaggctaanaccctatactactagaatggccaaaatacaaggcctagacgaagganaaacctattctaatatttacaaagataagcgggctcatacttagcccatgggctcgaaatctaccctaaggctcatgag

SEQ ID NO: 62798 - DNA, 428 bp, Glycine max
  unsure (1)..(428): unsure at all n locations
attcaaactattcctatactggacgagtccaaccaaccaatcccaaacaaggtcatattccatcgacttttttggtcatttaaggcatgcatggatgtgttggcattttggaaacccattgtgcaaatcgatggaacatggctatatggaagatacaaaagtgacatttgtagtgcaattggacaagatggtgctaataacatatcttcattgggcattgccattgtcgagggtgagatagcagatgggtagcactttttttttgcataactngatagcacatatgacaccacaacatggtatatgcttaatctctgacaggcacgattcaatcaaaagtgcatacagatgactngacagtgggtggacagcagacaactacatgtgttctatattcngcacatacgccantactacaaaaaatggtc

SEQ ID NO: 62799 - DNA, 422 bp, Glycine max
  unsure (1)..(422): unsure at all n locations
tgtgaagtgcatatttcatacactcgctattcctatctgttggcttagcgagtcatccggtgagcgcaacattcctcagcaaggcgcgaggaagaatctggaagaaggatgagttgtgcatgttcgctgaacgaagggtcatgatgtaggctccattggagcttgtgaggcctaggatcttcttcatcgagggattccttggcttctggaaaataaatggcaacggaatggagaaggaagagagagaggagacgccacttcaaggagaagatgagtctagaagaagttcaccaccataggaggccatggataagagcttggaggaagaagaagatgaatgaagggagaggaagagaagagcatgacaatttgcgctctacaagagctntaaatctgaagtttaatattcaaatgatcaaagt

SEQ ID NO: 62800 - DNA, 442 bp, Glycine max
  unsure (1)..(442): unsure at all n locations
agcttttccctgtatagctcaagtctaagtgttctatccccttcacaatcaaagacgtgaagccttatggagtagttgacctgatggaaccctattctactgacccggagcgcaacttgatagtgaatggctagaggttgaaagtcttacaatggtggcgatattgagagattgaccatcatcatccacctccatgatccatgagggtgttttacgtcaagctagtgacgttaaagaaagcgctactaggaggcaacccaggatttctacccttattcttctattatattaattcatgttgctttcatgtgtgcttgggaattcctatgtttgtggatattgattacatttggctacactttgactntcataaatggagtgagcttgtcgctgctatagtgtgatttctgctcaactttgggtatgctctacatgagtaatg

SEQ ID NO: 62801 - DNA, 442 bp, Glycine max
gggtcaaaggtaaggctaacttggatataccttctatgattctctcggaagatcccgctatacccagaagactcataatctcaaaaatagacttaggactctcccactttaaaacaacttctatcttagagggatctacagttattctaccttgagatatcacctgtcttatgaaactaactttctttaaccaaaactcacacttggacaatttagcataaagttgttggtccctaagggtttgcagcacaatcctcaagttctcctcatgttcttctttagtcttggagtgtaccaaaatatcacctatgaatactaccacacaactatcaaggtacgggtgaaagactctattcatgtaatccataaacacaccagggcattagtcacatcgaagggcatgactagatacttgtagtgaccataacgggtcctaaaggca

SEQ ID NO: 62802 - DNA, 65 bp, Glycine max
  unsure (1)..(65): unsure at all n locations
gacctaagagcacctgaggcatgcagctgagatctatagggcaccttanagttgtcgtatcacgg

SEQ ID NO: 62803 - DNA, 450 bp, Glycine max
  unsure (1)..(450): unsure at all n locations
ctcatattcattntaatatgcatatttatgctttggattatgctcttgtcttctggaatcagaggtatccacacaaacaagaatcctcaatatgagagatgctgaattgttggctgccaaagaagaggttctaattaaacttccgttactaaatagcttgtagaaaattaaactaattaaattgtgttgatctatagcttgctctcgtagcttaaagagtgccaaacagttcttgtggagcatcagcatattttatttaaattacaaagtatgctgtgtgataatgtaatatcatatagaatccctgttctaggagaggaccctgtttctgagctgtatctgttattgtaatagtaacttgatacagtttaaagcttttgctggtatgtgttgacatagtataggcactactacgttgacaagatggttagtactttaaagaatctgata

SEQ ID NO: 62804 - DNA, 496 bp, Glycine max
ctgaggatgccgcttgtatacaccccattctctccctttggaacatattatagccaaagtgcatggtaaaaacaacacaatagcattcatttaagtcaatataacatggaaacactaaaaccaaatataatccaaacattcataaggtaaataaataatccatacattcataagtcaaaccacatttaatcctaagcataaaaggctaagtaccaaatattgaaaggtaatgaaaatccagataactaaaagatatagccaaatacacggcttataatgaacgataataataatctaaaaactaacaaggtggtggtggtggtggaagatcgaagctctgacgaatataaatcacatcctcttcaagttgtgtgatgcgggtatccatgccttcaaagcgaacatccaaagaattgaatcgctcaccaacatatgtgcggaggcacctgtactctgatataacttcagtcaaaagggtagaggaatcattacgctg

SEQ ID NO: 62805 - DNA, 271 bp, Glycine max
  unsure (1)..(271): unsure at all n locations
actcatagctgaggaatcttanggaaccactagagataccgatatcgctgtcagactttgcatgtgagcccgcttagaggtaagggatgagttatgcacagttagggagtagtgagaacatgtgtagtgaatcattggtgcagttttgtttgattatatttcactttgtaaattcatgattagaatatttgtgcttagctatttatatatatatatatatatatatatatatactgcgtgtgtgtgtgtgtgtgtgtgagtgtgtgtgtgt

SEQ ID NO: 62806 - DNA, 390 bp, Glycine max
  unsure (1)..(390): unsure at all n locations
catgcaagcttcccaaacccatggcagaaggganagtgtangctgagnttttattattttttacaaaggccgccatggaggaatgaagaggtggatttttcgccaaccgccatatgcaacttgtgaagggatgtcagctatttcattgccatcagccagcatggtgtgcttatatgatggaacattgtgccttcaccgaagataacactcttttctaatgaatattcaatgatctgatataaattgaatgcggagcgcaataaacttattccaagacgaatccactgaattaatcattaataacaaatattgaaatacactcaacaacttggagggaactaacccgcaaagcaccatntctcccttcggcgcataagacacgcactttgt

SEQ ID NO: 62807 - DNA, 387 bp, Glycine max
ataccctatgtccccaggaacataccctacctcaaacctcgccatcactatcctagctactcggtcagcattggccacaccctcccctacaataactgtgctttttctcctcaccagacgaacttagcacactagatacatcatcattgctaacaaggactagattaagctaaatgaaggagccaccagaaacttgaccaaaaggtacagatgctggagacacattaaaactaccaccgggaacaacttgatggggctgaggagattctgcttggcatgaggcccactgaaacacgccatcagagaaaaactggcattgaagccgctagtcaacgctagtctcgcaaaggtgctagagaaaccaggtactctcatgaccctactacc

SEQ ID NO: 62808 - DNA, 462 bp, Glycine max
  unsure (1)..(462): unsure at all n locations
ttagagcgcctgcggcatgcaagcttagccncaaagtcagcacaggaattcctttgacananggtgtgctcatgctgactgaatgtatgancatgatattcgaagatgagtcgtcacacaaacagtctctacatacttaatcagctccaacaaattataccgaaattaantttattcatatgatagataacatctntaaatcaaacaattaaatgtcgggaaatcttgattaaagatgggtggagtatgtactggaattgatatacatacttaatgaactatattagtttataaatccaaaatcgtatcagctaaatntagtagccatcatgaggagagtgggccttgggcactgggcattggcatcaatgagaaaaggggtgaagagcattaccaanaagataatcannaatgaaatgattggcacgggcatttttcttttttcttttgcattatgcaatc

SEQ ID NO: 62809 - DNA, 456 bp, Glycine max
ctcaagcttcttaacaaaactgatggatgcctgattatgtgagactaaccaaagattatctaatgaattgtttgaggtattgatgctgtgagcgtgggtaattttttttttgggtaaagtttgaatcatcaaaatatatataaaaaaaggttttcatgggagtccatggatgatcttttatcattatctaacagttagaccatggtgatggattttacttcttcttgtgttaagataggtagaacattgatttggattcattttctaagtctttctatgaagtatttgttgtaattttaataattatttcaaaatatttttcttaaaaaatatttaattaaatggataatttatgacatttaaattcaaaatttttattaatgcaataaaagtggaaattaagaggaggacaatgacaattgtaagcttattattgatgataaaagaaaaaaaagt

SEQ ID NO: 62810 - DNA, 285 bp, Glycine max
  unsure (1)..(285): unsure at all n locations
ggatcttaagcactgagcatgcagctggctncataccgagagagtttctatgtctaaactggactattcatttggtccaaagttcatggccttgcaggtgaagacccgcacaaacatttgaaggattttatattgtttgctccaccttgaaacccccagatgttcaagaggatcacatatttctgaaggcttttcctcattcattagagggagtggcaaggactggctgtattaccttgctccaaggtccatcacgagctgggatgaccttaagagagtattctt

SEQ ID NO: 62811 - DNA, 227 bp, Glycine max
aggaccgagagaccatacacgtttcctaacgatggctaattatgtgcgccattaagtctatcatatgctgacaatagaccagaagcccactgcatctcttcgtgggaggagtaagtctccgacatcgccttggacctgaataacaagcagcgaagttcttgactgccgcttccggtaacaacacaccgatccatgcccatggaggccttttggtggccagagtcgat

SEQ ID NO: 62812 - DNA, 466 bp, Glycine max
  unsure (1)..(466): unsure at all n locations
agctttacagcanatgtcactattccaaatttttgaatgatatgnnaataaggaaacataagtatattcaccaggaaaacatcgtagtggaaggaaattgtagtgatgtgattcanaagatccttccacccaagcataaagaccctgggagtgtaactattccttgttcaattggagaagtcattgtgggaaaggctcttattgacctgngagccaacattaatttaatgccactctccatgtgcagaaggttgngagaattggagatcatgcccactaagatgactttacaactggctgaccgctccattaccagaccatatggagtaattgaagatgtgctggtcagagtgaaacattntatcttcccggcanactntgtagtaatggatatatgtgaagataatgacattcctgtaatattgggaaggccattcatggtaactgcaagctacatagttgatat

SEQ ID NO: 62813 - DNA, 431 bp, Glycine max
  unsure (1)..(431): unsure at all n locations
tacatgtttacagaccttcgaactccatgtttgcaatgtttgcgttctgagcgacttgcgaggcaaaccttcataactgtattttcatttccatgttggcgattgtacagatctgtttgactggatacatcacacaaccttagaccttagcatattttattcttattttatcttttggtacaccatgtatatcacgtatttactttttttggtcttctgctttgccgctcacataggcttacatttttattgtcaatcctgtgttgtagatggatttggttaaattattatttgaagtctcagctatattnttgctctaaatttgttgtccatcttagtgttcatgtcagttcttcatcataattcacgtgtgcatcaatttgactcatatcttgcaaagaaatccccatttggagtctgtcataattcac

SEQ ID NO: 62814 - DNA, 365 bp, Glycine max
  unsure (1)..(365): unsure at all n locations
agcttcttagtattcaatggtgcttaccatgtagctgttgtttctcacttctcaactntcatgtttagttatgtattacttgagtaattgttttgtaaagaatttaatccaaatacagaaaattatacatgttataacttatatgttaaggcagacaggagttgctatagtccatgaggcttcttattgtcatcatagtcacaatgatggctatgttcctactcaacctatggattataccagccagtatcctaatcagaatcagtcttagacctctgctaaccccaatcaaaatagtacaaaagtcagagtccgaaccctaattactatgagacgcatctgtcttgaattatgttggtcaaatc

SEQ ID NO: 62815 - DNA, 383 bp, Glycine max
cacatgtgattgtgtccccataattctacaagcttgagatgaggaagtgttgaagggtgaaacttcctgcttttattgttgaccacagagtggtacctggagatatgtcgcgggggtcaggagaccttggggacgtcaggtggggtgctattgcccaaaaccaagcttgaccaatcccgacccaacccgggcatagtcggtcagtgagaacctgtgatgtacctaaacaggcgagctcctggcagtctacagataaaaggaaaacaagaccacacaccaaggaggcttgtggtggctggccagctgctgaatttgtgtaatatgtggatgggggcctctggtaatcgattaccaaaggtggggaatcgattacaaggcttaaa

SEQ ID NO: 62816 - DNA, 428 bp, Glycine max
  unsure (1)..(428): unsure at all n locations
agctntgtcgcgcactaatattgagctgcattttggtgttaaggtatgtggactccannaatgatatggtagataatgaagctctaaccaagtcttttgtattagaagaanttaaatatgcccttttccaaatgcactnggataagggcgtcggacctgacagattgagcccgaccctttataaacggttntggaatgtttgtggatntgagattttctaggcttgtgtctcctggctgcatgaagggactatgcctcctcactcgaatgatactaatattgtcttaattccgaagaaggagaatccagcatctatgaaggacctttgtcctatatctttgtgcaacgtggtgtacaagatcatgctaatagtggtagccaatacgttgcaagccgtggtggataaatgtatctccgcagagcaatct

SEQ ID NO: 62817 - DNA, 441 bp, Glycine max
  unsure (1)..(441): unsure at all n locations
tctccaagattaaaattagcttaagcataatctaactcttgttgaagttatcttgcattagctttttttaaaaaaaaaaacttatttttaacttctgcatttattaattttaacttttggagaatattattatctcttttcttcttattttcttcttttataaatagttatagagaaatttttcataacagaacctaaatatagggaaagagcataagattaaattaagtaactccttcaattgaatttttcttagtgaatcattgtcccttttaccatcagaaaatatagttctcatttcattcctctgtgtcgtgctgcctctgcctctacatatgctccttgactcctggtaatcagaataatactgtgagtgtgggctacangttgtgattaatactgatgaatatatctctaaattctagtaattcttttatattt

SEQ ID NO: 62818 - DNA, 144 bp, Glycine max
aatgcacttatatcatgcatccgcataaagctgctcttcattacatcataacgagcgtatcctgctttactgcgatatcatatcccaccctcacattctgcatgagtcatggcatcatcatgcgtatgcgtacaactaactttc

SEQ ID NO: 62819 - DNA, 443 bp, Glycine max
  unsure (1)..(443): unsure at all n locations
agaaactaccgctgaccatattaaacgacttaatgcttactcggangtcctattgagtcctgcaagatatcgagatgctcgatattgagaaaagaagctttgagcaaattcaaacgatattaactttgtactcggatgtccgattgagtcccgtaatatattgagacgctccaaattgaatacggagctcgtagcatatacagacgataataattcttaactcggatgtccgattgagtcccgtaatatattgagacgctcgaagatgaaaatggaagctcgtgcgatattcaaacgacaataacattatactcgtatgctcgatggagtcctgtagtatatctagacgctcgaagatgaaaacgcacgctctgggcgcatcagacgacattaccttctactcggatgtccgatggactcctgtgatagatagacacgatcga

SEQ ID NO: 62820 - DNA, 175 bp, Glycine max
  unsure (1)..(175): unsure at all n locations
cttacagcacctgcggcatgcaagctncttcttctccatcgagctctcaacccttatagctcgtcttcttacttaggtacgnntcgagagtgtttctacattttagctaccataactagtgtacaacgggtggaatttcattcattatcccattagtatgtaatagtgattctac

SEQ ID NO: 62821 - DNA, 448 bp, Glycine max
  unsure (1)..(448): unsure at all n locations
tcctaacaacaantttcatgtaggtggaccttcttcttgttattatgacttaccgtagccgcctatccctcttccatttccacctagagcaattccaaacaaaaagatggaagaaatggaaaatgagatcttggagaccttccggaaagtagaggtgaacatacctctgctagatgccatcaagcagattccaagatatgccaagtttctaaaggagttatgcacccacaaaaggaagctcataggcaatgaacgaattaacatgggcagaaatgtgtcagcattgataggtaaagttgttcctcacatacctgagaaatgtaaggacccaggtactttctgtataccttgcatttattgggaacaataagttgagaatgccatgctagaattangagcatcagttagtgtcatgcctctggtccattttaattctttatctcttgga

SEQ ID NO: 62822 - DNA, 332 bp, Glycine max
agcttcagtagtctatgtacgagcgtctcaatatattaccgcacctcatcttacatgcgaggatatagataacttcggtagaagtagctctgaggatcaaaattcacatacagagcgattatacatgttacgagtacatatatcagacgaccccagcgaatagctattgtccatgagggtatctcataacatcataatcgcaatgagagcgacgctatatctctaccgactgattctgacatccgaggtacaaagtaaaagtcagttgaaatcgctgagagcctcaaccttcaatttccagcggttcgagctcatacgcgtactactaagac

SEQ ID NO: 62823 - DNA, 405 bp, Glycine max
  unsure (1)..(405): unsure at all n locations
tggcattggaattgcgaaagccctcctccatcattatgatttgttcctgctatctcaaacaaacaaatcaaacgtaacaagacaattatagttgctgtttgaatacctcacccactcaagtgtatcacacaattatggtttttctctaatgaaacactcttgccttttaccactctaattccccttgagttcttaggcaattcaagagattatggccacaacaaagaacaattcaccaatatgtgtaaggtaaggctagagagacaaggaaaaggttaaccaagaaaaaggctaacaatgtttttaggcacaaatgaaggaaataaaattcacaatttacgaattcaagtaacaatccttcatgcagccaatatattaccttagagagatgtgntttttaaagat

SEQ ID NO: 62824 - DNA, 469 bp, Glycine max
  unsure (1)..(469): unsure at all n locations
agcttgngctcttgttctactcaccgcctntttggtttcatttctagctatcttatacttatcccaagtttcagaatttctacacctagaccactccttaaaacactccttttttactctagctntgctctgaacattttcattccaccaccacgattctttacccctaggtccaaaacctctagattcacccaacgtctctttagccactttaataatctcttgggaacatctgttccacatatcatttgcacttccttgtgattggccacaccatccctcccatatctttggtnggaagattccttgtttctcacccttcaagtggccaccattgatccttggtgctaccataagacttctttctcttgccctatctctaattcttacatccataaccaaaactctatgttgggtagtcaagctctctcncgggataactnntacagtcaagcaantacttctatca

SEQ ID NO: 62825 - DNA, 443 bp, Glycine max
  unsure (1)..(443): unsure at all n locations
ntgaaattattntatggaaaatattatattaggttttcttattgaaatgaaaagagcagaaaacaatcataggattgcatgaggttttaccatgtttaccatttaggttttctggatattaagtcgagtactaaaaatcactaacaacccacactctttgagtcttacgaaaatattattttcctctaagcactagtctaaccataaaggacttccatcattttcgaaaacaaatatcaagggcacacctttgcagacttacaaatcccaggttttcttaaaaaataagaagaaataaagtaattgtctagattctaaatcatattcgcattntctaaatgaagataactaaggccctttaagggtgcctttgaaaaacttagccgaccatagtagatatcatacttacaaataggaggaagaacaaggtggaaaagggggag

SEQ ID NO: 62826 - DNA, 430 bp, Glycine max
  unsure (1)..(430): unsure at all n locations
attgcaatctcatacagccacatgctctaactaaatttattgttttgcaaatcataccttcttgaacttcattcaaatagctcacgatgttatttatgataatacacattcatacctaacataagcatttcattgttttccttttatttttcttgtcatttgatgtgactctatgtaagaattaggagaataaaaaaatgtaggagataaagaaaaagaatatatatgtttcgataagaatttcattgaacacttaattataggaaaaaaaataataagataaatagaattgaatttctcacataacttanaaaaccaacttatacattatatattttaagagattagaatgaaaaacttataccttatgagttagatttaacttatggaagtaataagttcaacttatnttattataattcttctacta

SEQ ID NO: 62827 - DNA, 452 bp, Glycine max
  unsure (1)..(452): unsure at all n locations
ttgatgctntatttcaatctgaanagctgtgagactgtcccctattattataagaaactgacctgtcaaaaatcagttaaataatgcagattataatttgcagataatgtgtaagactaaaaatctaaaatataactctcgggctgactgaaaattaagaatattagtaaaggaaaaaaactctgttgctattgagactgagattaagagaagtgaaaatttcgcagaacacacgttttattgatttctttgtgaatatataatatgtacactgaatatgattgtcttgtgaataacaaaattaataactaacttcaactaacagcaacagaaggaatctaattgacttgtttggataaattaaaatcagctgttagagaagttaaatgagagcttctataaattagcttatgcnagaagctaatttaacttatgtaagaagtttaattatt

SEQ ID NO: 62828 - DNA, 455 bp, Glycine max
  unsure (1)..(455): unsure at all n locations
tatccgaatgaggatgttccatatgttctctagactggactaatacattngttgcccaagtttcatggtcttgtaggtgaagatcctcataagcatcttaaggagttccatattgtctgttccaccatgaagatcatatctttctaaaggctcttcctcattctctggaggtagtggcgaaagattggatgtactaccttgctcctaggtccattaccagctgggatgaccttaagagggtgttcttggagaaattcttccctgcatctaggaccactgccatcaganaagacatttcatgcatcaggcaacttagtggagagagcttgtatgagtactatgaaagaatcaagaaattgtgtgcaagttgtcctcaccaccagatntctgagtaactccttctgtaatatttctatgagggacttancaacatggagaggagtatgaatgatgct

SEQ ID NO: 62829 - DNA, 451 bp, Glycine max
  unsure (1)..(451): unsure at all n locations
ttctccctctntccatgggactntncttcttccttctttctcccattgttgtccgntgaagctccaaaatccctcctcatttctactccaaattgcaaggagaagccattttcggagtcttggagcacacctctacattgtgggacttcgaatttcaggtatgggtagacttcttctcacatgaaattcgtgggtgttgggtttttgggagttatgatgggtagttntactaggttattgccttagagtaattatttgtgaaggaatttgttgaaatcatgctaaacttgacatgtttgatgtgagccaaattacccattctgatttagggttttatgatgatgctntgtgatatatgaatgctgaanatgtngatagaaaactggtagagatgatgggaagagttaacttacggttaaatgtgagaatggtagtgatgtgagtggaaaag

SEQ ID NO: 62830 - DNA, 488 bp, Glycine max
  unsure (1)..(488): unsure at all n locations
catgcaagctntgagccttctagcaacagaagatctctcttccctactttatgaagaggtaatgtccatttctttagaatctgttatccagttcttcctttaatctcaactctgaaaaatgactaaaaaaaaattcttgacttgataaaactggacaacaaagaaacaatatatgatttcatgtttagtaattttccttgtaaagttctcctgtcttaaagggtgaattacactttacaccatttgaaatttttcatcaaaattaattttattacaccaagttttaaaactaccttttaattcatcaagtttcgaaaccataaacttgaccttcacttgaacactttgaagattcagaaatgctggacttgttcataatntagttaaaactgataatagacaggtcatttagactataannagtagagcatgagaaaaagtattaanagtaatcatgtctataatagtaattcgagtctcatctctat

SEQ ID NO: 62831 - DNA, 453 bp, Glycine max
  unsure (1)..(453): unsure at all n locations
tatattgttgtttactaattgaaataataatgtttaagtttataaattttgattcaattgttaataaagatcagatttatattctacaagaatgtgagtttgaatcctattattaatgtgaagatctgataagtaatatgtaagatctttgtaaacacttaataaaacttgagatatgttctgatactaatgagtttagtaggatacttgcctaaattttatttaagaaaaaaatgtttaggctatttttatcaaatccgttacttaggattgtgccatgttgattgttgagtagatttagttggtgctatttttgtccaagtggtgcaaaactggttcatgtcattaatgcttaagatctaagggaatgaattcaattntgtggattcaatttgtttattttgtgctctgtcttttagctaggaagtgcaatctgtgatgcgtcatttagtg

SEQ ID NO: 62832 - DNA, 443 bp, Glycine max
  unsure (1)..(443): unsure at all n locations
agctntaggaatcattattggacattatcatttttatacattattntttaagataagaaagatgaaaggaaaaanaagagagacgacatgtattccccaacttgttaagtcttanatgtccaaagacacaagcttgagcaacatttccctaacctaattattataaatagactgagctntatacataattgctttataccaccactaccacaagaatntcatatagatttaaagtttctcaactaagttaagaaatttttttaaagctcttcaggaacctaggtaaggtataagcaccaatagttatgaatcaaaagaatgagcactttcattgttcacaagataccagttatgcaaagagtaataaatcattgtatagggcatgcaagggagtgggctttaaaggcacaaaccttggtagtctcagtggcataaccccattc

SEQ ID NO: 62833 - DNA, 494 bp, Glycine max
  unsure (1)..(494): unsure at all n locations
agtcacctgcggcatgcaagcttactctgtacaatgatttatactattgtaaatcaattcactngaactttntaaaatattntaaaatatataacgatctcggctctgtgtagctcgagagcattggtgttgtaccgacgaatctagagagagacgagcaagggcttgagtagccccttcctctctnaggaattttcatctatatacatatanttttctacagtaattagtataaaattagctttgtatgttgttattctaatacttgacgtataaagttaattagtataaaatagtgtaaaattaattattttggtgttttatcgcagcgactaaatgataattagtgtgaaattaaatatatatntgttattataataacaattaaattatgatcatctaatataanaatttaatatcaattctatgtataacactaatntcttttcaaaattattatttattagaangtagatatattaagaattataaag

SEQ ID NO: 62834 - DNA, 394 bp, Glycine max
  unsure (1)..(394): unsure at all n locations
gaagtatctccaaggatgtgtatacaagttattaacaactataccgaaagggcaaattaggttatgagagccttcttttagggttctcaaagcgtattagaggcttcttttcaatggctactagatgtagttaagtctttacagaactgagtgaatgaactgacaatattagaaaattacaggacacaagagatacctccattattatcagttaatggtacaagagtcttcaagtgcacatgcagtgcatacaataatcaaaatcaagacaagcacaaaacatgcaaaaagtgcacaaacatatgcaatgaaaaaaaaaacattagaaaacccangaacagcctgtacagagaacagctgttctcgctctccaaacctccaaacagcgattcaa

SEQ ID NO: 62835 - DNA, 427 bp, Glycine max
  unsure (1)..(427): unsure at all n locations
taaagttgaagatggaggttatttacctaagtttaatggtagaatggctcanaaacacttgggaaagcttggaagcagagtggaagtggtttcttcttccctcttgaccagctcgtgaaaatggaggaagaatgatcatgaatgatgaattttagagtctaaatgaacttatagaggaagcttacagcatggtccattggattattgtgtagtcttatcttaatcactcaattttaacccatgaatgacccttgctcagccatggaaaacgtgtacatcactaccaaatgtggtgtgcttcacttttaaaaattntacttaaaaaggataaagtagagttttgcaaaaaatgaaaattttgcttttactaaaactagtaaattntatcctaaatgccttgattaatgcactaacttcctcgattatt

SEQ ID NO: 62836 - DNA, 434 bp, Glycine max
  unsure (1)..(434): unsure at all n locations
caccagacggggaccaatttacgtcacgcagtggaatgtctactcttctattaatattntcttataaatcanaattaaatcatatatattcgaaatttatgatattcacacatcttatgtattctaatattaatatattcaactcaagtgaactgcccactntataaacgatcagatgagaattattctatcagttagaatattactatgtagtatttttctaagtacatattatcaagaattagagtacaaagatattttaactaattatatgcaaaaaatcttataagcgtaaatgacagtgaaaaagagaacaatcaacatagttaataacttaatatactaagtagaaatatataatatatcgagcactatacaatatntttgtgtataatncacataatatgacgaggacaatatatatctgttcttct

SEQ ID NO: 62837 - DNA, 424 bp, Glycine max
  unsure (1)..(424): unsure at all n locations
gtgngagtnggacccctctgtggactatttttgccattatctcaacaacacggccncaaatgagaaacatatttgaaaatgtctacactgntatagtacacagaacatgtgaattataggttcttgagaacaagttaacattaaaaataattatgattgttgaatcactaccaaaggcccatattaagcaaatatttagttggaccccaaaattttgcaaaattgtaacgaatcatgatcttacaactattagcatgcttcattctcatatttatacctcatctttgagaattcttttctttttcgaaccccactttcgtgctaacttcagtgctgtttccacaccttcagcaccggaatcataggaagtaccatatataaccaacatgttngcacatactcatcaaattctgggaagcgatca

SEQ ID NO: 62838 - DNA, 442 bp, Glycine max
tcaagaatcaagatcaatattcaagattcatggttcattttcttttagaagacttaatcaagataagtatgaaaaggatttttcaaaaactgagtagcaaatggattttttacaaaacatgtttaccaaagagtttttactctctggtaatcgattaccagtagcaaaatgtttttgaaaaagttttcaaattgaatttgcaacattccaattaatttcaaaaagctgtaatcgattacaatgttttggtaatcaattaccagtgcatttgaatgttgaaattcaaatttaaatgtgaagagtcacatcgtttcacataaaagccttgtgtaatcgattacactaatttggtaatcaattaccagtgactatttccgaataaatcaaaagatgtaactccttaaatagttttttactatttcaaattggtttctagattttc

SEQ ID NO: 62839 - DNA, 438 bp, Glycine max
  unsure (1)..(438): unsure at all n locations
ggaaattatagagagatatagggatcacgnaaataaaggaataaaagagggagagaagtggaactttgaagtgtgtctcataagactttcattcatcaaagttgcaacaagtgttacacatgccttctattatagactangtagcttccttgagaagctntcttaagaaaaattccttgagaagcttctttgagagaacttcattgagaagctagagcttagctacacacatccctctaataactaagctcacctccttgagaagattcctaaagaattagagcttagctacatacacccctctaataactaagctcacctccttgagaagattcctaaagaagctagagcttagctacacacccnctataatagccaagctcacccccataccagaatacatgagaatacaaaanagtccctactacaaagactacc

SEQ ID NO: 62840 - DNA, 438 bp, Glycine max
  unsure (1)..(438): unsure at all n locations
cggtgtagggaggcagctctgtttctgaattgnggccatctgcagntncctttntcctaccttggaattcctgtggggtcgagctctagaagcaggaatgtatggcaacctctcatcaacaaatatgaagctaagcttgcaaaatggaagcagcgatgtctttctatggggggcaggataaccctcatcaattctgtcccaacagccctccctatctaccttctctcttttttcagaattcctaaaaaagtgatacataaggtagtttctattcagaggaactttttgtggnggggtggttctgaaacagctaagataccatgggtgatctgggatattgtttgtcttcccaagactaaaggagggttggggatcaaagaattgtctaagtttaatgaggcctcgattggtaaatggngatgggatctggctaataac

SEQ ID NO: 62841 - DNA, 399 bp, Glycine max
  unsure (1)..(399): unsure at all n locations
agcttgnaaggctatgtgtggtgtcataccctattttcattcggnggcgatcatttacaaacatttggattctcgccagccgaattgagctacttaacaccaattgtcatgcatttcgtaaggttttttgacgtttcagaagaaaatgtgcaaaatactcaacaggagggcaaaagggtcacttttggggcatttttcagctcctgagccacccagataacttcatgatgaagtaaccagcttgcctgggcgagcantgttgcttcagcatgaagttatcaactcacctgggcgagctaccttcatcccanatggcttggtttgctatnaataggcgtgggaagactgaagtaaagggtcatgaggttccccaaggtccagaggtccagatagaagaag

SEQ ID NO: 62842 - DNA, 388 bp, Glycine max
  unsure (1)..(388): unsure at all n locations
cgaatggtaaaataccaccttaagctgatatatagaatgtggtttatngnntcttnngcgagaagaagggacacatgaaacagacctgcccccgattccagaaatggtttgagaagaaaggtaaatcaatctcattagtatgttatgaatctaatatggttagtgttaatattaacacctggtggattgattctggatctactattcatattgcaaattctttacagggtatgcaaaacctatagaaaccagtgggaagtgagcaaagcattctatcaggcaataaactagactcacatgtggaggccattggaacttgcattttgactttaagtagtggctttattttaaaattagaaaggactntttatgtaccaagtctttcccg

SEQ ID NO: 62843 - DNA, 470 bp, Glycine max
  unsure (1)..(470): unsure at all n locations
catgcaagcttatgggcatatgattgctacangcattatggtgngctatagcttattcatggagtagaggaggataggcaacacaagggtttcaagtatgtgtttgaatgcccaaatgaacctttcttggaagatgcacccgcgagccccgcgtcgccctcccgccgaagggtaagttgcgacagttggtggctccactcgggacaatttttagagagttaggccaatcaatcagtgtgctttccttaccacgacttcccttttggtccttttctttggctttctccttatgttcttgagataataaactctttgatgcttttagtgtgttntaaaatgtatgcatgaggtaaatatttattcattngatgcacacaaacaccaacactatttgcacacacggtgagttgaatagggccctataccctggttcatgggaacttaaggagtggaggtgaatctgtgatcat

SEQ ID NO: 62844 - DNA, 442 bp, Glycine max
  unsure (1)..(442): unsure at all n locations
tggacttaccttgacttaattccttagattgcccnntttagtcttgttnccctttccttgttttgaagctcactacaagccttaagtgaaaaaccatgatatcactatatccttaaggaattttggagctttggaattgttttgggaataagtgtgggggattttgtttcattggataacatgttttgttggccatgcttcattatatattttgagccatacttgatacacattgcatattggttaaatgttggacatgctgaatatgatgttgtttctcaaaaggctacagaaaaaaaaatattataaaaaaaatcgaaaaagacaaacagtatagttgagtgaataagacaagaatgatgagactcttggttctactctntatgtctacaatttatctttacttctttttattctcttatggtttcttaatatgcactta

SEQ ID NO: 62845 - DNA, 348 bp, Glycine max
  unsure (1)..(348): unsure at all n locations
tttaccttcttgttaagccaatctgttggcttagcgagggttcgctaaacgtaacactcctgggctaagcgcgagcaagactctggaagagatgagctgtataggttcactaagcacactgctttatctcactaagcgcaccgcttcagttcatccgctaagcgagaaaggcgtgctaagccaaaaattactaacgtgcgctaagcggtccatacgtgcgctaagcgcacgagcatgaacaaggccacctatttaagcctgaaatcagaatttgtgaagggagtttggactgggattcaaagctntgcatgtctagggtttctagagagagaaaggtccaagttctag

SEQ ID NO: 62846 - DNA, 441 bp, Glycine max
catgatgatgaatcaaatatggattcaagaagtttgatgatgacatttatgatgacaaaaagcccaaaagaattatttcaaggttgagtcaacaagttcaagatcaagattaaatcaagattaatttcaagtttcaagaaatgacatcaagaagaatcaagattcaagagaagatgacttcacaagggaagtattgaaaagaatttttcaaaaaaaccaaacatagcacagttttgttttacaagaaaagtttttctcaaaattttctaagttaccagagtttttactctttggtaattgattactagtttcctgtaatcgattaccagtggtaaagtttgatttcaaaagcttttaactgaatttgctatgttccaattgatttttaaatggtgtaattgattacaatatattggtaatcgattaccagtgtatctgaac

SEQ ID NO: 62847 - DNA, 463 bp, Glycine max
  unsure (1)..(463): unsure at all n locations
gctagtgatataagtgtaagtgtatatggttctacaaatgctgggtcaaaacctcaccatgattagacaactatatatggatggtgcaagtgtgacaccctttatcctgacatacatataaatcagaaaaacatataagaatttagaatttaattaaatcaattntattcaaatcacttaagcaaattcatatggataaaagggtcacattcactatactgttacaaaataaaacttatcaaaaacatcttcggctcaaaacaaggtcgtccaaaactccaaagaatgaactaaagactcagcatatgaaatagaatgatacaaactacaagtccataacttcttgcaattaacacagaaccctgtgtctcaatgtcacgtnctatcagagcattgtacttcagcatcctctagcatgaggttctccatagcaattcacctaaccatttgcttncatgaacac

SEQ ID NO: 62848 - DNA, 408 bp, Glycine max
  unsure (1)..(408): unsure at all n locations
tatcctgaccncgagagatataggaggctgggggganatctcatttacctttctatcactagacctgatatctcctttgctgtgggagtgattagccaatttatgcagaatcctcatttggaccattggaatgctgtcatgcgtattctgaggtatgttaagagagctcctggacaagggttgttgtatgaagacaagggtagtacgcaactatcaggatattgtgatgctgattgtgctggatgtcccatggataggagatctacatcaggttactatgtcttcattggaggaaatcttatctcttggaaaagcaagaaacagactgttgtcgcttggtccagtgcagaagctgagtatcgatctatggctatgngtacgtgtgagctcatgtggatcaaacaattt

SEQ ID NO: 62849 - DNA, 427 bp, Glycine max
  unsure (1)..(427): unsure at all n locations
agcttatatgagttagcatctcctatctcacttgatacaaccaaancanctcactcagcccttgacttggcacctgactcagcttcattcattacatgcaaataactaaaatcgttagtcgtggaatagaactgaatggcccactggttcatgcaatgattagttttagttgattaatgttccttattactgtaccaatcctttattgctccactttcccattgtcttgtttagtttagtacatggtgtgattagaatatgatgatccttcactacccttanatggcatntgctagtactatgctagttgtatgtggcatntactcatcctctaatctatcatctatctacacaaccataggctgacaattngagtagggaaccatatatagttcaaagntaactctatactaanntactaaattat

SEQ ID NO: 62850 - DNA, 439 bp, Glycine max
  unsure (1)..(439): unsure at all n locations
ttgaattctagtananaagactcctcagacttattataattctcatgcatcttttacattgaaaaccagaaacttggattcctaggcatgagtcatccttttggcactttagtctagcttctacaaactacccacacactcacaatgcgcacaatttatttcgcaagctaagttccacaaaatcatgcgcaaatgccattgaggcatttcaccgaacacttggtgggcgcatgtttaagcatgaaaatcaagggaatgggggcaatgtggcatgccccattatctcagaacgcaccctaggcctaaggccatcccctacaacccctcaattcaacaaaaacaagcaataattcaaggataaatccctcancgtttgagcaaatacatgcaacttagagcaccaaaatatatcaatggaaagccaaagagctcaagaatg

SEQ ID NO: 62851 - DNA, 456 bp, Glycine max
  unsure (1)..(456): unsure at all n locations
gtcacctgcggcatgcaagcttgatgaaggagcatttatgttgccattgtgaaagaattctatgcanacttgtatgacctagaagataaattacccaagcaactgcaggtcaggggtcatctgattaaatttgatgaagatactntgaatacttttcggaagaccgcaatgattgtagaagagggggagaatttatgtgcttattcgagatttgcactcctgaggcctaatcctcaggagttagctgctaagctctgtatcccagggaggggatttgagctgaatgttgatggtttccccttgtttgaaatgaatggttgtgtttgaattgattgagcaaatgtatgaattgaatggattggaatgattagatgtttggtttgatcaaagtngcagtcattagaagagaatgagcatgtgattggaagtatgactganaatattagtcagtttgtc

SEQ ID NO: 62852 - DNA, 443 bp, Glycine max
  unsure (1)..(443): unsure at all n locations
tatacacttcanatgaaagctctcattgtattcaacatattattgatatggaaatgatatgattttgctactataaaaaaaaaatataagcactaatattaattntgactacatcttcaaaaaccaagctattataagtaagtttgaggccaagattgcaaaatggaagcaaacatgtctctctatgggtggaagaataaccctcattaattcaattttaacagctttacccatctatttgctatcttttttttaggatccctaaaaaagtggtgcaaaagatagttactattcagagaaattttctatggggaggtgattctgaggccaacaagatcccttgggtgaagtgggacacagtttgtcttcctaagaacaaaggggggggggttagggattaaagacttgatcaaatttaatgaggctntgcttggcaaatgggg

SEQ ID NO: 62853 - DNA, 279 bp, Glycine max
  unsure (1)..(279): unsure at all n locations
catgcaagcttaaggagaggntatcttgtatcggctttcttgacaggacgaaaagagggtctgcgtgggagcgttgctccttggacgacgacatgatgtgcgagatcagtgtctggaagggagagggatcggcgccaagaatggcggcgacctgggaatgctgcaccttatgatccatggtggcggctgtggcgaccacagagaataagaagagcgacgacgagacaacacaccggcgggttagggtttcttgtttctgacgacgatgtgatgatagac

SEQ ID NO: 62854 - DNA, 271 bp, Glycine max
acaattgacttgtgcacaagttaattcatctggatcaacatcacgaattagctcttacaaaaactatcgtttactagtgcacatgctgatggaggtgcagaacacatgatgggacccgacttggaagccttgtcggaattgtactaatgaccattcttaagtgcattttagaaatcaaaaatagtgatgctctacaatcactatgattttacaatttaactttttgacatatgaacaaaacactaccgttgttcacagcggaagcaaatat

SEQ ID NO: 62855 - DNA, 451 bp, Glycine max
  unsure (1)..(451): unsure at all n locations
agctngaagacgcaataattaggtaaagtttatattttaaanaagaagaaaacaaataaatcatagttaattccaattcgtcgatttatacatgtgcttgtattggatgttttaaaatctacaccattctgatagaaccaggactagatagcccttgtattggttttcccatcaatgattctctctttgtactgcctccatacactttagagtatcataatccatctgcatccttttgcattcttaccagatgtattggttatatggcgatcgtgaatgaaaaaactaattgctaagctatttccataaccaaaatgctctcaaacgcaacctacgaggtaaacacattagtagaacattcatgattcctatactatttcaacaatcttaaaaccatacatcctaaactagttggagtggaacgaacacaccgcttgactctacttctaaa

SEQ ID NO: 62856 - DNA, 394 bp, Glycine max
  unsure (1)..(394): unsure at all n locations
gatgataagataatntgtccacctatcagntttctttatgtttacgattctcctccanagaaagaatttgtaaattgccgttgcggctgttgtttacggatcccatagttgggaggttgcaaatactgctgcccagaagttcgtcgtttacgcgcgccctagaactggcctgtgacaccaacgatctttgttgatcaatatgtacgttattgcgccagtgtgacaaataacaagtttatgaacaaagatattaagaattaagaaaaatgtttgattaacacctattatattattcacttgaatacagaagaaattaagagagaataatataagcgcttaatacagtatatgatgtgaaaagaaagagattgaaaaagatatgttgattaaatat

SEQ ID NO: 62857 - DNA, 310 bp, Glycine max
  unsure (1)..(310): unsure at all n locations
cgcttgctcacttntcactaagagtgctagtgttgcgtatctatatatagacccttctatcctggtataggattctcatgggatactggaagaaacggatctttaattcttacttttcacccatctttaatacaaggaaacacgatctgatatccttaatatgtgaatctcttatatatgcttatgatatctacaatatatgtgctcaactgattatactcttattcatagtacaatattactttcatacaatatattcttgacatgtcgtactagttaaccattagtggagaggaaatcacattcatga

SEQ ID NO: 62858 - DNA, 377 bp, Glycine max
  unsure (1)..(377): unsure at all n locations
agcttctcccccatttttctataattatggttagaagcgaagcgaanaagggttcagccctctatgcacttctctctctttcgaatgtgctaggaaaaattgtttccgtgaagaaaatctaagccgaggcgcttccgaaacgtttccgtgaggaatttcgcgaaggattcgaccgtacttcgacgttcatcattcgttcttcatcgttcttcgatcttcaacgggtaagtacctcgaaccaagcttttcgattcattctatgtacccgaggtggtccacattgtgtttcgtgtatggttattctcgtttcatttactttttatacccccttttgacgtgcgtaagcacatttatttaagtcatttctcgcttaacct

SEQ ID NO: 62859 - DNA, 370 bp, Glycine max
  unsure (1)..(370): unsure at all n locations
tgaaggtgtgtaacccaccattgtcatattagaatactgttattgtgnctactattattgggatcatctctttctccatcattaggggtgctacttgacctgccagatccctccgactttatgcgtattctttgaaagatccgtgccccctttttgcacatgttctgtagttgcatcctatctagagccatattacaattgtactgacactgcctaacaaaggcaaccattaagtcctttcaagaatggacttgggaaggttccaagttagcgtaccaggtaacagctaccctagtaagactctgttggaagaaatgtatcaccaattcctcatcttttgcgtatgccctcatcttccgataatacatct

SEQ ID NO: 62860 - DNA, 465 bp, Glycine max
  unsure (1)..(465): unsure at all n locations
agcttgttggaatattatgaggtttcactattattccaaaggttctaattacggtggttaaaaaaaaattaatgttgtcgttattttagagactaaaatgacatgttgaattattaaattaattgatgcttgtaatttgaagaactaatttgatgtattaccatgcttatctctttgtagttttgtaaattttcaatggtttgaaaacactaaagcaatacttgaagtgtgttctcgtttattctaatattctgagaagaaaacagtaaaaacaagaaaaagaaaagaacataaaagtcattcttgtaactgatctgaatttttttatttatatntaatcgttttgtgagtntcaaagaacaaatgatcatttcttctaccgtgctaattaatgcttgtacttgaaccttcttacaagctctcttcgtgtatataatatagctaaagctgtggtanaatgaatga

SEQ ID NO: 62861 - DNA, 417 bp, Glycine max
  unsure (1)..(417): unsure at all n locations
ggtgtgtggtccaccatctnttttagnagataattggtaatgngnctactatcattatcattttttctccgtcattgaggtgccacttgagctgccaggtctctccacctttgggcgtattcttttgaaagattcgttccccctttttgcacatgttctgtagttgcatcctatctgaagacattatactgacactgcctaacgaatgcaaccactaggtccttccaagaatggactcgagaaggttccaagttagtgtaccaggtaacagctaccccagtaagactttcttggaaggaatgtatcagcaattcctcatcttttgcgtatgcccccatcttccgataatacatctttaaatggttcttggcggaagtagtccccttgtacttgtcaaagtccagcaccttgaacttg

SEQ ID NO: 62862 - DNA, 441 bp, Glycine max
  unsure (1)..(441): unsure at all n locations
tttatttttatattannaataatcaatattatttgtgacatttgttntagctntgaactntgtttatcgganaataaattgataatttatttaaatttatgtatgtatttaaaaaaattacttgaaagctgacatttagttntaattaataattacttaaaaaaaattatcatacaaattattttactggaaactacaaaataaaatataaaactaatttaattataaaacaaatgggagttgccaatgggagttgcaacttgcactcaaatcgcaagttgcagttgcaactcccctttaggcctgcagctgggtaactcgccactcgtagtggcgttttccgtgccacgtggcgttttcccagcaaactcgccactaggagtggcggtttgtatattatccatgcaaagtacgtagaanagagcccnctcatgtaatatt

SEQ ID NO: 62863 - DNA, 395 bp, Glycine max
  unsure (1)..(395): unsure at all n locations
agatcaacgacaatggaatagagaatgaggatagatgattggagacaccactttatggagaagatgagtcaagaacaagctcaccaccatatgaagccatggataagagcttgaaggtaggagatgatgtatctccttgtggaacttgcactacaagaaaaatgacctatacctacggacaagaactgacactataaataaaaaatccgtaggtaaatgtatgatagactttgtcctatagacgtttcttccgtcaactctgaggggccgtataatgacagctgattgtctggcactataggtatacctactattgatagcgtgacagaaaagtcattaacttctacttacatctcttaactatanggaagagactttaatatgtatctatcatc

SEQ ID NO: 62864 - DNA, 250 bp, Glycine max
gctggcgggacgagattgcgcgggaaatgagtattgagggggcggcctctgtggttgagagggcaacctttgctggacggtcaccagattgggagggtattcgacgttggccgaaaagctcggttggtgtggggaatattggtaagtggggtcgtgaggggatcaaatgtatgtcaaaaacacattgatggtcacttgccataaaattgatgctggttgactcccacattcacaaatgtctactgaagtt

SEQ ID NO: 62865 - DNA, 397 bp, Glycine max
  unsure (1)..(397): unsure at all n locations
cgcattcatcgcatccactaacagacgttgagcgccgtccaactgatggtactcgtcaccaccaccacctgcttcagccataattcaacaggaaaaaaaaaatgtgcaataaaaaatattaaggtttcaggacctcacaacactctactcacgtctcttagatggtagtacactcgtgtttaatgctctcaatangcttntgtgtaatgtattccctcttgccttttaccactcgtggttcctcttaagttcctggatggaccanattagacacaccaggtaatataaaataaaaggaaagacaatataatgatcacaaacagatttgatttgngataaccaactggactcgatttggataataatatattagaattggatctgataacaggtgagc

SEQ ID NO: 62866 - DNA, 340 bp, Glycine max
  unsure (1)..(340): unsure at all n locations
cagcgtctcgagttggacaggagtcaattgttcattctagncaaaanttatgggcgnttgaatntgctcagagcttcagatctcaattacgagcgtctcgatatattacgatactcaatcggacatccaggcctaaagttattggtgttcgaatttgctcaaagcttcagttttcaattacgagcgtctcgatatattacaggacttaatcggacatccgagtcaaaagttattgtcgtttgacttttattatagcttccgattcaatgtcgcgcgtgtcgatatattacagggctcaatccgacatcccagttaaaagttatttgccgttgattttctc

SEQ ID NO: 62867 - DNA, 498 bp, Glycine max
ttcagtcacctgaggcatgcaagcttcctaggatgtgaatcttgatctgtcatatcatacttgtgaaggtgtagaaggtgcctttcttttcctataagccatctacaaaatataagacaaaacacaagagattagcacacgtttattctcaagaaaatagaaaaaattaaaactgaaaacagagttgggcgcttagccccttcacgaaattactcatgggctaagcgcaaaaaactcacgattagcctaaagactcaaaaaatctttttttctatagattaggcttagcgcagcaaggcacgcttagccttattccaaaggtaaagaaacagaacctaagtggcacttagctagcaagctaggcttagcgcctgaactattatgagtatctcagtatactattgacgcttagcgcataggcacgcttagcatctgcatcgttttggcaacagccacgatgaatgtgcttagcgcaacatggtccacttagcacgatca

SEQ ID NO: 62868 - DNA, 434 bp, Glycine max
  unsure (1)..(434): unsure at all n locations
attcatttagcctaactagggatcgagggttagtattttangcttcattatagaacataaaagtaagattgattagagaaacatctttatataaatcagcttgtttattagaaagacccaacacttttacctactgctgtcaatcttatttacttgcatttttactgtttttagccttgacttagtttaattctattctaaaccatcaattatcaatgtttctttcaacaatgccttatttctgaacttaactctgtctaatactagtttcctgagttcgatactcggattcatccgttttnaatttaaatacttgatgatccagtgcgctctctggcaaaccggatttcccttgacatatttgtataaagaaaagtagaccaaaaagtactgtaggggaaatccacacccatcatagtgtcgctgacacatca

SEQ ID NO: 62869 - DNA, 417 bp, Glycine max
  unsure (1)..(417): unsure at all n locations
agctngaaggagaacttgatttcttggtcaacccagtaacccagctggccatgaatcagaaatctacacctgttgcaagagtctgtggtctatgttcttttgcagatcaccatacggatctttgtccttctttgcagcaatctggagtcaatgagcaacctgaagcttatgttgcaaacatttataatagacctcctcaccagcaaaaccaacaacaacagaataattatgacctttcaagcaatagatacaattcaggttggaggaatcatccaaatctgagatggacaagtcctccacaacaacaacaacagcctgtnccttcttttcagaatgctgctggtncaagcaagccatatattcctnnctnncatgcagcacaacagtagtagtcacaacaaaaagcaaacaagcact

SEQ ID NO: 62870 - DNA, 468 bp, Glycine max
agctagactctagcatatgtgtaaatgattttgattagtggattcttccatgcaaatcctcattcaggaaatatcctgattcgaaatgatcagaggcaagtcatcagctatattggtttgctaatatctctttaactgttatttcatctctaggtgagtatcctacagttattgtagagatgttttaatcaagaggaattacatatgaaaatgacccgaatagtggcatgggtagaatattgcgaattagtattagacatgagggtctaattttttttaactcttaaccatcctgatgtagtaacttccctcaattcaggttgccttgctagactatggacaggtgaaggatctcccagattagttgaggcttgcctatgctaatctagttcttgcgattgctaatggtgacccatcaagagctgcggagagctttatgtacttctacattaatctgtaatcgaaaac

SEQ ID NO: 62871 - DNA, 371 bp, Glycine max
  unsure (1)..(371): unsure at all n locations
cctgtagtaggatctttcatgtcttaattctgtgttgatcatcattattatggcatggaattcttccagcattacttttaacattctaatgtagatcccaaagtgaagatattgcaccctgataactattagccaatcctatatcaccttgaaattcagacatgcctttctcgactgttaacatcccatgagttgccaagcactacttgattagctatctctcaaatatatgatttgatataatccttcaattatttattttttgctgatcttgctattctattaatctgagtgagttgacggaccaagcctctatcanaaactgttactggttcttcataacttattaggatcgattaaatattcaattt

SEQ ID NO: 62872 - DNA, 449 bp, Glycine max
  unsure (1)..(449): unsure at all n locations
agcttcgtatgttataacattaatagaaatgttcacagtatcacaaacatacacatatgcatcaagatcaaaccatgacactcagttccaacgtaatgataattttttggatcatgccataataatattataacattatagatattagttatcaatataaaatatgacatatacgcacacgcatgttaacaaaaacatgtatccatatgtatgtatgtatataatcatattctatgtataccaatataagaatataactaattcataaatatataaataaatactatacgcaacatggtggaagcataattactaagtgaattcattatgaaggtacatgtacgtagctacgcatatataatacataaattngaaatgtcaaacatgaatatctaagtagtatatatgtaaccacgagtgagagatgcacaccaggaagtcgcatacta

SEQ ID NO: 62873 - DNA, 414 bp, Glycine max
  unsure (1)..(414): unsure at all n locations
tcctagtcacgcttctntggccataggctatgttgcttgtaattttgtacccaacagantcatatccagagaaaaagtcgaatgtactcgattctggtgtaagagaggaaggagtatgttctccttcaccagaagaagtattctctccctccatatagtcttcttctctcctactaaagtttgatcctgtcactgaagcaggacttttagcatatcttggttttttatcacttgcaattctcttggcagtttgcaaagcctcaagtgccgcaccttgcacaaatgccattttatcagattggcacttgtccatctcctcaattatcaattcaatctctgagaatatgcttctagagtccaaacttctcatcacgtagttgatcatctgaatggatgaaagccttttctgagaat

SEQ ID NO: 62874 - DNA, 97 bp, Glycine max
  unsure (1)..(97): unsure at all n locations
agcttcaccaccanaagagtgtctnggataattatcttacagaggaagcttcaatgaaggatgagaatgatagacatagagtgatgcaatcctaccc

SEQ ID NO: 62875 - DNA, 388 bp, Glycine max
  unsure (1)..(388): unsure at all n locations
ctaacaaactaagctcacagaagcttcatcaaatacactttgacttttattaaacgacnagccnnncaaagggaaacccaagattgctaaccagacctttaagtcagatcccatcctttattgcttctattagagcatgcactctacctttgtagtggataaaaccacaatgggctaaagagtttcctttcaactatcaagagagttgccaatcatgaatgcgtaccttgtcatagttctccttgcatccaaatctacagcatagtcaaaatctaaataaccaacaagagcactagacgtgtctccatggtagacaagttcaatatcagttgtacccattagtacccaaatatacatatcacaacttaccaattgtacaacctaccct

SEQ ID NO: 62876 - DNA, 459 bp, Glycine max
  unsure (1)..(459): unsure at all n locations
gcaagcttgatataagnatcatattaaataatttcgttcttattgaaaatattctactatgaacaacgagaatagaacaatagagaacaaaatatgcataacatattcatgttcaagtctcatatgtattgtatttttttacaattattctctaacatgctatttgaagcatgactggacattagatgtaaacatctctcctcatacatatttgaacaatcaccactttatgagagactagttccaatatatatgcgacacaatatgcatgacataaatgaaaatgtaaatgttcggccaaaaaagaaaacgcgtgacaattattctgaatatatggtaggctcccaacctaataaacgaaccaagaaaccatcaagttaatntaatttgacaacaccactttcgtatatattagtggatagggaagattcggtacatgatgatgtatctctcccccta

SEQ ID NO: 62877 - DNA, 432 bp, Glycine max
  unsure (1)..(432): unsure at all n locations
agaagagnnnggaacaaagccaaacatgtaaggaattcttttgttacagcgcgccaaagacgccggggggaccgcagagcgnncngaaaaccatgaagcggaactagcaagcnctgctntctgcggagctttgcctggagatggctggagtggacgcatggaacacagctgtttgcaaggatgcattcctgagatcattcaggtagtaaattaattatgatcttctattatcaaatgaatcacttataaactaatcatgtcaagcttgtcattaatttcaacttgcttttctccattttatattcgtgtttagtacgatgggatctttctaccatacgaaaacgtactcaactatgacagctttgctgttagattacctgaagatgaaattccaaacttgataaacgatcttcgggtacttgttttctacat

SEQ ID NO: 62878 - DNA, 352 bp, Glycine max
ataaccaaagagtatactcttatttttctctacatgagagagtccttcattgatataatcgtattattgatatagagacccacatcttcttggttccttgtatgttagttttgactaaagatccttttggaacccataccatttttccaatgctactaccattcttactaatataacatgttgatgcactatgacctctcttaccacagtataagcatgttaagaagggagaactagtcttttgagtggaggcaaaataaaaaattattcttcttttggtgatattcacgattatatactaatcaaggcttatcataaacacaccttctgttgcctagtataatatctaaat

SEQ ID NO: 62879 - DNA, 450 bp, Glycine max
  unsure (1)..(450): unsure at all n locations
ctaagcttacaagaaagcttccatcaatattatacttatactattttattaaatgatagctttttcaattggaaacccaagattgctaaccagacctttaagtcagatcccatcctttattgcttctattagagcatgcactctacctttgtagtggataaaaccacaatgggctaaagagtttccttccaactatcaagagagttgccaatcatgaatgcgtaccttgtcatagttctccttgcatccaaatctacagcatagtcaaaatctaaataaccaacaagagcactagacgtgtctccatggtagacaagtccaatatcagttgtacccattagtacccaaatatacatatcacaacttaccaattgtcacaacctacccttcggcgggaaggcgacgcggngctcacgggtgtgtcatccaagaaaggaaaatgcgcggagt

SEQ ID NO: 62880 - DNA, 455 bp, Glycine max
  unsure (1)..(455): unsure at all n locations
agcttccttntaatgcatcgcacctaagacttatctccatggnggtatgggctttngacggcagtcgttgtgatgtaaggcgggagatcgatctcccgattcaaatcggaccccacgtgtgccaaattaccttccaagtaatggacgtaaatcctgcctacagttgcttattaggccgaccttggattcatctggttggggtggtcccgttaacactgcaccagaagttaaaatttgtggtggagggatagctgattatagtttcgggaaaagaagacatacttgtaagctgtccatctattatgccttatgttgaggctgcaaaggattcattggaaacatctttccaggcattggaagttgtgagcaatgctntcgtggagtcttcctcagtgcacccacgctcatctggtgtcgttntgatggtagctcgcgtgatgttggagcacggatat

SEQ ID NO: 62881 - DNA, 438 bp, Glycine max
  unsure (1)..(438): unsure at all n locations
aactcacgcttattaagaggcttcctctagaagctttattaagaggcntttatcatactccagacatcttctcaaagatcccaacagtcagatcatggacaagtgtcttgtgaagtttaagaccaaatttcgagaagatccaacggttaatgaaggctgagcagcgtttttaccgaggcagctgcatgtagctttctctagaagcttcattaagaggcttcctctagaagcttcctcgtggcttctttgagaagctttctcaacaggattctttgagaagctagatccttatctatccacacccctctattaactaaattaacttccttaaaaataattacggatgaaaataacgcaacagataatcaaacatcanacataattactaataatatatagatatatatatcagggtgttacaaggaactaacagatttg

SEQ ID NO: 62882 - DNA, 441 bp, Glycine max
  unsure (1)..(441): unsure at all n locations
agctncgcanatcgccattgccatttcttaatgtctcgaaatctncgacccctgcatgggtcgcctctaggctggaccacgagagcttccaaacactgtccatgtcatcgccgacgttgtcgaaaccgataacacagtttccggcgaattcggcatttataccaaaccctcggtacactttattcttctcagactcgaactgagtacattttactttgattcgaggcattgcattgtatagaaacttatatgcaaatatataaaagtatcaagtgagaagtgagacaattaacttcgattattccatcttacttagatagccaacgttagatttaagtacaactaacctagaccgtctgtgacagattgaatgctcatgctctcacgcttcctatgtagactgaacttatatgcagcctcctacttgtacaatttttcaat

SEQ ID NO: 62883 - DNA, 373 bp, Glycine max
  unsure (1)..(373): unsure at all n locations
gcacacacatgcacctattgatggtggaaaaagaacactcgagnctcggaggaagtctnacagnagaacgaccaaaaaagagacanaggagcnagaannagaggcgaganaaagcagcaaancatatacgtagtaagcatatattcttcctgtgaatgttgcattggaatccaccccttgagcattctgttggattatcaaacaaattaccatgatcaaaccatgcatcaagattataccagccagacgttaaaaaatatgtcttgttcggtggcaatattaagcataagttatcatggtgtagtttgttgcgaatgaagatgcgataaaacaaacctatcctacatgttatctactagtataaaagttaact

SEQ ID NO: 62884 - DNA, 432 bp, Glycine max
  unsure (1)..(432): unsure at all n locations
actaagcttgagccattcagcgacataaattttactcggatcttctattgtgtcctataatatatcgagacgctcgaaattgaaaacagaagctctgagcaaattcaaacgacattaactttnttctcggatgtacgattgtgtcccttagtatatctaagcgctcgcaattgaaaacggaagctcgtagcaaattcaaacgacaataacttttaactcggatgtctgattgagtcctgtaatatatcgagacactcgaaattgaaaacagaagctctgaggaaattcaaacgacaataactttntactcggatgttcgattgtgtcccgtagtatatcgggacgctcgaaaatgaaaacgtaaggtctgagaacagtcaaacgacgaataacttttactcggatgtccgattgaggcccgtaatgtatcga

SEQ ID NO: 62885 - DNA, 441 bp, Glycine max
  unsure (1)..(441): unsure at all n locations
ttcgaggtacttacccgttgaagatcgaagaacgattattaacggtttattaacgcncaagaaaggtcgaaaccttcgcgaaattccttacagaaacgttacggaaacgttccggaagcgcctcggcttagattttcttcacggaaacaattattccaagcaaattcgaaagagagaaaactgcctaaggggctgaaccctctatcacttcactcctccccctatttatagaaaattgggggagaagcttgccacccagctcgcccaggcgagcagggttgcttcctccagaagcaacagccttctggaggaatcttctggagggcccaagtgggcctggttgctatttgcacccgcatttttactaagtacacccnctctgctttatttgagattcntttttcgtaaagttacggagacttacgaatttcgtaacgatac

SEQ ID NO: 62886 - DNA, 206 bp, Glycine max
  unsure (1)..(206): unsure at all n locations
ntagccttaggtggggcactatgttgctcatgacgctctttctanctttaatttcgccatcncngggcatactccttgaatgtttcacattccttctttgacatgctttgcaacttagatctgctaggagtatagtcgatgttgtactagtactgcttgctgaaagcttcacctaaacattttccatgagccgaatatgggcctcg

SEQ ID NO: 62887 - DNA, 477 bp, Glycine max
  unsure (1)..(477): unsure at all n locations
agcctaactggggagttcttaagtgatgagctatctaaaattgatgcatnctgannggataggtagtatcaattaattcttttaaatcactctctgattataaataacatgaggtgtaacatccttgattgttgactnttcggagcctcacacactacaacacttctcatggtgacaattcacacaacttccttgttagtcagaatcctctaccggtcataaccctccgtaggtagctctttccgagaccttgacaatctgtttcggctgctntcaggatcaatgattgaccccacaaatcaacacaagacttttcatcttgttttgtcctcacttacaagcttaactgtggagttcttaagtgatgagctacggaaaagtagatgcatcttgatggtataggtagtatcaattaattctttatatcatccttactatgtagcctatatcacacacctctagatccctctattctat

SEQ ID NO: 62888 - DNA, 437 bp, Glycine max
  unsure (1)..(437): unsure at all n locations
agcttaagcctaaaggtgggttggtgaagctaattntcctctttttttnnctttntcatcnnctccaaaaagggacttcaatttgggtcctccaatctgaaattttctttttccttctgattctctcttgtgataaagaaattactaaatcggatactattgaagcctatagaaatagtgaaaatggtaactagaccaacctatagatattcaagcagttatggcagatcaaatatgtacattactggatgagacttgagaggtagataacgattaccaaaggcaagaggattaaggaagtttatatcatacagaaataaacttttatatattataattgatcaaaaatagaaaatccatggtgaaaagaatgataaaaaagcttctcttttcttctccacggccttctgatttctataaattgaattacactcctc

SEQ ID NO: 62889 - DNA, 457 bp, Glycine max
  unsure (1)..(457): unsure at all n locations
agctntcaatgcacanattctatataattatatgaacactntggtcaatntcaattatgatattaactntttaaattatatataaaaacctaaacaacaagaaaaagagaaaataaaaaatcaatatctctctctaaatntctcctttatttcatcaattcatattaattagaaaaaatactcgatttatagggttcacgctcaacacaatagcatatcaattccacaacaattggtttgtcaaacatatataattcactgtaataattataaggataaaatgaaaattgcaaaaacaccccanaactcattccaattgatatctctaaggatccctacacatgttctcactaattcccaattgtgaataactcatcccttacctctaagcggactcacgtgtcttcagccagcgatagcagcatctctagcgggtctctgagatccctccaatttt

SEQ ID NO: 62890 - DNA, 426 bp, Glycine max
  unsure (1)..(426): unsure at all n locations
ggacacttacgctactaagctctgcgacaaagctcacgccctatgaggccttttatatttatgtgagggagcctatnagcagtgacccctttgttctagtaaccataacttgtgttggagttcatgaagcactatctagaatgaattttactctggtcgcaataagatgacaatgtacaggtgaattttttggagaataatcctcctttgatcttacttcctctgctgaatgcctaacgattatagctggtctggctttctatataagcctcaagaatcaatcctggcaaaccctatgatccgcattcccagcggatctatggagaaccaacttggcgttcctgctctgcacatgagaaggaatgttggctagagagtcaggtgcatggatgagatattggatcacaacacaaattgagttctcat

SEQ ID NO: 62891 - DNA, 485 bp, Glycine max
  unsure (1)..(485): unsure at all n locations
ggcngcaagctcaactacagagatatgttaggctttgtacaataggcgcgctaagcacacttccaagaattcaaaaaccgcaagagaatggcgcttagcgccttctgcctcgctaagcccagcttaaaaactcaagttatagaatggatcttgggcctatcactgctacaataaaaatattcctgagaagatgtggcgcttaacgcatcatacacgctaagcccacttggtaaagttcaattaccgcaaagatgtgtggcttcccgcaatgatgtgcgcttagctgaactattcatccaaccaatcaggggtctatgcgcttagcgtgaggaagctcggcttatcgcatgaagactgagcgcttagcgtaaggtctgcgcttagtggatagacaattgcaaaacaattctaaagtcttttctgtctatctcttcacacaagcttaatacccctcggtcattactaaacangctganattaatcac

SEQ ID NO: 62892 - DNA, 443 bp, Glycine max
  unsure (1)..(443): unsure at all n locations
taagcttcccacatcagggaataacatgaattttccattcttcacagccaaganaacaggacaaaggcagaaaactctgcccaaaacaccaacaaaaatcatagctttttctcacttaaagaccctagtaacatttccttcggtccaattcgttaaccgttggatcgactcgaaacttttactggaagtctctagtacataaatatacattttgaccgttgggatctactagcaaacatccagaactcattctgcattactctttccacaaccagcaaatacatagcatttttctgcacttatgcaaaattctgctgcacaatttcacagcaaaattctgcataaagtgcagatttcgaanaccacacttccnctcatccaatcttgcccaaatcaaatcctacaagtcccaaatcatgtatcaatcatgtctaaaccaaagt

SEQ ID NO: 62893 - DNA, 441 bp, Glycine max
  unsure (1)..(441): unsure at all n locations
agcttcaacattcaacttcgagcgtctcgtttttattatactactcaattagacatccgagtataaagttattggtcgttggaatttctcagagcttcaacattcaatntcgagcgtctcaatatatgacgggactcaatcagacatccgagtaaaaagatattgtcgtcttaattggctcagagcttctacattcaatttcgagcgtttcgatatatgacgggactcaatcaggcatccgagtaaaaagttattgtcgtttgagttggctcagagcttcaacattcaatttcaagcgtctcgatatatgacgggactcaatcaggcatccgtgtaaaaagttattgtcgtttgaagtggctgagagcttcaacattcaatttcgagcgtctcgatatatgacgggactcaatcagacattcgagtanaaagatattgtcg

SEQ ID NO: 62894 - DNA, 441 bp, Glycine max
  unsure (1)..(441): unsure at all n locations
actaagcttgagcanattaaacgacaataactttctagtcggaggtcntattgagtcctgtaatatatagagacgctcaaaattgaatgacgaagctatgagcaaattccaacgacaataactttttactcggacgtctgattgagtcccgtaatatatcgagacactcgtaattgaatattgaagctctgagccaattccaacgacaataactttttactcggatgtctaattgagtcccgtaatatatcgagacgctcgaaagtgaattttgaagctntgagcaaattcaaacaacaataacgttttactcggatgtctgattgagtcctgtaatatatggagacgctcgaaattgaatgttgaagctctgagcaaattcaaacgaacaataacttttactcggatgtctaattgagtcctataatataacgagacgct

SEQ ID NO: 62895 - DNA, 445 bp, Glycine max
  unsure (1)..(445): unsure at all n locations
agctngccctaaccttgggaatgagctatatatttagccaaaacaactccctctagttcagttgtaaagaaagaaagatacccacatataaaacatatcctcctaagaaagcaccagagtaataatgaaataacctaccatagcgaagggaaccatgaaatgattntaccagccttgggtgcatgaatattgatgttaaaagctttgatggccttaaactcactcaaagaggatctcatacagcttgaagtaagataaccggcccacaagcaaaatatgagcaaacataaggatcattgcttgctgctatgagacaaaaagattatganagcaggcttgattgtggcaacttaagatcgcccaaaccacanagaataaactagcaagaacaacatctttagcttgcaggtgaacaactaattngccaacaaccaagataagatcc

SEQ ID NO: 62896 - DNA, 450 bp, Glycine max
  unsure (1)..(450): unsure at all n locations
cacttacatactaagctacctanagagattaggaaggacgccgtttcgcatttactttgccactcccgagttcgatagccatcgtttcaggagcgctgagcaccagtagcatttcaaagccatcaagggatggtccttccaccgagagagacgcgtccagctcagggacgaggagtacacagattttcaggaggagatagctcgccggcgttggatgttgctggtcacgcccatggtcaagtttgatccggatatagttcttgagttttacgccaatgcttggcctacagaggagggcgtacgggacctccggtcatgggtaaggggccagtggattcctttcgatgcagacgccctcagtcagttcctgggatatccgctagtatnggaggagggctaagagtgcgaatacggtcagaggaggaaccangccgatggatttgatgagga

SEQ ID NO: 62897 - DNA, 432 bp, Glycine max
cgccttgcccctagatatattgggttattatgtcactttgaatgacaaatttcttgggataaaggtagtgttgttatgttttcaaagcccgtactaaggcatacaactccttatcataagttgaatagttaagggtaggaccacttaacttttcactaaaataagcaattggatgaccttcttgcctcaacacagtcccaatcccaacatttgaagcatcacactcaatttcaaaagattttctaaagcttggcaacgcaagtatggaggcattagttagctcttgcttaagaacattgaaagcttcttcttgtttctctccccatttgaaaccaacatttttcttgagcacttcattgagaggtgctgccaatgtgctaaaaccctacacaaatcgtctataaaaacttgctaagccatgaaaactcctca

SEQ ID NO: 62898 - DNA, 465 bp, Glycine max
  unsure (1)..(465): unsure at all n locations
agctcgaagatgtttgtgttacggttgtcgattcacaagagaataatctgagacaaaatgagcatagtattgtaatgttgtcgctttactagatgaaggagacttgagcgaattgagtgaatcttaactttgctaagtttgggagtttcatagtatttgagcttattgtgtaaactctttgagtgattagaatacatcttctatcaaacatatattgtttgtgaaggttacgaatgacttagtgacaaagaatacttgggtcttaatctcagggggagattaagggtagtgcacaggagtggcctaaagagtactcattatagccagaagtggcatagagaatacttaattgtaattaaagaatcgattagtggaacccttcagggttgaaaagaaccatatgtacccataagctgttgtgaccagtatanagctttgtattttatttctacttctatataaccc

SEQ ID NO: 62899 - DNA, 440 bp, Glycine max
ggacctataaaactaagcttagtcaggaagaaccaaaaatgttcaatttggttctgaaagacataacaagactttttatattgtttaaagaataatctttggtgaccataatgcatcaaaacgttaagaaagttagcagatgggcctaaaagaaatgttatatcttggtaaggatacgatatcaacaagtattcgttctaaacgaaatcacaagacaataagagtacaatgcaaaacagtggtgtaagtctaaggcctgaatctcaacactttgctactatacatgatgacaaacccgtgtagcttccatgccttactttggagtcattgaagatatttgggaggttcattatgtaaaactcagcgtctatctcaagtgtaagtgggtagatagaaataccggtgtgtgaatagatgatttcgaattactttggtaattt

SEQ ID NO: 62900 - DNA, 457 bp, Glycine max
  unsure (1)..(457): unsure at all n locations
ntgtggagtaaaaaatggcagcttcagtgtcttcttccattttctctgtatacaatagcaattcattaaaaacaatgaacagacagtgagataaacgaanatggaaccaaaacaaaaatagaaataaaatggaatatgaatatgaagaggaatggagaggaatgaaaatggaagatggagaggatgtaaaaaatcagcaacaactctttgtagcaaaaatgacagaagatatttaaaaaaaaaagaattagaagagaaacaaaaagaaatcagcaatatagcaaaaataggagaagataattntttgaaaaaaggaaattacgaaaaaaatgacacatttgttcttcaacacagaacctgtactcatgtagaaaacaaaataaaggcagaacacccncaanaattaaaagccttgtgtttacgaacctgaacccatgaagtttttgagataaaaatc

SEQ ID NO: 62901 - DNA, 442 bp, Glycine max
  unsure (1)..(442): unsure at all n locations
actagctgaacgtcctcaccgacaccgcggnnctttctgctcttttttatcgcgggctgaagcactggttccgcttccctaactgcattggaggcggttgccgtggcattatcctctagagttttctggagttttagcatggcctccgtgatagaagccatttgatcttttaaggccgatagatcggccttcatctgctcttgcacgccctcttcattatccatttttctggattgagtgttataggggtgcctttgtgcattcttagttatggcgaactccctaaagaaacatacaacggtgagtatgccaccaaaacatgaatatgcaaatgaatgatcggagcacttggatccaccccaaggtttttttagataatgtgatgagttcagaacttctcattctataaaagaacgaagctctcatctagccaagattatac

SEQ ID NO: 62902 - DNA, 195 bp, Glycine max
  unsure (1)..(195): unsure at all n locations
tcttcagcacctgagctgcaagctgggcttaatatagaagttccgttgtttcattcgttatgggtgaaaaataaaatgcnaattgaagcatcaatcttacataagaatattctatgctacccgaaatngccatngaaatgtttggtgggtgttacaccctattatacaagaaccatatctaantatatagttgat

SEQ ID NO: 62903 - DNA, 452 bp, Glycine max
  unsure (1)..(452): unsure at all n locations
ctaagctcaatgtaacttgcggttaaatattacgccttatatcttctttttgctcccttctcatatgccaatgttaactttcattgataattgaaggtgatggccccaactgtccccagcacccccattggtgagtgaacctcattgatcgaattcaagagctcccattactgtaacacgtggtgttaacaacaaccctagcctgctttcagattgagagggacctgacctgttaataattaccaacaagcatgcatcgatcttaaaagggttttacatgggcaagcaatgtaaaatttcacagctgcgggcgtagaactaagtactcaaaaacactttaattanttgatgccatgcccatgcatattagattctttntattntattcattgcataacgcanagttaatggttttcagtggtacgttttctatctccccagtccccataatc

SEQ ID NO: 62904 - DNA, 377 bp, Glycine max
  unsure (1)..(377): unsure at all n locations
ctctaaattttttgaaagaatgnnaataaggaagcataaatatattcatcaggaaaccatcataatggaaggaaattgcagtgctgtgatccagaagatccttccacccaagtataaagaacctgggagtgtaactattccttgttcaattggagaagtcaatgtgggaaaaactcttattgacttgggagctactatcaatntgatgccactctccatgtgcagaagaatgggagagttggaaataatgcccactcgaatgactntactattagttgaccgctctattacctgaccatatggagtaatngaagatgtgttggtccgagtaaaacattattatcttccagcagactttgtggtaatggatatctctg

SEQ ID NO: 62905 - DNA, 408 bp, Glycine max
  unsure (1)..(408): unsure at all n locations
cgcttactntgatatgccgtgagcttcagataatantcatattgctttcaacaggtctacaggtctgcatacctgtttcttctaaaatatcaagagcatacttcctttgagaaataacaataccatctcctgattgagccacttcaataccaaggaaatacttaaaagatcccagatctttgtgctggaaatgactgaataagtgctctctcaactgggcaatcttagtagtatcattccctgtaatcactatatcatcaacatagaccattagatagacacattttccaggagaagtatgatattaaaatacagagtgatcaacttcacttcgttttagtccaaacatttgaacaacatgactaaatttaccaaatcatgctcaacgagattgttcaacccataaag

SEQ ID NO: 62906 - DNA, 458 bp, Glycine max
  unsure (1)..(458): unsure at all n locations
gcatgcaagcttctaagaagcagtggatgaaaaatagtttataattatttntgtggtccacacgctaagcgcatcccttgtgctaaacgccatttccttcacacgctaagcaagctgttgttcgcgctaagttccttgacccctgctcattggttggatggtcccactaatcgagtgcttagcgctaagcccaaaaacctctctggattttaattctttcgaattgggcttagtgcaaatgctcgctaagcgcaattccttctctggaattgcaattattagaattgcactaagcacgaatgacacgctaagtgtgggccactactgcatttaatgagcattaattcgctaagcgtagcctttggtggctaagcgcaagttgcatgaccaatcaaagctacagtacccgctaagcgcaaccttgcgtactaagcccaaaagcttctctggaatttaac

SEQ ID NO: 62907 - DNA, 445 bp, Glycine max
  unsure (1)..(445): unsure at all n locations
tgagatgaggaagtgttgaagggtgaaactttctgctnttattgtttaccacatagtggtacctggagatatgtcgcgggggtcaggagaccttggggacgtcaagtggggtgctattgcccaaaaccaagcttgaccaatcccgacccaacccgggcatagtcggtcagtgagaacctgtgatgtacctaagcaggcgagctcctggcagtcaacagataaaaggaaaacaagaccgcaaagcaaggaggcttgtggtggctggccagctgtgaatcttgagtaatatgtggattgtggcctctggtaatcgattactaagggtgggtaatcgattacaaggcttataattgaagacaggaggctaagatggtctctggtaatcgattaccaaggggtgtaatcgattaccaggcttgaaaacgaagtcaggaaacttagggag

SEQ ID NO: 62908 - DNA, 461 bp, Glycine max
  unsure (1)..(461): unsure at all n locations
agcttcctgtataatatcttcgaaacatttattttggatcgncgcaacccanaataagggaagccgctcaggcacttactntaggtataaattattcagtttggatccagctgcacgagatacaattgtcaatccaataatgtttaatctagcttaattcanaatcaaacacccctatgcatttattattntaatataaaaattaatttanaggactagtggttagatttaactgtaaaagaactagatccttgattaaaaaaatgaaatgtcaatgatagttcttataataatgataaaatgcctacatatattgtcctttccctgagttaagttctaatatatattcatctaatttctttcactattcctcattctaactatttcttaattatcgctcttggatcgaattntatatttaanagctagaaaattatagataataataacatacgaacata

SEQ ID NO: 62909 - DNA, 370 bp, Glycine max
  unsure (1)..(370): unsure at all n locations
agccacaaggatatttaacctgaacctcaatttgtcngtcatacacaccagccagcggacagcgggagctaacaatgatggnnggaagtgcgctggaaagcaccttttctctaacaaagtgacagatgatctttctatgcctttgatctttagatgcgattgccgcccaacgttaggtgaaggagtacccgcctaagctccataagcgcacatgtgactatcggcatagaacaaaatccaactttcgcactggatctagaaattatgcattgcttattgctcttccatgatattaggtgtggctccagcaagaacacagtatacttacgtggatcatgtgtctaagggcgaccgctcccagacaacatca

SEQ ID NO: 62910 - DNA, 373 bp, Glycine max
  unsure (1)..(373): unsure at all n locations
agctatacacactctaggtatttgaatnnctttcatggtccatangnanananatagatgagagatcccgagttcaactcttccattaataaaaaattaacaattaacaattgataactagcatttgctgataaatatatgtctcactctaccattccaccacctatatggaagcacatcgcgtcattgagtgtatgttttaaagtgaagctatatccagcgatactgatattacatcatttatattataatatagaaaagttatactatttcttaaatgaaagaaaaattttcttaaaacacgacaacaaatattattatggaagaaatttttttctctataggggaagagattctctttttttaaccaaat

SEQ ID NO: 62911 - DNA, 416 bp, Glycine max
  unsure (1)..(416): unsure at all n locations
ggcaactctcgcagacatgtacgaagaantttggtgtgttctgttacatgtccccacatccacgtgaccctgttttctctaaaactcaatttctattttccacacataccaatgtcccaatgataaataaagcctctccaaactcgccccatgaatcacacactttcagcaccctcaagagaccctttcaaagttaacaacttgaaggtgtgcaaagagtactaacaatcaatttcacaatggccatcaaaaaatccaataagctaccccaagcagatgtgataaagcaaattgtgagaaggtgttcaagctttgggaagaagcagcaacagggctacaatgaagagggtggtcttccagaagatgtgccataagggcactttgcagtgtatgttggtgaaaacaagacaagatac

SEQ ID NO: 62912 - DNA, 433 bp, Glycine max
  unsure (1)..(433): unsure at all n locations
tcctcgggccatttcctgcgaaggcaaacatttgtagatttagttntaccaagaaatgctattcttaaaacgaaaatggcatacaacctcccccaataacacaaacatcaatgtaaatttagagcgaactcatgcgcatacttcctttcgaacattcactcgcaccagatattcttctaactaagaaaaatgcacccaggcacaatcaaggcaccttcgttacctagatcacttatatgtacttctaaggtgtatttgctacctacatcacatgcacttcctttgctaaatttacatacatgcatactcaaagcattttggctaccaaaaattgcatacgtgcacattctggtatttctaatacctatacatatacaaacttttgtgatgaatcttggctacctacacaataaggtgctacatttcatgcttt

SEQ ID NO: 62913 - DNA, 459 bp, Glycine max
  unsure (1)..(459): unsure at all n locations
agctngnggatgctgatataataatttccttttgttctaatattacatagaaggaaaaaaatagagatggatattcaatatatagatagaagaaaagaaaacacaatcattctctactttctagnttttctaccaagctagtaaaatggaattgttcaatccacatctttcataaaaacaaactaaatttgtcactcagtcaatagtaaagaggatacaaagtataatttaattgatgacattgtcatactgttagtccttcaaatgtattattattgttgatcacgcaaacttgttcatcaagtggttccccaacacctcgactatcatcatggagaatacgccttgagtagtaaacattgtgttaatactttgcttgaataaaataatattgaattagcattaataaaagagagcttgaatacctatgaagcatcaatccacctcaccatctttgat

SEQ ID NO: 62914 - DNA, 423 bp, Glycine max
  unsure (1)..(423): unsure at all n locations
gttgtgggtgtaaccggcaccccatagtactggcagagactcgntatcaaggccagaaatcccagtgctctattggacttctccgggtccactagatatctgggaggagcgatccttgcaaattggtaaatggcatacaagattagctgggccacattaatactaaattgagtcaagacggcataaaccagctggaactttgtgaagatcaaaattatgatcactgtggagaatgttgctgatcatcactgtcatccagctggctgctcgcaaccgacaagtgtaccggatcgcacaagtagtataaaatggtaagaaccgagtatcacactctcggagaacttgtgttatctggcaagctatttcgattaatatgcgtctagtatgaaaatatgagtgtggttatgaacatgtattaaacta

SEQ ID NO: 62915 - DNA, 435 bp, Glycine max
  unsure (1)..(435): unsure at all n locations
agcttgaagcaatatctagaaggctatantattttcttaaacagatagatagtctcggtttgaaaattgtcgctggcagagtctcttacagaaaagatacagatcgatcggtggaatatgttgttgcaagagacgatgacaaaaagaagctgttgagcatgcttttctctgatgaagatgagaataataatcacatacaagtgctgacaatatggcgcatgggaggtcttggaaaaacaacccttgctcagagccttttaaatgatgatgcagtgcagaaccatttcgatctcaaagcttgggcatgggtatctgatccttttgatgtgtttaaggcaacaaaggcaatggttgaatctgccacttctaaaactngtgatattactacatttgatgctcttccgtgtgaattgaagaacacctttaaagaataaa

SEQ ID NO: 62916 - DNA, 453 bp, Glycine max
acactatgaaactaagctttgcctaaacacatgtgcatttctcatgttcttttaatcgactaccaagcagggtaatcgattaccataagacaattttgaaaataaacttttaaaaggggttttgaatttgaattttgaatcatgtaatcgattaccagatgtttgtaatcgattaccagcaacgacacttcagaaaacactttgaaaagtcatgacccttcaaaatataactatgtaatcaattaccagaaagttgtattagattaccagtgaagaatttcagaaaaaactttttgataagacacatgtcttctaaccattttgaaaaggcacgaaagacctatatatatgtgtgtctgacttcaaaaagtaagatattccgagagaacttcatcgctaaatgctctctcaacaactcttgcggcaacacttgcaaatctattgagaattcat

SEQ ID NO: 62917 - DNA, 455 bp, Glycine max
ttgaagctagctgtaaaaggtttgtgaaaatatttcttatgttctcatcactatcaattaccctagtttgagtgacatttgctctggtcttatagtagtggaatccgagagggattcatatctcctctttagccaagtattaacttagtcttaaagggaaatgaaagactagttgtcttttgtcaaatccaagtggttgagtatttgaagagatgtcttgccaacaattgtaatgtttagacacatttaatgctattgcacattttcgaaagagacacgatgcttatgtcctttgtatttcaaaaatgctctcaagatagacaaaggtcgcacccttctccaatcatctattcatgtatttgagaaaaagatctaacgatctgaataggtgcatcctttcatccctcgaaagcttccaaaaatctataagagagcaaaagttttttgttctctta

SEQ ID NO: 62918 - DNA, 216 bp, Glycine max
atcctaagaaatccgatgacacatagaggagacgcgtgaccgtctgatgtacctcgaacaatatattcatagcagggtaccatctatgcagagctattagtggatgttgatccgaaatgatcaagcaaaggagactataacgtacaaatgtgtgtgcactatatggaagcgatacgttatatggtagcctctcttctgccggttgtgtagcgttcc

SEQ ID NO: 62919 - DNA, 462 bp, Glycine max
  unsure (1)..(462): unsure at all n locations
actctgaaactacgctttgcctaaaccattgttccacatccaggctcatgatatctttctaagcagngnaatcgattaccataagacaattttgaaaataaacttttaaaaggggttgtgaatttgaattttgaatcatgtaatcgattaccagatgtttgtaatcgattaccagcaacgacacttcagaaaacactttgaaaagtcatgacccttcaaaatataactatgtaatcaattaccagaaagttgtattagattaccagtgaagaatctcagataaaactttttgaaaagacacatctcttcacaccattttgaataggcacgaaagacctatatatatgtgtgtctgacttcanaaagtaagatattccaagagaacttcattgctaaatgctctcttcaacactcttgggcaaacacttgcaaatctattgagaattcatctaggaacttcaa

SEQ ID NO: 62920 - DNA, 336 bp, Glycine max
gagcatactttttgcacacaagcgttgaaggacaaaaagaaataacatcgatcttggccttatcgacctcaatacctctactagagaccaaatgccctaagactataccctcatggaccagataatgacattttacaaagttaagaacacagttagtctcaatgcatcgatcaagaactctagagaggctatccaaacatgcatcatagaaggaaccataaagagtgaaatcatccataaacacctccatgtaaatctctaataaatcaaaagaagggactcaccatgcacctttgaaagatgccaggagtggtgcatatgccacaaggcatcctg

SEQ ID NO: 62921 - DNA, 455 bp, Glycine max
  unsure (1)..(455): unsure at all n locations
ttctcaaggaagctacatgaagttgtctcggtaaaagcactgtccacttttcgttaatcgttggatcttctcgaaatttggtctggagcttcacagaacacttgtccacgatcggaccatagggatctttgacaagacatctggagtgagggcgacgtttccgtttccgagagctttagtcacttgtgcgttttgagccttgtagtccaattagctttggaaaaatgccatttcttctccttctttcttccaaaaccatttccaatgttccaagcactttctccgtcacccacagccaccagtagccaccacaaaccgccattgttctccgttgaaacctcacaccgagaggaacccttcaaccgaagcagaatcttccaacttgtcttgcgattntggttgagagcgaagcccgatctaaccttttgttttccttcaaggtaaccatggttcta

SEQ ID NO: 62922 - DNA, 275 bp, Glycine max
gcactgtagcttgcggaggcacgacacacgcgacgcaaagaatatggacgcacgacaatgtatgctaccttccttcaacagatgacactgcggcgcgaccgatatactggctatcactccacggggggctgatagcacaatgtttagaccaacttggggatagctcaagcgaggtaactatcatcgcacgctaggggcatgaatatcgacccttaatgttaacaacagcgggcgtgcataaccgtgtttgatgatatcgaactctactatggtga

SEQ ID NO: 62923 - DNA, 237 bp, Glycine max
  unsure (1)..(237): unsure at all n locations
tatgtcanactggctgacgtctccatatgtgngttcactatggtcatgncgaggctactagaattcatttggaatatttgtagctgattctgaataagtgatcattcttgatttaaaattattgcctcctaatcagccaagtgttaatcttgaagtgggtcacctatcttccaattgcacctcgttaaattgcttgttagacgcatcatagtctcgtgctatcactagtagagagac

SEQ ID NO: 62924 - DNA, 438 bp, Glycine max
  unsure (1)..(438): unsure at all n locations
ctagctggtcaggactacccgtgaagattgttaacgattaatatcggatgaagaacgtcgaagaatggtcgaaaccttcgcgaaattccttacggaaacgttacggaaacgtttcggaagcgcctcggcttagattttcttcacggaaacaatttttccaagcaaattcgaaagagagaaaactgcctaaggggctgaaccctttgtcacttcactcctccccctatntatagaaaattgggggagaagcttgccacccagctcgcccaggcgagcagggttgcttcctccagaagcaacagccttctggaggaatcttctggagggcccaagtgggcctggttgctatttgcacccacatttttactaagtacaccccctctgctcttttgcgattcttttctcgcaagttacggaaacttacgaatttcgaacgat

SEQ ID NO: 62925 - DNA, 434 bp, Glycine max
  unsure (1)..(434): unsure at all n locations
agcttccaagattatttgatgatgccaaagtattttcttacaagattaaagaaatcaagaagattcaaatgaagattcaagagaagactcaagatatgcaagaacctcaagaaaaaacatcaagaatagtataaaaagaatttttcaaagaaaatattgaatagcacaatttgtccaaaagaattnttcaaagaaaaatcttttacctgagttntttactctggtaatcgattaccatatggcagtaattgattaccagaagcccaaaaccaatttataactgttntacaaagtagtaatcgattaccatgggcatgtaatcgattaccaatggttttgaacatngaatttcaaatctcaagagtcacaacttgtgacanaatattttcaaaatagcataatcgattacacaatantttgcaatcgataccagt

SEQ ID NO: 62926 - DNA, 440 bp, Glycine max
  unsure (1)..(440): unsure at all n locations
tggtgatgatgagaatcctcatgtaagtgctccagaatgtctcttccttcaccagtgagtagttcgggttccggttcgggttcgtggtctacgaagggtgaatctcctccagctgataagcataatcctaatccatctggagattctagtcctaatccaaagtctagtagttcttttgagtcgaataagtcttccattgggaaaaaattggttccaattgtggctcctatcgcaggtgttgcagctgtggcttttgtgctcattccgctttatgtgtattgtttcaggaagaaaaagggtgtctctgagggtccagggtcattggtgattcaccctanggatgcttctgatctggacaatgtgctgaagattgttgttgctaacaacagcaatgggagcgtttccacagtgactggcagtgggtctgggatacgactgga

SEQ ID NO: 62927 - DNA, 447 bp, Glycine max
  unsure (1)..(447): unsure at all n locations
agcttctcccctatnttgctataaataggggtatatgtgaagaagaaaagggttcagccccttaggcatttctctctctctcgaatagctgaggaaaattagttccgtgaagaaaatccaagccgaggcgctttcgtaacgtttccgtgagtaattacgcgaagattctcgaccgttcttcaagattcatcgntcgttcttcgntttcttcagtcttcaacggggaagtaccttanaccaagcttttcaattcattctatgtacccgtggtgggccacattttatttcatgtatttttggtctcggtttcattcacttnttatatccnncttcgacgtgcttacgccatttatntaagtcatttctcgcttaatctaaaaataaaatatatctccaccgatcgtctgaattgtatcatcccgtatatttgggtaaaatgaattctga

SEQ ID NO: 62928 - DNA, 381 bp, Glycine max
  unsure (1)..(381): unsure at all n locations
actaagctncacttaggggagggcggcatacgtctttttctttctcaacgcgagcgatgaccactactcttgctttccgcgatgcttcttttcatgtccgccagagtgggcttatagcctaaaccatacttcccacgattgccttgggcatttatcatgctagttatgccgccgccgtcttcgcctaaacccattccgggctcataaccattccccaacataacttgggccatcattactgttgcatccgatagacaaggctgcccacagaatgagtccacggaggaaatgctgaccacctcaaaagactggcaagcggtttctaacgattcttctgcggcttccacataaggcatagaagatgggcagcttaccaagatg

SEQ ID NO: 62929 - DNA, 388 bp, Glycine max
  unsure (1)..(388): unsure at all n locations
tgaggcatgcaagctgaataatatatcatatttataaaacntttcatttgtaatacaaagngagactatatttatgataagatctcaaccatcaactaacacgttctaattaataagacaaatatacattggataccggaccatgtacctatgtaatattaatcaaccaaagaaattttgagtaaataagagtataataagttctatttctggcttttactcattatcgacccactcaaaaggaggaacggccaatttttgctccctctaccctccaaatagagacacatgtacataagagatgagaataaacaaattgtgatcgaggaatgagtcgaactgacactactacccttgtaaactgccgaattagctgagagacagcgag

SEQ ID NO: 62930 - DNA, 421 bp, Glycine max
  unsure (1)..(421): unsure at all n locations
acttacatactaagctatagagaaaaggangcgatgangtgccactcaancnttttatgttgaaaagctatcgaagaagattaattattgtgatgcgaaacatgcttttactccttatgactcatccatgaagttaaagaaaaatttgagtaaaggaatttcttcacataaatattctcaaagtatcggttctttgttgcattcgacaaacttctctaggcctgtctgatattgcacatgcagttggtagattggaaagtaattgagggatttagtgatacataattgaagctctgattttgatgaaataaaaatgacaagcggctatgtctttgctttagctaattgcgcagtatcatgaatatctactagacaaattattattcacatgaaagcacaaatatttgcttaaatatcgcta

SEQ ID NO: 62931 - DNA, 305 bp, Glycine max
aatgttctatgggtgaaactgtttgatgcagtaacttattatgacattttgaatggtgcataattttgggttgacaagtatatgatgctaatcaattttgttaggcaggttcatccagacatatggtacacacataatagtacgtatggctgtacgacgtcaagatgtaatatgtgtgaaacaaaaacattctataaagattcctcctggtgatctcagaagacatttacaggatctcgtagattatctattctcagatgtctgaagcccttctttactacagaggacgatagcagatggaaaac

SEQ ID NO: 62932 - DNA, 398 bp, Glycine max
  unsure (1)..(398): unsure at all n locations
atgcagattaggtcttcgccagagaaatgatcaatgttgtgttctanaagaggcaagaaggatcatcctactaggacgactgagaacactggggcaaataaagagggtgaggatgagggagaaacccatgctgtgactgacatttctgtactgacaaaattcccaccaaccctgcaagatcgatactcagccaataacagaccaccttcttacccaccacccattcattcacaaaggccatccctaaatctaccagcacgactgtctaccgcactgtcaaggacgaacaccacctttagcgcataccanggacaccagccattagatgaactctgtagcgagacttcctgtctaagccacccccattacagtggtctatgctgactcgctcccagatc

SEQ ID NO: 62933 - DNA, 236 bp, Glycine max
cattttgcatatccatgaatcgaatccttcatctcatgccttaagtagtagtgattgtttttttttatagtctaaagctggctttatatagctttttttgacatattagtcagttaaccaaattagagatgacgaatgtttggcaatacacaatatactagtagtacttttctcttaacacatattctatgagttatttaagattattacaattgacgaaatcaggaggagaaaga

SEQ ID NO: 62934 - DNA, 344 bp, Glycine max
ctacgataaagctacgcgggagtacgtgagctcagatgaaggtgggcaactggggatggtggatatatgtgtgatttgtggatgaggagagtcgacttgcaccatcgcccgatcgccacctagtaccacatatgacgggtaccccataatcctacaagctagaagtgagaaagtgtggaagagtcagtcttcctacttttattacgtgaccacagagtggcacctggagatatgttgcgggggtcaggagaccttgttgacgtcaggtggtgtgctattgcccaaaaccaagcttgaccaatcccgacccaacccgggcatagtcagtcagtgagaacttgtga

SEQ ID NO: 62935 - DNA, 407 bp, Glycine max
  unsure (1)..(407): unsure at all n locations
tctaaaaagaggcaaatatgatcatcatgctttgataatgcaccaaacaaactagggcatatgaagagggtgagaatgaaggagaagcccatgctgtgacagccattcctatacagccaagtttcccaccaacccaacaatgacattactcagccaataacaaaccttctccttacccaccgcccagttatccacaaaggcaatccctanatcaaccacaaagtctgtctaccgcacttccaatgacgaacaccacctttagcacaaaccataaacaccaaccaaaaaatgatatttgcagcgagaaagcctgtagaattcaccccaattccagtgtcctatgttgacttgctcccatatctacttgacaattcaatggtagccataaccctagccaggttcatcaa

SEQ ID NO: 62936 - DNA, 294 bp, Glycine max
aatcgtttaccaaagaggttactctctggtgatcgattaccagataatagtattcgattaccagtggccagcattgtttcagaactgagttacaaagctataatcgattaccatagaaacgttatcgatcaccaatgtgttaaaacgttagatttcaaatttcaagagtcacaaccagtgatataacattttcaaatcattttaaacttgtgtgatcaattacacaatactcgttagtgattaccagtgttgctatacgttctgagtttcagatctaaacatgaagagtcacat

SEQ ID NO: 62937 - DNA, 441 bp, Glycine max
cgcgggtctgagagacacatgtcaagtggtggtgatatactattacgatgctccgagcacattagatttggtacgaccatgccctccagaattccagctgtgaaattgtcgagtggaggaacgcctcggcttttacgcaacgagcataatgtaaacctttacggcattaacagctctatatttgggcctacgctatatagtttttcttttgtaaagctttgagcatctgttgtgatttataatcaaagatcttcttatttgacctaatctctaccattctattcatatcatgttacttcttttatgaaaggagatccatgatagtccccaaggactaatcctggacccgctatcgactttagcagaatgaatcaacgagatgatgaaacagtattggactccccatattaaatatggttcctgagacaaaaagggctataa

SEQ ID NO: 62938 - DNA, 403 bp, Glycine max
  unsure (1)..(403): unsure at all n locations
gctgcagctatataccttatcattcagctcatcttatctcaatcaattcccaacatatgtntctgtgacgattgaagcttgaaaatccttggaaaggaaaatatgattgggtttccttgataaatggtagtcgatgaatctcatttcatatagcacgttacatatgctagctttgttctttcaggggagcaagaaagagagntgttgtggatgcatctaaagaagagagatcacttgaacatgaattacatgttgactcaccgcagactgaagaaatggatgctgatgtacaaaaactcgaggaggtttgtgtcacacctaaaatgttcttggggacattatggtgctgctngatatggccttanaaggagatgtgggcttangtgatcggagagttaaaccc

SEQ ID NO: 62939 - DNA, 452 bp, Glycine max
  unsure (1)..(452): unsure at all n locations
tgtgacgataactccaacacactcttcttagtgggtacatgctctctatcacgcaagatggcgtgatcactagcagccatgttttcaatcaactccattgcttcctcaggagtcttcaattatattttccctcctgctgaagcattcaacaactgtgtagattgcagtctcagcccatcaatgaacatgtttagttggattggctcacagaagccatgtgtgggagtcttgcgtaacaagctatggaacctctcaagtgctgtactctaagactcatcanggaattgatgaaactaagaaattgttgcttcccttcgcagtttagactaagaaagactctttatataattccctatctttccaagcttaaacattgccttgatgttgcacctctcttgctctccgctataaaagagacaactgaccatatacattttgttctcacacctcac

SEQ ID NO: 62940 - DNA, 185 bp, Glycine max
tatgactagaccagcacttctatgggagagggaatggctcctacaaaactctctctaagtgtacttattgtctactttgtgtgagaagctgccaaatcacatagatggatgacgggtgtgtgtggtgtgcttacggtaagctaatgaagaccatttcgcacattagcttggcgcacagactaggc

SEQ ID NO: 62941 - DNA, 494 bp, Glycine max
  unsure (1)..(494): unsure at all n locations
atccttaagtcacctgcggcatgcaagctatcttgagaatctagagtggtgctactgacattcctgcattagctaagctcacctcgatgccaaaatacatgantatacaatgggaaactctcttgagaaacaaggaaggtagcttccttgggaaaaaaaggaagaaagcttctctgataagctagaggggggcgactgattgaggccgcacccgaatcaaattaacattaaacatgcagtatctaggaagtgatcctaggtcgtctcccaatgaacaatggtcaagcaacgtttataatatattgtgataaaacagtaacgaatgggggggggtgtctgctttgtatttaacatcaagcacatttattagaaataacagaataaaacatgttgttctccttgttcacagcagtctttatactagttcgtgatttatcctaccaatcaccactaatccaccctattaattctaatgaaatacatacgtgtctttt

SEQ ID NO: 62942 - DNA, 387 bp, Glycine max
  unsure (1)..(387): unsure at all n locations
gcagcttacctatcgctctacagttttatattgggaccaatccatccttgtgtcggactctcgccactttgatagccgcgatatcccatactgcttcccctaactctctgtcttcttatgccgcatccatgccttgcgaactcctggataccctcgcgtttgtggtcactgaaaccccatgcgatgaaaggcatgatgctntcatctgatggcacttctctcatggggtagccaagctgtcttatggcgaggacgggattataattaataccaacccttgttcccatcaagagaacatttggacatccttcgcatgaagatagaatcctgattcttccttccttctagcgaggaaaccaattaacagacgcccctcatgctagccaa

SEQ ID NO: 62943 - DNA, 283 bp, Glycine max
ctcacattctgatcatctcaactagtagtcaaacttgagcctcaatctgaagagccatagctcgtcataatgacatagatgtgagatctgctctgttgaccggagattccttctctagtttccttgacctctactataataatctgacaccatcagactctgaaggtggttcaaattcagtcaagacttcgaaatctgaatttgcataattgtaggcttaccgatggaagtatcctatggcagctgctctcatatgagtgcttcatcttctcgtggtaccatg

SEQ ID NO: 62944 - DNA, 302 bp, Glycine max
  unsure (1)..(302): unsure at all n locations
acgagagcacgagntccaaggaaatttttttttatctatagcttcactgactaaaaaaaccgacttggaaaaaacactatcttttcatctcacacagtatttggcactatgcatttttgtaggagggaatgaatcatttatagctcattattttcctaaataataactcgcgagagggcacccgggcacagtaagtgcgcctgggactgaggcaggtagaaacgaacaccttttctatgcaaggaagtgcgcaacacctcccctcctgcatacaaagctcggaatgggacaaattattaatc

SEQ ID NO: 62945 - DNA, 339 bp, Glycine max
cgcgcgcactctagaggaaagacgcttattttaaaggaaaggcttcttctttcctctcaaaatagacaacacaaaatatccacgttattctaagacatagaaaaattaaactgaaaacagagttgggcgcttagccccttcacgaaattactcatgggctaagcgcaaaaaactcacgattaacctaaagactcataaaatactcttttctatagattaagcttaacgcagcaaggcacgcttatccttattccaaaggagaagaaacagaacctatgtggcacttaactagcaagctaggcttagcgcctgaactaatatgagtatctcagtatacta

SEQ ID NO: 62946 - DNA, 513 bp, Glycine max
  unsure (1)..(513): unsure at all n locations
ctgcagcttgttagcgttatgcgagacggagtaccacatgctagctatcatcgccaagtaccaagaagagttatgtctagccgcggcccacgagcataggattgcggatgaatatgcccaagtatacgcggaaaaagaggctagaggaagggtgatcgactctttacaccaagaggcaaccatgtggatggatcggtttgctcttaccttgaacgggagtcaagaacttccccgattgttagccaaggccaaggcgatggcagacacctactccgcccccgaagagattcatgggcttctcggctattgtcagcatatgatagacttaatggcccacataattagaaatcgttaggaaacttgtatggtctctaagaccttgactagatacgacttcctttttgaaatannaatgagtggttctatgtgtctactccaaaaagcttgtgcaaatcaaatcactcctacatttcatctctagcatgcattttctttctttacccactcctcacg

SEQ ID NO: 62947 - DNA, 320 bp, Glycine max
  unsure (1)..(320): unsure at all n locations
caaaattggggcaaaaagatgaatcgagtcacatcactgcttcgtctactgccaaacatatntaggattattgatgtccttgttacttncagtttcaccttgacaaagatgtcatggaccatgttgaaaatctaaattgattcaaccccatatcctgcgtaaaaattcgcaatacttcgactgtacatcattcgcatgcatccatgctnttcattggttgcatagctcattgcattctttccttgaaaaataaaataaaataatatgaacttatcananagattaggacacgctttacagcgcccttaccgaactcgtgc

SEQ ID NO: 62948 - DNA, 398 bp, Glycine max
  unsure (1)..(398): unsure at all n locations
ttctatgtacccgcggtggttcatcattgtgtttcgggtatatatattcttcgtttaattacttattatacccccttttgacatgcttaagcaaatttatttaagtcatttctcgctcaacctaaagataaaataaacttacatcgatcgttngaattatattatccgataacttcaggtaaaatgaattccgaccgttcggtcgtgccgtaaccacgttggaaatcagaaagaggtcaaataataatatagtaatataacatataccttttagtaaaataaagcgaacaatcaattggacgttttctctttgagatttctcattcttacatcgaattggctaataactaaagtgaaactaaggctaaaatcaactcgcctatgcaagctcgtccata

SEQ ID NO: 62949 - DNA, 449 bp, Glycine max
ttttgtaacagcatatcaaagccataacgttatccacagatgcctctagtaagagtaagtatcaattctgcttcattcaagttctaaggcaacaatacatttctgaaagcttaagtcaactaactatgcgcacaagtgagggatcacaccaagagcatactaaatttaagctcagaaagaagcattgaacacaagacacacagccaatgagatattaaagtaattacgtcagatgttcagtagatatccccaacaagggtgtttatctagccattacagaaaaaccccttgatattatattgagactactaatcctatgtatctctgctaaaactgctcctcttgtggctttagagctctttaccgaaaatgcactgtggtgtgctgtagaatttcgtgctctaggcattggaccctaattctgcacaaaacacagcttaaatatgctc

SEQ ID NO: 62950 - DNA, 234 bp, Glycine max
tagctgcacatcactatcatatgctctcacagcgcctatacttcacgagaaatcacagtgagagaagaatgcgtccccaataccttggagtatcctggtaccccacgttgagaagcacttcacgactcccgagatgcctaccttatcgcgatttggagcagatatgggcgcctgaggatggagctataatggacgatcaatggaggatgaacataacagaaacatctctgtgag

SEQ ID NO: 62951 - DNA, 223 bp, Glycine max
  unsure (1)..(223): unsure at all n locations
gtcacctgaggctgcagctatgctgcaacattatagtaaactttctcagnngccnaaaccaacagcagctgattaattatgacctttcaagcactagatacaatctaggttggaggaatcatccaatactgagatggacaattctctcccaccaccaacaataacttatccttcttttacaaatcctgctggctcagcaagccatatgtccctctccatgcac

SEQ ID NO: 62952 - DNA, 537 bp, Glycine max
  unsure (1)..(537): unsure at all n locations
gatcttgagtcacccgccgcatgcaagctntgagccnatatcctgactctctatatttcttgacccagggtgagaatgtcaatccttaccctcggaagcaaaaaagaatagaagggaaatttccaatcaaaaaaaagagaaggaacattcccaatgaaagagaaaaaagaaaagaaaggaaattcccaatcaaagagtgggagaaagaaaaaagaaaagaaagaaaattcccaaccaaagaatgggagaaagtaaaaaaggaaggaaaggaaaccacgacctanaatggtctcctccctttaattaccaaccaaaattccgtgcgctagcgaccctttttttctcgccccgcactaaacaaaaataacagaataagaataagccagganaatcaaaagccataaacacacaaaaaccgaaagaagaaaccaccaatagaacccgttccccagggaagccctattgatccatgatcacgcatgtaatttttgatttgataggaaataatctgcacagtcaagtcatgacatatctatg

SEQ ID NO: 62953 - DNA, 483 bp, Glycine max
  unsure (1)..(483): unsure at all n locations
gctacatgaagctgcctcggtaaatacgctttccagccttcattaaccggtggatcgtctcataatttggtctgcaacttcacaagacacttgtccatgatctgaccgttgggatctttgagaagatgtttgtagtgtgctagaagcttcctttcccgagagaatctcctatttaagcatctcaaccttagctttcgtgtagcttaggaaaaacgtcatttcttcttctttctttcttccaaagtcatttctaaagttccaagaactttctccatcacccgcagccaccattatccaccacaaaccatcattgttctccattgaaaacccacaccgagtggaacccttcaaccgaagcggaatcttccaacttggcttgcggtttcggtagagaacgataaccctaatctgacctctcgntntctttcgaggtaaccatggctctatgctcagttcttgtagnttcatctcgtctttgcatct

SEQ ID NO: 62954 - DNA, 438 bp, Glycine max
  unsure (1)..(438): unsure at all n locations
agcttcttgaacgtgatcaatatattcattgttacataataaaggatgaagacgtggttcatgatatacaacacctagataataaaccggtacagacttccactgctcgattntgtttgggtgacaccgactgggatgacattctctaccggttntgcatatgtggagggtgaacacgttaataatttggtttgggctttacaacgcttctgagggcctttattaaagcgtgatgccctccctggagttattccactaacagagaccaaacattgatgaatgcagtgaagactgtattccctgtctgtacaaatatgttgtgcagctttcacataaacaagaatgtgaaggccacacgtaaatcattaatnntcgcacaaaatgctcgggattatgtcatggattgttggngatgtctgactgattgtccttcataac

SEQ ID NO: 62955 - DNA, 285 bp, Glycine max
tgctttttattatgacatttgaaccaattagtatttctttaattgcataggatgattggacaattatgaattatggtatttgactatgtggtgttatatatttgatcaattcatgttcttgcttctgattggttaaattatttcaatgaatgtcgtgtgaatgatagtaatgtatgtatgtttatatttgtcgcgcactctggctttctgttgtgcctaagcgggagagaaattgaatatatcatgaactccataagttatatactaatttcaagtagcataact

SEQ ID NO: 62956 - DNA, 312 bp, Glycine max
  unsure (1)..(312): unsure at all n locations
gagaatggtatgacaagccaactgggattgattctgcctactctctcagctcttagaggtaccactaacacaccgcattcttgttttaattcatactgcagacataaacaaaccccaataaaagaattgaacctctataaccaatgcatacacatcatacactacatttacatacattaatacatagcttccctttcttataccttggtagctgtctctgcaacctttcctgtctccgacaaagaaatttcagcactcacaatntgacaaacatgcaattatcctattattattttcaatgtacgtgctatt

SEQ ID NO: 62957 - DNA, 420 bp, Glycine max
  unsure (1)..(420): unsure at all n locations
cttagatagattatccatctttatctgcaactctttccacacctctgcaggcctgcactttgtgaaaataattaaccatataattaacgaagttcacaggttattgttctagaactactgaatgaagaaaattaaatgagtttaatatatatatataaatataaagagggaattatataattaaatgatatacagaaagagtagtgatatatattattacctgcaagttttgggactgagctccagcaaccatgtccataagttgtgatatagtttatgagcttttcatcttcttcaggtgaccatagccctcntttgaccttctgcttgttgcagcaagagtgatgccccatgtctacagtttcttctctatcttactctagagtctcaaatgtttcaaaccactagtacatagagagc

SEQ ID NO: 62958 - DNA, 388 bp, Glycine max
  unsure (1)..(388): unsure at all n locations
gcatgcagctaanaccacagcaactattctctatgtgttcaacagccctctactacatgagctttctaggctttgataggaggaaccctacaacgaagtaaattctgagccaactctctcctcaccacaagcctataacatctaatctaatactgctcagaatgtatttacacctaaattaccaccgatatcaaatgttgactcctacccacccaactttgccctataaataggtcacgggtcactatggccatttggttttccctctagctcaggctaaccgatatcacatgtcctaagtgacacttcaagtaatattaactcactatagcctgcatttaccacagaactcagacttaaccgtcaactttaaagtttactcttttgc

SEQ ID NO: 62959 - DNA, 247 bp, Glycine max
ccacttccaacttgcctctatgaattgcccgggaacctttctcaatagacaaaatgatatgcacccgaggactatcctcctatatgacttcccgttatgactgtcaccactccttgagcctcttgaaggcgttctgcgagcacctttactcaggacacagttctgaatcgtaggaataggcaccgcgggcatcatgttctcctcgccagttcatcaaaaatccttttttagccatgctaccacaaga

SEQ ID NO: 62960 - DNA, 401 bp, Glycine max
  unsure (1)..(401): unsure at all n locations
tgtaagacacatcttcttttcnctggtgattcttgactccatctcatggaagcacatgcccactngtaattccanagtgtcaaacctttcaccaacacaggtgtgaagaccatcacacctatccaaaatcgttgagagaagagatgaatcttctccatcatgtgcttcttcaccaacatgtcgagcatcctttttaacccaagagccatcatgctctttttgataaccaaaggatgctatgactgaagcacctataaggaatgatctccttgatggaacatatggttcagaatcaagagggatgttaaagtgttgaaagaaaagggttactatatgacgataaggcaatgaaccattcaatcgcaatgtcatatgcatgcgatatctaacaagatatacct

SEQ ID NO: 62961 - DNA, 241 bp, Glycine max
taggcaatagacattttcaatgctaaatcaccttactatgcacattaagggtgatagaccaaagcatcatacattagcattgaggagcataaacacagaaacatacaattagatatatgattacttcgcatgattaaaatccactaggtgttgccgccttcaaataaccctacttgtaactacaaaccagttcttgataactgtctctgctgcaagagctcttcgaatagactgtgggtgg

SEQ ID NO: 62962 - DNA, 396 bp, Glycine max
  unsure (1)..(396): unsure at all n locations
tcaccatatttcttttcacgagatgagaatntctatcgtcacccttggaagagaacaaaaaaagaaaaataaagttcccaatcaaagatcggaagaaaacaaagaagaaaaaagttctcgatcaaagatcggaaggaaacaaaagaaaaaaaaagttcccagtcaaagatcggaagaatacaaaggaaaaaagaaaatccccgatcaaagatcggaagaaaatgaaagaattatacagaagggtctttggaccagacaaatatccaaacaatacagaatagtcacaacccaataaggaaagaaaggaaaccatgactggaagtggtcctctccctttgattgccaaccaaaatcttgtgcgctgatgactntctcgccccgcactanacaaaaaca

SEQ ID NO: 62963 - DNA, 448 bp, Glycine max
  unsure (1)..(448): unsure at all n locations
tatagatactcaagcctgctggcacagagnntnacgactatgctcttgtgtggnggttctcgctactaaaagagagagcangaaatgaagagccaatggttgatacatggacggagatgaataagatcatgatgaagcggtatgtgccggctagttactcaatggacttgaaatcaagctccaaaaactaacccaaggcaacaagggggttgaggagtatttcaaggaaatggatgtgctcatgattcaagcaaatattgaagaagatgaggaggtaactatggctcgatttcttaatggtttgactaatgatatccgtgatattgtngagctgtaggagattgttgaaatggatgatttgcttcacatagcaatccaagtggagcaacaattaacaaggaagggagtggctaagaggatgtttaccaactctggttcttctagttgg

SEQ ID NO: 62964 - DNA, 497 bp, Glycine max
  unsure (1)..(497): unsure at all n locations
tctgagtcacctgcagctgcagcttaacattaanttcgagcgtctcgattatgtcatgactcaatcagacatccgagtaaaaagttattgtctgttgaattagctcagagcttcaacattcaatttcgagcgtctcgatatatgacggggctcaattagacatccgagntaaaagttattgtcgtttgaattagctcagagcttcaacattcaatttcgagcgtctcgatatatgacgagactatatcagacatccgagtaaaaagttattgtcgtttgaattcgctcagaggttcaacattcaatttcgagcgtctcgatatattacaggactcaatcagacatccgagtaaaaagatattgtcgtttgaattggctcatagcttcaacattcaatttcgagcgtctcgatatattacgggactcaatcatacatccgagtaaatagtattgtcgtttgaattggctcaaagcttcacattcaattcgagcgtctc

SEQ ID NO: 62965 - DNA, 365 bp, Glycine max
  unsure (1)..(365): unsure at all n locations
catatatcgagacgctcggaatatgaatggttgagtctttagagccaattcaaacgacaataaccttttactcggatggctgttgagacccgtaatatattgagacgctccaaattgaatgttgaagctttgagcccattcaaacgacaataactttttactcggatgtctgantgagactcggtatatattgagacgctcgaagttgaatgtttaagctctgagccaattctaacgacaataactntttactcgaatgtctgattgaggcccgttatattacgagacgctcgacattgaatgttgaacctctgagccaattcnacgacaattatctttttctcggatgtctgattgagtcccgt

SEQ ID NO: 62966 - DNA, 453 bp, Glycine max
  unsure (1)..(453): unsure at all n locations
tatccatcacatgtggtactaggtggctgtcgtgcgatggtgcacaaactagttgtttgtttcacatccacaatgcgcgcataaacccaccatcccctgttgcccacctacaactgagctcacgtactcccacgtagcccatatcctcgtttctctcaacaccgggtccccatcaatcctcccaagcttccacaacatccaagcaaaacaacattcacacaggacaagctatcacagccaagcaaaacagagtaaaggcagaaaactctgccaaaacaccaaccaaaaatcacagctgtttcccactcaaagaccccagtaacaattccttcgatccaattcgntaaccgcgggatcgactccaaaatattactggaagtctatagggcataagcctacatcttgaccgntgggatctactaagaaacatncagaactcattctacattactc

SEQ ID NO: 62967 - DNA, 354 bp, Glycine max
  unsure (1)..(354): unsure at all n locations
ttattagccaattcaattaagaatgagacatccccaagagaacacgtccgagtgatatttcgctttattttactaaaagggcattntttgaatattattttacctctcttttgatttccaacgaggttacggcacgaccgaacggtcggaattcatttaaaccgaaattaacggatgatacgattcaaacgatcagtggaaaattattgtatttttatattatgcgagaaatgacttaaattaatggcttaagcacgtctaaagggggtatatatagcgaatgaaaacaagaataaaaatacatgaaacaatatgtggaccaccacngctacatagaatgtaattgaaagctcg

SEQ ID NO: 62968 - DNA, 425 bp, Glycine max
  unsure (1)..(425): unsure at all n locations
tgacaatagcaccatttcttgcgctatattgatgggagttggaagccatcttctcaatcagatgcctagcccttgcggagagtcatattaccaagagctccccaatggcagcatgaatcataactcctctccatgtttgtaagtccctcatcaaaatattattgaacgagctgctcagaaatctggtggcgagaacagctagcacacaatttcttgaatctttcccagaactcatacaagctctctccaataagttgcctgatgcctgnaatgtcttctctgatggcagtggtcctagatgcaaggaagaattcttcagaacaccctcttaaggtcatccacctgtaatggactatgacaaggagtacagacaattttaccactcctctgagatgaggaaagccttcaaaagaatgatcttctga

SEQ ID NO: 62969 - DNA, 370 bp, Glycine max
  unsure (1)..(370): unsure at all n locations
ttcgctctctgatatatatcggggtatgcattattcttacgggatatgagctaatttaccttttcatgtcgcatttgcatcatgaacaaccttcttagcaactcattacatacacatgtttatttggttgcatgttggtcgagaacaacaaagacaaaaacgattagtgaagcacaataaaggccggtaacgttgtcccatacacctaactacaggtttgtttttggattctcttttaattgcttaaatggtcatgtttgttctgcaaagatgtcctacaanaaaagccttcacaatgctctgttgatgattgatctgcatgtttcccaacatgttttgttcattatattggtatattgagaccacatta

SEQ ID NO: 62970 - DNA, 473 bp, Glycine max
  unsure (1)..(473): unsure at all n locations
ttattaagagagaaacttccattaatcagagcatctttgctcttcngatgataaacaatgtgtgtaccggagatggagagtatgctgatgatatcttctcataaccacaaatgaaattttggatgtaagcattcgtttctaaacgaccacttagaggaaacattgggtcaacaaagatagaagaaatcactcgaagtgtattaatctcacagaggttagtgtttcgtcctaattccgaaccatatatatgccatgacttgatcttgtaaatcatttcctatcaaatcaaagattacatgcgtgatcatggatcagtaggaccttttcttgagaactggtgttttttgtgagaatattggctctgaatgtttgtggctttctcctcttctcgctttgcttagagtgaggcgatacattcaccgacgcacatgattgtgggtggcaatcaatggaagaggaccacttctagtcgt

SEQ ID NO: 62971 - DNA, 473 bp, Glycine max
  unsure (1)..(473): unsure at all n locations
agcttttaactgaatgtgcaacgtttcnatgtttttaaatggtgtaatcaattacaatatattggtaatngattaccagtgtatctgaacgttgaaattcaaattcaattgtgaagagtcacatcttttcatataatgctttgtgtaatcgattacatggttttggtaatcgattaccagtgacaagttttgaataaaaatcaagagatgtaactcttccaatggttttcaggtttttctcaaggttataactcttccaatagttttcttgaccagacatgaagagtctataaaagcaagaccttgacttgcatttcaataactcttacatnatcttttgaatagaccttttgaacttcttcttcttcttcttcctttgccagaatctttctaagttntctgggttccaaaccttgntctttcacagaanacgaaagtgtgctattcatctttntcattatcttctccctttg

SEQ ID NO: 62972 - DNA, 373 bp, Glycine max
  unsure (1)..(373): unsure at all n locations
ttatccaattgaacatccataaggccaactatatgtntcattttccaggagtatccatatattcaataggctcatccattacgctcataatactaaaagcctaagagaaattttctaagacatatgtnttccttgcaatgtgatacttatgcaaggctgtaacagtacattgggatccgaagtgatcaattgcatagcaaatgtgttgatacccaatacattaaaaaagcaatgtgtagtgctcttcattagagaattcctttgtctcttttgcattattttcaatgaaacctccatatgacttgatgctctaatcaattgcaatttcacttcttttgatctggtcatcaagaatacctaatgcgtatgtttt

SEQ ID NO: 62973 - DNA, 443 bp, Glycine max
  unsure (1)..(443): unsure at all n locations
gctaccctttttggccagcaatcaactatgggctatgccataaatagtttccttacacctatatngttagaaattttgttcatcatgaacatgtaggtgtagaataagtagcaaaatacccttagcaatctacacctttggatatggtagcaagatgcttggatttgtgtacatgtaatttttttacgtagtcaaaatatctcacgagaatatatatgttgcatcttatgtaaagaaataccttacaaagatcaccttttgatttaaatgcaatattagttagcacacaatatacttgaatctgcatgcagatttangtaacatacaaacactcgaataagcatgatatgtagcaccttattgtgtgggtagccaagattcctcacgaaatttgtgtatgtataggtattaaaaatacacacatgtgcatgtgtgcaatgttc

SEQ ID NO: 62974 - DNA, 491 bp, Glycine max
  unsure (1)..(491): unsure at all n locations
gctgatttagtnttcgccgatgaaaggatcgaagtgtgtctaataagacgcaaatctgatcatcatgctctgataaatacaaaaaaactatggcaaatgaagatggtgagaataatggagaaacccatgttgtgactgccattcctatacagccaagtttcccaccaacccaacattgtcattactcagccaataacaaaccttcttcttacccaccacccagttatccataaaggccatccctaaatcaaccacaaagcctgtctaccgcactttcaatgacgaacaccacctttagcacataccaaaacaccaaccaagaaatgaattttgcagcgaagaagcctgtataattcaccgcaattccggtgtcctatgctgacttgctcccatatctacttgataattcaatggtagccataaccccagccaatggtcatcaaccttcatttctctgagaatacgactcgatcgcaatgtgtgcttatcat

SEQ ID NO: 62975 - DNA, 493 bp, Glycine max
  unsure (1)..(493): unsure at all n locations
atccttaagccacctgcggcattgcaagcttatttatttcatatgcagtatctatcttcttactntatnttttcagatagtctagttatttgtgtgagtgtgttattttcggagttttataaactattactgtacgtataacgaagttgattcctcatgcatnttgtcttgtaaattttaagaaaaaaaacagagaaattgatggtcctttctttgcctaggaaaattaatgatcacaaagtaaccccagaatgcctggtgtagcacgtatgacagcttcatttatcacaagcatacgatgcctggtagtttaaatgattgagtaaacaaatccatgtgtgttttgttggaagagcttaaacggtaagagaagaaaatatatttgctctctctctatatattttacaagcaggaagttngtgtgattggtgtatctctggagtttggagactcatgatacgactcttgctggtataaaattctgatttacata

SEQ ID NO: 62976 - DNA, 441 bp, Glycine max
gggaacaacctaatctgtgtatgataaaaatctgtgtccaccactaaaattcaagaatggcaaacttctttttggctggttccatatctctgttccacatttatgagttcttgctaatattcaagaatctcaaacaccttgcttccattggcaccttataacatttacttaaagacataagctgagccaaatttcttacctacaaatactatgaccaacttcatgatatgccactaaacttttgatctacccatctgtcatcagtgttccttccattccatccataatcctatcagtagaatcatcaatttgtttagatgaaatagttgtgtttctagtccctctctgtctttccagaccctctctgtctttagattcttctatgagtttatcaatggccatcgcttaagtaattatcacagggtggttggaaatatactc

SEQ ID NO: 62977 - DNA, 105 bp, Glycine max
ggaccaacacgagtgacaggaggggttttttttcacacgacagcggccaagaacccaccgagcaccgaaaacgagaaaaacaaacaacaacggaaccagggaaag

SEQ ID NO: 62978 - DNA, 92 bp, Glycine max
agagaggggaaaaaggaaaaaaagggaaggagagagaggaagggaaaagggaggggagaaaagggggaagagagaaaagaaaaaaaaaagga

SEQ ID NO: 62979 - DNA, 297 bp, Glycine max
acgagtgcacgaaggaagaattttttttctatagacctacttggcgctacttacttccttatgatctaccaagaagaccgctacagaccgaggaaaagacaaagattacacacataagaaaggaccaactgattagcagatatttagacaaatataaaatatagtgactatcaaaacctcaagaaccagataacattattgaaaaaactattactcattagacaaaactgaaaagaagactctatggggagaaaatctaaacggactagataaacatgcttgcagtatccaaactaa

SEQ ID NO: 62980 - DNA, 506 bp, Glycine max
  unsure (1)..(506): unsure at all n locations
tctaagcacctgggctgcaagctgtggctttataagactacctctggttgaattctngccggtaacttctctggctccttgttgaatggttcttcggatgattcctccaacttaagccttgtatgaaattcctcccttggttgaatcccgacggtcctccttggttgtatccttcgaatccgtggcgattctgagctcccatgtagtttacttccctggaagaatcttcttgtgctatgcattgccctggctcgtgtgctcctccacagatgtggcatccccctatttgcatggctgaagaataagagggacttaccgcttatagttgttgtagaagcttactgagtgtctccgttagggactctatctgtcgtgctaatagcttgctttgggccaatgttgcatcttggactgtgagttctagaagaatggcatgatcattggtcaccatgttctctatcagctccattttcctctctgggtgtctcagcttgatttttcctcta

SEQ ID NO: 62981 - DNA, 314 bp, Glycine max
  unsure (1)..(314): unsure at all n locations
gtgtgaatactaattttctctctgcagatacattattntcgataatcttaatggctagaatgtgcaaaaattgggtcataagataatgtccaaaattcatgatgatccaacgtttgacaagtcctaggtcgtagttatactcggacaggtgttgggtgtctacatgaaaagtgaaagctcattgcaagagaaatttcttctatcatagacattagagaatcccaacggtgagtgtgtgacaaaataagttccgaaccacgcctgcttatttcacgattatccaacgagtaacatgtctaagatccttattttac

SEQ ID NO: 62982 - DNA, 465 bp, Glycine max
  unsure (1)..(465): unsure at all n locations
agactatacacagtgataaatatattgtctccggttgtaaaaaaaaggaagggattttttcatcaattttaattggtagcaataagtaataaagaatttaaatttccccaccttgtggctgtggactgtggtagacaagttggtgtttaaatttaatttcttcggctattaaatttgaactgataagtgatatnggtatatccggaacatgaacactggcaacggcatanacaaagagatntgctaaactcaggtttgtgcttgattgaattttgctatacgctntccttctgagactattgtactaagagtaacgactaacgtgacccaattaagaatagaagaagggtatgaagctatttgatttcaactcgatcttctaattaacaagaaccttgaaagtgttcaagtatttgatcattcctatgaccattttatattctaacttgaccagtcatttcacac

SEQ ID NO: 62983 - DNA, 447 bp, Glycine max
  unsure (1)..(447): unsure at all n locations
gttgcttacaatatgtgcaaaacttcatggtgcaatggcgagcaatatgaccaaattgcttgcatgaataacattgaacttgtcatgtatcacgacctttgccattatcccgggcagtataggcaacaacaatagctntcgaaatagaagagtcatgcgatagagctacttgagtgagaagatgttgttcttcccgaagcagttcgccaacacatacatccagagagggaagtgggtgccgatttaagagagcaacacgtacaacttcaaattcaggtctaagcttcatgaggaattggtcccgcttagtgacctcataaacctcttgacaacaaccaaagaagttctcggaacaatagcatatagtatagcagaatggtcaacccataagttcaggaaaccacaataatattcctgaatatagagatagcctaactgtaattggta

SEQ ID NO: 62984 - DNA, 421 bp, Glycine max
  unsure (1)..(421): unsure at all n locations
tcagagtcacctgcaagctgcagcttncgttttcaattggagcatctggatatttatatgactctgncngacatcatgagtaaaaagtattgtcctctgaatttgctacgagcatccgtgttcaatgtagaacgtctcgatatattatgggattcaatccgacatccgtgtataaagttattgtcgattgaatttgctacgatattccattttcaatttccagcatctcgctatattacgtgacacaatatgacatccgagtataaagtaattgttgagtgataatgctcaacgcttctgatatcaattttgaacgtgtcgatatattactggactcaatcgatcatccaagtaagacgctatagccgttggaattatctacaaacttccattctcaatctcgagtgcctctatatattac

SEQ ID NO: 62985 - DNA, 258 bp, Glycine max
tctttaacctcgtttcattgagcggtcattttcagactaccgcctcatgttaagtatggcattaattttcaagcttgattaatttgagcgttgattttacggaccatcgactcgataaagtatgcgtgattgatcagctcctttaattgagctttcataatgcaccttgcgcatcgaaaaagtatgcgtgattttaagttcgtcattgacgttatttacgactaccgctcggtaagttgcatcttctaacttgtcaat

SEQ ID NO: 62986 - DNA, 474 bp, Glycine max
  unsure (1)..(474): unsure at all n locations
gcttgtgcaaatcanatcactcctacattttatcctagcatgcattttctttcttacccactcctcacgtttggttttttagggaaaaacaccataactaaacgcgccgcaagggatccctatcgcaccagatccaaatctagaacgatgggtgatcaagaggagacgcatgaacagatgaaagccgacatgtcggctctgaaagacaaatggcctccatgatggaggccatgttaagtatgaagcagctcatagagaagaacgcggccaccgccgccgctgtcagttctgctgccgaagcagacccgactctcttggaactacgcaccatcctcctcaacatatatgacgggaagggaccactggggacgatggcagcctacctggatacaccgagcggttacctatggatgccgccactatcaccaccgctgcagaaatcggccacttgcttccgtctgaagaagctctaca

SEQ ID NO: 62987 - DNA, 386 bp, Glycine max
  unsure (1)..(386): unsure at all n locations
ctctcacctcacacgagtctatatcatccatctaaacttgctcaaactgggttttacgacgaaaattctaccgaatcaaaatttgactcctcacacccaatcttaccctagaaatggctcttgccttcattntggncatttgtttttctctcttgcacagcccaagcttcctcataagtcctaaatgacatttcaaactaggattaactccctttaacctccaaataccactaaatccagatttggccttccaactctcaaagtctcactctntttccactcataacactacattctcactttctaaccctaagttaactctacccttcatccctagcagttttccatccacaatttcagcacataaacatcacaagcatcatcat

SEQ ID NO: 62988 - DNA, 365 bp, Glycine max
  unsure (1)..(365): unsure at all n locations
atctcacagtcacctgcngctgcagcttagccaaaccccacccttcgacatataccttgttcttgatanggaattttacccttaccctcagaagaaagaatagaaggatctcccaacaaagaatattcatttactgttatgttatgaatgtgcttcaaaaagcaaaagataaagagaaaatccccgatcaaagattggaggaaaacatganaaagaaaaaattcccgatcaaagatcgaaagaaagcataagagaaatatacagaaaggtcgttggaccagacaatgtgtgaataatgtacaaagttgtcacaagcaagaaagaaaacaaaagaaaccatgatttgaaacacatgaagcttccct

SEQ ID NO: 62989 - DNA, 112 bp, Glycine max
ttaaagtgaggtcagctctatctagacaccttttagatacctcggatttctattcttactcaccataactatcatgaatttatggtatgtcactgtggtttcttccaattaa

SEQ ID NO: 62990 - DNA, 371 bp, Glycine max
  unsure (1)..(371): unsure at all n locations
agacgngtatgggcgtcacagtctccgaaaatattttaaaaagtgaatacatttctgtctgacagggagacctatgcaatatcatatacgacggctcagcaatttcgtaccttccgagtcagcatatatattataactggtaactgaccaaacaaagtaccataaagaaaatgttgtacatgcaactttatttacaataattcttaccccagcgtacataggttaggaattgactagcttatacccactgcagaaagaaaacaagtagaagactctgatatatcttacatttagttgaaaatccccagacgagaaatcataaaaacccctatattagccatctcaatggagatgacacgtaaaaagggaat

SEQ ID NO: 62991 - DNA, 339 bp, Glycine max
  unsure (1)..(339): unsure at all n locations
tattatgtcttccatgagatctccgctttgtagatcaaccggatgaggtggacatgttgctgtatgaccaaccaactcaccatgccatatncactttgtgtacgtcgggctaaagccatcacatatcagatgcgatctaatgtcatccaacgaatgacgcctcccgttgacacatttaacacaagggcagaanaagttgccatctgtggttgctgaatgtatttcggcaaatgacaaaaactcttcaactccatgttgataagcttcgcttatgcgaggtgctgtaatccaagatcggtccatgctcagtgttgtctaatacagagcatgatgatggga

SEQ ID NO: 62992 - DNA, 473 bp, Glycine max
agcttgcaaagtttctttgcagtattctttattgatccgggtgatgaaattatggcacaggtattctctaaatccaattccttggtttaacaagggatttctaattggaacctgcatagtatggttctctggccttgttgaagcttgggttgctgtaaacattcctgctggtttcctacaccaacagtggttaaatttttgttgcctatattttggatattgtatcacttagttttaaattgtagttgttggctgggagcattttcccacaattttctgcagttatgttggtaatcacaatgtgcttggtatagcaacctcaatttaaaactaaactcattatttatgataaagaatccactctatggtgatcttaaattacctaaatcttgcaatttttttattgaatatacttttaaggctagtcagaatgacacttcagtagtttactttatgacggacaagctatcctt

SEQ ID NO: 62993 - DNA, 506 bp, Glycine max
tatgagaatatctcataatctcattgagaaactaaatgctctacttatagtggttataaataatgagagaagcctattcgaagtggataggaagtataatgcatcattcaaaatgatcaagatgttgatgggtgaggcagatacgatgcgtgaggaacgtcaaaaaggtgttaatcatattttgaaataaagtaaatcatgcaatatatgatcttcatctctcaaattttcttgggaattaagaatagtatatgtgttcttataagtagatcgcatgatagatgaacctcaatacaaattataaataaaatttatgtgtttacaaacatatgatatgtataagtgatactttgatatatgtagtagccatatttgtcagaaattatgtctctctcatcattgtcattaatagtgaatcatctataaatattacatagatattgatagcataaataacattaatggcacaattattctaattcctataattaagcaacataattata

SEQ ID NO: 62994 - DNA, 328 bp, Glycine max
aaagggttcagccccttaggcacttctctctctttcgaatttgcttgaataaattgtttccgttaagaaaatccaagccgaggcgcttccgaaacgtttccgtaacgtttccgtgaggaatttcgtgaaggtttcgaccgctcttcgacgttcttcattcgatcttcatcgttcttcgatcttcaacgggtaagtacctcgaaccaagcttttcgattcattctatgtacccgtggtggtccacattgtgtttcgtgtatttttattctcgttcatttaccttttttacccccttttgacgtgcttaagccattttctgtaagtcatt

SEQ ID NO: 62995 - DNA, 459 bp, Glycine max
  unsure (1)..(459): unsure at all n locations
cttctgtgagcanagcanagactcgctctagtctctcaccttaagtaaatgccacactcttcttcaccagctcatagagaggtgatgcaatcgtagagaaattatgaacgaaccttctatagaagctggctaacccatggaagctcctaatatctcccacactttttggggtgggccattcttggatggccttgattatctcatggtccacttggaccccatttctaccaactacgaaacctaatataactatattatctacacaataggtacacttctctatatttgcatagagggtgtttttcctaaggactgatagaacttgtctgagatgtcctaagtgatcatctaggctcctactatacactaaaatatcatcaaaaattacaactacatatctacctatgaattcccttaagacatgatagcattgcctcataaatgtgctaggtgcattag

SEQ ID NO: 62996 - DNA, 390 bp, Glycine max
  unsure (1)..(390): unsure at all n locations
agctngactgtgctgggagaatacaaatgactcaagtgaaccaagagccatttctaaggcaaaattatgtgttgaagagtcaaattatgatttggtggaatcttgggtgtaaatccagtttgaacaagtctaaattgatggtatagacttgtgtgaggtgagagttngcttcaaatntgtcccattctcaatttcacttctaaagcctagaaaatccattaaattgaggggttttggacacctatattttgtgttgctgtggtttgaagcttgactttggtttagacatgattgatacatgatttgggacttgtangaattgatttgggccagaatggatgaggngaagtgtgattntcgaaatctgcacttatgcagaattttgctgtc

SEQ ID NO: 62997 - DNA, 458 bp, Glycine max
  unsure (1)..(458): unsure at all n locations
ggtagcanatgcanaccacaataactnttagctcggatattctattgagtcccgtaatatatcaagacgctcgaaattgaatacagaagctcttagcaaattaaaacgacaataactttctacacggatgtccgattgggtcacgtaatatatcgagtcactcgaaactcaatacagaagctgagagcaaattaaaacgacaatgacttttaactcggatatcccattgagtcccgtaatatatcgagacgttcgaaaatgaatacagaagctgtgggaaaattctatcggcaataactttntactcggatgttcgattgagtcccgtcatatatcgagacgctcgaaatttaaaacgaaagctcgtagaatattcaaacgacaataactntgaacttggatgttcgattgagtcccgtaatatatcgagaccctcgaaattgatatagaagctctga

SEQ ID NO: 62998 - DNA, 449 bp, Glycine max
  unsure (1)..(449): unsure at all n locations
agcttgaagtcactcatgaatgcatagtggatgtgagaagagcaagaaagcacactcttgtatccgaatatgaagcgttctgaattaagaatggataaaccaaagattcactcatattgtgaatcatctccttggtctgggaaaatgtttgaagatgatgagctgaacatcaagatcctcaatagtctaacaagaacttgngaatcaaagattacaacaatcaaggaatccaaggacttagctacaatatatgatgatggaagctctcatcagtaaattgcttgcatatgaacatgaaatgattcaacaatctcatgtagaagaaatagaanagaaaagaagaggaattccactcaaagttaactcctcaaaggaagatacaaggacagttccaacagtgaggaanagggcagagaattcaacctaatggtaaagaagtntggaaaatt

SEQ ID NO: 62999 - DNA, 118 bp, Glycine max
aaatggaacggaaagtgattagtttttaaatgaaaaagatatgaatagaagaaggaagcggaaggaaagaatagagataatataggaatagaaaggagagtaggagattgtaaaaaaa

SEQ ID NO: 63000 - DNA, 253 bp, Glycine max
  unsure (1)..(253): unsure at all n locations
attaaaattttggcttcagcangggtcatgtcttcaaggctccaccactggcaacatctatcatacttctcttcattgtgctcaagccttcataaaaatattggaggagaaactgctcataaatctggtggtgagggcaactaacacataattttttaaatctcttccagattcatatangctntctncactgagctgcctaatgcctgaaatatcctttctgatggtcgtggccctgaagcanggaaaataa

SEQ ID NO: 63001 - DNA, 370 bp, Glycine max
tgaatgtgactgaaattgtgggaaccaaaagtcaccctcaacaaccaacaagtcagccaccatttggtctcccaacaggctgatgcctaagatgccaattgggcccttattacaacttgaactaaagcctttttagttgattaacccaaaacatattattggtcagccaactttacaaggattgtggcattatttatacaaactaaacactctataattgaaataaagtggtgtcatttagtcctcctccatttgggccatgatacaactcacaaccttggacttttctccttgaatcttgggcgtgaattcaaatagtatggacagcacttgttgaagagcttccttgtgctttctagctctagccctt

SEQ ID NO: 63002 - DNA, 387 bp, Glycine max
tatcatgctttgatgaatacgaaccactgggctaatggatagaattaggaagagggatgaacccatgctgtgactatcgtacctaccatggcaaatttcccagcagctcaactatatcgatactcactcaatattatcccttttcattacccaccaccctatcaaccaacgaacacttaatcatccacaaatgccgctccctaattcatccacaaagcccactcctataatatccatacagcctgccttcgcacatacataccaaacgccatcttgctaacctactcttaggggaggggacacagactccgggcgatttccaaggaagaaatgccggatcccccctcattatttaggaaacgaagaaaactgaacgggcctcaactc

SEQ ID NO: 63003 - DNA, 435 bp, Glycine max
tgcttcgttagtccttccaagaacgaatctgggaaactttcttgtctgttaccacgagattgctgccccggccaaaatctcttggaaaaagtgcatcaagagtttctcatctcttgagtatgcccccactttctgacaatacatctttaagtggttctggtgacaagtggtccctttgtacttgtcgaagtccggcaccttgaatttgggatggatgatgacgtcgggcactaaacatagcttcgctatgttgacataaggataatcgacgatcctctcaatggccctcagcctttcctctatgagatcaaaacttctctctctcttccatggtcagaggtagtctccctactgataaatgcacaggttgcaacgagcggtgtttaagggctcctgctgcattatgctgaggcatgccaccaaacgctggtccct

SEQ ID NO: 63004 - DNA, 148 bp, Glycine max
taaatagttaatgtatgtgctcgtgacgtaccgaccattaatactcagcttagtgatctattgagaaataagagagggtatgtgttattcgtcagtgaataaataatagataacccaagtgaggtgctgaagtttgcgtatctatatt

SEQ ID NO: 63005 - DNA, 528 bp, Glycine max
  unsure (1)..(528): unsure at all n locations
gatccttagagtcacctgngctgcaactttgcactcacataatctttttttatttcaccanaatgcaccatcgatgaccgagtgaaagttgtgcatcccaaatacaacgaatacttagaatctgttagtagtttttataatacggtgcatgagcttgccacaaaccctctttgccaagatcctgtatcatgtcttctatatgatctccatgttgtacatcacaccgcctcactgtgagtggcagttgacatgtctggcaattcaccatgcatatccaatttgtataagttggactgaacccctcacatataaaatgtgatctaatttcattcaatgaataacgtctgccattacacatataacacatggaagaaaacaattccagctaatactggtgcattttgttgcacacattgcaagatatctttaacccactattgataggtgcaccttatgcgtggtgctttaataccacttcaatccattgttttgtgtgctgtgactaccgctatgttattccatatgcat

SEQ ID NO: 63006 - DNA, 138 bp, Glycine max
ctccgacggactaagcacgagctgcactagtaggactttttttttgggaacaaaagacactacatgatacccctccactgcatactattatggaaggcagcctatgcaaccgaaaaactacatcgatttataaaaact

SEQ ID NO: 63007 - DNA, 420 bp, Glycine max
  unsure (1)..(420): unsure at all n locations
actaagcttagtgccggataaactatatctcagaagtgcagttggttctctctctcattcatgcngttatcagaatataataagatagttatggagtagtctatctcggtaaatcgaatttaaagcacgcatccggtatctgaacttctcgtctatatataataggccgaaattctctaactgtgaatgtgtgaaaagtccaattatagctatatttccattcaaaattccgtaatcacgttgaattgtggcgtaaagtgttcaaacgttataacaaacacacattgtgtctgagtccaattcattaacaactcatattaatagctaaattatatctgccactaacatctgccgtatcactatgcatagctagatagaaaccagattctgtgcgaattaaccttgcacacattcacacag

SEQ ID NO: 63008 - DNA, 346 bp, Glycine max
  unsure (1)..(346): unsure at all n locations
tcagctgtcgctgcagctcataaaagttatatggctttacctatcttctcgcgctggtacaagacagctaatgagtttatgagcaactcaagattcaacagatgtgacatggaccattgttgctacattaagaaatatactactcactatgctatccttatcatatatgttgangacatgtatgattacaggatctagtatggcagaaattaacatgttgaagcagtagatggctaacaactttgagatgaaggatctcgttccttctacactaatgcttggtctgagaattcttacatctaggtcaggatgacatcttgagttgtctcacgagaaatatatacac

SEQ ID NO: 63009 - DNA, 379 bp, Glycine max
  unsure (1)..(379): unsure at all n locations
gcactttgaggaactttgttacttattacgcaaaaaagctnggttatgagacggaacctacaagctgctagcgggaaatgaacgggccttacctagattgcttcaaagcccgagccatgaaatattcagggcgagaaggtccgcattgctggccttgagaacatcggggaagtctgatctgtgaggtggacaaccgaccatcaatggtgcctctggggaagagaaaaacactccttagctcttttcgcgatcttgaggtatcatcgcaccttgctgagccgggtaactaacttctgtctgcgagaactagtgcggctcgctcgaaacgcgaaacctctttgactcgaagaaatactctctaaacctgcaagtgcacggc

SEQ ID NO: 63010 - DNA, 442 bp, Glycine max
  unsure (1)..(442): unsure at all n locations
ctagagttaggaaagaatgtgatgagcttatagatatcaacatgaccacggatgaagcgctagagcgggaaatgaaaaaggccagaaaggaagaatggagcagaaacaagttctaaggggaattgttaggcagcagtaatgagctcaaacttagaaaggctgagagagacaaatcaaggatggagagcatgatgttagaggataagttaaggagttgtcagaggtgatcgaggccgtacccgaatcaaataaacatgataatgcagtaactatgaagtgatcctatgtcgtttcccaacgagcaatgataaaccaantgttcataatatacttgcagtaacagtaacgaatgggggggtttgttngttntgtgatttaaggagcagaacnaagtaactggaatacgaaactaataatataaaaaatggggttgttcctctga

SEQ ID NO: 63011 - DNA, 514 bp, Glycine max
  unsure (1)..(514): unsure at all n locations
gtcacctgcggcatgcaagctcattcagaatgcaattacctcacaggtttttttagcatttagcaccattatcaatttcagagaacacatnttcagacagaaagcaatggcgttgctcagatagggctaactagnggaagaagtcgcgagggaacaaaccacgaaaccaaatatgacttctttgttgcaaggtattgagaagacgaaacaacgatggcgttgcagcaaagcgcgggttgaggtggtgatgacgtctcagtataacgcgggtgaggtggtgacggcatcgcagcagaatgcgggagatggcaganagttagagtcgtgagggagatgaccgtcgcgaggccgaacgggttagagtgagagtatagttgaagcgccagaagtgaacagatgatntaaataggataatacaatgtcattgtnttcaaaaaccgatattaacgtgactttgttaacattggttgttaaagaagatcaatggtaacaaaatcacgtcactcaagtaaca

SEQ ID NO: 63012 - DNA, 333 bp, Glycine max
acaatttcatggatgaataattcagtgaaaaatgttaacctctctatctccattgtgatgaggagtatttcatttcatagctcctcattatgaaaaataatttttttatgtttatttgattaacgattacattaaaactattcaaaatatgtttatggatgactggagtacaagtttgggtcatattttggtgtatggattctttgagcctcaatccatgcacaatggaaaggatagatgcaaccaatgtcaacattacattgtaacatgtgtcaaggaatcacaacgacaagtctacctaagagcttacttgaatcagtaagtaaaatgtat

SEQ ID NO: 63013 - DNA, 265 bp, Glycine max
atgtccgactgagacccaaagcacatcgtgacgctcgagattgaatgttgaagctctcaccatattcaatagttcttaacactttactcggatgcctgaccagagacgcgtcatacaatgagacgctcgatattgattgtatgatgtccgagctcagtgcgacgacagtaacctttctcgtctgagcgctggttgagtaccgtaatcgttcagacgctcgaaatgtatgtgaagctctcacgtaataagcgacgataaccttttc

SEQ ID NO: 63014 - DNA, 459 bp, Glycine max
  unsure (1)..(459): unsure at all n locations
aagcttaccccatcgtntntacagtcttagattaggagctcttctttcttgtgtgttcggactctcagccacttatgatagccgccgatgatcccattactgcttccnctagactctctgtcctttcttcacgccgcatcccatgccttgcgaactccttggagtaccctatcggtgtggtcactgaaacctcgtgcgatgaaaggcgtgatgcattcgtctgatggcactcctctcatgggacatccttcgcatgaagatagaatcctgattcttccttccttctagcgagggaaccatttaacaaacgcccctccatgctagccaagagttggtcccaattcatctttcttcttcgacgcacgagcggtgaccttgtagcagatagacgggcctaccttcttagagaaaaaggtgtgaaaccagccccacatatagagctggagtactgcagacaat

SEQ ID NO: 63015 - DNA, 369 bp, Glycine max
  unsure (1)..(369): unsure at all n locations
atacagccctatgctgggtagaatgcatactctaaacgattgttaaaccgatactatcgatatacaatcagagagttacagcttcacagagtttgccagcaatgcaacgntcctcccctgatggatatcgtcggagagcatgttcaccgcggaaacgagggctcaaagggcctttctctaaggatatgtaatctgcattaaaaagtcatgcatttaactagaagaagctataacaaacttgaccagcaacaagctctagaagatacttactggtacttttgcttcacagaagtattcagggtcagcattaaacctccaaccatttcagtgagaaataatgtgtcgatgctacgctcaaagactgtcatc

SEQ ID NO: 63016 - DNA, 433 bp, Glycine max
  unsure (1)..(433): unsure at all n locations
acaaattatcataaaaccgtatgcatcataccgcttcttgattacattgaaaatgattaaacanaggacatgccgataaaaaaacaaaggacgtgatttagctacctttggagcaaaatatcatttgattggcacccactgattatgtagagctatggattgccaagtgcatccttcacatcattggtacagccaaggaaacatcttctgggagaaatttaaaagtggccgtgtgtaagatatccccaatatttgacgcatgccaacttcttattgggccaaatacatctttcagtatcgtttaaagatccaatttgaatccataatgacgaaaaaaaacaccgaagagagggaaacaatacttcctgccctcttttactacttgcaaccccaanaacaaccataaggacaacaatacccctcatcagacacc

SEQ ID NO: 63017 - DNA, 328 bp, Glycine max
ctcggcccaacaccgactcactatctaaaataatagttttttttctgcgctattgagtggatttaattctgagtctaagggattacacaggaagcacgaacaagaaaagtgtagagccctcactagatacttgaaaaggctcccccaatacctagaaaactggagatcttatgagaaaaaaggtaaatatgagtggacacaatgatgataaaggtaaatggatttatctatccaattctttcaataccaatgtcactgtctataaatggactcctgtatttttgaaattctgaaatttctaaaactcctaaaccaattgtccctcctc

SEQ ID NO: 63018 - DNA, 495 bp, Glycine max
  unsure (1)..(495): unsure at all n locations
ctaagcttaggctgctcaatagctccaggttgctgcatggaagggcttatgtatgtatggtggtcagcagaggagcacaaaccacatacccttgcaataggtacagatttctgattcaaggccagctgggttaccaagttaaccaatgcatcaagtttgccttcaagcttcttagtttctgatgatgcagatgggtgtgtagctacctcatgcactcctctaatgactatggcataatttctggcgctaaactgctgggagttggaagccatcttctcaattaaatttctggcttcagcaggagtcatgtcttcaagggctccaccactggcagcatctatcatacttctctccatattactgagtccttcatataaatattggagaagaagctngtctgaaatctgatggttggggcaactggcacatatgttcttatatctctcccagtactcatacaggctctctccacttgagtgtctaatacctgagata

SEQ ID NO: 63019 - DNA, 456 bp, Glycine max
  unsure (1)..(456): unsure at all n locations
cagccccgtaggcacttctctctctttcgaaattgcttagaaaaattggtttcgtgaagaaaatccaagccgagccgctttcgtaacgtttgcgtgagtgatttcgcgaagttttgaccgttcttctacgttcttaattcgttcctcatcgntcttcggtcttcaacgggtaagtacctcgaaccaagctgttcgattcattctatgtacccgtggtggtccacattgtgtttcgtgtatctttcttctcgttttcatttactttccgtaccccttttgacgtgcttaagccattttatttaagtcatttctcgcttaacctaangataaaagtaatttccaccgatcgtttgaattgtattatccgttaacttcggattaactgaatatcgaccggtcgtgcgtgccgtaccacgttggaaatataaaagaggtatatataatatatactcaaaa

SEQ ID NO: 63020 - DNA, 218 bp, Glycine max
  unsure (1)..(218): unsure at all n locations
taaaagctctatatgtgggcctanggctttagagttttcattctgtaaggctttgaggtctttgtttttgaatttataatacaaggatctttcttcatctgttcctggtctctacccattctcattcatttgcatgtttacttctttttctgaaacggcagattcgatgacgagtccnccgaaggtactaatacctgtgacccgtctatcatcttcga

SEQ ID NO: 63021 - DNA, 415 bp, Glycine max
  unsure (1)..(415): unsure at all n locations
gtggacatgacattcagaggatgtggcggaacatcgacattgtccgcgtacgcttgacatttatggcatttccttacatgggcgcagcaatcgctttccatagtgagccagtaataacctgctctaaggatcttcctggccatagcatgcccattggcatgtgtcccaaatgaacccccgtggatntcctcaatcatgtagttcgcctctttggcatctacgcatcgcangagggtcatgtcgtggcttcgtttgtataggatggtaccactcacaaagaaactagtagccaatctccttaacattcttttgtcattttcggaaatccctggtggatattctntgttctcgacataccgttngatgtcgaaataccacgggttcccatctcgctcttnctctatcgcacaacaat

SEQ ID NO: 63022 - DNA, 509 bp, Glycine max
  unsure (1)..(509): unsure at all n locations
atatgatcaatatatcattctatccagtactggcagagttacttgtttatggccttggttggattatttatgtgacaccctctattcccgacatatatattatatatattaagaaataagagatccaatttaattaaaaagtttttaaatacatcttaaatacaagcctttcataatggtaaaagactcacattcacttttctaacccataataatactagttcaaataactaataaatcatttcggctccaaatgaagttgtccaagacctcatacaattgatatagcaacttataccctaatgtcacatcctatcagagcactgtgtatcgacgtcctttagcacaaggttccttaaagaaattcacctattcatctgctcccncaaacacatagttcatgatcatcacaggatccaaacacatacaacacacagggagtgagttatcacatgcctaactaatagagaataataagacaacatatatgtataaatattatataacaa

SEQ ID NO: 63023 - DNA, 372 bp, Glycine max
tctataagatgataaattggttatattcactcgaataacacatgctctagcaacttgtcaagtacatctaaaccacgtgagaacctacatgtgtttccatccagaaaaatacagctaatgtcacacctgatagctctacagcttataaagcttacttttccacagatattatacttgtaaatggagccttcttagaaccaagacttatatttcttctttgctagaaatgcattcttaaaatactagcaaaatatctatcccttaaagcccacaaaatgcacactaccataggaacgatacacttatttgttcactggcattgtgtaaccagaattcctgaaacaaccacaatctcctcatcttgtgtacaat

SEQ ID NO: 63024 - DNA, 501 bp, Glycine max
  unsure (1)..(501): unsure at all n locations
ctgtagttctttntcttgatcctcatcacatatcttattgttatataccccccattcacttacaaacaccttgttgcaaaagcaatacaagtataattattagggtgatggtactttcacgtttcacataatcttctcttccatcattcacatagtatcaatcaacatcattcctttcctccctcctattccctccccctatttcatcaaaatcaacggttcagaattctacaagtgagattatgagaacaaattattatgtgaagaanaacaaaacagattcctaattattatgaattcaatgccaaaaagacacacaccttttcttctcttctaccaatctgccaagtcccaaagccaaatgtgattgccccaggtagaaatagcaaccatctagatgcttttcctttcatacccaanacanaatacaaaanataaaaataataaaataaatgacaatataatacaagattgaattnttatgaagagggacgtaagtat

SEQ ID NO: 63025 - DNA, 482 bp, Glycine max
  unsure (1)..(482): unsure at all n locations
tgcatcttgtatgagagatgatctctctttgttatngagatagaccacaagattgacctcctaggagccttctaaccattaagaggtcaccttcttcatgggggtagacttccttactagactcttcaccccttactttatcttcacttccactagaggaaggggaagaagtagtctcctcttgactactataaatgtcttgacccctcataatcaatgttttctttgtggtgcattgagaggcaatgtgacctctcccaagacatttgaagcatttaatgttgctagtcctttcttgggaactagtcttaggggtggatttctctatggtcttacccttatcttccttgngttgtgaaggtgcagcccccaaaattccttgggcttggtccttccttggataagagtgaaagccataagattctgaagaaggctctcttttaagttggtgctccactcttatacatagttggactaactca

SEQ ID NO: 63026 - DNA, 416 bp, Glycine max
  unsure (1)..(416): unsure at all n locations
gctatgctcgcggtgtcgcggaggagcttatgttcctgaagaagaaaagaagcagcaggaagtggtcttcggtgaggaggagcgccttctttaaatttttacttaaagggaaaaatggcctattcacttaaattgctgggtgcactagcaatattgctgggtgcacctagcatttcccactgagggtgttctgtcacctgaggaggcccaagtgcctaatgctatctagcccaaacttgatctactaagagtggcttttcttcctgttgcaccgtgcctttttcatttacatccaacaactttaataanattccaacacctaaccctttaagtntgctgcttctacttcgtttatccttggttcattatgaacctgagttttttcttccaactganctgctggttgttgtgtgggt

SEQ ID NO: 63027 - DNA, 504 bp, Glycine max
  unsure (1)..(504): unsure at all n locations
tactaagcttatgaccactggacaggcanatctaatgtatattattttgttgttaatatacaatgctaacaaaaagtaggatttaatatttaaaggaaaatggtacgaaatgtaatttcaccattattcaatatataattctgaaaggccaaccattagttcattacaaagtaattacatgtttttccgtaacaagaaagttgcttggctcaacaaaatttgtggtagagtcattccatcatacagcttgcgggcaacaaaaataaaacaaaagctttcaacccacaaacatcatcaatcacaacaatctaacaatttagtgtcattcattgaacatcaaacgaatacattcctcaagcatacaccaacaatgcataccgtaaacgcaaaggtcaaaaagggaggcatatggtactagaaacacatatctcatcgaggagagtggccaccgagagcaatagtgaccacaaatgggagtaagagaggatgcatgaatggtgggag

SEQ ID NO: 63028 - DNA, 524 bp, Glycine max
  unsure (1)..(524): unsure at all n locations
agctagcccagagaaggagttcacttangatatgcttaccacttcaaaagactggaaagcggnttctaatgactcctctgcggcttccacataaggcatagaggatgggaagctcaccaagatgtcttcctcgcttgatacgatgaccagatgcccttccactacgaatttcaacttttggtggagtgtagagggaacaactcccactgagtggatccacgggcgccccaaaagacagctgtaggggggggttaatatccattatttggaaagtaacttgacaggtgtgagggcctatctgtactgggagatcgatctctcccctaacctctcggcgggtgccgtcgaaggcacgaaccaccattgaactcggctttaagtgggaggcattgaatggtaatttctccaaagtgctcttangcatcacgtttaaaatggaaccattatcgatgaacactttggctacgatatggtccatacactcgactgatacgtgcannagcttattatgcccctctccctcg

SEQ ID NO: 63029 - DNA, 487 bp, Glycine max
  unsure (1)..(487): unsure at all n locations
agctaatgcagcananatatacaatttacttcctcaacctcagcagcaaaatcaaccacagcagagcaattatgacctttccagtaacagatacaaccctggatggaggaatcaccccaacctcagatggtccaaccctcagcaacaacaacagcagcctgctccttccttccanaatgctgctggcccaagcagaccatacattcctccaccaatccaacaacagcaacaaccccagaaacagccaacagttgaggccccttcacaaccttcccttgaagaacttgtgaggcaaatgactatgcagaacatgcagtcaactgatgtggtaattcatttagctaatagaagtgttgcctaccctgttggttcatagaagattcttagttagagttgggaactgatctccctgttgaatttatattttgaatatggaagatggattttctcaaggatcagctcccatcattctaggcagaccctttat

SEQ ID NO: 63030 - DNA, 338 bp, Glycine max
  unsure (1)..(338): unsure at all n locations
actatttatacccncctcttgacgcgcttaagccattttacttaagacatctctcgcttaacttaaaaataaaataaattgccaccgaacgcttgaattgtattatccattaacttcggttaagatcaatttcgaccgttcgtgcatgccgtaaccacgttggaaatcaataagaggtgagaaataatataataatcaaaataatatctttctagtgaaataaagcggactatcaatcggacgttatctctctgggatttctcattcttaatcgaagtaattaataactaaagtgaaactaatgctaaaatcaactcgcctagtcaagctcgtccaca

SEQ ID NO: 63031 - DNA, 492 bp, Glycine max
  unsure (1)..(492): unsure at all n locations
tgcagcttaaccaaaccggtgagagtgtgactttactctgcgagtgaacgactagctgtgagtgactaatcttgcataaatctctgaattttagaatgaaatgtataaatgaggacatgatgaaggccataattgtacatacacaagctcttttgaccaaacaacttaccttgaatgataattgcatcctttgctccctntttgagctgaatgatattgtcaaaaaatagaaccctgaacttaaataattatctcctgataccttgtttagattttaggagagcatatggttcaaggaaagtttactctaaatttgtgggagggaagtcaattagaatgacaataaaaaggttaagcatcagcacacacaacatataagttgtatgtaaaatatatatgaggaagaaaagaataaattgtgttgtacaatatgatcanaatgcacttatgacgagaagatagagagatagctacttgtataatacaagacca

SEQ ID NO: 63032 - DNA, 222 bp, Glycine max
  unsure (1)..(222): unsure at all n locations
catcagcacacacaacanataagttgtatgtaaaaaacaaagtggnggtgttacaataatgtcaatagcaataaagataagggaataggtgagaatgttatctttacaaaaacaagaaaagatcattgggattagtctaggacttgtgctctcttagaatctaaacctttgaatcctataaaaaccaatgaatttttgtagccaagcctcactacaagcctg

SEQ ID NO: 63033 - DNA, 507 bp, Glycine max
  unsure (1)..(507): unsure at all n locations
ctcagagtcacctgcggcatgcaagctntctatggatgatgctctcctacaacttatgacaatgtagcaggaaataacactatataggatcaaggttcaatcaatcaataattcattcagctcanactgggtgcaagggataaatcattcaagcacatggtcaacttattggctaagtggctatcaaaatcaaacatggccttcatcatcctcaatttcatgcactcagttcatacttcagaggttcatgcaaacatcaatagtaaatgatagtcgtttctctccaaattttaggatcacactctcaccgggatacggtcaatgcattccttcataatcaatctgacaaactgactatacatttcagtcaaagttctaatcacaatgtctttctcttctagtggatgcaaccttgatcaaaacatagtctatacattccagtccactaaattcatacaactctcattcatttcaaacacaaccattcatgtcaacgagacataccac

SEQ ID NO: 63034 - DNA, 515 bp, Glycine max
  unsure (1)..(515): unsure at all n locations
gacactcagatactaagcttaactctagcccaactcctacaaaatctgattcatgctttatattgtggccttgttcatgctcgtgcacttagcacaattatgaaccgcttagcgcacattattgaatttctgcttatcgcgtgcgtttctcgctcggcggatggactgaagcggtgcgcttagtgagatgaagcggtgcgctcagcgaacctgtacagctcatcttcttctagattcttcctcgtgcttagccaatgaatgttgcgcttagcggacgctcgctagccagcagattggcttagcgagaaggtgaaaaacaacacttttcatagtcgcctaattaacctgatattgagagaaaatgattattaaacacacaaaatggaagtactaagtatntattacctatacttaatagaaagtacttataacactacaaaataaccataaattggggaagtttgaacaattacataggttgtatcataanagtagtcgtatcatcgactacaccg

SEQ ID NO: 63035 - DNA, 271 bp, Glycine max
  unsure (1)..(271): unsure at all n locations
ttctatgtactcgtggtgtgcctttttntgtttcatgctattctattctcgatctcattaactatttatacccccttttgacgtgcttaagccatttatttaagcattccttgttaactaaaataaaaaaatttccaccgatccgctcgaattgtatcatcccgttaatctcggttaaaatggatccccaccggttggtcgtgccgtaaccacgctggaaatcacaagagagggaaattaaatatatgatcaaaaataccttttagtaaat

SEQ ID NO: 63036 - DNA, 199 bp, Glycine max
  unsure (1)..(199): unsure at all n locations
ttttagttgattaacccaaaacatatttttggtcagccaactttacaaggattgggccattatttatacaaactaaacactctaaaattgaaataaagtggtgtcatttagtcctcctccatttgggccatgatacaactcacaaccttggactnttctccttgaaacttgggcttgtattcaaatagtatggacagca

SEQ ID NO: 63037 - DNA, 385 bp, Glycine max
  unsure (1)..(385): unsure at all n locations
gcgactatatctatntgtatcaatatcaagtagcaactgtgataaaacaatgtagatgctttctatacacgtcactacctccataatagctaatggacatcactaccttcgcggaaatagaagaccatagaagagttctacatttagttgcaggtttaatcacacatataaattgttacatgcagcctccacattgagaaacaggatgtttatgaaatacattaagttagatactagttaataatattgatgcacagaaatacatttggaattttagattagcaagtatcttatacctgaatctaattcgtttgaagactttgaaccactaggtagtactacgagtgtgccataaacaccatgctcaaattgttcaatgactgat

SEQ ID NO: 63038 - DNA, 296 bp, Glycine max
  unsure (1)..(296): unsure at all n locations
gagtacaacagttaccgctatatgagcgctgtacaccagcatcggcttcgaggccatcaagggatggtcgtttctccgggagcgacgcgtccagctcatggacgacgagtatactgatttccatgatgaaatatggcgccggcggtgggcatcactgtgtactcccatggccaagttcgacccagatatagtccttgagtttatgccaatgctttgccaacagaagatggcgtgcgtgacatgatatcctgngtaaggagtcagtggatcccgtttgatgccacgctatcggcaac

SEQ ID NO: 63039 - DNA, 453 bp, Glycine max
  unsure (1)..(453): unsure at all n locations
cgctggagctgttccttctactgccctaactctcttagactggtgatccctacgctcttgaccttgactagatagaacctctntttaagagaaggcatatgacttgatcccatgttttactaaagtgaacaaaaatcggtgcgaattaaaactccgacatctatcatgggtggaatggatgaatgcatgaagaaatgcatataacacagatgcgattcaagaatacgggagcccgacaaattgccttcttcttagatacaacgtcttgtggtagcaaagtgcccgacgtatgtatttaagaaggtggcactgaccctccgttggtttgcaacgagagggatcacaacagaatccgtgcgtgatgcatatgcgagaggacaacaccggaatgtgcagtatgacaatattcacagaatataagcataacgggacatgacacttatgcatggcagt

SEQ ID NO: 63040 - DNA, 415 bp, Glycine max
  unsure (1)..(415): unsure at all n locations
acattgttttcaaatttcaacagtggtggagattggataatgcgtgtacttgactactacttgtgctatgggttatgggttatccttgtaattttcttttcaaaagaaaattgtaccaatgagaagattcttagtgcatattagattgaatatattttcttttattgaatattactaattggaagggcaaatgttagatgataacttcttgagtttgtattttgatagcctagtcatttaccaagacttgagaaatgttctagatgttgtccttggtcttctatgcattttgggcattggtaacaatgattcagccacacaatataatcataataaaattattgacatcaattntctcaagagacccatgttataagctagtgttatctaacacgattgtctcgttaaaattgtc

SEQ ID NO: 63041 - DNA, 455 bp, Glycine max
  unsure (1)..(455): unsure at all n locations
atgcatacagataagactcctttttctgatagatttgacngggcacggcaactacaaacaatattactaccgcgcaatttcgcattgttataatatgtactgaagcagcgatcaattctatcgcatctgacaaataggtgagcataaattatatctcgataaacaagacaaaagccatggagaaagaataacaactcttaacggctgtagtgatttttaagtgtaaataaaactatagcactagcagtgaacctttctgagacctcgttcacacttcacagaaacgctcttatactgtttttctgtctgtcacaacatgacccctcttcaacttctctgttacttttttccaatatctctttctcttcccacatcacaaacaactaactcattgaataatatctaccttgatatccctaaactgtctctgacattcccctctctctctctctctc

SEQ ID NO: 63042 - DNA, 479 bp, Glycine max
  unsure (1)..(479): unsure at all n locations
gctctaatccaatgtatatgtttcataaatgggattcctttgcttggtgttgttgattctggcgccacccattcctttatatcttgtttgtgtgtagaaaaacttaagctttctgtgtcttctttaaataaagatctagtagtagagacccctactagtggttctgtgttaacttctgatgtgtgtttgaatttgtcttgggagatttctcgtaggatattcttgattgatttaatttgtttgcctttgagccaaattgatgttattcttggtattgactggttatcttccaaccatgtctctgttgaactgtttgataaaagtgtggtgtttgatgattctagagtgagtaaggatatgctgtttatctcttgcaaccaagctgtgacatctntaaaggaagatgctcaagtatacatgatcttgtctagcctataagtagagataaatggttctacgtgtggtcttactggacatga

SEQ ID NO: 63043 - DNA, 478 bp, Glycine max
  unsure (1)..(478): unsure at all n locations
tgagatgaggaagtgtagaagggtgaaacttcctgcttttattcgttgaccacagagtggtacctggagatatgtcgcggtggtcaagagaccttggngacgtcaggtggggtgctatttgccaaaaccaagcttgaccaatcccgacccaacccgggcatagttagtcagtgagaacctgtgatgtacctaaacaggcgagctcctggcagtcaacagataaaaggaacaaagacgacaaagcaaggaggcttgtgtggtggctggccagctgtgaactttgattgatatatgggatatggcctctggtaatcgattaccaagggtgggtaatcgattacaaggcttaaaaatgaagataggaggctaagatggtctctggtaatcgattaccaaggggtgtaatcgattaccaggcttgaaaatgaggtcaggaagctaggggagcttctggtaatcgattaccaggggatgtaat

SEQ ID NO: 63044 - DNA, 474 bp, Glycine max
  unsure (1)..(474): unsure at all n locations
ctatttcatttttctttttatttcttctctcataagnatttatggagagatntatccaananaaaataccatgaagaacataaaattagtcagcttaacctcaaaagtacaaagaaggttaagtcaattcataaactatcattatgttgtaacacttacaatttggaattcatctaatttgcctcctgaacaagaatggaaaatgaaagtagcacaaacagtaacgaataggtcttgctactatagtggagagaggaaattctgatggtcccacaaatataacaagatataaatattagataaactacttcgtccttaatttatntactgtgataacaattgaagttgggtgcatgagtattattgtttntagtagtatcatctttgtattgcactagtattattggtttacatcttttacctagatatttgttttagatctccaaataatatatgcacatattatcttatatc

SEQ ID NO: 63045 - DNA, 89 bp, Glycine max
cattctgaaaggactatacagacatgttatgactaatctggcttcttacacatgctaggactctaaatggacccaaaaattatgtgtat

SEQ ID NO: 63046 - DNA, 402 bp, Glycine max
  unsure (1)..(402): unsure at all n locations
gtgtagaagggtgatacttcctgcttttattcgttgaccacagagtggtacctggagatatgtcgcggnggtcaggagaccttgnggacgtcatgtggggtgctattgcccaaaaccaagcttgaccaatcccgacccaacccgggcatagtcaatcagtgagaacctgtgatgtacctaagcaggcgagcttctggcagtcaacagataaaaggaacaaagaccacanagcaaggaggcttgtgtggtggctggccagctgtgaactntgattgatatatgggatatggcctctggtaatcgattaccaagggtgggtaatcgattacaaggcttataaatgaagacaggagactaagatggtctctggtaatcgattaccaaggggtgtaatcgattacc

SEQ ID NO: 63047 - DNA, 273 bp, Glycine max
tgacaactcttgagagtaactctccctgaaatgggatgaggtaactctctctgaaaaatgggttatggataaggccacaccatctattccccgacccactccgaccattgaacatattaaacaagataactccggcaaggtagaaataacctttaataggagaaattcttttcatctagaataaggcctctaggtttaatatgagtcagccagaaagtcttctcagttagaaccccgtcaatctcagtaggattaaccaggtttgagtcacac

SEQ ID NO: 63048 - DNA, 350 bp, Glycine max
taatgcgataactcgcgagcataggcgtagttgcgactaatctatagagagacaaatcaaggcttgactggcacttgctatctagatggttcatctatatacataaagatatttcagttaattaatatgataatagttcttgatgttgttatgctaaaacttgacgtatccagacctgtgcatcataatgagagaattaatcatatatgctgtctactgcaatgactatctgatagcagtgtgaaataagacagaatcgcctatcttaccataactatgatatctcaatatgcattacatcttccttgttgacactactttttcaaatatattatatcacctagatatgc

SEQ ID NO: 63049 - DNA, 436 bp, Glycine max
  unsure (1)..(436): unsure at all n locations
ttagatactcagcttcactaaagaagatctccaggatgtggatcaagtatttttcttntcaaagtgcaataagtatgagagcctctttatgagtctcanagcgtattagaagcttcttatcaatggctactatatgtagttaagtctttacagaactgagtgaatgaactgacaatgttattaatatacaggacacaagatatacctccattattatcagttaatggtacaagagtcttcaagtgcacatgcagtgcatacaatattcaaaatcaagacaagcactttacatgcataaagtgcacaaacatatgcaatgaataatagaacattataaaacccaaaaacagcctgtacagtgaacagctgttctcgctctccaaacctccaaacagcgattcaagcaagcaattgattggtagtggcggatgaacct

SEQ ID NO: 63050 - DNA, 508 bp, Glycine max
  unsure (1)..(508): unsure at all n locations
tactaagcttagattagtctttgaagttttaaagtgagtcagaattgttcttttataataatattatcttctattttggaatgtgattttgaatatttttttattaacttgaaacaaaaattattttattagatttatttatatgaaaactatacaacccgactaatgtttgaataaaaaaaagacaataaaaatgatgaagattgcaagataagtgaatcaacgagtaacaaaaaattaataaacttttttaaattatttttctgttgagactaattntgcatatcattttntatcatgcttgattctttttttattcgtaaatgtgaattgatagttttcttataattattatcatagtatagtttttggtgttctatttcttaacattatgtaaatgtcaatttcatgtcttgatatgcactcctttttataagaattatgacgtcaatagtattagatttactttgcatatttttacaagtaaagtaaaattattaagaatcaa

SEQ ID NO: 63051 - DNA, 463 bp, Glycine max
  unsure (1)..(463): unsure at all n locations
agtttattcagaaaattagagcttatctcttttatcttagtgagagtgattctcctaaattcttgagtgattcaagaacaccctgactgtatcaaaagacattcacaaccgttgtgtgttgccctcgctggaaagagtgattctttccttcctttcatcttcacccttgttctttcaaaccacaattccagaaaatccacctctgcccagaattatctcgtggccataactcccattgtacgcactcaaattaagtgattcttgagcctaaatagaatatcanaacgagacctttcacctctgtttggaatcacctcatttggagccctgtagcttcagttattgccatttgtatatttctgtccagccaccacttaacctgactgttactcatccattcattcatttatgccacgaaccacctattagacccacgaattaacaccttttttcaatcttcctt

SEQ ID NO: 63052 - DNA, 434 bp, Glycine max
  unsure (1)..(434): unsure at all n locations
cccgttgaagatcgaagaacgatgattatcgaatgaagaacgtcgaagaacgggtgaaacctttgcgagattcctcacggaaaacgttacggaaacgtttcggaagcgcctcggcttagatattcttcacggaaacaatttttccaagcaaattctaaagagagagaagtgccaaaggtgctgaacccctttcttcttcacttcctcccctatttatagcaaaataggggaggtggttgccgcccagctcgcccaggcgagccaggttgcttcctccagaagcaacagccttctggaggaatattctggagggcccaagtgggcctgggtgctattngcacccccatttttactaagtacacccncctctgctggtnttttggtgattctttttcgtanagttacggaaacttacgaaattcgtaacgatactt

SEQ ID NO: 63053 - DNA, 482 bp, Glycine max
  unsure (1)..(482): unsure at all n locations
ttaagtcacctgcggcatgcaagctaagcattntatgactttaagtcttctattattgaaggcaanatcaagttatggggatgataagaaatgaaactgctcccttctacaatataatatgggatgatcttttaaattgacgatacanaggaatattaatggcacttggccaagaatacgtagggaaactatgcaacgttctcattcctatctacagcaaaatggacggataattaaagttcattttcaacgccctctttttcatatgtgatttatcttatacccacgttatatgctctttgttcgcattacatccttcaattttttatttctctcttcttatctcataatgtctcttcgttggattgtatacacatccacttagaatgtgttaggacagctaaatattacgttcaggttttttttttgttagaatanactgctgaaaatgctaagagcgtgaatttattctagtctttacc

SEQ ID NO: 63054 - DNA, 453 bp, Glycine max
  unsure (1)..(453): unsure at all n locations
tattctaagcaatatatatatattcaatggttataatattcatttgattngatgaagatattgcacgctccatatttcctgggtggggttaccgtaagttcattttctcatgaacatataaacatgggttatcaacttatcatacacgctntatgttattaatccgttccctatacagatatgctaacgcttttccattttcaatttatgtttcattgccaagctttcctttcgagatatgtcagccatagatagagttgaaaagtgaacaaatgaccaaatcatacataaaagaaattccatgagggcgatgtggtggtggcagacaatatatattcatgaagtggtaggacagcattcagcaacagttaataatgtacacatgctntcggaccccaccaccagtgcatgtgaatgttcctacaattcaagtgacactctcaccaatgatct

SEQ ID NO: 63055 - DNA, 434 bp, Glycine max
  unsure (1)..(434): unsure at all n locations
tctaacagtataaacttctggtaatcaattacataccttgtgtaatcgattacaagcctttaaattcaaatttgatatttgccaatgcttcacaaatcaatttagccactggtaattgattacattctctggtgatcgattaccagagaggaaatagcatagttttgaacaagatatttgttcctacatatttcttagcaaatatctactttagccaaacctgtgcagtatcaattaaggaattctttctaagatcctatcaactaagtatatcgctcttcttgcatttctgaattcttgactagaatcgcgcttatctttggcatcatcaaaacttcatatcatatatgcttctacaatctcaccttgttngatgatgacaatantcttaaatcaagatatacgatacaccattgataatgctgtctcacaac

SEQ ID NO: 63056 - DNA, 459 bp, Glycine max
  unsure (1)..(459): unsure at all n locations
ctcatttatttcatttagatagcgatccagaccaggtctgagagaccatacaaggttcctaacgatttctaattatgtgtgccattaagtctatcatatgctgactatagccgagaagcccatgaatctctttgggggtggagtaagtgtctgccatcgccttggccttggctaacaagcggggaagttcttgactcccgttcaaggtaagatcaaaccggtccatccacatgagtgcctcttggtgtaaagagtcnatcacccttcctctagcctctttttccgcatatacttgagcatactcatccgcgattctatgctcgtgagccgtggctagacctaactcttcttggtactaggcgatgatagctagcatgttggtctccgtctcgcataaatgctgagacatgcttcttttggacctttgaacaacaataacttctctttagaaccatgctt

SEQ ID NO: 63057 - DNA, 388 bp, Glycine max
tagcttattattaataaaatgttgggtgtatctcttcccttttgaattaggatactaatcatgacataagactatggtgattggaagccacaatgtgatttacagtttgaagatgtataagatgcatgggaactttggagtaaatatggtgagatagtacattttggagttacaaagcatgtcataaacaagcgagaggaagatggtgctataacctcttgtagatatgcttgttacaatgaagggattagatagccatatataacgaatggtcaagctaccaagcacagagctgagaccaatactaattgctctgtaagacttggttgtcattgatgaataatggaaaatatataatatgattttgccataaagcttaccaccctta

SEQ ID NO: 63058 - DNA, 405 bp, Glycine max
  unsure (1)..(405): unsure at all n locations
acacgagntagagaagtctcacacttatgcggggactaatatgacctggagaacgataatagtgagagaattatagatttagtgatgaaatatgtttccttaattggtgaaaaactcaagtctcatgtcagctaaaataaaatcaatgtaaattatataagtgaagaacaattctcacactaattgttaggatcgaattagacctaaattcatattctaagattctaagattctaagattgtgtgaatgataatgtccatactctttagagtcaagttatactctaactcacattctaagattaatataatctcaatttaattacgtgtttgtttcgtatttattgatagaaatcttaagaagtgaagatcgtaactcttttacatcgtactttcacaactaata

SEQ ID NO: 63059 - DNA, 502 bp, Glycine max
  unsure (1)..(502): unsure at all n locations
gatcttagcactgcagctgcacttccccatggtattgatgtttaatgatatcattgnttcctttagatatanagaaaatattgttgatcagtgtatatatctgaaggtcagtagtagtaaggtcatttctctaattttgtatattgatgatatcttgtctgcaactaatgatcttggtcttcttcatgaaactaagaagtttctctctagcaactttgacatgaaagatatgggtgaggcaagctatgtgatagggatagaaatattctgtaatggatcataaggattgttaggcttatctcataaagcatactatagagattcaagatggaaaggtgttcaacatcacttattcntaattataaaggagacaaatttagtctcacaatgtcctataaatgatatggaacgaagacaaatggaagcaactttgtatgcatcagttgttgttgtatctactatgaaagctcaatttctagcatgctttgaggctacaattcat

SEQ ID NO: 63060 - DNA, 396 bp, Glycine max
  unsure (1)..(396): unsure at all n locations
tagctcttagaggggatggaccttttaggtcttggagaggatcaattacaatgcctataggttggacctcccataagagtatagagtcagcaccacctttaatatttctgatttaattccttttgcaggtggagctgatattgaggaggaggaaccaacagatttgaggtcaaatcctcttcaagggggaggggatgatgcaatcctttctaggaagggaccagttaccagagccatgagcaagaggctccaagaggattgggctagagctactgaagaaggccctagggttctcatgaatctcanggtagaattttgagcccatgggccaaggttgggtccacttatctttgtacatattatattaggatttcattattnttggtccttgtattt

SEQ ID NO: 63061 - DNA, 407 bp, Glycine max
  unsure (1)..(407): unsure at all n locations
agcttttggagtagaaacatgggaccaactcattntatntcannaaaagaaatcatatctagtcaaggtctgagagaccatacaagtttcctaacgatatctaattatgtgggccattaagtctatcatatgctgacaatagccgagaagcccatgaatctcttcgggggcggagtaggtgtctgccatcgccttggccttggctaacaatcggggaagttcttgactcccgttcaaggtaagagcaaaccgatccatccacatggttgcctcttggtgtaaagagtcgatcacccttcctctagcctctttttccgcatatacttgggcatactcatccgcgattctatgctcgtgggccatggctagacccaactcttcttggtacttggcgatgatggctaaca

SEQ ID NO: 63062 - DNA, 464 bp, Glycine max
  unsure (1)..(464): unsure at all n locations
gctgtctctctcctaattgtatatatatatgttatttgaatgaaataaaactaagcaactgagggaaaagtttctatcctcacatattcaaaactttaagttggtatcagagcgggtcgtattcaccgtcgtncgcgccgccgttcgtcaccgtccgccgtcgtccgccggccgtttcaaccggcgactacagggttntgtgcgcctcgaggagcgcaactcagcgcaactaaccgctgggccaggagcttccccacgcgccgtcacgcaccatcttcgtgcgcgccaaacgccggcgcgtgaccaccacgcgccgccctccccttgccggatacgcgcgcgtttgctttcggccgtctcgtcgggctctcctgagtccatatcagccattagttnttggtttcggcacttcgttgagtgaccatgtgccttccttgtctctctactntagtttcctttgatct

SEQ ID NO: 63063 - DNA, 396 bp, Glycine max
  unsure (1)..(396): unsure at all n locations
atctctgagtcacctgcggcatgcaagcttgtaatcgattacacacatactgtaatctattaccagaggagaatttcagaanatattctcaacagtcacatctttttgtgtggttcttgaatggctatcaaaggcctatatatatatgtgacttgagacacgaatttgataagagtttttcagaacaaaaaaggtcttatcctcttagaaagaaaaataattttatcctcttacatattccttagccaaaactcttgtgattaaataaggaattatgtgagtgctccaattgttcaatctatcttcttatagagagaattcttcttctcttcttcttcattctgaaaagggattaagagactganggtctcttgttgtgaaagaattctaaacaca

SEQ ID NO: 63064 - DNA, 421 bp, Glycine max
  unsure (1)..(421): unsure at all n locations
gacactatacaatactaccgcttctccnctatttggctataaataggggatgaagtgaagattataagggttcaaccccttatgcacttctctctctctcgaaattgctgaggaaaattatntccgtgaagaatatccaagccgaggcgcttccgtaacgtttccgtgagaaattacgcgaagattctcgaccgttcttcaagattcatcgttcgttcttcgttttcttcagtcttcaatgggtaatacctcaaaccgagcttttcaattcattctatgtacctgtggtggtccacattttgtttcatgtatttttattctcgttttcatttacttttttatacccccttttgacgttcttaagccatntatttaagtcatttctcgcttaatctaaaaataaaataaatttccaccgatc

SEQ ID NO: 63065 - DNA, 359 bp, Glycine max
gctatctgcaaggaagctatattgttattttatcaatcctgcataggattggcgctgcatactgggtacccaccaatcatacttacactgttgccacaggtgtgggtaaaattctgtattctgtcggaaccatcttcatatctaattttgtagactatattattgaccaaactgataaacattcagaatattttgatgacaaatgacgcactgccattccaactgcgtagtgtggtattatgtgtggtcaacaacccattattataaaccacaatgactatgggatgaagagagaattcagactgtccctgcactacaaacgtgtttaagggacacattatcgagacattgactttaca

SEQ ID NO: 63066 - DNA, 59 bp, Glycine max
cggagcaacacacgatatgacatggaaaacgcaggcagtgccggacttaacaaccgtgg

SEQ ID NO: 63067 - DNA, 467 bp, Glycine max
  unsure (1)..(467): unsure at all n locations
tctgcccaattctctataatagggggagatgtgttgtttataagggttcagccccttaggcacttctctctctttcgaatatgcttaagaaaatngtttccgtgaagaaaatccaagccgatgcgcttccgtaacgtttccgtgagtgatttcgttgaggttttcgaccggtcttcgacgatcttcattcattcgttatcgttcttcagtcttcagcgggtaagtaccttataccaagcgttttgattcattctatgtacccgtggtggtccacattttgtttcatgtatctctattctcgtttcatatattttttatacccccttttgacgtgcttaagccattttatttaagtcatttctcgcttaacctaaaaataaataaatttccaccgatcgtttgaattgtattatccattaactttggttgaaatgaatttcgaccgatcggtcatgccgcaaccacgt

SEQ ID NO: 63068 - DNA, 470 bp, Glycine max
  unsure (1)..(470): unsure at all n locations
taagcaccgcggctgcagcttaataattgnaatngacggtgtgtggattttcttgtactctactaggggcaatattccttggcacccttaatcatgttcaatttgttggtaagtttacgtctcttaatctaaaaaaggaaacttggttaacatgtgagagtcatttggataaatgaaaatagtcttggatgttatatgcatgagtatttcaatgcttgcactactacgaaagtgtgttttttatgacaggtagtctacttttgtaattatgtgtctgaaacatccttctatgatgcacattctaagacngttattgaaaaccgccttagaatgtgtgtatctcataaaaaattatgactggttatattaataactcgtcncgctctcacttgaattaagagcccaattaatatgagttcacgtgcangcagcaatataacttctgcgacctctctagctcttgatcttcc

SEQ ID NO: 63069 - DNA, 241 bp, Glycine max
  unsure (1)..(241): unsure at all n locations
tactatctcttgaatagcnctccgttcactgccatagannntaagaccagtatgtgttgtatggtctaacaaactcactgaatactcaatgctgaaggtgtttaaaatgcccaacattccatgtaatggaagtgataatgaaaccccacacccaaaaggagacactagctttatgggctatggagagggagtctaatgactcacaatttggtctttatcaaacagagagggcatttagatt

SEQ ID NO: 63070 - DNA, 501 bp, Glycine max
  unsure (1)..(501): unsure at all n locations
agcttanggagaccttntatgnttttaccaaaaatgttatcattgccagcgtatggcctatcactagtcatatattatcttagttcaaacaaagataacatgtacgcatatcaaatcagcaatgctatttgatgtaaatgacttttcataaatagtgtttagaattacatcttaaccaactaaaaaaaaaagtgtcaccgacaaatatagctgtctttttcaaattgatgaaattataaacacaaaggaaaatcgtacaaagttagaaactaaacaaatagtgatgaattaaataaaagtattgtattgaaaagacaaaacttataagacatttatctagtatgacaatatttttgggtaccattggctttttcagttaaaattatgggtatcattgctacaaaaccgcacctgacaagagtaaaacaggataaaatatcattcgaaaaaatgtaatggagagaagtacactcttatgcattatataatatcattntcata

SEQ ID NO: 63071 - DNA, 508 bp, Glycine max
  unsure (1)..(508): unsure at all n locations
agcttatgcgcatattttcttacgaatgttcgcttgcttaagacattcttttaactaagaaaaaatgcacccatatacaatcaaggcagcttcattacctagattatttacatgtacttccaaggtgtatttgttacttacatcacacacatctccttggctaaatttacatacatgcatactcaaagcattttggggtaccaaaaattgcacatgtgcacatcttggtatttctaatacctatacatacacaaacttcatgatgaatattgactatctacacaataaagtgctacatttcatgctcttttcaagtttttgctacctaaagccgcatgcaaattcaagtatattttcctttgctgactaaaattgtattaaaaggtatatattcttgttgtaatgtatcctctttacatatcatgcaacatatttatatatattctnttgtgagacatcctgactaccanaaattatatgtacatacatccaagtattttgctatcat

SEQ ID NO: 63072 - DNA, 476 bp, Glycine max
  unsure (1)..(476): unsure at all n locations
catgtggtactacgtggcggtctgtttattgtgcacaacaagtnttccacatccacaaagcgcgcataaacccaccatcccctgttgcccacctccaactgagctcacgtactcccacgtagcccatatccttttttctctcaacaccgggtccccatcaatcctcccaagctttcccaacatcaaagcaaaacaacattcaaacagcacaagctatcacagccaagcaaaacaaagcaaaggcagaaaactctgctcaaacaccaaccaaatcacagcttttctcacttaaagaccccagtaacaattccttcgatccaatatcgtaaccgttggatcgactctcaaaatttactggaagtctataatacataagcctacattntgaccggtgggatctactagcaaacatccagaactcattctgtactactctttccacagccaaccacacacaagcatatttctgcaccaag

SEQ ID NO: 63073 - DNA, 497 bp, Glycine max
  unsure (1)..(497): unsure at all n locations
agctntangttgctcattgattctagaatgctgcanatattgactgagatcagcataagctntaggttgcccacgaaattaaccacattattttccatcctttccttaatcaatttccgcattttccatcaaagtttaatcttacacgatcctaagtcagcccttgtgccatgagggtgcatatcatttggtaatcagagctccggttctaggatcaacacttcctttgctggagatattgggtaacatccttctttattctctttgccatttatattaccttcttattcatatntttttaggctgaaccattgcaaaagttaagccttttgatctctttgttataaaananaagcagaatttcgtataagcaaaattaanaaaaaatgggctgaatggttcatgcttgaagaactttaaaataaaaatctctttaggtaatatattggttgcatgaaggaatgtactcgaattctaaatctgaatttattccttca

SEQ ID NO: 63074 - DNA, 358 bp, Glycine max
  unsure (1)..(358): unsure at all n locations
ccttaaaactaagcttgtagcgcgggtctacctaatttcgncgggacctttgttgttactgcgactttctttggccttggagggcttggacccatatttgcaatttggaaattccagactgccggaaaccaaaaaaattgatgcacaatccgtaagttccggaccaccggaaataaatggaagctcgtgcataattaatgaattcgtacattcatagtcaaaagggagatatgtatcgcagggtcgtacatactgaaaaaacagatcgtacagatcgaagttcgtacttacaaaaaaataccaaaaagtaggggggactataagaaggggtaatagattaattagccttcaaaatttg

SEQ ID NO: 63075 - DNA, 502 bp, Glycine max
  unsure (1)..(502): unsure at all n locations
ttaagtcacctgcggcatgcaagcttcgtgcacagatccctcatttaagactacacctgantttgacaactctcttaggtttagactaacttaaaccgagtgtcgtctgcagatccttcatgtaagatgtaacgacccgcctcgttgctacgatatccacactctaatatacgataatttcaatttttataaaaagaactcccttaattcttttcttatgaaaatagaagtgatcttgtctcgacatacattcatctaacaacacgccattacttaagtgaatatacataattatatagaaacaataatttagtacacgtcatacacataaaggaaattaaatccgttcatagatataattaaaatccaagttttacatccttaactcaacaaaataaaactcgaaaaccaactacggaggagtcgattacaaaacacaactctcttccaaaataatgccaacgtcatcacgtcggcttggcggtcctcaccagaatcatac

SEQ ID NO: 63076 - DNA, 255 bp, Glycine max
  unsure (1)..(255): unsure at all n locations
ctacggatntggtcttcgctggtgaaaggatcgatgtgagtcctattatatgcaaatntaatcatcctgcttggacggatgagaaactgnngcaaatgaagagggtgagaatgaatgagatacccatgttgtgactgccattcctatacagccaagttttccaccaacccaacaatgtcattactcagccaataacaaaccttctccttacccaccacccattaatccacaaaggccatccttaattcaacacca

SEQ ID NO: 63077 - DNA, 366 bp, Glycine max
  unsure (1)..(366): unsure at all n locations
ctcccatatactactggtgattcaatggtagccatatccctagccaaggttcatcaacctccatttctccgagaatacgactcgaacgcgacgtgtgcttgtcacggataaacccccgtgcgttccattgatcattgtaaggctctgaagcgtacagtgcaaggtctaattgatgcgggctggctgaaatctgaggagaattgcgtgtaaatcctgacattgacaagagatgccacacatggcgcaattttgaaagctgttgttacgagtctctaatgactcatcaggatatccatgtntatgccattatcgtaaaccacagctacaatggttaatgaaatggatgaagctgatatctttgtcctt

SEQ ID NO: 63078 - DNA, 222 bp, Glycine max
tatggtctaacaaactcactgaatactcaaagctgaaggtgtttaaatgcccaacatatcatgtaagtgaaggtaagatggaacccacacccaagaagggtgactagctctatgggctatggagagggagtcaaatgactcacaatttggtctctatcaaaaagaaaggtcatttagattagatattttatctttgaagaactctctatgctacattctaaa

SEQ ID NO: 63079 - DNA, 460 bp, Glycine max
  unsure (1)..(460): unsure at all n locations
agctntgagccaaaatcctaactcaccatataccttgtcccatggtgagaatgtcaatccttaccctcggaagcaaaaaagaagagaaggacaatttccaatcaaagaaaaaaaagagaaggaaaatgtccaatcaaagagaaagcaaaaaaaggagagaaggaaaatttccaatcaaaggaaaaaagagaggaaaggaaattcccaatcaaagagtgggagaaagagaatagaaaagaaagagaattcccaaccaaagagtgggagaaagtaaaaggaaggaaagaaagctcctgatcaaggatcgaaagaaatcacaagatatgtgcanaaaggtctntggaccggacaatatctgctcaatacagaattgtcaccaaatgaacaaaanataaatggaaaggaaaccacgacttgagagtggtcttcttcctttgattaccaaccaaaatcctgtgcg

SEQ ID NO: 63080 - DNA, 364 bp, Glycine max
agcttcggtatcgatatattactggacttattaagacattcgagtaacaaagaattgtcgcgcgcatatactcacagcgccggtattcaatctcgagcgtctacatgtactaccggagtgtatcagacattcgcgtcacacgctattgcctggcgaattagacctgcaggcctacactcagcttcgagcggcaccatagattgcaggactgcacctgacgtccttgctaatacctattgacgctcgaactatctgatgacatttgactatcttctcgatcgagtgcttcatttactgcactctatcagacatcgctacctaaagccgcttgcctattgaagtatctctgacgttgctgactcaa

SEQ ID NO: 63081 - DNA, 373 bp, Glycine max
cttttactcggatgtctgattgagtcccgtaatatatctagacgctctgaattgaatgttgaagctctgaccaaattcaaacgacgataactctttagtcggatgtctgattgagtcctgtaatatatcgagacgcttgaaattgaatgttgaagctctcagaaaattcaaatgacaataacttttttactcagatgtctgattgagtcacgtaatacatcgagacgatcgaaattgaattctgaagctctgagctaattcaaacgacaataactttttgctcggatgtctgattgagtcccgtaatacatcgagacgctccaaattgaatgttgaagctctcagcaaattcaaacaacaataactctttact

SEQ ID NO: 63082 - DNA, 414 bp, Glycine max
  unsure (1)..(414): unsure at all n locations
aagcttcctttaatgcatcgcacctaagaccaagctctatggtggtatgggctnttgacggcagtcgttgggatgtaaggggggagatcgatctcccgattcacatcggaccccacgtgtgccaaattaccttccaagtaatggacgtaaatcctgcctacagctgcttattacgccgaccttggattcatttggttggggtggtcccgctaacactgcaccagaagataaaatntgtggtggacggatagctgattatagtctcgggaaaagaagacatacttgtaagctgtccatctattatgccttatgttgaggctgcaaaggattcattggaaacatctttccacgcattggaagttgtgagcaatgctttcgtggagtctcgctcagtgcacccacgctcatctggtg

SEQ ID NO: 63083 - DNA, 262 bp, Glycine max
  unsure (1)..(262): unsure at all n locations
cagtcgatcattgccagtgtcttgtgaagttaataccaaatttcgagaagaccaacgntaatgaaggctgagcaacgtttttaccgaggcagctgcatgtagctttctctagaagcttcattaaaagagcttactctagaagcttccctcgggcttctttgagaagctttctcaacaggattctttgagaagctagatccttatttatccacacccctctattaactaaattaacttccttaacaataattacggatgaaaa

SEQ ID NO: 63084 - DNA, 473 bp, Glycine max
  unsure (1)..(473): unsure at all n locations
agcttatccacgccccgtttgtatcgntggtctcatctctctgcataaaagntggcctctgggcccgcctatagtagatacataaaggaaactttctgcatcaaagtaccaattaaccttaatgtatgcacttagagtttcagtttgccgatgaattagtctctctgctaccttagaataggatttcattgtaaatgggttttaaaatcttatatttattttcatattgcaaagtgtgcactaactttgaaacatgattaagttatgaataatttaaaaaacatatgtaagtctcgcttatatattaattataacttaaattatggacaatgattgactcaagcagttacgtttatttctcgtaatcaaagaatctattattcaaattctggttaattttcttgagtgtgaacatatatatattgagagaacaatattctcattgaatatgctaaagaacagaacttaaacta

SEQ ID NO: 63085 - DNA, 298 bp, Glycine max
  unsure (1)..(298): unsure at all n locations
aaaactcagcttgtggccactangagaccagtggactagattcagtgtgcttcttgagattatcaatggcgggatcggggggtaagaacaacaaggaaatgaaatacgatgataatatatgtcttgaaagagttaaacaggaaagaaacctgagaaaagacatcactaccacagtgaaagtattgcacgaggataatcaacaaatggttagtgcataaaaaaaagttgaccttgtccatacaaaataaaaaaaagttgaaaaacttgtgctgtaaaacggggacacatgtccaattat

SEQ ID NO: 63086 - DNA, 359 bp, Glycine max
  unsure (1)..(359): unsure at all n locations
ctcgatgttatgctaagcctctcatctatgctaagcacatattgcagaacggtttctggtgttgtagaaagcgataagcgccacctgtcgcgctaagacccatatgcttatgggactttacaacttcaagttgggcttaacgcgagggttggctaaacgctcatgttctaaactcaaatgtcacattggcacgctaagcgcgccatacgaattntagtttttaaaaagcaaaggcacacgcacttgagttgctacctttgtacccaaacctctgcaccttcctatctttgaacattctgatactatctactacgtgtgtactgctcctctgcctcattntagcttgcctgcaaagacaa

SEQ ID NO: 63087 - DNA, 332 bp, Glycine max
tgcctgtccgatgcagcagtaatgatggcccgagttatgttggttaacggttacgaacccggaatgggtttaggcaaagacaacagcgacataactagcctgataaatgccaaaggaaatcgtgggaaatatggtttaagctataaacccactcaagcggatataaagagaagcatcgcgggaagaaagagcggtggtcaaagctcgcggttgagacaagaaagtgaaggaagcccgccctgccacataagtagaagctttataagcgcgggtctgggagacgaaagtcaagtggtcgcggtatacgaggatgatgttccaagtacattgga

SEQ ID NO: 63088 - DNA, 445 bp, Glycine max
  unsure (1)..(445): unsure at all n locations
agcttcatgcaaataagtgaaagacactaccctccaagcatataccaatttggaattgctggcttcgcttgatcgtgacaactcacatgtacattcacactcgatcgtatgggatgggatgaaaaggtctttgatccctgagaagacaagattaaaccaaaatctctcttgctatagctaggtgttttcatgaatgatactattataaatatgatctttagtaatatttttttatttaacatttgataaaaatgttactaaaatcttttaatgacatttgaaaaatattacaaaattataaataaatattattaatatgtttttacagcattaattaaatgttacgtataattcatgttaaaatcatcttgtaatattcttagggataaaatgtcacacaaacatcttattagtaatatttattcatagacaacattntatgaat

SEQ ID NO: 63089 - DNA, 458 bp, Glycine max
tcacttatttaaaattcgcctaccttgctgatggtaaagtttattgttaggaaaatgaaaaagaacaagaaagtgatagtttggggaggagcaacttatactatttcttccaatgagaataataccaggcaggaattacgagtcaacaaactgttggtttatttagttaccaaccatgcaatcatcgttcaaatttaaattattgaacaaatgaatgcgccatccccatttgctcacattcttcccctttgtgagatgttccaaccatgaatcgttaagtgacaaaatattaagagagggtgtataaaatacttcacaaccacacaaattattacattatctaagtgattccgactcactttcacgtcacatataatcatattttcttaatttaataaaatgtcacatgacaattgatccctgatcatataataatttatcttcacaagagacaagac

SEQ ID NO: 63090 - DNA, 500 bp, Glycine max
  unsure (1)..(500): unsure at all n locations
agcttattaagaggcttcctcgagaagcttcctcgtgacttctttgagaagcttcctcgagagacttctntgagaagctagattcttatctacccacaatcctctatgaactaaattaacctccttaaaattaattacggataaaataatagcacaaataatcaaacatcaaatataattactaataatatatatatatatatatatatatatatatatcagggtgttacatcatgacacctaagcacacttagtggagaatcttggaattgatcttgaattagtgggctgaaccatagctaanattcactaatcataattagtgaaattttggctccacaaattcaatttcaaattcaagtgaaatttgaatagaaattcanatttccctcncaatttgtgtgacacttaagctataaatagaggccatgtgtgttcattttttcaactntgctcatttgagaatacacttcanagtcatacctcaattgagggacaaa

SEQ ID NO: 63091 - DNA, 272 bp, Glycine max
atgccccacattatttccgtgacacagatgcaaaaatgatgatctggaaactttatgcaaaactggtcatgcatgcacctatgtggacactcaagtgtcagatctttatggtcatgtgatgctagggctcaagattcgttacctctattttaaatcaacccaatgtttccaaaaatatgtcttttatcaatttgccattcatccgagttcttttgggcgtcggggaaatttcacagcgtcaccctcagtgatacacacgtttttttcaaaat

SEQ ID NO: 63092 - DNA, 502 bp, Glycine max
  unsure (1)..(502): unsure at all n locations
gcaagcttgaggatcggcagctccagctctgtgaggatgtctatctttctcttgaagttctgcaccaggattntgcaactcacaaacttgggaatcaagaaactgctgaaaccatgtcgaaagtactatctgaaataaaagacttagtagctgccagctctactccagaagaaattgtggcagcagataaggccgacctaatggaaaagatcacacagttgaaaaatcaagggaacaccattgcatctttagaaaggaagctggagaatgttcaaaaatctatagacaagcttgtgtctgcttttaatgcagaggagactccaganaacaagacgacccctctgagaaggaagaaaattcttcctttcacattaagcaacagtcccaacatgcagcatataatacgtgctccttgctcgcctctctcctcttcgcgtaaagcaatggaacatgacattgagaacagggcaccgganaacaacattggcatctctggcagtga

SEQ ID NO: 63093 - DNA, 487 bp, Glycine max
  unsure (1)..(487): unsure at all n locations
gtacagtttcaccaccccattgtagggggcttgatttctcccagctcggatagctcctgcaggattccaactgaaataatgggtaattaaccaatgagttcttatagtgacaatcatcaaagtttttaccacataagcaaaatgactatgtgacctactagagttgaaaggttagccagatgaaaatgctacaaaacagcgagtttaaaggcattgagtaatgaaaacttacaatatgattttcaaatgttttacaaatcatatctaattaaatacataattcagtgtgcttactctngagtttgacaaagagattccaagaagtacctgggaattatatgctaatggatggtagcagcttcaggagatggaagtccaccacaataagaagtgaaagactntattttccccttccgcacatgtgctnggttgatcatcttcattggcatcatatgatctggatcatcanacaactacaatcttatat

SEQ ID NO: 63094 - DNA, 465 bp, Glycine max
  unsure (1)..(465): unsure at all n locations
agctngtaggcctaggatcttcttcatcaatggatttctttgcttcttggaagatgaatggcagcggaatggagaatgaagagagagaggagacgccacttcaaggagaagatgagtctagaagaagctcaccaccataggaggccatggataagagcttggaggaagaaggagatgaatgaagggagagggagagaagagcacganattctgtgctccaaatgagctttgaaatctgaagtttaatattcaaatggatcaaagtgaaaaaaatgcacacacatgacctctatttatagcctaagtgtcacacaaaattggagggaaattcaaatttcacttgaatttgaaatttgaattgtggagccaaactttggagccaaaatttcactaattatgattagtggaatttagttatggttcagcccactaatccaagatcaattccaagattctccactaagt

SEQ ID NO: 63095 - DNA, 162 bp, Glycine max
atctatctctttcaagagagattcattcttcttctctttctaattcactaaaggattaagagatcgaggatcttgtgctgtaaagaattctaacgccaacgaaggattgccttgtgtgttagaacttgtaaacgaattacagatagtgaactctcagcggtc

SEQ ID NO: 63096 - DNA, 470 bp, Glycine max
  unsure (1)..(470): unsure at all n locations
agcttgaaggacattcattaggtggttgatcattgatgcaaatagagtanttgaatgttggacaagatacccgagtctcaacaacatatacatccctgngaattcctttctaagagccaaaatctatggattgaagagcctatgaaaaacacaaacaaggtttaagtaaacaaattatccattgaaaaaagaagaaggaaatagaagaaacactttaaagacagtgaactagtaacgtgaacctaaaattcttctttacttgctagttgtttttccattcttccttacttgctagtttttttttccattcttccttacttctttacaataggagttcacagcgagtgagaagcaactttagaatctcaaagagactctcanacatgtaaaattaatctaaaattgacagattgcagcattggtcaattcaagttggacaaattcatgtgcttgatccaatttaagttatg

SEQ ID NO: 63097 - DNA, 450 bp, Glycine max
  unsure (1)..(450): unsure at all n locations
ctaagctggncatattatggtctgagttaagatctagacttggtttcttttattctacttagcaacatcttctgatgagccctatttctttttataaccattgctcttttgcctcgagttatgatgagaaccaccatcttgtttcacttttagtgctcaaagaccctcgacttatagaagttgacttgttaaagtcagaaggttttgatggctcaagtcctaatagtccaccattagtccagaacctaatgaaatgattagccaaagactctctagaagtctcttcagatatggagactattttgttggtcttatctacttcgtcatttgggtaattagagttattggcactagaaaatgatatattagtctcaatgggtgctgacattgtatcattaacaatagaagaaccaatgtaggtatcagtgcatactggagttatccaaaaca

SEQ ID NO: 63098 - DNA, 465 bp, Glycine max
  unsure (1)..(465): unsure at all n locations
taagcacctgcagctgcagctagttagtgtcagttaaatacacacaatgttttatgattattaatcaataganaatttctccatagttgttgcaattcaaagtctttcaaacaaattcaccaaaggcaagaattgtgagcattgcaatagaagggatcatgcaattaacaattgttgaactctaattttgttttcactaagccttggattgtggacagtggggctactaatcatatcacatttgattccacacttttcactcanacataatcaccaatatctattgtcaacctagccactggatcttctactccagtcacatctatcgaagccatgccattcaattcaaacattactntagataaagtccgatgtgttccttccttttggttgaaattgatgtctggtagcaaactcattgctagtctgaattattgngccatnttgtttcctaccttatgtgtt

SEQ ID NO: 63099 - DNA, 225 bp, Glycine max
  unsure (1)..(225): unsure at all n locations
actttgaaactgcagatcatgagacactggtccacattgaccagaacccagatgtgacaacagacaaaaggcctatcagaaccaagggttcttcatcaagacttcatgggtntgaagtccacactgacgacactatcactgatgaagggtaacttctgcccaagaagtagtgcatgttgcactgcgtgctgatgatgacctctttccttttcttaaactactaag

SEQ ID NO: 63100 - DNA, 262 bp, Glycine max
cttaggcacttctctctctctcgaatatgcttacgagaatatgttttgtgaagaacatcctagccgaggcgcttgcgtaacgtttccgtgagtgatttcgcgaatgttttcgaccgctcttcgacgatcttcattcgttcttcatcgttcttcagacttgagtgggtaagtacctctaaccacgcttttaggttgatctatgtacccgcggtggtcacatgtggttcatgtcttttattctcgatcattcacttgtataccc

SEQ ID NO: 63101 - DNA, 389 bp, Glycine max
  unsure (1)..(389): unsure at all n locations
catagaaaaatgaaattctggagtgttaatattaaggcgcatgacacaagnttatcgagactttaattagctagctacttagtgacgtagggcttttgggtgggatggagagtgagaagcccaacttctcccttcagagtccttaataacgaacatatatggaagaaagatcttacatcgattgtgtatgtgagaatatatggaagacaaataatgtctcttacacccatgataatggttgtcttgtgcacatggccacccttcaccgacttaagctgctggagttgagataactctatgtacacctcaacttcacacatggattcatattaatgttagatattatgctgcgatatcctctgcaacattaaaaactcggcttcgtatgt

SEQ ID NO: 63102 - DNA, 271 bp, Glycine max
actaaaaactcagctcactggctactttgaaatgttgctctgcggagtattcttacttatgatgggttacattatcatggtagcgattagacagtgtgtgaacatgtgcatacaatatgagtatttcttattatagcagatggctcatctccaacactttagctggatgcattcatttgaaagcaggatatccataggatctgagcagcattataaaaatacattagacatatgcgttgctgctacactatacgaatgttaagagctgata

SEQ ID NO: 63103 - DNA, 477 bp, Glycine max
  unsure (1)..(477): unsure at all n locations
agcnttgaagggaagagagagaccaatcactatcacatagcatggtcttgaaagaggagatagctgcttgctcaaggtccaaaagaaacttgtctcagcgattatgtgagacagagaccagcatgttagccatcgtcagcaagtaccaagaagaactaaatctagccatagcccacgagcataaagtggcggacgagtatgcccaagtgtacgcggaaaaggaggctagaggaagggtgtcgcaacctacccttcggcgggagggcgacgcgtgactcgcgggtgcgtgttccaagaaaggaatatgcacggagtcgccaccaatgtctatttgaggaaaacgtctgagaaaccggaaaaagacgtgatctacaaactctatagtgaaagggttgggagcctttaattaaatgtgcaaacatgaacttcaattttatggtccctcttacgtctctatttctttttggactttntata

SEQ ID NO: 63104 - DNA, 404 bp, Glycine max
aactcgacctatatagtgaacaagtcaaatcgagccgaaccttaaatagaccgagccaaagacctttgacaagctgatcgactcatccccatccctaaaaacaatgacaatccaatgcagtaacaattggtgtattgatatattggcaaccagtgacattcatttatgaaatcctcatacttatagctggtgagacgaacaattattaaccttacacaattctgtgtatattgaagaaatgctttatgatgtataaaggattcaaatatcattgtcaagctgagctgtatgcacctacactaaaaacagaatagttgatatcacttattatttgaaaaggtataatgaagataacaatgatgtatgattagatatgctttacctgtcatttctcaacgctgtac

SEQ ID NO: 63105 - DNA, 404 bp, Glycine max
  unsure (1)..(404): unsure at all n locations
atgaaacacaatgtttgatgttgtatgactcaaacgaacaaccctcctgtggtgtggcgatcacttgaaattagagaaaaaaatcgtttccgtgaagaanatcgaagccgaggcgcttccgtaacgcgtacgagacgtttccgtggttgattntgtgaagattttccgccatccttcgtttgttctacgccgttctttggtcttcagccgataagttctcgaaatcaaactttccaattcattctatgtaccctttggtggccccacttgtttcgcgtacttntactttcatttcatttactttccgtacccccttttgacgtgctntagtcatttatttaagtcattctcttgcctaatcaaaaaataaaataaatttccaccgatcatttgaattgtaacat

SEQ ID NO: 63106 - DNA, 336 bp, Glycine max
actaaactctacggcctcatgatacaacgtataggctgtggagacaatcattctactggctcttatcatagacaaaatggtggtgttggtgagtggaacaagataacatttacggagcatcctatgcaatgggagaagcagctccagagggagggactaatgcatgcataatggaggtagcctgaactgtggctgcttgtcatattactgtatacatatggaagaagcactatagtgtgtaataattcttcggcgccactattcgaaccaacatagttgttgtgtgctacctaatcgatgtgtagagtgaaaacaatactcttacatatgtgggat

SEQ ID NO: 63107 - DNA, 405 bp, Glycine max
  unsure (1)..(405): unsure at all n locations
tcgcgatatgtgaagatgatgttccaagaactctgganttggtccgaccatgccctcctgattatcagctgggaaattggcgagtggaggaacgccccggcatttacgcaacgagcataatgtaaacctttacggttttaaaagctctatagttgggcctaggctctagagatatcattttgttaaggctttgtgtcttttggttttgaatttataatacaaggatctttcttcatctgttcctagtctctacccattctcattcattngcatgtttacttctttttctaaaacggcagattcgatgacgagtcccccgaaggtactaatacctgggacccgtctatcaacttcgagcaagaaatgaaccaaacggaagatgaaggagatgaggatgtgggactt

SEQ ID NO: 63108 - DNA, 478 bp, Glycine max
  unsure (1)..(478): unsure at all n locations
agctngagatgaggaagtgtngaatggtgaaactttctgttnttattgctgaccacagagtggtacctggagatatgtcgcggnggtcaagagaccttgnggacgtcaggtggggtgctattgcccaaaaccaagcttgaccaatcccgacccgacccgggtatagtcggtcagtgagaacctgtgatgtacctaaacaggcgagctcctggcagtcaacagataaaaggaacaaagaccacacagcaaggaggcttgtggtggctggccagctgtgaattctgtgtgatatgtggagtatggcctctggtaatcgattactaagggtgggtaatcgattacaaggctctaaaatgaagacaagaggctaagatggtctctggtaatcgattaccaaggggtgtaatcgattaccaggcttgaaaagaagtaggaaacttanggagccttggaatcgataccagctgtgaatcgatac

SEQ ID NO: 63109 - DNA, 355 bp, Glycine max
atgccttttcactacacgttctaaggcggatgttcaagaccgccttaaaatggaatggccaataacatctaagacgaggtatagtggtaactcatcttcattccgctgataatcatcatatccctatctagccatctctaactctctgtatcgcctgcatactctacctcgacatcttgagagatgattagggctgttatagaatatgaggatgtgaccacccactcgcacgcactctctgtacttgcacatgcaccactctcactaatctgttgtgttgattcatgcgagcatggagctaatagtctatccttacacatgatggagtgtgagaggatgataatagagttgatat

SEQ ID NO: 63110 - DNA, 518 bp, Glycine max
  unsure (1)..(518): unsure at all n locations
gcacctgcggcagcaagctntatacttcattcanagacaatcagcanagatctcatgcttgagcagccatggatacactagttgcaaggtaaaaattatattaattcggattaactagttgaaaggttcatttaacgcattactcactgctattaaataaaactgatttctattcctcaatgcacaacattcgttgaacactatattatttgtaaacaactgagaaactcgtggatcattcaaactttanagctcagaaattataacaaatcttgaagttgttgacagaaaccatcaacacacgtcgactctaaactgtcgcttagtaagaagttcctcagtttggcatgatcttctctcacttttcttccaacctcattcccatcttccatcacagttttcacagctttgcatacacntttctttgtgaacaacccatcttcatcacctttctctacttccaccccaaccttcaactttttactanacattcttgcatttatgacatgatcagcacc

SEQ ID NO: 63111 - DNA, 360 bp, Glycine max
  unsure (1)..(360): unsure at all n locations
acacatgataatagagtacgaaccttgagaacataaccttcctttcctcttcttcgtcatcttcctcagctatgcccataccacagatccaatnggccaatccacatagactgaaactagatgtccctcgatttgacagctctgatccctcacggtgggtattcaaaattacccacttcttcgaataccacgcaacccctgatgctgagaggctcaccgtcgcgtccttttacatggacagaccggcccttgcgtggtttcaatggatggctcgaaaccaccagctcaccacgtggtcggagttccttgcagcaatccaagcacgatntgctcaatcttcatatgaggattcaacacgac

SEQ ID NO: 63112 - DNA, 317 bp, Glycine max
  unsure (1)..(317): unsure at all n locations
agctgtgatggtgttgagaagaaatcacacgggcgtcttcattttatatgnggagaatgcgaatgtatgtatacatggatttgatgatgtcaaaagaagaatcacacaaggctcattntgcttcatgattaatacaagatagtttcaacaaacacagccttgatttaagatttcttcaagatcaagccttgcctcacaatgaaaggggtcaagtcattccaggcacatgtaatcgagtaccaatacatgctatccattacgcatggtttgaaagtgcgcaatcgatcacacatcatatgtgatcgattaccagagac

SEQ ID NO: 63113 - DNA, 302 bp, Glycine max
  unsure (1)..(302): unsure at all n locations
tactcagcttccaataaccaagtaganatagtattactcgaattgacaacattatatatctngagaacaacctccaaaagttgcatgctatagccacttcctgttccaaccatgcaaagcctccctgaagattctgcccagaacccatcaagactaaacattattgaacttgggaaacgcttacggttcttcaatcttttgccacgtgtgaagtttcccacacggtaataggagctggcacttcttattaacaaggtagctccaactttgagtaagccagagacatcagtntcatacacact

SEQ ID NO: 63114 - DNA, 440 bp, Glycine max
  unsure (1)..(440): unsure at all n locations
agcttatccggcctcccataacagggccttatagtttttatctcatgctaaggcaggcaccgcaacagggtcaggcacagcagcatcagcaagagggccagctgcagacgcaccatcgccgcctctacttaaaaatgctaatgtgttctatggtgtctactgaaatgctaaaccccgatccctcgtgatagtctagcctaatcctcatcaagcatctgcctcagatccctcttgttggactaaacttgactagaacctcattaagacaaacatacaaacaactaggttatcgtaccccgatccctcatgataatacgataaactagccctgtcctatcaaattctaagaatcaaaccagtttctagtattgaatgatcctaacaaagcatgcatctacgtgatcaaggcaaagcctactaanatggtgtactgatagcac

SEQ ID NO: 63115 - DNA, 485 bp, Glycine max
  unsure (1)..(485): unsure at all n locations
cgtctaccacacaaccaatgctaaacaccacctntagcacgaactctatctccatccaaggaaggaatctcatagcgaataagcctgtatgattcaccccgaatttcggtgtcatatgctaaacttgctctcatatctactcgataattcaatggtagccataacctctgctaggtttcctcaacctccatttttccgaggatacgacttgaacgcaacatgtgcatatcatggaggagccttggggtattccattgagcactgtatgaccctgaagcataaggtgcaaagtctaattgatgtgggctggctgaaatctgaagagaatcgcttgttgaatcctaacactgacaagcgacaccacacatggngcaaatttgaaagctattgtaaatgtctctaatgactcatcangatcttcaagtttatgccattattgtaaaccataggtacaatgctaaataaaatggataaatctgacatct

SEQ ID NO: 63116 - DNA, 431 bp, Glycine max
  unsure (1)..(431): unsure at all n locations
agctntataagtgcgggtctgggagacgaaggtcatgttgtcgttatatgtgaagatgatgttccaagaactctggatntggtccgaccatgccctcctgatttccagctgggaaattggcgggtggaggaacgccccggcatttacacaacaagcataatgtaaacctttacggttttaaaagctctatagttgggcctaggctttagagttctcattttgttaaggctttgtgtcttttgtctttgagtttataatacaaagatctttcttcatctgttcctgggctctacccattctcattcatttgcatgtttacttctttttctgaaacggcagatccgatgacgagtcccccgaaggtactaatacctgngacccgtctatcaatntcgagcaagaaatgaaccacacggaagatgaaggagatg

SEQ ID NO: 63117 - DNA, 494 bp, Glycine max
tcttatccaaggcgtcatctggtggtgaagctccttcttccatggtttattccttaatggatggcgcctcctctcacctcctttcctttgtcttccgctgcatctccatggtggaaaatcaccattaaaggaccccattgaagctcaaagatccagcctccatataagccccacaagcaagcttccatcaatatatgcatgcaatctacggaggggagcggtgttgcgaagcccaaacccttggtgatatacttcactaaaagcgcagcttcgcaaaagcctggacacccctttgtagccaaacctgttcctttcctgtaccaaaatagccacgcggtcccgtggagatatgcacctccaagggagaaggaagaagaagtcactgacgtcagctcgctgtcagctaaagtaacaaatatcacgggactgagtggtgtgacccgtagtggtcgtgtgttcgcaccttcggacctaccagtccaacccgcggacgt

SEQ ID NO: 63118 - DNA, 346 bp, Glycine max
  unsure (1)..(346): unsure at all n locations
gccacctgcngctgcagcttctacatgctgctggatgctgtaagaacaatgataatattagcattgttttaaganctntattcggctttctgagtgaactgcttacttatcttgcaaggggaatgcatgattatagttcgaaactgtctgactttgagacaactaaggcggatcctactgagcatacaactcatgtgtacactcaagaaatgggtactcaacgatatgcgacaccttaatatgtggcaagtggtgggctttaacctctccgtaatcatcgattggtggttaatctcggatcatcatactgataactgaggtctggcgtgggatgatgatccttatg

SEQ ID NO: 63119 - DNA, 210 bp, Glycine max
tgttcggagaacgcgtttgagaggtgtttattgattcctgatgtgtcttcaactatattgagatggcctacaagaccaagctcaacatggttcagtccagcactgttcacagttaggaaaatgattctgaaacattacatactgaggtagagattgaggataaacatgttgaaacacaagctgttaactggcctctcgatgaagagaaat

SEQ ID NO: 63120 - DNA, 78 bp, Glycine max
  unsure (1)..(78): unsure at all n locations
aacctctaagtcacctgcggcatgaagctagagaagaagttcgatggagganataaagatagagtgtgggggggggga

SEQ ID NO: 63121 - DNA, 287 bp, Glycine max
  unsure (1)..(287): unsure at all n locations
gatctagaagataagagtactccaagtcctcacaacattttttatggatgatacggctcattaaagtatactgggagacaaactcttgtagatctttcccacattgcccttgatcattgaccaaaaactaacacccttctcttctnaccaggattggaaagcttttttcgccttgctttttgagggtgctgataattatagaccatgaatgtcctctatatcagcatataaagagtgggccccctaccctaataataactcccgttgcacctccggtttagaccgcc

SEQ ID NO: 63122 - DNA, 381 bp, Glycine max
  unsure (1)..(381): unsure at all n locations
agcttgagatgaggaagtattgaagggtgatactttctgcttttattgttgaccacagagtggtacctggagatatgtcgcgggggtcaggagaccttgnggacgtcaggtggggtgctattgcccaaaaccaagcttgaccaatcccgacccaacccgggcatagtcggtcagtgagaaactgtgatgtacctaaacaggcgagctcctggcagtcaacagataaaaggaacaaagaccacaaagcanagaggcttgtggtggctggccagctgtgaaacttgattgatatgtgagatattgtctctggtaatcgattaccaagggtgggtaatcgattacaaggcttaaaaatgaagacaggaggctaagatggtctct

SEQ ID NO: 63123 - DNA, 421 bp, Glycine max
  unsure (1)..(421): unsure at all n locations
ctctgtgatgtagttntcgctgacgaaaggatcgaagtgtgtctgttaagaggcaaatntaatcatcctgcttggacgaatgagaaaactgtggcaaatgaagagggtgagaatgacggagaaaccctntctatgactgccattcctacacggtcaaatttcccatcagcctaacaatgtcattactcagccaataacagtccctctcaccgaatcatccacaaaggctatccctaaatcaaccacaaagcctgtctaccgcacttccaataacgaacaccacctttagcacaaaccaaaacaccaaccaagaaatgagatttgcaatgaanaagcctatagaattcaccctaattccggtgtcctatgctgactcgctcccatatccactcgataattcaatggtagccataacccccca

SEQ ID NO: 63124 - DNA, 448 bp, Glycine max
  unsure (1)..(448): unsure at all n locations
agcttgacttgagtcatcaagagattatatatatgttaccatggcatgagtttcattaatcatctatatttcaatctttacaacatcatctctcaacatctttcaatatccttctacataattttctgattcatttctcttcatctttctaaaagtttttgatcaacactttctcttccaagaaaagttctttgttcacaaacttgttctattaatctttttcattgtcttctccctttgccaaaagaacagaaggactaactgcctgaattcttttgtgtctttcttctcctttacaaaagattaaaggactaaccgcctcgagaattctttgattcttcccttcccctcaagcaaaagatttcaaaggactaaccacctgagaattctttgtcccaacacattgganggtatatcctctgtggtacaagtagagggtacatctact

SEQ ID NO: 63125 - DNA, 426 bp, Glycine max
  unsure (1)..(426): unsure at all n locations
tgagatgaggaagtgtagaagggtgaaacttcctgcttttattctttgaccacagagtggtacctggagatatgtcgcgggggtcaggagaccttgnggacgtcaggtggggtgctattgcccaaaaccaagcttgaccaatcccgacccaacccgggcatagtcagtcagtgagaacctgtgatgtacctaagcaggcgagctcctggcagtcaacagataaaaggaacaaagaccacaaagcaaggaggcttgtgtggtggctggccagctgtgaattttgattgatatatgggatatggcctctggtaatcgattaccaagggtgggtaatcgattacaaggcataaaaatgaagacaggagactaagatggtctctggtaatcgattaccaaggggtgtaatcgattaccangcttgaaaac

SEQ ID NO: 63126 - DNA, 462 bp, Glycine max
  unsure (1)..(462): unsure at all n locations
ctttctccctctntccatgggactnttcttcttccttcttctccaccattgttgtccgttgaagctccaaaatccctcctcatttctactccaaattgcaaggagaagccattttcggagtcttggagcacacctctacattgtgggacttcgaatttcaggtatgggtagacttcttctcacatgaaattcgtgggtgttgggtttttgggagttatgatgggtagttntactaggttattgccttagagtaattatttgtgaaggaatttgttgaaatcatgctaaacttgacatgtttgatgtgagccaaattacccattctgatttagggttntatgatgatgctntgtgatatatgaatgctgaaaatgttgatagaaaactggtagagatgatgggaagagttaacttacggttaaatgtgagaatggtagtgatgtgagtggaaaagtgtgagat

SEQ ID NO: 63127 - DNA, 349 bp, Glycine max
  unsure (1)..(349): unsure at all n locations
agcttgacnnttggttagacatgaatgatatatgatttgtgacttataggaattgattcgggcaaaattggatgagggaaagtgtgattttcgaaatctgcacttatgcataattttgctgtcaaaataggtgcagcaggattttggctttgtgcagaacaatgcttgtgtgtggttggctgtggaaagtctagtgcagaatgagttctggatgtttgctagtagatcccaacggtcaaaatgtaggcttatgtactagagacttccagtaaaattctggagtcgatccaacgggtaacgaattggaacgaacgaattcgtactgcggtctttaagtgagaaaagctat

SEQ ID NO: 63128 - DNA, 439 bp, Glycine max
aaattttgtgcaatacacgcgctatggtgcattcaataacgggctaaaatatgttttcgttctttctgtagaatattcaaagtttatttttagtctctgcaaaaaaaaaattatccattgttcatcattgtgaaattaaaatatgcgactctttgattaacaactaagtttgaacgaatataaatctacatggcactttttaatttaatttttaaaatacaattttgggaattaaaaaccaccacgcatttttgaaaagaataagagaaatataattggtggcagttaaaaacgccgcatgtttaatgtaaaaatacaagagtcaaccattgtcttttaactaaacaaccaccacctccaatccctaaatccgagatccccaatccccaaatctaaaatccataacccccgaatcaactataacaatttagaaaacaaa

SEQ ID NO: 63129 - DNA, 397 bp, Glycine max
  unsure (1)..(397): unsure at all n locations
agctngaggtgaggaagngnagaatggtgaaactttctgtctttattngcngaccacagagtggtacctggagatatgtcgcgggggtcacgagaccttgtggacgtcaggtggggtgctattgcccaaaaccaagcttgacaaatcccgacccaacccgggcatagtcagtcagtgagaacctgtgatgtacctaaacaggcgagctcctggcagtcaacagataaaaggaacaaagaccacaaagcacggaggcttgtgtggtggctggccaactgtgaactttgattgatatatgggatatgggctctggtaatcgattaccaagggtgggtaatcgattacaaggcttanaaatgaagacaggaggctcagatagtctctggtaatcgattac

SEQ ID NO: 63130 - DNA, 253 bp, Glycine max
  unsure (1)..(253): unsure at all n locations
tcagctaggatattggtaatgtnttcttactaattatggttattagattttagtattaatttcttttataataaagacacccctcatatattttgtactgtgtggttggtacctgtgatgattgcgaacctttgttcgtggaagcagaatgatagcagtagagtacgagaagagagatccttttgtggagccgccgagccgatgtgatgacgctgggattattttgggagagaagtgtgttttgtgaatcaac

SEQ ID NO: 63131 - DNA, 482 bp, Glycine max
  unsure (1)..(482): unsure at all n locations
agctngaagggtgtgtaacccaccattttcataatagaacactggtaatgtgtctactatcattgttgtcatttctttctccgtcattgagggaaccacttgggctgccaggtccctccacctttgggcgtattctttgaaagatccatgccccctcctgcatatgctctatagttgcatcctatccggagccatatttgaattatactgatactgcctaacgaaggcaaccattatgtccttccaagaatggactcgggaaggttccaagttagtataccagctgacagctgcctcagtaagactttcttggaagagatgtatcagcagtttcccatcttttgcgtatgcccccatcttccgacaatacatctttggatggttcttggggaaagtagtccccttgtacttgtcaaagtccagcaccttgaacttgngaggggtgatgatattgggtactangaacaactcttctatgtaac

SEQ ID NO: 63132 - DNA, 399 bp, Glycine max
agaacttcctggaaggcccaaatgggcttggttgctatttgcaccccctttttactaaatacaccccattgccttttttttgctgattcttttttcataacgttacgaaaacttacgaattacgtaatgatacttgttttccttccgtaatgttacggtaccttatggattacgtaatcatcccttttttgccttccggaatgttacgaaactttacggattgcgcactaacacttccttttaattttcggcatttcaggaaacttcacggattgtgctacaatgctttcttttgactttcgacatgtctcagaacttcacgaattgcctaacgatgggtgccaagtacctcgaagtggtcaaacaagggtcgcatcccaataatggatggtccccgga

SEQ ID NO: 63133 - DNA, 459 bp, Glycine max
  unsure (1)..(459): unsure at all n locations
agctngtacgaatcanatcactcctgcattnnatctctatcatgcattctttctttctttacccactcctcacgtttggttttttagggaaaaacaccataactaaacgcgccacaaggcatgcctatcgcaccagatccaaatatagaatgatgggtgatcgagaggagacacaggaacagatgaaagccgacatgttggctctgaaagaacagatggcctccatgatggaggccatgttaggaatgaggcagctcatagagaanaacgcagccaccgctgccgctgtcagttcgactgccgaagcagacccaactctcttagcaactgcgcaccatccttcctcanacatattangacggggaagggacacactgtggcacgatggcaaccctcacctgngatacaatcgagcggcttacccttatggattgctgccaactactcaccacccgtctt

SEQ ID NO: 63134 - DNA, 136 bp, Glycine max
gctgacgcactgggaccatacatgggacaggggcgtcgtctatttgccaacaagtttcccataccaaatccccataaacccaccatcccctgttcccacctccaactgagctgacgtactcccacgtagcccatat

SEQ ID NO: 63135 - DNA, 495 bp, Glycine max
  unsure (1)..(495): unsure at all n locations
agctnngattgtgagttganntttagcttggtttcttttggttatttctcaactatttaaaagcgaactttcaaagtaaataaccggttgaaaattactcttttgatgattaaccgaggtgacaacataaacgatcagttgaattttattttaatggtgattaaacaagattacaacgcaaatgatcggttgaaattcattttaacattgattaagtgagattacggcttanacgattggtcgaaactcccttaaaacaaagaanaagaacaccgacggtagaagaatgaagatgaagacatacaaagtaagaatggacccctaaaggtgcataaaatgaattcaaagctttgaaattgaaaactaactggtcgaagatcgaagaacggcgaagaacgtccacaaaattgatcacagaaacattacggaagcggctcggccttgattttcttctntttctccttctttcactaatttcagtgaaatatgcttact

SEQ ID NO: 63136 - DNA, 314 bp, Glycine max
  unsure (1)..(314): unsure at all n locations
taagcttgacagtgggtgtttcaccttctcgctaagccaatctgctatcttatcgagcgtccgctaagcgcaacactcctgggctatgcgcgaggaagactctggaagaagatgagcatacaagttcactaagtgcaccacttcatctcactaaccgcactgcttcagttcatccgctaagtgagaaaggcgcgctaagcaaaaaatcactaacgtgcgctaagcgggccatacatgcgctaagcgcacgagcacgaacaaagccacctatttaagcctgaaatcaaattntgtgaagagagtttggactggga

SEQ ID NO: 63137 - DNA, 257 bp, Glycine max
  unsure (1)..(257): unsure at all n locations
agcttcagattcaatttcgagcgtcgcgatgcatctctggacttaatcttacatccgagtagaaacgtatagtactctgaatgtgctgtgagcgttancattcggtctcgagcgtgtagatatgtgacgggactcaatccgacatccgagcaaaaagatactgccgttagaattatcccatagcatcaaaatctagttgggagcgtactaatatattccgggactcgagcacacataggagcaataaagtctttccg

SEQ ID NO: 63138 - DNA, 443 bp, Glycine max
  unsure (1)..(443): unsure at all n locations
ctcaagcttgcatttggaatagcgaaagccgccctccatcattaggatgtgtttctgtttctctaactaacaaatcaaacgtaacacgacaattatagttgctgtttgaatacctcacccactcaagtgtatcacacaattatggtttttctctaatgaaacactcttgccttttaccactctaattccccttgagttcttaggcaattcaacagattatggccactacaaagaacaattcaccaatatgtgtnaggtaaggctagagagacactgaacaggttcacctagaaagaagctatccttgtttgtatgcacaaatgaaggaaatcaaattcagaacttaggaattcaagttaccatccttcatgcaaccaatatattaccttatagagattctcttgttaaagatcttcacgcatgaaccattcagcacaatatta

SEQ ID NO: 63139 - DNA, 497 bp, Glycine max
  unsure (1)..(497): unsure at all n locations
agctntnntttggatctgagtggaatctctaacttgttataatttcttggttgctttgacacacaacactcaacacacaattgttttggtatctcaatttgnggaagaccatgaaccattttcttacttttcaattcacttaaactcttgaagtttagatgaccaaacctgtgatgccacatccagctntcatcacttatagaagcagccaaacaatgaaattttgcaatatgaattccaatcttgaatgttctatttcttgacaaaggagcctttagaatcaacctcctattgctatcaaatatcttcatttgactgtcctccatctgcattgagtagccattttctagcaattgtcccaaactcagcaaattattcttcatattggaaacatacaacacatcattgataaatgagtggttgccatcctttctctgaatcatcacttttccaatgtcttctgcagtacagagctgtatctgcaacttgatcttgtc

SEQ ID NO: 63140 - DNA, 498 bp, Glycine max
  unsure (1)..(498): unsure at all n locations
cttgactggagtcatcaagagattataaatatgtgaccatggcatgagtttcaagaacaatcaattatcatcatcaatcatctttgaatcatctatctttcaatctttttcaacatcatctctcaagcatctttcaatcaatctttcaatatctttctacagaattttctgattcatttctcttcatctttctaagagttttttatcaacactttctcttccaagaaaagttttttgttcaaaaacttgtgttattcatctttttcattctcttctccctttgccaaaagaacgaaggactaaccgcctgaattcttttgtgtctctcttctcccttacaaaagattcanaggactaaccgcctgagaattcttttgattcttcctttccccttaagcaaaagatttcanaggactaaccgcatgagatatcttttgtttcccctcacaaagattcaaaggactaaccgcctgagaattctntgtcccaacacattgg

SEQ ID NO: 63141 - DNA, 461 bp, Glycine max
  unsure (1)..(461): unsure at all n locations
agcttctataatgggacaactagtgattcttgtgacttgtacatgcaagggaggtagagctggacaaaaataaggtgtgggtaaaaccttataaatcacactacattgaacatttgtatatgatattaacaatgacatctattntgtaacctagaatatctaataaaagacacatttaatagcatgtgcaagcaacttatcttaaccaggagcaaggtcacgaaccaaaccaatacacccaaatgcacatagaggagcatggtataatggacctttgaggaaataagttgatagggaattgatcaaataataagcagttaatacaacttcaccacanaattataaaatgatattntcatgtaacaataaatgagcacagactctgaagtttgatcgataagcagttttgataagatggcgattctctcttttttgctgctccctttangtgggctatgtga

SEQ ID NO: 63142 - DNA, 491 bp, Glycine max
  unsure (1)..(491): unsure at all n locations
tgcttctacatagttgtgcagcatcatcaaagttatggtttgtgctcctccgcaacaaagctttgaatctctcccacgtgtcatagagaggtttgtcagatccttgggaaaacatcgcgatggcggattttgcactgataaatcttgatggaggaaagaatctcgctatgaatntatcctccacctcttcccaagtgttgaggcttttatttggatgtgattggagccatgttttcaccttacctaatggaagcttgcttgagaagcttctatggaggttggatccttgagcttcaatgaggtctttcaatggttattttcagccatggagttacagcagaggataaagaagaggtgagaggagacgccatccactaaggaataagccatggaagaagaagcttccccaccaagagagtgtcttggataagaattctagagaggaaacttcactggacgaagagantgagagagagagagagagagaaaaa

SEQ ID NO: 63143 - DNA, 446 bp, Glycine max
  unsure (1)..(446): unsure at all n locations
agctnggtgttataatagtagctcagtanattctntatttctaagtaggttcgcaaatatattaaaggcattttaaagcctggaatgctgatgactgacatatgtgaaacattggagaacactgttcgtaagctaatatcagaggatggccttcaagcaggcattgcattccccacaggatgctctgtaaattggtaacactttatactatggttttctgcttttcccttttgttatgaggcttcttgctctacgggactaaatattaagaatgagcaatgaagggccacaaagagcataagcgtcgtgagaatgctatgctggatgagtgattaaaaaacttcgtaccccattgcccagatgctcttctctatgcgaaggtatggnggagggatgntgtacgcagccttactcttacatatgcaaagaggctgtaatgtatttga

SEQ ID NO: 63144 - DNA, 345 bp, Glycine max
  unsure (1)..(345): unsure at all n locations
ttcatctcttgttagtctgagctatacattattgttgatctatgcactngcncnntcatttctatctgcagatctctctctctctctctctctctctctctctactnggggtgtgtgactcggccttgacgagttatgtccacaggaatttgtagcacatgcttctaccgtcaattgcctcaagattggacggaaatcatccacggttcttgtcactggaggtgaagatcacaaggtcaatctttgtgctattggcaaacctaatgccatactggttccgtctcctctactcttctctggacaaagagtttatgtcattcattgttcgtatgcattggtttcttt

SEQ ID NO: 63145 - DNA, 359 bp, Glycine max
  unsure (1)..(359): unsure at all n locations
gcttgtaaaaaacaagtcccttgtctatatttatatcattccgngntaatcttaaatacttggtgatatggcgtgctagatggtatatcacttcccttttgatataagagtttgtaaatttaagcaaaaggaactatgtggggaagcaaacattaccaaccaaatctttgtgtccacgctcgttccgcgttgaaccaaatagaaaagatatggcagacaacggaaaggccagaacacccataagccaaattcctcccaccacaatcgcacattctaatagtnctatagatccatgattacgcatgttatctttgagttgataggatatgatttgcaaagtcaagtcatgacatatctgt

SEQ ID NO: 63146 - DNA, 207 bp, Glycine max
  unsure (1)..(207): unsure at all n locations
actcagctaggagctgaacatgggagagaacatggagagcanggaagattgtgtgagttacatcatactgggctttcaacaataattgacagcaacaatatgttgcaacaaaccattntggaaacaacaaaaacatagcctgcagaataacccattcagggagaacgaagaaaggcgaataagccagccagaacaccccattaacac

SEQ ID NO: 63147 - DNA, 461 bp, Glycine max
  unsure (1)..(461): unsure at all n locations
agcttgaagggaagagagagaccaatcactatcacatatcatggtcttgaaagaggagttagctgcttgctcaaggtccaaaagaaacttgtctcagcgtttatgtgagacagagaccagcatgttagccatcgtcagcaagtaccaagaagaactaaatctagccatagcccacgagcataaagtggcggacgagtatgcccaagtgtacgcggaaaaggaggctagaggaagggtgtcgcaacctacccttcggcgggagggcgacgcgtgactcgcgggtgcgtgttccaagaaaggaatatgcacggagtcgccaccaatgtttatttgaggaaaacgtcgganaaaccgganaaagacgtgatctacaaactctatagtgaaaggtttgggagcctttaattaaatgtgcagacatgaacttcaattttatggttcctcttacgtcgtctattctt

SEQ ID NO: 63148 - DNA, 494 bp, Glycine max
  unsure (1)..(494): unsure at all n locations
actcagctaccaagtnntttttatagtttaagttgaacattttatctaatatgcttgaacttgacctttatagtaaacaagtcaaatcgagccgaaccttaaatagaccgagccaaagacctttgacaagctgttcgactcatccccatccctaaaaacaatgacaatccaatgcagtaacaattggtatattgatatattgacaaccagtaacattcatttatgaaatcctcatacttatagctggtaagacgaacaattattaaccttacacaattctctgtatattgaagaaatgctntaggatgtataaaggattcaaatatcattttcaagctgtgctttatgcacctacactaaaaacagaatagttgatatcacttataatgttcaaaaggtataattgcaaaataacaattgatgtatgattaagatatgcttcaacctgtaattntctcanagcatgtaacatntatacaaagttaacaagtctc

SEQ ID NO: 63149 - DNA, 469 bp, Glycine max
  unsure (1)..(469): unsure at all n locations
agctnttccctggagagctcaagtctaagtgtgtctattcccttcttaatcaaagacgtgaagccttatggagtagttgacctgatggaaccctattctactgacccggagcgcaacttgatagtgaatggctagaggttgaaagtcttacaatggtggcgatattgagagagtgaccatcatcatccacctccatgatccatgagggtgttttacgtcaagctagtgacgttaaagaagcgcttactatgaggcaacccangatttctacccttattcttctattatattaattcatgtggctttcatgtgtgcttgtgaattcctatgttggtggatattgattaattntggctacactttgactttcanaaatggtgtgagcttgttgctgctatagtgtgatatctgctcaatgttgggtatgctctacatgagtaatgtggtgtagttggatagtgtctagtgg

SEQ ID NO: 63150 - DNA, 467 bp, Glycine max
gagaaaccttctatgaatctctctgttatatcccgctatacccagaaaactcataatctcaaaaatagacttaggactctcccactttaaaacaacttctatcttagagggatctacagttattctaccttgagatatcacctgtcttatgaaactaactttctttaaccaaaactcacacttggacaatttagcataaagttgttggtccctaagggtttgcagcacaatcctcaagttctcctcatgttcttctttagtcttggagtgtaccaaaatatcacctatgaatactaccacaaaactatcaaggtacgggtgaaagactctattcatgtaatccataaacacaccacggcattagtcacatcgaagggcatgactagatacttgtagtgaccataacgggtcctaaaggcagtcttcgaaatatgctcagatttcacttagatctgatggtaagctga

SEQ ID NO: 63151 - DNA, 377 bp, Glycine max
  unsure (1)..(377): unsure at all n locations
agctnggacaatggcagggcaatcttggatgaatcttctatataaaccaacatgtccaagaaaagagcatactttctgcacaaaagtggggtaaggaagaaaagaaataacatcgatcttggccttatcgacctcaatacctctactagagaccaaatgccctaagactataccctcatggaccagaaaatgacattttacaaagttaagaacacagttagtctcaatgcatcgatcaagaactctagagaggctatccaaacatgcatcaaagaaggaaccatanagagtgaaatcatccataaacacctccatgtaaatctctaataaatcaaaanaaggtactcaccatgcacctttgaaagatgccaggagtg

SEQ ID NO: 63152 - DNA, 498 bp, Glycine max
  unsure (1)..(498): unsure at all n locations
actcagcttctaaggaagctacatgaagttgtctcggtaaaagcactgcctatccttcgttaatcgttggatcttctcgaaatttggtctggagcttcacagaacacttgtccacgatctgaccatatggatctttgacaagacatctggagtgagggcgacgtttccgtttccgagagctttagtcacttgtgcgttttgagccttgtagtccaattagctttggaaaaatgccatttcttctccttctttcttccaaaaccatttccaatgttccaagcactttctccgtcacccacagccaccagtagccaccacaaaccgccattgttctccgttgaaaccccacaccgagaggaacccttcaaccgaagcagaatcttccaacttgtcttgcgattntggttgagagcgaagcccgatctaaccttttgttttccttcaaggtaaccatggttctacgcttatntcttgttagtttcatcttacctntacata

SEQ ID NO: 63153 - DNA, 368 bp, Glycine max
  unsure (1)..(368): unsure at all n locations
ggagcatganattgaaggaataaacgagggagagaagtggaactttgaagcatgtctcacaagactctcattcatgaaagttacaacaagtgttacacatgcgtctatatatagactaggtagcttccttgagaagctctcttgagaaaacttccttgagaagcttctttgagagaacttccttgagaagctagagcttagctacatacacccctctcataactaagctcacctgcttgagaagcgtccttaagaagattcctaaagaagctagagcttagctacacatacctctctaatagctaagctcacctccttgagatgagaagctagagcttagctacacaccctctatggtaactaagctc

SEQ ID NO: 63154 - DNA, 481 bp, Glycine max
  unsure (1)..(481): unsure at all n locations
ttttgtggataataagtcagctataagcctatcatagaatccattctctcatggtagaagcaaacacatagaaacaaggtttcactatcttanggatcaagtgaacaaagagaaattggaagtggagtattgctgcacatttgatcaacttgctgataatttaaccaaacccctcaaaggggagagggttaaaatgttaagggacagaattggcttgatggacttatgagatcagaattaagggaaggtgtgagagtttaattctgttttggctctgtatataagagagagtaacaaaatcttaaaattctggtataagtgctagcctaagagtgaagggctgttacttctgttttgcttgttaaaagggcaatcatacattcttaataaagcgtggttgtcattctatcattttcagtctctagtgctattcctagtgtgtatgcaattctgtgcttagaaaacagtgagtgatacacaa

SEQ ID NO: 63155 - DNA, 430 bp, Glycine max
  unsure (1)..(430): unsure at all n locations
agtacttgttatggaatgtgttatggaatntcgttttcaatgacntattgttatggaatcaccatcgcggacaccataataactatttttatgttgcgcatcaaactagaataataaataaagtcgtaaagaaaaattaaagtagacaaatgaaaataagtaatggtactgactaacgacaaacaccattttcaacttctaaatgaaaaattaaagtaggtttagggtttatgagttatgggttaaagttatgagttattggttagggttatgagttacgtttaagggtcatgggttagtgttatgaagttgggttatgttctatgagttagggttagggtttagtagttagggtttatgacttaagttatgggttaggtttacgacttangggttatgagttangtttaagggttatgggtagtggttg

SEQ ID NO: 63156 - DNA, 418 bp, Glycine max
  unsure (1)..(418): unsure at all n locations
cgttaaagaactgagggaaaatcaagaacaagcttgtacgcacatctgttcgcgtgtatgatatccactccacaaggtttgaagtagaggagagcttcaaccctataacgcaacgtggcaaacaaaagtgggcagtaaacttgaatggtcgtcattgtcaatgcggaaggtattctgcgcttcactatccatgttcacacattattgcaacttgtggttacgtgagcatgaactactaccaatatatagatggtggttatacaaaccaacacatcttaaaagcttactccgcacaatggtggcctcttgggaatgaagcggntattcctccttctgatgacgcatggacacttatccctgacccaactacaattcgtgcgaaaggtcggnccaaatcaacaaggataagaaatgagat

SEQ ID NO: 63157 - DNA, 447 bp, Glycine max
  unsure (1)..(447): unsure at all n locations
agcttctagccaaatggacttaccttgaattaatttctttgatatccnctttgagccttgtttccctttccttgttttgaagctcactacaagccttaagtgaaaaaccatgatattaccatatccttaagggaatttggagctntggaattgttttgggaataagtgtggggggtttttgtttcattggacaacttgttttgttggctatgcttcatgatgtattttgggccatacttgatgtacattgtatattggttaaatgttggacatgctgaatgaaatgttgtttctcanaggccaaagagtaaaaaaaaaaaaaaaaaaaattcaaaanaaaaaattctnatnaaaaaaaaaaaagaanaagaanaagaanagccctatagttgagtgaataagatcttaaatggcacaagaatgatgaaactctnggctctactcttc

SEQ ID NO: 63158 - DNA, 299 bp, Glycine max
  unsure (1)..(299): unsure at all n locations
ccacactngataatggagaacacatgaacagcgctaggcaatgtcattcatggtgctccgaacaaaggtggagtatggaggattgccttgagggtccgcacttaggcaatcatgaaacacagctccaaactcgaaagtggaggacacatgaacagccctaaacaagaacattcatgtggctccggaaaaggatgagaatggaggatngccttgagggtcctctctttgcaatcatggagcacaactncaaactcaaaaagtggaggacacatgaacagccctaagcaataacattcatg

SEQ ID NO: 63159 - DNA, 525 bp, Glycine max
  unsure (1)..(525): unsure at all n locations
agtcacctgccgcatgcaagctnggagacatgcacaaaagtaccatcccaattgttgttggtgttcgtgggactntgcattgtgggcctccacccatgccaatatcaatcagcagaatttcaaaattaatcatgcaaaaaccacattatttcttgatgcagaaataaatatataaaacagtacacacttganaattgagctttcgctatataaattcatgtgtagcagggtttggacatatttctataacattgagctaaataaatacccaaaacagacaagacactagtaagcacaaataaatgtgtggaacaaaatagttaccaggtacaagcctccattgccaattagcatgattaatagtggttcatatagtcagacgaagaacaattccctagtctagctttaaataactcccgtaatgctgcacatgcaaaagaaagtagtaaataaaaatataaactagaatattaaaacttttatttaanaatggtaatattcagcaatacanaatagatgtggata

SEQ ID NO: 63160 - DNA, 455 bp, Glycine max
  unsure (1)..(455): unsure at all n locations
gctggatgcggaatcttctcctgatgaaagtttgctgtctctctctcttactcgactatgcatccgtcattgtctaaatctaaaaaaactggactacaaggggcggctctgtcagctctcctctctcaaggaattgtttcttgatgactgccccaacctccaacagctaccagaggagggtcttcccaaatccatttcatatcttgaaattcaaggctgcaccgacctcaagcagcgttgccagaacccaagaggcaaagactggccaaagattgctcacattacaacgtgcattgntcgnatgatattcatgattatttgtaagaattatcatgacactttctcttcttagttgatctgaatgatcatgaaccttctacaccatttgtgctcgaagcaaaacaataaataattgttttcttatacttacatacgtatctatgaatatgaaatta

SEQ ID NO: 63161 - DNA, 395 bp, Glycine max
  unsure (1)..(395): unsure at all n locations
agcttatcctagagatgctaggaggacttacagacgatgagatgatggagttcttcacctganatcgtggattgaagccacgacagaagttgagcctgttgttcccaaagcaaaaactcagaagagacatttccagtattgcgatctgccaaagaagcatatcgcggaggaatttgtggatttgtgaggagatagcgaagacgatggactttgatcacaagctcaacctgttgataccataacaaatagtgggagttcatgagtatttccgagatcgaatgagagaaatctttcgctgttctatgaaagaagtggcggcgaccaatgtagcagcatctacattcaccggtgtctcattatgcaccgcaacttcagtggtcaccggcggcggcgga

SEQ ID NO: 63162 - DNA, 486 bp, Glycine max
  unsure (1)..(486): unsure at all n locations
ctgtggggtgatactgaccttgctngngaatggcagtctgctgttaatgttgctgtggggttgttgtgtgtttggaataacaataatttccaggttgaccttatagtctctgaaaagggcttcattatgctgggtggggtttggttgcctgatatgcaaagggtagttgtggtcaatatttatgctccctatgatatcgtgggtaaaaggcggctgtggcaggacttgagtagaaggaagatgcaatcctaagacctgtgttggtgtcttgttggggattttaactgtatcaggcatccctcagaaagaatggggagcaattgtggcaattcagagtccaacattatatctgaattcaatgatcggcttgctgttatggaggttgatgatattccttgtgcgggtaagctagtcacctgngttaggcctaatggttcttgttaaagcaaactggatagagttgtagtctctgatggttgctctcta

SEQ ID NO: 63163 - DNA, 417 bp, Glycine max
  unsure (1)..(417): unsure at all n locations
atacttaagtcacctgccgcatgcaagcttctcacaagctaaaatcaatntacgtaccaacttctttgtatcaagagaaacgaatgcggatcttgtaccctccttccaacgaatccaacccctttaagatcctgttgggggtagtacaccacattgttcctaggcctacttgacataaacgcaaacacaatcataaataaagataaatttgttagtactgtacttttttattgtaaaaataaaaccctaactactggatctacatcatcaaggcggccacaacaacgaatgcaatggcgacaacagatccagaggtggagactctgcanaggtgggcgtggctgttggggccaagattggtatgcgtccgcataagaggtggttggaggagagactttggctgcgatcgcttgtgac

SEQ ID NO: 63164 - DNA, 479 bp, Glycine max
  unsure (1)..(479): unsure at all n locations
gccccatcttctctaacatctccaccacatcgtaggtgttgtcccaacttatgtatagctgttaggcgatggttcctgagaagaaccttcagaactcccctgaattgagctcaaagttgacgagggcgttgactggggataactaactgagtcccatagcttcagcagaagaaagaaataacagcaaaaaaaaaaaaaaaaacttgataaggccatagctagaaaactaagggaattaaaaaatgcaaaaaaaaaaaaaggttttaaatattgacacggtggaatagtatagaagaataaacaaacaagtttattattaccgattccagaggatcggaacctatgcttaaggaatcgaatntggtgttgtcttgaagcatgaagtgaggcatgtctgagacaagaatgtcttgagagagtgatcgaaattcacggngaatgagcagctcctgtggctttaaatcatgtccgngtatgtt

SEQ ID NO: 63165 - DNA, 353 bp, Glycine max
  unsure (1)..(353): unsure at all n locations
cggctcattcttcagtccgaacttaatactgtttctttaaaataataaaagtntattgcgaggttgggagttaaagcggtcagcactaatagaaactaatcttattcatacaccttggtgacagaagtatttctttataatctcgtatcttatatctacaagacaatacaattaggtgcgtaatactgctatgagacaattattaaacattaagcattacaaatcgatggtggtgtttctcaacgagggaataactagacacgtttgtaccagaagaaaaggactagactggctactnttttcccttcaattctagctatcacaatgattcaatgtcatgctattatttatct

SEQ ID NO: 63166 - DNA, 388 bp, Glycine max
  unsure (1)..(388): unsure at all n locations
ctaagctcgaactagttgtgggcgtttacatgcccaactcccttgagtgacatttgtattganttttatcttaggtgtcgcatcggagtacatttgaaatttgcttcgcattgtgcatcatcatattgtgtgaagaaaagtttctaaggtagaaaaatttcttcaaaggaaaaaactctctgtcatcgattacaacaagctatttgaagcttgtagagttaagtcccgtatcgatttaatcaattactgatatctcgtaatcgattacattggtgggtgagacaatgactgatttactcacgagtctctactttaatcgattaccaagtgaattagaatactgagtaaaacctatagaggattacaatacttggtgtgagggctcgtg

SEQ ID NO: 63167 - DNA, 436 bp, Glycine max
gcaagcttataagaacagaatagccttaatagattctatattgcatgtgaactaggacgcatcaacaagaatcaagccaatgctattgtgcatgcaatcaatggggcagaacacaccacatgattataatgatggacggctcagattctcacaaaggtaaaatcatcactttcaaattgagctttcaaaactatcatgacgtgtagagaagaatcaaagatttcaagtcacagaacgtcaagaacttctatattcgaaacaattacccatttcttgaacatatcctatgattcaaagaagaacatgctaagtcgtacgtgcacacaatattgacccaaaatattaaactgataatccgacgaaactaacaacattaacatatttacacaactatcaacataacctgaccaaccaaactagcagaaccaaagaacac

SEQ ID NO: 63168 - DNA, 383 bp, Glycine max
tgcactcgtgggagagtcctatagcttgatatgaattcaagacattctgatgagcttctattgtgtgacttgacatgaatgtgttctctagaaatcattatatcatctcataaagaaaagacatcttcatattagctgcaacaatccatttatggaaatgaaaaaacaaaccataaatgtaaatgaagatgagagatgtttatatataaaataaaatattactggtacaaggagttacttcgatggtgtaagaaaaaaaaacacaagaatagtctttgtgaaattaaacgtattagttctcggttatcaaatccttcttattaatcatatgtcaaaagctttggtgttccctctaagcctgtaaatttctttgctggaactct

SEQ ID NO: 63169 - DNA, 418 bp, Glycine max
  unsure (1)..(418): unsure at all n locations
agcttgtcgatggtaggtagagggaacctatccttgtctatgatagtgtttaaggggcggtaatctacgcagaactgccatgtgtcgtccttctttntaacaagcaacactagtgaagagtatggactatggctgggtcaaatggggttgctttgtatcatatcctcaacttgcctcttgatttcgtgcttctagaaatatggatacctatatggtctgacattcataggttgggagttcaagacaagatgaatagtgtgatcactgggtcgaggaagaggaagggaactatgttgttggaaaatangtgagtaacggctgagaagggaacggagttttggcagagttggcatggtggaggtgccggaagacgtggtcatgtcactaagatgaatgtgtgaaaaggaagtcacgtgat

SEQ ID NO: 63170 - DNA, 480 bp, Glycine max
  unsure (1)..(480): unsure at all n locations
cagaatctgtcacccagagattctgcttccttttgtgaatactnntgccaagaggttggataactgggactgagacgtcatcatgagagagagaagcaatggttgcaattgggatttggtcaattttgaaagcagggatttcaggaatggagtaactgagaggagggccattatacaccacagcaagggagtactcatagctgcttaagctatcttcagtttccacagtaacagtaggcacagaagaaggccttaactttctcacaagagaagccatttcatgcagtccaaattgaagccaaaacccaaaataaataccacagtactcaccaactcatcatctcacaagaatccattctgaggganaaacccatgatgcacaatacggagaaatatcagcaccccatgaagganaaacatggaaacaaagcctcagaacttgaatacaaaggctgcagatatattgggaaagagagaatt

SEQ ID NO: 63171 - DNA, 475 bp, Glycine max
  unsure (1)..(475): unsure at all n locations
agcttcttgagatgcatttcagtgatctctctataatctttggtgaaatcaactatctcattagatacatcgacattgaaatagtcaatgagtcataaggcaagcacaacatacgaaaattcataatccactaaccaacgactcttcatcatgatgtcttcaattagaagtacccaattcatcttaatactagatttaagaccatatacaatctacaaatcatcatcatttacctgcacatgattacttgacctcagagtgagaatataagttgtgaggtacacgagcattctgtcttctgttgttagaccacctacactngggtgattcctcacataccttgttgtgtcaagaagcattcccttgtaggcttgcattttatcatacccatcaacagattcttcaaatttgggacttccccatgtcacgtaggctactgcttcaacttatcgtgataccattctgctcattactg

SEQ ID NO: 63172 - DNA, 488 bp, Glycine max
  unsure (1)..(488): unsure at all n locations
ctaatggtttaaattatacaaactgtataaagtaaacaaatatcttaacttgtaataaccacaaaacattntgcaggtatgttggtcttaaggcatgcatcactccattacctaataatggatatggagcaaatgttacagagtggcctttgcggcttcatcaaccaccagacaggctccatagcatccaattggatgccattatatccagagatgaactcttgagggctgactcaaaatattggtttgaaataatagaaagttatgtacgggctttccgttgggaggattacaacttgagaaatgtaatggacatgagggcaggatttggagggtatgagagtattacatttcttgctttctttntctgttatatattacatttgtcggctattaggtttctgtagaatgattgtctaatgtatcgtgtatccgcgtgtgtattatcgtcgtgataactgcagagttgctgctgcgctgcatgatct

SEQ ID NO: 63173 - DNA, 494 bp, Glycine max
  unsure (1)..(494): unsure at all n locations
aagcntttaacccctntaaatgataggctcagaatgtagaataagaagccgcaatcaatttaataatgttctttaaacatgcaagacaaaattgattgcaataaaataaatgagataagggaagagagaaatgcaaactcgatttatactggttcggccactccccgtgcctacgtccagtcctcaagcaacccacttgaggttttccattctctttgtaaaatccttttacaaagtctgaaccacacaaggacaacctatcccttgtgttcaggaatccttacaacttaagagaccctcagtcccttaatcaatctctttgattaagaagaagaagaagaattctctctttanaagaagaatattacaattgaagttcatggatgaaatcttaatggaattgcaaagtgttgcccaagagttgttgggagaagcattggcaatgaagttctcttggaatacctctctctttcttttgaagtagacacacactt

SEQ ID NO: 63174 - DNA, 400 bp, Glycine max
  unsure (1)..(400): unsure at all n locations
ggcanactgtgcctccgaccgaacaccgtcgggtttctattctgtcccaagtttatcgngggctgaagcactggttccgcttccctaactgcattggaggcggttgccgtggcattatcctctagagttttctggagttttagcatggcctccgtgatagaagccatttgatcttttaaggccgatagatcggccttcatctgctcttgcacgccctcttcattatccatttttctggattgagtgttataggggtgcctttgtgcattcttagttatggtgaactccctaaagaaacatacaacggtgagtatgccaccaaaacatgaatatgcaaatgaatgatcggagcacttggatccaccccaagggttttttagataatgtgatgagttcagaa

SEQ ID NO: 63175 - DNA, 428 bp, Glycine max
  unsure (1)..(428): unsure at all n locations
agcttctgcatatgttatggagtttcatgccattgtctctgctagttgcaaatgccggaaatatctacttggccataaatttacgatattcactgatcattgtagtcttcgagagctcatgtctcaaataatacagaccccgaaacaacaattctatctagccaagctgcagggatatgattacgatatccagtataagaccagagtttcaaatacagtcgtggattccctcttgcactgngatacctcacctccaagccattattctgtgcttatgatccctcatcttgatttcatgactcagttgaatggaacattattagctagttcagagtttcagaagcaacgagaagccatattatctcacccggaagcctaccctagtttctccatctcagacgatcttatcatcttcaagggcgcaatct

SEQ ID NO: 63176 - DNA, 462 bp, Glycine max
  unsure (1)..(462): unsure at all n locations
cgcactgattaatgttcacgaaattgggttaactggtgaagggttaactgccagganaccacattataaacgaaacctcaaagagagttgggcttcgtcctcaaaaggaaacaacaccagaatatttagccttccatagattcaaacagaaaacgtaaatgaaacatgaagcagaaacgtaaatgaaacaaaaacgtcaatgaaacagaaacgtaaatgagacaaaaacgaaaatgaaaacagaaacgtaaatgaaagtagaagaagaaacaagaacaaaattgtaattagaagcagaaaatggaaaattgcattacgtgaacagtagcatccaagcagaaaaacgtaaaaccctaaacaaagctctgaataatgaatagcataacagaatgtcttgcacgaatcccaaggctgctatntaaaaagagtcactcanagtcactgggccctattacaatactc

SEQ ID NO: 63177 - DNA, 476 bp, Glycine max
  unsure (1)..(476): unsure at all n locations
agcttgagggtgcgcagcccaccatctnttcatagtatagtaccgataatgtgtctaccatcacgattatcgtctccctttccattattgggggtaccacctgagccgccagatccctccaccttttgggcatgttctttgaatgatccgtccccctttttgcacatgttctgtagttgcatcctatccggaaccatatcaaattttgtactgatactgcctaacaaaggcaaccattaggtccttccaagaatggactcgggaaggttccaagttagtgtaccaggtaacagctaccccagtaagactntcttggaaggaatgtatcagcaattcctcatcttttgcgtattcccccatcttctgacaatacatctttagatggttcttgagacaagtagtccccttgtacttgtcaaagtccagcaccttgaactngggaatgaaccatgttgggtattangaacaacttttct

SEQ ID NO: 63178 - DNA, 469 bp, Glycine max
  unsure (1)..(469): unsure at all n locations
ttactatgcagagaatatccaagaaaaataccttcatctgacttatcatcaaattttcctaagttatcttttccattattcaatacaaaacatttacaaccaaagatatgaagatgtgagatgtttggttttctgccattgaacaattcatatggagttttctttaaaatgggtcttattaaagccctatttaaaatgtagcatgcagtattaacggcttcagcccaaaagtattttggaagaggagtatcatttaataaagttctagcaatctcttccaaagatctatttttcctttcaaccacaccattttgttgaggggttcttggtgcagaaaagttatgctcaatcccatgcttatcacaaaataactcanattctttattntcaaactcacccncatgatcactcctaatagatataatcttgagattttcttatttgaatgattttgcaagtttttaaatgc

SEQ ID NO: 63179 - DNA, 466 bp, Glycine max
  unsure (1)..(466): unsure at all n locations
agcttaacatcagaccacttccagggtgctggaactatcttacatggacttgatggngcctatgcaagttgaaagccttggaggaaagaggtatgcctatgttgttgtggatgatttctccagatttacctgggtcaactttatcagagagaaaacagacacctttgaagtattcaaagagttgagtctaagacttcaaagagaaaaagactgtgtcatcaagagaattaggagtgaccatggcagagagtttgaaaacagcaagtntactgaattcttcacatctgaaggcatcactcatgagttctctgcagccatcacacctcaacaaaatggcatagttgaaaggaaaaacagaacattgcaagaagctgctagggtcatgcttcatgccaaagaaacttcctataatctctgggctgaagccatgaacacagcatgctatatccacaacagagtcacactt

SEQ ID NO: 63180 - DNA, 466 bp, Glycine max
  unsure (1)..(466): unsure at all n locations
ctaagcttctggaggatactcntagttgcttaccaaccatgcaatgagaacatttctccttatatgcattcttcagtcctggaagcatatccttcttgactaaacaatctaaccccttctcactgatatgactaagctnttggtgccacaaagatgcctccatatctagagcattcacactatctctagcaaccaaagcttttgtccaatacaacttcaaaattttctcccccttggccacaaccaagttacccttggtgagtttccactttccagaaccaaagtggttatcataaccagcatcatcaagtaccagcacagagatcaaattaaagcggacatttggagcatgtttcactcctctaagtagcaactgcattcccatgttggtgtgaaacaaacatcaccaacaccaatcaccttggacacaccatcattacccatcttcaagacttcaaaatcacct

SEQ ID NO: 63181 - DNA, 434 bp, Glycine max
  unsure (1)..(434): unsure at all n locations
agctttcaatgagtataggatgaatgaagggcttatttatatgtccatggcaggtataatgggtggtgtgttctctaaagttggtttggttgatgaattggtgaaactcttacaagacatgaaagcagaaggaacaagactagatcagaggctgtaccaatctgctttgaatgcttttaaagatgccaggttgcaaatttaggaaaggtggatcaaagagagcttttttgtgacatagtgttgtttcaattctgaaaatagtggccaaatgtgaagctganatattcaaaaccggtgagttatttgacgcttgcttcttcaggcacttaagggtgacaaaaatatctatcatagatatatatcatgtatatgttttggtgatgaaaggggtgttcttgtacaatttttagctttataccctttctattgtatgc

SEQ ID NO: 63182 - DNA, 247 bp, Glycine max
ggctgttatgcttacgtgccaagagaagggcatgcatactatgctggtacctctccatctggatgggcatctctcccagatctaaagcgtctgcgcatcacctcatgaaaccattgggcatcttatcacatggaaacatacatatgtgatatgggatggatagcacagattcatttagtaattgattagcttgccaccccagccaagaccaatgtactatatagggcatacattaccaagcacgtct

SEQ ID NO: 63183 - DNA, 471 bp, Glycine max
  unsure (1)..(471): unsure at all n locations
agcttattggtcatatgatngctacatgcaagaggtgtgtgcattagcctatgcatggagtagaggaggataggcaacaaaaggttttcaagtatgtgttgtaatgcccaaatgaacctttcttggaagatgcacccgcgagccccgcgtcgccctcccgccgaagggtaggttgcgacagttggtggctccactcgggacaatttttagagagttaggccaatcaatcagtgtgctttccttaccacgacttcccttttgttctttatctttgtctttctccttatgttcttgcgtatataaactcttttgatgcttttagtgtgttttaaaatgtatgcatgaggtaaatatttattcatttgatgcacacaaacaccaacactatttgcacacacggtgagttgaanaagggccctatacccgggtccatgggaacttaaggagtggaggtgaatctgtgatcatgct

SEQ ID NO: 63184 - DNA, 476 bp, Glycine max
  unsure (1)..(476): unsure at all n locations
tctagccaaatggacttaccttgacttaattcctgtgatagcccttctgagccttgtttccctttccttggattgaagctcactacaagccttaagtgaaaaaccatgatatcactatatccttaaggaattttggagctttggaattgttttgggaataagtgtgggggattttgtttcattggataacatgttttgttggccatgcttcattatatattntgagccatacttgatacacattgcatattggttaaatgttggacatgctgaatatgatgttgtttctcaaaaggctacagagaaaacaatattataaaacaaagtcgataagagaaacagtaaagttgagtgaatacgaaaagaatgatgagactctcggttctactctttatgtataaactttatctttacttctctgtattatcttatggtttcttaatatgcacttattccccatntctcctctattcctt

SEQ ID NO: 63185 - DNA, 439 bp, Glycine max
  unsure (1)..(439): unsure at all n locations
agctngcgagcaagccttcttaagaaaactatcgcgactccactgatcttgagtcgaccaaagtcaggagtacccttgcacctttacctctcagttgcgtaagaggccatcagttatgcctttgtctatgaagagcgaaaacaccaaattcccatttgattcattagtcgaatccttcatgatgctgagaaatgataccagatagagaaggtagcattggcactcaacctcggcccgacacctcagtctgtatttcctaagtcaccaagttgtagtaaagacggaacaccccatcaagcaggtgttgcaaaagcctgagttggcaagaaggatggtagcatggtctgtagaactgttagagtttgacctcaaatatgagccccacagccccgtgaaaacctagttcatggcagactttctagcagaaattactgggacg

SEQ ID NO: 63186 - DNA, 467 bp, Glycine max
  unsure (1)..(467): unsure at all n locations
ctaagctggcttatttccttattagcaatttcctagtgagtttctttcttaattattcataatgaccacttaggttctgtccttaataatcctgagtcctcaattagctctgatttccttaattagttcgctctcttgactgtattctaatcactaaacatcataaattcattactgttaatattctctacacaaaacttaaatgagatcaatgtcataattattttctcaaaaaggaagaattatgagacaatttttacaaatttctatatatattaaccccaatatatatacttaattagcagntatcatcactcttctctatgtatatgttgttcaacgtcgcaatttttatgcaatgtgatacgttaccttcatacttacactctaacaataatcataaattattttaaaattgaaagagttattaagcactctaatttttatgtcatgtgtattggatatct

SEQ ID NO: 63187 - DNA, 436 bp, Glycine max
  unsure (1)..(436): unsure at all n locations
agcttgagccaaatcctgagtaccacaatccttgtatcaggtgagaatgccaatccttaccctctgaagcanaagaaagaagagaacgaaaatttccactcaaaggataaaggagaacgaaaatttccaatctaagacgaagcaaataacgagagaatgaaaatttccaatcaaaggaaaaaagagaggaaaggagattcccaatctaagagtgggagaaagcaaaacgaaaagatagagaattcccaatcacagaatgggagagagaacctagagaagttcaaaagaagagagttcctgatcaaagaaactataagagatgtgcagaaagatcttctgaccagatgatatctgaactatacagaattgtcccagatgaacaagagacagaaaaggaaaccatgacctataagtggtcttctctctttgattacca

SEQ ID NO: 63188 - DNA, 408 bp, Glycine max
cttagatggaattgcaatgttccaatagttgttttaaatgtgtgtttcgattacaatatattggtaatcaattaccagtgtatctgaacgttgaaattcaaattcaattgtgaagagtcacatcttttcataaaatgctttgtgtaacggattacatggttttggtaatcgattaccagcgacaagttgtgaataaaaagtcaagagatgtaactattccaatggtttttaggttctctcaaggttataactcttccaatggttttcttgaccagacatgaagagtttataaaagcaagaccttgattttcattttaataactctttcataactttttgaacgtctatttgaacttcttcttcttcttcctttgccaaaagctttctaagttgtctagtatgcaaacc

SEQ ID NO: 63189 - DNA, 389 bp, Glycine max
  unsure (1)..(389): unsure at all n locations
agcttctagccaaatggacttaccttgaattatatttttcgatatcccctctgagcctatgttcccctttctttgttgtgaagctcattacaagccttaagtgaaaaaccatgatatcacctcacccttaaggaatattggagctctggaattgttttgggaataagtgtgggggggtatgtttcattggaagatatgattgttggccatgcttaatgttttattttggccatgcttgatgtatctatatattgcctagctcttgctntaatcttcaaattcgttcttcaaaaaaaaaaatcaaaagaaaaattcaattgctgcagattcgtactgtttataacaacggaatataaagaatgatgaatagaagtgaagttgaataaatg

SEQ ID NO: 63190 - DNA, 492 bp, Glycine max
  unsure (1)..(492): unsure at all n locations
tgccacccagctcgcccaggcgagcaaggtggcttcctccagaatcaacatccttctggagggcccaagggggcctggttgctatntgcacccncatttttactaaatacaccccctgcccttttttttgtgattctttttccgtaatgttacgaaactttacgaatttcgtaacgatacttatttttctttcgcaaggttatgaatccttacggattatgtatttactcttttttagctttcgaagaagttacggaaacttacgaattgcgcataaacacctcttttcaacttccgccacattacggaatttcacggatcgcgcaagcctgcttcctttagatttctgagacgtctcgggacttcatttactgtgcaacaaaggacgccaagtatctcagagcggctatccaaaggttgcatgtcatcaagtaataatccccggacgacattatggtatgacagttgcccctctttacttacctctcatcg

SEQ ID NO: 63191 - DNA, 466 bp, Glycine max
  unsure (1)..(466): unsure at all n locations
agctngngctctngcctcactcaccgcctttttggtttcatttctagctatcttatacttatcccaagtttcagaatttctacacctagaccactccttagaacactccttctttactctagctttgctctgaacattctcattccaccaccacgattctttacccctaggtccaaaacctctagattcacccaacgtctctttagccactttaataatctcttgggacatcttgttccacatatcatttgcacttccttgtgattgtccacaccatccctcccatatcttttggtggaagattccttgtttctcacccttcaagtgccaccatttgatccttggtgctaccataagacttcttctctgtgccctatctctaattcttacatccataaccaagactctatgttgggtagtcaagctctctctcgggataactntacagtgcaagcaatactttcta

SEQ ID NO: 63192 - DNA, 326 bp, Glycine max
  unsure (1)..(326): unsure at all n locations
cttganattanntttatggaaaatttagaataggtcttccataatgtaatgaatagagcagaanacaatcataggattgcatgaggttttaccatgtttaccatttacgttttctggatattaagtcgagtactaaaaatcactaacaacccacactctttgagtcttacgaaaatattattttcctctaagcactagtctaaccataaaggacttccatcattttcgaaaacaaatatcaagggcacacctttgcagacttacaaatcccaggttttcttataaaataagaagaaataaagtaattgcctagattctaaatcata

SEQ ID NO: 63193 - DNA, 484 bp, Glycine max
  unsure (1)..(484): unsure at all n locations
atcctcagagtcacctgccgcatgcaagctgaagatgtgtgcgtacggatgtctaatcactatagattaatctgagacacaccgagcatagtattgtaatgttgtcgctttactagatgaaggagacttgagctaattgagtgaatcttaactctgctaagtttgggagtttcatactatttgagcttattgagtaaactctctgagtgattagaacacattttctatcaaacatatattgtttgcgaagggtacgaatgacttagagaccaagaatacttgggtcttaatctcanggggagattaatggtagtgcacaggagtgtgctaaagagtactcattatatccagaagtggcatgagaatactaattgtattaaagaattgattacggaacccttcagtgttgaaagaaaccatatgtagcccataagctgtggtgaaccagtataaagcctttgtatttattctgctcttctatata

SEQ ID NO: 63194 - DNA, 96 bp, Glycine max
gactttctaaattggtgaaagaataattttggtgaccatatgcatctaatactttagaaaggtagcagatggcctaaaagaaatgtatgacttggt

SEQ ID NO: 63195 - DNA, 305 bp, Glycine max
  unsure (1)..(305): unsure at all n locations
agcttccaaattagtgtaccacactatcgcatctcctttcaagctatcctgaaagaagagtatcaacaggctttcatctttagagtgggcgcccatcttacggcaatacattatgagatggtttttgggacaagtcgtccctttatacttgtcgaagtccggcacttngaacttcgagggaataacaacatcgggtactaagcaaagatccgtcatgtctgcgaacggatagtcctcaaatccttctacgggcctcaatctttcctcaaggagatcgagctttctcctttcttcagttgctgggg

SEQ ID NO: 63196 - DNA, 485 bp, Glycine max
  unsure (1)..(485): unsure at all n locations
cgagatgaggaagtgttgaaaggtgaaacttcctgctcttattgttgaccacagagtggtacctggagatatgtcgcggnggtcaagagaccttgtggacgtcaagtggggtgctattgcccaaaaccaagcttgaccaatcccgacccaacccgggcatagtcggtcagtgagaacatgtgacgtacctaagcaggcgagctcctggcagtcaacagataaaaggaaaacaagaccacatagcaaggaggcttgtggtggctggccagctgtgaatattgtgtaatatgtggatagtggcctctggtaatcgattaccaacggtgggtaatcgattacaaggcttaaaattgaagacagggggctaagatggtctctggtacatcgataccaaggcgtgtaatcgattaccaggcttgataacgaggtcaggaagctagggaagcctctggtaatcgattaccaacgggtgtaatcgattacca

SEQ ID NO: 63197 - DNA, 501 bp, Glycine max
  unsure (1)..(501): unsure at all n locations
agctngcactgacccaatcttcaactntntattcaagtttttacatcaattctttngaatcttactagtcaaaaattaaaataatattaaaatcctcattatttcattaaaaacaacattatagtagaggaattgtaatcattcttaagtcaaaattgactatcaattaaactcaaacttcgcagttatcactcattattttcaaacaacttgagcttgtgagaagttttactgaacttgatatatttctatctacataggctatgccttggtgcatggtcagaccatggtgaaaggactggtggattttatgcttgcaatcgttatgaagcagctaaacaagagggagtggtaagggaattagaaatactctacttcattggttcacgtttcatgataccattaacctactgcccctggcatatattntgataacgatatcttcttctgaactaacatgttgtgcatgtagtatgatgaaactgaaagaagaagagaaat

SEQ ID NO: 63198 - DNA, 322 bp, Glycine max
  unsure (1)..(322): unsure at all n locations
gaagtgaatcacagcggacattttatcccatcgctcttgtaacaagctattctatgggcaaccggaagagatgttcctcaaccatggattatgactaaaaacttcttgtgctggagtgcgacaacagtctattgccacccaaaaattgtcccttttcgttgattcttacggtggctggaaacccctgaaagtagctaatatgttcacacttgcaccttgaagaccntctgtccaaagctgtattagccctgcatcgtgtcattttggaatgaaggtgtacgtggtacatattacatatagagcacatagtgtatatatgctt

SEQ ID NO: 63199 - DNA, 505 bp, Glycine max
  unsure (1)..(505): unsure at all n locations
agcttcgaagggaagagagagaccaatcacgagcacatatcttggtcttaaaagaggagttagctgcttgctcaaggtccaaaagaagcttgtctcagcgtttatgcgagacagagaccaacatgttagccatcgtcagcaagtaccatgaagaattaaatctagccacggcccacgagcacaaagtggcggacgagtatggccgagtgtacgcgaaaaaggaggctagaggaagggtgatcgactcgttacatcaagaggcaacaatgtggatggaccgattttctcttactttgaacaggagtcaagaacttccccgattgctagccaaggccaaggccaaagcaatagcgggcacctactccacccncgaggagatccacggacttctcagttattgtcagcatatgatagacttaatggcccatataattagaaaccactaggaagtttgattgtcgctcagatcttaactagttataaactttctgaataaatgagttat

SEQ ID NO: 63200 - DNA, 491 bp, Glycine max
  unsure (1)..(491): unsure at all n locations
aagctntgggggacatcttgactagctttcaatctgacattcaccacagattctgccttcttctattntcagatggggaatgcctctaacagcacctttgtcaatgattttcttcatgcctcttaagtgcagatgtccaaatctttgatgccatattctgacttcatcttctttggaggatagacatgtggaggagtaactggtttcttgaggtgtccataggtaacagttgtcctttgatctgctgcccttcattagaacttcactcttctcatttgtcaccaagcattctgactgtgtgaagtttacattgaatccttcatcacacagctgactgatgttgatcaagtttgcagtcagtcccttcaccagcagtactttgtccagactaggaagtccatcatggactagctntcccattccagtgatctttcctttagagccatctccaaatgtcacatagctagtggagcaaggttcaatgttcacca

SEQ ID NO: 63201 - DNA, 507 bp, Glycine max
  unsure (1)..(507): unsure at all n locations
atctctaagtcacctgcggcatgcaagcnttaactgaattacaacgctccaattgatttctaaatgttgtaatcgattacaatgttttggtaatcgattacctgtgtgcttgaacgttgaaattcacattcaaatgtgaagagtcacattctttcacaaaaaagctctgtgtaattgattacactattttggtaatcgattactagtgaaagtttctgaacaaatcaaaatatgtaactcttcaaatagtttttgactcttacaaattgcttttaagttttattaaaagtcataactcttctaatggttctcttgactagacatgaagagtctacaaaagcaagactttgttttgcatttttacatctatccaatctatcaatcaatcttttccaattcattctttacacaacgcaattggccactttgatgtctgagtctctttgaattccttcttcttcttccttttccaaaagctttcaaagtttctggtttctaaccttgaaa

SEQ ID NO: 63202 - DNA, 334 bp, Glycine max
aaccgatacataactgcccgggaatgtattttccccgcgcaaaaaagaaagagaaattcatcaagaaaagagatgaaattccatcaagacaacgaaagaatattccatcaaggaaaaagaaggaaggaattccatcaagagtgggaaaagcaaagaaagatggatttccatcaataatggagatgaaacaaaagagatactgaaagtccatcaaaacaataaatcaaaagtttgactactttgacatctatgccccagacaaagaggaagtacccacctaatgccttcctttatgcaccaaattggccttggatttttcccgataacaaaataa

SEQ ID NO: 63203 - DNA, 490 bp, Glycine max
  unsure (1)..(490): unsure at all n locations
agcttatcanatcacaatccanatcatgaatcgattgtttaatttttgaatcatgaatcataaatttatcgaattctaagattaagaaaacatcaaaaatagctcttaatatatcatataaatgataaatgatgtgtaatactcaatgtaataattttaaactaaaaaatcgccgtaagtctcacaaaacgaaatcacaactcatactcatacttgagtatgtgaaacctttaatttagaagataaaaagaaaagcaacggaacaaccaaatatagtgcataaagagagagtgacagtgtgaaacccaatttcagaagaataaaaatagatatctgaataatcaagtagtgtgtgttaaaagatgtaccttcagttccttttcatttaacagtcttagcttataaaacatttcaatntcttttataagtagtagaactatagtcaaaaataaaatgaagatcaatgaattgttgaactgtgcggntcata

SEQ ID NO: 63204 - DNA, 419 bp, Glycine max
cgagataatcatcatacagatgggtgctatgggcttccttctcttatttaatgcacaaacatgctcaacgccttcaccaaacaatccctctctactcattaaaatgacttgatcttactttgtatcatacatatctgacaatgatacgaaccataattcaattttatataagacaaaaaattaaaagttatggatctaagagtgcgtaagtaattcaaatttattagttaaagtgtttctagcttgacatctgacatggttggacattgggaccttgtaataaaaccagcaagttctttaaagtgcgtttggtaaaatactttaattaagttgttatctgataaacaatataatataataacttctatcataagcatgtaattcaatgagtatatagaatagttacacgctattttcat

SEQ ID NO: 63205 - DNA, 454 bp, Glycine max
  unsure (1)..(454): unsure at all n locations
gcttgaaatgcaagaattgtagattcagtaattctctattcttctcattcaataaaatctgttgcagcaatttctgcgtcaagaaattgatagtacactttctctcaaacttgtatgaaaattttaaatgagtcactaagcattttgtggcggtttaaacccccagaaaatgagctgcaacaaaatattaacacttggtgctcacagaaacttaacagaaggactaagaataataacagaccaaagcttgttattattcttttatttcctaccccattgcccagaggctcttcgctatgcgaaggtatggnggagggatgttgtacgcagccctactcttgcatatgcaaagaggctgaaaagtaataacctcataaagttacggaccaacaagatagtaaccgcaaaaacaaatcatgatggatgcagttancattcagaggagacattatcc

SEQ ID NO: 63206 - DNA, 481 bp, Glycine max
  unsure (1)..(481): unsure at all n locations
acagctctcattagaagctgatccaaactaattctatttctagaattgngtagaacaaatcaacagtcatagaaacacaaatgatgagttggcattcggcaaccacattatatcatgagatgagtaatgagttgtttctattggaatgttcacaagaagaaaagcatagaatttgagggaattgaagcaaaagaaagatagaagaaagattaaattaaaaataaccttatcatatgcaaggcgtgcatttgggtcagagagaatggaataagcttcgttgagtatgatggccatgtcatggccagcaaggccagcaatgttagggtggcagcgcttctgaagagagcgattcgccactttgacctgtgactgatcacaagagctgtcaatgcccagaacgtcatacaagtcaaagtccatcatggttgatgatgatgatgatgatgcctcgcatgtgagagtggatgtggaggcattggac

SEQ ID NO: 63207 - DNA, 424 bp, Glycine max
  unsure (1)..(424): unsure at all n locations
agctnttcgcanagattacggtaaaacttgtttcttattcatggtagaagtctctacatattgcctcccttgcccagtattatgatcagccgatgaggtgcttcacctttgggaacttccagctatcacccatggtagaagaatatgaagagatcctacggtgtcctctaggggggaggaaaccatacctcttcacaaggttctatccctcattagctagaatttccaagatagtccaaatcttggctcaggaattataccacaggaagcaagtcgaacattgggtggttggaatgccgagaaaatatctggaggcaaaagcaagactcttggcaggtaaaggcgagtgggccccgttcatagatattctcgcactgctgattttcggatgattcctctatccgaatgtggatggcgtggtgga

SEQ ID NO: 63208 - DNA, 431 bp, Glycine max
gcccgtcagtgtgactcagaagtcagtatgacagatcttgtgagcacggaagatgacgtaaatctccgcgtctcaacgggcttgtcggccgcgattgacgaatggcgcatgagacgacgttagtctctgcgtgctatcaagcttttcgtcttacagatagcaaaaaggtttatacggataaccactcgggtatcttcgcccgtcagcgtgactcataagtcagtatgacagatcttgttagcgtggaagataacgtaaatctccgcgtgtcaacgggcttgtcggccgcgattgacgaaaggtgcatgagaacgacgtagtctctgcgtgctatcaggcttttcatcttacagatagcaaataggtttatacggataaccacttccgtatctctgcccgtcagcgtgactcagaagtcagtattacagatc

SEQ ID NO: 63209 - DNA, 441 bp, Glycine max
  unsure (1)..(441): unsure at all n locations
agctntacagcagaatttagtaatgacccactaacctataattaaaataacttaatgccattaacctagggaattaanaaaaaaagaaaaaacttaatggctgagtgtaactgaaattgtggcaaccaaaagtcacccccaacagccaacaagtcagccaccatttggtctcccaaaaggctgatgcctaggttgccaattgggcccttattacaacttgaactaaacctaactaaagcacttttagttgattcacccaaaacatatatttggtcagccaactttacaaggatcgggccattattttgacaaactaaacactctaaaattgagacaaagtggtgtcatttagtcctcctccattngggccatgatacaactcacaaccttggacttttcttcttgaaacttgggcttgtattcagatagtatggacaacac

SEQ ID NO: 63210 - DNA, 409 bp, Glycine max
  unsure (1)..(409): unsure at all n locations
ctttntagttcggtattgcctaanannattgcaatgtagttcggctaggtttcttcgtgcgagctcaaccgaagttgtatttcggccgacgccggcattttgtcggccaggataacattagcccacctcggcaaanaaaaaacatgattcaccggtattgacaganaaaaatgctggccttagtcggccaggaaagatgaccgatcgaggtctaaaaaagaagcatgaccggattacgccgatcgaacgtttcctaatagatatcctccaagtattattcagggatcgaatggaaaaaacaatagccgacatcggtagttaaatagccgtgactgatatttttcagccaacattgcgcaacttctttcacaaacgctggccgataatatttctttacgggaaaggatgc

SEQ ID NO: 63211 - DNA, 485 bp, Glycine max
  unsure (1)..(485): unsure at all n locations
agcttgttgcaggtttcagaaattgaaatctgaatatatatgtgcagggacgcattgtaatcgatgacacaaatatggtaatcgattaccagagagcaatgttgccagaaataactgcttgtaatcgattacactattatggtaatcgattaccagaggttattttagccagaaaataaaaacaaaaggctttctaggagataagaagttttgagttactatcaaaatactttntcatgagaaatatatttaaaaatactttatgaataattctcaatcatgtaattcacatatcatattatgcacaaacattaaaacatgtaaataatcaattttatcaaaacaatcaacataagtatgaagagtattgattntattgaaatatatgaacgaatatttcatgcaaataagatgaaatcaatcaagaacatatactcatgatttcaaacaatcanaaaacanaccaatacagaatttgtagtcat

SEQ ID NO: 63212 - DNA, 488 bp, Glycine max
  unsure (1)..(488): unsure at all n locations
ngaatagcgactcacaggtagctgtaagctgcgatatgaacctgtcaatgtagtttaaatgccccaggaaatcttggacctgcttctcagtacgcggttctggcatctcaaggatggcttttaccatttcggggtccacctctattcctctctgacttatgatgaaaccagcaactttcccgacttgaccctgaaggtgcacttagcggggttcaacctcaattgatatatcctaagcctttcgaacaacctccgcaagttgacgaggtgttcctcctcagttttagacttggtgatcgtgtcgtctacgtagacttcgatctctcggtgcatcatgtcatggaacagagccaccatagcccgttgataggtcgccccgacgttcttgagcccaaaagacatcaccttatagcagaacgttcctcacagggtgacgaacgtgtgcttttccatatcctctggtgcgcatcttatctgattgtagcctg

SEQ ID NO: 63213 - DNA, 405 bp, Glycine max
  unsure (1)..(405): unsure at all n locations
agcttatnggtcatatgatngctacatgcatgaggtgtgtgctagagcctaagcatggagtagaggaggataggcaacacaaggttttcaagtatgtgttgtaatgcccaaatgaacctttcttggaagatgcacccgcgagccccgcgtcgccctcccgccgaagggtaggttgcgacagttggtggctccactctggacaatttttagagagttaggccaatcaatcagtgtgctttccttaccacgacttccctatatggtctttttctttgtctttctccttatgttcttgtgtatataaactctctcgatgctcttagtgtgttttaaaatgtatgcatgaggtaaatatntattcatttgatgcacacaaacaccaacactatttgcacacacggtgag

SEQ ID NO: 63214 - DNA, 260 bp, Glycine max
cgaccttgaaactcagctttaccaatggctacctgactaattcttgattccctttgttcctgttcccttccttgtttgagctcactacagccttaaggaaaaccatgatatcactatatccttaagaatttggagctttgaattgttttgggaataagtgtggggattttgttcattggataacatgtttgtggcctgcttattattatttgagccatacttgatacacattgcatattggtaaatgtggcatgctgata

SEQ ID NO: 63215 - DNA, 360 bp, Glycine max
  unsure (1)..(360): unsure at all n locations
taaatcttcgattcctgcatggatcgtctcgatggtggaccactagagcttccaagcactgacaatgtcttcgtcgacgctgtctaaaccgataaccaagttctcggcgaattctgcatttataccataccctcggggcactntattcttctcagactcgaactgagtacactgtactttgattcgaggcattgcatagcttataagctgatatgcaaatatgtaatagtgtcaggtgagaagtgagagaaatcactcccgatcattccatctgacttagatagtcaagttcagatttgagctcaacatacctacaccgactgtgacagaatggatgctcatgctctcagcgcttctatg

SEQ ID NO: 63216 - DNA, 327 bp, Glycine max
gcacacacatgcacctattgatatggttgttaaagaacactcgagtctctgagtaaggcttacagtcgaatgactaacaaacatatacaggatttataattagatgtgagactaagtagcaaatgatatgcgtacaagttctatattcttactgtgaatgccgcattggaatccaccccttgagcattcttttggattatcaaacaaattaccatgatcaaaccatgcatcaagagtataccagccggacgttaaaaaatatgtcttgtttggtggcaatacttaagcataaaacatcatgttttagttcgttgcgtatgaagacgc

SEQ ID NO: 63217 - DNA, 397 bp, Glycine max
cttgggggttgacgcactctatctcgcattatatcatgatcactagcagacatattctcaatcaattcatatgcctctctaggggtctgcaggtatatcttacctcctgctaaagcatctaacaactgcttggtttgcggtctcagcccatctataaacatgttcgactgaattggctaagacaacccatgagtgggagtcttttgtcacaaaccacgaaatctctccaatgcttgactcaaagactcgtcatggaactggtggaatgatgaaatataagcccccccttctacagtctctgactccgggaagtattacaccagagagttttcaacaactccctctcacgtgttccaactattgcctctgaatgaatggagccaccctcttgcttctc

SEQ ID NO: 63218 - DNA, 418 bp, Glycine max
gagattaacgagagagagagtgagtgtttatttgagacctatgagtgagaggaagaaaagattgttatggacagaaagaaaaacatatttttcgatggaggtggtgtctcgtcacgtcaaggtgtgttgagagggagagagagatacacagagtgagcattgtgaggtacaatgttttgtacagagtgaggaattttaattcctttgtttttgctaagaatttgaaattctgtcaagatagtatattaaaatgctttacaaaaatgataacatagcatccaaacataccataagagtattgcttctaatgtgaagttgtcaactaagatctctccatatgctaagaaggcaatattacttgtaagctacacatatagtgatagagataaatcactttcaagtagattttttaattcta

SEQ ID NO: 63219 - DNA, 410 bp, Glycine max
  unsure (1)..(410): unsure at all n locations
agcttattaattaatccactagggttgcttccagtgtgttgngatttagatcatttgtataagatctaagtttaaattgtggtgaatcattaggtttggtctagtagtaataaacataaggtggtaggttttaatttcaacacaaccagtacaaaaaaataaagtttaaattttggtattgtcgttctatataaaaaattgtgcttatttaattttacttgtatgagagagaaattttttcttttaaagaagatcaaatgacttaagttattttataactttaaactcaatctatataaatttttataaaacttatttatttatttatttattaaacatgaaatgtataagtttaatttaacttatgagaataaattaattcaatttacttctttntatttcatgatata

SEQ ID NO: 63220 - DNA, 226 bp, Glycine max
  unsure (1)..(226): unsure at all n locations
taganatccactgaatataggttcttttcttattactgaacaatatgnttttactgccaagacataagttttctgaaatgctgatgatccgtcaaaaacttgtttctcctaaattctccaatccctntgaattcttacacaggtccaagaagaacttacatggcattatattaaaagaaataatanaggaaaagatnttggcccttttgaccttccacatgtcaat

SEQ ID NO: 63221 - DNA, 235 bp, Glycine max
ggaagacaacgagccatagtattttttaccacaaaagacacgacttcaaaacaatacaaacttcccagagcccacagccatgcaatgaacccgaaaaccacgaactcgaatcaatgctacttcaccaagacaccagcctaataaaacgcaacgaccccagctcgaatcaaagataacccccgagccaaaacctccttgaacccaaaaaccacagaccaaacaacgtctcctccca

SEQ ID NO: 63222 - DNA, 167 bp, Glycine max
cctgccgcgtgcaagcttattgaacgggatcaatgatcgaggccgtacctctttcttatcttataaacattaacaatacagtatctaggaagtgatcctaggtcgtctcccaatgagcaatggtcaacctacgttcataatagatagtgataaaatcacaacgaatt

SEQ ID NO: 63223 - DNA, 458 bp, Glycine max
agctggccacccagctcgcccaagcgagctacgttgcttccctcacaatgtaccgccttctggagaacttcctagaacgcccaagtgggcctggttgctatttgcaccccatgtttactgaatacaccccttgcctttttttgttgattctttctccgcaacgttaaagaatcttacgaattacgtaacgatacttgttatcttttcgtattgctatgaaaccttatggatcacgtaatcatcccttctttggcttccgggatgttacggaactttacggattgcgcactaacacttccttatgactttcggcatgtctcggaacttcacgaattgcctaacaatgggtgccaagtacctcgaagtggtctagcgagggtcgcatcccaacaacggatggtccttggacgaaattatggtatgacagtcacattataagacatggtgatgggcgtctt

SEQ ID NO: 63224 - DNA, 500 bp, Glycine max
  unsure (1)..(500): unsure at all n locations
agctngcgagcaagccttcttaagaaaactatcgcgtctccactgatcttgagtcgaccaaagtcaggagtacccttgcacctttacctctcagttgcgtaagaggccatcagttatgcctttgtctaggaagagcgaaaacaccaaattcccatttgattcattagtcgaatccttcatgatgctgagaaatgataccagatagagaaggtagcattggcactcaacctcggcccgacacctcagtctgtatttcctaagtcaccaagttgtagtaaagacggaacaccccatcaagcaggtgttgcaaaagcctgagttggcaagaaggatggtagcatggtctgtagaactgttagagtttgacctcaaatatgagccccacagccccgtganaacctagttcatggcagactntctagcagaatttactgggacgtncgacctaccccaaactggtggaacttgtacctagatggcatatccaatgaaaaagtaat

SEQ ID NO: 63225 - DNA, 487 bp, Glycine max
  unsure (1)..(487): unsure at all n locations
agcttaanacaacttgtgtaattgattactgtaaggttgtaatgggattaaaacaaaaagtttgccttctgaagaaattntataacattagaaattntctccttactcacacatgatgatgcatgatgcacataggatatgatagagactaagatgcaacataaaatacaacaatcaatgcaaatgtcactcaagagagttgggcatgtaaaagaaaaaacttcttcaagcttcaatgctaactcttcatgtttctccccctatctctaacagcttggatgcaagatctggaatgagtggttcaacttcatctacattggacgcttcaccagtctcatccatgacactagtgtttgaaggtcaatgatgaccccacacacattggtgttgtccgcagctntagtagatgctccagcttgaactntctcagcagtagtagcagcttcttgctcatcaattacaacagtagcatcaacaacaacatctt

SEQ ID NO: 63226 - DNA, 346 bp, Glycine max
  unsure (1)..(346): unsure at all n locations
taaccattaaacaaaagtcatacaataatgttattatgatcagttgttgagaaatcaagtcattctggtcggtcgaaccggtcgtagcaccaagtggtctagggtagtcctttgctgaccatgcacgctccccaggtgcttttaagttgttgtatgtgcaaatgttgaatttaaaattgataacatgtgctgttatgaaaatacaacaaaaaaatggcccttttaagggtngaactcgcatcatctcaagggtaatttaggagtatcaaccaccaggcaacttatttaccaattacttgcacaaacctacacaaatccattaattttgatttttatgttgataata

SEQ ID NO: 63227 - DNA, 441 bp, Glycine max
  unsure (1)..(441): unsure at all n locations
atccttagagtcacctgcggctgcaagctnggaaagatgcttcatggaggatatataggttgagagaaagagagagtggggagcacgaaattgaaggaagaaaaagggagagaatttgaactctgagttgtgtctcacaagactctcattcatcanagttacaacaagtgttacacatgcttctatttatagactaggtagcttccttgaaaagctttcttaagaaaacttccttgagaagcttctttgagaagctagagcttagctacacacacccatctaaaaactaagctcacctccttgacaaaatacatgagaatacaaaaaaaaaggtccctactacaaagactactcaaaatgccctgaaatacaaggctaaaaccctatactactagaatggccaaaatacaacgcccaatagaaggaaaaacctattctaat

SEQ ID NO: 63228 - DNA, 494 bp, Glycine max
  unsure (1)..(494): unsure at all n locations
ctaagcttatacatgtngatgattataacacatatatatgtatatgaatcttataataaattaggaattaatagttcaaataataaaattaaattgaaggaaattattatattaagattcaatgataaatacttttaatttattttttagtttaattatttattaactctttttaattaaaaataatatagttcgatttaatatatacatgttgtgtgccatgtaaatattaatactatgtcatgtgtatataattcatgagatgtgataacatgtcgctttgggattataacattatgactaagattgggtgtatgtgataaattgagtatgtgttgaatggtaagatacgtgtattgagatgttatacgcattaagctatgaactgtacaatcacataactgtaagatcctttaacatgttgctatggaattataacattgtgattaagattgaatgtgtaataaattgagtatgtgttgaattgtaagata

SEQ ID NO: 63229 - DNA, 408 bp, Glycine max
  unsure (1)..(408): unsure at all n locations
ctnnttgttcgatggttgcctaaaaattacaatgcagttcggtttgctaggtttcttcgtgcgaactgaaccgaagttgtgtttcggccgactggcatgttctcattttgtcggccaggaaaacattagcccacctcggcataaaaaacatgattcaccgatatttgacaggaaaagaaaaatgctagccgacgtcggccaggaaagatgaccgaccgaggtctgaaaaagaagcatgaccggatgactccggtcgaacatttcctaacagatatcatccaagtattattcagggattgaatagaagaaacaatagccgacatcggtagttaaatagccgtgactgatatttttcggccgacattgcgcaatttcttttacaaacgctggccgctaatatttctttac

SEQ ID NO: 63230 - DNA, 479 bp, Glycine max
  unsure (1)..(479): unsure at all n locations
agcttataagaacannaatgcctcaatcatttccatatatgcatgtgaattangaagcatcaacaagaatcaagccaaggctattgtgcaagcaatcaatggggcaaaacacaccaattgattatgatgatggatggctcaaattctcacaaaggtaaactcatcactttcaaattgggctttcaaaactatcatgacatgtagaggagaatcaaggatttcaagtcacaaaatgtcaagaacttttattttcaaaacaattacccatttcttgaacatatcctataattcaaagaanaacatgcaaagtcgtacatgcacacaaaattgacccanaatattaaactaanaatccaacgaaactaacaacattaacaaattaacacaactaacaaattaacataaccaacaaaactagcaaaacagaagaacactcccntccatacttaaacaacacattgtcctcaatgtagcacaat

SEQ ID NO: 63231 - DNA, 333 bp, Glycine max
  unsure (1)..(333): unsure at all n locations
tagcacnccacctgacgtccctgtcgtaatctatccttggcgggagggcgacacgagactcgcgggatgcgtgttccacgaaaggaatacgcgcggagtcgccaccaacgtttatttgaggaaaacgtctgaaaaaccggaaaagacgcgatctactaacttttaaatgaaaggttcgggagttgtatttacgcacggggaaggtattagcaccccacacgtccgtcccaagggacggcagcctttaatcgaatgtgcaaacatgactttgatttttacgttcccttttatgtccttatatcctttataccctctatatattttttctttttt

SEQ ID NO: 63232 - DNA, 460 bp, Glycine max
  unsure (1)..(460): unsure at all n locations
agcttgaagcatatctagaagctagaatattttcttatacagatagatagtctcggtttgaaaattgtcgctggcagagtctcttacagaacagatacagatcgatcggtggaatatgttgttgcaagagacgatgacaaacagaagctggtgagcatgcttttctctgatgaagatgagaataataatcacataccagtgctgacaatatggggcatgggaggtcttggaaaaacaaccctcgctcagagccttttaaatgatgatgcagtgcagaaccatttcgatctcanagcttgggcatgggtatctgatccttttgatgtgtttaaggcaacacaggcaattgttgaatctgccacttctaaaacttgggatattactaaatttgatgctcttcgggtgaatcgaaaacacctttaagataaaaaattttgctgggctcatgacctttgatatg

SEQ ID NO: 63233 - DNA, 428 bp, Glycine max
  unsure (1)..(428): unsure at all n locations
actcagctgtgcctanaacacattgtttccaacatccaatgctctggttatctattaccaagcagtgtaatcgattaccataagacaattttgaaaataaacttttaaaaggggttttgaatttgaattttgaatcatgtaatcgattaccagatgtttgtaatcgattaccagcaacgacacttcagaaaacactttgaaaagtcatgacccttcaaaatataactatgtaatcaattaccacaaagttgtattagattaccagtgaagaatttcagaanaaacttcttgaaaagacacatctcttcaaaccattttgaaaaggcacgaaagacctatatatatgtgtgtctgacttcaaaaagtaagatattccaagagaacttcattgctaaatgctctctcaacaactcttgggcaaacacttg

SEQ ID NO: 63234 - DNA, 466 bp, Glycine max
  unsure (1)..(466): unsure at all n locations
gtgcaagcttgataccactngataagaaccataccacanattatagccaaaccccacactagaatcccatacttccaatgtgggagtcaagtcccataccttgcaacttgcaagtggatcctaacacaactgatgatatatcttcacaattaacttccatccgtggaaatggtgtagtattaatcagatgaaaaactttagaattctcattttatgcgcattgtctttctaattttcaacatataatgtaatactttcattgaccaacataccgcagttgatatctaatgaaatcttttattttgtttgtttcgtaagataaacagtttctgtcatcgcacaatagaataattgaagcatgaagctatactggagtcaagggtgaacaatacctgaataacatgtaaaacatttggaatatcaacaccacgagcagcagcatcggtacatacaagaacaccacctt

SEQ ID NO: 63235 - DNA, 454 bp, Glycine max
  unsure (1)..(454): unsure at all n locations
ctggtgatgaaattcccacanagctatgttggtctataatatattctcataaaatcaatagggaaaataaaagctaggaaaactagaaagcaaactgctaacagtttccatgaattggaaaatctttgcaatcatcatatatcaattaatttgataaacaggaaaattaaagagtagagtttatgagcatacattagttaagccacccgtgaaaagcgcaaatgaaaagtcagatctctgattaatcaactgaagcttcaaggaaccttttcctgtgttcttgtaaccatgactggagaaattggcatattgatactgaaattagaagcagaaaaagggaagagtttaacattaaacatttaaactctcaagctntctttagctaagagttntgtgcttgcacaaaccttgataggtgcagaacacagaaatggnggattcacccatatgtttt

SEQ ID NO: 63236 - DNA, 429 bp, Glycine max
  unsure (1)..(429): unsure at all n locations
agctnntacaacagatttagtaatgacccactaacctataattaanataacttaatgccattaacctagggaattaaaaaaacttaatggctgagtgtaactgaaattgtggcaaccaaaagtcacccccaacagccaacaagtcagccaccatttggtctcccaaaaggctgacgcctaggttgccaattgggcccttattacaacttgaactaaacctaactaaaacccttttagttgattaacccacaacaatattttggtcagacaactttacaaggatngngccattatttagacaaactaaacactctaaaattgaaacaaagtggtgtcatttagtccttctccatntgggccatgatacaactcacaaccttggacttttcttcttgaaacttgggcttgtattcaacagtatggacagca

SEQ ID NO: 63237 - DNA, 464 bp, Glycine max
acctataaaactcagcttggtataagctaaacctagtcactcggatgtttgattcggtgacacaatatatcaaggcgctcgaaattgaacagcggaagctcccgagaaattcgaatggtcataacatttcactcggatgtctgattcgtggacataatatatcgagacgctcaaaattgaacagcggaagctttcgagaaatttgaatggtcatacctttacacacggatgtccgattcggggatataatatatcgagactctcgaaattgaacaatggaagcgcttgagaaattcgaatggtcataacatttcacacggatgtctgattcgtggacataatatatcgagacgctcgaaattgaacagcggaagctctcgagacatttgaatggtcatacctctttacacggatgtgcgagttggggatataatatatcgagactctcgaacatgaacaatgga

SEQ ID NO: 63238 - DNA, 409 bp, Glycine max
  unsure (1)..(409): unsure at all n locations
gctatgtgctcgcgactggtctctttcttcccttcgcaacttgagttcactattgctaccccatagagctccgcgaaattngttccggccatactctttcttgcgagccctcttggtctcttgttcaagggctcttgcggtaatngcattctcttcccgtaacccggcacactcctttcgaacgtgtgtagcggccaacttgatcttctccttggcaagtttgcctttccttaactcgctttgagagattggacttcttcgtcctcttccggtgcttcaaaatcctcttcgctgacgacttttaacttggcgagccaatctaaacctcgtatatgaactntcagccattcgtggtacccaccaatgataccattacgaatgcctctaagctcttgatcttttcttaacg

SEQ ID NO: 63239 - DNA, 392 bp, Glycine max
  unsure (1)..(392): unsure at all n locations
tattaatataggtttaaattgggtggaaggttaaataataaaataaatttgttttttgttcaatttttaggatataatttttttttgatttttattaattnntatatanaaataagtaattntgggtcaaccaattcaccagaatgatcacttgatcaatggaccgantnnatcactcaactattgtccggntgaatcaaactgagtcacactaggacgaatacacgactgatancataatcaatttgacttgatcagacatctagtttgctggtggggtatattngggttggggtttaaaacatggcactaagttgtatcacttcctttgctccactacaaaatanggttttcttatgccccagcaaattgtggtgcatcaacattttagt

SEQ ID NO: 63240 - DNA, 296 bp, Glycine max
gggttgaattaagatattccaaactacttccccgagttaaaatctattgcactttcttttcaaggtatagattcccttcacaatgaacttcttaaataataattcaaataaaaacaatttgtgtatgaatataaagaaataatatacggcggagtttaagggaagagagagtgcaaactcagatttatactgggtctgggcacacgcttgtgcctacgtccagtccctaagcgacccgcttgagagttccactatctttgtataattctttgacaagttctatacacataaggaca

SEQ ID NO: 63241 - DNA, 489 bp, Glycine max
  unsure (1)..(489): unsure at all n locations
cggatctctaagcaccgcggctgcagcttttatccaggcacattcttgggggngaagctccttctttatggcttattccctggaggatggtgcctcccctctcctcttctccttggccttccgctgcatctccatggtggaaaataacaattgaaggacctcattgaagctcacagatccatcctccatagaagttccacaagcaagcttccatcaagtggtaatcagagcacaagagcttcaagaggtgctccttaaacctccattaattattttctttaccttctcttccatcttttgtttcttcattcttctccatgtatctcctcacatgttntgtgctaaatgttgttaacatgattctttagagtttccaccaattaaacttgctatagaagctagatangatgttctatnggtcaaatatcttgttcttgttcttgaaccatgaattgtgttgagttaggttcctttgaagtttgcttggta

SEQ ID NO: 63242 - DNA, 385 bp, Glycine max
  unsure (1)..(385): unsure at all n locations
acactatgaatactaagcttgaaccanaaccggtgagagtgtgaacttaaactgggagtgaatgacttgctttgagtaataanctctgcatgaatctctgaatnttagaatgaaatgtataaatgagaacatgatgaaagccatgattgtacatacacaagacttttgaccaaaaaactctccttgaatggtaattatatcctttgcaccctttttgagctgaatgatattgtcaaaaatttgaaccctgaacttaaataagtatctcctgataccttgcttagattctaggagagcatatggctcaaggcaaatttaccccatatctgggggagtagaactaattgggatgcaaagaaaaaggttaagcatcaacacacacaac

SEQ ID NO: 63243 - DNA, 427 bp, Glycine max
  unsure (1)..(427): unsure at all n locations
gagtaaacaattaaaaatgtcacaccaagcctgaactttcccttttctaagcgagtaaaacagcatcattcttttgaaagaaaaagattcatgtgctcgttataacatttccatgcttantttgcaaaccccccaacagttgaccaaantnnatatttttccactgttcanggctgaaaaaataaaataaaaaaggcttgaatccggacagattgtnttgtaaatgtacacagagatcttatatatggcctatgaatcatacaatatgctagaataagactaaatagcaagatcaacaattntgaaatggcangatccaaaattaactttagtatttctagaattcttccgtgcanaagaatactatnntcagaaccaaaatctcatgtagcatttgatcatccttcanatatgctcaactagtaca

SEQ ID NO: 63244 - DNA, 475 bp, Glycine max
tagctactaccattccaacctctctcaggaagagaagactgacattttctcacgagtttaaatatttatggtattttgttcatattaggatagatgaatctaactctttccatctaccttctgttatttcttgttgaactaaagacaaacaataacacaaaggaattgcatgtaagtaactgctgcatgctacttttgaacaacagaagcaataaatcacagcttcaggaaataaagagagacaattaaatccctactttagatagatatatttcctaccaagacatatccataatccaccatccaacaaggattacttatttataagttcgagtaaaacccgactaggtaaaagggatgaagtaaaccatatgtatatcacttgctatataaacacataagaatcttaacaaagatgcgaccactagacgcttgtcttactcagcatgcttacaaagcatatcatatcattatc

SEQ ID NO: 63245 - DNA, 529 bp, Glycine max
  unsure (1)..(529): unsure at all n locations
atcctctcagtcacctgcggcatgcaagcttcggagaagaagcttaacggtagtgctgggcacctttgacagagacgtgagtgagagagggcatanagagactctgagagggtgcaagctattgagacgaagtgagatgcaaagaaagggcacgagtataagagccataacacttgaacttcatagatgatnttcanaaatcgtctntgaattagcgatttcaattacagttctccaaagaaatgtcttcaatatcaggctttgacttcattnttaaaaagcatagttgtaattntactgatatttacaaaaatgagacaggatttgtaacaacgaagatnttgtgtaaaatcgtgtcgattcaccgtcgttgaagcttgtgttttagtagtgatggactcaacaaccaagcagggttagggaagacaaaggannaaaacacttatctggatcaagggatgaaggatagcttanagtcaagggctcccaatcctttcttcttccatcttctctcctctttctctatctc

SEQ ID NO: 63246 - DNA, 390 bp, Glycine max
  unsure (1)..(390): unsure at all n locations
ngtgagggatgatggngacccggtgttgagagaaacgaggatatgggctacgtgggagtacgtgagctcagctggaggtgggcaacaggggatggtgggcttatgcgcgcattgtggatgtggaaaaacttgttgtgcaccatctgccgaccgccacctagtaccacatgtgatgggtaccccataatcctacaagcttgagatgaggaaatgttgaagggtgaaacttcctgcttttattgttgaccacagagtggtacctggagatatgtcgcgggggtcatgagaccttgtggacgtcatgtggggtgctattgtccataaacaatcttgaccaattccgacccaacccgggcatattctgtcagtgagaacctgtgatgtacctta

SEQ ID NO: 63247 - DNA, 169 bp, Glycine max
tcatctgacttagcatcagatttcctaagtttctttccattggtagtacaacacatttgctacctataacatgaagatgtgagatgtttggttttcaaccattgaacaatttatatggcgttttctttagaatgggtcttattaaagccctattcatgatatatcatgc

SEQ ID NO: 63248 - DNA, 428 bp, Glycine max
  unsure (1)..(428): unsure at all n locations
ctcagctttatggaggctggatctttgacttcaatgattgtctctttttgtgaatntcaaccatagaggtgccacggaagataaggagaagagtgagaggggcgtcttcactaggaatagccataaaggatagcttaccccaagagagtgtcttggataagaagcttagagaggaagctttaatggaggaagagaatgaaagagagagaggggggggggaacgaaattgaacgagaaaaagagggagagaacgtgaactttgaagtgtgtctcacacgtttcacattcatcatagttatgataagtgttacacatgcttctatttatagcctacgtcactaactaaatgaaagctttcttgagaagctagagcttagctacacacacagccctctaatagctaagttcaccccatgccaaaatacatg

SEQ ID NO: 63249 - DNA, 427 bp, Glycine max
atgcgcccaagaggagccttcttcacttcagattccgacagctctaaatctgacaccatattgttcatctacagtcgaggtgcaaccatgacttagtgtcatcgctatgtcgacaatttggtgcttacccgtcacgatgaattgttggtcaagcaatgacaagatgcactggcctgacaattctccctgaaggagctcgacacacccatacattttgtgcgtgttgtaaatgctcccacgtcacatggactatatatcaggcaacatcactatatatggtatctcttcaaacccacaacatgcatgatgatgcatagaccaccagctctcaggtatcgaccacatgcaatctcacatcaggtgatgactactcttgcgatgcactatctattgcagctagctactcactgaatatctctctcacatg

SEQ ID NO: 63250 - DNA, 513 bp, Glycine max
  unsure (1)..(513): unsure at all n locations
agctngcagactataccttcgaccaatctctgttctgtntctatctcggcccggatntaaagcgggttgcaacaccggctccgcttccctaaccgtactggaggcggntgccgtggctttgtcctctatggttttctggagttttaacatgacctctgagatggaagccatttaatcttttaaagccgatagatcagccttcatctgttcctgcacgccctcttcatcatccattttttctggatcgagtgttataggggtgccttggtgttttcttagttatgatgaaattcctaaagaaataaacaacggtgagtatgccaccaaaacatgagtatgcaaatggatgatcggagcacttggatccaccccaagggtnttagataacatgatgagttcagaacttctcattttataaaaagaacacagctttcatctagccaagaatatacaaaggtattacaagagaacctaacggtttctaattatgtgggccatcanatctatcatgtg

SEQ ID NO: 63251 - DNA, 434 bp, Glycine max
  unsure (1)..(434): unsure at all n locations
taacattgattnttttaaaaaccgatgttaatatatacattctacatcggnntttagtaaaaaaccaatgggtatttttatgagttttttaataagctgtctggttttttaataaccccaaattaaccttgcaatttaaaagcagaaccataatatatgaattttattttattttcaaacaatttttactagaaattccataaaaaaattattatttactatgaattaaaagaatatttaatgttaaggagacatgaattgtaaaaaaaatgtaaagtaactaaaatacaattccaaaattgcttaaacactaattgtttcatttttaactttcaagtaatagggtgcccactagatgtgaagcgccttcaatctctctgattctaatgatctagcatcattgaaatactgcatgatacaataaaacataagtc

SEQ ID NO: 63252 - DNA, 414 bp, Glycine max
agcttgaagggaaacttgatgccttgtgtctcctattaactcagtttgccatgaatcagaaatctacacctgttgcaagagtctgtggtctatgttcttctgcagatcaccatacagatctttgtccttctttgcagcaatctggagtcaatgagcaacctgaagcttatgttgcaaatatttataatagactccctcagcagcaaaacaaacaacagcataataattatgacctttcaagcaatagatacaatccatgtttgaggaatcatccaaatctgagatggacaagtcctccacaacaacaacagcatgtccttccttttcagaatgttgctggtctaagcaagccatatgttcctcctccaatgcaacaacagcagcagcagtcacaacaaagacaacaagcaactg

SEQ ID NO: 63253 - DNA, 329 bp, Glycine max
  unsure (1)..(329): unsure at all n locations
tttttatattgcgcaaagccggcagagatatatcagtctgggctatataacgaccgatgcaggttttttgtttaatctaaaccctgaataatttttggatattgctcaataagaaatgttcgatcggcgtcatcaggtgatgctctgcttttatattagacctgctggatcggtcatctttcctggccgacatcgactatcattntctttatcagtgtcggtgaataatgtttttaggccgaggtgggctgatgtntttctagccgaataaatgaaaacacgccagtgtccgccgaaacacagctgcggttgagctcgcacgataaaac

SEQ ID NO: 63254 - DNA, 458 bp, Glycine max
  unsure (1)..(458): unsure at all n locations
agcttctagccaaatggacttaccttgaattaattccttttgatagccctttgagccttgtttccctttccttgttttgaagctcactacaagccttaaatgagaaaccatgatatcaccatatccttaaggaattctggagctttggaatngttttgggaataagtgtggggggtttttgnttcattggataacttgttttgttggctatgcttcatgatgtattctgggccatactcgatgtacattgtatattggttaaatgttggacatgctgaatgaaatgttgtttctcacaggctatatagtaaaaaaaaaaaaaattcgaatatgataaagaaaagcaataaagttgagtgaataagatcttatatggcaaaagaatgatgagactcttggtctactctatatgttaaatttatctcacttcttttatttcttatttttctatatgcact

SEQ ID NO: 63255 - DNA, 359 bp, Glycine max
  unsure (1)..(359): unsure at all n locations
aatgcacccatatacaatcaaggcagcttcgttacctagactatttacacgtacttccaaggtgtatttgttacttacatcacacacctccttggctaaattcacatacatgcatactcaaagcattttggggtaccaaaaattgcacatgtgcacatcttggtatttctaatacctatacatacacaaacttcatgatgaatcttgactatctacacaataaggtgctacattttatgctcttttcaagtttttgctacctaaagccgcattgcaaattcaagnnatacttcctttgctgactaaaattgtatttcaatataaaaggtatacaatctttggtaatgtatcttctttac

SEQ ID NO: 63256 - DNA, 346 bp, Glycine max
  unsure (1)..(346): unsure at all n locations
aacatntttgctcaacaaaggcattnntttttttttgttacagagtttgagcagcaaagagaagtaaaggaaaatggcgggtttttggagcgtgttttgtggggaatctggttgttcagaggctggaagaatgccttgcagctatgattntaggcttctcattgatccttccacttgtgtcaaccattcntgtgaatctcgctttgatgtgttgctgcttatcatgcttgcatgcattatgatccagaaatcatcattaaaaccatctcgtggtctaacacanggtgcaagatattcatattntcagctagtttctgccatagccaacggtgctcttgggttgaca

SEQ ID NO: 63257 - DNA, 347 bp, Glycine max
catcttctggacatgcttggtgttctgaataatttggatcgaagtatggaaggggggagtactggttcatcgagcaatttgcgtgaagaaactgctcgtgtgtcgaaagattcttcagagctttttccaactggcattccacaagtaggtcaaacagagattagccaagaatcagttgcgggtggactggggaatattcgttcggaggtgattggctccacatctggcaatgatactactacttttctatcgaatgaccgtatgagatatggcagagctgacaatgccactctaaaaggtcatgacagttccattagaggcagacagagatatacttcaatgctgct

SEQ ID NO: 63258 - DNA, 512 bp, Glycine max
  unsure (1)..(512): unsure at all n locations
agcttggaccatctctatgatcatgtgttcttaattttaaataacaaaatcataccaacttcctcctgttcatctgccaatgttgaagctgttcacgtggacttcttcagctacttcgattgtccgcatcatcaacatccattggttctgccaaagtttcatcatctatggtctgattntcatgcagtgtagacaaggcaatacaatccagaggcttacagagaaccaaaacagagagcctcatgtgaccatttttatccagatgaangtatcagtgttaatatctctgcataatagatgataattgacaattattaatatgattgtttagcatgtaaagtcaatccatttcagcacccaataaaccatcatccgtgacataacannataagccaacaactttataagtacagtcaaactgaacctgtgaatgtaattgtgttgtgaatagatctatggcagaacacttgtcaatganaatctacaacattntacttaggtgtcttcctcat

SEQ ID NO: 63259 - DNA, 516 bp, Glycine max
  unsure (1)..(516): unsure at all n locations
gcttcaagaatcaagatcaagattcaagacttattattcatgaattaagagaagacttaatcaagataagcatgaaaaggttttttcataaactaagtagcacatggatttttctcanaacatgtttaccaaagagtttttactctctggtagtcgattaccagattgttgtaatcgattaccagtagcaaaatggatttgaaaaagttttcaactgaatntacaatattccaattgatttcaaaaagctgtaatcgattacaatgttntggtaatcgattaccagtgcctttgaacgttgaaattcaaattcaaaagtgaagagtcacatcctttcacaaaaaagctntgtgtaatcgattacactaattcggtaattgattaccagtggatggttctgaataaatcanaacatgtaactcttcanatgggtnttgactntnntcaaatggtttaagttttataanaagaataactcttctaaatggtcctcttggncagacatgaagagtctat

SEQ ID NO: 63260 - DNA, 453 bp, Glycine max
  unsure (1)..(453): unsure at all n locations
cactcaagcttttctttgagcacaacanaagcgtgctcttgggttttacctcacgtatatgccacattcttcttcacctactcattgagaggtgatgcaattgcagagaaattaggaatgaaccttctatagaagcttgctaacccatggaagctcttaatatctcccacactttttggggtgggccattcttggatgacgttgattntctcaaggtccacttggaccccatttctaccaactacaaaccctaagaaaactatattatctacacaaaagggacacttctctatatttgcatagagggtgtttctcctaacgactgaaaaaactcgcttgaaatgtcttaagtgatcatctangcttctattggacactaaaatatcatcaaaatagacaactacaaatctacctatgaaatcccttaagacatgatgcataagcctcataaag

SEQ ID NO: 63261 - DNA, 415 bp, Glycine max
  unsure (1)..(415): unsure at all n locations
cacacactgtaacactgctaattctangaaatatttgtacaccattgacattgtcacatggacaaggtacttgaagcaaccttattgtataaaaaattgaccatgacaacaattatcctaagtttgacattgcagttagactacacattgatctaccattactatatatggtcctaacagtaaaacaatgacgaataattatatttttggtntagtcctatggtgggtgtatgcttatanttttgaagtgtctagtgtccctcaacaaaactactagaacttattagagcaatnggacgtaattatcttagatcacaactaagtggatcaagtgtcaatattgaacgggaagttntatctatagaagacatgtgtcctaatagttatgttaccattattttgaatntctataagt

SEQ ID NO: 63262 - DNA, 268 bp, Glycine max
tcacatagacggttgaggtgtgtcctctctttctgtggccgcccatgtagaagaagactgatggaactctacgaatgggggcacctacttatatagtgctggaagggctctcataccatcctacatgcaatcttctctgttggctcaataatgcgcatttcttattgaagaggacagggcctctatatcatcccatgtgaaacctcttacgttactcactaatatgttgacagtgtggaacatataaaaatgaaatcgctgagattta

SEQ ID NO: 63263 - DNA, 359 bp, Glycine max
  unsure (1)..(359): unsure at all n locations
cagtttatcantttgggcctacttggattaattttatgtttttaatttaatttcacgagaattataagtaattgggcttgaatccagaattgggcttgcacttgaagagaggaaaacaatttattctaccanatcttatcttatctagatttctcatctggatattatttcatctagattntatcttatcatatctagaatttatctcatctagatattattntatctangtcttatcttatctagattctatnttatntatgggctcggaacttaaacagatctgtaagctgtggnggctgagaactatataacagcaccaanggtctagttntaggctntctctctctctcttttgt

SEQ ID NO: 63264 - DNA, 452 bp, Glycine max
  unsure (1)..(452): unsure at all n locations
ctgcagctgctaatatccaagtagacagggttctaacttatggatgagacagganatcaaagaaacaaagggagtgattctgtgggaaaacagaccagtgggtcaatgaaagctanagcagaattggaggctaaaagagtacttattaagaaaaggctacatgaagatgtttctggtgtccccaagaacaatgcccagactaataatgagttagatattgtggacgaagaataccagatattcctgaattcttgtgggatgactatatacctagtgaattaatagaaaagcagaatttggaggctaaaagaggacttattaagaaaaggccacatganaatgttctggtgtcccaacaacaatgcccagactaatatggagttagatattgtggacgaagaataccagattntcctgaattcttgagggatgacttatacctagtgaataat

SEQ ID NO: 63265 - DNA, 427 bp, Glycine max
  unsure (1)..(427): unsure at all n locations
tgtgtaataatattctaacagttgagggtcttctatatgattaaccttgtgctcctacttccctagccagtcttaggcttgctaataatgctttgtgcttgacctggttgcaagtggctttaaatctgaaatgtagtgattgtgacaaagctacattattcgggccttctaatatgactctagctccacttccatgttgattggatgagtcatccacatgtaaagtccaccactcatcctagaactaaggctatagtgggtgaaattcatttatgaaatctgctaagctttgggcccaaatggtgcctattggtttataatggatctcgtattttgataactcaatggaacaagccatcatcttcctatctaactcaagctcgcataacactttatctatggggcaatcagtntgggatgttatctt

SEQ ID NO: 63266 - DNA, 508 bp, Glycine max
  unsure (1)..(508): unsure at all n locations
gctnntatggtaatagctcttataaataaatgtttaatttagttgtttaaccaaatatgcccatntcatacaggaattgtagataacaaaagatatctagaggagacaattaacatanaactacacacgaatcacataaagtacattcatataatagggaaatttgtggtgacaacgattcctcatagttgtaaactaaagctacatataatccgcattatcaaaataagcatatattgttcaatctaagggaaagttcattatgtcttgtagacatttaaagtctgagataaagatacactaccacattctcaatgtagctactaatgcttaacattgataatggaaaacacatcaaatatagcgtgtatatgatttccaatgatatattactacatcaacaacttcatgtagactaagggttatgatctaggaatgtgaacatgattaacatgtgctgaatatgacacagggtacatctctttctttcttatgaaaaaataaaaaa

SEQ ID NO: 63267 - DNA, 466 bp, Glycine max
  unsure (1)..(466): unsure at all n locations
cgtacatctgcattgctcttgttaacagcatcatttatctgcagatcataaacaccaagtaaccagttagatatagaagaacattgctaaaatgaactaaggaaatgtaaatgccaccttctgcagttctggactgatgcattcaattctttctttgatggtctttttttcttggctcaaatttgaaagtttatcttcaatgcttcgctggcaaaattaaaagcataaaaataaacgaacaaaagacataacttcaaacacacaatccttaaataatgttagcttgcatttgattggtgcatgttttcaaaaataaaccacaaaaaatacaattttaactatatttgcaaggacagaatatgaccagttagatttctcatgcctacaaacaaactatagccaacagaatatgaaccaatacttccagctaattaatgctgatattntaatgcctataattattaaa

SEQ ID NO: 63268 - DNA, 403 bp, Glycine max
  unsure (1)..(403): unsure at all n locations
atagatactaagctatgttacacaccctaatggaatttcattccattttgctacccantggaaccaaatgactttgatggatacattttaaatacatggctactatcattctgacaggagtttgatatgcgacataactcaaccttggctacggcagagaaatttgacngaaacctttaaatgatgttgatcactgaaaatgagctctatagcaaaatccaatttttgctgtaagggagtgttcatcccattggagtatgtaagagcacctccatttttgaaagggttcgcggacttactttattgtcaatcgggaaagtatgatcaatattggattcaagttggtgaaatggtcccaaattacgtaaattaatatttttatcaaatttaaatatatataaat

SEQ ID NO: 63269 - DNA, 493 bp, Glycine max
  unsure (1)..(493): unsure at all n locations
gcttatccgtagaggtgatggaccttttagttctngtagaggatcaataacaatgtctataggttggacctcccataagagtatgcacctagaactttataggtggagctaatactgaggagcatgaaccaacagaattgaggtcaaatcctcttcaaaggggagtgggtgatgcaatcctccctaggaagggactagtcaccaaagccatgagcaagaaagctcaagaggatngnngctagagctgtgtagaaggccctangattctcatgaaccttagggtagatttctgagcccatgggccatgttgtgtccacttatctttgtacatattagattangatttcattatttttgggccttgtatntacggctccataatgtangtagggttccctagaaatgtangattntntagcccctgtatttaaagcacctagactagtttttgcttanngggtagttgaatttacatgcataagtgaaattgatg

SEQ ID NO: 63270 - DNA, 445 bp, Glycine max
  unsure (1)..(445): unsure at all n locations
ccttcaagaagaccataattcaaactcgattgcagaaatcatattctcttatacccatctgactaggacaaacgaggctgatacgacattgaagggagcatccagtttagagagtagcaaacattgaaactcgacatcatcccttcattgaagagattatggaggcacaactcctacctagatggaagatgctaaccatcgattgttacaatggactctcagacccaaacaaacttgttgacgcttttgtcacacaaatgaatctgttcataaatgacattggaatcatgtgtcgagtgttccctacaacattgaaagatgctatacttgatngctgagaaagtccattaactcattcgcggcgcttatcatgcattntggagnttagtatgtgatgggcagaccatgccatttgacaacantggaacttactaacatttgcaag

SEQ ID NO: 63271 - DNA, 489 bp, Glycine max
  unsure (1)..(489): unsure at all n locations
ctgcaagctgtaaaaatattnggnttaatttgttttttctatcatagaatattatgttggtattaaataaatcaatnttattatttttagatattcgataatattgcgttaattatattaaatatttaataatatttggataacatattatataaaataataatgttaaaacagttcaaatttaaatgggtaacctacttgacaaccaaatcaattaaatntgattggattggattgaattaaaaaaatgaattaagttaagtcggactggattttaaaaaagtataacatctgaaccaaatcaaactaattaaatttaattgagttatatcataaatntaataaaaactgacctgaatgaattaacctgcaaacaccccttgtaaaacattggttctttgatttgctatatactntataccaaggcagttgtacttgttattgcaattgaaaattgaattttacataaatctatacaaatattattta

SEQ ID NO: 63272 - DNA, 425 bp, Glycine max
  unsure (1)..(425): unsure at all n locations
cgctgtcgtcccatgtttctctgttcttcataccttanacgtagaaaagaaagaagtacganaaanacaaagacaccccatttgattntctctgcaatctgaaaaatgggtcgtcgccaaaacgactcagatttcggtagattcgcgattctcgtcctcttcttgataggcgcaatctcctgctccgtgatctaccttttccttacggtggtcttcagtcccagccctgaatctcttccttcagtggatgatcatgtggtgggggttgcagaagaggagcaatgctgcagagggattgaacatttggagctttggggtgatgctgtgaaatggggctctgaatttaggttgaattcctcggaggaatggtgcatggcttgtaagcgaatgtgtagcggtgatggaggacctngtatgtgtaattc

SEQ ID NO: 63273 - DNA, 484 bp, Glycine max
  unsure (1)..(484): unsure at all n locations
agcttataatatattgatacgctcgatattaattctctgaagctctccagaaattcaaatggtcataactattcacacggatgttcgattatggcgaatcacatatcgagacgctaaaaattgaacagcggaagctctcgagaaattcatatggtcataacttttaacactgagttccgattcaggattataatatatacagacgctcgaaantaaacattggaaggtctcgagaaattcaattggttatcacttttcacacggatgtccgattcgggcgtataatatgtcgacacgctcgaaattgaacaacggaagctctcgagatatacaaatggtcataacttttcacacggatctccaattcaggcgcatcgcatatcgagactctcaaaatngaatagcggaagctgtcgagaaattaaatggcataactttaactggatgtctgatcngcgactcacatatgagacctcgaaataac

SEQ ID NO: 63274 - DNA, 446 bp, Glycine max
  unsure (1)..(446): unsure at all n locations
aaaanngggaccatcacagggattatgttttatcttttgatggagcacaacaagtttgtcacatacacaatgcgcgcataaacccaccatcccctgttgcccacctccaactgagctcacgtactcccacgtagcccatatcctcgtttctctcaacaccgggtccccatcaatcctcccaagcttccacaacattcaagcaaaacaacattcacacagcacaagctatcacagccaagcaaaacaaagcaaaggcagaaaactctgccaaaacaccaaccaaaaatcacagcttttcccactcaaagaccccagtaacaattccttcgatccaatttgtaacccgtggatcngactccaaaatgttctgggaagctatagtgcataagcctacattntgaccgttgggatctactagcaaacatccagaactcattntacattac

SEQ ID NO: 63275 - DNA, 414 bp, Glycine max
  unsure (1)..(414): unsure at all n locations
taagtcctttattctattgttcataacaaaaattaaagtgcaaagttgggattacttacttggattgcaataagaaatgagcaagaggaaatcagagaagcagagagcataaggtgagcatagtgcagataagtgcaggatgcaaaggatgagagtgagaagatgtttgtaaatgcacaaaagaaaactgcctaaggcaattaagccttattttggtagttttgactgcctcgcttagcgcaggtcactcgcttagcgagcactcaaggacttttaagttttcagaattcacactcacgagctcagcgggcagactcgctcagcccaattcanaaatatgacatgtcagagaagaaatgngcttagcgcgaaggatcgcgcttatgcgagtctgcagctctgattggtctgaac

SEQ ID NO: 63276 - DNA, 285 bp, Glycine max
aatttaaaatatggtatttactctctggtaatcgattaccacaggatgtgatcgattatcaatggccaaaatgctttctgaaatatttttaaatatttttgaaagcatgtaatcgattacacattcttgtaatcaattaccagcagttgatactatttataacacctattaaaatcttgaactcaaattttaaagcctgtaatcgattacacaaggcttgtaatcgattaccaggaggaattttcaaaataactctcaagagtcgcatctgttcaagaagttttt

SEQ ID NO: 63277 - DNA, 457 bp, Glycine max
  unsure (1)..(457): unsure at all n locations
agaagaagaagaagttcanagagattcaaggcttgtaaaggattgatcgaataagtgtaaaagtatattgaaaggaanaacaaagcctagcttttatagactcttcatgtctggtcaagccaaccatttagaagagttataactnttagaanaacttanaaccaatttgaaaaagtcaaaaaccttttgaagagttacatcttttgatttattcagaaacaaacactggtaatcgattaccaaatcagtgtaatcgattacacaaagcttttatgtgaaaggatgcgactcttcacatttgaatntgaatntcaacgttcaaaggcactggtnatcgataccaaatcattgtaatagatacaactnnttgaaataattgaacattgtaatcaattgaaacttttcaaacaatttgtactggtatcgataaacaattggtatcgatactaagagaaaa

SEQ ID NO: 63278 - DNA, 395 bp, Glycine max
  unsure (1)..(395): unsure at all n locations
acctaagctttctttggcaaacaaggcgtgtcttgtttttaccttatgcaatgccacattcttcttcacctactcattgagaggtgatgcacttgcagagaaattaggaatgaaccttctatagaagcttgctaacccatggaagctcttaatatctcccacactttttggggtgggccattcttggatgacgttgattttctcagggtccacttggaccccatttctaccaactacaaaccctaagaaaactatattatctacacaaaaggtacacttctctatatttgcatagagggtgtttttcctaaagactgaaagaacttgcttgaaatgtcttaagtgatcatctangcttctatcgtacactanaatatcatcaaaataacaactac

SEQ ID NO: 63279 - DNA, 426 bp, Glycine max
  unsure (1)..(426): unsure at all n locations
atcctctgagtcacctcgcggcatgcagctttccctatttcctattaaaggtggagtagtgaagganaaaaatgttcaacccttctggtaattcgaggtcacttgaaattagtgaacacaaattgttccgtgatgaaaatccaagtcgaggcgctttcgtaacgtttccgtgggtgatttcacgaagattttcaaccgttcttcgacgttcttcgttcgttcttcgtcattcttcggtcttcaaccggtaagttcccgaaatcgagcttttcaattcattctatgtacccttagtggtcgnncattggcttcatgtgctnttattntcatttcatntactntccgtacccnctnttgacgtgctttagtcatttacttaagtcattttctcacctaattaaaaatgaaataaatctccaccgatca

SEQ ID NO: 63280 - DNA, 317 bp, Glycine max
ttggtaatcgattaccagtgtctatgaacggtgaaattcaaaatcaattgtccagagtcacatcttttcacaaaaagctttgtgtaatcgattacaacgatttggtaatcgattaccaatgacaagttttggacaaaaatcaaaagatgtaactcttccaatgggtttcaagtttttctaaaggttataactcttccaatggtttcctttgaccagacatgaagagtctataaaagcaagaccttgatttgcatttcattaactttgtcatatattcttttacaacctttgaatctctttgaacatcttcttgaact

SEQ ID NO: 63281 - DNA, 450 bp, Glycine max
  unsure (1)..(450): unsure at all n locations
catgcaagcttatgctgcanacatctacaatagacctccttatcctcagcagcaaaatcagccacaacagaacagaacaattatgacctctccagcaacaggtacaatctcgggtggaggaatcatcccaaccttagatggtcgaatccttcaccacagcaacaacaacaacaacaaccttattttcagaatcctaatggcccaagcataccatacgttcctccaccaatccagcaacaacaacagcaacagccctagaaacaacaaacagttgaggcttcttcgcaaccttcccttgaagaacttgtgaggcaaatgactatgcaaaacatgtagtttcaacaagagaccagagcctncatttagagcttaactaatcagataggacaattggctacacagttaaatcaataacagtcccagaaatctaatagaataccttctcaatct

SEQ ID NO: 63282 - DNA, 280 bp, Glycine max
  unsure (1)..(280): unsure at all n locations
ttcttctatanacagaatggggatgcctctaacaacacctttgtcaatgattttcttcatgcctcttaagtgcagatgtccaaatctttgatgccctattctgacttcatcttctttggaggatagacatgtggaggagtagctggtttcttggggtgtcataggaacagtcgcctttgatctgctgcgcttattagaacttactcttctctttggcaccaagcattctgactttgtgaagtttacattgaatccttcatcacacagctgactgatgctg

SEQ ID NO: 63283 - DNA, 473 bp, Glycine max
  unsure (1)..(473): unsure at all n locations
acctgcggcatgcaagcttcttattctcagctaatgaagatgaatatgtggcttcttcatgcactcctctaatgacaatagcatcacttctggcactaaagtgcttgggagttgaagccatcttctcaattaaatttctggcttcagcagtggtcatgtctccaagggctccaccactggcagcatctatcatacttctctccatgttgctgagtccttcataaaaatattggacgagaagctgctcataaatctggtggtgagggcaactggcacatagtttcttaaatctctcccagtattcatataagctctctccactgagttgtctaatgcctgaaatatcttttctgatggtcgtggtcctggaagcagggaaattattnttctaagaatactctcttgangtcatcccagctcgtgatggaccttgngagcagggaatatagcccaatcctttgcactccctctaa

SEQ ID NO: 63284 - DNA, 499 bp, Glycine max
  unsure (1)..(499): unsure at all n locations
ctaagcttgataactaaattatctaatgatgaggagagagagagagttatatnttatantattcgtaaagaactaatcagagntttcatgatagaaacattaataaaaaaaagagtcacaacatgagtggttaagaatactatcatttatcaagaattgacacacaccgagagaacagttaaaagaaacataacacagttaaaaatttaacgtcataaatatgatatacacgaagattcacaaaaaagagtaaaatcctcagtatcatgtggatggtttgctattntatacattattcatatactgaatcacaattacaacttttgggtgaaaaaaggtttattaccttgtacaggtccagtaagtttgcctataaccatngctcccagaatccttccttngatatgacaagtaataaatagtagaggtcatcgctgaagaaaacatatactgaatgacttgttgtatagaaacaaatctacattcttcaaattataaa

SEQ ID NO: 63285 - DNA, 361 bp, Glycine max
  unsure (1)..(361): unsure at all n locations
tatctacacccccctttttactaaatgcaccccccttctattnttttggtaattctttttcctaaccgtacgaaactttatcgaattcgtaacgatacttaatttcctttcgcaagggtatgaatccttacngattatgtatttactcttttttagctttcgaagatgtatggaaactcacggattgcgcanaaatacctcttttcgacttccggcatattacagaatttcatggatcgcgcaagcctgcttccttttgatttctgagacgtctcangacttcatttattgtgcaccanaggacgccaagtatctcaaagcggctaaccaaaggtngcatgtcatcaagtaataatccccg

SEQ ID NO: 63286 - DNA, 322 bp, Glycine max
cggacctataaaactcagcttcaagggaggagagagaccgatcacgagcacatagcatggtttttttataatagtagccggttgctcaaggtccaaaagaaacttgtctcaacgtttatgcgagacagagacccagttatctatcatcaccaagtaccaagaagaactaagtctaaccccgcccacaacattggtggggacaatatgcccagtgtacgcggaaaaggaggctagaggaaaggtgatcgactcgttacaccaagaggcaaccatgtggatggactgatttgcccttaccttgaacaggagtcaagaactttcc

SEQ ID NO: 63287 - DNA, 503 bp, Glycine max
  unsure (1)..(503): unsure at all n locations
tgaggcatgcaagcttaacannatgtaagctcgaaaacanaatgttacatttaatgctacaatataagtagcagactatattttatattactgctntgactaanataatctgaatgaaatagcaatatgatgtccaactcattatcatgattcatgctgaaaaccttgaagcgggaaatatacaatttgttcatggagtaaacataggccaaatcaagccaaattattctaccatccagagaaacanaggtccataagaatattatattcgtcaagttctagagatgtgcattagttagataaaagttgtaaagtatccttagcatatttagatgtacctctactgctttgcactaaattttttcatgcattataaaaaatgtgtgtgcaactgccacacagtgagacaagctttatgactgacataacatgtacctattgttcattggatctgatgtggattgcctctgatgtaagacttattctgtcagcatacatgtgtc

SEQ ID NO: 63288 - DNA, 352 bp, Glycine max
  unsure (1)..(352): unsure at all n locations
gcttcatgatgaatctcagatgattcngagatggtttgacgatatcaatgttgatgtcttaaatcttaaaggtcaattcatgataatgaaagaatgagttcaagatgtttaagatgttcaagattgaatcaagaacacttcaaggttcaagagggaaattgattttaagaatcaagattcaaggttcaagcttccaagaatcaagatcaagattcaagactcaagattcaagaatcaagagaagacttaatcaagataagtatgaaaaagatttttcaaaaaatgagtagcacatggatctttctcaaaatatgtttaccaaagaagttttactctctggtaatcgattacc

SEQ ID NO: 63289 - DNA, 528 bp, Glycine max
  unsure (1)..(528): unsure at all n locations
atctctaagtcacctgcggcatgcaagctnggtatctccttctttactacttcaagaatcaccgggctgagtcttctntgggggtgtcttactggtttagctccatcctctaaatttattcgatgcatacatgtggatgggctaataccaggaatgtccgccagggtccagcctatagccttcttatgcttcttgagaactgacaacaacttctcctcttgttcatcagcaagggaggcagatataatcactggaaaactcttgctatcatccaagtaagcgtattttaaatntgatggcagaggcttcaattctggtgtggtcggctggacagtggtagaaggagaatggttctcagcctttacctcataaagaaagtcagaggtatgtgtacttcctgaaacatggttagtcctatctgactctantanatcaatctcaagaggtaaaacaccaccaccaggcatgccaatcatatcactctcagattcactctcagcatcaaattcgacatattgatcagtacaa

SEQ ID NO: 63290 - DNA, 383 bp, Glycine max
  unsure (1)..(383): unsure at all n locations
tcttagtttcagatgatgcagatgggtttgtatctacctcatgtactcctctaatgactatggcatcatttctggcgctaaactgctgggagttggaggccatcttctcaattaaatntctggcttcagtaggagtcatgtctccaagggctccaccactggcagcatctatcatacttctctccatattactgagtccttcataaaaatattggagaagaagctgttctgaaatctgatggtgggggcaactggcacatagtttcttaaatctctcccagtactcatacaggctctctccactgagttgtctaatacctgagatatccttcctaatgctgtggtcctggaagcagggaaaattgtttctaagaatactctct

SEQ ID NO: 63291 - DNA, 399 bp, Glycine max
  unsure (1)..(399): unsure at all n locations
agcttgctacccagctcgcccaggcgagcaatgttgcttcctccagaagcaacagccttctggatgaagggtctggaaggcccaagtgggccagattgctatttgcacccctctttttacttaatgcaccccgcttctatttttttggtaattctttttttcgtaacgttacgaaactttacgaatttcgtagcgatacttattttccttctgcaagggtacgagatctttacagataggtatttactctnttttagctttcgaagaagttacagaaagtcacggattgcgcaaaaacatctcttttcgacttccgccacattacggaatttcacggatcgcgcacgcctgcttccttntgatttccgagatgtctcgggacttcatttattgtgcaac

SEQ ID NO: 63292 - DNA, 398 bp, Glycine max
  unsure (1)..(398): unsure at all n locations
gaacataaatctaagcttaagctttagtcttcatggtatccatgtcggtctttcttatctctgacaaagtagactcataaacttgtaagagttagtgacttaactcaagagtttgataaccatgaccccagccatagtgcttcggcaactcaaatggactcaagtagtgcccaaagttgaagaattgggagggttaagtttccaatatgctttaggcaatactaatgtagatcaagcaaaggttagaacaacttgngataaggtcaaaaagaaaagggagaaagagtcaggaaaacttcgtgtgacagcttcctcagagtataaagaatggagaaagctcagaggagttcccactccaatccttgcagaaaccccatgtggggatagttcatnctatg

SEQ ID NO: 63293 - DNA, 434 bp, Glycine max
  unsure (1)..(434): unsure at all n locations
agctttagaacgagaatgtagagcatattctttttgtttatgacagagcctttccatcacttcttgacatggctcgtggctcggacattgaagtgccgaacaattccccaatccttaataaaatcttcgcaatgagaaacgtagaactcacaaggtaccttacgtgtggtcataatgatgcttgccagcgagatgtcatttgcccatgtctattgttcataatagattcaagcaaccttatctcgcatactctttgttctggaaagtatataatatatatgtatatctatataagagtcgatcactctaacactgtattattataagttctgcaaaatacctttaacggtgtgtgtcattattgtgttgtcgggcttntggtggagatagaataccaatagctatgaggcataaagtgcccacattccttcttc

SEQ ID NO: 63294 - DNA, 404 bp, Glycine max
  unsure (1)..(404): unsure at all n locations
agcntatcaacatcaaacttggagaaagagttcttggggtcatgacatgagaagcaatcaagtataatgttacttccttcactaaagcggagatccatctccacacatagtttatcaatagcaacataaaaaatctttgcacggtaatgatgaagattagtgatagtcctcccttctgctctngaacgaccccgaaccggtatttcatcatccatatttggtaccggaatacgtttagctcacaaaatccttggacatcggcataaaaattattccagccactctctctcattgtgcccaaccgagctgtgaaacatcaactaattccatggcattcacaatattaagatcttctctttggcatacatttgagagctcgtttgtgacacctaacaactgtaaca

SEQ ID NO: 63295 - DNA, 136 bp, Glycine max
gctatttatggagtttcactttataaagggaaaaaacaatataataatcaatggaaaaaatcaatcacatcagatttcccttccgataccccagcatgacacgtgtcccactctgcctagaaaagtggaatcaatg

SEQ ID NO: 63296 - DNA, 450 bp, Glycine max
  unsure (1)..(450): unsure at all n locations
agctngcaggggtcggtggcagactcaagaatattggaatgtgtaggggcttagtcccatacctccattgcagttcagttgtgcctgagcttgcttccctatttttattaattntgttcatgtatatgtgtgagttgaaactttctgctgaggaccaaaaggtaaaaaaattataaatataggaaccaaaataaatgtttaaaattatagggactaaaaagaanaattatcancactatcaagactaanagggtagttaaaccaaaataaaataaactagtgcaaaataatggtggtgtgattagacagttttaatcctaaatggctcgttgtagacatatatacctctacatattngtgcattctgcaaccaccaccattagtggaataaaaatntaaatgcaaacccttctatggtatattctatatacgcattattagtctaacaat

SEQ ID NO: 63297 - DNA, 430 bp, Glycine max
  unsure (1)..(430): unsure at all n locations
actaagctttcttattgaagtctgagtagagattgtcatcatgtgtcttatagaaagcagaatctgaagtggtgaggtgaagctgaagaacatgggaagtgacgttgtggccgaggactccataccagtggcaacagttggtattattatgattccaagacctaagcctatttgaaggatctatgagattattcttaatccttaaaagtgtcttacgctcacttgtgatgcacacactctctctgcatggtaagctgaactaccaaagcttgacaaagacaagaatatgaatgtgggaatccatgatcacacaagaatatatataanacaagtgtcgttgttggttctcatataaatcataaactgtatatttatactgctgncgtgctgtttttcctcactttcttatttcgacccctttaattttgtg

SEQ ID NO: 63298 - DNA, 418 bp, Glycine max
  unsure (1)..(418): unsure at all n locations
ggctgcagctttccctatttcctattatagggggagaagtgaagggaaaaaaggttcagccctcctggtaattcgagatcacttgaaattagtgaanaaaattgtttccgtgaagaanatccaagccgaggcgcttccgtaacgtttccgtaatgttttcgtgggtgatttcgcgaagattntcaaccgttcttcgacgttcttcgttcgttcgtcgtcgntcttcggtcttcaactggtaagttcccgaaatcgaacttttcaattcattctatgtacccttagtggtcctcatttgttttcacgtgcttttattttcatttcatttacttttcgtacccncttttgacatgctntagtcatttacttaagtcattntctcgcctaatcaaaanatanaataaatttccaccgatca

SEQ ID NO: 63299 - DNA, 399 bp, Glycine max
catttgtgcttaggaggaagaatgcattgcatcacatcgctaccatgtccttccaccacaattgtatcactatggatgtaccggttcttctttgttagtatatattttaaaaaatcggcatacagggggaatttgttgaagtgcttctacaaaaggcaaagtaatgtctattttcttgaagatatcaagaaatttggccaaatgtctttctttatcttttcgagaaggtaccaaaggataaggtacttctttgccttcatctggagtagtaatcttcttctgttcagtgtttgcctcactcttgactctcttcatctgatcatcaacaactatctgttattgttctcaattttcaacttataattcttttctgctttgttattctttctttatctttct

SEQ ID NO: 63300 - DNA, 441 bp, Glycine max
  unsure (1)..(441): unsure at all n locations
cccatcacatgtggtactangtggctgtcgggcgatggtgcacaacaagttttccacatccacaaatcgcgcataaacccaccatcccctgttgcccacctccaactgagctcacgtactcccacgtagcccatatcatcgtttctctcaacaccgggtccccatcaatcctcccaagcttcccaacattcaattaattcaacatccaatcatcatggactaacaaaaccaagcaaaacagggcaaaggcagaaaactctgcccanaacacaactcanaatcacagctgttctcacttaaagaccccagtaacaattccttctttccaattccttaaccgttggatcgactcgaannatttactggaagtctctagtacataagcctacantttgaaccgtgngatctactagtaaacatccagaactcattctgcactac

SEQ ID NO: 63301 - DNA, 368 bp, Glycine max
  unsure (1)..(368): unsure at all n locations
gagtaatatgagatacttaaatcaagagtgactctttatactcgatgttacggagtaggacggaaaacttgcaatgatgtctactaatgttggtatggcactgacatgccaatttccattttcatcctatagacataatagcaaagaatcttcatgaaaagggaagataaatgcttcaagtaaaaggagaatcacattattatcaatctattaccaacaagccactgtgtatgatcaagncacaaaggatgaaacctttgtgtgcctttactagccggataacccttgtggtggaagtcaactcttgaacataattcccatctgacaggcctnttatccattctcggatcacttttagactgggatct

SEQ ID NO: 63302 - DNA, 439 bp, Glycine max
  unsure (1)..(439): unsure at all n locations
gcaagctattatggtaggatttcttctgtaatggttctctatacaccctagttggggatttctaatgaacaactgatgtaaatacctaatatctaattgattctgttttttgtgttcaatggttgatgttngtatgcttttggtctgatcacccatttgtgtgcacagttaggtgacattagcattgggaaatgtactgttgccttagaacttaattgaagcgggatcgaaacttagtcttacataagggatctacgagttaaagtttggtttaattatgttgtacaataatgctgttagtttaggctagtcttacatganggatctacaacgaacttatgctatatatggctaactttcgtagctacttgactgagtctagtcttacacagggattgcgacanactcattaagtagtctaaactagaggatgctaatc

SEQ ID NO: 63303 - DNA, 391 bp, Glycine max
  unsure (1)..(391): unsure at all n locations
atactagctggttcttaaaccccatttcttgatggaattttgagtattgaaagaactatctgtgaagctagcatgtttaagagatgcagcgcacgtatctatatatatgttctggcatcttttcgtctttgaaggattcaaaatagaaaggcatatattgcatgcctatgtgactactaacaattctgaatntctgatacgtattctacatcatatttttaattgacttttgaggggggggaaaaagttgacaaaatatgtatacaaatacggngttntatttatttctttaaaaaataaattgaaattagtgtaaatatattattagcaaatatcatgacttgatacaaataatataatgattagtctcggtagaaataaattgtatctc

SEQ ID NO: 63304 - DNA, 500 bp, Glycine max
  unsure (1)..(500): unsure at all n locations
agctngatagacctgtaattcttacactngctggtttaccactctcaacattgngcaatgcttgtccgtacttatgggctcgancaaattatcaccccctacctgtcaaggctaccaccccggacattagacaatcttcaacgcaggacaatctcttttgcctgcaagtcggctcagagcttggtgttagacaagtggcctcagaaatcttaagaagggggggtngaattaagaatatgctaactatttcccccaataaaacctactcagaattttatgcaagttctaagtttcctttataacanattacttagatgatgaatcanatgagcaaactgaaatgagactaataaacaacagtaaatataagagataaagggaagagagaatgcanaaccaaatttatgctgcttcggtcacacccttgtgcctacgtccagtccccaagcaacccgcttgagagtccactatctntgaaattcttacaagactgacaccac

SEQ ID NO: 63305 - DNA, 433 bp, Glycine max
  unsure (1)..(433): unsure at all n locations
ggaccttagaaactcaagcttacgccttggatcttcttcataatggagtccttggcttcttggagatctatggcaacggaatggagaaggaagaaagatgattggagacaccacttcaaggagaagatgagtcaagaagaagctcaccatcataggaagccatggataagagcttgaaggtaggagaagatgagtgaagggagagggagagaaagagcacgatattntgtgcctcaaatgagttctgaactntgaattataattctcaaatgataaaagttgaaaaaaatgcacacacatggtctctatttatagcctaagtgtcacacaaaattgaaggggaaatttgaattttattcaaatttcactcgaatttgaaatngaatttgtggagcccaaatttggagtcaaaatttcactaattatgattagt

SEQ ID NO: 63306 - DNA, 433 bp, Glycine max
  unsure (1)..(433): unsure at all n locations
atatttagcagatagcccaaccaacttcactattcctagttagaaattccaatattctatattacctgctcattagctggaggaggaaggcctncaacatacacccgcctagcattgtatgtagccttgtaattcagtacatcaaagataggccataatcagggaaagtcatgctaaactttaaatgaaacttaaataagactgtagtcagtctcagcaagccttcatactcggaaagactaaacttaaaatgttgtggtgacgaaagtagtgtgtttctactctttttctataatgactctntttcttctcaatgaaagagaatatnttcttccagcagcacagtgatactaaacaaacaaaagcgcaatanaaagaaacacatgtaaaaagaagacagaacacacctttcacctacagcagcacatgatac

SEQ ID NO: 63307 - DNA, 372 bp, Glycine max
tgcccagagaaggaatccacggaggaaatgcttaccacctctaaagactggaaagcggtttctaatgactcctctgcggcctccacataaggcataaaggatgggcagttcaccaagatgtcttcctcgcctgatacgatgaccagatgcccttccactacgaatttcaaattttggtggagtgtagagggaacaactcccactgagtggatccacggacgccccaacagacaactgtaggggagttaatgtccattatttggaaagtaacttggcatgtgtgagggcctatctgtactgagaggtcgatctctcccctaacctctcggcgggtgtcgtcgaaggcacaaaccaccattgaactcggcttta

SEQ ID NO: 63308 - DNA, 411 bp, Glycine max
  unsure (1)..(411): unsure at all n locations
tatatggacgaaagtgaaaaactcctattttgtggtatgatgatggagaagcagtacttcttggacctganatgctacaacagattaatgaacaagtgaggttgattcgagagaagataaaagcatctcaggataggcagaagagctactatgatagaaggaggaagccactagattntcaggaaggagaacatgtgnttttgaaggtttctcccttaaccggagtcggaagggctcttatagctatgaaagtgacacccaagtatctatgtccatatcagattttgaagaagaatgggcctgtagcttatcatatcgccttacctnncgagttatcgaatttgcatnctgtgtccatgtctctcaactgagacggtacaacccggatccatcacatattcttgcagtgga

SEQ ID NO: 63309 - DNA, 357 bp, Glycine max
  unsure (1)..(357): unsure at all n locations
gcgcatanagcttcaattagagagaaggtctgttgtattattgaattcgnatggatacctaatgagacaacaaaatatatggtgcctttggaaagctcttacgcaaagtacgtcctgctctattactctttccttttttccctaaagagacaacacaatataatggatcattcatgactcggatgtgacagtttattaatttcgcctataaacatcatcattcgacacgtgtggttattggtgcacaatgcatatgtatgaagaacgtacgcccatatatttactaaatttaccacattaatatcaattacttatataaatgtgagatgatcctctctgacttgtgaccataattgc

SEQ ID NO: 63310 - DNA, 482 bp, Glycine max
  unsure (1)..(482): unsure at all n locations
agctntgactngagtcatcaagagattataaatatgtgaccatgacatgagtttcaattaattatcatcgtcaatcatctttgaatcatctatctttntcaacatcatctctcagacatctttcaatcaatctttcaatatctttctatagaaatttctgattcatttctcttcatctttctaaaagttgtttatcaacactttcttttccaagaaaagatctttggtcaaaaacttgtgctatgtcatcttttcattctcttctccctttgccaaaagaacgaaggactaaccgcctaaattcttttgtgtctctctnttcccttacaaaagattcaaaggactaaacgcctgagaanttctttgattcttcccttccccttaagcaaaggatttcanaggactaaccacctgagatatctttgggttctcttacanagaatcatagaactaaccgcctggagaatcttatcctaacacat

SEQ ID NO: 63311 - DNA, 399 bp, Glycine max
  unsure (1)..(399): unsure at all n locations
tagcctgcaatcttgaaacanataattaatattctacacacatatgttgtacaaagtctgaatgaagatgtnttggttccttattaagtgcattagtgtaaaatagtggatgcaatgctacatgtaaggttcgactcaattaacatgaccatgctttagttagaaggagaagtttttcctgtcttcgtatactgtgagttggaatagttggtaaacttgtacaggtacaaagtttcaaacactgaaccatgggtaatgcatgaattaaataattaatccaacctgcaatttactttaatacaacatttatgaaacatacctaaattgaggttaagcttcagttaaggaatcactacttatgcattccaacgaagcatttcaagccacacgatgggagat

SEQ ID NO: 63312 - DNA, 505 bp, Glycine max
  unsure (1)..(505): unsure at all n locations
agctntataagaaacanatgtaactctatttatattatctaaatatattttaaggtttaatataacattcattataacttatntaaaaatatattttacaataagacatttaaataaacatttatttttcaataaacttaattataagctttaccttatatctctntatgtaaattaacacaattaacatctaaaaagacaaatacatttaagattttaaagtattataacaaatttagtataataattataaggctaacatgggattttattctttcttataatntaaatctgcgaatttggttcttttatttctaaatcaataaatntaatccttgacatgacacaaatgtagcataagattaaataaagtgaaaaaaatcttaataagaattgaattcatgaatttttattcaaacataacataataaacaaccaagacgtttatttatttggtaaacttataacaccatttatatatatcatttgcaagaactgtaacttt

SEQ ID NO: 63313 - DNA, 428 bp, Glycine max
  unsure (1)..(428): unsure at all n locations
tcctagaaaaccatgaattgttggctttctaactttattacaagcctagaaagtcctttgggttcatttcatgtgttcattgctatatgatatgagatgaaatgcaaaggttggaacttgtgttggttgtttatgatggaataagcctaaacacttgagcttgagtgaaacaatgactgtgaggttttggttgatgatccttccttgatttctgtcatgcttactagcttatttcagctgtgactctaatgcttatgctcttatctttgaaaagctgcatgcttgtgagaagtaattgatttaagcattccacgatattcaattcatatggttgaattccttttagaatcagacaccattttcttttgattgaccactgtctntgtcacttgaggacaagtgagcagttctttctttgcttgagcaca

SEQ ID NO: 63314 - DNA, 461 bp, Glycine max
  unsure (1)..(461): unsure at all n locations
gtcacctgatgctgcagctgctgtcacttcatgaacttatgggcttcccttccaaaattcttgtgtcccttcaagtaagtcaacaaactatagcttgaactctatttgcttgtctattgatagagtntattgatcttttatcatcattacatgcaataaaagttctacactggtgtaccaaccattgaacaattataattaacggacacaataccatctataaacaattttgtttttccatagaaattagtttgtataacaagtttaaactttaaactgggccgacattaaaaatccttttgcagtctaacagtgttattaatggacgttattgatntcttttctaaacagatggggatcagcgcagttgattcttcagttgctggtctaagtggctgtncttatgccaacggagcttcangaaatgtatctaccgaagatgatgtgacatgctgaatgga

SEQ ID NO: 63315 - DNA, 430 bp, Glycine max
  unsure (1)..(430): unsure at all n locations
tgaagtgaganagtgtggaagagtcagncttcctacttttattcgttgaccacagagtggtacctggagatatgtcgcaggggtcacgagaccttggggatgtcaggtggggtgctattgcccaaaaccaagcttaaccaatcccgacccaacccaggcatagtcagtcagtgagaacctgtgacgtacctaaacaagcgagctcctggcagtcaaccgataaaagaacaaagaccacaaagcaaggaggcttgtgtggtggctggccagctatggatcttgagtgatatctagaatatggcctctggtaatcgattaccaagggtgtgtaatcaattacaaggcttaaaaatgaagacaggaagttaagatggcctctggttattgattaccaagggtatgtaatcgattaccaggccttaaaatggga

SEQ ID NO: 63316 - DNA, 449 bp, Glycine max
  unsure (1)..(449): unsure at all n locations
ctgcaagcttccacaacatccnctatagtaaaaggaattgattttaagagtacctctcacaacgactataatatttctgacgttcatgccacagctctgtttccataatgtcactttcaaagattgtctacaaaaattttggaatgattttcaggaacgaactatgttacataaagttattatatagtgttcttgatcatacaagttgtttataagaagcacattgagcttttattacccttctcttggaagccttcacatctcgtttgtaaaccaggaatatgattactaccagctggaagctcgtaatatacacatctgatacattaaccccaatatcaaaattataggaagttgtttgaagctgaatgctaataatgaaaatcataggtatatctctatcttctaatatcatacaagacactatcttcttttttgttgcactaatg

SEQ ID NO: 63317 - DNA, 350 bp, Glycine max
  unsure (1)..(350): unsure at all n locations
ccttattgganaatattatagttaaattagatccatgatataatttttatataaaattacaagtgcaatgacactnttaattcgcaaaaaatattcacctccttagaatgatttttattaaggttatgattttttaaatgatcagtcaataaaaaaattttgaatttgatgtcattgcatatgctaatatacattcatattttattatgaattctttctataaaaaacaattaaataaatagtgtctgtgtaaacaaaaataatgatattcttatcgctttacaataatttttttttgtgttgatagcatctattcaagagttaacaaccaaaggattaattcttttgtt

SEQ ID NO: 63318 - DNA, 459 bp, Glycine max
  unsure (1)..(459): unsure at all n locations
agctngcatcagtataaccctttagtttcaattcagagtctccatanatgaggaattagtctttagttcttcttaagtacttaagtatggtcataaccactttccaatgttcctcaccagggtttgcttgatatcgactagttacacctagtgcataagtgacatcaggacgtgtacaagtcatggtgtacatgatagctcccactgcgctagcatatggtactctactcatgcgttctctttcttcaggagttgttggacaattctccctactaagagtaattccaacacctacaagaaaatagcctcgtttggaattatccatgttatatctctttaagatagtatcaatgtacatagattgggagagttcaagtaaccttttagatctatctctataaatctttatacctagaatatagactgcttctccccaattcttcatggagaaattgtcta

SEQ ID NO: 63319 - DNA, 281 bp, Glycine max
  unsure (1)..(281): unsure at all n locations
gttatatataangaaacaatcaagcgacatggtgcaacataatacttgcattaattataataactgtcaacaatagaaattggaaatccaaacaacaaatgtcataattttaaagacttgtattcacatgatcatctgaccaagtataagataacttcctaaggcacgaatgaaagtagtgagatatatttagttcttgacataaactaattttacatgcattttatcttaaacataaatacaattgacagagaacatatttgtcaacaatctcatactaa

SEQ ID NO: 63320 - DNA, 511 bp, Glycine max
  unsure (1)..(511): unsure at all n locations
ggacttaagcacgagctcagctaatgactgaataaaatgtntgctttntatctgaaggatgntacctgcgcgaatgtgcctcttgagtcatctttccagaaagttcccagatgtgtatatacgtcaacaagtttatatgagtatcgaggatgggactcataagctgccaatcctgcacaccgtcggcttacttggggccttagattgctggaagtaagttactaagtatttcttatggggtgagtattatggaattaatactctactctgacatcttgtgctcaattntacttctattcttgccccggggagcgtggcagtgaaggatatggttcttctgattaaatttcaagttgaatctattggtgtgaattaactttactatcatgttcaggagaaggaanggaaagtttttttaatatgatgctattggccttcttagtaaataatatcaacttaccttggacaagaatntgntaccaagcaacggatgattcacatgggcgctcta

SEQ ID NO: 63321 - DNA, 465 bp, Glycine max
  unsure (1)..(465): unsure at all n locations
ctgtttatntaaattcctaggatcatgggcaactatgtgtgtcctactatgacttgagaaacaaaatgtggtcaaataacaagcagaaatttaaaaggtactaggttgcctcctagtagcgcttctttaacgtcttgagctggacgcttgatggcttgtcggtcacggacctagtactttgcttatctttggctttggacttggtcgcctgctggtcggccatgggtcgtaggcaacgcactaacgttttttgtggatgagcttaagggctttggaggtggcggcggtgcgtctgttgcccgctgccagccatccccaagctactgtggtgtcttgcccggcgcctgcctgggggcgtagtacttcttgatgaaagttcgattagtagggggcctgatgaccttgctgggggagacagacactctatggaactaacagaagcccataatcagagctggcactcca

SEQ ID NO: 63322 - DNA, 462 bp, Glycine max
  unsure (1)..(462): unsure at all n locations
tggaaatgacgacaatgatgatgataataatgatgatattgatggtgacagtgaaaatgagaataacgaccatgatgaaaaaatggtgatgattattttctaaaactcaaaccaatcccgtcaatttgaccgtgaaccttggtctaatcatattaagtgtttattggattaactttgcattgaacctaatacacccatcatcactacgtcacttcccctccaccaccaccatatcacttccaccaccattgttgtcattgntattcaacaacctccattcttgttactggcactatttctactcaccatcacccattattttaaaaactgaatcgctgtttatatagtttgatcaaaaacattattgtacatattctgttcatcaagaaattntgttgactcatttatatattaatgtttattggctactgctgctacctctatcatntcttctactacatg

SEQ ID NO: 63323 - DNA, 456 bp, Glycine max
  unsure (1)..(456): unsure at all n locations
ctatttctataatagggggagaagtgaaaggattaaatgttcatctctcctggnaattcgagatcacttgaaattagtgaaaaaaattgctccgtgaagaaaatccaagccgaggcattttcataacgtttccgtagcgtttccgtgggtaatttcacgaagattntcaaccgttctttgacgttcttcgttcgttcttcgtcgttcttcggtcttcaaccggtaagttcccgaaatcgaacttttcaattcattctatgtaccattagtggtcctcatttgttatccatggcctcctatggtggtgagcttcttctagactcatcttctccttgaagtggcgtctcctctctctcnttcttctccattccgctgccattcatcnttcaagaagcanaggaatccattgatgaagaagatcctacgcctaccagcttcaatggagcttacaacacg

SEQ ID NO: 63324 - DNA, 413 bp, Glycine max
  unsure (1)..(413): unsure at all n locations
agcttcggaagaaagtgatgaggtgcaagcgctatatgcatagcttgaaagagcccgggtagtcaaagagaagttcaagtccatagccatcanagtctgaagagagtatgatgaactaagggacgttaatatggccaccgatgaagccttggaatgagaaaccaagaaggcccgaaaggaagaacacgaccaanacaagttttgaggggctttatatggcagcaatagtgagctcaaactctgaagaggtgaaaggaatcatcatgggtcaaaggcatgatctggaaggacgagctaaaggcttgccttangtcgaaaagaaatttgtcccaacagttaaagtgagactgaagggaatatgtgggccatcatcgatgagtgcaaagagaagctaaatctagcggcgactcacg

SEQ ID NO: 63325 - DNA, 479 bp, Glycine max
  unsure (1)..(479): unsure at all n locations
gctcctgcttcgtttccaatacttttttgcaagaaatctatcttatgaacgataanaattgccaattgaaatgcaatcgcacagcacaacaggtcgaactttntatgatcaagttgcaccatcaaactatgaacaggaactgggaacaaatgcaaaggaaaatatatcatgcatctgacaaaccttaggattaaacagaatatagttgatttattatagttaattatgcctttgattaatggtggttgtatctttaaactatcaatatttgagcataaataatgataatgtttcgagtaattttaaaatctgatcatcntattttgtgattagaaattattttcattgtatagcatttatggtgtcatcagctccacacagctatccacgattagaaattatttcttttcttttttcagggtgcctcaattagtggtggataagctagtgaanatacaacgtcgatttctatggggagc

SEQ ID NO: 63326 - DNA, 499 bp, Glycine max
  unsure (1)..(499): unsure at all n locations
atctctgagtcacctgcggcatgcaagcttgctngcaatcaagttcaaaataacattttggaggtatagatcgtgaacccggttcatggtttccataagagcagtagcttctgcctcttggataggaggattacctatatggatagagattttagcagcgatgaactcttcatattaatttcaatgcatgttacagtaccgaacttgcatgattccacaaacaaagatgcgccaatggttcttctttcatcagcccatttcagctctgaccatggatacacactatcattggtgtctcggtgaatgcaaggcttgggcttgaccactgcctcattggggatatatccctataaattgaggattggaattggatttgccatatcctacacttgacattctacgatgcatangcccatattgaacaacaaagtcatttgtatgctggcttatgacttagcaagagaaatggttctgtaggtatcacttattacaatggtgg

SEQ ID NO: 63327 - DNA, 416 bp, Glycine max
  unsure (1)..(416): unsure at all n locations
tatagctatgggagggagaataaaacaatccanaatcaattgtacctcttaagtaacgaagaattctttntgcagcttttatatgagaagaggtaggagcctccgtaaagcgacacacaactcccaccgcatatagaatatcgggccttgtattggttagataccttaaactccccacaagactcttgaagaccgtggagtctaccttctctccttcatcaaactttgataacttcaagccaccttccatatgtgtgttcacgggattgcaatcaagcatattaaatttcttcaacacttcttttgtgtagcttccttgtgagacaaagatatcattctccgtttgcttcacttccattcccaagtaatatgacatgagtcccatatctgtcatatcaaattcacgagacatggac

SEQ ID NO: 63328 - DNA, 470 bp, Glycine max
ctaagctggagctcctaggcttagaatcgcattcgggcactcatattatatcctttatgctgtccctatacatataaaacagtcccacaatcccaagcttacaaaaccatgcccatatgccattgacgcatttcaccgatcacttggtaagcgcatgttcatgcatgaatagcaagagagtgggggcaacgtggcatgccccattgcttcagaatgcaccctatgcctaaggccatcccctacaaccccccaattccaaccaatcaagcatgaaacaaagccataattgctccctagatttgggcatattcacacacattagagcaccaaaagaagaccaagatatattaatggaaagctagaaagctcaataatgagatacttacttgatggagtgagtaacaacactaagaatggaagcaatagcgctcatatggtggcctatgggtgacaaacccttaattccatgg

SEQ ID NO: 63329 - DNA, 352 bp, Glycine max
  unsure (1)..(352): unsure at all n locations
agcttgtnggatagctcctatagcttataagcctcattttttagagnncgccagagtcggaagaggctgacctaactgtgtgctagttctccttccctagagtcattccttgcatcactatgcattcttcagactaaatcaccctccaagaattctcttggttctagtttcgaattaaaccttatggctatcctctatttgaatgcttcatacgcgacccatgcttaatccctcacttcatcaaccacgatgagtccaattattgaaccctccatgttccctgcctcatcggaatatatctgttggaatgaaggttctccaatctctactggtattaatgcatctgctccat

SEQ ID NO: 63330 - DNA, 416 bp, Glycine max
  unsure (1)..(416): unsure at all n locations
catagacaaaggaaatactattcatgtgttatgattaccattcnatatntgggtccattataaataaaacaaaaataatcactcccttcacatattcagtgactatttgtttatgagtgcaatgatgatgctctaactgtttaaaataattatacactgtcaatcaataaaaatctattacttgtatgaattttaaaatacatgatattctatgatgaaataattgcgttaaattattttacattggaagtgtacagagagacgtttaatttagttgtttcatgactataatttaaagataagatcctatattattcttgttctaagcacaaattacaagtttattgatggactcttaaaggagttaattctgaatggaatgttttcacctatcaatctatacgagtactttctct

SEQ ID NO: 63331 - DNA, 400 bp, Glycine max
  unsure (1)..(400): unsure at all n locations
agctntgagccanaatcctgactcactataaactcttgacccaaggtgagaatgccaatccttatcctcggaagcaaaanaagaagagaaggaaaatntccaatcataggagaaaggagaaggaaaatttccaatcaaagaacaagagaaagataatttccaatcaaaggaaaaaaaggaagcaaagaaattcccaatcaaagagtgggagaaagaataaaagaaaagataggaaattcccaaccaaagaatgggagaaagtataaaagaagaaagctcctgatcgaaagaaaacagaagagatgtgcagagaggtctttggaccagacaatatctgaacaatacagaattgtcaccaaatgaacaanagaaagaaaaggaaaccacgacctataatggt

SEQ ID NO: 63332 - DNA, 441 bp, Glycine max
gagaagatttctaaagaagctagagcttattgtgctctcacatctctaatagctaagctcacctccttgatatgagaagctagagcttatgacgtgccattattttcttctatttcttaaccctttttacaccattgtaattactaattagtcttaattgtcaaattaaatatgcagttttaccatttgagcctattggattaattttgtgcttttaatttaatttaaggagaattataagcaattgggcttggacttgaagagagcatactattttattctaccaaattctatcttatctagatattatttacatttgatctcatctatattttatttcatctagatcttatcttatctagattctatttcatcatggcgttggattaaaacagatttggaagctttggggctgaaactatataacagcaccatggttct

SEQ ID NO: 63333 - DNA, 502 bp, Glycine max
  unsure (1)..(502): unsure at all n locations
agctcgaatccaattcgntcagcatgcttttattattgttgctagtgtataattgcgttgtactggcgtcacataaattccaatcttttcaatatatttagtagcactgctctaataaaaaagatacgatactaattagtctataatatgagttaagaaaaatttaatatattagagaattaaataaacttaagagttaagaatacatctatgtgtataaccacctcgcaagtccgtggtagaatttcagcttaatcgggcttgaggcattgagtcaagtatcagttttagatacaacctctaagatactcgatgttgcactctaccagcaagatcacattgcatctacaggattcagctataacagaaatctctttatagtttagactatgtgtattatatccaggtattgatctcaggaacaagtgcacctgataattgcaactgattgaacaaatataagccatatgttgaatattaccaatggctatatgtacagtca

SEQ ID NO: 63334 - DNA, 302 bp, Glycine max
cgtgagccaccgtatagagagatgatctgaccacccgagtgaatccactccttggagtgaggaaactatgaagttagacagcctcattgagagagaagataaatattttgggaagtctctatcctctagcttgagtgagtccccatcgaatgagtcaattttgtaaacacatccttgtaaccctactatcactttgtatagtggaagaatctccatattggagaattataatcgcgtgctcccattactacttgtaattactaagtgcctatccttaacttcacgatgcgggaaagtccgag

SEQ ID NO: 63335 - DNA, 423 bp, Glycine max
  unsure (1)..(423): unsure at all n locations
agcttctgagacgtttccggaagatttccatcgttcttcattggtcttcgtacgttctttgtgtgttcttcggtcttcaaccagtaagnttttgaatccgagactttcaattcatttcttgttttgttggctttcatcttcatttcgttcactttcggttttcttttcttccgctcttaactgtttatttaagccgttatctcacctaataattgataaaatgaatttcaaccgatcattttttatgaatgaccattaatcattgttaaagataaatctaaccgatcgttcatgctgtaacctctgttaaacccaaaaaagaaaaataataataaaataatcaaaatatctttgaataaaataatcaaaaaaatcaaatcggacattnttctttgaaagtttccttgaatgaatngactaata

SEQ ID NO: 63336 - DNA, 299 bp, Glycine max
  unsure (1)..(299): unsure at all n locations
actctgaccataggacgtccttcccgcgaagcttcttttcatgtcagcctgagcgggcttatagcctaaacgatactttccacgactacctggggtatttatcaagctattctatgccgccgaagtttntttctaaacccatcccgggctcataaaccgttccgccaacataactcgggccatcattaccgctgcatcagacatactatgctgcccacagatggagtccacggaggatatgctgaccacctcataagactggaaagcggtttctatcgattcttctgcgggttccacat

SEQ ID NO: 63337 - DNA, 448 bp, Glycine max
  unsure (1)..(448): unsure at all n locations
agcttacgtatggctaaacatgtaccatatcaattgcanacgagacaaggaagcaaaacacaacactgtaacactgctaattctaggaaatattgttacaccattgacattgtcacatggacaaggtactgaaggcaaccttattgtataagaaatttgaccatgacaacaattatcctaagtttgacattgcagttagactacacattgatctaccattactatatatggtcctaacagtaaaacaatgacgaataattatatttntggttntagtcctatggtgggtgtatgcttatatntttgaagtgtctagtgtccctcaacaaaactactagaacttattagagcaattggacgtaattatcttagatcacaactaagtggatcaagtgtcaatattgaacgggaangtntatctatagaagacatgtgtcctaatagttat

SEQ ID NO: 63338 - DNA, 300 bp, Glycine max
  unsure (1)..(300): unsure at all n locations
atatttctatcttaccttcatgtacacatctgtatctggatcaggtgtaatatttgcttctttttctcttctgaacacctctgctagcaaatctgcagaatgtgaaataattttatttaaaacttganttttcatatgaaatttggctcgatttccaaattgcagctctgtgggctaaccataaggaggcccaactccttggactcatgctgagaaagccagggtttctctgactgacatctctccaatatgaagatcattctgacttacaaactcattcatcccatgaccattataagt

SEQ ID NO: 63339 - DNA, 485 bp, Glycine max
  unsure (1)..(485): unsure at all n locations
agcttgtcntcagcgttatgctatacggagacctacatgctagctatcatcgccaagtaccaagaagaagtgggtctagccaccgcccacgagcatagaatcacggatgagtatgcccaagtatatgcggaaaaagaggctagaggaagggtgatcgactctttacaccaagaggcaaccatgtggatggatcggttngctcttaccttgaacgggagtcaagaactttcccgattgttacccaaggccaagcaatggcagacacctactccgcccncgaagagattcatgggcttctcggctattgtcagcatatgatagacttaatggcccacataattatgaaatcgtaggaaacttgtatggtctcttagaccttgactagatatgacttcctttntttgaaatanaatgaagtggtcccatgttcctacntccacaaacttgtgcanatcanatcacttctgcatctcatctctagcatg

SEQ ID NO: 63340 - DNA, 393 bp, Glycine max
  unsure (1)..(393): unsure at all n locations
atcaagcctatgctatngtgccagctctcaatggggctaaacacaccaaatgattatgatgatggatggctcaaatactcacaaagggaaactcatcactttcaaattaagctttcaaaactatcatgacatgtagagaagaatcaaggatttcaagccacaaaatgtcaagaacttntattgtcaaaacaattaccaatttcttgaacatatcctataattcaaagaaaaacatgcaaattcgtacgtgcacacaaatatgacccanaatattaaactggagatttgaagaaactaacaacattaacaaattaacacatctaacatattaacaaaaccaacataactagcaaaaccaaagaacactcctcctcatacgtagacaacacattc

SEQ ID NO: 63341 - DNA, 510 bp, Glycine max
  unsure (1)..(510): unsure at all n locations
agcttctccccctatttgctataaataggggatgttgtgaagtagataagggttcagccccttaggcacttctctctctctcanaatagcataggaaaattagttccatgaagaanatccaagccgaggcgcttccgtaacgtttccgtgagtaattacgcgaagattctcgaccgtttttcaagattcatcgttcgttcttcgttntcttcagtcttcaacgggtaagtacctcatcccaagcttttcaattcattctatgtacccatggtgggccacantttgtttcatgtatttttgttctcgttttcatttactttntatacccccttttgacgtgcttaagccatntatttaagtcatttctcgcctaatctaanaataaaataaatttccaccgatcgttngaattgtatcatcccgtaaatttggtaaaatgaatccgatcgttcgtcggccgaaccacgtggaatcaaaagagtaaaaaatatatatatcaaaatcctttag

SEQ ID NO: 63342 - DNA, 312 bp, Glycine max
  unsure (1)..(312): unsure at all n locations
taagcttaccttgaaatgaggaaattcgtaaagaaagatccagtctattatattaccttcataagnagaaaaatcatctgaaaggcttgcaaaatgagtataccacactcaataagcttcatgattgcctaaatgacgaaaggtgtaatctattgaaagaatgttcacatgtccataagaattatgaaaacttagaggcaagtgaacataacttatgggttgattgtgaacgatattgttggatcaactggcctcataatattaagaagggggggctgaattaatattactgcaccttactaattagaatct

SEQ ID NO: 63343 - DNA, 466 bp, Glycine max
  unsure (1)..(466): unsure at all n locations
ctattatcattggccggggctaaacaaacagctatagagtctagtgctgtcacagaccaaagctcatcctcaagaaggttcanatagacatccaaaccgccatgggcccttaattgctcccttgaattgcgagatgcatgagccatgtcacatagcaaaggcaatgcatactgtntcaagggagaatttgatgtgatgaatagcatcaaatggggaatgattccattttcagctgcttgttcttggctcctcttatttatcttgcataaatggaatagtgcgttcaagacctatagaaaatgaaatttaagatgagactcaagccaggtttagaatgccgacgaagcaagacaaagaaatgacaactaaaattacagaaattacacaaatctagaaatcacagcaacagtgaaatgaattgaatagttgtccaaatccacatatattaattataggtactacatac

SEQ ID NO: 63344 - DNA, 422 bp, Glycine max
  unsure (1)..(422): unsure at all n locations
gctgagaaaacattaatgatctaattctccacgaccgaccaatactaaacatgttattgtttgtccccacagttaactgcatgcacaattatcaaatttagaaaaattaagacacatgcataaatcagagagagccactctaaatcaattgattctctatatattctagataaaaacaagggtaaagaactaatatgggacaatagatatgacattatcatcaagatagctgaaggattaatntacctgcatgattactccaacattaggataatccgcacagatataaaagccaacaacatcttattgataaaatgcttacaactncaactccaagaatgattccaacaattagacccgatttattggttgtactactacgacggtttgtactaacagtaggtatgaaatctgtacaatat

SEQ ID NO: 63345 - DNA, 449 bp, Glycine max
  unsure (1)..(449): unsure at all n locations
agctngagatgaggaagtgtngaagggtgaaactttctgcttntattgttgaccacagagtggtacctggagatatgtcgcggnggtcatgagaccttgnngacgtcaggtggggtgctattgcccaaaaccaagcttgaccaatcccgacccaacccgggcatagtcggtcagtgagaacctgtgatgtacctaaacaggcgagctcctggcagtcaacagataaaaggaatacaagaccacaaagcanggaggcttgtggtggctggccagctgtgaattttgtgtaatatgtggatggtggcctctggtaatcgattaccaagggtgggtaatcgattacaagggcttaaaatgaggacaggaggctaagatggtctctggtaatcgattaccaaggggtgtaatcgattaccaggcttgaaaacgaagtcaggaaacttatggag

SEQ ID NO: 63346 - DNA, 451 bp, Glycine max
  unsure (1)..(451): unsure at all n locations
gctgtctatgatttagagagagaaaggccaagtttctntatgttttagagattntgctgngngaagatctgtagagatcagagcttgaagcagaagccgttctgagagattgagatgagtttgtgagtggttgtgagatcctagaggtgaaggagacatcctcaccacttgtatttgtgtaatctttcatcttgttgttctctttgttgtaaaggaggcttcctggttatggaaagctaaaatcctctgttggatcttccttgtagaatatcgttctatctatntaatgatgttttgtgtgttctctgtgctatcagctnttcattctagtatgcctttaccttgatcacgcagatgcatgctttgttagggtcatgcaacagtggaaactggtatgattctgatgaccttgttaggacagggctatagtgtcgtactatcacgaagaatc

SEQ ID NO: 63347 - DNA, 415 bp, Glycine max
tacttggttatgagtcttatgacactcaagtaatggctactgtgaaagaaattagaatttaaaaacctgtaaaagggtctaatatgttgcgttggaggattggccatgatcttgcactgtatgcatctgataacagggcttttacagaagtcatttatttagaaagttttgctgattaatcttcagataaatttctcatcctgcattcgatgagtatgacatgaccatcattaactactaagaagtaagatatttatttctggagtgggttctaatggaagggaaaagggaaatatttattttaaataagcgatttttatgttataatataacaaaatcatacaataatcttgtatctgtctttttctttattaaaaaaccaaatttaattattactgaataaattttctccctc

SEQ ID NO: 63348 - DNA, 467 bp, Glycine max
  unsure (1)..(467): unsure at all n locations
aagcttacataatctttatttttttaaactcgactgattctattttttttattaatgncaatnnattcattctgttaaacaaatgagttaatctgatcaaaacttaacaaattaaattcaaataattcataaatagtttaactcgtttaaatataatttaacaatctaatttaattgaagcttttcaaagttaataaagttataattaataattcgatctaccattatattctcacaatctatttagtgtattcttttgggaattaatctttcaactctctgtgtacaccaattaaaaaatctttcaatttccctataactctctaacagaattactccttatgattttaaatggagaagaaagtgcccttaaaaacgccaacactactcgagcatatatatatatatatgattgtttcttacctgtatcttgtgacatttaaaatgtaggtcaatatcagtgttga

SEQ ID NO: 63349 - DNA, 420 bp, Glycine max
  unsure (1)..(420): unsure at all n locations
acctgaggcatgcaagctntataagtgcgggtctgtgagacgaatgttatgtgtttgctatatgtgaagaggatgttccaagtacttcgtgattggtccgaccatgccctcctgatttccagctgggaaattggcgagtggaggaacgccccggcatttacgcaacaagcataatgtaaacctttacggttttaaaagctctatagttgggcctaggctntagagttttcattttggtaaggctttgngtctttggttttgaaattataatacaaggatctttcttcatctgttcctgggctctacccattctcattcatttgcatgtctacttctttttctgaaacggcagattcgatgacgagtccctcgaatgtactaatacctgngacccgtctatcaacttcgagcaagaaatga

SEQ ID NO: 63350 - DNA, 442 bp, Glycine max
  unsure (1)..(442): unsure at all n locations
actaacgcttcctcatctccaaatgttcatcttctaggtcttcatctttaccattgtttgttagggctggatggttcaatgatataactgtacgatccacccttgcccacaattttgatgatcacaaaggtatgaattgctgttaatatactaatgaactatttctaagtggacatgacctacaatataagagcacacatgatattaattcctaccttacaacaattttaagtacacgttcaattgttaagtaaaaaattgttttattaataagtaaaatccaacatctaatgcgttgctatatatacaactatcatccactctttatgaaaatcagtgtctatacanttgagttcttttactcacatccaatagacattaatcacttaaactntgatcttatatacataattgataagtgacatccatagaaagtgacaag

SEQ ID NO: 63351 - DNA, 471 bp, Glycine max
  unsure (1)..(471): unsure at all n locations
agctntatatggacgaaagtgcanatcttctatttgttggtatgatgatggagaagcagtacttcttggacctgaaatgctacaacatgataatgaacaagtgaggttgattcgagagaagataaaagcatctcaggataggcagaagagctactatgatagaaggaggaagccactatattttcaggaaggagaacatgtgtttntgaaggtttctcccgtaacccggggtggaagagctctcaatgctaggaagttgacacccaagtatctaggtccatatcagattntgaagaagattgngcctgtagcttatcatatcgccttacctccgagtttatcgaattngcatcctgtgttccatgtctctcaattgagacggtacaacccagatccatcacatatacttgcagtggacgaggtacaggtgaaggataacctcacctatagagcacaacctcatgaaatcac

SEQ ID NO: 63352 - DNA, 486 bp, Glycine max
  unsure (1)..(486): unsure at all n locations
aatcggcatactccacacagagattttgatggtattattattcagcatactccacacaaacagattgtgaagacaaaaattgggcaagtttctgcggatcgaatgttatgagctgataggaccattttatttggcttagtgagagaggtcttatacattataccacaattttaaaacaataataacaggaaataacaagttatgatataaaaagaatagttttttcagtaacatccggaaattntgtttaggctaattgaaattctgatggcagattgaaatcaaggctctcttccaaggtcttttgaaccttcatcccaaattttttaacctttataattntattttttggtggtggtggtgtaatttggggatgtctctgtcaatccaagttatctatagtctccaaacttatcaactagcagtggtgaacacattggttctatttctcaagtgaaatagtgctgtggtgtgtgaactcacccg

SEQ ID NO: 63353 - DNA, 72 bp, Glycine max
  unsure (1)..(72): unsure at all n locations
agcttctanactntatacaagagtgaagctctgatacacttgttagacaagtggcctcagtatcttaagaag

SEQ ID NO: 63354 - DNA, 403 bp, Glycine max
  unsure (1)..(403): unsure at all n locations
cttagtttcagatgatgcagatgggttgtagctacctcttgctcttctctaatgactatggcatcatntctggcactaaactgctgggagttggacgccatcttctcaattaaatntctggcttcagcaggagtcatgtctccaagggctccaccactggcagcatctatcatacttctctccatattactgagtccttcataaaaatattggagaagaagctgttctgaaatctgatggtgagggcaactggcacatagtttcttaaatctctcccagtactcatacaggctctctccactgagttgtctaatacctgagatatccttcctgatggctgtggtcctggaagcagggaaaattttttctaagaatactctcttaaggcatcccagctcgtgat

SEQ ID NO: 63355 - DNA, 456 bp, Glycine max
  unsure (1)..(456): unsure at all n locations
ctactaacgccttgcggattggtcttcgccagtgaaaggatcgatgttgttcctaatagaggcaaatttgatcatcctactangacgactgagaaaactggcgcaaatgaagagggtgagaaagagggagaaacccatgctgtgactgccattcctatacggccaagtttcccaccaaacccaacaatgtcattactcagtcaataacaaacctcctccttacccaccacccagttatccacaaaggccatccctaaatcaaccacaaagcctgtctaccgcacttccaatgacgaagaccacctttagcacaaaccaaaaaaaaacaccaacaaaaaggaattttgcagcaaaaggcctgtagggttcaccccaaattccgttgtcatatgctaaacttgatcccatatccactcaataattcaatggtagccataaccccaaccaaggttcctc

SEQ ID NO: 63356 - DNA, 477 bp, Glycine max
  unsure (1)..(477): unsure at all n locations
agcttgtcatctntggatgctgacttgtggcatgaagccattactgatgagatggattctntagaatctaacaagacatggcatttagtagacttgcctcctggttgcaaaccaattggttgtgtcgcaacctacccttttgtgggcgagcgaggcgaggctcacgggtgcgctttccaatggaggaaaatgtgcggagtcgccaccaacgtttatttgggaaaacgtcggaaatactgaaggaaaccggtcataaagaatattccaagttcagaagttgtatttatgtttgaggaaggtattagcacctctcacgtttgtctcacaggacaacaaccttattttttagaattgtgtgaaattgtgttaccctaactttttatttctttttaatttttgaggtcgacaaaagcggggctcttgctcctacgtacccttcatcgaagaggaaacagacctatgtagttcttttttttt

SEQ ID NO: 63357 - DNA, 462 bp, Glycine max
  unsure (1)..(462): unsure at all n locations
acaatggctagacatgatacatgtcggggtttggttttgntattgataaaagggatgccccacattatttccatgacacaaatgcaaaaatgatgatttggaaattntatgcaaaactggtcatgcatgcacctatgtggacgctcaagtgtcaaatttttatggtcatgtgatgctagggctcangattcatttcctctattntaaatcaacccaatgtttccaaaatatgttcttttatcgatttgtgcattcatccgagtccatttcgggcgtccggggaaatttcacagcattcacccttcaggtgtagacacattttccaaanattggttatgaatcaatgaatttnttttttttcaaagaaaaagtggaaattatctcttttcaaaagcatgtcgggtttcagctagacaacttattttctctatttccattttttnctactggtttctttttctt

SEQ ID NO: 63358 - DNA, 312 bp, Glycine max
  unsure (1)..(312): unsure at all n locations
attatatttaaacaccgttgtggttatctatttgtgatgcttgatctatagaatgagtagtattatccatacttagtaaaaatgaatttatatcccactgaaagtttttcaggtattatacacgtgtcatcacctcatgaatgggactatgagccttctttctaaaattagacacttatactggtgttatcagcaaataatatagcgcctcaacaatattcattcactcatatataagaaattatcttttaagngacatacttcagcttatattcactactgagatattatgaatttacgacacacgttcta

SEQ ID NO: 63359 - DNA, 371 bp, Glycine max
  unsure (1)..(371): unsure at all n locations
gtctatataccattttttcacacctatagganatgcctttttattgggagggtgcgcaatggtcacataaatgagaaagatctattccctgagagaattcgtgttcgattctcatcatatgtaaaatttctttagatcagcagcagtcacacaccacaaataagattagtctctaacctggtgggttggaggacttgacccaagaaagaaaatcatttttgtcaaaaaaaaaaagtctaccattattgttttcccacaacatatctagccattcattccattgtttntcaattngagatatatatatatatatatatatatatatatatatatatatataaaagccttctcttttaataaattgttactga

SEQ ID NO: 63360 - DNA, 356 bp, Glycine max
  unsure (1)..(356): unsure at all n locations
agagttctgagagatnnttgtgtgtgaagatctgctgagatgagagctcgaagcgaaagccgttctgagagcttgagatgagtttatgagtgattgtgagatcctagaggtgaaggagacatcttcaccacttgtatttttgcaatctttcatcttggtcttctctgtgttgaaaggagggtttcggactatggaaagctaaatcctttgttggatcttccctgtaggtactngatgtaaatatatttctatctatgtaatgatgttntgggtgttctctgtgctatctggtgttcattccagtatgtctttaccttgatcacgtagatgcatggcttgttagggtcatcaacagt

SEQ ID NO: 63361 - DNA, 476 bp, Glycine max
  unsure (1)..(476): unsure at all n locations
agctngatagncaattgtctttattgtatgaatctatngataatcacttatgaagaaatgataattaattattttacatgagaaatgtgttaaggttgaaaatctctcttataagagagaaaacaaaataagatgagactgcacttttttcatctcactctctatttctatagtaccaaacaatttgaaatttctgatctcttcttcagttttcctccttttatttctgctgtactagacacaacgaaactntcagtctttcattcataccgcacacaaaactaatagggttgctggtatcttggcagctggatacgtagagctctcgtaaccacatgatatcacaagggtgtttgtatcactcgatagtgtttagaacatcttgtgtgtgacacattatcgtccttagttgttgctcttgccttacttatcatattgngctaganaacattaaactagatttaatataacacata

SEQ ID NO: 63362 - DNA, 419 bp, Glycine max
  unsure (1)..(419): unsure at all n locations
gaataagagaagttcaagagatcaaggctgtaaggatngattgaataagtgtaaaagtatattgaaaggaaaaacaaagcctagcttntatagactcttcatgtctggtcaagccaaccatttagaagagttataacttttagaanaacttaanacccaattgaaaaagtcaaaaccctttgaagagtacattctttgatttattcaaacaaacactggaatcgataccaaatagtgaatcgattacacaaagctttatgtgaaggatggactcttacattgaattgaatttaacgtcaaggcctggaatcgataccanatattgaatagatacaacttttgaaataattggaacattgtaatcattganacttttcaaacaatttgtactggtatcgatacacaattggtatcgatac

SEQ ID NO: 63363 - DNA, 452 bp, Glycine max
  unsure (1)..(452): unsure at all n locations
agcttagacttgcactcgcattccctgntggtcaagagcttaatcttctcaatattatccatcgnngctcctttgatactcttatatccagaagcatgttgagctaactcatttacctcatcattctcgtccctataaacatgttctatgatcacattggcaaaatattgcaacaatttcttagtcgattgatagaaatcccatactgtaacagtattacacttatatttcacattcatgtgcctgattaccaattgggagtcaccatatattataacgtatttcacacctcttcttattataatctttaaaacaaaaatctaagcctgatatttagctcggttattagaataacatgggtttatggatctagaatatctcatacctttttcgatggataagtactattatccctaccactacaccatcttgggttcgtgatccatccacac

SEQ ID NO: 63364 - DNA, 523 bp, Glycine max
  unsure (1)..(523): unsure at all n locations
ccgagatcccttgagtcacctgaggcatgcaagcttctgagtggatatataatgtatagctctttatatattcactatgacanatggtagaaaccacaccttgaacaaggaagccagccacttaaagaaacaatagcacttaagttgatagggtaaatgtttccattaccatagtgccccanaacatggcatgtagctgagtatagtgcagttgcagcacccatactgaagcccccaataccaagtttgactgtacagtatacagtagtatttaagtcaaatcactagcaacttgagtttagttaaaagttaaaacattcccatgaatacaatataaatgtaataactgggcttgctctaatttattaattaactaaatactacttcaataacttcactcaatatgtagaagtatataaatctaaacatcttattgatggcaaatgtggaaagttatttcaacggctcaagaaaactntatggactcttaaagcttgcaatttttcttggtataccatcatac

SEQ ID NO: 63365 - DNA, 480 bp, Glycine max
  unsure (1)..(480): unsure at all n locations
actcaagcttatcactctatctctcanaagtatganaggaagttcaagatatgcttgtatgcatacccctagtagacaaatatctctatcttaccttcatgtagacatctgtatctggatcaggtgtaatatttgcttctttatctcttctgaacacctctgctagcaaatctgcagaatgtgaaataattttagttaaaacttgattcttcatatgaattttggctcgatttccaaattgcagctctgtgggctaaccataaggaggcccaactccttggactcatgctgagaaggccagggtttctctgactgtcatttctccaatatgaagatcattttgacttacaaactcattcatcccatgaccattataagtcacctttccagtgaactgatcaagaagcctacctaattagctacaaatccaataatggaaatatgacacaaacatcatagcatcatttacaatttaataat

SEQ ID NO: 63366 - DNA, 476 bp, Glycine max
  unsure (1)..(476): unsure at all n locations
agctntccatagaccatctaanatggtgatattctcatgttagtcttgaaggtagtcctgtaagcccatagggcatcatccaacttcacaaccaatccttccttgaggatgcaacaatattctccagaattttcttcaattctttgttggatacctcggcctggccatttttctgaggatgataaggtgaaactaccttacgtttgacattataatgcccaataccttctacaactatctattgcagaaatgtgaaccctatcactgattatcactctggagaccccgaagcgggagaaaatgtttctcttcagggaattgatgacaatcttggcatcattctttgaggcaaccacaacttccacccacttggacacttaatcaacaaccaccaagatgtactcattcccataagaggatggtagagggcccacaaaatatataccccaacagtcaaatacctcaacttcaatata

SEQ ID NO: 63367 - DNA, 387 bp, Glycine max
  unsure (1)..(387): unsure at all n locations
accggacgcattggttaacttggtaacccagctggccttgaactctatatctgtacctgtcgcaagggtctgcggtttgtgctcctctgctgaccaccatacagaccttngcccttccatgcagcaacctggagcaattgagcagcccgaagcttatactgcaaatatttacaatagacctcctcaacctcagcagcaaaatcaaccacagcagaacaattatgacctctccaacaacagatacaaccctggatggaggaatcaccctaatctcagatggtctagccctcagcaataacaacagcagcctgctccttccttccaaaatgttgttggcccaagcagaccatacattcctccaccaatccaacaacagcaacagcccca

SEQ ID NO: 63368 - DNA, 488 bp, Glycine max
  unsure (1)..(488): unsure at all n locations
gctnttcttcttgatggaatntcctgaaattatctttataacatatntgnatgtatcagnttcctcacagtttttgtttaatgatctcaagtgtttccatgtgatacaaatcatgagatcacacgattatgcatggaaacctgttatggtgcattttctgtcaaatacaaattgattattggatggacttgtctagctgttagaaatgatcaagagctgtgaatgacagaattggctttcttcgtatatatgccataatctcttcttcctggaatttgttaaatattttagtatcttgaattagtaatacactctntataataaagttgaaatcactgtatgttaagtattgtgaaaatgtgtggcaactatctgtgtcatctggtacaattagatatttttggtattaatttgatatttatatatctgataaagatganataattaagaagatatggatacaaagagagcanggatgatgattctct

SEQ ID NO: 63369 - DNA, 363 bp, Glycine max
  unsure (1)..(363): unsure at all n locations
ntatattaaggaagatgttagagtgtttaagttntaaagtgaagattactttccaaaaactgtttaatagctataagaattttcatggagatgttgaatttgaatctacacaagcttctcatgacattggaacttctgatgtagaagtagttgatacttcatttgcaacagagtttgagaaagatatgaatatttgatggaagcgtgcttgagaagcttctatggaggctggatctttgagcttcaataaggtccttcaatgatgattttcagtcatggagttgcagcggaagataaaagataagaggtgagaggagacgccatccactagagaataagccatggaaaaagaagctttatcat

SEQ ID NO: 63370 - DNA, 432 bp, Glycine max
  unsure (1)..(432): unsure at all n locations
gctaacatcttcttaacanaatcaccagacttatcgtctatntctcttgtcaccacttcatncaaaagtgtaatgctgacacttcatcaaatgtngtcaatggtggaacaaacttctctttcctctcaatgctatcaaaatgaagtaaaactttattgactcctacccttctttggggaagcttgcctttattgatgaatgatgattnttgctcctctgcanggctaaactagtgtgtcaaagaaaagctnggtgtgccanaagaatggttaagagaagtggttggccatgtatngagtatggaacaacaatgctcttgtgagaaatacactaacgagagatgagattgggtcataatggtttgtcangtcatcaacacaaagcacatcatccacaaatgcaataatgttcgatgtcatactctctaatact

SEQ ID NO: 63371 - DNA, 420 bp, Glycine max
  unsure (1)..(420): unsure at all n locations
ctaagctggaccacaagtgagcatctggaatcacaccacttcatgttttatattgnnnnnngnnnggntcattngttacatgttgacttaaatgaaaatgttgcggttgtttacatgttgttgtatatttcatatgtagggttgagagtgctcattggtctctaaagagactcctacaaaactctgttggtgacatatgtagtgtttgggaagcaatgaataatatgatgacacttcaacacagctagattaaagcatcttttgagacaagcatgcacgtggttgagcatgtgtttaaagtaaccttgtacaaaaaaactacttggcatggtatcaaggtacgctttaaatganattgctgctgagtatgagtgtgtagcttatgccggcanaaacccttcatgttgtggatgtgtcatg

SEQ ID NO: 63372 - DNA, 415 bp, Glycine max
  unsure (1)..(415): unsure at all n locations
tacccatcacatgtggcactangtggcggtcgggcgatggtgcacaacaagtttttttccacatccacaaatcgcgcataaacccaccatcccctggtgcccacctccaactgagctcacgtactcccacgtagcccatatcctcgtttctctcaacaccgggtccccatcaatcctctcaagcttccccaacatccaagtaaaacaacattcccacagcacanactatcacagccaagaaaacagagcanaggcagaanactctgccaaaacaccaaccanaatcacagctnttctcacttaaagaccccagtaacaatttctttgatccaatnntgtaaccgttggatcgactccaaaattntactggaagtttctagtacataagcctacatnttgaccgttgggatctact

SEQ ID NO: 63373 - DNA, 427 bp, Glycine max
  unsure (1)..(427): unsure at all n locations
atactaactctagcgatatattttcattaaatgaattttgattctctatttctttaattggagaattccactcacagttntggaaaaaaaaattataacacagctcanatctaagtaaaatatcgactgaagaaacaaatacaaaaccttatgcggattccataaccttatgcggataaatctgaacaaaatctgaacaaacacagctcaaaatctgagtaaaaattaacacagctcanatctgaccaaatttcataaccttatgcagaaaaatctgaacaaagaacaacatacttaaaaagaattataacatacattattaattntgaaattacaaacctgattaagatatagactgaagaagcaaaaaagaaaacccgtagctcaaatctgagtacacatgcaacaacgttgagaagaatttgtc

SEQ ID NO: 63374 - DNA, 411 bp, Glycine max
  unsure (1)..(411): unsure at all n locations
agcttagctgaatntagatcgaatcgaagttagcttagctcaaccttggccagcttagcggataaaatcagcttcagatgcaagggttgggcgctaagcgcttaagactcgcaacttagcgcatgaacagagatgcacttagcgcgaggcttgcgcttagtgaaaggactgtttttcagaaaatatnttctaagttatttttcagtcctttntccatganattcaaacccttatgttaagcattcaaagattggctgatatactcctatgtatagattacatagcaagttccaaatgatttaaatgcataaataaaaaanaaacaaaaatagtagaatttaaaactgggttgcctccaggaagtgttctttaatgcattagcttgacgctttacctcactaagtgatctta

SEQ ID NO: 63375 - DNA, 427 bp, Glycine max
  unsure (1)..(427): unsure at all n locations
nnttggagtagaaacatgggaccaactcattntatttcagaaagtcgtatctagtcaaggtctgagagaccatacaagttttctagcgatttctaattatgtgggccattaagtctatcatatgctgacaatagccgagaagcccatgaatttcttcgggggcggagtaggtgtccgccattgccttggccttggctaacaatcggggaagttcttgactcccgttcaaggtaagagcaaaccgatccatccacatggttgcctcttggtgtaaagagtcgatcacccttcctctagcctctntttctgcgtatacttgggcatactcgtccgcgaccctatgctcgtgggccgtggctagacctaactcttcttggtacttggcgatgatagctagcatgttgggtctcgtctcgcataaacgctg

SEQ ID NO: 63376 - DNA, 110 bp, Glycine max
ccttgaaactcagctgatgcgtgcagtccaattatcctagtactgtgtttgaatccacctgtggaagcgattgagatatcttgtctctttaccattgttgctgagaacta

SEQ ID NO: 63377 - DNA, 434 bp, Glycine max
agcttataatatatcgatacgctcgatattaattatcggaaactctcgagaaattcaaatagtcataacttttcacacggatgtccgattcgggcgcataatatgtggagaggctagaaattgaacaacggaagctcttgagaaattcaaatggtcataacttttcacacgacgtccgattcaagcttataatatatcgatacgctccaaattaaacatcggaaactctcgcagattcaatgagcataacttttcacacggttatgcgattcgggcgcataatatgtccagaagctcgaaaatgaacaacggaagttcttgagagatcaaatggtcttaactttcacacggatgtgcgatcacgcgaatacatatcgagacgcttaaaattgacaacggagctctcggaaatgaaatggcataactttcacact

SEQ ID NO: 63378 - DNA, 431 bp, Glycine max
  unsure (1)..(431): unsure at all n locations
agggtgatgttgcgcgtactgatgggtaccatgaggtgtttgcttttgtttgacccacgcgggtgttgaagagacggcatgggcatctccttccttcctttntgcccctgttgccccgattcttttggcgttcacgtttgtggaggaaacgtaatcaaactttcctctcttcaatccaacctcgattctttccccggcaaacaccagatccgcaaagctggacggcatgtaacccactagcttctcatagtagaacactggcagagtgtctaccatcatggtgatcatctctctctcaaccatgggaggagctacttgtgccgccaaatccctccatcgctgcgcatattctttaaaggtttcaccctctntcttaaacatattctgcagttgagtacggtcaggagccatatcagaaatgtactgatact

SEQ ID NO: 63379 - DNA, 508 bp, Glycine max
  unsure (1)..(508): unsure at all n locations
agctnggttggaggtacttacccgttgaagacttgatgaaacgaagaacgaacgatgaatcttgaagaacggtcgagaatcttcgcgtaattactcacggaaacgttacggaaacacctcggcttggattttcttcacggaaataattntcctcagcaatttcgagagagagagaagtgcctaagaggctgaacccttttcttcttcacttctcccnnctattatagcaaaatggggcaggagctngccacccagctcgcccaggcgagcaaagttgcttcctccagaagcaatagccttctggaggaaggatctggaaggcccaagtaggccagattgctattngcacccnnccttttactaaatgcacccncttctattttttttggaattctttttccgaacgtaccgaacttatgaantcataacgatacttatttttcttcgcaggtatgaatcttacggatatgtattactctntttagctttcaagaagtacggaactacg

SEQ ID NO: 63380 - DNA, 282 bp, Glycine max
  unsure (1)..(282): unsure at all n locations
atggagatgcagcggaagacaaaggagaagaggtgagaggaggcgccatccactaaggaataagccatggaagaaggagcttcaccaccaagatgagccttggataacaagcttggagaggatgcttcaatggaggaaaagaaagagggagagaaagagagaggggggagcacgaaaatgaaggaagaanaagggagaagaagtgaactttgagttgtgtctcacaagactctgattcatcanagttacaacaagtgttacacatgtttctatttatagact

SEQ ID NO: 63381 - DNA, 428 bp, Glycine max
cagtgagagccaggaatcagaatagaatttgtgagggaaggcttaatctctgcgtatgacaagaacatagccactatgctgaaagatgagctatgtagctttgaagttaataactacaaagtcattaatgattcttccacaagtaggtgttctagctgtttagttaaaaacattcatatgcatatccttgaaaagttagttcttgcttattaagtcttgaaatgcatttgctgctaaattgatgcaggaaatcacataaaaccggagcaatggtgcacaagttggtggcatcagttcaaagtgctgttgcatagggggctgatggagaaaggtttgaagccttcaacacgctgagaatatttcaagtcataagtgttgcttttcttggtgactcctgtggtgcacacctcagaacacacattgagatc

SEQ ID NO: 63382 - DNA, 479 bp, Glycine max
  unsure (1)..(479): unsure at all n locations
agctngcattnnggaatgcgatttcctcactctatcattaggattagtacctgacatctcaaacaaacaaatcaaacgtaacaagacaattatagttgctgtttgaatacctcacccactcaagtgtatcacacaattatggcttttctctaatgaaacactcttgccttataccactctaattccccttgagttcttaggcaattcaagagattatggccacaaccaaagaacaattcaccaatatgtgtaaggtaaggctagacaaggaaaaggttaaccaagaataaggctaacaatgtttttatgcacaaatgaaggaaacacaattcagaatttatgaattcaagtaacaatccttcatgcaaccaatatattaccttaaagaagtnntttttttaagtcttcaagcatgaaccattcagcccaattttttttttttttaatttgttatacgaaatctgctcttttttttttat

SEQ ID NO: 63383 - DNA, 534 bp, Glycine max
  unsure (1)..(534): unsure at all n locations
nnagctaatacttatttgattcaccaatccagcgacaactcttcaccacaactctatttcttcataggcatcatgtaggaaacttagaaaacaaaacaaagttcaacaacatgattacttgtaggaattgatttataacatgttatgaactaaataacatgcatgaattagactcanaattcaaaagatgggctaagaatgacaagaatacatgaacaaatatatctagaactcaatcaacaaaatcaaaattcaacacanacttagaacataatgtgacaattattatgactaaacatgactctaagacaacatggaataatngatttacacatagattntngtgtttntcttctaantcaatatttggaagaaaaattagatctaaaggttcagcacaagaagattatgaatganacatggatagaaccaaaatcaacccanaaacatgattcaagagtagatctataaaattngaaccatagaaatgcaagaacaagtgtagatcttagattaatcggtttatcttttgat

SEQ ID NO: 63384 - DNA, 488 bp, Glycine max
  unsure (1)..(488): unsure at all n locations
atccttgagtcacctgcggcatgcaagctttcgcaaacttatgngtaaatctgggacttatccatggcnngaagcctcacacaggccatttgccctcctcgcccagtattatgatcagccattgagatgcttcactttttgggacttccagctatcactcatggtggaagaaattgaagagatcctangatgtcctctaaggggaaggagaccatacctcttctcagggttctatccctcattagctagaatntctaagatagttcaaatcttcatgcaggaattagaccacagaaagcaagtcgaaaatggtgtgggtggaatatcgagaaaatggttggaggcaaaagcaagaatcttggtaggtagaggcgaatgggccccgttcatagacattctcgtactggtgatcttcagaggaatcctctttccaaatgtggatgagttngtggacctagcagcgatcgacgcttttctcgcctatcatg

SEQ ID NO: 63385 - DNA, 410 bp, Glycine max
  unsure (1)..(410): unsure at all n locations
cattagaaattatatgccaatcataagtttattttaatatataaactccaatatgagaatttaatagtctatattgatcattccatgtgtactaacaaatatgtagtaaaattagaagaaaaaatatctttgtttaatgtaaatacatggataggattaaagtattctctcattctttcataaaatacttaaaatatgtaatctattaatattggatctacatttctttaatataaaaggtgtttggataaaattaanatattacttttaaaataatgattcttttttttaatgaaaatgagcttttaaaataaatgttgtaagttttttatctctctgaccatcactctttcattggattgcttnggctatttctctctctctatattcttttcaatcattttatacat

SEQ ID NO: 63386 - DNA, 332 bp, Glycine max
  unsure (1)..(332): unsure at all n locations
tcattaaaagagcttcagcaaagtgccttnccgtgttctgagtagaattgtctcaataaattntacatactcttaggatggaggannggtcgtgtagacttccatggnccatatagcaagcacagtagggacctcatcattagaattcacctttttcaatgattagttctacatggtgaacgaaggtgaaagtggagtatggaagctcaaaaagtaaatgaaaatttgtgctcaagcacaacaataaaatctctcttccattgacangtgagaatggatggtgaatcacanagggatggtgataatatagtctaatagatgcgagatgtctt

SEQ ID NO: 63387 - DNA, 213 bp, Glycine max
  unsure (1)..(213): unsure at all n locations
ttgagccaaaatcctgactcaccatataaccttgacccattgtgagaatgtcaattcttaccctcggaagcaaaaaagaaaagaaggaaaattttctatctaagagaaagccaaaagaaaagaaggaaaatnttccatccaagagaaagcccaaagaaaagaaagaaaattcccaatccaagaatgggagaaagttaaaaagggagaagaaaa

SEQ ID NO: 63388 - DNA, 469 bp, Glycine max
  unsure (1)..(469): unsure at all n locations
ttaagtcaccgcggctgcagctccttacacaagaaagagaagatgttgatngaagaaataccagtggtggggatgtctnctncaccttcagaacctcacaatcactcacaaactcatctcaagtactcaggaaggcctcctcttcaagctcagttctctgcaggtcttcacacaacaaaatctcgaacactctnggaactggacctttctttctctagaaaaccctagacatgcagaagcttcangaanaggcccaaactccattccaaaatctaatttcaggcttaaataggtggcttttttcatgcttgcgcgcttagcgcaactctgatccgcttagcacgaattagtgaatttcggcttagcgcgcgcttttctcactcaacggatgtacttgagcggtgctcttagcgagatgacccttcgctcagcaaacatgcatagctcatccttcttccagaaatcttct

SEQ ID NO: 63389 - DNA, 379 bp, Glycine max
  unsure (1)..(379): unsure at all n locations
ttgatggngacccggtgctgagaggaacgattatttgtctacgtangagtgcgtgagctcaatntaaaggtgggcaactagggatggtgtgtttatgtttgacttgtggaagtgggagagttgatttgcgccatcgcccgatcgccacctagtaccacatatgacgggtgccccataatccaataagcttgatgtgagaaagcgtggaagagtcagtcttcctacttttgtttgttgaccacagagtggtacttggagatgtgtcgcggnggtcaggagaccttggggacgtaaggtggngtgctattgcccaaaacaaagcttgactaatcccgacccaacccgggcatagtcagtcagtgagaacctatgacgtacc

SEQ ID NO: 63390 - DNA, 412 bp, Glycine max
  unsure (1)..(412): unsure at all n locations
ngcttccacaactcctcaatagctccgtcctgttgttcatgaatcgcctcccctcgtagtacgtcatatgcagatttagctgtgtaccgcccgctcggatccgccttccacacccattgatcttgatgttgaggctggattctgtaatcttcaatctctcttaaaaatgctgccgccatgtctatttcattgtcaaataatggcctcctccatctaaaatcccattcccacccattatctncaacagcccccatattttgtatatnttgaatttgctgtgaagatatcacatacaacctangataccttgtaatcagcggaacctccccttccatccagctgtcctcccaaaacttgaacttgtccccacatcctaccttccatgtaatngtgttcttcagtgactcaccct

SEQ ID NO: 63391 - DNA, 411 bp, Glycine max
  unsure (1)..(411): unsure at all n locations
tgatcatcctactangacgactgagaaaactggngcaaatgaagagggtgagaaagagggagaaacccatgctgtgactgccattcctatacggccaagtttgccaccaacccaacaatgtcatgactcagccaataacaaacctccttcttacctcaccaacaattattcatagaggccatccctaaatcaaccacaaagtctgtctaccgcacttccaatgacgaacaccacctttagcataaccaaaaacaccaaccataaatgaactttgcagcgagaaagcctgtagaattcaccccaattccagtgtcctatgctgacttgctcccatatctactngataattcaatggtagccataaccctagccaagggtcatcaaccttcatttctccgagaatacgactcg

SEQ ID NO: 63392 - DNA, 335 bp, Glycine max
ttccgctcctgagtatgacagtcaccgctttaagagcgctgtacaccagcaacgcttcgaggccatcaagggatgcgtcgttctccgggagcgacgcgtccagctcagggacgacgagtatactgatttccaggaggagatacggcgccggcggtggacatcactggttacccccatggccaagttcgatccagaaatagtccttgatttttatgccaatgcttggccaacagaggagggcgtgcgtgacatgaggtcctgtgtaaggcgtcagtggatcccgttcgatgcagatgctatcggccagctcgtgggatatccgttagtgctggaag

SEQ ID NO: 63393 - DNA, 480 bp, Glycine max
  unsure (1)..(480): unsure at all n locations
gtcccggatccttaagcaccgcggctgcaagcttggaaatatgttntcaccttctcgctatagccaattgctggcttagcgagcgtccgctaagcccaacactccgaggctaagcgcgaggaagactctggaagaagatgagttgtacaggttcgctaagcacaccgcttcatctcactaagcacaccacttcagttcatccgctaagcaagataggcacacgctaagccagaattcactaatgtgcgctaagcggtccataagtgcgctaagtgcacgagcacgaacaaggccacctatttaagcctgaaatcagaattttggaaagagaagttggactgggattcagagctntgcatgtctatggtttctagagagagaaaggtctaagttctagagagttntgagagaatntgttgtgtaatgatctatgtaaccgacccgctcgtcgctatggtatccacactctaatattcgata

SEQ ID NO: 63394 - DNA, 367 bp, Glycine max
  unsure (1)..(367): unsure at all n locations
tgtacaactcttanagaanaanagtcaaattattagtgatccagagacaaaagcattcattcaacaagaagtttaagaagaggtaagggaacccatnggatgcatcatgagaggaaatcatctagaaagtcaaattattggtgatccagcagatcatgttcaaacaagataattactcagaacacaagggcatactgcattgatttctaaaatgaagcccaaacacattgatgatgcaatgtaagatgacaactaggctaaagcaattcaagaggagcttaattagtttcaaaagaatggtgtttggaagttagtcgaactaccaaaaggaaagaaagttgttggagcaaaattggtctttcgcaac

SEQ ID NO: 63395 - DNA, 512 bp, Glycine max
  unsure (1)..(512): unsure at all n locations
agctccaatgcacaagaaatatttcgttatatactatgtggagtaaattatgtatggggttntgacttgtgagtaattaggctttgataatggtgcataatctctaattaacaaaatgttattggtaagaatctgactcaataattaagaattactgtgtacataacaatgaactatttttttttttataccaagagcaatgaactctatntatatatatccattgatttattgagtatttgtccatatatgatngattatggttcactcgcccctaagtaggacactgcgttaattagatagttacagggggaaaataggtggggtagtctccatctccaagcatatcttccctctctaatcaaatctatgatacttacgtatctgcactatcttttatgaagatcganggcaatgttaggtacanaaactggcttcatggcatgtttctgatggtactagcatganatcatgaacgtgagttttgatttcaactttagtatttatagtct

SEQ ID NO: 63396 - DNA, 212 bp, Glycine max
  unsure (1)..(212): unsure at all n locations
tagcanatggacctgggtgttacccagtttcattatatcttccgtaatactcatcacctctatcatatctaataattttcacatttctgtctaattgcctttttacttcattctagtaagnttctaaggcattcattggttgagaaatctcangcagtaagtagacataaccataatgtgaataattatcaataatggtgataaattatatt

SEQ ID NO: 63397 - DNA, 452 bp, Glycine max
  unsure (1)..(452): unsure at all n locations
agcttctgagacgtttccgtgaagattttccatcgttcttcattggtcttcgtacgttctttgtgtgttcttcggtcttcaacccagtaagttttgaatccgagactttcaattcatttcttgttttggtggctttcatcttcatttcgttcactttcggttttcttttcttccgcttttaactgtttatttaagccgttatctcacctaataattgataaaatgaatctcaaccgatcattttttatgtaatgacatttaatcattgttaaagataaatctaaccgatcgttcatgctgtaacctcggttaaaccaanaaaagaaaaataataataaaataatcaaaatatctttgaataaaataatcaaaanaatcaaatctgaccattttcttttgaaagttcttgaatgaattgactaataccaaagtgaactaagaataaaataact

SEQ ID NO: 63398 - DNA, 418 bp, Glycine max
tctactgatgtggcagggcgggcttacatacctttttgtctccaacgcgaactttgaccataggactttcttcccgcgaagcttcttttcatgtctgcctgagcgggcttatagcctaaaccatactttccacgactaccttgggtatttatcagtctagttatgcccggcgggcctctttctaaacccattccgggctcataaccgtggcccaacataactcgggccatcattaccgctgcatcagacagactatgctgcccaaagagggagtccacggaggaaatgctgaccacctgtggagactgttcagccgtatctaaccattcttctgcggcttccacatcaggcatggaggatgggcaacttaccaagatatcttcctcgcctgacatgatgaccgagtgcccctctacta

SEQ ID NO: 63399 - DNA, 334 bp, Glycine max
  unsure (1)..(334): unsure at all n locations
agcttctgcaatgcttcaacatgtcctcgttgtatcgcgagggaaggtcgtggacgaagatgtagcgtcctccgcatgggtcgctcttgttgtcggcggttcggagggcacggtcgaaggggaaagtgggttccttcggttcggaaactcgctcanggaagccgaggttnttacgaggttgttggtggttgtgttgggattggaaagtgatggngactgctgggtcangggcggtgggttggtggcggatgacggctaaatggaagtataggaggaggaaccanaagaatgcggagagggaggcgagaaagcacagtctggaatgaggggtttt

SEQ ID NO: 63400 - DNA, 350 bp, Glycine max
  unsure (1)..(350): unsure at all n locations
tcanagccctggcatccatcctcttagctttccgtgantcttccaattcttccaatcttgtcatgatcctcttcacttcagctntactattcttactatgtgctatttccaattctgtccttaacctatccttctcagctgcaatatttagtggtcttgttttggcagattttttctcttgtaacatctgcttcacagtagctgctgagtaaacaaacaagttggtctttagtatagcttcttttttttctgccacttcttgctntgttggcatccggccacctcttctctctacttccttaacccactggatgaactcttcctcctttggaggagaagtgctaatcata

SEQ ID NO: 63401 - DNA, 443 bp, Glycine max
  unsure (1)..(443): unsure at all n locations
cattacaatatcaaactgtaatgaagactctcttttctaataaanaattatctgattatatgctganaatgaactcttagaaccaatgtcaacattatcttgtgtacaaaaggaagtcatatacctgtgggtggagaagttgatcaagatgctgtggctctaccatcttgattgcagaacgaatatcaacaagcccctgattaaccatatctacagctattttgaatgcaccttaccagtacgtttgcgcttcacattgaacatccaaacctatttcttgacagtgaattcaatcctaaatatagacaatccaaagcttgccttcggctattgtacaatagataactataaagcagagaatattctatgatgaattacatatatcttgtatgtgtttaaattcacagtcctcagttctatagcgttgcatgagattatgactc

SEQ ID NO: 63402 - DNA, 235 bp, Glycine max
  unsure (1)..(235): unsure at all n locations
ttgatgtaaagaggtggaagggtatagatgagtttctttctataattattttctaaactttgtttagaggatgaatcgtttactaagagagtgcgtgagagaggttaatttacgtcgcgcagtggaatgagactgagaaagatgataaatggatggagcanagaatgggatcaagtgatctttaaaaccaatagaatattttcatttacaacaaacattcataaaataaattctt

SEQ ID NO: 63403 - DNA, 398 bp, Glycine max
  unsure (1)..(398): unsure at all n locations
gtctttgagatagagggtgtgccctaaactcacacatgtcaaagggtgtggccccagagagaaatgaaacatagcacaaaatggtttatgattgtgatttgtgaaccctctgctgcattacattctcttaaggccaaacttataatcaatgaggtattcatttaaaatttttttggcatgggtcgtacttccggaggcatagcaaatgtcatgagagttaccaacacatccctgatataatattaaaattgattctcttaaataagaatttgaatttaaatttatagatgaaataaatataattaaaataatagatttcatgaaaagtgatgaacgaatattatcctgtnaagnttatcattagtataaattctactcatctaataatgtgaaaaaat

SEQ ID NO: 63404 - DNA, 378 bp, Glycine max
  unsure (1)..(378): unsure at all n locations
gaccacagagtggtacctggagatatgtcgcgggggtcacgagaccttggggacgtcaggtggggtgctattgcccaaaaccaagcttgaccaatcccgacccaacccgggcatagtcggtcagtgagaacctgtgatgtacctaagcaggcgagctcctggcagtcaacagataataggataacaagaccacaaagcaaggaggcttgtggtagctggccagcagtgaaatttgtgtaatatgtggattatggcctctggtaatcgattaccaagggtgggtaatcgattacaaggcttanaattgaagacaggaggctaagatggtctctggtaatcgattaccaaggggtgtaatctgattaccacgcttgaaac

SEQ ID NO: 63405 - DNA, 302 bp, Glycine max
  unsure (1)..(302): unsure at all n locations
atggagtcagcaccacttttaacatttctgatttaattccttttgcacgtggagctgatattcacgaggaagaactatacaaattgaggtcaaatcttcttcaagggggaggggatgatgcaatccttcctatgaagggaccagtcactatagccatgagcaaaggttccaagtggatngggctagagttactaaagaaggccctacggttctcatgaaccttanggtagatttcaaagcccatgggccaacgttgggtcaattatctttgtcatattaattangatgcattatatgtggcc

SEQ ID NO: 63406 - DNA, 225 bp, Glycine max
  unsure (1)..(225): unsure at all n locations
atggagagaataagacggagggaggaacccatgttgtggctggcgttcctacatggccaaatttcccaccagttcaacaatatcaatactcaaccaatattagcccttctcattacccaccaccatatcaaccaagaacacccaatcattcacaaaggccacccctaaatcatccataaaacccttctgtngcgcctctctgataccaaacaccacccttaacac

SEQ ID NO: 63407 - DNA, 348 bp, Glycine max
  unsure (1)..(348): unsure at all n locations
gcttctcaaggaagtttctcaagaaatcttctcaaggaagcttctncaatgaagttctcaaggaagctacctacgttataaatagaagcatgtgtaacacttgttgtaactntgatgaatgagagtcttgtgagacataactcanagttcaacttctcttcctctttttcttccttcaatttcgtgctcccccctctctctntctctctctctttcttttcctccattgaagcatcctctccaagctttntatccaaggaatattcttggtggaaagctcttctttatggcttatccctagtgatggcgcctctctaccacttcttcttttgttctgctgcatctcat

SEQ ID NO: 63408 - DNA, 397 bp, Glycine max
  unsure (1)..(397): unsure at all n locations
cggcgatggtgcaaaacaattctccacatccacaaatcacgtataaaccaccatccctttgtgcccacctcaactgagctcacgtactcccacgtagcccttattctcgttcctctcaacgccgggtccccatcaatccttccaagattccacaacatccaagtaattcaacatccaagcatcatgaactaacacagccaagataacagggcagaggcagaatactctgcccaaaacacaaaccaacatcacagcntttcacactcaaataccccagtaatattctctttgttcaattcgtaactggtggatcgactcgaaaatttacttgaattctctncacataaatctacatatgaccgtgggatctgctaaaacgtcagaaccatctgtacta

SEQ ID NO: 63409 - DNA, 185 bp, Glycine max
  unsure (1)..(185): unsure at all n locations
tgacacttagctactactgtgcagagaaagggagtaggtaccataaacacttggtgcaacatatcttcatagaagtacaatttttcgatgtcgccttgtgctcagagctgactntgtagcatacaaattgaaaataacattaaaagcatatgacaaatggaattaagaattgtcgcaacatgccc

SEQ ID NO: 63410 - DNA, 317 bp, Glycine max
  unsure (1)..(317): unsure at all n locations
ttcgtgaccatagagtggtacctggagatatgtcacggcggtcaggagaccttgtggacgacaggtggtgtgctattgcccacaaccaagcttgaccaatcccgacccaacccgggcataatcagtcaatgagaacctgtgatgtacctaaacaggcgagctcctggcagtcaaccgattaaagaacaaagaccacanagcaagaaggcttgtgtggtggctggccagctgtgaatcttgagtgatatatgggatatggcctctggtaatcgattaccaaggggtgggtaatcgattacatggcttaaaacgagatc

SEQ ID NO: 63411 - DNA, 217 bp, Glycine max
gctgaggaagccatatgttgaaaagaatcagacacgtactcaagagactagataattgcataatacattgttgtgtgaggactatatatacacacacgagaggcttgtcagtattcgcatggtgaagggcttatgcgtggctgctgcatattaaatggggagtaatgcatgccttttgaagaatcatattatgctattaacattttacgatcaactt

SEQ ID NO: 63412 - DNA, 294 bp, Glycine max
  unsure (1)..(294): unsure at all n locations
acttaggtttacaattctatctgatcttttaaataagatttgagacgtgtcaagttcaattacacacaagaagaataataatattctagtccatcctaaaatggttacttctatttaaataaataaattacaaactgtaagatatgtattttatcccttaagaataagaaggaaataactcttcatatattttaattatctactatttcttaatgagaactcgtattatttgtgaaatanataaaaatttagaacctaatcctaattanaaagagcaatacaaaaaaagagttg

SEQ ID NO: 63413 - DNA, 277 bp, Glycine max
  unsure (1)..(277): unsure at all n locations
tgttaacatctaatttaaaaaaccgatgtaaacaaaaaaagttaacatctggtttataaataactgatgttataaagaaagaagtacaaccaattaagtgtatgcgtgagggacgctgacatcngttttctgctaaacacaatgtaatatgctaatatgctatattaacatcagtttatagaggaaaccgatgagaacgtgcatccattatgcaccaatattgctgaaataattatgtataacatcgagtacttataaataacccgacgtaacctat

SEQ ID NO: 63414 - DNA, 438 bp, Glycine max
  unsure (1)..(438): unsure at all n locations
ggatccttaagtcacctgcggcatgcaagctngcttgtggggcttctatggatgttggatctttgagcttcaatgaggtcctttaatggtggatttccaccatggagatgcagcggaagacaaaggagaagaggtgagaggaggcgccatccactaaggaataagccatggaagaaggagcttcaccaccaagatgagccttggataacaagcttggagaggatgcttcaatggaggaaaagaaagagggagagaaagagagaggggggagcacgaanatgaatgaagaanaagggagagaagttgaactttgagttgtgtctcacaagactctgattcatcaaagttacaacaagtgttacacatgtttctatntatagactangtagcttccttgagaagctttcttgagaaaacttccttgagaagcttctttga

SEQ ID NO: 63415 - DNA, 394 bp, Glycine max
actctctgcacgacacaggagagccaagttatttatgtgggaggaacttaatcctgcgttgacaagaactaccactggctgaagatgactatgagcttgaagtaataactacaagtcattaagatcttcacagaggtgtctactgttagtaaacattatatgcatatcttgaaagtagttttgttataagcttgaatgcattgtgctaatgatgcggaatacataaacggacatgggccaatggggctagtcaaggctgtgcaagggtgaggaaaagttaacctcacagtgaaaatcagcaaatgccttcttgggatctggtgcccccaatacacatgaacggaaagttttagtcatactgtatatgcataacgaatatcctactaagttgtaa

SEQ ID NO: 63416 - DNA, 308 bp, Glycine max
  unsure (1)..(308): unsure at all n locations
acaagaatgggactccacccagttcacattagaagtggcctggcacaaatatcaggagaatgttcatctccgaaacatccttccaaagaggaacctccagctgacctacttcgactatgacgagttcctaaaggaagtcgagcggagacattgggataggatgttcaccacgcttccagagaaaaatactgatngtggcttggtgagggagttatactccaacatttatgatcctgangacgactcacctaaacaatgcaaggtccgaggaaaggtcatcaagtttgatgctcatacattgaacacct

SEQ ID NO: 63417 - DNA, 100 bp, Glycine max
  unsure (1)..(100): unsure at all n locations
tgcatgacataaatgcattntacagacacgagagcgcggaagatcatctattcttactcacaacnattgggcatcatggctcatttgcggtcatcatcat

SEQ ID NO: 63418 - DNA, 391 bp, Glycine max
  unsure (1)..(391): unsure at all n locations
gcagcttcagttctgctagaatgccacaggnaaaaaataaataaactaacacaaattagttgcatgaatggactaaaagtaaacagagacatagtagaatcgaacagggtatttcatcagaattgattccagtaaagcaaagagatgtctgaagtgaccaagtaaaggttatcacttatcaacctttgatttaaagtgggttaagttcatgaggtgctcttttaaatccacagtatgtatattttactnttccactttacacatctcgcttttcaggatccaaatcctacatccatgaccttttgggaagaanaagaataacgagagggcataaaataggaaaaggagaaggcanatttatcatccacctttnccagtgtccattaaatca

SEQ ID NO: 63419 - DNA, 366 bp, Glycine max
  unsure (1)..(366): unsure at all n locations
cttcaatagggatgcattggcctgtctcatgagcttcaccacacatggtacaacctgtgacctgcaaaatagaagaatgtgtaggttgtccaattgataatttagttggcatcttaccaagtgtttctgttaggatctcaagntgcttagatagcaacttgttatgtgccaacaaagcatcgtgtgatggtagctccaataggctcttctttgtgggttgatgggttctatttcctcgaatggcatgatcactggctgacatgttctctattgaactcaatggattgtggtctcagcccatctatgaacatattcagttggattggctcggagaatccatgggtaggagttcttctcagtaagtct

SEQ ID NO: 63420 - DNA, 306 bp, Glycine max
  unsure (1)..(306): unsure at all n locations
ttttctaacgatttctaattatgtgggccattaagtctatcatatgctgacaatagccgagaagcccatgaatctcttctggggcggagtaggtgtctgccatcgccttggccttggctaacaatctgggaagttcttgactcccgttcaaggtaagagcaaaccgatccatnccacatggtgcctcttggtgaaagagacgatcacacttcctctagcctctntgtncgcatacacttgagcatactcatccgtgattctatgctcgtgggccgtggctagacctaactcttcttggtacttggc

SEQ ID NO: 63421 - DNA, 343 bp, Glycine max
  unsure (1)..(343): unsure at all n locations
gctatgtgctcgcgacaggtccctctcttcccttctcagcttgagttcactattgctaccccacagagctccgcgaaatatattccagccatactcttccttgcgagccctctnggtctcttgttcaagggctcttgcggtagttgcattctcttcccgtaacccggcacactccttccgaatgtgtgtagtggccaactagaacttctccttggcaagtttcgcctttcctaactcgcttttgagagcttggacttcttcgtcctgttccggtgcttcaaaactctctttcgtgacgacttttaacttggtgagccaatctaaacctcgtatatgaactttc

SEQ ID NO: 63422 - DNA, 372 bp, Glycine max
  unsure (1)..(372): unsure at all n locations
tatatcgacacgctcgaaattgaatgttgaagctctgagccaattcaaacaacaataactttttactcggatgtccgaatgagtgacttaatatatcgggacgctcgaaattgaatggtgaacctctgagcaaattcaaacgacaataacttattagtcggatgtctgattcagttccgtcatatatcgagacgctcgaaatttgaatgtgaacctctgagccaattcaaacgataataactgtttactcgaatgtctgattgagtctcgtaatatatcgagacgctagaaattgagtgttgaacctatgaagccaatcaaacgacaataactntttactcggatgtctgagtgagtctcagaacatatcga

SEQ ID NO: 63423 - DNA, 186 bp, Glycine max
  unsure (1)..(186): unsure at all n locations
acagactcatcaacatccagtaaacgtattgcggttgattggctctgaggtcaaaatcatttgagcgttcgtttttacggactcatctactccgagaaaaagtattgcgttgaattggtcnagcgtcacattcatttgagcgctcgataattacgtgactgattccgacatacgagtaaaaacgta

SEQ ID NO: 63424 - DNA, 444 bp, Glycine max
  unsure (1)..(444): unsure at all n locations
gaaatctttgcaagcatcataacatctcttttttttcaagcaaatcaaaagaagacatgctgcagtgcttcattgactcanaatacaaagatggtcgctcaacaacagaagctgaagtgactgggcttctcattgctgcactttntgccggtcaacacacaagctcgattacctccacttggactggggcatatctgctgtctaacaaccagtacctttcagctgtgcaggaggagcagaagatgttgatagaaaagcatggggacagagttgatcatgatgttttggctgaaatggatgtgctgtataggtgcatcaaagaagctttgagactccatcctnctctaatcatgctgatgagaagctcacacacttgatttagtgtcacaacacgagaggggaaagagtatgacattnctcanggtcatataatngccacatcac

SEQ ID NO: 63425 - DNA, 398 bp, Glycine max
  unsure (1)..(398): unsure at all n locations
acattcttttatcaagtcagtgtttacagggattgcagctacaatggtacattttatcaatgtcaattggccatagctatttccgtttggctgggttggtaaatgtaaagagagataaaccataaacataagagaaaataataaaaattaaattttaattgaaacatggtaattcttaagatcttgatactgagattntatttgaaggattaaaaatctttaaagaggttttaacaattgaatcaaaatcaaacttttataatattgcgttctttgaagtcatttaattnnttttaataatacatgtacaactttataaatagtattaattattcacgatattatctgataagcttattaaaattaaagtattagaattctatatttgtgatctatta

SEQ ID NO: 63426 - DNA, 453 bp, Glycine max
  unsure (1)..(453): unsure at all n locations
tgcacccaacagtgaccaagatcttcagataatactattatttgaaaatcaagcacacttaaattattagtagcattntcctttccacataaaaagggagaaattgttccggaaattgagttattggcaacattcagcacttcaacatttgcagacacacttggcaatgtaccagtgaacaaattagaactcaaatttatgaggctggaattgagaaagatgttagataggtctccacttaacagattgttggacagatccaggaattcagtttgcaaagtccaattccaaaaccaacttggaaccaagtctgcaatacctgccttagacattgtcaaaaccttcacagaactttgctcttttagccattctgganacttangacctattccanagggagctcagtaaacatattncaagctgaaaggangaacccatccagagttgacactg

SEQ ID NO: 63427 - DNA, 299 bp, Glycine max
caagaatttcttgagagaaaatcaaacctcaaatatttttaactttcgcagttgaaaactcagagataacagatacacaaacaaagtaaaattggcaaatttagatgccctttttttcccctttaaaatgtgttattgtctagttatgaatgagaaaagtagagtttgaagtacatgacttgttgaccattcattacatagtaaatggaatgtaacactctttttgtctttaaagaaaatgaaaggcttgataatgataaaacttataccacaaatattcttgatttttataaatatct

SEQ ID NO: 63428 - DNA, 317 bp, Glycine max
  unsure (1)..(317): unsure at all n locations
gcttctcaaggaggggagcttagttattagaggggatgtgtagctaaacattagcttctcaaggaagcttctcaaggaagctttcatttaattactgaccttcaaagttccacttctcttcctcttttgtctccttcaatatcatgccccccctctctctctcattcttttccttcattgaagcttcctctctaatgtgtaatacttcaaagntccacttctctccctctnttgtctcttcaatttcatgccccctctctctctcattcttttcctccattgaagcttcctctctaagcttcttaatcaagacactc

SEQ ID NO: 63429 - DNA, 342 bp, Glycine max
  unsure (1)..(342): unsure at all n locations
tccttaccctcggaagcaaaaaagaagagaaggaaaatttccaatcaaaggaaanaggagaaggaaaatttccaatctaagaggaagcaaaaaaaaggagagaaggaaaatttccaatcaaagaataaaagagaggaaaggaaattcccaatcaaagaatgggagagagcacaaagaanagaaagaatattcccaatcatagaatgggagaaagaataaaagaagatgaagaatgggaagaaagttcccgatcaaagaaaacagaagatatgtgccgagaggtccttggaccagacaatatctgaacaatacagaattgtcaccanatgaacaaaaagaaag

SEQ ID NO: 63430 - DNA, 404 bp, Glycine max
  unsure (1)..(404): unsure at all n locations
gctatccttatgggctgcctccggacttcactctccgagccatctcggaagagttgagccaagcccctacttttgaggggcaactcccaccttatgaagactatcccgggcaagacgatggngaaggagatacccatcttggccccctgctccatctcanagatccatccccgcatgaactaccccagctgaacatagtccgccatatcccggcctcacccgcacccgtaaaagaatctgttccctttgcggaagataaaggaaagattgaagcgcttgaagagaggttaagagcagtcgagggcctcggtaattacccattctcagattggcagattatgtcttgtgccaacatcgtcatccctccanatcaaagaccagacttgataatacaagggcaacat

SEQ ID NO: 63431 - DNA, 450 bp, Glycine max
  unsure (1)..(450): unsure at all n locations
aagatgggaaataatatntacttactggttgcatgtctaataaatgaagatcattgaagaagatagaatgagagcaaccaccaaatattagaaggtatcggtctcctcaaatagcagctgaatgatcatatctaggaactggaggtgtctgccaatcaaaatgcaagaaattggtaaggtcatatggaacttctctaaagcatgtaaacacacattccgaaagtgtaaaatagataccacttacgtagtctttatcattntccaagtcaaactttcaagatcgagaaacatggacatcattcaacagctttgggcaatatccccaattccccttttgggcaagtgtctgctcccaaataattgtggtgaaattcttagctgcctttatacctctgaggactacgaattaattntgattcagaaagtgagtagctatatcatctctctatc

SEQ ID NO: 63432 - DNA, 439 bp, Glycine max
  unsure (1)..(439): unsure at all n locations
ctcagctgtgcatatatgtatatgtcacatcttatcnaaacctatatatcacaaaagagntaattaaaaaaaaagggtcaagtcatatacaaatatgggtaggcccccttcagtcaacaaataagaaaatattaattcanagaaacaacatttgaataaaatagtaaaacaaagaaattaccatgtagtatggttctttataaaaataagtgtaaaatatacatgacattaagtaaaatccccagcctatagatatagaagaaatgaacaattctaaataatgaagatgaanaaacaatctttggaactaggttaaatagcaagcatatgcagctaagtttggttttggttcttattagtccaacatgcaattcgagttcggtgactnttcagagcatgagcttcatactctagagtatagaannacaaattcaataac

SEQ ID NO: 63433 - DNA, 445 bp, Glycine max
  unsure (1)..(445): unsure at all n locations
ggatcttaagcactgggctgcagctataatggtgtaaagtgctttcttgtttgttaattcaagaagaagtatatgttgaacaaccaccaggttttgaaatattggataagccaaatcatgtttataaatngaaaaagactttatatggcttgaaacaagcccccggggcttggtacgagcgtttaagtaagttccttttagaaaaggacttttctagaggaaaagtggatactactatttntataaagagaaaatcacatgatattttattagttcaaatttatgttgatgacattatttttggatccactaacgaattgttgtgaaggaattctccatgacatgcanagtgagtttgaaatgtcaatgatgggagaacttaacttctttcttggatacaaattanacaaactaaggatggtatctttttcaatcaatccaagta

SEQ ID NO: 63434 - DNA, 425 bp, Glycine max
  unsure (1)..(425): unsure at all n locations
catcgttcgcgtgtatgatatccactcgacagtgttttaagtataggagaccttctattctataacgcaacatggtggacaaaagtgggcaattaacttgaatggccattattgtcaatgcggaaagtattntgcgcttcactatccatgttcacacattattgcagcttgtggttacgtgagcatgaactactacctatatatagatgttgtttacacaaatgagctcatcttataagcttactccgcacaatggtgacctcttgggaatgaagcggtaattcctccttctgatgatgcatggacacttatccctgacccaactacaattcgtgcgaaaggtcggncaaaatcaacaatgataaggaatgagatggatnggctcgaaccattctgagcaccgacaaaatgtagtatatgtggag

SEQ ID NO: 63435 - DNA, 475 bp, Glycine max
  unsure (1)..(475): unsure at all n locations
agctnntgcatgtttaggaagttctagttagatatttgtccaagttccaaagagttctgagagattntgttgtgtgaagatctgctgagatgagagctcgaagcgaaagccgttctgagagcttgagatgagtttatgagtgattgtgagatcctagaggtgaaggagacatcttcaccacttgtatttttgcaatctttcatcttgttcttctctgtgttgtaaaggaaggttccggactatggaaagctaaatcctttgttggatcttccctgtaggtacttgatgtaaatatatttctatctatgtaatgatgntttgtgtgttctctgtgctatctcgtgntcattccagtatgtctttaccttgatcacgtagatgcatgctnntgtatggtcattcaacagtggaaactggtctgattctaaagtcctttgtagtactacgctaagtagttgactatcacgaggaatcg

SEQ ID NO: 63436 - DNA, 336 bp, Glycine max
  unsure (1)..(336): unsure at all n locations
agcttagatganacgtacctagatagtgtggcgttggacaataaaaagagaagtgtcacagtcttcagtgcgatggagaagaacaagcttagatgcagaacaagagaggtacacggagaagaagagagggtgagaaaaataggtcgcatctgatataatttaaaatgtaagtccaacatcggttntcaatacaaaaccgatgttaacaaaatgatgttaacgttaacatcggttntcttcaagaaatcgatgttaactgatcatacgttaaccatcgatttcagaanaccgatgttaacgaacttatgttaacatcggttttcttcanacccgatg

SEQ ID NO: 63437 - DNA, 405 bp, Glycine max
  unsure (1)..(405): unsure at all n locations
tgatagaaattacctctaaattaatatcaaacttaacatttgccgattcattttaaatggttaccaaacaagcacataatcgtcaaacatctgtgtacaaaatatataaaaattaagttgcatattttttctctcattataaaattgaccaaaattaaaaaacaacgaaactaccaatggtaccgagtacgtaaccatataanaatattgatgattgataattgtgtccagaagtgcaatctaatgtctttatttcatattgatcattcnaatgaatatatgtaataaattaatacaatttcttcaaacaaaatatgctacaataacatcgctgacataaactatgaatatgctagcttcaangcaattatttagaaacagctttacggagaagatcgactgtgt

SEQ ID NO: 63438 - DNA, 380 bp, Glycine max
  unsure (1)..(380): unsure at all n locations
tgtatgtatacatgatttttatgatgtcaaagaagaatctaacaaggctacttcaaatgataagcatttgcttcaagaataattcaagattgcttcaacaaacaaatccttgtttcaagattcactaaagaccaagccttgccttataacaaagtgctttcaagacatgcaaggctctggtaatcgattaccaggaagtgtaatcgattacccgaagacagggttgagaaatagctgttgaanaanggttttgaatttgaatttcaacatgtaatcgattaccatatgtctgtaatcgattaccagcaacgaaactttggaagatcaaattcanaagtcataacccttcanattataactgtgtaatcgattacacaaac

SEQ ID NO: 63439 - DNA, 398 bp, Glycine max
  unsure (1)..(398): unsure at all n locations
aaacatgacanaatcaataaagatgctgtttattgcttatatacgcttgatgaggtgctgctgcttggaaagaatgctggaaaccagagaggacttggatttaatcctaagtctgctggcagaacaaccatgacagaatttgttcctgccaaaaacaggactggagccacgatgtcacaacatcggtctcgacatcatggaatgcagcagaaaaagagcaaaagaaagaagtggaggtgtcactactgtggcaagtatggtcacataaagcccttttgctatcatctacatggccatccacatcatggaactcanagtagaaacagcagaaagaagatgatgtgggttccaaaacacaaggctgtcagtcttgttgttcatacttcacttagagcatc

SEQ ID NO: 63440 - DNA, 390 bp, Glycine max
cgtgatgatatcctatgggctagcttgatgatactgatatatttattgctcctatatcagaatcaattgtctgatgtattcgttaatatgtggctctcttatttgtattactagggggagctttcaagttggaattattttgccagaagaatatccaatggcggctcccaaggtacttaatttagatgatgcttttttttctatatacatcgtggtattcttttggtgttaagagtataagcttctgttaagtcttggcccacctaacagataagacaaggtatattattgttatcttcaaattgctataacactattctttgtgtttgcgttctaatgctacaattatgatacctgctatattacatgatggtgatgatatcccaaaat

SEQ ID NO: 63441 - DNA, 408 bp, Glycine max
cccgcgacatatctccaggtaccactctgtggtcaacgaataaaagcagaaagtcttacccttctacactttctcatttcaagcttgtcggattatggggtacccatcacatgtagtactaggtggcggtcgggcgatggtgcaaaacgattctccacattcacaaatcacgtataacccaccatcccctgttgcccacctacaactgagctcacgtactcccacgtagcccttatcctcgttccttctaacgccgggtctccatcaattctccaagctttccaacattcaagtaattcacttccaatcattatgactgactaattaacaaacacggcaatgtgaaactctgctcaacacacttaaatcacagtttacatcaataccgagtacattctggtcaatcat

SEQ ID NO: 63442 - DNA, 263 bp, Glycine max
gccattatacttaagtcatgtctcgcttaacttaaaaataaaataaatttccaccgaacgtttgaattgtattatccattaacttcggttaaaataaattacgaccgttcggtcgtgccgctaccacgttggaaatcaaaaagagggtaaatataatattattatcaagaagacatcttctagtaaaataaagcggaaaatctatcggacgtgttctctttgggattgctcattcttaagcgaattgattaattacttatagt

SEQ ID NO: 63443 - DNA, 380 bp, Glycine max
  unsure (1)..(380): unsure at all n locations
tcccctaatatatcaaactgctccaaattgaaaatggaagctcgtagcaaatttaaacgagaataactttttactcaaatgtgcgattgagtcacgtaatatatcgagacgctctaaattgaaaacggaagctcatagcaaatggtaaccggaataacttttaactcggatgtccgattgagtcctgtgatatattgagaacgctcaaaatgaaaacagaagctctgcgcanattctaacaacaataactttttactcgggtggtccgatgagtactggaatatgttgagaacgctcgaaatgaaaacaaaagctcctagaaaattcaaacgaaaaactttttactcagatgttcgactggaatcccgtatatatcgaga

SEQ ID NO: 63444 - DNA, 447 bp, Glycine max
  unsure (1)..(447): unsure at all n locations
atccctggcggataccatactggaaggaattccatgccaccttactacttccttgatgtacaactccacgagtttctccattctatacttcatattcaccggaataaaatgagcagatntggtgagtcgatctactatgacccacacagcatcatgtccacgactagtcttgggtnaactagatacaaaatccatagatatgctctcccattttcattccggaattttcaatggcttcaattcttccgatggtcgctggtgctcagccttagccttttgacatgtcaaacatcttgctacatattcatctacatctttcttcatgccatgcgcaccaaaacttctcttcanatcttggtacatcttagtcattcctggatggaactaagacgactttatgcgcttcttcaagatcttaactctaaatcatctaaagatggacacata

SEQ ID NO: 63445 - DNA, 368 bp, Glycine max
tcagatatcttaagaaggggggttgaattaagatattacaaactatttccccaattaaaattctactttgattttaatgcaagttccaagttcccttaaagatagatttctaaaagatgattcaaaataactaatctgaatgtaaatgtaaagcaacaataaataaaagagtttaagggaagagaaagtgcaaactcagttttatactagttcggccttacccttgtgcctacgtccagtccccaagcaacccgcttgagaatttactatcttgtaaaacccttacaagtctgaacccacaaggacatccttctttgtgttagatgcttacacaagagatctcggctcttatccctttcaaagtagaa

SEQ ID NO: 63446 - DNA, 303 bp, Glycine max
  unsure (1)..(303): unsure at all n locations
cataaatctaaattatattatgtctaaggacgagataataataaaactattcaagaagcggngaaatacaaatcttgatcctgccaatgatcctgtgcagagttcatggcattctcatttatgtccaatgctgtaatgcttgatggtgaatcctaagaaaaaggcaggtctggcactggtgcagatgacttangctgagaagaagacatgcccaacactgcaatggaaggctctggtgtcacctgtggggtagctgctactggatcagtctaaaaaatgaaaggcttatgtggagtgggatct

SEQ ID NO: 63447 - DNA, 502 bp, Glycine max
  unsure (1)..(502): unsure at all n locations
gcttgcttctacacatcattcacatgttatatctataattcaattttagatgtatctaaacttgggatntacacgcccaataaaaagaatcaaggaacccactatagaagagttgataacaaaacacaactctctcccaaaataaattccaacattatcacgtcggcttggcggctccaacatcacctactgctgctcatctacnttccatgaacgaaagtcacaatcatcattggtaccaaccacacaacacannaatgtaagggtgagttattataaaagatcaacaacaccanatgacattgattagcaagaaaacaataacagtaaccacaattattcttaacaatccatcagttcagcatacacttaacanacaagtcatcaacttttntcacaattcanatcaattatgctcaaaatgatgcatgcacctgacttaactctcaaatgcaatggtgtaccattcatcangaaatagcctaagcgtgtcacatgacac

SEQ ID NO: 63448 - DNA, 304 bp, Glycine max
tggagcttattcacatgatctatcatccctttttcacttatcttgagaagattataggtttcttcatattgaataatgggaagatctataaggtgttagacatgtggcctcagaaatcttaagaaggggtgaattaaattcccactaacaaacttttaacccccttctaaaagaagagataggcttagaatgtagaagaagcagcaatcaatttaataatgttctttatatatgcaccgacaaattgattgcaatatattgaatgatataatggaagaaagaatgcaaacacaatttttatact

SEQ ID NO: 63449 - DNA, 272 bp, Glycine max
tgattttttttttataaaatcaattataatattcttatattaatatttttagactagaaatgtctctaataaaattgaaagaatgtattgacaacaattaaagtgaaagagtttaatgacagaatagtttggaaaatataattaaataattatgtttaactaaaaatattttcttatggataataggacttggcttattataaacagaggatattgaaaatatgtgatttttatgatatcaagtaagtggatttatatttgtaccatttttt

SEQ ID NO: 63450 - DNA, 374 bp, Glycine max
  unsure (1)..(374): unsure at all n locations
aaaacactagggaggaagaaacaactcattactgcagcactgttgtatttgtttggtggtgtgaatactgcctatgcaccagaacttggtgttctcttagcaggaaggctgatttatggacttggtataagtttggtaggctactttgaccagtaacattttatgcaatgtggatgattcttgcaccatcttacaagtgaattgaattacaggccatgcatggngctcctttatatattgcggagacttgcccatcacaaattcgtgggacattagtatcattaaaagaactcttcattgtccttgggaatctggtattgcattgtctnttatgtgtcttttaccaactaaaagaattactgantgtgggactg

SEQ ID NO: 63451 - DNA, 301 bp, Glycine max
aagaaaaagttataagataatggcattttcttatcaaccgttaaggcttgctaaataagccacactcacatagattgttacactcataatttccaaattcttctcaaaagagcagttaagctcaagtcacattaatcatctcgttttcacctcaaggcttaattgtgtgtgccttgttggtgatggcacacttctcaactaaacagtaccgtaagtaagtgagttaaaagccaaaaagaaggactaggacatctgatccacctattcttttatcgatgaaaacaatggatcaataatcact

SEQ ID NO: 63452 - DNA, 267 bp, Glycine max
  unsure (1)..(267): unsure at all n locations
cacacaaccgtattccgacggcaactncaatcctagcatgagcgcgcatcctggagagaatttccagtgaagaaacttgtggaattcaccctaattccgatgccatacttggacttgctacgatcctttatcgccgaccaatggcggtagtgagcctccggaagatataccaatctttccctcgatggtacagccccaacgccacctgcacttatcatggaggtatcccatgacatatcatagaacaatgtgtgacccgtcaccata

SEQ ID NO: 63453 - DNA, 325 bp, Glycine max
  unsure (1)..(325): unsure at all n locations
agaaccttatgctgagaaaacattaatgatctaattctcaatgaccgaccaatactaaacatgttattgtngtcctccacagttaactgcatgcacaattatcaaatttagaagaattaagaaacatgcataaatcagagagagccactctaaatcatttgattctctatatattctagataaaaacaacggtcaagaacttatatgggacaatagatatgacattatcatcaagatagctgaaggattaatttacctgcatgaatactccaacagtatgataatctcgcaagatataatagccaacaacatcttattgataaat

SEQ ID NO: 63454 - DNA, 288 bp, Glycine max
  unsure (1)..(288): unsure at all n locations
ctttgagaaaactttcttgagaagctagagtttagctacacacacccatctaaaaactaagctcaccttcttgagaagctttcttgagaagttagagcttagctacacacccctataatagctaagctcacccncatgacaaaaaaacatgagaatacaaaaaaaatcctactacaaagaactactcaaatgccctgaaatacaaggctaaaaccctatactactagaatggccaaaatacaaggcccaaaataagaaaacaacctattctatctattacanagaaga

SEQ ID NO: 63455 - DNA, 345 bp, Glycine max
  unsure (1)..(345): unsure at all n locations
catactaatgtacaatattgacacattgataaacacaatttatttaacagcagagttcgcgtttaattctctttatgtgtaaaactaatttaggtaaacgacaatcatacattatagataaaattgttttctgattcagtaaatttacgatattcataatctttaattcagggaaaaaaatcatacttaaattccaactatctgcagtaatctacattgggattttctttggcagggttaagagggtatgaatatgattactntgntcacaaaaaggctaaatataaaagttaattntgggacatatttctatcaataggcttagtttatagtgctatttgcatt

SEQ ID NO: 63456 - DNA, 348 bp, Glycine max
  unsure (1)..(348): unsure at all n locations
taaagattgaangggtaaattcaacgaaacatataccaaacttgtgtcattattagccttatgaagcattacttggatttgcataacttgaacaaatagaataaaacataacttattcgattataaaaagtttttttagaagtaggtattattatacaattctaggcctaattaagcatatgatccctagccaggaccccggccagagcctctatagcaaaaccggttcataatacaatacccattattagagcaaccattatttattggggngngncctctattattaatactactattaatagtaatattataaccacaccctgatgcctgcatctccattgtaga

SEQ ID NO: 63457 - DNA, 512 bp, Glycine max
  unsure (1)..(512): unsure at all n locations
agcttctacggaggttggatctntgagcttcaattaggttctttttggtgaatntccaccatggagatgcagtggaaggcaaaggagaagatgagaagggaggcaccatccactatgaaataatccatggaagaaggagcttcaccaccaagaatgtgccttggataagaagcttgaagaggatgctttaatggtggaaaagaaagagagaaagagggagcacgacattcaaggaatataagagggagagaagtggaactttgaagtgtgtctcataagactttcattcatcancagtgcaacangtgttacacatgcttctatttatagactatgtagcttccttgagaagctntcttaagaaaaattccttgagaagcttctttgagaanacttcattgagaagctagagcttagctacacacatccctctaataactaagctcacctccttgagaagaattctaaagagtagagctagctactacaccctctaatactaactcacctct

SEQ ID NO: 63458 - DNA, 285 bp, Glycine max
  unsure (1)..(285): unsure at all n locations
tttggatggtatacatatgattctttcatgcagcatgatgttcaagaactataatcggttctttgtgaaaaacttgaagacaaaatgaaggtatggcaagaagtttggaatatttgttcatgattattcttgatgggtgaccatatcaaantggtgttntgtgttatttgtcttcacggaactgttgttgagggaaccatacaaaaattatttgaagggcaccatatgaattacatagaatgcatcaatgtagactacaaatcaactagaaaggagtcantttat

SEQ ID NO: 63459 - DNA, 373 bp, Glycine max
  unsure (1)..(373): unsure at all n locations
ctgcaagcttgaatgctctattcaatggagttgacattattatctttatactgatcaacacttgcacagtggccaaagatgcatgggagatcctgaacatcactcatgaaggaacctccaaagtgaagatgtccagattgcaactgttggccacaaaattcgaaaatctgaagatgaaggaggaagaatgcattcatgacttccacatgaacattcttgaaattgccaatgcttgcactgccttgggagagaagatgacagatgaaaagctggtgagaaagatcctcagatccttgcctaagagattngacatganagtcactgcaatagaggaggcccaagacatttgcaacatgagagtagatgaactcat

SEQ ID NO: 63460 - DNA, 358 bp, Glycine max
  unsure (1)..(358): unsure at all n locations
aagagacacatattatgaataacaagagaaaaattnanagccaattttgctattattaatgacaacactggnnattnntaaagnggnacacaacattatttanaaggttgtactcatcattcacattaaagacacaccactcacaactattttcaagcattctaaattngtcatgaaagtcatgcatgttagagattganggagcaacatgacacgggcaacattttgaacaacctctcaaggaaaagcatgaagaaagttttgaagatgttntgacttttacatgcccaactcccttgagtggcatntgtattgattgggtatttgtgtattgcatcataatatcattcatcatcat

SEQ ID NO: 63461 - DNA, 190 bp, Glycine max
  unsure (1)..(190): unsure at all n locations
gctgcagcatatggaagtgacgccatttttacttatctaaanngggggcccatgcttggtgaaaaatctgcacttgatcacttgttgaaaccggtgagcgccttatagtgcccctcaaaagcttctcttgacaagatggcatcaatctcaagcgttttgtgcgctcgtgaaaaaccggatttgatgccat

SEQ ID NO: 63462 - DNA, 335 bp, Glycine max
  unsure (1)..(335): unsure at all n locations
cagccccttaggcacttctctctctctctaatttgctgagannaaatatttccgtgaagaaaatccaagccgaggcgcttctctaacgtttccgtaacgtttccgtgagtaattacgcgaagattctcggccattcttcaagattcatcgntcggtcttcgttttcttcagtcttcaacgggtaagtacctcaaaccaagcttttcaattcattntatgtacccgtggtggtccacatttcgcttcatgtnattttattctctttttcatttaacttttatacccncctttgacgtgcttaagccaattatttaagtcatttctcgcttaatcta

SEQ ID NO: 63463 - DNA, 218 bp, Glycine max
  unsure (1)..(218): unsure at all n locations
ttctggtcttagaaatgtgacctaagcagttatgccattatgctcctgagtttgtattatgaattctacgcttaataccacacaattcctcattgaaggattcaccataggaagctacaatatcaattaaatatagattatcataagccaagagtgaattatttctatcaatatctgaaataatagacgacctacacacattggttncacatgaacac

SEQ ID NO: 63464 - DNA, 169 bp, Glycine max
  unsure (1)..(169): unsure at all n locations
atcttttcattctcttcntccttttccaaaagaattcgccanagactaaccgcttgaattcttnttgtgtctctcttattccttttccaaaagaacaaaggactaaccgtctgaattcttntgtgtctccctctctccttgtcaaagaattcaaaacgacacagtctga

SEQ ID NO: 63465 - DNA, 274 bp, Glycine max
ctgcagcttgagaattcaagacattctagttctctatgacgcttgagaccgaataatcgagacgctcgaaactatcgtgcgaggcgctagaattttacatcagatcgggaataatttttttcacgggcaaatgtttcttgccataagatacatggggtgctgcgaacgcactctgtgactcaacgaaatccaacgcctcttgtaatttaggaacaccgaacaaagctctctacgacaatattatggcacttgaaaagccgccagtggtgaaaca

SEQ ID NO: 63466 - DNA, 466 bp, Glycine max
  unsure (1)..(466): unsure at all n locations
cgttcatacagcgctcgaattctcgggacctattgtgcatccgagtgaaatttatttcctttaaatttgctcagagcttcagttttcaattaggagcgtctcgatgtattatgggtctcaatcggacatccgagttaaaaaatattgtcgttagaattttctcatagcttcctgtttcaattacgagcgtctcgatattctacgggacacaatcgaacatccgagtcaaaagttattgtcgttnggaattgctcagagcttcagttttcaattacgagcgtctggatatattacaagactcaatcagacatccgagttaaaagtattggcgttgactttcaatagagcgctcgtatttacagactatttgacatcgagcaaggtattgcgttattttccagacttcgtttcatttgagcgctctatttatgagtcatcggctctgagtaaagtattgcgttgattg

SEQ ID NO: 63467 - DNA, 300 bp, Glycine max
  unsure (1)..(300): unsure at all n locations
tgcaatgcgatcatctatgtataaacatgagttangtttgctattccaatgtctcactcctctgacacatcttgcactttgtggtttgggggaggaagatcttctcaacaccttgntgaaggagctgatactgcccacgtctctctgggtgttgaccctatggtgtttcaatggtttaaagttgttggaaggaaaagggcttcaacatctcacttctctctgatggcttaacatctggaactatggaagcattgaatccttgccagaagatcagctgccatcctctcttgaattactgga

SEQ ID NO: 63468 - DNA, 331 bp, Glycine max
  unsure (1)..(331): unsure at all n locations
tgggttggtcgtctaaaaaacagggggatgttccaaaaggtagaggatgagcttaagtgggtcttagaccctgaagttattccttgctactgggttgacgattggatcatccttctcaacttggacgattctaaggccacccagattatgcaagaggagaagacgcatggctccacacccatcctggaccttcagaaatggtcgcaggatattcgcccaacccatangctcgcctggatacttctgtggngcttgtcgccgacagcgtangagtcaaaatacatggngaaggtggtagcggcgatcgggcatatggtggaagtcatgaact

SEQ ID NO: 63469 - DNA, 316 bp, Glycine max
  unsure (1)..(316): unsure at all n locations
tttcgtatgctacatacggaatatataatctgtatgtcttatacggatcacctgatccatataacacatacggattacataatccgtatgttatttttaaaattattaaaaaatacattaaattaaattttttaatagtaaaaagttttttatataaaaattattatttagtttttgtttctaaataggttttntaatgaaatataaatatattatttttttgtttgtaaatagttactctttattctataaataaaaaatagtttattttgaattatgattttaaatatttaattttttgtaatggtagatatat

SEQ ID NO: 63470 - DNA, 221 bp, Glycine max
tcagagtcacctgcggcgtgcaagcttcttattctcagctaatgaagaattattcttgtttcttcatgcactcctctaatgacaatagcatcacttctggcactaaactgctgggagtttgaagccatcttcttcattaaatttctggccttaactatggtcatgtcttcaacggctccaccaccggcagcatctatcatacctctctccatgttgctgag

SEQ ID NO: 63471 - DNA, 440 bp, Glycine max
  unsure (1)..(440): unsure at all n locations
ctcatcgaagtctgagtagagatagcctttatggtcatgtattanagcagaatctgaagcgttgttgtgaagctgaagaacatgggaagtgacgttgtggcagaggactccataccagtggcaacagttggtgttattatgattccaagaccaaagcctatttgaaggatctatgagatgattcttaatcttcaaaagtgtctcacgctcacttgggatgcacacactctctctgcatggtaagctgaacaaccaaagctggacatagacaataatatatatggaggaattcatgatcactctagaatatatataagacaagtggtgttgctggttctgcatataatcatcacacttctattatttatactgcttgccgtgcgtgtggtgttcttcactttcattatattttaaccttcttattattgtgcgcaatacta

SEQ ID NO: 63472 - DNA, 214 bp, Glycine max
  unsure (1)..(214): unsure at all n locations
actcatanaacttggaagattagaagatagccaggggtttagttgacacatggaaaaaacgtgttggagctgaaatgattattaacgatgctacgtcttgttcagtttagactgttccctggccagccagacaacgaatttctgaagttgctcaaggtgggaataaacattctagtgggtcacctgatgttggcatgaagagctcagttacaca

SEQ ID NO: 63473 - DNA, 381 bp, Glycine max
  unsure (1)..(381): unsure at all n locations
accaagaaatgctacccttaaaacaaaaacggcatacaacctccttcaataaatacaaacatcaatgtaaatttagagcaagcttatgcgcatacttctttacgagcgttcacttgcacaagacattcttataactaagaaaaatgcacccatatacaatcaaggcaccttcgttacctagattatttatatgtacttccaaggtgtatntgttacctacatcacacgcatttcctttggctaaattacatacatgcatactcaaagcacnttggctatcanaaattgcatacgtgcacattcgggtatttctaatacctatacatacacaaacttcatgatgaatcttgactatctacacaataaggggctacatttcat

SEQ ID NO: 63474 - DNA, 134 bp, Glycine max
cgagggccaacagttttccatcacatgccgcataaccaccatcctgtaccacctcatctgactacgactccacgtgccatatctcgtttttaacacgatcccatcatctcccagtttccacttcagcaaacaca

SEQ ID NO: 63475 - DNA, 411 bp, Glycine max
  unsure (1)..(411): unsure at all n locations
ataggggcaatttttgcatttcataaagttgctgggtgcaccaacaaaaatgctaggtgcacctagcaacactcatagagaaaaaacaaagccctaaaacccttataacccaacccaatacccatgttctctgttaactcactcatgtcacccctgtcaaagactcaaacttaaacgttcctgttacaaaacgtgaaattggaaaagtgggtgcttggcggtgacacaatggaggtcgcanagtgtccgacgcgacgattcttacgtgggcttcagagtatcagcaccaaaacacccttgtagagtgattgcggaaccacaactccanacncaatgcgatagcgtgtatgacaggcacggagatgcttccagaatcatacnattctacatgttgctcgcgatttactactt

SEQ ID NO: 63476 - DNA, 237 bp, Glycine max
  unsure (1)..(237): unsure at all n locations
cggacatcgacttaagcctttcttctctaacccttctttaggggacgtagtggtggaagagacttccctactccaccctactcttcctccaccatgacttnagggagtttttcttttcctatctccttctttgcttttattacacttgtccgcttctctttgatgaattaattgcttttaatcttttaattgtgctacattgaggacaatgtgttggttaagtatgggggggggggg

SEQ ID NO: 63477 - DNA, 453 bp, Glycine max
  unsure (1)..(453): unsure at all n locations
gaggcttagagaatacttagtggatcctgcagaggtttaaattactagggtgggtgttgcatgtagaggcaagtaaagaatactaagtggaacttgcaaagttcaagaatactagggtaagaatactatgtgtggagagnttaaaataatgaataccatggttgtgtgtntggtcttagtggaaaaatcctaaacttgtaggtactagatgttgcccatgttgcgatgaactagtataaatgatttcatgtattggatccttctntactatatctcaattattttctcccattggttgcttatcattaagtttngaaaaatcttggttacaaaagatngactctaaaattttatcanaaggtgtgttacaaatagtttcttctttcaaagcaacatctacctaacatttgagaagcgaaaacaataatctttgcatataagaacttgtgattt

SEQ ID NO: 63478 - DNA, 349 bp, Glycine max
ctccatgagaggttggatcacatggagaatagagatcataatgaagaagaaaggaggataagagggaatgatggtgttcctatactaaaccgaatcgatggtattaaactcaacattcctccatttaaaggaaagaaagatccggaggcctacatggagtgggagatgataatagagcatgttttctcatgcaacaactatgaggaggaccaaaatgtgaagctcgccaccacggagatttccgactattggcttgtgtggcggaacaagctacataaggagagagcatgaaatgaaagcctatggtgatacatgaccgagatgaaaagatcatgatgaaccggctgtg

SEQ ID NO: 63479 - DNA, 350 bp, Glycine max
  unsure (1)..(350): unsure at all n locations
caaagcccgtactaaggcatacaactccttatcataagtngaatagttaagggtaggaccacttaactnttcactaaaataagcaaatggatggccttcttgcatcaacacagccccaatcccaacatttgaagcatcacactcaatttcaaaagaattttgaaagtttggcaacgcaagtatgggggcattatgttagctttgcttaagaacatngaaagcttcttcttgtttctcntcccatttgaaaccaacattnttcttgagcacttcattgagaggtgctgccaatgtgctaaaatccttcacaaatcgtctattaaaacttgctaagccatgaaaactcctca

SEQ ID NO: 63480 - DNA, 390 bp, Glycine max
  unsure (1)..(390): unsure at all n locations
acttccttgagaagctagatctattctcacacacccctctcataactaagctcacctccttgagaagccttcttaagaagattcgtaaagaagctagagcttatctacacatacctctctaatagctaagctcacctccttgagatgagaagctagagcttagctacacaccccctataatagctaagctcacccccatgacaaaaaacatgaaaantaaaaaaaaaagtccttattacaaagacgactcaaaatgcgccgaaatacaaggctgaaaccctatactactagaatggccanaatacatggccttgacgaaggacatacctattctaatatttacaaagagtagctggctcatacttagcccatgggcttcgaatctaccct

SEQ ID NO: 63481 - DNA, 339 bp, Glycine max
  unsure (1)..(339): unsure at all n locations
ccttcgtacctatatattacatgtacttcaagtgatttgtacctacatcacacacatttctttgtaaattacatacatgcatactctaacacttggctatanaaattgatacgtgcacatcttggtattctaaacctatacataccaaacttatgatgaatttgactattacacaaaaggtgctcattcatgctnttttaagtgttttatacctaagccgatgcaaatcagatattttttttgtcactaaatgattcanataaaggattttgaatgattttttactacatgcacaattataatttggaacattgatccaaatattgtctcatcagtatt

SEQ ID NO: 63482 - DNA, 369 bp, Glycine max
aataacagaacgtctttgaatggatgtggactgtattccacatgtggagcaatcaaggtagatgagaactgaatactatagacactcctataggccccacctagaggatctcctgcatcaaagatcatattaattaaattattttagataatgatggtgtaaacgtgtctttacatgtcttatgtcaactccggaaatatatatctcttccttcattagataacggaagaactttccaagaaaatacatcattgctgttctacgatcaacagatcaagtgcatcactttatggattggtgttggaatcgttgaatcattatctgattatactgtaaccataacagacaaccttcctcactaacttatca

SEQ ID NO: 63483 - DNA, 397 bp, Glycine max
  unsure (1)..(397): unsure at all n locations
aacagcttatttagctttgttggaaaaacngcttatccttttttttaaaaacttttcttgtgaatcaacaatcaagtgacttcacatatttatttcttaaggggttattacatagaatataaaatatttaatttatacaaattattatagaaataaagatagagtatattacttatgtgttggtgtaaaagacattatattatttctattaagaaataacattaatgctttgctatatttttttcttatctcaataaaagaaggaaaaaatcgtgccacaaccatcccttttgtcataaaatcattatcgngatcatatcactacctatctgactatataaaataactaataattaagagtattttttaagaaaaaatatattgcacgagacattct

SEQ ID NO: 63484 - DNA, 427 bp, Glycine max
  unsure (1)..(427): unsure at all n locations
tcaatctttatgtttggtcaattcactataattccttgntattcatcttatcctccatgtatatcctccattgtattggtgttttattctgtttagagtagattaaaaaaaataaaccaactaaatcttagatctacacttgttcttgcatttctatggttcanatttcatagatctactcttgaatcatgnttttgcgttgattntangttctattatttttcagtcataatcttcttgtgctgaacctttatatctaaatnttcttccaaatattgattattaaaaaaaacacacaaatctaagtgtcttagagtcttgtctagtcataataattgtcacattatgtngtaagtgtgtgttgatttttattttgtgattgattcttatacattcgtaatgtattcttgcattctatctgtggatc

SEQ ID NO: 63485 - DNA, 230 bp, Glycine max
  unsure (1)..(230): unsure at all n locations
gcagcagcnagggacatacccaaaccgatcacgtttgtctctgncacgcccggatcaaagcaggcagatcaccggctccgcanccctaactgaactggaggcggacgccgcggctctatactctatgagtttctggagcttaaacacgacttccaagacggaagccatctgatctttcaaggccgatagatcggtcttcatctgttcatgcacgcactattcaatataca

SEQ ID NO: 63486 - DNA, 468 bp, Glycine max
  unsure (1)..(468): unsure at all n locations
ctatctctcaaanagtatgaattgtatgttaagatatgcatgtgaagcatacccctttttacaaatatttctatcttaccttcatgtagacatctgtatctggatcaggtgtaatatttgcttctttttctcttctgaacacctctgctagcaaatctgcagaatgtgaaataattttagttaaaacttgatatttcatatgaactttggctcgatctccaaatagcagctctgtgggctaaccataaagaggcccaactccttggactcatgctgagaaggccaggtttctctgactgtcatttctccaatatgaagaatcatttgacttacagacatcattatcccatgaccattatatgtcacctctccagtgaactgatcaagaagccaaacctatatagctaccatatcaaatttgggaaatatgagcacaaacatcatagcatcatttaacaatatataaat

SEQ ID NO: 63487 - DNA, 422 bp, Glycine max
  unsure (1)..(422): unsure at all n locations
tctagataagataagataagattagatctagatgaaataatatctagatgagatcaaatctaaataatatctagataagataagataagatctaattttgtagaataaaatagtctgtcctcttcaaatccaagcccaattctggattcaagcccaatgcttcattaattcctgaaattagattaaaaacatcanattagctgaatgagcccacataataaaactgcctaattaatttgacaattaanattaatcagtacttanaatggtgcanaaagggttaagaaatangagaatataattgcacatcanaaacccccatacttatgcctttgcactcctagggcaaatgaaataaagaacanaatccaatgatattcatagagagacagacaaaacatttacatatttctcaatgaaca

SEQ ID NO: 63488 - DNA, 488 bp, Glycine max
  unsure (1)..(488): unsure at all n locations
gctaagcatcacattcattttacacaaattttattatgcagagatagccttgaattatcatgaacgtcatacatccatattaggaaatgaaaaaagttagagtatccacacataatcttcaatctactagagactacattntgatagtataatctccgactacaaaccattaaaatttcagaagaatgacatttatcaaaaagtgtgtagtatagctttgatattacttcattagctatntagaagaatggtattataattgtcaaaatgaanaactactatatgttagagatagggggagcaacatgagataagcaacatgagcaacatggtgaacaacctataggctaaagcttanagctcaaggaaaagcttgaagaangtttgacgaagtttttggctttacatgcccacttnctgagtggattatatgggtgtacctgggtatggtctagaattaaatctgattgctatgctatctggtaggg

SEQ ID NO: 63489 - DNA, 344 bp, Glycine max
  unsure (1)..(344): unsure at all n locations
gaaccaagctcaagcttttacaaaaagggtcatcaagtcaagttgaaatatggaagtaaccgtcctgcaaaattggggcacaagatgaatcgagtcacatcactgcttcgtctactggccaaacatattannngatgtgatgtgcttgttactttccagttcaccttgacaaagatgtcatggaccatgttgaaaatctaaattgattcaaccccatatactgcgtagaaattcgcaatacttcgactgtacatcattcncatgcatccactgctttcattggttgcatagctcattgcattctttccttgagaaagaaataaatataataaatgatctttcaa

SEQ ID NO: 63490 - DNA, 370 bp, Glycine max
caccacacagttacatgagactaatgctgcacatatatatgctgacagtcgttataaggatatgaggatttctaacgtgaagaacgagagtatgatgacgattactatctacaaggttttaaaggcgtgatatgtagtatcaagcgatgtcaaaggctgatatgcataattattaagggtaagccattgaatgaatttagtgcttttgaccctaatttattcctatgatttgcatgactctggtaatgatgagaataaaccacgtttggatatatacggcccgcacggtgatatttgagaaaaatagagagtagaactaattgtggagtcacgtcatatatattagagcaaagtgtattgataatttcta

SEQ ID NO: 63491 - DNA, 343 bp, Glycine max
  unsure (1)..(343): unsure at all n locations
gagagccttcttgtctctctttcttgaatcctctaaagtctccttttgtgcttggaatagtgaagtctcatcttgcggctccttatagcctctttcaaccatctcccacacatcatgtgctccaagaagggctatcattttgatgctccaatcgtcatacgtgcccccctctataagtggaacttggaaggatgtcgttccatttcttacgataactctagaggaatttcttatcagaacctaagctatgataccactttngtggaaggagaaagtatacgaagtatttgagaaaatgtcggaggagagaatatataaaagacgacntagttttattacttga

SEQ ID NO: 63492 - DNA, 402 bp, Glycine max
  unsure (1)..(402): unsure at all n locations
agctntgcggatntggtcttcgccagtgaaatgatctatgtgggttctaaaagaggcaaattngatcatcctactatgacgactgagaaaactggggcaaatgaagagggtgagaaagagggagaaacccatgctgtgactgccattcctatacggccaagtttcccaacaaacccaacaatgtcattactcagtcaataacaaacctcctccttatcccaccacccagtatccacanaggccatccctaaatcaaccacaaagtctgtctaccgcacttccaatgacgaacaccacctttagcaaaacccaaaacaccaaccaaaaatgaattttgcagcgagaaagcctgtagaattcaccccaattccagtgtcctatgctgactngctcccatatcta

SEQ ID NO: 63493 - DNA, 324 bp, Glycine max
  unsure (1)..(324): unsure at all n locations
tatattcatcaggaatttatcatattggaaggaaactgcagtgctgcgatccaaanaatccttccacccaagcataaagatcctgggagtgtaactattccttgttcaattggagaagtcaatgtgggaaaagctcttattgacctgngagccagcatcaatttgatgccactctctatgtgcagaagaatgggagagttggaaataatgcccactctcttattaacctgggagctcttattgactntacaattagctgactgctccattaccaggccatatggagtaattgaagatgtattggtcagagtaaaaaaatttatc

SEQ ID NO: 63494 - DNA, 524 bp, Glycine max
  unsure (1)..(524): unsure at all n locations
tgcggctgcagcttaacattcaacttcgagcgtcgtcgtatattatattatttcattagacatccgagtaaaaacttattgtcgtttgaanttgctcagagcttcaacattcaatttcgagcgtctctatatattatgggactatatcagacatccgagtaaaaagttattgtcgtttgaatttgctcagagcttcaacattcaatttcgagcgtctccatatattacgggactcaatcagacatccgagtaaaacgttattgtncgttgaatttgctcagagcttcaacattcatcttcgagtgtctcgntatattacgggactcaatcagacatccgagtaaaatgttattgtcgtgtgaatttgctcagagcttcaacattcaaattcgagcggtctcgtatattatacgactaaagtagacattcgagtaaaaagtattggcgtttgaattgctcagacctttcacatcaatncgagcgtctcgtatataccggactcatcaacatccagtaaaattatg

SEQ ID NO: 63495 - DNA, 301 bp, Glycine max
  unsure (1)..(301): unsure at all n locations
aagttgagccantaaacgacaaaacttttactcggatgtctattcatgacgtatatatttgacgctgaaatgaatgttgacctctgacaaattcaacgacaaaacttttactcggatgctaatgattcccgaaaatatcgagacactcgaaactgaatgtgaacctttgagccaattcaacgacaataactttttactaggatgtttgaatgagccgcgaatatatccagacgctcgaagatgaatgtttaagctctgagccaattcaaaccacatatactctttactctgatgtccgatt

SEQ ID NO: 63496 - DNA, 426 bp, Glycine max
  unsure (1)..(426): unsure at all n locations
atgatataatttaaaatgtaaggcccacatcggttttcaataaaaataaaaaaaaaatcgatgtaacaaaatgatgttaactttaacatcgattttcttcaagaaaccgatgttaacttatcatacgttaacatcgattntatgaaaatccgatgttaacggataccatattattacaattatgccaccgtgtttatcttatacatcgatttatcaaaaaccgatgttaatctgccgatgttaaatctggtttttgtagtagtgtataaataatacttggattataacatgtagagactagtgtaaactactttgggtgagctagaagtggcttgagaaaatatatttatatctttgagaaaaatagtanaactttgatgggtatcaacaattgaatggtatctcagtggttgagataaatagtat

SEQ ID NO: 63497 - DNA, 442 bp, Glycine max
  unsure (1)..(442): unsure at all n locations
ccttatctcctactcaattcaagaacactaattccaagctgggaatgataaacatctattcccagcttgaggngggctcttagccactatgagagaattcgtgttgctgctactgcagagntgccgctactgcagagttgctgctattgcatttcatntacatntcatttacccttcatttcatttgtaattgaataactaactctctctttttcattttcaactttgtatataaaccatacttaatagaanataaagcttaagctgnnttttatcattccataagctgttgttcgttttctcctctctcgatctctttctctctctcgatacaacttctattaaagtcaatntcttgttagtagaatactataatactcttagaacatcatatgggctcaaaaactattataaaggataatttctaaccgtaataactatg

SEQ ID NO: 63498 - DNA, 292 bp, Glycine max
cagcccctttggacttctttttttcaattgttagaaatgttcggaaaatcagcgagccttcgacgttcgacgttcggaggatccgaagtttgacgtcttcatgtcttatgtttatgtctcagctacgggagtcctaacagcttcattatttattcccgggggccacattggttatgtatttatttcgttattcactttatcccctttgactgctaaccatttattaagtctttctcgctacctacaataaataattccccgacgttgattgattatcgtacttggtgaatga

SEQ ID NO: 63499 - DNA, 438 bp, Glycine max
  unsure (1)..(438): unsure at all n locations
gtctaatgaagatgaactcaccttcatctcatgaaatattntcaagatgtggaagaacaaagggagatccaaatagaagaacttctcanaaatgttgttcaaggaaaagaaagacaaagacaaaagctccataatatggtatgaatgcaagaaacctagacactttatatctaaatgccagaactagagaagtctcgggacaagaagaaatactacaagtccaaggaaaagaaaggtctctttagcacctaggaggatctagacgacacattgtctaatgaagatgaagaagaagccaacctatgtctaatggtagacatagtctttgaagaataagaagtagaccanaaggatganggaaatcttaatgatcttanatctcttanacaatcttatcacgaactattatcanactcgtccattcttnntcaaagctac

SEQ ID NO: 63500 - DNA, 478 bp, Glycine max
  unsure (1)..(478): unsure at all n locations
agcttataaactttcgacagatcttattataattttactaatataggacgctgttatgattaggacgtaaataattgagttacatattattttatatttatttataaaatcaatatcaaaccaacgacttatagataaaattaatattttccaaatgattgtacaacctataatcacgcgtgtaggaggcaaataagtggatttacacttcaattagcccacaaaatacgaaataatcatgaatataaatacaaatatttatagttgaatataataaacaaacttataactttaagtaatacacanacacatcagttattatatattattaatgttgaacttatagagttttaataattaaatctaactttagattcacatctacttattagattaaatatctctcgaagagatcaaataagcaagtctaattgaatattcagngaattatattgaaatgatttatgaataactcatc

SEQ ID NO: 63501 - DNA, 400 bp, Glycine max
gaaaagcaacgggataatccttcctatagtttcctctttggtggggaaggccatggttactaccgctataagctttggttatcaactcgtcccccgggtggtccattcaacccgtctttttcatcatcttccatgcccatgatgcatcctccaaatccaatgatgaatctgtctcctctaaatgcttctccaatgaacccttgcaggaatggttcttcaccttcgatgctaggtccacctcatttccaacagttctatgatcaacaacaccaccatcaacatcctcagtctttttggacttctggtcgggctgagtatgatccgtcatccaagtctttcaaaggggtctttgggccactccatcttgatgtgaatggagctagtaatgtcttaacaatct

SEQ ID NO: 63502 - DNA, 412 bp, Glycine max
  unsure (1)..(412): unsure at all n locations
gcttgcttcacgtcatgaaacaaggtaanttttccttntctttcatgcactaactcgcgtcgtggtgttcctttcccctgcaactgcaacgtttctcataagacttgatgaaatccatagaaaataagcatattaaacaccataattaaactaatagcaatatgggtctccaaaatcctagtcacactgaatcatacatttgttgctggtattgaaatgcatcattttctaatgatctatcaatatgtcatgtagggagatttatatatgagaatgcgaaggattgagatgtgataatgatatgcgcatgaaattgttctggcttgtattatctctctcactctttcttgctctatataataaaaaactcttcttttggaactagaaatatttcctttgccatctcataaat

SEQ ID NO: 63503 - DNA, 309 bp, Glycine max
gaccctcacttgactgaccacaaagatgaccctctcctgttctctgttacaacaacccaagtatatgtaccctctacttgtaccacaaaagatgtacccttcaatgtgttaagacaaagacattttaggagggtagtcctttgaatctttggtaggggaaacaaaagaatctcacgcagttagtcctcttaattctctttgaaagggagaagggagacacaaaagaatcatgcagtatgccctctattctttggagaaggagaagagagacacacaagaattcagacgatctgccttgtggatttgtaa

SEQ ID NO: 63504 - DNA, 245 bp, Glycine max
  unsure (1)..(245): unsure at all n locations
taatgccacaatcttctttacctactcattgagaggtgatgccattgcagagaaattatgaatgaaccttctatataagcttgctaacccatggaagctcttaatatctcccacactttttggggtgggccattcttggatgagcgtgattntctcagggtccacttggaccccatttctaccaactacaaaccctaagaaaactatattatctacacaaaaggtacacttctctatatttgcat

SEQ ID NO: 63505 - DNA, 459 bp, Glycine max
  unsure (1)..(459): unsure at all n locations
tgcagctctgtttcattacgagcgtctcatatttatctggcctcatccgacatcggagtaaaaaggtattgtcgttagaatttgctcagagcttctgttctgaattttgagagtctcgatatactacggaacacaatcggacatctcaagtaaaagttattggtcgttggaattgctcagagcttctgttcttaattacgagagtctcgatatattacgggattcattcggacatccaagtaaaaagttattgccgtttgaatttgctcannagcattcgtgtcaattacgagcgtctagatatattacgggattcattcggacatccgagtaaaaaagtattgtctttntatttgctcagagcttctgtttcaattcgagcatcttgattatacaggactcaatggacatccgagtcnaaagtattgtcgttgaatttgtatgactttcggttccata

SEQ ID NO: 63506 - DNA, 414 bp, Glycine max
  unsure (1)..(414): unsure at all n locations
ttatagaagatgacgcattgtaatcgattacaggtatttggtaatcgattacaggcccaataagccttctggtaatcgattacaggatgttgtaatcgattacaggctgcctgttcatgtgtaatcgattacactggatggtaatcgattaccagagcctatcctaggctagtttctaagagaatatctatatntatgctcacatacatcctatatgtctaatattcactactaatacactaaattcaatcattcaattactatatacacaagagatcataaattctatcataaaaacaagaattcaaacaagatcaaccaatatantctactatctaaaggtaaaatagtaatcagccaatcaatcaaccaatcaagtcacccaataattcctatgtttctnaatctcttaca

SEQ ID NO: 63507 - DNA, 441 bp, Glycine max
  unsure (1)..(441): unsure at all n locations
tattcacttggtaatcttaanagacttcaattctttgaagtatggaatcttaacatctattaaccttgaacttcaagctttggcccagagtaagatactagactataggatatgctttttatcttctgatgtcttcttgaatgccaatacaattggtttggttntaatgatttaaccaaaggtttatttaattatctnntttttgctaatcttntttgctaatggtattagatagatagttatgttgtattaatgcttacaatgtagaatatgtaaatatacgtactatatatacagtctacaagaccaatggttccttctttctcttcaatttcttctaaagaaattntccgcatgggtatatatncaggtgactagaacatgcatgctacatatgtatggttgaatgtaaacttctacatcctattaagtatacctact

SEQ ID NO: 63508 - DNA, 124 bp, Glycine max
taatcattcagtgagaacctatgacgtacctaaacaggagagctcctgcagtcaaccgataaagaacaagaccacaaacaaggaggcttgtgtggtggctggccgctatggatcttgagtgata

SEQ ID NO: 63509 - DNA, 446 bp, Glycine max
  unsure (1)..(446): unsure at all n locations
ctactgtataactaaatggagatttgttttttaacaatgagctctttaaggtaaatatattattaattggttgattaacaattaaaacctattaaggtatagatagattaattataagaatcccaattatacgtaactgacgtactagttcacaaatttaaatgagaacacggtgaacgtatttgtgtcaaaataagggagtaactatggtttttcgattgattgaattgaatgccaagaaaaatagaaggaacaatattaaacccaaatttggtgacgaagattatctgtaaacacataaatacattaagtgttagacccagcntcagatccacaagatacaatagaatatatcaatctagccatacaacgattatatatatgcagaattattcaactactatgaaaagaatacacattatttcgtgcactacctaattattttc

SEQ ID NO: 63510 - DNA, 365 bp, Glycine max
  unsure (1)..(365): unsure at all n locations
accctaatatagtgttgggaagtatcattatctgcaccttctcaacgggcttcaataatggaacctcaactcttaatgctattattggcacctcgaaggctctagggttggagggctctatcttagttgcaaacccaaactatggtgattatattgcagagccaatcccttttgctgnttctggtattatgatccctcgtgtagatgatgccaaggtacaaacgaaggacttagtcagtattattacctatcattatttaactganactttactatcagataagtaaaaaggcttcttgaagtgtatgtatattacagattatgaaaacacataaagaggataggaaggaactgcacacaatttg

SEQ ID NO: 63511 - DNA, 419 bp, Glycine max
  unsure (1)..(419): unsure at all n locations
gcttctanactntctacaagaatgaagctctgataccatttgnttgacaagtggcctcagaaatcttaagaaggggggttgaattaagattatgctaactattcccccaattaaaacctactcagattnttatgcaagttctaagtttcctttataacaaattacttagatgatgaatcaaatgagaaaattgaaatgagactaataaacaacagttaatataagagataaagagaatagagaatgcanaactggatttatactggtttagccacaccctggtgcctacgtccagtccccaaccaacccgcttgagagttccactatctntggtaattctttaccagtactgaaccatacaagggactttccttcttggtgttctgattntctttacaacaagagactcacagtctctt

SEQ ID NO: 63512 - DNA, 394 bp, Glycine max
  unsure (1)..(394): unsure at all n locations
tgcttactngcaccatgtnttcctctccaggttatacaaccaatgatatgcagattcattgatgtccttaatctattgcattnttttatttccacaaatgttcataagtagctttagcagctcccatcatcagatctttcagcatcaccccaccaccaaattgtttcttaaaattgttataaagatctttcagctcccatcatcanatctttcagctctatcggggttggaaattccagaaaaacttngtgtaatcccctgcaaataaataactcataanaataatgaanaaaaaaatttacaaaataaaagtacaatccaagagtattaattttttaccttctgttgacactaatgaacaccatntgttggttcacactaccaatatctaaac

SEQ ID NO: 63513 - DNA, 304 bp, Glycine max
  unsure (1)..(304): unsure at all n locations
agcaggtataccagcgggttcaacacctgaatactgtatttggaaagacccaaaagaagggataaagtaagacttgcatatggaagaagaggtccattttctttgatcttccatactagtctgatctagacgttagacattgtattgatgttatgcatgtcgagaaaaatgtatgtgatagtgtgaatgggacgctctttaacattcanggcaagacgaaagatggcttgaatacccgtcaagatctagttgagatggggatatgatcacnagtgcatccaggtctgatgggaagaaaatttac

SEQ ID NO: 63514 - DNA, 284 bp, Glycine max
  unsure (1)..(284): unsure at all n locations
tatttagaggttaaaactctaacccatagctgatgctgatcagatgcaaaagcccataaccatctacccaacaaagctaaagtgaatttggagatatcctttatccccagtcccccatcagacttatgcaaacaaatatcatcccatttcacccaagggattnttttatgatcaatgtctccaccccacagaanattcctttgaagggatatcacacttganggatatcccaaggggctgctttcataatctttcataacaataggatcccacaccagctgact

SEQ ID NO: 63515 - DNA, 412 bp, Glycine max
  unsure (1)..(412): unsure at all n locations
tccataaattatatatatgttctctaattatatgatacttaatttttttttacaggagttaattgatggacccaaaggaattgactatcaaacttggtcttgaattcaatagtttggaagaggcatatctattttagacggattatggaggcatgaaaggctttggagttagaaaaagaattcaagcaagagtaagaaagatggtttcgttactcattataaatatgtctggtgaaggagggcgtacatctatctgataaaagagatcctaanacgaccaatccaaaagctgagacaagaacagggtgtatggcangcatgannagtaaacgaatcaatgagaaatatataagtgatgaatnttttatgatcataatcacccactccatccactagaaaactgtgcatatgt

SEQ ID NO: 63516 - DNA, 374 bp, Glycine max
  unsure (1)..(374): unsure at all n locations
taaaataattggaacttcttcgatgtacattttgaacatatattacgagagcccgtcaactcaaatcccaattaacatgagtacacatgagctacgtaaaacaagcctttgattcacgtttgaaaattatgacctagttctctacttggtcagattattggacaaatatttgaaattattgagtttgaccttaaaagtactccctgcgttcagtttgtttaaaagttgtatcaacttctaataaaataattnttgaaaaagaaaaagagaacaatctttcttagaaaaaattgtgggcataaattacctcttataagtgacaagaaaaatatacctctattatctattattatttattatgtattcatatattt

SEQ ID NO: 63517 - DNA, 386 bp, Glycine max
  unsure (1)..(386): unsure at all n locations
ctcctttaaccttcaaataccactaaatccagaatttgccttccaactctcaaagcctcactctttttttcactcataacaccacattctcactttctaaccctaggttaactctacccttcatctctagcagttntccataagcaatttcagcacataaacatcacaagcatcatcataaaaaccctaaaatagaatgggtaagcttgactcacaccanacatgacaagtttgacttgctttcatcaaattccttcacaaataactaccacaatgcataaacctagtaaaactacccatcatatctcccaaagccccatacccacgaaaatttatgtgagaagaagtctacccaaacctgaaaattcgagtcccacacgtagaga

SEQ ID NO: 63518 - DNA, 414 bp, Glycine max
  unsure (1)..(414): unsure at all n locations
gtgagtcttggattagttaatttattactgatatcttatataatcacatactgggttgttngagacaatgacccatttagtcaagagtctctactttgatcgattaccaagtggatgaatcgattacttctttctcatttattgttcaaaagtgatcaagaacactttaattgattaccaagagcatctaatcgattacattggtctngagttgttttttagatgttggatgaacactttaatctattacttagataatctaatcgattactttggtaaaataatggattaccttatagaattaatcaatttcggacaattataactatnttctctatanacaaccagcttgtattcacatctacacatcaagagatcattagagaatactcaatacatctcngaaacaacatc

SEQ ID NO: 63519 - DNA, 343 bp, Glycine max
ttgcccaaaaaaaatctttaaaagacacgtattattcacatgacactccctcacttaccagcattttaataaccaggggcgactgtctaacagatcctgagaaataaaaaatcttctgtaggacagaaattgaaagtgtgaagtgaatatagattataatgaattataacctctgcgccctgagtgaggtcactgaaaacaatatgagagatcgcttattcgaaacaatacatgcacgaccttctcgacactcttctttggtttgattcagcaacaggacgccaggaacagtgtgcaataaataagaagaacatagcctgacaagagtcaaatgagtgagttt

SEQ ID NO: 63520 - DNA, 316 bp, Glycine max
  unsure (1)..(316): unsure at all n locations
tatatatcaagtgagctacccattcaatggatacatatcgttgtattcaggtgctnttagagcatatatcagcacttctctatcccgaagtctctctctcttgactagcattaattatagaaagaaacttaatagcatcaaaagcatacaagtatttctgttattcattgacaaaagcatcaaatgcatntctctccaacgtgaaagaaanataaactgactctngtctacnttccacaccaaagcattattcgagtgaccttggtctcagattagaatccttaattactaaatagtgtaataatcaatgctaatc

SEQ ID NO: 63521 - DNA, 433 bp, Glycine max
  unsure (1)..(433): unsure at all n locations
gggaaataactttttattttttttagncatccaacttgctcagcgtgacacccatgctaagcgagccatagcctatgcgctgagcgagcaaaactctcgctaagcgcaccaacccctcatctgatggnntgtggggtctcgctaagtgagacaatcgcgctaagcccaaaaccttcttgggttatacatttatttgaaatgggctaagcaaggtagctcgctaagcgcgtcagtctatctcactaagcgcatctatgcgctaagcgcaaaagtctctctgtctgggctatatatgtaattgggctaagcgagtcatcttgctaagcccaaaagtctctctggaatggcaattacgctaagcgagaaccatcttgtaagcgccaccccactactgcattctcattcatttaatccattgagtaagccatggtct

SEQ ID NO: 63522 - DNA, 298 bp, Glycine max
  unsure (1)..(298): unsure at all n locations
tatatgcacacaaacaatgtgcanatgcttnttatatgtagtactatcccggtctacgacctagtatcaaaatttttcttagttgtcacttgtcaatatgcatcacanattgtattaacatatatatgccaacctaccacaaaaggctagttaaattattgagaactagttgtctagttaatcgaaggttccatcaagtggaaaacgaaaaagaaccttntattgatcangtctgcctncaagagtggatcataanatagcantttatgtagaagtaaatactatgacatcccatcat

SEQ ID NO: 63523 - DNA, 411 bp, Glycine max
  unsure (1)..(411): unsure at all n locations
agcttgtttganatagatcatttttcttagntttatgacanaacattnttgctcaacanaggcatttnttttttttgttacagagtttgagcagcaaagagaagtaaaggaaaatggcggtgttttggagcgtgttttgtggggaatctggttgttcaaaggctggaagaatgccttgcagctatgattttaggcttctcattgatccttccacttgtgtaaccatttgttgaattcttgctttgatgtgttgctgcttatcatgctcgcatgcattatgatccacaaatcatcattaaaaccatctcgtggtctaacacaggtgcaaagatattcatatattcagctagtttctgccatagccaaccgtgctcttgggtagacacttttgtgctctggcatttgggttta

SEQ ID NO: 63524 - DNA, 450 bp, Glycine max
atatgggctacgtgggagtacgtgagctcaattggaggtgggcaacaagggatggtgggtttatgcgcgcattatggatgtggaaaaacttgttgtgcaccatcgcccgaccgccacctagtaccacatgtgatgggtaacccataatcctacaagcttgagatgaggaagtgtagaagggtgaaacttcctgcttttattcgttgaccacagagtggtacctggagatatgtcgcggcggtcatgagacaatggtgacgtcaggtggtgtgctattgcccaaaacctagacggagcctgggagaccctcgaatgacacacgaagtgccgatgtcagggcacgactcgatttacggctacttcattggtgcatccagatgaaccggcgcgtacgcttcagcgcactgtagagtggatactacccacgcctacaccatatcgtgtagtgga

SEQ ID NO: 63525 - DNA, 292 bp, Glycine max
  unsure (1)..(292): unsure at all n locations
cattcatcgcatccactaacagacggtgagcgccgtccaactgatggtactcgtcaccaccaccacctgctccagccataattcaacaggaaaannaaaaatgtgcaataaaaattattaaggtttcaggacctcacaacactctactcacgtctcttagatggtagtacactcgtgtttaatgcctctcaataggctttgtgtaatgtattccctctttgcctttaccactcgtgtttcctcttaagttcctggatggaccannatagacacacaaggtaatataaaataa

SEQ ID NO: 63526 - DNA, 349 bp, Glycine max
  unsure (1)..(349): unsure at all n locations
agcttntgtgtgggatacccaatgtgtgtatattttccaaacccttaaggaaagaatgacaaccgctccagtgctagttntgcctaacccgagagaaccatttgaggtgtattgtgatgcatcaaagatgggtttaggcagagtgttgatgcaaaatggccaagtggtggcctatgcttctagacagcttcaaactcatgagaggaattatcccacccatgatctagagttggttgctgtagtntttgcccttaagatttggagacattatctgtttggctctaagttcgaggtgtttagtggtcataagagccttaaatacttgtttagtcaaaaggagctgaacatg

SEQ ID NO: 63527 - DNA, 479 bp, Glycine max
  unsure (1)..(479): unsure at all n locations
tggagcttacatcactgccctncggttgtggttctaaaaggtctctcgcatgggccaaggggtgcgtcttccattgaaggaaaacacgtggagtcaccaccaacgtttattcgaggaaaacgtcagaaaaaccaaaaatgaaaaaggtcgaaggtttgcatattttgaaaatgaaggtttgggagttgtttacacacggngaaggtattagcaccccacgcgcccttcataagggacaacaacctctaatcaagtgtgcaaatcatgatttcaatattatttatttccctacctctaatcaagtgtgcaaatcatgatttcaatattatntatttcccttntatctntaattttcccttttatatattattaattntttggcccttntaatgtcttttttttactttntanggtcgacaagggtgtttccctcgctcctatgtattcctcaattgtgatgagaaaatcatacctacgta

SEQ ID NO: 63528 - DNA, 461 bp, Glycine max
  unsure (1)..(461): unsure at all n locations
caatgaatctttgntcagtcttcagntatgtcaacatagtctcttttcaacatcatttaatttttgtactgatacattctactaatatatggagttggtcactgttttgcctgaggatgacaattcctagaccataacaatgttagagccggtaaaggacaatggtcttttaaataagcatgttatacatgccacaaacaatttacgttattataacacanatgaatgcataaattaaaaaataggattatcttgaatctacctgaacaaaatgattgtcatagatgtgaccaatgcatattntgcgaagcacagaagaatctgttggtggttgacttctaagaggaaagaacgtcatgcttttgtttagagacaacgactacaggattacattataccttgatgcaatgacatatnctcatctcagtatatccatccactttatccatagtaccctgatc

SEQ ID NO: 63529 - DNA, 447 bp, Glycine max
  unsure (1)..(447): unsure at all n locations
gtgaaagctcagccatgattgctggaaaagccaaaaatgaccaggcaaagaaagtaaatttgtggtgcacttattgtaataaggcatggcatacacgggagaattattggaaattacatgataaaccttccaatcgagaattgggacaaaaagaaggaacatccggaggagcatctcaaagaagtggacaggtctatgtggctgataagaatgaagaanaagcaaactcttccaacttgtcgaaatctactagccttagtcaagaagaaatagaaagaatgagagccttttttagcagcctttgaaaaccattangtacttgtacattggcatattcaggtatgcttcctctntcttttggattaatgtctcnaaacacttcatcccttgngtttagatntggagccctaccatatgactcttcattaaatacttctcactattctc

SEQ ID NO: 63530 - DNA, 372 bp, Glycine max
  unsure (1)..(372): unsure at all n locations
atggagaagcagtacttcttggacctgaaatgctacaacagattaatgaacaagtgaggttgattcgagagaagataaaagcatctcacgataggcagaagagctactatgatagaaggaggaagccactagattttcaggaaggagaacatgtgtttttgaagggttctcccttaaccggagtcggaagggctcttatagctaggaagttgacacccaagtatctaggtccatatcagattttgaagaagattgggcctgtagcttatcatatcgccttacctccgagtttatcgaatntgcatcctgtgttccatgtctctcaactaagacggtacaacccagatccatcacatatacttgcagtggacg

SEQ ID NO: 63531 - DNA, 424 bp, Glycine max
  unsure (1)..(424): unsure at all n locations
tcaaagaatgagttccagatgttcaagatagaatcaagaacacttcaagactcaagaggaaangtgaagaacacttccagattcaagaggaaaggtaaattcaagaatcaagaatcaagattcaaggatcaagcttccagaatcaagatcaagattcaagaatcaagagaagacttaatcaagataagtgtgaaaaggttttttcanaaaatgagtagcacatggatttttctcanaacatggttaccaaagaaagtttactctctggtaatcgattaccagattattgtaaccgattaccagtagcagaatgaatttgaaaatgtnnttcaatgaattacaacgtccatttgattcaaagctgtatcgatacatatttggtatcgatccagtgctttgacnngtgaatcaattaatatgagag

SEQ ID NO: 63532 - DNA, 374 bp, Glycine max
  unsure (1)..(374): unsure at all n locations
gcttaagaccctggcgcaatatttggtgctttatnctatcattcgccacatttcttcctttcccagcagtcataaatgtgaaaacaaagcagctaanagcagcattatctgaatcaactagcaaactaatttatagtatgattttccttttgctttntaagtgaattagaactaaattccccgaatataaccctgaacaagttcagaactacaacgactaagtccaataattntcgtcttcaataaatcaaaaccaagtggataacatctatggcagaaaacattaacggacacacaacttgtaattcgaacaaggggcaaataaccaagaaagcaaaatatcttaaccaaatgttaggaagtacacctaaact

SEQ ID NO: 63533 - DNA, 315 bp, Glycine max
  unsure (1)..(315): unsure at all n locations
agaaaacnctgactgtaagcccttggagaaacgaactgatggccttctcaacctaagtcctattttgctattcttagaggcacccacaaactggatatgctctaatttgtttgctaagattntttatacttttgctttgaaacctacgggattttagatatagattggtcgacaatgaaattatctactatttaaaataagatctactatatcatatcaaaatatacttctaatatcatggactgctcatattgatcagatgtagcaaatcctcgataatatatcagcggattacttactgcagggccttctgtt

SEQ ID NO: 63534 - DNA, 360 bp, Glycine max
  unsure (1)..(360): unsure at all n locations
gcttatcatggtagatgttgatcatgctaatcttttagacaaatatattgaaattgggtggggccaatgctntggtgagaaaatctgccacttgatcacttgttgaaactggtagtagctttagagtgcccttcaaaagcttctctcgcacaagatggcaatcaatttccaagtgttttgtgcgttcgtgaaaaaccggatttgaggcaatgtggactgcgcttttgttgtcacaagaaaagagttggagttctggtaagctgaactctcaaatctgcaaaaagatacaacagccatttgaactcacaagcagctgaagacagagccctgtactctgcttctgaagatgatctggacaca

SEQ ID NO: 63535 - DNA, 401 bp, Glycine max
  unsure (1)..(401): unsure at all n locations
actaaacaacattatggtaacaacataattaanaccaaaacttaatccgcagatcccttctgtaagactaagttttgatcctgcttcaatcaagttctaatgcaatagtacatttcccaatgctaaagtcacctaactatgcacacaaatggatgatcagaccaaaagcatacaaacattaagcattgaaggaagcattgaacacagaanacataatcaattagatattaggtatttacataagttgttcattagaaatccccaactggggtgtttagccagccattacanagaaaccctaacaataaatgagaataanagcagagaatgatagttccttacacaagaagggggaattcctctctcttctagcatctccactcattctncactaaataatc

SEQ ID NO: 63536 - DNA, 423 bp, Glycine max
  unsure (1)..(423): unsure at all n locations
taccttctcttccattgnntgttcttcatttttctccatgtatctcctcacatgtctttgtgataaatttgtaacatgattctttagagtttccaccgattaaacttgctatagaagctagatnttattttctatgggtcaaaattcttgttcttgttcttgaaccatgaattgtgttgagttaggttcctttgagttttgcttggtatttctgtggtgaacctaactataaattcttaaaaatattaagtagaaaaacctcnaaatctaaggacttgtcacctatgatttgcataaagcatgtctagcataaacttgccatagattctatgtggctgaattatttctgttcttgctactcatgctatagtgatgaatctttagctatatttattgagcaatcttcatgtattagtcttacat

SEQ ID NO: 63537 - DNA, 353 bp, Glycine max
  unsure (1)..(353): unsure at all n locations
acgttagtctctgcgtgctatcaagcttttcgtcttacagatagcaaaaaggttatacggataaccactcgggtatttccgcccgtcagcgtgactcaaaagtcagtatgacagatcttgtgagtgcggaagatgatgtaaatctccgcatgtcaacgggcttgtcggacgcgattgacgaagggcgcagaagacgacattagtctcttcgtgctatcaggcttttcgtcttacaggcaacaaanagtttatacggataaccactcgggtatttctgcccgtcagcgtgactcanaagtcagtatgacagatcttgtgagcgcggaagataacgtanatctnctcgtgtcaac

SEQ ID NO: 63538 - DNA, 281 bp, Glycine max
  unsure (1)..(281): unsure at all n locations
tatgcangttgaaagccttggaggaaagaggtatgcctatgctgttgtggatgatttctccagatttacctgggtcaactttatcagagagaaatcagaaacctttgaagtattcaaggagttgagtctaagacttcaaagagaaaaggactgtgtcatcaagagaatcaggagtgaccatggcagagagtttgaaaacagcaggttcactgaattctgcacatctgaaggcatcactcatgagttctctgcagccattacaccacaacagaatggcatag

SEQ ID NO: 63539 - DNA, 464 bp, Glycine max
  unsure (1)..(464): unsure at all n locations
ttaaaagactgtaatatactatcttcagtttggttntgtggaaagaaagtgttatccctctcttttcatttacaagactgcttttcaaactactaatctcttaatctatgtagatgatatcatcattaattgtagctcttcttagttgattcaacaccttaccactcagctcaactcanaattttctcttaaacaacttggtcaactagattactttcttggcattgaggttaaatctctttctaactagttcttacttctcactcataacatgtatacaatggatttactacagaanactaatatgatagaagcttagttaatccctcttctcctatggccttcaattgtaaacttcctaaaataggctntacaatactngaccatcactagacctgagatcagttactctatgaataaaggttgccattatggccaatcccttaagtcacattgactacatg

SEQ ID NO: 63540 - DNA, 306 bp, Glycine max
  unsure (1)..(306): unsure at all n locations
tttctttgcctaacatacacacttgctcaaactcatgaaaagaaacacaaactcaatcacagtcatgcattcaattcaaaaccaaatcatacaccaattttcacacaaagataaaagtggtttattgccatatcatcaaaatcaagtcaaactgttccatatacttcagaataagcaaaccaactacccataaataaaactagcagtgtatacaaacataaaagaaatactgtactgaaaccgtaatcataataataataatccanaaagcaaaaagcatcatcaggaatcaacaatgtccagagt

SEQ ID NO: 63541 - DNA, 328 bp, Glycine max
  unsure (1)..(328): unsure at all n locations
ctagatatgaaaagtgaggctgatgttgatgataacaaaaagattttgtttatcaaaggactaaagcgggtgaacaancaggtggagctactaaatgtagnaagttatgcaacttgggtgatgagttcttgtatccanagagtatttaagggatggaactangagtgaatcttgacacttttttagtggggaactcaccttggatcataacttgatgataaaatgactgatatgacaccgtacnatattaagatatatttacatcatggactgtttgctgcttaaaaaatggtcggaaggttagctttgaggctcggtatatattttg

SEQ ID NO: 63542 - DNA, 426 bp, Glycine max
  unsure (1)..(426): unsure at all n locations
cactgcattcatcataggctaaatttctactgcattcatcaattctaanaaaaagccctttgagcttctaaagtgcccaaacaaagttattctttggttcaacctccatatacacaaaaagttgtagaaaatttcatttcaatatgagtcacaccaacaacctcaagtaatgatagtatatatctattagttntctaggtattggccatcaagaacactatgttaaatggattaatcattctcatagcatcaagatgtgtccaaaaaatatctcacacaactttngatgtatcattcattatatgtcaatgaatatacatatctcgttcaagtaagttcatcaaatgctgcatttccgttctaaagcctctnttagacgaacgatacacaatccgtgcattatatacttggtnntatggagtcaca

SEQ ID NO: 63543 - DNA, 338 bp, Glycine max
aactgatgaataggtgttccagcgggttgaacaccttaatactgtatttggaaagacccaaaagaaggataaatgttatagttgcatatggaagaagaggcctattttctttgatcttccgtactggtctgatctagatgttagacattgtattgatgttatgcatgtagagaaaaatgtatgtgaaagtgtcattgggacactccttaacattcagggcaagacgaaagatggtctaaatactcgtcaagatctagctgacatgggcatacgattgcagttgcatccaaggtctgatgataaaaaaatatatttgcctccagcttgtcatactttat

SEQ ID NO: 63544 - DNA, 259 bp, Glycine max
  unsure (1)..(259): unsure at all n locations
agctnggtttgngcaatagcaccccacctgacgttctcaaggtctcctgacccccgcgacatatctccaggtaccactctgtggtcaacgaataaaagcagaaagtctcacccttctacacttnctcatttcaagcttgtcngattatggggtacccatcacatgtagtactaggtggcggtcgggcgatggtgcaaaacgattctccacatcaccaatcaacttttaaccaaccttccctggtggccaccttcaactg

SEQ ID NO: 63545 - DNA, 226 bp, Glycine max
  unsure (1)..(226): unsure at all n locations
gtcacctgaggcatgcaagctagctatagaagcagtctgtgaatctatagcttatatatatagatcttgngatgtgttaggattctcagaataatggtcatttgacctcttatatgtaacagtggtttgaattattttgacaaataaaaatagctttgtaataatggatgtttttattcttcttaaattaattagaagttatctaacttacgagaatgaaatttaa

SEQ ID NO: 63546 - DNA, 451 bp, Glycine max
  unsure (1)..(451): unsure at all n locations
atccctgtcggatacaatactggaaggaattgcatgcaaccttactaccttcttgatgtacaactccacgagtttctccattctatacttcatattcaccggaataaaatgagcagacttggtgagtcgatctactatgacccacacagcatcatgtccacgagtagtcttgggtaaactagatacaaaatccatagatatgctgtcccagtttcattccggaattcccatggcttcaattctcccgatggtcgctggtgctcagccttagccttttgacatgtcagacatctcgctacatatgcatctacatctttcttcatgccatgccaccaaaaacttatcttcaaatcttggacatcttagtcattcctggatggaaactaagacgacttttatgcgcttctttcaagatcttaactctcanatcatctaaagatggcacacatat

SEQ ID NO: 63547 - DNA, 428 bp, Glycine max
  unsure (1)..(428): unsure at all n locations
acctgcggcatgcaagcttcttantntcagatgatgcaactgagtttgtatctacctcatgcactcctctaatgactatagcatcatttctggtgcaaaactgctgggagtaggaagccatcttctcaattaaatttctggcttcagcatgaatcatgtctccaagggctccaccactggcagcatctatcatacttctctccatattactgagtccttcataaaaatattggagaagcagctgctctgacatctgatggtgagggcaactggcatatagttaattaaatctctcccactattcatacaggctctctccactgagttgtctaatacctgagatatccttcctgatggctgtggtcctggaagcagggaatgttttttctaaaaatactctcttcatgtcatcccagcttgtgatggac

SEQ ID NO: 63548 - DNA, 341 bp, Glycine max
  unsure (1)..(341): unsure at all n locations
atgccccacattatntccatgacacanatgcgaagatgatgaattggaaatnntatgcataactggtcatgcatgcacctatgcggacactcaagtgtcaaatatttatggacatgtgatgctagggctcaggattcatttcctctactttaaatcaacccaatgtttccaaaatatgatcttttatcaatatgngcattcatcctagtccatgtggggtactcaggagaaatacacagcattcacccttcacggtacacacatgttttcaaaaactatctatgatcagcgaatgtttttttatccaagaagagttggaagacatctcttttcacaagcat

SEQ ID NO: 63549 - DNA, 513 bp, Glycine max
  unsure (1)..(513): unsure at all n locations
gtcacctgcggcatgcaagctagcttctacaatctccctctgtgtgatgatgacaactcctgaaatcaagaaacacatacacatnttttttagtcgatcactcacttaattctcgatattctccccctctggtttttagtttaagcttcacttgaacataagttatttaattatgtgagttcttgatttaatccttattttntctccctctctggcatcagcanaaatccaaagtgcataagaaatataaaacatacataaataactaatcatacgagagaccataaaacaattaagcaagatattttaaccattcatcaaacttagaaaggtaagatatattataaccatacataaatgacatacacaagaatagaaaacaatcaaacaagatatcttaatcattcatcaatcttagaaagataatactctatagaatgtcatataatccagaaagtcattcataataaccaaataaaaatgcatacctctagtcatacatcatcaaaataa

SEQ ID NO: 63550 - DNA, 403 bp, Glycine max
  unsure (1)..(403): unsure at all n locations
atcgcggactccataaggaaagtgtgtttgttgacttanttntacaatnttatctgatctttaaaataagatttgagacgtgtcaagttcaattacacacaagaaaaataataatattctagtccatcctaaaatggttacttctatttaaataaataaattaaaaactttaaaaatatgtattttatcccttaagaataagaaggaaatgaactttcatatattgtatntatctactatttcttattgagactcgntattanttttgaaataaataaaaatttaaaacctaatcctaatttaaaaagagcaatacacaagaagagttggggtgcaaaattaatagcatagaatgaagactaaggcatggtagatttcacttttgaaatgatatttttaactc

SEQ ID NO: 63551 - DNA, 415 bp, Glycine max
  unsure (1)..(415): unsure at all n locations
gatgaatcctattcaatgactgactggcccattatcacctcttgcatgtgctcttctagtataagtagtgtagaagtcagagaaaactcacgagataagagaaaggaaaagagaatttttctggccaactcttctgtagagcacatctgagtatttataagctcaagtgttataaggacagctggcatatactancctaactgcctaagctacccaaggatgcagttgagaactgcacctttagacaatatatctttacaagtagtaattaagaaaggtttgggatcaaccatcgtcatcattcagtgtcaattttaaatatatattgcagatatggctctattcactgtactctggatcattgcagaataagtaccttacaaatatgagctcttcacttgatatcatatggttt

SEQ ID NO: 63552 - DNA, 484 bp, Glycine max
  unsure (1)..(484): unsure at all n locations
acttgtggacatatattacacttcttcaattgtatctccagtaacttgggggattataagtgcaatgaaatgtatggatatggtacttttggctctacagnttatccagtcaatccgctaagaaacctcttttcacttatttttgcaggatggaaattctggagaggatttcaataaagattctgtagagcgtgatgaaaggcgcctaacagaatngggccgtaggaacttggaaatattngtccttgcccatatattcangtagtagtcgcaatgattntgcaatggattcatagtgttcatgttattaagtttcttttagagtcattaagtcattgactcattgctcgtatgtgtctntgatcttcttctcttcttatctggtaaaagatacatgctctctcattgttgatgagaaataagctattacgaactntcctaccaacattattgtttctagctgatgacataacactgtgaagct

SEQ ID NO: 63553 - DNA, 266 bp, Glycine max
agcttataatatatcgaggcgctcgaaatttatcttcggaaggtcttgagaaattcaaatggtcataacttttaactcggatgtccaattcatgcgcatcacatatagagacgcttaaaaatgaacaacggaagctctccagaagttaaaatggtcataagttttcacaaagatgtccgattcatgcttgtattatatcgagacgctcacaattaaacatcggaagctctcgagaaattcacatggtcataacttttcactcggat

SEQ ID NO: 63554 - DNA, 354 bp, Glycine max
  unsure (1)..(354): unsure at all n locations
tactcttcaaacaagaatgacatacaacctcctcccataaatacaaacatcaatggtaatntagagcaagcttatgcgcatattttcctacgaacgttcacttgcacaagacatcctattaactaagaaaaatgcacccatatacaatcaaggtagcttcattacctagatntattacatgtacttccaaggtgtatttgttatttacatcacacacgcctccgtggctaatattacatacatgcatactcaaagcatttcggggtaccaaaaatggcacatgcgctcatcttggtatttctaatacctatacatataaaaacttcatgatgaatcttgactacctacgcaata

SEQ ID NO: 63555 - DNA, 263 bp, Glycine max
  unsure (1)..(263): unsure at all n locations
agctngaatatcttcagttgagttatgcacacctatccaaagcatttcatnggctacacactctccaatctctttcttctttgacccacctagatttgtcaggatgcacactccctcactataatgaaccatccttgctcaacttctcatctctgcaaactctccatctttccttcactagttattcccctgccatttcttttgtcccccagtggatattcaaaatgaaaaaacttggttctctttcaatatgggggaatgaa

SEQ ID NO: 63556 - DNA, 470 bp, Glycine max
  unsure (1)..(470): unsure at all n locations
ttcgtcttttttttcagactctntcgttgataggatgatgtacactgtattgctttggcaatatcttatgacttatataactacatgagacttctaaccacggtactttagtttgtccatgttaggtgtaacagtctgagttctaggtttattaatttgtttctgtttattttaggggatgttgaaattctaatgtgccgctagggcacggctatttctgttttagatgcagacttgttaactaacaaagatcacaagttgagtgtttgtattttgtacttgttaataaatgccattgccagcggctctgatangtcacaagttgactgtaccaaccaattgtgctntaagctacctanntgtgtgagctgangaaagggctntgattangtcannaatttattgtcagttcctgacaatacactnntgcaggaatgtactaatntcattgtcaatagacccacagtctc

SEQ ID NO: 63557 - DNA, 469 bp, Glycine max
  unsure (1)..(469): unsure at all n locations
agctnngaatatcttcattgagttatgcaaacctatccaaagcatttcattggctacacactctccaatctcttccttctttgacccacctagatttgtcaggatgcacactccctcactataatgaaccatccttgctcaacttctcatctctgcaaactctccatctttccttcactagttattcccctgccatttcttttgtccccaagtggatattcaaattgaagaaacttgtttctcttcaattatggggtaatgaaatccaaggtccgattcctggcggtattcgaaacctcacacttcttcaaaatctttacttgtctggaaattcattctcatcttctatacctgattgcttatatggtcttcatcgtctcaagttcctcaacctaggggacaaccacttgcatgggactatttctgatgccctgcgaaatttgacttctcnttgtgaacttgatttatc

SEQ ID NO: 63558 - DNA, 499 bp, Glycine max
  unsure (1)..(499): unsure at all n locations
nngtgcgcttagcgctngtgttaatntcataatgtgcactattcatcagcgtgctgcactaagcgcccggctctattttccagttaattattctggtttcttgagaataaccctatgctaatcttgcngtggttgtcttacattttgcagatggcttctaagaaaagaaaggcaccatctacacctacccaagccagaattgaaaaatcaagattcacttcccaagaagcttgggaaagatacactgatgttattgtgcctaggaagctttttcctgagaggaacgtggtggtttattatacagagttcgatgagctcaaggaagaactcgaaagacgccattgngatgaggagttaactgactttggggacagcaataatgatgttgccattgtgaaggaattctacgccaacctatatgaccctgaggacaaatcatctaagcaggtgagggtgagaggtcatctgattaaatntgatgaggatacacttaatactt

SEQ ID NO: 63559 - DNA, 351 bp, Glycine max
  unsure (1)..(351): unsure at all n locations
tagctcgtagtaaanacgactgaatgtgaccctcattctgatttgaatacacaagtatacacggtctgagatgaagctcctacgatctattatgaattgtaccactgagattattgtgagacatattcaataatattatagttttcaagttatgccagaacaagtctggtacatagtcattaatcccattatcagatatatcaagctcatacgaagatcgttgagtcttgagccacctatgaaaagtgaggcccaacttgccagaacttatttcaagtttattatttggaatggatgaaccctactcgggacatatttatgagaccactagttacctgacatagacaagaa

SEQ ID NO: 63560 - DNA, 516 bp, Glycine max
  unsure (1)..(516): unsure at all n locations
aagatatctgaatctatcatatatgaatgtcgatggtgagattctctgtgatatangaaatctctccaagntggagtatcttgatcttaaagtaagttctctccggngaccaatcccttctcagctagggaagcttacatgtttacgatatctacatttaaagggcaattatgatctccatggagaaatcccttatcaaattgggaatctctcactgttgagggatcttgatcttgggtttacttcactattcaaagcaatccctttccatgttgggaatcattctatcttgcatactcttagacttgctggcagttttgatcttatgggtaacgatgctaagaggctatcttctctctctttcttaacanaatatggcctggattcaatgccaaatcttggctcctctggtcactggcaacaaatgattgctgagcttattccaaacttaagagagctgagactaggtcggtgtagtctttctgatcatgatattacatcagtggttgcgtctca

SEQ ID NO: 63561 - DNA, 401 bp, Glycine max
  unsure (1)..(401): unsure at all n locations
agctnggtgcatatgatttatatgctccagcttgatgnggagtgttgaatgttgaatatttcttttgtattttagccttgtttggtagcttaatctgtaagccttattcagaaggcagcagtgagatgtcactgtcatctctcctctctcttttntgtatcctatatatatgtaacattctgaatctaataaaggtgtgagagaaagtgaggttttgactcctcctcaccttcatttcaagtgcaatcaaagcaattctgaggacctttgaactagtatcaggcctcaaaattaactttgcaaaaagttgtttttggtgcaattgaaatgtctgataggtggaagcttgatgcagctagttgtttgaattgtagcttgctgtccattcccgtttgttacct

SEQ ID NO: 63562 - DNA, 180 bp, Glycine max
  unsure (1)..(180): unsure at all n locations
cttgagtaactgaccctggtccctgtccccactggtctgaatcanaaacctgcgcccgtcgtccgactctgtggttatagctactctgctgaccaccaaacagacatatgcccttctgtgcagcacctcagaagcaatagaacagcgagatgcttatgcgtgcaaacactatacaacaag

SEQ ID NO: 63563 - DNA, 178 bp, Glycine max
agcttcaccggatgatgccgatctaacatttcctattcgacatcatccaatcgttattcagggatcgaatataataaacaatggccggtgtcggtcgttatatggccccgactgatatctatcaccctacattgcgcaatttcttttacaaacgctggccgattatgttatttattta

SEQ ID NO: 63564 - DNA, 463 bp, Glycine max
  unsure (1)..(463): unsure at all n locations
tctaccatgccanaacgaaggagactgagtatggatntaagataacaaagctagtaacagtgctctgggtctnacacccacatcactacatgaaagagctgagagtatttcgggttttacaaaggaacgtaatttggaaattccgaccacgccaatgtgaccggggttcagtgtaggttacgaaaataacatgcatttcatgaaaggataatgtttacaaagtctctttctctaaggtttttcagaggaagcataagacaagcantggcagttccaaagtctgtaaagatgccaagacaagatgaaactaacaagaaacaatcatagaaccatgattacctcgaaagaaaacgaaagatcagattatggttttcgttctctaccgaaaccgcangccaagttggaaattctgcttcngttgaagggttcctctcggtgtgggttntcaatggagaacaatgat

SEQ ID NO: 63565 - DNA, 290 bp, Glycine max
  unsure (1)..(290): unsure at all n locations
agctnggagaatatagtttatatgctctagcttgatgtggtgttagaatataagctagttttatcantttgtcgaagtaatcttgtaaaggtttcaaaaatgttgtttttgtgtactctgaanagcctaagtaggagtaggttcccttagtctgaacttatcttttcttcttgcttattggattctttttcttatatatattattngnagctgatgagcaataagacacttaaacactctcaacaaatataggccattattttaacagtaatgaaagaaataatcattaa

SEQ ID NO: 63566 - DNA, 514 bp, Glycine max
  unsure (1)..(514): unsure at all n locations
nggtgttttctcacagataggacatgcatgattccctntaacattgtatccacttaaatttccatatgctataaagtcattaatagtacaaaacaccattgaccgtaacctaaacatctgctgcaaattcccatcccacacatcaaccccctcttcccacaattttttcaagtcttcgattactggactgaggtacacatcaatgtcattccctggctgccttggacccgttatcatcatacacaggataatgtattttcacaaaatacacaaccaaggagggagggtgtaaatgttggatcgagtggcctgagaataattaagaaggggggttgaattaattattcctaaacctttaccaattaanaaattacccttctaagggctttactaaattattaagagaatgaggagtagaagagaaacttaacagaaagtaaaagcggaaattaaatgcacagcgganagtanaagagtaggaagaagganacanacacacaagagttttatactg

SEQ ID NO: 63567 - DNA, 228 bp, Glycine max
  unsure (1)..(228): unsure at all n locations
agcttgaatatcttcattngagttatgcaaacctatccaaagcatttcatnggctacacactctccaatctcttccttctttgacccacctagattngtcaggatgcacactccctcactataatgaaccattcctgctcaacttctcatttttggaaactcttcatctttccttcactaagtattcccctgccatttcttttgtccccaagtggatattcaaattga

SEQ ID NO: 63568 - DNA, 457 bp, Glycine max
  unsure (1)..(457): unsure at all n locations
ttcgtctcttttttcagactctctcggtgataggatgatgtacactgtattagcttggcaatatcttatgacttatagaactacatgagacttctaaccagggtactttattttgtccatgttaggtgtaacagtctgagttctaggtttattaatttgtttctgtttattttaggggatgttgaaattctaatgtgccgctagggcacggctatttctgttttagatgcacactggttaactaacagagatcacaagttgagtgtttgtatttngtacttgttaataaatgccatcgccagnggctttgattangtcacaagttgactctacaaccacctctgtgctatangctacctactgttgtgagctgaggaaggggctctgatcacgtcacaattttattgtagttcctgacaatacactttgcaaggaatgtactaatttcattgtcaat

SEQ ID NO: 63569 - DNA, 482 bp, Glycine max
  unsure (1)..(482): unsure at all n locations
ttaagtcacctgcggcatgcaagcttgttagatacttacagatngtaggtcttgttatagttcttatctttaggatcttgggacgagggactatggaccctaattctcctattcctctagacactctaactntagtaccatcttcaagatatttaactccaaccttgcaaggcttggtgcacaagtaaaagttggttactcttactttcacacatgttatcccatttggagatgcaatcaccagttcaatatttgaacatgtacataccctatcactgggtcaagaacttgcacattggaggcatgcagtgnggcttccactgtaaagatgcccccttcatgacctttcccttgcttgatatngctttttacctataaagaagatggcaaaggcattggagtgagaaatctatcaagaaaattacacaatcaaatgctcaatgtcactgacaaccgattaatantctgacgcaagatatact

SEQ ID NO: 63570 - DNA, 463 bp, Glycine max
  unsure (1)..(463): unsure at all n locations
agagaagaaaagtaaacannaaatggaatataanaatgctaataatgatgccattctctttatttgattgaatataaagaataattcacctcataaaacaaaaatataaacttttccttcctatccaacgtacccttattgttaatatcgttctaaaaacgggtcanaatgtattcatatcattttagcccaatttttcatcctgtatcnnttttttctacttcttattaaataggataaaaaatttaccatgcaaaatacggttgaatattctaaccttttttattagtgagaatagactatagagaatatgtactatgtttgtggctgggtatgacgaataaaagtgtgacatagatataaataaaactggatcaataataaatgaacaacactaanatatttgaatcagataatttggttttcttcanaatcaatccaattcaatccataantattccta

SEQ ID NO: 63571 - DNA, 211 bp, Glycine max
  unsure (1)..(211): unsure at all n locations
agctggccacccagctcgcccaggcgagcagggttgcttcctccataagcaacagccttctggaggaatcttctgtatggcccaagtgggcctagttgctatttgcacccncatttttactaaatacaccccctggcttttttttggtgaattctttttcgtaaggtaccggaacttaccaaatttcttaccaatccttggtttttttccg

SEQ ID NO: 63572 - DNA, 478 bp, Glycine max
  unsure (1)..(478): unsure at all n locations
gtgtgtgttaagatacaagctggaagaaataggtaaggatgtgaggaacaagcctacgcttgtggccaaaggttactcacaacacgaaggtatagattatactaaaactcttgctcttgttgctcatctaagggcgatactcattntactatcctttgctactcatcatggtatgatgttgtatcaaatggatgtaaactgtgtgttcctcaatggacttatcaaggaagaagtctatgtgaaacaaccccctgcgtttgagagttctatctatcctcatcatgntttcaaacttaataaagctntgtgtggtttaaagcaagcttcttgagcttggtatgaaaaagtaagctcgtctttaatttgaaatggctctataagaggaaaggtaaatactatgctatttcagaaagaatatggaagtcaaatcctagtcgtcaagatatatgtggatgataccatattcagtgctactaat

SEQ ID NO: 63573 - DNA, 435 bp, Glycine max
  unsure (1)..(435): unsure at all n locations
agtcacctgcggcatgccaagcttctaaatgttcacatttgtctgtacctttcttcttcttgggtattcncataggagctaatcctaggagagttgaaacatggaaaggaatcatagtccaaaattaagaanaaagttggccgcttggaagctaatatcttgtttttttgttgagaatatgtcttattaaattcagcctctcatccttgcctattatttacttctctttttttagagcccctatggagatcgtcaaaaagattaaatttatccaaggaaatcttgtggagagggatgaggaaaaagaaagattattgttgacttggaaagattttggccaagaaaaagggggcttacatcagaacataaattattgatatgccttgttggtaaggagaggacttatttcataaaatatatattttggagaagtgt

SEQ ID NO: 63574 - DNA, 434 bp, Glycine max
  unsure (1)..(434): unsure at all n locations
agaatctattcgagactctctgaatttggagaagatcaagaggataagacggaattagaaaaggagatgaacagaacaacgtcgcaatcttgaaagaatgatgttgaggatgattcaccacaaagaatagaatttttttatcagaacctaaggttctatacaagaaccaagaaagacactctcttaatggcggataatatganatttcataacaaaaactgccaataaagtgtttaagaagtctatttataaattctactaataattctaaattaggtccaagggccaataactaatataataattaaaagacttacaaataacaataaataagtggcagcccattacaagtcccaaaatatgcacaatatacaattaaaaatgagaataaatattattctaanagttgactaaaatttatgagcttcacttct

SEQ ID NO: 63575 - DNA, 374 bp, Glycine max
  unsure (1)..(374): unsure at all n locations
taattctttatgattctatcaagatacagtatacaaaaattgagccacctctctaagtgtagagtgtggctctgaanatgaatcagttcttgtattgttggtgatcaaactttatatttgcatccacaggtgttaatattagggattaaataaaaaggatattatattaaaataatttcataaaaaatatcattatttgcttaattatgattctaacttgcttgattgcatgacctacacgatgtgtttggaatgaaggagaacaattttatattttttttaatgggatccacatcttttattctatcttaaatgtttaattcaaagattattcttattatttttgtgtccatctttctattctcatcctctaa

SEQ ID NO: 63576 - DNA, 462 bp, Glycine max
  unsure (1)..(462): unsure at all n locations
tatatacttattctgctttacaatttctggaatattgatttattntatgcatgaatatattctgacaaaaatctattctatgcatatatatatgaaatcaaatgcataatattatgtttcaattataaaattatatgagaatcttattcataattatattgtatctcgatctcaaaatgcanaataccatttattctcatataataaagttntatgtctaagtgatctttataatgttgattaattatggattagccacaacatctatatttgattaaaattatatattaagttgattaaagatcatatacggaattggacataatattgtaattaattatacttatataatgaagtttatcccataagaatctttattatatctgtgcaattaattgggataaaatgacgtattatntttcatgattacccacacgcatcatgatgtatgtataatttgtc

SEQ ID NO: 63577 - DNA, 475 bp, Glycine max
agcttgaggcagcagcttgagtgcttgcattaatgtcacatgtaaaagataaataaactaacacatattagttgcatgaatgtactaaaagtaaacagagacatagtagaatcgaacaggttatttcatcagattcgattccagtaaagcaaagagatgtctgaagtgaccaagtaaaggttatcacttatcaacctttgatttaaagtgggttaagttcatgaggtgctctcttcaaatccacagtatgtatatgttacttttccactttacacatctcgcttttgaggatccaaatcctacatccatgaccttttgggaagaaaaagaataacgagagggcataaaatatgaaaaggagaaggcaagtttatcatccacctttcccagtgtgcattacatcatccaaagggaaaatgatatccatctttgcttattatttctctccaacatttcagagatgaaatcaaattat

SEQ ID NO: 63578 - DNA, 436 bp, Glycine max
  unsure (1)..(436): unsure at all n locations
gttcagttccattcgatttttgtttgccctgtgagtatggatcaacgaagtgaagaaaatcctccaatgctgctgccatgcttacatgtctcttgcaaacaatcaattatgaagctatcaaaaaacagcacccgaacattcaagtgtccatactgtccagccgaagctactgttgcaaactgcaaaacagctgtattctgatgatgtttatgtattttatctcttccatacatttcatttgtgcaaataccagcattacagctttctggttgatataaatattctaaanatcttttacattntgataagaccaacgagtaaataanaatngaaagaacctgtctattctaccgttcttgctttctccgtcaggagaatatacaggagctccatgatctcactgtacaactacaacttctataatgatcgatacagc

SEQ ID NO: 63579 - DNA, 112 bp, Glycine max
  unsure (1)..(112): unsure at all n locations
ngcttataagaacanaagtgccttaatcattttctttattcttgtgaattaggacgcatcaacaagaatcaagccaaggctattgtgcacgccatccatggggctaaacaca

SEQ ID NO: 63580 - DNA, 349 bp, Glycine max
  unsure (1)..(349): unsure at all n locations
gcctagcactctncagactgagcttaacacaattatgcagttctgtttggttcttttagagttgatagatatttaattgctgagttctgttatttgtgctcttatttctcaattctgtccctcttatnttcaattatcctctctttaggttttcattctcttgagcacgttctgatttgtaaatatgggttccttctaaatctttgctttctttatactcgtctggtttgacttctgatttttaaatatgatgcgagctttattttntcctgctccttttgttcttatcatgattctgattatcttcatggttctctctagagtagtaaatattttntaatttcttaat

SEQ ID NO: 63581 - DNA, 485 bp, Glycine max
aaccaacttgatccacgaggacccactacggtccaactttatttcactaaccggagaatctatttgagactctccgaatttggagataatcaagaggaaaagacggaatttcaaaaggagacgacaagaacaacctcgcaatcttgaaagattgatgtcgcggatgattcaccacacatgaatataattcttgcatcagaacctaagggtttatacaagaaccaagagaaacactctcttaatggtgtataatatgaaaattcataaacaaaactgcccatatagcggttaagaagtctatgtatacattctactaataattctaaatgaggtccacggcccaataactaatataataattaagagactcacatataacaagtaaagagtggcagcccactacatggccaacaatatgcacaacatacaaattataatgagaataaaattattctacagtcgactaaatcatgagctcactcctc

SEQ ID NO: 63582 - DNA, 335 bp, Glycine max
  unsure (1)..(335): unsure at all n locations
gcttgaagagtggcaagatcatcgctcttgtcttcttcttganaatgattgccatcaatctgatgagatgacatcttataaagcgatctaatactttcaaatggatgatcacgtgatttattcatagacacatcgagatgtgctcatgatgaaagtgtttcctatgatttaggaagagcaccacctattgagacgctgtgaaaaagtaacgtgtcaatatttttaaatgccaccatatgatctgtccgattgagtgaaagtcgcgaactctgaactgtgagtgctgtgagtgcatgggaaatacaatgagctagaatttctaaaaggtcaataac

SEQ ID NO: 63583 - DNA, 258 bp, Glycine max
tgtgggttgctacttgtcatctgacctctctgcatgagagagctcggcattattgtgccacttatccatattggcttcatctccaataccaacttgcacatattggactgtctagcaccgcgatggtagattctattgccatacaggtgtgagaagcactctctcacgtgttgtatctatacctgtgttacaggcttttcatggagagcttccactacatctacgaatccattatctatccctactattgatcttggc

SEQ ID NO: 63584 - DNA, 235 bp, Glycine max
  unsure (1)..(235): unsure at all n locations
agcttgtagaatggctagacatgatacatgtcatgtgttggntngcttcaaggataaaagggatgccccacattatttccatgacacanatgtgcaaaatgatgatttggaaactttttgcanaactggtcatgcttgtacctatgcggacactcaagtgtcaaatttttatggccatgtgatgctagggctcaggattcatttcctctattttaaatcaacccaatgtttccaa

SEQ ID NO: 63585 - DNA, 483 bp, Glycine max
  unsure (1)..(483): unsure at all n locations
gatgatatggtcttcactgactaaaggatcatagtgggtctaaaaagaggcaaatctgatcatcatgccttgataaatgccaaanaaaactatggcatatgaagagggtgagaatgagggagaagcccatgctgtgactgccattcctatatggccaagtttcccaccaacccgacaatgtcattactcagccagtaacaacccatctccttacccaccacacagttatccacaaaggccatcccttaatcacaccacataacccacctaccacacgaccaatgctaanacaccacttttagcatgaaccgaagcaccaaccaagaaatgaaatttgcagtgagatagcctgtagaattcaccccaattccagtgtcctaagctgacttgctcccatatctacttgataattcaatggtagccataaccctagccaaggggtcatcaacctcatttctctgagatacgactcgaacgcacgtg

SEQ ID NO: 63586 - DNA, 319 bp, Glycine max
  unsure (1)..(319): unsure at all n locations
agcttggttcgaggtacttacccgttgaagatcgtttaacgatgaagaacgaatgaagaacgtcgaagaaccgtcgaaacctttgcgaaattcttcacggaaaacgttacggaaacgtttcggaagcgcctcggcttatattttcttcacggaaacaatntttccaagcaaattctaaagagagagaaatgcctaaggggctgaacccttttcttcttcacttcctcccctatatatagcaaaataagggaggtggttgccgccagctcgtccagcgagctaagttgtccagcgagcacggtggttcttcaaacaacag

SEQ ID NO: 63587 - DNA, 500 bp, Glycine max
  unsure (1)..(500): unsure at all n locations
tctcactggccctgcaaccattaagccagctttacctcctatttcaatcaagaagcctgaatcaagatggacgttagcatctgacactggctccggatttacctttcctgtttcagcatcctcctctgtattctctgagccaccaactccatccatcacgcctttactttctgctggggatcagcaccaagtaaaagaaggatctactgaactgtcatatagttttggtctgaaaaagtccagtccagcagtagttttttccttcccttctacaagtaatactgctattcagaatgaagctggagacataaagtttaactttggttcaactaagaagccaaggttatcgttctcatttggaaaaaatgctgtctgctgttaaaaataaaatggcaaaacaatgttccaaaagtcatccaactntntttttcttgtgattagtgtatttttagcctttaattaactctgatngtacctatactttgcttttcttttgtctt

SEQ ID NO: 63588 - DNA, 405 bp, Glycine max
  unsure (1)..(405): unsure at all n locations
agctngcctaattaacctgaaattgagagaaaatgtatattaaacacataaaatgaaaatactaagtatgtattacctatacttaacagaaaatacttataacactacagaataaccataaattgggagagtttgatacaatctgtacaagttgtatacacaaaaagtagtcgttttcatcgactaacagctattcgtcagactcacgggtccggtagcatgcagtgactaacgtcatcatctgcacctttgtcaactaaaggcaagcgagcctgttgatcgagactagtttagtctcacaactttgtcatccagagacggaaagtccaatgacatgcggagataccttatatttatccgcaccttttgtgatgcgatcctaacccccaagggcatttggataaa

SEQ ID NO: 63589 - DNA, 525 bp, Glycine max
  unsure (1)..(525): unsure at all n locations
ctctactaagttgcctgatgcctganatgtctnttctgatggcagtggtcctagatgcacggaagaatttctccaagaacaccctcttaaggtcatcccagctgaaaatagacctgcgagcaaggtagtatagccaatcttttgccactccctctagagaatgaggaaaagcctttaaaaagatatgatcttcctggacatcanggggcttcatggtgaaacaaacaatatggaactccttaagatgcttatgaggatcttcacctacaagaccatgaaacttgggcagcanatgtattagtacagtcttgagaacatatggaacaccctcatcaggatattgaatgcacaagctntcataagtgaaatcaggtgcagccatctccctaagagtcctctcacgaggtggatgtngagccatgttctcagtatgaaaattagtagtggaatgctcaanatcagaatattcagaatcactcttcacaaaatgctcaaaatgcacanaatgaccaggatgcacactat

SEQ ID NO: 63590 - DNA, 439 bp, Glycine max
  unsure (1)..(439): unsure at all n locations
gtcacctgcggcatgcaagctntgaaaagtggtggttttcaccttctcgcttatcctatccgctggcttagcgagtgtctgctaagcgcaacactcattggctaagcgcaaggaagaatctggaagaagatgagttgtgcaggttcgctaagtgcaccgcttcatctcactaagtgcaccacttcactccatccgctaagtgagaaaggcacacgctaagccgaaattcactaatgtgcattaagcggtccagaattgtgctaagcgaatgagcacgaacaaggccacctatttaagcctaaaattagattctgtgaagagagtttgggctgggattcagagctttgcatgtctagagattctagagagagaaaggtccaagtttcacagagttttgagagaatttgatatgtgaagatctgcagagactagatcttga

SEQ ID NO: 63591 - DNA, 435 bp, Glycine max
  unsure (1)..(435): unsure at all n locations
tctctcccagagaggtcaaggaaaaatgctatccaaggacatcaatatcataaccacaaaaagntttccagcctatttatgcatggtcaaacatgtggggtaactggtgggtgataaataaagggggaatttacaggattggtgaaggaaggacaatttgtgtgtggaaagacaactgggaagttatgatggatgatgatgatgtgataagagacaatatctctcaacttatagatgagaacaccactatgagttgtctcttttaagacgaaaaggtcttagaatgtaaataagtggttcgcgtacgctactgcacaaaaaatacactctattctntgctgagaattcatagaaatgagaatatagtgtaaattcggatccaattgtgtcattaagaagacacgattcatcacaagtcagatggcactcgcatac

SEQ ID NO: 63592 - DNA, 399 bp, Glycine max
  unsure (1)..(399): unsure at all n locations
atgatgagctntggcttgaggcgggcatattattttatataaccatcngngngatcacttgatcacatgagcctttggaatatttggttcatgacatcaaatcaaagtgataccatattaagcgagctatcctgtcactatacgatgctgagatccttacaattttggaacaccattgcgatgacactattatctccatgattcttttattgctggctggtacacaatcctccaaaattataatattctttaaacaatgacactgtcgtttatatttcctattcttgccgccatctcagatttattattcttgggtctgactctcattaaatcatcccaccacttgtgttcaccagacgaatagtaatcagatcttcatgccaccaatgtagggacatc

SEQ ID NO: 63593 - DNA, 445 bp, Glycine max
tagaagctgaagaaattatggaaactcggagaataacgatatgaatagtcacaaatgacagtatgagaaaggaaagcactttttaaaattaaaaatgactccccctattcctattaattgtcagcgaccttcttcatgggcttgggggggtgcaagttttgaatttaattggacccctatgagggccaattaagtctatggttagggttctcatgctacggataggtttagtgtctattttagaccttacgtgtcattgatcctcactttagtgaatttttaaatcactaccacctcataatcatttttctatgggctaacataattcattaacccataattaactatttccatgatttcttgacacttatttactgtcactaaagttgattccacatataactaaataattaaacccataagacatatatttattttatattat

SEQ ID NO: 63594 - DNA, 274 bp, Glycine max
  unsure (1)..(274): unsure at all n locations
gtcacctgcggcatgcaagcttaagggctgtgtgcatgtttagtttgctcattttttataatttatcacttctgtcaactttatgatgccttttttgaaaaggaaaagagctattatttcccttagatngttccaaacattgtctagttatccttctagaagctaatatgtgaactaaagcttttattgtagccaaatttcatataagggcatagccttggcatctattcttccggaatgatgctttaacaaattaaagaagccatttcttttg

SEQ ID NO: 63595 - DNA, 509 bp, Glycine max
  unsure (1)..(509): unsure at all n locations
ctaagctcactatgggcaggcggcttcttactttcttgctacaacgcgagctttgaccaccgctcttccttcccgcgatgcttctcttcatatccgcctaactgggcttatagcctaaaccatacttcccacgatttcctttggcatttatcaggctagttatgccgccgttgtctttgcctaaacccattccgggttcgtaaccgttccccaacataacttgggccatcattactgctgcatcggacaggcaaggcttgccaaagaaggagtccacggaggaaatgctgaccacctcaaaagactggaaagcggtttctaacgattcttctacggcttccacataaggcatagaggatgggcagctcaccaagatgtcttcctcgcctgacacgatgaccaaatgcccctccactacgnaattcaactttnggtggagtgtagagggcacaactcccactgagtggatccacgggcgcnccaacacacagctgtaggggggggtaata

SEQ ID NO: 63596 - DNA, 271 bp, Glycine max
  unsure (1)..(271): unsure at all n locations
ctcttggaagttcattattccctctatccccattatcttgagaatcctcattgcttccttcatctttttctttagagtcatttccatgaatatgtgtatcttctaaggaatctgaaatatcatctaacaaatccttccttggaagaatggcattagactcatcaaaggaaacatgtatagactcttcaatgncactggtctttattatatattctataagccttactatgcanagaatatccaggaaaataccttcatctgacttagcatc

SEQ ID NO: 63597 - DNA, 480 bp, Glycine max
  unsure (1)..(480): unsure at all n locations
aatgagaggagagtagggtgcaagctcttattcttgcacaccacanaatacatatgttgaaaactaaggtgtgatcaccctcaccttaaggtcttatngaaattgagagagatggagaggagagtgtgaatctttggttttgtttacgaggtgagagaagaaaacattcagttcactcctcactaagtcacaaaggcttgagaaaaaaagatgtgaagtttgtgttgtggtgagtgagatcatgagtatagagagaatgaacatgctgacgcgattgaatgggtgagtgtgtgagattgggtgagaatatggtgcangcatggtcaactatgcttgtgttgatgaataaaatgatggctaaaaagtggttacactgtgtagtgtaaccctgcactcgtgaatataatttcccacactcgaaacatctttctgtcaactttaataattaaaactaatcaactacaatttaatatacttaat

SEQ ID NO: 63598 - DNA, 513 bp, Glycine max
  unsure (1)..(513): unsure at all n locations
atccattaagcacctgcggcatgcaagcttcatgcttaactatgtatggcaaagtcttattactggtgttcaagacatacaagtgagcttgtacaaatcttctacacttggagtgatcacctgcagtcctcttgaacccttaccacccactctgtcatcatgctgacactcaggaagcccaacagctntagccttctctaagtattctgaacaaaattcaatggcttcatctgcaatgtacctctcaacaatagatgcttccggacgatatagattctttgtataccctcttaagatcttcatgtatcgctcaaccgggtacatccaccgtagataaacaggaccacagcatttgatttctctgaccatatgcacaatcaagtgaatcatgatgtcaaagaaagcagggggaaaatacatcttcaactggcacagtataattgcggcctcattntccaactcattcaacattactagatcaatcactttgctacatatagcatggaagaagaa

SEQ ID NO: 63599 - DNA, 445 bp, Glycine max
  unsure (1)..(445): unsure at all n locations
tcaagagatcaagatttcaagaatcaagattcttgagatcatgattcaagacttaagattcaagaatcaagagaaggcttaatcaagataaatatgaaaaagattntctcaaaaattgagtagcacatggatttttctcaaaacatgtttaccaaagagttnttactctctggtaatcgattaccagattgttgtaatcgattaccagtagcaaaatggatttgaaaaagttttcaaatgaatatacaacgttccaattgtattcaaaaagctgtaatcgattacaatgttttggtaatcgaataccagtgcctttgaacgttgaaattcatattcaaaagtgaagagtcagatcctttcacataaaagctntgtgtaatcgattacactgatttggtaatcgattaccagtgattgtttctgaataaatcaaaagatgtaactc

SEQ ID NO: 63600 - DNA, 381 bp, Glycine max
  unsure (1)..(381): unsure at all n locations
agcttacaaaatctgtgttgccttgcttctgatggaaaggccgcgcataaacagagggaaaagatagaggcacaagagcatcaaagtgctcaaattaattcagagtatgcagatgcaaaaaggcttaactgcagttcactagtaatagatttgcagtttacatccccacctatacctgtcgatattcctgagagaaatagaagtcaaaataaggaagaactggttttattagcttcaaatctggagtcacatgtttcccaagaaggacatgttgggagtattactgatcatagctggttggtaagtactaaggctganggtggtactgtcatggtaaataaaacatgngtgaagaatagcatggtgaaagcaacacgagtg

SEQ ID NO: 63601 - DNA, 499 bp, Glycine max
  unsure (1)..(499): unsure at all n locations
cttgcttctgaacactctntctcanggtttatttttcgtgggttattgattaataattaaaaacctgatccaagtgctcctctataacattgctacatgagtagctcgttgtttgattataatatataaccttaaatgtccttgaaaggagttggactaatggattgttttattgacctgcggaaaatatggcatcgctgttcatatagttntgtgaaaacacttcttaatttccatggcaacacgaaataagtattnttattcacgttctgctactagttgttaacttaagaataaatataaataatactaaaaccagtattttaattacaatattatcatattgtaattaaaatattgggtttcatattataaatactgatttattgattattagtaatattgataatatcnaaaatataaaaatatcattaattaacannattttaattacagggtattaaatatntaacatcatttcttaacttagtaccgatgt

SEQ ID NO: 63602 - DNA, 293 bp, Glycine max
  unsure (1)..(293): unsure at all n locations
agcttganngatatggggtacccatcacatgttgtatctatgtggcggtgggcgatggtgcacnaacaagtttccacatccacaatgcgcgcataaacccaccatcccctgtagcccacctncaactgagctcacgtactcccacgtagcccatatcctcgtttctctgaacaccgggtccccatcaatcctcccaagcttgcccaacattcaaagaatacaacattcaaacagcacaaactatcacagccaagaaaacagagcanaggcagaaaactctgccaaacaccaac

SEQ ID NO: 63603 - DNA, 447 bp, Glycine max
  unsure (1)..(447): unsure at all n locations
tgcttacaaaggagagctgcccgatgagtataatgttagttccaccttcaatgtctctgatttatctcttnttgatgcagatggagaattcgatttgaggacaaatccttctcaagagggagagaatgatgaggacatgaccaagagctagggcaaggatccacttgaaggactcggatgacctatgacaagggctagagcaatgaaagccaaggaagctcttcaacaagtgttggccatactatttgaatacaagcccaagttcaaggagaaaagtccaaggctgtgagttgtatcatggcccaaatggaggaggactaaatgacaccactttatttcaaatttagagtgtctagtttgtctaaataatggcccaattcttgtaaagttgctgaccaaaaatatgatttgtgttattaactaaactgctctagttcaagttgtaat

SEQ ID NO: 63604 - DNA, 362 bp, Glycine max
  unsure (1)..(362): unsure at all n locations
agcttattactgcttcttggatggatactctggatatctatatgatacaggggaccccaaggatcaggagaagacgaccttcacatgccctnttggtgtctntgcctacagacagatgttgtttggataatgtaatgcaccttgccatattcagatgtgcatgtnggccatttctgcagatatggtggagttggagcataaagcctaatgggccctcaaactgcttaactttgattaagctacatctatagagaagatgaagttacagttgctataggtagaagaaataatgattgaacgcatatgaatcatccaagatttataagcaaagatgaaggcgtatcatgacaagaaattacaaa

SEQ ID NO: 63605 - DNA, 459 bp, Glycine max
  unsure (1)..(459): unsure at all n locations
cgctaggggctcttnctcctgattcaggtctaatccataacacattttagcatacagactctatctatgaactgttcacaacacacgactcctcaattgtagaagcaagcttcatgatgatgaatcatgttgattcaagtagttttgatgatgaaaaagatgatgacaaaaagcccacagaatgatctcaagattgagtcaacaagttcaagatcaacgttaatttcaagcttcatgagaagaaatcaagaagattcaagaatcaagagaagcttgatctcaagattcaatataggatgaagtcaagaatcaaagagaagaaagcacgaagacttcacaagggaagtattgtaaagatttgtctataacaaacatagcacaattgtggtttcacaagagttttctcacatttctacgtatcagaattctactctctggaatcgatactagttgctatat

SEQ ID NO: 63606 - DNA, 110 bp, Glycine max
gcaagcttcgaggatctactatctcttcaacatttatcttatttgtgtttgaatctgaattgtgttataatctaagtagattaattcaaccatcgttcaattctgctcaa

SEQ ID NO: 63607 - DNA, 466 bp, Glycine max
  unsure (1)..(466): unsure at all n locations
agcttcaatntagtgtttcattcttctgtcttgtttaccaattacacaaattaaaatcactaaataaccatgtgcacctgataatcagataatgcaccatatgatggattacaggaatcaccccaacgcccatgtgggtattgatcccatcctatggtccttgatatgtagctttttggtcgatttgccctatgatagttgcataaagaaagtaagaaatctttcagacagaaactcccttcttatatgttggaacaagacatagcaattgcaaaggtaacataccaaaagattggacggacatcttctttaacacggaanacatntgcagggcgtctccaaggtaaggacctagaaactttggactcttcaattaggccaaagttctgccagcaataacattaatatcagctttaattaagtgaagtctttcaaaataacattanaatatgcacatcacatgcat

SEQ ID NO: 63608 - DNA, 488 bp, Glycine max
  unsure (1)..(488): unsure at all n locations
tagcgtatcatgtattataataattggaagcttctaattgtgtaaccttattctattggggtagatgttcatttcaaggcaatctgttttactgaaccagtttatttagtattcaatgaaatgattgttntacgttaatattacatcgttggtactagataatttccttttactcatatttcctctaaaaaaaaagaaacctttactcatatttgaggtcatatatatgtaaatcgataccaaaataaaagcgaaggtataatgacgataagagggccccagaaattntttaatgtcaattgctacaaatagatcgactctattataataaaggtttgggttaatatgattaattgattatcagttcatttggttggtttattaataaatatattatagcgctattaagcaatatgtcggtatgagacaaacattataaatcttaaatatatgtaaagtggaatgtccttatattctcataattatat

SEQ ID NO: 63609 - DNA, 254 bp, Glycine max
  unsure (1)..(254): unsure at all n locations
agctnnggagaattagattatatgctctatctcgatgtggngntagaatataagctagttttatcattttgtccaagtaatcttgtaaaggtttcaaaaatgttgtttntgtgtactctgaanagcctaagtaagagtagggtcccttataccgaacctaacntttcttcttgcgctattgcattctctgtcttatatatattatatgtagcggaggagcacaatgacactttaacactctcaacaaatatatt

SEQ ID NO: 63610 - DNA, 466 bp, Glycine max
  unsure (1)..(466): unsure at all n locations
ntataagtgcgggttcgggagacataggtcaagcgttcgcgatatgcgaagatgatattccgagtactttggatttggtacgaccatgctctcctgatttccagttgggaaattggcgagtggaggaacgccccggcatttacgccacaatgtaaacctttacgggtttaaaagctctatagttgggcctaggctttagagtattcattttgttaaggctttgtgtcttttgttcttgaatttataatacaaggatctntcttcatctgttcctggtctctacccattctcattcattggcatgtttacttctttttctaaaatggcagattcgatgacgagtcccccgaaggtactaatacctgggacccgtctatcaacttcgagcaagatatgaatcaaacgaaagatgaaggagatgaggatgtgggacttccttctgaactagaaagaatggtcgcccatg

SEQ ID NO: 63611 - DNA, 455 bp, Glycine max
  unsure (1)..(455): unsure at all n locations
agctntatatggacgaaagtgcataacccctatttgttgttatgatgatggagaagcagtacttcttggacctgatatgctacaacagattaatgaacaagtgaggttgattcgagagaagataaaagcatctcaggataggcagaagagctactatgatagaaggaggaagccactagatnttcaggaaggagaacatgtgtttttgaaggtttctcccttaaccggagtcggaagggctcttanagctaggaagttgacacccaagtatctaggtccatatcagattttgaagaagaatgggcctgtagcttatcatatcgccttacctccgagtttatcganattgcatcctgtgttccatgtctctcaactaagacggtacaacccagatccatcacatatacttgcagtggacggggtacaggtgaaggataacctcacctatagagcac

SEQ ID NO: 63612 - DNA, 439 bp, Glycine max
  unsure (1)..(439): unsure at all n locations
gatgatgacaaaggtgatgacaaaaagctcataggtcaatcaaagaatgagttcaagatgttcaagatagaatcaagaacacttcaagactcaagaggaaagttgaagaacacttcaagattcaagaggaaagttaaattcaagaatcaagaatcaagattcaaggatcaagcttcaagaatcaagatcaagattcaagaatcaagagaagacttaatcaagataagtgtgaaaagggtgtttcaaaaaatgagtagcacatgtgattttcttcaaacatgtntaccaaagagtntttactctctggtaatcgattaccagattattgtaaccgattaccagtagcanaatgaatttgaaaatgtntttcatatgaatttacaacgttccaattgaattcaaanagctgtaatcgattaccaatatttggtaatcgatt

SEQ ID NO: 63613 - DNA, 343 bp, Glycine max
ttaagtcacctgaggcatgcaagctagcatgagtctcttctctgtggtacaaagaatattataatatgttggaggaacaaaatacaaatcgtgtacatatttgacaaacactgccaccaagtgaaagtatttgatgacccctaataaaatgaattaaatgacgtcaaaaagtacgccctatttttttcaattataataatctaatgatacatattaaatgaaggccaatgcttacaagtgtgccgaggacacggggttaagaactaaagtgttttattggaaggcataaaattgccggcttcatgaagtttttttatactttcctatgagatacatattaaaa

SEQ ID NO: 63614 - DNA, 347 bp, Glycine max
  unsure (1)..(347): unsure at all n locations
agcttacatgtacagtcaagcctacgaaagcagttttgggcagaagctatgaacacaacaacttacttgattaaccgaggtccactagtaccattggaacatataatactagaagaggtattgagtgaaaaaaggtcaaacttacgcatnctaaagttttggttgtgtaacttatgtgcatattagtgatcaaggaaaaaataaacttgatcccaaataaaaaaagtgcacttttattggttatggtgaggatgattntgactaccgctcttgggataatgaaaaaaaatgatgatttgtagtagagatgtgatctttaatgaaggattaatgtaaaatgaaaaaca

SEQ ID NO: 63615 - DNA, 489 bp, Glycine max
  unsure (1)..(489): unsure at all n locations
tactcagcttgtactattatngatgctagtagcaatgaagagaaagtccattatataacttgtgaaagatctaacagactcagcctaatgttgatgagaatgactgttgcaaacagtattaagacaactctccctaaaatcgaaagtgttaaaaagtttatgtgattagtgggagagtgctctcaaacaactgataagtctgttgctgggacattaatgagtacattgaccaccatgaagtttgatggttcacgtactatgtatgaacatgtcattgagatgacaaacattgcagcaagacttaagaccttgggaatataatgactgtgaatgagaactttcttgttcagtttattacaaactcattaccgtctgagtttggcccgttctaaatgaactataataccatgaaagataaatagaatgtgcatgaattgcacagtatgttagttcaggaagaaatgaggcttaagaatcaaggaagtcact

SEQ ID NO: 63616 - DNA, 95 bp, Glycine max
  unsure (1)..(95): unsure at all n locations
ttaagtactgngctgcagctgcnaacccttatctaccctatcttatcagaagaaagaagccttggcctttgtctaaaacacccacctaagcatta

SEQ ID NO: 63617 - DNA, 478 bp, Glycine max
  unsure (1)..(478): unsure at all n locations
ccttcaaactcagctttgaatcaacttgccctggtatcgatacaggaaattgtgtatcgattaccagagagntaaaactctggtaactttagaaaattntgagaaaaactcttttgaaaaacaaaactgcgctatgtttgttttttgaaaaatcttttcaatacttcccttgtgaagacttcttgatttcttctcttgaatcttgaattcatcttctcttgaatcttgaaatcaaacttctcttgattcttgaaactcgttgactcaatcttgatatcgttctcttgggctttttgtcatcatctttgttatcatcaaaactacttgaatcaacttgactcatcatcatgaagcttgcttctacatgcttgtgaaaagtgatntgattaagcattccatgatattcagctcatatggttgatgtccttgatgaattaaacacaatnttcttttgattgaccactgtctttgtcacttg

SEQ ID NO: 63618 - DNA, 450 bp, Glycine max
  unsure (1)..(450): unsure at all n locations
aactcttagaagctgtcctgtaatctgtcaccatatgctangctgtagctntcagtatgaaataaattttgtactatctatcaattctcatatatatatatgcatctctcagcaaactaaggctgaggatcctttntgtgtgcttatttttgcactcaaacatttcaaagaatctaaattgattctttgcaatccttgtttattttcttaatctaagctcaatcaccttttttcataatttcaaagtgactcgtgttttatccttttgcaatttactcaattntgaatatctttcttattcttaaatacaggaaccaaaggtaaaataagggtataatcatccatgaattggtttcatatcacaagacataaatngtgagccagtgattnttatttttcattaacanactttcaatttgatgcattgcttgaagttattgaagtcatgat

SEQ ID NO: 63619 - DNA, 431 bp, Glycine max
  unsure (1)..(431): unsure at all n locations
ctcggactggagacncttcgtccacactcatgacttatgtaccaccactcattgtgaggtgaggccttgcatgctccctggtgggaggataaggtgccacttttatgctcttagcataacactatcgtgcctgcttttggtcttccttgacaatcatgatatctttcgtctaggtggggaacttcatcttaagatgcgatgtggagacaatagctctgagctcgttcaacgttttcctaccaatgaaagcanagtaaaaggtatatacatcaacgattaagtacctggttgtaaagatccaagagagctatccttgaccaanagcggtcattaggtcgacatagcctctggtcgctactctttctnctgcacagcaaggagtggacatgagtgagtctgaatagtatcangcgaaacttcaagcctctgga

SEQ ID NO: 63620 - DNA, 476 bp, Glycine max
  unsure (1)..(476): unsure at all n locations
agctngatcatcttcaggtatgatccacgatactatcattatctggagattctctcaacacagatgttgttttaagtcacatgagggtcatggcgcatcgtgcttttcatggggagagtttctctagctggtaagatgttaaacttggtttgcaattgcctatttggtgttccaaaattaggatcatgaaccatttttttatgagtattatgagatataattataacattttaatatcttttcttcctttctctagggatgtctgatttgggatcttccataaaaaaagaagactaacatttgacaataatgtacacaagtggaacaactagagatcccaaaggtgtcattatgtntaatgaggctttcatggctgaagtgttgtctgttgaccacatacttatgtcagaaagtcagagtggtaagactatttatttgaagcttcattagttcatgttgtatnggtatactactac

SEQ ID NO: 63621 - DNA, 482 bp, Glycine max
  unsure (1)..(482): unsure at all n locations
ttcctaagntctttaacaagcttataacaatatacnttggccttcgttaattgtctttgggctgggcgaccacgaccaacatagtactttcggtacctactatatgttgacttgaccaacgctgntattggaatactgcgacaatctttcaacaccttattcacacattctgatagggttggtgtcatgtgaccatatcttcgtccagatgtatcgtaagccatgctccattattcctttgaaatgcaatcaatccatcttgctatggctggactcaattgacgaaatntttctaaagtttgatcanacacatgcttgcaaggagtgtacgctgcatcaaatttgtaccattcacaagtgaggtagatatgaaactcacataacttaatgtgtaaatataccnacccaacttctgacatctcttttgntcgcgtgttgaattgcgatgaaatgctactatgtgtggacgcagacacatgata

SEQ ID NO: 63622 - DNA, 423 bp, Glycine max
  unsure (1)..(423): unsure at all n locations
agctntatacaactntgagcggntntcctctactttattgaattcagtgtttcttctaatgctcctttagaaacgaaatgcaaaatgtcttaatctcattgttggttatgagaaattctatatttgtgctttcattcctcattcgtcgcattagttttgaaaaaaatgtgtgttgttctgatcggtttggaggtttgtttctttaccaagtgtgttcatattttagtgaaagtttttagagacttcaatttcttcagccttttacatttacaagacttcaatgtcttcagccttttacatttacaagacttcaatgtcttcagtcttttacatttacaagacttcaatgtcttctgtctttacattccaaagacttcaatgtcttttgtcctttacatttcaaagactttcatgtcttctgtc

SEQ ID NO: 63623 - DNA, 481 bp, Glycine max
  unsure (1)..(481): unsure at all n locations
tcaagttgattcaagtagttttgatgatgtcttagatgatgacaaaaagcccaagagaatgatttcaagattgagtcaacaagttcaatatcaagattaatttcaagtttcatgagaagaaatcaagaagattcaggaatcaagagaagtttgatttcaagatttaagagaagatgaattcaagattcaagagaagaaatcaagaagacttcacaagggaaatattgaaaagaattttcatanaacaaacatagcacagttttgttttcaaaatagtgtttctcacaagtttctaagttacccagagttttactctctggtaatcgattaccaatntcctgtaattgattaccagtggcaaagtttgatttcaaaaatcttttaattgaatctgccacgttccaattgttnttaaatggtgaatcgatacaatatattggaatcgatactagtgatctgacgtgaaatcaagagtcacatc

SEQ ID NO: 63624 - DNA, 480 bp, Glycine max
  unsure (1)..(480): unsure at all n locations
agctntgagagttccncgtgaggcatcatgatggttatgacctaatatataatgccatacggtatacatgcttacttttctagaatttgaaactctcaactcatttcatggtttcaactggttagttttcataatgaagcacaaatttggcgtcaagaatgactagttttatgtttaacttggagagttttaaagcaagaatagataattagattatgcattaaactttttacagtctagaatacaataatacattcagcaagatgttgcatgtccctctttcantttttttttgtatgggtgccaagatatattctaatttttattgatgcttttgatgtgcattgattagatgtatttatgatggatgaattgttgtttaaatgttgataggataatttagtgtggacgtggatnttgcatgagaatcgtctngatgaagtaactctcgtatctgatatgcctcgngacatttatgta

SEQ ID NO: 63625 - DNA, 467 bp, Glycine max
  unsure (1)..(467): unsure at all n locations
tcatcaagagaatataaatatgtgtccatggcatgagtatcacnaaatcatccttcaacaaccatattatcaatcatctctgaatcatctatcttttacatcatctttcaacatccttgaatctatctttcaacatctctcaatatcgtctttcatctctttcaacactttcaacagaactgtgtaattcattgctctacatctttctaaagaggttttatcgacactttctctttcaagacaagatctgtgttaaagaacttggggtattcatctntttcattctcttctcgctttgccaaaagaacaaaggactaaccgcttgaattattntgtgtctctcttctcccttacaanagattcaaaggattaaccgccttagaattctcttgattcttcccttccctttaaacaaaagatgtcaaaggacgtaaccgctgagatatcttntgtttgcccttacaaag

SEQ ID NO: 63626 - DNA, 426 bp, Glycine max
  unsure (1)..(426): unsure at all n locations
agctngtgaatgttggtcttcaagggaatgttgattaataattaaatagatagtggtgactnttcccatttttgtgggttcaatataatgatactgttattntcctggnttgctactgttctttatggagtagtataaaactgggcagggttgaacatgtgctgtaataatgtttgatgtaaaaaaggaaactgaanaatcgatagcttctttcattcgaaatccagtatgtacttatatcccatcaatatcataattcgtaatgacaaattcataaatggctaatcctatttttgctggatgtgttggctgactgattcacataaagttaaataaaaaatctactggcccattttcttggggtttttcccttccttttcaccttaccatgtcacgtaatactgaaagacgagttgaatgagaata

SEQ ID NO: 63627 - DNA, 279 bp, Glycine max
ctcaatgaaagcaccagttgttatgttcctaatatttcatgactaagagacctccagaaaaaaggggattaaggagaggaaatctactgcatgttattgcttgcatttctattacaatgattgtgcatttatatgcatcatatgctgattctatgtccttctacaagatctacgaaggaggctagcaataacggatattgtgaatattctaacagaaagatatattccagtagacagaatattctaatttgtcaatgctaaggtgtcagctcaacgctt

SEQ ID NO: 63628 - DNA, 390 bp, Glycine max
  unsure (1)..(390): unsure at all n locations
agctnggagtaaaacttatgctaaggatctatatgtgatagtgataaatacttgtaacttgttgaagttggtggaacttagtggtttgccatggacagaacgtagtcttggtgattgagacgaatgaatataaatttcctacgtcttattcttattattttctcttctgctattagaattgaccaagggtttgaatntgatctttgcatttgacaaactctatttgtcttagatagatttgaaagtatcatttgattcactttgcaaaagtcttatactattttcttaagttttacttcatcagacaataactttgttgattatgaaaaggatttaaatttagtgaaaatcataatccaacccccatttttgtgatatttgcatttacac

SEQ ID NO: 63629 - DNA, 469 bp, Glycine max
  unsure (1)..(469): unsure at all n locations
cttctntgtgcactttgtgcctccaatctaagataatagtatgttagtttcatgttttggcctcacaactattcgatccttcttattggcatgctcttcatctttaaaaagagatatagcatcaatgggtcccaccttgtcatcacacatctcacgtacaagggcgagagcgtgagatcactgatgattctatactggaaagtgtccatcgaatcgaaagttntcattgaattgcttggtggctgttcataatggatacatatgcgaatatattactttttgcgaatgaatacttattatctttgtcttccatgactacatccattcatttgctgaatagtgttatctggattcgaactcattttcatgaaaaaacgaatcaaccatcatattttcaaattcatcatttgtcctcgcttattttaaaatagtacatatatttgtctcactgacaattagccatttgcat

SEQ ID NO: 63630 - DNA, 443 bp, Glycine max
  unsure (1)..(443): unsure at all n locations
agcttgcatactaagtgctcaccatcactatatatgaatccctcaagttatttcatgtaaacctcttcttctagatcaccattcaggaacgccgttttcacatccatttgatgtagctcaagatcaaaatgagctattaatgccaaaattactcgaagagagtctgtcttatatacaggggaaatggtctctgtgtaatcgattccttctctgtgagtgaatcctttagcaacaagtcttgccttatgtctctcaatgttgccttctgagtctntttttggtttgaagacccatctacattcgatggcttttacaccaacaggcaactcaacgagatcccaaacttggntagatgccatagaatccaatctcatcctcatagcatcataccacanagttgattcttagaaactcatgcttatgaaaacgtctcaggatcattt

SEQ ID NO: 63631 - DNA, 324 bp, Glycine max
  unsure (1)..(324): unsure at all n locations
agtcgtgaggtgcgtgtctactagtgggacttcgaaacttcaagtttgggtggacttctttctcctttgatttcctgggtatggcgttttgggagatatgatgggtagtcttgctagttctctgcttcatgatagatatttgtgaagaaacttgttgaaagcttgttgaacttgccatgnttggatgagttagacatacccattctcgtttagggtttttgagatgatgtttgagatgtttatatgcttacatngcttatggaaaactgtagagatgaatggtcaattaacctatggttacaacgcgaaatgtggtgtatgagt

SEQ ID NO: 63632 - DNA, 467 bp, Glycine max
  unsure (1)..(467): unsure at all n locations
cgccttgcccctcgatatattttaaggactcacggtcactattaatgacaaattccttgggataaagatagtgttgccatgtgttcaaagcccgtgctaatgcatacaactccttatcataaattgaatagttaaggggatgaccacttaactcttcactaaaataagcaaatggatgggcttcttgcatcaacacagccccaatcccaacatttgaagcatcacactcaattgtaaaagattttagaaagttggcaacgcaagtatggcggcattacttagctcttgcttaaaaacatagaaagcttcttcttgtttctctctctatatgaaaccaacacttttcttgagcactttattgagaagtgcttgcaatgtgctaatatccttcacacatcgtctataataacttgctaagccatgaatacttctcacctcggtcacggacttangtgtaagccattctt

SEQ ID NO: 63633 - DNA, 392 bp, Glycine max
  unsure (1)..(392): unsure at all n locations
agcttcacanaatctgtgttgccttgcttctgaatgaaaggccgtgcataaacagagggaaaagatagaggcacaagagcatcaaagtgctcaaattaattcagagtatgcagatgcaaaaaggcttaactgcagttcactagtaatagatntgcagtttacatccccacctatacctgtcgatattcctgagagaaatagaagtcaaaataaggaagaactggttttattagcttcaaatctggagtcacatgtttcccaagaaggacatgttgggagtattactgatcatagcttgttggtaagtactaaggctgaggttggtactgtcatggtaaataaaacatggttgaagatagcatggggaaagcacacgagtgcatctcaatact

SEQ ID NO: 63634 - DNA, 515 bp, Glycine max
  unsure (1)..(515): unsure at all n locations
ctaagctttgatggatctttgcttctgaacactctntctcanggtttatttttcgtgggttaatgattaataattaaaaacctgatccaagtgctcctctataacattgctacatgagtagctcgttgtttgattataatatataaccttaaatgtccttgaaaggagttggactaatggatngttttattgacctgnggaaaatatggcatcgctgttcatatagttttgtgaaaacactttttaatttccatggcaacacgaaataagtatttttattcacgttctgctactagttgttaacttaagaataaatataaataatactaaaaccagtattttaattacaatattatcatattgtaattaanatattgggtgtcatattataaatactgatntattgattattagtaatattgataatattaaaaatataaaaatatcattaattaacaaattnttaattacagggtattaaatatntaacatcatttcttaacttagtaccgatg

SEQ ID NO: 63635 - DNA, 409 bp, Glycine max
  unsure (1)..(409): unsure at all n locations
ataagtaacctgacgcgtggagcttacagcagattntagtaatgaccgactatcttagttttaaaataacttaatgccattaacctacggaattaaaacaaactaaatggctgagtgtaactgaaattgttggcaaccaacagtcacccccaacagccaacaagtcagccaccatctggtctcccaaaaggctgatgcctaggttgccaattgggcccttattacaacttgaactaaagcccttttagttgattaacccaaaacatatatttggtcatccaactttacaaggattgggccattatttagacaaactacacactctaaaattgaaataaagtggtgttatttattcctccattggggccatgatacaactcacaaccttggacttttccttcttaaactt

SEQ ID NO: 63636 - DNA, 445 bp, Glycine max
  unsure (1)..(445): unsure at all n locations
tctcttagggggaactggagaatntaanaagagaacattctgtattgaaggagaaagaatctgagactgaatccatcgttgggaatctgcatgtcaagctccgcaaaagcaagtctgagcttgaagcctgcatggcaagagaatctaaagttagaggtgcatccgaggaaatgatcttgacacttagccagctgacatctgaaactgaaaatgcaaggcgagaagcagaagatatgaagaacaggacagcagaattgaagaaggaagctgaagttaccatgcttgctattgaagaagcagagaanaagcttatagtggcactggaagaagcagaagcagcanaagcagctgagaaaaatgctcttgaccatatnatcagtttaactgaaaggactactgctgcacgtgcatcaacatctgaatctggtgctgtgattacgatctc

SEQ ID NO: 63637 - DNA, 133 bp, Glycine max
  unsure (1)..(133): unsure at all n locations
ctctaagncacctgcngcatgcaagcttcacttcctcaacttgtgtcactgaacatattcttcttgtgtctctgcttcctctcggcatcaatttcatctatgatcgctgccttgtccaaaaatctgtagcaat

SEQ ID NO: 63638 - DNA, 418 bp, Glycine max
  unsure (1)..(418): unsure at all n locations
aaacgctcactacttcatccanagctacattttcaaattatggcaattaatggctttacacacataaactctaccaatgccccaaccaaaatcatgcaagtctcttaaacgagtaaaataattgctgtcactactgtatacaaagctaccttttcaaattctgttttaccacacacacaataagctgaatcctcaaaattttaaagataataaataacataagtgattgatgacatgttctacaaaacaaaaaccgatgataacaataaaataatttaaggagagagacagagagaaataaaacgaacaatggcatgaacattntccctaataacgagcacattcttcgaaacagagcatgtcaaactaatacccaaccacgatcacaatataaacaaactcaaataaaaaaaaaagc

SEQ ID NO: 63639 - DNA, 332 bp, Glycine max
  unsure (1)..(332): unsure at all n locations
gcgctgcgctttggttactaaaaacttctgctttaaggacttaaaaagcattggtattaaaatatcctggtctgactaattaaagtggaggatagtatcatcttgacctagggtgagnaggaatgttataaaaacatgggctcactttaaacatgatactcgtggtatcaaacagcttacgccagactncatcaatttatacttcaatcccacgttcattgggtcctgtatccaagcatcgttgctaggtggtgataaccatccgatttgtattagtaaaatgtgtctaactggattgaaaatagagaatgtttataaataactatgacctt

SEQ ID NO: 63640 - DNA, 494 bp, Glycine max
  unsure (1)..(494): unsure at all n locations
ctcagctnggcttgtggaggggaaggagagatatagaagacataagtgtagtttttgcactttctacgatatactctaatttaaatatttatcttttattgttatcttttctatttccttcctccttacctaatacacggtagaagtcaggagggtattatttccttcctctcaacctaatacaccctaaaagtcagagggtattatggaagattccatcaaataaaaaaattgtctctattcattttactgcattcataatatttaaaatgtgtaacatatcagattcaaaagtaacaatcataacttgatacgtgttagccaactgagtagtaaaaaagaagttttctctaaaatggtggattgacatatgttagctacgtacaaccaaaacaaccagataaaaaaatataatataatggtaattaaaataaattagtgaacaatgtgtatcatatcaattataaaagtcgccattataacttgatatgttt

SEQ ID NO: 63641 - DNA, 489 bp, Glycine max
  unsure (1)..(489): unsure at all n locations
agcttcttctccttattaatggctgctgggcggtggttgggtttcgtatgctacatagggattatataatctgtatgtcttatacggatcacctgatccatataacacatacggattacataatccgtatgttaattttaaaattattaaaaaataaattaaattaaattttntaatagtaaaagtttttttatataaaaattattatttagtttgtgtttctaaataggttttttaatgaaatataaatatattattattttgtttgtaaatagctactctctattctataaataaaanaatagttattntgaattatgattttaaatatttattcntttgtaattggagatatatgaatttntaatttgttttcaaaataggtatttgtttgtgtgttacataaaaaatagttaatttgatttatgttttgaaatagcttattatgttaattggaaatatattaatctcgtatttgttttaaatagt

SEQ ID NO: 63642 - DNA, 86 bp, Glycine max
actcagcttcaaggcttataccacggagcatgagtgttgaagaacatagacaacccatggtactactcctcttaagagctggactt

SEQ ID NO: 63643 - DNA, 455 bp, Glycine max
  unsure (1)..(455): unsure at all n locations
agctngatagcacgcagagactaacgtcgtcttctgcgaccttcgtcaatcgcggccgacaagcccatttaaaagcggtgatttacgtcatcttccgtgctcacaagatctgtcatactgacttttgagtcacgctgacgggcgcaaatacccgagtggttatcctaataaaatttttgctgtctgtaagacgaatagcatgatagcacgcagagactaacgtcgtcttttgtgcccttcgtcaattgtggccgacaagcccgttgacatgcggagattaatgtcatcttccgcgctcacaagatctgtcatacagacatttgaatcacgctgacgggtggaaatacccgagtgggtatccgtataaacattttgctgtctgtaagacgaaaagcctaataacacgcagagactaacttcgtcttcttcgttcttagtcaatcgccgccgacaag

SEQ ID NO: 63644 - DNA, 489 bp, Glycine max
  unsure (1)..(489): unsure at all n locations
tctcagcttttgtctacagaatgcaaaaagnttatacggatcaccactcgtgtatttccgcccgtcagcgtgactcaacagtcagtatgacagatcttgtgagcgctgaagataacgtaaatctccacgtgtcaacgggcttgtcggacgcgattgacgaagggcgcataagacgacgttagtctctgcgtgctatcaggcttttcgtcatacagacaacaatagagttatacggataaccactcgagtatgtccgcccgtcagcgtaactcanaagtcagtatgacagatcttgtgagcgcggaagatgacgtaaatctccgcatgtcaacgggctcgtcggccgcgattgacgaatggcgcagaagacgacgttagtctctgcgtgctattaggctcttatacttacagaccgcaaacagtttatacggataaccactcgggtattccgcccgtagcgtgactaaagtcatatgacagatttgtgac

SEQ ID NO: 63645 - DNA, 480 bp, Glycine max
  unsure (1)..(480): unsure at all n locations
agctnttcttcgtgggttgatgggttctgtctcgtataatggcatgatcactgactgacatgttctcaattagctcagttgcttctttcgaggtcttcagttntatctttccccctgcagaagcatctaacagttgcttggtttgtggtcttagtccatctataaacatattcaattggattggcttggaaaacccatgagtgggagttcttctcaacaagcctctaaacctctccaatgcttcacttagagattcatcangaaactgatgaaatgaagatattgtagctttcccttccgcagtcttggactttgggaagtatttctttaggaacttttcaacaacttcttcccaggttttcaggctgttacccttgaatgagtggagccacctcttggcttctcctgccaatgagaatgagaaaaggctgagcctaatagcttcgtctggtacatcgacaatcttaacagcgttgcata

SEQ ID NO: 63646 - DNA, 168 bp, Glycine max
  unsure (1)..(168): unsure at all n locations
acttagcttgaataattcctttgatagcccctttgatcctatgattccctttctttgttntgaagctcattacaagccttaaatganaaaccatgatctcaccttaaccttaaggaattttggagctttggaattgttttgggaataagtgtgtgtgtgggggggggg

SEQ ID NO: 63647 - DNA, 459 bp, Glycine max
tacgagcctaaatgagatcttatatggagatgtttgttcataggagactgaatgggttaccattagagaaacataggctaataagcaacctatcataacttctgatcattctatactagaaatgaccaagcatttgaatcctttgtatgttaaagcctcgataaaatggtgaaactttatccaaagcatttgtagatagggggcaatgttgattatcatgtcttcgaccacgttgaagaagttatgttaaaggcatgagtagttcattcctacaaatatccagatgatcaagtttacgaaaggagtcactctagcattaatggttgtagtagccgaaataacgattgacctaacaccatgaattcaacattcttcattatggataccaaactagcttatttcgtactggtgaggagcgattcgattcattctagccaaaatgtaccttctatcgtacat

SEQ ID NO: 63648 - DNA, 233 bp, Glycine max
  unsure (1)..(233): unsure at all n locations
agctntgtatgggagagatccacctactttgttgttatatctaccagaaatcactgatgttccaactgtgcaagagcaattgactgctatagatgaacttttgagacaattgaagggataattgatgaaggctcagacatatatgaagaatcacgctgataagaaaagaaaagatgtcaatctacaggtgggagacttggttctatgttaagtacaaccatacaaacaacatt

SEQ ID NO: 63649 - DNA, 500 bp, Glycine max
  unsure (1)..(500): unsure at all n locations
ttgtagtacataagcaatagggttatcaagatgcggtgacgatgaatggcaatctcatatctaagctattccctttatgtaacctacttttgggacacaatactcagcactcgtaatgctatatagtgttatagagtgctagtaatcttgtggctagattatatactatttttgctatgacaggctaaagagagaataactactctcattgctattaatatgtcctaattatactaatttgcaacccggattgttagatttnnttattcaccaagtattgagattctttattgtatgattccattgggcctctttcttgtgaagactaatcatttgagtcatagaagatngttttttgaccaataggtacatacacacattagaatttgtccctattggttgagaatagtatatgatgggctgtactcaatatagtgaacaattatggctatgcgagagatatatattctgatcgcacataacacagaatactaacaaca

SEQ ID NO: 63650 - DNA, 321 bp, Glycine max
  unsure (1)..(321): unsure at all n locations
agcttanggtcagcctctgcctcagaggngcagtttgcataggcacgagctaaagagctggactcttccttgtttgtttcggcaagcctatcacacatcttttctgaatccactgcctttccatcaaaagttacaggatagggtgtctgatgttctttgacaatttcgaattctttcctctttgggctggttgcggtatacgaggtagaggttggacctatcgtcttgtcgggtgggtcattacccactggttcagctacacgcaagtacccagtgggtaatagtgatgactgcgtgtcgtgacactcaacggcgagttct

SEQ ID NO: 63651 - DNA, 494 bp, Glycine max
  unsure (1)..(494): unsure at all n locations
cgcttgatgatatagttntcgccaatgaaagaatctaagtgggtctgaaaagaggcaaatntgatcatcttgctttgacaaataaaaagcctatggcacatagagaggatgagaaggaggaaggaacccatgctgtgactgtcgttcctacatggccaaatttcccaccagctcaacaatgtctttacccagccaatatcaacccttcttattacccaccacccaatcaaccacaaaggtcaccctaaatcagccacaaagcccgcctgccgcacatccaataccaaatgccacccttaacatgaaccataacaccaaccagggaaggaattttccagaaaataagcctgcagaattcaccccaattccaatgccatatgttgacttgctcccctatctgctngataatgcaatggcagtcataagcccaacaaagactcctcaacctctgtttcctagacaatataacaccaacgtgacatgtgcttatcatg

SEQ ID NO: 63652 - DNA, 436 bp, Glycine max
agctggccacccagctcgcccaggcgagcatggttgtttcctccagaagcaacaaccttctggaggaatcttctagagggcccaagtgggcctggttgctatttgtacccccattattactaaatacaccccctacctttttttggtgattcttttttcgtaaagttacggaaacttacgaatttcgtaacgatacttgttttctttccgtaatgttacggaaccttgcggatcacataatcatcccctttttgacttacggaatgttacggaaccatgtcagtctctgcatgctatcaagcgttctgtcttacagatagcaaaagaatgtttatacggataaccactcgggtatttccgcccgtcagcgtgactcaaaagtcagtatgacagatcttgtgagcgcggaagatgacgtatatctccgcgtgtcaac

SEQ ID NO: 63653 - DNA, 466 bp, Glycine max
  unsure (1)..(466): unsure at all n locations
agagacacttgcatacccagcctgactatactggntcagacactttccacgcctacacncagtcctaaggcaacccacttgagattttgcactctctttgtgacactccttgtacaaagtctgaaccacacagggactaccgtatccttgagcttaagaatactctacaacaatagactctcagtctcttaatgcctttntagaagttagaagaagagaagaagaaatctctcttaaaagggatagattgtacaatgaagaccaatctaaattccttattgaatatgcaagtggttgaccaacgaatctttntgagaggataagacagttcagttcagacaaactcttaatctcttgagaggataaactttttgggcaataaaagctctctctgaattcgtgtttccaagtcacatataaatagacctttgatggccattcatataccatttgaatagatgtgact

SEQ ID NO: 63654 - DNA, 311 bp, Glycine max
  unsure (1)..(311): unsure at all n locations
agctngaaatngcatttgggcacctattttgactctcctatgctgnctctacatatataaaacagtcccaccatcccaattntgcaaaatcatatccatatatcattggggcatntcaccgagcacttgnggggcgcacgtttggacacanattgcaagagaatgggaacaatgtggcatgccccattgttcagaatacaacataggcctaatgccttctcacacaaaccctcaactcaacaaaacaagcatggattcagatgcgaatngcttacgatatttgcaaaaatgccaactaaagcaccaaacac

SEQ ID NO: 63655 - DNA, 500 bp, Glycine max
  unsure (1)..(500): unsure at all n locations
agatgggaccttttctataacatatattatatattagttnaaaaacaatttgatagaaagatcatccaatgttgataaaaacagttttcacataaccaatttaaagaaaaaattatgcatctagaggtgtgttagagagaaagcaagttaaagactcaagaagaaaagtataaacaccttgttcataatgattcactctatgctcacttctccttcaatcttagaagggttccactaatcanaatagattacaaaacaagtattctaccctaccactcatagcttacaacaaatactctgtaggtcacttccaacacaccctcaatctctacatgagactaanaagcaccccagtattttgttatcattaagtcactcctggttttcaaacaacaagtttgaatgattacacatcaaataactctcaaagagaagacatacaatataaatctaattaccgaaaaactttgctaagcagagaatagctctctacgcactct

SEQ ID NO: 63656 - DNA, 473 bp, Glycine max
  unsure (1)..(473): unsure at all n locations
agctngccgcccagctcgcccaggcgagccaggttgctttctccataagcaacagccttctggagggcccaagtgggtctggttgctatttacaccccctttttttttactaaatgcaccccccttttctattttttttgtaattctttttccgtaacgttacgaaactttacgaatttcataacaatacttattttttcttccgcaaggttacgaacccttacgaattatgtattttctcttttttagctttcgaagaagttacggaaacttacggattgcgcaaaaacacctcttttcgactttcgccacattacaaaatttcatggatcgcgcaggcctgctctctttatatttctgagacgtctcgggacttcatttattgtgcaacaaaggacgccaagtatctcanagcggctaaccaaagattgatgtcatcaagtaataatccccggacgaaattatggtatgac

SEQ ID NO: 63657 - DNA, 483 bp, Glycine max
  unsure (1)..(483): unsure at all n locations
cctcatcactttcttccgaagctttaacctcattgtctctcacaatctttagatttgggagccaatccaatccttgtgtccgtactctcagccacttatgatagccgccgatgatcccattactgcttcccctaagctctctgtcttttcttcacaccgcatcacatgccttgtgaactccttggagtaccctcgcattgtggtcactgaaaccccgtgcgatgaaaggcgtgatgctttcgtctgatggcactcctctcatgggacatncttcgcatgaagatagaatcctgattcttccttccttctagcgagggaaccaattaacagacgcccctccatgctagccaagaagtggtcccaattcgcctttcctttntcgacgcacgagcggtgaccttgtagcggatagacgggcctaccttcttggagaanaaggtgtgaaaccagccacacatagagagccagtgcacaacaaacaat

SEQ ID NO: 63658 - DNA, 469 bp, Glycine max
  unsure (1)..(469): unsure at all n locations
agctntgatcttccaccactgccgccaccatcatcttatattatatnttaatattagtactttgattttcagccttgtattttggctatattattatggtatntgaacaatttactatttccctanttgcatggtatgtttgaacaaatattaagtatgttatttgactatatgcgttttatatataatttatttatgattgctgcttcatggtttggttgttaggttctcaatgtatgttatatgaatgtttggttatgattgattatttcaaatttattatgcactttggctntttgttgatgccaaagggggagagaaatgagattaaatcaagaattcacatgagtaatcaacttacttttaaaagataagcataaattcaaaaacaaagggggagaatatatgtgagtgatcgactaagaacaagtgtgtgtgtgtctcttgatttcagaatttgtcatcatca

SEQ ID NO: 63659 - DNA, 436 bp, Glycine max
  unsure (1)..(436): unsure at all n locations
atttatcttttacctgcccaactcatntaagtgacattngtattggttggtatattgaatgttgcatcttattccatatcatatgttttgtgcatcatgcatcatcatgagtaagtgagaaggaaactttttgttagaaaagtttctttggaagacaaaactcaattntaattaattacaatcttatcataatcgattacacaagttgtttgaagcttgcagagttatgtcttatatcggtttaatcaattacaagcctattataatcaattatatgggtggttttgagacaatgactganttattcaggagtctctgctttaatcgattaccatgtgagtataaccgatacttctctctctataagtgattcacaagtgaacaagaacattttaattaattaatgtgagtatctaatcgattacattggtcttga

SEQ ID NO: 63660 - DNA, 198 bp, Glycine max
  unsure (1)..(198): unsure at all n locations
agcacctgngctgcagctcacaaataacagtaatcaatgtctctcctatctttctattggtgtnttgctggcaactcatacctagcaccttctgatgcanattaatattctctccttttactttggtncctcaacatgtggtacatgtattctcttaattgggtttcaaagtgcattacattagttatgcacctaata

SEQ ID NO: 63661 - DNA, 401 bp, Glycine max
  unsure (1)..(401): unsure at all n locations
tctcgagtaggtgccatgcgttgcagttcacgccgacgggaacgggtgagaaccagaggattactcccgtcgtgatggaagctattagcggcttaattgaagtgccttgtcatggttgtactcggcgtaaaaaaaaaatatctttctgaagatttgaatcctaatgatgaacttattcgctgcactatgctgtgaagaggaaggttgtgggaatatggtgatgctatgattgtggtaaagtgaaagctggcggtgcctacactntgaaagaatggcccttgtgcttcctatcctactcataaattatgatgattttttccttgagataaactagctgagtctgttcttcactanttggatagtactgcaagtgctggcactgtgcgcagcaccatctggag

SEQ ID NO: 63662 - DNA, 470 bp, Glycine max
  unsure (1)..(470): unsure at all n locations
agctngactcacaccaaacatggcaagttcaacactcttttctcaaatctcttcacaattaactatcacanagcataaaccaagtaaaactacccatcatatcttccaaagccccatacccacaaaaatttaggtcagaagaagtctacccaaacctgagatttcgaggtcccacacgtagagatgcgcttcacgactccgaanatgccttcctttcgcgatttggagcagaaatggtgaccaaaggttggagctttaatggacgcttccatggagaggaagaagaaagaaacagacacgtgagggagagggagaaagcttctgaattttctgttgagtgaggagagagagaaacaacttttctggttaaaagaggctttctcattctattattttatttaagctatgccacatgtctccatttgagtggaacaaacggcccactttttctttgatgtgactcatgctca

SEQ ID NO: 63663 - DNA, 484 bp, Glycine max
  unsure (1)..(484): unsure at all n locations
tcaaactcagcttataagcgcgggtctgggagacanaggtcaagcgttcgcgatatgcgaggataatattccgagtactttggatttggtacgaccatgccctcctgatntccagctgggagaatggcgagtggaggaacgccccggcatttacgcaacgagcataatgtaaacctttacggttttaaaagctctatagttgggcctaggctttagagtttttccatttgctaaggctttgtgtcttttggttctgaaattataatacaaggatctttcttcatctgttcctgggctctacccattctcattcatttgcatgtgtgcttctttctctgaaacggcagatccgatgacgagtcccccgaaggtactaatacctgggacccgcctatcgacttcgagcgagagatgaatcatacggaagatgaaggaagtgatgatgtgggacttccctcacaactagaaagaatggtcgtccatg

SEQ ID NO: 63664 - DNA, 533 bp, Glycine max
  unsure (1)..(533): unsure at all n locations
acacactcaagctggcagagcttcaacttgcatgctntattgcctcctatggcttatttagtagtgtcttctaaagtatcaatgttacttatatttttccagtgactaataatgttgacaccatgataaattggcagtcccaatatgttgacaccatacgaagcattctacagtcccaatatgagtaaattgagatagcgcccaggttgaactatgaaagatgttcatgttttccacatgaggcacccttttatgggggaaaccatgaggctcattccaatattccatataggactaatccttctgtgaacccatgattatagatgaacaacatcaactttgatactggctttggcaaacatctagataacagcccaatacgtttatatgagggctttcataagtactactatacattatcatttagaagtggctatatatatctttagtcttacaatgtagagtattttgcttcagtaaaattatattttgctttagtccttgcaactatgtatattgtttttgccttatat

SEQ ID NO: 63665 - DNA, 479 bp, Glycine max
agcttcacttcactatcaaaatcatcctttatcttgctggatatccccaatactagtttcttgatggcaattattcttccattctttacagtaccctgtttgatagcatgtatgctttataaatggaaatgttagggtttcattatcccaaaactagtataattcgttcttctatatttatataactacagatatttatctcttaggttttggaaatcttaaggtcttgtttcttcttgaaattattgttcttttaatatctgtgtttaattacaaaatcttactttattctacttcatttcatatctttaaaaataagtaaaggaaactacgaaaataaatttttttatttctaatgtcattaggaaataaaataaatcaagataatattgttgccaattatttataacttaacaaatctcaacagagtgtgataattgttagcttaaaaaaactcacatctaataagtatcattctt

SEQ ID NO: 63666 - DNA, 394 bp, Glycine max
  unsure (1)..(394): unsure at all n locations
acatggatgaccaagagtcttcgggatacaacagcttcactgtcagtagtggtcaacagcgctggggtggttcttcttcatcatgggaaccaagttttgttgaatcaaaagattgctggacttctagatcgaactactcctaagaggaatgccagacattgtgcttggaagggagggtggcatctgaagcggtgcttgacgcatgtgaagccaatataaaattgaacagccaaacgagagagtgtgatcatcatcaccatgggagtggaatacggcatggcaggctcggcgccaataaagntcttcactacagacctgttgttacagcagctgcatccacatagatgtagctttgtagaatggattcttcttcttgtatcttaaatactccatg

SEQ ID NO: 63667 - DNA, 420 bp, Glycine max
  unsure (1)..(420): unsure at all n locations
agcttatanaccntatacccagaagtgggattctttatcttttactntgctatcgaatgattgggtgccttgtgttccgtaaataaaacatgcactttgagaagagtttcattctctgtagatgttaagatattaaaaatctagttgcttatatgttccgaactcataggaatgtccttatgcatatatttaggtttggtatcaccatcctcattattactattatgataattagtaatagtattagtattatgatgatgacgatgacgctctgttcttctatagtttcttaggttggttcctaatgagaacaataaattgatgcttcataagtggatggcaactggaagtgcttatcaactaaaggaactattattttcttaatgtccgcagttaatcatgtttatctttatacatttg

SEQ ID NO: 63668 - DNA, 347 bp, Glycine max
  unsure (1)..(347): unsure at all n locations
gattgataccgacaaaacataagaggccatattcactgtatcagcatgagataagatctaatcagaatgtatgcatagtattacgttatcttattttacatacgtgtgctatgtaattcatcaatgaattttgtgtatcggaagactaagactttcgttaataatcattttaaacttatatatttacaatcgattgtnaaatatcttaatagtataaataaacttaagattaaagattcttatgaatattaaaattgtgatattaatatctatatgcaaatattccattgtctgtgcattgtattttacacaaagctacttatctatttaaaatcatatataaaata

SEQ ID NO: 63669 - DNA, 173 bp, Glycine max
  unsure (1)..(173): unsure at all n locations
anngctgangattatggtgtacccatcacatgtgttactatgtggcggncgggcgatggtgcacaacaagtttttcacatccacaaagcgcgcataaacccaccatcccctgttgtccagcttcaactggagctacgtacttccaccgagcccatattctcttttctcttaac

SEQ ID NO: 63670 - DNA, 436 bp, Glycine max
  unsure (1)..(436): unsure at all n locations
cacctcatttgaatcctctatgtatataatacagtcccacaatcccaatctntcaaaaccatattcatatgtcattgtggcatttctccgagcacttgttgggcgcatgcttaggcataaatagcaagagaatgggggcaatgtggcatgccccattgcttcagaatacaacataatcctaaggccatcccctacaacccctcaactctaacaaatcaagcatgaaaacaacccataactttcccacaaatttgagcacattctcacaatttagagtaccaaaagatgaacaaaatggaccaatgaatagctaaaaaattcaaggattaaatacttgttggagtgagtaggaataacaaaaatgaaagcaaaattcaaccaaaggtggcttgggggagcaaaaaccgcaagtctcgtgaactctctctttttaaat

SEQ ID NO: 63671 - DNA, 456 bp, Glycine max
agcttaaacattcaatttcgaatgtctcgatatattacgggactcaatcaaacatacgagaaaaatgttattgtcgtttgaatttgctctgagcttcaacattcaattacgagcgtctcgttatatcacgggacttaatcagacatccgagtaaaaagttattgtcagttgaatgtgctcagagcttaaacattcaatttcgaatgtctcgatatattacgggactcaatcgaacatacgagaaaaatgttattgtcgtttgagttgctctgagcttcacattcaatttcgagcggcttgattattatggggaccaatcagcatccgagtaaaagtattgtcgttgaattgctcaagcttaacattcatttcaatgctcgttattacggctaataaactacagaaaatgtattgcgttgaattgtctgactcacatcatttcacgctcgttatacg

SEQ ID NO: 63672 - DNA, 427 bp, Glycine max
  unsure (1)..(427): unsure at all n locations
ttgagccagaatcctgactcaccataaaccttgactccaggtgttaatgccaatccttaccctcggaagccataaaaaagaagagaaggaaaatttccaatcaaatgaaaaaggagaaggaaaatttccaatcaaaggaaaggaaattcccaatcaaagagtgggagaaagcaaacagaaaagaaagaaaattcccaatcaaagaatgggagaaagaaaataagagaagtttattagaagaaagctcctggtcaaagaaaccacaagaaatgtgccgagaggtccttgnactatacgatatctgaacaatacagaattgtcaccaaatgaacaaaagaaagaanaggaaaccatgacctaaaagtggtcttctccctttgattaccaaccaaaatcctgtgcgctagcgactttttctccccgcact

SEQ ID NO: 63673 - DNA, 384 bp, Glycine max
ttaagcaccgcagctgcagctgttctatgctcgatcccatatgctctttctgtctgcatcatgtgaagagaaagaagaaattcctgcccaatatggtcgtgaggtagccttctaatagtgatgcactgagtaaatgtataatcatatcaatatatctctaaacaaattctctttcaagaagaggtcatccatgattagcatgcttttgttacaacattgcaactctttgtatttatcagatagagttaacactagtgaacatgaatcaggttctggctgggttgcttaatatggcagataatgctgattggaggaatcgcacacatagcaaagatgaagaaatgaaaattgttgaatgtttcaagagccgatttcaagaatatt

SEQ ID NO: 63674 - DNA, 352 bp, Glycine max
  unsure (1)..(352): unsure at all n locations
taaattgcctatacaagccgtattcacccagtctntcatgtcttctcagctcaaacgntctttgaaggatgggtccacagtcaattcccttccttcgggactggaaatgactgattctgattttcctgtaccanaagccgtgctagctactcgcgagaataagcgccagggtgttccaatacttgagtggctcattctatggaaatcacagccattataagaggccacttgggaatctgctgtttcaattcatgagaaatttccttctttctgccttgaggacaaggcagcttctaacacgggtggtatcgatgggaaaactatgtgggataaaccttacaaagtgtattat

SEQ ID NO: 63675 - DNA, 219 bp, Glycine max
ataattatacaggaagatattgacacctgtctaaagcacgagtcatggccaaaatggctcctttctcatcactaggagggtgagtaatatgatatgcatcacctagtcaaaatccacatgaaataagttcaccacatataaactaaggctagaagaaaatcctacatattctgcatttagacaaactacctgacatcccatagccacggacctctgcat

SEQ ID NO: 63676 - DNA, 320 bp, Glycine max
  unsure (1)..(320): unsure at all n locations
tatttatatatttattcctttattaatatatatgagaggggtagagggtgtcacaatagtcttttatcgtatggaagtattaaanaaattacataatgcctgcatgcttcttaaactctttaaataaatattgtccaacaatgcactactacaaagggatattgtggtattctatttctatatgtggattcttatatttaggcactttcttctaatgttctttattttttgtgtaattttcatgatggatatatttaatttaaacttgaataatttttgttaggcatggagaatgtgaccttcattttcaactaatggag

SEQ ID NO: 63677 - DNA, 376 bp, Glycine max
  unsure (1)..(376): unsure at all n locations
acctgcggcatgcaagcttcaacattcaacttcgagcgtctcgntatattatattactctattagacatccgagtaaaaacttaatgtcgtttgaatntgctcagagcttcaacattcaatttcgagcgtctctatatattatgggactatatcagacatccgagtaaaaagttattgtcgtttgaatttgctcagagcttcaacattcaatttcgagcgtctccatatattacgggactcaatcagacatccgagtaaaacgttattgtcgtttgaattagctcagagcttcaacattcatctncgagtgtctcgttatattacgggactcaatcagacatccgagtaaaatgttattggcagttgaatttgctc

SEQ ID NO: 63678 - DNA, 489 bp, Glycine max
  unsure (1)..(489): unsure at all n locations
cgacaataacttttactcggatgtctgattgagtcccgtaatatatttatacgctcaacaatgaatgttgaaggtctgagccaattcaaacgaacaataacttttactcggatgtcctattcagtgacgtattatattgngacgcttgaaattgaatgttgagcctctgagcaaattcaaacgacaataactntttactcggatgtctaattgattcccgaaatatatcgagacactcgtaattgaatgttgaacctctgagccaattcacacgacaatgaacttttactaggatgtttgaatgagtcccgtaatatatccagacgctcgaagttgaatgtttaagctttgagccaattcaaacgacatttactctntactcggatgtctgattgagttccgtaatatattgagaccctcgaantntattgtgaagctcttagccaattcaaacgacactaactcttactcggatgtccgattcagtga

SEQ ID NO: 63679 - DNA, 493 bp, Glycine max
  unsure (1)..(493): unsure at all n locations
agctngctagttctgttgccccaatttaatattgttaagtgccagttaaatcctggaagacttgcacaccacaagcggatatgtccttaaggacagtgtgtctaacacatctcaagcttaattttttagtagccatacatatttatagatcgtgtttgtgattgataggtttggggttcagaaatagttcataattgatcgtgataatggacagcaagaacaacagagatatacttgttccatttcatgtgcatctcatatacatntgcaatttcaactaatgtacaaatgtatactatctgagtcaacagttagtcatacagctatgtcatatagattataatatcactgtactttgaacacaatggaataatggaattctaacaaattctcagatctgcctcactgttcaactctcagctatctcttttatccgttgngcaattttatcaatgcttaacatgaaatatcaagcagcatgtgttatatgaat

SEQ ID NO: 63680 - DNA, 373 bp, Glycine max
  unsure (1)..(373): unsure at all n locations
tgccttctcanggaaagaggaagtgaagaaacataagcacgactagtgatgctcacaaagaagaagaacatgcaaaagggtacaaaactgaaagaagatagggtagtcatttgtgagaaaaatggtttagaggagtagcatatgaaaggaaactaatacactatgagagtgaaatagcaatgacaacatttcatagaccttaataagttaaactgattatacactaacaggattgataggtgatttctctatgaagagtatagaaagctacataacactaacagcatccaatgttctctttctttctcttcccttaacacttttcctccttcacattcacgcacacacttacacacactagcttggtgtcatc

SEQ ID NO: 63681 - DNA, 232 bp, Glycine max
cccatcacatgtggtactttgtggcggtcgggcgatggtgcacaacaagttttccacattcacagagcgcgcataaacccaccattccctgttgcccaccttcaactgagctcacgtactgccacggagcccatatactcttttatcttacaccgggttcccatcaattcttccaagcgtttccaacattcagagtagaacgacatttaaatcagcgcatgctatcacagcc

SEQ ID NO: 63682 - DNA, 462 bp, Glycine max
  unsure (1)..(462): unsure at all n locations
agatggaccatctcaagtgctagaaagaatcaatgacaatgcttacaaagttgagctgcccgatgagtataatgttagttccaccttcaatgtctctgatttatctctctttgatgcagatggagaattcgatttgatgacaaatccttctctagagggagagaatgatgaggacatgaccaatagcaagggcaaggatccacttgaaggacttggaggacctatgacaagggctagagcaaggaaagccaacgaagctcttttacaagtgttgccatactatttgaatacaagcccaagtttcaaggagaaaagtccaaggttgtgagttgtatcatggcccatatggaggaggactaaatgacaccactttatttcaattntagagtgtctaggttgtctaaataatggcccaatccttgtatagttggctgaccataaatatgttttgtgttaatcaac

SEQ ID NO: 63683 - DNA, 438 bp, Glycine max
  unsure (1)..(438): unsure at all n locations
agctnganagtgtgtaaccaaccatnttctcattgtataacaccggtaacgtgtatactatcattgtgatcatctttntctctgtcattgaaggtgccacttgagctgtcaagtccctccacctctgggcgtattccttgaatgactcatgctcttttttacacatgtnttgtagttgcgttctatccggagccgtatcataattgtactgatattgcctaacgaaggcaaccattatgtccttccaagaatagactcgggaaggttccaagttagtgtcataccctaatttcgtccggggattattacttgacgacatgcaacctttgattggccgttcaagatacttggcaccctttgttgcacaatatgtaagtcttgagacgcaccggaagtcaaaaggaagcannggtatgcgatccgtgaaattccgtaatg

SEQ ID NO: 63684 - DNA, 486 bp, Glycine max
  unsure (1)..(486): unsure at all n locations
gtatgcccgagtcattcatccctatgagatgttgtcgaagtattggcgatcatgaatgccattccttggattatagggttgaaccaagctcatgcttntacaaaaaggttcatcaagtcaagttgaaatatggaagtaaccgtcttgcaaaattggggcaaaagatgaattgagtcacatcactgcttcgtctactgccaaacatatttaggattattgatgtccttgttacttccagtttcaccttgacaaagatgtcatggaccatgttgaaaatctaaattgattcaaccccatatcttgcgtaaaaattcgcaatacttcaactgtgcatcattcgcatgcatccatgcttttcattggttgcattgctcgttgcattctttccttgaaaaataaaataaaatgaacttaatcattgttataaaaaagaaagggacacgctntacgacgcccttaccgaactcgtgctagagctagaataat

SEQ ID NO: 63685 - DNA, 485 bp, Glycine max
  unsure (1)..(485): unsure at all n locations
tgcagctggttgaggactacccgtgagacttttatatctaagaacgaacgatgaatcttgaagaacggtcgagaatcttcgcgtaatttctcacggaaacattacagaagcgcctcggcttggattttcttcacggaaataattctcctcagcaatttcgagagagagagaagtgcctaagaggctgaacccttttcttcttcacttctccccctatttatagcaaaatgggggagaagcttgccacccaggtcggccaggcgagcaaggttgcttcctccagaaggacagccctctcgaggaaggatctggaaggcccangtgggccataatgctatttgcaccccccctttttacttagtgcaccccctctctattttttgggaaattctttttcccgaatggtatgaaactttacgaatntcgtaacgatacttattttccttccgcaaggttacgaatncttatggattatgtatttactc

SEQ ID NO: 63686 - DNA, 521 bp, Glycine max
  unsure (1)..(521): unsure at all n locations
ctcagctatngatgcatgctcgtggtgtgatcaccgattggtgtgtgctgttaggaactntatcattgacaaatgtactatttccttggaacttgatagagcagggctagataactatagtgctagatatagtgtgcagggctctagtttttattatgttgtgcttataatgctggttaaattaggctaagttcaacaagagacatctatgaacgaagtttagtttaaattagtttaaactcacgagacatcggtgttggtattttggtctcggcatagaacacaggaataatttcaaatagagaaaaatcctaattgcatcaagtatctcagtggaaggaaccaacgcttttacttatctggtttcacactcagattttcacgtttaatatttctctgattacaatagaatatacctctggtttcaattcatgatacttaattctttttacacacagctgtatnttgaatgacactcttccaacgtaaacaaggtccctgagtttgatactcagatcatt

SEQ ID NO: 63687 - DNA, 478 bp, Glycine max
  unsure (1)..(478): unsure at all n locations
ggctgcagcttacaaattttntatatccaagcctatatatataaataaatcaaatctagataagatcagataagataagatctagatgaaataatatctagatgagatcaaatctaaataatatctagataagataagataagatctaattgtgtagaataaaatagtctgtcctcttcaaatccaagcccaattctggattcaagcccaatgcttcattaattcctgaaattagattaaaaacatcaaattagctgaatgagcccaaataataaaactgcctaattaatttgacaattaaaattaatcagtacttaaaatggtgcaaaaagggttaagaaataggagaaaataattgcacatcaaaacccnccatacttagccttttgcactcctaggcaaaatgaaataaagaacaaaatcctaggatatctaagagagacgagacaaaacatttacatatttctcaatgaacatc

SEQ ID NO: 63688 - DNA, 479 bp, Glycine max
gcttcttcttccttggcttattccctagaggatggggcctaccctctgctcttctcctttgccttccgctgcatctctatggtgaaaaattaccattgaaggacctcattgaagctcacagatccagcttccatagaagctccacaagcaagcttccatcagttgtggtcaactcatatggaccgtgacaaagtcacgatgtcttaagcttcaatgctaggattctgctaacggtcatggtggatatcaccacacctgtagtgagcttaattaaggaaactatctttaggagtttaattagagtaattatctctagagggttaattagaaatatctattgtagtatgcctaattaaagtaattatctttaggaatctaataagaatatttatctatagcgcacctaatgaaagtaattatcgttagggatctaatcagaatattatctatagggtgtctaattaaagcaattatcttta

SEQ ID NO: 63689 - DNA, 420 bp, Glycine max
  unsure (1)..(420): unsure at all n locations
nnagcttgtgtaatcgattacactaattggtaatctattaccagtgactatntctgaaaaaatcaaaaggtgtaactcttcaaaaaggttntgactntttcaaatgggttttaagtttttctaaaagttataactcttctgaatggtcttcttgaccagacatggagagtctataaaagcaaggctnttgtttgcatttcaacaatcttgaatactttacttttccaatcaatcctttacaagccttgactctttgaacttcttcttcttctttgtaccaaaagctttatgaagttntctggtttttctaaaccttgaaaacttgtgctattcatccttntcattctcttctccctttgccaaaaagaattcgccaaggactaatcgcctgaattctttntgtgtctctcttctcccttt

SEQ ID NO: 63690 - DNA, 473 bp, Glycine max
  unsure (1)..(473): unsure at all n locations
tactcagcttatgtacatatntaattcttttagtcggggatgtcgaatattatcaaaacatatttccttttctaggacttctgatactttnttcctttcaatcatcttaaaatgatataatagagttaaaaatggtgttcctaatattaattgtgcggtcatgtntttaactaatacaagtgaggtggtgtaacatattntgattntacaaatttttgcaaattnttgcattagacaatttgtactcaatactcatttgacatccatttgcacagctaaccccttttngtgttttttcataatattttgtaatatatatatgtgtgtgtgtgtgttatatnttgataagtttatattaagtcaattntaatattaatgaatgaggtaacaaattattttacattaatatgaaactatttatatatgatctatgtgaaaataattttcaattcaacagtgtattgtaagaacat

SEQ ID NO: 63691 - DNA, 299 bp, Glycine max
  unsure (1)..(299): unsure at all n locations
gatactatggttagatttagcgtctacatctggtgaataataacatgatataaattgaatcatntgcaaaagatgggatcctgaggtgtctttcagctatatgtactagtgttgacattggttgtatatacttattttggtagccatatatggtaataccgttttggatatcatcaatgtgagtactgtctaatctttcagttcaaattgaaggagtattgattaactcttatttntgatgtgacttatgttgccactgatccatccggacacaagaataatgcacttaagcagcatat

SEQ ID NO: 63692 - DNA, 440 bp, Glycine max
  unsure (1)..(440): unsure at all n locations
actcactggcaagccaaactaatggattgaactnttcaaatcaacgactcaacaggtaatctcgccggaccaaacccagaccctcttcgtgcacaaacccccgaggttccccatcatagctcagagaagaaaagcaacggcaccacgagaaccctanttgccgccatcgcaggtgcagtttccggagttgtttgctctcccttatagtcgttttcttcctcgtcaaacgcaagaagaacgtcgccgttgacgacaaaaaagaaggaacttctcgcggaagtggctcatcatcgctaccaaccaacctctgccgttatttctcaattgcagaagtaagagctgccaccaacaacttcgacaaactcttcatggttggagcgggaggcttctgcaacgtgtacaaaggctacatcgacgacagtgcaacatgtgtcgcaatc

SEQ ID NO: 63693 - DNA, 406 bp, Glycine max
  unsure (1)..(406): unsure at all n locations
ttaagncacctgcggcatgcagcttatctttgatgtaagagttctattttcttatgtgcttgtnggtgaaaatttctgtgaacacgaggtcaccatttttttaatgtaaaccttctttaattctattttatggttaagaaataacatgtattctatttttcccttatcttctttcttctctttatacacatgtttctatgattggatctggaaccctttgttttaatgttcatgaaccaccttcactgtngggaacaaatcaatagatttttgtaattgatgctaacaatttattgaccaccttgtgccagccaaacactacacatatagggttatttcttttgacacggtggattaacactttctattgggctagtatattattgcatgtgatacttatgtgttc

SEQ ID NO: 63694 - DNA, 506 bp, Glycine max
  unsure (1)..(506): unsure at all n locations
gggagaggatgcttcaatggaggtatatanatatggagagatttagagaagcgggagcacgatatcgaatgaagatatagggagagaagctgaactttgaggtgtgtctcacaagactctcattcatcaaagttacaacaagtgttacatatgcttctatttatagactaggtagcgtccttgagaagctctcttgagaaaactatcttgagaagcttccttgagaaaactctcttgagaagctagagcttagctacacacacccctctcataactaagctcacctccttgagaagcttgcttaagaagattcctaaagaagctagagcttaactacacatacccttctaatagctaagctcacctccttgagatgagaagctagaacttatctacacactccctataatagctaatctcaccccatgacaaaaacatgaagatcataaaataagccttactactaagctactcacatgcctcgaatacaaggtataacctatcta

SEQ ID NO: 63695 - DNA, 480 bp, Glycine max
  unsure (1)..(480): unsure at all n locations
nggtccccaacgctctgttcaagctctcccaatatctagaggtatacctangatctctatcagatactatgctagatggcacaccatgtaacctgacaatctcacttatatacaaagtggtcaacttttccaaggaaaatatgatattaatgggaatgaagtgagcagacttagtcaatctatcaacaataacccacataaaatctaatcctctagaggttctaggtagtcctaccccaaaatccatggaaatattgtcccacttccactgnggtatctctaaaggttgtaacttccctgaaggtctctgatgttctatcttagccttctgacagactatgcatgcatacacaaactcactaacctctctcttcaagttgggccaccaaaacatcgtctntaaatcctgatacatcttggtagcaccaggatggatgctcaaattactcttatgtccttcctctaagatcatcttcctat

SEQ ID NO: 63696 - DNA, 414 bp, Glycine max
  unsure (1)..(414): unsure at all n locations
agcttccatcaagtggtaatcagagcacaagagcttcatgtaggtgctccttaanacctccattaatttttttgctttaccttctcttccattgntgtttctatcatttttctccatgtatctcctcacatgtcttgtgctaaaagttgttaacatgagtctttagagtttccaccaattaaacttgctatagaagctagatttgattntctatggttcaaatntcttggtctttgtcttgaatcatgaattgtgttgagtttacgttcctttgagtnttgtcttgttattntttgtggctgaaacctataccataaaattcttacaaaaatattaaagtataagaaaacctcacaaatctagagtgacttgttcacctatttgtagtttgtcatagaagtcatgtctagtcat

SEQ ID NO: 63697 - DNA, 400 bp, Glycine max
  unsure (1)..(400): unsure at all n locations
tntcctcatcttccacattgcttttcttctttctttctcctncaccattggtatcctttgaagctcccaaatccctcctcatttctactccaaattgcaaggagaagccattttcggagtcgtgaagcacacctctacattgtgggacttctaatttcagttatgggtggacttcttttcacatgaaattcgtgggtattgggtttttgggagctatgatgggtagttctactatgttaatgccttatgtgagttatttgtgaaagaacttattgaaatcatgctaaacttgacatgtttgatgtgagtaaagctacccactcntgtttaaggttttatgatgatgctttgtgatatctgtatgctgaaattgtggtacaaaactggaaagatggtggga

SEQ ID NO: 63698 - DNA, 359 bp, Glycine max
ccctttcttaatagggagaggaggataagtatcctctgaatcagatactgaatagtgaaaaatgtttcggaaaaaatccaccgaggcttcgaacattcgggtgttgcaaatttaacgtcttcacgtgtcgtcgtctcgcgtcttcgcttaaccggaagttccgaatcgaactttcattattctatgtcccttagggcctatttgttcacggctttatttattttgttacttcgacctcttgacggcttatcattgttaagatttctgctataaaatatataattcccgtcttgatgacatcgtattttgtaaagaatcacattgctgcgacccgtgaccaaagagaaattattatataa

SEQ ID NO: 63699 - DNA, 390 bp, Glycine max
  unsure (1)..(390): unsure at all n locations
agcttgagcanattcaaacgacaataactntataatcggatggtccaatgagtcccctaatatatcaaactgctccaaattgaaaatggaagctcgtagcaaatntaaacgagaataactttttactcaaatgtgcgattgagtcacgtaatatatcgagccgcctctaattgaaaacggaagctcatagcaaaggtaaaccgtattacctttaacctcggatgtccgattgagtcctgtgatatatgagacgcctcaaaatggaaaacagaagctctgcgcaaatcctaacaccattaactttttactcggtgtgccgatggatactgtgatatgtgtggacactctcaaattggaacacaaacgctcctagaaaattcaaacgaaaaa

SEQ ID NO: 63700 - DNA, 201 bp, Glycine max
atgccccacattatttccatgacacaaatgcaaaaatgatgaattggaaactttatgcaaaactggtcatgcatgcacctatgtggacactcaagtgtcaaatttttatggtcatgtgatgctagggctcacgatacatttcctctattttattcaacccaacgcttccaaaatatagtcttttatcaatatgtgcattca

SEQ ID NO: 63701 - DNA, 477 bp, Glycine max
  unsure (1)..(477): unsure at all n locations
agcttgctggtggggcttctatggaggctggatcttgatattcaatgaggtcctttaatggtgatcttccaccatggagatgcagcggaagacaaatgagaagaggtgagaggaggcgccatccactatggaataagccatggaagacagagcttcaccaccaagatgaaccttggataataagctcggagaggatgcttcaatggaggaaaagatagacggagagaaagagagaggggggagcacgaaattgaatgaagaaatagggagagaagttgaactttgagttgtgtctcacaagactctcattcatcaaagttacaacaagtgttacacatgcttctatttatagactangtagcttccttgagaagctttcttgagaaaacttccttgagaagcttcttcgagaaaactttcttgagaagctagagcgtagctacacacaccccctccatatataaactcaccttcttg

SEQ ID NO: 63702 - DNA, 492 bp, Glycine max
  unsure (1)..(492): unsure at all n locations
catgggttaagtatgagcccacttatctctgaacatattatattaatggtttcattattttgggccttgtatatagggctccataatgcgggtatggtaccctaaaaatgtaagaattttcagcacttgtattttagggcacctagactagtttttgtattatgggtagttttgtaatttcacatgcattaagtgaatatttgatgtgtgtgttggaaaataaatttaattgaattgtgagaagaccaatccaattaaattttatagggggaggtgagcatttgnttgctacaccccattgccacatcatatagtcacactttgtgcatggtctttatgctttacatgcctcatgccacctaagcatacttagtggagaatcttggacttgatattgaattagtgggctgaaccatagctaaaattcacanatcataattaatggagatttggctccacaaattcaatttcaaattcaagtgagatttgaat

SEQ ID NO: 63703 - DNA, 486 bp, Glycine max
  unsure (1)..(486): unsure at all n locations
gatctctaagcaccgcngctgcagcttatctttgatgtaaaggttactatctttctatatgttgcttggttggttgaaaatattctgttgaacacaaaggtacaccatttntttttaatgaaaaaccttctttaaattctagttttatggtttaagaaataaacatgtattctattttttccctttatcttctttctttttctttatcacacatgttttctatgatatggatctggaaccactcttgttttaatgttcatgaaaccaccttcacttgttgggaacaaatcanattggatttttgtaaattgcatgctcaacaattntagttgagccacctctgttggccaagccaaaagcactacacatataagggtttattttcttattgttacacgtgttggtatttaaacaccttttctagttgtggtctcagttatcaatgattngcattgntgatttcttatngtgttttctcttatctat

SEQ ID NO: 63704 - DNA, 431 bp, Glycine max
cggagaggatgcttcaatgggggattagaaagtgggagagaaatacagaggcgggagcacgatattgaatgaagaaatacggagagaagttgaactttgagttgtgtctcacaagactctcattcatcagagttacaacaagtggtacatatgcttctatttatagactaggtagcttccttgagaagctttcttgagaagacttccttgagaagctatcttgagaaaactttcttgagaagctagagctcagctacacacacgcctctcataactaagctcacctccttgagaagcttccttaagaagattcctaaagaagctagagcttaactacacatacctttctaatagctaagctcacctccttgagatgagaagctagaacttagctacacaccccctataatagctaagctcactcccatgac

SEQ ID NO: 63705 - DNA, 462 bp, Glycine max
  unsure (1)..(462): unsure at all n locations
agctngtctccctaaggcaggaccatcaaccatctatcaattcttcattccaggtcagcttcctttctccctttctttcttatacatagtcttatggtgtacccctggccatctttgattttccttttatctgcacccctggcttctgtatttggacctctggtttgtgttctctcttgttcctcagcttttgtatcagtattccgtatggtggtataaaaattagaacaaacggagcataatggtgtttgttcttattatgttgtagttttgaattgtataatggtttttattaagagtgtctattatgctaatgaaaaaggatacgttcactgcacattcaaaattcatttatgttaatcactaaatatgcattataatattcataattaaattcctatgctgccatatagtgctcatccaaagtgatggatgatgctttatttctagcttggtcttggt

SEQ ID NO: 63706 - DNA, 467 bp, Glycine max
  unsure (1)..(467): unsure at all n locations
tctaaatctatggtcctgtaaaaccttgcacactgccttataaaaggaaataccgtgtatttgatggcaatgcattatttttgttttcagctagatgctagagttttgataattctttctatttgtgtcacaggttgggggcagctacttcttggtgagtttggtcgacaatgattacatcaatggtgatcttttcaccgtcnttgcagatttctgacatgagcttattatttattagttctttagttatgtcacttctgttcgttgtcatgttcctttcctttcttttgtgttcttctcagtaggatggttcatattacacgtggttctaagttgaagtaccaaattatttttctgggctttgtcccaaacatctttattttttcattcttctgagtcgcatgagtaacctgtacgttgacttaaggacaagttacttctttcctttgaatcgatgtttcttaact

SEQ ID NO: 63707 - DNA, 495 bp, Glycine max
  unsure (1)..(495): unsure at all n locations
agcttagatntacagtanatattgaaataaaagtttataaatatatagtaaaataaaagatattttttggtaacaaataaaaaaaataatatattatacacatganaaacatatttaaactnttctagattccccctcaacaatcaacaaaaaaatgtcgatttaatgggtttagaaagtacaatatgcaggatacttagcatccacactccctnacctcaagtttgagggggtggaaaggatagattggcatgagaccttcttccttaaatgtgatatacctactcagttggtgttggatctgaaagttaagtactcagcctatatgccgagttcgatagtgcggtcaattatatttgttcctatacctaagccacactatgaggcctaataagctccaatagtaacccacacaactcacttgataagagagaacatatgctgatccaatatccaccaaacattgattggtgatattaattaataaatatttat

SEQ ID NO: 63708 - DNA, 461 bp, Glycine max
  unsure (1)..(461): unsure at all n locations
cacttcgtctntttttttcagactctntcgttgataggatgatgtacactgtattgctttggcaatatcttatgacttatagaactacatgagacttctaaccagggtactttagtttgtccatgttaggtgtaacagtctgagttctagggttattaatatgtttctggttattttaggggatgttgaaattctaatgtgccgctagggcacggctatttctgttttatatgcagactgtttaactaacaaagatcacaagttgagtgtttgtattttgtacttgttaataaatgccattgccaggggctttgattatgtcacaagttgactgtacaaccaatctgtgctttaagctacctantgttgtgagctgangaaggngctttgattangtcanaaatttattgtcagttcctgacaatacactttgcaaggaatgtactaattttcattgtcat

SEQ ID NO: 63709 - DNA, 459 bp, Glycine max
  unsure (1)..(459): unsure at all n locations
ctgcagcttcacaagatggcccttctcacaattccaatggtaatgttcaaagaacctctttctgattgtgtntttctattgttcaaagaccctctgagttttgatttgcattgtttgtgtttggctttgtttgtgtcgaagaatgtgattataagaagaacttcgcctccagtttcattgtgtttatgtgttctaatgctaagttctctatgattatgggtgttctaatgttaagttctttgtgtttatgtttctaaattgatttgtattgatctttgtgattctcctttctacatttggttggaattttcacatagttgtgttatgtttgtggcataaaataaataaataaacatgtcctagtctcttatatangttttggcatggcttattgtgttccattgtctacttttgtaaagatgcctcattgtgagtatgatagatcatggtgttgtcact

SEQ ID NO: 63710 - DNA, 424 bp, Glycine max
  unsure (1)..(424): unsure at all n locations
cgactccactanggactggtnntacagagttaggccaatcaatcagtgtgcaacatctcatcatgacttctttatttatgttctcccttccattctatctttggttttttgtccatatttgtacataacctttgctatgttgttgtgtttggtgtgttcgtctatcaattacattcctagttagaaataccctttttctacacacacatgacacctacacctcacacacacattgagatatcaggccctatgcccgggtctatgtgagccataaagagtggagggtgaattgtggtcatgttgngtgatcgaggccgtacccgaatcaaataaacattaaaaatgcagtatctaggaagtgatcctaggtcgtctcccaatgagcaatagtcaaccaaacattcataatagatagtaataaaac

SEQ ID NO: 63711 - DNA, 296 bp, Glycine max
  unsure (1)..(296): unsure at all n locations
agcttctgctaccacacccaacagatctatatctctataccttagaagaagaagaagaagaagagctcanacacttgtcctcttccacaataatcacgtgatcactcttttttcccaagcactcgcctctgtacttaccatttggaccaaagctcttaacttcctttgaagaagaaggatagaggaaagaccaaaaaccgtttctttttctgggactgaagtccttctnctcgagaaactggttccttctgggtgtggcagaggacttgctggcgttgaaaatgatattagctgat

SEQ ID NO: 63712 - DNA, 503 bp, Glycine max
ggcagagctgcaacttacatgctttattgcctcctatggcttatagagtagggcttcctaaagtatcaatgttacttactttcttccagtgactaataatgttgacaccatgataaattggcagttccaaaatgttgacaccatacgaagcattcaacagtcccaaaatgagttaattgagatagcgcccaggtttgaactttgaaagatgttcatgtttcccacatgaggcacccttttatgggggagaccatgaggttcattccaatagtccatagaggactattccttctgtgaacccatgattatagatgaacaacatcaactttgatactgtctttggcaacatctagataacagcccaataagtttatatgaggcttctcataagtactactataaattatcattctacagtggcttacatatatctttagtcctcaccaattagagttttgttgctttagtcaaattatttattgctttagtcttgcaatatgtat

SEQ ID NO: 63713 - DNA, 463 bp, Glycine max
  unsure (1)..(463): unsure at all n locations
agcttccctccaacacttaagcagaaagaagtgttttttttgttacacagattcatccttatagacaaaagagaattatatctggcgagaggtaagataatgtggaagctctttagtttatgctaatttcaaaaagataatagaaggaaattggtggttatgtagagtggtggttagtgccaatggttatcaaaagagagggagcttgtactaagggaaagctcaaatacaaaatgatcatcaatactttcctttataggaaactatttaattcaatctattggtcagttgagctagggtagtgccatttaccttgtcacgctaggctgaagatttaagatcttattcagttaaggtgggtatgtgggaacaattaattcaatatgatacaacttataaggactggtttgggataattccattggtgaggactgtnggagcttagtttcaacgtgtcattcac

SEQ ID NO: 63714 - DNA, 425 bp, Glycine max
  unsure (1)..(425): unsure at all n locations
gatatattatatatatgggggattttctgcttcatgatcacctgcaaacaagaaagatggctttattattctatgtaactcatcttatctaaacatttgcctttcttgttgtgatgattgacatagactcatagtttttgcctttgatataatgttctgcaatcatatccggtttaatagtttgagtttttcaataatggatatgcagaatactttcacaataagttggtagacacgatacatttcatggaaattctcagtttgaaagatagtgtggagagagacaccttcttccgcaagcttccaaatttagctgagcaacttcctcgccagatagtgttgaagaaggatatttctgtggaatntctaattataaactatagacggatccacctttgttatcccaattttttatgaatcttatg

SEQ ID NO: 63715 - DNA, 483 bp, Glycine max
  unsure (1)..(483): unsure at all n locations
agcttgaagattatggngtacccatcacatgtggtactatgtggcggtcgggcgatggtgcacaacaagttttccacatccacaaagcgcgcataaacccaccatcccctgttgcccacctccaactgagctcacgtactcccacgtagcccatatcctctnttctctcaacaccgggtccccatcaatcctcccaagctttcacaacatccaagcaaaacaaaattcaaacagcacaagctattacagccaagcaaaacagagcaaaggcagataactctgccaaaacaccaaccaaatcacagcttttctcacttaaagaccccagtaacaattccttcgttccggttcaattaaccgtggatcgactcgaaaattttactggaagtctctaatacttaagcctacattgtgacgcgtgggatctactagcaaacatccagaactcattctgtactaactctttcacagccaaccacacac

SEQ ID NO: 63716 - DNA, 443 bp, Glycine max
  unsure (1)..(443): unsure at all n locations
tgtacttaaaaatgtgttaaaaatacatttaattaatatatataattttattcctttattaatatatatgtgaggggtagagggtgtcacaatacatttttattgattggaagtataaagaacattacataatgcatgcatgcttcttaaactttgtaaaaaaatattgttcaacaatgcactactacaaagggatattgtggtattctatttctataggtggattcttatatttangcattctcttctaatgctctttattntatttgtgtaattctcatgatggatatatttaatttaaacttgaataatttttgtangtatggagattgtgaccttcatttntcaactaatggagaatgctcgtggattagactccatcaatggcagataagagtacaaatataanttcattcaacgaaaagtacttctattcctgtgtc

SEQ ID NO: 63717 - DNA, 406 bp, Glycine max
gaattacgaagcatcaacaagaatcaagccaacgctattgtgcaagcattcaatgtggcaaaacacaccaaatgattatgatgatggatggctccattctacaaaggtaaactcatcactttcaaatcgagctttcaaaactatcatgacatgtagaggagaatcaacgatttcaagtcacaatatgtcacgatcttttattttcaaaacaattaaccattcctcgaacatatcctataaatcaaagaaaaacatgcatagttgtacatgcacactaaattgacccaaaatataaactatatatccgacaaacttacaacattaacatattacacatctacaaatatcaaaacccacaaacttcaaaaccaaacactcccccatactacaaacatgtctcatgtac

SEQ ID NO: 63718 - DNA, 498 bp, Glycine max
  unsure (1)..(498): unsure at all n locations
gtcacctgcggcatgcangctttgatggtgtcgagaagaaatcacatgtntgtcattatattaaggcggagaatgtgaatgtatgtatacatgattttgatgatgtcaaagaagaatctaacaaggctgcttcaaatgataagcatttgcttcaagaataattcaagattgcttcaacaaacaaagccttgtttcaagattcactaaagaccaagccttgccttaaaacaaagtgctttcaagacatgcaaggctctggtaatcgattaccaggaagtgtaatcgattacccgaagacagggttgagaaatagctgttgaaaaatgttttgaatttgaattttcaacatgtaatcgattaccatatgtctgtaatcgattaccagcaacgaaactttggaaattcaaattcaaaagtcataacccttcaaattataactgtgtaatcgattacacaaacattcgtatcgattaccagtggaaagtttcagaacatctg

SEQ ID NO: 63719 - DNA, 337 bp, Glycine max
ttaaattccgccgacaacaatagataggtttatttttatgtaatataaatttaggctcctggaaaaatcatagaagagaacaaacattcctgaatatcctcccatatcaaattcttctgagcagcaaggacttccttccaagtctcgtatgtcacatcgaccctatcatgagcgacaatccccaaatatgttcttaatttcttttttggggaccagcagcgctgccagttgtatgattgacatggaccactggtctctctgccccaggtgggctattggccaaggatcgtagccgtgtggctttacgtgtccgttcatggtatatgaagacgtttat

SEQ ID NO: 63720 - DNA, 162 bp, Glycine max
  unsure (1)..(162): unsure at all n locations
gaggatgctatgatggaggagaagatttatgtttgtcttcttcaccaacatgatngaatacatgagggctataggaaccactgggaaatatgtcacatagaatatatattcctcagctgaaccacaagtgatacacaatgcatctatctatggactataggg

SEQ ID NO: 63721 - DNA, 475 bp, Glycine max
  unsure (1)..(475): unsure at all n locations
caccacaaaactaagcnaagaggaagctcatggaaaaataactgaaaagaggcttatgttggagcacaagctgaggaagaaaaagggagacaattaactttgaatgtgcacacaaaactctcattctcaaagttacaacaagtgttacacatgcttctatcatagccttgtagcttcttgagaagattcttgaaaactccttgaaagctaattcagaaacatcctcgaaagcttgttgagaagctaccttgagaaggtagagcttaactacacacagccctctaataactgagctcagctcctatagaagcttccttgagaagattactngaaaagctagagcttagctacacacacctctctaataactaagctcacctccttgagatgagaagctagagctnagctacacaccccttataatagctaagctcaccctggtgccaaaaatacatataatagtctctactactaa

SEQ ID NO: 63722 - DNA, 348 bp, Glycine max
  unsure (1)..(348): unsure at all n locations
caaagattacatactcctttttcaacatacacatcgtggcgttatacacaaaattcactatatatacactcatcgctcacacacacagaatctcttctcacacaatatttatacacacacacaaaatctttccaacaaccttacatacaaaaactcatggctcttttttatatatagatacgacaattgtacacaacccctctttctttttccatactaggtaataacaagaaagtagttccgcntaatttaagaccacgatcataaaggaaaactccacaaagatcccgaacaaacaatatcgataataacaaagtagcacaaccccacagttcaaacaaaagtatg

SEQ ID NO: 63723 - DNA, 347 bp, Glycine max
tgagatttgtcatgctcgctgctaccatgcgataaacaatacactaaatgtttcatgagaggcgacaagattttcctactactagcaattcacctagaggtgagagatctagacccgtattcttgaagcacaccattggctaggttggaactccgatgattcaatggtgaatgaataaaacagaggtcgaaaccacgtgatacattatttctgttgatcatacactggatgaagtcaatttcacttacagtggttatctggcggcgaagcacttagaggtatatgctacagaaaaatgtttgaagaaaattaccctcttggatgaatatacgtgtgtacttgacatt

SEQ ID NO: 63724 - DNA, 347 bp, Glycine max
  unsure (1)..(347): unsure at all n locations
tctacttcaatgtggctttcccactagtgtaacacaaatgtgaagtttcactttatgcttcatactatttggtgaattatatttactactataacttttattttagtagctgtttatccttgaaccaaaaggagngctaaaatcatctaatattatgtagaaaaaaatgcatgtctgatacaaatcttttggcaccaataaatatcgtttccattcgagctggcttatttgtctgagctctatctttatttggttgtcattgtctttataaggtgtgttactttttctttttgagtaccatgtaaattgttcggaactttatcgatggaatgtttatctgaagcata

SEQ ID NO: 63725 - DNA, 300 bp, Glycine max
tccacggaaagacaaacaccgggagcaaaaaagggaggaaacccaccagagaccaaaagaagaagaaaccccaccaagaaaaagaaggaaaggatcccaacaaaaggaaaaccaaagaaacaagaaatccccaaccaaaacggagaacaaaaacaaagaacaagggaagaaagtcccgaccaaacaaaaacaaacgcagaagggcgcgacccgccacatccaaccacaccaaatggcaccaacgcacaaaaaaggaaacgaaccacgacaaaatggcccccccctagagccagcaaaacc

SEQ ID NO: 63726 - DNA, 483 bp, Glycine max
  unsure (1)..(483): unsure at all n locations
gaaactaagcgcggggatatggggacccgtcatatgtggactaggtgttgatctgttgaggccaaatanctctgggactttcctaatcaaacatgaacccaccatccccagttgcccaccttcaactgagctcatgtactactacgtagcccttatcctcgttcctctcagcaccgggtccccatcaacccctccaagctttcacaatatccaagcaattcaattgcaaatatcatgaaactaccctataccaagataacagggtagaggtagaaaactctgcccaaaacacagtcaaataccacaactttccttactcaattaccccagtaacattctctgtgttccgattcgttaaccattggatcgacttgaaacttttactggaggttcctagtacataaatctacattttgaccgttgggatttgctagaaaatgtccagaacacaatatgtgctaccttttccataaccaacaatgc

SEQ ID NO: 63727 - DNA, 437 bp, Glycine max
agcttcatgatgttgaatcaagagcgattctgtgattgtttatgatcacaaagatgatgacaaagggcccaatacaatgagtttaagattgaatcacgaacacttcatgaatcgagaggaaatatgatttcatgattcacgaatcatgtttcaagattcacgtttcaagaatcaagattcaagaatcaagaattatccagttgaagattcaacagtctagataagactcattccagatgagtccttaaaaggctcttcaaaacattgagtatcacatgcaattttcacaagatcttttaccaaagagtgtttactctctggtaatcgattaccaatttattgtgattgagtaccagtagcaaaacttcttttcaaaagctttcaactaaatatacaccgttcccattgatttcataatgaagttatcgattacaata

SEQ ID NO: 63728 - DNA, 447 bp, Glycine max
accctgaacatatagattacctatgcaatattctcattgttagcaccacatacattgtctgacatgaaaattaaatgaatgttataaaatgtaattcgtactttataggcaaaatgggtccacactcccattgaaatgttaaattttgatgcacctaccacactggaagataaataaaaacaattaattagttaaacatctaaaaaaatataacaaatataaatatgtactttcttaacctaatttttgttcttgtgattagtgttgtcaacaagactaccaaaattcttatgttgacaagagttgcaagatgccaagtgtgccagcacgaagaacacttatcctatggacacaagtacacattgcatatacaaagcattgtgcatggactttcgtgcagacaaatagtgataaatatatattactggtgaagtaaatgtcatttat

SEQ ID NO: 63729 - DNA, 435 bp, Glycine max
  unsure (1)..(435): unsure at all n locations
cctgcgggcggcaagcttgaagcgatctactcagacgcgcgttgttgtannttgtcgaaaccactaacatttgtgtggggggtagtgctaattgaaccccacaatatttcattcacttcctaccaatcagttgtcacccaaaatgtcaatatcatacatacttcgctctctcctcaaatgtttaattggtctttactatgctaccctcttggttatcattaattatctatctcatacaattttcctcttttagtactctaccacgagagaatgaggataaaacttctcaccttagttcacatgataactaggtagcacccttcattatggtcctcttgagtggtgcattgccactcccacttaaaactctactaattcctagacctaagctctcctatactttaagctaacggtagtagtggatatatcaacata

SEQ ID NO: 63730 - DNA, 500 bp, Glycine max
  unsure (1)..(500): unsure at all n locations
atccttgagtcacctgcggcgtgcaagctntaggaganaccataaaatagtctacatctctttatcagnatttaggtggnacagagatactttcctaactagggtttacacaagagaagatagtcaacaacctttttggaaagaaaaatttctagccggtcttcccagatcattaggagataaggttagagataaaatccgtagtcaatctgccaatggagatattccatatgaaagtttaagttatggccaattaatttcttacgttcaaaaggtagccttaaaaatttgtcaggatgacaaaattcagaggcaattagccaaagaaaaggctcaaacaaagaaagatttatgttctttctgcgaacaatttggtctaccggcctgtccaaagcaaaagaaaaaacaatcttcaagaaaagatatccatgagaataaaccggtcaatacaaagagattttccaggaggagatactcacacanaccatcaaccagtagag

SEQ ID NO: 63731 - DNA, 502 bp, Glycine max
tatagaaaactcagcttaacttaacataattcacatcatgttaccaatcattgtgttatattcacttgcctaaggatctaatcacaaaatcatattctataccttcacattaatcacatgttcataacaaaacatctcaagtacaacacaacatctctcacacacaattcattacccaccatcacgtagcaagtcacaatgatcattacacagatgttatgaaacatatatactaagactcaatcctatattgaatgtggtatcttgtcagtgaaaaataacactagggcacctaggagtacataataaaatacaccacacaatgggtaagcaggtcactcttattaaaagaaatcataaggtgaatcaatagggttattctcgttagcgtgaattctctaaccatatgagatgaacagagatctaaatgagcactcaaaccgagtgtatttaccctcaaagcctagactctgaagaatccattattggctcaattttctga

SEQ ID NO: 63732 - DNA, 457 bp, Glycine max
agctttaaccacaatgattacactttgttgttgtacacctatcttgtgtgtgctcacctgtcctctataaatattaattactgcttccgcataccaaatgcaatggtcatcaaaaagaaaaaatatccatgcttttatgaacaaaaagtttccaaggttgggccattatttttatcaccataatttatgcccagtagagatctggggtcgaattgtagaaatctcctaggaacttgttatttcacacctatttttgataagttaacacctttcaattttcatatttttataaaagtacctttaaccccctctaataacaataaataaaatgttctttttgtattattgttgtataacctgataaaaatttgtcaaaatacataacgagagtatgttttatcactcaaataattttaaaagagtggcgtgtgaactaacaatatgaagtgtgaaataa

SEQ ID NO: 63733 - DNA, 382 bp, Glycine max
  unsure (1)..(382): unsure at all n locations
cccagctcggcctgtagtgctatgacaaactgatgcnacttttctttctctctgtatctttctcagggagagcttttggaaaagttaatccaaacaacacctacattttcttttcatatttacccattgtgagatagtatgcctggttttaaaatgaatcgtacgaactatttactgatgaagcaaggatatattttgcatgtatttgaaaatggcttaagttaatttatggtcaacctagaatgtttattgcaggtcgcgtcgaccattctatagtctaggaaaaatttagcttctgttcgcgtaagtatgtttaccttgatcgtgtttgatgagaaatatcttgtctctgcagcgtcgttacctagtatttaccctttgt

SEQ ID NO: 63734 - DNA, 406 bp, Glycine max
  unsure (1)..(406): unsure at all n locations
acctctgagtcacctgcggcatgcangctnnggtttgggcaatagcaccccacctgacgtctcttatgtcttctgacccccgcgacatatctccaggtaccactctgtggtcaacaataaaagcacgaagttcacccttcaacacttgctcatctcaagcttgtaggattatggggtacccatcacatgtggtactaggtggcggtcgggcgatggtgcacaacaagttattcacatccacaatgcgcgcattaacccaccatcccctgtagcccacctccaactgagctcacgtactcccacgtagtccatatcctcgtttctctcaacaccgggtccccatcaattcttccaagcttccccaacatcaaagtaatgcaacattcaaacagcacaaactatcaca

SEQ ID NO: 63735 - DNA, 493 bp, Glycine max
  unsure (1)..(493): unsure at all n locations
gtcacctgcggcatgcaagcttcaagaaaaatggcctcagcanactccttatttttgatgaaatctatcaatagacctcaattttaatggagagggtaccactactggaaaacccgaatgcaaatttttattgaggcaatagacttaagtatttgggaagccatagaaatagggccatatatgcccactacagtagaaagaattacaatagatggtagcacatcaagtgaaagcataacaatataaaaaccttgagatagatggtctgaagaggatagaagacgagtacaatacaatctaaaagccaaaaacataataacatctgccctgtgaatggatgaatatttcagggtttcaaattgtaagagtgctaaggaaatgtgggacactctacaattaacacatgaaggaactacagatgttaaaagatctatgataaacacactaacccatgagtatgaactgtttagaatgaatgcaaatgaaagcattc

SEQ ID NO: 63736 - DNA, 469 bp, Glycine max
  unsure (1)..(469): unsure at all n locations
tctaagcncgccaatagaagcaagatgtctctctatggtggaaaatactctattactctgtttnacagctttacccatgtacttgttgtcttntttcagaatccctaaaaaagtggtgcataagatagtctctattcagagaaactttctttacnaaaaccttgactaatatcaagcatcttgatacatctaagggagtatttactttcaaagaagcaaaattaattagcagatacgaacctgcaactatacagattattgaggttcttatacagatagcatagaattaggaaattgatctatccatcaatattgctgcaaaaatagctacaaaatctaagcagaacctcaganaagcaatcatggctctngaagcatgcaatgcacacaagtaaacttctgactgacaacatatttatnttaacatttctagaaaattctctatggagactaaatgtggcactatgat

SEQ ID NO: 63737 - DNA, 460 bp, Glycine max
  unsure (1)..(460): unsure at all n locations
gtcacctgcggcatgcaagctngtgccacctacattgtaacatcccaatnttttgtttctatattaaaatggattgttatttataaataaatggaatttaaaaaaatgatgagatgttatatataaattaataatgagatataattattaattaaaataatgatttgagagaaaacaaaaagggttttttttatttgtttgatagagaataaaataaagtttgttcttataactattaaattaataaactaataaataaactaatagagtaaataataggtcgtaaatgcccctagctataaatagcaacatgctaggttagttttcagactgactcctcaacctcctatgcctcacaatttcgatgtttctttcttctcccacaaccctctatattttcccgcaggccatctaacatgtcttataacaatgacgatctcggactcattcaccggtggat

SEQ ID NO: 63738 - DNA, 436 bp, Glycine max
  unsure (1)..(436): unsure at all n locations
aacaacctattgactcagatctttatagctgtacccagtatatcttgtttgagcaccgngagaagcaagattctcatgctgagaacagtcaaaacatttaagctggaacatctagaaaattataagcatttaagcatggccaggctatagattcccaatttatggatgtcacctaacatgagtgaactgaaattacagtagtgtgctgcttatagaattttgaagctgttaatggaggaagcatagcttggccagaatttttcctctaccttaatcataggattgcatatatgtggtttctcacatccccatgttaaattcttcttaaggtcaaggacaactcttaatttaaccggtgttatgaatataaagtatctcctaactttaccaatgattatattctatcaaataattgatccatcacttttaatagaat

SEQ ID NO: 63739 - DNA, 257 bp, Glycine max
catgcagcctgctcacaagcttgtactatcggaacggctttgttttttcttaatagctgagagaatgaccgcagcttctctaccatctatgggaagaacatggacaaatactccaatctgccgatcaattattggacttcttcaacattggataagttgtgcatgtttattatggacatgcgttattcatggttgggttctaatgcacgttgtggaatatgaaacccagccaaatatgcgcctacggtccactaaag

SEQ ID NO: 63740 - DNA, 434 bp, Glycine max
catgcaagcttgtgcgaatccatcactcctgctattatttatatcatgcataacatctttctttacccactcctcacgtttggttttttatggaagaacaccataactaaacgcgccacatggcattcctatcgcaccatatccaaatctataacgatgggtgatcaagaggagacacaagaacaaatgaaagccgacatgtctactttgatagaacagatgtgtttcatgatggacgccatgtagggactgatgtatctcatggagaaaaacgtgggcaccgctgccgctgttagttcggctgccgaagcagacccaactctctgggcaaccgttcaccatcctccctcaacatagttggacggagaatggacacactggggcacgatggctacccttatggattgtcaccaactactcaccaccatcctaca

SEQ ID NO: 63741 - DNA, 471 bp, Glycine max
agctgcatgaacatggagtacacagcacacttggtactatgtggcggaccggcgagggagcacaacaagtttttcacatgcacaaatcgcgcataaacccaccatcccctgttgcccacctccatttgagctcacgtactcccacgtagcccatatgctcgattctctcaacaccgggtccacagcaatcctctcaagctgtcacaacattccaagcagaacaacattcatacagcacattctatcacagcctagataacagagcataggcagaaaactctgtcaaaacaccaaccaaaatcacagcttttctcacgtaaagaccacagtaacaattccttcgaaccaattcgttaaccggtggatcgactccaaaattttactggaagtctatagtgtataagcctgcattatgaccgttgggatatactagcaaacattcagatctcattctgcactatacttgtcaca

SEQ ID NO: 63742 - DNA, 329 bp, Glycine max
atggaacgctcaaaatcagaatattcagaatcaccctccacataatgctcaaaatgcacaagatgcacactatgcctaactaatatatgataggtgctatccatctcaggatcagagggtcgaaatcacccggattgcccgtagtcaatgcactatttatacgaaatagtgtggtgttcatcatgcacctaccgagggggtacaactattgctatactcaaatgatatcaaaacgagctgaatatttgggatgaacaccctacaatcatgagaagatagcatataaaatttcgaacaaaaattgataagtctaactatgaatactacct

SEQ ID NO: 63743 - DNA, 480 bp, Glycine max
  unsure (1)..(480): unsure at all n locations
atccttagagcaccgcggctgcagctgagctcactgttactgccccacagtttcttctatatttgttccggccgtgttcttccctatgagcccttnttgtctctcgctccaacgccttggtggtagctatatttacatttctcagttcggcattctcctttcggattatcagagctgttgatttgaacctttctttgattgtatgggcttgctcgagttctgccctacgagttgttcccagatattaccgtaagtcttgcgaaaagcttgccgttggagctgacccatcaactgtcctaactcttttagattggtggtccctaggctctagaccttgacttgatagaacctcttttaatcgaacgcatttgacttgctcacatgtattactaaatagaacaatattggtgctaatcataactctcacatctatcacgggtggatggataatgcctgatgatgcttatatcagatgcatta

SEQ ID NO: 63744 - DNA, 179 bp, Glycine max
  unsure (1)..(179): unsure at all n locations
ctgctcaattgctacatgttgctgcatggaagggcaaatgnnctgtnttgcggtcagcagaggaacacaggccacatatcctagcgacagggacaaacatctgattcaaggccagctaggataccatgttaaccaatgcatccagtatgcactccaagcttctgagtttcatattatgc

SEQ ID NO: 63745 - DNA, 316 bp, Glycine max
  unsure (1)..(316): unsure at all n locations
agctttaaacgtactacgtggctcgaaattcgnactgcgttcttcgacgggacaattttcgaatccgagactctcaattcatttcttgtctatccaagctttcatctttacgcccganttgttttctttcgactttaacgcgcttataaccgttatttaagccgctttctcatctaaataatgataagatgaatgtcaaccgatcattagtggtgcatctcattaatcacattagaatgaagataaccgacgttcgcgctataacctcggctaaccatgagggtaaatctagtacgatactcaaaatcttgaaaag

SEQ ID NO: 63746 - DNA, 251 bp, Glycine max
ggaaattacaatgcggaatgtatataggaacttccaatgctcgcaagaagtgaggaggaatatccccctatcaaaagtgggacatagccaaagatatgagggagaatccctgcgatcattggttgatagtgtaaaacgctaacaatatggaaccatatgtctcctccggatcaaagcaatgcttagagacgtgcaaatagcatttgacgcccatgtgttgactctccattgggaccgcacactcaatgagg

SEQ ID NO: 63747 - DNA, 422 bp, Glycine max
  unsure (1)..(422): unsure at all n locations
agcttgctaacccatggaagctcttaatatctccttatcttttcgggatgggccattcttggatggccttgattntctcagggtccacttgaaccccatttctaccaactacaaaccctaagaaaactatattatctacacaaaaagtacacttctctatatttgaatagagggtatttttcctaaggactgaaagaacttgcctgagatgtcctaagagatcatctaggctcctactatacactanaatatcaatcaaataaacaactacaaatctacctatgaaatcccttaagacatgatgcataagccttgtcgcaacctaaccttctgcgggagggcaacgcgtgactcgcggatgcgtgttccaagaaaggaatacgtgcggagtcgccaccaacgtttattcacgaaaacgtctg

SEQ ID NO: 63748 - DNA, 448 bp, Glycine max
agcttctcaaggaagctacctagtctataattagttatcttgtgtaacacttgttgtggctctgatgaatgagagtctcgtgagacatacttcaaagttccacttctctccctctttcattccttcaatttcgtgctccccctctctctttctatgcctctttctttacctccattgtagcatccttccaagcttcttatccaaggctcatcttcgtggtgaaacttcatcttccaaggcttattccctattagaaggcgccaactctgtcctcttctcctttgtcttccgctgcatctccatggtggataatcaccattacaggacctcattgaagctcacagatccagcctccatagaagctccacaagctagcttccatcacgcagtactttatgatgagagctcggtgagttgggggcttgatgacccttgtgtgggtgacata

SEQ ID NO: 63749 - DNA, 374 bp, Glycine max
  unsure (1)..(374): unsure at all n locations
tgtagacacatctctcaaccatgagtttcttttattcatgcaaagaagcgcatatccacgtgctattactaagtgtccaacctctcacaaacaaatgttngaagaccatcaaacctgtcacataatcttctatagaagagatgaatatgctccctgaggcccttcttcaccaacatttatagcatacttcttcaccacaaagccatcatactcctttatataaccaaatgatgctatgactgaggcgcctataacgaatgatctcttgataggaacataaggtccacaaataatatggatgtttatatgtagaggaaaatcggtacaacatgatgattatgcatacgggccttcaatcgcaatgccatatgcat

SEQ ID NO: 63750 - DNA, 451 bp, Glycine max
  unsure (1)..(451): unsure at all n locations
agcttaaaggataagtatatatcaattntacttgtatcttggttatccaaaatatatatagtgtttgtattatctaaattttcaaaaatatccaaatcgtttaaacgtgacaataattgatatgatagtaatacgaaattttgaataatttatttactctgtttgaaaaaaacgtggcagtagaagaactttgtcgtgttcttcatgagtagaccataattgataatcctaatctgtttcggtgaaacaattccacttggacaaaccagacaaacactaccatgttgctatattacgagtaacgttccagcacagcttttgtttatgcctcttcttctctcggaagaagttcaattctttactcaaactttgtgttcactctttctcttttttggtgttagttcggtgaatcatggagaacccaatcgacggtggcgagttcgtgtacctt

SEQ ID NO: 63751 - DNA, 478 bp, Glycine max
  unsure (1)..(478): unsure at all n locations
ctagagtgcanatggtcgagtctaatgcttcagacaacaactctgtatggtccacanatgatgaaatggctctcatgtctagaaagttcaagaaaatgctgaanaagaaaggaaagtttcagcacacctctagaagaaaataagccatattcaagaagtataatgaggaaaacaatgagatcatttgtttcgaatgtagaaagcctagacatatgaaagctaaatgtccncagccaaagaaaaagcaatgttctagtgacatgaaaaagaaaagtttgatggtcacctgtgatgactcatacaatgaggaaagcaacaactcagatgaggatcaaactaacatctatctgatagcagatgcagacaaacaaagttgaagtaaaaattgttgaatttgtatacctgcttttaattatgacaaaccattagcaatgtaaatttgtagggatggtgcatgactaacattctacttaagtgt

SEQ ID NO: 63752 - DNA, 509 bp, Glycine max
  unsure (1)..(509): unsure at all n locations
gaattaatttctcttttgatatgtccccttttggagcactatgttccgcctttcttttgttnnnttgaagcttcatnnntacaagcnnncttaagtggggaaaaacncattttgatatcacnncttacncnncttaaggggaattntnntggagcctttcggaatnnntgttttgggaaatannagtatgggaaattaagtngggttggggcgggtatgnntttcatatggaaagatanntgatttttggcccatgcttaaaatgtnttattttggccatgctngatgtatatatatattgcctagttcttgctttaatcttcaattgctgcaaaaaaaaatatatatcaattgctgcaaattcgtattgttaaaaaaaaaaaagaaaagaagtgaagttgaataaatgaggtcttgttatgaggacttgatttggaagccttggttgattntgtttatattagagggtatgggtatactacttgtgcttaatttccacttattcccca

SEQ ID NO: 63753 - DNA, 469 bp, Glycine max
  unsure (1)..(469): unsure at all n locations
actaagcttcattgattaccattgatgtgtaatcgattaccagcaatgaaatctctttttattcaatttgaaaagtcatgacccgttcaaatataactgtgtaatcgattaccaacgaagaatttcagaaaaagctttttgaaaagacacaatttttgaaatcattttgaaaaggcacgaagggcctatatatatgtgtgtctgacttcgaaaagcaagagagagattctaagagaacttaattgtcaaatgctctctcaacaactcttgggcaaacacttgcaaatctattgagaattcatctaggaacttcaaattgtattatcatctctaaaagagagaaaatcctctacgaacttcaatctgtatcattcactctaaaggagagaaatgatgcaagctccatnggagcccgtaggcctatgatcttcttcatcaatggattcccttgcttcttggaagataaatg

SEQ ID NO: 63754 - DNA, 509 bp, Glycine max
  unsure (1)..(509): unsure at all n locations
atctcagagtcacctgcggcatgcaagctttcacaggttccttcacaaataatcatcattctgcagataactaacaaaaccacccatcatatctcccaaaaccccatacccacgaaatttaagagagaaagaagtccacccaaacctgaattttcgaagtcccactcgtagccacgcacttcacgactccgaaaatgctctcctttcgcgatttggagcagaaatgagcaccanaggttgaagctttgttgggcaacaatggtggatgggagaaaagaagaagaaggctgcgtgagagagagagagagatgtctgaaattttgtggggctgagtgaagagagagagagttgctttttggttttaaaagaaaggggtttctcttttttctttatatatttattcaagctctgccacatgtccctatttgagtggagcaagaagggcccactttctccttttactgtgacccacactcagccacaaaagtgagaaaaatctgacctttgag

SEQ ID NO: 63755 - DNA, 349 bp, Glycine max
  unsure (1)..(349): unsure at all n locations
actaaaaactagtttatcaaacaattcaaccantgttttactggaagtgtcaaaccggtgagcccaacccacactggttgagcattaaagggactaaaccaaccccactcacctttgagtgagcccctaaaagttaacctggcttgacccaccacatgtagggagattaattgtgaattatatngtgtttgaagttgaccaaaaggtacaagctgtatatgctttctctataattgtctctgcactttncgatgtacatctgcatttatgggttgtatagtaacaaataactatatagtggtagtgtcttaagcttcaaaagtatttatcacacatttgtatataatta

SEQ ID NO: 63756 - DNA, 443 bp, Glycine max
cttaagtcacctgccgcatgcaagcttagcagtaatgatactacttgtggtcccatttatatacatactatctccttactttttacccataattaagatgattacaaccagccccaaaatgataacagtgagccccacattgcatgcggacacaagcaaaccaacctgtttttttttttttaaacgtcagaaaactaaatcaagtaaactaacatttatgattactgaattactcgaatgatatatcaaaggcgagatagaagcaattccagcctcccaccccctacagatatgattgtctcttctttttttctaccagaaaacactctacttcagtacttatgtaaccatctcacccttataagaattggttaaaatattatctttgacattatatccctacacctagaaggtcaggtttagccaccacacatactattttt

SEQ ID NO: 63757 - DNA, 316 bp, Glycine max
  unsure (1)..(316): unsure at all n locations
aatcccccccccccnagacggatggctgagacccananaaaccccagaaccaaggcnaacacacagaaagttgaaacacacaacacgggcaaaatgaaagaaagcggcaacacgaaaggaaagcaccaaacagcaccggaagacagagagacgcacacgagtacaacgagccggaagaaaggacaaaagagggaacgaagcaagaggggaaaaacacagcggcgccaagaacaggccaggaaccccacacaaaacaaagacaccaagacaaagagagcgaggcgaaccaacaaacaggaaggggacaacagagaag

SEQ ID NO: 63758 - DNA, 473 bp, Glycine max
  unsure (1)..(473): unsure at all n locations
aataatctagctcgaaagtctctatcgttatcattggacttatttatttatgaaatcaaagatggaccttcgctagttgtattaatgaataactgcgagactattgtttaagctactttccttgatatctatcttatgcctaactccatctatttgttcagttcacattttattcttctctttgaataactacatattntgcgaagacagtgatagggcacattgcttcgtcctgctcatcatgcaatctagaattttctatgcatacacctctgtacatagtcactacatgtcattatcacttgatgacaagcaaaactgtatatttgggaaagtgttagtcggtgaaaacgactaactnttgtgtataaaacttgtataaattttatcataagtctccaatctatggttattatgtagtgttataagtattttctattaagtatacgtaataaatacttagtacttccatt

SEQ ID NO: 63759 - DNA, 335 bp, Glycine max
atatataacacagacccacaatcctgattttacaataatcacactcatatgccattgaggcatttcactgagcacttggtgggcgcatgtttatacataagtagcaagagaatgagggcaatgtggcatgccccattgcttcagaatacaacacaggcctaaagccgtaccctacaaacctctaacttcagcaaacagccatggtttcagactataattgtttcaccaattgccaaaatatgatcaatttaaagcaccataacacatccatggatagccaaataaccaaaggaaatggttctgactctggttgagtgtattaaagcgtgataaga

SEQ ID NO: 63760 - DNA, 443 bp, Glycine max
  unsure (1)..(443): unsure at all n locations
taagctcgatagttccncaattatgggtattttggacgtaatattgtttatttttcttctntcacgggcaaagctatctgtagaatatttccatcataattagtgttgaaatgtgtgcattttcaagtgaaaaagaggctaagttttgaacttgcaaaagtagcagctgggctaagctcatgatgtgggctaagcgcaacttcagcgcgcttatcacacacgagaatttggcacagtgtcaacatctaatgcccacgctaagcgtgagatcagtgtgctaagcgcagcatgtgccttcagccatgctcagcgcacggctggtcctaagcccgattcacttacttgcgctaagtgcgagggtggcgctaagcgcaacgttgcgaatgtatagactatttaaaccctgttttgtgcagatatagggtagagctgataattggcat

SEQ ID NO: 63761 - DNA, 472 bp, Glycine max
  unsure (1)..(472): unsure at all n locations
agcttcatgatgatgaatcaagttgattcttttagttttttatgataacaaagatgatgacgaaaagccgaagagaatgatttctagattgagtcaacaagtttcaagaatcaagagaagtttgatttcaagattcaagaaaagatgaattcaagattcaagagaagaaatcaagaagacttcacaagggaagtattgaaaagttttttcaaaaaacaaacgtagcacaattttgtttttcaaaagtttgattatcagtttcctgtaatcgattaccagtggcaaagtttgatttcaaaagcttttaactggaattgcaatgttccaattgatttcaaaatggtgtaatcgattacaacatattggtaatcgattacaagtgtatctgaacattgaaattcanaattaattgtgaagagtcatattctctcatataaagctttgtgtaatcgattacatgggtttggtaatc

SEQ ID NO: 63762 - DNA, 476 bp, Glycine max
  unsure (1)..(476): unsure at all n locations
aactcagcctccttaccaagcaanacatttctggtatgcccgattttttgtttccattacaacaacccaatggtctttccaagatagacaagaatcgactcattacaccgactgcataagcaatatcatgtcttgtacatatcatatcatacatgagacgacaaacaacagatgaataaggaacatttttcatttcttctttgtctccctcactcgttagactttgctgttcgctcaacttaaatattctaccaagtggaatgctaattggcttggcctttgcatattaaatctcttaagagctttctcaatgtattgttcttgagatagtcacaataacttatgtagaagaaaagctccatgatgaatcaagattgattcaaaaagatgttttgatgataacaaagatgatgacacaggtgatgacaaaaagctcaaggtcaatcaagaatgagncaagatagaataagaacact

SEQ ID NO: 63763 - DNA, 465 bp, Glycine max
gtgcaagctctcctatcgataaccttcatcttcaagttttttgttgtctcacaacagattaattcttcactcaagttcttcgtctgatgaattcacgtcattgacgcaattaatgattgcattaaatgtgtgttccttcttcatgtagagagtccatgttgataggttatcatgacaagcacttctacagaaagtcactcctttcatcagagtatgtctgcatagcagagcacacctttttgatgaagaccaacactttcagatcttgtacttcatttattcttcatacgactccaacaaatcctaggagaatgtttatgcaaaataaaatctcctacccaagtattatatgaagatcttaaatcgtgtggatcgagtggcctcacaataattaagaacggggtcgaatatttattccttagacttactcatataaaatatcctctacgctttactatatgtaag

SEQ ID NO: 63764 - DNA, 432 bp, Glycine max
acccggtgttgagagaaacgttgtttttgtctcgtgggagtacgtgagctcagttggaggtgttcaacaagggatggtgcgtctatgcgcgaattgtggatgtggaatacttgttgtgcaccatcgcccgaccgccacctagtaccacatgtgatgggtaccccataatcctacaagcttgagatgaggaagcgttgaagggtgaaacttcatgcttttattggtgaccacacagtggtacctgtagatttgtctcgggggtcacgagaccttgtggacgtcatgtggggtgctattgtccataaccaatctcgaccaaatctgacccaacccgtgcttatttgttactgagaacctgtgacgtacctaatcatgcgagctcctgtctgtctacatattaatgcacaatgaccacacttctctgacgcttgt

SEQ ID NO: 63765 - DNA, 481 bp, Glycine max
  unsure (1)..(481): unsure at all n locations
agctngccacccagctcgcccaggcgagctcagctcgcccagtctagcaggttgcttcctccagaagcaacagccttctggaggaatcttctggagggcccaagtgggcctggttgctttttgcatccccatttttactaagtatacctccccctgcctttttttggtgattcttttttcgtaaagttacggaaacttacgaatttcgtaacgatactttgtttctttccgtaatgttacggaaccttgcggattacataatcatcccctttttgacttacggaatgttacggaacctcactaattgtgcaacgatgcttccatttgatttccggtgtgtcacggaaccttacggattgtgcatcaatattttcttttgttttccggcatgtcccggaatttcacaaattgcctaatgatgggtgccaagcacctcacaaggaccaaacaaaagtcgcatgtcatcaagcaaaggtccccg

SEQ ID NO: 63766 - DNA, 482 bp, Glycine max
agcttttacacccatatattctgtgtaacaagctatttctagctctaaacaaaacatcggatttgttgatgttgtggaagcaatgtcttccaaggttattttgatgatgccaaagaatcaagagttaagcaaagtttcaagcaaagattcaagaatcaagtttcaaggtttaagattcaagaatcaagattcaagaataatcaatatcaagattcaagactcaagattcaagaatcaagagaagactcaatcaagataagtactaaaaaagtttttcaaaacattgagtaacacaataagttttcacaaaatcattaccaaagagttttactctctggtaatcgattactagaaagtagtaatcgattaccagtgttttaaaacgttaagattttaaacttcaagagttacaacttgtgtgtaaacattttcaaatcattttaaacttgtgtaagtcgatacacaatacttgtaatcgatac

SEQ ID NO: 63767 - DNA, 449 bp, Glycine max
  unsure (1)..(449): unsure at all n locations
acctattaatctaagctatcctatggcctgcctcgactcaccttcgtgccccctgatgtagttagtccaagccctacttttgaggggcaactcccaccttatgaagactatcccgggcaagacgatggggaaggagatacctatcttggccccctgctccacctcaaagatccgtccccgcatgaactaccccagccgaacatagtccgccatatcccggcctcacccacacccggtaaagaatctgttcccttcgcggaagataatggaaagattgaggcgcttgaagagaggttgagagcagtcgagggcctctgcaattacccattctcggatttagcggatgtatgtctcgtgcccaacatcgtcatcccttccaaattcaaagaaccggaccttgataagtacaaaggtacgacatgttcgaatgtgcatcttcngatgtattg

SEQ ID NO: 63768 - DNA, 295 bp, Glycine max
tatgaaatctacaaccctctgaggggctcctagtgttgtcttaaccacagatatccatgtgaaatacctgtcccacattacactctgggtatcatctaaggggttgtaacattcccttgagcgtctatcgatgtactattttagccattctgacagactaggcatgcatacacaaactcactaacctctctctatatgttgggccaccagatcatgatctataaatcatgatacatactggtaacaacacgaatggatgctcaaattactcctatgtccttcctataagatcatc

SEQ ID NO: 63769 - DNA, 504 bp, Glycine max
  unsure (1)..(504): unsure at all n locations
cgaccttgaaactcagcttgaggattatggngtacccatcacatgtggtactaggtggcagtcggtcgatggtgcacaacaagttttccacatccacaaagcgcgcataaacccaccatcccctgttgcccacctccaactgagctcacgtactcccacgtagcccataacctcgtttctctcaacaccgggtccccatcaatcctcccaagcttccccaacatcaaagtaaatcaacattcaaacagcacaaattaccacagccaagataacagggcaaaggcagaaaactctgcccaaaacaccaaccaaaatcacagcttttctcacttaaagaccccagtaacaattccttcgatccaattcgttaaccgttggatcgactccaaaattttactggaagtctatagtacataagcctacatnttgaccgttgggatctactagtaaacatccagaactcattctgcactactctntccacagccaaccacacacaagcat

SEQ ID NO: 63770 - DNA, 446 bp, Glycine max
  unsure (1)..(446): unsure at all n locations
agtcacctgcngcatgcaagcttgtacattggtaaatctgtgaatcatttgctatctcataaaaacttggaaattcagaagaaagccaggggtttagttgacacatggaaaaaacgtgttgaagctgaaatgattataaatgatgctaggtcttgttcagttcagactgtccccttgccagccagacaacgactttctgaagttgctcaaggtgggaataaacattcaagtgggtaagctgatgttgccatgaagagctcagttacacagctttctgcatccaaaactgcctctccgaagaatgccncaggagagaatactacaagatctacatctgcatcttcagggtctacgaaatcagtgccttcacctgcacccgcaaccgcaaacttgaaagatggacagccccatgctgcagctgttagtggttcatctgatcttcctgt

SEQ ID NO: 63771 - DNA, 482 bp, Glycine max
  unsure (1)..(482): unsure at all n locations
nntggcgcanactnttcaaactcagtggcacctaacttcgcatgatctctgtctatcatcctgaatttgatggacaagcgaaagtacttaatcagatactcgaacaatatatccgtgcttttgtacactccgatccttctcggtgggataaatttttagcattggcagaatagtcctacaacatggtagtgcattctgttacagggcaatcaccttatcaaatagtctatggcaaacctcccccgttcattcctcattatctccttgggtcctcttacgttgaggttgttgatcacctactctcggaacgacacactatgttgcatgctatttataggaagctcattaaggctcagattgctatgacgacataggctgataagcaatgtagggatgtctcttatgatgttgtgtgatatcctttacctagatatacatatttatataataaaatacatggaaatacagaattacacaaatga

SEQ ID NO: 63772 - DNA, 428 bp, Glycine max
  unsure (1)..(428): unsure at all n locations
ngctngcctcanagaggtccaggaaagacaaggcatccgaatgaactagttccgctccggagtatgacagtcaccgctttaggagcgctgtacaccagcagcgcttcgaggccatcaagggatggtcgtttctccgggagcgacgcgtccagctcagggacgacgagtatactgatttccaggaggaaatatggcgccggcggtgggcatcactggttactcccatnggccaagttgatccagaaatagtccttgagttttatcccaatgcttggccaacagaggagggcgtgcatgacatgagatcctgngtaaggggtcagtggatcccgtttgatgccgacgctatcggccaactcctaagatatccgttggtgttggaagagggccaggaatgtgagtatggccagaggacgaaccggtctgat

SEQ ID NO: 63773 - DNA, 490 bp, Glycine max
  unsure (1)..(490): unsure at all n locations
tctaagcttaacatcctntatgatcccaggccaattgaagttctcgcttagtcttgccagagtcttggctactctcatgtgtccgcttgttggggatgaatgatactccgtgagcaggattgggatgaaatgagaaccttgaggtaaccaaatacgaccgcccttcaaaatcaagttttatgcaatggagtagtcaggatatgtcgccgaagcatcgaagatagcttgttgcatcatgataaaagcttggtcatgcgaaagatattgtttaagttcccctaaaaatgtcaaacaaggaactgaaaatagcaatagagtgcttgaagagggttttggaacggtattggatcaagtaatcgtatccaatgagtctggagagacacatttgctgctctggtgtctgcacaacaagtgtcatcaactccttaaggcttcgatgatccgtaagaatggtgaagtgatggcccaataggtattgatgccatttctt

SEQ ID NO: 63774 - DNA, 393 bp, Glycine max
  unsure (1)..(393): unsure at all n locations
tacaccaagtcacatccaaagggctatcttgattacttttgccatctatcaatcacaccacttgtatatatgggcttggatgaaggataatggtccagtggacccaataaaaatggtatgggttatgcaagtgaccctntcttgatcccttccctgtataagcctagcctataattctagctcctttacaaaaaaaaaattcaaagctttatatgtcacatgttggaattcaatttaaaaaaagggtaaattaatttaacactaataaataagttaactcttatagggatccattatgagtgtagaagttaagcttaatcagtgtaaaaatcatctttagtgtgactcttaatctaatgatcatacaaggtgataaattatcaatattagtat

SEQ ID NO: 63775 - DNA, 447 bp, Glycine max
tattcgctcaggaaataccgtggaacactcctttttttttccatacatctttctttgtaaaactcttataatgtctatataactccgcaaaataacttgattatcttaagaaaaatgactaatggctaagaatgtatatttgtttgtaagacaattaagagcccgtcattgtgcacacaaataacaaatgtgttcgagttatataaaggctcataagattgtatattcatctggtagagaagtaaaagctagccattgacaaacaaacaacaaacttatatgatttatgtagagtctacagcggctttgttggacaaaaacgacgtttaacaagcttggcgtagagtatgtcttgtgcagtaagaagtggtcgtgacacaatactcataactctaagaaaggtattgaaacttggttgctagataattaagaactgaatgtaatctc

SEQ ID NO: 63776 - DNA, 442 bp, Glycine max
  unsure (1)..(442): unsure at all n locations
agcttctagaaggagatcaacttgatgttctatgtcttttgaaggtggcagtccatgacgaatctccttgggaaagacatctttaaattcctgcaataagggttgaacactatgagaaacataaatagttaactgattagaattatcactctctctctcttgtgtatcactcttttcctcgggtgtatcactcttctttatcatattcctntgcggcgcctcactatattctttctcttggtctctccttttctctcattctgaattggtcatcacacacatttctaggggatagaggtttagagtaaacgaagaagatttggctattcgcctgtagggctcttctttgttacggctcaacaaacgttgcattttggtagatcacgcgtccaaaaataagcgctgagatatcgccaattgatgatatacaccaccattgtca

SEQ ID NO: 63777 - DNA, 407 bp, Glycine max
gatgtccaattctgggacataactgatgtatacgctccaaattgaacaacggacgctctcgacaaattcgtatggtcataacttttcaaacggatgttcgattctgggacataacacatctagacgctcgaaattgatcaactgaagctctagagaaattccaatggtcataacattttacacacatatccgatatgggaatataatatatcgagatgctcaaaaataaacaacggaatctctagagaaattcgaatggtcagtcactttcacacagatgtccgattcggggacagaatatgttgagacgctcaaaattgaacaacggaagctgccagaaactctaatggcacgacttttccacaggtgttcgatctgagacatacacattagactttcgaattgac

SEQ ID NO: 63778 - DNA, 447 bp, Glycine max
  unsure (1)..(447): unsure at all n locations
tcttagagtcacctgcngcatgcaagcttaaatggctggaatcagtaaaggtccactttactttcccaaacgtccacttcaaaaataataatacatgaatatataggacacctgtcttaaagcacgagtcatggccaaaatggctcctttcccatcactaggaggttgagtaatatgatatgcatcacctagtcaaaatccacatganataagtcaaccaaatataaactaaggctacaagagaatcctacatatcctgcagtagacaaactacctgacatcccatagccacggacctctgcatagaatttggctcctcggatgtttgcatgctcaaattcctaaaagataggagaaacagataaatgacagatctactgtctatcctccaacattgtcctcaagaaagtcaattattttcaattgtaatattaaattgtgcataac

SEQ ID NO: 63779 - DNA, 481 bp, Glycine max
gacctatgaatctcagcttatagtgcggtacgggagacaaggtaagcgttcgctatattgattatgatattccgagtactttggatgtggtacgaccatgctctcctgatttccagttgggaaattggcgagtggaggaacgccccggcatttacgccacaatgtaaacctttacggttttaaaagctctatagttgggcctatgctttagagttttcattttgttaaggctttgtgtcttttgttcttgaatttataatacaaggatctttcttcatctgttcctggtctctacccattctcattcatttgcatgtttacttctttttctaaaatggcagattcgatgacgagtcccccgaaggtactaatacctgggacccgtctatcaacttcgagcaagaaatgaatcaaacgaaagatgaaggagatgaggatgtgggacttccttctgaactataaagaatggtcgcccatgaag

SEQ ID NO: 63780 - DNA, 476 bp, Glycine max
  unsure (1)..(476): unsure at all n locations
gtcacctgcggcatgcaagcttgccacccagctcgcccaggcgagctcatctcttctatgcgagcaggttgcttcctccagaagcaacagtcttctggaggaatcttctggagggcccaagtgggcctggttgctttttgcatccccatttttactaagtatacctccccctgcctttttttggtgattcttttttcgtaaagttacggaaacttacgaatttcgtaacgatacttgttttctttccgtaatgttacggaaccttgcggattacataatcatcccctttttgacttacggaatgttacggaacctcactaattgtgcaacgatgctttcatttgatttccggtgtgtcacggaaccttacggatngtgcatcaatattatcttttgttatccggcatgtcccggaatatcacatattgcctaatgatgggtgccagcacctcacaggaccaaacaaaatcgcatgt

SEQ ID NO: 63781 - DNA, 454 bp, Glycine max
  unsure (1)..(454): unsure at all n locations
tctcagctctgggctgaatatatataacagcaccggggttctagtttatgttctcttcttctctctctcctctcctctctcgctttntcgttttagttntagagtgctactctcaattcgttttagtttctttttcattttggagaataattctagttttcgtttctaccacaattttgttttctattgattaatggaaggctaagtctccagcgttgttttctctggaggatcaagcacaactctctttgaggttctattattactattaaattctgatcaggttctcctcttcactaattattctgtatttggtgctattagtccatgcatgcttagtgcttgattaattgtctctgcgcttacattacgttcatgcttaatggtcggtcatgattaattggtgtatgtgttgcttaatcacataatgaatgccttatgttaaatgtcactt

SEQ ID NO: 63782 - DNA, 201 bp, Glycine max
agctttaacatgttccttcacaaataatcatctctcagtagaaaactaacaaaaccacccatcatatctcccaaaaccccatacccacgaaatttaagagagaaagaagtccacccaaacctgaattttcgaagtcccactcgtagccacgcacttcacgactccgaagatgctctcctttcgcgatttggagcagaaatg

SEQ ID NO: 63783 - DNA, 475 bp, Glycine max
  unsure (1)..(475): unsure at all n locations
cgaagatgacattttaaagaatactatctaaggtagtgttaaattatacgctngaaactactaaaaaactagtttatcaaacaatcaaacaatttttttactgaaagtgtcaaaacgggtgagcccaacccacactggttgagcattaaagggactaaaccaaccccactcacctttgagtgagccatgaaaagtctaacctggcttgacccaccacaagtaggtaaattattgtgaattatattgtgtttgaagttgacaaaaaggtacaagtttattatgctttctctattattgtctttgcactcttcgatgtacattgtaatttatggtttgtatagtaacaaataactatatagtggtagtgtcttaagcttcaaaagttattaatcacacatttgtatataattagaatcccattaaaaataattagatcctgcactgctgaatttgagtttgcatttggaaaagtgtg

SEQ ID NO: 63784 - DNA, 421 bp, Glycine max
  unsure (1)..(421): unsure at all n locations
agcangcaatgaaagatatngtctatttagcagtctggtgtcaatctagacacacaaaccaaggccataattcanaatatgtaagatagaaatgatcatagtcattggcgcaaatattgacttctgtaactgctactaaccttacaatggaagatactatatatacagtgatgaactttcattcagtaacacaaatttgtttaatttgtacggtcaaatctattagctcatgtgttcaacttgaaatatgaaatttctattttacatcttttatttggaattatgtaacaaaacatgcaaaaaaaaacttgactcatacgttgtattggagatgcgcattggttgtttatatattgcttgtctggcacactacaaattatgttttcatttctcttgtccatagaatagagttgttttatat

SEQ ID NO: 63785 - DNA, 329 bp, Glycine max
ctgggagaccctcttgactgttcatgtatcctctccatgggaataccattatgactatcgcctctgatctccccattaagcccataacagctccatcacgggaatcagacacaggacttcacgaggtgcgtgcctaaccttccttaataaactgctatgccttctatgacatcgggctctagtgcgtgatttctacatgtatctcctcaaatgtctcgtgcgtaatatgtgaaacatgattctatacagagttcgaccgattaacttgctattgaagctcacatgtatcttctatgggtcaaatatctggttcttgtgtctgaaccatg

SEQ ID NO: 63786 - DNA, 76 bp, Glycine max
ataagatataacttcatatatgtatgctattcaaagtcattcgatgagcttgacctcattcgtatttcacgtccat

SEQ ID NO: 63787 - DNA, 263 bp, Glycine max
tctcaacatctgtaatcaatcttcaaagcttggaaaatttacgagcattttcttttcttctagaggggtgtcaaacattcttttaagaaagtcatggaaaactgggcattcgtttctgattgttttccctctgcaaagaataaagactaccgtccatgtttgggtgacgtcttcttacaaatatcaaaggctaccgctgaatatctttgttccttcaagagcaaggataccgctaaaatttttgtgcgccatggaggacatac

SEQ ID NO: 63788 - DNA, 484 bp, Glycine max
ttaagacacctgcggcatgcgagcttggatcccaacactctgctcaggctctcctttatttagaggcaaatctaggatctctatcatacactatgctatatggctcaccatgtaatctgaccatctcacaaatatatagggaggttaacttcttcaatgataatctgatattaatgggaatatagtgagtatactttgtcactctgtctagaataaccctatagaatctaactctttatgagttctatgatgtcctacaacaaaatccatggaaatactgtccactctcagtggggtatatccaagggttgtaacttccctgaaggtctctgatgtactatcttagccttctgatagactaaacatgcatacataaactcatcatcctctctcttgatgtgggtgcgccaaaacatcatcatcaaattttgaacatcttggatgcatatgatggatgcttatgttactcctatgtacttacttc

SEQ ID NO: 63789 - DNA, 418 bp, Glycine max
  unsure (1)..(418): unsure at all n locations
gtgcttactctccatagaagcgagatncattcctttattagtgggcagaacacaaccnccaagtggggtctgacattatcttcagaaggctgcgcctgagtttcggcctcatctactgacagctcatgatgtaaggagtccccacttctatcttatctgccactatatgcggctgagtttcagcttttcctactgaaggctctatttgggaagagtccacacttgaaccttgaacacaacattcctacttagtccccctctactccttgccatcaccggcgtcgatatacgaacacacgctttcctgtatgaacttgcaataacatcatcccgtcgccttcagttcttccacatgtctaactgacacatatatatcaactaattcttatccccctactctctcgaatcattgtaattt

SEQ ID NO: 63790 - DNA, 392 bp, Glycine max
  unsure (1)..(392): unsure at all n locations
agctntatgagttcagcagcacctcatggtattttacttagatatataaactctatttaatttgcttatgtgtgtgccatgnttttttaaatgagtgcataagtgcaaacatgttggcaatgacttctcttttgtgttcaaatgtttttgataattaatttggagcattttttgtgcaagatctgtgctacttcttcttcaaaatttaaaggtcttttttgccttccaaaattctccatctatttattttttctttatcctgacttgtgggaagtgtaaagctccgatctttcctctctgcttgcttntcacaantttatatacaacaaacgaagttgttttattgagttccaatacttcaagtgaagatctgtagctctatctttaacccc

SEQ ID NO: 63791 - DNA, 465 bp, Glycine max
  unsure (1)..(465): unsure at all n locations
cctatgatgagtgggtttgcataattaatatgctaatgcatgctctatcactaacttgntcgcgaactgggcagtatgaattttaagaattagaaaatctagtactcttaataaaccatcactgctattgggaatcaaactttgaggtgtttttataagatcttgtccatttttatatttaacgggaaagttagtattgccatgtgtccaaatctgagtgtctactctgtaagaattgattaattagtatactcccaaccaaagataagttgtgtgtatatatatccgaaaagagaaagaacatagataaagatgtatggatatcgtaactccaagctgtctcattgtatctttgcatcatagtgtaaatgctcgccatgattgtcggagggctaaagaatcgtttcattaataaattgatattcgtttgtctaattaaaagtgatacaaataattattaaactc

SEQ ID NO: 63792 - DNA, 483 bp, Glycine max
  unsure (1)..(483): unsure at all n locations
agctngcttctacaatcntccccttgttgatgatgacaactntgaaatcaagaaacacacacacacacacacactttttcctagtcgatcactcacataaatttccattctccccctttgtttttgagtttatgcttcatttgaaattaagttaattacttgtgtgagttcttgatttattccctatttctctccccctttggcatcaacaaaaagccaaagtgcgtaacaagtatgtaacatacaaatataactaatcattcacacaacaatcatggaaaaatataaaccaatcatgaagcatgaaacatgaataaatcaaatatataaaaaaaccacagtcatatagcataattcataattgttcaatcatactaagcaaatattaaaaagaaataataagtgctcaaatgtcatataaacatatccaaatacaaggattaaaatataataatcaaacaagagaagagagacttatagaaa

SEQ ID NO: 63793 - DNA, 441 bp, Glycine max
actcttaagtgtgcatgactgcttcaagaattcttgtgtcctaaagttactatcaggccaagaagatattgtgtccgatgggtatggagtattagaagattcatgcttgcccgaataattgcatactatacaggcatgaattcgaagaaatgcccaaatgccctaggtgtggggcatcacggtacaaagtgaatgatgacgaggactacagttatgatgaaaactcattgaagggccctccagcgaaggtgttgtggtatcttcccatcattccaaggtttaagcgccttcttgctaatggagacgacgcaaaagaccttacctggcatgcaaatgggagatactctgatggaatggtccctcatttggctgattgctcccagtggaagaagattgatggtttgtattctgatttttgtaacaacgcaagaaatcttatgc

SEQ ID NO: 63794 - DNA, 194 bp, Glycine max
aaacacgagcgcacccaaaacacgcgacgcgcacttctattactcaacaaaaagggagagaaaacttgccacaccaaacaggacgaagccgaccaaccccatacatccccacaagagacaacaaggacagcgaaaacaaggaggccagacaaaccaacaagaaccgccggaagaaaaaaggcaaactaaaagac

SEQ ID NO: 63795 - DNA, 399 bp, Glycine max
  unsure (1)..(399): unsure at all n locations
atgcagctttcatnttaattacaagcgtctagatatattatcgttactcaatcggacatccgagtaaatagtattgttgtttgaatttgctcacagcatctgttttcaattccgagcgcttcgatttattataggactcgatccgacatccgagataaaagttattgtcgtttgaatttgccgagagcctttattataaattttgatcgtcttgtaatattagagcacctcatctgacatttcgtaaaaagtttttgtcgtttgaatttgctcaagcttccgcttaaatttcgagtgccttgatttatacaagacttatcggatgtccaattaaaagttatatttggtgaaattgctcgaccatccgttctaaatatgagcgactcgatatactacgga

SEQ ID NO: 63796 - DNA, 455 bp, Glycine max
  unsure (1)..(455): unsure at all n locations
ctaagcttgagcaatcaacacaataactttactccgaggccgtttgttttttagttatcgagactctcgtatggaaacagaagccgtagaagntcaaacgacaataactctttactcagatgtctgattatgtccagtagtatatccatacgctcgtaattgaaaacagaagctcgttgcatattcaaacgacaacaacttttaactcagatgtccgactgagtgctcaaatatatcgagacgctcgagatcaaaacagaagctcttagcaaatgttaaggacaataacttatatcttggatgtgcgattaagtcccgtaatatatcgagacgctctaaattgaaaacggcaactcgtatcaaatactaacgaccataacatgttactcggatgtgcgattgtgacccgcgatatatcgagacactcgaagtgtaaacatatgctctctgcaact

SEQ ID NO: 63797 - DNA, 383 bp, Glycine max
atcgggcgagggtgaaaagcaactctcccacatccacagatcaaacatgaacccaccattcccagttgcccaccttcaactgagctcacgtactactacgtagccattatcctcggtccttatagcaccagggccccatcatcccgcccaagcttccacaatatgcaggccattcaagatcaactatcatgaactaccctaaaccaagaaaacagggcagaggcagataactctgcccataacacattcacatattatagcattccttactcaaataccccagtcacaatctctttgttccaattcgtaaccggtgtaacgactctgaaattgactataggttcctagtacataaatctacagtttgagagttgggatctact

SEQ ID NO: 63798 - DNA, 482 bp, Glycine max
cattaatctaagctcgccatcccgaccacccggcatagttagtcagtgagaacttgtttgtatctaaacaggcgagcgcagtcaacagataatatgaactatgaccacaaagcaagaaggcctgtgtggtggctggccagctgtgaacattgattgatatatgggatatggcctctggtaatcgattaccaacggtgggttatctattacaaggcttaaaaatgattacaggaggctaagatggtctctggtaatcgattaccaaagggtgtaatcgattaccaggcttgaaaacgatgtcaggaagctatgagagctgttggttatcgattaccaaggggtgttatcgattaccaggctttcaaaatgaaactgagagattgtggaggcctcttgtaatcgattaccaatctgtgtaatcgattacacagaggaatgggtcactggtaatcgattaccacgtatgtggtatcgattacaca

SEQ ID NO: 63799 - DNA, 352 bp, Glycine max
acgacgagactaatgctatttctccaacaaaggatatcttagatgatgctgctcaatctttataacaactgcatattcatggacaagatactaatcgaaaatggaatcgaagcaatgatcatcctccataataacccaaatctaatgatgaactttcacaacaatcggaaagattcaaatgatcaaccccctgactacatttattggtgattatctaaatggggtaacatctacacattgtctaaacgattatgcaatcatatcgcttttgcgcctatgattgaacctaataatataaatgaagccataccatctgatcatctgatatttgctatgcaataataactaaatc

SEQ ID NO: 63800 - DNA, 269 bp, Glycine max
tagccacccgcctcacatttacttaagacaccaacagctaacctcgattgtctataaatgtaacgaggggggttaaacaaaggaagactacttatgttctcatgtggttctataagaaaaaaaaggttgggagtgcaatgccaaaaatggccacttgtgattgtctataagatatagaggggataaagtatttcaaattttagttagaatacaatctgttctggtaatgattgatataaattatacctttccaaaccggatgagaacac

SEQ ID NO: 63801 - DNA, 411 bp, Glycine max
agctttcgcattgcactgctagataccaatctttctttctactgcatttcaagacgaaatttgcacccctctgcatttcataactcatgcaccatatcaggctataagtgcatagatttctctctatatgtcagtatccaaaatccaatgtcctatctcttgagtttgggatgagtgaccctctcaaagagtcaacatcttgccttcttatatgagtgaccctttcaaagacataacgttctcgcctgtatgtattataggactcaacgacatctacctttatgtttccttggactcaacatcctctacctttatgtttcctggactcaacctcctctgtctttaagtattcataagactcaatgcactctatcattatgtatttatataactcaacattctatgttttat

SEQ ID NO: 63802 - DNA, 490 bp, Glycine max
  unsure (1)..(490): unsure at all n locations
gacctataaaactaagctttgaaactacactgccaaataccggtcaagaatcttctctttatgatgaattatntcaaggacttctaattcattgtcatcttgatcaatgcacatgcagaaatagagactagcatacctgcaccagatatacatatgtaaagactcagttaattaccacgacaaacagaagggtgcctagaaaaggagttgcaatatatgacaaaagaactggtatcttcatcgctataccttttataaacaactttatgtcctcgccattctacaaaattacattgctcgtgagcacgggaaagaatcattccactgagctcacggattaccttgtaaaaaataaattacacatagtaaggatagttaatttgcagaatgtaaagtttgatgtgcagtgtctgacgtgcagtattcatgataataccatcaatgccaatgctatatgaanaatgtaacaatatcagaggaaacatattct

SEQ ID NO: 63803 - DNA, 400 bp, Glycine max
  unsure (1)..(400): unsure at all n locations
ngctngaccctagtgcccacccatgcatctttaattgnttaaaccacacaccanagggcatctcgtatatgaccttcattcccataacatcactacattccgtaacattgtcttctatgaagaccattttcctcttttgcctgagaaccgaactttacccacccttcatacttctatatcaccacttgcttgttcaagcaaccccgaatactttgattctcccattccacccagtgacaatccatcatctcctaataccactgaccctcctttacgacgttccacgagaccaaaacaagcacccacctacctacaagattaccaccgtgcactcacttataaagctgataccactgcgagtaatgttcgggatcctctacactcatgactctcttattgc

SEQ ID NO: 63804 - DNA, 341 bp, Glycine max
ttgaacagcactatcatcacaacataataataaaactaaaaccccacactccatccctggtaatgcagtaattcattcttgcttctattcagttctaaggcaacaatgcatctcccaatgatatattcacctaacagtacatacaagtgggtgatcagaccaagagtatgcacacatttagctatgaaagaagcattgatcacagccaaacacaattaaatataatataagtattgtcctccactatttaattaacaaacccaaactaaattgtttatcctgccatacacagaaaccctacacaaatgagatatagagacagaatatttgttgcttacaca

SEQ ID NO: 63805 - DNA, 463 bp, Glycine max
  unsure (1)..(463): unsure at all n locations
tatctaatttctaatacgaagcatgtgactggttttctgttnttctggnnggttagttttgtcccttgtgatgaactatacggnttttagcctactttatttagaaaactagttcaacttggtttaatgttttgactgaaaattatgtaagatgcatatgtttctaccgaaagtaaagcttgatttgatttggtctgaacctctgatttaaccacagagcaatgctgtctgacatttctgttgatctgaacctggtttaagcaaatgccctatgtaattcgtgtattagacatatatcaataggttcttctactattttgtgtaattcctataatggatgatattttagtttgttagttagtgcattaatggttataactctatgcaacgcttttttaactatcttttatgcttgattggtttttgattagtagtataaccattattgcactcactactcact

SEQ ID NO: 63806 - DNA, 431 bp, Glycine max
  unsure (1)..(431): unsure at all n locations
agctggttacctccttcttcactacatcattaattaccgggttgagtcttctctgtggttgtcttactggtttagccccatcctctaaatttatccgatgcatacatgtgaatgggctaataccaggaatgtccgccagggtccagcctatagccttcttatgcttattgagaactgataacagcttctcctcttgctcatcagtaagggaggcagatataattattgggnnaactttgctctcatctaagtaagcatattttaaatttgatggcagaggcttcaattctggtgtgggcgactggataatggtagaaagagatgatttctcaacctgtaccttataaagaanngtcagggtatgtgtacttcctgaaacatggttagttctatctgactctataaaatcaatctcaagaggtaacacatca

SEQ ID NO: 63807 - DNA, 457 bp, Glycine max
  unsure (1)..(457): unsure at all n locations
atgggggtcccatcacatgtggtactatgttgttgtcttcgatggagcacaacaagattttcacattcacaatgcgcgcataaacccaccatcccctgttgcccacctccaactgagctcacgtactcccacgtagcccatatcctcgtttctctcaacacctggtccccatcaatcctcccaagcttccacagcatccaagcaaaacaacattcaaacagcacatgctatcgcaaccaagcgaaacagagcataggaagaaaactctgctcaacacattaaccaaaatcacagtttttctcacttaaagaccacagtaacaattccttcgatccaattcgttaaccgttggatcgactccaaaattntactggaagtctatagtgcataagcctacattgtgaccgttgggatctactatcaacatncagaactcattctgtactactactttcac

SEQ ID NO: 63808 - DNA, 409 bp, Glycine max
agcttcagaccacagcaacacagaatctacgtgtattaattcgctagttcagaggctattctaggctcgacaggtggaatatacaatgacgtaaattcgcagcatactctcgcctcacacaagtctataacatctatctaaacttgctcacactggatttacacctaaatatccaccgaatcagaacatgactgctgtgacccaatcatgccctagaaacggttatcggttgactatggtcatatgattttctatctagctcaatctaacctttctcacatgtcctaaatgacatttcaagctattattatctcactttaacctccatttaccacagaactctgactcagccttacaacatatgacgtctcgctctttgttactcataacgtggattctcgctatctaa

SEQ ID NO: 63809 - DNA, 484 bp, Glycine max
  unsure (1)..(484): unsure at all n locations
tactaagcttaccggacttgtctaaccgacgaaaggatcaaagtgggatttattaatgtatatctgatcattccgcgttggtgaattccaaaattggggcgaatgaaaaggatgaaaatgaaggagaaacccttgctatgacttgcatttctacccggtcaaaattcctgtcaacccaaccatggtatttcttaagccattaccgtttctcttacccaattattcaccaagggcattcccaattaatcacaaaggctggccgcttgtcattcagtgccaaacaaccaccaaaaagggattttgtaccaaaaagccggagtgattcacccaaaatctagtggtatatgccacctgctcttatatttacttgataatgcantggaggccataaccccctgccagggtccctcaacctcatttttccaggatacgactcgaacgccacatgtgcatatcatggtaggagtctgggacattccatgga

SEQ ID NO: 63810 - DNA, 474 bp, Glycine max
ctgctgctgaatcttgtggacaaccccacagactcctttcttcaggagtagttacacaggttgctgggatatgattttgtgattgaatacaacgtcggaaaggagaatctagctgctgattctgtttcacgaatgatgatgttgtcttggtctgaacctcaagctagtatactgcagaagagtgaacaagccactgcagagaatgttgcattgcatgaactgatatagttgtgtaaagaacaaccagattcacagagaaattatacaatcaatggtaatttgttgtattggaagaatcgggtagtaattcctgaggaaaaagaattgattcacaagttgctgagagaatataataactctcccatagggggcatgctgggataaaaagaactatagctagaattccaagctcattctactggacatcgttgaagaaggatgtatacagctttgtgcggagttgtgacatctgtc

SEQ ID NO: 63811 - DNA, 309 bp, Glycine max
gaagacacactggtatagcttaggtggcccatggatcaacactggttactcaaatatgaccccttcaactgttagaaactggccatagcccactaaaactttaaacccgcggtgggtgactaaaaacttcatgaatttcgcatatctattgtgaatgaagtgattagaactgctcgctcaactaaaacctgctcagaaatgtttccaatgtgacctagagacctcaatggtttaacactatgtgaatcatctcgtgcatttaatgacaagagatgctcatcgtgctcaccttccactgatgctttaccc

SEQ ID NO: 63812 - DNA, 289 bp, Glycine max
catgtccgagaacaaatcatctggtaaagcttcccatgatcaaagaattggttcgaagccgaataacagttatttgaatcgaaccttgtgtgacatataacagctttgttaattaactattgcgcatcccattaaaaaagaatggtataaattcaagaatagcaaaccccgtagattatcccttccttaattctctagcctgactcgttcactatcatatagtggctgctccttagccacgccttccctgttccttaccattcccttggacacatttagaagtgaaagc

SEQ ID NO: 63813 - DNA, 443 bp, Glycine max
  unsure (1)..(443): unsure at all n locations
actaagctcactaacattaactaccagaactataatcattgaatatagtgttttttatcaccnatccttatgtgttcctcacaaaactcatttcgcttatactcaatttcttcatgcttctattcgactttatgatggtatattgaagagctctggcgtgccattctctttctttgatagtttatccctcacataattatttattagttattttgaactttttctatcgttttgatctatagggcttgcttttctcacaagatgagtgaagagttgaatcagtccctcatcatacacaggccttactacctacatccaagtgagagtctagtcacaacatttggttcgccttaattggatccccagattataatttttagagaagatcgacgtgcactactttgaatgcgatatanatgttgagttcgttgatggctctatct

SEQ ID NO: 63814 - DNA, 302 bp, Glycine max
  unsure (1)..(302): unsure at all n locations
tgacgcatgcgagcttgtaatcactcacaagccaaatgtgattaaatcattggcacacggaattactgtccaatagtcttatacaatctttacaagaactttctgtgaccacactgtcatacgcaacgtcaaggttnttggggtttttgagaccacaatcatggctgaaccagccgcaatataccataatataaaggattgcttgtatgctacgaaatctcaactatggctgcctgcaattgaaaaccatggttctatgcaaaatataccatacacaacgtgtatttaacaataatgcactc

SEQ ID NO: 63815 - DNA, 444 bp, Glycine max
  unsure (1)..(444): unsure at all n locations
agcttctcaacgccctaaagcccanaaactttactttattttatnattcaatcnnttaaatgagaaaataagcactataagaaaccctactgcaccagataatatcagaataaacctaccaacacaaccccatctgtgcacttgatcccaataacagtcctacaacatagtgtcatatctaggatcactaccaaatactaaaaaaaattcaaaaccgcgaatgaatattataattattcaataaactatttcctgatgaatatcgaaaccacgaattaaaaaaataaaataagtaccaacccgctgtaatcgacggatttggcagcatactcgatctggaaaacaccgccatcgggggagaaagtggcgacggagagatcgaaacctgatccatgctgttcatatttttcggaagctggtttactttcgctggatatacttctt

SEQ ID NO: 63816 - DNA, 354 bp, Glycine max
  unsure (1)..(354): unsure at all n locations
ggaagctcactacaagccataagagaaaaaccatgatatcactatatcctcaaagaattanggagctctggaatagctatgggaacaagtgcgggggggaattgtctcatcggacaaccagatgtgatggcgatgcatcacgaagtaagctgggccacactacatgtacatcggatttagggaaatgttggacatgctgaaagaaatgctgatcctcaaaagctacacgagccaaaaaaaaaaacgaaaaagaaaaaattctaaaaaaagacaagacaagcaatcaagctgagtgaacaagatcataaatggcacaagaaagatgaaactcttggttctacccttcatggtgaa

SEQ ID NO: 63817 - DNA, 460 bp, Glycine max
atcttaagtcacctgcggcatgcaagcttccatcaagtggtaatcagagcacaatagtttattgttgtgctccttaaacctccattaattttatatctgtaccttctcttccattgttgtttcttcatttttctccatgtatctcctcacatgtcttggtctaaacgttgttaacatgattctctagagtttccaccgattaaacttgctatacaaactaaatgagaatttctatggttcagaattccttgttcttgttcatgaaccatgaattgtgttgagtttaagtccctttgaattctgacttgttgtttattgtggctgaaacctaaactcataaaattcttacaaatatattaaagttgaagaaaaccatataactatatagtgaccttctctcctattgtactatcttcatgacgtcctgtgtagtatgaaatttgacccatagatgtcttat

SEQ ID NO: 63818 - DNA, 444 bp, Glycine max
ttacaacagcaagccccaagatactcattttaggatgcacagaccaaagttgcgtatgttaaaaaattgtatgaccaagtgaaggtgcaaattgcaaagaagaatgaaagctatgccaagcaagcccaatagaaaaggaaggaagtggtacttgaacccggtgatgatcttggacatttgaggacaaatgttcttcaagaaggagggaatgatgagaatcatgaaacaggccacatacattctaaaggcccaagtggagaatgacgaacgcccaagtggagaatgacaaagcccccgagtggagaaggatgaatgcccaagtggagaatgatgaatgcccagaggcagagacactatcaagactattaattgatgctgaatgccaagagtaatttgaaggcccataataaatatgctcttcttaggtataatatattattattg

SEQ ID NO: 63819 - DNA, 217 bp, Glycine max
tataaaaccccgagagcactaattaggcacaatttttttttactctcgtgaagggggagctagttgaaagcaagtctacctaacattttgactcatggcactctaaatttccggtgaacgcaaaaaattataaggaaggaacacactttgttatgaaagacttgttttttgcaaatccatttattgggtgatggtaccacaattattctaaagaact

SEQ ID NO: 63820 - DNA, 368 bp, Glycine max
  unsure (1)..(368): unsure at all n locations
gatgattaaacattatataagcttctgtttgtatgtataaacattgcattggctgttgacttctgctctttatggttaagccttgttactnctaccaagtggataaactttgaggtatagtttttacttggtggttatgttctgatagtttcatggattaatgattagagcttcttccaaacggtcttgttgttgttttcgcttaatggttaaactttgatgcttgccttggactcttggaagaagattgataaaattgaagctggtcaaagatatttataagctacatcttttgtcaatgtatttcatcatgtttagatatatctttcacactttatgttcattttcttttatgcaaatgtattatc

SEQ ID NO: 63821 - DNA, 433 bp, Glycine max
  unsure (1)..(433): unsure at all n locations
agcttanaagtgaactctgaactcggaaaattcttttgaaatagtaagaaggttaaaattgatttatggctaaattacaagacaataaatttagaccgataaaatcactagaattaagcgctctgtattttgtatttctgaataacatgattgagcatgctcaacatttatttctaaattactattattctgaatgaataagactctgagagtgtaaactatgacactatntatctgtggtgtgtgaagtttatattggtctgaaatcctaagatatctactggatatgagtaagatcgggagagtgtgaattacgacacattatatctacaatgtgtgaaatctatattccgatatatattgattatcttttctgacacactctgggttgagtcaaggggtgttgacccttgcaacattttgctataattat

SEQ ID NO: 63822 - DNA, 331 bp, Glycine max
tcctgttctgatgtgcctcagtgtcttctatgattgatctgaatcaaacagatcgtgtggacatagaagatatcatcacactcttacacatattaaaccattcttacgtaaattaatgaggatgtcaatgagatcacttgatgacattgtttatgtgcaatacatattaaagcaacctgtacacccacaactacataacgaagtactggtggcatcatatatacagcatgaggctcccgtgaaatctcatacagcacagaacgaacgcctaatagcacgacttaatctatccttatatgactgcggatgccaacgctcaaagatcaaacat

SEQ ID NO: 63823 - DNA, 439 bp, Glycine max
  unsure (1)..(439): unsure at all n locations
gatcaaggtttatttttttacgctacagcatagaacacggaagcacgattgattatagaaacatctctatatgcatcagtgggtctgttagaanaacccaacacttctacctactgctgacaattttacttacttgcatttttattgtttttatcctaaacttagtttaataatgttttaaaccatcaattatcaatgcttctttcactaatgccttattgctgaatttaaccctgtcttagactagttccctgagttcgatactcggattcatcggttttaattctaaatactcgacgatctgatgcgcttttcggaaaaccggactttccttgaacatatttgtatatagaagaagtggaccaaatagtaattgtacgggaaatccaatagtgtggcattgagaagtaatgtgtcctcttccaagacatctgatgca

SEQ ID NO: 63824 - DNA, 412 bp, Glycine max
  unsure (1)..(412): unsure at all n locations
tttggaccgtgggaatttcaaattttaaatgaagagtcaccaccttttcaagaaagataactgtgtnatcgattacaccaagaatgtaatcgattaccaatgataggtttgaganaatctgccagcagtcacatcttntcacttgattttcaaatagccatcaaaggcctatatataagtgacttgtgcacgaatattctttagagttttccctgttcacaaaaggcataatcctctcaaacaaanatctcttatcttcaaaaattccttggacaaacacttgtgttattcaataaggaatcgagggcttcattgtaacatctgtctctttcaagagagataatttcttcttcttcttcttacttctgaaaaagggctaagagactgtgagtctcttgttgtaaagcatctg

SEQ ID NO: 63825 - DNA, 452 bp, Glycine max
  unsure (1)..(452): unsure at all n locations
ttaagtcacctgcggcgtgcgagcttctcgatatattatgcgcctgaatcagactttcgtttcatagttatgaccatatgaatgtgtncactgtattccgcgtgacaagctacgaccatgtgaatttgttgatcgcattcgctgatcaatctcgagcgacgtgatatattatgcgcctgaatcggacttacgtgtgacaagttatgaccatttgaatttgtccagagcatccagtggttcatttgcagccgcctccatatataatgctcgcgaatcagacctatgtgtgacaaggcatggccatatgaattacgtccgagcagtcgtggatcgatatcagcgcctaaccatattggcgcgtaatcgacgtccgtggacatggaagaccatttagtgggacggggctttcgtgttaatccaagctttcgagatttatgcccagaagagactta

SEQ ID NO: 63826 - DNA, 340 bp, Glycine max
  unsure (1)..(340): unsure at all n locations
ctaatactaagcttctcgagtatgatgcgcctgaatctgacttccgtgtgacaagtttttatcantttnatntctcgacaccatacggtgtgtatattttagcgtctcgatatattatgcgcctgaatctgacgtgcgtgtgacaagatatgaccatttgaagttctcagagctttcgtctgttaatttccagcttctcgatatattatgcgcctgaatcggacttctcgcggacaagctatgaccattggaagttctcgagagctttcgctgttctatttcgagcgtctcgaatattatgcgcctgaatcagacttccgtgtgacatgttatgaccatt

SEQ ID NO: 63827 - DNA, 478 bp, Glycine max
agcttaaagggataagtatatatcaatttaccggacctttggttatccaaaatatatatagtgtgggtattatctaaattttcaaaaatatccaaatcgtttaaacgtgacaataattgatatgatagtaatacgaaattttgaataatttatttactctgtttgaaaaaaacgtggcagtagaagaactttgtcgtgttcttcatgagtagaccataattgataatcctaatctgtttcggtgaaacaattccacttggacaaaccagacaaacactaccatgttgctatattacgagtaacgttccagcacagcttttgtttatgcctcttcttctctcggaagaagttcaattctttactcaaactttgtgttcactctttctcttttttggtgttagttcggtgaatcatggagaacccactcgacggtggcgagttcgtgtacctttccgggttcggaaccacttctcctcga

SEQ ID NO: 63828 - DNA, 468 bp, Glycine max
cgagtctaatgcttcagacaacaactctggttggtccacaaatgatgaaatggctctcatgtctagaaagttcaagaaaatgctgaaaaagaaaggaaagtttcagcacacctctagaagaaaataagccatattcaagaagtataaggaggaaaacaatgagatcatttgtttcgaatgtagaaagcctagacatatgaaagctaaatgtccccagccaaagaaaaagcaatgttctagtgacatgaaaaagaaaagtttgatggtcacctgggatgactcatacaatgaggaaagcaacaactcagatgaggatcaaactaacatctatctgatagcagatgcagacaaacaaagttgaagtaaaaattgttgaatttgtatacctgcttttaattatgacaaaccattagcaatgtaaattgtaaggatggtgcaatgactaacattctacttaagtgttttagt

SEQ ID NO: 63829 - DNA, 490 bp, Glycine max
  unsure (1)..(490): unsure at all n locations
atcctatgagtcacctgcggcatgcaagcttgtgggattgaagagtgatcacaaagtttatgggatgtcctgtttatattctaacctggataactctgtagatgcatggatcttcagaaagactcaaacatatatatcatcatgatataataatttgtgggcaaaaaactctgcgcacaaaagattaataaatataatggaacacacataaattaactatactgcaaaaaaaaaaaaaaatacagaaacatttacattatttagcaccttttagttacatntatttatggaaatacaccccaagaaagatttactgctttaacaggattatttgtttggttagtttaactcatttaatttatatataacttcataattattctatttatcaaatatttttttatgtttaattcaaacataactgcggataatattcttctcgtgaatatttgaaatgattctttacaaacgtcttttacataatgatagt

SEQ ID NO: 63830 - DNA, 481 bp, Glycine max
  unsure (1)..(481): unsure at all n locations
tctaatgatttacaccaataaaaaagagcagtttgaaattcatgagaatgtaaaaagatgagtttctcaacatagagttacacaattgaatgatggatgtggaactcaaaaggacaatcagccaggaatgaaaatgatcacaacttgctgatgtagcaatcaaatatagtaaaattgctaacatgtgtctcaacttagagtgacataaagatggatgtggaactaagcaaatttgtgatgtgagaatcaaacagatatggatgtctcaacaaaggaatggagaaaaaaactaactaaaactgatgtaacccagtgccagaggatccttgctttgcataagtatgggggaggttcattatacacagctnttctttgcatatgcaaagaggttatttctgaatttgaacccatgaccaactgtcaccaaggcgcaattttattgttttgccaggactcggccttctacaaaggaatgtagaat

SEQ ID NO: 63831 - DNA, 419 bp, Glycine max
agcttatatctggtcgagtgcaggtctgtttatactttatactcccaacaactgatgcatacggaattgcttccatttgcttccgttccagatcatttttaggacattgtgcgagactaaatttgtctcctttctgaattggaacgggagatgctgaacactttttcatcctaaatctctctagtactttattgatatatgccttttgagacaagcctaacaatcctcgtgatctatttcggaatatttctatccctatcacatagcttgcctcacccatactctttcatttcgagatactagatagagactttttagtctcatgaagacgaccaagatcattagttgccagcaatgtatcgtcacatacaggactagaaacataaccttactcccacttgacttcagatatacacacc

SEQ ID NO: 63832 - DNA, 394 bp, Glycine max
  unsure (1)..(394): unsure at all n locations
cgttccacctacatagcataagatcttcatcggtaattattcttgttatggatgctaatntgtgaatctcttgcacacccaagtttggaccaactagtaaaagggtgaccaaagagtcaactacaattccaattcttgattaccactcaaacaaattactgttttcttcgatagaccaaaatcattttatatgttggataaaactgttggtcacaaagctgattctctacaccatgatgaacaacaataatgaaaacaaactctctcaccaagccactaggagagaagccaatcattgccaagcaagttgcaagggatgtttattgtttatttcattccactattgacaaaatcatgcatgctaatttttataaccgggctgttataaaagtgt

SEQ ID NO: 63833 - DNA, 484 bp, Glycine max
  unsure (1)..(484): unsure at all n locations
atccttaagtcaccgcggctgcagctgcccgagaagaatcccggagatattttatccctcgaaagactggaaagcggtttctaatgactcctctgcggcctccacataaggcataaaggatgggcagttcaccaagatgtcttcctcgcctgatacgatgaccagatgcccttccactacgaatttcaaattttggtggagtgtagagggaacaactcccactgagtggatccacggacgccccaacagacaactgtaggggagttaatgtccattatttggaaagtaacttggcatgtgtgagggcctatctgtactgggaggtcgatctctcccctaacctctcggcgggtgtcgtcgaaggcacaaaccaccattgaactcggctttaggtgggaggcattgaatggtaatttctccaaagtgctcttangcatcacgtttaaactggaaccattatcgatgagcaccttggctatgatat

SEQ ID NO: 63834 - DNA, 440 bp, Glycine max
  unsure (1)..(440): unsure at all n locations
agtgtagattccttctaaaaacaaaaaacaagcggacttttctatatatatagatnccttttcagctcgcatggaactttgaataactttatttcatcaaacataatcaccaaagagacattcctaaaacgcagacagaaggtacatatggcataaaacctcagaatctgagctaaatgaatggcaattatattatagatgaatcctctgcaattgacactgattcactgaacaggaaacttaccttcatccctcttcacactttccaatgtccacaagccccatggttggcccaatccctcccatagccacagtttcagtgaagtggtgattgcgatggccatcctctcccatagcgaaacaggtacgcatcttcaagacgtggttggtgggggccaaagcgatggcgtcngagaagtagtgaattgcggtggggtagt

SEQ ID NO: 63835 - DNA, 463 bp, Glycine max
  unsure (1)..(463): unsure at all n locations
agctngtangattatggcgtacccatcacatgttttttatgtggcggtcgggcgatggtgcacaacaagttttccacatacacaatgcgcgcataaacccaccatcccctgttgcccacctccaactgagctcacgtactcccacgtagcccatatcctcgtttctctcaacaccgggtccccatcaatcctctcaagcttccacaacatccaagcagaacaacaatcanacagtataagctatcacagccaagcaaaagcagagcaaaggcagaaaactctgctcaaacaccaaccaaaatcacagcttttctcacttaaagaccacagtaacaattccttcgatccaattcgttaaccgttggatcgactccaaaattttactggaagtctatagtgcataagcctacattgtgaccgttgggatctactagcaaagatcaagaactcattctgtactact

SEQ ID NO: 63836 - DNA, 433 bp, Glycine max
  unsure (1)..(433): unsure at all n locations
agcttatgngagcacaaatgtattgcggatatgctcttatcacatatgagtgggtgatgggctgtgttaatgaggcaacccagcacagaagaattgctatcagacatgatggagacaagcatgccacaccatatggacgattgtgtaactgattttgctcctaagcgctgagctgacaccttagcattggacaattagaatattctgtctactggaatatttcttttgttaggatatttccaatatccgttattgctagcctccctcgtaggacctgtataatgaactagaataagcatttgatgcctataaatggacaatcattgtaatatacatgctagcaataacaatcattacattttctctccttaatcccactctttctggaggtgtccgtagtcttcaattgtaggaacataacaactggtgcttt

SEQ ID NO: 63837 - DNA, 436 bp, Glycine max
acactaaaaactaagctctgaattcttgctagagatgtggcctaagcgctcatgctttttattggtgaaatactcaattaatttatgtggcgcaccatgtgaatcctttgcaacatttctctataagaacactcaatatcaattaaagacccataaccaacatcatttggatcacataagagaaaaatattatcttttccatatgaacaataataattagatatgtccagaatagaaacagaaattgaatttcgccttatagatggtgtgttagacaagtggcttcaattgcttaataggaatgggtgaattaactaaagaaattctcttctaataaacttctaaattacctcttaaatctatatgttaagaagattgaagattaagatgaaaatttattgaagcgtattcttcatattgcaagataaataatata

SEQ ID NO: 63838 - DNA, 443 bp, Glycine max
  unsure (1)..(443): unsure at all n locations
agacacctgcgggcggcggcttgagcgtgtgattatgctngatgcgccatatattttatcttttactcacacgattatgagtctggtgtatgagcgacactaggcaaaaaacgcagaaagaggatgatcgtgcacacttgaccgaaatgtgatggtttagtatagtacatactacttttggccaccgctattattgtggctatgctgaggaccctcgctggatacgaactctgtaccggtctaggctatgctttgatagaaaggaactgactgtttcacgacttgctacctgtaccaacataaaactacctgactgttcaacggtttcgctgactaacagaaagcgggatatctctcgttattggtaaagtctaagataaactaacttatggttggcattgacaccacatacaagaattctcatccttggatcaataacaacg

SEQ ID NO: 63839 - DNA, 458 bp, Glycine max
  unsure (1)..(458): unsure at all n locations
cgagatgagtaagtatagaagggtgaaacttcctgctnttattctttgaccacagagtggtacctggagatatgtcgcgggggtcaagagaccttggggacgtcaggtggggtgctattgcccaaaaccaagcttgaccaatcccgacccaacccgggcatagtcggtcagtgagaacctgtgatgtacctaagcaggcgagctcctggcagtcaacagataaaaggaacaaagaccacanagcaaggaggcttgtgtggtggctggccagctgtgaatcttgtgtgatatatggattgtggcctctggtaatcgattaccaagggtgggtaagggtaatcgattacaaggcttaaaaatgaagacaggaggctaagatggtctctggtaatcgattaccacggggtgtaatcgattaccacgcttgaaaacgaggtcaggaagctaagggggctttt

SEQ ID NO: 63840 - DNA, 415 bp, Glycine max
agcttgtgaataaggacatgacgtcatgcgttatatgtgtaacaacaccacaaaataccgatgttacctttcacttaccctagtctcaatcttggcgtgatattgatcatcactcaaaatgacttccttatccatcctatcatatccctgactacaagatgcaaatgcatgcatgcttatgattaaaatgtgtaaatgtaacaagcagacaaatggaatcttgttcacttttacttaatctcgtaccgaaatccattgattgagccacatggatccggagttaatgagcacaatatacagtgtatataccaatgagtcctcagagatcacacacgtgttgaaactactaactgccccaggaactatgcctaatatatctgaaccacatctagactatatggcgaaagcgaatctt

SEQ ID NO: 63841 - DNA, 263 bp, Glycine max
tcttgaaagaaatgtgcactcatgtttaaaaactctctagcaataacaatagcagcacttgcgagctatctactaatgctactcgaccaataataatggtgagtcttaatacctcactcttcctgttctgccccatagccagataatagattattaccaagtgagccaccgactgagataaagtaatgtccgtggattataataatagatcgttcttatatcgttctagttgtaaggaaaataatccttggtatagtggccaa

SEQ ID NO: 63842 - DNA, 408 bp, Glycine max
  unsure (1)..(408): unsure at all n locations
tgcttanaggatgtatgaaaagacggcaatgatttattcttgcgaaagatgttaaagaacatagaatctcatggaaccagtgggaaaaaggtgaaaaggaataagtctgtgccagctgaaacaaaaaagactggaaatgattttgacatcttaaatatggtcagagaaattaatgtggataacttggggacccccactaattttgaaccaagtaacggtcatgaccattctctgattaaaaaggaactgaaggatccagaatatgcaacaggtaaaaagagaaaagctagcaaaacaacacctgttccggtgcctaaacgtaggcggtcttcctctgctcatggaaaattgagattatcaactagtatatcaaaggcatctcgaagagtttcaggagtagactcccct

SEQ ID NO: 63843 - DNA, 414 bp, Glycine max
atcaagagcaagagccaaaacaatgcttaaccactcaagatagaagcaaaacaacaatccaatgcttaaccatctatgggaaaaactcaaacaatgcttaatcaccatggacaaaaacttacattaacataaagcatcaacaaattgaacaacacaaaatctgtcttcaatgaggaattttcacaaacacatacgttgtgaaccaacagcaaccaaggtttaaccacccatggcaaaggctaaaataatacttaaccaccatggacataagttaataaatgaacaatacttaattaccacacatgacagaagctgaaatcatcaaaacatgcctaaaaaggctgaaaacaataagccaatataggccaaatatcaacaaaacaatgaagaaattaataccagacagttggtgtg

SEQ ID NO: 63844 - DNA, 433 bp, Glycine max
agcttgccgatatagcagagcttgctgtgttatatcatccaagtgagcgtccacctatgtcagatatagcatcttggttggagcaaattgtgaaggacggattgatcttatagcattaatcattgccctgtgagaaacttgtttcgaattttgatccatccacaatatcttctttttcataaatttctgtgagtaatgctctcttctgcgattgtaaattgttttgagtttgttgtagattgcttatctcctttgtagtagttctttgggtttacttttcctaatcttcacgaagtgaaggacatggcattattgcaacatacacacatgctgtgaattatttttcctgtcatataagcctaagaccatttccagcatacagatagaatcaatttacatgtacaacagtgacttaaaatggtagtcaacatga

SEQ ID NO: 63845 - DNA, 334 bp, Glycine max
gtctagaaagttacatgccccctctcaactccctcaaaaaaataaaaacaatcccaaaacattccagtacagcaatttagtttggccttacctgtatcgagaagcatcagcccctatcatgttatgtgccagaccattttgtgccagaccattttgtgccagaccattttgaactcgtaaaagagtgacagttagattctgaacttcttgcttgcacacatcgcatgttctattacctttaatggtaaaccatttgactgcacatcctctgtgtgccaatgaaaggtcacctttgcagccacacttccaattgaaagtattaccaccttctcca

SEQ ID NO: 63846 - DNA, 414 bp, Glycine max
  unsure (1)..(414): unsure at all n locations
catgcaagcgttgatgttngtgttgaatgcattagatgtaatcataccaaaagcacgaaattaggtgcatatagagctacatacatcttggaattgatacatacggacatttgtgggccatttcatacgccttcatggaatggtcaacaatattttatatcattcataaacgattactccagatatgcatacttgtttcttatacatgaaaagtcacaatctctggatgtgttcgaaacatttaaagttgaagttgaaaatcaactcaacaaaagaataaagtgtgtcagatctaaccgtggtggtgaatactatggcagatatgacggttcaggtgaacaacatccagagccttttgtcaggtacctagaggaatgtggaatcgtcccacagtacaccatgccggggtcacct

SEQ ID NO: 63847 - DNA, 364 bp, Glycine max
  unsure (1)..(364): unsure at all n locations
acttagaacacctagtctgcgtcttttaattattaatcatgctcgtaaaactaaaaaaaaggaagagaaaaggcacaactatatgtgtatatttattgtgcttttggaaagggtgaaaatggaaggaatggatggaaaccaatttgtgtcattgaattaccttacagccatatgaaaaatgtgtgtttcaattttttttgttgcacaactgtaatcttgctgtgctattaaatatgaaattattcttaatttgtaggtaccgactgctacggattggcaaaaagtacttgccaacttcagtgttactgcaacaaatactgtcatactgctcatcttcngaggtatgtatgtcattcttaaaact

SEQ ID NO: 63848 - DNA, 445 bp, Glycine max
  unsure (1)..(445): unsure at all n locations
cccnctatcgntaaggctccaaaacaaaagcttgctttgttgtttaataagaaacctaggggaaattactgttcatgctgaagagactgttgcttcaaagagtgcagttgagatggtcttgcgttgttctcacttggataacaaggatgtcttttctaaaagtgtacgtattctatatcccatattaatgtcccctatttaattaaatacatttttttttgtttgtcattcgaaaaatctctcatatatgtttttcttgtaggacccttttctaagaatatcaagaatggttgagagtggaggttatattcctatatgcaagactgaagttatcgacgacaatttaaatccaaaatggaaatcagtttgtcttggtgcccacaagtttggaagtaaagtaagcctaccatctttgggcttaacatttaatgctacaagatagtat

SEQ ID NO: 63849 - DNA, 407 bp, Glycine max
  unsure (1)..(407): unsure at all n locations
cgtttcggatgcaatcagaaataaattngataatttattaacagataaagtagttcggaagttgaataatcgcggttaagcatgagcatgaggcaatcttctatcaaacgcaacgtcaatgataatctcgcattgttaggcttataagcttttttcttcttgcactttctcggcaacaaaatagcatacagtaagaaaatcgatccgaaaggaacaatgaacatcatttgtcgaaggacccgccttaccggatgcgatgaacggagagcttgctcgtagtgaaatgaagtttgcctgattttgatggcgggttgagactngagagtgtataatggaattaatggcaacccaattatggtagtcaacttctgcacctcactaaattgctttctgctccaatgcgtaaa

SEQ ID NO: 63850 - DNA, 443 bp, Glycine max
  unsure (1)..(443): unsure at all n locations
agcttgccaacccatggaagctcctaatatctcccttactntntggggtgggccattcttggatggccttgattntctcagggtccacttggaccccatttctaccaactacaaaccctaagaaaactatattatctacacaaaaagtacacttctctatatttgcatagagggtgtttttcctaaggactgaaagaacttgcctgagatgtcctaagtgatcatctaggctcctactgtacactaaaatatcatcaaaataaacaactacaaatctacctatgaaatcccttaagacatgatgcataagcctcataaaggtgcttggtgcattagtgagcccaaaaggcatcactagccattcatacaaaccaaacttggtcttggaaagcggtntccactcatcaccctttntcatcttggattggtgatacccactttta

SEQ ID NO: 63851 - DNA, 389 bp, Glycine max
  unsure (1)..(389): unsure at all n locations
aacttagctagccctagaggggatggaccttntagggtttggagatgatcaatatctttgcctataggttggacctcccataagagtatggagtcagcaccacttttaacatttctgatttaactccttttgcaggtggagctgatattgaggaggaggaactaacagatttgaggtcaaattctcttcaaggggaaggggatgatgcaatcctccctatgaagggaccaatcactagaaccatgagcaagaggctccaagaagattgggctagagctgctgaagaaggccctatggttctcatgaaccttatggtagatttctgagcccatgggccaaggttgggtccatttatctttgtacatattagactaggatgttattatatt

SEQ ID NO: 63852 - DNA, 452 bp, Glycine max
  unsure (1)..(452): unsure at all n locations
agcttctcaaggaagttntctcaagaaatcttcttagtaagctacctagtctataaatagaagcatgtgtaacacttgttgtaactntgatgaatgagagtcttgtgagacacaactcanagttcaacttctctccctttttcttccttcaatttcgtgctcccccctccctctttctctccctctttcttttcctccattgaagcatcctctccaagcttcttatccaaggctcatcttggtggtgaagctcattcttccatggcttattccttaatggatggcgcctcctctcacctcttttgctttgtcttccgctgcatctccatggtggaaaatcaccattaaaggaccccattgaagctcanagatccagcctccatagaagccccacaagcaagcttccatcaagtggtaatcagagcacaagagcttcaagtaggtgctcctta

SEQ ID NO: 63853 - DNA, 341 bp, Glycine max
gcgaaataggttggcgagtacttatactactattcatttatatggtgatgagtttttcaagctccctaagtgtggatgagcgttgtttggtgtcgagcgtggtagccttgaaaaatgtgagagttgcgagtcgatgtggcttgttaagcccccgagcttggacatgtgttgtccgagctgcttttgccaagttgtccatgatggacatgtgtcacgtgaggtaattcatcagatttgacaactctgccctttctttgactgttggagagtttatttaagatagttcgtaatggctatctgctgttacgggggcgtacgacacttgtgaggtactcttgcat

SEQ ID NO: 63854 - DNA, 428 bp, Glycine max
  unsure (1)..(428): unsure at all n locations
aaaatatgaaattaatgttctgattaccaacgaagaactgctgaaggtgttagtacaatctaactactggaaaaaatatggaccaatagaaattttagctgtctttactaaatatgttgtgaaattcgaagacgaggtgactgcgacatcgctaaacaactgaatgcaatgtttatttttttgctttttcgttgatgtaacctttatctgtttacggtgtgtttaaatcccataataaagttcaatgtgttatttcaatggtccaaagataatttattttaattttttgaccttcaaaccttacgcatacttagaaggatctgattcctatntttttggattntctgcctcttactttaggtgttatttgatggaaccagggaacggaaatatatttttttggttttttgacgtccaaacataagaaa

SEQ ID NO: 63855 - DNA, 360 bp, Glycine max
  unsure (1)..(360): unsure at all n locations
agcttaacatcagaccacttccagggtgctggttctacttcacatggacttgatggngcctatgcaagttgaaagccttggaggaaagaggtatgcctatgttgttgtggatgatttctccagatttacctgggtcaactttatcagagagaaatcagacacctttgaagtattcaaagagttgagtctaagacttcaaagagaaaaagactgtgtcatcaagagaattaggagtgaccatggcagagagtttgaaaacggcaagtttactgaattctgcacatctgaaggcatcactcatgagttctctgcagccatcacaccacaacaaaatggcatagttgaaaggaaaaacaggac

SEQ ID NO: 63856 - DNA, 269 bp, Glycine max
  unsure (1)..(269): unsure at all n locations
agcttatccttattgttgtaggtgtgtgncatgnnctgtgtaaatagccaaataattcatttctaagaatagttcatttttctttaaaacggggtttataaagatcaaaacattttcanatcttggttttggttacaacagattctctttcccttncattctgtcaccatagaccgcactcgtgtcccacatcacttgactgacattgcctatggcatctcattggcttcatctgtccactatcgctttcttgtaagacccctctctca

SEQ ID NO: 63857 - DNA, 416 bp, Glycine max
  unsure (1)..(416): unsure at all n locations
agctntcacatggatgtccgattcggngacttattatatcgagacgctcgaaatcgaacaacggaagctctcgataaattcgaatggtcataacatttcactcggatgtccgattcggggacataatatatcgagacactcgaaattgaacaacggaagctctcatgagattcgaatgctcataacatttcacacggatgtccgattcggggacataactcatctagacgctcgaaattgaacaacggaagctctcgagaaattcgaatggtcataagatttcacacgaatgtgcgattcggggacataatatatcgatacgctcgaaattgaacaaccgaagctctctagaaattcgaatggtcataacatttcactcggatggtcgattcggggacataatatatctagacgct

SEQ ID NO: 63858 - DNA, 458 bp, Glycine max
  unsure (1)..(458): unsure at all n locations
tcagctntgtccncaaggcttcatgtagactcgtccaaaatcgcgaagtgaacctcggatccctgtcagatacaatactagaaggaattccatgcaaccttactacttccttgatgtacaactccactagctttgccattctatacttcatccgagtgaaatgttatgaccattcgaatttctcgagagcttccgttgttcgacttcgagcgtctcgatatattatgtccctgaatcgaacatccgagtgaaatgttatgacaattcgaatttctcgagagcttccgttgttcaatttcgagcgtctagatgaattatgtccccgaatcgagcatccgtgtgaaaagtatgaccattcgaatttcctgagagcttnccgtggtcaatttcgagcgtctcgatatattatgttcccgaatcggacattcgtgtaaaacttatgaccattcaatttcttg

SEQ ID NO: 63859 - DNA, 440 bp, Glycine max
  unsure (1)..(440): unsure at all n locations
aggtaacaagggctgcttcatctgatcctgtttatgactttgactatgatccaattatggggatgcctgttactaaattcagagatgaatacataggaaaatccaagggagagaccccaggaaaattgaagggtactgggatgtactcatatcaacaaggtaatgccgcacttgatagcgatgaaactttcaacagtttcattcgacgtgccaagtgtaaaattagaaccgtgtcccacatcgatcgcgagcagagcaacgttgcacctgcaacgccaccagtgtacgaggccaatgccatggataaccaaaacgaccagttttcaaattttattcagagtactaagaagaagttgagaacaacatcaagcatgagaaagaatggttccttcaataacggctattgatgatggngacttgacgtgtggtgtgtccattat

SEQ ID NO: 63860 - DNA, 356 bp, Glycine max
  unsure (1)..(356): unsure at all n locations
ntattttaattcatggataaattaatttcattttataattattttcttatactaaaactgcttttttgtgaaatatactaaaactgattacatatatgtttatatgataaattatattgttacaaatacccatcgatgactgatcagattattggagtctaatagttccatcctccaatcagtcagtaacaacaaaggaagtaattaaaaaactatatatttccctatgacatacctttccaacaacagtcaagaaggtgcctattggaagtatatacccactcagttttgttgacaccaaaaacctgaaaagtgaaaaacatggtttcaattatgtaagtttaattacaaaatga

SEQ ID NO: 63861 - DNA, 442 bp, Glycine max
  unsure (1)..(442): unsure at all n locations
agctagtaacactcgcctgggcgagctgatctaactcaanattttctgtttcggtaaaaaaatcatatctcatactcaagattttatatttcaaatcccaacggtccggatgtggataattttcttaggaacctccagaataaaattgaagatgatccaacgattaacgaattcgggatgacaattttattgaaattggtttaggtaaaaatttgaaatctcataatctcaacttagctcaacaaaactctacataactcaacattcacatcatgaaattcacacatgactaattcaagccatatctcaattcattcaagtcaaccatatagtcaaataacacaataaatataattaaacatcaatttatctatcttagggtgttacaattacaatgtatattntgtgtaaatggtgcaatggttatgttggatagtttata

SEQ ID NO: 63862 - DNA, 377 bp, Glycine max
  unsure (1)..(377): unsure at all n locations
tcatttttcttttttcatcacatcataaaatntatgatatttataaattttttcaatttttctctatactttagatagcacattagatgtctatcaaatatttttttttcttaatggaagcattacatatagttaataacatgaatcatagtatantaattatatactgacataatttgttgctcatgtaaacagaactatgcaaaataggaaccgatgaacaaagtgactggtacttcttcagtcataaagataagaaatatccaactggaactcgcaccaatagagctacanaagcangattctgganagccacgggaagagacaaggcaatatactctaagcattgcctcatnggcatgagaaagactctcgtg

SEQ ID NO: 63863 - DNA, 436 bp, Glycine max
agcttgagtataattcattgtttgtgttattatcctacattaaataattggattattgatgtttctgtcacgatcaagtgatagttgatatctccatatgtgcgtacactgtgattatgttttcgtttctagaattcatttggagtatctactgttgattctagatgagtgatccttcttgatttaaaattattgtctcctaatcaatcgagtgttcatcttattattggctgctcatcttccaatcatgtctagttaaactgcttgataatctttcttgttgttacttctaatacgaataaagagagacttcgcctttgacaatcatgttaagatgttttgagaggaaatacttgagtagacatgatcattgttacctatagacgaaagtcaaacttagtaagacgtgtacctgtgttccttgaggatatgctta

SEQ ID NO: 63864 - DNA, 353 bp, Glycine max
  unsure (1)..(353): unsure at all n locations
ctaacactagaatattttactgttatattntgntctaattgttatgcttaagnagttaactgcaaattaatgtaataagttagatatctaaactgttgtcttatttttctgatgttaatgcctcttgcctttagtttgtcatgtactttttagcacctcttgcctcaaaatgttaaaaccttaaggtgtgatgaccttgatttactgactttaaatcatatagaaattagtatttaaaaataatgacagtagccttggcttttattccaatgactatgacgctggtangatgacttcaaaaccacagatggtgtgaccaaaatttgagtctatggtaacaatgggtgtttgct

SEQ ID NO: 63865 - DNA, 451 bp, Glycine max
  unsure (1)..(451): unsure at all n locations
agcttgtgggaatgaagagtgatcacaaagtttatttttgtcctgtttatattctaacctggataactctgtagatgcatggatcttcagaaagactcaaacatatatatcatcatgatataataatttgtgggcaaaaaactctgcgcacaaaagattaataaatataatggaacacacataaattaactatactgcaaaaaaaaaaaaaaatacagaaacatttacattatttagcaccttttagttacatttatttatggaaatacaccccaagaaagatttactgctttaacaggattatttgtttggttagtttaactcatttaatttatatataacttcataattattttatttatcaaatatttttttatgtttaattcaaacataactgtggataatattcttctcgtgaatattngaaatgattctttacaaacgtctttta

SEQ ID NO: 63866 - DNA, 437 bp, Glycine max
  unsure (1)..(437): unsure at all n locations
aaatctantgattacaccaataaaaaaagagcagttttatattcatgagantgtaaaaagatgagtttctcaacatagaattacaccattggatggatgatggtgaactccaaaggaccatccgcccagaattaaaatgatcaccacttgcttatgtagccatccaatattataaaattggttacatttgtcttaacttaaagtgacataaaaatggatgtggaaactaagcaattggtgatgtgagaatcaacagatatggatgtctcaacaaggaatggagaaaaaactaactaaactgatgtacccagtgcagagatcctgctttgctagtatggggaggtcatatacacactttcttgattgcaagaggtattctgatttgaccatgacactgcacaagcgcatttatgtttgcagactcgctctacaagatg

SEQ ID NO: 63867 - DNA, 400 bp, Glycine max
  unsure (1)..(400): unsure at all n locations
cacttgaagttgtgagttttcattgataatttttacatctgttcaagcttacttatttgagaatgtctttgaaattgctggttntttttaccatatacccgatctgaaatttttggttaaatgtatgtctttatgaaaatttgttaaggtgataattagaaggattaagccatatatagtttaagtgcaaggttctaaggccaaagtattatttggaaacaataattgtcttcatatgaatttgttacccttcttcgggtcttcctctccttagttgccattttcatgtccaccttacactntggctgacttatatatatcatcaaaccacttaaagcacaagcacatgttctatctgacagcaactactagccacctcacataagggatttcatgcttt

SEQ ID NO: 63868 - DNA, 420 bp, Glycine max
  unsure (1)..(420): unsure at all n locations
atcgttcgcgtgtatgacatccactccacattgtttgaattataggagaccttcaatcctattatgcaacgtggcggacaaaagtgggcagttaacttgaacggtcattattgtcaatgcggaaggtattctgcgcttcactatccatgttcacatattatngcaacttgtggttacgtgagcctgaactactaccaatatatagatgttgtttatacaaatgagcacatcttaaaagcttactccgcacaatggtggcctcttgggaatgaagcagctattcctccttctaatgatgcatggacacttatccctgacccaaccacaattcgtgcgaaaggtcggccaaaatcaacaaggataagtaatgaaatggatggtgtcgaaccgtctgacaccgaataatatgcagtatatgtg

SEQ ID NO: 63869 - DNA, 441 bp, Glycine max
  unsure (1)..(441): unsure at all n locations
agctntatagtagatgtcactctactccaaatccttgattgatatgttaacaaggaaacataagtatattcaccaggaaaacattgtagtggaaggaaattgtagcgttgtgattcaaaagatccttccacctaagcataaagaccctgngagtgtaactattccttgttcaattggagaagtcactgtgggaaaggcttttattgacttgggagccagtataaatttaatgccactctccatgtgtataaggttgggagagttggagataatgcccactaaaatgactttacaactggttgaccgctccattaccagaccatatggagcaattgaagatgtgttggtcagagtgaaacattntatcttcccggcagacttcatggtaatggatatctgtgaagatactaacattcctgtaatattgggaaggccattcat

SEQ ID NO: 63870 - DNA, 433 bp, Glycine max
  unsure (1)..(433): unsure at all n locations
tgaggaagtgtggaagggtgagacttcctacttttattcgntgaccacagagtggtacctggagatatgtcgcgggggtcaggagacctcggngacgtcagagtggtaccaggctgtgtaatcgattcacagagtacaagccactggtaatcgattaccagttatgtgtaatcgattacacagtgcattttacaggttttcatgttctgaagctgtgtaattcgtgtntggcctctggtaatcgattaccaacgctgtgtaatcgattaccagagatgaaaagccttgaggtacacctcttaattgcatgtagtggttatgagacgcattgtgttgctaccgtagtaagatctctcgtgaaagagtctacccctttcttatatttcttgaaaatcgtgatggcggcgcaagttatccatgatcgagtggagat

SEQ ID NO: 63871 - DNA, 453 bp, Glycine max
  unsure (1)..(453): unsure at all n locations
cgcatgccaagctttgcagtagcttcaacgtagtttccctttatgctgacagcatctctactgggtgagtattgcgaggccatttgtgataactcaagttttatcacctccgtcaactcttgtttcattcaccccaaactatgtttgctttcctcttccacttctctcctccattcttcctttaggttatgcgatgcctatccaaagtactgactaattgtcacaccagtcccagctacacgaacccgaccaggatgctccggttggtcaattgtagtattcaatatgtcatcacgaccattaggaacaaagcttccctatgtcgtctattcttgtaaagaatcatgtaacaaccataaaaaggatttacctttcaacttagatcatgttttcatagcaaanatttgaattgaaattaaggcataacatgaaattacaattntgtcagagatt

SEQ ID NO: 63872 - DNA, 467 bp, Glycine max
  unsure (1)..(467): unsure at all n locations
ttgatctaccaccactaccaccaccatcatcttagttgtctattatgtttaatattattagnaccttgatttctagccatgtatttggctatattattatgacatttgaacaatttagtatttcttttatttgcatggtatgatngaacaattgtgaattatgctatatgactatgtggttttaatatatttgatctattcatgtttcttgcttcatgattggtttatattctttaatgaatgtcttgtgaatgattagtagtgtatatatgttatttntactacttgttatgtactttggctntntgttgatgccaaagggggagagaaatanggattaaatcaagaactcacataagtaattaacttaatttcaagtgaagcatanactcacaaacaaagggggagaatatggaaattaagtgagagatcgactatgaaaaagtgtgtgtatgtnngtttctgat

SEQ ID NO: 63873 - DNA, 456 bp, Glycine max
agcttcgaaatccaacggcggcgcgtggcttccgtcggacgcgcgtaagggctaggaggcggctttctcggcggcagattgcggagtttgcctccggcgcctctctccgggggcgccaacgcggtgatttgatcggtggccatgagagtggccgagtgggcaacggctgaaaagttaaaaataaaaaccaaaaaacgaggtaaaggcaaaaatactgtaagacgtaagtccaaacattgcgctctctcactcaggtacagtacgagtagccgcggatgtacatatactgtagttttgaagactagtcaacgtgtgtcttttgtggtccacctctcattctctcagaacgtcaattgttataagattaaggagaataaaattgggggtggtgggttttacgtactgcatcttcaatcccaatcccgactctttatatattctcctttcccacctcaa

SEQ ID NO: 63874 - DNA, 343 bp, Glycine max
  unsure (1)..(343): unsure at all n locations
gaccgagccataagagatataaatatgtgaccatggcatgaatttgtatcatcttntcacatcttttcccaatcaaaatctatcttcatctcttctaacatattcacttttcacagatttttctgattctttntctcttcatctctctaaaagttttgttcaaaactttctcttccaagtaaagttctttgttcaaaaacttgcgctattcatctttttcattctcttctccctttgccaaaagaacaaaggactaactgcctgaattcttttgtgtctctgttctccctttgcaagagaattcanaggaccccgccttgagaatctntngattcttcccttc

SEQ ID NO: 63875 - DNA, 408 bp, Glycine max
  unsure (1)..(408): unsure at all n locations
caccgagctgcagctgtggtcagaatggattgnatanctctattaatctttaaattacttaaagaagggaatattgagcgatttttaacttttaataagataactttaaaatattttttttgtttttttattttttattaaaatgtgtctatagaatagatcaagtttacaattttcataaaaatttaaaactatttaatacttcattaaataactntaatctaatgtgtaatatagtaaatatcgatagtaagattacataagtataaatgtttgatttatctgaaattcgatagttgatataatattaaaatatttaacagttaaatcaataaaaaaattatacaagaagtaattaatagaagtacttccaaagtaatatgattcttttccttcttaatctctttc

SEQ ID NO: 63876 - DNA, 373 bp, Glycine max
  unsure (1)..(373): unsure at all n locations
gtctcaaatatattcaatcaatcatgaattccattnntcataccaaaattaaagaaaaaggggggctttgtgatctcaaaccagagccgttgttcaacgaacgtgccatatacgtggaaagattntgtctttcttgatcgatcaggcagataactatttttttttttattttgtaaaatgttaatactatattacgtgaaaattgacaaanaaaatcacatgaatttgtactataaaaagaaaatccatacaaaattgcatcaatttgaaagagaaacccaaaaactactagagtccacctagtggcggaactgaggtagagaaacacacattactattggtagcttctacttaaacgtagaactctcgacaa

SEQ ID NO: 63877 - DNA, 423 bp, Glycine max
  unsure (1)..(423): unsure at all n locations
agcttatactatcaattcatacaccttttttttctattgaattcgngggtgctgcataagctttgttttcttatgcttctatatgtagtttttttttttactttgaaaacttagctaacgatttgttgaagaaagtaagagtgaagttaacaaatattttgtttatttgttggttttggaatggctgcagggagaggaaatcgcggaagagacgcaacggtggaagtgattatgtggaagacacacttgaaaagtggaaggagtacaacaggcagcaacaacttggctctagagaaaatggggtggaagtgattcacaaagctcccgcaaaagggtcgagaaaagggtgcatgagaggaaagggagggcctcataactccgatcgaagttcagaggtgtgaggcagaggatttggggtaaatg

SEQ ID NO: 63878 - DNA, 462 bp, Glycine max
  unsure (1)..(462): unsure at all n locations
ctaatgagaaccgctgaacttaagtctatcctattttctgtctataatttcagcccacaatgaaggatgacgaatggataagtgagctttcctaagctgtagagtgataaaatataatgcaaaaggctaataaaagttggaccagataataaggattagatttatatgacttacaagaaccttgctaatgtacgatcaataaatatctccataatgacattctgagtcctaagacatatcatgtaatgtcctacaaaaagacctaagcatgcacctaatgaaaattgttgaacttaagtctatcctaagttgacctaataattgccgcccanaatgaatgatgatgaatgtataaatgaacttttataatgagaccctcttaaggatgataaattaacccagtttaattaaacaaaaatcacaattaattattattaacacgaattagtagatgatttcaaa

SEQ ID NO: 63879 - DNA, 453 bp, Glycine max
  unsure (1)..(453): unsure at all n locations
cggatccttaagcgaccgcggctgcagcttgagccattcaacgacattctttttactcggatgtctgattgagtccggtcatatatcgagacgctcgaaattgaatgttgaagctctgaaccaattcaaacgacaataactttttactcggatgtctgattgaggcccgtaatatatcgagacgctcgaaattgaatgttgaagctctgagccaattcaaacgacaataactttttactcggatgtctgattgaggcccgtaatatatcgagacgctcgaaattgaatgtggaagctctgagccaattcaaacgacaataacttnttactcggatgtctgattgaggcccgtcatatatcgacacgctcgaaattgaatggtgaagctctgagccaattcatacgacaatatacttttactcggatgtctgattgaggcctggcatatatcga

SEQ ID NO: 63880 - DNA, 333 bp, Glycine max
actacgctaacattaatttgagcgtctcgaatttatcggacttttcaacatcataaaattttgcgtttgatggctccagattcacattcaatttcgagcgtctcaatatattacgggactcattcagacatccgagtaaaaagttattggtcgtggaaatagcttaaagcttcacaatcaatttcgagcgtctcgatatattacgggactcaatcagacatccgagtaaaaagttattgtcgtttgaattggctcagagcttccacattcaatttcgagcgtctcaatatattacgggcctcaattcaacatacgactaaaaagttactggcg

SEQ ID NO: 63881 - DNA, 434 bp, Glycine max
agcttaggttgctcattgactccagattgttataaagaaggacatagatctatatggtgatctgcagaagaacatagacaacagactcttgtaacaggtgcagatgcagatttctgattcatggcaagctgagttactaggttgaccaaggcatcaagttttccctcaagctttttattttcagcagatgaagatgaatctgtggccacctcatggactcttctaaggacaatagcatcatttgttgcactgaattgttgggagttggaagccatcttcttaatcaaattcctagcctcagcaggactcatatcaccaagggctccaccactggcagcatcaatcatactcctctccatgttgctaagttcctcatagaaatattgtagaaggagttgctcagaaatctggtggtgaggacagcttgcacacaa

SEQ ID NO: 63882 - DNA, 457 bp, Glycine max
  unsure (1)..(457): unsure at all n locations
atggngtacccatcacatgtggtactaggtgtcggtcgggcgatggtacaaaacaagttctccacatccacaaatcacgtacaaacccaccatcccctgttgcccacctccaactgagctcacgtactcccacgtagcccttatcctcgttcctctcaacaccgagtccccatcaatcctcccaagcttccacaacatccacataattcaacatccactcatcacaaactaacaaaaccaagcaaaacagggcaaaggcagaaaactctgcccaaaactcaaaccaaaaatcacagctntttctcacttaaagacaccagtaacatttccttcgttccaattcgttcaaccgtggagtgactngaaaatngtactggaagtccctagtgcataagtctacattntgaccgntgggatcttctagcanatattcagaaccncatatgtactacccttt

SEQ ID NO: 63883 - DNA, 444 bp, Glycine max
  unsure (1)..(444): unsure at all n locations
agctntgaaagttgagcttgaangtattttgtggtgaaggagaagctgaaggtggcagtcactatggtcaggaaagaatgtgatgagctgaaatatatcaacatgaccacggttgaagcgctagagcgggaaacaacaaagatccaaaagaaagagtggagtaggaacaagtttcgaggggctttatggggcagcagtaacaagctcaaacttagaaaggctgagagggacaaatcaaggatggaaagcatggtgttagaggataaattaaagagttgtcagaggtcgaagagaatttgacagagcaattgagccaaatggaagagaatatgttgataatcatcgatcaatataaagagaaggtgaacttggctgctagtcatgggcagatgctggaggatgaacaaacaaaggtatcggctttgcaaattgaaaaggaagcga

SEQ ID NO: 63884 - DNA, 383 bp, Glycine max
  unsure (1)..(383): unsure at all n locations
tataanagatatatatataataatatatgtgcttatgtgattatngnngngnnnataatattaaattatttattttatatgtgtgattatgttagcttgtagctattaaaagtaatatttgtgagcatagagtagtctaagtcttcgtgacgcacatatgcgattagtgatttcataatcactaatatttgtgataaggatactacgctttaggactcattaagagctaaaatggtcaattaaatagcacaactgctatctctgaaaattatccatgttctaaaataatctttgtattttttttcatttaaccacccttatgtctcccttttgtgaaaactagcatcattcctcatttcacaaccacctagtcacctaacatg

SEQ ID NO: 63885 - DNA, 437 bp, Glycine max
  unsure (1)..(437): unsure at all n locations
agcttgccgatatagcagagcttgcttgttatagcatccaagtgagcgtccacctatgtcagatatagcatcttggttggagcaaattgtgaaggacggattgatcttatagcattaatcattgccctgtgagaaacttgtttcgaattttgatccatccacaatatcttctttttcataaatttctgtgagtaatgctctcttctgcgattgtaaattgttttgagtttgttgtagattgcttatctcctttgtagtagttctttgggtttacttttcctaatcttcacgaagtgaaggacatggcattattgcaacatacacacatgctgtgaattttttttcctctcatataagcctaagaccatnttcagcatacagatagaatcaatttacatgtacaacagtgacttaaaatggtagtcaacatgaatttt

SEQ ID NO: 63886 - DNA, 438 bp, Glycine max
  unsure (1)..(438): unsure at all n locations
agcttcaagttgacaaagactttagatgtttgtataatctcacttgaagttgtgagttttcattgataatttttacatctgttcaagcttacttatttgagaatgtctttgaaattgctggttttttttaccatatacccgatctgaaatttttggttaaatgtatgtctttatgaaaatttgttaaggtgataattagaaggattaagccatatatagtttaagtgcaaggttctaaggccaaagtattatttggaaacaataattgtcttcatatgaatttgttacccttcttcgggtcttcctctccttagttgccattttcatgtccaccttacactntggctgacttatatatatcatcaaaccacttanagcacaagcacatgttctatctgacagcaactactagccacctcacataagggatttcatgct

SEQ ID NO: 63887 - DNA, 446 bp, Glycine max
ttagaatactcacgcttgttcgcacatcgttcgcgtgtatgacatccactctacattgtttgaagtagaggagaccttcaatcctattatgcaacgtggcggacaaaagtgggcagttaacttgaacggtcattattgtcaatgcggaaggtattctgcgcttcactatccatgttcacatattattgcagcttgtggttacgtgagcctgaactactaccaatatatagatgttgtttatacaaatgagcacatcttaaaagcttactccgcacaatggtggcctcttgggaatgaagcagctattcctccttctaatgatgcatggacacttatccctgacccaaccacaattcgtgcgaaaggtcggccaaaatcaacaaggataagtaatgaaatggatggggtcgaaccgtctgagcaccgaataaaatgcagtagatgtg

SEQ ID NO: 63888 - DNA, 447 bp, Glycine max
agcttgtgcccctctctttctctctttcgcttatacgaacaccattacaacatatacttgttttactctccttacacacattcttacttgagcatcaaagtcctttgttttgcaggtcacccctcctatcaaaggcacttctttaagccgatgtgtgaagttcgggaccccactcagccacgtctgccctaacgtgccacggttctagattttggtaagaacatttggcacccactgtggggccgcagtaaaagataccccacggcctctcatcaatcctttcacatccatccatggttagcactcgatttggcatcagaagcgagacccctcttgcagactcacatcctcatccggcaactatgatagacgcacacactctacaacaactccaaaaccgcaatgcggagatggagcaatgccatgaggaagagttgacaaagctag

SEQ ID NO: 63889 - DNA, 336 bp, Glycine max
acttgttggtgatgaacaaaagctcataactgtttctaaaaatgcgaaaaaggatgaccctagagctgcaaactcgtcaatcccgtgggtatgggctttgaaaggggggaaaagaagtttttgaatgcaaaaacgtcccctctttcgtcattcttataatttggtgcaggggtggctcgcccaggcgagctaacctgcacattttttttatttttttgaggggaacattaaccatgccccctcccttctcatggattagcatcttgcctaacttgaacttacttaagttagaattaggtgtcgattacttatctgtactctcttaaaacaaacaaa

SEQ ID NO: 63890 - DNA, 444 bp, Glycine max
  unsure (1)..(444): unsure at all n locations
tgcaagcttcttaggtgaccatgaccacatttcgatctggaatgggtttgaaagtgggaaagtaaagtctgctatcttgtcgtgaagtcataaatcataatattggtatgaattatgatgccttgttttgtctgcaaagatgctcttaatgttagaaaatcttgccaaatcatggggactaaacgctgaaaggctaatcaattcattttagttaatgaaaatatagctagacaaagcagaaaacatttcattcctatctgactatctacaaaaaggtgaaggtcttatcatatgtttcagaatatatcctaatatttagtttagaaaaaataaatttttatattctattaaaaaaacttttttttttataataaaacgacttctcttttctaaaatggcataatcttaattcttaaacctattntagtaattnggaatttaatc

SEQ ID NO: 63891 - DNA, 398 bp, Glycine max
  unsure (1)..(398): unsure at all n locations
acacattttcttttacttggaaataaaatgcgctatnttttctatttatagntattttttaagaccatatttgtattaactaatntaactagaaccgagtatgaggaacgagacgcacactgatccttcaatatcagttaatgtcagtcaacaatatatttcagattaaaatgcagctaggagaaagtcaaatatgacgcaaccacatagcacagatcacaacgaaagaacttggattcctnctccaaacggcttgctaaaacgcaacttagatgctgctattctcaaagagataaacacatntggaggtggtctttgatcagaggagaacatggaagctatataaatcaaactccaaatatttccagggaattcatcaaccatcgcagaagctgaat

SEQ ID NO: 63892 - DNA, 432 bp, Glycine max
  unsure (1)..(432): unsure at all n locations
agctnttatccctttgaaaggctggtatgtattattgtttnttaaaaaaatacttttaataaatatttgaatttttattcctttgttagtatatatatgcgaggggtagaggatgtcacagcagccatatccattctggctagtaaaaagactacataatcacatgttcatagacaaatgttgaatttccgattaattgtaacattgctactggaaaaagtcttggatttcagattcattagagtttcatttactactgctatatgcgttacattgtaggatcatctaagattctcgcgttattgcttctgacaaggtatatgtgtggcttagtggcagagtgaatctctttagagtggctgtcatcaattcacataagaagacccttacttatctttggcatatacaaagtgtgatatgccagggctggac

SEQ ID NO: 63893 - DNA, 293 bp, Glycine max
ctttcgctagagtgacgccccataaagtgagtcaagtttgtaaatactttcttgttaccctactatcactatggataggggaagaatctgcatattggagaattataatcgtgtgctcctattactacctttaattactaagggtctatgtgaactacacgaagcggacaagtgcggatttttccagcacactttgaactaatgcacctagatgattcatatgtcggctaagcaataactcaagacacatgtcacgtgacatattgttatgaatcactttctagatcatggaa

SEQ ID NO: 63894 - DNA, 373 bp, Glycine max
ccaaacaaataaccaacgcactcacatggacggagcttaatactcgtaggttatattggttgttgccataacctctcttttgttgggtttaaaaagaaacctctctatctctatattatttcttaaacaaataaagtttattttttaggaatcatgatatgaggttattcaatgttttgatttaattttataaaaaacatgtggcgatttattgattattttcttattatcaatgtgattttttatgcatgactattatacctttgtatattaatattgaagtaggaatgtagcaccttatgattcgagttaccattctcaagttacaattctttaactccctgttgatcttaggtaaaatgtagagtttcac

SEQ ID NO: 63895 - DNA, 329 bp, Glycine max
  unsure (1)..(329): unsure at all n locations
acgtctggatgtactgactactgccatgtgcgatttatcaccctagtcatgtccgngttgctggagtctgtgtcatgatcaaacaatactttggattgacttcaaggagctcccgcacatctatgtccatggctcctaaagacctggagcagttgacacaaaaaaatcaaggaccagcaggaggagtcgatcacagaaaaagtgactagacaactaatgttgtccttcagccagatgcagtcgcagatgcaatcacagagactcgcactaccacatcagcctaagcctggtccttctattgcttgtgttagcacaaaaggaaagttgtg

SEQ ID NO: 63896 - DNA, 435 bp, Glycine max
  unsure (1)..(435): unsure at all n locations
agcttgtacaagtcttgctgcaatttatcttttatctntgctgcatggctatatcctaagaaggggtgaccctcataacaatgtatggaagatgcggtgagacttcgatgggacaaagtgttcttgatatttatgtttcacttatatcatggagaccaaatattacaaaacaagtttgctaattgtaaccatatgactataaattatggatcaatcgcattctatcccccacatattgatcatgcagctaaacataattgtggcagggaaaaaaatgtatagaaatataagcgaattctgcataagctctattttataggcaatccaagtacctttagggataccattaaggcatgacagaacccttctcaacactgtatcaatacgcggacaggttaaaccaactgtgcacaccagatcagtatatatcacaac

SEQ ID NO: 63897 - DNA, 431 bp, Glycine max
  unsure (1)..(431): unsure at all n locations
ctcatgacagtgagaaactatcacccactatcgtgatgttttatgcanaccaaactntcgttgatgtcatgattttaaactatctatctcatatgatgccgatattattgcttttttctatgcttattcacatgtttgtggtttaatcattatattttcatgtaatgttttaggatctagacattgggaaatatttatatactaagaacttgagaagaacatctaggtgatctatgtctaggggtagagcgatattgtttagtctgttttatgcatctctgttcgtaatgcaaattatttaatataactcttaacggattaagagtgatattagatgatttaggctctcttacttgaacggtcataattagaatatgttaatagatgcgtataataatcatattcatgttaaatagagaaatattcattac

SEQ ID NO: 63898 - DNA, 444 bp, Glycine max
  unsure (1)..(444): unsure at all n locations
agctngcatcagctccatccatccatcttttctctccccaagcttagatatttgattntaagtggctgcaaagaaattgaaagccttaatgttcattcaaaatctctcaatgtactgagactcagaggttgttcatctctcaaggaattttcagtgacatcagaggaaatgacacatttggacttatctcagactgctatacgtgcattattgtcgtcaatgttatttctcctgaagcttacatatttgtatttaagtggctgtagagagattgaaagccttagtgttcatataaaatctctccgtgtactgacactcatcggttgttcatctctcaaggaattatcggtgacatcagaagaaatgacagtattggagttacctgacactgctatanttgcattgccaacatcaattggtcacttattatctttaaaagagtta

SEQ ID NO: 63899 - DNA, 456 bp, Glycine max
  unsure (1)..(456): unsure at all n locations
cgattcattctatgtacccatggtggtccacattgtgtgttcgtgtattttattctcgnttcatttactttttatacctccttttgacgtgcttaaagccatttatttaagttatttctcgcttaacctaaaaataaaacaaatttccaccgatcgtttgaattgtattatccgttaacttcggttaaaatgaattccgacctttcggtcgtaccgtaaccacgttggaaatcaaaaaagaggtaaaataaacaatataataaaaaaaatgtgtntagtaaaataaagcgaanaatcaatcggacgttntctctttgggatttctcattcttaatngaatngactaacaactaaagtgaaataagggctaaatcaactcgcctagtcaagctcgtccacaaaaataggtntttgagntngtcatttcaatttcttactaagtaaatggatcatttc

SEQ ID NO: 63900 - DNA, 442 bp, Glycine max
  unsure (1)..(442): unsure at all n locations
agcttccatcacttagcgtggatgatgtgtattcgacacttcttctctggaagaattttattgtagcagcgctcagcgtgctatcctgcgcaaagccccagatccattttgtaacttgagtttttaagctgggcttagcgggccaggaagttctaagcgccaatctcttatgggttttgaattcttggaagtgtgcttagtgcgcctgttgcgctaagcctgaattattctctataagttgaagcttgatggtacgctaagcctcacatctcaggctaagcgcatattgtagaaaacttttggggtgcagaaagcactaggcgcagcttgccgcactaagccccagatgcttacgggactttacaacttcatgttgggtttagcacgaggctatgctaagcgctggggttntaaactcaaacgtcacgttggcacgctaagc

SEQ ID NO: 63901 - DNA, 215 bp, Glycine max
  unsure (1)..(215): unsure at all n locations
tgatggnagtcgaccggaagtgattggggaaatccacatccccattcagataggcccccacacttgcaatgtggtgtttcaagtgatggacataaaatccgcctacagctgcctcttggggagaccttggattcatgcgctgggagtggtcccttcgacgcttcaccagaaattgatgttcgcggttgatggacttttggtgatagtgtcgggcg

SEQ ID NO: 63902 - DNA, 443 bp, Glycine max
  unsure (1)..(443): unsure at all n locations
agcttgactggtctttaactcaagaagatttaaatgcnnttaatattaccttgttgatcattttatccagcatatacttttcactttgtatcaattagtaagccattttgattcctgtatacaatttgtattttattctttagtgttgactctngactcattttttttattctaattgttgtttctccattatacttctgctttttaaaaattctcatagatacattaatgaaaaaaaaaagccaatgcaataccttaaaaaaaaaggcaaaaaaaaaagtcaagcaaaaaataaataaaaaaagattaaaaaaaaagcaatactacgacggttattgtataaccgtcttagtatgttacacctactacgccggtaattntataaccggcataaaaattcattttcgcatgtcatatacaacgacggttcgtggcaaccgtcg

SEQ ID NO: 63903 - DNA, 443 bp, Glycine max
  unsure (1)..(443): unsure at all n locations
tctggtgtgtctccacattntccattataacaccaacagtattacagaanaacaaccctaagacataattttcagcttcaaaatcaagtggacaggcaattcgtggcttcaacttctcaacttgtctctttgtgcttctgaccttcaactcatcctatgatattactccaaaatggatgctaatttgtcaaacccattaaggcaattgaagcatcacgccaaaccattataaaatgcattacttgagctaacacaaacacttgtggtacaagaattgacactttggcgaagttcgttcacaggtagccacatngtttgtagtagttnttatctctcngtcggtgggttcgtggcctcaagctctaatgctctataagtatttcaggtcaaggaaataatttactntagtctcaatacactggttacacagtgagatgcaacac

SEQ ID NO: 63904 - DNA, 428 bp, Glycine max
  unsure (1)..(428): unsure at all n locations
agctaatgctgcaaacatctacaatagactttctcaacctcagcagcaaaatcaaccaaggcagaactaatatgacccctccagcaacagatacaatcccggatagaggaatcaccctaatctcagatggtctagccctcaacaacaacaacaacaacaacctggctccttccttncagaatgctgctagtccaagtagaccatacgttcctcctccagtgcagcaacaacaacaacagcaacaacaacatcaatagagacaacaatccactactgaggcccttccttaaccttcattggaagaattagtgatgtgatgcaaatgacaatatagaacatgcagtttcagcaggagactagagcctcaattccgagtttaacaaatcagatggggcagatggccacccagcttgaccaagctcaatcac

SEQ ID NO: 63905 - DNA, 223 bp, Glycine max
  unsure (1)..(223): unsure at all n locations
ggagngcgtgagctcattttgtaggtgggcaactggggatggtacgttaatgtttgatttatggaagtgggagagttgatttgcaccatcggccgatcgccacctagtaccacatatgatgggtgccccataatccactaagagttagtcttcctacttttgtttgttgaccacagagtggtacctggagatatgtcccgggggtcaggaaaccttgccgaaa

SEQ ID NO: 63906 - DNA, 436 bp, Glycine max
  unsure (1)..(436): unsure at all n locations
agcttgagatgaggaagtgntgaatgttgttacttcctgcttttattgttgaccacagagtggtacctggagatatgtcgcggnggtcaggagaccttggggacgtcaggtggggtgctattgcccaaaaccaagcttgaccaatcccgacccaacccgggcatagtcggtcagtgagaacctgtgatgtacctaagcaggcgagctcctggcagtcaacagataaaaggaaaacaagaccacaaagcaaggaggcttgtggtggctggccagctgtgaattttgtgtaatatgtgagatatggcctctggtaatcgattactaagggtgggtaatcgattacaaggcttaaaaatgaagacaggaggctaagatggtctctggtaatcgattaccacggngcgtaatcgattaccaggcttgaaaacgaggtcag

SEQ ID NO: 63907 - DNA, 380 bp, Glycine max
  unsure (1)..(380): unsure at all n locations
tctcttcttctgcattggagataaactaaactattatgtgaaagtctaattcatctgtgtttcacccctgcttcaattactttttgggtgtagagctatcaanggttttattcacaatngatatatatttcctttgggtgtttgtctttccagtggagatttgcattngtgttacatggtcaatggaatctattaggcatattgtttaaacttctacatgattaagttattacaaatttgcatttgttgattgtttagagaagggatatatatggtgcttgtgagcaatatcttggactgagacacgatgacagtgcttccaaaaagtcctatgccagcaaccaagtaaatattgnggagtaacttctttctttcgttgg

SEQ ID NO: 63908 - DNA, 460 bp, Glycine max
  unsure (1)..(460): unsure at all n locations
atcctctgagtcacctgcggctgcagctgacaataaagaaaaaaatgtatgtctgaccacaataaatgaaagtaaaaaaaagagttctttattgcagagataaaacagagtcttattacagataaaataataaaacatacatggtaaaaatgacatagataaggaaaatactttgtaaatgataacattgaactaaacttcaactggaaaatcatattcataattggtagtttgcaaatgataccattattagttgcaagagagtatgccgtatcttataatttaaatgaggcagttgcagtgggtaaacaattgaaatgctgaatctgtttgtttgacactttntatttgattggtaatctacattactaataatggttaccattattagttgcaagagagtatgccatatcttataatttaaatgaggcagttgcagtggtaaacaattgaaatgctg

SEQ ID NO: 63909 - DNA, 398 bp, Glycine max
  unsure (1)..(398): unsure at all n locations
ccttcctaaccctcctgttgtggaagcatcccaagactatataagggctntctcacaaccagccaatggtgcatgaagcaagcgcagacactgtcctttcatcagaacaactgatatagggccactacctgcaagtgagtataaaaccaatntcatccaatgactcatagaagaatatgtgggaggaccaaaatgaactggacctgttggtctaggaagaaatgatgaatgagaaagaggcactatggacacaactataccataatcacgaagaaacaaacgatcaagagttgccggtgcaagagaagccaagcttcagagcgaagaatgtctacacgatatttttttggcctttttagcatgtctgtcttaacatctgcactttcaaatacttctaa

SEQ ID NO: 63910 - DNA, 444 bp, Glycine max
  unsure (1)..(444): unsure at all n locations
agctttgaagctattttgacagttgcaacttgtgtgtttttatccatgccttctgataaatttagctgcttcagtttattttgaattctttatgcagatttaggaatgacttaaccaaatttggtacttctgctcattcttcaatcacaaggcacatgaaacaagaaaaaaatattgttttaactctcaactatgaaactaacattntcactggatatctagggggattaatcttgggtttagggagataaaatatattttaccctgtatatctataattattttttggtttgatattgaggctcttgttatccataaggcatgttgggctccaactaatccaagtcacgccagttggattcatttaaggggaaaagcactcccagggattattggttttattcacaataaatcagaaggcattatntaaaggaaatcaaacct

SEQ ID NO: 63911 - DNA, 404 bp, Glycine max
  unsure (1)..(404): unsure at all n locations
gatatagaaatccgcagatcttctttaagctgaatatctgggataatccaagctgtctggatcctgtaaacatcctcaaagccaaggtagaangctcgtagcctctctttaagaagactntntgagaccgaatttgtacccggaacatgaattccctcatccttaagcaaagtgagaatgggactccaactagctctctcatatttcattgcatgctgcttgaaactccaattgcactttcgaatccattcatctacatgtatgagcctgagttcagaccccttaaccttttcagccatataatgcaggttggtcattaagaacaagtgctgcaacgagacttctttgtataacttggacctctcctcgagggtgcttccaagattgagccattgatccgaagt

SEQ ID NO: 63912 - DNA, 467 bp, Glycine max
ttaagtcacctgaggcatgcaagcttattccgaggatagtttattatcatgtacattctgcaagagttggctcataacaggccaatcataactatggagcattttcttgagcaagtagcctggcctaaagctcaacttccattggtgagacccaaggaggcagctccgcctgagcccacacctgtgcaggttgatccagagccagctggcccacaatctccagtggtgaatccattgtcttctcctgagcgtgaagtagttcccccatctccacctcttattatcatcttcgatgcatcatcagatgaagcggctgcccctcccgattcaccagccaaagaaatagctgaccttcctacttccctagttggaggaattgccgatctttctgattcgtcatctggagaagatgttgctctcactgattccccagtttaaacactggttgaaatagtgattcctgatga

SEQ ID NO: 63913 - DNA, 442 bp, Glycine max
  unsure (1)..(442): unsure at all n locations
atacctcttgttataacaaccttgcactcttccttgtgattcttctcgatanttgctccaaagctgctggatgacttctcagctaactgcttggccagttgacccacctggatctcaagatttttcagggctgactcaatactcttatggttggacatggtcagttgcataaactgagctagtgtctcctctagtttggtggtcatctgaaaaatatttggcccttgttgaggtggcctgttggaaagtccaccctggtccttattgaattgattgccagggtgtgatctccattgcccttgctgattatagggacctngctggaaccccgaaaatcctccttggggtgatcctngtctctgttgattcccatgtatgaacttttgagtggctcttaatgggatgaatgacctattatgacctaccacaatgtcaactatac

SEQ ID NO: 63914 - DNA, 447 bp, Glycine max
  unsure (1)..(447): unsure at all n locations
agcttgcctaattaacctgaaattgagagataatgattattaaacacacaaaatggaagtactaagtatttatcacctatacttaatagaaaatacttataacactacaaaataaccataaattggaagagtttgatacaatttatacaagttttatgcacaaaagttagtcgtattcaccgactaatacataaactccctgttttaatcgatttccaggctattcataatcgattacacaagtcttttgagaagctttaagagagatactcattttgattaccggtcatccgtaatcgattacacaattcagttaagaccatgtctagtttttaggagtctctattntaattggttaccaggtgatcgtaatcgattacttcattcttganagtgttcttaggagtgatcaagagccctttattcgattaaatcaagaatctaatc

SEQ ID NO: 63915 - DNA, 418 bp, Glycine max
  unsure (1)..(418): unsure at all n locations
tacgcttaccactatggctcgcctccggatttcactccccgtgccgtcccggatgtattgagccaagcccctaccttcgaggggcaactcccaccttatgacgattatcccgtgcaagacgatgaggaaggagatacccatctcggccccctgctccacctcaaagatccacccncccatgaactaccccaaccaaacatagtctgccacgttccatcttcacccacacccgtaatcgaatccattcccttcgcagaggataagggaaagattgatgcactngaggagaggctgagagcggtagagggccttggcaattacccattctcggatctagcgaacctatgtctcgtgcccaacatcgttatccctcccaaagtcaaagtaccggactttgataagtacaaagggacgacat

SEQ ID NO: 63916 - DNA, 447 bp, Glycine max
  unsure (1)..(447): unsure at all n locations
agctntgatctaccaccaccaccgccaccatcatcttatttntctattatgnttaacattattagtactttgatttctagccatgtatttggctatattattatgacatttgaacaatttagtatttcatttatttgcatagtatgattgaacaattatgaattatgttaaatgactatgtnggttttatatatttgatctattcatgttacttgcttcatgattggtttatatttttcaatgaatatcttgtgaatgattagtaatgtatgtatgttttatatttgttacgcactttggctttttgttgatgccaaagggggagagaaatggggattaaatcaagaactcacataagtaattaacttaatttcaagtgaagcataaactcaaaaacaaagggggagaatatggagaattaagtgagtgatcgactangaaaaagat

SEQ ID NO: 63917 - DNA, 449 bp, Glycine max
  unsure (1)..(449): unsure at all n locations
tctagccaaatggacttaccttgacttaattcctttgatatctcctttgagccttgtttccctttccttgttttgaagctcactacaagccttaagtgaaaaaccatgatatcaccatatccttaaggaattttggagctttggaattgttntgggaataagtgtgtggggttttgtttcattggataacatgttttgttggccatgcttcatgatatattttgagccatacttgatatacattgcatattggttaaatgttggacatgctgaatatgatgttgtttctcanaaggctacagagcananaaaatatatatattatnaaaaaaatcgaaaaagaaaaacagtanagttgagtgaataagaaaagaatgatgagactctnggttctactcctttatgttaaaatntatccttacttcttnnttatttcttatggtttctta

SEQ ID NO: 63918 - DNA, 453 bp, Glycine max
  unsure (1)..(453): unsure at all n locations
agctnggcctcanacttgttgatgataggttgccaaactctccagcttgtagggcttgaccccactggaattccaagataagaaaaaggaataaccagctggctgcagttaagaaaatgagctgcatctctacaccaaccctctgatttgcccaaacagccaaactgacttttagcataattgatcttgaggcctgaaaccatctcaaaacatctcagaatagactttaagactctaacattggccgaatttgcagttccgaaaaacaaagtatcatctgcatatagcagaatattgacatccattactaggattgttgttgtttaaaaaagaatttaggtttgtattgtagtctttggatattggaaatgcaattatggccatgctaggtttagtcttctggatgattctaaatggtgtgtctttatgggactgatttatatcttatgtgac

SEQ ID NO: 63919 - DNA, 195 bp, Glycine max
gtatccctaccactgtgagactccaatggatcataactaaagaaataagtttgtatgtatggtgcgcactcagtgccacaaatatactcttgtaatatagtagtgccttgtgtagtatatttctataactaggactaaagatgtgtacagtgataccaacacattcaataaggggttcttctctcaagatcctta

SEQ ID NO: 63920 - DNA, 441 bp, Glycine max
  unsure (1)..(441): unsure at all n locations
agcttcatgcttaactatgtatggtttatcttcattactggggntcaagacatacaagtgagcttgtaacaaatcttctacacttggagagatcacatgcagtcctcttgaacccttaccacccactctgtcatcatgccgagactcaggaagcccaacaggtttagctttctctaagtattctgaacaaaattcaatgacttcttctgcaatgtacctccctacaatagatgcttctggacgatatagattctttgtatacccttttaagatcttcatgtatcgctcaaccgggtacatccaccgtagataaacaggaccacaaaatttgatttctctgaccagatgcataatcgagtgaatcatgatgtcaaagaaagcggggggaaaatacatctccaactggcatagtataagtgcggcctcattattcaactcatc

SEQ ID NO: 63921 - DNA, 452 bp, Glycine max
  unsure (1)..(452): unsure at all n locations
cctacacacatccactggtgtggtctttagtttttcacgcccncacaaacccatttgtctcacatcatacaactgatgaatataaggtacttcctgtaaccatgatcagcatcacaaccttttgcactagtagtatgagagactaacagtccatctccaccgcaatgttccacacacctgacaactctgccaaatcgagtgaagcagtaaaatatgcatcatttcaagcacttcatgaatctcgaagtcatgtagatgacaagaaagtcacctcaatgttgtcgccatcaccatcacgactgatgttgcgacccaggtcatctcgggtgacacttgacctcttgtccatcatggaggagcctgtgacaacaatccgaattttggtattgagattaaccttacctccaccccacctggtctgtcgaattttggtgtgagcttgaccctccttc

SEQ ID NO: 63922 - DNA, 182 bp, Glycine max
atagctactttcgggggcgttatccactttttaagtaactatgcaactcttttgaggtgtgacatacaaacaaaagaatcaataattacagcgatatcagaacacaatttaaagcgacaaatgagtgtcatataacaactcatttatcgtctcaccatcggactgcgttggtatatatatgt

SEQ ID NO: 63923 - DNA, 433 bp, Glycine max
agctgaagtgatctactcagatgtgtggttgttagtcggtgaatacgactaacttttgtgtataaaacttgtgcaaattgtaccccaaaatatttcattcacttcctaccaatctgttgtaccccaaattttcaatttcatacatactttgctttctcctcaattttttattttttctttactttgcttctctcttgtttttctttatttttctattttttagatttttccttttttagtactttacaagagagaatgaggataatactttcaacctttgttcacatgatagcttgttagtaccctttattttgttccttttgagtggtgcattgccactccaaacttaaaacttttcctaattcctagacctatgctctcctatcctttaagttaagggtagtagtggatatataaacatacaaatttcaat

SEQ ID NO: 63924 - DNA, 474 bp, Glycine max
ctcacgcttcacacagtaaattatctttatgcattcttgttattccttatacgagattatgcttttgtagctttgagattaacctcaagcttgcagggccaagtttcttatgccatacctagtgatctcctttgacaaaaagtaggcatgacacattatgatctgatagctcatctagtctaatcttatagagattacttttcctcttagtagaaaagagaaaaaagtatggacttgtcactattctgtacgatgcactcatccttgttaaaggaaacattatatccattgtcacataattgacttataactagtagattgtgttttaacctttcaacaaataaaacattattaataggatgatatggcggtatacctatcttacccactctttgtattagctcttgtttattccctccaaaagttatggttccactatggatcgagtcatgcattggaacatacacctttctc

SEQ ID NO: 63925 - DNA, 439 bp, Glycine max
  unsure (1)..(439): unsure at all n locations
agcttagacgaaatgatgctcagatggaattatagagcttcaaggtagatggagaacaaagagcttcaaggtagatagagaacagagaccttagatggagaaaaagagagcgcgagcaagatacggctcacaatatttttcaaaatctaagttcaacatcatttttttaaaaaaaaaaaaaccgatgttaacaaactgatgttaacattaacattgattttccgaaaaaaaccgatgttaacaaacttatgttaacatcggttcttggaaaaccgatgttaactaattaatgttaacattggttttccaataaccgatggtaatgtcacttcgttaacatcagattttcacaaaaccgatgttaacggatacacagtatttacaattatgccaccatgtttacgttaacatcggttntgttaacaaccaatgttaagcc

SEQ ID NO: 63926 - DNA, 411 bp, Glycine max
  unsure (1)..(411): unsure at all n locations
tggaatccaagattccgttttacacaagttgntcaattctattcttagaaatgtgacctaagcatttgtgccataatgctcctgagtttgtattatcaattctatgcttagtaccatgcaattttacattaaaggattcaccacaagagactgcaatatcaagtaaatatggattatcattaaccaagagtgaatcagttccaacaatatctgaattaaaagacaatctgaacacattgtttccaaatgaacacaaataacccaatttgtccttataagaaactgaaaccaaattccgtctaaatgacggtacaacaaaagtgtctttcaaattcaaataaaaaccagtacataataataatttaaagtgccctatagcttccacttncactgatttaccatcttcaacat

SEQ ID NO: 63927 - DNA, 448 bp, Glycine max
  unsure (1)..(448): unsure at all n locations
agcttgagtggcctcgtctgccctgcantttgttccatgggctttacacactcctttgtgcaatttgggcagttggtcacctgtaagacttccacctgtacttagagagtcctcatctcctgctgtcatagataaagaggagcatattcaggagccaatggatgctgatgtaatcgaacgatctggtgccacaaaagcagaaccacagagtataacagaagatggggagcttccaactttgcttcctaaagtgtctaagcttgacctttccgcacaactgaacttaatttcaaaaagtatcattcccccgctcaataaaatcaggtcacaaagtttcaaaaagattgatgatagttctgatttcttgctggatattgaaagtgatattgatgagccagctcagattgaacaagaacatgaaaaatcccaataccatgccagaaagtct

SEQ ID NO: 63928 - DNA, 384 bp, Glycine max
  unsure (1)..(384): unsure at all n locations
ctaccaattngagatttgcttttcctattctaatgttattttattngtatnnagctttcggggttgtgtagttttcggcggtgaatgtgatcagcctatggaccatggagacatcgaacctgngttggttctatcgtacgctttttgtctgaggtgggaattagacggaacacctaatcatttcggtgattccacgattattattcatggtggtcatgctatactgcgcaccccattttagactaacgtgcgccctaattttcaatttttttttacttggtaggaaagtaaataaaaatcatatagttttttcatgagtgataatgtacaagaaacaaacttaaatatgtatnntgattctaagcttggggtttttctatgcat

SEQ ID NO: 63929 - DNA, 439 bp, Glycine max
  unsure (1)..(439): unsure at all n locations
agcnngngcgcctcactatctctctttcgtttatacgaacaccattacaacatatacttgttttactctccttacacacattcttacttgagcatcaaagtcctttgttttgcaggtcacccctcctatcaaaggcacttctttaagccgatgtgtgaagttcgggaccccactcagccacgtctgccctaacgtgccacggttctagattttggtaagaacatttggcacccactgtggggccgcagtaaaagataccccacggcctctcatcaatcctttcacatccatccatggttagcactcgatttggcatcagaagcgagacctctcttgcagactcacatcctcatccggcaactatgatagacgcacacactctacaacaacttcaaaaccgcaatgcggagatggagcaatgccatgaggaagagttgac

SEQ ID NO: 63930 - DNA, 321 bp, Glycine max
  unsure (1)..(321): unsure at all n locations
acactacttgtggttatgaacttttttcttaacggaatcaaaaaatgcgaaaaaggatgaccctatagcttgcaactcgtcaatcccgtgggtatggcttttgaaaggggggaaaagaaattttngaatgcaaaaaccgcccctctttcgtcattcttataatttggtgcaggggtggctcgcccatgcgagctaacctgcacattntttttttttttttgaggggaacattaaccatgccccctcccttctcatggattagcatcttgcctaacttgaacttacttangttagaattaggtgttgattacttatttttac

SEQ ID NO: 63931 - DNA, 443 bp, Glycine max
agcttgtttaatctttccatatgagtatcttgacctatgaaatcaaaagttttccttaatattataaaccaaagaaaaggtatacaattatcaaatattttggcaaataaatacaaacagtttcaggacaaagatttgctctaaataattgctaaaagataggaaacttactacattttgatgagttgtatcatattctacgattgtttaatatgaagatgtaaaatgaaagtgcctgaattgaaacaaagtgacaaatctcaaatatgtattttccatcttctgagtataactccatatatagctagtatgcttatcagaattgtcccatccagctcccattgtcttaccaaacaagtctgcatgaatccacttcatcacgaaccatttctcacctttaatcacaagtcatccaacattgagactgctagtgatcataggag

SEQ ID NO: 63932 - DNA, 431 bp, Glycine max
  unsure (1)..(431): unsure at all n locations
atagaattnggatctctcttggagatttaaaagatatgttaatganaattccttgcaaatgcaaatatgagttgtgagggttggtgaaagggttgtgaaccctacaaatcttcttttcacacctaggctttctttgagtgcacccaccccttaacatacaataacgtccattggctcaatctcaaactcactacaaatgactcaacacacgcaaatatatgtacaacatcaccacataaataattaatttacttcaagcacttaatttanaattaatttaactggctaattaatgaaaaccacttaatcatacattctacaaacatatgatgttacaactccttgacaagagaaaaagtgtctcaaaatttcttggaaggaatatatagcatcgacaagacgcactattcgcttcagagactaatctttct

SEQ ID NO: 63933 - DNA, 442 bp, Glycine max
  unsure (1)..(442): unsure at all n locations
agcttgtagagtagtgtctcgtatcgatttattcgattacttacttatagtaatcgattacacagttctttttgagacaataattgattcttcaagagtctctgcttttatcgattaacatgtgatataatcgattacttctctcttaaaaagtgtttcaaaagtgatcaagaacattttaatcgattacatcaagaatctaatcaattacattgttcttgaaagttttccagcttttgggaagaacactttaatcgattgaaatggtaatataatcgattacttctttgaaataatcaattatattgtatatttaattgattgcaggcagttataactattttctctatgaatagcctccttgtgttctcacttcaaaaaagttctaacaacttctgaatgagctnngaatacgagctgatattanagaaagaaagaaaga

SEQ ID NO: 63934 - DNA, 369 bp, Glycine max
  unsure (1)..(369): unsure at all n locations
tccttaatcacctcattaaggactagaacaccatgtaggatgtgtctgttttttatgaaagttgtctgcctctcatcaataagaccagatatcacttgtctcaatctatntgctaataacttagctatcaccttgtacatacatccaatcaaggagatgggtctgtagtcatcaaatgactggggatgtttaattttgggaatgagagctatgaaggaagcattactgcctctagggaaactgccatgtacatggaattcatcaacaaatcttctgaagtcagctttcagcatatcccanaattctttaatgaatttgaagttgaaaccatcangtccaggacatttgtccccatcacaactncatact

SEQ ID NO: 63935 - DNA, 421 bp, Glycine max
  unsure (1)..(421): unsure at all n locations
agcttcctcgtggcttctttgagaagctttctcaagagacttctttgagaagctagatccttatctatccacactcctcttttaactaaattaacctccttaaaaataattacggatgaaaatagcgcaacaaataatcaaacatcaaacataattactaataatatatagatctatgtatcagggtgttacatgtaatcctctaaaggtgagggcgtgcagccctctgatggagaggacgtgtagccctctgaaggtgagggcgtgcagccctttgttggcgaggacatgtagtcctctgaaggtgagggcgtgcagccctcttgaaggtgaggacaagtagtccttggaaggtgaggacatgtantcctctgaaggtgaggacgtgtagtcctccgacggtgaggacgtgtagtcctct

SEQ ID NO: 63936 - DNA, 472 bp, Glycine max
  unsure (1)..(472): unsure at all n locations
cttctagccaaatggacttaccttgaattaattcctgtgatatgcccttttagccttgtttccctttccttggtttgaagctcaatacaagccttaaatgaaaaaccatgatatcaccatatccttaaggaattttggagctttggaattgttttgggaataagtgtggggttttttgtttcattggataatatgtttgttggctatgcttcatgatttatttttgggccatacttgatgtacattatatattggttaaatgttggacatgctgaatgagatgttgtttctcaaaggctacgtatgtaaaaaaaaaaaaaaaatcgaaaaaaaaagaaaagcaataaagttgagtgaataagatcttaaatgaaaaaagaatgatgagactcttggntctaatcttttatgttaaaatntatctttacttcttntattttctaaaattttttcctaatatgcacttattccc

SEQ ID NO: 63937 - DNA, 442 bp, Glycine max
  unsure (1)..(442): unsure at all n locations
agctntgatctaccaccaccgccgccaccatcattttatttttctattatttaattttactagtactttgttttctagccgtgtatttggctatattatgacatttggataatttagtatttctttatttgcatggtttgattgaacaattatgaattatgttatatgactatgtggcttttatatatttgatctattcatgtttcttccttcatgattggtttatattcttcaatgtatgtcttgtgaatgattaatagtatatgtttgtcctatacttgttacgcactttggctttttgttgatgccaaagggggagagaaatagggattaaatcaagaactcacataagtaattaacttaatttcaagtgaagcataaactcaaaaaacaaagggggagaatctaagtgagtggtcgactaggaaaaaatgtgtgtatg

SEQ ID NO: 63938 - DNA, 410 bp, Glycine max
  unsure (1)..(410): unsure at all n locations
tcatcttggtggtgaagctccttctttatggcttattccttagnggatggngcctcctctcgcctcttctcctttgtcttccgctgcatctccatggtggaaaatcaccattaaaggacctcattgaagctcaaagatctagcctccatagaagccccataagcaagcttccatcaagtggtaatcagagcacaagagcttcaagtaggtgctccttaaacctccatcaatantttgctttaccttctcttccattgttttttcttcattttttctccatgtatctcctcaaatgtcttgtgctaaatgttgttaacatgaatctttagaagtttcaccgattaaacttgctatagaagttagattttaatttctatgggtcaaatntcttggtcttggtcttgttcttg

SEQ ID NO: 63939 - DNA, 443 bp, Glycine max
  unsure (1)..(443): unsure at all n locations
agctngacgcaacactctgagcataaaagtgtgttttctttnttagaatgtatataggtgtatggcaattagaatatattagatgttcttgtatgttgacatgggtaataggatactttctacacatgcgcgtgtgcataaatggattacatgagtttggtctaaatcagaggggctagcacaacatttttgcgttaataaaagcattatcttgtaaaactaacttctaaatgtttgttctcgtaggaaatggccccgaggaaacttgcctcaaagagatccaggaaggataaagcaaccgaaggaactagttttgctcccgagtatgatagtcaccgctttaggagcgctgaacaccagcagcgcttcgaggccatcaagggatggtcatttctccgggagcgacgtgtccagctcaaggacgacgagtataccgatttcca

SEQ ID NO: 63940 - DNA, 305 bp, Glycine max
  unsure (1)..(305): unsure at all n locations
gtgttgaagggtgaaacttcctgctnttattgttgtatacagagnggnacctggagatatgtcgcggnggtcaagagaccttgnggacgtcaggtggngtgctattgcccaaaaccaagcttgaccaatcccgacccaacctgngcatagtcggtcagtgagaacctgtgatgtacctaagcaggcgagctcctggcagtcaacagataaaaggaacaaagaccacaaagcaaggaggcttgtggtggctggccagctgtgaaacttgattgatatgtgagatatggtctctggtaatcaattac

SEQ ID NO: 63941 - DNA, 455 bp, Glycine max
agcttgtctcagcgtttatgcgagacggatacctttatgctagctatcatcgccaagtaccaagaagagttaggtctagccgcggcccacgagcataggattgccgacgaatatgcccaagtatacgcggaaaaagaggctagaggaagggtgatcgactctttacaccaagaggcaaccatgtggatggatcggtttgcccttaccttgaacgggagtcaagaacttccccgattgttagccaaggccaaggcgatggcagacacctactccgcccccgaagagattcatgggcttctcggctattgtcagcatatgatagacttaatggcccacataattagaaatcgttaggaaacttgtatggtctctaagaccttgactagatacgacttcctttttgaaataaaatgagttggtcccatgtttctactccaaaaagcttgtgcaaatca

SEQ ID NO: 63942 - DNA, 405 bp, Glycine max
  unsure (1)..(405): unsure at all n locations
gagtatttcagagatggtttgatgattacaaatatgatgacaaaggtgatgacaaatagctcaatggtcaatcaaagaatgagttcaagatgttcaagatagaatcaagaacacttcaagattcaagaggaaagttgaattcaagaatcaagaatcaagagatcaagattcaagacttaagattcaagaatcaagaanaggcttaatcaagataagtatgaaaaggttcttttaataaaactaagtagcacatggatttttctcaaaacatgtttaccaaagagtntttactctctgctaatcgattaccaaattggtgtaatcgattaccagtagccaaatgaattttgaaaagtttttaaatgaatttacantgttccaattgattcaaaaaactgtaatcga

SEQ ID NO: 63943 - DNA, 426 bp, Glycine max
  unsure (1)..(426): unsure at all n locations
agctntgagccaaaatcctgactctatatttaccttgacccagggtgagaatgtcaatccttaccctcggaagcaaaaaagaatagaagggaaatttccaatcaaagaaaaagagaaggaaaatttccaatgaaagctaataaaaaaaagaaaagaagaagaagaagaaaaagaagaagagaaaagaaggaaaattccccaatcaaagagtgggagaaagcaaaaagaaaagaaaggaaattcccaatcaaagaatgggagaaagtaaaaaaggaagaagaagaaggaaagaaagctcctgatcggtgatcgaaggaaaaacagaagaaatgtgcagagaggtctttggaccgaacaatatctgaacaatacagaattgtcaccaaatgaacaaaanaagatggaaaggaaaccacgacctaaaat

SEQ ID NO: 63944 - DNA, 331 bp, Glycine max
  unsure (1)..(331): unsure at all n locations
tgcgcacgtttggacctttgagngatttgttttagctggaacccggaatcatgcagtatgttaactgtactggctggctttcttgaatcctccgtgctactaagtaaaataattaaatgtttggtttttatgctttgtaggctgtaaaagacgaagttattattgatcttgtcgaccgctgtcgcacaaaccaaaaaaaattgatgcaaatgctaacaactactgggtttagttcactcagctattccatctggcacacacccaaatgtacttgtgtgttaccttgtgaaggctatccactgatatgtggaatgatcttattgtcttggtt

SEQ ID NO: 63945 - DNA, 444 bp, Glycine max
  unsure (1)..(444): unsure at all n locations
agcttgttttcgctaaattaaggggttgttatggatggccttaggcttatgttgcattttggagtaatggggcatgccacattgcctgcattcttttgctattcatgccaaaacatgcgcccaccaagtgcccggtgaaatgcctcaatgacatatgggcatggttttgtaagcttgggattgtgggactgttttatatgtatagggacagcatgaaggatttaaaatgagtgcccgaatgcgattctaggcctaggaacccaagcttttaatttcaatacaaggaagcatgacttacgcctaggaatctaagttttggttttgaatgtaaaaaggcatgaatattaggacatgtttgagaggtttttattagaatttaaatttggctgccccatgaggaatacctcgcacctaggtagctnggaaaatacctttcaacggtat

SEQ ID NO: 63946 - DNA, 357 bp, Glycine max
  unsure (1)..(357): unsure at all n locations
gggctgctgtctttgagttccgtgagcttgtgttttgaaggagggggaagtttggtggagaaactctcctcctcgttctttatctcaggtgcaggggtgctcgcncatgcgagctaacctgtttttttttttttttgggaagaaataagcaaggctttctatatgtcggcgttcgcttacttgaaccccctcatggcagatatccaatatttactttaaagacacaacaatgattactgtanaattaaaggatactaggctgccttgatacggcgcctttcattcgtcccaactaggcaagggacgatgacccatctgtcgtgaccctacctctacttgctgcatcctaaatacctg

SEQ ID NO: 63947 - DNA, 433 bp, Glycine max
agcttatctgaatactcaaagcgacctgtttgttttaaaaacaatcgtcttaccgtttgtgattcgtgacttccaagagggggaatccctttaggtgcaacttgctttattaaatccttcagttcatcgatggtacatgttgaaggaatttgaaatttcttttggattttttcctgtgaacgcgcatccaacaaatttgttctggggtggcatgttccatttcccgttgtaatacaagatcgcgtcatgagtacggggcatagtgcgttgaagtaagtttattactccacctggtgttcttccaacggtgcataataactcaatcagaccaacacatgagaattgatcattacacattaacattgtgttgacatcgtcatcatttattcaattcatacactgaaagcgaatttggttacctgtatgggtgaat

SEQ ID NO: 63948 - DNA, 310 bp, Glycine max
  unsure (1)..(310): unsure at all n locations
actaccctcagccttttaaacttgataaccaatcatttcccccaatacactgttacacagncctgagtcttgtcactgccttcctaaggtcgctgtcgcgctacctccctcgctcaaggcctcaaaaagcccaaacaaagcatattccaacaaccatntggtgggaaactccgttctttcatgcttcttccccgtttctcccacctgctccgccaccctcctcctcctctccacgccatggcgcgtgccgtcacgtgcgcgcactcaccncctcattttcaccgctcatccggcatcgctacctctcgct

SEQ ID NO: 63949 - DNA, 301 bp, Glycine max
  unsure (1)..(301): unsure at all n locations
agctngannatgcttgagatggcgtatatttattttcctatgctaggtctacaaagatgagcaaattccatggtcacaatggatccactccaggaatataggtcactgctctatttatacgggcattcagcgatcaccctttgagtgataacatctatgaaaatgacagtaaatgtgtagtgcacactacgctattaacacaggcaaagcctagaagcgttctattcgaacttatctatgatcacgacatacatattggcgcacccttactgacgatgtgatataagaacgttctcgcaat

SEQ ID NO: 63950 - DNA, 439 bp, Glycine max
  unsure (1)..(439): unsure at all n locations
agctttttctctagttgttntgccagggttttcaagcgccaaagagaagtagaagagatattagagtctcaatttcattgtcttcatgcgaggggtatttttatgtctgtagacattatttcgtaaatcccaacagtgggtatgtatgaaaatgagttccaaagttgatgtccaaatttgagaacgatccaacgattaacgtgtttgtaatcgtagttttatcaggacaaatttgggtgtatgtgaaaaaagagaagatttgagagataaagaagagagaacgaacttgggaggaagggaaaacgtgaaaacctgtaaatgtaaaaactaactatgtctcgttttatttactttaaaaccattattttaattaataaatctatttctccttatttatttaattacgaagactcattatttttttaaaataaatttcttt

SEQ ID NO: 63951 - DNA, 437 bp, Glycine max
  unsure (1)..(437): unsure at all n locations
agcttgtgtatatataggcacatgatgtatctcanaatatatacaataatattattccttctaaatttgagatggtatcagagctcctgatctttgggagcctctggctgtgcaaccctaattcttatcgcaacctttattgttgtgcaccctaatccttatcgcaacctttattgctgcacaccctaatccttattgcagccttcattgctgcgcacttcattctgtaccttgatcgcacctatctgtgatggctgaaatcgtgaaccctattctggaaactggggacaaatcccaggctgctggtgaattgcagaatgttcattctgcttattgattaattggaaagaattatctcaaatggtctcaactcatttggagcatcttgaaaggaaaaggaaaggtcagtcacttgactaatgctgtcccttttgaaa

SEQ ID NO: 63952 - DNA, 258 bp, Glycine max
cctaattttttatcttaaactcaggttaaggccagatcttttaatcctttagaggatttccaaaaacaatacaatgtatcaaccccatggataacacacgaagaataacacaagtgaaaaaccaaattctatagaaaaataacaaagcccctacgtgagagttgtcctacaaattgcaaaatgccacagacaaattacgaaacaacatgagaccccaaacaaaccatgaatcaacacctaataaaaaaatcaaataac

SEQ ID NO: 63953 - DNA, 336 bp, Glycine max
agcttaataagaggcatgctaagcgggtagtgtttttatatcaatttccatatgtcatcaaacataaaaaggggaaagggaatgtagtggctgatgcactgtctaagagacatgctttacttgctatgcttgaaactaaactgtttggtctcgagtctttgaaagacatgtatgtgcatgatgtggactttgctgaaatttttgctgcatgtgaaaagttttctgaaaatggttactataggcataatggattcttgtttagagcaaataaattgtgtgtgcctaagtgttccattagagagttgcttgtgagtgaatcacatgaggggggggggg

SEQ ID NO: 63954 - DNA, 275 bp, Glycine max
  unsure (1)..(275): unsure at all n locations
tatgacagncaccgctttaggagcgctttacaccagtaacgcttcgaggccatcaanggatggtcgtttcgacgggagcgacgcgtccaactcagggacgacgagtatactgatttccaggaggagatagggcaccggcggtggacatcactggttacccccatggccaagttcgatccagaaatagtccttgagttttatgccaatgcttggccaacagaggagggcgtgcgtgacatgaggtcctgggtaaggggtcagtggatcccgtttga

SEQ ID NO: 63955 - DNA, 272 bp, Glycine max
agcttgtacgatgactagagacgaaacatttttgtttttggctggcgacaaggataaaagggacgccagtcattctttcgatgacgcacatgcaaaaatggtgacatggcatctttatgcactacaagggaggcatgttcctatgccgacactcaagagcttaattttcatgaccatgtgatgccagggctcatgactcgtttcctctatttaaagcaacccaccgttaacagaatacgaacttttataaaataaggcgtacatactagtcc

SEQ ID NO: 63956 - DNA, 446 bp, Glycine max
  unsure (1)..(446): unsure at all n locations
agctngtgcgaatatggtgtacacatggcatgtgtttctttggggctggcagctcaccgagcgcaacaacaattcccacatgcggaaagcgagcgctagcctaccattctctgatgcacacctcaactgacctaacgttctcccacataccccatatcctcgaaactatcaacaccgggaccacatcaaacctgcaggaccatctcagccttcgggtattgcaacgattataccgcacaagcgggcactgattagttattctgtactagagcaaacaacctgtctgcgcaatacacacagcgttatctctgtactgaagtgcaaatataagaagaccacatctaccgatcatcgcatgatcgaccagacgattcctacaaatccttgttcatctatcaatcttgtccaaaccaaagcctagcttctaaccactgcgtcacttcatc

SEQ ID NO: 63957 - DNA, 451 bp, Glycine max
  unsure (1)..(451): unsure at all n locations
agcttctattgacagccactcatgacgcatgtcctcaggcttccctcctttgtgagttattgttgcaatggcatgtcggcatggcatccctacatcaaagttgtaaaatcagcacacatgtaggttaggaatgaaaaaaacactataaagaacacaacctgttagttgccatactccacaagtgcatgtccattcacctaaattgacctcaaccttattcccccacatgtggacctcatatctcaggcccatgttatcaccacaccaaaggggagtccattgattagcaaaatggaattctttttctagtcttttatactgcactggacataatggtccaggttttccagaaagtttaaccttgcgggcagccatggttctcatgatataacttctaatttcttcaagcattgtgataataggctngcatctatactgcagaattctggaa

SEQ ID NO: 63958 - DNA, 375 bp, Glycine max
  unsure (1)..(375): unsure at all n locations
tgcctccagaggtccaggaaggacaaggcagcagaatgttctagttcctgctccgagtatgatagtcaccgctttatgagccgcgtacaccagcagcgcttcgaagccatcaaggggtggtcgtttctccgggagcgacgcgtccagctcanggacgacgagtatactgatttccaggaggaaatanggcgccggcggtgggcaccactggttactcccatggccaagtttgatccagaaatagtccttgagttttatgccaatgcttggccaacagaggagggcgtgcgtgacatgagatcctgngttaggggtcagtggatccccgtcgatgccgacgctatcaaccagctcctgggatatccgatggtattg

SEQ ID NO: 63959 - DNA, 454 bp, Glycine max
  unsure (1)..(454): unsure at all n locations
agcttactaaggcacttgttctagctctttctgacttttctaaaacttttgagctagaatgtgatgcctttggagtgggagttggagctatattgtaacaaggtggacaccctattgcttattttagtgaaaaacttcatagtgccaccctcaactacctcacttatgataaagagctttatgccttaataagagccttccaaacttgggaacattaccttgtttccaaggaatttgtcattcatagtgatcatcaatcacttaagtacatcagagggcaaagcaagttaaacaaaaggaatgaaaaatgggtagagtacctagagcaatttccttatgttatcaaatacaaaaagggaaaaacaaatgtggtcgtcgatgccctctctaggagacacacattgttttgctccctaggagctcanattttaggaattgataacattagagactt

SEQ ID NO: 63960 - DNA, 436 bp, Glycine max
tcaagctttagcgagatggatacattattgatttatatacataatcaaatgagaaagatcaaaaggttgtgcatttatcagattgtacggttaaggattgcttaaagcaattaatttgtattacatataccaataacttgcatctactttttgataatttatcattcaagagtttcattactaagtatgattgactttaagcaattctgaaatgagtgatttcccaaaaagtttaaagtaagtgtgtgagtgaaatcaaaatacactaaaaagtcttgttatgttggcctgtaaggaacattcattaatcctaaaagcaatcccacattacaaagtggttttagagcatggtctctctttagtacactgcggtttgaggacaaaccaaacgaaaactagttggtatgtaacatctgatgcgtgctaacaataacaa

SEQ ID NO: 63961 - DNA, 462 bp, Glycine max
  unsure (1)..(462): unsure at all n locations
ttatcccgaaaacagagtgtccattggctttttcatgtctctgaacaggggagagaccaagaagctcttattctctgtcccttaacggttcagaaaagcgcgcgcatgcgaaatggaacataaggattgagaagtgaagtagacagcgatcaaatgagagtgagatcttgatcattgattgtggagttgaaactattatagtgcagtgtgtatgttttggtggtgggaagtggaaacaagaaacgaacgagacacgaagaatattacgttactggtcttgagggaaatcgaatgaaaaagaaaatgtgccctttaacgctgtcgttactgatatatatagagctatgagcttccggcgcttgatttggattgaatgtttttgggttttatttttannaaaatagacaataagagtaaaaataagtgtcttaaaatttataagatatctatatgaaaatattt

SEQ ID NO: 63962 - DNA, 428 bp, Glycine max
  unsure (1)..(428): unsure at all n locations
agctnngangctaggatacctaagttagatttgttatattaaaagngcgaatatatttcagtgtgtttgtcggaaatgaataattattttcctttcctagttaaccaattgctcataacaaacttttgttcgtttggcgaaactcaaattgcaacatattccctcattttagttaaaagagaaaattgccatgaaacagcttgaaaattgaatacacaaagggagactatctagtatgttaacgtaacttgttggaaccagaatattgctgagagcaatgaattatttttttcatgcaaattacaattttagatgacacggacacatcgaanaaacatttgatagaactgatattttaacttatgcaatggatcattttcccctcgatttcatagccttgtctatatcttacagaagcagaaataatg

SEQ ID NO: 63963 - DNA, 381 bp, Glycine max
  unsure (1)..(381): unsure at all n locations
agctngaagagagttgtgagtgagtataattcttaaccaacgcctctagaggcataccgaaagaggacgagttcactgagacttacagaatattgtgatgaagttcgacaaggcttctcaaaagaagtcttgaatgactcctgtgactattcgaagtatacttggatgagcctcaacttataatgagataggttgtgatggcttgatgagaaaaaatatttatcattggcatccacactaggggaaatcctatagacttgtgataagagacatactctacctatatgagtgaatcgttatagatctcttagtgagctatctttactatgcttctagtgcagcgtgatactcctactctttatgaataccaatgatcttgat

SEQ ID NO: 63964 - DNA, 430 bp, Glycine max
agcttcttatccaaggctcatcttgtgggtgaatctctttttttccatggcttattccttaatggatggcgcctcctctcacctcttctcctttgtcttccgctgcatctccatggtgaaaaatcaccattgaaggacctcattgaagctcaaagatccagcctccatagaagctccacaagcaagcttccatcactattacagtctcccttgctttctaaggacaatcaagttcgttggcatgcagagacaaattatggtcatctacccctttccgaagacttcaatgtctttcgatcgagactattaaagtcttcattgccttccagagacatgcgagtctgttggcatgcagagacaaattagggtcatccgcttttgtattttaagacattacagtcttcttgtcttcagagacaatcaagtccgt

SEQ ID NO: 63965 - DNA, 409 bp, Glycine max
  unsure (1)..(409): unsure at all n locations
attggtcttcgctggcaaaatgattgaagtgttgtctttaaagaggcaaatctgatcatcatgctgtgataaatggcaaaaaaactgcggcaatgaaaggcaccatgcacaaacctcaaacgaacctaggggcagattagaatttctcacccaataggttcccagctacaaggtcatgatgaaagataacaattgatacctcaaagccttacactgnggcaatgaggggcatcgtgcatgagcctcaagtgaacataggggcagatcaaaagctctcacctgtncgatgttttaaacaaaaaaagggggacaaaccctagaatttcaatggattgattaaacgtcaaacggctccattgtcgtcactccaaaatggtcaagtgactatatcaaacanaacaaacactct

SEQ ID NO: 63966 - DNA, 437 bp, Glycine max
  unsure (1)..(437): unsure at all n locations
ccaacttatcatatatcttgaaccagggtgagaatatcaatccttgccctcggaagaaaacacaaaaagaagggaacttcccaatcaaaagagtggaagaaaacaaaaagagaaaattcccaatcgaagagtgggagaaagcaaaaaaaaggaaagaaaattcccaatcaaagatcggaggaaaacagaagaaatatacagaaaggtctttggaccagacaatatctgaacaatacagaattgtcaccaagaaaatatgaaaagaaaggaaaccacgacctaaagtggtcctctccctttgattaccaaccaaaatcctgtgcgtcggtgacttgtttgcctcgcgctaaacaaaaatagaaaataaaaaggccaaaaacactcaaagccaaatttcccaccaagaanaaccccattcccaagaaaaagtcctactg

SEQ ID NO: 63967 - DNA, 268 bp, Glycine max
ctcaacaacccttcagaaatcgtgattgtagcttaaataggcaatccagtcggtggacgcgcggttagcgcacgtaagtgacttctggcttagcgccagtcacacttgctcagcctgaaggtgaagacggtgcgcttagagttggccttcgctcagcgcctctatacaactcatccttcttctagaattgtccatgcgcttagccattagatggggcgcttaacagatgatgtgcttagccagaagataagtggcttagcgagttcat

SEQ ID NO: 63968 - DNA, 412 bp, Glycine max
agcttaagaatcttggatgttttctattttatgaaacacatcataggttcagagcccaaaatctaggtgtactacaagttctcatattacatgccatgcctcaccaaactcatccaaaagctagtttgaacatgctatcttacaaggattctaaaacaatcttaagagttatcaaaatggaatgaaaccaaaaatgtttaaatgttgagtcttaaaaatttcaggggttgaaatgcaactttcaaaacttgaatatggtgagcacacgaccaggttgaataaaaggttccaataaggaattttctttaatggcacaatataatctaacatactctatccaatttcacagacacgtcttgtaatgattcaaaaacacttatagatcacttggaagtaggtataaattaatata

SEQ ID NO: 63969 - DNA, 380 bp, Glycine max
aacctgtatattctaaagcaccctaaccattttatttctcaactcttaaacctgtcatactttaagttctcagggattggatctatagatcaaaaaagaaatttaaaaattaaataaaaaaataaaatgtgtatattattaatgcagacaattaaatttcatgaaaattccccatgtcaactaattaacatgcaacaatgtaagtatagctgacaatatattgtcaactctgtattttatacaataatatcctcgaggaaaagctataattagtcaaagttttgaaaagcggcaaagcaacagaagaagaaactcctctgttctaacaaccgcttagtaaagaaacagagcattgaatctattagctcgaacacaactga

SEQ ID NO: 63970 - DNA, 431 bp, Glycine max
  unsure (1)..(431): unsure at all n locations
agctntataagtgcgggttcgggagacattggtcaagcgttcgcgatatgcgaagatgatattccgagtactttggatttggtacgaccatgctctcctgatttccagctgggaaattggcgagtggaggaacgccccggcatttacgcaacaagcataatgtaaacctttacggttntaaaagctctatagttgggcctaggctttagagttttcattntgttaaggctntgtgtcttttgtttttgaatttataatacaaggatctttcttcatctgttcctggtctctacccattctcattcatttgcatgtttacttctttntctaaaacggcagattcgatgacgagtcccccgaaggtactaatacctgggacccgtctgtcaacttcgaacaagaaatgaatcanacggaagatgaaggagatg

SEQ ID NO: 63971 - DNA, 403 bp, Glycine max
  unsure (1)..(403): unsure at all n locations
catcaaactttcnatggatgtgtttttatcgagtctggatgcggttccaaacatgatctaagccaattttagtcaatgctctctcttattttagnttttatatttttttaaatgattctgtaatatttaaatattttttatgttacctcttcttattactttgtcattgttattcattaattattgtgatgactaaattagtgaggcctaagattaaaaaaatatgttatagtaaagggttaaaaatacaatatatttatagaaactaaactaaaaattatattctttataatngataaanaaaagtaaaaatattatctaaaatggtgtcttataaattgagttaatatattgctctcttaagttttggttattatagctatactccatttttttactttag

SEQ ID NO: 63972 - DNA, 444 bp, Glycine max
  unsure (1)..(444): unsure at all n locations
agctttgcacaataaaaaattaagatgattatgttaaatgtttatgttagatatgcaagttaaaagagatatatatatggacagttaaaagatacaagacattaagaaatttgtttcaagaaatcttattttattaaacttataagtgatgtgaagatcagaatatgtttctcatatatattgaaagataataaaaaaatattttaagaataatttattttcatgaattcatattgtttatgtttcttcatcttaatattttcttctcaatgggtgggaatcttacattaattctcatggaaatgcttaatataatttctcattctcttcttattcaacctcatctaattatttaattaatatttttattttaaattaaattaaaaaaacattcttatgcattagaaatatgtaccanaatctttaatgaaaataatattatca

SEQ ID NO: 63973 - DNA, 425 bp, Glycine max
  unsure (1)..(425): unsure at all n locations
aacatacctccgcgtgcacaacatgtttcactaaatctccgaccattgaagaattggcattgatgacctcgacgttctcttcatgcaaaattcgaataatttcacagaacatgaactggctatcgaccccacatgttagaatgacttcaagcaaatttcccgtttcgtgaatctggatatttggcgatttcaggcttccttgtgcttcagaagaactcgaacagccaccacgagttctcttcctttcctttaacctttctttcttctcctgctccagcttcactnttgtctctaggcttttgatatnagtgatggcttcatctatntgatcaggcagtgacatcgcttcctgaataaacaaaaaaattgatcttttcacatatattcatggtttaattgaatccgtatcagatacttttaggttt

SEQ ID NO: 63974 - DNA, 448 bp, Glycine max
  unsure (1)..(448): unsure at all n locations
agcttcggaagaaagtgatgaggtacaagcttctattgcaaagcttgaaagagcccgggtagtcaaagagaagttcaagtccatagccatcaaagtctgaagagagtatgatgaactaagggacgtcaatatggccaccgatgaagccttggaatgagaaaccaagaaggcccgaaaggaaaaacacgaccaaaacaagttttgaggggctttatagggcagcaatagtgagctcaagctccgaagaggtgaaaggaatcatcatgggtcaaaggcatgatcttgaaggacgagctaaaggcttgccttangtcgaaaagaaatttgtcccaacagttaagcgagactggagggaatatgtgggccatcatcgatgagtgcaaagagaagctaaatctagcagcgactcacgagcaaaggctagaggatgagtacaccaagatatcag

SEQ ID NO: 63975 - DNA, 457 bp, Glycine max
  unsure (1)..(457): unsure at all n locations
ttcgctagtcaagcgaagctacctangctataaatagaagcatgtgttccactntttgtaactnttatgaatgagaaacttgtgagatacacttcanagttccacttctctccctttcttcccttcaatttccatgccactttctccctctctcattctcattctcttagtggtgaagcttctccttccattgcttattctctagtggatgacacatcctctctcctcttctcctttatcttccgctgaaactccatggttgaaaatcactattgaaggaccttattgaagctcaaagatccagcttccatagaagcttctcaagaaagcttccatgaagtggtatcagatgacaagagtttcaagtaggtgcctcttaaacctncattaantttcaactntaccttctcctacatngnntgttcttcattttttctcatgtatctcctcacatgtc

SEQ ID NO: 63976 - DNA, 452 bp, Glycine max
  unsure (1)..(452): unsure at all n locations
agctttcctgaaatcatcatcctccatgtgttcatttttttcacgtcttacttcagtttcaaacaaagaaaccacaaaacaacatagttaaccacgcttttgcaaataactttcatcaatcatgcgacgcataatattcattgttgatacaatgctagaactaacacattttgttttactcgcattatcatctaatctaactgcattattttcaatgctcgcgtagaatgtgataccaaggtatctatctgacctaaaaaattgattaacttcaagtaacattttaaaaaaatactacaaactattaaaaaagttactaataaacttatttattgaataataaaagaaatctttcaactaataaaaaaagttaaaagataactganataccttatcaaatataacctcagtttacttaaaatttatgcaaagatcgtaaaatacatataagt

SEQ ID NO: 63977 - DNA, 339 bp, Glycine max
  unsure (1)..(339): unsure at all n locations
tcgatngtcacgtgctcatgcatcattngttagccttggctatacgagacatcttgccaaacaaagtcatgttcacgataactcgcctgtgctttctcttccatgctatatgtagcaaagtgattgatccagtaatgtttgatgagttggaaaatgaggccgtaattatactctgccagttggagatgtattttccccctgctttctttgacatcatgattcacttgattgtgcatctggtcagagaaatcaaatgttgtggtcctgtttatctacggtggatgtacccggttgagcgatacatgaagatcttaanagggtatacaaagaatctatatc

SEQ ID NO: 63978 - DNA, 443 bp, Glycine max
  unsure (1)..(443): unsure at all n locations
agcttgtcaatgcttcatcccatcttctctcttattcttccttgaattcatcaaattcagtatggtagattaccacatttctctctggcagcagcttcctaggaacaataatgtcattatacctttcccaggcctcaggagaagtgaacctcgatcggtcatatcggacatgggaaggtgtggcaggtgcctttctcttctttgatgccatctgaaaatataagatcaaacaacaagattagtcagggttatttccaacaaaacagaaaaataaaactaaaaactgaactgggcgctaagagcagtaggctgggcttagcgcgccttatagaattttacccatgggctaagcgcaacagactcgcgcttagcctanagacacaaaaaatatttttctgcagattaggcttagcgcagcatgttgggcttagcctanatctaca

SEQ ID NO: 63979 - DNA, 443 bp, Glycine max
  unsure (1)..(443): unsure at all n locations
tatgcgcatatttccttacaaacgttctcttgcacaagatttttattaaccgaaaaatgcacccatatacaatcaaggcagctttcgtacctagaataattacacgtactttcaaggtgtattttgtacttacatcacacacatctncttggctataatcacatacatgcatactcaaagcattnttgggtaccaaaaattgcacatgtgcacatnctggtatttctaatacctatacatacacaaacttcatgatgaatcttgactatctacacaataaggtgctacatttcatgctcttttcaagtttttgctacctaaagccgcatgcaaattcaagtatattttcctttgctgactaaaattgtattcaaaataaaaggtatacattttttggtaatgtatcttctttacataacnnatgcacatattatgtatatttt

SEQ ID NO: 63980 - DNA, 435 bp, Glycine max
  unsure (1)..(435): unsure at all n locations
aaagaagctatagttantctcacacacctctctaatagctaagatcacctccttgagatgagaagctagagcttagctacacaccccctataatagctaagctcacccccatgacaaaatacatgaaaatacaaaaaaaagtccctactacaaagattactcaaaatgccctgaaatacaaggctaaaaccctatactactagaatggccaaaatacaaggcccaaaagaaggaaaaaacctattataatatttacgaagaagagtggatccaacattgacccatgggctcaaaaatctaccctaaggttcatgagaaccctagggccttctttagtagctctagccgaagcctcttggagtcttctatccaatacccttggggggtaggatggcatcatcctctccaccttggaaaggattngacctcaaatcc

SEQ ID NO: 63981 - DNA, 411 bp, Glycine max
agcttatgctgcagacatttacaacttactcttctaacctcagcagcaaaatcaaccacagcagaacaattatgacctctccagcaacagatacaatcccggatggaggaatcaccctaatctcagatggtctagccctcaacaacaacaacagcagcctgctccttcctttcaaaatgatgctggcctaagcaagccatacattcctccaccaatccaacaacagcaacagccccagaaacaacaaacagttgaggctcctccgcaaccttccctcgaagaacttgtgaggcaaatgactatgcagaacatgtagtttcaacaagagaacagagcctccattcagagcttaactcgccagatgggacaattggctacacaattaaatcaacaacagtcccagaattctga

SEQ ID NO: 63982 - DNA, 439 bp, Glycine max
agcttgtcatatgccactgggaaattccattcgtttgcaccattgttcattctctcttgctgccccaccactagccgtagatcctcatttaaaaccttttgtagatgaaacattaaaacacacaattaacacaagttggagagggcaaagatgccatttatttatggacaaaacttgcatcaagtttttcatgttcttgttattagcttctcaaattgaatgatggcatgtggatttttattttgcaccatattgctatccacatatcataatttgagttgagaacttgatagtaaagacataatgagaacatgatcatttttgtagagttatgtctttcatttaactagggtactttaataaataatcaatactaaaaattcaaatcatattgaattataggcagaattaagttagaattttaagatctcctgttagt

SEQ ID NO: 63983 - DNA, 193 bp, Glycine max
  unsure (1)..(193): unsure at all n locations
gagatttggtacatgtacaatttatagaattttgattatcattgcaattccctgttagaacaaccagtgaaaaagaaattatgatgaaacaaanagtgattgtctttgaaaatgacaaacttcctttagaccttgagtgtatgatattgtggaataacacatttaagactagagaaaaatttgtccttacaag

SEQ ID NO: 63984 - DNA, 414 bp, Glycine max
  unsure (1)..(414): unsure at all n locations
agcttatattgatgcattaggcttttgtgttataccaagctgtggtcatctaattcaactgcagataattaaatttaaattagtaatgctaggacctcagttttgtataccttaatttgactgaacataaaggctatgaaatttccttattatcgagggatgttggtaattgtatttcagctggaactgtgggaccacattattttttaacttctgacttaaaggaaattcacattagataagctgatatgttaaatctgaccatataatgaaaggggtattatttgtcaagcttacctgtcaaaaaaggaagtggtgttgttttaaatcacacccctgccccccaaaaaaaacccatccactttnttttntaaattttttttttgagagggaacagctattaaaatggaatct

SEQ ID NO: 63985 - DNA, 448 bp, Glycine max
  unsure (1)..(448): unsure at all n locations
agctntgtgtaatcgattacactgtattctttatcgattaccagtgattgtttctgaataaatcaaaagatgtaactcttcaaatggtttttgactttttcaaattggtgtctcatccaaaggatttgtgcacaacaacttccagcagaaatatattccgcttctgcagttgataaggcaacactatgttgctttttgctatgccatgatactaatgctgaaccaataaagtggcaagtcctactagtgctttttctatcagttttgcatctagcaaagtcagaatcataatatcctaccaagttacaagaagaattcttaggataccaaaagcctaaatttatagttcctggtaagtatctcattatccttttgatgacacttaagtgggattctttgggattggcttgatatctagcacacatganaacactaaacataatatctg

SEQ ID NO: 63986 - DNA, 281 bp, Glycine max
aaaagaacacggtagtctgctacaacttccaagaaagggcaaagtaatgataaaccttatggggtacagaggtactgataaaattatcattcagaaaaagaatctccatattggtaaccctatgatgcctcaaactataaataatacttgtcaaataaaactagtatttaccatccttctgatttatgtctggatggatctataatgcttataaaaggcctgtagtcaatcactattgagaacatatgctctatcttgctatgaagcaagttcttcatgtc

SEQ ID NO: 63987 - DNA, 444 bp, Glycine max
  unsure (1)..(444): unsure at all n locations
agctntaacaaacattgatgtttnttctcttatctgtttttcactttcacacctcttactttcatacgaaccaaacaaagcattacatctaacttaaattcatcaagagtgtatagatttctgtagacttcatttgacctaaaataacattgagggacaaatctgagttaagtttgctttttctttttttcccctcaaaatttagaatcgagctattcttaggataatagaactgtgtgcaaaagagttgactcaatagcttactggagacagatatagatatagattagttgctcatcacccttatttgaagtctaaatggccttgattntacaacctanagggctaaataaagccattggtaaaagggtgtcactggtgacaaaaccattggccgtttntgttggtattatcgacaactgaacaaccatgccactgataaat

SEQ ID NO: 63988 - DNA, 305 bp, Glycine max
  unsure (1)..(305): unsure at all n locations
ttacaataaatactntgtaggatttagttattatttttactatnatagnaaatattggtaaagaatattttattgtaatttctattagtctattntagaatattatgttgataatattaaatgaatcaattttactattattagatcgcccaatccaactcctcaaggttgagatttctagctttgatcattgccctctgtgaagctcgaggggtcatctctgattcactcaccttcgagtccttaagctcggccatcaatttggcctacatcagaaaaaaaactactggaaccccgccgacaca

SEQ ID NO: 63989 - DNA, 424 bp, Glycine max
agcttccacatacttgatacccattctattttttcagcaaacagaggctccaaaaaatcacttccaaggtcaagatagaccaaattggagagattcccaatctgaaatggaatcttccagatgaatccagtatacgagaggtcgaggtgagtcaaggaagtcattgtcccaaggaaagaaggaattgccataccttcaaaatcattggcgctcaagtccaagtaattcaaatgctttaaatcagccaaacaaggacttatctctccaccaaactggaatcccctataaccttcccaatcgtagccatcatagtaacgatagaaagcagtagaaggtgaagagttgaggtgaagctgaagaagatgggaagtgacgttgtggcagaggactccataccagtggcaacagttggtatgattatgat

SEQ ID NO: 63990 - DNA, 351 bp, Glycine max
aacaagaattgtcgtaaaataataaactcataccctttactttcgagttgaaactcagagataccgatacacaaaccaagtagaattggcagaattagctgccctttttttcccctttaaaatgtggtattggctagttatgaatgagaaaagcagaatagtttgaagtacatgactggttgaccattcattacatagttaatggaatggaacactctattgttctttaaggaaaatgaaaggcctgataattgataaacttataccacagatattctgatttattagacatatactaatactggaagattgagggcctgagtattctcagtaaaaaactgtttataaaat

SEQ ID NO: 63991 - DNA, 442 bp, Glycine max
agcttttaaatgggtaaaaggctcactttctctttcttctacatcatattcaaacttgtccaaataaataataaagtcatctcgactcaaagaaagtcatataagtctcatacaattaatatagaacctatatcctaatgtcacatcctatcagagcgtggtgttcccgtgtcctctagcatgaggttcttcatagtcatccacctattcatctgctcccccgaacacaagttcaagatcatcacaggatccaaacacaacaacacacagggagtgagttatcacattcctagctaatagagaaacaagataattaaatatacatattatataaatgagataccacttgcttaaacatagctcacgtaacttcaccacttcgtcattcaaaattcacttttcaattatcaatcacattacacaagaatcccacacttcgatc

SEQ ID NO: 63992 - DNA, 380 bp, Glycine max
  unsure (1)..(380): unsure at all n locations
cttctagctacactagtnttattttacattggccaaatgcatacatagtcaaaagaggctacaaatcttgcaaagttatcctccatcaccgagttcttagatgcaagtcaagagcttacagagctagaatttgtcctcccatcagccactgctccataacgatttatatcgaaatattctaataacgttgaatataactcaatgtattcagctgagccatcagagaggctattatctagtgaaggtggtttagctgaatcagcaagaggaatttcatatagggcaggataatcagctagaaagtatggagttaaaatggttgaatccctggtaaatgctatgtcaatattagaactaactatataaacaactgctatact

SEQ ID NO: 63993 - DNA, 443 bp, Glycine max
  unsure (1)..(443): unsure at all n locations
agctntataagtgcgggttcgggagacaaattgtatgcgttcgcgatatgcgaagatgatattccgagtactttggatttggtacgaccatgctctcctgatttccagctgggaaattggcgagtggaggaacgccccggcatttacgcaacaagcataatgtaaacctttacggttttaaaagctctatagttgggcctaggctttagagttttcattttgttaaggctttgtgtcttttgtttttgaatttataatacaaggatctttcttcatctgttcctggtctctacccattctcattcatttgcatgtttacttctttntctaaaacggcagattcgatgacgagtcccccgaaggtactaatacctgggacccgtctgtcaacttcgaacaagaaatgaatcaaacggaagatgaacgagatgaggatgtgggac

SEQ ID NO: 63994 - DNA, 408 bp, Glycine max
  unsure (1)..(408): unsure at all n locations
ctgcatcaaacagtcaattgatgtgtttntatcgagtctggatgcggttccaaacatgagctaagccaattttagtaaatgctctcttttattttagtttttatatttttttaaatgattctgtaatatttaaattttttttatgttacctcttcttattactttgtcattgttattcattaattattgtgatgactaaattagtgaggcctaagattaaaaaaatatgttatagtaaagggttaaaaatacaatatatttatagaaactaaactaaaaattatattctttataattgataaaaaaaagtaaaaatattatctaaaatggtgtcttattaaatngagttaattatattgactctcttaaagttttggttattatagtctatactcccattttttttac

SEQ ID NO: 63995 - DNA, 461 bp, Glycine max
  unsure (1)..(461): unsure at all n locations
aagtcacctgangcatgcaagcttgctctaaatttacattgatgtttgtatttatggtaggaggttgtatgccatttttgttataagagtagtgtcccactggtaaaactaactttccaaatgtttgccttcgcaggaaatggccccgaggaagcttgcctcaaagaggtccaggaaggacaaggcagccgaaggaactagttccgctccggagtatgacagtcaccgctttaggagcgctgtacaccagcagcgcttcgaggccatcaagggatggtcgtttctccgggagcgacgcgtccagctcagggacgacgagtatactgatttccaggaggaaatagggcgccggcggtgggcatcactggttactctcatggccaagtttgatccagaaatagtccttgagtattatgccaatgcttggccaacagaggagggcgtgcgtgacatgagatcct

SEQ ID NO: 63996 - DNA, 397 bp, Glycine max
  unsure (1)..(397): unsure at all n locations
actatgctagtgcctccataccctgatgaggatgtcccatatgttcttatagactgtactgattcanttgcttccaaagtttcatggccttgcaggtgaagacccgcacaaacatttgaaagaatttcacattgtctgctccaccatgaaacccccagatgtccaagaggatcacatatttctgaaggcttttcctcattcattagagggagtggcaaaggactggctgtattaccttgctccaaggtccatcacgagctgggatgaccttaagagagtattcttagaaaaaattttccctgcttccaggaccacagccatcaggaaggatatctcaggtattagacaactcagtggagagagcctgtatgagtactgggagagattaagaaactat

SEQ ID NO: 63997 - DNA, 441 bp, Glycine max
  unsure (1)..(441): unsure at all n locations
agcttgagatgaggaagtgttgaagggtgatactttctgcttttattgttgaccacagagtggtacctggagatatgtcgcgagggtcaggagaccttggggacgtcaggtggggtgctattgcccaaaaccaagcttgaccaatcccgacccaacccgggcatagtcggtcagtgagaacctgtgatgtacctaagcaggcgagctcctggcagtcaacagataaaaggaacaaagaccacaaagcaaggaggcttgtggtggctagccagctgcgaaacttgattgatatgtgagatatggtctctggtaatcgattaccaaggatgggtaatcgattacaaggcttaaaattgaagacaggaggctaagatggtctctggtaatcgattaccacggngtgtaattgattaccaggcttgaaaacgaggtcaggaagct

SEQ ID NO: 63998 - DNA, 440 bp, Glycine max
  unsure (1)..(440): unsure at all n locations
gcaccacaaggataaaggagctcgcttcaggtgttataattgatgttgtaatagaaaagaaaattccatanatcataacatcaacaccattagagcttactttaaccaacgtcatggaagacctcacaccggagcataatgaagagttgggggaatgcttccagcacctagattcctcanaggaagtgctggaaaataaaatagaagatccaggaaccttgattaaagaaaaacctatcttggaattaaagcccttgccccttcaccttaaatatatcttttttagagggcgaggatgagaaaccagccattattagtagcacattgcacanagaggaagaaaaaatactaatggatgtactaaagaagcacaaacaagccttaggatggcanatctccgacctcanaggaataagcccatccatctgcatgcacaacat

SEQ ID NO: 63999 - DNA, 455 bp, Glycine max
caagcttcccctatagacattgccaaagccttcagttccaagaatattcttagagctgaaattatccgttgcatgtagcagctctctgaaactgaaatgtttcagatttcccaagctaagaactccctcttccttacaatctgcaacaataccacaatcataaatactaatatcctaatcataccaatccagtaccatataatccaagaacctcagttacagtgctacccaccgctgatataaagcatggctccgtgctgtcgtttctttctataccacaatagcccaaaaagcaaaaggatgagggaggcgcagctaagactgaccccaagtgctattgctagtcttttagacttgtgttttcctataaacagaaatgtaatacatggttaaaatgttgtataaagacaaagatgagataccaagaacgtggaggtaaaaggacaaaccttctg

SEQ ID NO: 64000 - DNA, 128 bp, Glycine max
  unsure (1)..(128): unsure at all n locations
aaatgcatggtttcaaagaataacaggagttttgtagtcatgtgatttctggttgccangagggangtagttcattgngggagtaagatagtggaaatctatgaaatgcagatgtgctaagtagtata

SEQ ID NO: 64001 - DNA, 446 bp, Glycine max
  unsure (1)..(446): unsure at all n locations
agcnttgaatgaggctaaagattctgttgttcatgttcaataagatccggtggagattaatttatctcagcctcatttgtcacaagatagtgacatggagttgatggtaaatatttgtcacaacaaagtagttttatctcaacctaatttgttgcagcactctatttttatatattacaattattcatgtttggcatttgcatgtaggtccctgcaactattgttccaccaatagcaaggaataagctaaccataacaagagccaaacaaaggaaggttgctgataaagatgatgcagtataaagaaaattgaagaccaattttttgttgcattntgaaagctgctgagttagaaggttgctgatgaagaaaaccgaagaagcatttttttgttgcattntgatattaggatatgtagttgtatattttgaaagcttcactggcat

SEQ ID NO: 64002 - DNA, 213 bp, Glycine max
accatgaatatctttgtatgctcaaaatatttatgattctcacaacaaatgttcaagcttctttggaggtctcaatctccttaatgaaatttagtttaagaaccatccttagttgttccaaaacttgaaaaaaaagacaaaattcaccatgtgagactattttagaaaacaacaaagctagcataacacacttggcgaaatatatcgctatgt

SEQ ID NO: 64003 - DNA, 408 bp, Glycine max
  unsure (1)..(408): unsure at all n locations
agctntattgattgtgtgataaatatatttatttaaataacttataatatttcttgagataatacttaaaataatattttttttaaaaatactaacttctaatttttgtatttattctctttttatccttaaacatttattaaattttctttttaatcttttctatttttttattatatatgatattgatataatatataataattttatgtggctttatttttattttatatactttataaataaaaagctacaagtgcttaaaattgatttaaaactaaaattataaatattacaaaatatatttttatcacaaaaatcaaataaaattttgtataaaagcattacataaatatatccatttatgtaattatatatttttgtaatttttcaactttcagaaattta

SEQ ID NO: 64004 - DNA, 350 bp, Glycine max
tcatcttcataacctattcttccaaattcatcaacaagtttaatcatcctcaccacgagcctttgggtttttggacatggggaaatagccatctctacttgtagaagtcatacctataagtcaagttaatgcacgagcaattaacaaaattagacctcaccactcaacttagtgtatcactcaagttcactcatgtatcactctttcaaggcttttcttatataatttgcactcttgccttataccactcttgcttctcttcagttcttaaaaaaaacctccgacttcaaatcaagaagtattcatatgaatatgtcacaaatcacactcaactctagaagcaaaaacag

SEQ ID NO: 64005 - DNA, 422 bp, Glycine max
agcttctagacaatgcatcaacagatatatttttcctacctggtttatactgtatggtaaaatcataaccaaggaattttggtaaccattgttgttgttctagagtctgcaatgtttgctccaacaattctttaaggcttttctgatcagtttctaataatgaacttatggcctaacaaataatgcctgaatttggccatggcttcaatcatagcatagaattccctagtataagtagattgcttctgcattctaggggacaacttcttagagaaataagcaataggatgttgagattgactcagtattgctctaatacccgaaccagaagcatcagtctcaagtacaaatggttctctaaaattaggaattgctaacactggaaatgaagtcataactttcttgagctgcacaaatgcttg

SEQ ID NO: 64006 - DNA, 365 bp, Glycine max
  unsure (1)..(365): unsure at all n locations
tacatgnggccagcgaccatccccactggatactagcataaactagctggccgctcataatcattggagtttagatcaaactcaggactcatcggaaacatccccttatgttttggtgtcctcaagaaccttcaatcactagtaatattaaaaaatagtgtaacagcagaaataccatcaagcattggcaatgtcatcaagttgaagaagcttgttcttggtggaaactatcttactagtaggattccagatcgtnttgataggctacatgagttattaatctctgacctatgtagcaattcattatctggctctttgcctttgacacttgggagcttaacttcagcattgaagcttgatgtcac

SEQ ID NO: 64007 - DNA, 408 bp, Glycine max
agcttattcttatactgaatagctctgtttttccttggatgaatttaaaattgggctgcggaattcattcaaagcatatatagagaggccatctgaattgcatcttttgtctactatacaggccattgagagatctctagttggtattcaagaaggatgtactgcgatttatgatgtaatcctatttttttttactagaacatttatcttttttggttaatgatggattgaaataatggtaccggacaatccctcaataaattgaatttataaactaattcctagattattgatacttgcggttgaggaatgttagttgtcttatctatttgatattacatgcatacctgatttataaatttacataagattttgattcatggaatttaacattttttttctttatat

SEQ ID NO: 64008 - DNA, 388 bp, Glycine max
  unsure (1)..(388): unsure at all n locations
ttttgccatacaaacgcagaacctatcatgatatatacaccatgttgccattgtatattgtcataattgcctaactaaaatattattattcataattgtgattatctggtttggaggcaacaataaccaagttattatgcaaaattgaagacctaagcgcacacaatgaatctaaaggactgtttggtgtaaaataaatgtctaatttcattntctacatagagctttcattttcttattttcaaattcaaaaaacacgttggcttttattttctaatgttggaaatattatcctgtagcatggctgagtctttgcagttgctacagtttgattggaaaaattcaattttggaagactaacatatngcatactaatggttcgcatgct

SEQ ID NO: 64009 - DNA, 448 bp, Glycine max
  unsure (1)..(448): unsure at all n locations
agcttctgcactgttggctgagtgagtgatgatagagagaacgtggctgtgtgttttaagaaaaggctttctctttttttttttaaaaaaaaaaactgtgccacatgtcttcttttgagtggagcaaaaaggggcccactttttctcttgatgtgactcatactcagccacaagaagagaaaaaaatctaaccttttgaaatgctaaaatccttcctcggtttgcatgccggttctctggttctagtccctcgcgtttctctgcacccgtcgggaccagttttcgaaagtaagcaatatatatatcaaaacgctcagactgaaaccccgagcgtggttcagaggttggttttgttaaattttaagttgcacgcaaaacgataattcttagactaattaattgagaataatctatagctatccagttatggatntctcttcgctaatca

SEQ ID NO: 64010 - DNA, 307 bp, Glycine max
  unsure (1)..(307): unsure at all n locations
ctgatcgctaaacgacatcttatccttggctaatcgtgttctatagncgccaagcgcaattccttatagccataactgaggtgcatgaagctaagcgccagtcatggcagctaagcgagattcattgcgacagtgtgagcattaagcgagtacttatcagctaagcgcatgctcctctgtacttaagatgcatcattttagctaagccagccagagtttggcttagcgagagttccagcttttcagatctgcaaacctcgctaagcggtctgatccacgcgctaagccaagcctgtgtaaaaaaaac

SEQ ID NO: 64011 - DNA, 437 bp, Glycine max
  unsure (1)..(437): unsure at all n locations
caagctttcgcanagcttacggtaaaanttggtacctagccatggcagaggtctccacataggccattgcctccctcgcccagtattatgaccagccattgaggtgcttcacctttggggacttccagctatcacccatggtggaagaatttgaagagatcctaggatgccctctagggggaaggaaccatacctcttctcaggattctatccctctttggctagaatttctaagatagtccaaatctcggcgcaggaattaaaccacagaaagcaagtaaaaaatggggaggttggaataccgagaaaatgtttggaggcaaaagcaagaatcttggcaggtagaggcgaatgggccccattcatagacatccttgcacttttgatcttcggaggagtcctctttccaaatgtggatgggttggtggacctagcgg

SEQ ID NO: 64012 - DNA, 326 bp, Glycine max
  unsure (1)..(326): unsure at all n locations
accgaagattagtttattactgaagatngattcatgcccgctgaaatcaatttcttacactgagaatgctttaagaaatggtttcctcaatcctgtgccaattgccaatagctttgagctcctcataattagatttggtgttgttcactgtagctcctttgatgtaattagaatttagaacacacacagagctagaattagctcttgccctctaaaataatctttaaacttagacatgtttgttttgactaatgcacttgataagaaaaatcangaatagataaaaatactactcaagtagattagttgggctatatgcatttcat

SEQ ID NO: 64013 - DNA, 432 bp, Glycine max
  unsure (1)..(432): unsure at all n locations
agctataagctctagttntcatgttgttcttgttgctcttcttatctctaacaaaatataaaaataatattcagattttagagtttatctaaagcttaagtttatggaatgtaacatgaacaatcaaaacctattactccgttccaaaactataaatgctttacaaattcaacactaaattcataatcctttctctattatacccttgtttacagttatcagtgcattgaatattttttgtcaccaatagctaaccatttatcaatgagaatattcacttaatattgtctctagactctacggtatctaaatatttgcggatcatggtgattccaacaacatgactaaagaggaatattatagtctatagctttatcaattaatatttagtaatgggtgtgcactaaccttaaacatatataatttttgaac

SEQ ID NO: 64014 - DNA, 302 bp, Glycine max
  unsure (1)..(302): unsure at all n locations
tttggctgagtgaggagagaactgcttttattaaaaggctcctctttcttttttttacaaggatgccacatgtctccttttgagtggaccaaaaaggacccacgttttctcttgatgtgactcatactcagtcacaaagaagagaaaaatctgaccttctgaaatgctaaaatcctgtcttcggttgcatgtcagttctctggttccagaccctcacatttctctgcacccgtcggtgccagttntcgaaagtaagcaatatatatatcaaaacactcagaatgatacctcgagcgtggttc

SEQ ID NO: 64015 - DNA, 435 bp, Glycine max
  unsure (1)..(435): unsure at all n locations
agcttgagttggtatctggccttagaattatatttgctaagagccaattcggtgtggtaggcaaatctcaggattggtgtagtcgtgctgctgattacttgcactgtagccctctgcagtttcctttcttgtacctagggatgcctataggtgttaatcctaggaggaaggtggtgtgggagcctataatcagaaaatttgaagccaaattgaacaagtggaaccacagaagcatctctatggctggcagaactactttaatcaatgctgtcttgacaactttgcccttattttatgtctttnttcaggatcccttcagcagtcatcaagagactcactgctatccaaagacagtttctttggggtggcaattcagaagggaaaaagatagcttggatctcttggcagcaagtgtgtgctcctaaagaaaaggga

SEQ ID NO: 64016 - DNA, 433 bp, Glycine max
  unsure (1)..(433): unsure at all n locations
tgctctaacggctctatcctactaatcccttttctacccttacgcantaatctgaaggtaagctggtctcattactctccttctgggcttttccatattctgcacctctgctgaatgttctctttgtacccctactctgtgatctgtgttttccctatcatcccgcggcccttgngaaatcaccttgtcctcaaggtgatagtcattaagcaaagcagaccaatcctcccaagacgtatcatctgnggataagccatgccattgaaccaagacttcccaagcttctgaaggggttctgcgataatccacaattgctgccggagtgagaaggggttgatcattatgaaattgagcangtagaggcgcgaaagaagtgatgtccaaatgaccatgaaacggtttgagtagagagcaatggaagacatcatgaatc

SEQ ID NO: 64017 - DNA, 465 bp, Glycine max
  unsure (1)..(465): unsure at all n locations
ttaagcaccgcagctgcagctatgccagaaatggtatatgaaattgagatgctttnaaaaacaccatttcctagttaacaatgcattatgtaccatgtncaattatntttgttttaagtgaaacgggtttatgatcccaacacgggtggctcgtggtgcctaacacatgaaactaagaatgtagtgtgaagtttcacgcttccccctttttgtttttgtttgttgaggaaaacgcaatgatgagcaaacatgaaaacaaatggtatgcaattttgcagatcaaatagtttgttgaacgcatatgcatgatgatgccatgactcatgcaaaatgtgatgctggaatatgataacggacaaatgcaggatatgtcctttatgatgttatgaagagatgcttatgcgatgcatgatatgaatgcattttaccgacacgagagcccggaaattatctcttctttcttgc

SEQ ID NO: 64018 - DNA, 502 bp, Glycine max
  unsure (1)..(502): unsure at all n locations
aagtcacctgcggcatgcaagcttcttgcgtagctgctcttgggctctttanattcttanacaaatccctcttattactagctattttgaattctttagttcctgaatgtacaaccttcaaattgttgctcgttcccctctttgttttttgcaaaacagaaaataaaaaaaagtacctcaggtacttcatcattatttacataatgaaatatttatatatttgtgccgataaaaaaaaaaccttacagatcatagctacacactaacagcagtaccagatatcacacagataacaacatcagacaataattccaaccaagaggaaatcatgactacaaatagtagaggcaataacagaccanaatgcaacacacacaggcccaagtacctcagtgacttcgtataaggaccagaggagctgcaagcccgatagcagattctataattccttctacttcgtataagactgtccctcacaaagccctgccactaataatagctt

SEQ ID NO: 64019 - DNA, 499 bp, Glycine max
  unsure (1)..(499): unsure at all n locations
agtcacctgcggcatgcaagcttgaagaggatgctttaatggaggaaatatatatagaaggggggagcacggaattgaaggaataaaagagggagagaagtggaactttgaagtgtgtctcataagacttttattcatcaaagttacaacaagtgttacacatgcttctatttatagactaggtagattccttgagaagcttctttgagaaaacttccttgagaagctagagcttagctactcatatccctctcataactaagctcacctcgttgagaagcttccttaagaagattcctaaagaagctagagcttagctacacatacctctctaatagctaagctcacctccttgagatgaaaagctagagcttagctacacacccnctataatagccaagctcacccccatgacaaaatacatgaaaantacaaaaaaatccctactacaaagactactcaaaatgtctcgaaatataaggctaagaccctatactac

SEQ ID NO: 64020 - DNA, 475 bp, Glycine max
  unsure (1)..(475): unsure at all n locations
gcaagctnggttcgaggtacttacccgttgaagatcgattaacgatgaagaacgaatgaagaacgtcgaagaacggtcaaaacctttgcgaaatccctcacggaaaacgttacggaaacgtttcggaagcgcctcggcttagattttcttcacggaaacaatttttccaagcaaattcgaaagagagagaagtgcctaaggggctgaacccttttcttcttcacttcctcccctatttatagcaaaataggggagatgcttgccgcgcagctcgcccaggcgagccaggttgcttcctccagaagcaacaaccttctggaggaatcttctggagggcccaagtgggcctgggtgctatntgcacccccattnttactaagtacacccnctctgctntntttggtgattcttttttcgtaaaggtacggaaacttacgaatttcgtaacgatacttggtttctttccgtaatggta

SEQ ID NO: 64021 - DNA, 512 bp, Glycine max
  unsure (1)..(512): unsure at all n locations
ctaagcctcttggaggctgngatcttgagctacaatgaggtccttcaatggtgattatccaccatggagatgcacgggaagataaaggagaagaggtgagaggaggcgctctccactacggaataagccatggaagaaggagcttcaccaccaagaatgtgccttggataagaagcttggagaggatgcttcaatggaggaaaagaaagagataagggggggagcacgaaattgaaggaataaaagagggagagaagtggaactctgaagtgtgtctcataagactttcattcatcaaagttacaacaagtgttacacatggttctatntatagactatgtagcttccttgagaagctctcttgagaaaacttccttgagaagcttctttgagaaaatttccttgagaagctagagcttatctacacacacccctctaataactaagctcaccttctcgagaagcttccatgagatgattccttaagaagctagagcttagctacacacacc

SEQ ID NO: 64022 - DNA, 445 bp, Glycine max
  unsure (1)..(445): unsure at all n locations
agctntacaacatgatttagtaatgacccattatctctataattaaaataacttaatgccattaacctagggaattaaaaaaacttaatggctgagtgtaactganattgtggcaaccaaaagtcacccccaacagccaacaagtcagccaccatttggtcttcccaaaaagctgatgcctatagttgccaattgggcccttattacaacttgaactaaacctaactaaagcccttttagttgaataaccccaaacatatttttggtcagcccactttacagggatgggcaattatttagacaactaaacactctataattgaactaagtggggcattagtcctcctcatttggccatgaacaactacaacctgnatttttctcttgaaactggcttgattcaatagatggcagacttgtgagagctcctggtttcttgtctacc

SEQ ID NO: 64023 - DNA, 297 bp, Glycine max
agctttgaccacagctcttgcttcccgcgatgcttcttttcatgtccgcctgagtgggcttatagcctaaaccatacttgccacgatttccttgggcatttatcaggctaggtatgccgccgttgactgtgcctaaacccattccgggttcataaccgttccccaacataactcgggccatcattactgctgcatcggacagacaaggctgcccacagaaggagtccacggaggaaatgctgaccacctcataagactggaaagtggtttctaacgatacttctgcggcttccacat

SEQ ID NO: 64024 - DNA, 467 bp, Glycine max
  unsure (1)..(467): unsure at all n locations
agcttgtgcctcttcacgtctggtttatgattgtatcatatananccaaagacccttaggtgctttgctgatggctttttcccgttccaagcttcaattggagtcttgtcttttacagacttagttggacatctggtgagtatgtaaacaacagtgtagactgcttcagcccagaatgtgttaagtagtcccttctccttgagcatcgatctagtcatttccataattgcgcaattctttctctcagacactccattntgttgaggagaatacgcgactgtaagttgtcgctcaatgccttcatcctcacaaaatctttcaaactcgcgagaggtgtactctctgncgcgatcacttcttagtacttttatccattttccactttgattttcagcaagggccttgaactttttaatactccaaagacttctgatttntcttttagaaaatatacccatgtcattcta

SEQ ID NO: 64025 - DNA, 239 bp, Glycine max
actaagggagttaccagatatcttaaggctaaaaagtaaaatgtcaaatagcatcctacttaatttacctttcttgtgtcaccaagtcgcacacacttataaatcttttgatgacccaacctaaaagttaaaccagtaaataacataagattgttgatgataattagggacacaaacactcttaatatattcactttaaggacaagacaatttgcctaatgttttacattgattactac

SEQ ID NO: 64026 - DNA, 466 bp, Glycine max
tttctacacactatattcatcaaatagagatagtattttctcactttcatcacacacacatgttgtttctgcctctacaatctgggtcagactagataactattatatccaacatgtgtatacgtctctaatctaaaattaccctttgacttaaaagctataattgcttaaaaataaatatgcatgtctacctagtagtagcaaaccaagaaatatgagattggtctagtgcatgccacggagttgtaagacacaatgcatatacccatttttgaaaaccaagaatgatattcctattttcaaagtatcaattttttgcttcaagttaacaaccctaatatcatcttgggtttgtgacagaggatcgaacatgttaacctaaagtgcatgaggattcttacctagtgaaatacgtcgacgcacaactgtaccatggttggccgttagatggactaaccatactctg

SEQ ID NO: 64027 - DNA, 517 bp, Glycine max
  unsure (1)..(517): unsure at all n locations
tactaagcttattatgttatattggcatngactctatatcttttggcttcgaaatattntattngcatntttgccgaacttgctaaatcaatatataattactaaatcgtctaagatattagttttcatatatcagtgtaaacatctatagtaccaatcaattctttaaaattttttaagcatgactcttaagtngattattatacctaacaatctataattgaatgatagagctaaaacatttacattatcagtaacattttaattaaattcataatcttatcgagtggatctgaatgtcaagtcaaatttatatttctcatttttcacatattattttctcttttataaacanattgaaagagagaaatattgtaaataactctttattagaaagttccaactttagagttagaatggtttaatctctaaaaaaattcgttgttctattagcctttcactttctgactttaaatgttgaaaatgtttataataaaataattatattaaagtcatg

SEQ ID NO: 64028 - DNA, 341 bp, Glycine max
cctacttgagtgtcacacgccacacggagagaatgaaggtccatgttttggcatttgtgagcaaatgctgataaaaggtgcaaagctaatcctcatgcttttgatagaatcagttatcgtgaatgagtgaacattctatggccatgtcggatcgggccctaggctaccataatcgggtagatgcgctttttgaatctttacccagacatgcataatgtttgcaccaacaaacacggtctaatctaattttgcctaaattggccaatcctaccctaaatgcatatatcaatgtgctatactcctagaatatcgcgatcatctccctagggatacatgtactc

SEQ ID NO: 64029 - DNA, 218 bp, Glycine max
acacggtctctgaattgtttagattcttccctttacgatatgcaccagatttcaaaggactaaccgcctgagaatattttggtctccacattctcacagtatcaaggggtttacagcctgatatctttgtctgtaacacattggagggtacatactctgtggtctaagtagagggtacatctactaggagttgattgagaacaagagatggtgcatat

SEQ ID NO: 64030 - DNA, 428 bp, Glycine max
  unsure (1)..(428): unsure at all n locations
catgcatgcaagcttaagagacatncttgaattatattatagtgaagactctagaggcggagagaatgaggactcgtttactcgtgacattatcacaactattgggaatgaagactggaaacaggctctttcagagacaactacttgaatagaatcctgtcgacttacttgaaaaatacttggatgagcctacacttagaatgagaaagggggtgaaagcttgaggagaaaaatatctatcattggtattcatattaggggaaatgctatgaatatcagataggagacctaatctcagaagatgactgaaacaatataaatctcttagtgagctatnttgcctatgcttcttgtgcacgtgtgtacttctatctctatgaaaaccaattatctcgacctcggtntaaaacaagacaaatccctctctt

SEQ ID NO: 64031 - DNA, 121 bp, Glycine max
gttttatttatatttctttgattttttttcttgttgtttttttgtgtacgttctttttttcttttgtttttttttgttttttttattatattgttttacttttttttttgtttcttatttt

SEQ ID NO: 64032 - DNA, 472 bp, Glycine max
agcttatccctctctggtgtgtggtttattgttgagaaaacctttcgaatcgtatatatgcctcggatgagtgtgtctctctcgatgtgtaggcacatgactacttaactcccttcttttgtatgtagtcatgaatgtagttggttaagtttgtgattccttaatacatccttatggattggttaattcttacttcttatatgtacgttatatacttgttataggaaccttataattctatgtatgctagtagtatagtgttctgccttaattgcatagatattatggttgtttgtgatttccttgtttgtagcgatgttaattccttatagttcaatgacatgtatcaagatagatttcataaggaatactccgttgaccgtaccttccagttctagtacaacccattttcttgtgttgattgtgaagcaactcgatatacttgcaacactataccaatcatttttgtgta

SEQ ID NO: 64033 - DNA, 401 bp, Glycine max
  unsure (1)..(401): unsure at all n locations
acacaanatactcagctgtcctattgaacatgacaacttgtggggagattttatttatatttatacntatccttctgagcaacacttattctgtctccactacttgtatgaaaatgtgtttctgctgagaatatgtttcttttttatcctaccttagcacacacttgaaattcaaatgataaggtaaattaaaacgatgatgaaacataaagtacatgaactttttaagcataatcatcatcgttcagagtattgagaatgggtgaaacaaaacttctatagaaataattgtgtaagtttcttatcaccaatntggatgttcaaaagactctacacattggatgctcagttttaaaagagcacttatacgcttgttaatttataacaagttggatgttata

SEQ ID NO: 64034 - DNA, 393 bp, Glycine max
  unsure (1)..(393): unsure at all n locations
ctccttctgtgttgcttagcaatagtatacatcacgtgcctgatttcttctccttcatttgatgataaaggaacaatcaactgtgtatcatggcagggtccatcttgctcgcctctctaaaaagtgtccacacgaaatgcttaaatataatatnggtcaatgcgtattacaaatatctaatacatactgataaaaaaagtatctaataaatttttaaatatattaaaacataaacaacaaattttatactttaatacatacattctattaatgtatctgtcttgttaactaacactctaaagaaaatggttctaatactctcttgaataaaaatatttatcgtattcgaaataatatatatcaactcatgtttctctttattagtagtactaa

SEQ ID NO: 64035 - DNA, 429 bp, Glycine max
  unsure (1)..(429): unsure at all n locations
aaaacacgaggaccaagcaaatatgaacgaaatggcacatgagcaaaaacaatcgctaatagctctttctctgtggtagtgtaaatcgcttgggcagcatccaaagttctggaggcgtagtagatcacccaacgcaacttgtcaatcttttgagcaggatagccccctatgaataattggatgcatcacacatcagctcaaatagggctatccaatcacgtgcctgaatgataggggtggtagtcaccacactcttgaggcaatcaaaagcctctntgcatcggtcatcaaaacacactccaccttcttttgcagcagaatggatagtgtgagggacactttgctaaaattctcgatatagcgcctattatagtgaaataacatctatctttgcagggtctacctctatgcccttacaaggaaatatat

SEQ ID NO: 64036 - DNA, 250 bp, Glycine max
  unsure (1)..(250): unsure at all n locations
ctgcagcttctcggccttttttgtgggtttcattacgcaaacggatcaaaaatgcgaaaaggatgaccctaggctgcanactcgtcaatcccgtggtatggctttttgaaaggggggaaaaagaagtttttgaatgcaaaaacgtcccctctttcgtcattcttataattnggtgcaggggtggcttcgccaggcgacccagcttcgccaggcgagctaccttgatttttttttttttttttttaaaaaa

SEQ ID NO: 64037 - DNA, 200 bp, Glycine max
ctgaggcatgcaagctatccctctctgatgtgaggattagattttttataacctttcgaatcgtatatatgccttggatgagtgtgtctctcttgatgtgtaggcacatgactacttaactcccttcttttgtatgtagtcatgaatgtagttgtttaagtttgtgattccttaatacatccttatggatggataaattc

SEQ ID NO: 64038 - DNA, 460 bp, Glycine max
taaaggatatgcattcatttcatttaagaatcttggattatcaatgacaaaagctaaagatcaacaatatcttacaatatgttagtattgatggaaaataatataatagggagggtgtggctacacagatgagaagctggagagcaagttaattcatcacatagtaaacaagcaatatataaagattcataacatataagtggggcaaaacttctgaatgtaatgaaccaaattaaatagagcagaagagcaagaagtatagtacaaacaattttaccatgtgttagtattataagatataaatataaacttaaggttcaattattcatttgagatattagataaggtgaaaagatattacatataattagagatgcaaaaccatggacctccacctttttgacggaaatcttgatggatcaaggaacaaatttcatattcttatgccatgccaataacc

SEQ ID NO: 64039 - DNA, 333 bp, Glycine max
agcttccttcctgcaagctgaggaagaatacttactatgagtgataacctggtgcaccactgcaattatgttgatccatgtggagaccattcacaaaaatttacattgatttctctagatgcatcatggatcgcaattcaaaactaaactttacccttccatggcaatgacttccctaccttattgaggaactccactttttttataacaaaagaagtggctcaaggaattttgtgtaactaacaaaataagtaagtgctaaggaaccaaagattctgggcagcttaataaccccttaaaaaggataattcatgaccggccttaataccttac

SEQ ID NO: 64040 - DNA, 520 bp, Glycine max
  unsure (1)..(520): unsure at all n locations
ctcaagcntatcaattaagagatagcaagcatcaaaggtgtgagaataactccttttgtctcaccagcccttgaaacagttccattgaagtgggaatgtcaagagggagctccaacaatttacaaagctgaaatgggctaattggggtgagcgagagtgacctcctaagctgtttgaggtcaaagggtttgagcaatctctcccactctgtctcattgtcactactactactactactactactactctcggcttcattgtgagcattgaaataggtttcatgggcagaggtgcaaagtgggaaataagggattntgaagcaaatgtgcatggatctatcgacatggattgataactagaatgatccaacatgaaggtgggagaaactaaccccaatggagccaccgtgatgtgggtctcaataaacgaagacaccgaatactgatgctgatgctacagtgaaccctccttgntgtcattgaaaatggaacacacatattcatgtcaaccgccgttgttg

SEQ ID NO: 64041 - DNA, 435 bp, Glycine max
acatcgtgacttgacttttatttttctatcaccatatattctgccttcttctattctcagagtgggaacgcctctaacagcacctttgtcaatgatattcttcatgcctcttaagcgcagatgtccaaatctttgatgccatattctgacttcatcttctttggaggatatacacgctgaggatgaactggttttttgaggtgtccataacgaacaagagtgctttgatccgctgtccttcattagaacttaactcttctcagttgataccaaccattctgactgtgagaagattacatagaatccttcatcacacaactaactgatgctgatcaggtttgcagtcagacccttcaccagcacgtctttgttcggactatgaagtccatcatgactatctttcccattccaatgatctttactttacagccatac

SEQ ID NO: 64042 - DNA, 346 bp, Glycine max
  unsure (1)..(346): unsure at all n locations
gtgccgatatctaacaaaaggttggtataaatgacataaataagaccacacgacaataacaaaaggacgaatgaaaatacgtgagaaataaaatgaaaattaaacgtgttagtgcgaagaggaatatagctagccaacattaatgttaataggcgaaaacatatacaaacagtcctaacatttttaaaattatttccaccttatttcttttctctaaacatcctcaacttttngcatccaccctagatcatttccatccatcactgaaagagtcaattttgcatgatagtgagagacttnaatgctaatcatacacttcggtatggatagccaacatttaatccta

SEQ ID NO: 64043 - DNA, 439 bp, Glycine max
  unsure (1)..(439): unsure at all n locations
agcttctatataagctgaatcattttatcattaatcacaagttgagttnnattcagacaattagagtttatctcttttatcttagtgagagcgattctcctaagttcttgagtgattcaagaacaccctggctatatcaaaggactttcacaacctttgtgtgttgccctcgcccagaaagagagattctntcctttctttcatcttcaaccttgttctttcaaaccaccatttcagaaaatccccttctgcccagaattatctcgtggccataactcccattttacccactcaaattaagtgagtcttgagcctaaattaaatntcaaaacgagacctttcacctcattntggaatcacctcatttggttcgcattttacccaccacttaacctacagtttaccattccattcattcattttatgccaagaaccacct

SEQ ID NO: 64044 - DNA, 390 bp, Glycine max
tgaatctatgacataagcttcaaccaatctacattgtttgtatgacaactgttgtagttggacagcaatcacacagtgtgtccaccatggaatgctatatgttcctattggttatagatttggtatgctttatgttcctattggttatagctttggtgctggaatgttcaatttggagtccacaataggaggaactctatatggtgctggagtctttgctggatatggtacaagacaagcaagtgaaatggagctggagcttgcagagtatcttggcaagtatatatgaaattatcccataaaagctatgttggattctgcgattaaattccattaagctctcctatctaggttagcattctagtctatctcaacctatgttgtaatggc

SEQ ID NO: 64045 - DNA, 486 bp, Glycine max
  unsure (1)..(486): unsure at all n locations
catgcacgcttggtacctccttcttgacttcttctttaattaccgggctgagtcttctctgtggctgtcttactggtttagccccatcctctaaatttatttgatgcatacatgtggatgggctaataccaagaatgtccgccagggtccagcctataaccttcttatgcttcttgagaactgataacagcttctcctcttgctcattagcaagggaggaagatataattactggaaaactattgctatcatccaagtaagcatattttaaatttgatggtagaggcttcaattctggtgtgggcgattagataatggtagacagagatggtttctcagcctgtacctcataaagaaagtcagaggtatgtgtacttcctgacacatnggtagttctatctgactctagaaaatcaatatcaagaggtaaaacatcaccagacatgtaatcaatataaattttagattcactctcagcatcatatt

SEQ ID NO: 64046 - DNA, 426 bp, Glycine max
atacactttttctacctcagcagcagaatctaccaaagcagaacatatatgacccctccagctactgatactattccggatcaaggaatcaccctagtattagatggtttagccctcaacaactacaacaacatcaacctgctcctttcatccaaaatgctgctaggtcaagtagaccatacgttcctgctccgagcagcatcaacgcaacagcgacagcaacatcaatagagacaacaatccactactgaggcccttgcttaaccttcattggaagaaatagtgatgtgatgcaaatgacaatatagaacatgcagtctcagcatgagactagagcctctattccgagtttaacaaatcagatggtgcagatggccatccagctgaaccaagctacactacataactctgacatgttgcttctca

SEQ ID NO: 64047 - DNA, 289 bp, Glycine max
ctcagaacaaaactcatgagagagaatagaccacagccccaggagtcacctatgaccattcaacgtaccgccctctattatatggaggcgaccgaaggtgcatcaatctgagaagacagctcatttcaccccaaactgactactattccccgatcttgattcatctgaagaccaggttctcttcttcctagcaccaccatgtgatcctgatgatgaaaatatttgtggaacaaatggacaaaggaccgaatgtttctacaaaaaagcaactacagtgctacagcgttat

SEQ ID NO: 64048 - DNA, 480 bp, Glycine max
  unsure (1)..(480): unsure at all n locations
agctntatagtagatgtcactctactccaaattcttgaaggatatgttaacaaggaaacataagtatattcaccaggaaaacattgtagtggaaggaaattgtagcgttgtgattcaaaagatccttccacctaagcataaagaccctgngagtgtaactattccttgttcaattggagaagtcactgtgggaaaggcttttattgacttgggagccagtataaatttaatgccactctccatgtgtataaggttgggagagttggagataatgcccactaaaatgactntacaactggttgaccgctccattaccagaccatatggagcaattgaagatgtgttggtcagagtgaaacattntatcttcccggcagacttcatggtaatggatatctgtgaagatactaacattcctgtaatattgggaaggccattcattntaactgcaagctagttgacatgggtagaaagaagctg

SEQ ID NO: 64049 - DNA, 480 bp, Glycine max
  unsure (1)..(480): unsure at all n locations
agctntgagccaattcanacgacatattctttttactctgatgtctgattgagtcctgtaatataacgagacgctcgaaattgaatattgaacctctgaggaaattcaaacgacaataactcttttctcggatgtttgattgagactcgtattatatcgagacgctcgaaattgaatgttgaagctctgagccaattcaaacgacaataactntttactcggatgtctgattgactctcgtcacatatcgagacactcgaaattgaatggtgaagctctgagccaattcaaacgacaataactntttactcggacgtctgattcagtcctgtcatatatcgggacgctcgaaattgaatgttgatgctctgagcaaattcaaacgacaataactntntactcggatgtctgattgagccccgtcacatatcgagacgctcgaaantgaatgttgaagctctgagcatatctaacgacaat

SEQ ID NO: 64050 - DNA, 377 bp, Glycine max
  unsure (1)..(377): unsure at all n locations
caagcttgatgttggnccattatgacaagttttanttgtttctgtnacactctccataatcgcaaattcgatactatggtcagattcagtgtctacattcggtgaatcataacatgatatagattgaatcatttgcaaaggatgggatcctgacgtgtcttccaactatatgtactaatgttgacattggttttatattactaatttcgctaaccatatatggtaaaacgctcttggattacatcattgtgcgtagctttctaatctttcacttaaaattgcatgagctatgatttaactcttactttcgttgtgacttaagttgccactgatccatccggacacatgactaatgcacttaagcagcatataataaa

SEQ ID NO: 64051 - DNA, 487 bp, Glycine max
  unsure (1)..(487): unsure at all n locations
ttaagcaccgcagctgcagcttgatgggctagagctgtgctatgtttataagatccggtggagattaatttatctcagcctcatttgtcacaagatagtgacatggagttgatggtaaatatttgtcacaacaaagtagttttatctcaacctaatttgatgcagcactctatttttatatattacanatattcatggttggcatttgcatgtatgtccctgcaactattgttccaccaatagcaaggaataagctaaccataacaagagccaaacataggaagggtgctgataaagatgatgcagtataaagaaaattgaagaccaatcttttgttgcattctgaaagttgctgagctagaaggttgctgatgaaaaaaaccgaagaagcatttttttgttgcattttgatattaggatatgtagttgcatattctgaaagcttcactggcatgtgatatgatgtaaacattatggcctactaaac

SEQ ID NO: 64052 - DNA, 493 bp, Glycine max
  unsure (1)..(493): unsure at all n locations
ctaagcttncatatttatntcttacataaaaaataccttttggccatgataatcatntgtcattggtgaccatgaagatcnttgtatgctcaacatatttatgattctcacnaacaaatttcaaggtttcttggagttttcaatctccttaatgaaatatagtttaaaaaccatccttagttgttccaaaactgtaaaaaaaagacaaaattcaccatgtgagactattttagaaaacaacaaagctagcaaaacacacttggcgaaatatttgtctatgtagtcaatatcctctnttccagcacgccatccacccaaccgatacaacaacaaaacatagtgtattaaataacaacacanataataatataacactctgcaaataagcatctcatattttactaattaaaaatcgtgtatcatcccaactttcttatgttgggaagtcaatgtagaaatagcttgtgtttgtttgatatgcagcgtgggagta

SEQ ID NO: 64053 - DNA, 307 bp, Glycine max
  unsure (1)..(307): unsure at all n locations
caaacttagangncagtgttctgagcaccttctccatcaccagatgttccttaatttgttctccacagcacttcatctaattggtgagtgtgagaatcttggtgaaatactcagctactgattcagtctcctccattgcaagaagctcatactgtcttctcaatgtctgaagctttaccttctttatcttttctccaaagataatccaatatttatttagataaagatatctaaatatatattttagtaaagtaaaagatagataaaagcgctttaatatattatatagccatttttatgttgaaaa

SEQ ID NO: 64054 - DNA, 383 bp, Glycine max
  unsure (1)..(383): unsure at all n locations
tgtcacagcagaacagtccatacgcggaaattttttttaagctcttttggcaatcggaaacaaacctgtacttgtggtcatcgtcaccggggcgcgacgcaactcggcaacgacccatttctccctctgaaactgaaacagaaaccttgcttgccgccaaacaatattgcttatggtaagtgttgttcacttttaatttagcgtactttctaatttaattaaaaataagactaaagactaaaataaatgaaatgttattaacatttacaaatacaaagtagggaggatggtaaatgactttctnataacattaaagacaatctattctttttattaaaaaggtatgttcaaaattcataccaaacaattatggtgtacttttt

SEQ ID NO: 64055 - DNA, 411 bp, Glycine max
  unsure (1)..(411): unsure at all n locations
gctttatnggcactcaataatntcacngtcactgaatacatctatgatagagtgacatctctaatcatgatgttagccgatgatcaaactccatatctcgattaagagacttcattctcttatttaatagaaacataatctagtatcgtattatacttctcactaatcataccgattaaattattattcatcttcccttcattgatatgaacatttacacattagaaattgaattcaagttcaatcataaaatagtatcgtattgttgttcttttctaataataaactaccccctatacattgagactaaaaagaagctattgagctcacgtttactcaataatcatacaattgattctgatatggtaaacatgttctcaagaaaaaaccatgaccattagttgtgcattc

SEQ ID NO: 64056 - DNA, 390 bp, Glycine max
acacaaagcaccaagcgaacaatatgacccctccagcagcagatacaatctcgggtagaggaatcaccctcatctcagatggactatccctgaacaacaacaacaacaacagcctgctgcttccttacaaaatgctgctagtgcaagtaaaccatacgttcctgctccagtgcagcaacaacgacggcagcgacaacaacatcaagagagacgacaagcctctactgaggcccttccttaaccttcattggaagaattactgatgtgatgcagatgacaatatagaacatgcaatttcaggaggagactagagcctcagattcgagtttaacatatcagattgggcagatggccacccagctcaaccaacctcaatcacaaaactgtgac

SEQ ID NO: 64057 - DNA, 190 bp, Glycine max
gagtgcgtcagctgatctctaatgttggcaaattgggctagtacgtgaatgtttgatttatggacgtgggagaggtgatttactgcctctcccgatcgacacctattaccgcatatgatggcagccccattatccactatgaggtcgtctggccacctctgggagatgaccacacagtggtcactggaga

SEQ ID NO: 64058 - DNA, 291 bp, Glycine max
gctcaagcttctcgtgtgaaatgagagagtctcgatatactacggaacacaatcggacataccagtacaacagttttgctgttcgaatctgctcgcagctactgctcgtatatactacagtcttgattcattacaggattcatacggacatccaaataaaaagttattgtcgtttgaatttcttcagaggcctcgttgtaatctccatcggctagatatataacgggagtcaatcagacatccgagcaagaagttattgtctgtttatttagatcacagtcctgttttcaa

SEQ ID NO: 64059 - DNA, 467 bp, Glycine max
  unsure (1)..(467): unsure at all n locations
gaccggatccttnagtcacctgcagcatgcactatacgatctgattgtagatctattctgatagagatcactccgacattgtcctttctggaagaacttggtacttggagaagtaaaaacaagatgttgtatcgtgatctattgttgaagctgtaatttgggctacgacacaacgtatttctgaattgctttggttaaatatcatcttatatgacttgaagattaaatgagaggcacatatgaagctttattgggagtataagtcagctatcagcatatcctataatcttgtacaacatgatcgaacataacacattgaagtggatagacattctatcaatgacaagttggatagtggtttgatttgtcaccttcgcaaggtaacttgcggatttctactagaggattgccactccaattttgatagacaatataaagcaagactggttacatctatcttcacttga

SEQ ID NO: 64060 - DNA, 324 bp, Glycine max
  unsure (1)..(324): unsure at all n locations
cgcatatacttgccgcaaatgttcagcttagctggcactggtcagctaagctaattctgcagaagctaaatttatgcaacgttctctaagcagctccacatgtcgctaagcggtagtgttttttttttnttttgcataagccacttaaatggaccatatctcgctaagaggccaatgtcnttttcagttttgaattttaatagatggagtcctgattaactgtctgattcctttgtctatagatggcttccacaaagagaaagagtattggttaagacccacaacccagtatggcacacggagattctctttcttagatgcttg

SEQ ID NO: 64061 - DNA, 286 bp, Glycine max
agcttggacctatctcgaccatcgcagcttgtttctatcagccgtgcatgttgatcactccagatgctacagactattgtaggaaccttatgcagagcccagaatgacctgaccgaatttggtactctcagatgaactatcaataacacggcacatgattcatgagagatacattgttctaactctcacctatgataccaacattttgactggatacttaacgtgattcatccatggtataggcacatgaaaattatctaaccctgctcttatataattattgaat

SEQ ID NO: 64062 - DNA, 501 bp, Glycine max
  unsure (1)..(501): unsure at all n locations
ttaagtcacctgaggcatgcaagctngcctaattaacctganattgagagtatttgtattttaaacacacaaaatggaagtactaagtatttatcacctatacttaatagaaaatacttataacactacaaaataaccataaattggaagagtttgatacaatttatacaagttttatgcacaaaagttagtcgtattcaccgactaatacataaactccctgttntaatcgatttccaggctattcataatcgattacacaagtcttttgagaagctttaagagagatactcattttgattaccggacatccgtaatcgattacacaattcagttaagaccatgtctagtttttaggagtctctattttaattggttaccaggtgatcgtaatcgattacttcattcttganagtgctcttaggagtgatcaagagccctttattcgattaaatcaagaatctaatcgattgcattgttcttataagctttccagatttt

SEQ ID NO: 64063 - DNA, 310 bp, Glycine max
actctgctataaagcacaccgcgtagactctctatttctctgacggtcaaactagtcaacctctctcgtgaatatctaatgatgattgggatgaaacgagcacacttcgttaacctatctacaatagcctaaatggaacctcaccctctggggatctatgtaaccgcaccacgaaatccatggtgatgttatcccacttccactcacgtatctctataagttgcaacttccttgaggcctttggagatctatcttaacctctctgcacactagggatgcaatgacaaactgtttaacttctctcttttta

SEQ ID NO: 64064 - DNA, 265 bp, Glycine max
gatacaatcttctcatatgagaatgcttcataaacattaagacaactagcagatgggcctaatagaactggtataacttggcaaggatatgacataatatgtgtattcatcttacacaaaagcacagactacatatgctatgcattcagcgggatcacccttatggcacaatctcaacacttcgcatgtgtgcgtgaacgtcatccctgtgtaacttccatcccttactttgtgttcattgatgaaatttgggagcttaactatg

SEQ ID NO: 64065 - DNA, 476 bp, Glycine max
  unsure (1)..(476): unsure at all n locations
ggcagcaagctanatataagtcttaataaacaaacttggcattgtagtagtagaaccttatttgactcaggtgggtaggtccaataaccttttcatttgtgcctttcagtttctggcttctttctaattaccatttcttgcacttttgtaattntaacaagtaaccttcttctccttctattttttgggaggaagttaattntcaatttgtctagtatttgtttctttcttcatcatttcagtacgttggttttcatcattttaaaaacgataaaacatggccttagggaaatctccttctgttgctttaggagtttatatgtttatgtttgctagagagggctatttatatttggttgcataaggtaattttagagcaaactttgaacaatactttaactgttcttgaattaggaaatatatttacacatttacatgtatggtataagtgtaaatatttttggggtgcttaacaa

SEQ ID NO: 64066 - DNA, 465 bp, Glycine max
  unsure (1)..(465): unsure at all n locations
tctacttatgtggcagggcgggtntccttcactttcttgtttcaacgcgagctctgaccactgttcttnctttccgcgatgcttcttttcatgtccgcctgagtgggcttatagcctaaaccatacttcccacgattcccttgggttgttatcagactagttatgccgccattgtctttgcctaaacccatcccgggttcataaccgttccccaacataactcgggccatcattaccgccgcctcggacagacaaggtttcccaaagagggagtccacggaggaaatgctgaccacctcaaaagactggaaagcggtttctaacgattcttctgcggcttccacataaggcatggaggatgggcagcttaccaagatatcttcctcgcctgacacgatgaccaagtgcccctccactacgaatntcagcttttggtggagtgtagaaggcacaacacccactgag

SEQ ID NO: 64067 - DNA, 416 bp, Glycine max
  unsure (1)..(416): unsure at all n locations
acaccacgctctccaaacctctccatactaaatgccttcactacttacttcactaccatgggatcatcaacccatctcctttcttttacaataccttgaatattattactcctcctccattntcaccacttatggaaataacaagcgctgtcacctccttcctctaaccatcttgctctataagaatattgaaggagaagggattcctgtcttttagataccctccaaaactcttccataagattctttctatgatcttcctcttcaagagacaatgaacccgtatggccttaatatacaactccttgatcttcttataccacttaccacacaacgcattcaagttgcaaagacttccaatcccacattttatatttattgtttacaaccttcagtttccctcaatttaatgcccc

SEQ ID NO: 64068 - DNA, 268 bp, Glycine max
atttctctattcatagcacgtctttttttttataaacgggtgttggagaatcgaaccgtaacggtgaggagagagggtggtacacttaagaatgaaaactcgctgcggctgctagttgtttgatgattcaaggactagatgggtgggctatggtgatatctggtgggttcataagcttgcccattgtaaaaatgatttgttcttctgctggggagaaaatgcctggtcttctggctagaacgttggaggttatgggcaaatggtcaga

SEQ ID NO: 64069 - DNA, 292 bp, Glycine max
actctagccttgctcattcattttaatcacttgaatctttttctctcatgtacctgagttttgtagaagctcgttttttactcaagagaacttcattcatgcgttgaccctactctttctcgtggagactacaagaggtaaggggggactttccacttcttgaaccctaaccttgtttctttgaaagctacgcttcattgcatgatgctgcgatgtttaaaatttcgtatctactaccatgactggtaacggatgacatgctgtctatctaaaagttctaaagttcaaaatg

SEQ ID NO: 64070 - DNA, 324 bp, Glycine max
  unsure (1)..(324): unsure at all n locations
acctctgtttnttatttaattaagttctacagcttaaggatgatggctgcgtatactgantcaaacagcaacgacgtgtataatacactatgtntgatgaagctagcaacatcttggtattttaattctctattggaatttgaagacgttatgataaatacaacactacctctgtatactatgcttcatgcttacaataacagtgtacttgaacanaggagattgnctatcaactttgtaattctgtctagtcctatactggtcatcttcaggaaacaactgattcactatattaatggcccgtataatatgtgaatgaaacta

SEQ ID NO: 64071 - DNA, 441 bp, Glycine max
  unsure (1)..(441): unsure at all n locations
agcttangacaccatccccattcatatcattattgttgagcatagaatggcactcatcaattggagaaacttcgagaagcaacagttggatattatcaaaacacagcagcagccgagacatacgtagaaatgttcaatacaaacacaacatcacagctgaagatccgtctctgagagcatgtgcagaggtccagcttccaattaaagacatgcttgacgctaacaacccattcacattcataactgcagatatctccactaaagtataattaactgatgaatgtgcagcttgccactatcgcagaggagggcagtgtcaacttgacagcagagagaaattctgttgtaccaacgctacactacaacanaatcctggtaaacacccacaaatgcaatccactaacacttggtttttctatctgtatgtcacattgtaggttc

SEQ ID NO: 64072 - DNA, 203 bp, Glycine max
actacaagccttaagtgaaaaaccatgatattaccatatcttaacgaatattggagctttggaattgctttgggaataactgtgaggggcatttgtttcattggacaactggttttgacgactatgcttcatgatgtagtttgcgccatacttgatgtacattgtatattgtgtacacgttggacatgttgaatgaaatgttg

SEQ ID NO: 64073 - DNA, 462 bp, Glycine max
  unsure (1)..(462): unsure at all n locations
agctntctgcaaggaagctaagtgttaatttgcaatcctgcacaggaaatgggctgcgaactgtgtacccaccaatcacacttccactgttgccacaggtttgggtaaatttctgtatgctgttggaaccaagtccaaatttaattttggaaactatanttttgatcaaactgttaagcattcagaatctttttgttgtcaaattacccattgccttccctactgtattgtgtggcattatgttgagtcaacatcccaatatcctaaacaacattgactctgtgatgaagagagaatctcctctatccctgcattacaaactgtttaaggggacacatgtcccatacattgtctcgacatcaaggaaagctgctgcttcacgtgctgtgtccaaagatgctttgattgttgaactcaacgacacatgcaaggtgctggaagcaaccatcaaagccaccacat

SEQ ID NO: 64074 - DNA, 431 bp, Glycine max
  unsure (1)..(431): unsure at all n locations
gctgctctanattacattgatgtttgtattgatgggaggagggttcatgccatnttcgctttaagagtaacgtcccactggtaaaactaactttccaaatgtttgccttcgcangaatggccccgacgaagctngcctcanagaggtccaggaaggacaaggcggtcgaaggaactagttccgccccggagtacgacagtcaccgctttatgagcgttgtacaccaacagcgcttcgaagccatcaagggatggtcgtttctccgggagcgacgcgtccagctcatggacgacgagtatactgattttcatgaggaaatagggcgccggcggtgggcaccactgtgtactcctatggccaacgttgatccagaaatagtccttgaattttatgcctaatgcttgccaacagatgatggcgtgcgtgacatg

SEQ ID NO: 64075 - DNA, 465 bp, Glycine max
  unsure (1)..(465): unsure at all n locations
agctagtcgtatctctctgcctgttttttcattccttcttcataatcgacnatgccactgatgtctcgcccttgtggcttatgtccttcagaagacactttccctattgttcttgcgcctccagatgagcctcaatctgatatggtacgtaccgttccagcaggtcaccctatggtgactcgtgctaaagatggtatctacaaaccttgtctctctgtagatataactacttattggccatcttttcttttacatgcattactcaccacttttgagcctaaaggttttaaatctgctgccaagcatcctggctggctttgctgcatgaatgacgaactcacgaccttacactgcaacatgacttgtgaacttgtctcttgaccacctaacactaacattgttggctccaaatgggtattccgcactaaatatctttctgatgcgttcattgatcgcttcatagca

SEQ ID NO: 64076 - DNA, 484 bp, Glycine max
  unsure (1)..(484): unsure at all n locations
actaagcttgattgttaaagtaagatgcctcattcgcgtttgattgtcgcattgagtancagagncctagcaccaagattttggtgcatgccctgacagtggcgtgagaatctgattcatggaggtgacatctggcattgttaggtgagatctatcagcattgagaggagatctgttggcactaatgatgaaaggtggcaagaggtggttgtggatgatgttgtggtgacaggtgacggtggagggtttagaaaaataatgtctaatgagaggaatatgaagaagctgggatattgtcatcattaaatggaacggtgtgtttgatcttcagtgcataatagcatccttagtaactcgtgttaactttagagcgtcaaaatgaatgcatcttgaatgagatatggcgagattactagacctcttcatatcaaatcatgttagcgttgttttatatataaagatgatataattaatattttttttt

SEQ ID NO: 64077 - DNA, 161 bp, Glycine max
ctctgcctgcaccaccaacacgagatcactgatttttttcttttaacagagtcttgatcaaccatggggtccaggtggttatccaaaggtgaaagtgttctattactccggcctatcttttaagtgcattgtttccttatatagatgtaaggaacttgtta

SEQ ID NO: 64078 - DNA, 377 bp, Glycine max
  unsure (1)..(377): unsure at all n locations
gcatctgngcatacatcgcatccactaacagacgttgagcgccgtccaactgatggtactcgtcaccaccaccacctgctccagccataattcaacaggagaaaaaaaatgtgcaataaatattattaaggtttcaggacctcacaacactctactcacgtctcttagatggtagtacactcgcgcttaatgctctcaatacgcctttgtgtaatgaattccctcttgcctattaccactcgtgtctcctcttaagttcctggatggaccaatatagacacacacaggtatatataataaaaggaatgacaatataatgatcacaaacagatctgatttgcgataacaacttgcactcgatttggatataatataat

SEQ ID NO: 64079 - DNA, 484 bp, Glycine max
  unsure (1)..(484): unsure at all n locations
agctanataggacatctagtataaggcacttgcatngttgggattgcccgacagaaataagggtttataattcacaagaaaaaaaattggatggtagaacaattaatggatatttcattggttatccaaaaaattcaaaggagtatatgtttcattatactaatcatggtatgagaattatcgaaattggaaatgcaatgttcattgaaaatggtgaaataagtgggagtatagttccacaagatgtgaaaattaaagaagttagagttcaagtacctttagcttgtgcctctagcggtaaggtgattgctcttttagttgttccaaacaataatgaagaanaacaacaaaataataagcccgtgatacataatgaacctattgtggaagaaccataagaagttgcactgaatgtgaatgtatgaatacatgaatttaatgatgccaaagaagaatataacaaggttgcttcaacaaaacaaag

SEQ ID NO: 64080 - DNA, 464 bp, Glycine max
atcacctgcagctgcaagctcgtaaagcttatatggataaaacttgctttttagcttcggatataatgatgagctcattccttgttcaaaatggattcactagaggaataatggacactacactatttataaaggcctagaaagaaaacctgttgattgttcaaatctatgtagatgacataaaggaatagtgaacactacactatttagaaaggcatagaaaggacaccttctaattgttcagatctatgcaaatgacataataattggtgcaaccttagaaaggatgtgtaataagatttttaacctaatgaaagatgacattgaaatgagtacgatgggtgagctaaagttcttcctatggcttctaataatccataaagatgatgaggatgagaaaggtaatgattctccaaaaagggagtacaaagggatgattggttccttactgtatttacaatgtg

SEQ ID NO: 64081 - DNA, 442 bp, Glycine max
  unsure (1)..(442): unsure at all n locations
gtcacctgcggcatgcaagcttcttgcgtagccgctcttggtgctcataanattataaaacaaatccctcttattactnagctatttgaattctttagttcctgaatgtacaaccttcaaattgttgctcgttcccctctttattttctgcaaaaaataaaatcaatatcaaagaaaacagagaattgtcatggttattattactcgaaccagaaggaataacatctaaacaagtcattntattcttagaatgtgaaaactctgcatatttatggagaacatggggtatggaggcacgtaagtatgtgaataccacaagtcattttctccaattcaagggattgattaattgctctangaaaaaaacatacatctggtatattgtttggtttgcagcttgttggagcatttggaagaaacagaaatttttggtgctcacagc

SEQ ID NO: 64082 - DNA, 411 bp, Glycine max
  unsure (1)..(411): unsure at all n locations
aactagctgaacacgcgaccttttttctatgtcaaggccttgttttttatggtgaaaagaattgaagaganagatcaagagaagaacactacgttgcaacttggaaagaaaatacaaccttgccacacagtagtatgtccaaacagcatgtgcactccaaagtccaaggataatagcagaatttccaatgacaataatggcaaatgccaatggacctatcagtgcacctgccagaaagaaaccaccaccttgtcatgaatgtaaccagtaactttatttatcaaattatatattagcagacagattctgttaagtctgaatatgattattatatatntttcatgtgtctaagtctaactaagaataaaagaaggatancgaccgacagaaagaagaaaagggaaatgaacc

SEQ ID NO: 64083 - DNA, 229 bp, Glycine max
gctatcatcaccagccacctagaagagttaggtctgaccgctgaccacgatcatacgattgacgacgaatatacacacgtatacgccgatgatgaggctagaggaacggtgatcgactctttacaaccagaggcaaccatgtggatggataggctagaccttaccttgaacgggagcacaaactttcacgacagtagccatcgccaatgcgacggcagacaccgactcc

SEQ ID NO: 64084 - DNA, 470 bp, Glycine max
  unsure (1)..(470): unsure at all n locations
agcagtgttgtctagtacatacagttgtgcttgtgagacctgcttgcgatccatggttacaacattgaatccacatgtgcctctaccttgtcgtgatatgtcatggcgggtttcaggaagaccaacaggtgcagcattttcgatgtactcagaacgaaactcaatagcttcttctgcgacgtacctttcaacaatgcttgtttctgggcgatattgattcttcgtataactttgcaacaccttcttgtaacgctcaacaggatacatccaccaaagatagacggtccacacaaccgtatttctcgtacaaggtggattgctaagtgaatcatgacgtcaaanaaagctggtggaaaatacatctctgattgacaattgataatggaagcctcattctcctaatcatccaactgtttggggttgattagtttcttgcacatcgcattgaagaaaaaatacaatcaagttat

SEQ ID NO: 64085 - DNA, 367 bp, Glycine max
  unsure (1)..(367): unsure at all n locations
ctcacgccggagctncgnncggaggttcaggccttgcagccggtctctctttcccagccatctctctggccaaactccaggaggagaaaatggaggatcgccgtcgcccctaccgaccacgcccagcgaccaccaccccaacccactccactccaccaccctttctttcactacccccacccaccaccactcatccaccattgccgccatccaaacaaccccttaagcgcctcacacctgacgagttggcccgcaaacgtgaactcggactctgctatagtngtgacgacaaatgaagtcccagtcaccgatgtcgcgctcgcttctacatgctcatagctgaagacgatgaccctgataacaaccc

SEQ ID NO: 64086 - DNA, 339 bp, Glycine max
tgagacatgtgggacgtacattcgcccttttggcgcagctgacgatgctggcagtacaaccgcagctcggtaccgtattgcaccacccgattctcggcgttatcatcgcgacttcccagatcgaaatcggtttggaaaacactggaaggaagggggtttgggaaagggatgaaaaagatgaaacgtggaaggaaatataagggggctgtatgtaagcatatatgagagtgggcttgagaatacagaagaaagggagttagttatgcgcattatatcaatgaagacaggaagaatagaatatttacaagtataaatgtaatctctagactttttttatct

SEQ ID NO: 64087 - DNA, 366 bp, Glycine max
catgcaagcttgtaaagcttatatggatttcattttgcttcaagagtttgttatacaaagaagagcccattccttgttcaacatggactcactagaggaataatggacactacactatctagaaaggcctagaaagaaaaccttttgattgttcagatctatgtagatgacatacaggaatagtgaaccctacactatttatcaaggcatagaaaggataccttttaattgtcacatctatgcaaatgacataataagtggtgcaaccttataaaggatgggtaacaagatttttaacctattgaaagatgaatttgaaacgagtacgatgggtgagctaaagttcttcctacggcttctaataat

SEQ ID NO: 64088 - DNA, 267 bp, Glycine max
ctataagacaagctaaccctgatggcaccatacataaacacaaggcaaggctagatactaagggttactcacagtaaccctgaatggactacattgagacatttgcaccagtagctcgtcttgtaccataagagctctaatagctcttgtgcacaaaaaggatggagtatccttcaactagatgtctaatcaccttcttaatggcgacttgaaaaggatctatgggagcatcacaatgattctgttgaagtaagaagcatatgtaag

SEQ ID NO: 64089 - DNA, 159 bp, Glycine max
ggactggaaacctgggtaccacttaatgcttgagcacatcctttccactggtatacaaagcccccgatcgccttccacatgccagctgatgcaatggcctgagcgattctcttaccttggcgtttacacgtatggcctctatcaattgttgagcgatgt

SEQ ID NO: 64090 - DNA, 483 bp, Glycine max
  unsure (1)..(483): unsure at all n locations
agcttataagaacanaattgccttaatcatttttaattatgcatgngaattangacgcatcaacaagaatcaagccaaggctattgtgcaagcaatcaatggggcaaaacacaccaaatgattataatgatggatggctcanattctcacaaaggtaaaatcatcactttcaaattgagctttcaaaactatcatgacatgtagagaagaatcaaggatttcaagtcacaaaatgtcaagaacttttattttcaaaacaattacccatttcttgaacatatcctataattcaaagaaaaacatgcaaagtcgtacgtgcacacaaaattgacccaaaatattaaactaaaaatccgacgaaactaacaacattaacaaattaacacaactaataaattaacaaaaccaacataactagcaaaatcaaagaacactcccccccatacttaaacaacacattgtcctcaatgtagcacaaataaa

SEQ ID NO: 64091 - DNA, 488 bp, Glycine max
  unsure (1)..(488): unsure at all n locations
ttagagncacctgaggcatgcagcttgangattatggtgtacccatcacattgtggtttatgtggcggtcgggggaaggngcacaacaagtttntccacatccacaaagcgtgcataaacctaccatcccctggtgcccacctccaactgagctcacgtactcccacgtagcccatatccttgtttctctcaacaccgggtccccatcaatccttccaagcttccacaacatccaagtaatacaacatttaaacagcacaagctatcacagcaaaatttttctgcacttgtgcaaaattctgctgcacaatttcacagcaaaaatctgcacaaagtgcagatttcgaaaaccacacttcccctcatcaaatcttgcccaaatcaaatcctacaagtcccanatcatgtatcaatcatgtctaaaccaaagccaagcttcaaaccacagcaacacanaatctaggtgtccaaaacccctcaatttaata

SEQ ID NO: 64092 - DNA, 313 bp, Glycine max
gctaatgacctctatcctcaatgaattacagaaccaagtccccgctcagatagaatgtaagatttcttctaacttttgtccaaattacattggaaatatctttaagacttattccttggctaaagttctcatttttgggagaacctattgacctattacccagtatcacttagacctaaaaaaatttgttacatttatctctatatgaaagacaacttccttccttatgaaaatgacttaaatacctgattagaatgactacatgaggatacacttactccctaaattaattctgatcctcgaaactgaactt

SEQ ID NO: 64093 - DNA, 466 bp, Glycine max
  unsure (1)..(466): unsure at all n locations
agcttgtacgaatgtaagaaacatcttcttttgtcttggtgatcctngactccatctcatggaatcgaatgtccactagtaactccaaagtatcaaacctttcaccaacaaaggtttgaagaccatcgaacctgtccaaaatcttttgaagaagagaggaatcttctccaccatgtaaatgtccttcttcatcaatgggttgagcaccctttttcacccaaaagccatcatgctctttacggtaaccaaaggatgcaacacaacagcgcctattagaaaggatctcttgattggaacataaggttcagaatcaagaggaatgttgaagtgttgaaggaagagagtgactangtgtggatatggcaatggagcatttaatcacaatgccttatgcatgcgatatcggactaagtgtgcccaatcaattngtctgcctttatganaagcccacataacaataagatct

SEQ ID NO: 64094 - DNA, 394 bp, Glycine max
  unsure (1)..(394): unsure at all n locations
ctaagctgccagtattatcctatgagagtgtgttttttttatcagatgcatccttgatataggtgaacaactacctttacaaaagtcatcagtcaagttgaatatgaagtaccgtctgcaaattgggcaaaagataatcagtacatcactgttcgttactgcaacatttaggatattgtgtcttgtacttcagttcaccttacaaaatgcatggacctgttaaaattaaatgattcaaccctatctgcgtaaaattccaaacttaactgtcatattccatgcatctgctttcattggtgcttgtcgtgcatctnnntgaaataaaaaaataaataaatgactatcaaagaaagaaccttacgcccctccgactctcttactagatatgggagca

SEQ ID NO: 64095 - DNA, 356 bp, Glycine max
  unsure (1)..(356): unsure at all n locations
ctgcagctatatatttccacctatacaggtanatctagtcgcgggacgtgtcttatggagaagagaaatggagctggatgatactgaaagatgcatagctgcccttgccaatcaaagaattataatgatgacccggagagcactaattgctctagatttatgaaaatgcatgtgcaatctagacctgcaaatatggatgcaagaggatcaaatggggctgctgctgcatgatgataaaataatggaactcattgaggcctgaccaaaagcatagggaatggtgttaaacaactatgaatgttatcacacataaaaggtgtataagggatctaattttgagaattctgtctttgtca

SEQ ID NO: 64096 - DNA, 422 bp, Glycine max
  unsure (1)..(422): unsure at all n locations
cacaacaagttnttccacatccacaaagcgtgcataaacctaccatccnctggtgcccacctccaactgagctcacgtactcccacgtagcccatatccttgtttctctcaacaccgggtccccatcaatcctcccaagcgtcctcaacattcaagtaatacaacatttaaacagcacaagctatcacagcaaaaattttctgcacttgtgcaaaattctgctgcacaatttcacagcaaaaatctgcacaaagtgcatatttcgaaaaccacacttcccctcatcagatcttgcccaaatcaaatcctacaagtcccatatcatgtatcaatcatgtctaaaccaaagccaagcttcataccacagcaacacaaaatctatgtgtcaaaacccctcaattaatagatttttatgcttagaa

SEQ ID NO: 64097 - DNA, 416 bp, Glycine max
  unsure (1)..(416): unsure at all n locations
gcttgtgtatcgataccactaattggtaatcgatttttattgtttgtttctgaattaaatcaaaagatgtaactcttcaaatggttnttgactctctcaaattggttttaagtttttctaaaagttataactcttctaaatggtcctcttgactagacatgaagagtctataaaagcaaggctttgttntgcattttaaaaaatctttctaacaattcaatcaattcattacaatcctttacaagccttgaatctctttgaacttcttctttgtaccaaaagctctccaaagttntctggttttctaaaccttgaaaacttgtgctattcattcttttcttctcttctccctttgccaaaagggaatcgccaaggactaaccgcctgaattctatttgtgtctctcttctcccttt

SEQ ID NO: 64098 - DNA, 287 bp, Glycine max
gacccaaaagaaggataaaagtatgagttgcatattggaagaagagggcctatctttctttgatcttccgtactggtctgatctagatgttagacattgcattgatgttatgcatgtagagaaaaatgtatgtgaaagtgtcattgggacactccttaacattcatggcaagacgaaagatggtctaaatactcgtcaagatctatctgacattgggcatacgatagcagttgcatccaaggtctgatgataaaaaaatatatttgcctccagcttgtcatactcta

SEQ ID NO: 64099 - DNA, 408 bp, Glycine max
agatcccttcgatcccttaatcagggtgctatgttgaatctcggctggtacgtgtctgcgggaaattaaccttgggctaattttgtggatgacatcccacaatgattcaatactttgcgaacatatttcttctgacacacaagaattttcttctagactcgatccctcttgatttccatgcccaaaatcttttcaacagctctcatgtcctgaatctcacattcactactaagtaatgacttcagcttctgaatcgcccacaaatcttcgaaatgtataagcatgccatccacacaaagtaatacatagatgttggaaccatcctccaccttgctatgataaacacacaagtcatatggactcttgatgtacccgtgagagaaaatgaactcatcaaatctcttttac

SEQ ID NO: 64100 - DNA, 371 bp, Glycine max
  unsure (1)..(371): unsure at all n locations
ttggggacgtcaggtggggtgctattgcccaataccaagctggaccaatcccgacccaacccggcatagtcggtcagtgagaacctgtgatgtacctaagcaggcgagctcctggcagtcaacagataaaaggaacaaagaccacaaagcaaggaggcttgtggtggctagccagctgcgaaacttgattgatatgtgagatatggtctctggtaatcgattaccaaggatgggtaatcgattacaaggcttaaaattgaagacaggaggctaagatggtctctggtnatcgattaccacggngtgtaattgattaccaggcttgaaaacgaggtcaggaagctaatgaagcctctggtaatcgattacca

SEQ ID NO: 64101 - DNA, 412 bp, Glycine max
  unsure (1)..(412): unsure at all n locations
ccacagaggccatntcctctctcgcccaatattatgatcagccattgagatgctatacctttggggacttccagctgtcacccatggtggaagaatttgaagagatcctatgatgtcctctagggggaaggagaccatacctcttctcagggtactatccctcattagctagaatttcaaagatagtccaaatctctgcacaggaattagaccatggatagcaagtcagaaatggggtggttggaataccaagaatatgtttggaggcaaaagcaagaaccttggcatgtataggcgaatgggccctgttcatagacctctcgcactttgatcttcggaggagcctcttccaaatgtggatggcgtggtggatctagcagcgagtgaccacttttctcgcctatcattacca

SEQ ID NO: 64102 - DNA, 459 bp, Glycine max
ctgcagcttgcaatgataatagatcatctctgtggcttcactgtttgcagattgcaggggaaagtgtgagtgaagagaggcaaacacaagaagaatatgtacatatgctacaggtatatatttttcataattgtagttcctaaaagaagtaatttttgaaggaaagtccaagtatcattaagtttctttgcttcaagtcaaagtattcattggaagttttcaatttacagaatgaatgtactaaggctaagatagagctacaagaacagaacaagtgcatccagaggctcgcactggagcttgataagaccactcaatttgttgtgagaataactgaacagacaagacaagttttttcttaatttctagagaagacaagacttatatgctttatgtcacttactctagttttgaattttgaggttttctatttatcatttcaaaattctatacacgtat

SEQ ID NO: 64103 - DNA, 306 bp, Glycine max
  unsure (1)..(306): unsure at all n locations
atgatatcctcatgctagaaccatatcatttgtaactaaatttgtacaatcaacaaatctgcaagataagatatagtacgaacatgcatgttgaactacatacacttttatctgattgcgcagcctttagaaacctcaccatacaaacataaggagtaggagcatttagaccgaactttacatttctaagataagtntttctgtcagaaaccacaaacacttttaatattatttagtaatcaaacaccacaaatttaaattactgataatctgattactgatgaaattcaccatatatttataatt

SEQ ID NO: 64104 - DNA, 362 bp, Glycine max
  unsure (1)..(362): unsure at all n locations
aaaatttgaatttaaaagctgtaatcgattaccattgatgtgtaatcgattaccaacaacgaaactctntgaaattcaatttgaaaagtcatgacccttcaaaatataaatgtgtaatcaattaccaaaaacctgtaattgattaccagtgaagaatttcagaaaaaactttgtgaagagacacatctctttcaaccattttgaaaaggcacggagggcctatatatatgtgtgtctgacttcaaaaagcaagagagagatattcgaagagaacttcattgtctaatgctctctcaacaactcttggacaaacacttgcaatctattgagagttcatccaggaactctaaattatattatca

SEQ ID NO: 64105 - DNA, 376 bp, Glycine max
cttctgaaagcagagctagcacattatctctattctagctcacctctggaagctttcgtagagatcttaaagaactgagctactcacacacatttaatgctagctcacctctgagtgaaagctagagctactcaccccctatatagctagctacccatccaaatactgaaaacaaaaaagctctactacagactatcaaagcctgaatacagtagccttactataaaggcaaaacagccaagaagaaacttttttattcaaaaagggatcactgccgaggcgaaaacaccctagtatgaaactaggctattacagtctgcctccttgagcttatcatcctggggagatgatcagtaaatgttattttttgcccaaa

SEQ ID NO: 64106 - DNA, 482 bp, Glycine max
  unsure (1)..(482): unsure at all n locations
catgcaagcctttggatccattcgacgctcttcatttaattattcaagatcancaaaaccggcgcttccattcgtgaagttgacaaactcaatattcactctcctctgtacatacacatcaagaaagaacctcttgaagcattttaatctttcacgagtgagttccatgtcttgatgtggaggaactcatttagaatcttcacttagtcattcatgactattatatctacaatgaaaaagaaatatatacatgattaaaatttatgtaattctaaaaaaagtataagtataaaagtatagagttaattacctacgatttaaggaatgagctaaacaatggagaggagtgctactcttagtccaacgatcaattaatatggagtgcactacctcataaaaagatgatccttcactctcctcctttctctcatattgagatatgacattcttcaccttttcaatcattgaatcccacatctcat

SEQ ID NO: 64107 - DNA, 265 bp, Glycine max
tattatgaaatgatgggttttatgcctatgacatttcatgtttgcgtgttctctggttgattggactttggagctatccattgtttaggatttttggcatgaaagtctaaggttttcatttgtggggtttgggatatctattggttcaatctatattcctgtggagttacctaagggagtttgtgttgatcaaactacaacatgtgatttctgagttattcctattgaaacactcgcttcaaactgtggattgactctatgtatc

SEQ ID NO: 64108 - DNA, 475 bp, Glycine max
  unsure (1)..(475): unsure at all n locations
aggtaacaagggctgcttcatctgtttctgtctatgactttgactatgatccaattatgggggatgcctgtactaaattcagagatgaatacataggaaaatccaagggagagaccccaggaaaattgaagggtactgggatgtactcatatcaacaaggtaatgccgcacttgatagcgatgaaactttcaacagtttcattcgacgtgccaagtgtaaaattagaaccgtgtcccacatcgatcgcgagcagagcaacgttgcacctgcaacgccaccagtgtacgaggccaatgccatggataaccaaaacgaccagttttcaaattttattcagagtactaagaagaagtngagaacaacatcaagcatgagaaagaatggttccttcaataacggctattgatgatggngacttgacgtgtggtgtgtccattattngttatcgatcgagtatatagactatagtgcatg

SEQ ID NO: 64109 - DNA, 464 bp, Glycine max
  unsure (1)..(464): unsure at all n locations
aataattaattatattattttttatctataactgctnttttgtganatatactaaaactgattacatatatgtntatatgataaattatattgttacaaatacccatcgatgactgatcagattattggagtctaatagttccatcctccaatcagtcagtaacaacaaaggaagtaattaaaaaactatatattttcctatgacatacctttccaacaacagtcaagaaggtgcctattggaagtatatacccactcagttttgttgacaccaaaaacctganaagtgaaaaacatggtttcaattatgtaagtntaattacaaaatgatattgggggcattacggggaagaagatgggagaggatggatggatgaatgagtaacactcccaccttaatatagcagtgcagagaatcatacattttacgatcaagtgagngaactatctctttaatacctccc

SEQ ID NO: 64110 - DNA, 472 bp, Glycine max
  unsure (1)..(472): unsure at all n locations
agctcatcttggtaggaattttacatgttttgaaggaagaagacgncagcacagngggttatcatactcaccatggccactatgaattttgcgtgatgctgtttggcttgtgcaacgcaccatcatacttgcaaggctctatgagcagcatcttctggtcttacctacgcaagagcataatcggctacttcgatgatattctcatttatagtaaatccttcgcagagcattttgatcatctggcaaaagagtctgagctattactcgcaaggcgcttcttcctcaaatactactagtgcacttttacaccacaacaacatgactacttggggcatgtcgtctctcagcatggcgtcaaacctgtgtccaccaaagttgaagcaattctaacttggccgatctctccatctatgcgggcactatgcggatatcttggtattatcgccgctctatcaagggatatgcaaccatc

SEQ ID NO: 64111 - DNA, 346 bp, Glycine max
gacatcagattttcttgctgtcggattgccacaaaataaggtatattcacaaaaaaaatggatggagaacataatggatattcattggtatcaaaaatcacaggagatatgttcattatactatcatggatgaaattatcaattgaaatgcaacgtcattgaaaggtaaaaaggggatattttcccaagagtgaaaataaaaattagagtaagtcctttacttgtgccttacggaacgtgattgctctttactgttccaacatatgaaaaaacacatatatagcccgtgaacataatgaactatgggaaaacaaaaagtgactgatggaagttaatacatatttat

SEQ ID NO: 64112 - DNA, 362 bp, Glycine max
gacaccccaccgctgtattgaagaagtgactcatacgaatatgaccaacaaaggttaatattaaagtttgaactgtgcatatattctctatatttgaatagactgtatttatgtcgctcaatcctaacacataaaaatgggttttggggggatcctcataacgaaaaagaataataagtctcaaacatatgctgcttgtcatgcttgacatataaacatatttcacattcagctccatttgcagataaagtgcggtccatcgaatttgtcctcattacaactactttcgaaatagacattgagcaaacagcagactatctatttcagaatagacacctcaagtaaagtacccttaccttcaa

SEQ ID NO: 64113 - DNA, 435 bp, Glycine max
tcaggctaagtgtcagtccgctgcgcttagcacctgagtaaaatttcataaggcgtgctaagctcagcctgctgcgctaagcgcccagtcaaaatttcaaatttatttttatgtttttgttgaaaatagcctgtgctaatctcttgtgttgacttatattttgcagattgcatctaacaaaaggaaggctccttctacaccttcctaagttagatatgatcagtcttggtttatatctctaaaagtttgggagaggtatattgatatcattgtgcctacgacactactaccagagaggaatgtggtaggttattacaccgagtttgacgagttcatggaggaactttgaagaagtcattgggatgaggagttgactaatcttaatgacagtagcatagacattgccattgtgaaggaattctacaccaacctcta

SEQ ID NO: 64114 - DNA, 401 bp, Glycine max
  unsure (1)..(401): unsure at all n locations
tccaactatccgggagtgatgacaatagaatcaatatcttcacctcatcctcaaatttaatttgcactgactccaactgggcaagaatagtattaagttcattaatatgattagctatagagttagcttctcccatcttgaggttgaacaaccgacgcatcaagtatactntcttggctgcagatggcttctcgtacatatctgaaaacgccttcattaagtctgcagtagtcttctccgttatgatgttgaatgcgacgttcttggctaatgtgaatctaatcacgccaagagcttgtcgatctagcaagttccattcttcttgcctcatgtcatctggcttatcccctgatcagggttgatacaacttcttctgatatagataatcctctatctgcatc

SEQ ID NO: 64115 - DNA, 429 bp, Glycine max
  unsure (1)..(429): unsure at all n locations
gaccggaccttaagcactgagctgcaacttgttttattctcatggactttcttccaaccctctaggaaagattgacaaccgctccagtgctagttttgcctaacccgagagaaccatatgaggtgtattgtgatgcatcaaagatgggtttaggcagagtgttgatgcaaaatggccaagtggtggcctatgcttctagacagcttcaaactcatgagaggaattattccacccatgatctnacagttggtgctgtagattttgcccttaagattaggagacattatctgtttggctctaagttcgaggtgtttagtggtcataagagccttaaatacttgtttagtcacaaggagctgaacatgagacaaaggagatggttagagtttcttaaggattatgaatttgaagcttagtaccatcctgtcg

SEQ ID NO: 64116 - DNA, 271 bp, Glycine max
cagcgagagccagggaaaagaggtaataaaggggcacaacgagagaaaggaaagcgaccgacggccaaacccacccaaagacacaagcacacagccatacaacagacaccaaaacctcggaaacaaccaaaccccgaaaacctgaaacaacaacgccccccccaacaacaccccgaaaccccaagaccaaaacaggcacaccaccccaacggcacccgaagaaacaacaccccccaaacaccccccgcaacgaacaaaagcaccaacccaa

SEQ ID NO: 64117 - DNA, 338 bp, Glycine max
tgggaatgcctccaacaccacccatgacatcgattttcatcacgcctctaagtgcggatgtccaaatctgagatgccatattactgacatcatctctcttggacgacagacctgtggaggagaaaccggtttactgaagcggccataggcaacaggacggctcgaactagtgctcttcactcaactacaccctatattagaaccaagcatctgacttgtgacgttactagaatgcttctcacacaccaactgatgctgaacaagttaggcatctgacttcaccatcaatcttggcccgactatgaagtcatgatggactcacttcccattccatgatc

SEQ ID NO: 64118 - DNA, 476 bp, Glycine max
  unsure (1)..(476): unsure at all n locations
agctntntgaaatntcaaaaatatggtatttactctctggtaatcgattaccagaggatgtaatcgattaccaatggtttaagtagtttctaaaatgttcttaaaattttgaatttgattttaaaagcctgtaatcgattacacaagacttgtaatcaattaccagaagttttaaatgctttataacagtctttagaaatttgaattttaaatttcaaagcctgtaatcaattacaccattttggtaatcgattaccagtaaggaattttcaaaaataactcccaacagtcacatctattcaaatgtttttgaatgtccatcaaaggcctatatataggtgacttgggacacgaaatttcttagagtttttgctgcacaaagagtctcattctctcaaaaactaaattgtcttatcctctaaaatattccttggccaagcacttgcaaattcaataaggaatcttgagtgatcttc

SEQ ID NO: 64119 - DNA, 298 bp, Glycine max
  unsure (1)..(298): unsure at all n locations
agcttccgttgttcaatttcgagcgtcttatantttatgtccccgaatcgaacatccgagggaaatgttatgaccattcgaatttctcgagagcttccgtctttctatttcgagcgtctagatgagttgtgcccccgaatcggacatccgtgagaaaggttatgaccattcgaatttctcgagagcttccgcagttcaatttcgagcgtctagatatattatgtccccgaatcggacatccgtgtgaaaacttaacaccattcgaatttctcgacagcttccgttgttcattttcgag

SEQ ID NO: 64120 - DNA, 434 bp, Glycine max
  unsure (1)..(434): unsure at all n locations
atgtatataaggattttttttttatngaaaaacttaattcactaacactttcgtgtattgctaatcttcaactcattttatttaagatattcttagtagattagcactaaataaaatatctttgatttggctgtaaatttttatactgtttttaaagttcaattgttactatttataaatgaacttatataaatattaccttcatattatcttgtgaacttcttgaggtaaaattgagactatttgcttttttttattatactacccatattcaaaagtccatttcataagatattagatttnccttatacaatgatcactatttcacaacaatgtgattgtactangttatggattctgatgttaacggtgttccaagcgagttcattattattttaaggtgctgatgaatactcattctgatcatagaatat

SEQ ID NO: 64121 - DNA, 304 bp, Glycine max
tgagcaaaccatctggttctcccctatatgttctcaagaacttaaagatatgcctgattgcattctgctttaaattgctttgatatatacaaacgtaaattggcgtcgagatcgtatcgtttcataattcagcaagttcttgttttgtctgacatcgggaataccctttacctagagaccttctgaccagcgatggaacttataatctgactaagagaataatggcttcattaaaacttattttgacatgttcacatatacctttcattcaaacttactttctttttttgtataaaaatgctta

SEQ ID NO: 64122 - DNA, 457 bp, Glycine max
  unsure (1)..(457): unsure at all n locations
tcagagtcacctgcggcatgcaagctntgtagacttgatcaccctagctactctctttttgtggtataacctntaanaacacgtgatcacccgtttcaaactctagcagcctctatcgcttatctgtataatattaagtctggatgaccaaattttattaagatctggaagaccattcatacttaccttagattntgatgagtacaatgactataaaatattgataagttaatgagtttatgacaagtggataggatcaacagactaaactattatctatatatatcgtccacactcaaagaggaaaatgctctgttaattattaactagcatccaatgcgctaaaaccaagagtgtccattcataatattaaccagtgttaaacattgtgtagcactatcattcatgtctagttaagtacgactcatacatacattcaaaatgatcaatacagttc

SEQ ID NO: 64123 - DNA, 396 bp, Glycine max
  unsure (1)..(396): unsure at all n locations
ctctatctctaacaananactcattgtgtttctttcatttgntcttagagctttgttggttaaggactggcatangagaacatcaaatggaggtatatgttgccctattttataatctccttttattctcatggttaatggttaatgttngtgtttcatgttctgatatctcactaattgctttcaatgtttgatgctttatatatcttatttcgaatttttaaatctatggttttgataggcctttcatttcatttattgtgtgtgaagaaaaaaaaagagaaaatttacaagactagagagataagctgtttgctgagcaatgtcgccgaaattngctggtgattaacgttgggttatgttctattatgtttctcttttttaatatgccgtaat

SEQ ID NO: 64124 - DNA, 395 bp, Glycine max
  unsure (1)..(395): unsure at all n locations
tatcagcaacaaatacagaataattggtgaaggggagaaactgatcagaatntaatattaataacaaaaccttaaagagagctatgcttaatcctcaagagaaaacaacactagagattcagccttttattaacagcagaaacgagacacaacaactggaaactaattgcaacacaaaaatgaaaatgaatctacaaacagaaaccgataatgaaattgcaattgaaaagtaaaactcttggagccaaagcatccacctgatcaatctatgctgtgattcagccttcttcagcaggtacttcagagctgcatggtcagtataaacaatagcacgagtaccaagcaaatatgaacgaaatntctccagagcaaaaactatcgctaatagctccttc

SEQ ID NO: 64125 - DNA, 476 bp, Glycine max
  unsure (1)..(476): unsure at all n locations
agctntcaaaccggttcctgtntcatgcactggtctctacaaatcttcacacagcanaatctctcaaaactctctggaacttggacctttctctctctagaaaccctagacatgcaaagctctgaatcccagttcaaactctcttcacaaaatctgatttcaggcttaaataggtggccttattcgtgctcgtgcgcttagcacacttatggattgcttagcacacgttagtgatttttggcttagcacgcttctctcacttatcggatgagctgaagcagtgcgcttgatgacctggagtggtgcgctcagcgaacctgtaccactcatatttttctggattcttcctcgcgcttagcccaagagtgttgcgcttagcagatgctcgctaagccaacagattggcttagcgagaaggtgaanaacaacactttccaaagcttgcctaattaacctanaattgagagaaaatgatt

SEQ ID NO: 64126 - DNA, 366 bp, Glycine max
agtcacctgcggcatgcaagctgtagcattcaaacaacttgattctcttgacaccacccgctagcgatagtatgatttatatccataaattacgtggcccggtcttccatttagattatcaactctcgctcggttaacaatgaaatgtggtcccacattatatttctgccgcaccaacatcttgtataattgattctcatatgacatgcggcgtatactgttcagcggatacaattggctgctctatacacattttgaactgcatcatttacaaccataggtgaatgactaaccttacgacaacattggctgatgactatcatttcgcgcgcttttttgttacaagtaacaaggctctgaatacct

SEQ ID NO: 64127 - DNA, 462 bp, Glycine max
  unsure (1)..(462): unsure at all n locations
agcttgtgaattgcatgttggttgagtatacatacccattctgttctaggggttgtgtgatgatatttgtgatgtttatatgctgaaattgctgatggaaagctgttagagatggagggtagaactaacttatggttagaaagtgagaatgtgatgttatgagtggaaaaaagagtgaggctttgagggttggaagactaagtctgaattctgtggtaaatggaggttaaagtgagttaatactatcttgaaatgtcatttacgacttatgagaaagcttggactgtgctagagagaataataaatgaccaaagtgaacaaaaagccatttctatggcaaatttgggtgttgaagagtcaaattttgattcggtgagattttangtgtaaatccagtttgaacaagtctaaatagatgttatggactggtgtgaggtgagaagttgctccaaattacctcat

SEQ ID NO: 64128 - DNA, 246 bp, Glycine max
  unsure (1)..(246): unsure at all n locations
ttaagagtagtgtcccactgtgtaaactaactctccaaatgtttgccctcgcacganatggccccgaggaagcttgcctcanagaggtccaggaaggacaaggcagccgaaggaactagttccgctccggagtatgatagtcaccgctttaggagtgctgtacaccagcagcgcttcgaggccatcaagggatggtcgtgtcttcgggagcgacgcgtccagctcagggacgacgagtatactgat

SEQ ID NO: 64129 - DNA, 352 bp, Glycine max
  unsure (1)..(352): unsure at all n locations
acagacatcttgtgattaacgctggtgtatttcagaactattttttctatcttagccttttgtcagacacttatccttttctttctgctgattactttttaattcagtcaggacttcaggcatgaggttaatttactagtgaagctttcgacaccctaatgtcgttcaatttcttggagctgttactgacaagaagccccttatgttaattactgagtatctgagaggagtatgtgaatgcatataactagatgtctaggttctgatgctctgaacttatgcaatcttaagattaaattntactaaatctctatttcatgccatttttagggtgatctttataagtacctca

SEQ ID NO: 64130 - DNA, 515 bp, Glycine max
  unsure (1)..(515): unsure at all n locations
cttgaacattntcaaanaagtagaatcgaatttggttttcaatgttacacatcgaactcattataaaaaaatcaaggatccaattataacttttaaaaacaaagggaccaaattgaacataataaatcaaggaatcaaataaacctaaataataaattaagggactaaattgaaaaatttaaaaataaaaaaatgaaattaaacttaaaaattaattaaaggaaaaaataataatttaagcagatcttttcaaaaaatctaacacaacgaatatatgtttctatagtggtgaatttttatgaaaaaaataacacaatagacacttattntcattntctattgtacaccaattaatacaaaacataattntgttttgtatcgtcttggcacaccacataaatgaaaacatatttccattgtgtattatgaataatgaacacatgtctcgttgacggtacttttagggggaaatttctacacatacgcatggaggtaaacttaacaaacaaatgtgg

SEQ ID NO: 64131 - DNA, 380 bp, Glycine max
  unsure (1)..(380): unsure at all n locations
ttctccctctgacaaaatgttttcttctaggacttaccgcctgaatctcttttgctctcacttattccttctgctatataacataagactagctgcctgaattcttttgtgtctccctcctcccttgtcaaagaattctataagacacagnccgagaatgtcttcgatatctccctttcccatatacaaaagatttcaaaggactatcctgctgagattttcttggatccccattcacaaagtatcagaggtttaacagcctgatatctttgtcttaacacattggagggtacatcctttgtggtataagatgagggaacatctacttaggttctgatagagaacaagagagggtgcatctcttgtggatcatctctagt

SEQ ID NO: 64132 - DNA, 446 bp, Glycine max
cctggagatatgtcgcgtgggtcaggagaccttggggacgtcacgtggggtgctatcgcccaaaaccaaacttgaccaatcccgacccaacccgggcatagtcggtcagtgagaacctgtgatgtacctaagcaggcgagctcctggcagtcaacagataaaaggaacaatgaccacatagcaaggaggcttgtggtagttggccagctgtgaaacttgactgatatgtgagatatggtctctggtaatcgattaccagcggtgggtaatcgattacaaggcttaaaaatgaagacaggaggctaagatggtctctggtaatcgattaccaaggggtggtatcgattaccacgcttgataacgaagtcaggaagctaagggagcctctggtaatcgtataccagcctgtgtaatcgaatacacagagggatgggtcactggtaatc

SEQ ID NO: 64133 - DNA, 318 bp, Glycine max
tttgtttgagcgaaaccactcgggtgtattgccattacgccaagtctcgtaagatagtagtcatagatgttatttgacaaatctcattattataaatggaggtatgagtctagatagctgcacttcatgtatgattgtgaaccaactgtatacgagtctgggaacttggttctactgaaagaggttaaataaactctacataatcttattgttacaccaagcatcctgtacacaatatagtcatacaacaccttgactaatccaacttaatcaaagaatgcacgaattattttagacatctatattcagctatcgata

SEQ ID NO: 64134 - DNA, 453 bp, Glycine max
  unsure (1)..(453): unsure at all n locations
tgctcaccactactagaggagaagccttctgttgttttataaaacctcctcctctaaatcaccattaagaaaggaagtnttcacatccatttgtttcaactcaaggtcaaaatgagcaactactgccaagataatatgaagagaatatttcttagatataggagagaaagtctttgtgtagttgattccttctttttgagtaaatcccttagcaatgagtcttgtcttgtatctctcaatgttgcctaatgaatcccttntggtcttaaagacccatttataaccaatggcccttgtcctattaggaaaatctacaaggttccaaactatgttactctgcctggattcatctcatccttcatagcatcataccataaatttactctttcaactcatggttgatcaaaagttcggatcatttcagccccatatatacgagatctgcaatatcat

SEQ ID NO: 64135 - DNA, 430 bp, Glycine max
aaaccacttcctctatactgtcgttgaaattttttgtgttgatagactctataagataaagttgaaccacttggacataagcatgactaatatcacattgcatggtattttcatgttgcgtattcattattgacctatagcattgagtgtactgatgtgtgagcatggggtctaatacatttgtgtactgacaaaagcttcaatgatttattattgtacatgagaatatcaagttgtaaggtggaacgcataggaaatagtatcacatcatgcttaggagtttgaataattgtacatatgtacccaaacggaattgtggaatttctatccatataatgtggctatatataaacattgatagtattatcataggagcttatttatggacaattagtgagccgtgacacttactaagattggcttaatgaca

SEQ ID NO: 64136 - DNA, 451 bp, Glycine max
atctggtggataatacaattttcctctctggtcctggatgaggcggtgggaaaaggattttactgttccttctcaccaaaggtcctcagccatgactgtagctattaagtaatgtgtgcatgttgggatgggttgattgtctttgtcgggatgttagatactgtttattgcatgattactcaagagacactacctcctgtgatttgatgtaggacctcttggactatgtatcttttattctcacattaatatattataattgtggccgttcatacaaaaaaaaggtattaattgatgatcactcggtgtcatgtatttgactttcttggtcaataaatatatgtttggcatggtgccagcgctattcattataccggctatcgaattatgttgtcgcaactctatagtcgcctaatatgtaatgatgcgtagctcactggctatttctatt

SEQ ID NO: 64137 - DNA, 435 bp, Glycine max
atagtcaacaacctttatctatttttgttggacagagatactttcctaactagggtttacacatgagaagatagtcaacaaccttcttggaaagaaaaatatctagccggtcttcccagatcattatgagataatgttagagataatatccgtagtcaatctgccaatggagatattccatatgagagtttaagttatggccaattaatttcttactgtcaaaaggtagccttaaaaatatgtcaggatgacaaaattcataggcaattatccaaagataaggctcatacaaagaaagatttaggttctttctgcgaacaatatggtctaccggcctgtccaaagcaaaagataaaacaatcttcaagaaaagaaatccatgagaattaaccggtcaatcaaagagatattcaagaggagatactcacacacacc

SEQ ID NO: 64138 - DNA, 505 bp, Glycine max
  unsure (1)..(505): unsure at all n locations
acggacctatgaaactcagcttaaagaatggctaagatttgttaaacataagcacttatacaatgaaggaaagctggagttgctgcacatgatgtccaacgttatgtcaaggaataagatcgggctgcactatgcacaaggcaagataaaatgtcaaatgaagaattgaagctgcaggatccacgatgttggatacaatgtccaggacatcctgcccgagaatactggagttgctgtacaatgcaagataaaagtcaagtagtgaagctgcaggatccacgatgtcggatacgatgtcctgacatccggcccgataatactggacatataattctgttatatctntaacagattattgtgcagttagcaagagattagatgatctatctttaggaacgaattanaagataattaangtttggaattcacagtagaagaagtcgttcagggattaaagnataaagataaanacctaaagatcaaactgcatcttttagatctttaa

SEQ ID NO: 64139 - DNA, 401 bp, Glycine max
cttgttgtactggattcacaggtcaaactcaggacagctcctcttttgctgtggtaagctgcatacatctaccctcccagacccacttgggtgagcctcatgccttggtcggctttttaatcctgggttagatcatttagagattaactatcatgagtttcaaacaatcatttgtcatttgtgcttcaatcttagataatctcgttgattctgggcttatcttgacagagaatcatcttagcttgagcttctcttattctgcatgcctagtgcctacctccttgagtctactttcattcacatgaatttgaaaccttcatcaatttctctgattcaacagatcttctatgtgagttttggtgaatcagatgatcttatatatgccatagttatgacttaac

SEQ ID NO: 64140 - DNA, 396 bp, Glycine max
ctagaatgttacctgaatataaaagttcattgtgaacagatgaaccatttctagctagagaacttgattatctttgattcactggggtcactcgagcagagatggctttaacattttacaaagtcttcaagccattgttgacaatgaaattaatatccagtggatgatcaaatctttcaacatttttatcagtacacatattggcttctcgtgaatatctttatatatataaagtagatgtgcgggcatttatgtaaaatcacatttccttccttgtttagtctctatttaggaaaattgcatctcatattttcttccttaaagatgaaattataaaatattatattatatgtgctaattaatgacgaaagtttaaatgtggtctctctttttaca

SEQ ID NO: 64141 - DNA, 208 bp, Glycine max
  unsure (1)..(208): unsure at all n locations
aagcctaagcacgagtaaattgctacatgcttaagcggagtttaatttgtattcttaaagngtatgcttaagaaagctatgcaaaatgctttttttactaaaccaatggtattccaagtgtgataaaatgaaaatcgcgtcatgatatgagcattcatatatagtatggagttatctctacgctattattatgcgcttcacactcata

SEQ ID NO: 64142 - DNA, 461 bp, Glycine max
  unsure (1)..(461): unsure at all n locations
aggctcacattcactntcttctacatcatattcaaacttgnccaaataaataataaagtcatctcgactcanagaaagtcatataagtctcatacaattaatatagaacctatatcctaatgtcacatactatcaaagcgtggtgttcccgtgtcctctagcatgaggttcttcataagtatccacctattcatctgctcccccaaacacaaagttcaagatcatcacaggatccaaacacaaacagcaaaccgcgagtgagttatcacattgctaactactagagagaaacaacacaacatatagtagccaaatacaatttacttagcatatctcacattatgtcatcactttgtcattcatcaatcacacctttcaatcatcaatcattatacacgcggatcacacactccgatcaagacataataacacactcaattcataatatacaattagcaagc

SEQ ID NO: 64143 - DNA, 216 bp, Glycine max
  unsure (1)..(216): unsure at all n locations
ctaagctaatatcgcttaacgacatcggagttcacgcgcgagggttgtttctcgcatccatgttggngagcaccagagtcaccccagaaatagcccttttcacaacgaaaggtcctttgtaattcggtgcccacttacctcgattatctttaacatctgtgagaaatctttattagtgctaggtgctcacgactggcctcgtgggttttacctctc

SEQ ID NO: 64144 - DNA, 275 bp, Glycine max
  unsure (1)..(275): unsure at all n locations
ttctaaagtggtcttcggaatcacattcataacttgtttcattgtcgataagtacctttgcgacaacatggtccatacatcttaccgacacatgtagagcctngttgtgtcctctcccctcaacgaaaatctcttcttccgtaaacacgatataattattggtggttatatgattaacgatgccttcnaaaccctccatcgagatatcatgtgctacatgcgcatcgataaggacttttatcaatagcgcacgatgaggctcggcatttattagc

SEQ ID NO: 64145 - DNA, 262 bp, Glycine max
tgaacctagttccatccctccttggaggtgactgcttattgtgttgagaatgagcgagaaaggttatcaaagttagtggaataaacattatcaaagttctatgagtaggagctatggttttattggacaacgactggtggtgaagaacctcacactcttcacatatgtgttgatgcacctctatcgtcccttatagcgcactttttatctcggcattcatgctctataagtcacatctcttggtttgttagttacacttctc

SEQ ID NO: 64146 - DNA, 281 bp, Glycine max
ttcgaagaaagtgatgaggtacaagccctaaaggcttatcttgaaagagcccgggtagtcgaagggaagttcatgtccatagccatcaaagtctgaaaagagtatgatgaactaagggacgtcaatatggccaccgatgaagccttggaatgagaaaccaagaaggcccgaaaggaagaacacgaccaaaacatgttttgaggctgcttattaggcaacaatagtgagctcaagcttcgaagaggagaatggaaccattaccgctcaatggcatgatcttc

SEQ ID NO: 64147 - DNA, 321 bp, Glycine max
agtgttatctgttgcccgcacatcccatgaaaacccaagatcgggcatagacttagcccatatcataaggaaccgggggaagacaaaggacgaagaaggcagagatccagagacacggaagaccaagcgcagagcagctgagatccccgcgccctgtacactaagaaccggagagcccgcacactctacatcagcaccacctccagcgtaaggagacatagctggccaaagcccacagactgcagaggccaaaattcaaagcctggcggaaggacacgagcccaaaatacaaagctcgcaagagatagggcagcagagacc

SEQ ID NO: 64148 - DNA, 452 bp, Glycine max
  unsure (1)..(452): unsure at all n locations
actagctgctgtggcttatgagctgacttgacttttttttcttaatggggatntcaccctggagatgtagcagaagacataggagaagagagtatatgcggcccctccactatggaataagccatggtagagggagcttcaccaccaagatttcttgtnggtagatatcttcactagattcttccccttttggctttttactttcactagaggaaggtgaagtagtagcctcatcttggctactataaatgtcttggcccctcaaaatcatggnttttgtggtggtgcattgagaagtaatgtgtcctcttccaagacatttaaagaaccttatagagctagttttctcttgcttactaaccttaggggctngctttttattgtcttcccctatcatctttgggcttagaaggggcacccctaagatgccttgaccttggctttctttggat

SEQ ID NO: 64149 - DNA, 165 bp, Glycine max
tgcaactctcataggtctctataaaatgtacaatgtaactaacaatgtttgcgaatgaaatctaatgtcacactttcgcatattttacgcaaggctctctttctctcactctctatttctctctccatctatcctttagatccaattcatttcttatagatgaca

SEQ ID NO: 64150 - DNA, 179 bp, Glycine max
  unsure (1)..(179): unsure at all n locations
atatatgtngatgccaagtatccctaccactgtgagactccaatggatcataactaagaaatagttttgtatgtatggtgcgcactcagtgccacaaatatactcttgtaatatagtagtgccttgtgtagtataattttataactaggactaaaaatgtgacagtgttccaacacatt

SEQ ID NO: 64151 - DNA, 487 bp, Glycine max
gacacaagatactcagcttttgcgaatactacaataaagaaatattttgttttttactctgtactttcacccattagagttgacagggaaggcttgaacatgcgttccctcaatgcttctatcaaagcactagctgataaaaatggtagcaattgaaacagaaaattagcatcattacaaaatgaagaagaaatatggccatttcaaacactcaaatattgataaagctagactataagaaactatacaatttacagaagcacgactgacataagagacctcaaaatacatggcaaccacttatatcagttctgaagaaacataaacaatatatgttaacagacacattaaatgcctaaacagaagtttaatgcactcctataacagtattcggttgctgctagctacttagaagcactaggtgttaacctctgaagacggcatccaactatcagttcactaagaacatattgtcctgattattaca

SEQ ID NO: 64152 - DNA, 80 bp, Glycine max
tgttactactatgattatcattttgaggagtactggcttcagcattggtcacagctggggacgaatccattagactagct

SEQ ID NO: 64153 - DNA, 501 bp, Glycine max
  unsure (1)..(501): unsure at all n locations
ttacaatgagggcatattctntcaagacacgcagagtttttttatagattgtccgccatgaatgggcgttaggcagcatagcctaattaatttccattactgtatataatacagagtaataacttattttcaagaagattctctatcgccctgattagtatagtatagtaagcctaccagtttaccaatatctttttctttaaaggaaatactagtaggagacaccttactcgtacgtactatatatagaggacccttctcaatccaatggttcctcagcagctgatgacagatgatgggcatgccttttgctaaagaacaataaaaaaaattctaaataatatatcctgtcccacatctctcactcttggtgttgtttccatgttntttggtatgcaacttaccttttttgtttcaagcatttataagtcattttacatttcttttacaagtgttgtgtgtaacttgtctttctaacatttccataattacatctaatat

SEQ ID NO: 64154 - DNA, 193 bp, Glycine max
cattctttccttaaaggaggaacgttgagttataccatcaatcgggtttgctaggaacaccatattcctcttcccgcctttctaatcaatatgaactctggtcccatgttgaccaacctctcatggagcgatcatctcggtggtcaataacctctccaaagttgctcaaagattgaattggatatgcgaaagc

SEQ ID NO: 64155 - DNA, 207 bp, Glycine max
agtctcaaaggaataaattgtgcactctagtctctactttagaagacatacagacaattgtgttctaattcttcttaacttgcttatgttatattttatgtggccttaacaatatgttcactcataacagaaaacaagcaagcgagtgcactctgtgaggaacctcattcgagaggttgccggtcttgtaccttatgatacgtgaat

SEQ ID NO: 64156 - DNA, 297 bp, Glycine max
  unsure (1)..(297): unsure at all n locations
tgagtctagatttgtgcactccntatttaattacattgataaattgataaatctcggatgaggctgtttaatctaatcttatgaggagtgtaacttattggttgaatatagcgcatggattgctgtangtgttttgattcttacaattaaaaaaacaactcattctttactttcacatatatatatataggagagattcatttactccaagagtaactatttgagagnttcttcttattcttaactttcattctctgtgaatacaatcattacaagtatctgcttcttatacttatt

SEQ ID NO: 64157 - DNA, 280 bp, Glycine max
actaagctttgctacagaagcaaagtatacgctaccttcgttttttccgccgcagcggactcaaagtagatgcagatctgtgaggcggagatgacgaaatctcacgtgtcacggcttgtcgtcggattgataagggcgagatgagacgtagttttgcggtattagcctttctctacagaaggcaaagttatatggaacccttctatattttgccgtagcgggctatatgttgattatgattcgtacgcgtagagacataacttccttgtcactggcttgt

SEQ ID NO: 64158 - DNA, 409 bp, Glycine max
  unsure (1)..(409): unsure at all n locations
cttgactgagtcatcagagatataaagatgcgttcttttcatgtgttncaacaataatcaacagtcaatgaccaatcatctttgaatcatctatctttcaatctctgttcagcatcatctctcaacatctcttaatcaatctctcaatatctcttctacagaattctttgattcatttctcttcatttttctaaaagatttttatcaacactttctcttccaagaaaagctctctgttcagaaacttatgctattcatctttttcattctcttcttcctttggcaaaagaacgaaggactaaccgcctgaattcttttgtgctcctctatcccttacaaaagattcaaacggactaaccgccgagacatcttttgagtcttccctctcccttatgcaaaagatttcaac

SEQ ID NO: 64159 - DNA, 363 bp, Glycine max
  unsure (1)..(363): unsure at all n locations
ggatgtgaganagtgtggaagagtcagtcttcctacttttttttgttgaccacagagtggtacctggagatatgtcgcggtggtcaggagaccttgtggacgtcaggtggtgtactattgcccaaaaccaagcttgactaatcccaaaccaacccaggcataatcagtcagtgagaacctgtgacgtacctaaacaggcgagctcctggcagtcaaccaataaaagaacatagtccacaaagcatggaggctggtgcggcggctagccagctatgtatctctagtggcatcttgtaatagcctctggtaatcgatcacatgtatgttgaatctcattacgtgattaacacgtcaccatgtgtt

SEQ ID NO: 64160 - DNA, 257 bp, Glycine max
  unsure (1)..(257): unsure at all n locations
ctaagcttttatcaggctatcttgggatgagctccttctttatggttattccctagnggatggcgccgcctcttacctcttctnctttgtcttccgctgcatctccatggtggaaaatcaccattaaaggacctcattgaagctcaaagatccagccttcatagaatcttcacaagcaagctgccatcaagtggtaatcagagcacaaaagcttcaagtaggtgctccttaaacctccattaattntttttctttac

SEQ ID NO: 64161 - DNA, 411 bp, Glycine max
tatgatgaatcaagactgattcaaagagttttgatgatatcatagacgatgacacatagttcataagacaagaacacttatgataacaaagataatgatctcaagaatcaaagaatgagttcaagattgaatcaagtacacttcaaggatcaagaggaaaggtgaattcaagaatcaaaaatcaagaatcaagtttcaagattcaagtttcaagaatcaagatctagattctagaatcaagagaagactctgtcaagataagtattaaactagtttttgtaatacttagtacacatgaatttttctaaaacactcttatcaagagattttctttctgtcttctttatcattatatttaccacaatctgttccaatatgctctactctatatttattgttctctatacgtaa

SEQ ID NO: 64162 - DNA, 491 bp, Glycine max
  unsure (1)..(491): unsure at all n locations
aacaccaaaatctntctccaatcgcaccatactttaacttcaaaaacgcgtggccacaatgataaagacgaagaccaaacatcacactcacacgtcgtctaaacataaccctccacgatagcgacaacgggccaaatcattaaccctaatcgccttctatggagaactttgacagagacctagcaagcaacagataaacatattgattggtcttctgaagcaatgttgttatgtcctttccatatgacacanacgatgtctttttctttgtttttataaaataattaatccaacatgtataaacattaacaccaaagggtacacatggcaacacgtgtaatcttatgtgtccagatgacgatcacgtaggtagaataacgatttgaactaacagcacagacctatgacacaaatnttagatatatggagcccatctaaagagtaattatcgagaccaatgtgaaaacagatggtatcatgaataaaacata

SEQ ID NO: 64163 - DNA, 499 bp, Glycine max
  unsure (1)..(499): unsure at all n locations
actgcatttgataaactnttctagacctgatattgcatatgtagtanacagattgagtatatatacccatagtcctcataatgaccatcaagatgcacttgcttaactcatgagatatctgagaggcaccatgaattatggtattaaatacaatgtatctcccgcaatacttgaaggatatagtgaggccaactggatctcttattcaaatgagacagaattcactagtggtaatgggtttactcttggtggtggtgcggtagcttgaagatcatccagacaaactattattgttagatcaacaatggagtcggagtgtgttgctctaataatggctgtgagtgaggctgggtgcgtgaaaaatatcctagctaacattcatctgtgaataaaactgaccncatcaatatctttgcattgtgattctcattcaacaatagctgtggctaataataaacattcaatggagaaatagacatatctacttagaataatgtgg

SEQ ID NO: 64164 - DNA, 277 bp, Glycine max
  unsure (1)..(277): unsure at all n locations
ctgagtccttaaagttaggcttgactcagttaaataatcgagttcaatagtaagtttacttgaattcaaataactcgaaataatgtgacttagctatcttcttatatttcacttggattgaatgagccgcaatattatgcggctntataatatggaggtcgactcaatattatctttatgagcacttaaatgatcttttaattgtatcatatgtgataacaattgtgatgaccttcaccctagaacttccatattatacaatgaaaataatccatta

SEQ ID NO: 64165 - DNA, 433 bp, Glycine max
  unsure (1)..(433): unsure at all n locations
gcttttgtctacagatgcanaagttatacggataacctctcttgtatttccgcccgtcagcgtgactcacaagtcagtatgacagatctcgtgagcgcggaagataacgttaatctccacgtgtcaacgggcttgtctgccgcgattgacgaatggcgcagaagacgacgttagtctctgcgtgctatcaggcttttcgtcatacagacaacaaaaaggttatacggataaccactcgggtattttcgcccgtcagcgtgacttcaaagtcagtatgacagatcttgtgagcgcggaagatgacgtaaatctccgcatgtcaacgggctagtcggccgcgattgacgaagggcgcataagacgacgttattctctgcgtgctattaggcttttagacttacagaccgcaaaaagtttatactgataaccactc

SEQ ID NO: 64166 - DNA, 312 bp, Glycine max
  unsure (1)..(312): unsure at all n locations
cgatacaagagagtgttcatgatctgaacctcttataacgtgtagtttgtatcttgaaaccttccattgcaagtgcatataaatggtgttgtgaaaatgggaaaaacaagaaccatgatgccaatagctctgtggccctacaccttcacactataatactatcatgttttttcttctataacaatnagcgcgatctttataccttcgtttcatattcatatctcaatttcattgccttttatttctatacatcttaccgtaccgaacctcttaactaagtctacctactgatcacccctcccatacattcta

SEQ ID NO: 64167 - DNA, 430 bp, Glycine max
acctgccggtgttattcttctggtcaatgaatggtacggggaaatggtccttttggtaacctgttcagcctcctatagtcgatgcatactctacaactgttctgctcccgagtaggaatcaactcctccttctcatttttgatcacagcgaggccggctttcttcgagactacctggaaacgaaataatggcttaaatgagtttccttctcatcttttatcacagtgaggccggttctacaactgttctgcacccgattaggaatcagttgaaattcattatatcatctattaaacgagataacggcttatatgattggtcgaaactcattataagcgaaagacaagagtctcagagtttacacattgaagaagatagcatatgatgctataatggaccactaacggtgcatataatgaattcacagcgt

SEQ ID NO: 64168 - DNA, 371 bp, Glycine max
  unsure (1)..(371): unsure at all n locations
tcgacacgctcgaatatgaatgttgaagctctgagcaattcaaacgacaatataattntactccgatgtgtgattttgtcccgtaatataacgagacgctcgaaattgaatgctgaagctctgagcaaattcatacgacaataacactttactcagatgtctgattgagtcccgtaatatatcgacatgctcgatattgaatgttgaagctctgagcatattctaacgacaataactatgtactcggatgtctgattgagtccccgaacatatcgagacgctcgaaatagaatgttgaagctctcagctcaatcaaacgacaatatcttttactcggatgtctgattgattccgcatatatcaaacgctcg

SEQ ID NO: 64169 - DNA, 477 bp, Glycine max
  unsure (1)..(477): unsure at all n locations
tgaacctagttccatccctccttggaggtgactgcattatttagttgagaatgagcgagacaggttatcaaagttagtggaataaacattatcaaagttctatgagtaggagttatggttttattggacaacgactgggggtgaagaacctcacactcttcacatatgtgttgatgcacctctatcgtcccttatagtgcactttctacctggacattgatgctctattatccacatctctagtatagttagtaagactcccacgaattgggttctggatatttcttgatctttcanatacgttctccccacaccttcccaatgtgtttcactaccacangttctaagattccctcataatattatgattaagactaatcggtaatgaaattatatcttatctaatgattaaatgaatgatataatataaagtgaaggtggtatcatctttaaagtcatttttctttattactaata

SEQ ID NO: 64170 - DNA, 268 bp, Glycine max
  unsure (1)..(268): unsure at all n locations
ggcctcanagaggtccaggaaggacaaggcggccgattgatctatttccgctccggagtatgacagtcaccgctntatgagcgctgtacaccagcagcgcttcgaggccatcaagggatggtcgtttctctgggagcgacgcgtccagctcagggacgacgagtatactgatttccaggaggaaatanggtgcccgcagtggacatcactggnttactcccatggccaagttcgatcaaaaattagtcctgagttttatgccaatgct

SEQ ID NO: 64171 - DNA, 284 bp, Glycine max
tattcagaaaattagagtttatctcgtttatcttagtgagagtgattctcctaaattcttgagtgattcaagaacaccctggctgtgtcaaaggactttcacaacctttgtgtgttggcctcgctggaaagagtgaatcgttgcgttctttcatcttcacccttggtctgttaaaccgcattttcagaagatccacctctgcccataattgtgtcgggccataactcccatttacgcactcagattaagtgattcttgagcctaaattgactttcaaaacgaga

SEQ ID NO: 64172 - DNA, 414 bp, Glycine max
  unsure (1)..(414): unsure at all n locations
tactcaagctagagtgaacactattggaggaccattgtatgccttatatttattgcattcttgtngcataattctaaaccttgcatttgttttgttgagctaaaaagttgaatgtgggcaccttacttacttgattgaagcacatgaaccaaaaagaaatattgaataaaagggaatgcaagaaaagtgtgtatgtaacttgtcattgtgtatccttagtctttagttntaatttgtcttgtttttaagtcttagtttaattctgtttntgagtccttaatttcttctaagtagttttactatnttagttagtgttgggtgaggagaaacaagtttctaagattggagtgtaataaacgttaaattaccagatttcatatgcattttggacattagttggcatttaattaactt

SEQ ID NO: 64173 - DNA, 260 bp, Glycine max
tccaaaaactaaagacatgagagagtgagcgtatcgcagcagggcactaactaacctactcacatacacaagggcttacacgcactgcgctagctattcaaagacacacagagcatgtgcgctagctgacagtaggctagcgtgacaaacttccaaatttaagttgacctagccacttaccacaaccgctagagccatacttcgtcatacaggatgacgcctacggcatggcggtacgcgtattgaatcaaaattacaat

SEQ ID NO: 64174 - DNA, 322 bp, Glycine max
  unsure (1)..(322): unsure at all n locations
aaatgacagtatcaacagagcttcaagggagctctgataccatcaaagaagaatggatataatggatcaaaaagagagatacgacataaactacaatgggatgtatgaaaaacacatttctgctcatagttatataattatataggagaggatatatatagtcattctctgtgcctatagctanggatangaataanaggggaaatgacaacaaatatgaaagcanatataattggtaaaaagcacaacatataaccagaatggtttctctatgagacacacaacaactacccatagagcatcttacagacacagcttacac

SEQ ID NO: 64175 - DNA, 389 bp, Glycine max
  unsure (1)..(389): unsure at all n locations
tgtaaagtagtctgatctagaatgcctatcttttatgttaccaacccaatatgcataagtatatccctggactntcatgtgctcgtgcttcttaaacatcaacctttttccaagagctcctttcaattaacttagtatttgcatcacaacaaccatatggtctttactcgaaacatgcataaattgactaaccatactcacatcataagcaattctaggactagtgagagacacataaataaatcttcccacttaccttctccctggtgttctccgacttgaacattggcgcccattgtgtgatcttcgggataacttctttttcgatcccacatactactaagaactcaaaacactagactaaagaggctactctgcttcttctttta

SEQ ID NO: 64176 - DNA, 296 bp, Glycine max
aagaagctcataagctgctcggaaaacgctccagcctcacaatgtgatctctgaattcggcttaactcacagacacttgcaatcatctgacattgggatctttgagaagatgtctggagtgtgctagaagccttctaatgaagcttctagagaaaactacatgaagctgcctccgtagaaacgctgcccagccttcgttaaccgttggatcttctcgaaatttggtttgcaacttcacaagacactgtaccatgatttaaccgttggtatctttgagaaaacatctggagcgtgct

SEQ ID NO: 64177 - DNA, 431 bp, Glycine max
  unsure (1)..(431): unsure at all n locations
taaaccagctctcggcatttctggagacaacctgtatgtattctcaagaaacacttatttaacacannaatgacatgcntaatcttttccgatttagaacaaaacctcgtgcacacatttaatataacacatttatgaacatgcgtatgtgtaagaaaatatcctaccatntatgtcaacatataaggacatttaaaacatcctagttaccacacatatatatattttgataagaatacacattctcgtgctcaaggtattgggtcaaaattacacatattcatatcctaaatgttttgcttatcacaaaccacctacacacatttgaagtattntatttaacatacaaattntggtgttgcacctatatacgcattggaaagctaatcttccacgctacctatattcacacacatatatacataccatta

SEQ ID NO: 64178 - DNA, 61 bp, Glycine max
gaatgccccgcgatttacgcaacgagcataacgttaacctttgaccggttaaacgctctat

SEQ ID NO: 64179 - DNA, 440 bp, Glycine max
  unsure (1)..(440): unsure at all n locations
acacaagatactaagctatagaatgctatctatgtacttttaaaatatctatctttcaatttaattcgaaatgataataataaaatatataagaatagatgtgagaattttggatccattcattcaatctttaacccatttatctaccttcctctttctatntataacataaaaataaatgcaaatcgaaaagttcaccaaaatgttatccctcgtgttcgttcgggttntcatatattgacaagtgctagacagaacaccaggagtagtaaagatgtatgctctcttattttttgaatactctatagggaatatattaaataaaataaaaaacatttaatgtattggaaacttanaaatattcaatactttttttatctaagaaatatatatgttaataagatttagtagaaagatttataattattcaaaacagaaat

SEQ ID NO: 64180 - DNA, 348 bp, Glycine max
  unsure (1)..(348): unsure at all n locations
ccttcatataacgagacgctcgatattgaatgttgaagctctgagccaactcaaacgacaataactttntactcggatggccgaatgagtcccgcaatatatcgagacgctctaaattgaatgttgaacctcttggctaattcatacgacactagctttatactcggatgtctgaatgagcgccgtaacatatcgagacgctcgacattgaatgtttgacctctgagccaattaatacgacaataactgtttactcggatgctgattgagtcccgcatatatcgagagctcgaaatgaatgttgaactccggccaattcaacgccataactttcacttgatgctgatt

SEQ ID NO: 64181 - DNA, 228 bp, Glycine max
ccttaaacctccattaattttttgcttaaccttctcttctatggagggtcttaattttctcccgtatctcctacatgctttggctaaatgttgtaacatgaattttagagtttcaccgataaacttgtatagaagctagatatgattttctatgggtcacaattcttgttcttggtcttgaaccatgaattgtggtgaggttagggtcctttgaggtttggcttggta

SEQ ID NO: 64182 - DNA, 418 bp, Glycine max
  unsure (1)..(418): unsure at all n locations
tgatcttccagcaccgccgccaccatcatttatatctttattntcatatatagnacttngattttcagcctttgtatttggctatattattatggnatttgaacaatctccttatttgcatggtatatggtatttgaacaatttactatttccttatttgcatggtatgtttgaacaaatattaagtatgttatttgactatatgnggtttatagttaatctatctatgattggtacttcatgattcttgcttcatggtttggttgatatttttccatgaagaatgtatagatgattaaattatatctgtatactttaagtttgatacgcacttttggctatttgttgatgccaaagggggagaaaaatgggattaaatcaagaatcacatgagtaacaacttaattttaagatagca

SEQ ID NO: 64183 - DNA, 440 bp, Glycine max
tgtgttctcccttgtagaactactaactgcagtaacagtttttgtccaactatccggtagtgatgacaatagaatcaattccttcacctcatcctcaaatttaatttgcactgactccaactgggcaagaatagtattaagttcattaatatgattagttatagagttagcttctcccatcttgaggttgaacaaccgacgcatcaagtatactttcttggctgcagatggcttctcgtacatatctgaaaacgccttcattaagtctgcagtagtcttctcgtttatgatgttgaatgcgacgttcttggctaatgtgaatctaatcacgccaagagctggtcgatctagcaggttccattcttcttgcctcatgtcatctggcttatcccctgatcaggggtgatacaacttcttctgatatagataatcctctatct

SEQ ID NO: 64184 - DNA, 332 bp, Glycine max
  unsure (1)..(332): unsure at all n locations
tgttcagatacatgcatttgtgtgcaatacacaataccctgnacatcacaacaaaanggnngatcagaagagcataatagaactttaatggatatgtgtaggagtatgttaatcaattagattctacgcgtatctttgtggatgtatgccttgaaaactgccatgtatttgttgaatagggttcctagtaaggcagttccaaagacatcttttgaactgtggacaaataggacacctagtataagacacctgtatgtttggggttgccagtcagaaataagaatttacaatccgcaagatagaaaatcgcatgcaagataattcaatgtata

SEQ ID NO: 64185 - DNA, 141 bp, Glycine max
acatatctttatcaattaataacattagagattgaaactgagaacttaagattgatcctttctttctcttaattaagaaatttcaaatttccttctcaacttcctccctcatgatgctcatcacaatcatgctcacacttt

SEQ ID NO: 64186 - DNA, 195 bp, Glycine max
  unsure (1)..(195): unsure at all n locations
tactcctactgacctttagatatatacactcgataacaatatttttcttaaatctaaaggaaataatgttatcattaaactncacataccaatggcgggaagcttgcttaagaccatatatngatttctttaatttgcacaccatgtgttcatttccttcaactaaacaccccattggttggtcaatataaacat

SEQ ID NO: 64187 - DNA, 171 bp, Glycine max
gaggtgacatgtcacgacactggcttctgtgatgcaatgacaccaagacctgtcctccacccagtctctcttttgcctatggtttggggaaacacgtccggtgatacacactatgatagtattccttttgttcccaaatcccacactcgccatgactttctactcacttcc

SEQ ID NO: 64188 - DNA, 159 bp, Glycine max
  unsure (1)..(159): unsure at all n locations
tatgcaagttgaaagccttggaggaaagaggtatgcctatgttgttgtggatgatttcttcagatttacctgtgtcaactntatcagagagaaatcagacacctttgaagtattcaaggagttgagtctaagactctaaagagaaaaagactgtgtcat

SEQ ID NO: 64189 - DNA, 360 bp, Glycine max
  unsure (1)..(360): unsure at all n locations
taagcttgtgaagaaacttctcaagctcttatatataagtataagcacagcttcacggngaatcaaaggtgattcaaaggtgtttcgatgataacaatgatgatgacacaggtgatgacaaaaagctcanagatcaatcaaagaacaactcaagtgaatcaagaacaattcaagagttcaagataagaatcaagaagaattcaagaactcaagaagaaagtctaaagacaagaatcaagattcaaggttcaagatcttaagaatcaagatcaagattcaagactcaagattcaagaataaagagaagactcaatcaagataagtgataaaaagtgttttcaaaactttgaatagcacatg

SEQ ID NO: 64190 - DNA, 226 bp, Glycine max
  unsure (1)..(226): unsure at all n locations
cctatgcanggtgaaagtcttggaggaaagaggtatgcctatgctgttgtggatgatttctccagaattacctgcgtaagatttatcagagagaaatcagaaacctttgaagattcaaagagttgagtctaagacttcaaagagagaaagactgtgtcatcaagagaatcacgagtgaccatgccagtaaatctgtaatccgctagttctctgacatctgcacatc

SEQ ID NO: 64191 - DNA, 359 bp, Glycine max
  unsure (1)..(359): unsure at all n locations
ctaagcttggagctcggggtctttctgaagntcctcagccgactcgttttattangttacatacncttccacccaagactcgatagcattccatatctctagcccatcagaagcataaggatagtcctcgatcaaaagtctaactccatggcgagcagatggatccttaacagcaactactctgaattaaaagcacccaaataacattgattagcacaagagntatatcaagcctgaagcccttattcttcttatgtcaatgatgaccttatatatgatgcattcatgtgttcccccattgtatgcactgtgtgacatcatgcctgatttaatggagtgtctcacttctcttccacaca

SEQ ID NO: 64192 - DNA, 413 bp, Glycine max
  unsure (1)..(413): unsure at all n locations
ataaatagaatattttctatattagataagatacgacaaaatctagacgaaataaaatctagataagataagatctagataaaataacatcttgatgagatataatctagatatgataagataaaatctagatgaaataatatctagatgagatagaatctagataagatacgatttggtagaataaaattgtttgctctcttcctgtccaagcctaattccagattcaagcccaattacttataattctcctcanattaaattataaacacaaacataatccaataggcccaaatgataaaaatgcataattaatttcgcacataaggctaatcagtaattaaaataatgacaacaagggataagatatatgagaaaatgatgacacattatatcgcctcacacttagcctt

SEQ ID NO: 64193 - DNA, 428 bp, Glycine max
  unsure (1)..(428): unsure at all n locations
ctaagctctcgggcatcctgcgaggaaacatttgatagtagttttacaagaatgctacctctaaacatatatggcatacaaccccccttcaataaatacaaacatcaatgtanatttagagcaagcttatgcgcatacttcttcacgaacgttcacttgcacaagacattcttataactaagaaaaatgcacccatatacaatcaaggcaccttcgttacctagattatttacatgtactttcaaggtgtatttgttacctacatcacacacatttcctttgctaaattcacatacatgcatactctaaacactntggctatcaaanattgcatacgtgcacatcttggtatttctaatacctatacatacacaaacttcatgatgaatctggactatctacacaatanagtgctacatttcatgctc

SEQ ID NO: 64194 - DNA, 312 bp, Glycine max
  unsure (1)..(312): unsure at all n locations
aactaagctgtagatatttgtatggaattttctgtattctttcttttttcttgatagaaaaaggatagctttctttntcttgataganaaaggatcttataggagttcaagagttaaagtacaactacggaggatggatatcctgactattcctcttttacaggccatgctgcactntatctacaaagatactcttacggaagaggtggccacggtttcatcaaccactactagccattttccggtttctgaaacattgacagtaaaattgtagctgcacagacaagtatggcttgtgtaggcttagaatga

SEQ ID NO: 64195 - DNA, 495 bp, Glycine max
  unsure (1)..(495): unsure at all n locations
gacatgagtcatcaagagattatanatatgtgatcatgtaatgagtatcaataatcaattatcaatcatcaatcatcaatcatctttgattgtctatctttcaatcttntttcaacatcatctctcaaacatctttcaatcaatctttcaatatctntctacagaattttctaattcatttctcttcatctttctaaanagattttatcaacactttctcttccaagaaaagttctttgttcaaaaactcgcgttattaatctttttcattatctttctcctttaccaaaagaacgaaggactaatcgcctgaattcttttgtgtctctcttctcccttacaaaagattaaaaggactaaccgcctgagaattcttttgattctttcctttcccttaagcaaaagatttcaaaggactaaccgtctgagatatctattcgttccctcttacaaagattcanaagactaacagcctgagaattctttgtccaacac

SEQ ID NO: 64196 - DNA, 322 bp, Glycine max
  unsure (1)..(322): unsure at all n locations
ccacggaagattcctgatcaagcctttgtataggaacaaccacaagaagactgtctaatattctgtaacaatgcacggataaaatatccttttgtcacagagacatattcccacacacgtgcatgagatataaacttcagggtcatagtgcctcactgtcacccgaactcacatctacattccttgactcttggtgctttcataaaatagacacaagcacattgacagttgggtctctatttaaactggaaattaaagttcattattttagtaggaacatactaaacataaggtggaatgttggaacctgtccgaangattt

SEQ ID NO: 64197 - DNA, 356 bp, Glycine max
  unsure (1)..(356): unsure at all n locations
cacacgttactctgangagaacatcttttcctgagactcttgcttcaactctaggacatttctttataggtttatcatcacaggttctgtttattttgaaacatcctaaggattccgcctttctcttcttgttctcttgttccaaatctttcacatgctcgctgtacgatattcccaacctttacactgtttctacggccgatcctctgaccctttcccattattaccactacctagcgttctctcctaccctcctcccgttctgaggtctatactcacccactttgtctactattcttctactccatcaatctcctctctcacctctgtcttctgttctttatgctcgctcctct

SEQ ID NO: 64198 - DNA, 127 bp, Glycine max
tgcagctaagaaggaatctcttttgagtatatgcgaggattaacccgccactataatgatggcaaagtagtggtatgtgtaaagcgcgcttcatatgataatcttcgtacatagtccatgtaatctt

SEQ ID NO: 64199 - DNA, 313 bp, Glycine max
  unsure (1)..(313): unsure at all n locations
tgaaatttatgggagacactagataagaatggaaatggtgaangtaaatagcatacacacactatntttgtatatacacatattgtttctgtatatatgaaaagaagaactgtcagtataaataaaaatgtataaaagtgtgtgtgctgcaaatcaaatcaatggaagctaagtgcttaaataaaaggcaagtatggtgtaggaatgcatganaaaagtaaaggtttatctatggatgaatgctctcctagaacctaagcttttgaatcctagaaaaaccatgatttgttggcagcctaacttcattacaagc

SEQ ID NO: 64200 - DNA, 383 bp, Glycine max
  unsure (1)..(383): unsure at all n locations
catcttcttcaaccttggtgattcttgtctccatctcattgaagcgcatgtccacttgtaattccaaagtgtcaaacctttcaccaacaaaggtttgaagaccatcaaacctatccaaaatctttgaaataagatatgaatcttctccatcatgtccttcttcaccaacatgtcgagcaccctttttcacctaagagccatcatgctttttttgataaccaaaggatgcaatgactgaagcacctattaggaaggatctcttgattggaacatatggttcagaatcaagagggatgttaaagtgttgaaggaagagggtgactanatgtggatatggcaatggggcattcaatcacaatgccttatgcatgcgatatctaaca

SEQ ID NO: 64201 - DNA, 485 bp, Glycine max
  unsure (1)..(485): unsure at all n locations
ctgcagctntaactgaattacaatgttccaattgttttataatggtgtaatcgattacaagatattggtaatcgattaccagtatatatgaacgttggaattcaaatttaattgtgaagagtcacatcctttcataaaaagctttgtgtaatcgattacaaggatttggtaatcgattaccagtgacaagttttgaacaaaaatcaaaagatgtaactcttccaatggttttcagattttttctaaaggttataactcttccaatggttttcttgaccagacttgaagagtctataaaagcaagaccttgatttgcatttgaaaaaaaaagacttacaacctttacaaacaactnttccacatattcttttacaacctttgaatctctntgaacattnttcttgaacttcttcttcctttgcaaaagctntctaaagttttctggtctccaaaccttgnaacaaaagtgtctatatctttattct

SEQ ID NO: 64202 - DNA, 265 bp, Glycine max
gtgaaacttaatgagtcaccaagaactagacatagccattatggttgagacaaaccacgataaatatgagtgactgataggtcttttctgctctctttgtgtttaaattgacctagagattgaatctaatttcgtgttgatgaatatgatctattcctgaaaatatgttctattggttgattttgtctcccgcagaaatctattatccaatttaaagttattttatacgataaacttgtattagcttgtagggataatcattgat

SEQ ID NO: 64203 - DNA, 403 bp, Glycine max
  unsure (1)..(403): unsure at all n locations
tgcctactatagactgtttttctcccatgtttcagttgtgtgtaactcgtattttcttcacagatggngcatgcatgatgacccttaacactgtaaccgctgagattcccatatgctgggaagtcattaatggtacaaaaaagcatttgcacgcattcaaacgtctccttgcaaaatgcatcanacactacaaccccctcgtcccacaactttctcagatcttcaaccaacggacttagataaacatcaatgtcatttcctggctgtcttgngcccgatatcatcatagacaacatcatgtattntcgcttcatgccacaaccaggagggcaaatatanattactagcagaactggccatgaactngtgtgagtgcttaaggtgcatatggattcattccatc

SEQ ID NO: 64204 - DNA, 444 bp, Glycine max
gagtttattatggatgtataacccctgatttcctacttaacatattcttgtgcaggctgagagaaaaaaggagaggttaaagcaagtattgaattttgatatgttcttaaaacttagttttgcattggaccttttgataaaaatatttatgattataattttcatattgctttgaagaaattctttctcatttgatactctagccgaagggttcaggttatttgctaggtgttactaacaaaatacggtatcggtaaatattttttctagattttttgcttatcacgccatgactgaatcggtgtaatgtatcatgatgcttgcctttttaagttgtcatgaatacaaatggccatagtcttcatgttgatatatgaaacttgtgatgtataagtcatgaaatggcattcacccaaaacctcttggaatcagcttcaaagctta

SEQ ID NO: 64205 - DNA, 380 bp, Glycine max
  unsure (1)..(380): unsure at all n locations
tgacgcgacttagcacgcgctcagcttggtgatgaatgctttcaatgtcttgggacctagggttctatttgtttagataatatttttaacatcacaagccggtgcggttcattcaaaatccgacttcaaagcaaataagcattctgatcacatgcttattggcttgaacgtggtagggggtaaagacctatgaaagaaaggattanaaaggctcaaagggtgtttgagggtacattgataagaaccttaagcgtgttgatcttgggtagccactcttgatatagaatcttccacttggcttttgaaaacgagagtgctttttttctcactacttgcgattattcttttctttatgtgccctctgctcgtattgatgcttc

SEQ ID NO: 64206 - DNA, 365 bp, Glycine max
  unsure (1)..(365): unsure at all n locations
cccngatgaggatgtcccatatgttctttattctggactgattcatctgcttccagtgttttatggccttgcaggtgaacacctccacaaacatttgaaggaatttcatattgtctgctccaccatgaaacccccagatgtccaagaggatcacatatttctgaaggcttttcctcattcattagagggagtggcaaaagactggttgtattaccttgctccaaggtccatcacgaactgggatgaccttaagagagtattcttagaaaaaaatttccctacttgcaggaccacagccatcaggaaagatatctcatgtattaaacaactcagtggacagagctcgtatgattactgggagcgat

SEQ ID NO: 64207 - DNA, 377 bp, Glycine max
  unsure (1)..(377): unsure at all n locations
tatctcttcacttcatactttaaaaaccctttttgttcattaatacacaagctgaaataaatcacaatcatcaacaagatgggctaactacatgccagaaataaaaataaaagatacagaaggggaagaaaagctgggttgcctcccagtaagcgcttctttaacgtcactagcttgacgcatcatcctattatccaggatccattanagttcccacttcaagcaccttcttctcaagtcttctttcctccatcacatgaactntanaatagacattccagtcaggtggctctntatcttcatgaaatagatcanagcctgatttttgatcttctattccccatttgcacatcttctttccatatctactacacaac

SEQ ID NO: 64208 - DNA, 396 bp, Glycine max
  unsure (1)..(396): unsure at all n locations
ctaacanaaggcattcaaagtgggtggaattcctagagcaattcccttatgttatcaaacataaaagggaaaaggtaatattgtagccgatgctcttcctcggcgtcatgtattgctttctatgcttgaaacaaaattgattggtcttgaatgtttgaaaagcatgtatgaaaatgatgaaacatttggagaaattnttaacaatagtgaaattttttcagaaaatggtttctttagacatgaaggctgtctttttaaagaaaacaaattgcgtgcgcctaaatgttctactagaaatttgcttgtttgtgaagcacatgaatgaggtntaatggggcatnttgggtccaaaagactctagaaacattacaagaacatatttattggcctcatatg

SEQ ID NO: 64209 - DNA, 287 bp, Glycine max
tcgctagtgttatgacagaatgtgataacctgagagatatcaatcatgaccgtggctgaagcgctctagtgggaaacacattgtgacaaacaggaagaatggagcaggaacaagttctcaatggcttggttaggccgtagtattgagctcatacttataacggtcgatagagacttatctctgatggatagcacgatgtcagaggattaattaaacagatctcagatattctagagaagctcgacagagaaattgagctagatggaagagaatatattgcttatcat

SEQ ID NO: 64210 - DNA, 344 bp, Glycine max
acttgagtcatcaagagattataaatatgtgactcttgttgagtctcaagatcatcaatcatctctgaatcatctatctttcaatcttctttcaacattcttcaatcaatcttttcaactctttctacagaattttcggattcatcttctcttcatctttcttcaagtttttgttcaatactttctctttcaagaaaagttttttgataaaaaacttgtgctattcatctttttcattctcttctcctccatgtcggccttcatctgcctttgcacctcctgaattcttttgtgtctctcttcctccttacgaaagaatcaaaggactaaccgcctgagaattc

SEQ ID NO: 64211 - DNA, 386 bp, Glycine max
  unsure (1)..(386): unsure at all n locations
tgttcaaccctcctggtatctgagattcactgaagattagtgagaaaaattgtttctgtgaagaaaatctaagccgaggcgcttccgtaacgcttacgtgacgcttccgtgggtgatttggccaagattttcaaccgttcttcgttcgttcttccgtcttcaaccggtaagttcccgaaatcgaacttttcaagttattctatgtacccttagtggtcctcattggcttcgcgtgcttatattatcatttcattgacttttcgtacccctttatgacgtgctttagtcatttatttaagtcactttctcgcctaatcaanaaataaaataaattgtcaccgatcattggaattataacatctttgaatttctgtaaaatgaaatct

SEQ ID NO: 64212 - DNA, 189 bp, Glycine max
  unsure (1)..(189): unsure at all n locations
tagctaataggctaacttaggagcgacgttgcttcgtctattcttacatgagggatctgnggacaaaactcagcttaagttagtctaaacctaacagggttgtctaaatcgggtgtagtcttaaatgagggatctgcggacaaagcttgcatatttaacctaacgaaggaactagggtatataatctcc

SEQ ID NO: 64213 - DNA, 391 bp, Glycine max
gatcttcttcaagagaggcatagcagcaacacaagctgcaaccatcaatgcctgcatcagattgctgaggcgctgttctttaacttcaactggcaaaaggtcatcaacatccttatctacatcgaaaacagcctcgtcaacaggggaatcaatgtatccatgacttgaagaccagtggatggtggagtccttcagctcctttagcccctgcttgaagaacaatatataggataaaggagagagagataacaaatttcaagtcaaattggaaatcatatgattatacttaccacggcacgtggtattcggcggactaatggagtctgcattttgtcatatgcttcttgcatatgtcggtataattgacacaggttcatattattctgcatgc

SEQ ID NO: 64214 - DNA, 407 bp, Glycine max
  unsure (1)..(407): unsure at all n locations
gctccgngtttagaattctgttctccctcggtgtattatctnggatacgtaagggtgtcttagacaatgatgatgaacaattaaagaaaactgacaacaaaccgacactgatggaagaagctgcgcaagctgcaaaatcagctgcagctgcagctgcagatgtggcaaaagcaagccaagaaatgctggcttcaaaaggtgaaggtgggtttgtagaactttaatttgcatgctgtaaaaagtctatgaattgttttaacactcctactctccttggtgtatttacgagaaatggctgtagttattgctgcatctggttatactttgcagagaggagatactttgtggaagttgtgagcctcttagataaacaagtacaagaaatgaagtcaatgacaaatgccata

SEQ ID NO: 64215 - DNA, 378 bp, Glycine max
  unsure (1)..(378): unsure at all n locations
aaatatctctctctcttatcaagggtggatagtgaattttctttctataacgctgaaagggagagaagcaaaaatcgaatgggatattaattggtagtatttgacagcaatgatggtaatgaattaccaaccctatttgtaacgaccagcgagagttcagatttcactgtattattattagggctgctttttaaaaaaatattataaaaattaaaaaaaaaagggtatcaacttaaagtggattcgtttggattggacgattggcatcgaatntaaattttaaaatgctctcttttaatattcgatactgactcttgttgtgtttatcagataaaaggtaaagatagatttgagttgagggctttattcgcctaaata

SEQ ID NO: 64216 - DNA, 289 bp, Glycine max
agaaactcagctatgccttcctctggctaggttattgcacccttccttcacctaaatatctcacatggctcagtgtcctcccagcatgacttgtcagcttccataattactcatgagcactgtgctatgcacacaacttgcttgcaactgaatgcacacaaataatacatgcaataagtatcaaagttggtgagaatatgaacattaaaagagtagtttcctagtgtggccttttggacaatagaagcggtccacttatggattgccacttgcgtacatataattgaca

SEQ ID NO: 64217 - DNA, 408 bp, Glycine max
  unsure (1)..(408): unsure at all n locations
ctatgtgagcgtgacattgaccacgtctatactttgcattttgtattgactgaggcttaagaaattcatacaccgatccatgacccaagctattactccactcatccatatacctaaatggggacatttcaaacaataaattaacatcatgtatataaagaaccaatttgcaattaaatagtcaatggcatgaattttacttacatggtccacaactgtagtatagctatgttcaaacatttgtcgcctgatattatttcagtgacatcaacatatgttatgaacaagggtgcatctacatttggaatcccanatttactaacatcccacattaactaaataggcttgttagaaatgtcaaccaggctcttaatcaactcatgcaaggggtcatctncagcaacatca

SEQ ID NO: 64218 - DNA, 318 bp, Glycine max
ctagatgtactggttaacctggtaacccatctgtccatgaatcaaaaatctgcacctgtcgccagactttgtggctatgctgctctgacgaccaccaacagacctttgcccttatgagcaccctatgaagcagttgaacagcctgaagcttatgctcgcgacctttacaatatagctcctcaaccgcagcgacgtaatcaaccatagcataacaattatgacgtctccaggagcaggtacaatcccaggcggaggaatcatcccaaccttagataggcgaatccttcacaacagcggcaacgacaacaacagtcttat

SEQ ID NO: 64219 - DNA, 344 bp, Glycine max
  unsure (1)..(344): unsure at all n locations
ctggggcttgacccacgcgggtgttgaagagacagcatgggcatctccttacttcctttntgcccctgttgccccgattcttttggcgttcacgtttgtggaggaaacgtaatcaaactttcctctcttcaatccaacctcgattctttccccggcaaacaccagatccgcaaagctggacggcatgtaacccactatcttctcatattagaacactggcagagtgtctaccatcatggtgatcatctctctctcaaccatgggaggagctacttgagccgccacatccctccatcgctgcgcatattctataaaggtctcaccctctttcataaacatattct

SEQ ID NO: 64220 - DNA, 436 bp, Glycine max
  unsure (1)..(436): unsure at all n locations
tggctcaatgagcaaggggaaatgatagtcattcattaagtaaacatacccttttctataggagactactatgatgacgttttatatgatataatccttatggatgcagggaacattttgttgggtagaccatggcaatttaacaagaaagacatccacaatggtctcaccaatgaaataaccctcacccatgtaagcaaaaagctcaaacttgttcccttgacaccttcacaagtggttggggatcaagtacaaataaaactcaaatgggatgaggaaaataataaaaaaaagaaaagaagaacaacctttaatggttaaggaggagtgtaaggaggtaggtgtctcctccaataggttagctaagaagaaagtcattntgcaatanagacaaacattaaagacacttcccttcttagacaacctncacatattc

SEQ ID NO: 64221 - DNA, 417 bp, Glycine max
gctgttaaaggtaacacatggcaccttgtacgtagaacatccatccaccaaggcttcttctaagtgacagagagagagagagaggtaattgaagtttttggagttttcatgagggtttctctgatttcgagagtgattccgtgactcgttcagtacaatccgtgacctgggtcgagttcaaaaccagtgtgtagtctcacatattttcattgttttctttacataatttgcaatatttggcctctctggtgaaagttgttttcctttaagatcgacttgttaatcaaagatgcatatgtgattagagtgtaattaagggttcagtatcattcttttttatgaatactgtgcaacctattgatagtgatcaatttattaaaatataaagattaaatgaagttaaatgctaatcatatg

SEQ ID NO: 64222 - DNA, 464 bp, Glycine max
tagtggacacaaacttatatatcttattattacacaatcaataaaaatttcacaattaataaagtaaaaaaaatatttatcgtttattaaaattaatctgattttttaataagaaaataatgtaatttatttccttaaataatgatttgatcatatagagatatattaaatatttatataataaaaacaattcaatttttttaatctttttttataactaactaaaggaattttttttataaatatactttacatgtatttattattattattattattattattattattattattattatatttatatgtattttaaatatatttaacatttttaaaataaaactaaacgagtccaacctatccatctgaactttttttataactaaaactcttgatgttttagacggaatgtgaccacccattttcttatgaactgtttttagtttttattcttaatatat

SEQ ID NO: 64223 - DNA, 391 bp, Glycine max
  unsure (1)..(391): unsure at all n locations
gctggtaccaaggtttaatatattcatggaccaggngagctagatgctatcttgtgcgagcatgtgccacaaacatccataanatgactatatttcccatttccttgtggctttcattcctggatctgataatcaatttgagcgatcgctcaaccttgcgttgcaaccggtgtcgaacgatagaagcattcctcagatgaaattagagtctaacagtgtctaaatggaaaacaaatgaataactcttttactagtaaaaatattgtttcgacctctagacctctacaacaactacaccttcatctgattggtctaaccagaactgcatccgctagtggaaagaagtatggacttcgtatagtggaagactactctagaaggacatgggtta

SEQ ID NO: 64224 - DNA, 393 bp, Glycine max
  unsure (1)..(393): unsure at all n locations
tcatcttggtggagaagcaaccacttctatgtcttattccttaatggatggcgcctcctctcacgtgtatttctttgtcttccgctgcatctccatggtggaaaatcaccattaaaggaccccattgaagctcccagcctccataaaagcctcacaagcaagcttccatcatcgtacgcgtgatctttgattcgataggaaaccgngtgcataataaagtcatggagtacatatggcatggggttgaaggaaaaacacttgcctgtgtgagattttatacactatgagtgatttattgccagcttcagcttaacccgatgtttgccctgaatagccatttataagctaaatgacgacgtcctgcccttcattttctgttacaaggaagattac

SEQ ID NO: 64225 - DNA, 371 bp, Glycine max
  unsure (1)..(371): unsure at all n locations
tggccataaatcagaaatctacatgtgcacctgttactgttgcaagagtctgtggtctatgttctttcactgatcaccatacaaatctttgtccatctatgcagcaatctggagttaatgaggaacctgaaacctatgctgcannacattataatagaccaactcagcagcanaaccaacaacaacagaataattatgatctttcaaacaacagatacaatccaggttggaggaataatccaaatctgagataggcaaatcctccataacaacaatagcctgtccctcccttctagaattntgttggtccaagcaggccatatgttcctcctccaatgcagcagtagcaacaacaaagacaacaagcaact

SEQ ID NO: 64226 - DNA, 330 bp, Glycine max
  unsure (1)..(330): unsure at all n locations
atatggatacttcgttctgtttgaacaaaanatgccacccctacactgccctgtacaccttccatggccaacttggcaccatcggaggaccggttcaagataggctccactatttgcatgcgcatccatctccggccttggatggataatctccaccctactcagtctgtaattagatgttgtcagggcttcatcatcgctataactctcaccatatgctgcccgatacgctgtgcatgcacatacatgtgtgcctgcaaatgtggtgaggttccattgatccaacccaagcctctgatcctccaattgcaccctagtatggatggactc

SEQ ID NO: 64227 - DNA, 302 bp, Glycine max
  unsure (1)..(302): unsure at all n locations
gctcattattggtgagagtctcagtacatattatgttggtcttggtgtaaaattataactaccaccaactctgaaatcttagcatcagttttcttgcttcgccgaactttgataacttcattttgcactccatcagtggtccaattggcttgcatctatccatcttgaatttattaagcatcttctttgcgtagctntgcagtgaaatgaagatttcattttctttttgctgtacctcaatggcaagatagtttgacatattatcgaatccggtatctcaactccttatcattcttcttaac

SEQ ID NO: 64228 - DNA, 276 bp, Glycine max
acttccttttcaccacatctagaatgactgtgtttattcgtcgctgtggctacctcactggcttagctgcatcctctaaaagtatcctatgcatgcaggtagatgggctaataccaggaatgtctgctaaagtccatccaatggccttcttgtgcttcttgagcaccggcaacaacttctcctcttgctcaacatcaacggaagcagagatgatcactggaaatttgatgcaatcctaccccgcaagggcattggatagaagactccaagtagatt

SEQ ID NO: 64229 - DNA, 440 bp, Glycine max
  unsure (1)..(440): unsure at all n locations
taaatcttgttttatggttaatgttgtctctagaacatttccattggatttaatgatgaaatctgtgcattgttaggtgaaaaagagactaagttttgaattgcaaaatgtagcagttaggctaagctcagtagttgggctaagcacatattcaccgccaagcgcagcttcagcgcgcttagtgcanaggagaatctggcagagcatcagcatcaaatttgcatgctaagcgtgagatcagtgtgctaagcgcagtaggtgccttcagccaggctaagctcgagactggcgctaagcccaatttcacttactcacgctaagcgcgagggtggcgctaagcgcagcgtcgtgatttcaagcctatntaagccttcttgtgccagaatagggacaactttctacatcttttacacaccttntangacagcatgtagaacggc

SEQ ID NO: 64230 - DNA, 460 bp, Glycine max
  unsure (1)..(460): unsure at all n locations
ctcgccaacttagcatagcttagattcatctcaattgatcaagtttctttcctccaatggactgacagcgtaacaacacttgttcatattgtcttagaatattctcttgtgattcgaaaaccttaacatgaacatctttaggctttatatagaatccaaagcttcaattcattgagagatcccagttagtcattgtctaatagctttggtgcttgacacgaggtctctactttgcagagaaagagagtggggaccacaaacactntctgcaacatatcttcagagaagtacagtttgtcaaggtcgcctagttcttagagttgactttcaacatataaaatccaaagaaaggttaacaacataagacacaaggaattaagaatgtcaagacaagacanattaaatctttcctcttgtgcgctatagcacgagtttcttactaagctngtgggatgtactt

SEQ ID NO: 64231 - DNA, 399 bp, Glycine max
  unsure (1)..(399): unsure at all n locations
gcgcgaacattatctgtagngctcacttagtcccgtctgcctaccatacatcctgatgcaacatgcaagatggatatatctcaccaacccacccgtcgagtgagtccttctagctctggctgtaactttattaagccaccaaccatagtgtaaataacttaacctcatacaagaaccatgactaagtacgatgatataatatcatcaatgagaatatctgaattctaacacataatgcggaatgttaaacagaatgacctcatgaagcacctcgagaaagttgtaaacttaattctatctgaaactactaaataataaccttatgatatatacgctgatgaaccgtatgaggatcaattataatactacactactattgtaacaaaacatctatattat

SEQ ID NO: 64232 - DNA, 370 bp, Glycine max
  unsure (1)..(370): unsure at all n locations
ctactcaacaacaggtcctcatcgaattcaatatcacttgcattgagatcagaccccaacgtgagaagtatgtttttataagccaggacttgatactcaagagaagtaatgtccatttccttctgatacataagctcttcagagactgcaagagtggcctcagcatgacctatcttgtcctctgccattctctcgtagtgactcgcctccatcttcaccgcggacttctcttgttgcaaccgcactatcatgtacatggcttcactggctgcagctgctgaggcttgcctttcctcatccaactccggatatagcttctgcagaagttgctgtagggcgcggagtgtctncttcatggctcttatatcac

SEQ ID NO: 64233 - DNA, 447 bp, Glycine max
  unsure (1)..(447): unsure at all n locations
gatgagattatgcatatactngatactatatatctgcgtaataaaaactcaatatcattctgctttgctataatgcagcggggacacaaattctgtggttccagttactgccacaaggttttctctcaaccaccttaacctcaggaccagaactcgttggtatccatggtactctggtggacaggtattaatttattaattaaatttgaaacccatttcacactgaggcttatgtgttttgtggttactctacgttggtggatggacagaggtgtatgatggcctaactcttgcaacagtaagaggagctggccatgaagtacctttatttcagccaaagcgagcttacatctcttttaagtctttttggcaggaaatgaactcccgaaatatcgacatgtaacacgttaacgttaatcaaattgaacactcatgatagtatatcct

SEQ ID NO: 64234 - DNA, 224 bp, Glycine max
tactgaaatcgaacattagcagtgcactactgaaatgtaataccataaagataaatggtctcgatatacagaagtattataccactgctgagcaaaacaagccattaatgaagatgatttgtctaaatgtaacaatttacattaacataccattttttgaaataacagaatgtagtccaaaagaacaacagagcgcattatcaagcagctgttagcagagtcgt

SEQ ID NO: 64235 - DNA, 435 bp, Glycine max
  unsure (1)..(435): unsure at all n locations
gtcatgggatatataccgttttggttgtgttatggaaagcatttgcatcattgggtgttttattttgtttggttgtatgagctatacccgattacatagtcaaagcatgtgcaagttgaattaaaaaatttaaaaataatataaaaattagttatataataaaatattttaaataattaaattttaattttgttgtatgaacttatgtattgtttgttgtagggacatgtcttttactttggttatacaccacgagagttcctttgtgaaagacaattgttggaatataataaataagatgttgatgcatttaagaaaatgcaagacattgacacttggtcatatttcaaaggagttgatctattgaacgaatngggctacgactctagtaactataggttgtggtggaagcatagagatgctatatttgacaag

SEQ ID NO: 64236 - DNA, 185 bp, Glycine max
tgtgacccactagcttctcatagtagaacactggcagagtgtctaccatcatggtgaacatctctctctcaagcatgggaggagcaacatgtgccgccaaatccctccatcgctgcgcatattctttagaggtttcaccctctttcttaaacatattctgcagttgagtaccgtcaggagccata

SEQ ID NO: 64237 - DNA, 434 bp, Glycine max
  unsure (1)..(434): unsure at all n locations
gctcaatgagcaaggggaaatgatagtctatcatcttgtaaacataccctnttctataggagactactatgatgacgttttatatgatataatccttatggatgcagggaacattttgttgggtagaccatggcaatttaacaagaaagacatccacaatggtctcaccaatgaaataaccctcacccatgtaagcaaaaagctcaaacttgttcccttgacaccttcacaagtggttggggatcaagtacaaataaaactcanatgggatgaggaaaataataaaaaaaagaaaagaagaacaacctttaatggttaaggaggagtgtaaggaggtaggtgtctcctccaataggttagctaagaagaanagtcattntgcaatanagaacaacattaaagacacttcccttcttatgacacctcacatattc

SEQ ID NO: 64238 - DNA, 470 bp, Glycine max
  unsure (1)..(470): unsure at all n locations
tgcgaaagccccactccatcattaggattagtacctgacatctcaaacaaacaaatcaaacgtaacaagacaattatagttgctgtttgaatacctcacccactcaagtgtatcacacaattatggcttttctctaatgaaacactcttgccttttaccactctaattccccttgagttcttaggcaattcaagagattatggccacaacaaagaacaattcaccaatatgtgtaaggtaaggctagacaaggaaaaggttaaccaagaaaaaggctaacaatgtttttaggcacaaatgaaggaaataaaattcagaatntaggaattcaagtaacaatccttcatgcaaccaatatattaccttanagagtttttttttttaagttcttcaagcatgaaccattcagccccaatttttttttttttaattttgctatacgaaattctgcttctttntttttttttttt

SEQ ID NO: 64239 - DNA, 367 bp, Glycine max
  unsure (1)..(367): unsure at all n locations
tgagctacgtgggagtacgtgagctcagttggaggtggacaacaggggatggtgggtttatgcgcgcattgtcgatgtggaaaacttgttgtgtaccatcgcccgaccgccacctagtaccacatgtgatgggtaccccataatcctacaagcttgagatgaggaagtgtngaagggtgaaacttcctgcttttattgttcaccacagagtggtacctggagatatgtcgcggnggtcaggagaccttgnggacgtcaggtggtgtgctattgcccaaaaccaagcttgaccaatcccgacccaacccgggcatagtcggtcagtgagaacctgtgatgtacctaagcangcgagcttctggcagtc

SEQ ID NO: 64240 - DNA, 433 bp, Glycine max
  unsure (1)..(433): unsure at all n locations
ctcgattnttcccaagttctgtaacaagcttagaactatatacttgttcttctcttaattgtctgtgggcttggcgaccacgatcaacaaagtactttcggcacctactatatgttgacttgaccaacgctgttattggaatgctgcgacaatctttcaacaccttattcacacattctgataagttggttgtcatgtgaccatatcgtcgtccagatgtatcgtaagccatgctccatttttcctttgagattcgatcaatccatcttgctatggctggactcaattgatgaaatttttctaagttttgatcaaacacatgcttgcaaggagtgtacgctacatcaaatttgttatcatcaaaagttgtacgtagacatgaaactcanataaattaatgtataaaataaccttacccaatttcttgaacatc

SEQ ID NO: 64241 - DNA, 145 bp, Glycine max
  unsure (1)..(145): unsure at all n locations
gcttgccacccagctcgcccaagcgagctcatcnctcctatgcgagcagggttgcttactccagaagcaacagccttntggaggaatcttctggagggcccatgagggcctgggtgctatttgcacccttctttttactaagtac

SEQ ID NO: 64242 - DNA, 448 bp, Glycine max
  unsure (1)..(448): unsure at all n locations
tgagctgaccgngctgacagggaagatatttttaccttagctgtctattnactatctctgctagcttgatattgatcgccttgtcttgaacaagttattttatgatttgattttgtgctttngtaactcgttgcttcctggttagatagtcatgctcagctttagtataactttgcattgaattctaatgctacaacttatgttttggttatatagcanttggtaaagatggccaattgattttatatacccatcaaataattcgtgaagaatgtagatagattgttttagaacttgtatcgttgagggatatattagttgtttttgaaaagtgggatcgacacccactaaattgttcggtttttcattnttaacgactaaatgtgtattcaagaatcactgtaattttcatttgaacctatcatgactaatagtgtgtatttatata

SEQ ID NO: 64243 - DNA, 278 bp, Glycine max
gctacatgagcatgctgttctaaacagagcctatcaggtgccaggaggggtcatccgatccagtataatccattggagagcgatgcttatcatgctgatgctccttctttgagacccttgtagaggatacgcccatggttgaatggaaccacgcaaagactcaaagcccaggggagctcgacattggaggaactacaccggatagaaccttctcttcccgtctggtgaacgatacttgcttgtatcgcagttacagaagctggacacatgcgcttatt

SEQ ID NO: 64244 - DNA, 196 bp, Glycine max
tcggcggtgaagcgcggagtttctgtctgattccctaatggatagtgtctcccctattctcatattcgttggctccacgctgcatctccatagcgaaaaatcaccagtgaaggacctcatagaaactcaaagatccagcctccatagaagctccacaagcaagctttcataactttttacacagaggactgatact

SEQ ID NO: 64245 - DNA, 418 bp, Glycine max
  unsure (1)..(418): unsure at all n locations
tctanaggctcttctctatacatgttgcaagagggtgaccttgagtacaaagagtgaaagggagagtgatgatacaaagaggcatgaaagaggagaggaagcttgaaatatcgaaatctttaatcngttcgtaaaccgtcttagaaggacattcttctaagactgttntgcgaanatcgtcttcaaatgacatctatctaagatggttntgctgaaagcatcttagaatgacaaccattctaagaatgttttcgcaaaaccgtcgtagaatagttatatttatttacaaaaatatcattgtatttctttctaagacggggtttcatcaatcacacgtaaatcaacgtcgtaaaaacattttctagtagtgttaattcgaattgtatcataatttaaataatagagtctaccatatctc

SEQ ID NO: 64246 - DNA, 424 bp, Glycine max
  unsure (1)..(424): unsure at all n locations
ccgaggaatgctaccacctatattactggaaagcggnttctaatgactcctctgcggcttccacataaggcatagaggatgggcagctcaccaagatgtcttcctcgcctgatacgatgaccagatgcccttccactacgaatttcaacttttggtggagtgttgagggaacaactcctactgagtggatccacgggcaccccaacagacagctgtagggggggttaatatccattatttggaaggtaacttgacaggtgtgagggcctatctgtactgngagatcgatctctcccctaacctctcggcgggtgccgtcgaaggcacgaaccaccattgaactcggctttaagtgggaagcattgaatggtaattcttcaaagtgctcttaggcatcancgttaaactggaaccattatcgatg

SEQ ID NO: 64247 - DNA, 448 bp, Glycine max
  unsure (1)..(448): unsure at all n locations
gaccaaaagcaagaaattaggtgcatatagagctactgacgtcttggaattgatacatacagacatttctgggccatttcatacaccttcatggaatggtcaacaatattttatatcattcatagatgattactccagatatgcatacnttgttattatacatggaaagtcacaatctttggatgtgttcaaaacatttaaagttgaagctgaaaatcaactcaacaaaagaataaagtgtgtcagatctgactgtggtggtgaatactatggcagatatgacggttcaggtgaacaatgttcggngccttctgccaggtacctagaggaatgtggaatcgtcccacagtacaccatgatggngtcacctagcatgaatggtgtggttgaaagacgaaacataactcttaaggatatggtaagaagcatgattngtcattctaactta

SEQ ID NO: 64248 - DNA, 451 bp, Glycine max
  unsure (1)..(451): unsure at all n locations
tcttgattntgtctaagttctgtaacaagctttataattantatacttnngtccttcatttaactgggtctttgggcttggggcggccacgaatcaacaaagtanctttcgacancctactatatgnnttgatttgaccaacgctgttatcggtatgttacgacaatccttcaataccttatttatacattctgagaggttcgttatcatgtggccatatcgacgtccttctctatcataagccatggtccatttttcctttgaaatgcgatcaatccatgttgctatggctggactcagttgacgaaatttttctaaattgtgatcaaaaatatgcttgcaaggagtgtagcctgcatgaaattagttagcaacaataatctgaagtatacatgaaacttatattaacatgaccatgataaatgaaatcttacccaactttttcaacatt

SEQ ID NO: 64249 - DNA, 395 bp, Glycine max
  unsure (1)..(395): unsure at all n locations
tgcctaatccaattaaatgataaatctcctcatgatacatacgaaattcaaaactttaattntaaagaaaagaagctagagacttatagagaaattggtgggcaagtttcaactgctttttaatgtaccataatccatccaaaaaaatattacaaaaaagaatctaacaattaagtgaggggtgaaaaaaaaagggaaattcttcatgtatagtacaaaacttttaacatgaaaattcaagttaatcaattacaatgtaaattagttttatcatttctctcacacgtgtgtagtcatgtaagaatttcactatagatatttcataatttataattattcattgtgaataaaagttctcttgaggaggaaaaaagtangcaatggcaaaataaaaa

SEQ ID NO: 64250 - DNA, 374 bp, Glycine max
  unsure (1)..(374): unsure at all n locations
agctntataagtgcgggtctgggagactatatgtatgtgttcgcgatatgtgaagatgatgttccaagtactttggatttggtacgaccatgctctcctgatttccagctgggaaattggcgagtggaggaacgccccggcatttacgcaacaagcataatgtaaacctttacggttntaaaagctctatagttgggcctaggctttagagttttcattttgttaaagctttgtgtcttttgtttttgaatttataatacgaggatctttcttcatctgttcctggtctctacccattctcattcatttgcatgtttacttcttcttctaaaacggcagattcgatgacgagtcccccggaggtactaatacct

SEQ ID NO: 64251 - DNA, 479 bp, Glycine max
  unsure (1)..(479): unsure at all n locations
catcaagtggtatcagagcacaagagcttcaactaggttctccttanacctccattaattntttttactttaccttctcttccattgttgtttcttcattttttctccatgtatctcctcacatgtcttgtgctaaatttttttaacatgattctttagagtttccaccgattaaacttgctatataagctagatttgattntctatggttcaaatttcttgttcttgttcttgaaccatgaattgtgttgagtttaggttcctttgagttttgtcttgttattttttgtggctgaaacctaaatcataaaattcttaaaaaaatattaaagtagaagaaaacctcaaaaatctagagtgacttgttaacctatggtagttttttcatagaagtcatgcctagtcatgaaacttgtcacataagaattcttatggtgngctgattttattttctggttctttgctaactcattgtcatg

SEQ ID NO: 64252 - DNA, 464 bp, Glycine max
  unsure (1)..(464): unsure at all n locations
gctntgagcatattcaaacgacaatattctttgtatcttatgtccganngngncccataggatatcatgacgctcggaattgaaaacggaagctcttagaaaaatcaaacgacaataacttttaactcgaatgtccgattgagccctttaatatatcgagacgctcgaaatttaaaacagaagctctatgaaaagtcaaatgacaatcactntcaattcggatgtctgattgagtcccgtaatatatcgagacgctcgtaattgaaaactgaagctctgagcatattcaaacgacaataacttttgactcggatgttcgattgtgacccgtatgatatcgagacgctcataattgaaaacgaaagctctgagaaaaatctaacgacaataacttttaacacggatgttcgatggagctccgtaatatatcgagacgctcgtaattgaaactgaagctctgagca

SEQ ID NO: 64253 - DNA, 412 bp, Glycine max
attacgagcatctcgatatattactggacttttcttaactccgaattgaaagttattgtcatttgactttttatagagcttccattttcaatttcgagcgtctcgatatattacagggttcaatcggacatccgagttaaaagttattgtcgtttgatttttctcagagcttccgttttcaattacgagcgtctcgatatcctacgggacataatcgaacatccgactcaaaagttattgtcgtttgaatttgctcacagcttcagttataaattacgagcatctcgatatattactggactcaatcagaactccgaattgaaagttattgtcatttgactttttatagagctctccgtttcaatttcgagcgtctccatatattaaagggctcaatcggacatccgagtta

SEQ ID NO: 64254 - DNA, 387 bp, Glycine max
  unsure (1)..(387): unsure at all n locations
atttactttcatcagctgtgtcataatctcgggaccagntctccatttatgattttatgtgcagagagcatttcgtgaattacgctattaactagtaaagttattttattaacaattgtcctaaacatatcaattaaggaattaataaatgaaaaatacactaaactgttcaatccatatttaaagtgtatgagtggaaggagagatagaaaagataaaattaaaggaaaaaaacattgttgagtgtgacaaatgataaaaagaaaaaaatatatagtcaaaatgggatggaaaacaaatcgaatgtacgaatataataatcctaattatataagaanatatagagaaaanagggtatccatgtaacaagtttttaattatggtaaa

SEQ ID NO: 64255 - DNA, 389 bp, Glycine max
  unsure (1)..(389): unsure at all n locations
actaacctaaggactcaaagccaatgttgaagatctatgtgatgattttaattcacacaatttgcatggtcaaatttgaaagggttctcatgatccaattgatgattntcttgcactctaatttgctaataaaagagtacacgaaagatctgaaaaaccatgaacttgaaggcaggccggttgcttcattgcataattgaagttgttacttttaccctagtattatttgggtaccaataccaagataatgtattttcttctttaaaaaaaaaaaaacttatagccaaactgccaaagtcatattctctcgtctctttctctatgggggtatctttggtgttagtagcttaattaggtgcaacaaaagaaacgaagtgttggtccccaat

SEQ ID NO: 64256 - DNA, 340 bp, Glycine max
aaactttagagctagaatgtgatgcctccggagtgggagccgccgctgttttgttacaaggtgggcaccctatttcttattttagtgaaaaacttcatggtgccacccttaattaccctacctatgataaagagctttatgccttaataagagcactccgaacttgggaacattaccttgtttccaaggaatttgtcattcatagtgatcatcaatcacttaagttcattagagggcaaagcaagttatacacaaggcatgaaaaatgggtagagtacctagagcaattttcatatgttatcaaatacaaaaagggaataacaaaatgtggtagctgatg

SEQ ID NO: 64257 - DNA, 441 bp, Glycine max
  unsure (1)..(441): unsure at all n locations
gctagacgaaatatatatgggaatagaggtaacaatggcggtaatgatggaccgaggcagaaccgggttgagggagtaaagctcaatgttcctcccttcanaggtagaagtgatccagatgcctacctggactgngaaatgaagactgagcacgtatttgcctgcaatgactacactgatgcgcagaaagtcaagctagcagcagctgaattctccgactatgcccttgtttggtggcataaataccaaagagaaatgttgagagaggaacggcgagaggtagatacatggactgagatgaaaagggtgatgagaaaaaggtatgtgcccactagctataacagaaccatgcgacaganactccaagggctgtcccaagggaatntaaccgtggaagaatattataaagagatggaaatggcgttagtgagggccaacatc

SEQ ID NO: 64258 - DNA, 428 bp, Glycine max
  unsure (1)..(428): unsure at all n locations
atccgagtaaaaagtaattgtagtttgaatttgctcagggcttcggtattccatttcgagcgtctcgatatattacgggactcaatcggacatcagagtaaaaaagtattgttgtttgaattgctcagagcttcngcattccatttcgagcatctcgatatattacgggactcaatcagacatcggagtaaaaagttattgtagtttcaatttgctcagggcttcggtattccatttcgagcgtctcgatgtattacgggactcaatcagacatccgagtaacaagttattgtcgtttgaatttgctcagagcttctacattcaatttcgagcttttcgatatattacgggactcaatcagacatccgagtaaaaagtattgtctttgatttgctagagctcagtattcattagagcgtctgaatata

SEQ ID NO: 64259 - DNA, 431 bp, Glycine max
  unsure (1)..(431): unsure at all n locations
cgacataacttttactcggatgtttgattgattcccgaaatatatcgagacgctcgaaattgaataccgaagcgctaagcaaattcaaacgacaaaaactttttactcggatgtctgattgagtcccgtaatatatcgaaaagctcgaatgtgaatgtagaagctctgagcaaattcaaacaacaataactttttactcggatgtctgattgagtcccgtaatatatcgagatgctcgaaatggaataccgaagctctgagcaaattcaaacaataataactttttactcggatgtccgattgagtcccgtaatatatcggaacgcttgaaattgaatgtagaagctctgagcanattcaaacgacaaataacttttactcggatgtctgattgagtcccgtaatatatcgaaaagctcgaaatgaatgtt

SEQ ID NO: 64260 - DNA, 402 bp, Glycine max
  unsure (1)..(402): unsure at all n locations
gcagctgcgctgactttatgtgtgcgattgtctttttttctacacaaganaatgggtactgtttttttcgttcaatattcaacactttctaattntaatttaacgccgggtttcggaaaagataaagagaatccccaagtgtgtggtattatgaattactatgaatttatcatgtgggtgaataaaagggaagacaaataatatcttacaggtaagattgccatagtctgaatagtatttgatcaagtaggtatttgatttaattctcttaagtgggtattattattattatttttaaatatttacaaaggacgttttcttttcaaaattaattatagtcacatattgtttctaatataacgtgttaaaattatggtgtatattttttggagagaagacgag

SEQ ID NO: 64261 - DNA, 318 bp, Glycine max
gcttcacacgttctttattttatacattctaatatctgtgggtcattttatacaccttcgtggagtggatgacaatatttcatatcattcatagacgatcaatccagattgcatacttgcttcttatacatgataagccacaatctttggatgtgttcacaacatccaaagtttaagttgaatatcatctcaacaaaagaataaagtgtgtcaaatctgacacgggtggcaaatactatggcacatatgacagctcaggagaacaatgtgtggggcctctttgcaggtatctagatgaatgtggaatcattccacaat

SEQ ID NO: 64262 - DNA, 446 bp, Glycine max
  unsure (1)..(446): unsure at all n locations
atactaagcttcacatttcccgcaatattgcaagtagcacccttatcttttatggtttcccatggaatcaacaatcgagacatggtagcttctaaatgtttgacaactcgaacattcaacaccttccatgggcaaagtgttggtcccagttcactagaagtgagtggaaaaggaagatatggtggaggacttttgccatgaaatggtttcagaagagcaatatgaaatacaagatgtattttagcagactcgggtagttgtactttatatgcaacagtaccaattctttcaatcactggaaatagaccaaaatagtgcatgcctagcttccgatgcttcctcaaagccactgaatgttgcctataaggttgtagcttaactaataccaaatcaccaaccttaaatngcagatctcatcttttcttatcatctagcatcttcatata

SEQ ID NO: 64263 - DNA, 467 bp, Glycine max
  unsure (1)..(467): unsure at all n locations
gctgcagctttatataagctgaaccatttatcattattacaggtgagtttatcagaaaataaagttatctctttattttagtgagagtgattctcctaaattattaagtgattcaagaacaccctggcttgatcaaaagacttttacaacctttgtgtgttgccctcgccggaaagagtgattatntccttcctttcatcttcaaccttgttctttcanaccacaattccagaaaatccacttctgcccagaattatctcgtggtcataactcccgttttacgcgctcaaattaagtgattcttgagcctaaatngaatttcaagacgagacctttcacctcgntttggaatcacctcanttggagccctgtagcttgagtctttgccatttctatatttctggctagccaccacttaacctacgttttctcatctcattattccattttatgccaaaaccacctta

SEQ ID NO: 64264 - DNA, 438 bp, Glycine max
ccagctcgcccaggcaagcagggttgcttcctctatattaacagccttctggaggaatcttctggagggcccaagtgggcctggttgctatttgcacccccatttttactaagtacaccccctgccttttttttgtgattcttttttcgtaaaggtacggaaacttacgaatttcgtaacgatacttgttttctttccgtaatgttacggaaccttgcggattacataatcatcccctttttttacttacggaatgttacggaacctcactaattgtgcaacgatgcttccatttgatttccggtgtgtcacggaaccttacggattgtgcatcaatatcttctttggttttccggcatgtcccagaattcacaaattgcctaatgatgggtgccaagcacctcacaagggaccaaacaaagttgcatgtcatcaagc

SEQ ID NO: 64265 - DNA, 307 bp, Glycine max
  unsure (1)..(307): unsure at all n locations
actgatagaaaatacagagtaatagacattgaagaaggaacaaaacacaataaagtaagatcatccaatcccaaaacaacatatatactccaaagcctaaaatctgaaatgctacgactactaataccagtatttaaatcactntcttttgctggccgtgagatcacgaaaataatttcttcaggtcatacatctttcagtgagatagacataacatatgctccgggtgtaacagtgactacactccaantttaacaaacatcattaaaccataccctaaatgacaaatcaacggcggaaataatga

SEQ ID NO: 64266 - DNA, 426 bp, Glycine max
  unsure (1)..(426): unsure at all n locations
gcttatgatggggatacaaatggtgcctaatttggcatgcttccacaccaggatgcagcttccctctcagttgcaatcttgaagaanaaattccgtgggcagattttcttgggttgtgataatcatcctttgtctaggttgggtgctttctctttaacttgtcaagtaacattctgattattcttgcaggatatttctaccagtctatcagattgttgtgattatatatatatatatattcactttttggttaaaagaacaatctcacatccacaccgctgctgtgttttcaggcaagaaatgatggatctggttaataaaagtgggaaattcagtnaaaaanttgacgaagttactggtgagttctatcatagtannaaaccgtatatgganataatactatcattacttttatcatgttaccta

SEQ ID NO: 64267 - DNA, 476 bp, Glycine max
  unsure (1)..(476): unsure at all n locations
cactcattgagttattttgtactttttctatcannatattactatttgtgatagccaggagtgactcggtgataaagaatactngggtcttaatcgcatggaaagattaagtgtaatgctaggagtgaccatgagaatactcattgtagtcagaagtggcatagaanatacttggttgtaatcaaatatttgatcaggggaaccctaaaaggtttaaaggagaactggacgtacctaaagagttgggacgaaccaatataaaaccgttgtgttttcattaatggttctatatataacttgtccttttctttaagtcacttccacactatcatatccaagttttgcaaactgattntttcaaacacaaatcanatcctttggatgaaatccttggtccatngatatctgctntaagaaaagtcttttatagttntcanaagaccaagtttaattcatcacactattcacccctctcc

SEQ ID NO: 64268 - DNA, 449 bp, Glycine max
ggaccttagatactcagcttacaccattgcatctccaaatatgtttgaatcatgcatttccaacacaacaatgccatatggtgtccacaagagatcaattcatgattatggaaacattttcaagagattaattaaccagtatggtatgaccaaaatgatgattcactacttgcataactcctcacggcttaagtgtttcccttgaggtaaatatttattgcatttgcaatccactcattggaaagtgagaattcactactacaatattgatatttaacatcaatttttttggacattcaacatcgatttcgaattgatgttgaaacgatcgtcgttaacagtagattatttttaacatcgattataaaaattaatattaaaacccactatataatatcagttttctccaaaatcaatgtagcatagtgacaaatagagaaaaataaatg

SEQ ID NO: 64269 - DNA, 480 bp, Glycine max
  unsure (1)..(480): unsure at all n locations
agaatcaagtttcacagaatttagtttcagatcattcaagtttcaagattcaatcaagtttcaagaatcaagattcaagaacaatcaagatcaagattcaagactcaagattcaataatcaagagaagactcaatcaagataagtactaaaaaagggttttaaaacattgagtagcacaagaatttttcacanaatcttntacctaagagtntttctctctggtaatcgattaccagaaggtagtaatcgattaccagtagccaacattggttttcaaactgatttacaaagntgtaatcgattaccatgaccatgtaatcgattatcaatgttttaaaatgttagaattcaaatttcaagagtcacaactagtggataaacattntcaaatcattctaaacttgtgtaatcgantacacaatactggtaatcgattaccaatgtttataaacattntgattttcannattaaacatgaa

SEQ ID NO: 64270 - DNA, 377 bp, Glycine max
  unsure (1)..(377): unsure at all n locations
agcgctatccgcagactcaacagaagtcagttgggattgaaatcagactatgtacatgaatcttacacccagtgggttattgataggaccaagagctttggcctaccctaccgcttacctagatacctatcgtccaccatcccaccatcatccttgcctatcccctttgatactaaggaagagtttcatgaacaattaaccaaagaaaggcaagaaaaagaaacttggaagaggagatgccaggagctcgagcaagagaatgagactttgaaggggaagatagcccaacagagccgtgagctttntatccagaaccagaggatggttgagaaggacgacttgcttcgtcggaaagacgctttgctccaccgagatgc

SEQ ID NO: 64271 - DNA, 460 bp, Glycine max
  unsure (1)..(460): unsure at all n locations
agcttgccgcccagctcgcccaggcgatttttgntgcttcctccagaagcaacaaccttctggaggaatcttctggagggcccaagtgggcctgtgtgctatatgcacccccctttttaccaaatgcaccccccttttctatttttttgtaattctttttccgtaacgctacgaaactttatgaatttcgtaacgatacttattatccttccgtaaggttacaaatccttacggattatgtatttactctnttttacctttcgaacaagttacggaaactcacggattgcgcaaaaacacctctgtgcgacttccgccacactacggaatttcacggatcacgcaagcctgcttccttttggatttctgagacgtctcgngacttcatttattgcatgtcattcaagtataatccccggacgaattatggattgacagtgcccttttattacgtctcatc

SEQ ID NO: 64272 - DNA, 455 bp, Glycine max
  unsure (1)..(455): unsure at all n locations
catcagaccacttccaggtgctggaactacttatttggacttgatggggcctatgcaagttgaaagccttggaggaaagaggtatgcctatgttgttgtggatgatttctccagatttacctgngtcaactttatcagagaaaaatcagacacctttgaagtattcaaggagttgagtctaagacttcaaagagaaaaagactgtgtcatcaagagaatcaggagtgaccatggcagagagtttgaaaacagcaagtttactgaattctgcacatctgaaggcatcactcatgagttctctgcagccattacaccacagcaaaatggcatagttgaaaggaaaaacaggactttgcaagaagctgctanggtcatgctccatgccaaagaacttccctataatctcttggctgaagccatgaacacagcatgctacatccacaacagagtcacac

SEQ ID NO: 64273 - DNA, 396 bp, Glycine max
  unsure (1)..(396): unsure at all n locations
gcttgcanaacaagtttctaaatatgtttttgtacaattatgaagaactaactaactccactaatatgtatagtggctactcagaaagaaaggatgggtcttgattangtccttctaatctacctaattaaaataattacaaaggcaaagtccaaatttgtagtccaattattcaagtgcaaagactatgacttccaagcccaatttgaccctcgaaatggcagaactagtccaagcttatttctaagaaaattgaaaaaaaaattcttaaatttccaaggaatactcagatgctccatttggagttttgttgtgtcctatagaccatgcacaagatagataggtcaagtaagcgcataatccgaaaataagcaacaattatcaattaagcccaat

SEQ ID NO: 64274 - DNA, 405 bp, Glycine max
  unsure (1)..(405): unsure at all n locations
gctagagcttaactacacacacccttctattaactaagctcacctccttaagaagctntctagagaagctagagcttagatacacacacccctctaatagctaagctcacctctttcagatgagaagctagagcttagctacacacacccnctataatagctaaactcacccccttgcaaaaatacatgaaaatacaaaaaattctctactacaaagactactcaaaatgccctgaaatacaaggctaaaaccctatactactagaatggccaaaatacaaggcccaaaagaaggaaaaacctattctagtatttacaaagaagagtgaacctaaccttggcccatgagctcaaaaatctaccctgatgttcatgagaatcctagggccttctttagcagctcta

SEQ ID NO: 64275 - DNA, 438 bp, Glycine max
  unsure (1)..(438): unsure at all n locations
atcaatagacctcctatctttaatggagagcggccccactactggaaaacccgaatgcaaatttttatcgaggcaatagatctaaatatctgggaagccatagaaatatggtcttatatacccaccacagtagaaagagtttcaatagatggtagttcatcaagtgaaagcataaccatagaaaaacctatagatagatggtctgaagaggatagaaaacgagtacaatacaacttataagccaaaaacataatagcatctgccctatgaatggatgaatatttcagggtttcaaattgtaagagtgctaaggaaatgtgggacactcttcaattaacacatgaaggaactacagatgttaaaagatctaggataaatgcactaactcatgagtatgaaatatttagaatgaatgcanatgaaaatattcatagcatg

SEQ ID NO: 64276 - DNA, 433 bp, Glycine max
  unsure (1)..(433): unsure at all n locations
ttatatacaaaagttagtcgtataaagttactattcaaactcccccaaatttacagttntgcttgtcctcaagcaaagaaagaacagttcacttgtcctcaagagacaaagatagtggccaatcaaaagaaaatggtgtttgaatcattaaggacatcaaccatatgaactgaatatcatggaatgcttaaatcaattacttctcacaagcatgctatttttcaaagataagagaacaagtattagagtcacaactgaaataagctagtaagcatgacaaaaatcaaggaatgatcatctaccaaaacctcacagtcattgtttcactcaaactctagtgtttaggcttattccatcataaacaaccaacacaagttccaaccttngcatttcatctnctatcatacaccaatgaacactcaaatattaatct

SEQ ID NO: 64277 - DNA, 430 bp, Glycine max
  unsure (1)..(430): unsure at all n locations
cttgaggannttggtcttgccagtgaaaggatcgatgtgtgtctgnaaaaaggcaaatttagtcatcctgcttggacgaatgagaaaactgnggcaaatgaagagggtgagaaagagggagaaacccatgctgtgactgccattcctatacggccaagtttcccaccaacccaacaatgtcattactcagccaataacaaacctcctccttacccaccgcccagttatccacaaaggtcatccctaaatcaaccacaaagcctgtctaccgcacttccaatgacgaagaccacctttagcacaaaccaaaaaacaccaacaaaaaggaattttgtagcaaaaagcctgtagggttcaccccaaattatgttgtcatatgctaaacttgatcccatatccactcaataattcaatggtagccattaccccc

SEQ ID NO: 64278 - DNA, 433 bp, Glycine max
acccagctcgcccaggcgagcaaggttgcttcctctagaagcaacagccttctggaggaatcttctggagggcccaagtgggtctggttgctatttgcacccccatttttactaaatacaccccctgcccttttttggtgattcttttttcgtaaagttacggaaacttacggatttcgcaacgatacttgttttctttccgtaatgttacgaaaccttgtgaattacataatcatccctttttttgacttacggaatgttacggaacctcactaattgtgcaacgatgcttccttttgatttccggtgtgtcacggaaccttacggattatgcatcaataccttcttttgatttccggcatgtcccggaacttcacaaattgcctaatgatgggtgccaaacacctcacaaggaccaaacaaaagttgcatg

SEQ ID NO: 64279 - DNA, 370 bp, Glycine max
  unsure (1)..(370): unsure at all n locations
attcttttgtcatgatccctatctatatattttctgttaactaaccctgtagatattaatttcacaatggaagtaaatgccattagaaatctagttgtctaattttttataattagccaatggacaattgtactaggatactctagttgataaattcataacccttgccgatggcaacgcggnggtggagccggagagctcgggcttgcgattccactggaggaggacaaaggggggtttgggttttggaggggaagaggggagaatggggcggaggacgaatgcggagttgggggcggaggacgaatgctgagttgggggcggtggtggcgccgggaagaaggtggagagatgatattgtgaaggggag

SEQ ID NO: 64280 - DNA, 374 bp, Glycine max
  unsure (1)..(374): unsure at all n locations
atactaagcttagcaatggcatctntgagatgatcaacggaagtctgcgttcacttggattccgccatngatggtcaatgaaagcaccactgttatcttggcgttcgagggccaaggaaccttcataactgagaaggagaaagaagtctcgaaaggaactttatatatgattcacgtgctgaattacaaagaatttatatgcgcgtataggattcatcgaagctttctaacaactaaacaactaacccttctaacagaataacaaccagattcagtctctgtctactgaagctaatatgtgaaccatcacatttgtcacgtgcttcattctgcatggccataagtattatgtttcaagtatgctggagtgaacc

SEQ ID NO: 64281 - DNA, 359 bp, Glycine max
  unsure (1)..(359): unsure at all n locations
tgtatagcagttcattgagaagatggcctggcttggagcccaaccttcttttgtgggggataatgaaagttttacagcccangcacctcaacaacatgagccagaaccagaaaacgatcactcatctgaagccaccatccctggagttgatgattttgccaaaagaagaatagagacgagatccaatgaggctgctcatcctggaccagtgccagcatcagctgatgcaccatttcgagtagtggatccatcttcacctcagcatgcagcagacgcttccactcatgtcttagagatacatgagggtcagaccataccagtcctgcccttggatacttctcnctctgctactctaatat

SEQ ID NO: 64282 - DNA, 435 bp, Glycine max
  unsure (1)..(435): unsure at all n locations
gggcgagacgtttatgaaggtttcgcctccaattctattttatactcgtcaaatttagaatgataaagtttcacattcattttcgaaaggatccttcggtctaaaatattatcgatatatcggttccaggcttcctctgattgaaatctcctattatcattctgatcctgtggtctagaatcactactcttatgtttcttagaggccatctacatataaaggaaccaaacaattaatcaggacacagntattcaaatttttaaaactgaaaaagacactggccgcttagcaagacatggtccgcttagctggccttngtaaaaaaaaaaaaaactatcgcttagtgacatgtgaagccacttagcggaagttgtagaaattnttagattctgtagaaatggcttagcgggaaaagcgcccgctagctgaacatgt

SEQ ID NO: 64283 - DNA, 418 bp, Glycine max
aaagcaaccgaccaatatataatcagatttaacaccttccaaccacccttttatgcaagtgatcatcctttattcgatcaacatatggcatgtcttctttgaggattaaaggtcttaatacaataagatgtcttaatgcatgcctcaacttttattcaaccagtggtttgcatgccttctggagtaactcttaagaaagaaattgaataattgattgtctatcattaattgttatttttatgtatatgttgtaaatgtttaaatattataagtaagaatatgaactgctaaaacatatttaatcattataccatatctgtacacaagaaataatgtattattcattatagatatgattcacgtactttaacaagatatatataatattataaatataaacgcatatatatcgtaatga

SEQ ID NO: 64284 - DNA, 312 bp, Glycine max
gacaaaccgaacggagccaaccaggttatatcaagaatatttgccaccccgcaataaaagaagttcaatgggcccaaacaactcagagaggagtttgccagtacggtatgccccacaagttctcaaatggcaataagttgtctttatctttgttttgattctgttttatgaattatcatgggaatatactactctatttctatatagaattaaaagattgtcttaccattggaatcagtaattctttagccaaatattatcacaactggtgattctttgagtgcattactgattatatactcacataagttt

SEQ ID NO: 64285 - DNA, 341 bp, Glycine max
  unsure (1)..(341): unsure at all n locations
ataagattagagtcatccactggctagaatgaaacatctatggaaatgaatgcagcccatgcatcctggttcaatgtgaatntggaatcagcattgattctcatagcattctttattgccacaaaaaaacttaatggtagaagtggaaatagaatttatgatatatggtttatagaattttcacacctgaagaattgagaaagccttctctgctacatacttctgaaggagtgttgctcctctttgctgcagtttgtctgggtgcatgcataaccttgctatctgataagccttcttcacctgtgagctctctaatagactcttatgaggaatagcatacc

SEQ ID NO: 64286 - DNA, 440 bp, Glycine max
  unsure (1)..(440): unsure at all n locations
tcttaaacaccaaaataattcttaaacactaacaaagtccaacacgcttggcacatgactggatttcttaagtatgctaacaaagatttgattccttaatcatcagtattgaaaatattntgttacaaaagacaaaactcacttcagtaatctctattacgagggttggtctcatgattctcagctatgagaatattttgattaaaaaaaacttaagtagtatcacatgccaaaaaagtataattctaaattatttctctataataaataacctattcatgatcattaaacgcgcaaattaattagcatgtcaatttatgtattagaacatctttaatggtcttcatatatgcagactaatctatgtcactcaaatcttaaacaacttaaattaatttctctttcatgagatttactattaaaaaaagttcttaactcac

SEQ ID NO: 64287 - DNA, 413 bp, Glycine max
tgatgaatcaagatagagtcaaagtattttgatgatgatgacaaaatgctcaaaagtcaagaacacttcatgataacaaagatgatgatctcaagaatcaaagaatgagttcaagattgaatcaagaacacttcaaggttcaaaaggaaatttaatttcaagaatcgagaatcaagtttcaagaatcaagttccaagaatcaagatcaagattcaagaatcaagagaagactcaatcaagataagtattaaaaagttttttcaaaaactgagtagcacatgaattcttctcagaaccttttaccacagagtttgtactctctggtaatcaattaccagattattgtaatcgattactagtagcagaatgggtttcaaaaagttgtcaactgaatttacaacgttccaattgat

SEQ ID NO: 64288 - DNA, 415 bp, Glycine max
  unsure (1)..(415): unsure at all n locations
gactataccttcgaccgaacacggccgtgtttctgtctagtcncctattcaaggcgggttgcagcaccggctccgcttccctaactgtactggaggcggntgtggtggctttatcctctatggttttctggagttttaacatgacctccgagatggaagccatttgatcttttaaggccgatagatcggccttcatctgttcctgcacgccctcttcattatccatttttctggatcgagtgttataggggtgccttggtgttttcttagttatgatgagactcctaaagaaataaacaacggtgagtatgccaccaaaacatgagtatgcaaatggatgatcggagcacttggatccaccccaagaattttagataacgtaatgagtccaaaacttctcatttataaaagaaca

SEQ ID NO: 64289 - DNA, 340 bp, Glycine max
  unsure (1)..(340): unsure at all n locations
ggactgcactggcgcaaggatgaagtagttttcganaacaaagagatgggatcgttcatggtgaattagatgaaagactccacccactgcagatgaggtgtatcaggaaagcacggctgatgggattgacatctctacgtgcacgaacaatccgcttagccaacattcttcattgtaaaccgatgatagagcttgttattctgcctctgctgaagatttacacacacgattctcgctatctttatcttcgtgtacttgaaacatcttgtccaacgcacatgaaccacatgtacacctgcgagtgtcgatcacgcttcccaatcactgtttgaatcagtac

SEQ ID NO: 64290 - DNA, 313 bp, Glycine max
  unsure (1)..(313): unsure at all n locations
aactgagtttcacccaattagaaccaaacaaatgtcatggagatcccacttttcatcaaatcacaaacaagaagctataagggtaacaaataggaacaaacaataattcatgcacgctatgacgtaaattttctaaaatgagaagaaatagaggagtttgatttactgtaccttgttacagtcttttccacagaaccaagtaccaagatatcnttgtgatatatctgcagctncattttccaggcacctaacatgatctacacaagtttgacaaagatgacaccaggtttacatatgcagacaaatatatact

SEQ ID NO: 64291 - DNA, 472 bp, Glycine max
cgctagtgaggcacttaatggtttgcgtgagtggtttaatcctatctcttatgctttcttctggagagatataatataatttctgatgttgtttaattttcagtagaggttcataactcaattgtttgaactttgtggtttttacactgtgattttagagagggagggggaaatgatttctgttgccactttaagaatttttggcaagagggttgctgaaataccctttgtggctaccagggtgcagtgtagaaggattgtgtgacattttaatgaatgagattgagaagcagttgacttacttggaagtagaggagattgttctgccttgaagtttgtagagttatgaaaaaggacaccaacctgaattcctcacagctccaaaataatcagagtatagttgatgctacaagtgattgtcatctttcagatgtgcctcttaatccatcagaaaatattcacaatccagata

SEQ ID NO: 64292 - DNA, 368 bp, Glycine max
  unsure (1)..(368): unsure at all n locations
acaccagngnnnaaattctattagtaaagcaacanagatcttcgcactcaatcaaacgatattaataagagtgaacactatattttttgctagagctgagtgaatatagaattagacagtaggcacaactttaaatagattntaagtaaaggccaactctaagatttaagtgtggattcggtcctacaatacaaggagtaaggaatgttgtaatttcctactttagtcatcactatcagtttatatttaaactgtccaacctcgagacatatgtcaattatatatttgtgcattgttatttcgttcttgatttttttttttttttgcgggatattattggaacttggaccgatatttnttctacatgt

SEQ ID NO: 64293 - DNA, 387 bp, Glycine max
  unsure (1)..(387): unsure at all n locations
aatcgaccaaagtacatacccgctcatctattntcaagcaccaaatgacacaggttacccttggcacgcttagttagtgtgctactntggctgaatggaagaggagatgagtacaaaaactttntgggattggtaacaaacattgatctgtcaagtaacaaattactaggagaaatacctagagaaatcacagatctaaatgcattgacacttttgaacttgtcacacaaccaattgattggtcatattccacaaggtattggtaatatgggatcattacagtccattgatttttataggaatcaacttctggtgaaatccctccaaccatttcaaatttgagctttctgagtattctagaattgtcttataatcatttgaatgggg

SEQ ID NO: 64294 - DNA, 418 bp, Glycine max
agagtgagacataattcttcggtgattcaagaactccgcgaaaggattaaattctcttattcaacagtcttgcatttaactcttgtagctttaccaagtctctaacaagtttattcatgtttatggtcaaatctctaacctctgtaatacttttcatggactaatttcatatcctcgctctattgcattgattctgatctccttcatcattgccctagaatttcattgttagcaataataccttctcatcacacttctatctagtatactcaacctttctagattctacctattttctccctttaatacatagtaatatttaacacactccaatttaagagtattatcactctacgcaccgttcatctaattcacataattgtgtttttttattgtactatatacttcatcagttgcg

SEQ ID NO: 64295 - DNA, 446 bp, Glycine max
ctcttctgctacgaaatccacaacactaacgcttgtttatgcttatcaatcacaagagtctttgagaactgtcatgtacttaagctgctggggtcccaactagatatcataagcccaacaacaaaatattcttttctcttttcaattctaggaatcaagcaagcttaattagtctcaaatgatgatgagtatcgaaagaatatagcttgtctttatggcagtcattatgtaaattttgatattgatagtggtgagctgttgccaaattatatatgtagtgctctttatggcaaagattggcaaataactcgtttatcaattgcgattaactcgtgtacttacagaaggcttcttttcattcatttcagcaatcttactcaggatatggtagagattggcagtaacaccgttatcaattgtaatggtagttcattatgtaaagacag

SEQ ID NO: 64296 - DNA, 495 bp, Glycine max
  unsure (1)..(495): unsure at all n locations
cactatactaganaacacatagaaggacacagatcacttatgtgtaggtgaattcaatacgcgataaataaaatgcttcaccatactcctttctgagtttttaatgtgaacgtcattttcatttatctttgctaggcaactgcattgacacttatgaattgttatgttacagattctttcattttccttaaaattcattgtgatgttacagattccttaaaattggaccggcatgtttaaaaaccacatgaaataagaactgatcaactgaaggatgaccagtctagacaacttacaaaattcgataaaacaaaaaatgaaggttttttcaaagaaacagccgaatatagtcaaaactaggtaaaaactgatgttaaaaaattggtttaaatcgatattntcanaataaaanaagttntttcgtanatatttntctaaaatggtttaaaacaaatacttgtatatgcaaatatgtaatatgatctctcatactaa

SEQ ID NO: 64297 - DNA, 473 bp, Glycine max
  unsure (1)..(473): unsure at all n locations
tccattaatttatttcttacataaaattactcttttgtctatgaaaatcattngtaattgttgaccatgaagatctttgtatgcttaaaatatttatgattctcacaacaaattttcaagtttctttggagttttcaatctccttaatgaaatttagtttaaaaaccatccttagttgttccaaaactgtaaaaaaaagacaaaattcaccatgtgagactattttagaaaacaacaaagctagcaaaacacacttggcgaaatatttgtctatgtagtcaatatcctcttttccagcacgccatccacccaaccgatacaacaacaaaacatagtgtattaaataacaacacanataataatataacactttgcaaataagcatttcatattttactaattaaaaagtgtgtatcatcccaattttcttaggttgggaagtcaatgtagaaatagcttgtgtttgttgatat

SEQ ID NO: 64298 - DNA, 429 bp, Glycine max
  unsure (1)..(429): unsure at all n locations
cttctcatgacaatgagaaactaanacccactattgtgaggttctatgcaaaccaaactttctttgatgtcatgattttaaactatctatttaatatgatgttgatattattgtttttttctatgtttattcacatgtttgtggtttaatcattatattntcatgtaatgttttaagatttagacattgngaaatatttatatactaagaacttgagaagaacatctaggtgatctatgtctaggggtagagtgatattgtttagtctgttttatgcatctctgttcgtaatgcaaattatttaatataactcttaagggattaagagtgatattagatgatttangctctcttacttgaagggtcataattagaatatngtaatagatgcgataataatcatattcatgttaatagagaaaattcata

SEQ ID NO: 64299 - DNA, 405 bp, Glycine max
  unsure (1)..(405): unsure at all n locations
gttaacccctcctggtatttaagattcacttaaaattagtgaaaaaaattggttccgtgaagaaaatccaagccgaggcgcttccgtaacgtttccgtgggtgatttcgtgaaagttttcggccgtttttcgacgttcttcattcgttcttcgtcgttcttcggtcttcaaccgataagttccctanatcgaacttttcaattcattctatgtacccttagtggtcctcatttgctnttacgtgctttcatttacatttcctttacttttcgtacccccttttgacgtgctttagtaatttgctaagttatttctcgcctaacaaaaataaatanattcaccaatcattgatgtatatccgtatttctgtacaatgattcaccgtcgtcattcgtactggttgaa

SEQ ID NO: 64300 - DNA, 440 bp, Glycine max
  unsure (1)..(440): unsure at all n locations
acactacgaaactaagcttcctatgaggcttctntgagaagcttccttgagaggcttcntgttaagttagagttttaactacccacacccctctaataactaaactaacctccttgaaaataaaacatggataaaataacacaacaaataaaatcaaacatcaattataattgctaataatatttcagagtgttacaccgtaaaattgactttaaagagattgaaagttaataaacaaagccaaaataaaaccaactcataactaaacttctttccatcaaaaatcacttaagatcgtttcgaggtctaatgccttaacgaccgttttgtttgtaataaaaatgattctttcaaaagcataaaaccaactcaacacacaaactttctcactttaaagaactacatangtttgaattcctcatcgcacctgaggatgcata

SEQ ID NO: 64301 - DNA, 254 bp, Glycine max
aacacatgaggagaccctgctctaatatacgaaacgaaataaagcaactgaagtgtcgttcatgacgactgaaacctgttgagcctggacacttacacatcctggtgaagctgacaaatggaatatacgtagccgaagacatgcacgcaaaagaaacattggcaaaactcggattgccctcattctccacaccatatccattgatctatgtagcataatagcataacctacagccatgacctgaatgtgaaacc

SEQ ID NO: 64302 - DNA, 426 bp, Glycine max
  unsure (1)..(426): unsure at all n locations
atagcaaaagattatgactaaggtgatgacaaaaagctcacacctcagtcgcagaacaactcaagtgaatcatagatcaatcaaagaacaactcangtgaatcaagagcaattcaagagttcacgataagaatcatgaagatttccagactcaagaagaatgttagagtcaagaatcaagattcaaggctcaagatctcaagaatcaagatcaagattcatgactcaagattcacgaatcaagagaaggcttaatcaagataagtatgaacagtgttctcacaaattgagtagcacatgattattctaaaacatgtttaccaaagagctctactctgtggtatcgactaccgattgtttaatcgattcccagancaatatttgtttgaaaagtttcaaatgcatttcaaactctattaattcaaaa

SEQ ID NO: 64303 - DNA, 447 bp, Glycine max
  unsure (1)..(447): unsure at all n locations
actaaaaagtatatcatctcagaatattatattatgtatntattagtataataataataataacaataatattatatttaaattattaataattacttattaagaccagtctattaggcacaaatagaccactgaccccttgtaagccaccttgcctattttcatccttacctaagaggtgtattaaaagacacctatgcacgagcaacaactattgaagtaccagatccatatggccaaggacagtttcaccataccttaagtggtctttgctagcaattgatgtatctggcttgagtaccattttgtgcagcttcttgttgatcagaagccttggactcaaaatgctcaagccaaatagcaacatcctgtgacatttatcacacaactttagattaagcataattgtaataattctttttatgaccagtaaacgggaacttgaac

SEQ ID NO: 64304 - DNA, 431 bp, Glycine max
  unsure (1)..(431): unsure at all n locations
ataaaagtatatatcactctataaggttgatanaagatgcatttgcttaagctcttgaaaaacaaaagcgctttataatgtagcttttnttcatacggngcttattantactaccgagacaaggactaanactaacatggtattttttagntnttttctcgacctacatataataaacttatctaactattacagaatctaatcagatttttaattgattntttttcttaacagaaactcaaatgaaaggcaaccaaactatacactcaganatgatatttactacttattttaataataaacagccgagtaaatatgatttaattctatagctctctattccacctgactctaatgcaccctaaatgcaagaacatgcagatcattctcaatgtagtgagtgccactgcaaatatcacagcttcacacac

SEQ ID NO: 64305 - DNA, 378 bp, Glycine max
  unsure (1)..(378): unsure at all n locations
attacatatgtatcattaagatcaattcacctctcctcctataagcaagataatcctttanagtctggaattagtgtcataaggcacacccgctatggtcttatctggataaattgtcttaatatatataaacttatagtatacgaaaattcgaacaaaataaactaaccttctctcttaagacctaacatccgtatgcataacccaatatgtaatatttctttcatttacaacttccaaaagttgatcttaacttatatatgaatgagataattgtatcttacatatgagagaggtttataagtgctcactaacaaatgtattcaaacatatcatatatgcacctcaattctgagatatgtatccgcatgcaaaaca

SEQ ID NO: 64306 - DNA, 414 bp, Glycine max
  unsure (1)..(414): unsure at all n locations
ttattcttcttatattgtaccttaggcgttaaaaatcgcaatcttgtatataatttaaacttttgtcctctggggtctgtttggcaggaagtaaagaaataagtggaaacagaatgaatgaagataaaaaaggtgaanaataaaagtgtttgatttaaaagaaataagaaatagataaatagttgattatagacaaaaatatagtattcattntaatccattaagtatgtaagcctgaccgtttgattagaaacctgtaacctacctccaaatgtgcacgggtgcatgcatgtatactttccaccgcttaaatgtcagtttagtttattcatgaagtacggaacaagcaacacgcaagtgcataaagntaattcanaattattgaatgcatctaaaatacacaattaaattaat

SEQ ID NO: 64307 - DNA, 500 bp, Glycine max
  unsure (1)..(500): unsure at all n locations
acattactattacgtgtggctaatccattgtgtctattatatattatatctatagtaaaatgatgagtttgatattttaatggatattacaggttcctaaggatccaccattctccccccttaagtaaattaataactaacacactcatagtgttaggaaccaaaaatagaaatgaagaacagaaaaaatttatagaattgaatggaaagaacagaaagttagagatctctcctagggacagtcagaacagttagtgaggttagctagtgataggggggaataaggggggaagggaaggattcattcacagatttaagttctgatatatctgatatctgaaaccaagctcttactttattaaattcatatgaaatactatcgtggacatcttatttgcaatgctattggcttactggtcctaactactattgaagtatattctctctaatagtattttctattgagttaggggcttatngagtcattatggttcatgcat

SEQ ID NO: 64308 - DNA, 391 bp, Glycine max
  unsure (1)..(391): unsure at all n locations
gcttacatgtagctacattaactcttacttatattacaagaccgngtacattagcanaactgtaaatgattgtatatgtaaccctgcttatntaaatttgtgagttaaatagattaagtaagtgagtttgaattactttatcaactccaacacccttaaggtcgtcgtaaagggatgccttcgtattgaagaagaaattgaagaccctttaagtttacttanaggagtgaaatcaaactctggagatctggaaggaagatgtgaggtgttacaaaaaaatatggtggccctagacctgaaagtggaacaacaacaactatcagcaaaggagggttctaaaaaaaagaggggtggtggctgatttttggaagtatagtaaaaggctggagtc

SEQ ID NO: 64309 - DNA, 473 bp, Glycine max
  unsure (1)..(473): unsure at all n locations
actccacccatatatggccttgacattaactagatctaacaccaccaacaaaagcgtcaaggaattcttgcaccctgtatacaaaggcttctttgaatcactttgcaatccttcatacataggggcatgtgcttgttgaaagaatcttgtccaaggtcacgaatcatatcctccaagtgatctcccatttctacatcaaatggttcagattaagacccactctgcatgtctgtcaattcaccatgtcatatccacgtcatgtaattcttctttatcccatcacataacagatggtcctgtatgtcgtcgactntntgccgtctcccgttcaaacaatntatgcacggacaaaaaaacttcccattttcatccgatcggcttctttctgaagcannatataggaactattccacgccttcctcatacgcagggctcangtagctttcattcatccaacttcgatccatctaaaa

SEQ ID NO: 64310 - DNA, 195 bp, Glycine max
ctcactataagactaatggttttatacattaaacactaagaataaatgtaattaaaaacatttttgagctttaaacctgtagtgcttgtgactacaaggatgaaaatattatagacagaaacagaagacgatcataaccatctaatcattacattaaattcatctaatcattcatataatttcttttaataaatg

SEQ ID NO: 64311 - DNA, 407 bp, Glycine max
cacagtaatatatcaggggagagtaattaatttattatcttggctataacactcactgaggatgcaagatcatcgcatgtcaacattctagcaaggccaaagtcacctgcatccaacatacacaacatatggattggatactataacaaggcacaacaacttacacatgtctaggctccaaacacattcatgaagtgcatgtgcaatttgaggacagaatgaagatagccattacctagacgtatatcttgatcttttgtcaagaatatatttgaacactgaaagcaacatggataaaacatcaatataaagtaggtcatcaaagattgtatatactcagcaacataacatcttcagtaaatgaacttagagaaatcattcacctcgacatcacgatgaagaatatg

SEQ ID NO: 64312 - DNA, 477 bp, Glycine max
  unsure (1)..(477): unsure at all n locations
ctgcagctcttggatgctgcgaaatctcatttatgtttggaaaatcctaatctattagaaacatcaacattgaagattcaatgaatcttgaggcaagcacaacatatggaaattcataatccaccaggagacgacatttcaacacaatgtcttcaatcggcagtacccagntcatctttatatatgatttcagaccataaactatctatagatcatcatccgttacctgagcatgattgcttaacctaggtgtgagaatgtaggtgataaggtatactaacattntttcctctacagtcagtccaccaactccgaagcgattccttaagtttttagcacgtcaaaaagcattcccctgtatctttctgtacccatcaggtgtttcatcaaacttgcaaactccacctatgtccagaccgactacttncttctacacagtagcatcaatgaccaaatctacttcattaacaatagaaa

SEQ ID NO: 64313 - DNA, 450 bp, Glycine max
  unsure (1)..(450): unsure at all n locations
ttatcatcaatgttgttacctaaattatcttaattaatcattgattattgggtattttntattagcaaaacataacaagctccttcaaaacataattaatccaacctcaacaaatactgactggaaactcatattagcaacacattaaaagaagtttgaaaggatttgagaaccctcttcttagtgccacatgctttgcacgccgtcaatcctcttcatagcaagcctctataatgccccttccataattgagaaggaaatgcaaggagaagagaaattaaaagggaaaaaagagattgagaagacgactntgaaaggattngcaaacatggacctaanaattgagatttgagagaattcgaagaaagtagaatgcaagtgtgaaattngagggcataaactttggtagtagataatctctgagagagaaagagagacacagagaaaaaa

SEQ ID NO: 64314 - DNA, 414 bp, Glycine max
ataataaacacgtatttatactaatgaaacaagattggaaatacacagtcgaaaccacatgcaagtaaaatagaaaattataacaaacggagaagtacagagtaagttcaaagaggaacactaaaaaacttcttattcttttcacaggcaaatcaaactcaacaagtctcatatgctcacaagaccttgcttgcggtctgaaacttagaggctatcatccttacctttcccatggcatacgcattggtaatctaattctaaagcctgtgccctccactagcagtcatgtactcgcccaatatgtactgagcagaatacgtctcctacatgatagaagaaagtgatatactcattcacacacatgttcaattcaagtttcatatgtgcctaacaaactgctacatgacaaataat

SEQ ID NO: 64315 - DNA, 413 bp, Glycine max
  unsure (1)..(413): unsure at all n locations
gtcatggtctataaatatacttcatgttgtgtttatggnggcaaattcagcaagggatgctcctcctgctccaaccactacatgtattgtaccatccaaggagcccttgtaattgatcttctctatgtaggcgcagatattctgaatgaagagagaaaatggaagtttaatttgtatgcaaatgataacagataacaaggaacaaagaaagcatctagataatttaagtattcacgcagttggagaaagattttagtattcactacaaccactggtcttctaatattagtgcagctatttccagcagacatgtatagaatttttatttaagcatacgaatgtagctagtaactctgtatcagttgctggttcacagatctattgtaatctcgagcctaacacatgatagtata

SEQ ID NO: 64316 - DNA, 368 bp, Glycine max
  unsure (1)..(368): unsure at all n locations
tcagcatgtactatcttagacggtgggacgcccagactaacgcacaacatgttctttccagcagggagtagttcatctcacaggccgtgaatttcttactcaagtagtagacggcgcgctctcttttcccgaactcatcatgttgccccagcatacatcccattgactcgtccaaaatcgtcatatacaagatgagaggtcttccgggcaccggcggcataagcacaggagggttcatgaggcactatntgatccttccaaatgccttttgacagtcctcgntctagcggatggattggttcttgcgtaagagctngaacaatggctcacagatagcggtgaagtgtgatatgaatctggcaatgtag

SEQ ID NO: 64317 - DNA, 385 bp, Glycine max
  unsure (1)..(385): unsure at all n locations
tgttctgtgccaataacgtgtcatgtgatgatagctatatcaatcttttcttcgtgggttggtgggttctgtctcgtagaatgacatgatcactggctaacatattatcaattagctctattgcttcttctggngtcttcagttntatctttccccctgcagaagcatctaacagttgcttggtttgtggtcttagcccatctataaacatattcaattggattggctcagaaaacctatgagtgggagtttttcttaacaagcctctgaatctttccaatgcttcactcanagattcattangaaactgatgaaatgaagagaatacagctntcccttttgcaatcttggactttgggaagtatttctttaggaacttttcaac

SEQ ID NO: 64318 - DNA, 472 bp, Glycine max
  unsure (1)..(472): unsure at all n locations
ttttttccacccaatggttgtcctccagcctagtttattcttgcattctttggagctcctagacctttcaaaagcctataaattgaatcaaaactattagcaaattttattacactcaaattttttaaaacaaccagttaaacacaagatgttattatattcacctagtaacctccacagcattcaaggggcatagaccagccatcttcctttcatggtaagtcatgcttgatcttgcagtcaagagctccggccgttgtatcctctcattgttaacaatctcatcaaattcgggactcaaaccggngaggcatccggtcctcacccacacatccttctccattcttagatgaagaacaaggtaagggcccttgctntgcattctctctgcaatgccgtcaccgagttcctgaatcggctgagcaaaccgtagtgcgttgaaagcaaccttgaacataagatgagaactaac

SEQ ID NO: 64319 - DNA, 421 bp, Glycine max
  unsure (1)..(421): unsure at all n locations
cctacacacatccactggtttgttcccaagttttgcacgcccncacaaacccatttgtctcacatcatacaactgatgaatataaggtacttcctgtaaccatgatcagcatcacaaccttttgcactagtagtatgagagactaacagtccatctccaccgcaatgttccacacacctgacaactctgccaaatcgagtgaagcagtaaaatatgcatcatttcaagcacttcatgaatctcgaagtcatgtagatgacaagaaagtcacctcaatgttgtcgccatcaccatcacgactgatgttgcgacccaggtcatctcgggtgacacttgacctcttgtccatcatggaggagcctgtgacaaccaatccgaatttgggtattgagaatcaccttacctnnccacacactggtct

SEQ ID NO: 64320 - DNA, 384 bp, Glycine max
  unsure (1)..(384): unsure at all n locations
catggttctctgactaaccatctcctagggtttggcatccactaagcgagctagttgcctcgctaagcgaatgaggctcgcttagtcaatcaacccgctaagcgagttcttagcaacatttactcttctcttctttaacctacanactgagttaaattcaacattagtttacaaaaatggagtttctactttataaattcatacaagaatgaaaatatttacaatttccacaaaaagaagcataaattagaggcacattggctatttcttccttatntttaatgcactannagctcatgaaatagcaataacaataatccataccctttgaacacccaacttaanatcttctaaccccactgtttgagtaanttgagtcaatta

SEQ ID NO: 64321 - DNA, 414 bp, Glycine max
atgatgatgcatgcctagctgtcaatgtacttgtgttcatgttgttataagaaaaacccagaaagaggtatttctttccctcttttcttaaaatttttaaaccttgatctgtttttagtttctaaaatatggtatgtgaggacaaagtatgtctttggaaacccaagttattgtaatatgttaatacaagtataggaagtagtgcttgtctccttttgttcagagatcactgatgactgatatttttctaatattttttttatcattttggttttttgtttttttggcatcaaacacctaaatctctaaatacaatatacgctctttgctgtatttcatgtgacaacaacacattatgagtgaaacttacatgatcccatgcggaaacaatgtaccgggccacagtgtggaaag

SEQ ID NO: 64322 - DNA, 271 bp, Glycine max
ataatatttttattttaaatataatagacatctttataaaaaatatatatataatgctaataattaatgacctattttaaaaataataacatatcaaatattttacataaataaatatattaaatattaaatattaataggtaacttgaagattgataactatgaatatttctaatattactaagtatctattatattattactaataattaaatatttgtattacgtttaaattgtaatataataattattatgactaattatgatatgg

SEQ ID NO: 64323 - DNA, 414 bp, Glycine max
ttgtgtaatcaattaccagactcttattatattcaaatttcaagtctgaagagtcacaactctgtagaaactaactgcgtaatcaattaccacatttatgtaatcgattaccagtaagatattctcgaaaataactcccaagagtcacaactgttcaagaagtttttgagtggccatcaaaggcctataaataggtgacttgggatataaaattccttagagtttttttgaacaacattgtcttatcctctcaaaaccaaattgtcttatcactctcaaaatattccttggccaaaacacttgcaaattcaataaggaatcttgatcgatcttcaattgtaatatccttctcttaaagagagaaaattcttgttcttcttattcaaagagatttgattaagataccgagggtct

SEQ ID NO: 64324 - DNA, 397 bp, Glycine max
  unsure (1)..(397): unsure at all n locations
tcactgatcctataactactgaagtcaaacatgttaactatgaagntcttaagtgatagggtacgtaaaaagtagatgcatattgatattataggtaatatctatgaattcctttaagtcatcctcaaatattcccatacttgcatatcctntagatccctntccttatggtgtgattcatttgnggtgttacatgtgagtcacaggttgcgatgcaatgctggtatgcaatttattcaacactgctagagcataggggtgcactnttctcccaaccatgttgggtcttataagttggttctttcattatgaggatggtcaccaactntgggttngatcatgtgatcatgtgatgactaccagtggtgctcaacttgatggatgctcaagatgcttg

SEQ ID NO: 64325 - DNA, 426 bp, Glycine max
  unsure (1)..(426): unsure at all n locations
tcgcagatctagtggttgctagcaagaggattgaaatgggtatgttaagtggcaaattngattatgctgcttcgatgaaaaggaagcctggggaaaatggagagaataagaaggagggagaaacctatgttgtgattgtcgtttctacatggccaaatttcccactagcttgacaatatcaatatgcatccaatatcagtccttcttattacccaccaccctaccagccaagaacacccaatcatccacaaagctcgtgatccaatcctaccccccaagggcattggatagaagactccaagaagatttgaccagagatgcaatagaaggccctagggttctcatgagccttacggtagaatttgggcccatgggataagtatgagcccacttatctttgtacattatagataagggttcattata

SEQ ID NO: 64326 - DNA, 310 bp, Glycine max
gcccgataggccgcacactgatcccgccctcctcggagccgaccgtgtcccggcgcacaatgtgctcgtctggatgacggtcacaaccccaatatggttgtgctgtccaggcctaccaattaatcaacaaatacatattcaatcatttaaaagaaaatctactactgtcaattagcgccactgcttgaaaactcatgcatgtacggaacaaattatgaactaaagttgtgctttagtttctgacattataacatatacttcagtgtagacatataattattaacatattggaggacgctctcaactattt

SEQ ID NO: 64327 - DNA, 376 bp, Glycine max
  unsure (1)..(376): unsure at all n locations
tactaagctacacgacnnctgttgagtcgagaatactntattatttatttggttaagttngaatatgatgtagaagaaaatgaatgtgagcctttntcccctttgaaagacttgtaaaaaaaatgttttaaaaatacttttaattaatatttgaattttttttccttattagtatatatgtgaggggtagagggtgtcacaagatccacttgagtgaattatgcacttgatagattaaacttaatggtgcaagatgacacatcgaatgaggcatatgatgatgatgatgatcccataagctatgaagaggctatgtgaagcttggattgtaagaaattgcaagaagttatggaatcaatgaagatcaacagagtat

SEQ ID NO: 64328 - DNA, 369 bp, Glycine max
  unsure (1)..(369): unsure at all n locations
tgagtgatgcaatcctccctangtgggaccaaccaccanagccatggctaggagactccaagaagattgngccagagatgcaggagaatgcccaagggttctaatgagccttatgggtagattntgggcccatgggctaagtatgagcccacttaagttgtggaaagaaacacaagagagaatagaataagtgaaataaaaagagtggaagaaataagtctagatgaaagagagaaaatatgagaggaatatagaagagaaataatgaaagaaatgaacagagaataacatgcctcctatagtagtcataactctcgcaagagcctaagtgaagaattcatgactattatgaaggaaacatangtcaca

SEQ ID NO: 64329 - DNA, 450 bp, Glycine max
  unsure (1)..(450): unsure at all n locations
tgcttaaaggtaatggatttgtttcaagaggttctggaggtgagaaccaaaacatgatgtcacccattgaggtaaaagcgtcaagctaatgacgttaaagaagtgcttcctgngaggcaacccagttttaatttctgttatctttgtttttcatgcattatatcatgtggaacttgctttataatctgtactttggagtatatcagcttatccttgattgttagatataagggtttcaatttgttgaggaagggactgaaaaaggacttagtaaacattttttgataaacagtcctttcgctaagctcaagcctcgccctaagcgcatctttgttcatgcgctaagccgtgagtctcaagcgcttagcgatcaacccttgcatatganngctgattggttcgctaagcccgccaaggctgagctaagccaatntcaactcaatctcaatt

SEQ ID NO: 64330 - DNA, 436 bp, Glycine max
  unsure (1)..(436): unsure at all n locations
cttgcagattctacggaaattnctgtttcttttcggaagcgcctcggcttagattttcttcacttaaacaatncttccaagcaaattcgaaagagagagaagtgcctaaggggctgaacccttttcttattcacttcctcccctatntatagcanaataggggaggtggttgccgcccagctcgcccaggcgagctcagctcgcccaggcgagccaggttgcttcctccagaagcaaccgccttctggaggaatattctggagggcccaagtgggcctgggtgctatttgcacccacattattactaaatacacccccctctgctgggttttggtgattctctnttcgtaaagctacggaaacttaccaagttctaacgagactgttttcttccgaatgtacggaacctgcgatacataatctccctttaactacg

SEQ ID NO: 64331 - DNA, 403 bp, Glycine max
  unsure (1)..(403): unsure at all n locations
acccatggaagctcctaatatctcccagacttttgtggtgggccattcttggatggccttgattntctcagggtccacttggaccccatttctaccaactacaaaacctaagaaaactatattatctacacaaaaggtacacttctctatatttgcatagagagtgtttttcctaaggactgaaacttgtctgagatgtcctaagtgatcatctaggctcctactatacactaaaatatcatcaaaataaacaactacaaatctacctatgaaatcccttaagacatgatgcataagcctcataaaggtgcttggtgcattagtgagcccaaaaggcatcactagccattcatacaaaccaaacttggtcttgaaagcattnttccactcatcacccttttca

SEQ ID NO: 64332 - DNA, 393 bp, Glycine max
  unsure (1)..(393): unsure at all n locations
tacgtcatgcagcgccatttggtctcctncatgtatagaaggtcccttttagttcccttgtgtaggggtcctatggagaccacctgtggcatgtaagcttccacttttgattnnttgaagtgctctggaacaaaggaaacgctacatcctccaacggtgtcgcttttaatagaaatcattgtaaaatacatagaatcagcacatctgcccaaacttgatgccctagtaagcctctggtggctatttgaggatgaggcttcgtccatgacccgtaatttttgaccaaaatggccgaggctaattcttgaaatgaggaaagttttgtgatctatagttagacaaaagaagagccccttggaccagataagagagagagaaaagatttgaagagac

SEQ ID NO: 64333 - DNA, 470 bp, Glycine max
  unsure (1)..(470): unsure at all n locations
tacccaagcangctgaagctcaaccaggagagctgttacttactcctaaagtaactggctagcccaagcgagctagttccttcaccctgaagtcttttgggggcccaggcgagccagagtctagtctgggcgagctagggtccaggaaactcaatgaaaagacccttttttccctcctttgtggtatctttcgcattttttatcaaaacattgaacgatcttttgtcttgtgcgatagctggtgtcgaacaacggagttcggttagcgagaatcaaaacatcaatgaatgatagtccccggtcgaaattagggtctgacatatatcatgcaccaattgcatggacaaccacctcanaataggagaacaatataataaaatanaactatgaattggacccttgcaacaatgcttaagtgcccatttactagttcatctaaatgcacagttaacactaatgactcacccact

SEQ ID NO: 64334 - DNA, 449 bp, Glycine max
  unsure (1)..(449): unsure at all n locations
agcaattcttagagaaaggttatgttattctctcataagacaataacctctctataagagacaatgcaagtaacttgaatgctaaggtgccaatgtcaagaaataaaatgattttgctcaacattcaaaatgatgttgcagaatatctcgagatgtgctacaaggatgcatcttggctctggcatattccaattgggcatcttaattntggaggattagagtttctctccaagaaagaaatagtgagaggattgtcttgcaatagtcaccttgatcaagtgtgtgaaggatgtctacttggtaagcaattcaagaacaacatttcaaaggagtctaactcaagagctaaaanaatggttggaacttatgcatatagatgtgtgcagtcctatcaagccaagttcacatggaaggagaaaattattncttttcttcatttgatgattttc

SEQ ID NO: 64335 - DNA, 405 bp, Glycine max
aaaccctctatgattctactgtagtatcctactaagccaagaaagctcttaatctcaaacactgacttaggactctcccaactcatcaccgcctctaccttggaaggatctactgttatccctcccttagatataatgtgccctaagaagctcacctcctctagccaaaaatcacacttggacaacttagcatacagtctattgtctttaagggtttgcaacacaactctcaaatgctcctcatgttcctctctagtcttagaatacactaagatatcatctatgaagaccactacaaaactatctaggcaggggtgaaaggtcctattcatataatccatgaacacaccaggggcgttggtcacaccaaaaggcataaccaagtactcataatgactggaacgg

SEQ ID NO: 64336 - DNA, 460 bp, Glycine max
tcggagaactggtctgttctctgctactcaaactgaggcttttgaagagcttgctaaggcaggattgaggaacccagtgagggttgaagttcgagcagaaacaaaatcagaaaatggtcctgcatcatcaaaacaaccagaatcttccaaaacaccttcaggacttcacattgaggtaaaacttatgaggcacactagcatgctgctggattggatgtaacttaacagtggttctttctcttacattcttactagaatccatatagcaagtttcatgtactgctaatagatgcataatacagtttatgtttatcctttgcttatactgatctccttaatcctttgagtttgcagtacttggaatgcgaggcagataagaagccatcacagctagtacatatcctgataaagaatctctcgaaaaaaattattatgtgagatacacgtcgataattaatga

SEQ ID NO: 64337 - DNA, 434 bp, Glycine max
  unsure (1)..(434): unsure at all n locations
tcactactcctgtgtattcttcccaaactctctttattcttattctctccatcatttattcatcttcataacttattcttctaattttatcaagaagtttaatcatcttcaccatgagccttgtggtttttggacatggtgaagtagcatctctacttgtagaagtcatacctataagtaaagttaatgcacgagcaataaacaaaataagacctcaccactcaacttagtgtatcactcaagttcactcatgtatcactctttcaaggcttttcttttataatttgcactcttgccttttaccactcttgcttctcttcagttcttaagaagaaccttcgagctcacaatcaagaagtattcaatatgaaatatgtcacacatcacaactcaactcaagaagcacaanacagaaatactcttagacatgactt

SEQ ID NO: 64338 - DNA, 432 bp, Glycine max
  unsure (1)..(432): unsure at all n locations
tgctcgtgcggnngaaatcaaaggtgtgttattgtaatgtttttcacttgtgaaggctttgtcccacccttctaagtaaattgtaattgacacacagctagaaagaatataaaatgaaggaagcccaaaattaagtttgttctgcattgttaactacaatgggaagaatgcatatttcaaggaagcatttaaccctatactctttttctttagcctgtacatgatgttaagagttaataactagtttggttcacagatccttgtggttaagtgttttaggttgagcatatttggctgttggccatggtataattcagtaagggtagtttgtctatggacttattntgaaggagtgtggaaattcttgttttcataataaanatttatctaaaaaaataaggcagtangtaatgggtttgatggtactttctg

SEQ ID NO: 64339 - DNA, 342 bp, Glycine max
  unsure (1)..(342): unsure at all n locations
tgttaaaaagatgaatgacatgggactgggggaactagaaaatgatgctgtagcagctgacgaattctgcacctttcattgcgatcccatgctagacaccttctcataagatccagaagccatggatttgaaactggtgcgtacataatttcatgatttggatcagttataactttgaattttgcccaaaatgtcttgtaatctgcaaatggtgttctcccatataccatttgataaagaatgcagccaagggaccagatatctgatggccgaccacattntatgatgatatcacttgcatcactctcattgcacataaatgcttgtggtgacatgtaactt

SEQ ID NO: 64340 - DNA, 440 bp, Glycine max
tatctacatctgcaacgtgaatgctgttacaactgaaaagtcttctttcttattcagccaactaactaactatctctgttaaagctgtttatactgcttcgaagatatataaagtatgatccttgaaccttgatgtattatgactcggatggcaatcatcattacttcaaataaccatgatgaccatggttgtaggtggacgatcattgatcagatgaaaccgagccactcaacatagatgcaacactcaaaacactcaagaaatacaactttaaggctgtgaatttataaaatgcacgatgacctattaccactctggcttgtcttcatctctatataaaagactgcgagctcatgatctagagatgttcaatcatataaatgacacatatcatagcttcactcacgaaccacaaacacaagtactctaagacgtgact

SEQ ID NO: 64341 - DNA, 434 bp, Glycine max
  unsure (1)..(434): unsure at all n locations
gcttaattacaactatatgaggaggctatatacaaaanatatattagatatatgacacacaagagagagagttgacacaacattacgaacatatactactaataaaaataanaatacaaataaatgagtgtcttacctttatgtcattggcctcatctacaaatattaaatgaattttccaatgaaattctagaaattattatgatttaatcagaagcgattaaggcaattatgaaatggtaccttttgcatgtggttaatgggtcatcgggaaaaaatggagggtaaccaagtattactaaaacaaatatatattactagtaaattaaatgtcaactaaccataattgtttgtatcaatatacaatgaagatgttagttcanaacaaaaatatcctatgcatctaaattttctaaatccatgttttaatctag

SEQ ID NO: 64342 - DNA, 487 bp, Glycine max
  unsure (1)..(487): unsure at all n locations
ctaagctatcactngaatcttgtatgagatcaatgaccaacttaatatccttctgtgtaatgaaatttaattacatggaattgaagttatattttgcacccaaagctgagaaaagggatgcagtagaagttcaatgacaagttcaattagtgcgctatgctagtggatgttgaagcttttagaagataaacccagatccaatacctttatgcatgcaaatggattttgtgggaaagagaaattatggttttaaattatttacatttaaaaataaaataaaaacacaaatatcctttaatttacactggtctaaaacaaaaagaaagaagttttaatttaatttttttaaagattaaattactcatttgattcctataattnntataattttatccttttaataatttanaagtgatttttaatttaaatataaactagagattaaaaaatcattttaaaagatagaatcataattttttatatatat

SEQ ID NO: 64343 - DNA, 472 bp, Glycine max
  unsure (1)..(472): unsure at all n locations
gcgaaagncccactccatcattaggattagtttctgttatctcaaacaaacaaatcaaacgtaacaagacaattatagttgctgtttgaatacctcacccactcaagtgtatcacacaattatggcttttctctaatgaaacactcttgccttttaccactctaattccccttgagttcttaggtaattcaagagattatggccacaacaaagaacaattcaccaatatgtgtaaggtaaggctagagagacaaggaaaaggttaaccaagaaaaaggctaacaatgtttttaggcacaaatgaaggaaataaaattcagaatttaggaattcaagtaacaatccttcatgcaaccaatatattaccttacagagaattttttaaagttcttaagcatgaaccattcagcccaattttatttattatttattcttattttgctatacaaatctgcttttttttttctttttt

SEQ ID NO: 64344 - DNA, 350 bp, Glycine max
acataatgaatacatacacaatcaagttgaaatggcatagataaaatactggattttaatatagagataaatattcaattaaaaatagagactaaattactatttagaaatagagaaccaaaatacatttaacctttaaaaatcacatctactaatatctaatcaactatctgaatggatataataataatagctaaaatgtaactttacattattggtaaaataaataatttttaacagaaataattctaacgcaatttaagaaaaatacatatatagatattatgaaatcagaataatgtcacatgtgctgaccggcactcatttagtatatatagacatactattct

SEQ ID NO: 64345 - DNA, 409 bp, Glycine max
  unsure (1)..(409): unsure at all n locations
tggatgagttaaacatacccattctgttttatggttcttgtgatgatatttgtgatgtttatatgctgaaattactcatggaaacctgttagagatgaaaggtagagttaacctatggttagaaagtgagaatgtgatgttatgagtggaaaaagagtgaggctttgagggttggaaggttaagtctgaattctgtggtaaatggaggttaaagtgagttaatcctagcttgaaatgtcatttaggacttatgagaaagcttggactgtgctagagagaaaaacaaatgatcaaagtgaataaagagccatttctagggcaaatttgggtgttgaagagtcataatttgattcggngagattttaggtgtaaatccagtttgaacaagtctaaatagatgttatggact

SEQ ID NO: 64346 - DNA, 83 bp, Glycine max
gaaaatgacagggatgggggaagtacacgtgatgtctcgaaccaaaaagttaaagcaaacccgcggtttgataattgagtatt

SEQ ID NO: 64347 - DNA, 479 bp, Glycine max
tctcgatgatgcgttgtgtgacgatgatggtgttttcagttatgacatagaactctgctagcaacaccgtggttctagccaccaattgtgccctcaatctgaaaaaattacatttaaaatttaactaaaagatgtcacttaggttcaaatgcattcaagcttaactcttgacaaaaaaataacatatttgaatttttttaatatatataccagcttactaatgtatatatacttgttttttttaatatgaatacgttagcaagttatacctagatattgtcttagaatacaccaataatatacctagatattttaattaatatataattagagttatattattattattattattattattattattaccaaatactccaatatttctatgataaaagcagatgcactctgacaattaaaaagatacatttcttatacaatatgaatattgtatgagtctaacatattctgaataatat

SEQ ID NO: 64348 - DNA, 415 bp, Glycine max
  unsure (1)..(415): unsure at all n locations
ctcagcagcaaaatcaaccacagcagagcattatgacctttcagcaacagatacacccctggatgganggaatcacccctaacctcagatgggtccagccctcagcaacaacaacagcangcctgctcttcttccaaatgctgctggcccaagcagaccatacattnctncaccaatccaacaacagcaacaaccccagaaacagccaatagttgaggcccctccacaaccttccctcgaagaacttgtgaggcaaatgactatgcagaacatgcagtttcagcaagagaccagagcctncattcagagcttaaccaatcagatgggacaatnggctacccaattgaatcaacaacagtcccaaaattctgacaagctgncttctcaagctgtcccaaatcccaaaaatggtagt

SEQ ID NO: 64349 - DNA, 485 bp, Glycine max
  unsure (1)..(485): unsure at all n locations
tgtangaatatggngtacccatcacatgtggtactatgtgtcggtcgggcaatggtgcacaacaagttntccacatccacaatgcgcgcataaacccaccatcccctgttgcccacctccaactgagctcacgtactcccacgtagcccatatcctcatttctctcaacaccgggtccccatcaatcctctcaagcttccacaacatccaagcaaaacaacattcaaacagcacaagctatcacaaccaagcaaaacagagcaaaggcagaaaactctgctcaaacaccaaccaaaatcacagcttttctcacttaaagacccagtaacaattccttcgatccaattcgttaaccgttggatcaactccaaaatnttactggaagtctatagtgcataagcctacattgtgaaccgtgngatctactagcanacatncagcactcattctgcactaactctttcacaaccagcaaaaacatagca

SEQ ID NO: 64350 - DNA, 194 bp, Glycine max
ttgttaattcatcctgataatttgatttgccataagaatgtcgatggcgcatcaaggagctgcttttatatagacctgctggatcggtcatcttttctggccgacatcgactattattttttttatcagggtcggtgaataatgttttttgggcgaggtgggctgatgtttctctagccgagtaaatgagaaca

SEQ ID NO: 64351 - DNA, 423 bp, Glycine max
  unsure (1)..(423): unsure at all n locations
tatcaataaacacttgtttttnttattcagaaaattagagtttatctctgttatcttagtgagagtgattctcctaaattctggagtgattcaagaacaccctggctgtatcaaaggactgtcacaacctttgtgtgttgccctcgctggaaagagtgattctatccttcctttcatcctcacccttgttctgtcaaatcacaattccagaaaattcatccctgcccagaattatctcttggcctttacttccattttacgcgctcaaattaagtgattcttgagcctaaattgaatgttaaaacgatacctctcacctctgttnggaacacctgatgtggagccctattgcttcattgattggcatttcttatttctgtccatgcacacttaacctacggtgtccatcccttctttcattta

SEQ ID NO: 64352 - DNA, 262 bp, Glycine max
tatcagagatagagttattctttatctaggagaggatctctaaatcttgaggatcagaacacctggtgatcaaagacttcacactttggtgtgcctcgtggaagaggatctttctttcatcatttcaccttgtcttcaacccaatccaaaaatcaccttgccaaatattcgggcatactccatttaccctcaattaggatttgacctaatgattcaaacaacttacctgttggatactattgacctgacttagtatgcattt

SEQ ID NO: 64353 - DNA, 238 bp, Glycine max
tgaaggagagccggagttgctgcacaagatgtccaacgttatgtcccagaataagatcgggctgcacaatgcacaaggcaagataaagtgtcaaatgaagaattgaagctgcaggattcacgatgtcggatacaatgtccaggacatgctgcctcgaaatactgtcattgctaaaagcattgaagctgcaggatccacgatgtcggatactatgaccaggacatcatgcccgaaaata

SEQ ID NO: 64354 - DNA, 426 bp, Glycine max
  unsure (1)..(426): unsure at all n locations
tatactatctatagggcggaacagaaatatgaatatgctttgactcttctagagacgggtgctgggggtccaaactcgaagcgtatttttgtaagaagaagatnactgtcaaatatataatatcgaaataatttcactaataatatcgcacatcacttntacaattattttactggcatacatcatctatcggttaattattttcatgcacatatttcttaacctttttgcatttataacatttttagaaaactataaaagttaatcacattgttngaattaactcaacttttatttatgaaatacgcacttaatnttaagtaattcgattagtgattatttgaatcatcattcaataaatgaatacatatgtaagcgcaagaccttcactagttattttatgatgatattatggatcaaattaaa

SEQ ID NO: 64355 - DNA, 441 bp, Glycine max
  unsure (1)..(441): unsure at all n locations
gccactgcccaccgtttcaccgatttccacgctcagaaaatatcaaatggttaatcaatatatataatttacttttgaaagatgactaatattatatatatatatatataactgtggtagttaattactcaatataatttaggaacaagttcagtgtgtgtgtatagcanaagacagagaaataataataaatgtgatgagagataactntaatttacatgcgagttttattatatataaaaaggattatatttagctaaattcaaaatggctggtagttgcatttcaaaatagcgaatttngaaacttgaggcagactgtgnggcgtccaattgatcgctctagaccacaagcattgaaagcatatcagcaggcagctagctggtgaaaacacgtgaataggttgtctaacatcgtgttaacatagatcctcaaaatata

SEQ ID NO: 64356 - DNA, 487 bp, Glycine max
  unsure (1)..(487): unsure at all n locations
atcaaaccacctaagcgagataatgaacgacccattgtgtccgtgtcaatttgctccaatttctcgaagcaatcaacacttctggatccccaaatgggtgattcattcacgttcagttgccctgcggctgcaattgccattgctccctaatcttccaaggaacgaaattcgaaagcaacagcgaatcgaatgagtcanggttcctctacggtttctcgcgcgcgacaattntctagaaagtctctcgcaagatcgaatagctgatatttgattgctttaaactgaaagttctagtttagagaaaaaataaaacaaatgtatctctgatcattgatatatatatatatatatatatatatatatatataaacatatgtgggtggtgaccattcactcctagttgctaatgcatcaaataattggattacaaattatatatttttcttagaatcaatgtaagatattatgtttttatatttattttaaa

SEQ ID NO: 64357 - DNA, 452 bp, Glycine max
  unsure (1)..(452): unsure at all n locations
tgccgcccagctcgcccaggcgagctcagctcgcctcaggttatcagggttgcttcctccagaagcaaccgccttctggaggaatcttctggagggcccaaatgggcctgggtgctatttgcacccccatttttactaagtacacccccctctgctgttttttggtgattcttttttcgtaaagttacggaaacttacgaatttcgtaacgatacttgttttctttccgtaatgttacggaaccttgcggattacataatcatcccctttttgacttacggaatgttacggaacctcacttaattatgcaacgatgcttccatttgatttccggtgtgtcacggaaacttacggattgtgcatcaatattttttttggtttntcggcatgtcctggaattacacaaattgcctaatgattggtgccaagcacctcacgaggaccaaagaatg

SEQ ID NO: 64358 - DNA, 471 bp, Glycine max
  unsure (1)..(471): unsure at all n locations
ggaccttagatactaagcttatcccgaaaacanagtgtccattgtctcctcttatgatcctgcaacaggggagagaccaagaagctcttattctctgtcccttaacggttcagaaaagcgcgcgcatgcgaaatggaacatagggattgagaagtgaagtagacagcgatcaaatgagagtgagatcttgatcattgattgtggagttgaaactattatagtgcagtgtgtatgttttggtggtgggaagtggaaacaagaaacgaacgagacacgaagaatattacgttactggtcttgagggaaatcgaatgaaaaagaaaaggtgcctttaacgctgtcgtttactgatatatatagagctatgagctcccggcgcttggattggatngaatgtttttggtttttatttntaannaaatagaanataagagtaaaaatangtgtatttaaaaattattagatatttat

SEQ ID NO: 64359 - DNA, 344 bp, Glycine max
  unsure (1)..(344): unsure at all n locations
agcttttatccaggcaattcttgggggtgaagctccttcttccttggcttattccctagtggatggagcctnccctctnctcttctcctttgccttccgctgcatctccatggtgtaaaatcaccattgaaggatctcattgaagctcanagatccagcctncatagaagccccacaagcaagctttcatcaagtggtaatcagagcacaagagcttcaagtaggtgctccttaaacctcccattaatttttgctttaccttctcttccattggtggttcttcattnttttctccatgtatctcctaacatgtcttgtgctaaatgggtgtaactttattcttt

SEQ ID NO: 64360 - DNA, 275 bp, Glycine max
  unsure (1)..(275): unsure at all n locations
ctctcttcccttcgcagcttgagttcactatngctaccccacagagctccgcgaaatttattccagccatactcttccttgcgagccctcttggtctcttgntcaaaggctctngcngtagttgcattctcttcccgtaacccggcacactccttccgaatgtgtgtagtggccaacttgaacttcttcttggcaagtttcgccttttctaactcgcttttgagagcatggacttcttcgtcctgttccggtgcttcaaaactctcttcgctgac

SEQ ID NO: 64361 - DNA, 469 bp, Glycine max
  unsure (1)..(469): unsure at all n locations
agctngccaaanacgcgacacaagtacaaagtttttntatatccaaaaatattggtttctactttatgcctttagagctcctacaccttgactagtttggaccaactaggactgcatccctctttggatgcaaatatggactggtcatagtggacgattacacctgatggacatatgccaggtttctaacccacaaggatgagtcttttgataccttttataaattttgctaaaagattcaaaacaaaaaaaacatttgtatctcttctatcataagtgatcacggcggagagtttgaaaacaatcttcttgaaaatttttgtgaagagaatggtatccaccataatttctccactctaagataatggtattcaccataatctttccatccatttggatgtcaatttttatttaaataccaaggataaccttggagaatatgactccaaatgtgattctagaatactac

SEQ ID NO: 64362 - DNA, 239 bp, Glycine max
  unsure (1)..(239): unsure at all n locations
ttgagtttccccaataataatctcaagcacttgggctattgcggtggctagaatattatacacaatctcgtataacaaattatagcaagatatgcgtctaaaatggtttacctgtgaggcctgatcatgcttatgaataagcacaataatagcatggttgagttgctctaaanatttttcagttggtaaagaattcattaaccgccgcaaagatatcatcaccaatgatatttcaagcc

SEQ ID NO: 64363 - DNA, 348 bp, Glycine max
  unsure (1)..(348): unsure at all n locations
agcttgcctcanagaggtccaggaaggacaatgcggccgaatgaactagttccgccccggagtacgacagtcaccgctttatgagcgttgtacaccaccagcgcttcgaagccatcaagggatggtcgtttctccgggagcgacgcgtccagctcagggacgacgagtatactgatttccaggaggaaatagggcgccggcggtgggcaccactggttactcctatggccaagtttgatccagaaatagtccttgagttttatgccaatgcttggccaacagaggagggcgtgcgtgacatgaggtcctgngttangggtcagtggatcccgttcgatgccgacgcta

SEQ ID NO: 64364 - DNA, 258 bp, Glycine max
  unsure (1)..(258): unsure at all n locations
tctggaggcccaaaggggcctgaatgttatttgcacccccatttttactaaatacacnccctcctttttttggtgaatctnttttcgcaaagttaccgaaacttacaaaattggttacgatacttgatattttccgtatgatacagaaccttgccgattacataatcatccncttttttgacttacggaatgttacggaacctcactatttgtgcaacgatgactctcttttgattccggtgtgtcacggaaccttac

SEQ ID NO: 64365 - DNA, 455 bp, Glycine max
  unsure (1)..(455): unsure at all n locations
agctntgagccaattcaaacaacaataactttttactctaatgtctgattgagttttgtaacatatcgagacgctcgaaattgaatgttgaacttctgagctaattcaaacgacaataacatttttctcggatgtctggttgattcccgtaacatatcgagacgctcgaaattgaatgttgaacctcttagctaattcaaacgacaataactcttttcacggatgtctgatagagtcccgtaacatatcgagacagctcgaaatgaatgttgaagctctgagccaattcaaaacacaataacttntttctcggatgtctgattgagtcccgtaatatatcgagacgctcgaaattgaatgttgaaactctgagccaattcaaaccacaataactatttactcggatgtctgattgagtctcggaatatattgagacgctccaaattgaatggtga

SEQ ID NO: 64366 - DNA, 410 bp, Glycine max
  unsure (1)..(410): unsure at all n locations
cattcaacttcgagcatctcgatatattacgggactctatcagacatcccttgttataagttattgtcgnttgaattgtctcagagcttcaacattcaatttcgagcctctcgatatattacgagactcaatcagacatcccacgaaaaagttgttgtcgtttgaattggctcagagcttcaacattcaatttcaagcgtctcattctattacgagactcaatcagacattcgagtaaaaagttattgtcgtttgaattggctgagagcttcaacattcaatttcgagcgtctcgatatgttacgggactcaatcagacatccgagtaaaaagttatttgtcgttgaattggctgagagctcaacattcaatttcgagcctctcgatatattacgagactcaatcagaca

SEQ ID NO: 64367 - DNA, 399 bp, Glycine max
  unsure (1)..(399): unsure at all n locations
atgatacatgtgccacttcccttcacgntgaacgcatcgtcaacatagagcctccaccagactagggtgggttgatcattgatagacaactttgccacaaaagtttgtcatgaactgtgtcttcacggggccgctagtttcatactggagatcgaactcataaaattctatggataatgctaccatccaccttgccaatttaggctttcgcaaaacatgtttgatggggtagtttgtcttgactatgaccatgtgactctaaaagtatggtatgagacgtcgggctgaggtaatgagtgctaacgccagcttctctatcatttggtagcgcttctcagtatcatggagtatgcagcttgaaattctgatactcagggacagatgtcgtaccggatgtca

SEQ ID NO: 64368 - DNA, 418 bp, Glycine max
  unsure (1)..(418): unsure at all n locations
agcttatcaaggtgatacaatntcttgatagttgatgaataagagaaaacccaatgganaagctactcagagtttacaaattcaatgcactatatatttaccaaatgtcaaataacctataactataaagctaccttactcattgcgtctgaaacataacactttatcatatcctcatataaatcagctaatcgatgtatttctggtgcatcaggcgaatgttctatgaccaaataagcatattcacagaaagtgggagtttcaggagcaaagaatatagggtagtggagaaattntggaaattctgctgagagaaaaaacacacagcatagagagagaaaatgaagtacctaaatagcaaattgcctagttccttctgccacaactgtaacaaggaccacttttccagaatccatgt

SEQ ID NO: 64369 - DNA, 286 bp, Glycine max
  unsure (1)..(286): unsure at all n locations
ctcatatgtncaagtctttgatgcctcatggttgaattattgacagcctcagtaactgctaccatatcctcatctgcaatcatgtaaagagatcctcgcttctttccacgagccacaatgagattgccttttgttaccttccaagctccatctccaaaagtggtgtgatgtcccttatcatccaactgccctataaatattaaatntctctttaaggcangaatatgtctgacattgtgcaatgtccatagggatccactggagggcttgatgttgatatcacctc

SEQ ID NO: 64370 - DNA, 367 bp, Glycine max
  unsure (1)..(367): unsure at all n locations
agctatgaatgaagctaaagaagctgttgcttatggttcatnagatccgccggagaataatatatctcagcctcatttgtcacaagatagagacatggagttgatgcgtaatatttgtcacaacaaagtaggtctatctcaacctaatttggggcaacactctatctgtatatattacaaatattcatgttcggcatttgcatgtacgtgcctgcaactattgctccaccgataccaaggaataagctgaccataacacgagccaaacaaaggaagggggctgataaagatgatgcagtataaagaatattgaagaccaattctttgttgcattctgaaagttgctgagttataatggtgctgatga

SEQ ID NO: 64371 - DNA, 141 bp, Glycine max
atacccaaatcgtttgagtaccttgaatataaccctttgtcacgaaaaaaatatgaatttaaaaagtgaacacagaaatgttgacattcttcaagtccccacaccacatgtatcccattatacctgatctctttcttaaag

SEQ ID NO: 64372 - DNA, 437 bp, Glycine max
agctatttggagtagaaacatgggaccaactcattttatttcaaaaaaaagggtgtatctagtcaaggtctgagagaccatacaagtttcctagcgatttctaattatgtgggccattaagtctatcatatgttgacaatagccgagaagcccatgaatctcttcgggggcggagtaggtgtacgccatcgccttggccttggctaacaagcggggaagttcttgactcccgttcaaggtaagagcaaaccgatccatccacatggttgcctcttggtgtaaagagtcgatcacccttcctctagcctctttttccgcgtatacttgggcatactcgtccgcgatcctatgctcgtgagccgtggctagacctaactcttcttggtacttggcgatgatagctagcatggtggtctccgtctcgcataaacgctgag

SEQ ID NO: 64373 - DNA, 252 bp, Glycine max
  unsure (1)..(252): unsure at all n locations
ataataagagaagcagcctcatttgtgaacaattctttgcgcccatcctgtgaacagtgcattgaagtgagaatggcccagaggagctccaacaatctcccaagccgatatgggctaattggggtgagccaaagtgacctcctcaactgtnttgaggtccaagaggtttagagcaattctctcccactctgtctcattgtcactactactactactactactactactctctgcttcattgtgatcattgaa

SEQ ID NO: 64374 - DNA, 458 bp, Glycine max
  unsure (1)..(458): unsure at all n locations
agcttgagtaccttgacctctactatactttttttctgtaagagncctgatgacattgaccacttggctagcctgagttttcttatccttggtggcaacaacttctctggtgacattcctaccagcattgggaggttaaaggagctaaaaagtcttcaactttatcagtgtcttctcaatggtactttccctgccgaaattggcaacttgtccaaccttgagtccttgtatgtgttctcaaaccacatgctcactcccacaaagatgccatcaagcttgacccagttgaacaaattgaaggtctttcatatgtatgaatccagctctgtaggggaaatccctgaatccattgtacacatggtggcattggatgactggatttgtcaaacatgattaagtgacaattcccatgatttgttatctgaaaattgacatactgttttaccgatcagcttctg

SEQ ID NO: 64375 - DNA, 327 bp, Glycine max
  unsure (1)..(327): unsure at all n locations
tgatatagaagatgccattgtgatgaacaatgcatctcttgatccggggcttggtcgttgattgttatgaagaaatatgcaactctatttggtgttgtatgctcttggttgtccatattttattgtctaagctctttaaggtagcatntctgatcttgatcttccctgctgtataggtataatgccatcattcagaagcattcgaatgacacatcagaccgactcttatgcctaatagaactgcgaacacgctggacgtatgcaggcaatgtctttgtggccatagaaattaatactaactcatattactgacgtatttgctgagat

SEQ ID NO: 64376 - DNA, 380 bp, Glycine max
  unsure (1)..(380): unsure at all n locations
agctatgttaattggataatgaagcctaatgtgtgattttgctnnctatangcttatgctctttcaagntttgaatattcttccatcttttttgtctcaaacacatctagtttatcaagtgaatgagtatatttgtatgtttaaattcatttcacgtcgataaactaattgtatacggaaatagcttattatgattcggacaagtataacaataaatagcttttgtatactcaatctaaatgtgattnttatttcaatttttttgtattatagattatcaacatggttttgtaataattcatccattccgcaatctcttccaatttgttttgtttgcacttactaatgttangtagtaagatgctgatctttgatttaac

SEQ ID NO: 64377 - DNA, 409 bp, Glycine max
  unsure (1)..(409): unsure at all n locations
taacatctcatgttagtctttctactcagacngatgtttgcatacatgatacatgaggagtgntatggtcctcattaacacattccttttgatacctctctatattggttaaaaattngttgaaaattatataatcataagtaaaaaatggaactcacaaaattgtgggtttaataaattttaattaataataaagagggagcttaaatttttagaatatgataatgatggaatttgttatgtctgcactaatattatgttgttttcaagtgatgaatgtcatcttcaaattgaatttgcaacattttaatagtatgatgatgtatgttatccttattaatgataacattcaaacaaagttatattatcttaactaacatgaattgttatttaaattcgtacaaaattg

SEQ ID NO: 64378 - DNA, 386 bp, Glycine max
  unsure (1)..(386): unsure at all n locations
gcttgaagatacaaagaaagcatgcttctattaaattatgatccnganagatcaatgaaggggactcgaattccaattattgtcacttgtgtttcaaaggcagacaatgatagaatcaaattggtgtcattaattctaaccatggttagatggaaggagtagaagctataaagaatgacgttttggtgcacttcgaaagagtatatcaagaagactctttcttgtacctaaatctggaacaagtcatttttaatcagcttatggtcgccgatagagctactctcttaaccctttcctctagtgatgagatcaaagaagttcgttggaactattatgccatggtcctaatangataacatatcctttcgcacagagtggttgaatat

SEQ ID NO: 64379 - DNA, 316 bp, Glycine max
tggctacttgaacctcttctcctcagaggtgccttcccggcgcccggagtgttcccccgagccacttcgatggtcttgatggctatgcttcttatgcttatacttcttctttgggtccttgctgacaagaggcaccacatcaactggaacctcacaaggtctcgatgcccatgtggcgtcaacatcggcgtatctccaccaaaagtagccatctgaacccgcctggtgatggaagcttgcttgtggtgcttctatggaagctggatctttgagcttcaatgaagtcccttaatggtgattttcaccatggaatgca

SEQ ID NO: 64380 - DNA, 309 bp, Glycine max
aaaagtactttcgacacctactgtgcgctgattagaccaaagcctgcttggcaatgttgaactatacttctaacctatttgttacacctgacacgatagtcgccgttggacctatccacgccaatcttatcatagacctcggccttatctctctgagtgcgatcaatccatgtgaaaaggtggactcgctacgaaaatttttaaatttgatcaaatgtgtcgcaggatgtcgcggataaaatatttgaaaacgtcgttagttaatgaagggaattactgacatcaattaaattcaccaagctcaccact

SEQ ID NO: 64381 - DNA, 404 bp, Glycine max
  unsure (1)..(404): unsure at all n locations
agctntgagccaaaatcctgactcaccatatatcttgatttcttgtgagaatgtcaatccttaccctcggaagcaaaaaagaagagaagggaaatttccaatcaaagaaaaagagaaggaaagtttccaaatcataggaaaaaaggaagcaaggaaattcccaatcatagagagggagaaagaaaaaaagaaaagaaagaaagttcccaacctaagaatgggagaaagtagagaaagaaaagaagaaagctcctggtcaaagaaaccagaagaaatgtgcagagaggtctttataccggacaatatctgaacaatacagaattgtcactatataaacaaaaacagaanaggagaaagccaaccaaatatcaaaagccataaacacacaaaagccataaacccca

SEQ ID NO: 64382 - DNA, 426 bp, Glycine max
  unsure (1)..(426): unsure at all n locations
tgagctgcagcttaaacctcggcgtggttatattcatctncttcccaatctatntgaattatgatgctgcttccaacgttacatccaagccattttctggcataattcgtgtagcagtgctgcctgatttcaactccaagcgtgtaaaaattctcgacaagttcagctcttgttatcctttgtcgggtaatgcaacactcgagaagcctttccgtgtggtgtatgaatggctaaaggaagggtctgggaacctgctaatgctanctcaccctcttcatgtcaagaatttatcatctactaataacggtcaagttaatgtgcttcgtcattttaagtatagaaacattgatggcgatcttgctggtgttgttggagactcatgggtgatggataccaatcctanttctgtgacatggnattctaaca

SEQ ID NO: 64383 - DNA, 373 bp, Glycine max
  unsure (1)..(373): unsure at all n locations
aattaaatgaaaattcttctcaagaacatacgaaattcanaacttttatnttaaagaanagaagctagagacttatagagaaattggtgggcaagtttcaactgctttttaatgtaccataatccatccaaaaaaatatttcacaaaagaatctaacaattaagtgaggggtgaaaaaaaaagggaaattcttcatgtatagtacaaaacttttaacatgaaaattcaagttaatcaattacaatgtaaattatttgtatcatttctctcacacgtgtgtagtcatgtgagaatntcactatagatatctcataatctataattattcattgtgaataaacagtttcttgaggaggaaaaaagtatgcaatgg

SEQ ID NO: 64384 - DNA, 315 bp, Glycine max
caagctgaataatggtcatatgattgaatatgaatattaacatgattatgttgatgaagcaaatttaattcatgcacaaaactgggtaacttcctaagtaatacacgtacaatatgatacgaagttgactcaatatatgctagtgatatgagatatttgtgtggcttctatttactatcactaactggtgtttgatttgagatatgctagcaacagactccttgacacactcttttgaacactctctcctttatgcggtgaagtgtctggacaatacaaaagaatatgggacctcatctatttaacgatccttta

SEQ ID NO: 64385 - DNA, 411 bp, Glycine max
catgcaagctatctgtagatcaatgtctaattacagatgataaggtgaaacgtatgccacagtttccctatgctaatgtagttggttgcttgatatatgttatggtctgcactagatgaaataatacatcgtgaaataaattctctaattgtagtatattcttgaggattgcagtatattctttctcttatatgaatgattgtacgtaaaggaattgattatagtttaatctgactaggtagccgataatttctaattgtttagcatctccaacttagtagactcaaccaaacatgatgcaacacacgcatcataagcatacaaataaaatatatacaaccaagaactatgatcaacattttagttacaaagtaaatgaagttcaaacgatgatgaactgaatatggaaga

SEQ ID NO: 64386 - DNA, 421 bp, Glycine max
  unsure (1)..(421): unsure at all n locations
tatacagtatattaactttaggctaccataaaatcattttctcttgaatgatgatatatactcagcacatttgtagaatctattttagaataaaaaaagggaaagaaatatgaaatgtgcatgatgtgtgatataataaaaagagatgacacgacaaatattactctataaattagtgtatgtgtncgtgtattgataataatgcaactttttaaaaaaaatttcttgaattttttacccgaaatttcattataaatacattctatcatataaatttattggattcaacattaataacgtctatatacattacacataaaacaatntaaagaacatgagtttttctcgctaataataaaaagaagtatcctaaatataagtatttttaatatacttcctttatgaattggctataattatc

SEQ ID NO: 64387 - DNA, 437 bp, Glycine max
  unsure (1)..(437): unsure at all n locations
agctgntcgccatcgttgcgtgttgaatctattctacaaggtttgaagtagaggagagcttcaatcctataacacaacgtggcggacaatagtgggcagataacttgaatgaccattattgtcaatgcggaaggtattctgtgcttcactatccatgttcacacattattgcagcttgtggttacgtgagcatgtactactaccaatatatagatgttgtttacacgaatgagcacatcttataagcatactccgcacagtggtggcctcttgggaatgaagcgacaattcctccttttgatgatgcatggacacttatccctgacccaactacaattcatgcgaaaggtcatccaaatcaacaaggataagtggcatactctaatttcatctgacgaccattgtttgatggcctgcaaccttgcttgaccgctttg

SEQ ID NO: 64388 - DNA, 245 bp, Glycine max
gagagagggctgtctgataaaagtatgggggctgagtgaagagagagaaaagcttctttggtctttaataaaaggggtttctctttttctattattttattcaagctctgccacatgtccctatttgattggagcaaaaagggcctactttctcttttgatggcgacccatactcaccccaaaaagtgagaaaaacctgaccttctaaacgctaaaatcctgcctcggtttgcatgccgcttctc

SEQ ID NO: 64389 - DNA, 378 bp, Glycine max
  unsure (1)..(378): unsure at all n locations
tatcaatatcatgactccagnatgtgctctccatggngagtgacatatatgcagaagcatatcaccacgtcaccagtgcatgacacccacgaagagtggcatgcatgcaagagcacgatgctcaaaacccaagtcagacaattccctggtcaatcctccaaagggctcacaaaacctatgtccacccttggtgagtcacactgattcacaccaccatgtttcaagtacctaccactttgtaagaggcgtgtatgtaagagcaagccagtttgtatccaatacatgccacccatagtgagtaccttgtatgccagagcacaacacttacgctgcacacaagactcatcaaaaccaagcttcgtgcttgctggtccttac

SEQ ID NO: 64390 - DNA, 323 bp, Glycine max
gatgagcttttttttttttggcgattttttaaataaaaaatatgttggaattatggataattttaaaaggttatatagaatattttataaagacagggaagaaaattatgatggtaatatattgtaaaaatatcattaagagaaatgggagtttacaattataagaaaaataaaattttattggtagtaatatatttttgtttaaaaatgtttaatttggcccgaaatttttgagattggcgatatgtgttaaattaaatatattttgttaactatatatagtatggatataatttaaaatatatgatgaaattatttattag

SEQ ID NO: 64391 - DNA, 312 bp, Glycine max
  unsure (1)..(312): unsure at all n locations
gcgtctcaatatattatgggtctgaatcagacatctcgaatcanaagntatggctgtttgtatatgccatgtgcttccatgttcaattntgagcatctcgatatattatgcacctgaatcgggcatctgagtgaaaaagtatgtcatatgagttagccgagagcttcgttggtccatttcgagcagctcgacatattattggcctgaatcggacatccgagtcaaaaagtatggcagtgtaaacttctcatgtgcttccatgtttaattttgagcatctcgattattatgcacctgaattggacatccgaga

SEQ ID NO: 64392 - DNA, 361 bp, Glycine max
atgaaagacgagagaatggagcaaacgaattatatccaacaaatcccacatctaagtaagcaaaacatttaaagcactatcttcataacatatgctttgcagttgggaaatacaaagacaaatacactgctcccactattaaatgtcatcaaaataactatagcacccatatgagggcaagtgttgaatctgcaccctctaactgcagattctgatctgttatttgtttcatgaaccacagcaagccgcattttgagcagctatacccccggtggctgcctggacgggtagctaatcttgatagtctgaggctgaaccacacaagaagaagatactgtcatctttcaggaatatgaaagaa

SEQ ID NO: 64393 - DNA, 368 bp, Glycine max
  unsure (1)..(368): unsure at all n locations
agctnggcctcttgctatcaatgatactcatattggtgtgcgtttgggcaattgttttggtgacatgtgaggacgcacaatggtacccgtcatcgatatcaagtagtgaatggtaacaaaattcaaagttgtattttctgccattccagggattgaaataatgttcaatttatctttatacactaattttttctcgaaagaacgattaaaatattgttagtacccactaatccatcaagacgttcaacattatctgccaaaagttagtcataattttgaggaacaaaatagtccttcgggagagtgaaagttcactgtcgtgattctcgacactggacgtgttttatgcgtgctgcacactggaaaat

SEQ ID NO: 64394 - DNA, 269 bp, Glycine max
atgaacaattgacctgggaccgtgttcacaagtgagaacaattgccaagcttcttactaatggagaaagtgtactaacgtgaaataattctataacctaccggtatattcacgttccccattatgtatgctcggacgagaagaaacatggggattcgaagcttaattgattagtaacattgaaatcgatgaaggggttttggttctctgtatatcaatattccttgatccgctccagtataaagcttgtaatttttatccccctgcttt

SEQ ID NO: 64395 - DNA, 468 bp, Glycine max
  unsure (1)..(468): unsure at all n locations
agctnntctagctttcattggagtattatgatctctcttttgtgctctaaattatgggagtatgctcaaatatatagggcaattctagtttggtttcttgcttgattaagttgaattaggggtgtgtatgggatggccctacgcctataatgcatttttgaacaatgggacatgccacatagtccccgttctcttgctattgacgcctaaacgcgcgcccaccaagtgttcggtgaaatgcctcaatggcattagcgcgtgacttttgtaaggaaacaacccatggngcattttggtttgacacattttcttttttggaatatgattcattcctgaaaagctagagtaattgccccatatatccttgcctatgaactaaatttatgcaaaaaacacaaaggaggtgatattgtgaaagtactcttttggcagcatctgctctggcccactacaatatttctaccctaa

SEQ ID NO: 64396 - DNA, 318 bp, Glycine max
  unsure (1)..(318): unsure at all n locations
ctcgcctgtgcgagctgctgngcaatctccacccttcatantctataaataagcgtgacggggctaatgagaaaggtccaacatcatatattaagaggttttcattgcaattagtgacaagaatgagaaagaagaagaaaattcatgtcgaggcacttccgtaacgctttcgaatgttttcgtgaccgatctcgcgaatcgtcttcgtccgtgtgtcaatcgtcttcgtcggttctcattcttcgactagttagcttttatttattgaaggtgtgaattcattctatgcacccttaggggtgcatncttgctttacat

SEQ ID NO: 64397 - DNA, 478 bp, Glycine max
atctctaagtcacctgcggcatgcaagctatgatgtttgtgttgaatgcattaaatgtttacattattcttagccagaaattaggtgcatatagagcttctgacgtcttggaattgatacatacagacatttttgggccatttcatacaccttcatggaatggtcaacaatattttatatcattcatagatgattactccagatatgcatactcgtttattatacatggaaagtcacaatctttggatgtgttcaaaacatttaaagttgaagttgaaaatcaactcaacaaaagaataaagtgtgtcagatctgactgtggtggtgaatactatggcacatatgaccgttcaggtgaacaatgttcggggccttttgcaggtacctagaggaatgtggaatcgtctcacagtacaccatgatggggtcacctatcatgaatggtgtggttgaaagacaaacataactcttaaagata

SEQ ID NO: 64398 - DNA, 253 bp, Glycine max
  unsure (1)..(253): unsure at all n locations
catggcctattgaaaatcattaattaataaagccttagtcaagcatcactactctgcaaaaatactttaattttattattcagtactaggttatctgtttttatagatcgtacagttcctaatttggttnatcccatatatcaattttataaattataagaatatatatattatatatatacaaactccatattttataagaagccttgcataaagtcctttttaaatgattttggcacttcgattttagaaa

SEQ ID NO: 64399 - DNA, 339 bp, Glycine max
ttttaatagacttttgggatgtattttgatatgacaatatttatctatctcaatttcttggagtgcgaagcactctacgtaacagatcttctcctgctaagatgtggttggcgggagagaaaaacatatactactgcgggaagtgttggaatatgaactaccttccatgctcatgtcagaacacagaaatttcccctttccttacttgctcattgtacttgtcacggcgagataattattatctacaagctgcccacaaacatgctcaacttttaaccttgtagttgaaccaaatattaggctgtttttattataatctattgcgcaatttctgtttct

SEQ ID NO: 64400 - DNA, 121 bp, Glycine max
  unsure (1)..(121): unsure at all n locations
gacgagacctcaagagaccgcagcatgcactgaaaaaaanaaaattttgattggcacacacacaggcgataagccaggagagacaacggggacccacatatcatggaaacacaagagggga

SEQ ID NO: 64401 - DNA, 73 bp, Glycine max
aacttgagccgaactttacttcaaagggatcatattttgcgcggcaaatttttcgccaaatcaggaacccaat

SEQ ID NO: 64402 - DNA, 384 bp, Glycine max
  unsure (1)..(384): unsure at all n locations
tcaagcttattngaacagctgagaggttcattatttcttgagtcanancaaatgtcaaactctgtatatttgatcactttgcaacaagatacaggttacaatgtattatgagtcagtgtaatataaccgtgtggatcaaaagaatccagttccatcaaggagatgcttatcttcacatagttttgctgagtgattatacaatttacttattggcgaaagattctagctaccctcaagtggaaatagcagaacacatctcttataggttaaacacttgctaagaggaatctgattaagatcatgatcttttgtggacatggacattatacacaaaccatatggtaggaaaaagtgtatagctaagaatactacaacaccaagatc

SEQ ID NO: 64403 - DNA, 425 bp, Glycine max
  unsure (1)..(425): unsure at all n locations
atccttagagacacctgcngcatgcaagctttctnggtgccattaactgttagagcatatatttggaaagatagttttaccaaaaaacgctactcttataacataaatggcatacaacatacaaacatcaatgtaagattagagtaaacttatgcacatatctttttacgaacgttcacttgcacaagacattcttataactaaaaaaaatgcacccatgtacaatcaacacacatccattacctagattatatatatgtacttccaaggtgtatgtgctacctacatcacatgcacttccttggctaaatatacatacatgcatactcaaagcatattgggtaccaaaaattgcacatgtgcacattccggtatttctaatattnatgcatatacaaacgtttgtgatgaatctttggtatcta

SEQ ID NO: 64404 - DNA, 356 bp, Glycine max
  unsure (1)..(356): unsure at all n locations
agcttgcttgtggggcttctatggtggctggatctttgagcttcaatgaggtcctttaatggtgattttccaccatggagatgcagcggaagacaaaggagaagaggtaagaggaggcgccatccactatggaataagccatggaagaaggagcttcaccaccaagatgagccttggataagaaacttggagaggatgcttcaatggaggaaaagaaagagggagagaaagagagaggggggagcacgaaatcgancgaattaaagaggtagagaagtggaactttgaagtatgtctcacaagactctcattcatcannagtacaacangtggtacacatgattctattatagact

SEQ ID NO: 64405 - DNA, 367 bp, Glycine max
catgcattaggggccatgctcaattattttgtttttagtgaaatgggtttatgatcccaacatggtttgctcgtggtgccttacacatgaaactaataatgttgtgtggaggttcacgccttcaccctttcttgtttttgtttgttgaggataacacaatgatgagcaaacatgaaaacacatggtgtgcaattttgcagatcaaaaaagtttgttaacgcatatgcatgatgatgccatgactcatgcacaatgtgaggccggaatatgataaccgacaaattgccgatatgccactattgattgtatgaagagatgcttatgcgatgcatgatatgaattgcatttaccgacacgagagcctgga

SEQ ID NO: 64406 - DNA, 371 bp, Glycine max
  unsure (1)..(371): unsure at all n locations
ctagaggttatctacacacacccatctaataactaagctcacctccttgagaagctttcttgagaagctagagcttatctacacacccctataatagctaagctcaccctcatgacaaagaaacgtgaaaatacctaataaatcctactacaaagactacttataatgccctgtaatacaaggctaaaaccctatactactaaaatgggcgaaatacacaggccctaagaagataacaacctattctactatctactaagaagagtggacccaaccttggctcatgggctcagaaatctaccnttagaatcatgagaaccctaagccttcttttcaactttaagcccaacctctaggagtctctggctcat

SEQ ID NO: 64407 - DNA, 236 bp, Glycine max
ccaaatacttatctatacccaacgctttccattatcatactgatagtcaacccatttaaaacaagctttgcgacattctgtcaaaatttatgacccactaaaaggggtaggtaaccataaataatgaggctcatactagctacatggccgtcgagcttattttgttggtattcaaaaaaacttcatcgtgatttttacactgacctcgtgaaagtaatctccgcaaagttcctaaa

SEQ ID NO: 64408 - DNA, 469 bp, Glycine max
  unsure (1)..(469): unsure at all n locations
agctngngcacgctaagcgcgcgtaaagacatttttctcgttgggcggactaactatgcgctaagcgcaatgctctctgacttaacatcttctagggttttgcatccactaagcgagctagttgcctcgctaagcgaatgaggctcgcttagtcaatctacccgctaagcgagttctttagcaacattttactcttctcttctttaacctacaaactgagttaaattcaacattagtttacaaaaatggagtttctactttataaattcatacaagaatgaaaatatttacaatttccacaaaaagaagcataaattagaggcacattgctattttcttccttatttntaatgcactaaaagctcatgaatagcaattaacaataatccataccctcgaacaccccaacttataattcttctaaccccaactgggttgagttaattgagtcaatttaattaatcctttt

SEQ ID NO: 64409 - DNA, 360 bp, Glycine max
  unsure (1)..(360): unsure at all n locations
cttcctctttttaaaattttaaaccttgatctgttttaggttctaaaatatggtatgtgaggacaaagtatgtctttggaaacccaagttattggtatatgttaatacaagtatatgaagtagtgcttgtctccttttgttcagagatcactgatgactgatattntctaatatttttttatcaatttgggttttggttttttggcatcaaacaccctaatctctaaatacaatatacgctctttgctgtatttcatgtgacaacaacacattatgagtgaaactacatgatccatgcngaaacaatgtccgggccacgtgtggaagagctgccaatattgattgacttttttttttatt

SEQ ID NO: 64410 - DNA, 431 bp, Glycine max
agctttttggagtaaaaacatgggaccaactctatttatttcttaaaaaagggtgtatctagtcaaggtctgagagaccatacaagtttcctagcgatttctaattatgtgggccattaagtctatcatatgttgacaatagccgagaagcccatgaatctcttcgggggcggagtaggtgtccgccatcgccttggccttggctaacaagcggggaagttcttgactcccgttcaaggtaagagcaaaccgatccatccacatggttgcctcttggtgtaaagagtcgatcacccttcctctagcctctttttccgcgtatacttgggcatactcgtccgcgatcctatgctcgtgagccgtggctagacctaactcttcttggtacttggcgatgatagctagcatgttggtctccgtctcgcataaac

SEQ ID NO: 64411 - DNA, 386 bp, Glycine max
  unsure (1)..(386): unsure at all n locations
gcttgctctanactacattgatgntngtatttatgggtggaggttgnatgtcatttttgttttaagagtagtgtcccactggtaaaactaactttccaaatgtttgccttcgcaagaaatggccccgaggaagcttgcctcaaagatgtccatgaaggacaaggcagccgaaggaactatttccgctccggagtatgatagtcaccgctttatgagtgctgtacaccagcagcgctttgaggccatcaagggatggtcgtttctccgggagcgactcgttcatctcatggacgacgagtatactgatttccaggaggaaatatggcgccagcggtgggcatcactggttactcncatggccaagtttgatccaaaaatattccttg

SEQ ID NO: 64412 - DNA, 424 bp, Glycine max
  unsure (1)..(424): unsure at all n locations
cgacgcttattgtgtacacactcattgagtgattattgttctttttctatcaaatatntactatatgtgaaagccaggagtgacttggtgataaagaatacttgggtcttaatcgcatggaaagattaagtgtaatgcttagagtgaccatgagaatactcattgtagtcagaagtggcatagaaaatacttggttgtaatcaaataattgatcaggggaaccctaaaaggtttaaaggagaactggacgtacctaaagagttgggacgaaccaatataaaaccgctgtgtttcattaatgggtctatatataactcgtccttttctttaagtcacttccacactatcatatcctagttgtgcaaactgattttttcaaacacaaatcanatcctttggatgagatcctcgtccattgatatct

SEQ ID NO: 64413 - DNA, 461 bp, Glycine max
  unsure (1)..(461): unsure at all n locations
ctgcagctataagaacaaaatgccttaatcattttcaaatatgcatgtgaattaggacgcatcaacaagaatcaagccaaggctattgtgaaagctatcaatggggcataacacaccaaatgattataatgatggatggctcaaattctcacaaaagtaaaatcatcactttcaaaatgagctttcaaaactatcatgacatgtagagaagaatcaagggattcaagtcacaaaatgtcaaaaacttttattttctaaacaattacccatttcttgaacatatcctataattcaaagaaaaacatgcacagtcgtacgtgcacatgaaattgacccaaaatattaaactgagaatccgacgaaactaacaacattaacaaattaacacaactaacataataacagaaccaacataactagcagaacccaagaacacttcccnccatacttaaacaacacat

SEQ ID NO: 64414 - DNA, 82 bp, Glycine max
ttattaaacacgggtggtttttttgcatatcgaaaatctaaccatacccatttaacttcaaaacatgttgtggaaaaaattc

SEQ ID NO: 64415 - DNA, 465 bp, Glycine max
  unsure (1)..(465): unsure at all n locations
agcttgatcaaaacaattctctaatttttcctatccactcaaatcatacaattgctcattcaaatcattggcagacactcatttcatacaaaaaaatccactgcatatcattttcaaccagttcactgttcaaacaagcttttatacaaacaatcaactcaaagtactgaaatttaaataactgaaatttaaagaactgaaacagaaacactgaaatttaaatgactgaacataaatcataaaataactcaaaatactaaaatgttcaaaatgcactaatttaaatgtcctgctcttgtggttgctcctatgcatgctcattgagatccaacaccggagcagctggtgaatcctaagggataggctgctctagctcagatggtatggcatcatcaggtataggtactggggatggctctgggatctggnttgtggaagtctnctcctcttgagccatgtgtacac

SEQ ID NO: 64416 - DNA, 323 bp, Glycine max
  unsure (1)..(323): unsure at all n locations
ccttaagcacatatctctctctcgaaatagctgaggaaaactagttccgtgaagaaaatccaagccgaggcactttcgtaacgttttcgtgagtaattacgcgaagattctcgaccgttctttaagattcatcggtcggtcttcggtttcttgagtcttcaacgggtaagtacctcaaaccaagctntttaatatattctatgtacccgtggtgggccacatttcggttcatgtatttttattctcgctctcatttaacctttatacccccttttgacgtgcgtaagcccattatttaagtcattcctcgcttaatctaaaaa

SEQ ID NO: 64417 - DNA, 321 bp, Glycine max
  unsure (1)..(321): unsure at all n locations
agcataaaatatgacaaataggataacaactgaggatcaatttataccgnggcggaaaggaggacgatattgatatgtcttggaagcatgataattacttcttcccaaacaactcctctttaacatcattgacgtagtgcacctcatcaaatataacctaccacatttatgcagaaaataaatacagataagtcgtcacaaattcacaaggacaagattnttcatagttgaagagaaaccacagagttacttacccattcaatgactcgaataatatcaacaccccggcagagcattgatcttaaaatttctgtggtcatg

SEQ ID NO: 64418 - DNA, 189 bp, Glycine max
aaaggtacctgtcgacggagcgacactcctattattaaacgaaaaaaaaggcagccaaaatttgctggggccggcacaaaaaaaggaaatcaaaactatctatttaactccaacatctaccttgcacgacagaataggaagtacgtcgaccaccgtatcagcaaggcattttgagccgagttgaagaag

SEQ ID NO: 64419 - DNA, 403 bp, Glycine max
aatgtgatccaactctgatgtcagtgttctgagcaccattctcaatcaccaggtgttccttaatttggtctccacagcacttcatctaattggtgagtgtgagaatcttggtgaaatactcagctactgattcagtctcctccattgcaagaagctcatactggcttctcaatgtctgaagctttaccttctttatcttttctccaaagataatccaatatgtatttagataaagatatctacatatatattttagtaaagtaaaagatagattaaatcggtgcactatatatattgctcttttattacgaaaagacggtatataacaatatatttaattgggtgtcgattactgcgctctaacgatttaatatctgagataagaagggttacttaaacacat

SEQ ID NO: 64420 - DNA, 174 bp, Glycine max
acgattctgggcttatcagctctttgccacgtgacttgctaaccattcggtcataccctcccacataatttgcatcttctgttctagacacaagtgccaaaaagatccacgagaaatgcgcccctccaaactgaaagggttccatcgatttttgggctccctaggatatagagg

SEQ ID NO: 64421 - DNA, 473 bp, Glycine max
  unsure (1)..(473): unsure at all n locations
agcttgcttgtggagcttctatggaggctggatctttgagcttcaatgatgtccttcaatgctgattnttcaccatggagatgcagcggaaggcaaaggagaagaggagaggggaggcaccatccactatggaataagccaaggaagaaggagcttcaccaccaagaattgccttcgataagaagcttgaagaggatgctttaatggaggaaaagaaagagagaaggggagagcacgaaattgaaggaataaaagagggaaagaagtggaactttgaagtgtatctcataagactttcattcatcanagttacaacaagtgttacacatgcttctatttatagactangtagcttccttgagaagctttcttaagaaaacttccttgagaagctntcttaagaaaacttncttgagaagcttctttgagaaaacttcctcgagaagctagagtttagctacacacacccatct

SEQ ID NO: 64422 - DNA, 316 bp, Glycine max
  unsure (1)..(316): unsure at all n locations
ctcgnctgtttctcctctatcaatacatacctatgtcgttcgctaccttcaccataactgatttgcgagttggatgatgttgatttggacactctagaatgagagacttagattggtcaaacttttgtttagagattaaaaaaaaattccgcttcaaaatatataattaactcttttaatgaacatcaatatcttcctttccacatgcgtgcatcattaatgctacaaaatagcaaaacccccatattataataattattataataataataattataatagtgatataagacttgaagattcaacatgtcccact

SEQ ID NO: 64423 - DNA, 483 bp, Glycine max
  unsure (1)..(483): unsure at all n locations
agctataaataatagtaaaattttataaagaaccaatggaaaaaaaagcaagaaataaataatatattttactattttaatatataataataatgactattcttttattatataaaataataataataataatgtcttagataattttaatgtaccttattttttaagaaaataaaattaagcatagtcaaatattattttttactattaatatgaaaattattatttaaaatagtatcaaaattatataattagggttaatacatttgaaggactatggatgaacttaattgaaaattatatttctcanataagttaacttagagttcatacttatttatntatntattntacataaaatttaatcttaaaactcattcatgtatatataacggnttcttaattaatcttgttaatatgatttaatagtacntcaatatatgtaaccgctaaantttattggtatttattgtgaactttaat

SEQ ID NO: 64424 - DNA, 386 bp, Glycine max
  unsure (1)..(386): unsure at all n locations
agcnttactttattaagaatgagggacatcttatattatattcacccacatttcacatactcatcatctgtcaagctaaaccccatatacctgattcgtcgatgtcctagaagataccaccatagacttgtcattacaaaaacatttccatatagctggaatggtggaaacagagattattatctcttattttgaattcacaatcatcataagccttggagatcagcttacttgctaagcgacaatctctaccaagattggagaacataaacgactgcaagtttcataatgatcccactaatctgattaccaaagcttactttcactacatgtgcgcgggtaagtagaacgattggagaacataaactggcacccggtttgtctcc

SEQ ID NO: 64425 - DNA, 261 bp, Glycine max
ataattatatcctcacttacaaacttcaacattttacagttaacttcataattaatcaagggctttctaagaaaattttactgccctatttttattaataatattttacaaaaaatcttatcccccataaattgactttcgacatcagtgtatgcgaaattaccagagtaggaagctgctttttcagcctataaaataattgaaattatcagaggtattaagattcttaaattgagtagtggtgttcgagaaactaaaaaa

SEQ ID NO: 64426 - DNA, 476 bp, Glycine max
  unsure (1)..(476): unsure at all n locations
ngcagttgccagctaagccgattatgcaaaagtatatatttctgcaacacccactattcggncccgcatgtcgctaagcggtagtgtttattttgtgaaggcgagctaagcggaccatgtctcgctaagctgccaatgcctttttcaattttatttttcagtttttgaattcgtataacttgtgtcctgatcaactgtttagtccctttatttgcaaatggcctctangaaacacaacagtatcggttcaagacccacaactcaatatgatacaaggagatttcactccttggattcatggaaccggtacacagataatgtattgnggagaaacatcttgccagagaggaaggtggaaatctaccacactgagttngatgaatttaagactgagttggagaggcataatctccataaatgcctcacccaattgtgtgatgggagcatacatgtggctntggtgaaagagttctatg

SEQ ID NO: 64427 - DNA, 434 bp, Glycine max
aagcacctgcagctgcagctgactgactgtaaaactaattacttgtgatgactgctatcattaaacttaatttttaattttcaaaaagttcttaaattatttaacttaatcaatttagtatttaataaaatatgtcaatactagatggtaacctacacataaaaagaagtgtttcacatgtggtaagatattgtgaaactaatgaaattttaattttttatagtataaatttaaacgaattattcacaagttaccaatgtcaagcttgtcaaacttgagattgatttatttaaataatcgagttaaatcttaagcttgagtttgtaaatctattaaacaaataagcttgatcgagcattgaacaagataaacatctgatattgtttgctcatatacacgcttatacaagactatgtttttgcttatgatgtata

SEQ ID NO: 64428 - DNA, 452 bp, Glycine max
  unsure (1)..(452): unsure at all n locations
ggatccttaagtcacctgcagctgcagcttgctatgtggccttagttatatcatgtttccaatcccggtctggtagaccacctctctgcattntagatcaacgatcatcttcatgcgagtctgagctttcagaagctttttgcggatagcatgaaatgtgttttctctgttagttagcaatccatcaactgcgtctagggttcaggaaccattgatgttatcagggaaattaaacggcttgcggccgaatgtaacttcataaggggtggtgcccgttgccaccgttcaagctgtgttatgagaccattccacccacaggaggagtttgccccattcctttggctgttgatgcacagatgctcttaagtattgctcgatgactctattcgaagcttcagttggccatcacttgtnggtgataagctgagctatcctgagctgcgtgccctgtg

SEQ ID NO: 64429 - DNA, 407 bp, Glycine max
  unsure (1)..(407): unsure at all n locations
agctatcattttaatttcgaccatctcgatttttaccggactcatctggactgtcgtgtataaacttattgtcaattcaattttctcagagcttctgatcacaatgttgagcatcttgatatattacgggactcatctagacatccgagtaaaaagttattgtcgctagaatatgatacgagcttccgttttcaanttggagcatctcgagatatattgggacactctgtcaggcatccgaaaaaaaggttatcgcggtttgatatttctaagagttttcggtttcaatttggagcggctcgatatattacgcgactctaccggacattcgtgtataaaagtattgtcaattctatttgctcagagctgctagtctcaatgttgaggcgcttgatattatacccgat

SEQ ID NO: 64430 - DNA, 208 bp, Glycine max
  unsure (1)..(208): unsure at all n locations
gaatgacataactttatcacggatgtttctgttgagcccgtaatatatcgagacactcgaatattacatccgaatctctgagaaattgaattgacataactttatacaccgatgtccagatgaatcctgttatatatcgagacgctgcacattgataacagaagcttcgttgaaaatcaaacgacaataactntttactcggatgttc

SEQ ID NO: 64431 - DNA, 369 bp, Glycine max
acctgaccctaaaacacgcagctgcaactatcaaagatttaaaactacccttcctcaataacaaacttaagccttaacccaggaataaaaaacctacggcggagtgaactgaaatagaggcaaccaaaaaacacccccaacagccaacaagacatccaccatatggtcctaccaaaagctgatgcctaagatgccaattgggccctcattacaactagaactaaacctaactacagcccctcttaattgattaacccaaaacataatattggacaccaactttaaaggattgggcattatttagacaactaacaacctaaaacgaaactaagcgtgtcagtagacccctccatatggccatgaacaacc

SEQ ID NO: 64432 - DNA, 262 bp, Glycine max
tatcgcaccggcgcgaccagttgaacaaccattttcctctaactgaaacgaacccgctgccccaacatattgttatggaagtgtgccctttaattaggtcttttattaattaaaagactaagactaaataagaatttattaattacaaacaagcgggagatgaatgattttataaataagacaattatttttataaaagatttcaaatatcccaaatatgggacttcggtattatagaaagacaaatcttcggaaaacctgg

SEQ ID NO: 64433 - DNA, 245 bp, Glycine max
  unsure (1)..(245): unsure at all n locations
agctattatcnttcttttagttctngaaccctatttctgtctggagaagaagcttgacccactactctactcgaatcatctgtgagtttcaatatcccattcgactctntatgtgctactcctctaatggacatgatgtcgcttactcaaaatccatcatataagaagctgttacgctgagatgaaacagggatcatatggaacaacaacacatgcacaaatagttggaggaacatgtttaggtt

SEQ ID NO: 64434 - DNA, 218 bp, Glycine max
acatattaagatcgtgagatcacatagaggcggtgagtactatggtagatacacagatgatggacaagcaccatgcttatttgcgaaatttctttaacaacatgggattggtgcccaatacactatgcctggttctccggatcataatggtgtggttgaacgaagatatcgaaccttattatacatggtgagaagcatgaggagttatgtaaagcttc

SEQ ID NO: 64435 - DNA, 442 bp, Glycine max
  unsure (1)..(442): unsure at all n locations
tgcggcatgcaagcttctaaggaggtgagcttantatgagttgggtgtgtgtagctaaactctatcttctcaaggaaagtttctcaaagaagcttctcaaggaagttntcttaagaaagcttctcaaggaagctacctaatctatatatagaagcatgtgtaacacttgttgtaactttgatgaatgagagtcttgtgagacataactcanagttcaacttctctccctttttcttccttcaatttcgtgctcccncctctctctttctcttcctctntcttnttctccattgaagcatcctctccaagcttcttatccaaggctcatcttggtgggaagctcctcttccatggcttatcctaatggatggcccttttctacctctttcattgtcttcgctgctttcatggtgaaataccattaagacccatgaactaaaat

SEQ ID NO: 64436 - DNA, 299 bp, Glycine max
  unsure (1)..(299): unsure at all n locations
ataaattttggtagtcatcatataaaagttaattgaagggaaagttcagccaacttaatttaaaaagagaatggttttgatgctgcctttttcatgaattaagtgcctagatctttaaatattggagtcagacttttgctttttgcttaatcttcttgtgagatgttctcatcgctctcatagtccttggatagaaggttgatctccttcttcgaaccatcngatgagtcattgtcatactaagcaatatatgccttcttggatcttctttcttcatggcttttcttctcattcttttc

SEQ ID NO: 64437 - DNA, 478 bp, Glycine max
  unsure (1)..(478): unsure at all n locations
agcttgtgttaaaaaggcggcaagaaagaagatgcacacgcagcgggtttagggttttagggttttanggagcgcggnggaggaggagctttgtctgagctgagactgagactgagacatggctttttggggtaagaaaagcacgtcgtctcgtctcgtgtgtctgtacaatccgttctgatgtctaaaatctaaccacattccaatcttctgctctgcaggagtcgaagtaaaaccgggaaagcctttttctcataaacatgacccctccaaaggacgcctccatatttcgatggtaatgtaatcttgttcataagtgtgaatgaattaaaatattagatttcttgctaacggaatagttattattagtattaccatactattggtaatntagggcactttgaagtgtgaatggaataacatattanaatgcttgctcgctaacggaatgtgtatattatcataccatatattaatt

SEQ ID NO: 64438 - DNA, 233 bp, Glycine max
tcacatcacaaggcgataaccacatcctgtgccactcaataattactctcccgagccatatctgtttttacacggtccataatctccagcttcacatcagtatacacatcaacgccaatatacagcaacaacaggcaagagaaaattgcaaacacaacaataagttttattaaaccagacatcttgtcatcgaacgtgacactaaattatgagtttagcataacactggacgt

SEQ ID NO: 64439 - DNA, 66 bp, Glycine max
agcttgccacccagctcgcccaagcgagctcttctctttcaggcgagcagggttgcttcctccaca

SEQ ID NO: 64440 - DNA, 435 bp, Glycine max
  unsure (1)..(435): unsure at all n locations
agcttttaccacacgtatgcaactatgggcatttctatatcatttaattggaaaagatttgacacaagggataggaggttaaagttgacaggttgatgtctacngtaacaagagaaaagtaaaagagccatacacaggcgtattttgataagtttgagttattagtaaggccacaaaagagatacgtcaggataatttttaaaggaatttccaagccaagaggacaatgccttgatgcaccaaagatgttatgcataatagaagaccaaagagggattatatgaatgaccaaagcctctatgataaatagatagagcataatatcatcattcataatattacacggtaatattaaggggttcataaggaccatcaaattcacatgtatatctatcacaactaagaatagaaataaaaaactatactatctttaag

SEQ ID NO: 64441 - DNA, 119 bp, Glycine max
attttaggctctaaagaggaggctgatgccactaatattataccataccaatagccaatccaccatattaggcaagttgattcaactattacctaaaggaaatgcaatttattggaaaa

SEQ ID NO: 64442 - DNA, 476 bp, Glycine max
  unsure (1)..(476): unsure at all n locations
agctatttattttcatttctttccatccaagttgcccaaataaccacattccagctctcttcatatccacttggtatttctccggaataccttgaaattgcttcatatttgttttcaaatcatgccatactgtgataaaacccgaccatcgaaaacataaattccaaacctccttcagttgtccagatgtttcagtttcagttttgcattcacagcacaacacttcttcgtttctcagaacacccctccttaaattatctttggttagtgtaaaaatcttctataatgactttatcagaattaaactctactgtatgtcttgaaaaaaacactcccttatcatttcatcgaacagatattgcttgatgagaaaaatatgccaacaattttagaatcacaaaggataatatgcaccgttctttgcatgtgcangactgaatctcaactagtcgaggatgcatagctgaggatatact

SEQ ID NO: 64443 - DNA, 236 bp, Glycine max
tctttttatgtctatcttctcccttttccaaaagaacaaaggactaactgcctgaattcttttgtgtctcccttctcccttgtcacagaattcacaacgacacaggctgagaattcttttgattcttcccttcccttatccaaagttttcaaggactaaccgcctgagaatttctttgtatccccattcacaaagcatcaaatggttaaccgcctgagatctttgtcttacacatt

SEQ ID NO: 64444 - DNA, 433 bp, Glycine max
  unsure (1)..(433): unsure at all n locations
agcttggttcgagggacttacccgttgaagttctattaacgangaacatcnaatgaagaacgtctaataacggtcaaaacctttgctaaatccctcacggaaaacgttacggaaacgtttcggaagcgcctcggcttatattttcttcacggaaacgatttttccaagcaaattcgaaagagagagaaatgcctaaggggctgaaccctttcttcttcactcctgcctatttatagcaaataggggagatgcttgccggcagctccccagcgagccaagtgcttctgcagaagcacaaccttctggggaatctttggagggccaaggggctggtgctattgcacccattttacaaaacacccccctcttttttgggattttttcgttagtaccgaactacaattcgtacatcttgtttttcgtaagtcggacc

SEQ ID NO: 64445 - DNA, 390 bp, Glycine max
  unsure (1)..(390): unsure at all n locations
agctntgtcagtgcaaggtggatgtgcgatgtttcttgttgtcatgataagcgaagacacccctcaagaccaaccaatttgggtgcgatcgtgtcctctatagnttgaattggggaattggcaagtcatcaaacaatctgggatttccatggcaaattcaatgtaatttgttagttccaaccctattactgggcctaagttttagggtttgcttcctatttgggcatgtcatntttgtgcccacaaatttataaatgtacaacccttcttcatttgatgagttcaatcttgcactttcatctatattcattcttctgcatatatatttttgntggtgataaatgatttgatacaaatccaacaatgagccctgtgaaagtagtgataccg

SEQ ID NO: 64446 - DNA, 309 bp, Glycine max
  unsure (1)..(309): unsure at all n locations
tcttggtgctcataatacccctacaatttattcctcttattactagctattttgaattctttagttcctaaatgtacaaccttcaaatggttataaaaagtctattacatgtagnttngctttttaattgtgatttgggacaaccatgttataaaaagtctattacatgtattgagcagtcacctacggtatgctagatggaatataaatactatatcttcnaaaatacacatgtacatggcatccttaggacttcatccagctgatgtttgtcgccaagcttnntctncctctccctctttttttttc

SEQ ID NO: 64447 - DNA, 207 bp, Glycine max
cagctatcacagcagcaaacgagcgcagccaaaactttgctcacaataaccaaatcacagctttctgcgtaagacccagaacaattcttgatcaatcgtaaccgtggatcgactcaaatttactgaagctataggataacctgctttgacgtgggatatactacaacatcagactatttgactaatttcacagcaccccacaacttt

SEQ ID NO: 64448 - DNA, 419 bp, Glycine max
  unsure (1)..(419): unsure at all n locations
atcgagacgcctcgaatgaatgttaatgctttgaactaattcaaacgacaatgactttttactcggatgtgtgatcgagtcccggaacatatcgagacgctcgaaattgaatgttaaagctctgagctaattcaaacgacaataactcnttactcggatgcctgagtgggtcccgtaacatatcgagacgctcgaaattgaatgttgaagctctcagccaattaaaacgacaatatacttttactcggatgtctgattgagttccgaaatataaccagacactcnatattgaatgttgaacctttgagccaatcaaacgacaataactttctactccggatgtcggatgagtcccgttatatatcgagacgctcgtaaatgaatgttgaactttagcccatcctacgacataactttta

SEQ ID NO: 64449 - DNA, 453 bp, Glycine max
  unsure (1)..(453): unsure at all n locations
agctattaagatgtgctcatttgtgtaaatatcatctatatattggtagtagttcatgctcacgtaaccacaagcttcaataatgtgtgaacatggatagtgaagcgcagaataccttccgcattgacaatgatgaccattcaagttaactgcccacttttgtctgccacgttgcgttatagggttgaaggtctcctctacttcaaaccttgtagagtgaatatcatacacgcgaatgatgtgcatacaagcttgttcttgatttttcctcaattctttaacaagctctgaacaatatactcgtccttcatttaactgtctttgggcttggcgaccacgctcaacanagtactttcgacacctactatacgttgatttcaccaatgttgttatgggaatgttgcgacaatcctttaaaaccttattgatacattctaaaagggtcgttgtcat

SEQ ID NO: 64450 - DNA, 276 bp, Glycine max
  unsure (1)..(276): unsure at all n locations
caccaactgatagctgcatttcctagctgatacaaataccctgtggtactctttctatcagttntatccccataccaatcagcatctgataagtcaatcatcttacaggaattgctactcaagtttgtaggatacagcaaaccacaaccaattagccctttcaagtacctcaatagtctttttactgcattcaaatgaccttgctgtggtgctgtctaaaatatacttaccaaaccaactccatatgctcaactgggctggtattgcatatatacc

SEQ ID NO: 64451 - DNA, 392 bp, Glycine max
  unsure (1)..(392): unsure at all n locations
agctaaactgttaaagtatgacaacagggattttactgtctatgtttccacatatggggatcaaaagcggaacattngcacatataggggccaatttaataaaatgttatgcgtaaggaccagattgagaatccatggcatgaacagcggctaaattatatgtttaaaccacaagaaataaaagataaagaaaaaaagaggctccattgtggaaaacgtgcctaagtgaagaaaattcagttctcaactcattgacttgttcaacaagcccttccttctcgctcttcaagtgctctatcaactcttccgcagctgcaacactcaaaagtcttcgaaattcagaacacgttcattcgtcgttgttcttcggagaattcacgcgaaaagaaatg

SEQ ID NO: 64452 - DNA, 166 bp, Glycine max
agcaacatgtcctggccccatgctaaaacatgccatctcataagaaacaccaatttttgttaatatataactaaaattctgaaactcgaatctgatttccttctatttatcagagcatcttccaatactatctgataactaagatatttaaaccttctttaaaaaa

SEQ ID NO: 64453 - DNA, 285 bp, Glycine max
agatgcacgcggattgcaaaggacaagaggagaggggaggccccatccactatggaataagccaaggaagaaagagctctaccaccaacaattgccttcgataataaacttggagaggatgcttttatggaggaaaagaaagagagaagggacagccctacattgacgaataaagaggaagaagtggactctaagcgtatctataagactttcatatcatcaagttaccacaagtgttacacatgcgtttatttataaactaggtagcttccttgagaagctttc

SEQ ID NO: 64454 - DNA, 226 bp, Glycine max
acttgttaaataaaaaaatccgtcaaaataaatacttttatgaaataatcttcttcacagctgctattagctcaatgcaacccctattaaatgtctatatagtatatatactatcactgtatcaagtcaccaggaaggactggtgaattctctggctaatcaacacagacgcttactgcagttcgtctaagacttacccaaagaattctatcggcagctgggattt

SEQ ID NO: 64455 - DNA, 375 bp, Glycine max
  unsure (1)..(375): unsure at all n locations
gctcacctcattgattttttacatggaaatacaaaaaaaaagccctactacaaagactactcaaaatgccctgaaatacaaggctaaaaccctatactacgagaatgaccaaaatacaaggcccaaaagaaggaaaaacctattctaatatttacaaaaaagagtggatccaaccttgacccatgggctcaaaaatctaccctaaggttcatgagaaccctagggccttctttagtagctctagtccaagcctcttggagtcttctatccaatacccttgggggggaggattgcatcanatagattaaacattgataatatatctacataagagacaaaatgttcagaanagcaagaaagatatacattattaac

SEQ ID NO: 64456 - DNA, 329 bp, Glycine max
ttaaacataatcaactgctacgagaatgtatacacaacccaaagagacaggcagatggcccatgaaatatatgccccagacatcaaacacctcataaaatagcatatgttgatggagcacttgctgtcagcatgtaagtgcacttcatgctttatgacgatgctcacaagtgcgtacaatattacacacatctttaaagatggtgggccacttaaagccacagtccaacacttcgcgagctgtgctttgaactcccattgcggaagaatggcaaaactgcaggactgaatcaggctcatgatctgggatgcatctgctaatgacctgat

SEQ ID NO: 64457 - DNA, 421 bp, Glycine max
attcgcctaaggtgtcttcgtccagttaactgaccgtgctacaacacctcgttcgcattggtatatataaatctcttgcgagtcgacaacattattacgaacatcttcaagctttgtaaaacttcacagctcctatctgtggagagatccccactagcccgtggttaatagttttgaccgtttacaccaagatgctactgtgcaaagagaataaggacaaccaacactctttggagcataactttactaaaaaataaatgtgccaacgtcccataatgctctacattgactttcagccggccacatcgcaagacaccattaaccgtatagaacataacgaactgaaatcttcagaccacatatattaatcctctctttgcgtgctaagcctagatgtcactaacctatgacgcactcttat

SEQ ID NO: 64458 - DNA, 275 bp, Glycine max
  unsure (1)..(275): unsure at all n locations
agctagacccatgatcattcataattatgtttctcttatnccattcttggattgaataacgcgtagctatatatactaattcattgttgatcaaatttatgtcgtactaatttaatgcattgaactgagtctgttgctgacactttcaagtggctagatcctctatacctataaatactaaggatgcattatatcaaagcttgtctcctaatataaaattatatttgagtatcagataaccatcccttcgtgttataaatgcaatcctaccccac

SEQ ID NO: 64459 - DNA, 349 bp, Glycine max
taccttctctccatagtagatcctcatttttctccatgtatatcctcacatgtcttgttctaaatgttgtaacatgactctttataagtttcaccgattaaatcttgctatatgaagttagactttgatttctatggttcaatttcttgttcctgtctttgaaccatgaattgcgcagagtttaggctcccttgcagtttgtcatgttattctttgtggctgaaacccataccattaaattcttacataacttattaagttgaagaaaacctcataattctaaagcgactttttcacctattgtagctctgtcatagaagccatgtctagtcatgaaaactcgcacata

SEQ ID NO: 64460 - DNA, 420 bp, Glycine max
agctattaggtgggacaacaagactttcttttatctgacaccaacactgaggctggcctccgctatattcagattgagaatgcctctaacagcacctttgtcaatgattttcttcatgcctcttaattgcagatgtgcaaatctttgatgccagattctgacttcatcttctttggaagatacacatgaggaggagtaactggtttcttgaggtgtccataggtaacagttagctcttcgatctgctgcccttcattaaaacttcactcttcttatttgtcaacaagcattcttgactttgtgaagtgtacattgaatccttcatacacaactaactgatgctgatcaggttggcagtcagcccttcacaacagtcttcgttacacttgaagtcctcatggactactttccattccatga

SEQ ID NO: 64461 - DNA, 391 bp, Glycine max
  unsure (1)..(391): unsure at all n locations
agctatgcggattttgtgttcgctggcgaattgataaagtggatntgaaaagaggcaaaatgcacaacaaaataaaataaaactggggcaaatgaagaggataagggagaaacccttgctgtgactgccattcctacacgaccaaatttcctatcaacccaacaatgtcattactcatgcaataacaacccttctccttacccaccacccagttatctcacaaggccatccttaatataaccacgaaacccacctaccacacaaccaatgcccaaacaccaccctgagcgataaccanaaaaggaagtttgcagcacaaagcctgtaggattcacaccaaattccggtggcctatgctaacttactcccttatctacttgataatgcaatg

SEQ ID NO: 64462 - DNA, 409 bp, Glycine max
  unsure (1)..(409): unsure at all n locations
agcttctggagttgtatttacgcacgggaattgtattatcaccccacacgtccgtcatatgagacggctgcctttaatcaaatgtgcaaatattacttcaatttatgttattttccctctttacgttcttatgtattgttgggccgttttatatatctatctttcggggggcgacaagggtgtttccctctgctcctacgtatacctcaattgtgataaggaaatcacaccgacgtagttctatgagacacagtgtctggacacgtattttttatcctttttgcacgatgtgttcttattgaatgaanggcattaatgcgtgcaccataaacaactttcattttttgaaagagataacattacgcttggccctgatgtcttttattttgaagaggattatatactgtga

SEQ ID NO: 64463 - DNA, 436 bp, Glycine max
  unsure (1)..(436): unsure at all n locations
cataaccatatgaatggagatattcctatgtgggttttaaatgcaagccgataataccacaaggcatcatncaacttaataacctaatctcttcttgtagaaaccacacatttctctaatatcttcttcagttccctgcttgaaaccttatcttgactgttcgtctgtggatggtatggngaagccaccttatgtgtgacactgtaatgccccaacaccttttgaagttgctatcgcaaaatgagaccatctaactgatcagactcttggtaccccaaacgagaaaaatattcttcttaataatttacaacagacttggcatattcttacggcaccactgtttaaccacttgacacatatcgacactcaagattattattccctaaatggggagtgactataagtcataaccaccatcaaaactctacctaatata

SEQ ID NO: 64464 - DNA, 402 bp, Glycine max
  unsure (1)..(402): unsure at all n locations
agcttaagatgaatccagaanattgtgctntcagtgtttccgcaagtaacttcttaggattnntggtgcatcaagaggcatataagttgataagaacaaagaaaaggcagtccaagaagcaagtgttggatcaagtggcttcgaaataattaagaaggaggggttgaattaattatgaacgtatcttgactaattaaaaatttatccttcttaatgttactagattcaattaggctttactactaagttatgagaaagtaaagaacagaaacaataacttagacacaagtaaagcggaaataaaaagtacacagcggaaaagtaaagagtgtagggaagaagaaaacaaacacaagtttttatactggttcggcaacaacccgtgcctacatctagtcccca

SEQ ID NO: 64465 - DNA, 389 bp, Glycine max
agagaagttgcactctgaattgtgtctcacaagactctcattcatcatagatacaacaagtgctacacatgcttctatatataaactaggtagcctccttgagaagctctcttgaaaaacttacttgagaagcctgctttgaaaaactttccttgagaagctatgatgcttgcttcacacactccctctcataacttagctcacctctctgaaagcttccttatgagaatcctaaagaagctagagcttagctacccatacccctttatatgctaaccttcctccttgagatgagaagccaaacctactttccacccctatatagctatccagctcctgacaaaacataaaaacctaaaagtctactcaagactctcaatgcttggatc

SEQ ID NO: 64466 - DNA, 398 bp, Glycine max
gaaatgatttgactgagccaatgcgtgaattgtatggattgggatgaatttctggatcatgtttgctatcattataagagaatgagcatatgattggaattatgtttgaaaatgttagtcggttgtcacatcgaatgagaaagaatgcattaaccgtctcccggtgagagtgtgatctttataactgtgagagaaacgactatcattctattggtgattcttgtgtgaatctctgaagatggattggatcataaacttgagaatgatgaggccgagtttgttatgaatactacttaaccgaaatctaaccttgtgattgatgaatatctcttgccccacttgactgaagaattgttgttgttatacttgacctatcagatgtatctttgctcctaatt

SEQ ID NO: 64467 - DNA, 414 bp, Glycine max
  unsure (1)..(414): unsure at all n locations
tgcaagctggctctaaaccttgtcatnggtcccttcttctcatgaaatgtttctagggccttatgctctttggatagtccttcatcacttgtcacgttgaactcaaagttctttattntgttaatacaccaaacgctatttgtatgcttcgaaggatccgatggttctttgttctcatgtagtgatatttcgaaagatcactcgaacagaattagcgtcattgtctttactcattntttattttcaataaaagacaagtaaagagggacaattgtcagaccctaatttcgtccatacacgttnnttagaatntgcattagtattcacacttacgttccatgtcagatattttatttatgtgttcaaatatgcattagntattgcgcttatgatccatgcactccatgctgagtc

SEQ ID NO: 64468 - DNA, 340 bp, Glycine max
  unsure (1)..(340): unsure at all n locations
gttctcagtatgaaaattagtagtggaatgctcaaaatcagaatactcagaatcaccctcaacaaaatgctcataatggtcaaaatgctcaaaatgcacagaatgaccaggatgcacactatatctaactaatctatgaaaggttctatctatttcangatcaaagggttataaatcacctggattgcccctagtcatgaactatatgtagcaaataatgtgtttctcaacaagcacctaacaagggggtaaaactacagctatactcaaacgatatcaaaatgagctgattatttgtgaggaacaccctataatcatganaagatagcacacaaaaatt

SEQ ID NO: 64469 - DNA, 278 bp, Glycine max
cctttttcctttgcgataaaagcatgacccacttctctatgtgaatcatctgcgagtatcattatcccatgtgactctatttctgctactcctctcgtggacatgatggtggttcccagaatcattctataccacccgttacgctgagatgaaacagagatcataatgaacatccacacatgccagaatcgttggaggagcatgttgatggtggccactatatcatatgtggaagatcaacgactttgaatgagaataatctacaacgcgctagattg

SEQ ID NO: 64470 - DNA, 367 bp, Glycine max
actacgaacgacaaataccgtgtgattaaggtattgatgccattgttacataacccgtactaaggcatacaactccttatcatacattgaatagttaagggtgggaccacttaacttttcactaaaataaacaattggatggccttcttgcatcaacacacccccaatcccaacatatgaagcatcacactctatttaaaaaatatataaaagtttggcaacgcaagtatgggggcattacgtagcttttgcttaagaacattgaaagctatttcttgtttctctccccatttgaaaacaacatttctctctgacactttattgagaagagctgtccatgtgcttatatccttcacaaacccttata

SEQ ID NO: 64471 - DNA, 251 bp, Glycine max
  unsure (1)..(251): unsure at all n locations
aaatctataatccaatccgcccctggacacaaaacccagccctgatgttgcttgaccaggaatggaaaggaatgccgaatcctttttccatatntttaagccatgtccagcagaaaaataacgcatcatccatcaatttttgaccatggaagctttcgtttgagaagactatcctgttcctgtggtgccatatacatcaggtcagagaaatccaccatgtttgtcatctttgtagtcagataccatcgata

SEQ ID NO: 64472 - DNA, 416 bp, Glycine max
  unsure (1)..(416): unsure at all n locations
agctatcctactactaactatnttcttacaattatataataaattcttttttaaaaaaaagatgcctccattttccttgctttaaagataaatgttttttatttgaaacattttaacttcaatcaaacattgaccataataattaagagtaatttatctattattattattattattattattataaactaaagcatgaattgtaaaatcgtcacaaaagtttctctttcacatcttatcttaagcattaattaacattaacaaattaaaggtaaacaatctttgcttctccttttctaactcttgtattttttgtaactcttgtattatacaaataataaggaattagaatgtggaaattattatttgttacgaaaaatatctcatgaaaagcatgcctgaatgaacatcttttt

SEQ ID NO: 64473 - DNA, 295 bp, Glycine max
ctgcagctaaacctaatcgttgttttttatatagcacagtcatatcacttgacgtacaatatatacactttacatgcgggttgattataacgaatgtcttcacaatactcacctagatggattattgtgatatcgagatgtgcttttaaaaattttctaaatcttaattttatcggggctaatatgtagaaccatgccatacatgagaaattagggtgtaattttattattattttaattaatatggaacataagcgtgttgcattctgttctctttcaagtcaattttagaaat

SEQ ID NO: 64474 - DNA, 375 bp, Glycine max
tgaattccacacgcgataaataaaaagcttcaccatactcctctctgagttcttaatgtgaacgtccattttatttatctttgcttggcaactgcattgacacttatgaattgttatggtacagattctttcattattctttaaaatcattgtgatgttacagattccttaatattggacccgcgtgtttgaaaaccacatgaaataagaactgatcaactgaaggatgaccacgctacacaaccttcgaagattcgataaacaaaatatgaacgttttctaaagaccaggctatatagtcacactatgtaaaactgatgtaacaattggttaatcgatatttcagataaaaagttttcgtaatatttctaaatg

SEQ ID NO: 64475 - DNA, 396 bp, Glycine max
atgatccatgcggagaccatcaaaaaaactacattatgtttctagatgcatcatggatcgtatttcataactgaactgtacgcttccatggcgatgacttccctaccttataggggaactccaccttttttattacacaacaaatggctcactgaatttttgcgttacttacacaataagttagtgctaaagaaccacagactcttggctgcttacaaaccccttaataatgataattcatgatcggtcttaataacttagctttggcaaatccttttgtttcttccttaaataattgcatatccactcgagacttatttggcatcaattatatgttcgagaattgtgtacaaatacatttatagtgagatatgtgggtcccgcatgtataataat

SEQ ID NO: 64476 - DNA, 317 bp, Glycine max
agtatgatagacaccgctctatgagtgctgtacaccagcagcgcttcgaggccatcaagggatggtcgtttcttcgggagcgacgcgtccagctcacggacgacgagtatactgattttcacgaggaaatatggcgccggcggtgggcatcactggttactcccatggccaagtttgatccaaaaatagtccttgagttttatgccaatgcttggccaacagaggagggcgtgcgtgacatgagatcctgtgtaaggggtcagtggatcccgtttgatgccgacgctatctgccaactcctatgatatcccgtggtg

SEQ ID NO: 64477 - DNA, 381 bp, Glycine max
  unsure (1)..(381): unsure at all n locations
ctagtggtgtttaagataagaccgtgtaccttagtaagagctagtatatcaattttggtgtgaggatggataccttattagagattatgactgataaaaattgttgaatcgattcaaaacaaataaaactaggaaattttgtagaacaggattaacctatgtcgactcanatatatgattcagtatggttctgactttaattcacttataaacaacaacgggaatttcaactaacagtttgtaggcacttgaaagcaatgcataaacacataacagaaatgcgaaatataaacttaaacatagttttggttgtagaacataaatagaatcgcacatataggttgtaaaatagatttcaaatcatcaatccaattcaccaaa

SEQ ID NO: 64478 - DNA, 333 bp, Glycine max
  unsure (1)..(333): unsure at all n locations
tcaccattgaagctccatcaaaacttcaacctttgtacaccatttctgcttcaaatcgcgaaaggaagcacatttctgagtcgtgaagcgcacctctccattgtgggacttcacatttcatgtgtgggtagacttcttctcacataaattttcgcgggtattgnngtttgggagatatgatgggtagttttactacgtttatgccttatgatangtatttgtgaagaaaattgatgaaagcatgttaaactcgtcatgtntggtatgagtcaagcttacccattctgtttanggtttttatgatgatgcttgtatgcctaaatggctgatgaa

SEQ ID NO: 64479 - DNA, 199 bp, Glycine max
aacccatttagtggtgctgctcatgaagatcctatacagcacctgagtgggactgtgtgtactcactacctgaaaacaacattactacatggaaccagggcataagtgccttcttaaagatatattcttctctcatgaagatggatcagtacatccaggacattggaaacttcctgcacaaggacaagagacttacttg

SEQ ID NO: 64480 - DNA, 345 bp, Glycine max
tctaagccgggcgttcctttctccctctattatcatcctgatgttttctttgaagctctgccccctgatcaccactgaaggacagctgcccccctgctttccgttggagaatgctaatctttgatcgtatctggagaagtgtgcctcctgatcctagtgagacactgtgacattgtgattctgagatgctcctggttcttctggttatatattatatatataatatggtccgacattttctttatgtggaacctggtattcttgtatatgtggtgccttttgaactttgacaattgctgacttttgtattcggaacccctttttttgaaattgcgtaatggtttt

SEQ ID NO: 64481 - DNA, 285 bp, Glycine max
cttcttcttccatgggttactccataatggatggcgccttctctcacctcttcttctttatcttccgctgcatcttcatgggggaaaatcaccattgaaggacctcattgaagctcaaagatccagctttcatagaagcttcacaagcaagcttccatcacacatgacctctatttatagcctaagtgtcacaccataacttggagggggaaatttgaatttctattcaagtttcacttgaaattgtggagccaaattgtagagccaaaatttcactaattatga

SEQ ID NO: 64482 - DNA, 366 bp, Glycine max
gagggagagaaataagatggggagccgacattgaaggattaagaggtatagaagggcacttgaagttgtctacaagactctcatcatcaaagttacacaagtggacacatgcttcatttataactagggtgctttctcgaaagctttctagagaaaactttcttgagaagcctttttgagaaaactttcttgatacgctagagcttagctacacacaccgccctcataactaagctcacctcctggagaagcttccttaagaagattcctaaagacgctagatgctagctacacatacctctctaatagctaagctcagctccttgagatgagacgctagaacttatctacacactccctattata

SEQ ID NO: 64483 - DNA, 251 bp, Glycine max
tgctattgcccaaaaccaagctcgataatcgcgacacaacccgggcatagccagtcagagagaactggtgacgtacctaaacaagtgagctcctggcagcatcatctttacggaacaataccactcccctcggacgcttgggtggctggacatctgtgaaacatgagtgacaagcgagatatggcccctggtaattgattaccatgggtgggtaccgattcgaggcttaaactgaaacaggagacttagat

SEQ ID NO: 64484 - DNA, 363 bp, Glycine max
  unsure (1)..(363): unsure at all n locations
tgaaactgaacacttagagcacttgaagcaagtggtgacagttctaaaattgcatttgctttgtgctaataaggcaaagtgcaaatttggatgtaaacagattgactacctgcgtcatatcatttctggtgagggtgtagcagtagatccagggaagattangtgtattatggagtggcctgaacctaagaatgtcaaaggagtacgtgggtttttaggtctcacgggttattacagaaaatttatcaaggattatggtaaaattgctaaaccgttgactgaaatgactaagaaaaataaccttattttgagaaaagatgctctggaggctttcaatcatctgaagcagatcatgactatagc

SEQ ID NO: 64485 - DNA, 483 bp, Glycine max
  unsure (1)..(483): unsure at all n locations
tcaccccataagtaagaatgaatattaccgccaatcaataatgttctaataacctccaaaagatgtttnatttttctctcagctactccattntgttgaggggaattaggacatgatgtttgatgaagaatactaatagaattcatcaaaattgtcaactcatttttgtagtattccccttcattatcaaacctaactatctttattggagtattaaattgtgtgcataccattntgtgaaaaactngaaaaaccttacacacatcacntttgcgtntaagaaggtataaccaagtcattcttgtaaagtcatccacaaatgtcacaaaccatcgcattccattgtgtgtgggaagaggggcaggtccccaaacatcagaatgaatagtagagaaaggagcattagctctattgttgttattggaaaagtacgcaatgactnnttgcatacacaagtttcacattaaaatagagattgacaat

SEQ ID NO: 64486 - DNA, 336 bp, Glycine max
  unsure (1)..(336): unsure at all n locations
aatgatcaaacgcttaaattggatattcaactttgggggtcactagagctcaatgtcttctaagggctcgtgtaacagatcatatggccaacttcatcaacttgaactaagtttccattgatgcaccacaaatngaagaaagatgatgtagaaattttttaaccaaattagagaacaaatgcagaaaaaagataacttaaccaagggtagttaacatagttaacattaacgaatggtcttttgcttttaaaaactacagntaggggaggtcaatgcaattttttcactaacaattatacttgtggaattacgaaactaagagttatatctctacat

SEQ ID NO: 64487 - DNA, 371 bp, Glycine max
  unsure (1)..(371): unsure at all n locations
aaaatctaatacaacaacaattaaactaatataggttatattggtactcatttaaatatganaatatattagatataaaatgtttttcaaactaactaaataaaagagtggatgcatgtgtaggttaatagcctataactaaaacctttataacataacatttgtttttctcgagaaaacatctcacttgttttaaggtgttgctacgtgtaccaatcatattacttgtgcacccagcaaaaaaaatntaatttcgaaaatgctcttattgcttttttcttccctttaagtttctttttttacaataacacagtcattctttcattntctcggtccatttcttttggttattcattgcatgagaggacatt

SEQ ID NO: 64488 - DNA, 452 bp, Glycine max
agcttggcctcaaacttggtgatgataggctgtcttttatctccagcttttagggcttgaccccactggaattccaagataagataaaggaataaccagctggctgcagttaagaaaatgagctgcatctctacaccaaccctctgatttgcccaaacagccaaactgacttttagcataattgatcttgaggcctgaaaccatctcaaaacatctcagaatagactttaagactctaacattggccgaagttgcagttccgaaaaacaaagtatcatctgcatatagcagaatattgacatccattactaggattgttggtgttaaaaaagaatttaagtttgtattgtagtctttggatattggaaatgcaattatgggcatgctaagtgtagtcttctgtatgattctaaatggtgtgtctctatgggactattctatatcttatgtga

SEQ ID NO: 64489 - DNA, 405 bp, Glycine max
  unsure (1)..(405): unsure at all n locations
tgacagagtccacccncaanagctagttactgaagggaaagagcttaatgttatatatgttgatgccaagtatccctaccactgtgagactccaatggatcataactaagaaatagttntgtatgtatggtgcgcactcagtgccacaaatatactcttgtaatatagtagtgccttgtgtagtatatttttataactaggactaaagatgtgtacagtgataccaacacattcaataagggttcttctctcaagatccttatctctatagtaacaaccaaaaaagggttcacacagaatactgtcactttntctgcaagcaaaatggtatctaagcacggcataatattcttttaaaaaaacaaaacaaggacacaattaattgatttaatagccaaatatgac

SEQ ID NO: 64490 - DNA, 364 bp, Glycine max
tatgcataagtatatcccttgactttcatgtgctcgtgcttcttaaacatcaaccttttcccaagagctcctttcaattaacttagtatttgcatcacaacaaccatatggtctttactcgaaacatgcataaattgactaaccatactcacatcataagcaattctaggactagtgagagacaaataaataaatctttccacttaccttctccctggtgttctccgacttgaacattggcgcccattgtgggatcttcgggaaaactcctctttacgaccaccacatactaactaagaactcagaaccactagactaaagagtctacttgcttcttcttcttatccaacccattgaccatttg

SEQ ID NO: 64491 - DNA, 299 bp, Glycine max
  unsure (1)..(299): unsure at all n locations
atgacnatttgaatttctcgagagctttcgtcggtcaatttccagcgtctcgatgtattatgcgcctgaaccggacctccgagtttagaggtatggctattttatttctcgagagcttcttgtgttcaattttgagcgcctctttatgtgatgcacctgaatcagacttctgagttaaaagttatgaccattctgaattctcgatagccttctgtattcaatattgagcttctcaatatgtgatgcgccacaatcagacttctgtgttaaaagtatgaccatttgagttttcgagagca

SEQ ID NO: 64492 - DNA, 137 bp, Glycine max
attctcaatctgcctaattgtgcacaaaactgccaatttgtgcgcacaattggctttgtgcaaaatgtttgtgtattgctggtcgtgaaagggtttaccatattggttctcgacatttctagtagatcccaccggtc

SEQ ID NO: 64493 - DNA, 486 bp, Glycine max
  unsure (1)..(486): unsure at all n locations
agcttccttcctgcaagctgaggaagattacttactatgagtgataacttggtgcaccactgcaattagttngatccatgtggagaccattcaaaanaatttacattgatttctctagatgcatcatggatcgcaattcanaactaaactttacccttccatggcaatgacttccctaccttattgaggaactccactttntttattacagaagaagtggctcaaggaatttttgtgtaacttacaaaataagtaagtgctaaagaaccaaagactcttggcagcttaataaccccttaaaaatgattattcatgatcggccttaataacttagctttggcanaaatcttnntttttttaccttaaataatngtcatataccactcgagactntatatggcattcaaatatatgccataaataaatgagtacanataacatttgaaagtgagatatgttggtcangttatgtatatataatataat

SEQ ID NO: 64494 - DNA, 500 bp, Glycine max
  unsure (1)..(500): unsure at all n locations
taaaactcaagctataattaagagatagcaagcatcaaaggtgtgagaataacctctttgcgcaccattcttttgaaacagttccattgaagtgggaatgtcaagagggagctccaacaatttacaaagctgaaatgggctaattggggtgagcgagagtgacctcctaagctgtttgaggtcaaagggtttgagcaatctctcccactctgtctcattgtcactactactactactactactactactctcggcttcattgtgatcattgaaattggtttcaggggcagaggtgcaaagtgggaaagaagggattttgaagcaaagtagcatggttctattgacatggattgataacttgaatgttttcaacatgaaggtgggagaaactaaccncaatggagccaccgcgatgtgggtcgcaatacacgaagacacggtatacagatgctgatgctacagtgaaccctcctttgtgcaatgaaaattgaacacacata

SEQ ID NO: 64495 - DNA, 420 bp, Glycine max
  unsure (1)..(420): unsure at all n locations
attttctttcgtggagacatttaccatctaattagtcttttcttctttgaggtgttatattgcattagaaaaatggcgagggcgaaaatgaaaacatagtctttacacgtactcaacaacacttaatattatctttgccataatgtattagatacatcatacacttcgacacatatttaatctattttacatcggcacgtattagatacttccaacttttgcatgttgtccacaacgttgtgtctatcatctagaaccacgagaatctattgctatacttaaggactttaacatcaattctagaggaagttctacatcaattgttgataacggctaaatatgagttatcttgataatagaaatatactatgcatatctctaaaaactattatgttagtagtatcgtcgacttanatgata

SEQ ID NO: 64496 - DNA, 328 bp, Glycine max
tgcattctgtatattctccaaaagacacgtggatccatcgcgtaatacggcctccctgtatcaatcactgtgtcaatattcctctggtgacaaaacacgctgaatttcacacgttgtccgaattataaagagacacattgacaaatctcactgtttccctataaagaccatcataccctatgggaagacccgtctatttatagaacagatgatcagactatccgtaaaagcatgttctatatgcacacagaactccacagcattacctattgacataaaagagttacgacatagcacccattcagttgaatacccaatactgccatta

SEQ ID NO: 64497 - DNA, 339 bp, Glycine max
gtgagctagatgctagcttgggcgagcttgggccacaaaacttcataaaatgactactttttccatttccttgtggttttcattcctggatctgataatcaatatgagcgatcgctcaaccttgcgttgcaaccggtgtcgaacgataaaagcattcctcagatgaaattagagtctaacaatggtaaaatggaaaacaacatgaaaactctcttactagtaaaaatattgtttcgacctctagacctctacaacaactacaccttcatctgtttggtctaaccagaactgcatccgctagtggaaagggtatggacttgttatagtggaagactactc

SEQ ID NO: 64498 - DNA, 378 bp, Glycine max
  unsure (1)..(378): unsure at all n locations
agctttatncagctctcgtggggtgagctactcttcatggcttattccttaatgtgaggcgcctccgctcacctctgtgcctgtggcatccgctgcatctacatggtggaaaatcaccatacaaggaccccattgaagctcccagcctccatagaagcctcacaagcaagcttccatcatctgacgtgtgatctgtgattccataggaacatcgtgtgcttaataaagacatggcgtagttatggttaggggtatacggctaaacactcgcctgtgtgagtttttatacactatgagcgaataattacccagatcatcataacccgacggtggctctgaatgttcataataaagctaaatgttgacgtcctgccttca

SEQ ID NO: 64499 - DNA, 445 bp, Glycine max
  unsure (1)..(445): unsure at all n locations
agctntataagcgcgggtctgggagacgaaagtcatgtggtttctatatactaagatgatggtccgagtacattggatgtggtacgaccatgccctcctgatttccagctgggaaattggcgagtggaggaacgccccagcatttacgcagcgagcataatgtatacctttacgggtttaaaagctctatagtcgggcctaggctttatagttgttcctttatgtaaggctttgcgtcttttgtttctgatgctataatacaaggatctttcttcatctgttcctacagatatacccattcttattcatttgcatggttacttctttttctgaaacggcagatccgatgacgagtcccgcgaatgtactaatacctgggacccgtctatcgacttcgagcatgaaatgaatcaaacggaagatgaaggatacgatgatgtgggac

SEQ ID NO: 64500 - DNA, 423 bp, Glycine max
  unsure (1)..(423): unsure at all n locations
ntttggagtaganacacgggaccaaagcatgttatatcatatagtcgtctctagtcaaggactgagagaccatacaagttttctagcgatttctaattatatgggccattaagtctatcatatgctgacaatagccgagaagcccatgaatctcttcgggggcggagtaagtgtccgccattgccttggccttggctaacaatcggggaagttcttgactcccgttcaaggtaagagcaaaccgatccatgcacatggttgcctcttggtgtaaagagtcgatcacccttcctctagcctctttttccgatatactagggcacactcgttcgcgaccctatgctcgtgggtcgtggctagacctaactcttcttggtacttggcgatgatagctaacatgttggtctccgtctcgcataaacg

SEQ ID NO: 64501 - DNA, 408 bp, Glycine max
  unsure (1)..(408): unsure at all n locations
tctagacaatgggtttgtaagttctccactgcctttcttagtcatgggttccatcagtccaagcatgactactccttattcaccattggttcagggaattccttagtcattctactagtgtatgtagatgacatcatcctgtcaggaccaaattctgcctctgtgcaagctattcaaacccaattgtaatctatgtttcaattgaagatccttggtactttgaaatattttcttggcttagaaatagctaaatccaatagaggtatctcactcttccagagaaaatactctctatctctnttggaagatacnaagttcttggcatgcaaaccttccaatcttctaatggatcccaactngaagcacaatcttgatgatggagacttactcgctgatccctcagtgtat

SEQ ID NO: 64502 - DNA, 420 bp, Glycine max
  unsure (1)..(420): unsure at all n locations
cacaactccaaaatcttgtaaaattgtctttgttacgctcccggntaactgatgatccattgaaatcactacaaaatatgcctcaattgtgtttctatactctggctactgtgcttatgaaggtggaatgttgtattctcaaaatggagggtttcaacaactaaaggaactatatctctatgaattacggtacttgggttccatcattatcgataaaggagcactatgttctctagaaacactctaaattgatagaatacaccttgagacagtaccttatggtatccaacactttgaaaaactttcagttctcatcgcttatcgtttgccagaataaatcatggaatgcgttgctcccgatggatgaccanaacgacccaacattcaacatgtgccccttggtagaattactttctatgg

SEQ ID NO: 64503 - DNA, 455 bp, Glycine max
  unsure (1)..(455): unsure at all n locations
cgtaatcgattacatcgattgtgtaatcgattaccagacacttattttctaatttcaagtttgaagagtcacaactcttcagagattaactgtgtaatcgatttccagtaaggaattttcaaaaataactcccaagagtcacaactgttcaagaagtttttgaatggtcatcaaaggcctataaatatgtgactcgggatacgaaattccttagagtttttctgaacaacattgtcttatcctctcanaatcaaattgtcttatcactctcaaaatattccttggccaaaatacttgcaaattcaataaggaatcttgatcgaacttcaattgtaatatccttctcttatagagagaaaattcttcttcttcttattcaaagagatctgnttaagagatcgagagtctcttaagttgttaggatatctgaacataatataaagatgtccctgtgt

SEQ ID NO: 64504 - DNA, 313 bp, Glycine max
gtgaacgcaattcgtcataattatgggactgagctaggttcaactaagtagccatctgccccatctgatttgtcagactctgaatggaggctcttgtctcttgctgaaatggcatattcttgatggtcatttacctcactaacttttctaatgaaggttgaggagaagcctcagttgcttggtgtctttgttgagactgctgctgtattggaggaggaacatatggcttgcttggaccatcagcaatctggataggagggacacgctgtttgtgttgtggaggacttgcccatctcagatttggatgatttct

SEQ ID NO: 64505 - DNA, 432 bp, Glycine max
  unsure (1)..(432): unsure at all n locations
gcttgtctcagcgtttatgcgagacggagaccaatatgctatctatcatcgccaagtaccatgaagaagtgggtctagccacggcccacgagcatagaatcacggatgagtatgcccaagtatatgcggaaaaagaggctagaggaagggtgatcgactctntacaccaagaggcaaccatgtggatggatcggtttgctcttaccttgaacgagagtcaagaacttccccgattgttagccaaggccaaggcgatggctgacacctactccgcccccgaagagattcatgggcttctcggctattgtcagcatatgatagacttaatggcccacataattagaaatcgttaggaaacttgtatggtctctcagacctcgactagatatgaacttctttttgaaataaaatgaagtggtcccaggtttctac

SEQ ID NO: 64506 - DNA, 497 bp, Glycine max
  unsure (1)..(497): unsure at all n locations
taatatcgcttaacgacatcggagttcacgggcgagggtagcttctcgccatccatgttggtgagcaccagagtcaccccagaaaaagcccttttcacaacgaaaggtccttcgtaattcggggcccacttccctcgattatctttaacaacgtgagatatcttttttaggacaaggtccccctgattgaacttgcgcgggcgtaccttcttgtcgaacgcgttctttatcctttgntgatacaggcgcccatggctcatggccgtcaaacgcttaccttcaataaagttgagttggtcgtagcgtgtttgagcccactctgattcttctaggcccgattctgctagtatcttctgggaaggaacctctacctcanatgggagtactgcttccattgcgtanaccaaggaatacggtgttgccacagtagaagttcgtaccgaggtgcgatatccatgtatggcaaatgacaacatctcatgccaatctttgtatga

SEQ ID NO: 64507 - DNA, 330 bp, Glycine max
  unsure (1)..(330): unsure at all n locations
tattcttacctctgcaggacactgcacacccaagcctatattgagtttagagataggcaatttttttttgtcatctttaattaaggtactaagattcctaaacttatatttacttttttaattaaggttgacaacaacctaattaaaaaaactcatacaagttcagagacccaataggagaaaaaaaatatattcaaagacgtagntaanaagggtgaaatagttcaggaatttgcanattaatttaacgtagattaaattatagcagacattgatctctctaaacaataataatgtaactntacaatctatgatgtatcttttattaaa

SEQ ID NO: 64508 - DNA, 407 bp, Glycine max
  unsure (1)..(407): unsure at all n locations
ggagtaaatgtttacagtagcagtatgaataattatgagttgtgtactagtacttctatacaagaaagtgttcatgacctgaacctcttatcacgtgtattttgtttcttgaaaccttccattgcaattgcatctaaattgcgttgtggaagtgggaaaaaaaaatcccatgatgccaatagctctggggccctccaccttcaaacgttaatactctcatnntttttcttctataacattcaggtgatctttatactttgttttaattttcatatctcaatttaattgctctttatttcttttcatcttaccgtaccgaacccattaactaagtctacctactaattcacccttcccatccatcctcgtgtgtggcccacatagcgantaactacgacaggcttatg

SEQ ID NO: 64509 - DNA, 449 bp, Glycine max
  unsure (1)..(449): unsure at all n locations
tctcagctatctattatatagagtntcaatattgtctttattagaatgtttactcattcggnccctatatttgcacaaaccttaccttgtagatcttacacttagaaatcattctttatagtccctctacttattctgcgtcatttctatatcttccattaatatattctcattgctgtttccttgataatatttttagcaactggagcaagtcattccaccagagtgaacaaactaagcccatcaaacgtacagagagttcagagtactgtgaggaagaggttgacggaaaagcctccaatagttatcgcgaaagtgtaagcatctcattatgcatttgcttatatgaattatcggagtatatagctgtcttgtgtgaaatgcttacggatgtggagatggttggtgcttcctccattctgtgaaggggttggatcgaatgtgaatta

SEQ ID NO: 64510 - DNA, 344 bp, Glycine max
  unsure (1)..(344): unsure at all n locations
tggttagcaaccactaaaccattaactattaggatgtgcttggaatcctcatccatcttgttgaacacataatagactccttgatcccataaaagcttgttgatgagggctacataatagatgtctgttcaaaccacctaagcccttaatgttcctcaaaatggtgatgtatattatgtgtggaagggcaaacaggaggttccccgtcaagtgaaatcgcataaacttgtggaggtcaatcgtcttggagccagctttgtgaagcacactatngttcagaatgttgcccatattttttccttcccacacataaagttatagacaatggtcttctatcactagcc

SEQ ID NO: 64511 - DNA, 266 bp, Glycine max
tatagttcaacagtattataccatatgcattcataaagacaatgtaaaattacacaggtggttgcacattcctgtaatataataatctagaagcatatctccaccaagagtattaatgcatatactgctttcacattgtacatttcaagacctgacatttaatgtttgccatgcttcactgaaattactaaggttaaaagtaggactacacaggtccaatgattattattgcactgtgttattcaatggtatcctcttggattgag

SEQ ID NO: 64512 - DNA, 204 bp, Glycine max
attcaaaatgtttttgactaaatttaatcctaaaattttttggagaattggcccaattggattttaccgtaaagctgataaattttcactttttcttaacaactcttttatttcaccgggaaacagcccttaagaatgcccaccaaaaggcagggatttttttttcaaaatcacttcctcccctacttatttgaaaactaaaaa

SEQ ID NO: 64513 - DNA, 434 bp, Glycine max
  unsure (1)..(434): unsure at all n locations
agcttctatataagctgaaccattttatcaataaagacatgttttgtttattcanaannatagagnttatctcttttattttagtgagagtgattctcctaaattattaagtgattcaagaacaccctggctgtatcaaaggacttttacaacctttgtgtggtgccctcgccggaaagagagattatttccttcctttcatcttcaaccttgttctttcaaaccaacaattcagaaaatccacttctgcccagaaatatctcgtggtcataacttccgttntacgcgctcaaattaagtgattcttgagcctaaagtgaattcaagacgagactttcacctcgtttggaatacctcattggagcctgagcttgagctttgcattctatattctgctaccaccctaaccacgtttctatctatattcctttatg

SEQ ID NO: 64514 - DNA, 439 bp, Glycine max
  unsure (1)..(439): unsure at all n locations
ggccacccagctcgcccaggcaagcagggttgcttcctccagattcattttccttctggaggaatcttctggagggcccaagtgggcctggttgctatttgcacctcccattttactaagtacacccnctgccttttttttgtgattcttttttcgtaaaggtacggaaacttacgaatttcgtaacgatacttgttttctttccgtaatgttacggaaccttgcggattacataatcatcccctttttttacttacggaatgttacggaacctcactaattgtgcaacgatgcttccatttgatttccggtgtgtcacggaaccttacggattgtgcatcaatatcttcttttggtttccgcatgtcccagaatatcacacattgcctaatgatgggtgcctagcacctcacaaggaccaaacaaaangtgcatgtca

SEQ ID NO: 64515 - DNA, 450 bp, Glycine max
  unsure (1)..(450): unsure at all n locations
gccccactccattatttttattattacctgacatctcaaacaaacaaatcaaacgtaacaagacaattataagtgttggtggaatacctcatctcactcaagtgtatcacacaattatggctttgctctaatgaaacactcttgccttttaccactctaattccccttgagntcttaggcaattcaagagattatggccacaacaaagaacaattcaccaatatgtgtaagggaaggctagagagatcaggaaaaggtttaccaatataaaggctaacaatgtttttaggcacacatgaaggaaataaaagtcagaatttacgaattcaagtaacaatccttcatgcaaccaatatattaccttaaagagacttgttttttaaagtacttcagcatgaccattcacccatttttgtttttttaatttgttaaacaaatcgcttttttttt

SEQ ID NO: 64516 - DNA, 486 bp, Glycine max
  unsure (1)..(486): unsure at all n locations
ntaacaactacattcatgactacacacaaaaggaggaagtattgtttttatacgttcaaaatagaataaaataaaataaaataacatgtttgaaacatcatgcaattaaaatagaaactcatgccctaatgtcacatcctatcagagcattgtgtcctgacgtcctctatcacaaggttccttaaagaaatccacctagtcatctgcttccactaacacaaggttcgagatcatcacatgatccacacacaaacagcacacggagagtgacttatcacattcctaacatatagagagaaacaggacaacatatagatatacatgtcatataaaaatacaacttacttaacacaactcacatcattccaccacttgtcacgtaacatcacatctcaacataataagtctcattcattgtcacatcattcacgtactcatagatcagaacacaatatcacttaaccatactatatcgatgaatacaca

SEQ ID NO: 64517 - DNA, 414 bp, Glycine max
  unsure (1)..(414): unsure at all n locations
agcttgaagganaactagatgcattggntaacttggttacccatctggtcttgaatcataaatctgtacctgtcacaagagtctgtggtttgtgctcctttattgaccaccatacagacctttgcccttccatgcagcaacctggagcaattgagcagcccgaagcttatgctacaaacatttacaatggacctcctcaacctcagcagcaaaatcaaccacagtagaaaaattatgacctctccagcaacagatacaaccctagatggaggaatcaccctaatctcagatggtctagccctcaacagcaacaacagtagcctgctccttcctttcaaaatgctgctggcccaagcagaccatacattcctccaccaatccaacaacaacaacaacccccaaaacaaccaacag

SEQ ID NO: 64518 - DNA, 514 bp, Glycine max
  unsure (1)..(514): unsure at all n locations
actaacaaactcagcttgaggattatggggtacccatcacatgtggtactaggtggctgtcgggcgatggtgcacaacaagttttccacatccacaaagcgcgcataaacccaccatcccctgttgcccacctccaactgagctcacgtactcccacgtagcccatatcctcgtttctctcaacaccgggtccccatcaatcctcccaagcttccccaacatcaaagtaatacaacattcaaacagcacaagctatcacagccaagcaaaatagggcaaaggcagaaaactctgcccaaaacaccaaccaaaatcacagcttttcacatacaaataccccagaaaacatttcttcgttcccattcgttaaccgttggatcaactcgaaaattttactgggagtctctagtacatgagcctacattntgaccgttgggatctactagcanacatccagaactcattctgcactactcttttcacagccaatcacacacaagcatttttctacaca

SEQ ID NO: 64519 - DNA, 71 bp, Glycine max
ataggaccattactgtcttattaaaatacgcacagcctgcactcattgagttttttgaactactagctttt

SEQ ID NO: 64520 - DNA, 318 bp, Glycine max
  unsure (1)..(318): unsure at all n locations
agcttaaagacctaatattaaaactttataatgtactaatatatttaaacagnttcaaataatttagaaccggccttcttattcaacctattttataggattatagagatacaaaccaagtttctttctttctatattgctacgcgctccatacaatatataattaaactgtcatataattaccaataaaattgtcatataattaaaagtcattggaaattatgaaaattactttaaaaattagatttaaagtattatcctattggttaaaatctttatacttaacatatatcaaaatcaaattcaaataattatggg

SEQ ID NO: 64521 - DNA, 496 bp, Glycine max
  unsure (1)..(496): unsure at all n locations
gctgtgtcatttagcgatattccacttttggcggtgagcacttatctcttgtattgagctgaataccctctcnggttgcaattgcacttagcgcacaggtctcgttaagatagttgtccaaagatgttatctgaaaaatctcaatagtaaaaaatgtaggcatgaatcaagaaagttgcagttcatgtttgaaggtgatccaacggttaacgagtctgggatcatggttntactgaaataggtaaacaaacttcacataaccttattgttcacaccaagcaaccgcacacatataagtcacacaacacctcaactaatccaacttaatcaaagaatgcangaaatatattaaacatctattttcagtatcaatattttaggctgttacanaagaccttttcttgggtatcaacaccaaagtattcaagaatcttggagatcagaactgcatatggacacttgaaaaaaacatctctggtcatcatatgtatcacat

SEQ ID NO: 64522 - DNA, 386 bp, Glycine max
  unsure (1)..(386): unsure at all n locations
agctataggtcaacctgaggactggtgcatctctgctgctgccttccttaatcgtgctctgctccagcttcctttttgttatttaggaattccaattggagtcaatcccaaaagaaaggtggtttgggaaccgattataaggaagtttgaggctaaactgagcaagtggaatcaaagaagcatctctatggctgacagaatcactcttatcaatgctgtcctaacagcattacctctggtttatttgtctnttntcanggccccctcagtagtgatcaataggttatctgccatccaaaagcaattctttggtgtggaatcgagatggaagagaatgcttgatatttggagtcaatgctatcttctagaatatggaggttgggatc

SEQ ID NO: 64523 - DNA, 209 bp, Glycine max
  unsure (1)..(209): unsure at all n locations
tactcaggcataacaaaccttcttcttaccaccacccaggtatctacaaggccatccttaataaccacaaagctgtctacgcacttcaatgacaaacccccttagcccaaccataaaacaccaacaaaaggattttgcagcaaaagcctgtagggtcacccanattcgttgtatatgctaacttgatccatattacttgtaatcatgga

SEQ ID NO: 64524 - DNA, 480 bp, Glycine max
  unsure (1)..(480): unsure at all n locations
gcgacctatgaaactcagctccatcnggttatcattgctcgttggaaaacgacctaggatcacttcctagttactatcattttaatgtttatttgattcgggtacagcctcgatcagagtgatgtttagtaagtgaactatgacaccctctataatagtcactaagttcttcacttaaactcttgcaagattcatgactaatataggagacatgttgttctctcttcatttctttcattatgtttcttctctcttactgtcttatttgctctctttcatcttgacttatttcttccactctttgtttttcctttctcttttatcttgggtttctttcgacaacttaagggatctatactcatctaatatcttatacaacgcgtccttaggagtagaaccctcaccattaacactatgtgaagactgaagactcatgttggttcctaaatgtggttctttcttggtgggggttctgaaata

SEQ ID NO: 64525 - DNA, 349 bp, Glycine max
  unsure (1)..(349): unsure at all n locations
gctgtaatcattaaagcgatgagagagacttctctgtttgtntaaacactaagtgaatcaattatagcctataattgagtaaacagagaggtttatatttacaagagatctcctaactttagaagctccttcttcatactccttcatgatgatgcatgatgcacatatgaaatgatggatgctaagatgcaacacacaattcatcaatccatacgaatgccactcaacagagttgggcatgttaaagaccaaacttcctgaagctcttcttcgcgcttaatgctaagtcttatgatgctcccctattctaacgagagggacgtcttgcatgaatatagcctgtatacca

SEQ ID NO: 64526 - DNA, 114 bp, Glycine max
  unsure (1)..(114): unsure at all n locations
ctctgaacnaaaccagcactgacagcctcaccaaagacacttgttcgaacaacaaaggaaaaagtcacaacacaacccagtacaaccaaacgacccaggcaacatgggctcaaa

SEQ ID NO: 64527 - DNA, 227 bp, Glycine max
  unsure (1)..(227): unsure at all n locations
ctatgactngagaaacaaaggtgatcaaataacaagcagagatttaaaaggtactatgttgccttctagtaacgcttctttaacgtcttgagctggatgcttgatggcttgtcggtcacggacctagtactttgcttacctttggctctggacttggttgcctattggtccgccatgggtcgtaagcaacgctctaacctttgtgtggatgagctgaggtgaactct

SEQ ID NO: 64528 - DNA, 400 bp, Glycine max
  unsure (1)..(400): unsure at all n locations
ttctatgtacccgtagnggtccatattgtgtttcgtgccattttattttcgntntgnttactttttatacnnccctgtgacgtgcttaagtcattttacttaagtcatttctcgcttaacttaaaaataaaataaatttccaccgaacgtttgaattgtattatccgttaactctcggtaaaatgaattccgaccgtttggtcgtgccgtaaccacgttggaaatcaaaaagagggtaaaaaataatataattataaaaaaaacatcttttattaaaataaagcggaaaatcaatcggacattctctctttgggatttctcattcttaatcgaattgattaataactaaagtgaaactaaggctaaaatcaactcgcctagtcaagctcgtccataaaaa

SEQ ID NO: 64529 - DNA, 398 bp, Glycine max
  unsure (1)..(398): unsure at all n locations
ctcaagcttcgaatataatagtactgtagaactatacttgtatatcaatgttatattntataagcgtggtagatatgatttaatattatattcaataaagcggtgtagctgtaatgtctttcttttagtataagtaggcagatcgtcatttatcttagacaaaggcttaattttatatacaggnggtgtgattacttatattaaattgttagaaattcactcagagctttcgtacaatctttataaagatattgtccaccagagggagaaagagaactgtctgaataagtgtggggctgagtgaagagaagagaaagctttttgggtttaaattaaacgggtttctctttttctattattctagttaagcaatgccacatggtctcatttgagtggag

SEQ ID NO: 64530 - DNA, 415 bp, Glycine max
  unsure (1)..(415): unsure at all n locations
atgtgcttggattgggcttcattctattcattcttgtgtgtatatacatattcaacatgtgttaataattataggcgtgcatgtcagctcagaattcaacgaatgatagtttaatgattaatctatgaaggagatttattttgcacatgtaaagaaacttatgcctagaatgactttgtnttaaagaggtggggaacatctagatatcaaatatttaattccaatgagggtgctgctattgcattccatgttgaagggattgtttttcaaataaactcttcatttcatcctcaaagtattattctctcttctaaagtggcactcaagtaagaatattatctaagtaatctctcaagtattagaaatcataataaatagtccttcaagtattgaaatccatctaattgatccccaa

SEQ ID NO: 64531 - DNA, 467 bp, Glycine max
ctgatggtgttgagaagaaatcacatgtttgtcgatatcttatttttggagaatgtgaatgtatgtatacatgagtttgatgatgtcaaaagaagaatcaaacaaggctcattttgcttctagatctataccagattgtgtcaacaaacaaagccttgattcaagatttcttctagatcaaaccttgcctcacaatgaaagggttcaaggcattcaatgctcatgtaatcgattaccactacatgtaatcgattaccaatggtttgaaagtgtgtaatctattacacatcatatgtgatcgattaccagagactctgaacgttgggaatccaaatattaaacgaaaggttacaactgttcatgaacaacaactgtgtaatctatcactctaactctgtaatcgatcaccacacatgattttcactgatatcgccaacagcccatctttatcattggagtttgaatgg

SEQ ID NO: 64532 - DNA, 387 bp, Glycine max
  unsure (1)..(387): unsure at all n locations
gcagctgcaagctgtaggtaaagtctcatgattgtcacgtgctctatgcaacaatgttagccgtggctatacgagacatcttgccaaacaaagtcaggttagccataactcgcctgtgctttttcttccatgctatatgtagcaaagtcattgatcctgtcaagtttgatgagctggaaaatgaggccgcaattatattgtgccagtaggagatgtattntccccctgctttctttgacatcatgattcacttgattggtgcattggtcagagaaatcaaatgtngttgtcctgtttatctacggtggatgntacctggtgagcgatacatgaagatctttatagggtataccaagaatctatatcattcagaagcatctattattg

SEQ ID NO: 64533 - DNA, 389 bp, Glycine max
gataagtttagttaccgtttggaagctttggaccaaccgaacaatatgtcaaacatatctataacttgatgtcactttctaaattcattggaggtaaagatgtaaactttatattagatgcattataaatgaaaaacaaagaaggaaagggttcaagttattaatatacctgatgaaaaagcacttgattattatggatgtaaagagtagtagtagaaatgagaaaaaaagtgaggaaagatcatggtagaataagtaactgatgaagtcgtcaacataaagacctccaaaactttatacaattttcatactcaaaaatataatttgaaacacaattacttggtcatggcagacagtgttaataatatacactctcaaacattaatagt

SEQ ID NO: 64534 - DNA, 383 bp, Glycine max
  unsure (1)..(383): unsure at all n locations
atcacatgctgttctatgtggcggtcgggcgatggtgcaagtcaactctccacattcacagatcacacataaacccaccatcctcagttgcccaccttcactgagctcatgtactcccacgtagcccttattctcgttcctctcaacaccgggtccccatcaatctctccaagcttccacaacatccaagcaattcaacatcccaaacatcatgaactatcataaccaaggaaaacagggcagaggcagaaaactttgcccaacacaaaccaatatcacaacttntctcacttaaaaacctcagtaacattctcctcgttccaattcgttaaccattggatcgactcgaaaatttactggtagctctacacataagtctacat

SEQ ID NO: 64535 - DNA, 468 bp, Glycine max
  unsure (1)..(468): unsure at all n locations
tgcccctctcttctcatgtgttcctagcatggcattaatgtcttcaagaaagcactgtggccctaggtgcctttgctggagatcagttaattccaccctgagttggcttctgagtntgtaggtggtacaagcataaatagcagcaaaaaataatgtattggtactctctctctcttcacgtatataagtgtgtgtgtgtgtgtgtgtgtgtgttttagttacttttactangtacaaaaatgtaacttaagatttaatttttaaaaatatctctcatctctcctcttgcacttgnttctattcaaagactctcggntctgcttctttgtatccccgctgccaactctctnttaccacattntctaatgatcccacccacattttatgttacaaacacggtattntctagtgatggtgtaataaagatggactattatatgttctgcttctaaaaagttggactatatc

SEQ ID NO: 64536 - DNA, 417 bp, Glycine max
  unsure (1)..(417): unsure at all n locations
agcttatccttatggcctgcctccggacttcacccttcgtgccaccccggaagatntaagccaagcccctacattcgaggggcaactcccaccttatgaagactatcccggacaagacgatggggaaggagatacccatcttggccccctgctccatctcaaagatccatccccgcatgaactaccccagccgaacatagtccgccatatcccggcctcacccacacccgtaaaagaatctgttccctttgcggaagataagggaaagattgaggcgcttgaagagaggttaggagcagtcgaaggcctcgacaattacccattctcggatttggcagatntatgtcttgtgcccaacatcgtcatccctcccaagttcanagtaccagactcttgatagtacaaagggacgacatg

SEQ ID NO: 64537 - DNA, 475 bp, Glycine max
  unsure (1)..(475): unsure at all n locations
ctttcaaatgggtaaaaggctcacattcactttcttctacatcatattcaaacttgtccaaataaataataaagtcatctcgactcanagaaagtcatataagtctcatacaattaatatagaacctatatcctaatgtcacatcctatcagagcgtggtgttcccgtgtcctctagcatgaggttcttcatagttatccacctattcatctgctcccccaaacacaaagttcaagatcatcacangatccaaacacanacagcaaaccgggagtgagttatcacattgctaactactagagagaaacaacacaacatatagtagccaaatacaatntacttagcatatctcacattatttcatcactntgtcattcatcaatcacacctttcaatcatcaatcattatacaccggaatcacacactccgatcaagacataataacacatcaatttcataataaacaattagcaa

SEQ ID NO: 64538 - DNA, 324 bp, Glycine max
  unsure (1)..(324): unsure at all n locations
atcatctcagntntccttatcaagtaaatggatcatntttaaggtccaacgccttataatgatcacctttcaagtaaaaagaatcgcttgattcacgcttaagaaagaactacgtaggtttgatttcctcatcgatggagggtacgtaggagcaaaagccccgcttttgtcgacctcaaaaaataaaaagaaataaaagttaaggtaatacaatttccacaattctaaaaaatatggtgtggtcctttgagacaaacgtgagaggtgctaataccttcctcaaacgtaaatacaactcccgaacttagaattntcattttgatc

SEQ ID NO: 64539 - DNA, 478 bp, Glycine max
  unsure (1)..(478): unsure at all n locations
ngctctanattacattgatgtctgtatttatgggaggaggttgtatgtcatttttgttntaagaatagtatcccactggtaaaactaactntccaaatgtttgccttcgcaggaaatggccccgaggaagcttgcctcaaagaggtccaggaaggacaaggcagcagaaggaactagttccgctccggagtatgatagtcaccgctntatgagcgcggtacaccagcagcgcttcgaagccatcaaggggtggtcgtttctccgggagcgacgcgtccagctcatggacgacgagtatactgatttccaagaggaaatagggcgccggcggtgggcaccactggttactcccatggccaagttngatccagaaatagtcctttgagtttatgccaatgcttggccaacagaggaaggcgtgcgtgacatgagatcctgggttaggggtcagtggatcctcgtcgatgccgacgctatc

SEQ ID NO: 64540 - DNA, 264 bp, Glycine max
tgactaaccttgataatgccaaaggaaatcgtgggaagtatggtttatgctataaacccactcaggcggatataaagagaagcatcgtgggaagaaagagcggtggtcaaagctcgcggttgaggcaagaaagtgaaggaagcccgccctgccacataagtagaagctttataagcgcgggtctgggagacgaaggtcaagtggtcgcgatatacgaagatgatgttccgagtacattggattggtacgaccactgccctctga

SEQ ID NO: 64541 - DNA, 282 bp, Glycine max
  unsure (1)..(282): unsure at all n locations
tccccattatgctaacatcgctcttaatttatccatttgagctttagatgcttatggaggataaacagaagcgaccaaataattcacaatattatcaaacccaacgagtggtgaaagaatcataaatactatacagaatgttcaaatggtcatctggaaaatcatcccgaatggatgaagtcttagaggcatgctcaatccaactcaagtggtcagccatgaggtttgngcaccactccgatcacaagattctcaatcaaactcttagagccaatagcatca

SEQ ID NO: 64542 - DNA, 477 bp, Glycine max
  unsure (1)..(477): unsure at all n locations
atcattgctcgttggaaaacgacctatgatcacttcctagttactacattgtaatgtttatttgattcgggtacagcctcgatcagagtgatgtttagtaagtgaactatgacaccctctataatagtcactaagttcttcacttaaactcttgcaagattcatgactaatataggagacatgttnttctcttttcatttctttcattatttttcttctctcttcctctcttattttctctctttcatcttgacttatttcttccactcttttcttttcctttatcttttatcttgtttctctgtcgacaacttaagggatctaaactcatctaatatcttatacaaggcgtccttaggagtagaaccctcaccattaacactatgtgaagaatgaagactcatgttggttcctaaattgtggatctctcttgttgggggttcgataataaaacgttaaagaaactatggttgaaac

SEQ ID NO: 64543 - DNA, 286 bp, Glycine max
  unsure (1)..(286): unsure at all n locations
taccagaacttagcatatgtatgctctcgtcttaactatcacttgctgatacaatgcatatgtctaatggcatataagatgtaatntttaaactttgttattattgcatcaattcacaatatctaagggtcttgatttgtcttatgacaacaaaggcatatgcatgcataatagacctcggagttgtgcggtgcgatgatgttggcctgagatgtctcgtgcacatggatttgactatagagtgaggttgctcgcgaaatgggtgaaggtggtggtggtgcacgta

SEQ ID NO: 64544 - DNA, 401 bp, Glycine max
  unsure (1)..(401): unsure at all n locations
agcctctctttggacctcgaacaggcaactaactcctctttcattaccatgctatgngctcgcgactggtccctttcttcctttcgcaacttgagttcactattgctaccccatatagctccgcgaaatttgttccggccatactcttccttgcgagccctcttggtctcttgttcaagggctcttgcggtaattgcattctctttccgtaacccggcacactccttccgaacgtgtgtagcggccaacctgaacttctccttggcaagatttgcctttcctaactcgcttttgagagcttggacttctttgtcttctttcggtgcctcaaattcttctcgctgccaactttaactttgcgaggcaatcttaaccctgtatattaaactttaggcattcgt

SEQ ID NO: 64545 - DNA, 488 bp, Glycine max
  unsure (1)..(488): unsure at all n locations
tgctcaccactactagaggagaagccttcaggtttgtttattatatcctcctcctctaaatcaccattaagaaaggaagttttcacatccatttgtttcaactcaaggtcaaaatgagcaactactgccaagataatatgaagagaatatttcttagatataggagaaaaagtctttgtgtagttgattccttctttttgagtaaatcccttagcaatgagtcttgtcttgtatctctcaatggtgcctaatgaataccctttggtcttaaagacccatntataaccaatggcctttgtcctattatgaaaatctacaagggtccaaactatgttactctgcctggaattcatctcatccttcatagcatcataccatagaatttactctntacaactcatggcttgatcaaaagtctcaggattcatttcagcacccatattatatcgagattcttgcaaatatacaatataatcactaggaatatc

SEQ ID NO: 64546 - DNA, 301 bp, Glycine max
acaagcaagcgaacttgcaaacaccacaaaatacagtttccataagacccagaaaattcttcatcaattgtaacgtggacgactcaaattttggaagcttaggctacctacttatgaccggggactacaaaaaatcaaactatctgactgacttctaccaccaaccagcattttgactgtcaaatctgtgacaattacagaaaattgatagtgcaattgaagcactttctctatcaactgccaaacaatctacagccaatatgataactgctaacaaagcagctcaacacagaccaaatta

SEQ ID NO: 64547 - DNA, 249 bp, Glycine max
tgaacaaatgtatgaatcgagtggccgtaatgattagatgtttgtgttgatcaagcttgcatccattataagaaaaagaacatgtgattttaatattgactgacaatgctactcaatatgtcagattgattgcgaaaaaagcattgatcgtatcctggtgagagtgtgatcctttaaattttgagagaaaccactataatttaattcttatcttttgcatgattctctgtaatatagactgaatgcatg

SEQ ID NO: 64548 - DNA, 313 bp, Glycine max
ttgagcctcgttcccttcttgtttgagctcactcaaccttaagtgaaaacctgaattcccaatcctaagaatttggaccttggattgtttgagataaggggaggttttgttcattgacacttgtttgttgctatgctcatgatgattgggccaacttgtgacaatgatattggtaatgttgaatgctgaagaatgtgttctcaaagctatgagaaaaaaaaaaaattcaaaaaaaatcgaaaagaaaaaaaccataagtgaggataaacttaaggccaaaagagaactctgtcacctcagtaatttatctatc

SEQ ID NO: 64549 - DNA, 302 bp, Glycine max
  unsure (1)..(302): unsure at all n locations
tgcagcttgagatganggaagtgtgaaaggtgaaactttcttcttttattgntgaccacagagtggtacctggagatatgtcgcgggggtcaggagaccttgtggacgtcaggtggggtgctattgcccaaaaccaagcttgaccaatcccgacccaacccgggcatagtcggtcagtgagaacctgtgatgtacctaagcaggcgagctcctggcagtcaacagataaaaggaaaacaagaccacaaagcaaggaggcttgtggtggctggccagcttgtgaatttgtgtaatatgtggat

SEQ ID NO: 64550 - DNA, 382 bp, Glycine max
  unsure (1)..(382): unsure at all n locations
cgngaggatngatggngacctggtgttgagagaaacgaggatatgagctacgtgggagtacgtgagctcagntggaggtgggcaacaggggatggtgggtttatgcgcgcattgtggatgtggaaaacttattgtgcaccatcgcccgaccgccacctagtaccatatgtgatgggtaccccataatcctacaagcttgagatgaggaagtgttgaagggtgaaacttcctgcttttattgttgaccacagagtggtacctgtagatatgtcgcgggggtcaggagaccttggcgacgtcatgtggtgtgctattgcctcaaaccaagcttgaccaatcccgacccactccggcatagtcgncagtgagaacctgtgatgtc

SEQ ID NO: 64551 - DNA, 301 bp, Glycine max
cgagctcactctctgacctgacacatcactctttaaactcttggcccgaggccttttcttggactgatactttgtaccaaagtcggaaatgtcggctatttctgagccttggcttgtcagcttgcgaatgatttttccaaccggcatttcacggtgacccactgacttctggagttgcttctactcttgaactgatttttctttcggttaaatttgtgcattactgcagcactcctttgcacttactctgccccagagctcaagctacttgcttctacggtcctgctagatttgtactgat

SEQ ID NO: 64552 - DNA, 459 bp, Glycine max
  unsure (1)..(459): unsure at all n locations
tctagcgcaatagacttaccttgaataattccttgatagcccttttgttccttgtttccctttccttgttttgaagctcactacaagccttaagtgaaaaaccatgatattaccatatccttaaggaattttggagctttggaattgttttgggaataagtgtggggggtttatgtttcattggacaacttgtattgttggctatgcttcatgatgtattttgggccatactcgatgtacattgtatattggttaaatgttggacatgctgaatgaaatgttgtttctcaaaggcttaagagtaaataaaaaaaaaaattctatatataaaattctaaaaaagaaaaagaaaagccataaagttgattgaattatatcttatatggctcactaatgaagaaactctcgggctacttttcatgttaaattttatcttacttcnttcatttcttatttttt

SEQ ID NO: 64553 - DNA, 203 bp, Glycine max
atccttgtttaaataaatatatatttaccatatattcaattcgaaatgcacgcacaagcttcttcttgagaactaatatggcacaactatcgtgaccacttttataaacaacttatggtagggtgaaagcattacaactcataaaatcaagcttcagaatgaaataaataccttctagaaatacaattgactaaggataagat

SEQ ID NO: 64554 - DNA, 447 bp, Glycine max
  unsure (1)..(447): unsure at all n locations
agcttgtgagacagacacangtcttggctgggatggtgagtaaaataccattgcaactagtgatgaatggtgggaagccaatattcaggtatgtattattcaacgaaaatagagattctttcgtaagccactcttttgttttttatgagtgagtcttgactgtgcaaccaaaattgcagttgcagactattttttagaagcttgtgtntgaaattataattgataattaggttggttattactttgttacatgttgcaatagagggaatttacatgcaaagaaatgaatgtgttgatatattgatgtgtattttaaacctactgaatggaatttattggaaatgtgtgtcaagaaagattgactgtgtgaagtattgacatcaatgatagacttgctgtgctgttattgctattggattgataagactgtttggtttgtaattataa

SEQ ID NO: 64555 - DNA, 402 bp, Glycine max
  unsure (1)..(402): unsure at all n locations
tgcagcttgctctgatccggcttncgcattcnattgctctatcattgtgttnagnttcctattcaagtttcactattctcgaaagatggccagcacaatcaagatcgagaagttcacaaggaagaacaatttcaatcagtggcaaatcaagatgcgagctctgttgaaggaacagggcatctgngcaccactctccagcagatcctccaacctagaagcatcctttctggagcaacaagaagaaaaggctcactcgctgattcttctgtctctctcagatgaagttctctacgaggtggctgaagacaaactgttgttgggttgtgctgaagctgagatactctacatgacgaagccatctgaacatgttgtattanagaacgactcttcgacttacatgag

SEQ ID NO: 64556 - DNA, 418 bp, Glycine max
  unsure (1)..(418): unsure at all n locations
gacctatgatactcagttgggatgttactaattacattntttttacattagttgtgtgtttctctttaaatgaagttgtttaattttttttaacaaaattatgttgtgtatgttttaaaataatttgatctaagttagttctatttgtttataaataaagttgttttttttataaataaaattgtgtatattctgaccgaataaaatacgtgttcgacatgatttgcatatcatggccagaacacgaggtttacgtcgtgccataggtagagttgtaggcagagatagacctgctgaccacgatgctgctgatgttcccgagaggcgtaagcctactgcctcatcccgtatgctacgcattcatcacatgactatggagggacgtgatatggctgacgacgtcgctgacatgactgac

SEQ ID NO: 64557 - DNA, 365 bp, Glycine max
tgagagaatgcgccatccactaaggaataagccatggaagaaagaactttaccaccaaaatgagtcttggataataagcttgcagaggacgctccactggatgaaaacgaagagggagagaaagagagatggaggagcacgtaactgaaagaagacaagggagagaagccgacttcgaaatgtgactcacatgactctcattcatcaaagtaccacaaatgtacacatgcttcaattatagactaggaactttcttgaaagccttcttgagaagctgctttagaaaaattccttaaaagctggacgctagtaccacaccgctctataactaagctcacctcttgagaacttcctgaaagatccta

SEQ ID NO: 64558 - DNA, 454 bp, Glycine max
tacaaatctattttatatccaagcccataagtaaaatctaatgatttctagataagataggataagataagatctagatgaaataatatctagatgagatcaaatctaaataatatctagataagatgagattagatctaactttgtagaataaattagtctgccctattcaagtccaagcccaattctggattcaagcccaagcccaattctagattcaagcccaatgcttcattaattcctgaaattagattaaagacatcaaattagctgaatgggcccaaataataaaacctgcctcataacatttgacaattaagactaatcagtgtttaaaatggtgcacaaagggttaagaaatatgagaacataatggcacatcacttagttcctaaacgaacctctcacatgttattcagaccaaggggtgtttgaaaaaacttatcaatttgca

SEQ ID NO: 64559 - DNA, 399 bp, Glycine max
  unsure (1)..(399): unsure at all n locations
actgaattgntgtgacaccttctaccccgacatatatataaataagaaaaatatataataatatgaaacttaattaaatcaactttatacaattcacatggataaaaaggtcacatttgtttcactgttatcaaataaaacttattaaaaatatttctggttcaaaacaaggtcgtcttagttaacaaaagaactcaagtaaagagcacaataaaataaagtaaaatactgtttgaacatatacaataatataaaaagtatgcctcaatgtccatcctactaagcattgggtgtctcaacgactttagcacaaaattctttaaagttattcagctagtcatctgcttgcacgaacacaagggtctagatcattacaatattctaatacaaacaacacat

SEQ ID NO: 64560 - DNA, 384 bp, Glycine max
  unsure (1)..(384): unsure at all n locations
tcccttannatctagtgggttatatatgggacatctactaatgtttttggttaaatatgaaagattcatccatgattntgtagggttttatggttgtttggtggatccaaaaaccaagttaaaaggatgggcaaaatggtcatctttgaagaattcaaacatccatttgcccaggctagcaaccaattcgcatggctaatcaagtttctttaggcataagcaaccaactcacctgggctagctacagctcgcctaggcgagtaagtatcttaagcactaagtaagcaactcgcaaggggagttcagctttcctangtgagttggttagcacctctcggctaanattctatataagccatgcanaccagaggaagagggatagac

SEQ ID NO: 64561 - DNA, 336 bp, Glycine max
  unsure (1)..(336): unsure at all n locations
agctnggtggtgtacctgaagatgctattaagctcttcctgttttcattntctttatctggggaggccaagagatggttgcattcattcaagggcaacagtttaaagacccttgatgaagttgttgagaagtttctaatttctttttcctagagtctaaaactgcatagggaaaagctgtaatttcttcattccatcagtttcccaatgaatctttgagtgaggcattagaaagattccgtagcttgttgcagaaaactcccactcatggtttttcagagcctatatagctgaacatcttcattgatggggtacgaccgcagtcaaagcagttact

SEQ ID NO: 64562 - DNA, 434 bp, Glycine max
  unsure (1)..(434): unsure at all n locations
tgctctgcaagtcttagaaacttagtctgcaaggtgttcatatatgctatgcaactctcatacgtctctatgaaatgtacaatgtaactcacaatgtttgggaatgaaattagatggcacacttccgcaaattttacgccatgctctgtctatcttactctctatttctctctgcttctatcttttagattcaattcatttctaatagatgtcatccctctctttctgtgtactcaaagtcagaatctgtattgtacagtctaatatatgtagaggatatcatagtcactgcatatgactctaaacttgattagaaactagtttacctatnttccttaaaagatcatggagatcttaattatttcttgcgaattgaagcagctaattaagttgatggctcacatatccctactccatctaagtatatgtgtatt

SEQ ID NO: 64563 - DNA, 454 bp, Glycine max
  unsure (1)..(454): unsure at all n locations
gcttatatacatgaagtacagntatttcatgtattttctnttgggtaagntatccacttgtagtaaaaaaatgaatgtagactgactatgaagcattgatagtgacttttcttctttctatctctgtggcttgaaagttgcatatgcatgactttttctgaggtggtcttttgccattcttgaaactatgtcaattttctggtctggtgtggatatatgataaacctctggaactcttcttttctttattgctgttttaggtactcggatatgtacaaagccatccccattttattcttgatattcttttccatgcncgaaaattctatgttgttccacccacatcagtcatcacataaatcaacttgtacattactttatttccttggcttcgctaaagatacaaggacagaatttgatcaatactggcatattatgttcattatgttataac

SEQ ID NO: 64564 - DNA, 295 bp, Glycine max
ccttaatattacatcgcgctgcaatttaactcccaataattccaagtcaatagcccaagttgtcttaccaggatgatccaaaagtcaacctggatttgtgcttgcacctctttttaaacacatattcataaacattgggctattctaaatagatccacaaggttaaaaaatgacactcttacgactatgtgatagataaatgtcggtgatctaaagatggcaacagtgacagatagtattaccaggcttattaagaaaatgtgacatcatggaaaaaaggtaatctctggcttga

SEQ ID NO: 64565 - DNA, 488 bp, Glycine max
  unsure (1)..(488): unsure at all n locations
atgcaagcttgacttgattatttaatttgctcaatgactatctttcttgatattacaagtagaatcttcatcaacatatattggaatgaanaatcttgaattagttgtcataccacctgtaatcaacaatcttgttattccacttaaggaaacaattagaacaatttatcccctaccatctaattgttgcagaaaatcgctcttcaagataaaaaaattcttattctcttgtatccatacaagaagaaaagtctaccaagattttgattaacatttaacatgattgtgtcatatatttacttcttgttaaaagtcattgtagaagcaaaaatctatgtnctttttctatactttctcattcataattaagctcatcataaatgagtctatgntggagattccaaaatcaatgtcatatatgccctaagcatacattcaanatcactcaaactcttgttgtgtctacaacaatcttttatttatggttg

SEQ ID NO: 64566 - DNA, 412 bp, Glycine max
  unsure (1)..(412): unsure at all n locations
tccaacttgtctccatgatattgccgccttcgattatgatcagtcaaagcatcaggagccgaatatattgtgtaacacctatcttgaacagcctctctctttggcaagttatccgtcccaacaaaaggtcttcccccaaccaaataagtgtttggagaaatttcttccctacttaaaggtgcaaaatatgcatccataggtgaaacaccacggcgataggcatgataaggatccctactgtcatccatataaagaggatcagttcgaagactctctacatgagcaggggcatttcttgtgtagccacggtccangtgatggggtngatagtctccctcataaaattccaatataggattaacatgagaagattagctaaattccttctatctcttgggagatgagatggtgt

SEQ ID NO: 64567 - DNA, 493 bp, Glycine max
  unsure (1)..(493): unsure at all n locations
ntgtatcctatggaggggattcgagcttaattctgatgggcaactcttgaagattctgaggaagaacatgactactctagctcagacatggagtgttctttccttttctaacctcattcccacctcccacacatatgatgtgaccttggacagagccaaattgatttatggaattatcatgaagaaggacatgaacccggtgtacctcatctcccaccagatctctctgattgcatagcatgacacatccagacttggattccctaccttgatcacaactctatgcaaggccagaggagtccagtcagactctagatccctagaagaattgagccctgccattaacttggcatacattaagaagaactgttggaatcttgatgatccaacaatgacatttagagggccaaggaaggccagtggtaagagatcaganggcccctactacttagcaccaaagacactagcttcttctttctttcacagctcatta

SEQ ID NO: 64568 - DNA, 445 bp, Glycine max
  unsure (1)..(445): unsure at all n locations
taattatcanaataaaatgaaactttttattaaaagaatgctcaagggcttcgcaatttagaaaaatctttgacaaaacgcctatagaatccaacatgtcctaaaaaacttctgatgcctttgacatttgctagtggtggcaatttttcaatgacttcccccgtagctttgtcaacctcaatgccatgctctgagattttatgacccatcacaatgcctttagccaccataaagtggcatttctcccaattgagtaccaggtttggttcaacacactacttcagtatagtgtcaagattagacatacatatatcanaagaagagccanaatagagaagtatccataaatacttcatactttttcatttaaaccttgctgctagtctatgacatgaaaaattattttcgttgaccaaactgctctctgatgcatatcactgataca

SEQ ID NO: 64569 - DNA, 400 bp, Glycine max
  unsure (1)..(400): unsure at all n locations
cttgaanagtgctggttttcactttctcgctagccaatctgctgtcttatcgagcgttcgctaagggcaacacttagtggctaagcgcgaggaaggatctggaagaagatgagttgtatatgttcgctgagtgcaccgcttcatcttatcaagcataccgcttcatcgcatccactgagcgagaaaagagcgctaagcgaaaattcactaatgtgcgctaagtggatcataatctcgctaagcgcgcaagcacgaacaaagccacctatttaagccagaaatcagattttgtgaagagagnttggactgggatccagagctttgcatgtctagagattctagagagagaaaggtccaagttccagagagttttgagagattttactgtgtgaggatctgt

SEQ ID NO: 64570 - DNA, 398 bp, Glycine max
  unsure (1)..(398): unsure at all n locations
cagatgatgcagctgagtttgtgtctacctcatgcactcctctaatgactatagcatcacttctggtgctaaactattgggagttggatgccatcttctctattaaatttcgagcttcaacaggggtcatgtctccaagggctccaccactggcagcatctatcatacttctctccatgttactgagtccttcataaaaatattggagaagaagctgctcaaaaatctggtggtgagggtaactggcacatagtttnttaaatctctctcagtattcatataggctctctccactaagtttcctaatgcctgaaatatcccttntgatggtcgtggtcctagaagcaaggaaaaatttttctaagaatactctcttaaagtcatcccagctcgtgatg

SEQ ID NO: 64571 - DNA, 377 bp, Glycine max
  unsure (1)..(377): unsure at all n locations
tctaagctctccctctttcctgaataggggaggaggcaaacttatatgttcaccctctggatctgagatcacttanattagtgagaaaatggtttcgtaagaaatccaaccgagacgcttttgaacgcttctgagacgttccggggtgattacgcaagatttccgtcgtcttatcgtctttgtcgtctttgcgttttcngcttcaaccggagttccgaaatcaactttcaatcaattatgttccttatggccccattgttcgcggctttattttattcattactttcgacccctttgaccgcctataattattaagcatgtctcgcctaaaaaactaaaaaaattcccgtcattgaatgaacgctttattttgtaaa

SEQ ID NO: 64572 - DNA, 403 bp, Glycine max
cttgcggatgtggtcttcgacgagaaaggatcgaagcgggtctgataacatgcacaattgatcatcctgctttgatgaatgagaaaactagggccaatgaagaggatgagaatgatgaatgaacccatgttgtggctgccattcctacatggacaaacttcccaccatcccaacaatgtcgtcgctcagccaatatgagcccttctcattacccatcacccaatcatctcacaaagccatccgctaatcagccacaaagcatgcctgcgtaccacatgcccaatgcccaaacaccacctataacgcataccataaatgaatcttgcagcaaaagcctgttggattcaccccaaataccggggccatatgctaacatagctccatatctacttgataatgcaat

SEQ ID NO: 64573 - DNA, 434 bp, Glycine max
  unsure (1)..(434): unsure at all n locations
agcttctcccntattntgctataaatagggtgttgattgaagaagaanagggtttagccccttaggcacttctctctctctcngaattgctgaggaaaattatttccatgaagaaaatccaagccgaggcgcttccgtaacgtttccgtgagtaattacgcaaagattctcgaccgttcttcaagattcatcattcgntcttcattttcttcagtcttcaacgggtaagtacctcacaccaagcttttcaattcattctatgtacccgtggtgggccacantttgtttcatgtatttnntattctcgcttcatttactttttatacccccctttgacgtggcttaagccattatttaagtcatttctcgcttaatctaaaaataaaataaatctccaccgatcgtttgaatggatcatccgtaatttgggtaaa

SEQ ID NO: 64574 - DNA, 451 bp, Glycine max
  unsure (1)..(451): unsure at all n locations
tcagggattgttggatgtggcaagtgtgcctccagctgttaactcaagtggaatgcacccttcattacagcagccagaattgcatgctttctgtaaatccaagggagtgcacttatcagtgagtgtgcaaatttaaatccaaacatttatgcatgctacatgaacaatgattntaagatcggaccagtgattgaaactagttcaatggttcgactgtagntgaatcggttttatattttttaaatataatataatatttcaactaataaaataatatataattaaaaaattataaattaatataaatgattaaattatatatttcgtaagataaaaattaataatagttaagaaaatagttgatatttatgggaaatatctaagagtgtanttttatttattttaaaatatcttagataaaataataaaattaaacacccaaaaattaaaa

SEQ ID NO: 64575 - DNA, 336 bp, Glycine max
  unsure (1)..(336): unsure at all n locations
agagaatgagcatgttattataagtattactganaatgtaagtcagcttgtcagattgattgtgaaggaatgcattaactgtatcccgatgagagtgtgatccttaaattttgagagaaacaactatcatttaatactgaattttgcatgaatctttgaagtatggactgaatgcatgaanatgaggatgatgaangccatgtttgattgtgatggctacttnatccaaaagctgaccatgtgcttgaatgaattatcccttgtacccagttngagctgaatgaatagattgattgaaccctgagcctatacaatattatctcctgctaccttgac

SEQ ID NO: 64576 - DNA, 314 bp, Glycine max
  unsure (1)..(314): unsure at all n locations
cgtaggagtatggngtacccatcacatgtggtactatgtgttgtgtcgggcgatggtgcacaacaagttttccacatccacaatgcgcgcataaacccaccatcccttgttgcccaccttcaactgagctcacgtactcccacgtagcccatatcctcgtttctctcaacaccgggtccccatcaatcctccgaagcatcccccaacaatcaaacaaaacttgattcataacgcacaagctatcacatcccagccaaacagagcataagcagaanaatcttgccaaacacccacccaatcacaacttttctcac

SEQ ID NO: 64577 - DNA, 441 bp, Glycine max
  unsure (1)..(441): unsure at all n locations
taatacgtatcaaggtaagttttgcatactgtaactctgactttgaatatcacatctagattggatgacactnnttatttgcttttcatctagacaattcattatttntataatataatcttattggttgtgatcttttatttttcttctagaaaacatagtaattctgatgatattaatccaattaaaatccattcttgatgcatggagtcaagtcaaaatgctgtcaaaattcagagtttatgactataaaggccataatggacatgtaattgccttggatattacatgatgttttctggcatggtcttaacttctactatgtaaattacaggtagaatactctggatttatgactataaatcctcaaagaattgggtagaaatattcttcttataaagtatgcgtttgctattttctttgctagtcctttgactactc

SEQ ID NO: 64578 - DNA, 419 bp, Glycine max
  unsure (1)..(419): unsure at all n locations
ctattcaagacanagaaattaaagatattcaagatggatgattttacaatctctagagtcttagaaaaggtatattaaatatgaatggaattccaattgaagtagcaaaaggtttggccaagaaatttaagttaaaaagttttttttccaacaaatttactctctggtaatcgattaccagaggatgtaatcgattaccagtggccaaaactgatttacaacagttattaaaanttgaattcaaaatttgcacggtgtaatcgattacacatatatggtaatcgattaccagcagtttctgaacgttttaattcaaattttaaagcttgtaatcgattacacatatactgtaatcgattaccagaggagtttttctgaaaacattctcaacagtcacatctttttatctgttcttaaat

SEQ ID NO: 64579 - DNA, 385 bp, Glycine max
cgaatccatggaaactgactaacaacacatagctctttgagactatatataataatttatattctgcattccatcgcacatgaagttcattgttatcaaatattaattgactactaaatgataataaaggttaattattaaaggaataggcggatatgtaagacatacttgcatagtaaatattatttgtggaatgttctctccgccagagattaccacctacaattaccaatggttcctcgcattattagtcagcaaataatttttgctatggaaaattgaccaaatgcccaaagctagctatacaccaaaaacggatatgatatcaaaaaagaaagtagtgggtgatgcatagcagatatatatgtaccacgtgtgattgagc

SEQ ID NO: 64580 - DNA, 393 bp, Glycine max
  unsure (1)..(393): unsure at all n locations
gactatcatcaaagctagctgatatgcttgtgcttgtttatntatctcgcacagaatctggttccactaatgcagatgagattctgattagtctgactggagagggtgagatagatgctgttccagatcttctagagcatgtcaatgttgtctttccttgtggcccttctcacttcttatttgattgtgagatagttgatggtgcattatattgctatcttttcacaatatataacattctcaaattactaagactgaagttgaaaaaatccatgtttataaagacataattagttctggcttctcactcatgattgtgttaaattcgacgaaacagaggaagaatgtatgatcactgtgtgtttacgaacaccatgaatgttgcatatatag

SEQ ID NO: 64581 - DNA, 413 bp, Glycine max
  unsure (1)..(413): unsure at all n locations
tatgcgggtgggtcttacgcatgacgagccagcccgtttacccacccctagtactaccttaatatacacactcgaaagtcaaataatgaaatatttgagaaagatgagggaacaaaaaaaatagataaaactttttgaacaatcatcatggaacatagtatacgttcacctttcgtgtttggatgaaggaaaacttatgataaatataagatgaagtataagttgtacttatcccgtcggacacgatacaccgtaggacattagatgctagatcttctcagaaactttggacaaaattcattaagtaacacattggacacgaagtttatcttagacaacattggataaataaacccaatgtgatacacacacaanataacttataaataactatagatattcattgacaaagt

SEQ ID NO: 64582 - DNA, 369 bp, Glycine max
  unsure (1)..(369): unsure at all n locations
aattcgacgggcactgattctggagcgccaagcatcaacagcgcttcgagaccatctagggatggtcatttctcagagagagacgagtccaaatgagggatggtgagtaccctgacttccaggaggaggtagctcgcaggcgttgggcaccacttgtgacccctantggctaaattgatccagagatagtcatggaattctatgccaacgtctggtccactgaagaaagagttcangacatgcgctcatgggtgaggggccagtggatcccctttgacgcagatgccctcaaccaattcttgggccacccgttgatcttggaaaaaggtcagcagtgtgaataccgccagaggaggaaccngctgatgg

SEQ ID NO: 64583 - DNA, 457 bp, Glycine max
  unsure (1)..(457): unsure at all n locations
tgaatgtgatgcccaagagcatgttggagaagctgttnttcatatcctctcacttgaggctaagctccatggcagttcgagcattcgatgggcgtcgtatgaaggtgaggggagagattgatctcccgatccagataggcccccacacttgtcaggttacctttcaagtgatggacataagccatgcatacagctgtttgttgggccggccacggatccatttggtgggagtaataccctcgacgcttcaccaaaagttgaaatatatggtgaaggggcttttggtcatcatttcatgagaggaggaccttcttgtaagctgcccatcctctatgccatttgttgaagccgcggaggaatctctataaacaaccttccaatcctttgatgtggcgttaatgccaccgtagaatcccttccaatgtgtcctcacatctattgtgtctcgcgtcatgct

SEQ ID NO: 64584 - DNA, 443 bp, Glycine max
  unsure (1)..(443): unsure at all n locations
agcttaagcagnggatcaaactgctctttggaactgactttgtgaacatatcaagaggattgtgcagagtgctgatcttatgaactttgattcttctttctgaccgaatgaagtgatatctaacatctatatgcttgggtctatcatgatgaacctgatccttggccaagcatatagcactaaggctatcacagtagatgttagcatattcttgagattaattccgagatcatttatcaaacctcttagccaaattccttccttggcagcttcagtaagagccatatattcagcctcagtaattgaaagggcaatagaaggttgaagtgttgccttcaactcaccaagcaccaccaagggtgtagcataccttggtagggaccttctcttgacaagatcacgcagcaaatctgcatcagaatagccagtgagacaacaatctg

SEQ ID NO: 64585 - DNA, 393 bp, Glycine max
  unsure (1)..(393): unsure at all n locations
taagacaatgatggcgtagattnggagggtcaaaaggggtgtttatattagtgacgtttaaggaaacttgtttgcattcaagttctgattggaagcttattgtcatgagtgatttgcaaaatgatgctacgccaatggaggttgatctttccttatgccaattatgggtgtgggtttattatctccttataaaatatcacacacaaatgatgcttgaaaccattggtaaatgaattagtgggtgttttggatgggatccatcgagggagaatatgctgggaagatcaacgagggttagggtggttgtgaatatctataagccactcaaaacgggatgatgataaagaattaatggaaagatgtgaggtgatgcaatcccatcctcaacgaaat

SEQ ID NO: 64586 - DNA, 481 bp, Glycine max
  unsure (1)..(481): unsure at all n locations
agcttatgcgcctatnntccttacaacgttctcttgtcaatacatttaaccgaanaatgcacccatatacaatcaaggcagcttcgttacctagattatntacacgtacctccaaggtgtatttgttacttacatcacacacatctncttggctaaactcacatacatgcatactcaagcattttggggcaccaaaaattgcacatgtgcacatcttggcatttctaatacctacatacgcaaacttcatgatgaatcttgactatctacacaataaggtgctacatttcatgctctttntttttttcaagtntcgctacctaaagccgcatgcaaattcaagcatattttcctttgctgactaaaatngcattcaaatttaaaaagtatattttttgtaatatgttntcttcacataacacgcaacatatttatatatatnnttttgtgagacatttttgactaccaaaaattatatata

SEQ ID NO: 64587 - DNA, 337 bp, Glycine max
  unsure (1)..(337): unsure at all n locations
gaggtccaggaaggacaaggcggccgaaggaactatttctttctcggagtacgacagtcaccgctttaggagcgttgtacaccatcagcgctttgaagccatcaacggatggtcgtttctccgggagcgacgcgtccagctcatggacgacgagtatactgattntcatgaggaaatagggcgccggcggtgggcaccactggttactcctatggccaagtttgatccagaaatagtccttgaattttatgccaatgcttggccaacagaagagggcgtgcgtgacatgagatcctgngttatgggtcagtggatcccgttcgatgccgacgctatc

SEQ ID NO: 64588 - DNA, 282 bp, Glycine max
  unsure (1)..(282): unsure at all n locations
ctctaatgactatagcaccacttccggagctaaactatngggagtcggatgccatcttctctattaaatatcgagcttcaacaagggtcatgtctccaagggctccaccactggcagcatctatcatacttctctccatgttactgaagccgtcataacaatataggagaagaagctgctcanaaatctggtggtgagggtaactggcacataggttcttaaatctctctcagaaatcatataggctctctccactaagttgtctaatgcctgaaatatcct

SEQ ID NO: 64589 - DNA, 162 bp, Glycine max
tctgaggatcacttaatattagtgagaaatatggtctccgcaaagaaaatcctagccgagacgcttctgaatcgcctctgagacagtatcgtgggtgattactcgaagatattccgtcgtacttgatagagctgcatgcagtcttcgggactcttccgacat

SEQ ID NO: 64590 - DNA, 235 bp, Glycine max
agctttggcccaaccaaaggcatctttctctgaagatagttctgtgacttcagcgggggcgaaccctcccaaccatatgtaccagagttgccgggacagtgattattatgaggatgagattgattatggagacagcgatcttattgatggtgatgaggatgatgatgatgccctcatagaataatgcaatgaactgagcgaggactttggcgaagatggcctagagacaactact

SEQ ID NO: 64591 - DNA, 377 bp, Glycine max
tcgaatataatagtactgtagaagtaatattgtatatcaatgttatactttataagcgtggtagatatgatttaatattatattcaataaagtggtgtagctgtaatgtctttcttttagtataagtaggcagatcgtcatttatcttagacaaaggcttaattttatatacaaggttgtgattacttatattaaattgttagaaatgcactcaaagctttcatacattctttttaaagtttctatccacaatctctattatacaatattatttctcaatactcttattttaaattaatattctcaaacatcttcatcttaatttttgaataaagcatgctgaggctaaaggaatggaaaactcaactatattggca

SEQ ID NO: 64592 - DNA, 495 bp, Glycine max
agcttgtatgagtactgggaaagattcaagatattgtgtgcaagctgccttcaccaccagatttccgagcaactccttcttcaatatttctatgagggacttagcaacatggagaggagtatgattgatgctgccagtggtggagctcttggtgatatggcccctgctgaagctaggaatttgattgagaagatggcttccaactcccaacaattcagtgcaagatatgatgttattgttcttagaggagtccctgaggtggccacgaattcatcttcatctactgaaaataaaaagcttgaaggaaaacttgatgccttggcaacctagtaactcagcttgccatgaatcagatatctgcacctggtgcaagagtctgtggtctatgttcttctgcagatcaccatacagaccttctgtctttcttgcagcaatctagagtcgatgagcaacctgaagctatgctacaaacatgtatatagacctcttcaacac

SEQ ID NO: 64593 - DNA, 439 bp, Glycine max
  unsure (1)..(439): unsure at all n locations
ggccgcccagctcgcccaggcgagcaagggtgcttcctccgtatcaacagccttctggaggaatcttctggagggcccaagtgggcctagttgctttntgcaccccccctttntactaaatgcaccccttctatttttttggtaattctttttccgtaacgttacgaaactttatgaatttcgtaacgatacttattttccttccgcaaggttacgaatctttacggattatgtatttactctntnttagctttcgaagaagttacggaaacttacggattgtgcaaaaacacctctnttcgacttccgccatattacggaatttcacggattgcgcaagcctgcttccttttgaattctgacacgtctcgggacttcattcattgtgcaacanagggacgccagtacctcanaagggtgcatgtcatcaagtaataat

SEQ ID NO: 64594 - DNA, 404 bp, Glycine max
  unsure (1)..(404): unsure at all n locations
acatgtggtactatgtggcggtcgggcgatggtgtacaacaaggtttccacatccacaatgcgcgcataaacccaccatcccctggtgcccacctncaactgagctcacgtactcccacgtagcccatatcctcgtttctctcaacaccgggtccccatcaatcctcccaagcttccacaacatccaagcaaaacaacattcaaacagcacaagctatcacagccaagcaaaacagagcaaaggcagaaaactctgctcaacacatcaaccanaatcacaggttttctcacttaaagaccacagtaaaaattccttcgatccaattcgtaaccggtggatcngactcaaaatttactggaagtctatagtgcataagcctacatnttgacccgtgggatctact

SEQ ID NO: 64595 - DNA, 443 bp, Glycine max
  unsure (1)..(443): unsure at all n locations
tctaaactntatacaagaatgaagctctgataccacttgttggtcaagtggcctcagatatcttaaaaaggtggggttgaattaagatatcacaacttatttccccaattaaaaattctagttatctttctattccagttataaattcccttaataatgaatttcttaaatattgattcaaatagaacaatttgaatataaatataaaacaataataaataaaggagtttaagggaagagaaaatgcaaactcagatttatactggttcggccacacccttgtgcctacgtccagtccccaagcaacccccttgagagttccactatcttgtaaattccttttacaagttctaaacacacaaggacaacccttcctttgtggttagaattctttcacaacaagagaccctcgatctcttattctttttcagattgagaagaag

SEQ ID NO: 64596 - DNA, 430 bp, Glycine max
  unsure (1)..(430): unsure at all n locations
agcttgtccaaatgacactcccacttaagaatatactattgttgtaatatcgaggccaccctaccgtgcacaggcaactccccccccccctccctcacggtgatcagcttgagtctcaagggagttccaaaccaagtgacacacccccagtataagtatttctcctcacgagaaactacaagtacttactggccaagttacactattttcatgtcaaatgaggtacaaaacatgggcaccatcaactgcaacgaccatggataaacaaaagatcctatgccatccccctcaagagatgcttagactctttaaccgctctatttccnccactaggaacatctaacaaggtcaaagcacccccccccccccatgaacgacataacatccaacgtatgaaacatggcatcatctagtacactgaccatgaata

SEQ ID NO: 64597 - DNA, 409 bp, Glycine max
  unsure (1)..(409): unsure at all n locations
cacaaaaactcagctgactgtgcagtgatttagccttaatcactctattattattcatctattaagaatgaaaatcccaagagaaaacgtccgattgatttctcctttatntcactaaaagggcatcctttgattattattttacctcttttttgatttccaacgtggttactgcacaaccgaacggccggaattcatttaaaccgaaatttacggatgatacgatttcaacgatcagtggaaatttattttatttttagaatacgcgagatatgacttaaataaatggcttaagcacgtcaaaaggtggtataataagcgaatgataacgagaaataaaatacatgatacaaaatgtggaccaccactggtacatataatgaattgaaaagctctggttgaggtactt

SEQ ID NO: 64598 - DNA, 346 bp, Glycine max
agcttgctcgtggagcttctatggaggctggatcttttatcttctatgatgtccttcaatggtgatttttcaccatggagatgcagcgcgaggcaaaggacaagaggagaatggatgcgccatccactatggaataagccatggaagaaggagcttcaccaccaagatgagccttggataagaagcttggaaggatgcttcaatggaagaaaagaaagatggagagaaagagagaggtgggagcacgaaattgaaagaataaaagagggggagaagtataactttgaagtgtgtctcataagactcttattcatcaaagttacgacaagtgttacacatgcttcta

SEQ ID NO: 64599 - DNA, 387 bp, Glycine max
  unsure (1)..(387): unsure at all n locations
acttctatgaatatcgatatngcatcatgcttaattatatgcatntgcttattctgatcattgtgtgttgtgtgattatttcttccatgcaggtacatgattcgtatttgttgtgagagtgacatgatgggcagctgcaccaactgaggtgangtttatattcctcttttttgactttatctttgttagctggttattatagctttaattcatatggttgagtttaaatgtgtaaaaaatagaaatagaaaggtctgctaattgcttaagaattccttgttgttcaatgcattccttttgaacctcanaaagtgcttatgatggccttttggctaatatctgattatatgtattgggtcctcggctgcgtattgtaggttattctct

SEQ ID NO: 64600 - DNA, 372 bp, Glycine max
gccgctgcagcttgagaaaaaaggaaatccttcttaatgttttattcctattcctctctaaatgggctacgtttttatataagcttctatacttattgtttgtcaggaaagaagaactgaagttcttggctttatgggaatctctgtctgggtatggaagctgctgtatatggcctatgcatggacacggagggaaacctccaattcttgagtttcaattttttccagggtgacaagttaattaaaaacaaacaaaattggctccctcaatgatgaccctgttttcaaattattatattttatagtatcttgcatttaataattgttaggattggttagcattgttctacataccaaaattattattctaaa

SEQ ID NO: 64601 - DNA, 424 bp, Glycine max
  unsure (1)..(424): unsure at all n locations
agatgcaaccaaatactattaatatcatcgcagtatcggtcacaacatcgaagattgttaggcctcgaaagacaaaatagaatggcacatacaaactgggtacctagcccaattngttaagaggtcagagtgtcggacaaccaccaagcttgagcaagacccggaagacatccaaaggactagcaccctttgtaaagtgcctatacagccaacatgcaaattatgtcatgagagaacttcacaaagggatttgcggtcttcatacaggggggcgctcccttgcaacaaaggtggtcccgtttggctactattaaccaacactcatgggagacgcccttgactttccatagagatgcagacgatgccaagagtttacagataatccacacacccttcctgacaatctcacagtttgagctccttg

SEQ ID NO: 64602 - DNA, 428 bp, Glycine max
  unsure (1)..(428): unsure at all n locations
agcttatgaatcccgattcgggtacatagatgcctatatgtatttngnangggatatatactgcaccggatacctaagtacttctcatcaaaacatacaaattggaaatgacatagtgaacttggattcatctatatcgcatcatccctcaaaaatagtacttgtaaaactgacattgaagttggtcatgaacagtataaaaatcgtcaaagataaattacagggacgtcatatatctacacaacgcaggagggttgatagactctgtgcagcacaaagtaggagatgatatttgtgcaagtgaacagaaactaatagacttcgacattccattgctctgatttcttcaatggcctcttgtactcagtccaatcaatgcctatagtacacaatgaaacacaagatattgtagtgaagtactctcaaat

SEQ ID NO: 64603 - DNA, 464 bp, Glycine max
  unsure (1)..(464): unsure at all n locations
acgacaataacttttactctgatgtccgattgtgtcccgtagtatatcgagactctcgtaattgaaaacagaagctcgtagcatatgcaaatgacaataactttttacacagatgtccgattatgtcccgtagtatatccatacgctcgtaattgaaaacagaagctcgtagcaaattcaaacgacaataactctttactcagatgtccgattatgtcccgtagtatatccatacgctcgtaattgaaaacagaagctcgtagcaaattcaaacaacaacaacntttaactcagatgtccgatggagtacgctaatatatcgagacgcgcgaaattgaaaacagaagctctgagcaaaattcaaggacaataacttatatctcggatgtccgatatgagtcccgtatatatcgagatgctcgaattgaaaacggaagctcgtagcatatactaacgaccataac

SEQ ID NO: 64604 - DNA, 371 bp, Glycine max
  unsure (1)..(371): unsure at all n locations
gtaaaagtattatcgtttgattttgctcagaaccattttttccaattcgagtgtcacgatatactacgagacacaatcagacatcccgagaaaaagnttttgtcgtttgaagttgctcagaacatctgttttcaatttcgagcgtctcgatatattacagcgttcaatcggacatccgagttaaatgttattgtcattngaatntgctacgagcttccattttcgatttcgagcgtctcgatatactacggcacacaattggacatctgagttaaaagtattggcactttgaatttctcagaacatctggtttcaatttcgagcgtctcaatatctcacgggactcaattcgacatccgagtaaaaagtat

SEQ ID NO: 64605 - DNA, 132 bp, Glycine max
  unsure (1)..(132): unsure at all n locations
gaacccaacaacgggggacaaaaagccgcgccacccgacacgcaaaaagccacacaccccccaccaccaacacacacacccccacaacaacgccaaagacactcccaaaacggcaattncaaaaagaaagac

SEQ ID NO: 64606 - DNA, 333 bp, Glycine max
  unsure (1)..(333): unsure at all n locations
agagccaccaggccctctaatagataccacatattctttatttacatctaagaagaataaggagcactacttcaagtgtatatcggagatattcaaggggtaggacacaaccatcgccatttggtgaagtcctacaacagatgctgctttacaccaaantcatgaatgacatctctcccaacaaagggaattgcattttcacttgaaacattgtggtgtgaggcaactgcacgcaggattttaaggaaacttcctagaaatcaaagacccatgggcgtgacaatccttgccccataggaatgagtcatacggaagactctcattgacttggag

SEQ ID NO: 64607 - DNA, 397 bp, Glycine max
  unsure (1)..(397): unsure at all n locations
gttttagactgatcccttcggttggccttttaactaaatttgaaggcgcgatggaaggatggaagatgtcttcgtcttacttaagttgctttcataatgtatgctaagtggtccataatgttttgttctgaattttcgacatgttagatggctgcaaagtgaacaagtatgaattcctgtgttggacattactgaagcatatgtgctcatggttggtgatcgtccaacttattagcgcgcaccatccaagtatgggtcccagctgcacttgaccagctcttcaaaatgctttgggcctctttttgaatgttttttgccgatcctacatcaattgttgttatgctttttggtttcatcaaggtcaactaccaccttctncccctctctactaattatt

SEQ ID NO: 64608 - DNA, 488 bp, Glycine max
  unsure (1)..(488): unsure at all n locations
agtcacctgcggcgtgcaagctngcttatgaagtntcaatagaggctttatcttttgttcttaatgagggccttcaaaggtgagtgtgcaccatagagatgccacagaagatcaatgaaaagaggtgagaagaggcgtcatccactatggaataaactatggaagaagaagcttcaccaccaaaatagcgccttggacaagaagcttacagaggaagctcctctggtcgaaaataaagagagagagaaagagagaggggggaacaccaaatttgaggacgaaaagagggatagaatgtgaactttgaagtgtggctcacaagattctcattcattaaagctgcaaccagcgttacacatgctcttaattatagcctacgtagctctcttgagaaaatttcttgagaagtcttcttaaaaacttccttgagaagctttttgagaggctgcttggaagctagacttaccgataacacccccctcataact

SEQ ID NO: 64609 - DNA, 452 bp, Glycine max
  unsure (1)..(452): unsure at all n locations
acacataaaactaagcttgcgttcatggccccatgacatctatccctctttggaaatatgtcagngcagacatgacattcagaggatgtggcggaacattgacattgtccgtgtacgcttgacatttatggcatttccttacatgggcgtagcaatcgctttccatagtgagccactaataacctactctaaggatcttcctggccatagcatgcccattggcatgtgtcccaaatgaacacccgtggatttcctcaatcatgtaattcgcctctttggcgtctacgcatcgcaagagggtcatgtcgcggttctgtttgtacacgatggtaccactcacaaaaaaactagtaaccaatctcctcaacgtcttttgttatagctgaaaatcctgggggatatcttgttctcgcatactattgatgttaaatacacgggatcccattgctctt

SEQ ID NO: 64610 - DNA, 387 bp, Glycine max
atccttagagtcacctgcggcgtgcgagctgctaagttctaacatggtgatagagatcattattgctgtatgtgaaccacaagtataaagttaggatgatacactgaagctccattcaaaactgaaccatgagtacataattattacactacattgcagctgcattaaacatgctattgttattaaccaatttcaagacctacaggaccccttcccttatttttgagaaaactagcttaatataatttactcctataattaactaacgagttgagagacgctatcccacaaatgcaataccaccttcttatgttagttcacaaagtttaattatataatcctgataaagagaacagcatataatcactaattaatacgtaatattat

SEQ ID NO: 64611 - DNA, 410 bp, Glycine max
gatttctatacaaaagctagtcgtatgtagcgacttttattgtagcatgtgatgaaccgtgagagggtgaatatgtgtgggacaagggcactatttcttaaaccaatggaatcattagatagtccaccttcatgttactatttttgaccatttcctattaccctattatataactatgtttatttttcataccttacccttaggatgtagagacttaacttgattatcaccattctaattatatatgtgttacacagaacttgccaagaaatattttggctaaagggtgtaggcatcgtataattaagacttcatatcatatgtaatcatacctatctattaaaagttaactcgaaaaacttcaaagatatcttttttttatttccttttaaatctgaaaataacattac

SEQ ID NO: 64612 - DNA, 452 bp, Glycine max
  unsure (1)..(452): unsure at all n locations
agcttaccgctggagctgacccatcaactgcccattttcttttaggctggtgattcctangctcttgaccttgacttgatagaacctcttcttaagtgaaggcttttgacttgatcccatgttttactaaagtgaaacaaaacccagcgcgaatcaaaactccaacatctatcatgggtggaatagatgaatgaagaaatgcatatgacacagatgcaatttatgaatacgggagcccgaggaattgtctccttcttagatacaacgtcttgnggtagcaaagtgcccaatgtatgtatttaagaaggtgacaccgaccctccgttggtttgttaaagagaggggatcaagacagaatccatgcgtgactcatatgtgaaaggcgcaacacgggaatgtacatagtatgacaatattcacaaaatataagcaaaaggtacatgacatttatg

SEQ ID NO: 64613 - DNA, 297 bp, Glycine max
tgaggaagcgtagaagggtgaaacctcctgcttatattgttcaccaccgcgaggtacctggagatatggacggaggtcaaagaacctcgcggacgtcaagaggggcgctatagcccaacaccaagctagaacaatcccgacccaacccaggcatattctgtcagagagaacctgtgacgtacctaagctggcgagctcctggcacctacaccataaacgaacaaagaccacaaaccatcgatgcttatggaggctaggcaactgaggaactcgattgatatgcgagaaattgtctct

SEQ ID NO: 64614 - DNA, 297 bp, Glycine max
actgatagcagatgtatcatcacaaaataacatcacagagggcacatcaactccaaagtgaagaagtaacctgtgtaaccaaacaatttcactagtaacagaagacaagacacgatattcagctttagtggatgattttgaaacagtgggttgtttcttataacgccaagaaagaaggttgtttcccataaagacacaaaagccataagtggatcttctagtattaacacaattggcccaatcagcatccgcaaatgcagtgaggttgagagagttcttatcatggaaaaacacacc

SEQ ID NO: 64615 - DNA, 491 bp, Glycine max
ggatccttaagcaccgcggctgcagcttaattcagaattatttttatataatagaaatgtttacttataatagaaacttggaatacgctaatacagcgacaaatgagagataaaatagtgatgaaatgtggagtgcaatcgcctcgattaaagggcaaaccaacacgggttagattttttactctgtcgctatgcaggtttttgacatatgagtgaaaataatttttaagtaggccaccaccattaaaaacttcccttttccctggaatcgttgtctacttaaatatagtagatgaaaaatataatattactaaaaactacatcaaatttaaatagatgatattttaatatgggtcataatctatatttaccaattgtattcacaaagagaaattaatataaccattttaaattaattagactggtacatgtcacaatatgtaatcttgaataactgattattacacatagactttattatggtcacaaaa

SEQ ID NO: 64616 - DNA, 424 bp, Glycine max
cgtgaagaatgaagtcttatcaagatcaacctcaagatgatttattacttaatgaggagattgatactttaagtcttaatgtcaatttcggtccattatatattgtagttgtttcgctttggaacatttaagttttaaaagtttcattatggttctttacgtttttgcaatgtatcattttggtccttttttataattttctgttagaaacattaatgttctgttagtgtttaaattttaaaatgagttaatgtcacttttggtccatcatgttttaaaagtttcattcatcctttgtgttcttgaattgtatcgtcttagtcatttcttcaattttttgttagaaacattagtgtttaaactttaaaatagtaagttaacataatgacagctaaaaaccactactatctcttccatattcaaa

SEQ ID NO: 64617 - DNA, 303 bp, Glycine max
accaatgtgagtgtattggactggccaactgctccaaagatatctttcttgacattagaataaaaataaaggcgcaaaagcttatcaatggtgggtgattcataagggaacaatccaaactgtggaaattgatggttttgatatcaaggtggatcggttcccccttctatgcaagatcccaatagctagtatctgatctttctttgattaagtcgctgctaccctctgtcttcgtgaagagataattattggataatcccaggttgcgtatatcaatatacctaacctgaaatacaagaacca

SEQ ID NO: 64618 - DNA, 320 bp, Glycine max
  unsure (1)..(320): unsure at all n locations
gatgatgacatanattcctaaagaatggtttcttgattgagtctacaagttcaagatcaagtgtaatttgaagtgccatgaaaagaaatctagacgattcaacaatcaatagaagtttgattctcttattcancacaatacgaacccangtttcaagatcatttatcaagaagacttcacacgggaagaaatgaaatgatccttcgaaacagcgacataccacatttttgtttttcataagaggatttcctcaaatactctacactaccagagttcttactctcttggaagcgttaccaccttcttgtctccattactct

SEQ ID NO: 64619 - DNA, 373 bp, Glycine max
ttccgcatcagcacctggaaggatctaattacggccttccttaatcttgtatcatttcttctctgacatggctcccgaccgaactcagctgcaaaacataagtaaaagagaacacgagtcttttaaagaatacgctcagcgaggttggtttgaagaggggaaagtttgattacgtctccccggtaggtgctagcggtttgaagaccggaacaactatggcaaagaagaaagagggagatgcccataccgttaagcgaaaaagaggctaagttttgaattgcaataagtatcaggtatgctaatcgcatagccaccgctaagcgcagcttcatagcgcttatcgcaaatgagactctaacaaacatctgcttta

SEQ ID NO: 64620 - DNA, 331 bp, Glycine max
  unsure (1)..(331): unsure at all n locations
cacaagcgaccgcaattgtggtcgtattagctgcatttgtctgcaattccctgcttaacaagatcgctatgaaaactgcgaccgcaatttaanaaccttgggaaactgcattgtttggcggtgattgaatgacgaagttacctttgacacgatcctgtgggaattcggaagngtggacccttctcggggattaacaacactgaatctttccacactcaacgcgttggtcttaatgtcttctgaaatgcacttggtgttacctctatgaagctcgtaccgcatctgatttccctacgcttcatctctatgtcttagtgataagtgcgaagga

SEQ ID NO: 64621 - DNA, 412 bp, Glycine max
  unsure (1)..(412): unsure at all n locations
actaagctataagaacatgatggctggtttaacccaatcacactatgtttaaaagctattgaagaangttaattattttgatgtgaaacctgtttctactccttatgactcatccatcaagttaaagaaaaatttgagtaaaggaatttcttcacataaatattctcaaattattggttctttgttgcatttgacaaacttctttaggcctgacattgcatattcaattaggaaggtatactaataatccttatcattctcattggatcgcattagaaagagtgtttagatacttaaaaggaaccattaattatgacattcattatacatgtttcctgcaataattgacgggtttagtgatgcaaattggatttctaattctgatgaaacaaactcaacaagcgggctatgt

SEQ ID NO: 64622 - DNA, 460 bp, Glycine max
  unsure (1)..(460): unsure at all n locations
acctgaggcntgcaatgcttctgcatccaccaaattatgcataaaactctttatatttgtttatcttcactttaactgaacatagaaacaaacttgaattggtgagactgggtcctacaatatattgatacacaagagtgaaattattcagagactacactgaaccttttaccgacaacttttaataacaacattctttaatgcccatatgcagttttattcttaatacattcgtgctgttcttgttatgctatgcaacggtgagggtgaattttatctgtctatgcagaatacacccccctataacgctttgcgtcttggttcttactaaaaattattgcgaactgcccaaaaacactcccatttagctcaatcattggataacaacattcttatctaatgaaagaccttaatcgcgtgatttatttttataataactaacttagatggatttttcatt

SEQ ID NO: 64623 - DNA, 329 bp, Glycine max
ctattcctggttcatgttgctgctgacatgtgtctccaaatttcttaggtaagaaaacagaacccttgattacttatataaatatatggaacctcaaattacgagtgatactataagaactatattccatttgttaagatgacctgatagttctcatggcattgcatgtttgtttgacccagctgacataacttgacctatcttatgttgtgctcatcagtgcatgaaagtttgaactttcgttcaatgcacatggtgttacccgaatcttgatatgggtcttgatacccacaatttgatcccactttatgaatctggtctttgatagc

SEQ ID NO: 64624 - DNA, 436 bp, Glycine max
actcaagctgtgatgggtgtaccgacaccccatagaactagttaagactcgttttcaaggtcgggaaccccaatgctctgttggacttttccgggtccactagatgtctgggaggtgcgatccctgcaaattggtaaatggtgttcgagattagctgggccacattaatactaacttgagtcaagatggcatagaccaactggcacttcgacaagggaagatcaaaattatgatcgctggggaggatgttgctgagatgcagtgtcatccagatctgtgtcagggtggtcatgctagtgtgcatgatctgcacccgtctccctgtcacgctgcgcgcatagtcctgccctgaaatgcattagcaactggcccaatgacctctcatcaaaccttcaagcctaagtctttctctgactgaactcacaaatgttcccct

SEQ ID NO: 64625 - DNA, 419 bp, Glycine max
  unsure (1)..(419): unsure at all n locations
agccccccagttatggaaagctaaatcctctatagaatcttccttgttttgtcttgangtagacatcttattatctatttaaagatgttatgtgtgttcattgtgttatcttgaacttcattctaccatgcttttgccttgatcacatagatgcatgtgtttctaggatcattcaacagtggaaactggtttgattcttagaactcattatgaaggggctaatttgtcgacacatcatcagggatcgtggtacggacacctaattgttgaatgtttgcttaaatgtggcctggtcagttgtatccacaagaagaatctgtggcgatgctatacatgagtaggctgtatattctttagaatctgtgttttctttcttgggacacctatcgacgcatatccttctaaataagcagttactt

SEQ ID NO: 64626 - DNA, 459 bp, Glycine max
  unsure (1)..(459): unsure at all n locations
agtcacctgcggcatgcaagctngtgaaatcaatggaatacaagattctgttttattcatgtcgntcaatnctattcttagaaatgtgacctaagcgtttgagccataatgctcctgagtttgtattatcaattctacccttagtaccacgcaattctgcatttaaggattcaccataggagaatacagcttcaagtaaatatatattatcattaaccaagagtgaaccggttccaacaatatctgaattaaaagacaacctgaacacaattgttctcaatgaatacaaataacccattttatccaaataaaaaactgaaaccaaatttcgtctatatgaccgttcaataaaagcgtctttcaaatcaaataaaaccagactaacacatatttctttatgacatctacatgctggcgttatggtgtatgaaattctgtatttcaagatattctttctga

SEQ ID NO: 64627 - DNA, 351 bp, Glycine max
aagtcttaaaatcaaagaccttggtgtcttacaattttttcttggactcgaagtggctcatagtaaacaagggatcaatatctgtcaaacataatatgttcttgatatattacatgatgcatgcttgttataaagcaaacctgtctctactccagatgattatgctgtaagactagaccaacaatctggaactccacttgatgatacagcaaatccatcatatttgtggctcattggtcgccttattatcctcaccaatacaatgccctgattcatatgccatgcaacacctaagccaatttgtagcttatctctttttaggtcatctacaatccggtccttcgtgatttt

SEQ ID NO: 64628 - DNA, 97 bp, Glycine max
ccccctcccaataccacatctagacctcaacagcacccggggatatcactaagtagcctcaacacacacaccccttttaaggggcacaaatcttcca

SEQ ID NO: 64629 - DNA, 347 bp, Glycine max
atctgtgttaagtccaagcccatagatgtagtagtatcttttctagatcagagacgattagatataatctggatgatataaaatctgattgagaccagatcagatctagatgaagtaatatctagattagataaaatctagacaatatctagataagataaagtctggataagattaaattttgtagaataaaatagtctgccctcttcaagtccaagcccaattctgaattcaagtccaatgccttcataattcctgaagattagattataacattaaattagctgaatgggcacacataataaagactgcctaattaatgcgacagtatagattaatcagtactt

SEQ ID NO: 64630 - DNA, 281 bp, Glycine max
cagcagctgccagcgagcggtcctaggagattatttttttgttatgtgaactaaagctactaggcgaactgggccagaaaattcataaaaagactatctccccacttcctagggttatcattcctggatctgataatcaatttaagcgaacgctcaaccttgcttcgcaacccgcggccaacgataatatccttccccacataaaatcataaccctacctatgttaaaatggaacacaaaacgaaaacatcttctactaaaaaaatattgtttctaccact

SEQ ID NO: 64631 - DNA, 375 bp, Glycine max
aaggaagaaaagagggagagaagtttgactttgaagtatgtctcacaagactcttatccatcaaaggtaccacaagggttacacatacttctatttatagcctatgatgcttcctatagatacttccttgagaagctcccttgataagcttgagcgtagctacacacacccctcgtataactaagctcacctccatgagaagcttcttgagaactatcttacaagattctagagaagcacacttatcgtgcccatcatttttctatttctaaacccttttgcccaattaatactgatggtcttactgtaatatacgggcgtttatacttggctatttactaactgatgtttaattattcacgattaataacattg

SEQ ID NO: 64632 - DNA, 283 bp, Glycine max
  unsure (1)..(283): unsure at all n locations
tttttatctaagatgatgttctgagtacattggatttggtgcgatcatgttctcctgataaccagctgtgaaaatggtgattggaggaacgccccttcttttactcaactagcttaatgttatacctctacngctttataagccttatattccggcctaggctttacattttcttccatttgttaacgctctgtgtcttttgttgtaattcattataatggatctttctcatcttgtatactttatacccattctattaatttgtattttacttaatttttca

SEQ ID NO: 64633 - DNA, 356 bp, Glycine max
actaggaacagtatggagtctaatcaatctttcatatttcattttgcttatccactctggactattctttgtgtggccttgtagagggaaatgcagaaaggattttcctgtgcactagtgaagaaagaagcatattctcaactcaactacccaacaaaagggataagagactgtccgttgagactcgagaaggttctttctattgcatttttcctaccctgaatttttctatgattaccacggtacctttgcctctttgaaagcccaagcctgtagagggaaaatgttatcttacttaacccatgccttacatgattggtcacaaaattcctataggccattatacaatgagactt

SEQ ID NO: 64634 - DNA, 273 bp, Glycine max
ctggtggtgaactcctcagcatgtgtattttctaatggaggccctccttcacctctgtgccttgtcttccgctgcatctccatggtggaaaatcaccattcaaggaccccattgaagctcccagcctccatataagccccacaagcaagcttctcatcatacgtcgtgtgatctttgattctataggataacgcgtgcaataaaatgtcaatggtgtttttttggttcggggtatatggtagaacatctgcctgtgtgagattatatacacta

SEQ ID NO: 64635 - DNA, 418 bp, Glycine max
  unsure (1)..(418): unsure at all n locations
ccgagtaagaattagacttattcttctgctacttttgaatttaatttagcgngtcattnctttatttcttgtcaagcatattagtgtctcgatctgggtacatagctagttggcagggtcatttactgtggatgatgcgaattccacattgataactaagttcaatttaattaactataaaaccataccaaatatatatggtgctgcaccaccagggaatttttcccaccctatcaacatatttgtaacgggaggtaaaaatcaaccttgaagctaattaacgaatggaaattgaaatagtgtgttagaagaatatagctgatctggtgtcatacacaatcctgtgttacttcgaaacttaccaagaaatatacgctttgcggggctacatggtagctattagaaatatctgatatac

SEQ ID NO: 64636 - DNA, 346 bp, Glycine max
agctgcatagctgccaagagccaagaaattttcatatatctgtataggtcagaaaagaactagtgcaaaatcaatcactttaaatgggaacattaaaattgcctgcttactcacaggataaagggtgagtacctccctctggttaataggaagccgatctctcttttcacaccttaattctgcttcatatactgcactctttgccctgcataaatatatgaaaagcactaatatctatataagacaacctacttgaatgaaggcgtagaaaccatcgcttcttatgtatgacaaggagacgaaacaatctcaaagtctgagaaactcaagtttccctacacgctct

SEQ ID NO: 64637 - DNA, 388 bp, Glycine max
  unsure (1)..(388): unsure at all n locations
tcctcggagccatttcctgcgaaggcaaacatactttaagntagttttaccaagaaatgctactcttaaaacaaaaatggcgtacaacctccttcaataaacacaaacatcaatgtaaatntagagcaaactcatgcatatactttcttacgaacattcactcacacaagatattcttctaactaagaaaaatgcacccatgcaaaatcaaggcaccttcgttacctagattatgtatatgtacttccaaggtgtatttgctacctacatcacatgcacattcttggctaaattacatacatgcatactcaaagcatcttggctaccaaaaattgcacacgtgcacattctggtatttctaatacctatgcatatacaaactttgtga

SEQ ID NO: 64638 - DNA, 260 bp, Glycine max
ctcgcctggcgagctaagtagctttcttcatattgtctcatcttctggagaacttactagaaggcccaagttagcctaatttttatttgcgccccctgtttactaaatacaccccttgccttattttgctgattcttttttcgtaacgttgcggaaccctacaaatgacttttcgatacttgtttgcttttcgtattggcaccaagaccttacgaatgacacaatcatcgcttctttgtcttacacaatgttacggaact

SEQ ID NO: 64639 - DNA, 392 bp, Glycine max
  unsure (1)..(392): unsure at all n locations
taaatctagttggactatatattgtacatctatctaatgtttttgtgttaaatatgaaagattcatccatgactttgtaagtttttatggttgcttgttggatccacaaaccaagttaaaaggatgggcaaaatggtcatattttaagaatacaaacatccatctgcccaggctagcaaccaattcgcatggttaatcaagtttctttaagcataagcaaccaactcacctgngctagctacagctcgcctaggcgagtaagtatcttaagcactaagttagccactcgcaaggggagttcatcttctctaggtgagttggttagcacctcttggcttacattctatataagccatgctaaccaaatgaagatggatagactagaagcacca

SEQ ID NO: 64640 - DNA, 417 bp, Glycine max
  unsure (1)..(417): unsure at all n locations
atccttaagtcacctgcggctgcagcttatatagacttcaagttttattctttgatatatctcaaccagnncgtgtctaatagactagggcgctctacacaatgtcgttactattcagagagagagtgtttgaaccacaaacactctctgcagcatatattcagagaactacaacttgccaacgtcgtctcttgctcatagttgactttcattgttccaatcgaatataacgttaacgacatactaccaaataaaaaattaaaaatgtcaagacaagacactatgaatctcccctttcgtgggctatggcatgaactgtntactaaacctatggatgtactttctgatgatacttttagtcttgaggatcagtaactgtttcattttctttgtctttgatccaagtgtgaagcacta

SEQ ID NO: 64641 - DNA, 370 bp, Glycine max
cgacaaggtgaaagaaatactagatcaaattgatgtgaaacatgatgctattgtatggaaggaactccttgctacatgttgaatgcatggtaacttcaaattctgagagaggacaactacaaatctttttgagttggaacccatgaatgttatgccttatgttatgttgtctaacatgcattctgaatcttgaaaatgggatgatgctgcgaatatacgaaagttggtgaaatcaaaaggaataacaaaagatcttggatgcatttggatcgatataacggtatattgcatacatctatgtatgaagatagaggacatccaatggaagctgagatttattccaagattgatgaaatccttagaagatcta

SEQ ID NO: 64642 - DNA, 456 bp, Glycine max
  unsure (1)..(456): unsure at all n locations
atccttaagcaccgcggctgcagcttgattacatattgaattcatccaaattttgtcaagtcattgttacttccatcaatattgatattgtatcatgcttaattatatgcatttgcttattctgatcattggttggtgtgtgattatttcttccatctcaggtgcaccatgatatgactttacccttgtcacattatttcatatatactgaccataatttctatttaactgggaatcanctgaacagcgactgcagtgacgtccccatcatatatgcactgaagaaaagtgtgcgggtgattgaattagacatatggcccaatttggaaagtaaatntnttattaaatatatttaagtacaaaaaatatcttaatgggagcaatcatctccttagagctttatgtggatccgtccatgaaggtacatgattcctattctgtgtgagagtgaaatga

SEQ ID NO: 64643 - DNA, 335 bp, Glycine max
  unsure (1)..(335): unsure at all n locations
taagcaccgcggctgcagctgtatcataaatcatagagagacttttgattttctacacttgtgtnatcaantatagcctataattgattaaaacacagagcttttaatttagaagaaatatcctaactttanaagcttttctttttactccttcatgatgatgcatgatgcacatatgaaatgatggatactaagatgcaacacacaattcaacaatcaatacatatgccactcaaaagagttgggcgtgtaaaacacaaaacttcttgaagctcttcttctagctttaaggctaagtacttatgttgttcccctatttctactatagggacgtc

SEQ ID NO: 64644 - DNA, 399 bp, Glycine max
  unsure (1)..(399): unsure at all n locations
tctcagcttgctaggcgagttgatttagccttaatntcactttatttattattcaattcaattaagaatgagaaatcccaaagagaaaacgtccgattgatttttcgctctatttcactaaaagggcattttttgattattattttacctcttttttgatttccaacgtggttactgcacaaccgaacggtcggaattcatttaaaccgaaattaacggatgatacgattcaaacgatcagcggaaatttattttatttttagataatgcgagaaatgacttatataaatggcttaagcacgtcacaagggggtattaaaagcgaatgaatacgagaataaaaatacatgaaacaaaatgtggaccaccacgggtacatataatgaattgaatagctcg

SEQ ID NO: 64645 - DNA, 370 bp, Glycine max
  unsure (1)..(370): unsure at all n locations
atccctaagtcacctgcngcatgcaagctnggatcattcatatctacgtaatataagccatttcttgattcatatccaagcagtaactcanatgcatccaagaaggaccatacaaagtacccttttacatttaatccactcctgtcaatgtgtcaaaaataaaggaaaagagtaaacaaaaaccacctttcatgaaacaattgacaattattntaaataaagtggaggtgctatgttgacattgtacaccctcttaactttcccacttgaaaatgaaaatcatagtagaattacctaagtgcatcaacccaaacttcctatgtattcatgcaagtaattcaccctcggccactcatctaatgatgaaata

SEQ ID NO: 64646 - DNA, 402 bp, Glycine max
  unsure (1)..(402): unsure at all n locations
tactaattaaatagagtttcanatctagtcaaaggggttgttaactactcgtcattaattgagaataagcatatattaattagttgtaactttatagtttatttattactttacaattttaatttattatattaattttctattaaatcacacgtaatgttttcgactacttgttaagaatatattttgcaaattcaaatattttctcacaaattcaatatttattatcaacagagttatatttattagactattaaatacttctcgattgagtttaaagccatagtataaacgagtttgagacaaactgtataattagttagtttctttcctttgaacatttgttgaatgggacaagtttttcgacttacattatccttaaccttgttattttctatgata

SEQ ID NO: 64647 - DNA, 312 bp, Glycine max
  unsure (1)..(312): unsure at all n locations
ccacaatgcgaccgcaattgtggncgtattagctgcatttgtctgcaaattcccgcaatatcaagaacgcgatgaaaactgcgaccgcaatttataaaccttgtgaaactgcaatgtttggcggtgattgaatgacgaagttaccttgacaacgatcctgtgggaatcgggaagtgggtacccttctcggggattaacaacactgtatctttccacactcatcgcgttggtcttaatgtcttctgagatgcacttggtgttacccgattgaagctcgaaccgcatcgaattctcgacgctacacacaaatgc

SEQ ID NO: 64648 - DNA, 465 bp, Glycine max
  unsure (1)..(465): unsure at all n locations
tataaagaacaatgatggcatggttttaacccaatcacactatgttgaacagctattgaagaagtttaacttatttgatgtgaaacctgtgtctactccttaggactcatccatcaagttaaagaaaaatttgagtcaaggaatttcttcacataaatattctcaaattattggttctttgttgcatttgacaaacttctttaggcctgacattgcatattcaattaggaaggtatactaataatccttatcattctcattggattgcattagaaagagtctttagataccttaaaggaaccattaattatgacattcattatacatggttcctgcaataattgaagggtttagtgatgcaaattggatttctaattctcctnaaacaaactcaacacgtgcgtatgtctctactctaactaatggtgcagcttttcggaaatttctaaccaacctttatatcat

SEQ ID NO: 64649 - DNA, 484 bp, Glycine max
  unsure (1)..(484): unsure at all n locations
atccttaagtcacctgcggcatgcaagcttcaggctgctcaattgctccaggttgctgcatgtaagggcaaatgtctgtatggtggtcagcagatgagcacaaaccacatacccttgcgacaggtacaaatttctgattcaaggccagctgggttatcaagttaaccaatgcattcagtgtgccttcaagcttcttattttcagatgatgcagatgggttggtagctacctcatgcacttctctaatgactatggcatcatttttggcgctaaactgctgggagttggaagccatcttctcaattaaatttctggcttcaacaagagtcatgtctacaaaggctccaccactggcagcaactatcatacttctcttcatattactgagtccttcattaaaatattggagaagaagattgttctgaaatctgatggtggnggcaactggcacatagtttttaaatctctccaatactatacaggc

SEQ ID NO: 64650 - DNA, 415 bp, Glycine max
  unsure (1)..(415): unsure at all n locations
ngacaagccaacaactctcgcacctgtagagtttaccaccctcttctccggacaatacttattcaagttgaggggcttgacaaactcgcaaccctcttacttgtcaaggctactacctttgacaccataaatctcttttgccaacaagctaactcaaagcttgtgggattatgtactgcccggggtccacaaaatggacgtggcaagtgacgtggcactccagtgagcacgtcagccctctatgtcaaccttggcataggagcacagacaccttgcccttatcaaccaggctactgggccgataagatatctctgatacctcattattcgaaattaatgataatgttaaacctccttatcatgtgacacgtccttattatctataatccaccacntatctactagctattaacta

SEQ ID NO: 64651 - DNA, 273 bp, Glycine max
  unsure (1)..(273): unsure at all n locations
actcagctctaagacttgttgtactttnnttcacgaatgatatatgattgttccatggattcttaatgcatatggtgtggctatatatgctattgtctataagatctataatgggtggatattatggttgcatggcgcaaataaagccactgaaaagtttgatatgctgtgtaacttggtgtgtgcttgccattgctttcatgtgacggataattgaataattcatgtgtgttttaattattaatgtgtaatgtttagggggaggtttatttt

SEQ ID NO: 64652 - DNA, 410 bp, Glycine max
  unsure (1)..(410): unsure at all n locations
atatgaatgagagacctataattttcatgaataaataaaaactancctaacgatatgtagctttaagcttttataatataattatcatagaataactctcaacacttaagcttttataatataatacataacctcataaaaaaaaaacaactgccttgaaaagcttatacctgaatcaattggtttctggattgtcaagctgcattcacatgtattatacctgactcagttaaattctgttaaaaaattcttaacttttaccctctttatttgaatgttaggtattgaaattggcttgcctcggcccaagctgccagctgtatttgttggagaaggttcccacatcacgaataatctttatcatttaagaatgacttacattttgtcaactggatagtattataggttta

SEQ ID NO: 64653 - DNA, 384 bp, Glycine max
cttatatggaaaatgcattaagctacatcctatatatcaatcctaaatttgagctcctacggagcaaaacaatgtgtgtttcctagagagggcattagctaccacatttgtttttcccttgttgtatttgataacatatggaaattgctctaggtactctacccattttgcatgcctcttgtttaacttgctttgccctctgatgtacttaagtgattgatgatcactatgaatgacaaattccttggaaacaagataatgttcccaagtttggaaggctcttattaaggcataaagctctctatcatatgtggggtagttgatgtggcactatgaagttttcactaaaaaagcaataggtgccacttgtacaatcagttcaac

SEQ ID NO: 64654 - DNA, 400 bp, Glycine max
  unsure (1)..(400): unsure at all n locations
tattaatgtatgattaactaacatataagacaatgtgatcagttatttcatatataaatatttctataactgttaattggtttattaatctcaaaaattattgtaacggatgaattaattcagacattntgtatattttaatgacgaaagatatgattcgactttatcagtttagtgatgtattcaagtttctttgaaatatatgattagataacattattttatcacgtattcacataatttaaataaaaagttacaataacgtgaggaatagtgaaattcgttacgcaagataacgaaatgtgatatatatatattaatttgatatagattgaaatatgaaaatttaacaacgatacataatatctccttatatactacagtcttaactaaattggaa

SEQ ID NO: 64655 - DNA, 458 bp, Glycine max
  unsure (1)..(458): unsure at all n locations
agctntganatctgaagtgtaatattcatatgatctttgttgataaaaatgcacacacatgacctctatttatagtctaagtgtcacacaaaattggagggaaattcaaatttcacttgaatttgaaattgaatttgtggagccaaactttggagccaaaatttcactaattatgattatctgaatttagttatggttcagcccactaatccaagatcaattccaagattctccactaagtgtgcttatgtgtcatgaggcatgaaaagcatgaaggacatgcacaaagtgtgactatatgatgtggcaatggggtgtagtaagcaaatgctcacctccccctctaaaatttaattggattgggcttctaccaatcaatttaaattatttccaccacacacaataaattatcacttagtgcatgtgaaaatactaaactacccctcatacaaaactag

SEQ ID NO: 64656 - DNA, 435 bp, Glycine max
  unsure (1)..(435): unsure at all n locations
tgtagaattatggtgtacccatcacatgtggtactaggtggcggtctggcgatggtgcacaacaagctttccacatccacaatgcgcgcataaacccaccatcccctgttgcccacctccaactgagctcacgtactcccacgtagcccatatcctcgtttctctcaacaccgggtccccatcaatcctctcaagcttccacaacatccaagcaaaacaacattcaaacagcacaagctatcacagccaagcaaaacagagccaaggcagaaaactctgctcaacacatcaaccaaaatcacagcttttctcacgtaaagaccacagtaacaantccttcgatccacattgttaaccgttggatcgactccannaatttactggaagtctatagtggataagcctgcctttgaccgttggatatctagcaacatc

SEQ ID NO: 64657 - DNA, 459 bp, Glycine max
  unsure (1)..(459): unsure at all n locations
agcctgagaaantcaaggaattacaatgaatactatatatctcttaatgttataaaatccccaacaaggaactactaacaccacacatattagagccaaaacacaaacaacacccattgatgccattcaatatttggcctttcaactccaaaactaatggagccattgaccttctaagtccaatacgtatagaccactattaatgagttaatcatagcttcttaattaaaaattattacattctccacttggtccaaacgttttgactcattgactaaaataattcaatgctcaatttccttaagaaataaacatgttaatcatagtgatagttcctcttttaacgggtaatatcatccatgtataccacatgctcaatcttccaacgaatatacttaatgttgaattaaacttgatgaattaaaccaatgtttattattgtcctcaacatatattttt

SEQ ID NO: 64658 - DNA, 390 bp, Glycine max
  unsure (1)..(390): unsure at all n locations
cgaggganaacttgatgncctggtcaagcttgccatgaatcatatatctgcacttactgcaagagactgtggtctatgttcttctgcagatcaccatacagatctctgtccttttttgcagcaatctggagtcaatgagcaacctgaagcttatgctgcaaacatttataatagaccccctcagtagcaaaaccaacaacagcggaataattataatctttcaagcaacagatacaattcatgttggaggaatcttccaaatctgagatggacaagtcctccacaacaacaacagcttgtccctcctttcagaatgttgctggtccagcaagccatatggtncttctctaataccattacancaacagctgggactcaaccccatcattc

SEQ ID NO: 64659 - DNA, 395 bp, Glycine max
  unsure (1)..(395): unsure at all n locations
agcctgagatgaggaagngnagaatggtgatactttctgctnttactcgntgaccacaaagtggtacctggagatatgtcgcggtggtcatgagaccttggggacgtcaggtagggtgctattgcccaaaaccaagcttgaccaatcccgacccaacccgggcatantcagtcagagagaacctgtgatgtacctaaacaagcgagctcctggctgtcaatatataaaaggaacaaagaccacaaaacaaggaagctttgggaggctcgcccactgtgaaatttgtgtgatatatgggttgtggcctctggtaatccactaccaacggtgggtaatcgattacaatgcttataaatcaaaacacgacactgagatggnctctggttatccattac

SEQ ID NO: 64660 - DNA, 430 bp, Glycine max
  unsure (1)..(430): unsure at all n locations
gatggcctcatcaaatgccttatgtcttgaaggtatttctatcaatagacctccaatctttattggagagggttaccactactggaaaacccgattgaaaatntttatcgaggcaatagatctaaatatctgggaagccatagaaatagggccttatatacccaccacagtagagagagtttcaatagatggtagttcatcaagtgaaagcataaccatagaataacctacagatagatggtctgaagaggattgaaaactagtacaatacaacttaaaagccaaaaacataataacatctgccctaggaatggatgaatatttcaggtgttgaaattgtaagagtgctaaggaaatgtgggacactctttgattagcacatgaatgaactacagatgtttaaagatctacgataaatgcactaactcat

SEQ ID NO: 64661 - DNA, 357 bp, Glycine max
  unsure (1)..(357): unsure at all n locations
agcttcattcatggttaaggaacaacattcacacattgagtcaaagcgaagaagaactcaatatagatactactgagtgaaacacaatgcttaattagtttatcctttacttagcaaagntcttgtactgattcatacttgattgtacacgcattctttaagtgttagaatatgtgattttctaaactatatgtttgtgaaatccatgagtggcttagtgtcaaaacaatacttaagtattcttagcttcagaggaagtctaagggttctgccaataatggcctagagaatacttataaagctatgagtgacaaatcagtatactagcttgtaatcaaactttaattagtggatccc

SEQ ID NO: 64662 - DNA, 404 bp, Glycine max
  unsure (1)..(404): unsure at all n locations
ctctccactaagttacccgatgcctaanatgtcntttctgatggtatgtggcctagatgtagggaagaatttctccaagaacaccctcttaaggtcatcccagctaaaaatgaacctgtgagcaaggtagtagagccaatcttctgccactccctctagagaatgaggaaaagcctttagaaagagattatcttcttggacatcatggggcttcatggtggaacaaacaatatggaactctntaagatgcttatgaggatcttcacctgcaagaccatgacacttgtgcagcaaatgtattagtccagtcttgagaacatatggaacaccctcatcaggatattgaatgcacaagctttcatatatgaaatcaggtgcatccatctccttaagaggttctttcc

SEQ ID NO: 64663 - DNA, 492 bp, Glycine max
  unsure (1)..(492): unsure at all n locations
tcagagtcacctgcggcatgcagctttatcctggcttcctatggggggagttctttatactcatcttatacttgaagnggcatcttcattcatctttcttcttctccattccactgcaatcagacctcaagaagcanaggaattcattgatgaagaagatccaagacctacaagttccacatggagctacatcaatttctctttaaaattttttatccaaacccaaaatttaaaataatgacatatattcaatatccccgttaaaatgaattatcctctttaaatactctatcnaaacatangagttgaaatgatacatgtcacacacaatataatgatatgacacaaaagtgggtcccaatttcacgggttattntttttctaataacaagccggatatattggtaatttgaccaaccccacacaagtaggtgatgcataataaatggttattcacataatttaaaaactcatcttggtttatatgtaaat

SEQ ID NO: 64664 - DNA, 346 bp, Glycine max
  unsure (1)..(346): unsure at all n locations
tgcctaagagacccgatgataagcggtgatgnacctttccgctcccaattgacagccctgtttatgagcgctgacaccacagcgcttgaggccatcaaagatggcattttccgggagcgaccgtcagctagggaagacgagtataccgacttccggaggagatagttcccggcgggggcatcactggttacccccatggcaagttcgacccagacatagtcctcgaanttatgccaacgcttggctacaaggaggcgtgcgagaatgcgatccttgtaggggtcagggatccttcatgcagatctctcaccagttctggatacccttatgctgagaggccggatgc

SEQ ID NO: 64665 - DNA, 272 bp, Glycine max
aaacgagggagagaagtttgtctttgaagtatgtctcacaagactctcatccatcacaggtaccacatgtgtgacacatacttctatttatagcctatgtagctttctagagaaacttccttgagaagcttccttgtgatactagagcgtagcctcacacactcctcttatcactaagctaccttcttgagaagcttctttgtaagctacctaaaaagatcctcagaaaagcctgagcttagggaggtgccttctattacttctatcttcta

SEQ ID NO: 64666 - DNA, 310 bp, Glycine max
  unsure (1)..(310): unsure at all n locations
gctttggataaactccttctcttctttctctcactgctcaacattcttctctctcttttcacntatgaactaccgttttcttgcacaaagtttgtggctcttccgttggtgatgatcatagtaggctcaacgctttatgaatccatggatccactcgcaccccggctgaaattgagttctgatttagtatactaatactttgtgaatgatcatttgttgtctccatcctatatatgattttcgtgatttttaatatacttaggatcatcatacattacgctatttgatcatttctaatttcatattcatt

SEQ ID NO: 64667 - DNA, 266 bp, Glycine max
  unsure (1)..(266): unsure at all n locations
cattttctttaaaaanaaaagagatgtgactcaaccaanaaaaagggggaacaaacaaacaagcgcttttaggagaaacagcgggcgaagaaaccacaccaaagaactaacgaccggcaaggaaacaccagcaacaacccacacacaagcggacacaaaaagaaagcaaaaaagcaccaaaaagaccaagaaaccatcaaaaaaacatgcaaaaaacaaccaagaataaaggacgccccgagctgcaagaggcaaaaaccagagaa

SEQ ID NO: 64668 - DNA, 237 bp, Glycine max
acatcttatctatatacaatttgtttgctgcttgcttgactcacgatttcctgaactgtcctgctatcatcaaaaatagggagaatgtaaagcaattgccttctgggtcttgacgatgatcatgatgatatgatgcaattgacgcaaatgcgatatttaagatcaaattccagacacacttcacgattaccagtcacgacttcatgatgatcactcttatatcacgaatggaattcc

SEQ ID NO: 64669 - DNA, 367 bp, Glycine max
  unsure (1)..(367): unsure at all n locations
gctatcgaaccattacacaatattttgagacttgattgatttatttgagtcctgcttaatccattaccagagatataatcgattacttctctcttaaaaagtgttacacaagtgatcaagaacactntaatcaattacatcaaaaatctaatcgattacattgttcttgaaagttatccaattttcgggaagaacactttaatcaatcaaaagggtaataatcaattacttctttgaaataattgattacattgtatatttaattgattacaggcagttattacgagctggtataagctagaataacattattagaaaaatatgtgtttacatccgttatttatgaacttctaacatcggcttttaa

SEQ ID NO: 64670 - DNA, 374 bp, Glycine max
acacaaaaactcagcttactccttcatcgtgagactcgatattcaagctctttccattccatcattgaatctattccactcataaaatatccaaaaaagcctacgaaaaaacatggaccacactaacattcaagcaaacaattgttgtctttaaaaatgcgtcgcggatattgcagaattatatctatacactaaaaacaaacataccatttcttacagaaccacaacctattagccatgtttgctccatccatatgcttgggaatatacatcatccgtaataacaactgtgtggctcctacctgatccagctttgacaagtttgaatcttcaattaaatatgagaaacttagcattactataacaatgactaa

SEQ ID NO: 64671 - DNA, 458 bp, Glycine max
  unsure (1)..(458): unsure at all n locations
agcttcaattgtaaactntgcggttaatatattacttctttatgatcttcaatatgctcccttctcatatgccaatgttaactttcattgataattgaaggtgatggccccaactgtccccagcacccccattggtgagtgaacctcattgatcgaattcaagagctcccattactgtaacacgtggtgttaacaacaaccctagcctgctttcatattgagagggacctgacctgttaataattaccaacaagcatgcatcgatcttaatagggttttacttgngcaagcaatgtataaattcacagctgcgggcgtagaactaagtactccaaaacactttatttatttgatgccatgcccatgcatattagatactttttattgtattcattgcataacgcaaaattaatggttttcagtggtacgttttctatctcctcagtccccataatcaa

SEQ ID NO: 64672 - DNA, 439 bp, Glycine max
ctgaaatggtcaaagagatgagcttagtttaattgttaatgaaatggatagcggatcatctgaaatggaagacacacatattgatgaattacagtcttcaagttttcgttatacttgcaatgaagaaagctgtagtcatttagctgctgattcttgtgttattgaaaatgtccaaagaagagattctccgatgataggtaatgataacaatgactcacaagaagaggctggctccaaaagcgtgaaagtgaagagggatgcaactaagagggtcctcatttataaagctcctcctgtcttgaccattcatttgaagagattcagccaatatgcccgtggtcccttaagtaaattaaatggcatgtcaattcaaagaaacatggtattagaccctatttgatcccagttatttgcactttgttgacctgtaaagtttaac

SEQ ID NO: 64673 - DNA, 459 bp, Glycine max
  unsure (1)..(459): unsure at all n locations
atgctgttacanatatcgtcaactcgagtgccaatattttgtgagcatgtctgctagttggtctttggagctgacataatcagtggagatttctgctgatagtaccttctctcgcacaaagtgacaaacaatctctgtgttttgtccgctcatgaaaaaccgggtttgaagcaatgtggatagcaacttcattgtcacatattagtccagcatcctgaacatctccacattttatttgttggagaagttgcctaagccatgtgatctcacatgccgctgctgccatggcatgatacttctgtgtggtctggtgaggctgctgtatggttcgtttgtgtgatctacacctagttgggttgcagnaccgcaacatcgcacaggggaagcaattatctgatctgtctgtgtgcagcctaacaaaagacgcatgaggatggtataataccattgcgctgcaac

SEQ ID NO: 64674 - DNA, 480 bp, Glycine max
ctcaagctctcaccagatcatataagataaatgcattcaggcaatctgcagatatatccttctcaacgtcaaattctccgcctatatattcaacctttccatcactggcacgtggagtgaatcttcctccatggtgcaatactaaagttatattgtcattcattctacacaatcagaaaccgcaaacatgggcagatattaggaaataaaaaaacctacctcaaaaagcgcgaagacattgacattgtcaaaaaccgcgaagacacaatcaaaaaccaaaaacattgtcatctataaaaacagagcatcataaacgaaaataataaacgatcataaacctccctacgaagcgcgaagacaatgccacagatgaaacccctcgaacatgtaaaaccccaaatcaaaccaccaatacaatgcatacgaatttgatgatattaccaacctgacataaagcgctaacccttaatcacgagaatg

SEQ ID NO: 64675 - DNA, 412 bp, Glycine max
ctatgcttagtaccagaatatccaaatgtaaaaattggtgttgtaaagctattcatgacttctgcgtgtggatgaaagatacaatctctgcagatgagaatgcttcatacacattaataaagctagctgatgggcctaatagacatgttataacctgtccaggataccacataaacaagtattcattttacacattagcactctatgacaaatgtataacgcataacagcggtgtcaccctaagggctgaatctcaacactttgtatagtgtgaatgacactaaatccatggtagcttgcatcccttactaatggtttcattgattaattgtggagcttaactatgtccgatttattgtatgtgtttctaatgtatatggcgctacaaccacatcggggtgtgcccgatgat

SEQ ID NO: 64676 - DNA, 319 bp, Glycine max
tgcatgcgtgtggacccatgccaagtgagcatcattacagatcggcttagtgttgacaacaccatcataacgaacaagatctttcattcatgataaacaccacacgtcaaaagggttgtatgaccatataagttcgactcgacaagtcttatgaccaccttaatgggagcttttgcaggacaccctcactgacaatggttgccctacaaattttgtgcatatgatttggagttgaactacttctgctaagacgcatattcctttgaatggccacatactctatgagttcattcctatgacggggtttatcaaggcaacc

SEQ ID NO: 64677 - DNA, 396 bp, Glycine max
  unsure (1)..(396): unsure at all n locations
tgtggaaaatagagnagagctttgcttggactgcttagttctcgagtctagtagcttcaaaccactcattattcaccattctcatgcattaattcgaggtatggaggagtttaacccctcttacttctgtattattgcatggctatggagttgcttccattaaatgtgttataggagcataagaagtgatctctccataaataacactataggttcctccacattaaaacttgtgctgatattgtgaaaacttgttaagttctgtcattctgggcgcttaatgttgaggcaacatgtttcttatgatgagattcgataagggtgcttcaaatcctgaagataaaaacccttctctccagctctcattttcatgctaaccatgggtactccgcctaa

SEQ ID NO: 64678 - DNA, 307 bp, Glycine max
cagagcacctgcggctgcagctttatagcgcggtctgggagacaaggatattgtttttattactaagatgagttccgagtacattggattggtacgaccatgccctcctgatttccagctgggaaaatggcgagtggagtgaacgccccgacatttacgcatcgagcataatgtatacctttacggttttaaaagctctatatctgggcctacgctttagagttattcttttggccaacgctctgtgtattttgtgtgtctggatacaaggatccttctgtatttgtatctacgtctctacccattc

SEQ ID NO: 64679 - DNA, 418 bp, Glycine max
  unsure (1)..(418): unsure at all n locations
agcttgacgatttagttntcaccaatgaaaggatcgaagtgggtttgttaagagattatattgattatcctgctntgatgaataggaagcctagggcaaatggagagaataagaaagagtgagaaacccatgctctggctggcattcctacatggccaaatttcccattagcccaataatgtcaatactcaaccaatatcaatcattctcattacccaccaccctaccagccaagaacacccaatcatccacaaaggccatccccaaatcggccacaaaatccactcgatgcacatccaagaccaaacaccacccttaataccaatcaaaacaccaactatggaaggaattttccagataataagcttgtagaattcaccccaattccaatggcatatgttgacttactcccctatct

SEQ ID NO: 64680 - DNA, 330 bp, Glycine max
atacagagatcccgcagataagactaggcttatattataaaacatgatcagcccaccatataaagagaacgaatactgagttcgcagatccctcgtgtaagactacgtttcaatcctgcttgtatcaagttctgaggcaacagtacattccccaatgctgaagtcacccaactaaacatacataatgggtgatcagagccatgagcatgcataatactaagcacttgaagaagcactggacactcaaaacacactcgattatatattaaagcatagacatcaactcggtccttacaaattcccaccaagagtggttagccaaccatacag

SEQ ID NO: 64681 - DNA, 409 bp, Glycine max
  unsure (1)..(409): unsure at all n locations
tattaatacataagccccgagatatgaanagagtaaagaccatcagcaccatctactcctttgtagaagatntattgctctcccaagatgtatcaagacatatgtaaggatgaaattcaaagaacacagagctatctttagcaaactgacgaactcaacaattttttngatattgaaggaacatgtaataatttgtgatgtttaaaggtaatttgagagncantaagggacacaaatgaagatgaaccagcacttaagatacttacaccttcaccatttcctacgaaaatttgatcaagtccatcaaagtgagtgaactgcttgatattttgtgattcaccaatcacctgtgaactagcacaagagtctggtattcaagtggtactaggatgaccctttccatgaaaga

SEQ ID NO: 64682 - DNA, 330 bp, Glycine max
agggtcttatcaaatttacaattctttaatgtgttcggatagctgtgtgttctcttcaactgaatagtccaaacacttacccaattctaactctagaagttggctaccttttatgattgaaatgactttgcaagtgttgttctccagtttcccttgatcatgatggaaaataataactgttaatcgagagcattctacatataaggtaaaatatatctatctcatcttcccaaaacttgtggtaggatgaatgatgtgtccatccttcatgactctattctcttgttaatcattttaccatgaattatactttatccccaacttccatcc

SEQ ID NO: 64683 - DNA, 371 bp, Glycine max
  unsure (1)..(371): unsure at all n locations
aaaacagcctattcactccatccaatatctccgacattcttctttaacggagaagcgacttaattccatcaatactctttttctacgacaccatcattaccatcttactcctcctttcctctccattaggatatctattcttcatttgatccaacctctaatggagcgcatcatcctgntgtgtcattaacctcaccacatcttttatcacagcttgcatttggcatgtgcggacagccccactccatcattaagatttgttcctgccctttttccccactcatatctataataaccagacaactatagctgctgtatgtaacctctctctctcacatgtctacacacttattgcttttctttatgaaaca

SEQ ID NO: 64684 - DNA, 292 bp, Glycine max
tctatggaggctagatctttgagcttcaatgatgtccttctatgttgatcttcagccatgaagttgaagcggaagataaaggagataaggtgagaggaggcaccatctactatagaataagccatggaaggagaagcttcaccaccaagagagtgcctcggataagaagcttatataggaagctccaatggtgaaacaaaatgatagacagagtgatgtaagacccattggagcttgtaagcctcagatcttcttatcaatggatacctttgcttcttggaagatgaatggc

SEQ ID NO: 64685 - DNA, 484 bp, Glycine max
  unsure (1)..(484): unsure at all n locations
caagcttgactngagtcatcaagagattatanatatgtgaccatggcatgagttntaaaaaaacaatcaatcatcaatcatctntgaatcatctatctttcaatctttttcaacatcatctctcaaacatctttcaatcaatctttcaatatctttctacagaatttttctgattcatttctcttcatctttctaaaattttnttatcaacactttttcttccgagaaaagttcttcgttcaaaaacttgtggtattcatctttttcattctcttttccctttgccaaaagaacgaaagactaaccgcctgaattcttttgtgtctctcttcttccctttcccttaagcaaaatatgtcaaaggactaactgcctgagatatcttntgtttcccctctacaaagattcaaaggactaaccgccttgagaatctttgtcccaacacattggagggtacatnctttgtggtacaagtagagggtac

SEQ ID NO: 64686 - DNA, 455 bp, Glycine max
  unsure (1)..(455): unsure at all n locations
cttattgataccaggagtttatttaatagccttattttaataaattacgttaaataatttattttgataagctcattgaaataagtttgcttataaattattagttattntntttccaatttatttggtattatttattggaaatttctcttatccttttattgaattttaaaaatcctcttacttttttgttggttgtttgaaaaactcttgtatctattnttttataatcatgcaagtgagatatacacattcaaattcttgtttacaaataaaaaatgaatgttctaaaaaattataaggaaaaacactctttcattttttaaaataatattattagtaaagtatttcaatgttaaaaactaatttaacaatataattctataaagtttattaatttatttacctttaaaatgaaaatttganttatcattttaaatataaaattaaaatac

SEQ ID NO: 64687 - DNA, 412 bp, Glycine max
  unsure (1)..(412): unsure at all n locations
tactcaagcttgatgatgtggtcttcaccgatgataggatcaaagtaggtctattatgaggctaatctgatcatcatgcttngatacatgccaaaaaaaactagggcaaatgaatagggtgagaatgatggagaagcccatgctgtggctgccattcctatacagccatgtattccaccaacccaacaatgtcattactcagccaataacaaaccttcttcttacccaccgcctagttatccacaaatgtcatccctaaatcaaccacaaagtctgtttaccgcactttcaatgacgaacaccacctttagctcaaacctaatacaccaaccaagatatgatatttgctccatgaaagccttataattcaccccaatttcagtgtctcatgcctacttgctccaatatttct

SEQ ID NO: 64688 - DNA, 389 bp, Glycine max
  unsure (1)..(389): unsure at all n locations
tacccatcacatgtggtactaggtggctgtctggcgattgttcacaacaagatatacacatccacatagcgcgcataaacccaccattccctgttgcccaactacaactgagcttacgtactcccacgtagcccatttccatgtttttactatcaccaggtccacattaattcttccaagcttcccctacatctagagaatagaacattcctacaggctaagctttcacagccattcaattattgtctaaggcgagaaactcttcctcaaacaccaaccaatattacagcttttcacatacaaataccccagaaacatcctcttgtccacttcttaaccgtggttcacctgatattttctgggntcttctttctaatacttctttcccc

SEQ ID NO: 64689 - DNA, 323 bp, Glycine max
  unsure (1)..(323): unsure at all n locations
cagaaagcctatccgcgatgttaccaaaccaanatgcatatatatatctcttgactttcatgtgctacgagcttcatatacataaaccttatcctcagagctcatgtcaataaacttaagatttgcatcacaacaaccatatggtcttaactcgaaacatgcataaatcgactaaccatactcacatcataagcaattctaggactagagagatacaaataaataaattttgcacatacctatttcctggtgttctacgacttgaacattggcgcccattgtgggatcttctggaaaaactctctttacgatctccacatatc

SEQ ID NO: 64690 - DNA, 446 bp, Glycine max
ctgagatggtctctggttagaggatcaattattcatatagtctatttttatctataggtcaacctgaggactggcgcatctctgctgctgccttccttaatcgtgctctgctccagctatctttttgttatttacgaattccaactggagtcaatccgaaaagaaacgcggttcgcgaacctattataatgaagtttgaggctaaacttgacaattggaatcataaaagcatctctttggctgacaaaatcactcttatcaatgcttgtctaacagcattacctctgtttatttgtcttttataagagctcctacatagtgatcaatatgtaatttgccatccaaaagctacttcttctgggtggaattcctaatgaaagaacattgtttgatctcttgcacccttcctttcttctataaatatgtaagtttgtggtcatagcttt

SEQ ID NO: 64691 - DNA, 356 bp, Glycine max
actaagctgttcattgagataatacgggcatacttattgatttttgtgtgcacaagtactggcctccaggaactctatattttacagctcccactgaatgattggttaggacacaccttctacatgtatagtagcccatttcctctatagtcatatgttctgggacatggtccttttccacagatctacgtctattcttctttggctttccattttggaaccttttatgtggtggaacaaggtgcgtatactatgactaggcccaaaatttgggtccttacactgaattaataatcatattataacttgtattagtaacactcattacacaaatacttatgtccctaattttactg

SEQ ID NO: 64692 - DNA, 429 bp, Glycine max
ctatgcaagtcaattttcaggaggtatctcggagaggatctttttcgggcatatttgcgcaaaatctcttgaactaggaagatgttgtccatcatctttctgttcttaatgaaaccagttcgagtttctccaataatagtctcaagcactagggctatgcgattgaccataattttagacatcaatcttgtataacaaattacagcaagatatgggtctaaaatggttaacctgggaagcctgatcatgcttaagaataagcgcaataattgcatgggtgagctgctttagaattattctagttgtaaagaattcattaaccgctgccaatatatcatcaccaatgatattccaagccttcttgaagaataaaacattgtaaccatctggcccaggaactttattgttaccatcacataataccttcta

SEQ ID NO: 64693 - DNA, 446 bp, Glycine max
  unsure (1)..(446): unsure at all n locations
atccttgagtcacctgccgcatgcaagctntaggttgcttgctaagctcgggtgtgcgctacgcctatattgcgtgcttagcgagctgtccacttcttccaacttttatttaaggctgtttcttccgggttttgcatcaatttccctttaaagcgcttgaaatattcttcttttgaattctgccaatcaaaaactgtgaagatattactttcttcattatttcaatgaaaacaacagtaaagtgaagaaatttcaatcattcatggccaaaattaattatcaaattaacttaaatttcgtagttatcagcacttcctcatgcattcgaataaaggcttccaaaacttccttaaattcaaaaattaccttattttcttccatggttgaggagtcatcctttgaatcagccattaagctcacatttgcaacttcttcttcactaaaaa

SEQ ID NO: 64694 - DNA, 424 bp, Glycine max
  unsure (1)..(424): unsure at all n locations
agtcacacgcggcatgcgggcttgtagaatggctagacacgatacatgtcaaggtctggtttgtttcaacgataaaagggatgcgcgacatggtcttatgacacttaaatgcttgaatgatgatttggaaactctatgaactactggtcatgcatgcacctattctgacactcaagnagcaaatttatattgtcatgtgatgcttcggctcaagattcatttcctttattttaatccacccaacgcctccaaaacatggtgttttgtcaatttgagcatccatccgacaccatttgcggctcttgggaaatcttcacagcatgcacccttttggtgtatacccgnttttcaaaatatggtttgatcatagatatattttttcaaacaaaagttgaaaatcgattctatacaaaagcacgtccgt

SEQ ID NO: 64695 - DNA, 474 bp, Glycine max
  unsure (1)..(474): unsure at all n locations
ctaagctacanatctatttaagtccaagcccataaacgaaatagaataatatctggacatgattagataagattggatgaaataaaatctggacgaaataaaatatagatgaaataaaatctggataagataagattggatgaaataaaattgtctgctttcttcaagtccaagcccaattccgaattcaagcccaattgcttataattctcctgaaattaaattaaaaacacaaaattagtcaagtaggcccaaatgataaaactggatagttaatntgacaatcaaggctaatcagtaattaaaatggtgacaaaaaggattaagacataggagaaaataatgacacatcagccgttgagcgggataacttgagaaaccaaacgtcttgccttctcactcaacgaaccttacagcttagcgaaaagaacgaaatgttcttagtgggtgtaacgtctatttccacaaatttac

SEQ ID NO: 64696 - DNA, 413 bp, Glycine max
  unsure (1)..(413): unsure at all n locations
ttgtggatgtntactaattaanntttttttacattagttgggtntttntttntaaatgaagttgggttaatttttttaaaaaaattatgttgtgtatgttttaaaataatttgatttaagttagttttatttgtttataaataaagttgttttttttataaataaaattgtgtatattttgaccgaaaaaaatacgtgttcgacatgatttgcagatcatggccagaacacgaggtttacgtcgtgccatangtagagttgtaggcagagatagacctgctgaccaagatgctgctgatgtttccgagaggcgtaggcctactgcctcagcccgtaggctacgcattcatcatatactatggagggacgtgatatggctgacgacgtcnctgacatgactgacgatgttcttt

SEQ ID NO: 64697 - DNA, 341 bp, Glycine max
actaagctgaacgacttcgtgcggagtcctcaagcttgccagctttacttgtcattgctgagcaccgacactcaccccagaggtgagagaggactgatacgttagaacatcgtcccgcagccactcatagccaacaacagcaagaggggacgaatgcgacctatcgctatggcttcgtcacacacacggaaatgcgctaacattcccaccactacctcttctcacttccttagaagtagaagagggagaatcacatttaccgggataggcttctcctgagcaaaggaaattcacgccctcccacgaacgtgagaagtgcctccaccaatacagcgtgaagc

SEQ ID NO: 64698 - DNA, 455 bp, Glycine max
  unsure (1)..(455): unsure at all n locations
ngcttgctgtaaaagcaaagccattctacttattgtttatgaaaattgagcctttcctctgggatgaaacttgcgagcaagccttcttagccttcaagaagaccattgctacacaatcgatcatgagttggcccaggctaggagtacccttactcctatacctttcagtagttgacgaaaccattaactcaacccttgtgcaagagaaagggaagcaccaactccctatcttatttaccagctgcatactccatgaccttgagaaacgttaccaaatgatacaaaaggtggcgctagcactcattaccttggtctaatgaactaccccatcaagcacgctttgtggaagcctgaactcatagccccatgatgtcctgatccggtgaacttttagaagttgatatctagtacgaaccttctagccccatgaagacatagntcatggcatacttcct

SEQ ID NO: 64699 - DNA, 362 bp, Glycine max
tatgcgcatatttccttacgaacgttcacttgcacaagacattctattaactaaaaaatgcacccatatacaatcaaggcagcttcgttacctagattatttacatgtacctccaaagtgtatttgttacttacatcacacacatctccttggctaaatttacatacatgcatactcaaagcattttggggtaccaaaaattgcacatgtgcacatcttggtatttttaatacctatacatacacaaacttcatgatgaatcttgactatctacacaataagggcgctacattcatgctctctttcaagttttgctacctaaagccgcatgccaaatcaagtatattttcctttgcttgact

SEQ ID NO: 64700 - DNA, 448 bp, Glycine max
  unsure (1)..(448): unsure at all n locations
agcgttctttggacctcgaacaggcaactaactcctctttcanaaccatgctatgtgctcgcgactggtccctttcttcctttcgcaacttgagttcactattgctaccccatagagctccgcgaaatttgttccggccatactcttccttgcgagccctcttggtctcttgttcaagggctcttgcggtaattgcattctcttcccgtaacccggcacactccttccgaacgtgtgtagcggccaacttgaacttctccttggcaagttttgcctttcctaactcgcttatgagagctnggacttctttgtcttcttccggtgcttcanaattctcttcgctgacgacttttaacttggcgagccaatctaaacctcgtatatgaactttcagccattcgtggtacccaccaatgatgccattacgaatgcctctaagctcttgatc

SEQ ID NO: 64701 - DNA, 455 bp, Glycine max
  unsure (1)..(455): unsure at all n locations
cgcaaaccaaatgctcaccactactagaggagaagccttcaggttgttttataaaaacctcctcctctaaatcaccattaagaaaggaagttttcacatccatttgtttcaactcaaggtcaaaatgagcaactactgccaagataatatgaagagaatatttcttagatataggagaaaaagtctttgtgtagttgattccttctttttgagtaaatcccttagcaatgagtcttgtcttgtatctctcaatgttgcctaatgaatcccttntggtcttaaagacccatttattaccaatggcctttgtcctattaggaaaatctacaatgttccaaactatgttactctgcctggaatcatctcatcctcatagcatcataccataaatntactctttcaactcatgcttgatcaaaattcatgacattttacacccatatatacagattttg

SEQ ID NO: 64702 - DNA, 472 bp, Glycine max
  unsure (1)..(472): unsure at all n locations
agctntgagccanaatactgactcaccatataccttgtaccacggtgagaatgtcaattcttaccctcggaagcaaaaaaaaaggggagagggaaaatttccaatctaagaggaagcataataggagagaaggaatattcccaatcataggaaaaaaagagaggaaagggaattcccaatcaaatagtgggagaaagcaataagaaaagaaagaaatatccccttctacgaatgggagaaagaacaaagagaagaacaaagggaagaaagctcccgatcaataaaaaataatatgcacaaaggactttggaccggactatatctgaacaatacataattgttcccaaatgaataaaaagaatgaaagggtaccatgacctaaaatggccttccccctttatttgtcatgcaaaatctcgtgcgctagcaaccttttttcgccccgcacttatccacaacagaaaatgaatat

SEQ ID NO: 64703 - DNA, 352 bp, Glycine max
tgagatgaggaagtgttgaagggtgaaacttcctgcttttattgttgaccacagagtggtacctggagatatgtcgcgggggtcaggagaccttggggacgtcaggtggggtgctattgcccaaaaccaagcttgaccaatcccgacccaacccgggcatagtcggtcagtgagaacctgtgatgtacctaagcaggcgagctcctggcagtcaacagataaaaggaaaacaagaccacaaagcatggaggcttgtggtggctggccagctgtgaatattgtgtaatatgtggattgtggcctctggtaatcgattaccaaaggtgagtaatcgattcaaggcttaaaattg

SEQ ID NO: 64704 - DNA, 445 bp, Glycine max
  unsure (1)..(445): unsure at all n locations
agtctgtggtcacatgtgatgtatacatgatttatgacttgtatgatctcaattgggcaaaatcggatgagggcaagagggatttctaaatctgcctaattgcgcagacaagagctgtcaaattatgtgcagcacaatttggctcttgtgcataaaatgtttgtgtattgctggttgtggaaagggtattacatattgagttctggacatttctagtagatcccagcggtcaaaatgtagatatatgtactagggatctccagtaaaattttcaagtctatccaacggttaacgaatcggaacgaagaaaagttactggcgtattaaatatagaagctttctattgaatgtgtttgggcaagttctgctatgcctggttcttggtttgatanttatgagttacatataaatgcttgatgtttgaatctggagggtgatgggaccc

SEQ ID NO: 64705 - DNA, 463 bp, Glycine max
  unsure (1)..(463): unsure at all n locations
agctngtacgaatataagaaacatcttcgaccttgttgattcttgactccatctcattgaatcgcatgtccacttgtaactccaaagtatcaaacctttcaccaacaaaggtttgaagaccatcgaacctatccaaaatcttttgaagaagaaaggaatcttctccaccatgtaaatgtccttcttcatcaacggatcgagcaccctttttcacccaagagccattatgctctttttgataaccaaaggatgcaatcacaacagcacatattataaaggatctcttgattggaacataaggttcaaaatcaagagggatgttgaagtgttgaaggaagagggtgattangtgtggatatggcaatggagaatttaatcgcacagccttatgcttgcgatatcgaactaagtgtgcccaatcaatttataggcctttatgaaaagcccacataacaataagatc

SEQ ID NO: 64706 - DNA, 373 bp, Glycine max
  unsure (1)..(373): unsure at all n locations
acacatgaatactcaagcttgtgtcgctccacccaaatctggccttgactattaagctttttttagtcacnctgcaatccatcatacacaggggcatgtgcttgctgaaaagactcttgaccaaagttcggattggggcttacactgcttgcctgtcatttcaccatgccatatccatgtcgtataattcctcttaattccaccacacaacagatgttcccatatgtcatccaatatttgtcttctaccagttcaacaattgatgctatggcaataattttgtccatctacatcagtcgacctctttttgagacaaaatgcgagaactgcaagaagccttccgattttttggactgatgccactttcattcat

SEQ ID NO: 64707 - DNA, 435 bp, Glycine max
  unsure (1)..(435): unsure at all n locations
ngcttgtggagcttctatggaggctggatctttgagcttcaatgaggtcctttaatggtgattttccaccatggagatgcagcggaagacaaaggagaagaggtgagaggaggcgccatccactatggaataagccatggaagaaggagcttcaccaccaagatgagccttggataagaagcttggaaggatgcttcaatggaggaaaagaaagagggagagaaaaagagaggcgggagcatgaaattgaaggaataaaagagggagagaagtggaactttgaagtatgtctcacaagactctcattcatcanagttacaacaagtgttacacatgcttctatttatagactangtagcttccttgagaagctttcttaaaaaaacttctttgagaagcttctttggaaaacttccttgagaagctttttgagaa

SEQ ID NO: 64708 - DNA, 435 bp, Glycine max
  unsure (1)..(435): unsure at all n locations
cacacatatactaagctcggtaatggctagacatacacatgacaatgcttgtgtttgttcttgataaaagggatgcgccacattattgtcatgactcaaatgcaacactgactatttggaaattttatgccaaactgggtatgcatgcatctatgctgactctcaagtgataaattttatggccatgtgacgctagggctcatgaattattgcctctatcttatgcaacccaacccgtccgaaaaatgttctattataatctgagcatctatcgaaaacattttgggcttttggaagatttttacaccttcacccttaagtgttttacattttttcaaaaataggttttacaatgaattttcttaggaaaattgtatgtctctctttcaaacctgttgctttttctnnacacctattctatctctctcctttttt

SEQ ID NO: 64709 - DNA, 429 bp, Glycine max
  unsure (1)..(429): unsure at all n locations
agctttctctctcctcactcagcanaacagtttatttcagacagccctctctctccctcacgttgccattctcttcttcttcattctccattgaagctccacacaaagcttcaacctttggccatcatttctaccccaaattgtgaaaggagagcattttcggggtcgtgaagtgcgtggctacgagtgggacttcgaaaattcaggtttgggtggacttctttctctcttaaatttcgtgggtatggggttttgggagatatggtgggtagtcttgctagttttctacttcatgatggttatttgtgaagactcttgttgaaagcttgttgaaattgccatgttggatgagttaaacatacccactatgttttanggnntttgtgatgatgttcgtgatgtttatatgctgacattgctgatggaaat

SEQ ID NO: 64710 - DNA, 366 bp, Glycine max
actcagctttcttacaatcatctgctactgattacaatcttttgcaagttacattcttgttttttcttcgtctaacatacaaacttgctcaaactcatgataagaaacacaaattccatcacaatcatgcactcaatccaaaatacagcatacaacccattttcacaaaaagatataagtgtttcactgccatgtcatcaaaaaccaagttaaactattcaaaatacttcagaataagcaaaccaactatttataaatagaacttaacaaaaatgacttactgtaataagactataattaaaataataataaactaaatggcacaaaaatgtcctcacgaatttaaaaatcctgtgatcctgtctg

SEQ ID NO: 64711 - DNA, 455 bp, Glycine max
agctagctgaaaaagcacagccattctacaaattgcttaagaaaattgagcctttcctctgggatgaaacttgcgagcaagccttcttagccttcaagaagaccattgctacacaatcgatcatgagttggcccaggctaggagtacccttactcctatacctttcagtagttgacgaagccattagctcaacccttgtgcaagagaaagggaagcaccaactccctatctattttaccagctgcatactccatgaccttgagaaacgttaccaaatgatagaaaaggtggcgctagcactcattaccttggtctaaatgaactaccccatcaagcagggtttgtggaagcctgaactcatagcctcatgatgtcctgatccgtagaacttttagaagttgatatctagtacgaacctcgtagccccatgaagacatagttcatggcatacttcc

SEQ ID NO: 64712 - DNA, 430 bp, Glycine max
  unsure (1)..(430): unsure at all n locations
tatgcgcatatttccttacgaacgttcacttgcacaagacattctattaactaaaaaatgcacccatatacaatcaaggcagcttcgttacctagattatttacatgtacctccaaggtgtatttgttacttacatcacacacatctccttggctaaatttacatacatgcatactcaaagcattttggggtaccaaaaattgcacatgtgcacatcttggtatttntaatacctatacatacacaaacttcatgatgaatcttgactatctacacaataaggcgctacatttcatgctcttttcaagtttttgctacctaaagccgcatgcaaattcaagtatatnttcctttgctgactaaaattgtattcaaattaaaaggtatatatttttttgtaatgtattttctttacataacatgcaacata

SEQ ID NO: 64713 - DNA, 462 bp, Glycine max
  unsure (1)..(462): unsure at all n locations
ttctgacgcatgcaagctntcacctttggtcctcctcatagntgttgcatgagaaaacatgctctattttcatctcccactccaagtaggcctccggatcattctttcctttaaatggaggaatgttgagtttaataccatcaattcggttttgtctaggaacaccatcattccctcttctcctcctttcttcttcattatgatctctattctccatttgattcaacctctcatggagcgcatcatctcgttgttcattaacctctccaaatgttgcatcaaagcttgcatttggaattgcgaaagccccactccatcattaggattagtacctgacatctcaaacaaacaaatcatacgtaacaagacaattatagttgctggttgaatacctcacccactcaagtgtatcacacaattatggctnttctctaatgaaacactcttgcctttaccactcta

SEQ ID NO: 64714 - DNA, 453 bp, Glycine max
tcccgacccaacccgggcatagtcggtcagtgttaacctgtgatgtacttatagcaggctatctcctgtcagtcaacagataaaaggaaaacaagaccacaaagcaaggaggcttgtggtggctggccagctgtgaattttgtgtaatatgtggattgtggcctctggtaatcaattactaagggtgggtaatcgattacaaggcttataattgaagacaggaggctaagatggtctctggtaatcgattaccaaggggtgtaatcgattaccaggcttgaaaacgaagttaggatacttagggagcctctggtaatcgattaccagcctgtgtaatcgattacacagatgaatgggtcactggtaatcgattaccaggcatgtgtaatcgattacacagtgtattattgcattattcatgtactgaggctgtgtaattcaagtttagcctct

SEQ ID NO: 64715 - DNA, 452 bp, Glycine max
  unsure (1)..(452): unsure at all n locations
agcttgtagaatggctagacacgatacatgttatggtttggtttggttcaaggataaaagggatgccccacattatttccatgacacaaatgcaaaaatgatgatttggaaattttatgcaaaactggtcatgcatgcacctatgtggacgctcaagtgtcaaatttttatggtcatgtgatgctagggctcaagattcatttcctctattttaaatcaacccaatgtttccaaaatatgttcttttatcaatttgtgcattcattcgagtccattttgggcgtctgggaaaatcttcacagcattcacccttcaggtgtatacacattgtntcaaaaactaagtatgatcaagtgaatttttcaaagaaaagttgaagtcatctttttcacaagcatgtggttttcagctcgacaactattttcttttcttcttctttttttttatcatat

SEQ ID NO: 64716 - DNA, 350 bp, Glycine max
  unsure (1)..(350): unsure at all n locations
agctngcctcaaagaggtccaggaaggacatgtcagccgaaggaactagttccgctccggagtatgacagtcaccgccttaggagcgctgtacaccagcagcgcttcgaggccatcaagggatggtcgtttctccgggagcgacgcgtccagctcagggacgacgagtatactgatttccaggaggaaatatggcgccggcggtgggcatcactggttactcccatggccaagtttgatccagaaatagtccttgagttttatgccaatgcttggccaacagaggagggcgtgcgtgacatgagatcctgngtaaggggtcagtggatcccgtttgatgccgacgctatc

SEQ ID NO: 64717 - DNA, 428 bp, Glycine max
  unsure (1)..(428): unsure at all n locations
cgcatgcgttgttatttcaaaatcataatagtagcaggtttgatatctcttcatcatttgaaaagtttggagcaacaggtagtgtggaagaagactaagaatatctatctttccaaaatcttggagggcaattaggcatttgttctggattttattcacgatcctgacatgtaagtgtatcgtgtttgagctccaattataagttcaacaagttttgctgtaacattcattataaaaatagatcagatgcttagagtaatttatgaagctgaaatgatgatgaaaagaaggtaaggcactaaaagggaaacaaataagtattaagctcacctgtgagaaatcctatgacaggaataggctccaaaactttctccgtgctttcaattcttttgccctaaatgttattgatattntagtggcaatttttc

SEQ ID NO: 64718 - DNA, 353 bp, Glycine max
catgcaagcattatgtcttttttttattgatccctattctattatattgggcgtgttaactaaccctgtttatttttatttctcaatggaaagtaatgccattagaaatctagttgtctaattttttataattagccaatggacaattgtactaggatactctagttgataaattcataacccttgccgatggcaacgcgggggtggagccggaaagcttctgcttgccattccactggaggatgacaaaagagggtttgggttttggaggggaagaggggagaatggggtggatgaccaatgctgatttggggccgaagactaatgctgatttggaggcggtggtggctccc

SEQ ID NO: 64719 - DNA, 451 bp, Glycine max
  unsure (1)..(451): unsure at all n locations
agcttgngcacgctaagcgcgcgtaaagacattgttctcgttgggcggactaactatgcgctaagcgcaatgctctctgacttaacatcttctagggttttgcatccactaagcgagctagttgcctcgctaagcgaatgaggctcgcttagtcaatctacccgctaagcgagttctttagcaacattttactcttctcttctttaacctacaaactgagttaaattcaacattagtttacaaaaatggagtttctactttataaattcatacaagaatgaaaatatttacaatttccacaaaaagaagcataaattagaggcacattgctattttcttccttatttttaatgcactaaaagctcatgaatagcaattaacaataatccatacccttgaacaccccaacttaaaattcttctaaccccaactgttttgagttaattgagtc

SEQ ID NO: 64720 - DNA, 214 bp, Glycine max
tttcttttcctctttttcttaaaattttaaaccctgatctcgttttagattctaaaatatggtatgtgaggacaaagtatgtctttggaaacccaagttattgtaatatgttaatacaagtataggaagtagtgcttgtctccttttgttcaaagatcactgatgactgatatttttctaatattttttttatcaatccgggtttttggttttt

SEQ ID NO: 64721 - DNA, 367 bp, Glycine max
  unsure (1)..(367): unsure at all n locations
agcttgaaaagaggaagtgtagaagggtgatacttcctgctnttattcgttgaccacagagtggtacctggagatatgtcgcgggggtcaggagaccttggggacatcaggtggggtgctattgcccaaaaccaagcttgaccaatcccgaccccacccgggcatagtcagtcagtgagaacctatgatgtacctaagcaggcgagctcctggcagtcaacagatataaggaactgtgaccacaaagcaaggaggcttgtgtggtggctggccagctgtgaatcttgtgtgatatatgggttatggcttctggtaatcgattaccaagggtggggtaattgatacaacgcttcaaaatgaagagagg

SEQ ID NO: 64722 - DNA, 450 bp, Glycine max
  unsure (1)..(450): unsure at all n locations
tcttatccaaggctcatcttggtggtgaagctccttctttcatggcttattccctagtggatggcgcctcctctctcctcttctcctttgtcttccactgcatctccatggtggaaaatcaccattaaaggacctcattgaagctcaaagatccagcctccatagaagctccacaagcaagcttccatcagactcctatgcacatttggaaacattcattgaaatctgtaacactgtaaagattgcaggcatgccagatgaagccatcagactcaacctattttcattttccttggcaggagaagccaagaggtggctccattcattntagggtaacagtctatgagtgattacaggtagtgatcacaccattctaggtgataaatngcatcaacccactaagaagagnttactagagttatcatcacaagacgctgtgtnggcaaaaaa

SEQ ID NO: 64723 - DNA, 365 bp, Glycine max
  unsure (1)..(365): unsure at all n locations
ctattaaactaccttataggataaaaaccttctaggtgattcacagaatatttgctggaaagatganagctctttcaccattactatagctaaagaagcacgaagacttcgtctaggaaaggaacatcaagaagtttttgacaagagtaaacaaatcttggtgtcgcaacgtgcccttttgcgggcgaacgaaagcaaagctcaacggtgcgctttcaaaggaggaaagatgcacggagtcgccaccaaacgttatttgtggaaaacgcccagaataccgaaagaaacccgccaacatgaaaattctaagtaccggagttgcatttacgcttgacgaacggattagcacctctcacgtttggctc

SEQ ID NO: 64724 - DNA, 433 bp, Glycine max
  unsure (1)..(433): unsure at all n locations
agctttcacttgttatttatgaccaaagntatagttactttagtaacttaagtgattacattcgattgaattttgttttacattcaaactttcactagaaactacaaaaaatgatcatcctaaatgattcaataagtgtataatataacttatattctcttataattgttttacatttaggacacagaatataataaaaatttgtatttgtgttatggataaggtgattaagtctataataaacaatggttaaccctttctcattagtggttaattctaattattctaatataatcactcaaaagtcacgtgaacaaggaattgtttgtctgatgtatgaaggactgactgaacttatatgaagaaagcgtgtgtcatgtattntgagaataattaacctctatcatatgaggatcatgaaagttacaaatac

SEQ ID NO: 64725 - DNA, 450 bp, Glycine max
  unsure (1)..(450): unsure at all n locations
tcacatcatgcttgtcatngatcaatgcaatgactcatggtcattggattcctttcatgaagcaactttaatcgacaaccatgacctttttgtgcaagggcattttggtcatttaactaatgactatctctgattggcctaagcttttagcaataactagaaaaaaaaatcaatcttcaatagtcccatgtagaggacctactacggngatttggggttcaaaatgctaaaatttatgtctgagtgtggtttctttttttttttttttcagattgatggtttttaaaaatcagaaaaaaaatcagaaatatgtttatagacatttttgtgatgttcttacaattnttacatattcttntcatttattttagaattttcgatacctatatcaaatatgattaacaattcaacacacatttactatgcattgtgaattaatccattatgaac

SEQ ID NO: 64726 - DNA, 430 bp, Glycine max
  unsure (1)..(430): unsure at all n locations
agcttgtgtcctttctttntcagcatctccttgaatngtctagacataagagcaacttcatcgntcatgaactctntagaattgttgtatggcttttcagactcaacaatatgtactttaagagctttagaatagcttttattttcttcttttctagagatggtctctttagacatgagggcatcaaaatctttttttggaagatgatctatattctaaagatgcacttcatggactcttaggatacccaacaattcatccaaggcaagagttntcaggtttctatccttttgaatggctatggttnttggttctcacaccttgcgaaagttgtctaaaatcttgaggttaaattgagctttggtgaaggtgccctanagcttcaagccatttataagaacttgaagtcttcaaacatgtcatccacaaa

SEQ ID NO: 64727 - DNA, 318 bp, Glycine max
  unsure (1)..(318): unsure at all n locations
tgctgcatgttatctcctcaactgtgtgttgtacccattgtctccagctcctcttccatattgatccaagtgttaggaatttggatgtgttgattaaggagagaggcttcttaaactatgttggtggtgggcttattggctgtggagtggaggttggagattcctcactgttagaaaaactatagcccgtcgacgatggtattcttaatatttcttngagaagcatggacttatgtccatcttttgacttcctattccttggaaaagaggagggaatgattggttgatcaatcctatgctttttttggacaacaagta

SEQ ID NO: 64728 - DNA, 426 bp, Glycine max
  unsure (1)..(426): unsure at all n locations
tcctgccgcatgcaagcttctaaactntatacaagaatgaagctctgttaccacttgttagacaagtggtctcagatatcttaagaaggggggggggttgaattaagatattccaaactacttccccaattaaaaatctatntgacttttttttaattgagttataaattcccttaacaatgaacttcttaaatattaattcaaataaaacaatntgaatatgaatataaagcaataataaataaaggagtttaagggaagagaaagtgcaaactcagatttatactggttgggccacacccttgtgcctatgtctagtccccaagcaacccgcttgagagttccactatcttgtaaattccttttacaagttctaaacacacaaggacaatccttcctttgtgttagaattcntttacaacaaga

SEQ ID NO: 64729 - DNA, 285 bp, Glycine max
gtgccaattcgtcttcttctttagtttattcttcttctggctttaatccatcagtgggctttccttctgtgtccagcatcttgggatgtcccagcctttgatgacagctttccaggttctgctatccagtgatttgaggaaggccaccatccttgctttccagtattcatagttggttccatccagaattggtggtctgttcactggtcctcctttctctctccatgttcatcagaatttatctccctaggtctcactcagtgatttctagtgcacgctctgata

SEQ ID NO: 64730 - DNA, 461 bp, Glycine max
ctgcaagcttctggccgaaactgtggatcctgttaaattatatattgggcacacattatctacttcagataaatcagatgagatacacatgcacaggcacaataaattctaaataaaatcattctttttacatctatttcaagatgaaataaatgatattctgaacaaactaaacatgcaagaggcataagaagtctaccacacaacattaaaggagtgtgtggcagctggtagaagtgaaaattggaggaataagaatgaaactgagtatctggggtttagacttatgttgtgtctgaactcgtcatgcaatttcactccacttttcccttttcacatatatacaaagcacgccaagtgtataagtataaacaaaatcatataaccccttatgtgtctagttttcttagaattagagctactcacgccccacaaaactgctcaagacttgaagaattaca

SEQ ID NO: 64731 - DNA, 423 bp, Glycine max
cttcttgctatgaaagacttctaattctcttaatctctccttttctaaaacaactaactcatctgacatcattttccaataatggtcgatcggaatgtccatttgtttttgtactctagctgattgcaaatgtatttcgaccggaagtacatcatcgcgcccataagttagtcgaaatggggtagtattagttgattccttaggagaatttctacatgcccatagaacttgatctaacgttttattccaatttcttggcttttgggcaatgtgtttattaatcaagtgaattacaatcttattggctgcttcgacctgaccatttgcttgcgcgtaatatggtgttgaggttaacaatcgaaagccagtttcttgggcaaattctttcatttttcgtccagtaaaaactgaaccttgatcagt

SEQ ID NO: 64732 - DNA, 404 bp, Glycine max
  unsure (1)..(404): unsure at all n locations
agcttctttctttaactttctattggatcattgttcgtgtcatgtgtgttatattttattttctgtgaaataatcatatatgttcaaagtgtgaataatcctcttccttgtgtccctgaaaaaggttggagattttagggacacaaggaataatgatcatacatgtccaacctccttgtgtaatctttntatgttacttcaaggtggtgggccaatattaatatgtttcttgtaaatattatattactcgaaggaggttggagatttcatgtgttgtgtgtaatgtcatgggtggacatacttggtttgatgatgcccacagaattattgatttttttccttcttttggaatttgggtttgtaaaatatgactgttattctctttgacgttaatcttgattatt

SEQ ID NO: 64733 - DNA, 415 bp, Glycine max
  unsure (1)..(415): unsure at all n locations
attggtgtattatgatctcctttttgttctctaaattgngggagtgtgctcaaatatatggggcaattttgattagctttcttgcttgattaagttgaattgggggtttgtatgagatggccctaagcctataatgcatnttgaagaaatgggacatgccacattgtccacgttctcttgctattaatgcctaaacgcgcgcccaccatgtgttcggagaaatgcctcaatggcattagcgcgtgatttttgtatggaaacaacccatggggcaatttggcttgcacatatttttgggacatgcattcattttctaaagagctagagtaattgccccgcatatgttctaggcctacgaaccaaatgttttatgcaaaattcacaagacgaggtcatattgcgaaagctacctctt

SEQ ID NO: 64734 - DNA, 337 bp, Glycine max
agcttcaacattcaatttcgagcgtctcgatatattacgagcctcaatcatacatccgagtaaaaagttatggtcctttgtattggatcagagcttcaacattcaatttcgagcgtctcgatatgttacaggactcaatcagacatcagagaaaaaagttatcgtcgcttgagttggctcagagattcaacattcaatttcgagcgtctcgatatggtacgggactcaatcagacatccgagaaaaaagttattgtcgattgaattggctcagagcttcaacattcaatttcgagcgtctcgatatgttacgggactcaatcagacatccgagtaaa

SEQ ID NO: 64735 - DNA, 201 bp, Glycine max
  unsure (1)..(201): unsure at all n locations
actcgcttcttgcgaaaaattatcgcggtntttaaatgccatgtgtgaaaatcgcggctttactgccagcgcttgtttcatcaccctgatatatggtagccatagaatgtcggcggggtatcgtatgcttttttgaggctcatctgcgatttctaccggcgacgcgtacatttttcgatcatattggtgatcatgtttttt

SEQ ID NO: 64736 - DNA, 304 bp, Glycine max
  unsure (1)..(304): unsure at all n locations
ctttgctgaagataattaattatttttgcattnttaatatcacttagttattattaatttatggcttagcgttaaattaattttggtaaattattattttgtggtctagaataatagtgtttagttattattaatttacagtttaggtagataaattattatacatgataaattaattttcttaaattattattttatgtttaagaacaatagtggttagttattattaatttaccgcttaggtagataaattattatacattggaaattaatttttttaataaattattattttatgttttag

SEQ ID NO: 64737 - DNA, 405 bp, Glycine max
tctctagtctcgctctcaacaactgcaaaatcaagtggtttattgttcctactactatcttgtccgatgggagttaacaaagtaccatggtatttgccagttaaaaatgtcccatctaattgcacaagtggcttgcaatatttgaagccttcaatgcatggattaaagttgtgggttagggtttggggtttagggcttggggtttaggaattagggtttagtgatacttgtggtaaagttgtgtgttaggattaaggatacactgagaaggatatttggactattaatgagttagttaattaaagggtgttattagatataaatagggaaagacggatatgaaatatactcttctattttctggtcttttcttatatgtaagaaaattcttttcttcatcatttc

SEQ ID NO: 64738 - DNA, 390 bp, Glycine max
  unsure (1)..(390): unsure at all n locations
agcttctccccatttttttataaataggatgttaagtgaagaggaatttcgtttagccctcctggtaatttagaatcacttaaaattagtgaaaaaaattggttccgtgaagaaaatccaagccgaggcgcttccgtaacgtttccgtgggtgatttcgtgaaagttttcggccgtttttcgacgttcttcattcgttcttcgtcgntcttcggtcttcaaccgataagttccctaaatcgaacttttcaattcattctatgtacccttagtggtcctcatttgctnttacgtgctttcatttacatttcctttacttttcgtacccccttttgacgtgctttaataattagcttaagtattttctcggctaatcaaaaaataaaataaa

SEQ ID NO: 64739 - DNA, 444 bp, Glycine max
  unsure (1)..(444): unsure at all n locations
tcctcatgaggcttctntgagatatcttcttgagaggcttctttgagaagctagagttttaactacccacacccctctaataactaaactaacctccttgaaaataaaacatggataaaataacacaacaaataaaatcaaacatcaattataattgctaataatatttcagagtgttacaccgtaaaattgactntaaagagattgaaagttaataaacaaagccaaaataaaaccaactcataactaaacttctttccatcaaaaatcacttaagatcgtttcgaggtctaatgccttaacgaccgttntgtttgtaataaaaatgattctttcaaaagcataaaaccaactcaacacacaaactttctcactttagagaactacatatgttngaattcctcatcgcacctgaggatgcatangagcaagggcagccccctt

SEQ ID NO: 64740 - DNA, 447 bp, Glycine max
  unsure (1)..(447): unsure at all n locations
agcttctaagttctaacatggtgatagagagtataattgctgaatgtgaaccacaagtataaagttattataatacactgaagctccattaaaaactgaaccatgagtacataattattacactacattgcagctgcattaaacatgttattgttattaaccaatttcaggacctagaggaccccttcccttatttttgagaaaactagcttaatataatttacttctataattaactaaggagttgagagaagctatcccaaaaatgcaatatcaccttcttatgttagttcacaaagtttaattagataatcttgataaagagaacagtatataatcactaattaatagtaaatattatagagattcaaacctggtttcagttntcacaatggttgtaagggcttcccaaaagcaagcagtagacaagatggcttcaactatgat

SEQ ID NO: 64741 - DNA, 415 bp, Glycine max
  unsure (1)..(415): unsure at all n locations
cttggaanatgatttctatacattagttagtcgtatgaagttactaacaggtagcatgtgatgaaccttgagagggtgaaaatgtgtgggacaagggcactattccttaaaccaatggaatcattagatagtccaccttcatgttactattnttgaccatttcctattacccttttatataactttttttatttttcatcccttacccttaggatgtagagacttaacttgattatcaccattttaattatatattttttacacagaacttgccagtaaatattntggttaaagggtgtagccagcactataattaagacttcaatatcatatgttaatcatacctatcttattaaaaagatgaactcgaaacaactttcaaggatatctnnttttttcatttctcttttaaaat

SEQ ID NO: 64742 - DNA, 443 bp, Glycine max
  unsure (1)..(443): unsure at all n locations
agcttctagccatatggacttaccttgaattatttcctttgatagcccttttgagccttggttccctttccttggtttgaatctcactacaagccttaaatgaaaaaccatgatatcaccatatccctaaggaattttggagctttggatttgttttgggaataagtgtgggggtttctgtttcattggataacatgttttgttggctatgcttcatgatgtattttgggccatactcgatgtacattgtatattggttaaatgttggacatgctgaatgagatgttgtttctcanaggctacgtacgtaaaanaaaaatcgaaaaagaaaaagaaaagcaataaagttgagtgaataagacttatnatgacaaagaatgatgagactctnggntctactctttatgttaaaaattaatcttacttcttttaattttctattt

SEQ ID NO: 64743 - DNA, 446 bp, Glycine max
tgtaaagagatcctcattctggtttaatcgattgccagttatctgtaatcgattacattattcagttgagaccatgtctcattttcatgagtctttgttttaatcgattaccaagttattgtaatcgattacatcgttcttggaagtgttcccaatagtgatcaagaacactttaatcgattaaatcaagaatctaattgattacattgttcttgaaagttttccaagtgttgggaagaacactttaatcaattaaaatgagaatctaattgattacttctgtgaaataattgattaccatggcaatttaatcaactacaggtagatataattgctttctctatatatacccaccttgtgttctcactttcatgaattcgaatgaatgaattagaacgagcatttgcgactcacacattctagtcttcatttttgtagcattcatg

SEQ ID NO: 64744 - DNA, 418 bp, Glycine max
  unsure (1)..(418): unsure at all n locations
agcgttgcatgtttttttattctagagagagttagatccaagtttcatagagttttgagagatnttgttgtgtgaagatctgcagagaccatagcttgaagaggaagttgttttgagagcttgagatgagtttgtgagtggttgtgagatcctagaggtgaaggagacatcctcaccacttgtatttttgcgaactttcatcttgttcttctccttggtgaaaggaggcttcctggttatggaaagctaaaatcctctattggatcttccttgtaggtacttgatgtaaatatcttattatctatttaatgatgttttgtgtgttctctgtgctatcagtttttcattctagtatgcctttaccttgatcacatagatgcatgctttggtagggtcattctacagtggaaactgatct

SEQ ID NO: 64745 - DNA, 443 bp, Glycine max
  unsure (1)..(443): unsure at all n locations
tctccaagggcatggtaatttctagcttcttgaaaatattcagaaatctagctagatgtctttctttgtccttcctagaaggtaccaaaggatatggtacttctctcccttcagctgaagatgcttctttctttttctctctagcacactcactcttgctttttctcttctcttctttttctttgtttctttttcaattttctcatttttttttcattaactttttctttctccttttctttttctttaatcttcttttctttctcactcacacttattggtatctctttctgctgatcatcttctacttccacttcttcctcagtctcactcaaaggttctatcactaagtcaattgctagctcagtcaccacctgttgttnttcttcacctatcctcatttctccttcattcatgctcaccattctacttctagtcataac

SEQ ID NO: 64746 - DNA, 308 bp, Glycine max
  unsure (1)..(308): unsure at all n locations
agctnngaatctgtattaaatttattntaattataaattaattaatcaagcttaaataagaatntaaatagcacaatacaaacatgaaaaaatattatactagaaaatacgataataaaagtaaataacaaaacataaatgaattaatcaaagcaattaatcatataatcttcatttaaataatagttggtattgaggagatgataaaatatatattttatattatagttggatttgctaaagatgcacattaataaattaatttcaatatttgtacacaatggtagtgctaactttacgagtttaaa

SEQ ID NO: 64747 - DNA, 372 bp, Glycine max
  unsure (1)..(372): unsure at all n locations
tctaaactntatacaagaatgattctctgataccacttgttgtacaagtggcctcagatatcttaagaagggggggttgaattaagatattacaacttatttccccaattaaaaattcctattaactttctaatccaggtttataaattccttaaataatgaaattcttaaatatttgattcaattggaccattttggatttgaatataaaccattattaattaagggagtttacgtaagagaaaatgcaacctcaaatttatactggtttggcacaccctgtgcctacttcagtccccaagcacccgctgagagttcactatcttgtaattcctttacagttctaaaccacaggacaccctccatgtgtta

SEQ ID NO: 64748 - DNA, 246 bp, Glycine max
  unsure (1)..(246): unsure at all n locations
tcattatataagtatattnagcagcgctatctaatggtgaatttatttaaaatctgtgccactgatatgcctttgatctgaggacttgatactgatcaacagattaaaaaaaatctttataatttcctgatcatttgtccaaggttattactgaataaagtggattattagatcaagtattattctgatcttacacttgagcatttcagaattaactntgtctataagttactggaagggctttgc

SEQ ID NO: 64749 - DNA, 445 bp, Glycine max
  unsure (1)..(445): unsure at all n locations
tgcaactctgtatgaattcggtcatggttgacataagttctcggtataaatcaataataatagtaataataaaacattacaaaaatatatcctaatagatataaaataataatgcttgtaatgataaaaaaaataaaaaaaaaatagtaatgcttgcttttgggtagtttagtcactgtctgacagaaattgatatattaacacagtgaatttatgtttgagaaattgtatttggacatgaatattgttggaaaagagttatgaagggaagagaaaataaggcggaaaatattgtcataacaaatgtttcatgaataatacaactctctacgttaatggtatgatcatgatgcaccttgcagtatntctatactaacattaacataaacataatcattgatggcaaaattctttagtacaagaactcgtattattaatatcaaac

SEQ ID NO: 64750 - DNA, 289 bp, Glycine max
tgatgagcctgcgtttttctttagagatttatccggttattctgttgaagatttgcccagagagaacctccaaaacaaaacctgggtcaggagaccttgtggacacctggagaggtgctgttgaccgaaagcaaactcgaccaagtcgaagcccacccccgcacacttaggcagtgagaacctatgatgttccttatcccgctagctgctgggaggctaccagtgtaggaactgtgaccacacaccaaggaggcttgcgtggtggccggccagctgagaatcttgtgtg

SEQ ID NO: 64751 - DNA, 399 bp, Glycine max
  unsure (1)..(399): unsure at all n locations
tcttatccattgctcatcttggtggtgtatctccttcttccatggcttattccctagtggatggcgcctactctctcctcttctcctttgtcttccactgcatctccatggtggaaaatcaccattaaaggacctcattgaagctcaaagatccagcctccatagaagctccacaagcaagcttccatcagactcctatgcacatttggaaacattcattgaaatctgtaacactgtaaagattgcaggcatgccagatgaagccatcagactcaacctattttcattttccttggcaggagaagccaagaggtggctccattcattntagggtaacagtctatgagtgattacaggtagtgatcacaccattctnatgtgataaatgcatcaacccac

SEQ ID NO: 64752 - DNA, 452 bp, Glycine max
  unsure (1)..(452): unsure at all n locations
atgctgccgcttgcaagctntgaacaatatacttggccttcatttatctgtctttgggcttggctgccacgctcaacatagtactttcgacacctactgtacgttgatttcaccaatgccgttatgggaatgttgcgacaatcctttaaaaccttattgatacattctgagaggttcgttgtcatgtggccatatcgacgtccttctctatcgtaagccatcgtccatttttcttttgagatgcgatcaatccatgttgctatggctggactcacttcacgaaatttttctaaatttttatcaaaaatgtgcttgcaaggagtataggctgcataaaattagttatgaataacaatntanagtataaatgaaagtaaaataaacgtgaccatcaaatatgaaattttacccaatntcttcaaccattctttttgtttggcattattgaattt

SEQ ID NO: 64753 - DNA, 431 bp, Glycine max
  unsure (1)..(431): unsure at all n locations
gtgtagcccaccatctnttcatagtagaaaactggtaatgtgtctactatcattgttatcatttttttctccgtcactgaggtgccacttgagctgccaggtctctccacctttgggcgcattctttgaaagatctgtgcccctttttgcacatgttctgtagttgcatcctatccggaaccatatcaaaattttactgatattgcctaacgaaggcaaccattatgtccttccaagaatggactcgggaaggttccaagttagcgtaccaggtaacagctaccccagtaagactttcttggaaggaatgtatcagcaattcctcatcgtttgcgtatgcccccatcttccaacaatacatctttagatggttcttggggcaagtagtccccttgtacttgtcaaagtccagtaccttgaacttgggaggg

SEQ ID NO: 64754 - DNA, 451 bp, Glycine max
  unsure (1)..(451): unsure at all n locations
agcttgctcgaaaagcaaagccattctacatatggcttaagaaaattgttcctttcctctgggatgaaacttgcgagcaagccttcttagccttcaagaagaccattgctacacaatcgatcatgagttggcccaggctaggagtacccttactcctatacctttcagtagttgacgaagccattagctcaacccttgtgcaagagaaagggaagcaccaactccctatctattntaccagctgcatactccatgaccttgagaaacgttaccaaatgatagaaaaggtggcgctagcactcattaccttggtctaaatgaactaccccatcaagcaggttttgtggaagcctgaactcatagcctcatgatgtcctgatccgtagaacttttagagttggatatctagtacgaacctcgtagccccatgaagacatagttcatggcatac

SEQ ID NO: 64755 - DNA, 478 bp, Glycine max
  unsure (1)..(478): unsure at all n locations
tatgcgcatatttccttacgaacgttcacttgcacaagatattctattaactaatttatgcacccatatacaatcaaggcagcttcgttacctagattatttacatgtacctccaaggtgtatttgttacttacatcacacacatctccttggctaaatntacatacatgcatactcaaagcattttggggtaccaaaaattgcacatgtgcacatcttggtatttttaatacctatacatacacaaacttcatgatgaatcttgactatctacacaataaggcgctacatttcatgctcttttcaagtttttgctacctaaagccgcatgcaaattcaagtatattttcctttgctgactaanattgtattcaaattaaaaggtatatnattttttgtaatgtattttctttacataacatgcaacatnattatagatttttgtgagacatntttgataccannaaatatatgtaca

SEQ ID NO: 64756 - DNA, 389 bp, Glycine max
  unsure (1)..(389): unsure at all n locations
agcttgaagtgagaaagtgtggaanagtcatttttcctacttttattcgttgaccacagagtggtacctagagatatgtcgcggtggtcaggagaccttggggacgtcaggtggggtgctattgcccaaaaccaagcttgaccaatcccgacccaacccgggcatattcagtcattgagaacctgtgacgtacctaaacaggcgagctcctggcagtcaaccgataaaagaacatacaccacaaagcaaggaagcttgtgtggtggctggccaactatggatcttgagtgatatctggaatatggcctctggtattcaataaccaagggtgtgtaatccattacacggcttacaaaggaagacatgaaggtaacatggtctctggtaat

SEQ ID NO: 64757 - DNA, 470 bp, Glycine max
  unsure (1)..(470): unsure at all n locations
cgccttctccccaattntctataaatagggggagaaatgaagtatataagggttcagcctcttangcacttctctctctttcgaatttgcttaggaaaattgtttccgtgaagaaaatccaagccgaggcgcttccgtaacgtttccgtaacgtttccgtgagtgatttcgcaaaggttttcgaccgttcttcgacgttcttcattcgttcttcaccattcttcagtcttcaacgggtaagtacctcaaaccaagcttttcgattcattctatgtacccgtggtggtccacatttggtttcatgtatttttattctcgtttcatttactttttatacccccttttgacgtgcttaagccattttatttaagtcatttctcgcttaacctaaacataaaataaatttccaccgatcgtttgaattgtattatcacgtaactttggctgaaatgaattccgaccgatcggtc

SEQ ID NO: 64758 - DNA, 424 bp, Glycine max
  unsure (1)..(424): unsure at all n locations
agctntgcctntaaggcttgtacctcatcactttcttccgaagctntattctcattgtctctcacagtctttagattggggagcaaatccaatccttgtgtccggactctcagccacttatggtagccgccgatgatcccgttactgcttcccctaagctctctgtcctttcttcacaccgcatcacctgccttgcgaacctcctggagtacctttgcattggggtcactgaaaccccgtgtcatgaaaggcgtgatgctttcgtctaatggcgctcctctcatggggtagccaagctgtcttatggcgaggacgggattataattaatacaaccccttgttccatcaagggaaccattggacatccttcgcatgaagatagaaacctgattcttctttcttctagcgagggaaccaattaaca

SEQ ID NO: 64759 - DNA, 427 bp, Glycine max
  unsure (1)..(427): unsure at all n locations
tccctttctttggccaatgctggacttgcttggcagtgattttcttggcaattttatgctcagaaatagcaatatccaccactccttcagttggtctgcccaggtacttgttgattacagcaggggagaatctaatacattttcctctgacaaacactntctgatactcatcactctttctgtttgttatgtcagagggaatgttgacaatgaattccctgactagactttcataacaatcacccaacttggtgacagttttcagcagtccagcagccttgatgaggtccatgatctccttgcaatccaaggcatctcttcccagttctctttctaaggcangtctgcgttgatatacaaatttccacctttcaacattgccaatggagtggaatgaaatgttgtccaatggggcattanggacatt

SEQ ID NO: 64760 - DNA, 462 bp, Glycine max
  unsure (1)..(462): unsure at all n locations
agcttatgcgcatatttccttacgaacgttctcttgcacaagacattctattaactaagaaaatgcacccatatacaatcaaggcagcttcgttacctagattatttacacgtacttccaaggtgtatttgttacttacatcacacacatctccttggctaaatttacatacatgcatactcaaagcattttgggatatcaaaaattgcacatgtgcacatcttggtatttctaatacctatacatacacaagcttcatgatgaatcttgactatctacacaataaggtgctacattccatgctcttttcaagtttttgctacctaaagccgcatgccaattcaagtatattttcctttgctgactaaaattgtattcaaattaaagggtatacanttttttgtaatgtattatctttacataacatgcaacatatntatgtatattntttttgtgagacat

SEQ ID NO: 64761 - DNA, 419 bp, Glycine max
  unsure (1)..(419): unsure at all n locations
gcttctcacttatattcctatatatagaaggaggagtgaagaatgaaagggttcagccttcttggcatttcgtaatcacttgaaattggtgaggaaaattgtttccgagaacaaaatgcaagccgaggcgctttcgttacgtttacgtaacgttttcgtgggtgattccgccaagattttcaaccattcttcgatcgntcttgttcgttattcggtcttcaaccggtaagttcccgaaatcgagctttttaattcattctatgagcccgtggtggtccccgttcgtttcgtatacttatattctcgttacatatacttttcggaccccctattgacatgcttggcgtatttacttaagtcattttctcgcctaatcaaaaaataaaataaatttccaccgatcatttgatttggtatat

SEQ ID NO: 64762 - DNA, 433 bp, Glycine max
agcttctacattctttttcgagcttttcgattattacgggactcaatcggacatccgagtaaaaagttattgtagtttgaatatgctcagggcttcagtattccatttcgagcgtctcgatatattacgggactcaatcggacatcagagtaaaaagttattgttgtttgaatttgctcagagcttcggtattccatttcgagcatctcgatatattacgggactcaatcagacatcggagtaaaaagttattgtagtttcaatttgctcagggcttcggtattccatttcgagcgtctcgatgtattacgggactcaatcagacatccgagtaaaaagttattgtcgcttgaatttgctcagagcttctacattcaatttcgagcttttcgatatattacgggactcaatcagacatccgagtaaaagagta

SEQ ID NO: 64763 - DNA, 461 bp, Glycine max
  unsure (1)..(461): unsure at all n locations
ntgagataattaaacgacaattatcttttactcggatgtctgattgagtcccgaaatatatcgagacgctcgaaattgaataccgaagcgctaagcaaattcaaacgacaaaaactttttactcggatgtctgattgagtcccgtaatatatcgaaaagctcgaatgtgaatgtagaagctctgagcaaattcaaacaacaataactntttactcggatgtctgattgagtcccgtaatatatcgagatgctcgaaatggaataccgaagctcggagcaaattcaaacaataataactttttactcggatgtccgattgagtcccgtaatatatcggaacgctcgaaattgaatgtagaagctctgagcaaattcaaacgacaataaacttttactcggatgtctgattgagtcccgtaatatatcgaaaagctcgaaattgaatggtgaagctctgagca

SEQ ID NO: 64764 - DNA, 440 bp, Glycine max
  unsure (1)..(440): unsure at all n locations
agcttgtagcatattcgaacgacaataacatttcactcggaagtctgattgagtcccgtaatatatcgagacgctcgaactttanaaccgaagctcgtagcanatttgaacgacaatgacatttcactcggaagtcctattgagtcccgtaatatatcgagacgctcgaaatttaaaatcgaagctcgtagaaaatacgaacaacaataactttttactcggaagtccgattgagtcccgtaatatatcgagacactcaaaatttaaaacccaagctctcagatacttctaacgacaataacttttcactcggaagtcctattgagtcccgtaatatatcgagacgctcgaaatntaaaaccgaagctcgtagcaattcgaacgaaataacatttcactcggaagtccgattgagtcccgtaatatatcgagacgctcga

SEQ ID NO: 64765 - DNA, 436 bp, Glycine max
tcggttataaaattcgagcgtctctatatattacgggacttatccggactttcgaacgaaatgttattgtcgttataatttgcagagagcttccgctataaagttcgagcgtctcgatatattaccgcactcaatcggacttccgagtgaaatgttattgtcgctcaaatttgctgcgagcatcgattttaaatttccagcgtcacgatatattacggcactccatccgacttccgagtgaaatgttatggccgtaagaatttgctgcagctttggttttaaatttcgagcgtctcgatatattacgggactcaatcggacttccgagtgaaatgtatttgccgtagcatttgctgcgagcttcggttttaaatttgagcgttggatttataccggactcatcagacttccgaggaaatgtaatgtcttcgacttg

SEQ ID NO: 64766 - DNA, 386 bp, Glycine max
  unsure (1)..(386): unsure at all n locations
agcttattagatcatataaagcctaattntttttacagggagaagtttttttttttttttttcatttttgcttcttaatttcttctcttataagggttaacggagaaaattatccaaacaaggccttataccataacgtcaaacatataagccattacttcaatcgacgatataacaagaccaggaccctatctaagctaaacagacttacaagataatcctaatcaaagctggaatagaacaattctagaaaaagaataaaatccctaaacaacatacgaatcctaaattaaaaccctaaatttaaaaataaaatcccacactttgcggaagtagagaacctaaaagggaacgcttcgaaggttgtaatgtgtgtgcagcgatga

SEQ ID NO: 64767 - DNA, 457 bp, Glycine max
  unsure (1)..(457): unsure at all n locations
tgtgtcacaattcattgtgactgtcaaagtgccattcacttatcaaatcaccaaatgtaccatgagaggacaaagcacatagatgtgaaactacacttcatcagagatgtaattgaatctgagaaggtgaaggtggagaaagtttcaacagaagaaaacccgactgatatgttcacaaagtccttctctagtgtcaaagtcaagcactgcctggacttgatcaatttcgaagatgcctaaagcaaattggtaggagtgcagccctgaatcacaaggtagacacttgctgatttggagtcaaggtggagatttgtggtgtgtgactcanaatcacaattgacacaagtgagaaggctttaagaggtgctgtcataactaaattcagttatgataactggagtggttttggcaccaaagcatagctagtgtgtatatatatattctngatcatgtaatg

SEQ ID NO: 64768 - DNA, 441 bp, Glycine max
  unsure (1)..(441): unsure at all n locations
agctntntattntcagtagatgaagatgaatttctggccacctcatggactcctctaaggacaatagcatcatttcttgcactgaattgttgggagttggaagccatcttctcaatcaaattcctagcctcaacaggggtcatatcaccaagagctccaccactggcagcatcaatcatgctcctctccatgttgctaagtccttcatagaaatattgcagaaggagttgctcanaaatctggtggtgaggacagcttgcacacaatttcttgaatctttcccagtactcatacaagctntctccactaagttgcctggtgcctgaaatgtcttttttgatggcagtggtcctagatgcagggaagaatntctccaagaacaccatcttaaggtcatcccagctgaaaatggacctatgagcaaggtagtatagccaatct

SEQ ID NO: 64769 - DNA, 347 bp, Glycine max
  unsure (1)..(347): unsure at all n locations
ggtagtgaggctnggctacaaaaataattggtttttctatgattgaaaggtttggattctaagagagcacaaatcccaaacttatccaagtagtcttttcaatacaattagcttattcactagcctttcattttaacttgtattgaccttaatacaacaacacacactttctttggatgccttttttctttcctcttctttttattctttttaatttttttaacacaacctatttggtgtgggtgctgatgtgctttggcttcaatttacattgcggttaactcccccaaatttaaggaaaattttcttgaaccatcttgatgcaatcctaccctcaaggacattgg

SEQ ID NO: 64770 - DNA, 433 bp, Glycine max
  unsure (1)..(433): unsure at all n locations
agcttcacaacctatatgctgttcaatttcttttgctgaccggctggcttcttcacccctgaagcatacatacacataccaacttcactaccaaaggcatttctcccaagggaatatttcaatcttttatacagagcagaagataacatgtactttcaagttccatgataaaggaaatattcaagaaaaagctctaaaataaaaggcaatactcactatgtcttatgactntaattccaattgccccttcaagcatcctagcttttgaaccgtcatggtcatattcatgaagtcctgattcataacatcaataaaacaacacaaaacactttcagtgacttactgaacaactactaccatanaattcagaataatttcaaaatgcttcaagctagaattacccgcagaagtactaaatactgcaatatcatga

SEQ ID NO: 64771 - DNA, 384 bp, Glycine max
tgagatgaggaagtgtagaagggtgaaactatctgcttttattcgttgaccacagagtggtacctggagatatgtcgcgggggtcaggagaccttggggacgtcaggtggggtgctattgcccaaaaccaagcttgaccaatctcgacccaacccgggcatagtcagtcaatgagaacctgtgatgtacctaaacaggcgagctcctggcagtcaacagataaaaggaataaagaccacaaagcaaggaggcttgtggtggctggccagctatgaacttgattgatgtgtgagagatggcctctggtaatcgattaccaagggtgggtaatcgattacaaggcttaaaaatgaagacaggagactaagatggtctctggtaatc

SEQ ID NO: 64772 - DNA, 455 bp, Glycine max
  unsure (1)..(455): unsure at all n locations
cgcttgacactntgagtaagttatgaattaatatttgatttgttataaaaaagaatgatttcttctcaagatatattttatgaaaatcaaacggaaatcacccttacaaactcaactttgtatgttgagaattcaactacactcgtttgagtatttctttgagtaattgtaatatatagctagcggcgaaaggagataaatatttaggttaactgcactcataaattttaccgtgataaccgggtgccacgcatccatatcggagctttcatgcttctaaccaaaagacagattgtacatcgtggagcgatcatcaccttaaataatttgtccgctctctgtgaatgctgaacaccacatatttcagtatcattccatacgtaagtactcctttgtatatctagactatgcatgcatctttcattgcacattagttaatttccttctagatctat

SEQ ID NO: 64773 - DNA, 425 bp, Glycine max
  unsure (1)..(425): unsure at all n locations
agcttgtggcacanagtataagaaattcatttttattcaaggcttgtaaaggattgcaatagatggattgaattgttagaaagattgatagaaaatgcaaaacaaagccttgcttttatagactcttgatgtttggtcaacagaaccatttagaagagttatgacttttagaaaaacttaaaaccaatttgaaaaaagtcaaaacctcttgaagagttacatcttttgatttattcagaaacaatcactggtaatcgattaccaaatcagtgtaatcgattacacaaggcttttatgtgaaaggatgtgactcttcacatttgaatttgaatttcaacgtttaaaggcactggtaatcgattaccaaaacattgtaatcgattaccagcttttgaaaataattggaacgttgtaaattcaattta

SEQ ID NO: 64774 - DNA, 447 bp, Glycine max
  unsure (1)..(447): unsure at all n locations
tgaaggtaaactatatggaggaatcatcacaacagacctttctaacctcaacagcaaaatcaaccacaacagaataattatgacctctccagcaacaggtacaatcccggatggaggaatcatcgtaaccttagatggtcgaatccttcacaacagcagcaacaacaacaacagacttattttcaaaatgttgttggcccaagcagaccatacgttcctccaccaatccagcagcaacaacagcaacagccccagaaacaacaaacaattgaggcctctccgcaaccttcccttgaagaacttgtgaggtaaatgactatgcaaaacatgcagtttcagcaagagaccagagcctccattcagagcttaactaattagatgggacagttggctacacnagtaaatcaacaacagtcccagaattatgatagaataccttctcaatct

SEQ ID NO: 64775 - DNA, 459 bp, Glycine max
agcctattattgttagggtttcgtctgtaatgtttggctagcgctaaacacccttgttggggatttctaatgaacagctgatgtaattaatttcatatctaattgattttgtttcttgtgttcaatgcttctttcagtacttaaattttgtatgctcttaatctgatcaaccatttgtgtgcctagttaggtgattttaacattgggaaatgtattgttgccttagaacttgaatgaagcagaattgaaacttaatcttacaagagggatttgcggattaagttttggttttaagtatgctgttacaataatgctgtttggtctaagtctagtccaacaagaaagatctgaggacaaagcttatgctaaattacgctaaacttttgtaaactatttaagctaagtctagtccaacataagggatctcgagggtgaagcttatttaagttagtctacacc

SEQ ID NO: 64776 - DNA, 407 bp, Glycine max
tgagaagcttctctgagataactttcttgagaagctagagcttatctacacactctcttctcttaactaagctcacctccttgagaagcttccttaagacgattcctaaagaagctagagcttatatacacatacctttctaatagctaagctcaccttcttgagatgagaagctagagcttagctacacaccctctataatagctaagcgcaccccatgacaaaaacatgaaaataaaaaaaaaattccttactacaaaaactactcagaatgcctcgaaatacaaggctaaaaccctatagtattagaatggccaaagtacaaggcccagacgaagggaaaacctattctaatatttacaaagataagcatgctcatacttagcccatgggctctaaatctactt

SEQ ID NO: 64777 - DNA, 406 bp, Glycine max
gcttagaattctatttcgatcgtctcgatatattacaggtctcaatcttacatttgaggaaaaaagttatcgtcgtttgaatttgctgagagcttcaacattcaactttgagcgtctcgatgtattacaggacttaatcagacatccgagttaaaagttattgttgtttgaatttgctgagagcttcaacattcaatttcgagcgtctcgatatttacgggactcaatcagacattcgagttaaaagttattgttcgttgaatttgctgagagcttcaacattcaatttcgagcgtctcgatatattacgggactcaatcagacattcgagtaaaaagttattgtcttttgaattagctgagagcttcaacattcaatttcgagcgtctcgatgtattaccgactc

SEQ ID NO: 64778 - DNA, 412 bp, Glycine max
acccatcacatgtggtactaggtgtgtgatcgggcgatggtgcacaacaagattttccacatccacaatgcgcgcataaacccaccattctctgttgcccacctccaactgagcacacgtactcccacgtagcccatattctcgtttctctcaacaccgggtcccgtaatatatcgagacgcttcaaattgaattctgaagctctgagctcatataaacgactataactttttgctcggatgactgaatgagtccctgaaactattgagacgctcgaaattgaattctgaacctcacagctaattcaaacgacaataacttctaactcgaatgctgattgactccgtaatacatttagacgctctaaatgaatgtgaagctctcacaaatcttaccacaataattttttact

SEQ ID NO: 64779 - DNA, 430 bp, Glycine max
  unsure (1)..(430): unsure at all n locations
ggcttctcaataaccaaacataacactactgacaatattgttataacttcttgtaccccgaatacaaaagcttctttgactcagtctccaatgtatcatacaaaagggaatatgcttgctgaaaacactctngtccaatatcataaatcatgtcatctaattgaattcccaatatctacatcaactttgtcaagtttgggacccccgtcgcatgtctgtctattcaccatgtcatatccatgtcgtataattctttttaatcccatcacagagaagatgtgctcgtatgtcgtctactgctngtcgtctctcatctaaacagttactacaaagacataaatatttcctattctcattcagtcaacttcttttcaaggaaatatcgaagaactgttcaacccattcttatacgtatggtcatgcacttgca

SEQ ID NO: 64780 - DNA, 410 bp, Glycine max
atacgaagtgaagtcaaaacttttatattggatatttagtttggaacgttatcctgcccttgtgttagttaggatcgagccttgggcaaatggtccccaaattgcgaaggaccgttcaaaataattcagatctattctaatggtgcttatgagttagaggagctaacccctcagaaacgtactttgagcataaaggtaagtatttgaaaaaatattaaccaacactgctcgaagttaaaataagcatagaatgagagaaatactggaaacataaaaatggcgattacagttaattgccacaaaagggcctgtgtcagtattacatcaaaagtagaatcgaaatacagaattcataatatagaaatatagttctactaatgcatgacaaatcctcatatagtttttcatgt

SEQ ID NO: 64781 - DNA, 452 bp, Glycine max
  unsure (1)..(452): unsure at all n locations
agcttattatntacaaaataaaaaagtatgattatagttgagtacattacaaaaattaatattcttcagtcattagcaaaaagtctaaaattagaaatacttaattaaaatctcattaactaattcgttaatgtcgagtgactactattcggcagtcttgtaaaactctgtttaaaaaggaagtcttataaactatattcacctcagataatctccagatcccattggaatcatataattaaaatcaatatcatattcaaacaaaaaacctttaaatctacccaagccaaggttgtgcgtctataaaactgccctatagattcccatttacaaatagactatatccagaagaataaaaaatccaattcgttaactgtttcaacgattgacttgtgactaccaccattcactgaaatatcgncattgtgaacattaaacaagtgctcgtcatg

SEQ ID NO: 64782 - DNA, 466 bp, Glycine max
  unsure (1)..(466): unsure at all n locations
gtgagtgaccactcatatagataacaatatcaattgtttcaataataccaataaatgcacattttattattggattgaggaatgagcacagggcagattgggccgagttacgtttgaccttaactcgttcgtgaatgtgaagtaattcatgatctacttactagttaaattataacatggcctaagagaggacaaggcttacccaatatataagaaacgaaagttctcaagtccgcaaccttttcattacccccaaaggaatggacatctctatttctattcttcacataacatgacactagaaatcanaggctgagattcattttaagaaanaaattaaaaaatccttccctcacctattgggtattgggtgctacatagccctttctatttctctcattggtctcttgccttcagtgttacagttcctttctctttttactggtctctttcagtttacattcat

SEQ ID NO: 64783 - DNA, 167 bp, Glycine max
gacaacaggggatggagggtatatgcgcgcattgtctatgtggaatacttgttgtgtgccataatccgaacgccatctaataccacatgtgatgggtaccccataaccctacaaacttgagatgaggaagtgtttaagggagaaactttcgtgtttttattgtacac

SEQ ID NO: 64784 - DNA, 424 bp, Glycine max
tggattatctcttattatggaatctatccttcctaagattgtagccaacccagtcaccctcattaagaactagctttcttcttcctctattgcctatactggaatacacctttgtttggctctctatttggttcttaaccctctcatgcaacttctttacagactctgacctagattccccttctttatgtataaaataagtgatcagtgggaggggaatgaagtctaacggtgttaggggattgaacccatatacaaccttataaggggactgcttggtggttctatgaaccactctgttgtaagctaattctacatgaggaagatactcatcccaggacttatggctgcccttcataagagcccttataaggatgtgataaggcctattcactacctctgtttgccatcagtatgggatgac

SEQ ID NO: 64785 - DNA, 155 bp, Glycine max
atgacccttagtaccatatccctttcttgtctgtactcataccagccttagtgaaaaccagaaatccctcaccttatagaattggagccttgaatagtttcggaataagagctgggggaggggggacatctctagtatttgatagcacatcgtta

SEQ ID NO: 64786 - DNA, 416 bp, Glycine max
tataatctcactgctgaatatactaacttagaatccagaaagctctatctcctatgtgctaatccaggctagaatacgaatcttaatgctaatcacattattataacgtatattgaataccttattcaattatatattttaaggaacctaaataatcaaatagattaattctattctactttaaataacattcatatgtaaagtgatcctagtgattggaaattaaattaattcaagtgagaataagacttacattcttgtttaagttaaaatcattactatatactatgcttggacacctgaaaattaactaaataataccatttatatgaataaattacaccacacttatattctatttatatttgcagtaacctttctttaagagaaatttgagttactaatttagtttaact

SEQ ID NO: 64787 - DNA, 339 bp, Glycine max
ttcaaatgtgagatgatgctcaagacatctggattggcactaccatgcctttctgattatcagctgggaaaatggtgagtggaggaacgcccctgcatttacacatcgatgcgtaatcgtagacctcttccgatttaaaagcttctatattgggcctaggcctatgagttttttcttttgttacgctacgtgtcttcggtgttgattaataatacaagcgagttgcttattttgtcctacgtgtctaccacttcattcatagcatgttacttcttttttgaacggtgaaccgagacgattccccgaggtacttatcctgggccccctatctatttatca

SEQ ID NO: 64788 - DNA, 448 bp, Glycine max
  unsure (1)..(448): unsure at all n locations
ntctgcatgaactaacattagcttatatatgcgctaatttgtggaaactatgtggtttagattttcttagagatgattctaacttgtgcgtaaacaagatttagcttatggaagaaacgttgttcattcttctttcttatatagatatcctgtacgtgcctatggaaaaatttatgcaaacaggacctaactcttgtatgcttatatactgctatataatatctttttatagctattcatggtatgttagtagcattatatatgtaggctggcctgtttactgcggctttacttatgccagaatagagcatgcggcacaacgaagtgattggatgtatagtgatcaagttcatcaatttcttacgaaggtattcatccaagtttaatggtttttttataatcataacagtttcttgtgttaagcattattttgtttgcagctaaatct

SEQ ID NO: 64789 - DNA, 334 bp, Glycine max
agagcataatcgatcacaacagagcaatatgacccttctagctaacaatacaaccctggatggaggaattaccctaacctcagatggtccagccctcagcaacaacaacagcagtctgctccttccttccaaaatgctgcgtggcccaaacaagaccatactatttcttcccacaatccaacaacaactacaacttcagaaacaaccaacagttgagggccctccacaaccttccctcgaagaacttgtgaggcaaatgactatgcagaacatgcagtttaacaagagaccagagcctccatttaaagctaaccaatcgatgggacaattagct

SEQ ID NO: 64790 - DNA, 243 bp, Glycine max
aaaatcagctgtctgctctgcattcctacgactcttatggtctctcgttccacgcgcttggtggaagctacaattacatacctcaagttccgcattcttcctttcggatcctaagagccactgattagaacctttttgaatgttgaactgctcgattctgcctaaagcctgaactctatcatatacttggagcctaacttgctccctattagcgattctcaaactggggagccatccaaacct

SEQ ID NO: 64791 - DNA, 397 bp, Glycine max
  unsure (1)..(397): unsure at all n locations
agcttacagatcaagaaaaccgaanatagaattacgactntgaccatnttatcatcgtcatccaccatggtctaacgatgtcacgactgtcgaccctagaaacaaacttggaagagagagagagagataagaaatctaggatgtgcttggtcttgttgaagataacgacccctaatctttntcatgtaatgattttcaaatctctcttctcttttctcttagtttagattctgcaacatcgaaaacactcctccaccgatgtcaacacctctattggagtgaagcttcaaaaatattttcatggccaagtgcaaagatgaactcaacattgaaaatgaaaacaaaaacaacaaacganaacctctctaacaatgacctannatacaaaatcgaaaac

SEQ ID NO: 64792 - DNA, 325 bp, Glycine max
  unsure (1)..(325): unsure at all n locations
ctggatttaattatacttatgaaccaaatttatttntgtttatgtgtatgacttgtaccaagttactgtttctatttaattatgtatattcacttaagtaatggcatgttgttggatgaatttatgttgtgacaaaattactttggttttcataagcaaaattaagggagttctttttataaaaattgaaattagcgtatattagagtgtgattatcgtagcgacgaggtgggtcgttacaactagcatttgctcaacctccctagcatccgcaaattggagcaaaaccatatcatggtttctcttgcagaggatatttgcactc

SEQ ID NO: 64793 - DNA, 426 bp, Glycine max
  unsure (1)..(426): unsure at all n locations
agcttctcaaggaggtgagctntagttttagttgggtgtgtgtagctatagctctagcttctcaaggaagtttcctcanagaagattctcaaggaagttttcttaagaaagcttctcaaggaagctacctaatctataaatagaagcatgtgtaacacttgttgtaactttgatgaatgagagtcttgtgagacacaactcanagntcatcttctctccctttntcttccttcaattntgtgctcccctctctctctttctctccctctttcttttcctccattgaagcatcctcttcaagcttcttatccaaggctcatcttggtggtgaagctccttcttccatggcttgttccctagtggatggcgcctcctctcacctcttctcctttgtcttccgctgcatctccatggtggaaaatcacc

SEQ ID NO: 64794 - DNA, 456 bp, Glycine max
  unsure (1)..(456): unsure at all n locations
tcttatccaaggctcatcttggtggtgaagctccttcttctatggcttattccttagtggatgacgcctcctctcacctcttctcctttgtctttcgctgcatctccatggtgaaaaatcaccattaaaggacttcattgaagctcaaagatccaacctccatagaagtcccacaagcaagcttccatcacccatcatttgagaaggccttataccaacttttctaaatgtatcaatttctagaatatctgtagcactcaacttcttatgcgctgctaacaccacacaataagcttagaccaaatgctaacgactatgtagatctgtaaatttagttacacacaaacgactattgtgaaaaatatgaacatganacctggctttacaatcacacctaatttcctttcttggttcatggttttgtgtttaagttggtagccccctctcttctctatg

SEQ ID NO: 64795 - DNA, 323 bp, Glycine max
agcttggaggaagaaggagatgaatgaagggatagtgagagaagagcacttatatttgtgctctaaaagagctctaaaatctgaagttaatattcaaatgatcaaagttgaaaaaaaatgcacacacatgacctttatttatagcctaagtgtcatagaaaattggagggaaatttgaatttcaattcacaattcacatgaatttgaatatgaatttgcggagccaaactttggagccaaaatttctctaattatgattagtgaattttagttatgggtcaacccactaatcaaagatcaatttctagattcttcactactgt

SEQ ID NO: 64796 - DNA, 405 bp, Glycine max
tatcctgaccctgagagatataagaggcttgtgggaaatctcatttaccttaccatcactagacctgatatctcctttgctgtgggagtggttagccaatttatgcagaatcctcatttggaccattggaatgttgtcatgcgtattctgaggtatgttaagaaagctactggacaagggttgttgtatgaagacaagggtagtacgcaactatcaagatattgtgatgttgattgggttggatgtcccatggataggagatctacatcaggttattgtgtcttcattggaggaaatctaatctcttggaaagcaagaaacaaactgttgtcgctcggtccagtgcagaagctgagtatcgatctatggctatggttacatgtgagctcatgtggatcaaacaat

SEQ ID NO: 64797 - DNA, 440 bp, Glycine max
  unsure (1)..(440): unsure at all n locations
acacctgcggcatgcaagcttgtgtcctttctttntcagcatctccttttattgtctagacatattatcaacttcatcgttcatgaactctttagaattgttgtatggcttttcagactcaacaatatgtactttaagagctttagaatagcttttattttcttcttttctagagatggtctctttagacatgagggcatcaaaatctttttttggaagatgatctatattctaaagatgcacttcatggactcttatgatacccaacaattcatccaaggcaagagttttcaggtttctatccttttgaatggctatggtttttggttctcacaccttgggaaagttgtctaaaatcttgaggtttatttgagctttggtgaaggtgccctagagcttcaagtccatttataagaacttgaagtctttccaacatgtca

SEQ ID NO: 64798 - DNA, 102 bp, Glycine max
  unsure (1)..(102): unsure at all n locations
gctgctgcatganatctcctcaactgtgtgttgtacccatggtctccagctcctctttcatattgatccangtgttangaatttggatgtgttgataaggag

SEQ ID NO: 64799 - DNA, 456 bp, Glycine max
agctagtatgacatttattttactttccgtttacattttctttaattatgaatttgttttggtcttttgctttccatgatttagtgatttttgctctaaaaatatcaaatattgtcaatgcttattgaataggagtttattagtttaattagaataccttggtttctcttcatgatttattcttgtttttaatatgtttgggctacttacctccaacaattttactagagaattacccgcaacctttgcaagactcactaccttgcaagctgtgtaagtttcccatttttgttactttttattacacttacgttaggcaaaactatctaaaatctaaacagttgtctggaagttggaaagctagctagaaattgaaaaaatagcttattaaattataagtatttgatataaatagcagtttacgtagttaaaagtgtaaaataactcaaaaacaat

SEQ ID NO: 64800 - DNA, 453 bp, Glycine max
  unsure (1)..(453): unsure at all n locations
cttctcncctattgtgctataaataggggaaaaagtgaagattaggagggttcagcatcttatgcacttctctctctttcgaatttgctgaggaaaattatttcggtgaagaaaatccaagccgaggcgcttccgtaacgttttcgtgagtaattacgcgaagattctcgatcgttcttcaaagattcatcgttcgntcttcattttcttcagtcttcaacgggtaagtacctcaaaccaagcttttcaattcactctatctacccgtggtggtccacattttgtttcatgtatttttattctcgttttcatttacttttgatacccccttttgacgtgcttaaaccatttatttaagtcatttctcgcttaatctaaaaataaaataaatttccaccgatcgtttgaattgcatcatacgttaattttggttaaaatgaattctgaccgttc

SEQ ID NO: 64801 - DNA, 290 bp, Glycine max
ttaagcacctgggctgcgtggattttattttctaattttcgtacaggctactgttctgggaatgtatcgtacattccaccaatcgagccgacataaggaacctggggcctagatgactactacattaatggtgtctcactgccgttcatcagaaactgctgcattgataagatggcaccgaacctgtgcgccgtcgtacaattctgtgaaattacttaatttgcttgtcgtatatactattggcggcacagcggaagtccatctgctaaaaaacccgcctcatatcatct

SEQ ID NO: 64802 - DNA, 60 bp, Glycine max
ttggatgaattatatatagagtcaagttatcgtggtaagatgatgggcccctctttctct

SEQ ID NO: 64803 - DNA, 366 bp, Glycine max
  unsure (1)..(366): unsure at all n locations
ctgcatgcatgcaagctagagatgtttgtgtgttgaagggcgaatcttcctgcttttattggtgaccacagagaggtacctggagatatgtcgcaggggtcaggagaccttggggacgtcaggtggggtgctattgtccataaccaagcttgaccaatcccgacccaaccctggcatatgcggtcagtgagaacctgggatgtacctaaacatgccagctcctggcngtcaacagataaaaggaaaacaagaccacatagcatggaggcttgtggtggctggccagctgtgaattttgtgtaatatgtggattgtgcgctctggaatcaattactaaaggtgggtaatcgattacaaggcttaaaa

SEQ ID NO: 64804 - DNA, 262 bp, Glycine max
  unsure (1)..(262): unsure at all n locations
ntacagcagagtttagtaatgattcactaacctacaattttataacttaccgcctttaacctacggaattaaaaaaaacttaatggctgagcgtaactgaaattgtggcaaccaaaagtcacccccaatagccaacaagtcatacaccatctggtcttccaaaagctgatgcctacgttgccaattggcccttattacaacttgaactaaacctactaaagccctttagttaattaaccaaaacatattttgggaacccact

SEQ ID NO: 64805 - DNA, 438 bp, Glycine max
  unsure (1)..(438): unsure at all n locations
taagtcacctgcggcatgcaagctanacaattttagctaaatgcgcttgttccattcagctctttatgacttaagaggatacttcctacccgacatcttctgtcatgaatggaagtgccatgacaggtgtataagtactctctatgatattagctacacaagctcgtgttgcacgaggtaagtgcaattgaattacctcgacaaccttcacattgcccataagaaacgacaaatggacgtcagatcacccacgatggctggtctccgacggaaatctctatcctctatgcttgcatatgcctgatactcatccaacaacacgatatcaatagtgactcgccccacaaagtcttataacacgccagggatgcgttcctcgatgtcccttgcttgaaagaaatccattccttcgagttcattctccgagaaataatattt

SEQ ID NO: 64806 - DNA, 374 bp, Glycine max
  unsure (1)..(374): unsure at all n locations
tatatacgcaatcgatggatatatatgcgtaattgattatatatgccaattaaactccncctgaggcctctgttattgattgaaaccgaccgtattcaatatactatgagcataaagccgttggatgacataaaccacatcatgtagtcgatcaatactacgacattattgattacaacaaaagctcatggcatgaataagtcttaaacccaacacataatcgattaanatgatgcactatttgattaagacggcagattttgaactataacaccacagacgcataaatggtaatccattaaaatacatgattccataaactgtataacacatgacattatactggtatcgattaacatgagtgcaattgacta

SEQ ID NO: 64807 - DNA, 420 bp, Glycine max
  unsure (1)..(420): unsure at all n locations
agctnttaaattgtatgcaacgttctaaattttataatccccaatatagtagctaaagctctcagtcacttgattaaatatgttctaaatttgtgcaggttgcattacatcaagtgcagattcaaatatagttatagagggtcgtaatcttttgctgtataataaggtattatattttggttattcttgtaggtttcttttgacatattgactcatgatcatcttggatttctttatataatttatttttgtctttagcagagaaaaccaagttctcaaatatttatgcatactcggatcttcttcccttcccagctaatatctctgtttctgttaatagaggatcccaaacttgagacccgtggataatcccaaacttgccttcgccaaaaccctcacacatccttctttcatgttcat

SEQ ID NO: 64808 - DNA, 453 bp, Glycine max
  unsure (1)..(453): unsure at all n locations
ntagtgggatggtaatagatgttttcggcacacatcttgttatacctaatgcataaaatgttagatattacatgatggactaatgacatccctgaaaaatcacaagtttaattgtcaaatattaatttttgtgggccttatgccttgcctggctaaaattgtccagagcaaaataagtataccttacactaatgtagtgacataatgcaatggtggttatgtgtctaaatatatctttggactttaaatataattgtggacacaagcattttgataatttagaaactgtctgctttcagccttcaactcggtcatgatacttgaaaggtctacatggcaaaacatgaatacaactaatactgactttatcagtactcacattatactagaaaatagaaatgcttctgcagagaaacagatgtattcatcctacttgaatatngccgattactt

SEQ ID NO: 64809 - DNA, 401 bp, Glycine max
aatctctttcttccatggcttattccctagagaatggcgcctgctctcacctcttgtcctttgtctaccgctgcatctccatggtgtaaaatcaccactgaaggacctcattgaagctcagagatccaacctccatagaagctccacaagcaagcttccatcaagtggtaatcagagcacaagagcttcaagtaggtgctccttaaacctccattggcgttttgctataccttctcttacattgttgtttcttcattcttctccatgtatctcctcacatgtcttgtgctaaatgttgttaacatgattctttagagtttccaccaattaaacttgctatggaagctatatctgattttctatggttcaaatttattgttcttgttctcgaaccatgaatt

SEQ ID NO: 64810 - DNA, 451 bp, Glycine max
tattctagggacaggttattattatgtaaagccatggtgaagtatacaagccaattgtatgaatgcggacatgatgaaggccatggttgtatatacaagccaattgaccaaaaagcttaccttgaattataattgtatcctttgcaccctttgtgagctaaattacattttcaaaattgaaccctaaacttgaatgaatatctccagataccttgcttagattctaggagagcagatggtttaaggcaatttgccccaaatttgggggagttaaccgggatataaagtggaaggccaagcacatcagcacacacaacaaataagttgtgttaaaaaatagagagaagcaatcacagaaagtatgtgttgttgtaataaggtcaaatacaagttaaagtgaaaggctagtgagtaagctaattgcattgaaaagactacttggataagtctg

SEQ ID NO: 64811 - DNA, 377 bp, Glycine max
  unsure (1)..(377): unsure at all n locations
agcttctagcctgttgtttatatacaacattttatctgaggtctaaactctatcaagctcccttctattgtctccaatgtgaataggggccattctatggaatatcatgctgtttaataataaaattccagcgtcttgttagggaagtctaaggtagaatatttatattatatagtggtccctttgcccttggttcttgaaggaatacatacatattatgntaaattgttgcgtaatggatttcaaaacgacattgaactcgtgactcatggtaataattaagctgtaacataatacctaagaatactagccaaaattntattaatgacagtaggcttatgtgctacctaatgtggggggcactggaccaagaaaaa

SEQ ID NO: 64812 - DNA, 445 bp, Glycine max
  unsure (1)..(445): unsure at all n locations
tcagcaattacaccttggacatttcaccaatatgaattattattagtaaaagggattagtgaggaattaccttataaacttcatcaacaacttcgttggagattttggttcctccaaatgaattgatgatatttccaaagtcattaaggccatggagattccattcccaatagcaccaacagaccccataaacatcaaaaaatgatccaaaggatcatcaaatgagaaaagcttctataagggcactgtttttgcagattcatctttggcctcactgttctttgagtctttcttgctgttaggatctccattcaagtcaatatcctctgccattttcttcattgaagactntacacacccttatactaattagtaatcactgtaaacggaaaaaacctgcagaaaatgcattacagggtcangttagtaacacacaagaatgtgc

SEQ ID NO: 64813 - DNA, 247 bp, Glycine max
taattgctccccaataggctccccgaaattgttccgggcatactctttcttgcgagccctcttaggctctcgtcaaaggctctttgcggtatttgcattctctttccgtaaccccgcacaactcctttcgaacgtgtgtagtagccaaccttgaacttctccttggcgagttttgcctttcctaactcgcttttgagagcttggacttcctcgtcctctttcggtgcttcaaaattctcttcgctga

SEQ ID NO: 64814 - DNA, 434 bp, Glycine max
  unsure (1)..(434): unsure at all n locations
tgactacatcttaccctcatgacanaatacatganaatacanaananaattctgctacaaagactactcataatgccctgaaatacaaggctaaaaccctatactactagaatggccaaaatacaaggcccaaaagaaggaaaagaacctattctaatatttacaaagaagagtggatccaaccttgacccatgggctcaaaaatctaccctaaggttcatgagaacgctagggccttcattagtagctctagcccaatcctcttggagtcttctatccaatacccttggagggtaggattgcatcaaaacctaccaaaactaacgatgctaaggttgttgtagattttgttagatctaatctgttttgcaagtttggagtccctatagccatcgttagtgatcaagggcacccatttttgtacagatccatgt

SEQ ID NO: 64815 - DNA, 333 bp, Glycine max
tgcttactcccaaccatattggattttgatccatcttggacatgcgattcgaaattgaaaacccaaagtttattagggcattacatcaaacatacaactccccaactgatctgcggaaagatatagtgagtagaaaacggaacttgccgacaaaaaacaaataaaagacagatgatttctctctcttatcagttcgcacaaagagagaaaattgaggaaacacactcgcaacaaatgttagatttcttatgtgcattatactactaggaaaattagcagtaattaaagtaatagaatgtgaatgtaataataaaaaggaatatccggcttgat

SEQ ID NO: 64816 - DNA, 129 bp, Glycine max
  unsure (1)..(129): unsure at all n locations
gcaaggaagctattctcgaactttatgcttcagatgaattgtacanttttgtaatttctcacattcagtttcaattctggacgatttcctgttaatttatcctttcacttttggntatagatgacttgc

SEQ ID NO: 64817 - DNA, 436 bp, Glycine max
  unsure (1)..(436): unsure at all n locations
agctctntggagtagaaacatgggaccaactcatcttatttcagaaaggtagtcatatctagtctaggtctgagagaccatacaagtttcctaacgatttctaattatgtgggccattaagtctatcatatgctggcaatagccgagaagcccatgaatctcttcgggggcggagtaggtgtctgccatcgccttggccttggctaacaatcggngaagttcttgactcccgttcaaggtaagagcaaaccgatccatccacatggttgcctcttggtgtaaagagtcgatcacccttcctctagcctctttntccgcgtatacttgggcatactcatccgcgattctatgctcgcgggccgtggctagacctaactcttcttggtactnggcgatgatagctaacatgttggtctctgtctcgcataaacgctga

SEQ ID NO: 64818 - DNA, 437 bp, Glycine max
  unsure (1)..(437): unsure at all n locations
caaatcgagttgaggttagcttagctcattcttggccagcttagcggaccaaatcatctcaacgaaaggactgtttttcagaaaatatttttctaagttattttttagtcatttttccatgaaattgaaacccttatgttatgcattcaaagattggctgatatactcctatgtacagattatatagcaagttccaaatgatttacatgcataaaaaaaataaagataacaaaatttaaaattgggttgcctcccaggaagcgcttctttaacgtcattagcttgacgcttttacctcactgggtgatcttatgttttggttcctactttcagaaccacttgacctccttccattacctgtaagcaaacattgtgttctagagcaggctcgtcttcaacaaacaaatcanaagcaatnttctgatctttcaaaccta

SEQ ID NO: 64819 - DNA, 407 bp, Glycine max
agcttgtatacacttcttcatttacgaatctattcagaaaggaactcttgtcatcgatttgatacaacttgatgtctttatgtgctgcataggataagagtattattatggcttcaagcttgctactagtgtaaaggtttcttcatagtcaatcccttcttgttgattgcaccttcagcaactagtctagcctgtttgactacttctccttcttcattgagcttatttttgaacacccatttggtttcaatgactgactgattctttggaggggaacaagattccaaaccttgttcttagtgaattgactacatttctctttcataacaaacacctaagaatcttgactcaatgcttcatcaatattcttaggctcaatgggtgagaaaagagtcattattcctttt

SEQ ID NO: 64820 - DNA, 446 bp, Glycine max
  unsure (1)..(446): unsure at all n locations
atgggttggatgttgaattctgtttgttcctggtgcttatatgatggtacagcgggtgaaccataagcggaagtttcttttggtgaggaagccatggaaaaacagagcgtttggaatgatttcgtaaatctcagaaaactattgggaaatgctggagaaaacacgaatgccaagcacatataaatttgaatgaagaatgtagaggggcgtgtgaagcaacggtcgaatttgctttgtggtgaacgtgctattaatgttaagtgattcgtttgggcacgttcagattgcagtagctgctataattcctctagcagacaaatgcccagcttgcccctcagtttttcaaactgatttgcatccaaagcctttgtgaaaatatctgctatttgntcctcagtgtcaacatgcttcagtgtgattactttatcatcaacaagatctctgat

SEQ ID NO: 64821 - DNA, 390 bp, Glycine max
agcttgatttgtgagttgattctagccttagtttcactttggttattattctattgatccaaggaaatttccaaagaaaaacgtccgattgatttttttgattattttattcaaagatattttgattattttattatttttttttcaagatattgtgactattctattattattttgcttttttttttggttaaccgaggttacagcgtgaacgataggttagaatttgttttaacagtgattaaacgagattacaacacaaatgatcaattgaaattcattctatcatttattaggcgagaaaacggcttaaataaacggttaaagcgagttaaagacggaagataagaaaaccgataatgaatgaaatgaagatgaaagctaaagaaa

SEQ ID NO: 64822 - DNA, 327 bp, Glycine max
  unsure (1)..(327): unsure at all n locations
tttatagtttggtgtggcctttnttctaagaaagcttttctttatgcttgagcttagcctttatagtaaacaagccaagccgagccgagccttaaataggccgagccattgtgcctagacaaacgggtcgggtcattattatccctagccctgacaaccaggctcaccaaggccaatgagtattctgagttagaactgtccggtttggggaacccaagcacagtttcaacacttccttgtctgagcatatcgtgtaaacatctttattccctatggaacattggatcattcaaaatgcattgagaaaatatggtcaatacatttatg

SEQ ID NO: 64823 - DNA, 373 bp, Glycine max
  unsure (1)..(373): unsure at all n locations
agcttggttcaatgttaatttgtcccacattttttactaattattaagaataaattgtttgaaatttaggggagacactatataagaattgaaatggtgaaagtaaatagcatacacacactatttttgtatatacacatattgtttctgtatatatgaaaaaagaactgttagtataaataaaaatgtataaaagtgtgtgtgctgcaaatcaaatcaatggaagctaagtgcttaaataaaaggcaagtatggggtaggaatgcatgaaaaaagtanaggtttatctatggatgaatgctctcctatgaacctaagctttgaatcctagaaaaaccatgatgtgttggcagcctaacttcattacaagcct

SEQ ID NO: 64824 - DNA, 456 bp, Glycine max
  unsure (1)..(456): unsure at all n locations
tgaacgaatataagaaacatcttcttcaaccttggtgattcttgactccatctcattgaagcgcatgtccacttgtaattccaaagtgtcaaacctttcaccaacaaaggtttgaagaccatcaaacctatccaaaatctttgaaataagatatgaatcttctccatcatgtccttcttcaccaacatgtcgagcaccctttntcacctaagagccatcatgctttttttgataaccaaaggatgcaatgactgaagcacctattaggaaggatctcttgattggaacatatggttcataatcaagagggatgttaaagtgttgaaggaagagggtgactagatgtggatatggcaatggggcattcaatcgcaatgccttatgcatgcgatatctaacaagatgtgcccaatcaatttgtagacctttatgaaaggcccacataacaatgagatc

SEQ ID NO: 64825 - DNA, 438 bp, Glycine max
agcttatgcgcatattttcctacgaacgtgttcttgcacaagacattctatttactaagaaaaatgcacccatatacaatctaggcaagcttcattacctagattatttacatgtactgtcaaggagtattttgtatttacatcacacacgcctccttggctaaatttacatacatgcatactcaaagcatttcggggcaccaaaaaatgcacatgcgctcatattggttgtctaatacctatacatatacacacttcacgatgaatcttgactacctactcaatatagtgctacatttcatgcctatttttgttcaagtctgtgctacctagagccgcatgcaaattcaaacatattattctttctgactaaaattgattaaaatagaaagatatattttagtatatggattctcacatacatgcacattttatttt

SEQ ID NO: 64826 - DNA, 457 bp, Glycine max
  unsure (1)..(457): unsure at all n locations
ntcanaaacattaanaacattttataacattccagtaagtattttggtcactgcccactggtaatcgattatagtgactgtaatcgattaccagagagtaaatatctcctttaaaaactttttgagaaaaaacctttggccattacttatgcatcatcaatttggaaacttctttctaagactctagagactaactttatcatttatcttggatttcttggattcttgttttggatcaaacttgagaaacacttttttgatgatgacaatatcctgaaatcaagataaactatatacaagttgatagcgtgtacacacaacccttactccccttatcttttggaatttttgcctaagttaatgatttctaacccatgttctctccccctttggcaacatcaaaaagcccacaacgtataaggaaaagaactatagaaaacaatcaatagtaaacaaa

SEQ ID NO: 64827 - DNA, 448 bp, Glycine max
  unsure (1)..(448): unsure at all n locations
gtcacctgcggctgcaagtcgcctgcagctgcagctngaagactctttacacggatgaatgttggtcagaaggacatttactacatcacaggagagagcaagaaggcagtggagaactctcccttcttggagagactcaagaagaagggctatgaagttcttttcatggtggatgcaattgatgagtatgctgttggacaactcaaggagtacgatggcaagaaattggtttcagctacaaaggaagggttgaagctagatgatgagactgaggaagagaaaaagaagaaagaggagaagaagaagtcatttgatgaactctgcaaggtcatcaaagacattctgggagacaaagtggagaagggtgtggctctgacagaattgttgattcccctcgctgtttggngactggtgaatattgatggagtgcacacattgagaggatcat

SEQ ID NO: 64828 - DNA, 453 bp, Glycine max
  unsure (1)..(453): unsure at all n locations
tgtggcaaagccttcagtatctagttaccttagctctgagatactggtagagcaagaagctaatagagtgcatggattacctgngcagcctctggtgaagttcaacaatatggtggttatatcactgtcaatgaaactcaaggaagagcactgttctattggttttttgaggccactcacaaactaaaacaaaaacctgttctcttatggctcaatgggggtactttttttttttttactaacccagctcttcatgtatatatttatattgcaatcgtttttatttagtgttcactctcatgactaatacatgataacttaatgaaaggtaagggtaatttctagtgaatttatcttttaaatcttataggctcggttaatctttatcttttgattntaacatgtattaaaaggaattgagagagatgaatttcatgatatattatggaaatg

SEQ ID NO: 64829 - DNA, 289 bp, Glycine max
  unsure (1)..(289): unsure at all n locations
catgcaagctcgctctttttttagttcttccaagatttcatcgntgtcaaccaagacctacaaaattgaaacaaacttaatcatacaatctattattaaaatgatagaaaatcaacaaaagaaagaggagctgaaacgggccaaatggaacattttcaaagcgtatggcatttcactttttcgctaacgagttcagaaagaatcataataccactgataaaaggaaggcaatgctttgtcacataatacaacaacacactttgtgtaccagaagctaaaattaaactct

SEQ ID NO: 64830 - DNA, 459 bp, Glycine max
ccgcttgttaggctgtaatttcattgcttaagaagtggtcggttctttctctttcatttgaatattctacacacacacacacatgtgcatactcaatcttctttcttagtttctttatgagaactcgcattttggtttccgattttacacattggattggaaacttagtttctataatctttctatttgcttgtttgtagaagatggcgccttaaggtgtagatcttttatttttttttgctttatatgctattttactgcccctagtctaaagggatattttcataaggtttgagagttagtcttttaatatgtgtaaggcggcataatataaaagattggtgaagagttaagagaataggatgatttctattactctaatttgaattacatggcctggaatgtgaaaatatattacgcttaataagaataaataagtgttcacgtgatgtgcatttg

SEQ ID NO: 64831 - DNA, 375 bp, Glycine max
atccgagaaaaaagatactctacgggagaagttgctcatagctgaggcagtcaagtccgagcgtgtcgatatactacgagactcgagcacacattccagtaaaaagctaatgtctatcgacaacgtttagagcttcggacgtaaattgcgagcggatagagatattacgggactgaatcagacattcgagaaaaaagctattgtcgtttgaatatgcacagaacttcagtattccattttgagcgactctgcttattacaagactcaatcagacatccgagtaacaatgttattgtcggtcgaatttgctcacaactatcgaaatcaatttcgagcgtcttgaattattaccggactcattctgcatccgagtaa

SEQ ID NO: 64832 - DNA, 370 bp, Glycine max
  unsure (1)..(370): unsure at all n locations
ntacatcagaatttagtaatgatccactaacctagaatttatagaacttattgtcattaacctatggaattaaagaacttaatggctgagtgtaactgaaattgtggcaaccaaaagtcactcccaacagccatcaagtcagccaccatttggtctcccaaaaggctaatgcctacgttgccaattgggcccttattacaacttgaactaaacctaactaaagcccttntagtttattaacccaaaacatatttttggtcagccaactttacaaggattgagccattatttagacaaactaaacactctaaaatngagacaaagtggtgccatttagtccttctccatttgggtcatgatacaactcaca

SEQ ID NO: 64833 - DNA, 193 bp, Glycine max
agtcttcacagaggccactgcctccctcgcccagtattatgatcagccgatgaggtgcttcaccttttgtgactctcatctatcacacatggtggaagaatatgaagagatcctccgatgccctctagggggaggaaaccatacctctgcacagggttctatccctcattacctagaagattcaagatagtct

SEQ ID NO: 64834 - DNA, 438 bp, Glycine max
cgcgtttggtacatagatgaagaagaagttcatagagattcatatatattcacggctcgtaaaggattgtatgagattgttgtttgaaagattgatttaaaatgcaaaacacagccttgcttttatagacttttcatgtctggtcaagaaggccattcagaagagttataacttttagaaaaacttaaaacccatttgaaaaagtcaaaacctttttgaagagttacatcttttgatttttcagaaacaatcactggtaatcaattacccaataagtgtaatcgattacacaaagcttttgagtgaaaggatgtgactcttcacatttaaatttgaatttcaacgttcaaggacactggtaatcgattaccaaaacattgtaatcgattacagccttttgaaaatatttggaacgttgtaaattcagtttgaaaactt

SEQ ID NO: 64835 - DNA, 344 bp, Glycine max
  unsure (1)..(344): unsure at all n locations
ttagcttttcgattcattctatgcacccataattgtccacattgtgtttagagcattttttctcggtttgtttactttttataccccctgttgacgtgcttaagccattatacttaagtgcgttctcgcttaacttaaaaataaaataaatttccaccgaacgtttgaattgtattatccattaactttggntaaaatcaattccgaccgttccgtcgtgccgtaaccacattggaaatcaaaaagaggtaaaaaataatataataatcacaaagacatctttagttaaataaagcgggaaatcaattggacattttctctttgggatttctcattcttaatcg

SEQ ID NO: 64836 - DNA, 442 bp, Glycine max
  unsure (1)..(442): unsure at all n locations
tgaagaagcatgtgagagatgcatctttattggctattgttccgtgtcaaagggctatagactttacaacttgaagaccaagaaagtgatcattagccgaggtgttgttttttatgaaaaagcctcttggaattggcaaaacgataatgttggggagaaaatagttccaacagtacttttaaagaaaagtccaacctcatcaaaaaatgagcaacaaattccgagcacaccatcaccaagctctagttctttatctccaagctcaacttcaataaaaatgaggagtttgagtgatatttataccaggtgcaattattgttttgtggaaccagaatattttgaagaagcaattaaggaagatgcttggtggaaggcaatgcaagaggaaatnggtctacaaggtgaagcataatctagatggttcaatccanaagaacaaagc

SEQ ID NO: 64837 - DNA, 426 bp, Glycine max
atctattcctggttcacgttgcttctgatttgtgtctgcaaattctcagttaagattatagaacccgtgattacttatataaatatatggaaccccaaattaggattgatactataagaactatattccatttgctagtatgacctgaagtgtccatggcatagcatgtttttttgacccaggtgacataacttgacctatcttagattgtcttcatcagtgcatgaaagtttgaactttctttcaatgtacatgttgttacctgaatcttgatatgggtcttgaagcccaaatcttgatcccacttcatgaacctggtctttgacagcaacatatttgggagttacctatacaaagacacacactagtaacacatgagttgcaggtgtgacagtgacggaatagtatagtatgatactatctggg

SEQ ID NO: 64838 - DNA, 289 bp, Glycine max
  unsure (1)..(289): unsure at all n locations
tgccagtgagtcatattggtaccacacccctctggtttcgactagaaatggcgaggggagaccccgacattactcacagcatatgtacctttgggttttaacttacagtggcctagcttagagtttcttttgtagggcttttgttcttttgtcctaaatttataatacaaagatctttcttcatttgttcctatgtctctacccattctcatccattngcatgtttatttctttggcgttaaaatgccagatccgacgacgagtccctcgaaggtactaatacctggga

SEQ ID NO: 64839 - DNA, 432 bp, Glycine max
  unsure (1)..(432): unsure at all n locations
gtacaaccactgatttacattgagtgttctcattgatgtgttctacatttgattttgcatgaatttctaattgtcataacatatgattcatggatatgatctacgcattatttctttctttacattttaagccactggccaaacagctatcccaatgtatattattttaccatttgcaagccctttgagccaaacacttgatattttgttggaacactaacctaggataaaagtttcctaccttacctcaggttaggagagaaaaggtattntgatggggatttctatcatttggtggctaatgtgatgtaaatgggtattaaaggaaattaaatatttataaaaaagaaacaaaataaatagaaaagaaaagagaaaaggaaaaacaagttctttatggataaataaatgtcttaatcatgtacaaaagtg

SEQ ID NO: 64840 - DNA, 403 bp, Glycine max
tgatgaatcaacattgattcaaggatgtttgacgataacaattatgatgataaaaatctcaaaagtcaagatcacttcatgataacaaagatgatgacattcaagaatgagttcaagattgagtcaagaacacttcagggaaaaagattcaagattcaaagattcaagaataatcacgatcaagattcaagactcaaagattcacgagtcaagagaagacttaatcatgataagtattaaaaagtttttcaaaacattgagtagcacaagaagttttcacaaaatcattaccaaagagttttactctctggtaatcgattactagattatagcaatcaattaccagaggttgtaaaacgttaagattttcaaaattcacaatgaagagtaacatctgttgatg

SEQ ID NO: 64841 - DNA, 503 bp, Glycine max
  unsure (1)..(503): unsure at all n locations
ttacgtgacctatgattactccagcttcttangacatgcanggttntataggcaattcataaaatatttctcanaggtcgccttaccacttattaatctgttgaataaagatgttgtttttgtgtttaatgaagagtgtatggatgcatttaatgatttgaaaactagattagtgtttaattacagcaccagattatggacaagaatttgagttgatgtgtgatgcaagtgattatgccgtaagtgcagtgcttggacaaaggaaaggaaaaaaaaaatcatgctatatactatgccggcaaggttctaaatgatgcacaggtaaactatgctaccacagaaaaagaaatgttggcaattgtttatgcacttgaaaagatcgatcttatttggtaggatcaagagttatcacttacatcgatcacacaactattaaatatttgctcaacaaggctgattccatacccagactgataagatggattctgctgttacaagaattt

SEQ ID NO: 64842 - DNA, 451 bp, Glycine max
  unsure (1)..(451): unsure at all n locations
ctgcaagctgccccatatagatatacaaagtatataacaagtacactcctcattctgctagctatcatgtccacagaaatccatacttgttaatagagattgtcaagtaataatcatatcacactatcacatgttatttgctactgcctacgggaaagctcgagcgagcaaactagcttggtgagtaatgctaactgtttgttgaaaacacccaagnaattcattacatttttacatcacttgacaatgagtgtcggatcaatgtcttttgttttgcgtgatagcacggatgcagatcaacttggacactacttcaaatagtataacgtgaatgatgataaaccaatcaataggtggataaactctgtcaatgcaaggtgttgcatattgcatgaacgcccaccacttgactcggaagtttattggtttctttaatcaactgatcacatga

SEQ ID NO: 64843 - DNA, 462 bp, Glycine max
  unsure (1)..(462): unsure at all n locations
tagtggcaactgaccacaaaacatgtgctttcaaatgctgatgcatcgcctatattcactgttaacaatttctcttcactcttgattattagattntagagagtatcctgcaaagtattagatgctaaacagaattagtagtgttttattcgttgcagcaaatgctatagcttgcgtggggaaaatgctcatttttctggttgactagtattaatccctagtaattgcagcattggcttccaattccaatgactttaatgcatcaataacatggtattcaatattatttttgtgggaacatatataattaaaaatttcaatttatgtcacgaatgtcatgtagtaaaatacaactgaggtacttggaggggaaaacactcgattacaaaaaataatcaacacaactgaagcaatacattaaaccatctacacactcttaaacaatactgaattactgagcac

SEQ ID NO: 64844 - DNA, 364 bp, Glycine max
agcttctcggtatattatgcacctgaatcatttcttcgggtgacaagttatgaccatttgaatttctcgagagcttccgttgatcaatttcgagcgtctctatatcttatgcgcttgaatcggacctccgagtgaatatattacaccatttgaattgctcaatagcttccactattcaatttctagcgtctcgatatattataccccctgattcggacctgcgagtgaaaagttgtgaccatatgaatatctcgagagctcccgttgttcaacttagagcgtctcgatattttatgtgcgtcaatcagacctccgagtgacaagttatgaccatctgaaattctctagagcttccgttgttcaa

SEQ ID NO: 64845 - DNA, 477 bp, Glycine max
  unsure (1)..(477): unsure at all n locations
tgatgcttcaagcggatgaaagaaagagggagagttagagagaggggggatctctaaattgaaggaataaaagagggggagaagtataactttgaagtgtgtctcataagactttcattcatcaaagttacaacaagtgttacacatgcttctatttatagactaggtagcttccttgagaagctctcttgagaaaacttccttgagaagcttctttgagaagacttccttgagaagctagagcttagctacacacacccctctcataactaagctcacctccttgagaagcttccttaagagaattcctaaagaagctagagcttatcaacacacacatctctaatagctaagctcacctccttgagatgagaagctagagcttagctacacaccctctataatagctaagctcacccccatgacanagaaaagatgaaaatacaaacagaaatgtccttactacaaagactactc

SEQ ID NO: 64846 - DNA, 439 bp, Glycine max
tcataattcaatttcgagcgtcttattatattacgggactcaatcagacattcgagcaaaacgttattgtcgtttggattaattcagagcttcagaattcaatttcgatcgtctcgatatattacgggtctcaatcagacatctgaggaaaaaagttattgtcgtttgaatttgctgagagcttcaacattcaatctggagcgtctcgatgtattacgggacttaatcagacatccgagttaaaagttattgttgtttgaatttgctgagagcttcaacattcaatctcgagcgtctcgatgttttacgggactcaatcagacatccgagtaaaaagttattgtcgtttgataagctgcgagcttcaacattcaatttcgagcgtctcgatgtattacgggactcaatcatacatccgagcaaatagtattgtcgttga

SEQ ID NO: 64847 - DNA, 407 bp, Glycine max
  unsure (1)..(407): unsure at all n locations
agcttgtacgaatttaataaacatcttcgactttggtgattcttgactccatctcattgaatcgcatgtccacttgtaactccaaagtatcatacctttcaccaacaaacgtttgaagaccatcgaacctatccaaaatcttttgaagaagaaaggaatcttctccaccatgtaaatgtccttcttcatcaacggatcgagcaccctttttcacccaagagccattatgctctgtttgataaccaaaggatgcaatcacaacagcacatattagaaaggatctcttgattggaacataatggtcanaatcacgagggatgttgaaatgttgaacgaagacggtgattangtgtggatatggcaatggagagattaatcgcatagccgtatgcttgccatatcgaact

SEQ ID NO: 64848 - DNA, 436 bp, Glycine max
  unsure (1)..(436): unsure at all n locations
ctttgacgctccacccanatctgttcttgacattacgcttctgtgagtcactctgcaaacctttatacacaggggcatgtgcttgctgaatagactcttgtccaaggttcggattgtggcttaccctgcatgcctgtcatttcaccatgccatatccatgtcgtataattcctctgaattccaccacacaacagatgttcccatatgtcatacaatatttgtcttgtaccattcaaacaattgatgccagggcaataatattttccatcttcatctagccgacctctttttgaagcaaattgtgagaacttctcgacaccttcctcatattttggactgatgcgactntcattcatccaactttgatccatctaacatatnactctctcatactcggtgagatgcacgatgcatgaatatctcacttttatgatac

SEQ ID NO: 64849 - DNA, 435 bp, Glycine max
  unsure (1)..(435): unsure at all n locations
agctnttggagcatgacaaattcaatctacttgtatttatgttcaaaggtcatggattatacttactgccacttgtacaatcctcttgcctatctttgtatatgccacaccaatcttaaagttgcttggccaagatgaaggaattgctgaacttgctggaagatattctatacaagtaattgttaggatatgggacgtggttatgccttttttctatggaaagatatggtagaaatgtatgatagaaatgatgggagtaggaagaggatgagttttcagaanattgacaccttaacttgaattgtgcttattagcttcttgacatacattacatagcttgctacaacttatgcatttatataggttacataggtgaattctacacacttctatactacttagtcctagagtcttctagactcatctatcatctac

SEQ ID NO: 64850 - DNA, 455 bp, Glycine max
taatcttaatgatcaatcataattcacaagacctcttctgtttgtctcatgatcatgcactgtagaaaatctaaaagttttcgcaagaggttcaaaataaatggggaaagctataatgaaatggccattcaccttgtcctcagactccttttcttcattttcattagcaggactgtccttgtttccttctgctgcatcttcctctcctatacgcttctcatcagcaagaatcttttcagtttcatttaccacttcctcaatcaccctatgaaattaacatcaaaaggaacaaataattaataactgccaattaaaaacatgggactcttggatgaaaattctaatctgaacttcattattattaaaattaagaattaaaattatgaatataaacaattgcttactctgcaatgtcatcattctgtgtaccccagatccctcgtcaaacccttccc

SEQ ID NO: 64851 - DNA, 401 bp, Glycine max
agcttgaagggtgttaaattaaaagtgtaatttatacttggggcaattatgtacaaatcaacatgaaacttggtcatcataaataacaggtctacgactaccaacagcaacattctagcaattgacattttatccttactcctcaatattgttcactatatagtcaaaacaacttcagcagtaaatatgaactaaatggcatatatttcaaacatactagcatgaacaaggaattttgtacctgaatattcaaataatgccacactggatctgactccggctccaaatccaacagtaacctcacagtattctcaagctacatgaagaacaagcaagtgttataatcaccctaacaaccagagaaacaagatcgctgcaatccatctcttacttaatcacca

SEQ ID NO: 64852 - DNA, 461 bp, Glycine max
  unsure (1)..(461): unsure at all n locations
nnttggagtaganacatgggaccaactcattntatttcttcaagaaagtcgtatctagtcaaggtctgagagaccatacaagtttcctagcgatttctaattatgtgggccattaagtctatcatatgctgacaatagccgagaagcccatgaatctcttcgggggcggagtaggtgtccgccatcgccttggccttggctaacaagcggngaagttcttgactcccgttcaaggtaaaagcaaaccgatccatccacatggttgcctcttggtgtaaagagtcgatcacccttcctctagcctctttttccgcgtatacttgagcatactcgtccgcgatcctatgctcgtgggccgtggctagacctaactcttcttggtacttggcgatgatagctagcatgttggtctncgtctcgcataaacgctgagacaagctccttttggaccttgaacaggc

SEQ ID NO: 64853 - DNA, 389 bp, Glycine max
  unsure (1)..(389): unsure at all n locations
cttatgcgcatatttttctacnatcgttctcttgcccaagacattctattaaccgaaaaaaaatgcacccatatacaatcaaggcagctttgttacctagattatntacacgtacttncatggtgtatgtgttacttacatcacacacatctccttggctaaattcacatgcatgcatactccaagcattttggggtaccaaaaatagcacatgtgcacatcttggtatttctaatacctatacatacacaaacttcatgatgaatcttgactatttacacaattaagggctacatttcatgccttttttcaagattttggtactaaaaccggatgcaaatcaaacatattttcctttgctgactaaaaatggatttaaaatatatata

SEQ ID NO: 64854 - DNA, 434 bp, Glycine max
  unsure (1)..(434): unsure at all n locations
tcaaactcgtttgtagaggacacatgatctaaaattcaattcatggcgctccgaacaaggttgagaatggagaattgcacaaagcaatcactacgcatagctccaaactcgaaggtggaggacacatgaacgaaaacgcaattcatgggctcccaaaaagggttgagaatggagaattgcactaaacaatcactacgcatggctccacactcgaaggtggaggacacatgaacgaaaacgcaattcatggggctccgaaaaaggggttgagaatggagaatngctctaagcaatcactacgcatggctccaaactcgaaggtggaggacgcatgaacgaaaactcaatttatggggctccgaaaaaggttgagaatggagaattgcactaatcaatcactacgcattgcttcaaactcgaaggtggggacacat

SEQ ID NO: 64855 - DNA, 389 bp, Glycine max
ttccccgggttattattcttggtctcgaacgcaaggagcaacccttaccattttctcttgcagtaattccactttccttacttgggctttactcttaaaaactaaccttgcttcattatttgctcaaaattctagcctatgctcacacagggtgcttctagatagatttcactctatgtccttaaatagtcatatctcattcattccaagacatcacaatagtttcacatcaccatgtatcataactgaggatggaaccatgaacaaattatacaacaacaacctaagatattcatggcatccacatcatcaatgacatgactcagaccaactcacaataatgcactatgtaatgaaatgccatggtcttttctctttttcatatgcat

SEQ ID NO: 64856 - DNA, 323 bp, Glycine max
  unsure (1)..(323): unsure at all n locations
tcttagttggaaagaagaaggaacctatcaatatattgctatatgctgatgaaactgtatntgtgggtgagattgcttgggagaatgtctatgctgtaaaggccctacttagaggctttgaactggcttctgggttaaagattaatattgctaaaagtcaatttgggatcataggaggtggacttaactgaggtttggaagcagctaataccctgaattgtagacaaatggattatccttttcactatttaggcatccctattggtgccaatccctctagcctggtttgggagcctctcattactaaattcanatataaatta

SEQ ID NO: 64857 - DNA, 486 bp, Glycine max
  unsure (1)..(486): unsure at all n locations
ttagctacgttgtgacactntgagtaagttatgaattaagtattgatttgatataaaaaagaatgatttcttctcaatatatattttatgaaaatcaaacggaaatcacccttacaaactcaactttgtatgttgagaattcaactacactcgtttgagtatttctttgagtaattgtaatatatagctagcggcgaaaggagataaatatttaggttaactgcactcataaattttaccgtgataaccgggtgccacgcatccatatcggagctttcatgcttctaaccaaaagacagattgtacatcgtggagcgatcatcaccttaaataatttgtccgctctctgtgaatgctgaacaccacatatttcagtatcattccatacgtaagtactcctttgtatatctagactatgcatgcatctttcattgcacattaattaaattcctcctagatctatcatcatggtcatggagcttcaca

SEQ ID NO: 64858 - DNA, 462 bp, Glycine max
  unsure (1)..(462): unsure at all n locations
gcttgtatcatgcaacgtaatgcatgcanggtcaccagttagntacatctgcttangaccattattctgatattccagttaattacacgccataatggtgcaataccattgtataaaaggagatcatattcatgaataaagcagagaaaaccattttccagtaatagtttagcgtagatatccttctcttacctctcgctcatatcaatcttggaatggtataattaagatcagttaagcgccggctgtgcggtgcatctcccattgataaattaagtttcttctccagggactccccccacaaaaatatagaacaaaaaacaacatacgacattgccaataaagtgagtaaaatttgtgcacgccaagcattccacagccacagtgacgacgccatatatattccgagtgagacctgatattcatatcgtatcgcgcttacttaggtataataaataactc

SEQ ID NO: 64859 - DNA, 433 bp, Glycine max
  unsure (1)..(433): unsure at all n locations
ccacagtgcgtcacanaacacttcacagaacgatgtttaagaacttccacttgagaacaccaatttactatcttccccttctgttccaactcctccctgcagcttagctcctcttcttctttttctctactgacccacaagaaaggacttccacaatctaataacgcaagtgcaagttcttccatttgcttcttcgacaacacgcaaaaactaccaaatgagacataaaccaccgacatctctggctttgagtccaaccattcaccacaatcattcgaggggcggaagatgtcaccgccaaatgaagtatcagtggggtctttcccgtccaagaaggccgagggaatcaacggcccgatggggatcatgttgaaattatcaacggccctcanagcctcatgttccaacgcttcanaggtgttgacaagtattc

SEQ ID NO: 64860 - DNA, 482 bp, Glycine max
  unsure (1)..(482): unsure at all n locations
gatcttaagtcacctgcggcatgcaagctngcacatgggcaagtgtacctcatgcttattaacagtagactcgaaagttcagatatcgaagccagatgaacaattatattctcagtttgtcaagtttattaaactaacagtaaagatgactaanaagaggattaaatatttttatgattntgatttttataagaaagaaaataaataaatataaagaaaggttttgagttataataagagtgactaggggttatgaatcattagtatcatttttccccaatcttagtcctaatgaaattccttccctggttaattatcgattcctaaaataaactaaagcctgtgatcaaggtcagaagatgttctttgcgtcaaatcattaccccaatgatcatggatctataaatttaagtcaaagggataaaatgattctagggatgaataattaaagattaactaatctttcagagattacccaaaca

SEQ ID NO: 64861 - DNA, 389 bp, Glycine max
  unsure (1)..(389): unsure at all n locations
caatgtcagaacagaagccacttatatnttactgctntattattgttatgacaagcagacctaaaatcttgtagttgatttacaggaccagtcgccagtcaaaatgattgaattagctaaaaacaaatttcgattgtgtttagattttagaaagacatcgcatagttggttatctattccttgttacattagatgataatattattcatccaaatgttatatgcaaatatttctcgtctagccatctgtttgtattgcatgggaccatacttccttaagttctaaattgttttgattgctttgagaaaatcagtacctccttatcatctaattgttggntaannngaanatcnanatgatactggataaatctgaagtcgtgtataaca

SEQ ID NO: 64862 - DNA, 403 bp, Glycine max
  unsure (1)..(403): unsure at all n locations
agcttagtatcttctgctacatgcgaatgcattctacaactttcacaatcgggtaggaataataaatgagtattaatttgaatgtcggatgcgccagtctgtgtattaacaaatcttccatacttcacattgttagtaattggctcagtcaacaggttctattggccaatgcaacaagctcgatccgtgtatataccacaaggtgaaacaaagttgaatatcaaaataagaagaaatgaagaagaaaagttgctgttttaagagacgtattccaactaatccattatgatagggataagagttaaaataaatgcatgaaaatttatatttagtcctcattgccatcattgtnaaaataaaaaatagagaaagaagcccaaatctccacccatatgcgtgacag

SEQ ID NO: 64863 - DNA, 74 bp, Glycine max
tccttatgctatttaagcctagtgttcgaaagtcgttgttatcctaggtgcattaattagttcatatgagacac

SEQ ID NO: 64864 - DNA, 412 bp, Glycine max
  unsure (1)..(412): unsure at all n locations
agctntgtgggatttgtgatagtgattntgttttatatgttgatgatatgaaaagtactactggatttgtattttttatgggtgattgtgtttttacatggagttctaagaagcaaggcattgtgacactttttacttgtgaagtcgagtatatagctacaacttcttgcacatgtcatgccatttggctaagaagaattgtggaagaacttcagttgttgcaaaaggaaagcacaaagatctatgttgataatagatctgcacaagagcttgccaagaatccggtgttccatgaacgaagtaagcatatagatacaatgtatcattttattagagagtgcattacaaagaaagaagtagagttgactcatgtgagaactcaagatcaagttgcggatattttcaccaagtc

SEQ ID NO: 64865 - DNA, 423 bp, Glycine max
  unsure (1)..(423): unsure at all n locations
ngttaataattttctttgccgcataaatagtaagaggatttcttgctttttcaaatgcgtcatttaacaaatccaatatcatagtcattgccttatcgcttaatccacacaaaacttttatatgatataatttgattataaattctagttttgtgtacttgcttccttcatacaatgtttggctcccgtcctttagaagctcataanagccattatgatcttctcttggttcatcatttactatttcatcttcatttaatggttgtgatgcacctacattagggtcatgttgcctatattgttcaaatgcgtcattgatcatcattntccatttttgaggttgaacaccactatcttggaaaacatcttccacttgagaagattctaatgcttgcttttcaccatgaagatcccatataacat

SEQ ID NO: 64866 - DNA, 435 bp, Glycine max
  unsure (1)..(435): unsure at all n locations
agctgtgctgatttatttttcgccgatgaattgctctaagngggtctgaaaagaggcgaatttgatgatcctgctttgatgaatgagaaaactggggcaaatgaagaaggtgagaataagggagaaacccatgttgtgactgccattcctatacgaccaagtttcccaccaacccaacaatgtcattactcagccaataacaacctttctctttacccaccacccagttatccacaaaggccatccctaaatcaaccacaaaacccacctaccacacaaccaatgctaaacaccacctttagcacgaaccaaaacaccaaccaagaaatgaattttgcagcaaaaaagcctatagaattcacccccaattccgtgtcctatgctgacttgctcccgtatctacttgataattaatgggagccatacccctgatga

SEQ ID NO: 64867 - DNA, 426 bp, Glycine max
  unsure (1)..(426): unsure at all n locations
ntgagccaaaatcctgactcactatgaaccttgacccattgtgagaatgtcaatccttaccctcggaagcaaaaaataaaggaaagaatgaaaatttccaatcaaaggaaaaaaagagaggaaaggaaattcctaaccaaagagtgggagaaagcaaaaaagaaaagaaagaaaattcccaatcaaagaatgggagaaagaatgggagaaagtaaagaaagaaaagaagaaagctcctggtcaaaggaaccagaagaaatgtgcagagaggtctttataccggacagtatctgaacaatacaaaattgtcaccaaatgaacaaaaagaatgaaaggaaaccatgacctaaaatggtcttctccctttaattgccaaccagaatcagtgcgctagcgacttgttcgcctcgcgcaaaaccaaaacag

SEQ ID NO: 64868 - DNA, 399 bp, Glycine max
  unsure (1)..(399): unsure at all n locations
agcttcttcactgttcctagtctgccatctgttacactcccttgtacactgttccaaaccctccttttcctataactctgtcctctgagaagctgctagttgctttcagaatgtcggcatgtgtgaaaactgtcttgttcagacggataaccttaactgtgtcagacatccatgatgaggatccggagctgctggaatcatgccattgntttgtatccctcaagaggtatcttggttcctctgaagggcttttcaccgatacacagactatgatcgtaagaagcccgaatactggcaaaaccagtgttattactatacacaccatatacacagacaggcttgtggacttttatgctctttggagagtggtgttgttgattggtacgttatccataactc

SEQ ID NO: 64869 - DNA, 453 bp, Glycine max
  unsure (1)..(453): unsure at all n locations
tannaatacagttacttggtgcttntagctnttttcttctatcagaattataatttcacctcacaaaactaagttggctttttgaagtaaatatttattacagagattactgtggtgaaacttcaattccaatatgaaaacaacacgaaaattacctaaaaaaaactgcctcaagttttgtcttatacaaaaaatccaacagttcagggcaaaaaaacctagcacaaatttgatttatgcatacaatttaatatttctactttctacctaacagcaagcctggagaattacaccttaataatcaaaagcaaatagtataacaaaagtcaaaggctctaactttaggggaacgagaatcgtgttattgacgccccactaattaaaacaaagaattgacgatatatgatagaaacagttaattcctgaaggaaaaaaaaatcagaaggtattatt

SEQ ID NO: 64870 - DNA, 300 bp, Glycine max
agcttaccggtggtgctgacccatcaactgtccaagcccttttaggctggtgattcctacgctcttgaccttgacttgatagaacctctttttaagtgaaggcttttgacttgatcccatgttttactaaagtgaaacaaaacccagcgcgaatcagaactccaacatctatcatgggtggaatagatgaatgaagaaatgcatatgacacagatgcaatttatgaatacgggagcccgaggaattgtctccttcttagatacaacggcttggggtagcaaagcgcccaatgtatgtatt

SEQ ID NO: 64871 - DNA, 338 bp, Glycine max
  unsure (1)..(338): unsure at all n locations
tgagatgaggaagtgttgaatggtgaaacttcctgcttttattgttgaccacagagtggtacctggagatatgtcacggnggtcaggagaccttggggacgtcaggtggggtgctattgcccaaaaccaagcttgaccaatcccgacccaacccgggcatagtcggtcagtgagaacctgtgatgtacctaagcaggcgagctcctggcagtcaacagataaaaggaacaaagaccacacaccanggaggcttatggtggctggccagctgtgaaacttgaatgatatgtgagatatggtctctggtaatcgattaccaagggtgggtaatcgattac

SEQ ID NO: 64872 - DNA, 416 bp, Glycine max
  unsure (1)..(416): unsure at all n locations
agctagccaccttgctcgcccaggcgagctatgttgcttcctccataagtggtgccttctggaagaacttcctggaaggcccgagtgggcctggttgctatttgcaccccctgttttctaaatacacccctgcctttttttgctgattctttttccgtaacgttacagaactttacgaattccgtaacgatacttgnttcccttccgtaatgttatggaaccttatggattacgtaatcatcccttttttggctttcggaatgttacggaacctcacggattgtgtaacaatgcttccttttgatttccgacatgttacagaacttcacggatcgtgcaacaatgctctcttttgacttctggcatgttatggaacttcacgtattgagcaacaatgggtgccaagtacctcgaag

SEQ ID NO: 64873 - DNA, 432 bp, Glycine max
  unsure (1)..(432): unsure at all n locations
tagctatgccttcttctatgtgaccaagctttattaaaagtgaaacctcttgttcattgtatacaagtttatcaacctaggaaggcatatttggaatcaagttatatatcatgtattagttacatttatcaaattccccaggttaataaaactaaaacatacttacaattntagattcttttttgtgcaactccttcagagctctctcaagaaactcacattcctctaacaatgagatctgngcaataatatttactacagagaaacaccacagggaaaaataataacagctgtcacaccatattaagatttcatattctggaacattcaacagtagcatggacagaaaagagaattgtattcaacanatgtaatttgaccatatatcaaactacaaaagtgacaaaaaaaatctaattgatttataatgac

SEQ ID NO: 64874 - DNA, 372 bp, Glycine max
  unsure (1)..(372): unsure at all n locations
tactaggagctccttatacctccattaattttcagccttaccttctctgccattgttgtttctttatttttctccatgtatctccccacatgtcttgtgcagaatgttgttaacatgattttttataatttccactgctgcaactccatgactgaaaatcatcattgaacgaccttattgaagctcaaagatccagcctccatagaagattctcaagcaagctttcatcaagtggtatcagagcacaagagcttcaactaggtgctccttaaacctccatttattttcagccttaccttctcctgcattgntgtttctttatttgtctccatgtatctccccacatgtcttgtgcagaatgttgttaacatg

SEQ ID NO: 64875 - DNA, 452 bp, Glycine max
  unsure (1)..(452): unsure at all n locations
taatatatctttaaaaaaacagaataactcccaccccactcncattatacagggacaatacaattattttataatttaacactattatgatttaattctaaattttatagatgaaaattgtatcttttatgactatataatgtcagggagcaatatgctaattggaaggaagaatgtcgtaagttgtttcctctcataggaagtggtagatttatcacagcacctgtaattactgaagatggtagacaggttcaagatcccttggttttgttagaaaataatccaaataatggattggttatacccacggaggttaccactaatgatacaaataacttaaaaaaggtgacagacaaaggagtaattcaatggatgttaacgctccatcaaataggtttgtgaatatttttggttctcaatgcactataatatatttctcacactaaataatg

SEQ ID NO: 64876 - DNA, 305 bp, Glycine max
ctataataagctccctatctattgtcttcaatgtgaataggggccattttatggaatatcatgctgctcaataatcaaattccagtgtcttgttagggaagtctaatgtaaaatatttatattatatagtgggccctttgccctcggttcttgaaggaatacatacatatgatgtaaatttgttgcgtaatggatttcaaaaccacattgaactcgtgactcatggtaataattaagcttgaacataatacctaagagtactagcccaaatttattagtgacagtaggcttatgtgctacctaat

SEQ ID NO: 64877 - DNA, 436 bp, Glycine max
  unsure (1)..(436): unsure at all n locations
tcagcaattacaccttggacatttcaccaatatgaattattattagtaaaagggattagtgaggaattaccttagaaacttcatcaacaacttcgttggagattntggttcctccaaatgaattgatgatatttccaaagtcattaaggccatggagattccattcccaatagcaccaacagaccccataaacatcaaaaaatgatccaaaggatcatcaaatgagaaaagcttctataagggcactgtttttgcagattcatctttggcctcactgttctttgagtctttcttgctgttaggatctccattcaagtcaatatcctctgccattttcttcattgaagactctacacacccttatactaattagtaatcactgtaaacggaaaaaacctgcagaaaatgcattacaggttcaagttagtaacacaca

SEQ ID NO: 64878 - DNA, 356 bp, Glycine max
  unsure (1)..(356): unsure at all n locations
ggcgtgtggagcttctatggagggtggatctttgagctctaatgtagttctttaatggtgattctccaccatggagatgcagcggaagacaaataagaagaggtgagaggaggcgccatccactanggaataagccatggaagaaggagcttcaccaccaagatgagtgtcataccacaattttgtccggggactattgcttgatggcatacaacctttgattgaccgcttcgaggtacttggcaccctttgttgcacaatatgtgaagtcccgagacgtgtcgggaatcaaaaggaagcgtggttacgcaatccgtgaaatttctttatgtgacggaaaccacaaggaagtattg

SEQ ID NO: 64879 - DNA, 464 bp, Glycine max
  unsure (1)..(464): unsure at all n locations
ttctagtttgatgattgtttcacatgctttgcttttaggacatttatgaanatgacaagaaagatggataagatggagactaggatgaaaatgcacaagaggaggatgaagaagatattattgatgatgattataatcaggttccactataacctctactttaatatgtaaattctgccattctatgactcgagatggttctttctcattctcatctttatgatgtagtaataatacattgtttattctcaaaaacttacccagaaaaattttcatatggaattgaagaaactatgaactaaaccttccagctgtatggttactgtgtctatatacaaacattctgtgaatatgtctggggtagcatgacttcaaactttatatttaaatagaatactgaaacaccttaattttaagtgatatggggcagtttttactgtgcagaaacatcttattttcccctc

SEQ ID NO: 64880 - DNA, 292 bp, Glycine max
aaaaggggggcgcacaaacacgggacataaggggagaatgcaaaaaaagagtggaatcaagacaaacggaaaagggaaaggaacaaggaggacaaacagggagaagggaagctagaaaaaggagaaaacagaagaaggggtagagagaggaaaaaaaaaaaggaaaagggaggggttcgcgaacataagaggggggagaaaaaggctaaaagagaagagaaaagggcaggaagaagaaggggaacaaacagtagaaaaaaggaaaaggaatgggaagaaacacaggaaaaaa

SEQ ID NO: 64881 - DNA, 322 bp, Glycine max
ctgcagctatgctgaaacatctacaacagaccttctatatctatcagcaaaatcagccacaatgagattattatgacctcttcagcaacaggtacaatcccgaatggaggaatcatcccaacctttgatggttgaatctttcacaacagcagtagcaacaacaacaaccttattttaaaatgctgctggcccaagcagaccatactttcctccaccaatccagcagcaacaacaacaaccgccccagatacagtagatagttgatgccccttcgcaacccttccttgaagaacttgtgaggaacatgactatgcagaacatg

SEQ ID NO: 64882 - DNA, 306 bp, Glycine max
  unsure (1)..(306): unsure at all n locations
tttacaatattnccggaatcgatgaccagtgtgcttgaacgttgaaattcaaattcaaatgtgaagagtcacattctttcacaaaaaaagctttgtgtaatcgattacacttatttggtgatcgattaccagtgatagtttctgaacaaatcaaaagatgtgactcttcaaatagtttttgactctttcatattggtgttaagcttatttctaaaagtcataactgttctaatggttctcttgaccagacatgaagaggctattaagcaaggccttggttagcattcacatttattcatctataca

SEQ ID NO: 64883 - DNA, 354 bp, Glycine max
  unsure (1)..(354): unsure at all n locations
taatcaagtaatatagacggatcatgtatttgtaataataattntcttataagaatattacgataaagtgtaagagtattaataattataatacaattaataaaaaaatttgtaactattgatcactctaaaacatatcatgatttaaaaataaaaattatagcctgatctttagagccttgatattaataaaattgaaagaattttcactttgaatatagataaattttcttgaatcgatcttcggtggcacccctctaaacaaaaaatattaagctaagataacaaaaatgcattttatagtgctctaaatatttatgcaccaaagcatctgttctgttggaccatacaaac

SEQ ID NO: 64884 - DNA, 486 bp, Glycine max
  unsure (1)..(486): unsure at all n locations
gtctaaaagagattgtggaggcaaacattctaacttattctgatatatacttattttccaaaatctcgttgagtcgtggttatagcattntctagctgtctcgcttgaaattactttgattacaaacttggagtgagtgagaatcattaccatgttttctttgtcgggggacgtacgttgtaaaagaccaacaaccactagctaccacgttaattttgtttagcagtagcgatcaagttgctaaattaggtgtgatgattggtgagaataaaaaaaaaaaatagttgattatgaagcaagaataaagctttcaactttcatgtcacggcaagtgatggatgaacttgacgaatctttgaccaacatgcatcttactcgaacatagtaattgatgttcggtcaaggactccagtcattgtgttgctgagatcacttgagttaaacgtgcctaaacatgtatgtatattaaattattataatagaaaa

SEQ ID NO: 64885 - DNA, 437 bp, Glycine max
  unsure (1)..(437): unsure at all n locations
agctngngtgatgttgcgcgtactgatgggtattatgaggtgtttgctggagtttgacccatgcgggtgttgaagagacggcatgggcctctccttccttcctttttgcccctgtagccccgattcttttgagcgtcacgtgtatggaggaaacgtaatcaaactttcctctcttcaatcccacctcgattctttccccggcaaacaccagatccgcaaagctggacggcatgtaacccactagcttctcatagtagaacactggcagagtgtctaccatcatggtgatcatctctctctcaaccatgggaggagctacttgtgccgccaaatccctccatcgctgcgcatatattttataggttcaccctctttcctatacatattctgcagttgagtacgggcaggagccatatcannaatgtactgatactgcc

SEQ ID NO: 64886 - DNA, 509 bp, Glycine max
  unsure (1)..(509): unsure at all n locations
aaaactanagcttgacaacatcngcagaaagaacatatataggaccatattcattattaaaatactcctttccaagcaaaagggacaatggctcatacctacaagattctatcaggatgagtatgccgtaagcaaaagcaagtcaaatgctggttataagtcgaggccttagaatgtaacaatagtggtgaagctagataggacactacattagcatttctgaccgaaaaagataagggtgatgaatagtgataattaagacctaaaaaacatggcaataagtgtcacgttaaaaagtatcaaattgtttctggtttgtcccttatgataataacttgggggatcaagtgtacatccaanaaccaagtcttatcctattaagtgggattaagtcaaaaaagatcaatcccaacatcagactctctcataaccacaaaagataacacattggcaaatttttatttatatgatgagattaccagcatatgattatagttcaagaagatatt

SEQ ID NO: 64887 - DNA, 298 bp, Glycine max
atatggtgtaaagatgtgtgcccgtgatgatagaggtcagtttgtcattgccaaaactttttgggctcatggggatatccatgcggttaaagctgaagctattagtttactggatgctattcagtggttgagagctataggctttaatgcagtctccattgagatggattgcaagccagtagttgatagtgtgatcagtaacccggtccctcaaactgagttaggggatattcttttggctggtaagcaaagacttttggctttttttttttctttttctaaactctggttaagttta

SEQ ID NO: 64888 - DNA, 343 bp, Glycine max
  unsure (1)..(343): unsure at all n locations
ctacttcagnttcaaatactggcctcactagttcagccactggtgttaataactctagtgtagattccaattctgttggttcttcctctagtactgctaacctttggcatgctaggttaggtcaccctaatggtcatgtaatgaaacttgtcctcaatcattgtaacatttctccataaaataaaaatttcacaggtgtttgttcttcctgctgtatgggaaaatctcagagattaccatttcgcccttttgtttctgttactcccctttggagcttattttcacatatttatggggaccctctcatntgactctatatgttggtcataaatattatgtctct

SEQ ID NO: 64889 - DNA, 450 bp, Glycine max
  unsure (1)..(450): unsure at all n locations
atgtgttgtgaagttacgtgggaaggagtagtgctttgatgagccccacccaagcttgacgacaaatctttcaagtggtacaaaaatggtgatgtgaacccaatcccatatttccttctattcacatctcaacatgggacccacccttatgcttagcatcaccacaattcttttcgtttcattaacatttcttaaccatacagccaaaggaaacgaacagacacatttcatactcttgattntggcttgngatctttttccatacacggaggaaaatgtataaaanataatcataaaagctgtaaataatatttatgccctacacatgccaccagaaccttctatggattgatgttgcattctcgtaaatacacaagatngtagtcaacatactttgtccaataaccttcggaacttgggaatacttatctncaccaacgggtcatgttt

SEQ ID NO: 64890 - DNA, 353 bp, Glycine max
  unsure (1)..(353): unsure at all n locations
aagaacaattcacttgtcctcaagtgacaaatacagtggccaatcaaaagaaaatggtgtttgattcatcaaggacatcaaccatatcaactgaataccatggaatgcttaaatcaattacttctcacaagcatgcagttttttcaaagataagagcacaagtattagagtcacaactgaaataagctagtaagcatgacaaanatcaaggaaggatcatcaaccanaacctcacagtcatttgttcactcanactcaagtgtttaggcttattccatcatatataaccaacataagttccaaccttngcatttcatctcctattatacaacaatgaacacacaaaaatgaat

SEQ ID NO: 64891 - DNA, 378 bp, Glycine max
accagggagatgcgtcagatgacaaccgcgaagaggtgagaggaggctccatccactatggaattatccatggaagaaggagctccaccaccaagatgagccttggataataagcttagagaggatgcttcgatggaggaaaagaaagaggatgagaaagagagagggggaagcatgaaatagaatgagaaaaagggagagaagttcaactttgatttgtgtctcacaacactctcattcttctatgtacaacaagagttacacatgcttctatttatagtctacgtagctttcttgagaagtcttttgaaacactttcttggaagcttctttggaaacacgctgagaagctgagcttactacacacacctctttata

SEQ ID NO: 64892 - DNA, 292 bp, Glycine max
  unsure (1)..(292): unsure at all n locations
ctcagcttacatcctccttcatttccacaccagatngcaagataaagctgtttgtggtttttaggagcctacctgtacctggtgggactctcaatttcatgacagggtgtacttctcctcactagagatctatggttgctgggctcttgccagctatcccgtgaatctctactagggtatggctgtagggtagcatctccttagagaaagtgtacaaactatgctaaacttgacacgcgttaaaggaacaagcacagcggccatccacagggttcaataatgaggtaatgag

SEQ ID NO: 64893 - DNA, 447 bp, Glycine max
  unsure (1)..(447): unsure at all n locations
gaaactcagcttcaaaaagagatcaactngatgttctatgcttcttgaaggtgtcttgttcattgatgaatctcctcgngaaagacatctgtaaattcctgcaataaaggttgaacactatgagaaacatatatagataactgattagaattatcactctctctctcttgtgtatcactcttttcctcgagtgtatcactctcctttttcatattcctttgtggagccacactatttgctttctcttattctctcttttctctcattctgattaggtcatcacacacttccctaggggagataggtttaagcgtcatctacgaatatttggctattcggctgtgggctcttctttgttacggttcaacaaatgttgcatttgtgtaggtcacgcattcataaataaacgctgagattcttcagttgatgaatacaccacattgcact

SEQ ID NO: 64894 - DNA, 466 bp, Glycine max
  unsure (1)..(466): unsure at all n locations
gcttgcagtagatgccactctactctaaatttttttatgatatgttaacaaggaagtataaatatattcatcaggaaaacatcacagtggaaggaaattgcaatgctatgatccagaagatccttccacccaagcataaagatcctgggagtgtaactattccttgttcaattggagaagtcaatgagggaaaagctcttattgacttgggagccagtatcaatttgatgccactctccatgtgcagaagattgngagagctggaaataatgcccattcgaatgactntacaattagatgactgctccattactaggccatatggagtatatgaagaaattttggtcagagtaaaacattntatcttcccgacagactttgtggtaatggatatctctaaagatactaacatccctataatattgggaaggccattcatgttgaccgcaagctgcatagttgatat

SEQ ID NO: 64895 - DNA, 494 bp, Glycine max
  unsure (1)..(494): unsure at all n locations
ggtatcttccactgattgtgcattaatcttctcttccacttcatgtatgctataggatacgaacaatcgtatgaagattggtatagttgaagagagacatggcctctatcacctcataccagaccaaacagacaaagccatttgctcgaccattattcaccctaaatgcaatattatcccaatagatctttggcatttttgaatgggccatctatcaacagaaagactgcaatgtatgaaaccttattatcccattatgagaaatgataaaaactttgtgtgtaatacatgtcactatgcgaaacacaagaagcttcctttntcctcgagcatttcacatgcatcacatacttttgatttacttcacatggatatatggggtccttggtcaaaaccatctatgcacggtcacaagtatttcttaactattggtgatgatcattcgagattcacgtggataccatctatgcacactaagacccgaacacaacaca

SEQ ID NO: 64896 - DNA, 83 bp, Glycine max
gcttgccgccactgagtattccgactatgctcttgtgtgtttgaacaagctacataaggagagagcaataaatgtatgatccc

SEQ ID NO: 64897 - DNA, 434 bp, Glycine max
ctcaagctcgaagacaagactatacgagggatcttccttgggtatagcaatatcttattggctactgtgtctacaacttgcaaactaagaaactcgtcatcagtcgagatgttgaagttgatgaatatgcttcatggaattgggatgaagaaaaagtggagaagaacgttcttatacccgcttaactacctcaagaagaatatgatgaagaagatccaggtgaaccaccttcacctacatcacatcaacaagatcaagaactatcatcaccagagtctactccagaacgagtaagatctttggtggacatatatgaaacttggtactgggccatacttgaacctggaagctttgaagaagcgtcatccaggaagtatgggtcaggcaatggaagaagaatacagatgatcgagaaaagcacacatgggagtagt

SEQ ID NO: 64898 - DNA, 486 bp, Glycine max
actatagcacactcaagcctgttggagtagaaacatgggagtcaactcatttatttcatataattatgtcgtatccagtcaaggtctgagagaccatacaagtttcctaacgatttctaattatgtgggccattaagtctatcatatgctgacaatagccgagaagcccatgaatctcttcggtggtggagtaagtgtctgccatcgccttggccttggctaacaagcggggaagttcttgactcccgttcaaggtaagagcaaaccgagccatccacatggttgcctcttggtgtaaagagtcgatcacccttcctctagcctcttttttcgcatatacttgagcatactcatccgcgattctatgctcgtgggccgcggctagacctaactcttcttggtacttggcgatgatagctagcatgttggtctccgtctcgcatatacgctgagacaaagcttctttggaccctgaacaggcaacta

SEQ ID NO: 64899 - DNA, 458 bp, Glycine max
taagaacaatgatggcgtagattggagggtcaaaaggagtgttgtatatttgtgacgttgaaagaaacttgtttgcattcaagttttgattggaagcttattgtcatgagtgatttgcaaaatgatgctacgccaatggaggttgatctttccttatgccaattatgggtgtgggtttattatctccttataaaatatcacacacaaatgatgcttgaaaccattggtaaatgaattagtgggtgttttggatgggatccatcgagggagaataggctgggaagatcaacgagggttaaggtggttgtgaatatctataagccactcagaaggggatgatgataaagatcgaacggaaagaagtgaggtgatgcaatcccatcctcaaggaaaatagatagaagactccaagaagattgggcatagatgcaagagagagcctaggattctcatgagcc

SEQ ID NO: 64900 - DNA, 484 bp, Glycine max
  unsure (1)..(484): unsure at all n locations
tgcaagctaacagcaataaacagcatcanagtattttttagatttactcacattaactaccacaagcacgattgacagtgaaaaatcataagatatgatttaatgcctaattgcacacctgacatccagtagatcaactctaactcatgatgataagaaaggaaacatgctcaacaacaatttcattacctttctctaatgaaagctgaattgatctcttctctaactcaacagcatgcttgctaagttcaactgaggacagggagcgaagcactgccaaaggatgagatatcagctatataaaatatcaagaacttcataagatagcatttgagggatattttaaggttcctggaatactttggatatattctctgatctgattggccaatccctcaaaacatctgcagttgtaggatcgctcttccagtgcaaattattaatccttaggataccaatggagtacgccagaaaagctgcacat

SEQ ID NO: 64901 - DNA, 435 bp, Glycine max
  unsure (1)..(435): unsure at all n locations
taagagcaggatggaggtggatgaccatatttggatntttgatgttcatattntgacctttaagggtggtgggctagttggggttgggatggatgttggacccacttgctcatgtctggaatattgtagcaaattgaagaatcacagcaagcttagattgagaataacataatccttagtaacaatttatctcatgtacaatttgaattatcctacaaccaggaaccagaatcttgatatttcttttctaacctcagataactctatttccccgtccttcaagaaacttttaatcaacaaaaaaaagaagctagagtttcagaattctggcttcatttgatcaagagcacaaactgccttagaatctgaatcttgcattagctttgctcgaatagcaactaaagcacgttcagcattcaatttaaagctttcatg

SEQ ID NO: 64902 - DNA, 259 bp, Glycine max
ctgacgacatacaagagcaccaattgttagggtaataacctatatctggcttctacgtcttcagcctgcacaatgaacaaatgattggggaataacaccattgtaagaggggaatattattattctcatatgcggcatggattattacattgctctttacaatgcaattaccactaacatatctgtataatttctctcctagaagaatctaacaacgagtttgatattcatgactgtctctgatggaagcacctctaca

SEQ ID NO: 64903 - DNA, 498 bp, Glycine max
ctcaagctttgcggatgtggtcttcgccagtgaaaggatcgatatgtgtctttatgaggcttatttaatcatcctgctatgatgaatgagaaaaatggagcaaatgaacatgttgacgatgagggagaaacccatgctatgactgccattcctatattgccaagcttaccaccaacccaacaatgtcattacttagccaataacaacccttctccttacctaccacccagttattcataaaggccatccctaaatcaaccacaaagccctccttccacacaaccaatgctaatcaccacctttagcacacaccaaaacaccatccaacatatgaattttgcagcgaacaagcctatagaattcaccccaattccggtgtcctatgctgacttgctcccatatccacttgataattcaatggtagacataaccccaggcaaggttcatcaacctccatttttctgaggatacttcttgaacacaacatgagcatatcat

SEQ ID NO: 64904 - DNA, 386 bp, Glycine max
  unsure (1)..(386): unsure at all n locations
agcttctaaggcgcggaggaggtcggagcgttcttctttntccanagtgnggattgggacgaataagggtcttcgcgcgtcccccattttggaagaggagaaggatttgatggtttggggagataagggcttttgtttntgtttttgggtgagtgaggagttgagaatggctaacgagcttgaagattggggttttgaaagacagggaagagaggtgcanaggagcctgcggaacatggagcactcgcttgtccacatgagatagatagattgatgagaagaggtttaagtaaataatattcaagaccatactttctacgtctttattattatactcatacagctattcttctaacacatccaaattgatctctttcattggtgat

SEQ ID NO: 64905 - DNA, 447 bp, Glycine max
  unsure (1)..(447): unsure at all n locations
tatcagttctagaacaacgtgcaataaataccacaacatttctttctataagaagagagccactgcctatagttgtgattaacacatgtgcttacctcanaaggagtactggcgaaactctactaagcactttccaggttcattctccagcatctgatgtataataaaaagttgtcacatcatcagaatcttcattttccagtgagaacacatcttgaaactgaaaatgctcttgtggcagtgaggaaaaaaaccgttgaagaataataaaaagaaaatacttgaactttttaccagggaggtggaggaactcgccgaactcgtagttgtcgggcttgagcttgatctatacgagctggaggacgagggggcggcatgtgcaaatgtcgntgccgcgtgggaagaaatctccgccgacgagggcttcgaggatgctggatttgcact

SEQ ID NO: 64906 - DNA, 488 bp, Glycine max
  unsure (1)..(488): unsure at all n locations
agctatcgtgacatctgaactcgatgtatggttagtctccatgtggngttagctgaaacatggatgctagggtggcaagcacattagccatctgattttcctctctaggaatgtggtggaaagagacctcatcaagaactcaatcagtttcttgatgtaggcctgatagggtatcaacttgtgatccctagtttcccattctcccctcagctggcgaattaccaaggctgagtctctgtacactttaagcaatttgacattaaagtcaattgccacttggattccgagggcacatgcctcatactcagccatattattcgtgcaatcgaagcccaatcgggccgtgaagggaatgcattggtgttntgcactccgagatactacttgtttgtgtggatgcaaaatctaccagcatgtgcaccaggttgtcaagtaaataattaaaacggtgtgaaccaagtatcaaactcanggaacttgtcatttgt

SEQ ID NO: 64907 - DNA, 485 bp, Glycine max
  unsure (1)..(485): unsure at all n locations
ggcctaattcacctganattgagagaaaatgattgttaaatactataaatggaagtactaagtatttattatctatgcttaacaaaagatacttataacactacaaaataaccataaattggaagagtttgatacaacttacacaagctttatacacaaaagttagtcgtatttaccggctaacaactcccccaaatttacagttttgcttgtcctcaagcaaaaagagaacagctcacttgtcctcaagtgacaataacatgcagtgactatgtacaatggtgtatgaaacaaatgttactgattgcatgataatagaatgaagcattctgtactcatcacttgtctttcacanaatatgcaactattcaaagagaagaataaaatggtaagtgtactattagatcgaagtaatcataagatagatattaaggaaagtagcttataccacagtttcacgactactggttcactcaagcacaagt

SEQ ID NO: 64908 - DNA, 477 bp, Glycine max
  unsure (1)..(477): unsure at all n locations
agcttcaaggctaagtcttcatgtttcttcctctatctcntaacaatctccccccttttggctttgatgatgccaaacttgattttgccattgagtatatntgaagagtctcaagagtagagacttttctttttcttagccatacctaanagtttcttaacactcagagaagtatcaattcatatcatcatcatcattatcatcaggtaaagttatatatgaatgtatgatgcaatgctaatgcgatatattctcccctttgcacaatgcttatgcaatataaagaacaaatgctaatataatgcactatgctatgctaatacatcttctcccccttttcgcattaacaaggccaaaaaatattcatagaatcaaaacaaacagaatatgaagggaagaagacatagcatntcattcatataaaaattntacaacatantcatcaaactactaaatgatatcataacttnttaaaac

SEQ ID NO: 64909 - DNA, 302 bp, Glycine max
  unsure (1)..(302): unsure at all n locations
tctcatttgatcttncatcactagaccacttttttggccctgctttatgtaaaagcattattgccctacatctaagatttagattcttattctatcatttaaagaggtgcatacataaacacctctaaaacgtggttaactaagataatatgtccaatatgaggcctgtatttctacatgctgtacttcacttatatagacagaacagnttagttggtttaaaatttagaagtcgtttgcaggtttggcatatagatggtagctgattgaactttttctctttcgatggcatttggttatat

SEQ ID NO: 64910 - DNA, 422 bp, Glycine max
  unsure (1)..(422): unsure at all n locations
caactcttanaagaaattataaaagntactaataataaatgaatttataaagagatggaataaattgtaacattatactagtactccatccattatttgaatgtttaattgtgttgtttttatttgggtgaatccaatttgaaagattatggtcttagaatgcactngtctccctttgtgtgattaattaattcctagctacgcacgacacagacactggtccacacagccaagaatggtagatccagctactgaattggtgccaccaccatcttcacccaccaattcatccatttcctcctctgatcttgacaccgaggtatcaccttctccaaaatcaaactcatttctcatntttccttcctaaactntcatcnttcttctcttctgacttttcaatatcgatagtctacgggatcctt

SEQ ID NO: 64911 - DNA, 504 bp, Glycine max
  unsure (1)..(504): unsure at all n locations
atccttcttcctgtgttcataccatcatcttctaggacgatgcatactcatcaattgttcaaaccaaaacacttaacanattgtcctattattaacattcaacaagggacctgtataagacaaatgacgtatttctttagtcatttcttgtatgaataacgttatattatttttgttattattaaaattttaaagacaataagtcgtcctttaatctaacaattactattctaccagatntggtcaagtatatttcactcgtttgctcttagaaaatgtttgataaaaaagaagctgagttctctgagaattttgaattgaaaatagtttctcatgtttgatatttaaaaaaaaaaaataagattcctgataaataatgtttatcgggaatattntttaacaattgtccacacaaactttctaacagagaaagtgtgttaaataattaanataactatcanaaaatatcaccgtactcttccatttctataaaaattatctaaa

SEQ ID NO: 64912 - DNA, 470 bp, Glycine max
  unsure (1)..(470): unsure at all n locations
gcaagcttacccaantgaacatggaaagaagatttttatacaagacaccgaagatntcttagaacctatcacccgtatcgacgattgaagaaaacttttaatggaagtcatgagaatgaaagtgcgccgcaaccattagctgtaaacgaagttcatgatcaggtgaaggacatcataactcatcttgggaagacccaaaagaagacatcatctaagatgaacatatggaagataaggtcaatattctttgatcttccatatgggtctagtctacgtgtgcgtcactgtctagacgttatgcatgtcgagaaaaatgttggagatagttaattgatacccttcttaacgttaaggcaagacaaaagatggtttgacatgtcgtcaagacctggttgacatgggaatacgagagcagttgcatccgatatcatacgatcggtgaacgtatcctccctccacatgccacacga

SEQ ID NO: 64913 - DNA, 362 bp, Glycine max
aactgtagaatagtaatatattactgtctcaaactcgctcatcttcaatagctcgaaatctcttcttagagattgaagtttaacggcacgtaccttaacacttacttgatactcctcctacaatgtgttccacacttatttggcagacttagctccaatgattcttgagaaaaatggatcactcaccgcttgttgcaaggtgaacaacgcctttgaatttcttagtttattattcttcaactctttctcttgagatgcattaatagctgaagtatccgcggtaacagtgaagccttcttctactatgtcccataaatcttgagatgaaaaatatgcttccattttaacaagccagaaatgat

SEQ ID NO: 64914 - DNA, 469 bp, Glycine max
  unsure (1)..(469): unsure at all n locations
tcctgactcaccataaactcttgtctctcttgtgagaatgacaatccttaccctcggaagcatagacaaaaggagagaatgaaaatttccaatcaaaggagaaaaggagaggataggaaattcccattcaaagagtgggagatagcaataataaaagatagaatattcccaatcaaagaatgggataaagattaagagaaggagaagaaggatggaaagctcctgatcaaggatcgaaagaaaacagaagaaatgtgcagaggggatctctggaccagacaatatctaaacaaatacagagttgtcaccaaatgaacaaaatatagaaaacgataccatatcctataagtggtcttctccctatgattaccaaccaatatcctgtgcgtcggtgacttgttcgctccggtcatcaaaacaganaagaagaagcctcaaaataatattgaagcctaaactcacaaagccg

SEQ ID NO: 64915 - DNA, 502 bp, Glycine max
  unsure (1)..(502): unsure at all n locations
tataagaacanaatagcctcaatcatttccaaatatgcatgtgaattatgacgcatcaacaagaatcaagccaaggctattgtgcaagcaatcaatggggcaaaacacaccaaatgattatgatgatggatggctcaaattctcacaaaggtaaactcatcactttcaaattaagctttcaaaactatcatgacatgtagaggagaatcaaggatttcaagtcacaaaatgtcaaaaacttttattttcaaaacaattacccatttcttgaacatatcctataattcaaagaaaaacatgcaaagtcgtacatgcacacaaaattgacccaaaatattaaactaacaatccgacgaaactaacaacattaacaaattaacaaaaccaagaaaactagcaaaaccaaagaacactcccgccctacttaaacaacacattgtcctcaatgtagcacaattaaaagaataanaacaattaaatcatcaaatagaatcggacaagt

SEQ ID NO: 64916 - DNA, 213 bp, Glycine max
  unsure (1)..(213): unsure at all n locations
tgagagagtcaagatcanatgagttgtttattatagctatgctaaacaagccaacaaagggagaaagaagggtgtcttcnaaccccgagatgggtttgggtgcacatgagaaaagaaaggtttccggaacaaaggaaattaaagccttaaccaagtggagatggactcatttaagtgcttgaaagaatcaatgacaatgcttacaaaggtgag

SEQ ID NO: 64917 - DNA, 262 bp, Glycine max
ccgaagatgaacgagatgaatttgttagcttaactaataagaaatgaattgaaagtctcggattcaaaaacttacccgtagaagaacaaagaacggagaataacaacggatcaccttttcggaaattctcagagaaacgtcgtggaaacacctgagctaggatattctttatggacacaaggtgttttcacccttaacagctgaaatgcattgccgaacgggttacggatattaggaacaacctcccttcgcctatttatag

SEQ ID NO: 64918 - DNA, 427 bp, Glycine max
  unsure (1)..(427): unsure at all n locations
gcttggagagttgagtctcatattagcttattcaattacatgtgtctcactatcaaatgcactgttgtttgagataatgagctaattattcaggagtctctactataatcgattaccaagtggattaatngattacttctatcgtcatatagtgttcaaaagtgaacaggaacactttaatcgattacttagagcatctaatcgattacatcgctctagagtgatttacatatgttgggaagaacactataatcgattacttacataatctaatagatggaatacgcgaattaattgattactttgtagatttaatcgattacaggtggttataactattcttttgtatagataaccagcgttgtgttcactccanaactcctcaagggaagaatacanagatacgtccagcagtgaggaagatgca

SEQ ID NO: 64919 - DNA, 505 bp, Glycine max
  unsure (1)..(505): unsure at all n locations
aacactcagcctgcttacagtggaggctattgaacattaagcagaatatgttgttctataattcactatgcattcccctctagataaagctctagttgaatgccattaagtgcttgaagaaggaagaagataaatatctcacagcattcttggatgtccttgacaaattgaaagaaactctttccgaggaaaatacttatgaagagacgaagaaagatgtttctgttgataacaattgtcgaatcgattcaaaacaaataaaactaggaaattttgcagtaaaggattaacctaagtcgactcagagatacgattcaatttggttcctactntaattcccttataaacaataaggggaatttcaacaaatagtttgtaggcacttgatagatatgcataaacagaacataaatgtgaaatctaaactggaacanagtttaagttgcgaacacatataataatacacaaaccaagtgtaatatagattccaaatcatcagtccatt

SEQ ID NO: 64920 - DNA, 497 bp, Glycine max
  unsure (1)..(497): unsure at all n locations
gcagcttatgcgcctatttacttacaaacgttctcttgctcaagacatttaaccgaaaaatgcacccatatacaatcaaggcagcttcgttacctagattatttacacgtacctccaaggtgtatntgttacttacatcacacacatctccttggctaaactcacatacatgcatactcaagcattttggggcaccaaaaattgcacatgtgcacatcttggcatttctaatacctacatacgcaaacttcatgatgaatcttgactatctacacaataaggtgctacatttcatgctctttttttttcaagttttcgctacctaaagccgcatgcaaattcaagcatattttcctttgctgactaaaattgcattcaaatttaaaagggatcatttttggaatatggtttctttacataacatgcaacatatttatatatatctctttgtgagacatttcttgactaccaaaactatatatacatacattcaagta

SEQ ID NO: 64921 - DNA, 346 bp, Glycine max
  unsure (1)..(346): unsure at all n locations
agcctcanagaggtccaggaaggacaaggcggccgaaggaactatttccgccccggagtacgacagtcaccgctttaagagcgttgtacaccagcagcgctttgaagccatcaagggatggtcgtttctccgggagcgacgcgtccagctcanggacgacgagtatactgattttcangaggaaatagggcgccggcggtgggcaccactggttactcctatggccaagtttgatccagaaatagtccttgaattttatgccaatgcttggccaacagaggagggcgtgcgtgacatgagatcctgngttaggggtcagtggatcccgttcgatgccgacgctatc

SEQ ID NO: 64922 - DNA, 443 bp, Glycine max
ccttaaattgagagattttgattattaaacatacaaaatggaagtactaagtatttattacctatacttaacagagaatacttataacactacatagtaaccataaattggaagagtttgatacaatttatacaagttttacacacaaaagttagtcattttcaccgactaacaacttctccaaatttacagttttgcttgtcctcaagcaaaaagagaacaactcacttgtcctcaagtgacaatgacatgcagtgactatgtacaaaggtgtatgcaacaaatgttactggttgcatgataagagaatggagtaaaatgccctcatcacttgtctttcacaaggtatgcaggtatccaaagagaaaaatacaatgtaacctgaacaattagatggagttggcataagatagatatcacggaaagtagcttataccacagtc

SEQ ID NO: 64923 - DNA, 480 bp, Glycine max
  unsure (1)..(480): unsure at all n locations
ntgagcanaatcaaacgacaataactntntactcggatgtctgattgtgtcccgtagtatatcaagatgctcgacattcagaacataagctctgagcaaaatgaaacgacaataactttntactcgtatttctgattgtgtcccatagtatatcgagacgctcgaaattcagaatagaagctttgagcaaaagctaacgacaataactttttactcggatgtccgattgtgtcccgatgtatatcgagacgctcgaaattcagaacggaagctctgagcagtatcaaacgacattaacattttactcggatgtccgattgtatcccgtagtgtatcgagaagctcgaaattcagaaccgaagctctgagctaaatcaaatgacaantaacttttactcggatgtccgaatgaatccggtaatataacgagacggtcgaaattcagaattgaagctctgagcaaaatcaaacgacaataac

SEQ ID NO: 64924 - DNA, 58 bp, Glycine max
ggccggtaattccaacacaacaaggaacttccttccaaagccattgccggaattcacc

SEQ ID NO: 64925 - DNA, 255 bp, Glycine max
agcttgtgatgttgataagcttgagaatctagtgtaatatgactaagtttgtcaagcttctcatgttgatgatatattccttaatgttttcaatggaatattccttgatgatatattcatttgtgatgggctagaaatcctaatgttattgttgctgttaagaaatttgggttgaaagcaaccattcaagggtagttagatactgagcaaccattaagaaatttgggcttcttaatctgtatccacatgaaacac

SEQ ID NO: 64926 - DNA, 481 bp, Glycine max
  unsure (1)..(481): unsure at all n locations
cttntttctatccncatggatggtccaatgtccttcttaactcaacatgtatctgtgcagngggttctccgctttgaatatttcacaactccaaagcatgtagattggaaaaagtatgagttccacccttgaccacctcttctacccttattcagctccgcctgctttttggttgatcttacatgagagcaactcattctacactccacacatgccatctttggctgcaccctacccattttctaattgataacccaacgattgtttactttttaagttttttttttcaattntttattcttagactttatccatgacatacatgcaccttcttttgctgggaccaacccgccnctcatacacacacacacacacatatatatctattgaaggcatggccaaagatcagcctttagttttcattgacatttatcctacacaacacacaccctaantcttgtgatattatattgaataatat

SEQ ID NO: 64927 - DNA, 325 bp, Glycine max
  unsure (1)..(325): unsure at all n locations
acttctaatgctcttaatctctcctcgtctaaatcaactaactcatctgacatcattntccaataatggtcgatcggaatgtccatttgtttttgtactctagctgattgcaaatgtatttcgaccggaagtacagcatcgtgcccataagttagtcgaaatggggtagtattagttgattccttaggagaatttctacatgcccatagaacttgatctaacgttttattccaatttcttggcttttgggcaatgtgttttttaatcaagttgattacaatcttattggctgcttcgacctgaccatttgctagcgcataatatg

SEQ ID NO: 64928 - DNA, 316 bp, Glycine max
  unsure (1)..(316): unsure at all n locations
tctctgaagcttaggatggaaaataacttatataatctttcagtcatccactcgctcagcgcgccctgtgtgctaagcgaaatcttgatcatgcgctgagtgagtcatttntcgcgcttatcgcatcaaccgctactcattggctgatggagcctcgctgaacgagccttgtgcgctaagctcanaaacctctctggaatttcatcttttggaagtgggctaagcgagtcatctcgctaagtgcctctgtgcactaagcgcaatttcttctctggtggatcattcatgagaattgagcctagcgggtcagcccgct

SEQ ID NO: 64929 - DNA, 270 bp, Glycine max
  unsure (1)..(270): unsure at all n locations
caagatttaatcaaatntcaagaatcaagattcaagaataatcaagatcaagattcaagaatcaagagaagactcaatcaagataagtactaaaaaagtntttcaaaacattgagaagaacaagatattttcacaaaatcttttaccaaaagagttttactttctggtaatcgattaccagaacgtagtaatcgattaccagtagccagcattgggtttcaaactgatttacaaagttgtaatcgattaccataatcatgtaatcgatta

SEQ ID NO: 64930 - DNA, 424 bp, Glycine max
  unsure (1)..(424): unsure at all n locations
cagctctaccaatgactacctgaataattccttgatagcccttttgagccttgtttccctttccttgtnttgaagctcactacaagccttaagtgaaaaaccatgatattaccatatccttaatgatatttggagncttggaatngttttgggaataagtgtgggggggtttttgttcatttgacaacttgttttgttgactatgcttcatgatgtattttgngccatacttgatgtacattgtatattggttaaatgttggacatgctgaatgaaatgttgtttctcaaaggcaaataaaaaanaaaagcaataaagttgagtgaataagatctttaatggcacaagaatgatgaaactcttggttctactcctcatgttaaattttatccttactttcttttaatttcttatttttttctta

SEQ ID NO: 64931 - DNA, 386 bp, Glycine max
gctctgattcaggcacatcacatatatggacgctcgaaatcgaacaacggaagctctccagatattcaaatggtcataacttttaacttggaggtccgattctggcacataatatatcgagacgcccgaaattgaacaacggaagcacttgagataatcaaatggtcattacttttaacttggaggtccgatacatgcgcatcacatatagagacgctcgaatatgaacaacggaagctcttgagataatcaaatggtcataactttttactctgaggtccgattcatgagcatattttattgagacgcttgtaatttaaaatcggaagctctcgagacattcaaatggtcataactcttcactcggatgtctgattcacgtgcac

SEQ ID NO: 64932 - DNA, 478 bp, Glycine max
  unsure (1)..(478): unsure at all n locations
acctaagatactaagcttaacatcagagcacttccgggtgctggaactacttcacatggtcttgttggagcctatgcaagttgaaagccttggaggaaaaaggtatgcctatgttgctgtggatgatttctccagattgacctgtgtcatctctatcagagagaaatcggacacctttgaagtattcaaggaggtgagtctaagacttcaaagagaaaaagactgtgtcatcaagagaatcaggagtgaccatggcagagagtttgaaaacagcaagtttactgaattctgcacatctgaaggcatcactcatgagttctctgcagccattacaccacaacaaaatggcatagttgaaaggaaaaatangactttgcaagaagctgctanggtcatgcttcatgccaaagaaacttcctantatctctgggctgaagccatgaacacagcatgctacattcacaacagagtcacactt

SEQ ID NO: 64933 - DNA, 432 bp, Glycine max
gcggattggtcttcgccggcgaaatgatcgaagtgggtctattattatgcaaatctgatcatcttggtgttgataaatgcaaaataaaaaataaactgcggcaagtgaagaggatgagatggagggagaaacctatgttgtgactgtcattcttatactaccaagttccccaccaacccagcattgtcattactcagccaataacaacctttctcattaccccccacccagtcatccacaaaggccatccctaaaatcaaccacaaagcctacgtaccgtacttccaatgacaaacaccacctttagcataaaccataacaccacccaagaaatgatatttgcaggtgaaagacctgtgaaattcaccccagttccagggtcctatgctaacttgctcccatatttacttgataatccaagggtagccataa

SEQ ID NO: 64934 - DNA, 245 bp, Glycine max
aaactaagcttgtcgaagatcaccacgactcctaacaggcagctgtatatatgttaatggagtgaggcctaggggacttaatgcatatatcatagctttaatcccacaggtactagatcctcaagtgctgaacgagatcacgcctatctgactgataggatgcgctaacaagatatcggcagcgatttgagatatagatagaagaaagaaatgcataccatgataggcgagcgtcaatctatcgt

SEQ ID NO: 64935 - DNA, 386 bp, Glycine max
  unsure (1)..(386): unsure at all n locations
agctngagctgatctctgagcgagaagacacgctagtctatcttgcactgtatactagtngtaccacacttcaactctatggttacgcctgtgtatcaattattctccaaaacacttattcttcttttgaatcttattggtcaaaaattaacatcatattaagattctcattattgcattaaaaaaaaacattannnnncccaacatataattaattttagtcaaaattgactatcaattaaacctaaatntttctgctatcactcgtatttctgggttattctagttatttgatacttctataaccctgatgtgggntgaacattccctaaaagatataattgccaggaacgaaagactatgtgaaatatatagtggatggaaat

SEQ ID NO: 64936 - DNA, 440 bp, Glycine max
gcttcgcgctaagcgcatgtttagacatgctcttagccgagagtctcaagcgcttagcggccaaccttcgcatctgaggctgatatggtccgctaagcaagccaaggctgagctaagccaacttcaatttaatttgaattcggctaatctgcagcctgatcgctaagcccatcatacacttcggctaagcgtgaggcattgccgccaaactcaattctttgcggctagaactggggttcatgaagctaagcgccagacatggcggctaagctgaattccttgcgccaatgtgagcactaagtgagttcttatcagctaagcgcatgctccttctacttaagatcataatttagctaactggcagagccggttaacagaagtaaaggttttgatctgagatctcctaagcggccggccatgcgctaccaatacgctgtaaa

SEQ ID NO: 64937 - DNA, 460 bp, Glycine max
  unsure (1)..(460): unsure at all n locations
ctgtagagctctgngcggagtcataccctaatttcattctgtggctatcatttacaaacatttggattctcgccagccgaattgagctacttaacaccaattgtcatgcatttcgtaaggttttttttcttttcagaagagaatgtgcaaaatactcaaaaggagggcaaaagggtcacttttggggcatttttcagctcctgagccacccagataacttcatgatgaagtaaccagcttgcctgtgcgagcaaggttgcttcagcatgaagttatcaactcacctgtgcgagctaccttcatcccanatggcttgttttgctataaataggcgtgggaagactgaagtaaagggtcatgaggttcctcaaggtccagaggtccagaaagaagaagaaaaaagagaaatgaggatgaatgaagaggaaaagaagcctanatgccgctaaatcgcgactac

SEQ ID NO: 64938 - DNA, 435 bp, Glycine max
ctttcagaaccatgctatgtgctcgcgactggtccctttcttccctttgcaacttgagttcactattgctaccccatagagctccgcgaaatttgttccggccatactcttccttgcgagccctcttggtctcttgttcaagggctcttgcggtaattgcattctcttcccgtaacccggagcactccttccgaacgtgtgtagcagccaacttgaacttctacttggcgagttttgcctttcctaactcgcttttgagagcttggacttcttcgtcctcttccggtgcttcaaaattctcttcgctgacgactcttaacttggcgagccaatcttaatctcgtatgcgaactatcagccattcgtggtacccaccaatgatgccttacgaatgctcttagctctagacttctcttaccgggttaccatgcctat

SEQ ID NO: 64939 - DNA, 498 bp, Glycine max
  unsure (1)..(498): unsure at all n locations
gacactatgatactcagctttagccaatagacttaccttgaattaattcctttgatagcctctttgagccttgtttccctttccttgttntgaagctcactacaagccttaagtgaaaaaccatgatattaccatatccttaaggaattttggagctttggaattgttttgggaataagtgtggggggtttttgtttcattggacaacttgttttgttggctatgcttcatgatgtattttgggccatacttgatgtacattgtatattggttaaatgttggacatgctgaatgaaatgttgtttctcaaaggctaaagagtaaaaaaaaaaaaaaattcgaaaaataaaattcgaaaaaagaaaaagaaaagcaataaagttgagtgaataagatcttaaatggcacaagaatgatgaaactcttggttctactcttcantgttaaattttatctctacttcttttcattttcttattattgtctaatatgcactta

SEQ ID NO: 64940 - DNA, 363 bp, Glycine max
  unsure (1)..(363): unsure at all n locations
ntgaaggcaagataagtcaagacctaacaataacaacttgtctatatgccaatagccacagttgagnttgacaaatntaaaatatagtcttactcagccttataccagctagcacaatatcaatcgantttgacatcattaccgtcgccattagatgttgatgtgatgtggatntccggccatattggcaaaacattaataccttattgaacaactaaccaccttttcatttatttcccagtaaagtttcgtaagttttgtcaattccgtgtggaagggtgtggttaatgaagataatgaggttgggggacctgaagctccactttgataatatcagtggggactcactaaactggacaaaac

SEQ ID NO: 64941 - DNA, 415 bp, Glycine max
  unsure (1)..(415): unsure at all n locations
tcaagcttaagagacaccattacaactaacgttgcttcttatctagaatcaattgaggaagcttcgccgagtgtccncattgaaaaacctctattcaaacctttcatagttagtgataaagctatacgaaaaattagggatcttatataaactaaatccttaatcgaaggcgtatgtgactatcataacgaattactaaacaatattagtagttcgcttaaagccattccagatactcctcatgcttcggaatatacttccaaaatggtaacaagaagtacctccaaattagataatgttattatatgaagatagcgaccaatacttatataacactactgagataagatcactgtcagaaaagaatataaatccattaaactcctaacactggaagaccctctccaattatatt

SEQ ID NO: 64942 - DNA, 442 bp, Glycine max
  unsure (1)..(442): unsure at all n locations
cgaatagcagatccagtgcactcagcataatcatgttcatccactttgttccctataaaatttgggggatggagtaactaaaaagtaatgacaaaattgattagtttattaattaatggatgcctttttttatcggctaatgaatatgtacttgttgcatgcattactctaagtaagtnggcataggaaaaaataaataaaaaagaagcacaatcattactctaagtaataattatgtccacttcaagatggagttggatggaattatggaaaacaaagtcagaaaagatcaagagaaaataaagtgatggatataatattgtaatgaaaagattaaaaagagacaatagtgcagataatatgaaagtgtaaatagaagtatcatggttctaaggatattaaagccctcttcaccccactaagcatcaacaaaagcactcct

SEQ ID NO: 64943 - DNA, 476 bp, Glycine max
  unsure (1)..(476): unsure at all n locations
agcttaataactacattcacgactacacacattatattgtagttnagtagtcatgcgtttacacatcaagaaagacacactcatccaagatatatatatggtccaaaaggttcttgcaacactaatccacgcatcataggagaaataagctaactaacaacatacacataggatgatagaggttcgttagcacattatcaatcaatatcaagactacttgcatcacccaatggctcgccataatgtccaaccgcacttcgcaaattataaagatggtcagtctcataactcatgactcaatagtgaatttatggtatagcagacattaaggatgcaaggcacatacaagcattattattaagtcttatttaatcatgtaggagaaaatacaaataataattcaagcatgctcaacaaaagtactcataagtaaccacacagagtgcacaccagagtatgattagcacatatcacac

SEQ ID NO: 64944 - DNA, 505 bp, Glycine max
  unsure (1)..(505): unsure at all n locations
ngagaaggtggcanaaagcttaaagaaactntaacatgttgtatttattatggagtatgaaaagagaggacttgaatacaggtaagtattaaagatagaccagttntgtggtgaaagaaaaaatgaaatatctggctcaaacttgattcaatgacctgaatagctcaaggaaatataagcacctatgatggttatggcacgtacttcaacaattaattcattntagaaactataataattgatacgaaataaaatgtgtggaaatattgagaccatactgcaaatgagcaagtaatattcatcttgagggttccaagtatatatttgatgggctacacacgatttaatcccnttgaagttaanatactaacacgcaatttgaagatcaactttccaggtgtgtaaaacacaggattaggatngcctacgagtttataaagaactgcatcaatctagtccattganttaatttataactggtaatntatctntaanaaattaatta

SEQ ID NO: 64945 - DNA, 413 bp, Glycine max
  unsure (1)..(413): unsure at all n locations
agcttatnataacattacacgctatttactatattttaaagtaaaaataaaagtacaaacttgactctctataatggaatgtgtaattccattcagtatattaaaattaaacaaacaaaaaacaatatttcataacttttttcttcagttctaatattttgaaccatattttctccacccacttactttctctgtttgctcttacttcgctgagactcaaccacgagcacggttaatgttntgcaaacatgagcggaaaagcctccgtctccaaggagctccatgccaagcacaccagaggtccttgttttcccacccctttagtatcataatgttatgatggtgtgtcttgaatcatgtgaagctagcaacatcttttctcttccattctgatgtgatcttcattcctgttg

SEQ ID NO: 64946 - DNA, 295 bp, Glycine max
  unsure (1)..(295): unsure at all n locations
tggattcaatatgcgattaaattggtgaacccgtactaaccaatatatatcagtactcgttggttaagcaggaaatgtggtccaacaaaaatcatttacgcgtgcagcatacatcattgtcataattgacaacatatattgacatgcttgcgtattacagtttgagcgtgacaacacattagctgactcaatacacattntgaaactagcagtcgctcgacaacacattggctgatgtgactacacattagcgacaacacattggctgacttgactacacatttacgcgtgtcta

SEQ ID NO: 64947 - DNA, 260 bp, Glycine max
  unsure (1)..(260): unsure at all n locations
agctttatgtntagacactggtgtataatactatttatatacattagggagataagagaataagagaaagagaaaaagtaatttttttaattatctagatcccactcttcatttaatgaatcttaagattaaattgataacattntcaagaatgtatgtatagtggtgtaggtaggcgggtacccatagtggagactctccccgcatgccatagttgacaaaagataataccccccttnttatgaacagcgctcacaata

SEQ ID NO: 64948 - DNA, 159 bp, Glycine max
caagtgacgattaattcttttagcagcgtttatatgaggagaggtaagagcctctcgatagcgacacacaactcccaccgcatatagaatatctggccttgtattggttagataccttacactctccacaagactattgcagatcgtggaggctaccat

SEQ ID NO: 64949 - DNA, 265 bp, Glycine max
atgacatagaatcaatgccttcacctcatccttcatattaatctgcacagagtccaaatgggcaagaattagttttaaactcattagtatgatcagttacagaaataccttctcttatcttgaggtagaacaatcggcgcttcaagcatactttgatggctgatgaccgcttctcgtacagatctgataatgctctcataaatctgcagaagtcttctcgttcataatgtgaacgcgatcttcttggctaatgtcatactgatca

SEQ ID NO: 64950 - DNA, 336 bp, Glycine max
  unsure (1)..(336): unsure at all n locations
gctctgcggattaggtcttcaccggcgaaatgatcgaagngggtcttataaatgcaaatctaatcatctagntttgataaatgcaaaaaaccaaccaagaaagcctacctactgcattacccaccacccagtcattcacaaaggccatccctaaaatcaaccagaaagcctacctactgcacttccaatgacaaacaccacctttagcgtaaaccaaaacaccaaccaagatatgaattttgcagtgaataagcctgtagaattcaccccaattccagtgacctatgctaactngatcccatatctacttgataattcaatggtagccataacccc

SEQ ID NO: 64951 - DNA, 431 bp, Glycine max
tatcctgaccctgagagatgtatgaggcttgtgggccaactcattttctttaccaacacttctcctgagatctagttagcggagggagtgtgcatcaccattatgcgagacccctcactagcaccatcagaatagttggacgcgtattctgaagtatggtaatagtgcttctgcccaatggttgttgcacgaacacaatggttattcgtcactatcaggacatagagatgactacatggtggatgccctacggagaggatacacacatcctgactttgtttcttccattgaggctatctaatcttttggaaaacctagaaagatactgctgccgattagctacaacgccgatgtctgacttgactacatagatacgagtgcatagttgacctagtgtggatcaaacacttccgtccgatctaacgtttgtg

SEQ ID NO: 64952 - DNA, 462 bp, Glycine max
ctgtgctatcgattacactgagttggtaatcgattaccagcgactatttctgataaaatcaaaagatgtaactcttcagaaaggtattgacttttccaaatgggctgtaagcttttctaaaagctataactctcttgaatggtcttcttgacactatacttttgcaatcaatcctttacaagccttgaatgtctttgaacttcttcttcttctttgtaccacaagctttctgaagatttctggatttccaaaccttgaaaactcgtgctattcatcatattattctcttctccctttgccaaaaagaatgtgtcatggactaaccacctgaattctttgtgagtctctctttgtccttttccagaagaacaaaggactaaccgccttgaatcttttatgtctcccttctcccttcgcgaacattcgaagacgacacagctgagaatcctttgagtcttccca

SEQ ID NO: 64953 - DNA, 78 bp, Glycine max
tgtgctatttatttacgttgtatacacatgctatgcatgcccccattattaaatagactttatgtttttccccgccaa

SEQ ID NO: 64954 - DNA, 485 bp, Glycine max
  unsure (1)..(485): unsure at all n locations
agctngtaagaccacagtagaagtagtgttgcttctatggagaacagccatccccttattgtagcctcacaatatgaattattgcatgaataagaacgaaacttatagtgagatgtaaggctttcaaaatatgaattactatatatgaaaagaagttaaaatatctgtgtattcaataacaatttgattgtttgaaaattgatgactgctataccatgcatgactacggaataatttcttcaaaataagaaatacaataactaacaaaaaggctgaaaaggtcttcattaaaggctctgcacaatgcacattaattaatgaactcacatgtccaagcatgggactangagacctgagtggangacaaggccaacattatcatcaagcaactggtagtcactgaatgcatgngtgccacactcatgtgcaatgacccatactccagttaggatgctaccttggacacgcaagtatattggccatgc

SEQ ID NO: 64955 - DNA, 473 bp, Glycine max
  unsure (1)..(473): unsure at all n locations
nggagaggatgcttcaatggaggaaaagatagacggagagaaatatagaggggggagcacgatattgaaggaagaacaagagagagaagttgaactttgagttatgtctcacaagactctcattcatcaaagttacaacaagtgttacacatgtttccatttatagactacgtagcttccttgagaagctttcttgagaaaacttccttgagaagcttctttgagaaaaattccttgagaagctagagcttagctacacatacccctctcataattaagctcacctccttgagaagcttccttaagaagattcctaaagaagctagagcatagctacaaacctctctaatagctaagttcacctccttgagatgagaagctagagcttagctacataccccctataatagctaaactcacccctatgccaaanaacatgacaatacanaagaagtccctactacaaagactac

SEQ ID NO: 64956 - DNA, 438 bp, Glycine max
agcatgcaagcataaagagctatggatcattctcgtatttgaagatgactgactgagcataacatgccatatttaatcatgccttaaatcgatatctatagagtattactctctaaaaaattacacatcgtatattcttgggcgattatcatttagcagatagcaagaacctatcatctcatcttatgatgaatcttcttctaagaaaatgaagctactcttcaagggacaacctcaaaagaagcagcctacccaataactcaaaatcaaggaccctcgagccgccgaagatattgataggttctctaactaattatggccaggcaagatattatgttgcctcaagatggatgtttatatcgaaagaataggttatcttaccgaatatgagtcactatgattaagatacattcgacaatacaaaaggaatagatgaat

SEQ ID NO: 64957 - DNA, 412 bp, Glycine max
gggagatgatgcttcaatgaaagataagaaagagggagttaaatatataggtgggagcacgaaattgaaggaagaaaagagggagagaagtggaactttgagttgtgtctcactagactttcattcatcaaagttacaacaagtgttacacatgcttctatttatagactaggtagcttccttgagaagctttcttgagaaaacttccttgagaagcattcttaagaagttttctaaagaagctagagcttgactacacacacctctctaatagctaagctcacctccttgagatgagaagctagagtttagctacacccccctataatagctaagctcacccccatgacaaaatacatgaaaatacaaaaaattccctactacaaagactactccaaatgcctcgaaatac

SEQ ID NO: 64958 - DNA, 344 bp, Glycine max
  unsure (1)..(344): unsure at all n locations
taatgaagccacaagagaagatcactacccgcttccctttatggttcatatgctctaaagactagcanggtaatctttctactatatttaggatggatattcatgctataatcacattgttgttgacccccaagaccaataaaagacgactttcacatgtcccttcggtgtatatgcttatcgcctcatgccagttgtgttatgctacgcatctgctacattccaaagatgtatgatggctatctttactggcatggaagagaaatgcactgcaccctctatagatgatttttcaatcctttgatgcatcttttgacaattgcttatgtaatctatacaaagtg

SEQ ID NO: 64959 - DNA, 179 bp, Glycine max
  unsure (1)..(179): unsure at all n locations
agtggatattatcccacataaacatcgcaacgaccaaaaaaaaaaaactcattcacattcgaacctcgataaatttcttaacatagaaccaaaaaaatgaacaccttctttataaaattacactaatgaatacttcaacatgaataaaaattgactatncaacctgaatccaacatatc

SEQ ID NO: 64960 - DNA, 488 bp, Glycine max
tccatcacctactccatggcctagtgtgttggacgcgctgtcttaccacactattcatttgtccttatcttcatcttccacctcctcccccatcaaggtcatgatgtcctcgttcgaaactccgaatgcataggttggtaatcattgatgggctgctgagctaggtaatctgccaaggcgcttccctttatcgccttttgagtgacataaacaatgtcgaactctgacagtagaacctaccaccgagcaatccgtccgatgaaagaaggcttttcaaaaatatacttgactgggtccatcttggatgccagccaagtggtgtaccacaacatgtattgcttaagcggtgggctgccataccaggttcaacatgttctttcagcaaagagagttcatttacatgctgtaacttcttgcttatgtaatagacacccgctcctcttccagactcgtatactgcccaccatacatccatcggtcatccacac

SEQ ID NO: 64961 - DNA, 401 bp, Glycine max
  unsure (1)..(401): unsure at all n locations
gagtatgcgtaattgaaatctggcaggctattgttagcttgattgtagagttgaatgttgggttctgctgcctaattaagggagtatctgctaatagaaatcttccctcattgaaaggaagaaatgatgcttaaagttgaattctggtcacgctaaagagagaccccgaatattgacaaatcatctattcacttgcacctctgcttcatcaacggtcggcagtgggatctgtgctgncttttgggtagacaggcgtaccttttgacgagattacttctattctacaaagtcgagttttgaaattacacaatctacgtctaacgccagctaaccatgatttaatattcatttaaaaccagaataattataacttaatatacgttaatatatgaaaccaatat

SEQ ID NO: 64962 - DNA, 430 bp, Glycine max
  unsure (1)..(430): unsure at all n locations
agcttatactaaaatactaaatntatgaagagagtataatatcacaatctanaataagagaagttttcagattcaaaaaatacttataaaactttttatatttgtaaattcttcaatacttttttttatttttatggataaaaaaataaaagtatttatatttacttcactctaatggacgagtgaaattttaactaagacttgttagatataaaacctggcttacttgattccatcaaccttttcattnntaattgtataatatgttgagttacaagtgtgaggtgaagtctcacgtcgaatagaagtagtgaaagttagcaccatattatgaggagaagagctttnatctgagtcgtctcttttatgtggtnatcgaggccataagtgacttctcgatatctctcaacaatgatatcgagctttctag

SEQ ID NO: 64963 - DNA, 480 bp, Glycine max
  unsure (1)..(480): unsure at all n locations
tgctgttgtgacaagtaacttcagctggagaacaagttcaactagtgatagatgcacaccangctcccaccttacagtaatgtcagtagcactgaaaagagaacagacagcaatgtctttaagcccacctgaacgctgtacaaatttagcattntgcatatcaaacaatgccacatttgttactggcctattttcctccatatattcctgatagacagatctggctctttcaagttccatctgtgtggactgtttctctttgttcacacacaaactaaattgaaatatttcaagagagacagagtacttcagcttctggtattcatcggaaatagtggacattatatttgcattgcgtggggtaccatctgccaacacaattatcataactctacncccctgtgagccgtaattaactcgcttgggatctggaacaattgtattttccaaacctgtctcaccccatacatgtattgaaca

SEQ ID NO: 64964 - DNA, 372 bp, Glycine max
  unsure (1)..(372): unsure at all n locations
gatgctcanactctgtaccaaaagaatgcatcanatatcatacaactgaaggaactggttgctgaagatgtcattgcagacttccctgatgatgaanagctgtcatggatgctacttgtggatggatgttctctgctacaaatcttggaaagggaaaacttgactatccagaagaaatgaatgttaaggttgaccaactagttctggtgtggcaagatgtgcttttgttagagaaccagcttccctatcaagtgcttaaactgttgactggccccgagaatgaagccatgctattaaacatcatgaaggagtttcttaagtgtcatcatttgtcaccagttagaccaaatcacagagcaaagacacaagaca

SEQ ID NO: 64965 - DNA, 385 bp, Glycine max
  unsure (1)..(385): unsure at all n locations
agatgaatgaagggagagggagagaagagcgcacaattgtgcgctctatatgagctctacaatctgaagttaatattctaatggtcaaaattgaataaaatgcgcacacatgacctctatctatagccgacgtgtcacacaaaattggagggaaattcaaatttcacttgaatttgaaattgaatatgtggagccaaactctggagccaaaaattcactaattatgattagtgaattttagttatggctcaggccactaatgcaagatcaattccaagattctccactaagtgtgcttangtggcatgaggcatgaaaagcatgaaggacatgcacaaagtgtgactatatgatgtggcaatggggtgtagttagcaaatgctca

SEQ ID NO: 64966 - DNA, 483 bp, Glycine max
  unsure (1)..(483): unsure at all n locations
ctcttcgcgaggtacgtaagtcaactntgtgttcttttgagttatagttctctgtgtgcacgatggtagaagtatgctaagtttggaaggagtgatgtggttattgcacgatggntgaagtatgctatgtttgagtgggtgttcgagttttatagttttctatgctaagttgctacttctgttgatttgactctgctttttttctgtgagcatcccatacccagcacaaggccacataaacccaatgcttaatctagcaaaataggtgatttcagttatactcagatgctccacattgtgaataaactacctaagctactcttctcaccaatgatgttggtctacctctgctatggctattctgtgatgtatatntcacttttactatcactctttctcactagaagattgctgactatccacaaatttgttgactatacccgtatgctttactaatactttgtctcactagaaaaactgggt

SEQ ID NO: 64967 - DNA, 222 bp, Glycine max
agagcgcacccgcctatgatgttcaacaaataaaagaggcgacagaccactgaattcaaatagattgattaaacgtcatacggctccattgttgtaactccaaaatggtcaagtgactcaatcaaaccgaccgtgcactatgatggagttttggagagaacgcaaccgattgtataagtgcatgaatttcaccttttcaaaggacagcaatctgtgctttca

SEQ ID NO: 64968 - DNA, 497 bp, Glycine max
  unsure (1)..(497): unsure at all n locations
ctgagcanattcaacaacaataactntntactcggatgtctgtttgagtcccgtaatatatcgagacgctcgaaattgaatgttgaacctctgagccaattcaaacgacaacaactttttactcggatgtctgattgagtcccgcaatatatcgagacgctcggaattgaatgttgaagctttgagcaaattcaaacgacaataactttttactcggatgtctgattgagtcccgtaatatatcgagacgctcaaaattgaatgttgaagctctgatccaattcaaacgacaataacattttactcggataattgattgagtcccgtaatataactagacgctcgaaatagaatgttgaagctctaagccaattcatacgacaataacgttttactcggatgtctgcatgagttccgtcatatatcgagacgcttgaaattcaatgttgaacctctgatccattcaacaacaataacttttacttggatgctgatga

SEQ ID NO: 64969 - DNA, 385 bp, Glycine max
  unsure (1)..(385): unsure at all n locations
cagcttcatgaataaaggcctcagcgaattccttattttcattatgaaatactatcaatagacctccaatctataatggagagggttaccactactggaaaacccgaatgcaaatttctattgaggcaatatacttaagtattagggaagccatagaaatagggccatatatacccaccacacttgaaagaattacaacagatggtagcacatcaagtgaaagcattacaatagacaaacctatagatagatgtgctgaagaggataaaagaccagttcattacaatctataagccanagacataataacatcttgcctgtgaatggatgaatatctcacggtttcaaattgctagagagctaatgacatgtgggacactctact

SEQ ID NO: 64970 - DNA, 403 bp, Glycine max
  unsure (1)..(403): unsure at all n locations
cgcctcanagagatctangaaggataaagcggctgaaggaactttctcttctcctcaatatgatagccaccgctttaggagcgctgaacaccagcagcgcttcgaggccatcaagggatggtcatttctccgggagcgacgcatccagctcagggacgacgagtataccgatttccaggaggagatagttcgccggcggtgggcatcactggtcacccccatggccaagttcgatccagacatagtcctcgaattttatgccaatgcttggccaacagaagagggcgtgtgagatatgagatcctgtgtgaggggtcaatggatcccatctgatgcagatgctatccgccatctcctgtgatatcctttagtgctggaagaaggtcaagagtgcatgtatggt

SEQ ID NO: 64971 - DNA, 407 bp, Glycine max
cttgaaactcagctgttaacatctctagaaactgccatctggagcacatattatattattccatattttgctccaataaccccaccacatgatgaaatagacacaatcctaaggatagcaccatatatggttttcaattgctgttgcggtcacaattgcggtgagttcagaaaactcttacattgcaagaaattatgaagaaaaatatggttgatgcaaccgtaattacagtagaattttcaaagagtaaaaccaaaatgaaataggactaaaatcatatttaactctcttttataaaaaatttgttgggtaatcttttcatctaacaataaatcaaagaggtttgggcttatgcttgtagctataggtggttttttgttgtgcacatgattactctaatttagtct

SEQ ID NO: 64972 - DNA, 461 bp, Glycine max
  unsure (1)..(461): unsure at all n locations
ggaccttagagcacctgcggcatgcaagcttcttcttcttttctctataaataagggattgatgtaagaacaaaaatgttcaaccctcctagtatttaagattcacttaaaattagtgagaaacattgttttcgtgaagaanatccatgccgagacgcttccataacgctttcgagacgtttccgtgggttatttctcgaagattntccactgttcttcgtcgttcttcggtcttcaaccggtaagttcctgaaaatcgaacttttcaattcattctatgtaccatnagtggtcctcatttgtttcgcgtgctcctatttgtaattcatttactttccgtaccccctttagacgtgctttagtcatttatttaagtcattttctcgcctaatcaaaaataaaataaatcttcaccgatcatttatattgtaacatctcttaattttnggaaaattgaaatc

SEQ ID NO: 64973 - DNA, 466 bp, Glycine max
  unsure (1)..(466): unsure at all n locations
gacacaagaaactcagcttatatttcttcttcatcatgaatgcttatgttattcattgatgttggataggaaatctctttccccttccaatgatggaactctcgaaggtctcaaacagtcaaaatggacgttgtccaacatggcctctattgtgtgcacaacctttggaaacttcacctgatgttgtttgtaatgccttgaaattntgataattgaaaataaatgtttgatgtctttcttgtgttattcgattacttgattaatttggatgagttaaggtattgtgtgaattagccatgtgtgatctgcttgatgtggataggtgtaagctccattggagcttgtaggcctaggatcttcatcaatggattcctttgcttcttggaatatgaatggtagcggaatagacaacgaaaagagagaggaaacgccacttcaaggagaagatgagtcttatagaagctca

SEQ ID NO: 64974 - DNA, 246 bp, Glycine max
gatcttagagcgactgcagctgcagcttgcggattggtttcggcgtattttttaacgggctgaagacgcaaatgatctctacttgatatcgcaagccgggcaatgaaaggtgaatgagataacccatctggactgacttctatatggcaactacccccaacccacaaggcttactcaaccaatatcagctttctattaccccacccatcttcgcaaggtttcttattcactctaactccctcacca

SEQ ID NO: 64975 - DNA, 441 bp, Glycine max
  unsure (1)..(441): unsure at all n locations
catcgtgcaaaccttttattcattaggcaatcaaaagcctacccgtcgatgttttaaacaaaaaaaaggggggacaaaccctggaattcatatatattgagtaaacgtcaaacggctccattgctgtcactccaaaatggtcaagtgactaaatcaaacagaacatacactctgatggagttctctgagagatttgcaaaagataggataaggatgcctgaattatcacctttttcaaaaggacagacaatctgtgtgtccaaaatgattatatcataatcaaaatcacaaaatacggaaagaatgtcatgaacactgtacaactctccattgacttgcatatgttcatatgatgtcaccgtaccaagatcacaataatggatcatgcgtctgcatcctaaaaatcgngttactgcatagattcctacatctcgtgtcaat

SEQ ID NO: 64976 - DNA, 435 bp, Glycine max
ctacgatttccaaggaagaatgatccaatgaagatgttctacgttcggctacgatcatgcaagggcaatagcttttcgttggatacggtatccgcagggagctatagagaagaagagagagaagttagggtttgacaaagttggggttttctcatacaaattaatataaaatatgggaaatgtcaaggaaaggattagaagcatgttgatcagtcttagagattgtttttttcatcttttcactaaactctattacactcaatttctttagcctctaaagtatccaaaattggcgatgcatctttggggagaccaaattgtttgaatcccacaagatttgatctccaatattgttgaacctctaaacagtatctgttgagtagatacaaattcaatagaggttgcatacgcactgattcctgcaccattgtgact

SEQ ID NO: 64977 - DNA, 422 bp, Glycine max
  unsure (1)..(422): unsure at all n locations
taaaactcagctctagganagctctaggtgcgaatgtcgacatagtntgtgagccttatagaagtggaaatgcttatcttgcagaggtacatcaatgtgttgatgctgctggaacaacggctatagattgcgacaataaggcaacacgatgtgatgatgaccccatctntccctacatgggattccaaccagataaagatcccaagttataatatcatgaaatcaaaatctcctaaattctattacccctataacaaatatatatagaaaataaggggttctaagtgtatgttaaggaaacaactaatgaaatatttcaataaaatctataaaaggtttgaccaaatatgtgcgaaaacaagctagaacttatatctatataccacgtgtacgttgatatctactattttactaactcatag

SEQ ID NO: 64978 - DNA, 489 bp, Glycine max
  unsure (1)..(489): unsure at all n locations
taagcttgagggtgcgtagcccaccatcttttatagtagagtaccgataatgtgtctaccatcacgattatcgcctcccttttagcacatgttctgtagttgcatcctatccggaaccatatcagaatagtactgatactgcctaacgaaggcaaccattatgtccttccaagtatggactcgggaaggttccaagttagtgtaccaagtaacagctaccccagtaagactttcttggaagacatgtattagcagttcctcatctttgcgtatgcccttatcttccgacaatacatctttggatggttcttggggcaagtagtccccttgtacttgtcaaagtccagcaccttgaacttgggaggggtgatgataatgggtactatgaacaaactctttaggttatcagaggcataatcttcaccttcttcaatggccctgagcctntcctctagatgatccaacattcacattcctgacatagtcatg

SEQ ID NO: 64979 - DNA, 328 bp, Glycine max
  unsure (1)..(328): unsure at all n locations
tctatggagggtggatcttagagcctatataatgtccttcaatgatgattngttgtcatggaggtgcgacagaagataaaggaaaagatgtgagaggaggcgccatccactatggaataagtcatggaaggagaagcttgcccaccaatagagagtcatggattataagcttagagaggaagcttcaatgaaggaagagaatgagatataagggcagagagagaagtgtgtgaatttgatgagaatacggaaagaagatgagctctgatgtgtctcacacaattttctcattcatcaaatgtacgacaagtgatacacatgaatatag

SEQ ID NO: 64980 - DNA, 405 bp, Glycine max
acttgtacgaatagatgtgggcataattgtatgagaggaagtgtgattttcgaaatctgcacttatgcagaattttgctgtcaaaataggtgcagcaggatattatcttggtgcaaaaaatgcttgtgtgtggctggctgtggaaagagtattacagaatgagttctggatgtttactagtagatcccaacgcgcacaatgtaagcttatgcactatagacttccagtaaaattttggagtcgatccaacggttaacgaattggatcgaatgaattgttactgtggcctttaagtgagaaaagctgcgatttgggttgatgtgttgagcagagtattctgtctctgctcttgtttgcttggctgcgatagcttgtgctgcttgaatgttagttagcttggatgtt

SEQ ID NO: 64981 - DNA, 394 bp, Glycine max
  unsure (1)..(394): unsure at all n locations
cggattgattcggtctgacagggatctatgtttattaatntattctacaacatagaacacattactttattngtgctttctttgatttattgattcttttgactaacatagtagttatagcacatctattgttcttttgaactggataactactgttctagtttcttgtatgcaaagaagatctactgcacgtgatttgatccncatttatttggagaataacgccacttgtagaatgcgtatcaagagagaatagaaaaatcttgcaggattagaagcagacaattcagggaagagctcaattttgagcatcttctagtttctatacagaaatttattaatctatcaaacacatatggtaagaccaaaaagcacctgaaatattagtctatgg

SEQ ID NO: 64982 - DNA, 345 bp, Glycine max
  unsure (1)..(345): unsure at all n locations
gcttgagcatagctacacatacctctctaatatctaagctcacctccatgagatgagaagctagagcttatctacacactcgctataacatctaagctgaccctcatgactaanaacatgataataccacatgcagtccttactacaaagactactcacaattccccgaaatacaaggctcaaaccctatactactataatggccataatacatggtccagacgaaggatataactatgctaatatttacaaagataagtgggctcatacttagcccacgggctcgaaatataccctatggctcatgagaaccctaaggcctatccttggatctctagccaatct

SEQ ID NO: 64983 - DNA, 327 bp, Glycine max
gacactatgatactcagcttatatatccatcacattgaatattttctgcacaaaaaagcaattgatgcttaatcaaaaattattagctgatcaaggaaatattatgagagaaatactacaaattcatatataatttaaccccaaaatatactcatgattagcatatatcactgctttaatgtgggaaaacttaatttctcaaccaacaatgtgctatcaacattagtacaactcccactatcaatgatcaagattgtatacattgacttttatgtggcatcttgtatgaagagtatgctcacattgctcgtcataatctcctacctt

SEQ ID NO: 64984 - DNA, 467 bp, Glycine max
  unsure (1)..(467): unsure at all n locations
agaagaaacatatttgtatgttatatgtctgaaagtatgttaagatctaaagttntaacctgctattgctaatatactgctttataaatacatgtgggagaatattagtgtccttcatcatgtgtgtgtgtgtgtatgcaattatgcattcctcaaggtggatctatcaatatcttagaatatccagttgaaagagcattcatcctccacaacaacctaggacagtgttttgttgaatatgggtccaatgggtctgagtgaataatggttcaatatagaacataggggaaattaagaatttctatgtctggatactttatctagtatcacgatttttgaccaaccaaacttattggagatgtgtttctcaacatggcataagattccgtgattgccctctgattaggtacttatgctgttgataaaaattcgacaatataatggtcacagtgttccttttgatagag

SEQ ID NO: 64985 - DNA, 421 bp, Glycine max
  unsure (1)..(421): unsure at all n locations
cgacacacatcgtacttattgctntgttcacactactacaatntgttcattcatcatcgtcaaatctacatcaggtattggaaaatcgatgtagtaaaacatgcggtgacatttttgcaatttaaaccaactttttgaatgtgttaacggcaatttttataaaacctcctttaatccgaatgttacgaaagcagttttataaaaactatctttgtttgtaacctgactactaccgttntaactagcaccatctgtgaattcatcatattttaattccattatttttcattttttaagctgacaactatgacttctcattcactccttatcttgngttattgagggttacatttcattcctttctctttgctacaacaattggcgaaacctgtgcgaggtccgcgctctccctccaggtcca

SEQ ID NO: 64986 - DNA, 456 bp, Glycine max
  unsure (1)..(456): unsure at all n locations
cagcatgcaagctagaaggtgcgtacaccaccatttaacatatttatatactggtcacgtgnctactattattgcgatcatcttccttttagacatagggggtgccactaggtctgccatgattctccacctttgtgcgtattctttgaaagaatcttgcccttttatgcacatgtactagatgtgcatcctatccagagccataacataattagtactgacattgcctaacgaaggcaaccattaggttcttccaagaatggactcgggaaggttccaagtcattgtaccaggtaacagctaccccagtaagactattctggaagaaatgtttcagcatgaccatatccacacataaacatatcacaaaggcgtacatgacatttaggttattgctagacagtgtttaaataggctcgcagcgatgatagctctgcccctatttatggacctaat

SEQ ID NO: 64987 - DNA, 249 bp, Glycine max
ctcaagcttctatagaaggttcgctcctaatgtctctacaatcgcatcacctctgtatgagctagtgtagaagaacgtggcatctacctgtggtgaaaaacaagagcaagcgtttgctttgctcaaagaaaagcttactaatgcacttgttctagctcttcctgactggtctaaaacttttgagctataatgtgatgcctctggagtgggagttggagctgttatgttgcaaggtgggcaccctattgc

SEQ ID NO: 64988 - DNA, 265 bp, Glycine max
  unsure (1)..(265): unsure at all n locations
gtcacctgcagcatgctagcttgaaggtgcgtctccaccatttacatatttttcactggnnatgtggctactagtattgtgatcatctccctttacagcataggaggtgccacttgggctgccaggtttctccacctttgagcgtattctatgaaagattcatgcgctctgttgcacatgttctggtgttgcatactattctgaaccatatcagaattatactgacattgcctaacgatggctaccattatgttccttcaagaat

SEQ ID NO: 64989 - DNA, 456 bp, Glycine max
  unsure (1)..(456): unsure at all n locations
ctaagcttctatgaaggttcgttcctaatttctctacaattgcatcacctctattgagctagtgaagaagaatgtggcatttaacctgggtgaaaaacaagagcaagcgtttgctntgctcanagaanagcttactaaggcacttgttctagctcttcctgacttttctaaaactttngagctagaatgtgatgcctctggagtgggagttggagctgttttgttgcaaggtgggcaccctattgctttatttagtgaaaaacttcatggtgccacccttaactaccccacctatgataaagagctntatgccttaataagagcactccgaacctgngaaccattaccttgttcaaggaatttgcattatagtgacatcaatcactaagtcatagagggcnagaaagtaaacataggctgcaaatggtaagtacctaagcattcattgtataaatc

SEQ ID NO: 64990 - DNA, 450 bp, Glycine max
tgaataactctatatccttcttgacacatttcttactaatccttctaaaagagattcttacgagtcctcattaaatattcttactgtgtgattcaggacttcatcaaatattacgaggattaacagaaagatacttgtcaaggatgcaacattattctattaaaataagaccaggctgttgaagacacattcactgagctatgtaatttgagtttgggttcacaacactggctgaaattatagcgatggagtgatgacgtatgtaggtttctcaaaagactagttccttatatggtggagagtcccataatgcccatgtcttaattatcacattaagcttcttatgctatgtaatgtgagactcataacattatcatgtcggttaagagcacactgagaccactgatttgatgggggtccttttctcctttgtgactctactcacctatc

SEQ ID NO: 64991 - DNA, 431 bp, Glycine max
  unsure (1)..(431): unsure at all n locations
agcttgccacccaactcgcccaggcgagctttgttgcttctggaggaattnnttggacccaagtgggcctagttgctatttgcacccccatttttactaaatacaccccttactctgttgttggtgattttntttttccgtaacgttatgaaactttacgaatctcgtgacgatgcttgatttctttccgtaatgttacgaaaccttacggattatgtaatcatcccctatttgccttccggaacattacggaactttacggattgcgcactaacacttccttttaatttctggcatgccacggaacttcactgattgtgctacgatgctttctttagacttccgacatgtcatggaacttcacaaattgcctaacgatgggtgccaagtacctcgaagtggcaaacgagggtcgcataccattaaccgat

SEQ ID NO: 64992 - DNA, 404 bp, Glycine max
  unsure (1)..(404): unsure at all n locations
gacctatagaaactcagctgaagcaactgatgcgtggtcactaggaacccttctgttcttgaatcagaaatctgtacctgtcgcaagggtttgtggttagtgctcctctgctgaccaccatacagacctttgccctttcatgcagcaacctggagcaattgagcagcctgaagcttatgttgcaaatatttacaatagacctcctcaacctcagcagcaaaatcaaccacagcagaacaattatgacctttccagcaacagatacaaccctggatggaggaatcaccctaacctcagatggtccagccctcagcaacaacaacaacagcagcctgctccttccttccaaaatgctgctggcccaagcagaccatacanttctccaccaatccaacaacaacaac

SEQ ID NO: 64993 - DNA, 500 bp, Glycine max
  unsure (1)..(500): unsure at all n locations
agcttataagaacaaaattgcctcaatcatttctctatatgcatgtgaattaggaggcatcaacaagaatcaagccaaggctattgtgcaagcaatcaatggggcaaaacacaccaaatgattatgatgatggatggctcanattctcacagaggtaaagtcatcactttcaaattgagctttcaaaactatcatggcatgtagaggagaatcaaggatttcaagtcacaaaatgtcaagaacttttattttccaaacaattacccatttcttgaacatatcctataattcaaagaaaaacatgcnaagtcgtacatgcacacagnaatgacccaaaatattaaactagaaatccgatgaaactaacaacattaacaaattaacacaacttacaatataacaaaaccaacataactagcagaaccanagaacactccctcccatacttaaacaactacattgtctcaatgtagcacatataaaagattataacaattaac

SEQ ID NO: 64994 - DNA, 396 bp, Glycine max
ctcagcttttatccaggctcatcttggtggagaagctccttcttcctgttttattccctagaggaaggcgccgcctcttacctcttctcctttgtcttccgctgcatctctatggtggaaaatcaccattaaaggacctcattgaagctcaaagatccagcctccattgaagccccacaagcaagcttccatcaagtggtaatcatagcataagagcttcaagtaagtgctccgtacacctccattaatgattagctctaccttctcttccattgatgattcttcattttttctccatgtatctgctcacatgtcttggcttaaatattgttaacatgattatctagagttttcaccgattaaacttgctataaaagctagatttgattctctatg

SEQ ID NO: 64995 - DNA, 470 bp, Glycine max
  unsure (1)..(470): unsure at all n locations
agcttatatagttgacacattgaacaatttattgtattctcttccggttnctttgcatacactcttcagtttgcggtgatattacatcataatgaaagagttaagcgtttctttaaagtcaaataaattggctaagttgtagaacttaatttgtgaatacacatataaactgtggctcctttcatcaagcctagacctagcatgccttaaaataatagtggtgatgttgctgaacctacgttcagcaatgtggcataattatgatgcactccattaattaaaccatgataacaacaacaagatatttatatatatatttatatagtgttgttagaatcttacatgaacagacaataatcctgtaatgatatcttggatatatttaatggatagaaatgagtttggaacatataaattatgcactatgattgatataaatggacttcaatctaagatgagttgtaaaaata

SEQ ID NO: 64996 - DNA, 220 bp, Glycine max
  unsure (1)..(220): unsure at all n locations
tgtccactatagcctntgtgacctataagagtatgntattaatttatttacaagagaatgncgtctcttanacactgaccgaagtcatgaagagcattaaatgacatctcttttagtaatgcacatttgaatgaagtcggggaatgccttataccaaaactattaaaagtgttgagtgaaaatattcaagttgtaaatctgaatgaatcgcatttcatat

SEQ ID NO: 64997 - DNA, 378 bp, Glycine max
ttccctgctctggacaagctaagatgttagccaaaacttaatttgtttccatctgacaaaatatttaaattatccttatttcacttaaaataaacctctttactggttgtactattttataaacctcaaacatgatgcattgttatttgagtatgattgatccagctgttgctgtcattggcactgaacatctttcgaggtttgtcttctatttataaaaagttgtatgatttgtacatgtcgttgttcatatatcggtattgtttcatgttactagttaaatgcattatgagtgaaccttaatcgcccgtccgagattccatacatcgattaatacggatagcttgaattaatcgatgaattgattcttgaattgtt

SEQ ID NO: 64998 - DNA, 497 bp, Glycine max
  unsure (1)..(497): unsure at all n locations
ntaggaganaccatanaaactaaggtagttcctaaacatttatttattgaggaagcttcgccaagtatccccattgaaaaacctttattcaaacctttcaaaggttatattcttctttcatttattatactgcattcttacttcctatctggccgtttgatcctactccgctgacctctgatatatatatacgtcaaagattaatactgtctctggtctcatatataagcaaaaataattacttcccatagattaagaaagttagttgaaatcatttaattttactaatctcaagtagaaagtaaggttattcttaaaatgtcctccattcaaacctgataccttgaataaaaatgactccataaaaattgaattacaattaaatgaagattgttgtacgaatgacatcaataaatatgagtatagaggactcntttgcttatatatgagtatagaggggagcatatctatgaaagatgtccaaattaatgaaagat

SEQ ID NO: 64999 - DNA, 236 bp, Glycine max
  unsure (1)..(236): unsure at all n locations
ctgtctgctgtcttttatttctcttacttttgctcctatagattctctcacttagtctagctttatgtatagtccgtgaggctactgttgcacttattggcgcctctaatgtagntcagctttctctcttcacacacatatgatgatccattgacatctacacattgataatctagatcataactactaaccccctgcgatcgacagacaagagaatcactcatcattgcacatgg

SEQ ID NO: 65000 - DNA, 487 bp, Glycine max
  unsure (1)..(487): unsure at all n locations
cgcagagaatttttcaaactcctcactttcttatatcacttctctatgaaaaacatttgcctctgtccattgtcttaccttctgttcacacccagcgcgcacaagagaacaagaagagagagacagatcgagagggagaaagagaaaatcaaaaaccctctttcaaggcatgtcatagatcgtgtttaagtaatacgcaggcaataacataggagataagatatataccaagttatcagactcatttgtacatgaatgttctgtagcacacatttctgattccaaaatcagttgaagaataacttaacagatattggaggcagattctcatctttagtaaaagtgttccttcccatattaacatagatgatcaaacaaaatcggactacatattttctttctcttagaattgatcataaagattgaaatgcctgacaaccacatcttatttcctatataattcctttatcattaagcnaggataatg

SEQ ID NO: 65001 - DNA, 489 bp, Glycine max
  unsure (1)..(489): unsure at all n locations
agcntgaaggatgcttcatggaggattagattggtgagagaaagagagatggnggagctcgaaattgaaggaagaaaaagggagagaagttgaactttgagttgtgtctcacaagactctcattcatcaaagttacaacaagtgttacacatgtttctatttatagactatgtggcttccttgagaagcttctatgagaaaacttccttgagaagctagagcttagctacacacacccctctaataactgagctcacctccttgagaagctttcttgaaaagattcctaaagaagctagagcttagctacacacacctctctaatagctaagctcacctccttgagatgagaagctagaacttagctacacaccctctataatagctaagctcacccncatgacaaaatacatgagaatacaaatnaagtctctactacaaagaactactcaaatgactctgaatacaaggcttaagccctatactact

SEQ ID NO: 65002 - DNA, 485 bp, Glycine max
  unsure (1)..(485): unsure at all n locations
nttatgtgagaagatgtgactcttcacattagaatttgaatntctacgttcaaaggcactggtaattgattaccaaaacattctaatcaattacaactntntgaaatcaattggaacgttataaattcatttgaaaactttttcaaatccattttgctactggtaatcgattactagagagtaaaaactctttggtaaacatgttttgagaaaaatccatgtgctactcagtttttgaaaaaaccttttcatacttatcttgattaagtcttatcttgattcttgaatcttgagtcttgaatcttgatcttgattcttggaagcttgaaccttgaatcttgattcttgattcttgaagtcaaatttcttcttgaaccttgaagtgttcttgattcaatctggattatctngtacatcttgatcatcttanacatcttgaactcattctntgattatcatgaagtgacgcttgaagcttttgtcat

SEQ ID NO: 65003 - DNA, 290 bp, Glycine max
tacgctggcataatcttgacagacaccctttaaggctatttccactcaagctgtacctaggatcgaggatgggtcgactatcgttatccactccttattgagaatgacgttaccactttccactgatatgatctcattgtgcatgcaggcgtcctaatggtgacacaaacaattcgtgcttacccaatatgctaataaagatctgtccctgattgacattgttcttagagctgcaaatgtatacgactctattctagaacatatagagtactcctctctacgattagaat

SEQ ID NO: 65004 - DNA, 412 bp, Glycine max
tgtgttgtgaactttatcaatggcagaaaactctcccaacttcccttttgctctaagacacacgccctcaaaaggtcctctaatgactgtatggtccgattagttaggccatcagtctgaggatggtaggctgaacttagtctaagcttggttcccaacgctttgttcaggctcttccaaaatctagaggtacctatgatctttatcagacactatgatagatgccacaccatgtaaaaataacaatctcactaatatacagggaggtcaaatgttccaaggaaaatcttatattaatgggaataaagtgagcagacttggtcaacctgtcaacaataaccaagatagaatcaaaacactttgggggttctaagtagtcctacgacaaaatccatggaaatattgtcccatt

SEQ ID NO: 65005 - DNA, 476 bp, Glycine max
  unsure (1)..(476): unsure at all n locations
gcttcttgaggaagcctcttaatgaagcttctctatgaatctacatgaagctgtctcggtaaaaacgctgcccatacttcgttaaccgttggatcttctcgaaggttggtttgcagcttcacaagacacttttccatgatctgaccattgggatctttgagaagatgtctggagtatgcgtgacgtatccgttcctgagagcattgctcacctgtgcgttatgagccttgtagtccaagtagctaaggaaaaacgccattttcttctccttctttcttccanaaccatttaattaatcaattgaaatattgatcctagggttcgtccctttcattttgttaaaaccttctattatctgcacaacaaggaaacataaagctttgggatcgatcgcgcgccccattgaaggatggcaatggattgtcancctttggtatgtgaccaagtgatactttccttgattaaagtcatagagt

SEQ ID NO: 65006 - DNA, 490 bp, Glycine max
  unsure (1)..(490): unsure at all n locations
tactaagctatgacatccttgtgtcatttccaagcacaagtaggtggatggagtaaaatgggaacactactcatttccttagattgttctatttgatctctntaaggtaaaaatttataacccattgtgttagatgagtattttatagcactgattagttatgggttgtgtgaaaagggttagaaactaagtattangaattattgtggttntctcaaaaccctatgttttgctaaaattggggattttgtctaatctcttattttaaatgcttagatcctgtggaaaatacggtggttgattttcccaacaacagtagaagacattgattgcattatttatgtgagtagctaatctacttagcgacattttttaaagtacttttaggagaagcaagtnagactcaatatatatatatatatatatatatatatatatatatatatatctcttatgatctctgaaatctatttgggaatgtgatatatat

SEQ ID NO: 65007 - DNA, 429 bp, Glycine max
  unsure (1)..(429): unsure at all n locations
agaaactcaagctaggtagccaggcccactaggggaaatgagtntcatcaataggatctatttttgcctaggcaactcgcacgcagttcaatctctaagggagtgtntggattgcattttcattttctgttttcattttcttaaaacagttcccatttccaaaagactagaatactaaaaacatgtttgatatgacttcctgttttccgctttcaagacataagaacactcaatatgtgtttgcaaccgaaaagtattcttagattctcttaaaattacattccttgccaccacatgtttattttacccaatataaggttcctgatgtcaactgacaatgagattctattgtttgcactctctggtttgttgagagaatattttactgatatgtgtcaacatacaaccaatgcatttcatcccatttct

SEQ ID NO: 65008 - DNA, 463 bp, Glycine max
  unsure (1)..(463): unsure at all n locations
agctntgagcttcttaattcagagtacactgtatacttccaaaacaagctgaataaatcactaccatagcactcccattattcatgaaattaccactctagtagtctagttacaaacaagctctaaataggaaagtaaatgggtcgaatagtgttatccanaccttaataaaaatagcatcaccaccaaccactatatgaataacattatgaatgcaaacatncaagtgttgaaaaaaaaaatcatgcatactcaattaaaaacaaaactaaggggccattattgacattattnttaaatntgatattatatacgaatttatactatcaaattaagagttattttctctacaattagataatttaaaanatatggcaagctcatgttaaagctcttggtgagtctaagaaaataatgatattcaaattttctttaatagtagactaatgaccatgattaacat

SEQ ID NO: 65009 - DNA, 507 bp, Glycine max
  unsure (1)..(507): unsure at all n locations
cttccacctttaaagatattaacatcttctaatgacagataaatttagatatacacatggccaaaacgaagcaagtgtggaaacatttaaactcgtaactagattataggaaaaaagtcactaagtgcatgtctaaatcaacttttgaagaataattaatttgatggacaagggaatagtaattgaacatgagcaaattgccctatatttctgattcatttatttgactacaattttttggacaatcacatgaaaatgcagctacattatacctgctcaatagcactcacaaggagtcgacatatttcttggtgacaatactgactggcagttgcaattagaggcatctctcctactatagttccatgcaccctgtcaagaagtgaaaggcttgagaacaatgcaatataacatacatagtatctttacatattaaacaaagtanaatccaaccatttacataaaggtcagagacaaggattttaaaacatcaattctaccataaat

SEQ ID NO: 65010 - DNA, 436 bp, Glycine max
  unsure (1)..(436): unsure at all n locations
agctntatctntagaatgtagtcagtagagattctatgtatcgtgaataatcgctataaaagtgataaagtatttcggcctacttaagtccatgtctggacaacaaatatcagtgtctatgatctctaataggttcgagctcctctttgcacccttattagacttgttattttgcttacccttaatgcaatctacacaagtttcaaaataagcaaaatccaaagtactaagtactcattcatttactaatctcttaattctcccgatagagatgtgtcctaatcttcggtgctacaacataaaggattccttattcacaacacatcattttaacctagcagtaacatgcatagaattataggcaacnatcatttgcaattcaataaagtaaagcccatcatataatgcaccgaaaccaataattctagatttatta

SEQ ID NO: 65011 - DNA, 494 bp, Glycine max
  unsure (1)..(494): unsure at all n locations
tcatagttcctagaccagaggaagctntaagggcattataagatatcatgatggtctaaattcaaatttcccatctcttcctcaattctaggaggtgggtctagttgcacttcagcattttcatcctcatccatttgcaaaagtaggtattgccggataggacacctatgagaagaagtgaacttctcatcacatgtatagcatagccctttctcccttcgaatctgcatttcagttggtgacattcttctaacatttcctggttttggaaaattggaattgtaattcatgttggggctcggaagtaagggtggtaggcttggtggatttattgactgagaagaaggtaggctngtgtttatgtttggtattgggcttgtgtttntggtacgattttggtaggaaatttgaatgggctggtgctgggtaagtattctctcnatagctggccagagatcacaacatagggtgagttgggaatggctatacatatg

SEQ ID NO: 65012 - DNA, 387 bp, Glycine max
  unsure (1)..(387): unsure at all n locations
cgtcanacccaagggtcttccttagtatgtctcgcttctccaaagactcatcanacccaaggtctgcccttggtgagtctcacttctccaaaggcttatcatacctaatgtccacccttggtgagtctttcttctccaaaggctcttcatatcaaaggttcacccttggtgagcctcgatgcatctgtacaggcttgtcaagcccaaggtccacccatggtgagccttgccaaaacccaagacgaacacatccctggtctgaagctcattaaacctaatgtccacccttagtgagcctcaatgcatctncactggcttgcaaccncaaggtccacccttggtgagcctcgccaatacctagaacgaatgcatccctggtccgaactc

SEQ ID NO: 65013 - DNA, 502 bp, Glycine max
  unsure (1)..(502): unsure at all n locations
agctngacgttggagctgatccatcaattgccttatttcttgcaaactgcaacctttagggctttgaatttgacttgatagaaccttttcttaagaaagggtgattgattcgatcccatgttttttctagaatgaaaaattctgtttgaatcaaactttgacaccctatcatggaggaaatatgatcaatgcatgaaggaatgcttatgctatgcatgacacaaatgcattttgcagacacaagagcccgaaagatcatctcttcttacccacaaacattcaggcatcatgattcatttgcagtcatcaccacagtgccccatgtatgcatttaagaaggtgatgtggaccttccaacttcccgtgacaaaatgatgagacaaatgtaacgcatgagtgacgatgcagtacagacatacatgcgtgagagcatgcaatngatagcacanaatagaaatattctagacgaacaagcatggtaatgccatcaaataataacaca

SEQ ID NO: 65014 - DNA, 407 bp, Glycine max
  unsure (1)..(407): unsure at all n locations
ntcatttagttagtgacctaggctataaatagaaacatgtgtatcacttgttgtaactntgatgaatgtgaaacttgtgagacacacttcaaaattcaacttctctccctnttttctccttcaatttcattccccccacccttcctcccctctttatatcattcttttcctccattgaagcttcctttctaagtttcttatccaaggcactctcttggtggtgaagctcctccttccatggcttattccctaatgtatggctcctcctctcacctcttctcctttatctttcgttgcatctccatgggtgaaaatcaccattgaaggacgtcattgaagctcatagttccagtcacctgtaatatttgatatcacgagatctagaagatgaattaatttccatttta

SEQ ID NO: 65015 - DNA, 495 bp, Glycine max
  unsure (1)..(495): unsure at all n locations
agcttgatgtttgtgttgaatgcattanagatatacagaccanaagcaagaaattaggtgcatatagggctacaaacgtcttggaatagatacatacagacatttgtgggccatttcatacaccttcatggaatggtcaacaatattttatatcattcatagacgattactccagaaatgcatacttgtttcttatacatgaaaagtcacaatctctagatgtgttcaaaacatttaaagttgaagttgaagatcaactcaacaaaagaatcaagagtgtcagatctgaccatagtgatgaatactatgacagatatgacgattcatgtgaacaacgtccagggcctttggtcaggtacctagaggaatgtggaatcgtcccatagtacaccatgccggngtcacctagcatgaatggtgtggctgaaagacanaacagaactcttgaggatatggtangaagtatgattngtcattctaacttatcagagtcac

SEQ ID NO: 65016 - DNA, 477 bp, Glycine max
  unsure (1)..(477): unsure at all n locations
cgatgccattatatttatagatgatgactganatcaggacttgtcttctcagacaaaccanaatctcctacctgtgaccctctattttctattgttgttattgcgttttaagaaataagagaaataataaaatataagattaagaagaaaacaacagtcttattttcttttttcttattccctgttaaagttacattctggcaattttcccagagatactagacagcatctgtaatttattttttgttatttcaaatcatctatgctgtgctaaggtgtgatggttcacgaatctttggtattagtaggaagacctaaacccttatcaagtttttatgaacccttctcatagaatgagaagctntaatgtgttggtgaatttattacctattccaaccagtcaagtcatggcttaaagcctgtacactcanggagtngccggtgctatgctgcagacagtgccaaagatcaatctga

SEQ ID NO: 65017 - DNA, 439 bp, Glycine max
  unsure (1)..(439): unsure at all n locations
aaagacagctgctgctgcagcttctgatatttctccaattattgtattctctcctaaagaatctgagaaggaaccgtttttacatgcactgaatctataagagctcaccacaacaatgctatctgaatctctcctatcaccttacttcacactcgtcaaactagagaattcaaaggaggttctagacgtgcccatgggaggtgctaactcactcctaagaccctcagctccggttgatgtgctcacatgatgaggatcgcatctctgaatccaaacgatttctagagacgaaacatgactggtgcgatgactactacctntacctcgaatcatacgcctgagcttgccaaatatgttcgtctggttagtgtagttatgacactgagaattatgtcagaagatagtcatctcactctccgaagcattgataatgattctg

SEQ ID NO: 65018 - DNA, 476 bp, Glycine max
  unsure (1)..(476): unsure at all n locations
ctcaagcttnacaatctggatccttttctgcatctatggcttcatttatttcataaataaggtcctccccctgcaagagagtcaaaaaaatgagttattatagagataaaagtcagatcttggccatcatattttagtttattatattagttggatatcttattctctgctcttgtacttcatcattntataccgccaataatatttattggtataaaaaaaaattgagtaaattgcaatatgtacacctcaatctatgcaaaaaaagaaagatacactgctattttcaaatactgcagccacatttgagagctaaatgcttctgtaaatatattttgcagttctctcaagatattaaaagagacaattggttttccaaaataagctaatccaaacacgctcataaaatntaattaacattagaagaattcacattnttcaaacatatgactntatattcaatcatcgaaaaagta

SEQ ID NO: 65019 - DNA, 298 bp, Glycine max
actaagctgaaagaatgtcaggacccaaggcgttgggactgtttgttgcacgggttgttgccgaatcagtataaaactcttgtgtgagggtgttctacttgcctactctcataattatcactctgcactttaattactgcgtatactcttggatgagaccatatatatgaacttgaacttcttaacaacatagtaaaagccccagaatggcgtataataatgattaaaggtgcagtcataattaatacaaccccccttcttgattattctgaagccacttgatcaacagacacggcaa

SEQ ID NO: 65020 - DNA, 388 bp, Glycine max
  unsure (1)..(388): unsure at all n locations
agcttgtgtgatcctcagcttacaagccaattttgtagagttgaaatagaacctaagcccanattntagggaagtttactctggagagccttacattcaaatgaaaggcatcacaaaacagtaaagtttgtgtgatcctcatgcttccacaaacccttccaatccgtcctttgactgaaaccccnaaaatgaacactgagcatgtttcaaaagcattggacanactcatttgtagaaaatggttgcaacacccaagccttctaagttctggctgcttnctgttacacatttgtacatttagaagcagaatttatgaatcaatatgatatagtacatatatgattctgtagaatgttcaaactaccttaatatcatttatatttcatta

SEQ ID NO: 65021 - DNA, 327 bp, Glycine max
  unsure (1)..(327): unsure at all n locations
tcatctcgaccggatccttaagcacctgcagctgcagcttggaagnagtgngaggtcaattccttaggcagagcttgaaagagcccgggtagtcgaagagaagttcaagtccatagccatcanagtatgaaaagagtatgatgaactaagggacgtcaatatggccacagctgaagccttggaatgagaaaccaagaaggcctgaaaggaagaacacgaccaaaaccaaagttttaggggctttatatggcagcaatagtgaactcaagctccgaagaggtgaaaggaatcattacgggtcataggcatgatcttgaaggacgagct

SEQ ID NO: 65022 - DNA, 264 bp, Glycine max
  unsure (1)..(264): unsure at all n locations
cttgagggtgcgcagcccaccatcttttcatagtatagtaccgattatgtgtctaccatcacgattatcgtctccctttccattattgggggtaccacctgngccgccagatcccttccacctttgggcgtgttctttgaatgatccgtccccctttttgcaaatgttctgtagtggcatcctatccagaaccatatcaaaattgtattgatactgcctaacaaaggcaaccattatgtccttccaaaaatggactcgggaaga

SEQ ID NO: 65023 - DNA, 447 bp, Glycine max
tagagttgcaatagtgctaagggttctgtgttttatttactccatattgtcgataattaacttgggttcctgtcttcatgatctttaagttcactgtgcaaagttgtttcaagtttggtctttggcaagtgcgtacaaagatattcatgacccgctgattaatatgaaagattcaacacctataggatatgaggagactcttggtgtactgctaaattgctgatttcttaatatgatgcaaggctaactcaatgatgtctactccaatatcaatgatatagagtcttggaaattgtgggttttgcttaaaaaatcaaatatgaaaggtttattcctaaaatctggtctataagattcaataacaaaagaaagaacactatcttcaataatgattgctctacatgaaaataaataatggcgatctcttgtagtctatattaatatttg

SEQ ID NO: 65024 - DNA, 418 bp, Glycine max
  unsure (1)..(418): unsure at all n locations
agctntgagccaaaatcctgactcaccataaaccttgactattgtgagaatgtcaattcttaccctcggaagcaaaaaaaaaggggagagggaaaatttccaatcaaagaggaagcaaaaaaggagagaaggaaaatttccaatcaaaggaaaaaaagagaggaaagggaattcccaatcaaagagtgggagaaagcaaaaagaaaagaaagaaaattcccaatcaaagaatgggagaaagaaaaaagagaagaagaaagggaagaaagttcccgatcaaaaaaaaataatatgcagaaaggtctttggaccggacaatatctgaacaatacagaattgtcaccaaatgaataaaaagaaggaaagggaaccatgacctacaatggtcttccccctttagttgccaggcaaaatcttg

SEQ ID NO: 65025 - DNA, 425 bp, Glycine max
  unsure (1)..(425): unsure at all n locations
acccggagatatgtcgcgggggttatgagaccttgnggacgtcangtggggtgctattgcccaaaaccaagcttgaccaatcccgacccaacccgggcatagtcggtcagtgagaacctgtgatgtacctaagcaggcgagctcctggcagtcaacagataaaaggaaaacaagaccacaaagcaaggaggcttgtggtggctggccagctgtgaattttgtgtaatatgtggattgtggcctctggtaatcgattaccaaaggtgagtaatcgattacaaggcttaaaattgaggacaggaggctaagatggtctctggtaatcgattaccaaggggtgtaatcgattaccatgctttgaaacgaagtcaggaaacttacggagcctctggtaatcgattaccagcctgcgtaatcgattacac

SEQ ID NO: 65026 - DNA, 500 bp, Glycine max
agtgacctgaggcatgcaagcttcattagttgttgtatttcagtattcctgcctcttatataataatggtatgtatatcatgcattgtatacctgcttcattgttgcagaatagttggcattgtgctccttcaatgttagaaaaatactctttggtttcaccaataataatgttcttatccttagtcaatcaaccaacatatgaatgttcaaccaatgacttagccaatgcatgattatgactcccacatattaacttcatcatccatctcccaacactggtttcgctagcagcttatagggacacccacattttctactgtcaataactgttcgtactaaatttttattgtatgccctgtattctccactctttctacaaccaattaaaacatatgaaatcctccctttatttgcaatattcgtatctgacctcataatcactaccacaaaaccaatatcatacgcaatagagtgagcccaatgcaacacgtcatcact

SEQ ID NO: 65027 - DNA, 130 bp, Glycine max
  unsure (1)..(130): unsure at all n locations
ctagtgagagacaaataaataaaatctgccacttaccttcttcctggtgttctccgacttgaacattggcgcccattgtgggatcttctggaaaactcctttntacgaccaccacatactaactaagaac

SEQ ID NO: 65028 - DNA, 346 bp, Glycine max
  unsure (1)..(346): unsure at all n locations
tgcgagcttccagatatggagagctaaatcctctgtggtgttttttttgtangtactngacgtaaatacctagatatgtatttaatgatgctttacgtgctctatgtgctatcaatacgtcatttcagtgtgctttagccttgatcacgtagatgcatgctttgttaggatcattcaacagagggaactggtctgattgttactacttgatatggtaaggctagtttatcgttttatcactagggatcgacgtacggacacctagttgcttgtatgtttgtcttaatactgttctggtcaggttactccaaccagacggatctgatgatgatgcttgctcaggatc

SEQ ID NO: 65029 - DNA, 432 bp, Glycine max
  unsure (1)..(432): unsure at all n locations
aaaaactaagctgccgccagctcgctcgggagctagctcgacaggcgaccatgcttcnttctcaaagcaacagccttcaggaggaatcttctggaaggcccaagtgggcctgattgctatttacacccccctctatactaaatgcatccccctttatatttttttgaagtatttgtccgcaacgctaccaaactttacgaattactgaacgatacttattttntctctcccaaggttacgaacccttacgaattacgtacttactcttttttagctttcgaagaagttacggaaacttacggattgcgcaaaaacacctcttttcgacttccgccacattacgaaatttcaccgatccgcgaagcctggttcctttatatttntgatacctctcatgacttcatttattgtgcacacaagaagccaagtatc

SEQ ID NO: 65030 - DNA, 477 bp, Glycine max
  unsure (1)..(477): unsure at all n locations
gagcttctatagaaggttcgttcctaatttctctacttttgcttctcctctcaatgagctggtgaagaagaatgtggcatttacctgtggtgaaaaacaagagcaagcctttgctctgctcaaagaaaagctcactaaggcacctgttctagctcttcctgacttttctaaaacttttgagctacaatgtgatgcctctggagtgggagtcggagctgtattgttacaacgtgggcaccctattgcttgttataatgggatagttgatagtgccgccctcaactaccccacctatgataaagagctatattgcttaataagaggcctacagacttgggaacatgtccttgcttcgcacgaatttggccttcatagtgatcatcaatcacttaagtacattagacggcaaagcaagttaaacaagaggcatgcanaatgggtagagtacctagagcaagttatatatgttatcaaata

SEQ ID NO: 65031 - DNA, 404 bp, Glycine max
  unsure (1)..(404): unsure at all n locations
tacattgatgtttgtatttatgggaggaggctgtatgccattcttgttttaagagtagagccccactggtaaaactaactctccaaattattgccttcacacgaactgggcccagatgaatcctgccttanagatgtcctgcaatgacaaggcagccgaaggcactaggtccgctccggagtatgacagtcaccggtttaggagcgctgtacaccatcagcgcttcaacgccatcaatggatggtcgtttctccgggagcgacgcgttcagctcacggaccacgactatactgatttccannannaaatatacccccggcggagcgcgtcactggttactcccatggacaagtttgatccaaaaatagtccttgagttatattcctatgcctggccctcacaag

SEQ ID NO: 65032 - DNA, 385 bp, Glycine max
  unsure (1)..(385): unsure at all n locations
agctttacaaagtggtcttccacattacatttattctttatccattgtcgataagtacctctgggacaacgtggtccatacatctcaccggcacatgtagagccttgatgtgtcctctcccctcaacgggaatctcttcttccgcaaaagcgatataattgttggtggttatatgatgaacgaggccttcgaaaccctccactgagatatcatgtgctacatgggcgtcgttaaggaccttcatcaatagcgcacgatgaggctccgagcttatgagtaattcaagcaaagagatccttgctggagatntattcagctgctcgactaccttagactcgctatgctggatgaggcggaggaactcatgggcctctaccacagtcac

SEQ ID NO: 65033 - DNA, 339 bp, Glycine max
atacataacacttgcgaccaaaaacatgaagatgtgagatgtgtggtttgctaccattgaacagttcatatggagttttcattaagatgggtcttatcaaagccctattcatgagataacatgcagtattaacggcttcaacccaaaaatattttggaagaggaggatcattccataaggttgtagcaatctcttgcatagatctatttttcctttcaacaactccattatgttgaggggttctagttgcgacaaagttatagtcaatgccatgcttttcacaaaataaatctgattctttattttcgaacgcacctccatgatcactcctaatagata

SEQ ID NO: 65034 - DNA, 462 bp, Glycine max
  unsure (1)..(462): unsure at all n locations
agcttaatatgtatttatnttgtgactgctgtatgtttaatatttatatgacatcaaataaccacgattgttttggacgctacaaccacacataataaaggaaaaaagagaaatggggtagatcatgggaaaatgaaccaagagatacaaatccgcaatcaggggcatcaaaataccaatagaattcgtgagtctcaaattagttttcatttatcatgctcaaacttctatacactgcaaaggcatatctaagcaccttgaaagtcaaagcatctatataattcatcagctatagaggtaacctaatgcaactcaaaaaaattgattactgttttacaacatccttgagtgaaactggccaaaccctgcacgttcctcaatgacaaaggctaaaatacctgcattatacaatacccataatgatggaattgataacaggaaggtgactcatgaacattgaac

SEQ ID NO: 65035 - DNA, 414 bp, Glycine max
  unsure (1)..(414): unsure at all n locations
actaagcttagacgagaggcgatcctacgttcctgaacataataccattacatgtaatagacagcatgtgcaaaacacattactacaatgaaacaatagtatgttaaataccatacaccataataaactagctaacagtttataccattcaacaaaggatgtattagatgagaattgtcagcatcaaatatgtattttgcctgacggaagcacaagtatcagaaaaatcctccacagctatagcaatagaaaccaagccgctcacttacgggttcacacacatcaacacaaacatttactcactacacatgtcaatatctcctccgggggctcctggaacgccgctcacgaagtggtctgcaaaatgataaagtttaaaacattcatatgctaaacaatgaanatttggaatgc

SEQ ID NO: 65036 - DNA, 471 bp, Glycine max
  unsure (1)..(471): unsure at all n locations
agcnttggacaatctgatataagatgtgatttattatttatcagagttgacaaccacttcggaagcatttcaagattgtcgcagttnttaatgaacaaggtctgtaaggagttggcagtttcttgaagccattgaggtaaggccaccagttgcggtaaaccccaaaatccaacacattttaacttcagcatgggacttcgttcttcatggtggtccttccagagatccaagtccagattaacacagtcttgaacaaacagatcgagtttctaattcaggaaaatttgtaacatccagtggcaaagacatcagactatgacaatcagaaacattcaatgttntaagagcaggaaataaacttcacccctccaattatgggaaagtctttcacaataagagtaggagtggatatatactcgccactacagaggggaattactctcaaactacgagaaaagattgataaggaga

SEQ ID NO: 65037 - DNA, 494 bp, Glycine max
  unsure (1)..(494): unsure at all n locations
tttgtattcattgagaatctgtctagcactatgattcgattcatgcaagctcaaaagtttatagaattagttagaatacatataggaacaaaagaattcgaaattcattnttgtgtattagtttgatcctaaactttccttgcttgaattgttgttggctgtgataggtaccatgtgctaccattttaatgattttatgcaataattgagaatttgaccaaatgagaatgagaaaatgaatgaaattaggaactatcatcagtataatgctcaattctttctgctttgagattgtttgacctgtaatttgagcttatttttatctgaaacttgattgatgagagatgttccttgtaatttgttgcatttacttgagatatttccgtctttgcatactntngactgagatgcaagctgagttaatatgaaaataatctcgtttcataggtttaaagtttagatngaactcatagntcaactcattagaattgaat

SEQ ID NO: 65038 - DNA, 397 bp, Glycine max
  unsure (1)..(397): unsure at all n locations
agcttgctctaaatatacattgatgtntgtatttatgggaggaggttgcatgccatttttgctttaagagtagcgtcccactggtaaaactaactttccaaatctttgccttcgcaagaaatggccccgaggaagcttgcctcaaagaggtccaggaaggacaaggcagccgaaggaactagttccgctccggagtatgacagtcaccgctttatgagcgctgtacaccagcagcgcttctaggccatcaacggatggtctgttctccgggagcgacgcgttcagctcatggacgacgagtatactgatttccatgaggaaatacggcgccgacggtgggcatcactggttactcccatggccaagtttgatccagaaatagtccttgagttttatg

SEQ ID NO: 65039 - DNA, 394 bp, Glycine max
  unsure (1)..(394): unsure at all n locations
cccgggtagtcgaagagaagttcaagtgcatagccatcaaagtctgaaaagagtatgatgaactaagggacgtcaatatggccacagctgaagctttggaacgagaaaccaagaaggcccgaaaggaagaacacgaccaaagcaaagttttgaggggctttatagggcagcaatagtgagctcaagctccgaagaggtgaaaggaatcatcacgggtcaaaggcatgatcttgaaggacgagctaaaggtttgccttaggtcnnnnggagntnnnncccaacagttaagcgagactgaagggaatatgtgggccatcatctataantgcaaaaagaagctaaatctagcggcgactcacgagcagaggctagatgatgagtatgccaagatatc

SEQ ID NO: 65040 - DNA, 427 bp, Glycine max
  unsure (1)..(427): unsure at all n locations
agcttgtcacaagggaaaacaagttaataaattcttttctactcgaaaaattgtttccacctcaagaccattagaactgttacatcttgatctatttgatccttctagaatagcctcaataagtggcaaaaggtatggtctgatcatagtggacattactctaaatggacctaggttatgttcctatcccacaaggatgagtcttttagtgtcttctttaaattntgtaaaagtgttcaaaatgggaaatgagtatgcattacttcaatcagaagtaaccatggaggagaatttgaaaatgagaattttcaattgttctaggagcaaaatggtatacttcacaacttttcaactctaagaacaccttaatagaatggtgtagttgagaggaacaacaattcattaagtaaaataacacatatcacac

SEQ ID NO: 65041 - DNA, 423 bp, Glycine max
gagtaataaagatatgagtgtgtgtttgcccccaacaatctgtatcagagttgatcttgcggcctggtgatcagagagaaaagagtattgaagaagcttgaggaagttgatggtgaatctgtgaggggtcctcgtttcataagtatacttggcgatgtgatagtcaagtgacgtgttccaatggaaaaagctggcggtacaagtctagaagtgtcaccattcagtacttgtgcagcagattgtgaaacataccactatttgtgcaagcatagcagaagcgtgatgagcatactagaagaatggagatgacattaaaatttaattatatgaaggatttctgggaaatatttcacatttgtaattccacatatctacgatatttgttagaattaaaaaaggatatttgctatttctaggatgctc

SEQ ID NO: 65042 - DNA, 290 bp, Glycine max
  unsure (1)..(290): unsure at all n locations
agcttagagctaattcaaacgacaatatacttttactctgatgtctgattgagccccgtaatacatcgagacgctcgaaattgaatgttgaagctctcagncaattcaaacgacaataactctttctctcagtggtctgatggagtcctcgaatctatcgagacgctccaaattgaatgctgaagctctgagctaatccaaacgagagtaactttctactcggatgcttgattgacgcccgatatcattcaaacgctcgaattgaatgttgaatctttagcaattaaacg

SEQ ID NO: 65043 - DNA, 433 bp, Glycine max
  unsure (1)..(433): unsure at all n locations
gcgacctatgaaactcagctcagaatcaatatcgagcgtctcaatagattactgtgactctatcttacatccgagcaaaacgttattgtcgtttggattagttcagagcttcagaattcaatttcgatcgtctcgatatattacgggtctcaatcagacatctgaggaaacaagttattgtcgtttgaatctgctgagagcttcaacattcaatttcgagcgtctcgatgtattacgggacttaatcagacatccgagataanagttattgtcgtttgaatatgctgagagcttcaacattcaattactagcgtctcgatattttacgggactcaatcacacatcctagtataaagttattgtcgcttgaatatgctgtgagcttcacattcaatttccagcgtctcaatctattaccggactcactcataca

SEQ ID NO: 65044 - DNA, 472 bp, Glycine max
  unsure (1)..(472): unsure at all n locations
gacccaagncacctgcggctgcagcttcttaccggcttctcgagccaacgagtggtggttattatggctctggaaggttcacaacagngagtgcagctataaatgcagctccaaagagtagtagtggaaggtatgtgatatatgtgaagggtggngtgtacgatgaacaagttgaggtgaaagcaaagaatataatgttggttggagatggtattggaaagactataatcacaggtagcaaaagtggtggaggaggcaccacaaccttncgttcagccactgttggtaagctctttatatttttttattatcgttaattaatcctaatcatttcttacgtgttatgtttgactgcgttacataaaaataacttaaagaaaattaccacaatttatttatattgtctataagaatcagatttcatgataaaattgtaaaanaatgattatggtattacttttctaaaattgat

SEQ ID NO: 65045 - DNA, 479 bp, Glycine max
  unsure (1)..(479): unsure at all n locations
taagtcacctgcngcatgcaagctntctttggacctcgaacaggcaactaactctctcttttataaccatgctatgtgctcgcgactggtccctttcttcctttcgcaacttgagttcactattgctaccccatagagctccgcgaaatttgttccggccatactcttccttgcgagccctcttggtctcttgttcaagggctcttgcggtaattgcattctcttcccgtaacccggcacactccttccgaacgtgtgtagcggccaactcgaacttctccttggcaagttttgcctttcctaactcgcttttgagagcttggacttctttgtcttcttccggtgctncanaattctcttcgctgacgacttttaacttggcgagccaatctaaacctcgtatatgaactttcagccattcgtggtacccaccaatgatgccattacgaatgcctctaagctcttgatctttccttaac

SEQ ID NO: 65046 - DNA, 479 bp, Glycine max
  unsure (1)..(479): unsure at all n locations
tgctcaccactactagaggagaagccttcaggttgttttataaaaacctcctcctctanatcaccattaagaaaggaagttttcacatccatttgtttcaactcaaggtcaaaatgagcaactactgccaagataatatgaagagaatatttcttagatataggagaaaaagtctttgtgtagttgattccttctttttgagtaaatcccttagcaatgagtcttgtcttgtatctctcaatgttgcctaatgaatcccttttggtcttaaagacccatttataaccaatggcctttgtcctattaggaaaatctacaaggttccaaactatgttactctgcctggaattcatctcatccttcatagcatcataccataaattntactctttacaactcatggcttgatcaagagtttcaggatcattntcagcacccatattatagcgagattcttgctaatatacaatataatcact

SEQ ID NO: 65047 - DNA, 449 bp, Glycine max
  unsure (1)..(449): unsure at all n locations
agcgttctcgccncattttcttataaatagggaggagattgtgtttatgtattttcgtttagcctctcctggtaatttagaatcacttaaaattagtgaaaaaaattggttccgtgaagaaaatccaagccgaggcgcttccgtaacgtttccgtgggtgatttcgtgaaagttttcggccgtttttcgacgttcttcattcgttcttcgtcgttcttcggtcttcaaccgataagttccctaaatcgaacttttcaattcattctatgtacccttagtggtcctcatttgcttttacgtgctttcatttacatttcctttacttttcgtacccccttgtgacgtgctttagtaatttgcttaagttatcttctcgcctaatcaaaaaataaaataaatttccaccaatcatttgaattgtcatatccgctaatttctggtacaatgaa

SEQ ID NO: 65048 - DNA, 502 bp, Glycine max
  unsure (1)..(502): unsure at all n locations
ctaagcttctataggcttcttgaaagcttcttgaaggcttcttgttacttagatgtttaactacccacacncctctaataactaaactaaccttcttgaaaataaaacatggataaaataacacaacaaataagatcaaacatcaattataattgctaataatatttcagagtgttacaccgtaaaaatgactttaaagagattgaaagttaataaacaaagccaaaataaaaccaactcataactaaacttctttccatcaaaaatcacttaagatcgtttcgaggtctaatgccttaacgaaccgtttgtttgtaataaaaatgattctttcaaaagcataaaaccaactcaacacacaaactttctcactttaaagaactacatangttngaattcctcatcgcacctgaggatgcatatgagcaagggcagcccccttgtcgaccccaaaanataaaaagaaatataataagggacaagtatataattttgaagtcac

SEQ ID NO: 65049 - DNA, 397 bp, Glycine max
  unsure (1)..(397): unsure at all n locations
agctngagctcgttgttgctgccccatagagcctctcgattcttattcttgctccattcttcctttcaggcccttnttgtttcccgctctaatgcttcgatcatagtcatgttgacatctctcagcacatcacactctttcctaaccctagtgactgtcgtctttagcttttccttgatcactcttgtttctttgagctccactttcaaagcttgcacttcttcgctttcctcagggacgttagcttctttcctacttaggcctttnagctttgggagccaagttatcccttgtgtcctagacttcaaccacttttgattgccgccgatgactccattgctacttnccctaagctctttatctttgctttccactatattgcatgccttacaaattc

SEQ ID NO: 65050 - DNA, 508 bp, Glycine max
  unsure (1)..(508): unsure at all n locations
ctaagctgggttgggcatagcaccccacctgacgtccncaaggtctcctgtccctcgcgacatatctccaggtaccactctgtggtcaacgaataaaagcaggaagtttcacccttcaacacttcctcatctcaagcttgtaggattatggggtacccatcacatgtggtactatgtggcggtcgggcgatggtgcacaacaagttttccacatccacaatgcgcgaataaacccaccatcccctgttgcccacctccatccgagctcacgtactcccacgtagcccatatcctcgtttctctcaacaccgggtccncatcaatcctcccaagcttccacaacatccaagcaaaacaacattcaaacagcacaaactatcacagccaagcaaaacagagcaaaggcagaaaactctgcccaaaacaccaaccaaaatcacagctnttctcacccaaagaccccagtaacaattccttcgttccaattcgttatctggtggatcgactc

SEQ ID NO: 65051 - DNA, 362 bp, Glycine max
acgaaacattcctcaataagttttcacaacaaggttttacaatactttctacctcgtttctcttcatctttcaatagaaatatttgattcatttctcaacttctttctaagagtgtttgttcaaaactttctcttccaagaaaagttctttgttaaaaaacttgtgctattgtttcttcttcattctcttcctccttgtccaaaagaacgaagcactaaccgcctgaattcttttgtgtctctcttctccctgtgtcagaagaacgaaggactaaccgcctcaattctcttgggtctctcgtctcccttacacaagattcaaaggactaaccgcctgagaactcttttgattcttcccttcc

SEQ ID NO: 65052 - DNA, 452 bp, Glycine max
  unsure (1)..(452): unsure at all n locations
tctnccccaattntctatanataggtggagaagtgaagtagaaattggtttatcctcttaggcacttctctctctttcagaattgcttaggaaaattgttttcgtgaagaaaatccaagccgaggcgcttccataacgtttccgtaacgtttccgtgagtgatttcgtgaaggttttcgaccgttcttcgacgttcttcattcgttcttcaatcttcaacgggtaaataccttacaccaagcttttcaattcattctatgtacccgtggtggaccacattaggtttcatgtatttttattctcntttncatttactttctataccctnttttgacttccttaagccatgtatttaagtcatttctcgctcaacctaataatatttaaatttccaccccatcgttgatttgatcataccataactttggttgaaatgaattgcgaccgatcgg

SEQ ID NO: 65053 - DNA, 482 bp, Glycine max
  unsure (1)..(482): unsure at all n locations
gcttcctagataggtatcatcaatcatcttctagatctgtgtctatctttntctctacatacattngcagatttcattntntggagattgattattgttgttatttcttcgtctcagaagaatggataatttactaggcattgctaattctacccacttttgagtacatggactatgaaggcctcaaaagaatattgaaagagataaaaaacagcaagcaagctacacacaataggtccttgcatcacaggctcagacttgaaagggcattcagtggaatacacttgcaaggtagcaatcatcagagagagggggatattgaggaccaagttatagaagtaaaaacattagaacaagatggttccagacagttatataagaccaactnttataattttgatgaacaacgatgagaggntgaggcaagactctgtagatgcttgatgaacagctcaacacggtcaatgcattttacaacgatc

SEQ ID NO: 65054 - DNA, 462 bp, Glycine max
  unsure (1)..(462): unsure at all n locations
agctggggtaatctttccatatgagtatctctgacttattattataaaagttttccttaatatgataaaccaaagaataggtatacaattatcaaatattttggcacataaatacaaacagtttcaggacagagatntgctctaaataatcgctacaagataggaaacttactacattttgatgagttgtatcatattctacgattgttcaatatgaatatgtaaaatgaaagtgcctgaattgaaacaaagtgacaaatctcaaatatgtattttccatcttctgagtataactccatatatagctagtatgcttatcagaattgtcccatccagctgccattgacttaccaaacaagtgtgcatgaatgcactccattacgaaccatttctcaccttgtgatacaagtcatccaacattgagactgctagtgatcataggaggaagcacgtgagagagag

SEQ ID NO: 65055 - DNA, 408 bp, Glycine max
tgcaaatatgagttgcgagggttggtgaaaggattgagagccttacacatcttcgtttcacacctaggctttctttgagtgcacccaccccttaacatacagtaacggacataggctcaatctcaaactcactaaacatgactcatcacacgctcatatatgtacaacatcgccacataaataattaatttactccaagcacttaatttagatgtaatttaacttgcttatgaatgaagaccacttaatcatactatttaaaaacataggatggtacaaactccttgacaacgaaaaaagtgctctcaaattttcttgtgaaggacatatcataagcatcgaccaagaacgcaactatatcgctttcaagaggacttaatcctttcctttgtgatctttcgtctagtc

SEQ ID NO: 65056 - DNA, 244 bp, Glycine max
tgcggcatgcaagcttctatccatggcttactatgagggtgtattttatcttgactcatcttctccttgaagtggcgtctacaatcaccatacctccgtctctatattgtttccattgatcttcacaaagtaaaggacccccttaatgaataagatccaaggcctacaagctctacatggagccacattactgtcagctttaagtgtccaccaatagtaaccaacacgcactatcttggctgcg

SEQ ID NO: 65057 - DNA, 485 bp, Glycine max
  unsure (1)..(485): unsure at all n locations
ctaagctctgtcctcagatccctctggtnggactagacgtagaccatttatcttgtattgtacagcatatttacaaccagaacttaatccgcagatccctcatttatgactaagtttcaatcctgcttcattcaagttctaaagcatcaatacttttcccaatgctaaagtcacctaactatgcacacaagtgggtgatcagaccatgagcatacagaatttaaacactgaaagaagcattgaacacaagaaacacaatcaattatgatattaaagtaataacattagttggtctttagaaatccctgacaagggtgtttanccatccattacagaaaatccctaacaatattgagattacaaaaccactgtatctttgcaaaagctactccttttgctgcctccagagctctatttccgtacatgcactatggtgcgctctgtaatcctctgcaaaaccgtgtaaaatcttgaccctaatatgc

SEQ ID NO: 65058 - DNA, 402 bp, Glycine max
  unsure (1)..(402): unsure at all n locations
aagccacccatcaacataantagcacggcaccaacataacattgcgggcacttgtgataatcatactcccgaaaacgcttacatgctngcaagacaacaaacgtttcataaatgataaaaacaagatatttaaataaatgccattaacgaaaactgcaaattctctgcttatccccgngtctgtaaattttaatgcnaaaaatgaaaactgaaaagcaaaacatcttacaagctggtttgnnttttttcctttnnnatctnnnnntggangnnnnnctaaaaaacagctttataagactcatcactcaaacaagacttttaaattcttattataaaaactagaatcttttaaaaaaataatcaatgggctttacaatttggtctttcctattctattagatt

SEQ ID NO: 65059 - DNA, 288 bp, Glycine max
  unsure (1)..(288): unsure at all n locations
agcttgaangcaacatcaagtctcctgtgcttatttatgaacatagaaagggcatggcattgaactgagaagaggctccattggatgttgacattaataatggtggaagggttgtggtgttgaacaacaataacctttcctctggtggtgacgttggtctatgatcataccttgtgaggatggatggaaatgccatgtgttctccatcatcctcttgtgaagctgcctcttaagctttttctcggcaaatgttaattgatagctttcgtgcacacgaggattccaatc

SEQ ID NO: 65060 - DNA, 433 bp, Glycine max
ctgtgaaagaaaacttcttcgaagttcttagagattaatgtatatttttagcttcacggtgaatcaaaggtgattcaaaggtgtattgatgataacaatgatgatgacaaaggtgatgacaaaaagctcaaagatcaatcaaagaacaactcatgtgaatcaagaacaattcaagagttcaagataagaatcaagaagaattcaagaactcatgaagaaaggctaaagacaagaatcaagattcaaggttcaagatctcaagaatcaagatcaagattcaagactcatgattcaagaataaagagaagactctatcaagatcagtattaaaaagttttttcaaaactttgaatagcacatgaatttttgacaaaaccttataccaaagaagttttactctctggtaatcgattaccataattgtggaatcgat

SEQ ID NO: 65061 - DNA, 489 bp, Glycine max
  unsure (1)..(489): unsure at all n locations
ctgagccanaatcctgactcaccatgaaccttgacccagtgtgagtatgtcaatccttaccctcggaagcaaaaaaaaaaggaaagaatgaaaatttccaatcaaaggaaaaaaagagaggaaaggaaattcctaaccaaagagtgggagaaagcaaaaaagaaaagaaagaaaattcccaatcaaagaatgggagaaagaatgggagaaagtaaagaaagaaaagaagaaagctcctggtcaaaggaaccacaagaaatgtgcagagaggtctttagaccggacagtatctgaacaatacaaaattgtcaccaaatgaacaaaaagaaggaaaggaaaccatgacctanaatggtcttctccctttaattgccaaccacaatcagtgcgctagcgacttgttcgcctcgcgcanaaccaaaacagaaaaggaaaaagccaacataaaatcaaaagccanaaacacacataagccgaaaaacacatcaa

SEQ ID NO: 65062 - DNA, 441 bp, Glycine max
  unsure (1)..(441): unsure at all n locations
agcttctcccncattntcctataaatagggggagattgtgttggataaaatgttcagccctcttggtaattcgagaatcacttgaaattagtgaaaaaaaatcggttccgtgaagaaaatccaagctgcggcgcttccgtaacatttccgtggttgatttcgcgaagattttcaatcgttcttcaccgttcttcatccgttcttcattcgttcttcggtctttaaccgataagttcccgaaatcgaacttttcaattcattctatgtacccttggtggtcctcatttgttttcacgtgcttttatttgcatntcatttactntttgtaccctcttttgacgtgctttagtcattttctcacctaatcaaagaataaaataaatctccaccgataattngaattggaatatcccgcaatttctggttaaatgaaatctgact

SEQ ID NO: 65063 - DNA, 425 bp, Glycine max
  unsure (1)..(425): unsure at all n locations
gtctccatcttcttttcgatgatgcataaacattggttatccatacgctaacattgttgcattacccaaacccacatgtaagcaccattaatcatggctcttcaatgctgcacaccaccaaaaacatgacaacatcactactcctttaccatacgaccaatacctataaacctacatctgacacccaaaactgaacacattcctcctaccaccctcaccaaaaaccccattggcacacaaaccaccatcaccttagcatcgtgacacaccaccattatagccctgccaacccatgatgtaccataaccganaactaccaccaccaccatctccttctgaatcatgaacctcgattcaaaacatgtttcgattacccacaaagcacggttctagaagcacaccataacggcgggttccttacttac

SEQ ID NO: 65064 - DNA, 402 bp, Glycine max
  unsure (1)..(402): unsure at all n locations
tatagtgagaaagacttttatcgtcttacggagntcaactaacatcctatcctagaacacttttaagcagctgggtatattggagttagagctccttcatgtgacaacccactattcggctctcccaaagaaagaatgggaaccaagggatgtctatgactatacaatacaatggttcgaagatttgatatgtgatggtgcatgcacacatcttctacaacatacttcttagtccgccgtctctaaatgctctgaatgccatagtgaattagagaattctatagcaagtctcaagcttggcccttaacgaaagatgagccgcattgagtcattcactatatggagattgcggcangagccaaacgatccacggagttagatctatacctgtgaaccaatgac

SEQ ID NO: 65065 - DNA, 458 bp, Glycine max
  unsure (1)..(458): unsure at all n locations
atatcctgctcaactgatcatagatactctttatatcttatagtattaatccagnnttattttgtcatgtgctctacagtgaatattaatgtttgtgatactttgncaaaaatgtatgggctatttagaattatatttcaaaaattcttaatgaaatttatcgtccaaccttttcataaaccatcaatgattgttatttatactgttacactgcatctctatatatcctaaaagataattactgtcccggcatccagtgcttttcaaatatcaatggctcacctatcagctatatctgtattagtatacatgtattagaagtgtcttcgacctatactataattatgatgatttgagcctttatcttgatgacactaaatatcatctttgacataatatatatcaggataattcatttgattacttaataaaacgtgaaatgtatgtctaactaatga

SEQ ID NO: 65066 - DNA, 237 bp, Glycine max
  unsure (1)..(237): unsure at all n locations
cgcagcacgcaaccncatcaagggngaaagaacaccaagattactcttctatatacaactatatgaggaggctatatacagaaattatattcaacatatgacaaacaagaaagaaagttgacacaacattacgacaatatactactaatcaaaataaaaacacacataaacgaacgtctcacctttatgtcattggcctcatctacaaatattaacaagatttttcccatgaaactc

SEQ ID NO: 65067 - DNA, 387 bp, Glycine max
  unsure (1)..(387): unsure at all n locations
acagcttctgattgttgaacaagccacttaatatctttgtgtattgttttaaatacatggaattgagagtatatgttgcaccccaagctgataaagggatgcagtataagttcaatgacaagctcaattantgcgctatgctactggatgttgaacttttaaagataacccagatcaatcctttatctgcaaggatttggggaaaaaaatatgttaaatatgactttaaataattaaaaccaattcttgatttctggctaccacaaaaaattctatgaattttaacataatccaatgactcttaggtatataaaaattttatataaaaggattttgattatattaactaagattaaatatttaaagaaaactatccctgttccattt

SEQ ID NO: 65068 - DNA, 493 bp, Glycine max
gtaacctgcggcatgcaagcttgtagctaattatatacaacacacaaaaaagtttatttctggtagtacaaaatcaaattctagttaaagcctaacaaatataaacatgattattttcttcagggaatctttgaggggctaaaggcacatagaactgaggatgggtgcatacttctatttcgaccagatgagaatgctcaactcatgaagagaagtgcagatagattgtgtatgccatctccatctaatgaccaatttgataatgctgtaaagcagatagttcttgcaaaaaaacgctggcgattcatttcctcctattattcatccttaatattgttctttcgtcttataaatcgtaaaacagaataagctttaaatttgagtaacgtgcctccttcagtaaagggctccttttattatgtcattgttcatgggaactcggacattgtagagatggcccaccaccagatatacattttcattatagtctcaa

SEQ ID NO: 65069 - DNA, 360 bp, Glycine max
  unsure (1)..(360): unsure at all n locations
ctaagcttaaggtacaacatctcttttgagtgtttacagtttcgtgtgttatcatcgtctgttgttagttngacactggtgaagggagaacggaggggggagatgtcattcgttctaatgcctcactaactaagatctaactactaatcatttgccctaacctaacctnnaaaactcttcttcattctccaatgggatttgtggattttgccttgtataggtgcaacacattgataatctttgctgttgcgttacatgttttttaacttacaaaatttcgagtgagattcttttagttgtgggtgagagcacacacacttcccacttcctcttttttgttcccattcactgtatgtcatg

SEQ ID NO: 65070 - DNA, 294 bp, Glycine max
  unsure (1)..(294): unsure at all n locations
aactaactcgtaagtaaccatgtgttggatgaaacacgtctttttttttattcttatgatcttcaggggattctattacattaaaaagcattggattctccaacacaaatcacttttggttnttcattattgtaagattcatgcataatggataagacaaaacgtgccatatgctttggccatatggagaattaagatgtgggacgcgctatatatatattcccctatgcacanncctcattcaaaggaaccagcttcttctgtttgtaacctcatctatacacccatttcatt

SEQ ID NO: 65071 - DNA, 358 bp, Glycine max
ctatgagagacaacgcggctttcattataacaacacacaacccacaacacgcactggactaaagtctataaaaggatgcctccctcaaagaagcaatggacgaaaaatgagaagaaaacaagaacaagagagcacgacaaatacttgaagagaaactctgctaaaaacacaagacgacatacattgtttggttctttgcaaagcaaattagctctgaaattgcccttaactcgatattcacttgctgaatggtaagacaacctcaactcacccaaacaaatgtctgcaaagctaggagtggctaagcggcaaaaaaaaacacttgcgtcctcagatccatgggagtataagaagacac

SEQ ID NO: 65072 - DNA, 244 bp, Glycine max
agcttcctctaccgtaagaaagaaaacattattgtcctttgagcgtctataaaaagtaattgcgcaatgtcaactgacaaatatcactcgggctacttcacgaccgatgttggctattgagttatctatgcaatcccttaatgaaatatttatgatgtcggctaggaaatgatccatcggcgtcatgcagtgatgcttctgttctagacctcgatcggtcatctatcttggcggacgtccactg

SEQ ID NO: 65073 - DNA, 415 bp, Glycine max
  unsure (1)..(415): unsure at all n locations
tcttccggaagatntccattgtcttccggaagaagctgctttcatattttatgtttttntagaaaaaatatattattttgtaataatttacttataattgcataaactgatatataaaataattaatactattatgcataaataattaaataattagtgaacgtaattatgactaatatttataatttgttttttacgcgcatgtcaaatattaatttaaaccataaaaattaattaattcgtaaacgtgattattgttttataacaaaatgaagaaaaaagaaatttgattttataataataagtaaaaataaaataatatttaatgcgtatgtaatgacgattntgcccttgtgtaaatgtctntaaattaacgtgttgaggctgctgtttactgcgctttcctttgttcttc

SEQ ID NO: 65074 - DNA, 325 bp, Glycine max
ctgcaactgagtactatgtttttaatccctttatatgttctgaactatatgcacttcacgaaatatacctgttgaaatattacgaacaatgtcttataataactggattttatcaaactatagtcaaagtattgaaacaataataaacaaatgattagttctgatctgctgtcaatgaaactctatcagaaacataacaaataaagtctattgtattgatatttaaaccaactaaaatatattaaatgtttgaaaataattaaatcatatcaacttaaaaataaatgactactattaacaaaaaacactttttattaaatatatt

SEQ ID NO: 65075 - DNA, 493 bp, Glycine max
  unsure (1)..(493): unsure at all n locations
tgacctatgcgccanaaanatntcagatggcattgacttatctatatcgcacaaattcaaacttgagtgttgttcacacgtcaattcatcattaacatccttgtccaatgtctcaaaaaaagaaacaatccatattgcaccaactaaatcaacaatgcagataacatcgattgttcacacgacaatgaatcattacgtcctctattgaagtgtaagttatttattaaaagctctcatagaaaaaaatgggttatttaaaaaacataaaaaaatcacatttttaaggtgtattcttcaaacaatcacaacccaaatnngattttgtatggtatttctagaaactacataacgaanatgaaactttgttgtgtaattttgaaaaaatattctacaaaaacttgttntcattttgtttttttcctcaacggaataatattttcattgcgcttagaggagcaaatctaatacacaatgaaatcacgactttgttgag

SEQ ID NO: 65076 - DNA, 382 bp, Glycine max
  unsure (1)..(382): unsure at all n locations
taagctcagagctcgagctgtacacgtggctccagacgcgagggtacgttatgttttacggnggacaccagaggagcacaatccacangccctatggacaagtgcacaattctgattctacgccggctgtgctacatgttgaccaatgcatccagattgactttcaacttcttaggttccgatgatgcaggagggtttgtaactacctcatgcactcctcttatgactattgcatactttttggcgctggactgctgggagatagaggccatcttctgcattaaatatttggcgttaacaggaaatatgtcttcaaggctccaccactggcaccatacttcatacctctctactattaatgagtcgctcataaaatattgga

SEQ ID NO: 65077 - DNA, 273 bp, Glycine max
  unsure (1)..(273): unsure at all n locations
aattgaaacaaacccatatgtgccctttccattagttccaatttctcgaagcaatcaacacttctggatccccaaatgggtgatgcattcaccttcatctgccctgnggctgcaattgccattgctccctaatctttcaaggaacgaaattcgaaagcaacagcgaatcgaatgaattagggtttctctatgtgttctcgcgcgcgatatttttctagaaagtttctcgcaagatccaatacctgatattngcattgcttaaaccgaaagctc

SEQ ID NO: 65078 - DNA, 462 bp, Glycine max
  unsure (1)..(462): unsure at all n locations
acacataaatctcagctataaacttgggtctctcttggagaacaaccggatatgagacatttaattgcttgcctacgccacaatgagttgtgatggctgctgtaatgtttgtgagacatacatatcttcttttcacacctaggctgtctttgagtgcaccgcccccttctcatacatcaacgatcatcggctgactctctcactctctatagatgactcaccacgcgcaaatatatgtacaacatcaccacatcaagaactaatttacttggagcacttaatgtaaatttaaattaacttgctcattaatgaaagccacttaatcatacattctanatacataagatgttacagactccttgacaagatacaatgcttcctcaaattttcttgtgaacgagatatcctgagcatcgatcaagaacgcaactatttcgcttctaagaggacttaatactttgc

SEQ ID NO: 65079 - DNA, 249 bp, Glycine max
  unsure (1)..(249): unsure at all n locations
atcttaagcgactgcggctgcagctgagctactgtactgcccacagagccctctaaattcntccggccgngttcttccctatgagccctttntgtctcttgctccaaggccttggtggtagctatatttacatttttcagttcggcattctcctttcggattttcagagctgttgattcgaacctttctttgattgtttgggctcgctcgagttctgccctacgagttgttcccagattttaccgtaag

SEQ ID NO: 65080 - DNA, 422 bp, Glycine max
  unsure (1)..(422): unsure at all n locations
agaggagcacaaaccacaaacccttgcgacaggtacagatttctgattcaaggccagctgggttaccatgttaaccaatgcatccagtttgccttcaagcttcttagtttcagatgatgcagatgggtttgtagctacctcatgcactcctctaatgactatggcatcatttctggcgctaaactgctgggagttagaggccatcttctcaattaaatttttggcttcaacacgagtcatgtctccaagggctccaccactggcagcatctatcatacttctctccatattattgagtcgntcataaaaatattggagaagaagctgttctgaaatctgatggtggnggcaactggcacatagtttcttaaatctcttccagtactcatacaagctctctttcactgagtgtctaatacctg

SEQ ID NO: 65081 - DNA, 456 bp, Glycine max
  unsure (1)..(456): unsure at all n locations
agctnggtgcatatgatntatatgctccagcttgatttgttgtgttgaatgtcgaatatttcttttgtatcttagccttgtttggtagcttaatctgtaagccttattcagaaggcagcagtgagatgtcactgtcatctctcctctctctnttttgtatcctatatatatgtaacattctgaatctaataaaggtgtgagagaaagtgaggttttgactcctcctcaccttcatttcaagtgcaatcaaagcaattctgaggacctttgaactagtatcaggcctcaaaattaactctgcacaaagttgtttatggtgcaattgatatgtcngataggtggaagcttgatgcacctagcttgttgaattgtagctcgctgtccatcccgtttgtttacctaagaattcctatanggacaaactctangcggtgtcagttgtgggatcctattctc

SEQ ID NO: 65082 - DNA, 319 bp, Glycine max
taactgacgcatggtcactgtcaccaccggttgaatataacatgcccgtctcgacttgtggttatgctactctgctgaccatcacacagacatatgaccttctgtgcagcacctctagaagctaatagaacgagccgagaatgcttctgcgagctaaacactctactgacaagaccatactctactctctatggctcagatcgcgctgaagtagaattattatgaccgctccaacaacatgctacaatatcgaatggaggacccatcgcacccttagatggtctagacctctacagattgggccacatccacaacagac

SEQ ID NO: 65083 - DNA, 350 bp, Glycine max
acaaggcagcagaaggaactagttccgctccggtgtatgatagtcaccgctataggagcgcggtacaccagcagcgcttcgaagccatcaaggggtggtcgtttctccgggagcgacgcgtccacctcaaggacgacgagtatactgattttcaagaggaaatatggcgccggcggtgggcaccactggttactcccatggccaagtttgatccacatatagtccttgagttttatgccaatgcttggccaacagaggagggcgtgcgtgacatgagatcctgtgttaggggtcagtggatcccgttcgatgccgacgctatcagccagctcctgagatatccgttggtg

SEQ ID NO: 65084 - DNA, 431 bp, Glycine max
  unsure (1)..(431): unsure at all n locations
tctcggctcatgctgngaacgcctctagttcaacactcgtgcagcttatgtgtcccacccagagggaagctccccaagttccaactccgaacacggctcgaccggccggcaattccaacacgacaaggaacttccctccaatgccattgccggaattcaccccgctcccgatgacgtacgaagatcttctaccatccctcatcgccaatcatttggccgtggtaactcccggaagggtcctcgaaccccctttcccgaagtggtatgaccctaatgcaacttgcaagtaccatgggggtgccccggngcattccgtcnaaaaatgcttggcccttanatacaaggtccaacatctaatggatgccggatggctgactttccaagaggatcggcccaatgtgaggaccaacccgctcgccaatcatggaggg

SEQ ID NO: 65085 - DNA, 437 bp, Glycine max
agcgtagacttaattctaaaagcaaatagcatactatgtcttttattagtgaaagccaccgaccaatataaaatcagatttatcacctctcaacacttttcttatgcatgtcatcatcctttattcgatcaacatttggcatgtgttctctgaggattaaagttcttactacaataaatgtcttaatgcatgcctcaactcttattcaaccagtgttatggatgccttttggagtaattcttaagaaagaaattgaataatttattgtatatcattaattcttatttctactgatatgtctgtaatgtttaaactatttaagtaagaattcgaactctcaaaatatatttaattattataccatattgtctcaaacacaaataatgtatcatttattataacaatgattcatgtaatctaaaaagatataaataata

SEQ ID NO: 65086 - DNA, 138 bp, Glycine max
tagcttgcttatgaaagaatatcacaaaagtgtctttcttggacaacctatggatccaccatctaaatcaaaatatttgcaacggcaatataaaatacatggcccaacacttcaagggagtttccataaggtatgccc

SEQ ID NO: 65087 - DNA, 474 bp, Glycine max
  unsure (1)..(474): unsure at all n locations
agcttctacttatgtggcagggcgggctttcttctttttcttgtccncaacacgagctntgaccaccgctcttccttcccgcgatgcttctctntatatccacctgagtgggcttatagcctaaaccatacttcccacgatttcctttggcatttatcaggctagttatgctgccgttgtctttgcctaaacccattccgggttcgtaaccgttccccaacataactcgggccatcattactgctgcaacggacaggcaaggctgcctagagaaggagtccacggaggaaatgctgaccacctcaaaagactggaaagcggtttctaacgattcttctgcggcttccacataaggcatagaggatgggcagctcaccaagatgtcttcctcgcctgacacgatgaaccaagtgcccctccactacgaattcaacttttggtggagtgagagggacaactccactgagtggacca

SEQ ID NO: 65088 - DNA, 421 bp, Glycine max
  unsure (1)..(421): unsure at all n locations
agcttggagggatngatggngacccggtgttgagaggaacggngataagggctacgtgggagtacgtgagctcagttgaaggtgggcaactggagatggtggatttatatgtgatttgtggatgtggagagtcgacttgcaccatcgcccgatcaccacctagtaccacatatgacggataccccataatcctacaagcttgaagtgagaaagtgtggaagagtcagtcttcctacttttattcgttgaccacagagtggtacctggagatatgtcgcaggggtcaggagaccttgcggatgttaggtggggtgctattgcccaaaaccaagcttaaccaatcccgaccaacccaggcatagtcagtcagtgagaacctgtgacgtacctcaacatgcgagctcctgcacgtcacccgata

SEQ ID NO: 65089 - DNA, 379 bp, Glycine max
  unsure (1)..(379): unsure at all n locations
agattccactccaattaagatgttcctcttggagtgagggttcggcgacaacaaacgacggctcgtggcagccacttgtggtcgcgtgtggtggataacgacgtgttcaggtttgggtggcgtatttgagaagaggagagtgaaaaatcgtgttttttacgatgacgaatgtattgataatctacacatattgcttaacaagcttgtcttgctaagcgggagtccacttttctcgctgagcgtgcaaattcttgctcaancgaanctcttctacactatagctcatctcacgttatttcctctctggttggaattgtgcttagcgagacatctcaagttgttatcttatacatccaaccgtcagactatgcacacatgt

SEQ ID NO: 65090 - DNA, 355 bp, Glycine max
  unsure (1)..(355): unsure at all n locations
gaaagcttctttgtgttgcttcctagtctataaatagaagcatgtgtaacacttgtggtagacttgatgaatgagagtcttgtgagacacaactcaaaggtcaacttctctgcctttttcttgcttcaatntcgtgctcccccctctctgtttctctccctctttcttttcctgcattgaagcatcctttccaagcattttatccaaggctcatcttggtggtgaagctccttcttctatggcttattccctagtggatggcgcctgctctcacctcttctcctttgtcttcggctgcatcttcatggtggaaagtcaccattataggacctcattgaagctcaaagatccaacc

SEQ ID NO: 65091 - DNA, 365 bp, Glycine max
  unsure (1)..(365): unsure at all n locations
tttaactagatggatcttagtgttcagaacaatgatatgcactgggctagaatttcaacaaaaagaattcaattaattcatattgcaatggaactttatcaagggatcacacaatccaatacaaaattatgaacaaaagctcacattgtagttttgagtaggccttactatagtagctacaagtggagcttgtaggtcttggattatatctatcatggagttttttgtttcttgaaaatcaacggttgcggaatggaaaacacagaaagataattacagatgtcactctgaaagagaagatgagtcgagaacaagttcatcaccatagaaagttatggataacagttcaacggangatatgagtg

SEQ ID NO: 65092 - DNA, 483 bp, Glycine max
  unsure (1)..(483): unsure at all n locations
agctntgtccctgaaaccctatgtgtgaattattatttttttcctgaaaccctctatgtaaatatgacagcctcatctctcccttcatgaaaacccactaaaaattgcctaaccccccctgttgttactccataatttattctgcaataactacttaaggcagttacatatggtcctaaatcactacacatttagttacgattaaccctttgtgcctaactagggtgtcgaaacatcacaacagagacagaccattgaacaatggattttcatcattaacatacaacagagacataccttcgatggaagcgcagacacgaactccacaaacgcgaactctacaatgtggttgcagtcacggaagtgcagcccattttgcgacaaacacgaactcatgcagaaggagaaacaacaataaagccctgtgttaaaacgacgaacgcctaatgttaaaacgaaaggacgtacctcaatggataagtg

SEQ ID NO: 65093 - DNA, 487 bp, Glycine max
  unsure (1)..(487): unsure at all n locations
taaatccttgtgctntgttggtgcccaaaataggtattattaggctccaaatccctaaaataggtggtctgatgaatggtttgagtggtccaaccctcttttataaaatcactcatgcacccaccatcttcatgatttgtgtatgtagggactcattaggtaggtttgttttttttaatacaaacttaggtactcatatgggacaccttaggtttgtcatactttttggtaggaaaaatcaacatgaaaatacagaaaaaagtatgttttattgcattacttttcttaattntttaaatantnatcaangngttcccatgaatccgaagagaataaaggtcattcctgagtggcccactccaccaagtataagaaaaatntaggacttccataacttaacaaacttgtacaaaaggtatgtcccatatttttctatacttgtagcaccactcattgagttggggaggaaccatgttccttcatggga

SEQ ID NO: 65094 - DNA, 406 bp, Glycine max
agctcgcatcttgaatgccatagtctcactgtcactattaatggcaaaagtggatgtatcatttactttcatcagctgtgtcataatttcgggaccagttctccatttatgattatatgtgcagcgagcatttcgtgaattacgctattaactagtaaagttattttattaacaattgtcctaaacatatcaattaaggaattaataaatgaaaaataaactaaactgttcaatccacatttaaagtgtctgagtggaaggagagatagaaaaaataaaacataaggaaaaaaaagttgttgagtgtgacaaatgataaaaagataaaaatgtatagtcaaaatgggatggaaaaaaaatcgaatgtacgaatataataatcctgattagtaaagaaaatatagag

SEQ ID NO: 65095 - DNA, 486 bp, Glycine max
  unsure (1)..(486): unsure at all n locations
taagggactcanagtccanatgttgaagtatctaggggatgatttctaattcacacnaattgcatggtcaaatntgaaagggttctcatgatccaattgatgattntcttgcactctaatttgctaataaaagagtacacgaaagatctgaaaaaccatgaacttgaaggcaggccggttgcttcattgcataattgaagttgttacttttaccctagtattatttgggtaccaataccaagataatgtattttcttctttaaaaaaaaaaaaacttatagccaaactgccaaagtcatattctctcgtctctttctctatgggggtatctttggtgttagtagcttaattaggtgcaacaaaagaaacgaagtgttggtccccaatgaatgttaactacttgtttcacaggtttgcttaccgaattccacgtgtgcactctgatatttccctgcaagtattttcctcagcctatgaaaatcacaa

SEQ ID NO: 65096 - DNA, 481 bp, Glycine max
  unsure (1)..(481): unsure at all n locations
agctngcatctactgcatttcaagatggaggttgcttgcttttgcatcccaaaaattgtgttcatattaagttataagtgcatagattgctctttatataccaatttcccaaatctaatgtcctatcttaagttttggatgagagaccctcgtaaagagtcaacctcttgctttctcataaggttgagccctttggtactaatacttattggcttatttcacaagactcanagtcctcattgttatctttcattggactcaaagtcctcgcttttatctttcagaggactcaaagtcctcgcctttacctttcacaggactccaagtgctaacctttatctttcataggactcaaagtcctcgcttttatctttaatgggactcaaacgcctcacatttatctatcttatggctcacaggtctctgtctttatgcttttgtacgactcanagtcctctgtcatttacatttcaaagacttc

SEQ ID NO: 65097 - DNA, 451 bp, Glycine max
  unsure (1)..(451): unsure at all n locations
aggaatagcacttgggcacacatttcggatcccctatgttgtccttatatatataaaacagtcccacaatcctaattatacaaaaatcacactcatatgtcattgnggcatttcactgagcacttggtgggcgcatgtttagacataagttgcaagagaatgggggcaatgtggcatgccccattgcttcaaaatacaacacaggcctaaggccttcccctacaaaccctcaactcaacaaaacaagcatggattcagacgtgaattgcttcacgaatttcgcaaaaaatgagcaatttaaagcaccaaaacacatcaatggagagccanataaccaaaggaaattgtacttacttgtggngagtgaattaaagcgtgaaaagataagcaaaactcaacaacggaagctaggaggctgctgttcttgtaattcccgtgagcttgggagttt

SEQ ID NO: 65098 - DNA, 414 bp, Glycine max
  unsure (1)..(414): unsure at all n locations
agcttcaccgatgatgccgatcgaacattncctattcgacattatccaattgnnattcagggattgaatagaataaacaatggccggtgtcngtcgttatatgagccccgactgatatctttcagcctacattgcgcaatntcttntacaaacgctggccgataatgttnntttatttacggtagaggacagtttttgttttggtgttgcctaaataatatacaacgtaggacggctaggtttttccgtgcgagctcaaccgagggttcattccgaccgacactggcatgttgttcttctcatttacgaggataagaaagcgttcgcccaccccggcataaacaacaaaaagacattattcatggaaattgatcgaaaaatgattgctgacctaacatctagagatgaccgatc

SEQ ID NO: 65099 - DNA, 498 bp, Glycine max
  unsure (1)..(498): unsure at all n locations
tctaccatgccacaacgaaggagactgagtatggatntaagaaaacanagctagtttcagtgctctgggtcaaacacccacatcactacatgaaagagctgagagtatttcgggttttacaaaggaacgtatattggaaattccgaccacgccaatgtgaccggggttcagtgtaggttacgaaaataacatgcatttcatgaaaggataatgtttacaaagtctctttctctaaggtttttcaaaggaagcataagacaagcaatggcagttccaaagtcagaaaagatgcaaagacaagatgaaactaacaagaaacaatcatagaaccatgattacctcgaaagaaaacgaaagatcagattagggttttcgttctctaccgaaaccgcaagccaagttggaaattctgcttcagttgaagggttcctctcggtgtgggttttcaatggagaacaatgatggtttgtggtggctaatggtggatgtgggtgatgg

SEQ ID NO: 65100 - DNA, 466 bp, Glycine max
  unsure (1)..(466): unsure at all n locations
agcttccctccaacacttaagcagaaagaagtgtattntntgttacacagtttcatccttatagacaaaagagaattatatctggggagaggtaagataatttggaagctctttagtttaggctaatttcaaaaagataatagaaggaaattggtggttatgtagagtggtggttagtgccaatggttatcagaagagagggagcttgtactaagggaaagctcaaatacaaaatgatcatcaatactttcctttataggaaactatttaattcaatctattggtcagttgagctagggtagtgccatttcaccttgtcacgctaggctgaagatttaggatcttattcagttaaggtgggtatgtgggaacaattaattcaatatgatacaacttaaaaggactggtttgggataattccattggtgaggactggnggagcttagtttcaacgtgttcatttcac

SEQ ID NO: 65101 - DNA, 484 bp, Glycine max
  unsure (1)..(484): unsure at all n locations
tatagaaaacagcggtgagtgctccttgatatataatatagatggtgatttttctgcttcatgatcacctgtaaacaagaaaagttgctntattattctatgtaactcatcttatctaaaccattgcctttcttgtnttgatgattgtcatagactcatagtttttgcctttgatataattttctgcaatcatatccgttttaatagtttgagtttttcaataatggatatgcagcaatatttcaaaataagttggtagacacgatacatttcatggaaattctcagtttgaaagatagtgtggagagagacaccttcttccgcaagcttccaaatttagctgagcaacttcctcgccagatagtgttgaagaaggtatatttctgtggaatntctaattataaactatagacggatccaccttttgtatccaattnntttatgattcttatgttttntnttttttttcacagtacttccttta

SEQ ID NO: 65102 - DNA, 401 bp, Glycine max
  unsure (1)..(401): unsure at all n locations
gccaggagcaatgaggctaatactacgcggaaagaaaagactcccttcatcacacaattatntcataaagcaataaacactatcactcaactacatccctttcttgataaaattatggaggcacagctcctgcctgaatggaagccgctgaccattgatcgctacgatggactctagtacccagatgagcacatggacacattcgtcacatagatatgtctgtttatgaatgaccacacaattatatgttgagtgcttccaacaagattgaaaggcgtagcacttcactggtatactagcttggcgagaaactctatcgactcatgtacaactcttacgacgctgttcatatcacagtatgtgatggggtaaccacatcaccttacaacacgtggactcac

SEQ ID NO: 65103 - DNA, 383 bp, Glycine max
  unsure (1)..(383): unsure at all n locations
caccctctgcatctgatgttcttgtatcagatacacagctcgcattcctttgattatctcactgactctatactcttacttcagcatattacagatcctgtgtgccggcttcatcgtcattattctgttgaaaatgactggagatacaactgtgcacaaaattgatttatctatggactgtctaaggctcctttctttgagactcttcatttcggcaacagcggggttatctggcagaagaggaactcagtagtcctcttctactgcttcccatacactcctaccacctaaatatgcttccatttngacagccgcacattgatttttagtccatctatactggtaccgaaatggtaatcaggatgttccaaagccctcttatg

SEQ ID NO: 65104 - DNA, 372 bp, Glycine max
  unsure (1)..(372): unsure at all n locations
agcttccattggtcaatttcgagtgtcacgatatattatgctccctgaatcggacctccgagtgaaaagttatgaccatttgaattgctcaagagcttccattgttcaatctcgagcgtctcgatatattatgcgtcataatccgacctgcgagttagaagttatgaccatttgaatttctcgagagcttccgttgttcaatcttcagcgtctcgatatattatgtgcctgaatcngacctccgagttggaaggtatgaccatttgaattgctcgagagcttccattactcaatttcgagcgtctcgatatattatgtgctctaatcggacatccgagtgaaacgtggtgaccttttgaatgtttcgggagc

SEQ ID NO: 65105 - DNA, 389 bp, Glycine max
  unsure (1)..(389): unsure at all n locations
ctcgaaagtcggccttaaacttcacaagacaactggcatcatctgatcattgcgatctttgagaagatgtctggagtgtgctagaagcctcttaatgaagctcctatacaaaactacatgaagctgcctcggtagaaacgctgcccagtcttcgttaaccgatggatcttctctaaatttggtttgcaccttcacaagacactctaccatgatttaaccggtgggatttcctagaaaatatctnnaangngcnnnaagcttcccctcccaaaacatctcttattaagcattcagcctttgctttcctgtaactatgaaaagaggatctcttcttctttctcttccgtatccttttaacgatcaagacttttgcatccccacattcgcat

SEQ ID NO: 65106 - DNA, 399 bp, Glycine max
  unsure (1)..(399): unsure at all n locations
gagcgttgcggatntggtcttcgccagtgaagggatttatgtttgtcccaagaaaggcacatttgatcatgctactatgacgaccgatagaactacggccaatgaagagggtgagacagacggagaaacccacgttgtgactgccattcctatacggtcaagattgccaccacactcggacctgacatccctcacataataacacaactaaccctttccgaccaaccaggtgtccacaacggtcctcctaaactgaccacagagctgtgtaccgcacttctatgaccaacaccacctttcgctcctacgaaagcatagacacaccatccaaaaggactagtcgcccaaaaagcctgtacggatcaccccagattccattgtgatatgctaaacttgctc

SEQ ID NO: 65107 - DNA, 248 bp, Glycine max
cttcggaatcacattcagacttgatccattgtttattttacctttgctacaacatgagccatacatgtcaccgacacatgtagagccttgttgtgtgctgtactctcggacgacatctcttcctcccttgacactatgtaaccatagacgcgtatatgactaacgatgcactcccgaaccctccatcgatatatgaagtgctacatgcgcatcctttaagacttttatcaatagcgctcaatgacgct

SEQ ID NO: 65108 - DNA, 250 bp, Glycine max
actactattatcatactgtggttgagtgcacactctatcgactccttatagaatgactctctacctgcacatggatgctctattatgcacatctctagaataattagcttgactccccttaattgagttctagatatctcgtgatctaatgaatacgacttactcataccttctcaatgcgttgcactatccaaactcctaagatttactcataatgtgctgaataaaacttgttggtgaaatatattat

SEQ ID NO: 65109 - DNA, 492 bp, Glycine max
  unsure (1)..(492): unsure at all n locations
tccactctcttcttcagcgattccatttccatggcttcctccctctacgacaacttcaaccttctctctcctgaacaggttctctctctctctctctttggaatttcaaccaacgcttcgggattctgattntgattttgattcggtgactctctcagcaagagctggtgaaggtgctactggataacggccaagagcacctgtttcgcgattggccagctcccggcgtcgatgataaccacaagaaagcgttctttgaccaggttttgttttattcattcaattcactcaattaaaatacatagatccgttccttccttccttatattcctaaacgacgttgcgtttttcattagttgactcaactcgattcgagttaccctggtggtctggaatcatacatcaaaaacgctaaacggctcttggccgattctaaggctggcataaaccctttcgacggctttacacctttcgtaagtcttgacagacgtg

SEQ ID NO: 65110 - DNA, 465 bp, Glycine max
  unsure (1)..(465): unsure at all n locations
tcccgtatccgtacttggaaggatctgattaccgccttcctattgctttatcagtacaattctgatatggctcctgaccgtactcaactgcagaatatgttcaagacagagggtgaaacctttaaagaatatgcgcaccgatggagggatttggcggcacaagtagctcctcccatggttgagagagagatgatcaccatgatggtagacactttgccagtgttctactatgagaagctagtgggttacatgccgtccagctatgcggatctggtgtttgccggtgaaagaatcgaggttgcattnaaaaaangaaagnnngattacgtttccttcacacacgtgaacgccaaaagatatcgtgcaacaggggcaaataggaaggaaggagatgcccatgccgtctcttaacacccccctgggtaaaccccacaaacacctcttgtacccatcatacgccaacat

SEQ ID NO: 65111 - DNA, 470 bp, Glycine max
  unsure (1)..(470): unsure at all n locations
ctgcagcttngaaccaaacttttgcttcatgcattttactactatggtaaatcaaattggtgtgaatagaaaacttaaataggactgcttggagagttttatttgaatttggggctgccccatgtntgatactttgcatagaggtagtatggaaaacaccttgcaagagtgtgcatatatatgtaaatataaggggcatggaaattcctagcaaaatgtgaaggattatctttctaaataaacacatgatagcgtggaattcccttttgaatgcaagtgtgtgtgcaggatataatnagttctccaatatgcatataaataaatgtgagtgaaacaataaaacttgtatgatatatatttcaaatatgtgtaagtagcttgtaaatagcagatatttaggatataattaggtgtaaagtatgacgcaacgccttgagcatgagaatgtgtgctcttctcaagatgcacat

SEQ ID NO: 65112 - DNA, 386 bp, Glycine max
agcttctaagtagacctctcggagcgattccttattctcatttgctatgaaatcttgacatcgtccacgtctatcctttgcatcttgtattgactgaggcttaatatattcatacaccgatccatgacccaagctattactccactcatgcatatacctaaatggggacatttcaaaaaataaattaacatcatgtatataaagaaccaatctgcaattaaatagtcaatggcatgaattttacttacatggtccacaactgtagtatagctatgttcagacatatgtcgcctgatattatttcagtgacatcaacatatgttatgaacaagggtgcatctacatttggaatcccaaatttactaacatcccacattaactaaata

SEQ ID NO: 65113 - DNA, 486 bp, Glycine max
  unsure (1)..(486): unsure at all n locations
tganatgaacaacggaagctntcgagagantgaattttcataacttttctcacggatgtccaattcggggacataactgatgtagacgctcgaaattgaacaacggaagctctcgacaaattctaatggtcataacttttcaaacggatgtccgattctgggacataacacatcgagacgctcgaaattgaacaacggaagctctagagaaattcgaatggtcataacattttacacaaatatccgatttgggaaaataatatatcgagatgctcaaaaataaacaacggaatctctacanaaaatcnaatggtcataacttttcacacagatgtccgattcggngacagaatatgttgagacgctcgaaattgaacaacggaagctgtcgagaaattcaattggcacaactttcacacangtgttcgattcngggactaacacatcgagactctcgaaattgaacacccgaagctctatagaaat

SEQ ID NO: 65114 - DNA, 418 bp, Glycine max
  unsure (1)..(418): unsure at all n locations
agcttgtagaatggctagacatgatacatgtcaggtgttggtttgtttcaangataaaagggatgccccacattatttccatgacacaaatgcaaaaatgatgatttggaaactttatgcaaaactggtcatgcatgtacctatgcggacactcaagtgtcaaatttttatggtcatgtgatgctagggctcaggattcatttcctctattttaaatcaacccaatgtttccaaaatatgttcttttatcaatttgtgcgttcatccgagtccatttcgggcgtccggaaaaatttcacagcattcacctttcaggtgtagacacattttccaaaaattggttatgatcagtgaattttttcaaagaaaaagttggaaatcatctcttttcataagcatgtcggtttttcagctagac

SEQ ID NO: 65115 - DNA, 498 bp, Glycine max
  unsure (1)..(498): unsure at all n locations
ntgatgatatggtcttcactgacgaaaggatcaaagtgggtctaataagaggcaaatctgatcatcatgctttgataaatgccaaanaaaactagggcaaatgaagagggtgagaatgagggagaagcccatgctgtgactgccattcctatatggccaagtttcccaccaacccgacaatgtcattactcagccagtaacaacccatctccttacccaccacacagttatccacaaaggccatccctaaatcacaccacaaaacccacctaccacacgaccaatgctaaaacaccacttttagcatgaaccgaagcaccaaccaagaaatgaattntgcagtgagatagcctgtagaattcaccccaattccagtgtcctaggctgacttgctcccatatctacttgataattcaatggtagccataaccctagccaagggtcatcaacctccatttctctgagaatacgactcgaacgcaacgtgtgcttgtcacg

SEQ ID NO: 65116 - DNA, 425 bp, Glycine max
  unsure (1)..(425): unsure at all n locations
cgctctgttcaagctctcccaatatctagaggtattcttattatctctatcagatactatgctagatggcacaccatgtaacctgacaatctcacttatatacaaggtggtcaactgttccaaggaaaatatgatattaatgggaatgaagtgagcagacttagtcaatctatcaacaataacccagataaaatctaatcctctagaggatctacgtagtcctaccccaaaatccatggaaatattgtcccacttccactgnggtatctctaaaggttgtaacttccctgaaggtctctgatgttctatcttacccttctgacttactatgcatgcatacacaaactcactaacctctttcttcaagtgtggcaccaaaaccatctctttaaatcttatacatcttgatactccaggatggatgc

SEQ ID NO: 65117 - DNA, 460 bp, Glycine max
  unsure (1)..(460): unsure at all n locations
tcctcggggccatccctgcgaagganaacatctggagagttagtttttaccattacatgctacccttaaaacataaatggcatacaacctccctccaataaatacaaacatcaatgtaaatttagagcaagcttatgcgcatacttcttcacgaacgttcacttgcacaagacattcttataactaagaaaaatgcacccatatacaatcaaggcaccttcgttacctagattatttacatgtacttccaaggtgtatttgttacctacatcacacacatttcctttgctaaattcacatacatgcatactctaaacactttggctatcaaaaattgcatacgtgcacatcttggtatttctaatacctatacatacacaaacttcatgatgaatcttgactatctacacaatatagtgctacatttcatgctctttttttttcaagtgttttactacct

SEQ ID NO: 65118 - DNA, 485 bp, Glycine max
  unsure (1)..(485): unsure at all n locations
tatgactggactactgtcaccagttatggcattaggcttgtctagctacctatatagtggatatggttccactntcaagctctcaacatatcattgtcgggcctgctcttgatctaccttgacagtcatgatctctcccatcaaggttgggaatntcatcttgagatgtggtgtcgagacaatggcttcaagtttgtttagcgttttgttgccaatcaaagcaaagtacaaggtatctacatctatgattaaatacatgacggtgaagctccttgagagttggccttggccgaaagtggtcatanggtcaatgtancctttggnctctactctttctctggaanaaccaacgagtggtcgagagtatggttggactgtgttagatgacactctcagcctctcgaatgttccctataaannatgttgtggaatgccctggtcatgggaccttgacacatgaatttgcttctcgatgagacaccatg

SEQ ID NO: 65119 - DNA, 75 bp, Glycine max
tatatcgagacgcgtcgctatagtatgtagaacctttgagccaagacttgcgagtgtgactttttactccgatgt

SEQ ID NO: 65120 - DNA, 456 bp, Glycine max
  unsure (1)..(456): unsure at all n locations
ctaagcttaacattcaatttgagcgtctcgtaatattacgggactcaatcttactattctagtaaaaaattattggcgtttggattggctcagagattcaacattcaatttcgagcgtctccatatattactggactcattcacacatcccagtaaaaaactattgtagtttgaattagcttagagcttcaacaatcaatttctagcgtctcgatatatcacgagactcgatcatacatccgagtaaaaagttattgtcgtttgaattggctcagagcttccacattcaattttgagcgtctcaatatattacnggcctcaatcaaacatcccactanaanntattgacgtttgaattggctcagagcttcaaccttcaatctcgagcgtctcgatatgtgacgagagtcaatcacacactcgacgtaaaaggtatcgtcacttgaattggcttag

SEQ ID NO: 65121 - DNA, 412 bp, Glycine max
aagtaactgacgcatgcgagcttgtccgtatacatatgattctggaagctgattatttttattgtttactaagtgaaatggatcatcttcaaggtccaactgccgtagaatgatcaccttataagtaaaaaagaatcacttgataagaaagaactacgtaccctgatgtcctcatcgtaattgaggaatacgtatgagcaaagggaaacacccttgtcgaccacaaaaagagaaaaatgtcatcacgggtatcaaggatataatgacataactacggaacgtataatggaagtcatgtttgcacattcgagtaagggctaccgtcccttgggacggacgtgtggggtgctaacaccttccccgtgtgtgaatactacctcccgaccattcacttacaagatcatagatcgca

SEQ ID NO: 65122 - DNA, 330 bp, Glycine max
  unsure (1)..(330): unsure at all n locations
actcggttatgactctgagtatgtctataagccaggcacaccgaatagaggagcggatgccttatctagaatgcaccaacgaatggagtcgacgagtattacctcttttctgcagtgggatcagacacaatcaatgaacgacgacgcgcccaacgatgaggaattacagaaagcaatagccgaacgatcacatgatccagttacccgacccggatacgtctacaaacacgcgagctcacttcctaaaanaaaaatnnncctttctaaacattcanccatgattcctacattatngaaagagtaccataccactccacacagaaggcattt

SEQ ID NO: 65123 - DNA, 444 bp, Glycine max
  unsure (1)..(444): unsure at all n locations
agcttcaggatgatgtacagactngtggatatcaatangtacaagtgatgtgggaaatgctacagagaaccgaatgtgaagttatagaaaaccaccataagcgcaagcagtttcccttctggaggatctntgtatggtccaaccatactcaatctgcaaatcacgcttcaagttaaaaccagacacaagtntcaagtttacaaataaaaccgcttctgcagatggcaagccacccttcttttatcttcccattgacagcatcatgattcttctcttcttcttcttggctcctaaaacttagcacatgtcgtgttcaactcacactctactaccctgtcacagtacagtagtagtatatatgtaaatataccaatagcttcacacccaagaagctttgtggaatagctactggttctctaactgcaaagcaagtagatttcatgt

SEQ ID NO: 65124 - DNA, 410 bp, Glycine max
  unsure (1)..(410): unsure at all n locations
caagatactcagctttcgtgagagganatgaatcttgacgtttggggctgttttcttctntctgacctgttacttgttttaatatttctaatgacctggtctaacattttttaaagcctaatttgatttcttagtatacttaaattttcagatggtataacgtatttcaaaataggctaattaactaataggccaatggagtaaattctatctaaaaaaagatttaaattataaaaattaaaattactacaactcaatgcatgggacaaggccgaaaaaaggtaaattatacttttaaagaatgaancataattcatttatatgatatcancctttctcatggggcaggatgatatataattacacatccncaanaagaatacaatcaactcaatcacctttgccatctc

SEQ ID NO: 65125 - DNA, 413 bp, Glycine max
  unsure (1)..(413): unsure at all n locations
agcttgaccccattactttgtccgcatcgtgtattttcctctnttcaacttgcaccagcgcctaatggagacagtgcctgcaacgtggattcacctctttgcgttataatatttgctcggtcttgaatcccaacacaataaagacattttgtcagtttcttcataaacttaagtgtcaattcagattgttattataatattgtgcctgcaattcctctgattactgtcctaatagttaaatgttaccccgtagctcaacacaatgatcatcaaccttcacaggcctttatcttttatgtcaataatcaatacttggtaggtatgcctagtctaaagtaataaactagaatctccttatcgataaaaaaagttattgtactactaaaacatcatatgaagtgcaacatacggac

SEQ ID NO: 65126 - DNA, 487 bp, Glycine max
  unsure (1)..(487): unsure at all n locations
caagacactaagctaggtacacacncttctaacaactaagctcacctcttttgttatgattttctagagcttanctacagacaccccctataatagctaagctcacccccatgtcaaaatacatgaagatagaaaaaagtccctactacaaagactactcagaataccctgacatacaaggctaaaaccctatactactagaatggccaaaatacaatgcccaaaagaaggaaaaaactattctaatatttacaaagaagagtgaacccaaccttggcctatgggcatagaaatctaccatgaggttcatgagaaccctagggcctttatagcagctctagcccaatcctcttagagtcttctatccaataccctttggggtaggattgcttaatcttgttgattcctcccactggaagaagattaatcatctgtatccagaattctggaaagagacaagaaatcttaagcttggactagccactga

SEQ ID NO: 65127 - DNA, 509 bp, Glycine max
  unsure (1)..(509): unsure at all n locations
acctctaagtcacctgaggcatgcaagcttcaatntagtgtttcattcttctgtcttgtttaccatttactcaaattaaaatcactaaataaccatgtgcacctgataatcagataatgcaccatatgatggattacaggaatcaccccaacgcccatgtgggtattgatcccatcctatggtccttgatatgtagctttttggtcgatttgccctatgatagttgcataaagaaagtaagaaatctttcagacagaaactcccttcttatattttggaacaagacatagcaattgcaaaggtaacataccaaaagattggacggacatcttctttaacacggaaaacatttgcagggcgtctccaaggtaaggacctagaaactttggactcttcaattatgccaaggttctgccagcaataacattaatatcagctgtcaattaagtgaagtctctaaaaataacattaaaaatatgcacatcacatgcaataggagaccaccatta

SEQ ID NO: 65128 - DNA, 492 bp, Glycine max
  unsure (1)..(492): unsure at all n locations
cagcgtatcatntattataataattggaagcttctaattntgaactcttattctattngggtagatgttcatttcaagggcaattggtttactgaaccagtttatctagtattcaatgaaatgattgttttacgttaatattacatcgnttttactagttaatttccttttactcatatttcctctaaaaaaaaaaaaacttttactcatatttgaggtcatatatatgtaaatcgataccaaaataaaagcgaaggtagaatgacgataagagggcccagtaaattttttaatgtcaattgctacaaatagatcgactttattaaaataaggttttgggtaattatgattaattgattatcagttcatttggttgtttttattaataatattattattggtctattaagcaatatgttggtatgagaaaaaattataatttttaaatatatgtaaattggaatggcccttatattctcataatttatatgg

SEQ ID NO: 65129 - DNA, 322 bp, Glycine max
  unsure (1)..(322): unsure at all n locations
actggataccgaggtgcacctgatactctgataatgcatcacatgatggatgacaggaatcaccccagcgcccacgtgggtgttgattccatgctctggctctcgatatgtggctttctcggacagccgccctatgatagttgcatacagacctgcagaaagtctttatacagaggctaccctcttatatttgtgaacaagacatancaattgcaaatgtcacataccacaagattggacggacatcttgtttaacacggaaaacatatgcatggcgtctcaaggtaacgacctagaaactttggactcttcaattatgcca

SEQ ID NO: 65130 - DNA, 358 bp, Glycine max
  unsure (1)..(358): unsure at all n locations
acctgcagctgcagctttncccaatttctattatgggggagattgtattttattggtcagccccttcgcacttctgtgtcttttaatttgcttgaaaaatcgttccatgaagaacattaagccgagccgcttccgaaacgtttccgtaacgttgacgtgaggaatttctctaaggttgcgaccgttcttcaagattcatcgttcgatcttcgatgtcttctgtcttcaacaggtaagtacctcaaaccaagctgttcaattcattctatgtacccatggtggtgcacatattgtttcatgtatgtttattctcagtttcatttacttattatactcccttttgacgcgctcaagccat

SEQ ID NO: 65131 - DNA, 350 bp, Glycine max
  unsure (1)..(350): unsure at all n locations
ctatgcatagtcatagcatagcttgactggtcgatttcatgactcatattgacatcataaacactggggagatcgaacatactcatcactttgatgatttcattatgctcatcatgataatatgcagaagcgcttgtcacgttcacctccacacaattagtcaagactacatgacacagcgtcctgatgatcgcttttcttcttagacaggaattcctaattgatatagccaaagggtgcgcccntcaatctaacttctcatgtgcctcttaaaaaatccactctctggacatcgctacccaggatatcgaaattatcagggcctataatgtgttactcagctattaaaa

SEQ ID NO: 65132 - DNA, 495 bp, Glycine max
  unsure (1)..(495): unsure at all n locations
aagtcacctgaggcatgcaagcttatatgtcttacattcttcattcttgggtcctatatctgattaaaagtcctcanaagctctggataggttgtcactcacaactttccatgtctcatttctaaacttttgatatcttgcccaatttttaacaatattgcacctatgtaaggccttaaaacactcccttctatttcatacttattttgaacactttcattccattaacaagattccttctctcttgctcaaaaacctcttcattcactcaagataatttggcaaccttcctaaccttcttaaacttcttgtcccaaataagggtaacactaccttgngattctcaattatcttcaacaatttctctttgaagacatttttatcatccttgagctgctaccactcaaagtagtcaatcgtgctcactctagcggtgtggtgagggtatgctaccacaatgatttgcaacatgtgttgatgtcaaattgttgacac

SEQ ID NO: 65133 - DNA, 462 bp, Glycine max
  unsure (1)..(462): unsure at all n locations
ctaagctttaatacaccacaacagagattattcttctaaatcactacctaattatcattattccacatgcacaaattaaaatgcatatgcatgactagtttaatttcacaaccattcaagacatattgcgtttgttggctctaattataagagaccaactttttcatgaaaatacacctctaaagttagtgaaagaccaaatttagactaacacctatctctaaggtagtaaaaatccataaaagtgtaaagtgactataaaatatcaaagatgttatttctgcaacactctgcttaaaatgggtaattattgcnnannnnnaacatcttaaatttaaacaacgtcnactaaatgattcttcattgtatattctaatgtgatggagagataaactaaaactcttgataatgatagtaaaccttttgtctcatcacacaatatggacatcttttctatcatgg

SEQ ID NO: 65134 - DNA, 263 bp, Glycine max
  unsure (1)..(263): unsure at all n locations
cgtgcgagctagaagatacatgatgttgaagcagtagtgatataattatctcttaacctatccacaccacaatngtctctggttattgtattcaactcaccatccgcttcttcccaaaatgttgccttcaaagagaaccctggttagcgccccatactaactcggtcataaacgacttcgaacaaaactcctgagatgtggactatccacaccaagactgctcctgctcactgaccacccgcgctttatctctctattacaac

SEQ ID NO: 65135 - DNA, 459 bp, Glycine max
  unsure (1)..(459): unsure at all n locations
tcacctgcggcatgcaagctngcacanattcatcccaagtgtgtatgatcataatgcattcatctcgtttctgttttgcaacatcaaacaggttctgttgaatagtatcgagcaacttctttatttgcacaaccaaatcacccctagcagtgtgtatctttgcaccattatcacgtcgaacagcgcgaacctatgcaaaattcaaagagatttatttggtgttcactgaaaaactaacagcgtggaagcacaatgacaaatttgagaattgatataacactggcaaagttgatgacctgcttaattgctaaatcctttggcccaatttcaattcttagaggaacccctctcatttcgcaggtggaatacttccatgcaggagaataatatctctagaatctgactcagcgcgaatatcttgcttattcaatgtatgcacagttgcagaacaggcattaa

SEQ ID NO: 65136 - DNA, 488 bp, Glycine max
  unsure (1)..(488): unsure at all n locations
caaaaactacgctcttgttaaatattggatcggatctttgtaacagacttattccttgattgtatgctactcttggagagcatgtttgntctgttgaaactaacgttcgtcgtgaattcaagaatgcaccaacgcgaaaccattctctaatttatacattttcttatttacgctatgtttaaaactttntctcttttacatccacgtcatacaattgtcgcgtctaaattggaatactcaccattgaaacaccaacaccaaatgtgtctgaatccttgtcaccttatgtcacagatcacctcgaaagatcccaaacctgatagccaaacttgtcccctatgaaagttcagaacccaaactcacgagacttgtatgtacgcttgttacttgtgtggggtgtcgttcacacaaacccattcctactaatatgatgatctttaattggccagccacattcattaggcttatgacttgtgacacctacatgt

SEQ ID NO: 65137 - DNA, 414 bp, Glycine max
  unsure (1)..(414): unsure at all n locations
agctcgcagtggctacttgctgtctatcttttttgcgagcatgcatctatatcttctagtagaagtttaaatttcactattttagttaattaaatatcttgtaaaaatgccaaaatttcataaaaaaaatgttttgctctgtaaaagtgacccatccaagcattgggtgtaggaaattcaattgaaagtcattcaaatatcatattgttctttcaaattctaattgcccatctaaacgtaggataaagttgttctgcttaagctntaagagcctattatttcttgaggagtgtttcgagtaccttgagacataaattcaacacatcgcactgatttccagtgaaggcttggttccactctgcttgtttttcaacatcatcttcaccactatcttgctgcccactaatcaaatga

SEQ ID NO: 65138 - DNA, 443 bp, Glycine max
  unsure (1)..(443): unsure at all n locations
ctcaagcttatagntattggagggagaataaaacaatccagaatcaattgtactcttctagtaacgaagaattctctttgcggcctatagatgaggagaggtaggagcctctgtaaagcgacacacaactcccaccgcatataaaatatcgggccttgtattggttagataccttaaactccccacaagactcttgaagactgtggagtctaccttctctccttcatcaaactttgataacttcaagccaccttccataggtgtgttcacgggattgcaatcaagcatattaaatttcttcaacacttcttttgtgtanctttcttgtgagacaaaaataccattctccgnttgcttcacttccattcccaagtaatatgacatgagtcccatatctgtcatatcaaattcacaaaacatggactccttgaactctttaaaca

SEQ ID NO: 65139 - DNA, 454 bp, Glycine max
  unsure (1)..(454): unsure at all n locations
agagtcacctgcggcatgaagctttgtcttgcatgtcaaagatagtatttttgattgaactatgaganaatacccacaagtttagaagatgctacgaggtaatatcaattcaaacaatctatggaagttacaatctccttttgaacataattcctcaatttcaaaaagttatcgtggtagtgtgaaagcccatcaccaccattaaatgcagggaagagacatgcaattataccagtatttagaaaattccaacaagtgtgacgaataacccaatagttattgaaaaggcctaatgaaggaactgattgaaataatacctgcacatttcaatctttggtttccaaaaggatctaaattcttgtctgatccatcttttaaataggggttcctaaagcaagaaagaggcctaaccttgcaacgcaatccaactacagaatgtgacacataattttga

SEQ ID NO: 65140 - DNA, 428 bp, Glycine max
  unsure (1)..(428): unsure at all n locations
ctaagctatccggggctattcaactagttgcagtccttagcacacactcctgctgttatatatacattcgactgctcagtttcttaggaggatagacatttctactcatatcagagaaatgtagtgattattcccactttctcagctcaaacttgatttctgaagaatgctgatgagggtaataggatccgaagaactgatgtgcaagatgaatcaactatatatgttttttcacatttttcggaacaacactatcatatagttcttcccacatctacaatagtacactgattctcgagccgcatcaaannccnnnnnntactcttgctgacacatctttgagacactagataccctttgttatgatccgatactctctcatggttaaaaacagctccatgattaacactgccatccacagcatcatc

SEQ ID NO: 65141 - DNA, 133 bp, Glycine max
ctacgcatatagtatattgcgtatggttccgtctactcaactcaaaaatgtctagaagaagggagactttataaatatcgccgcggggaagacctgcagtacaagtggaacctccattttgaagggaacatca

SEQ ID NO: 65142 - DNA, 400 bp, Glycine max
  unsure (1)..(400): unsure at all n locations
acctatagaaactcagctgaccatcccgacccacccagcatagtcggtcagtgtttatctgtgatgtacctaaacaggcgagctcctggcagtctacagataaaaggaacaaagaccacaaagcatggacgcttgtggtggctcgccagctgtgaaacttgatcgatatgtgagatatggtctctggtaatcgattaccaacggtgggtaatctattacaaggctgacaattgaacacaggaggctaatatggtctctggtaatcgattaccacggggccgaatcgatcaccatgcttgaaaacnannncnnnannccctnanccccncnnnnntngataccaaggggggtggaatcgagtaccacgctcatacacgtgactggaacattgaggacgcct

SEQ ID NO: 65143 - DNA, 385 bp, Glycine max
ttaggaagcatcaacaaaaatcaatccaaggcctttgtgccagcaatcaatggggcgaaacacaccaaatgattatgatgatggatggctaaaattctcacaaacgtaaacttatcactttcaaattgagctctctaaactatcatgacatgtcgaggagaatgaaagaattcaagtcacaaaatgtcataaacttttattttcaaacaattacccatttctggaacatatcctataattcaaagaaaaacatgctaaatcgtacatgcacacaaaattgacccaaaatattaaactagagatctgacgaaactaacaacattaacaaattaacacaactaacaaattaactaaaccgactatactatgaaaaccaaagaacact

SEQ ID NO: 65144 - DNA, 473 bp, Glycine max
  unsure (1)..(473): unsure at all n locations
tctatagaaggttcattcctaatttctctgcaattgcatcacctctcaatgagtaggtgaagaagaatgtggcatttacctgnggtaaaaaacaagagcaagcctttgttttgctcaaagaanagcttactaaggcacctgttctagctcttcctaacttttctaaaacttttgagctagaatgtgatgcctctggagtgggagttgggcctgtattgttacaaggtggacaccctattgcttattttagtgaaaaacttcatattgccaccctcaactaccccacctatgataaagagctttatgccttaataagagccctccaaacttgggaacattaccttatttccaagggaattgtcattcatagtgatcatcaatcacttaagtacattagagggcaaaacaagttaaacaaaaggcatgcaaaatgggtagactacctagagcaattntcatatgttatcaaatac

SEQ ID NO: 65145 - DNA, 476 bp, Glycine max
  unsure (1)..(476): unsure at all n locations
agcntttgcattgcattgcttgatacaaagtctacattttactgcatttcaagacgaaatttgcacccctctgcattccataactcatgcaccatatcaggctataagtgcatagatttctctttatatgtcagnttccaaaatccaatgtcctatcttttgagtttgggatgagtgaccctttcaaagagtcaacatcttgccttcttatatgagtgaccctttcaaagactcaacgtcctcgcctttatgttcataagactcaacgtcttctacctttatgtttccttggactcaacatcctctacctttatgtttccttggactcaacgtcctctgtctctatgttctcataggactcaatgtcctctatctttatgtattcatagaactcaacatcctctgtctttatgttttcataagacttaacatcctctgtgccttatgtttcataagactcaatgtactctgcttta

SEQ ID NO: 65146 - DNA, 492 bp, Glycine max
tatgagaactcacactgccaaaataccggtcaagaatctccacattatgatgaattatttcaaggacttctaattcattgtcatcttgatcaatgcacatgcagaaatagagactagcatacctgcaccagatatacatatgtaaagactcagttaattaccacgacaaacagaagggtgcctagaaaaggagttgcaatatatgacaaaagaactggtatctccatcgctataccttttataaacaactttatgtcctcgccattctacaaaattacattgcttgggagcacgggaaagaatcattccactgagctcacggattaccttttaaaaaataaattacacatagtaaggatagttaatttgcagaatgtaaagtttgatgtgcagtgtctgacgtgcagtagtcatgataataccatcaatgccaatgcaatatgaaaaagtaaacaatatcagaggaaaaaatatactgtgctcaacatttaa

SEQ ID NO: 65147 - DNA, 366 bp, Glycine max
  unsure (1)..(366): unsure at all n locations
ttccgctccnatcgcaaaggagggcatttcctgagtcgcgaggtgcgtgtctacgagtgggacttctaaacttcacgtttgggtggactgctgtctcctttcatttcgtgggtatggtgttttgggagatatgattggtagacctcgctagacttctgcttcatgatagttatttgtgaagaaacttgttgaaagcttgctgaacttgccatgtgtcgatgagttagacatacccattctgtttacggtttattgatgatgtttgtgatgttatatgctgaaattgcttatggaanactgttcgacatcaatggtcgaattaacctacgcgcttaaagtgacaaccttgtgttttgagtcgaaaaa

SEQ ID NO: 65148 - DNA, 431 bp, Glycine max
agcttcacctgatgttctcataattagaaggatgtgtctttttattgtggcacttgaaaagattggtaattacacttacatgatatctgcattgtcctgtttactctcttctatgggcactgtctagtgatgtccagattcaaatacatgctctactgatctcatgttcagaatacacaaaacaatagttatagccatggtaggtataaactttttaacaaaaaaactattttcatatatttgtgtacaaaacgaagaaatttgcagaacaaatctgtcgtggctatcagtattctaagcataggtaccctgagaaggattaaagacttacatgatactcacattatagaagagttagactttctagaatctaacaccaagaaccaaaaccaaaactcaacattccccccacgcccccctaaaattaggac

SEQ ID NO: 65149 - DNA, 377 bp, Glycine max
ctaagctcggcgaagttataccgtgattaatgtaatacgagcctatatatttcttttctctttagatatctgaaacccacctcattaaataaacaaagagatcttgctcatctgctcttgcagttccaccttgtctcatatcactctgcacgacatacttcttaggtcttgttccggtatctatatgaaggtcgattctttgaggatcctatcaacgatggtctgactagcgattttgatccagatataatccacacgataaacgacgaagaggaagacgacgtcctgtcaccagagtatgagaggtttgtctctcaggaagaacgtgaaatgaagccttaccaacaataaaccgaatcgtaaacatgttgaccacc

SEQ ID NO: 65150 - DNA, 428 bp, Glycine max
agctcggtccgtaaaatagattttgaagtttatcatttctatctcttactaagtaaaatggatcattttcaaggtccaacgccttaaaatgatcaccttttaagtaaaaaagaatcacttgataagaaagaactacgtagtctgatttcctcatcgcgattgaggaatacgtaggagcaaagggaaacacccttgtcgaccacaaaaagagaaaaatatagaaaagggctttaaggatctaaagacatataaagggaacgtaaaatcaaagtcatgtttgcacattcgattaaaggctaccgtcccttgggacggacgtgtggggtgctaacaccttccccgtgtgtgaatacaactcccgaaccattcacttaaaagatcatagatcgcatgttttccggtttttccgacgttttcctcaaataaac

SEQ ID NO: 65151 - DNA, 350 bp, Glycine max
acccttaaaacataaatggcatacaacccccctccagtacatacaaacatcaatgtaaatttagagcatgcttatgcgcatacttcttcacgaacgctcacttgcacaagacattcttataactgagaaaaatgcacccatatacaatcaaggcaccttcgttagctatattatttacatgtacttccaaggagtatttgatgcctacatcacacacatttactttgctgaattgacatacatgcatactctatacactttggctctcagaaaatgcatacaagcacatcttggcatatctaatgactatacatacgcagactgtatgatggatgttgactattacacat

SEQ ID NO: 65152 - DNA, 351 bp, Glycine max
  unsure (1)..(351): unsure at all n locations
gagctcgtagcaaattcgaacaacaataactnttcactctgtagtctgattgagtcctgtaatatatcgggacgctcgaattntaaaaccgaagctcgtagctaattctaacgacaataacatttcactcggaagtcctattgagtcccgtaatatatcgagacgctcgaaatttaaaaccgaagctcgtagcaaattcgaacgacaataacatttcactcggaagtccgattgagtcccgctatatatcgagacgctcgaaatttaaaaccgaagctcgtagcaaatgtgaacgacaataacatctcactcggaagtccgattgagtcccgtgatatatcgagacgctcg

SEQ ID NO: 65153 - DNA, 366 bp, Glycine max
  unsure (1)..(366): unsure at all n locations
cgaccttagatactaagcttcngtntgaaatttgagcgtctcgatatattacgggactcaatgttgcttctgagtaaaatgttattgtcgttcgaatgtgctacgagcttcggatataaatttcgagcgtcacgatatattacgggactcaatcggacttccgaatgaaatgttattgtcgttctaatttgctacgagcttcggttntaaatatcgagtgtctcgatatattacaggactcaatcggacttccgagcgaaaagctattgtcgtttgatgcagctacgagcttcagttataaattatgagcgtctcgatctattacgggactcattcangctncccagggaaatgcattgggcgttc

SEQ ID NO: 65154 - DNA, 419 bp, Glycine max
  unsure (1)..(419): unsure at all n locations
agcttctccacgattcttgatacgcgttttttgttcgcnttctcgccgctgcgatggtcccgcataggcgcgccagcactggatccccgccctccttcgcgagccgagccgtgttcccgtgcgccacaaatgttgctcgctcttggaatgacgtgtacacaaaccccaaatatgggttgttgtcttgcccacggtcctacccaatttaatcaaaacaaaatacaatatttcaatttcattttaaaaagaaaaaatttacttaactggtcaatttaagtctggccaactagctatgagaaagctccgattgtcatgtcacgtgaaaccaagaatatattgatactacaaatgttggtttggctctcagtttttcttgacacattaatataccaatatgagctatgcagctgttagtacat

SEQ ID NO: 65155 - DNA, 319 bp, Glycine max
  unsure (1)..(319): unsure at all n locations
tagacgaccttggttgagtcgagaatactgtatgtatttatatggtttagtttgaatatgatgtanaagaaaatgaatgtgagcctttttcctcttcgaagacttgtaaaaaaatgttntaaaaatacttttaattaatattcgaatcgcttctccttactagtatatatgtcaggngtgaagggtgtcacaagatccactcgagtgaattatgcacttgagagagnagatttccttttnctagatgacacatcgtaggacgcatatgatgatgatgacnatcccataacctcctaacacgctctgtgaancttggatt

SEQ ID NO: 65156 - DNA, 512 bp, Glycine max
  unsure (1)..(512): unsure at all n locations
gacctatgaaactcagctctgtcttttataaaacaagaagttctgaactcatcatgttatctaaaaaaccttggggtggatccaagtgctccgatcattcatttgcatattcatgttgtggtggcatactcaccgttgtttgtttctttagggaattcaccataactaagaaagcacaaagacacccctataacactcgatccagaaaaatggataatgaagagggcgtgcaagagcagatgaaggccgacctattggccttaaaagatcaaatggcttctatcacggaggccatgctaaaactccagaaaactctagaggataatgccacggcgaccgcctccaatgcagttagggaagcggaaccggtgctacagcccacaataaacttgggccgagatagaaacccaatggtgttcggtcggaggtacagtccgcaagcttacccttatggcttgctncagacttcactccccgtgccgctcccgaagatgtgagccaagcccctacct

SEQ ID NO: 65157 - DNA, 365 bp, Glycine max
  unsure (1)..(365): unsure at all n locations
agctngagatgaggaagtgtngaagggtgatactttctgtttttattcgntgaccacagagtggtacctggagatatgtcgcgggggtcaggagaccttggtgacgtcaggtggggtgctattgcccaaaaccaagcttgaccaatcccgacccaatccgggcataatcgctcagtgagaacctgtgatgtacctaaacaggcgagctcctggcagtcaacacgataaaggaacaatgaccacaaagcaaggaggcttgtggtggctggccagctgtgaatattgtgtgatatatgggttgtggcctctggtaatctattaccaacggtgggtaatctattacaaggctttacactgaatacagg

SEQ ID NO: 65158 - DNA, 337 bp, Glycine max
  unsure (1)..(337): unsure at all n locations
ctagttctcctcctgagtatgacagtcaccgctttaggagcactgtacaccagcagcgctttgaggccatcaagggatggtcatttctccgggagcgacgcgtccagctcanggacgatgagtataccgatttccaggaagaaataggtcgccggtggtgggcatcactggttacccccatggccaagttcgatccagaaatagtcctcgaattttatgccaatgcttggccaacagaggagggcgtgcgtgacatgaggtcctgngtgaggggtcagtggatcccgtttgatgcaaatgctattggccagctcctgggatatccgttaatgctgga

SEQ ID NO: 65159 - DNA, 480 bp, Glycine max
  unsure (1)..(480): unsure at all n locations
agcttaacaaccataaattcctatttacattttcttctatcaanatttgactatggttcaattatacattttatacgcgtctttatttcacttttacaaattgagctcagatccattatgataactattacataggcccagaaaaaatggggatcatttaagaaaaagggagataaaagaaaataatagcaaatcgtgtatggtacctaatagagcttcttgcttcatcaaactcttcttccatatacaaattattctcaaaattatgtcaccaaaaaattcatttccttcttttctctttcaaatcaatatttaaaattatttaatgtaaagaaaaaatgggcatcattttggaaaaaagggtgagaaaagaaaataataacaaggaaattcatgttatgaacatgtaatcatcagtttaaattcaatgtacgtaacaagttacacggtaattcttttcttttggtacacaattacatg

SEQ ID NO: 65160 - DNA, 467 bp, Glycine max
  unsure (1)..(467): unsure at all n locations
gacacaagaaactcagcttaagtattgtattcttatttcttttgacaaaattcctctttctgttgtcctcttaaggtaatggagaattctataggtagcctgtaagtgaacttctcttggacagtgcataaatgggctccccaaactaacagcaaaagtaatcaggccttgtgtgagacaagtaaatcaattttccaactagacgttgatagatctcctaatccacctctgcattgtcatcttcattacccaatttaaggtttgaatccatgggagtacttagaggtttacaagctgtcatacctgtctccttcancaaatatgtggcatatttctgttgggatatgaaaatacaacaatgatatcatccacaaatacataacaatacaatcactcccnctgaggtcaagtgtntgatgaataaagtgtgggctccttggctntatttgtatcctaatgctgtcatg

SEQ ID NO: 65161 - DNA, 478 bp, Glycine max
  unsure (1)..(478): unsure at all n locations
agcnntttatttgtcttaatcaattcttatattacatgattttatttaatgggacattctattaaattgaggttaagttcctgaccgaaaaaatcattacccttaattcagaaaaaaaaatcattacccttaacttacgtttaatcttagtctttatataacttttaaatcttttcataatctattttgtgtttgaaaaacaaatcagtgaaaaataattatagatggacataaacctccaatcaaaacctacatggatgccgtccaatgaagttaaagaaaagttggtcaatcgtgaagaatccatcaaaagaaaaagttgacaaaacctcatcgggtcaaatttgtttcttttcttaattctgtatcaatcccatcatagaattttgtttatttatgaaccaatgaacaagaaaacacacaatcacactcaataatattggtggagtgatgactaagtctaaattgatattttgat

SEQ ID NO: 65162 - DNA, 503 bp, Glycine max
  unsure (1)..(503): unsure at all n locations
gacactaaaaactcaagctgagcattnggttgcataaatatgaccatagtaatagggtatgcatctcattntccttanaatttatatgttagagagcattntttaagagaattatgttgattgtatcatatgtatgaaaagtatggcaattgtacttgaatcttgtatcactttaaacaaattagatactcttttgatgtaatattagatagtgataataggaaatataatgtggttttgctctatagatgctgtatacatttttcatttattgcaaattcaaagttatttgagccacaaggaggcttttggtcttgcaagattgaaatgaatgtgaataggtattttccattgtgtattcatgaaatttggttggtttaattccttgtctccatcttttggtgtttgaaacttgtaattcaatggtagtaaagaacttaatgtcttcaactagacaattagttgctctctgcctttggtattatgttatttacttgtataaa

SEQ ID NO: 65163 - DNA, 406 bp, Glycine max
  unsure (1)..(406): unsure at all n locations
gaacttatgacatttcatgtatttgtattcaacggatctcatcaattgtttggtggagagagagagctcaccaatgcatagtggcgacaactacactgtnttctgattgattaaaagtatatcttgacctgttgcaaaagatatatataactttgtctagatatttatgggagggtgactcaagagggagagaaacgatgcataattcatcatccttataataaaatatgaaaattctagtcatatctgtgtgtgggaaggtttccaatttgcctttaatctatattctacggggcagtgataatcaaaatatctattatatttaacatgcattggatttggtgtctagagagtttaaaacaaagtcataatatccctcctgccctcttggatttaattattgttg

SEQ ID NO: 65164 - DNA, 396 bp, Glycine max
atccttaagtcacctgcggcatgcaagcttacctttggtcctactatattttgtctttataaaacatgctctattatgatgtcccactccaagtatgcctgcggatcatgctatcctttagacggaggaatgtggagtataataccataaattcggttatgtataggaacaccatcatggcctattctcctactttgtatctgattatgatctgtatatgcgatccaacctctcatggagcgcatcatgatcttgtttcattaacctctgcatatgtgtgatcaaagctcgcattgggaattgcgaaaaccccactccgtcatcctgagtagtccctgccatctatagcaaccaatcacaccgctcaagacagtaatagttgcggttgaatacctc

SEQ ID NO: 65165 - DNA, 500 bp, Glycine max
  unsure (1)..(500): unsure at all n locations
atccttaagtcacctgcggcatgcaagcttgtcttgtgtagaattacggtacacaacttttattatacccagggcgcagaattccacagagaccacaatgcctatttcgggaaaaaaaactctggaggaagcaagaggagcagctnttgcaaggatacctaggttttgtaatctcatttttattattattaagggttcttctgtaatggcttgctaaacacccttgttggggatttctaatgaacagctgacgtaatcattctaatatctactgattgtgtttcttgggctcaatgcttctttcagtgcttaaatttcgtatgctcttgcgctagtcacccattcgtgtgcatagttaggtgactttatcattgcgatatgtattgttgccttacaacttgaatgatgcataattgaaacttagtcttacaagacggactcgcggactatcgtttggtttcaagtatgctgcacaatactgttgttagtctaatctactc

SEQ ID NO: 65166 - DNA, 465 bp, Glycine max
  unsure (1)..(465): unsure at all n locations
tctgtttctctaacacttgtcatccacaaactgatgggcatatatttgtagtgaataggtctctatccatcattctaagggctcttctgaaaggcaaccataagtcttgggatgagtatcttcctcatgtagaatttgcctacaatacaagggttcatagaaccaccaagcgatcccctttagaggatggctatgggttcaattctctaacacccttagacctaattctcctcccacttgacacttcttttatacataaaaaaggggaatctatctcagagttcgtaaagaacttcccttanaannntannaaccccctnganaaccccacaaaggtgtatgcaactaaaggcaatagaagaacaaatgtccctctctaagcttcttatccaaggcactctcttggtggtgaaacttctncttccaggctcattatctagtggatggcgcctcctctaacctctt

SEQ ID NO: 65167 - DNA, 431 bp, Glycine max
  unsure (1)..(431): unsure at all n locations
ggatcttatcacgcgctcagctaggcatccttcacaacacgtcggttctgctcggcctgatttaagcgggttgcagcaccggctctgctttcctaaccgtactggaggcggttgtcgtggctctgtcctctatggttttctggagtattaacatgacctccgagatggaagccatttgatcttttaaggctgatagatcagccttcatctgttcctgcacgccctcttcattattcattattctggatcgagtgttatatgggtgccttggtgttttcttagtnatgatgaacttcctaaagaaataaacaaaggtgagtatgctcacccaacatgaatattcaaatgaatgatcggtgcacttggatcccccaaaagttttaggaacataatgagtcacaactcttatttataaaagaacaagcttcatc

SEQ ID NO: 65168 - DNA, 467 bp, Glycine max
  unsure (1)..(467): unsure at all n locations
tataagaacaaaattgcctaaatcatttccaaatatgcatgtgaattangaagcatcaacaagaatcaagccaaggctattgtgcaagcaatcaatggggcgaaacacaccaaaagattatgatgatggatggctcaaattctcacaaaggtaaacttatcactttcaaattgagctttcaaaactatcatgacatgtagaggaaaaacagggatttcaaatcacaaaatgtcaagagacttttattttcagaacaattacccatttcttgaacatatcctataattcaaagaaaaatatgcaaagttgtacatgcaaacagaattgacctaaaatattaaactagaaacccaacaaaattaacaaatttaacaaaactagcaaaaccaaagaacaccccccccatacttaaacaagtgtaataaaagtaaagaaggagataggaaaagaaaaactccctaagtctt

SEQ ID NO: 65169 - DNA, 202 bp, Glycine max
  unsure (1)..(202): unsure at all n locations
atgttaaaagatgatgacgtgacatgattagaanttgtattggtgtttgagctattcaaactgctagatgccgctgacactgctactagaggcactgctgcagatgagacagatgatgacgacagagagggtgatgttttaatagtcggagatgancaagaattatatgaaccaccatatgtgggtgcggaaaaatgagaat

SEQ ID NO: 65170 - DNA, 461 bp, Glycine max
  unsure (1)..(461): unsure at all n locations
ctcttgagaggcttctntgagaagctaacactntaactactaacacccttttaataactaaactcacatcctngaaaataattacggataaaataacataacaaatataatcaaacatcaaacataattactaataatatatagatatatatcagggtgttacaactctcccaccctttttgaaatttcgtcctcaaaatttacctgactcaaacaaggatggatgagcttctcgtatctgactctctaattcccacgtggcatcttctcctgatgcacctccccagatcaccttgaccaacagaatctttttccctcttaggtgttttgttcacctatcctcaatcctcaaaggcaatgtttcatatgtcaaattctccttcacttgtacatcatccaattcaatcacatgggatggatcacggatatacttatagagttgacacacatgacaaacatta

SEQ ID NO: 65171 - DNA, 439 bp, Glycine max
ctggtccttctcatagttgtggcatgagaaaacatgctctattttcaatctccactccaagtaggcctccggatcattccttcctttaaatggaggaatggtgagtttaataccagtcattcggtgttgtctaggaacaccaatattccctcttctactcctttcttcttcattatgatctctattctccatgtgatccaacctctcatggagcgcatcatctcgctgtatcattaacctctccatatgttgcatcaaagcttgcatttggaattgcgaaagccccactccatcattaggattagtacctgacatctcaaacaaacaaatcaaacgttacaagacaattatagttgctggttgaatacctcacccactcaagtgtatcacacaattatggcttttctctaatgaaacactctttactcttaccactcta

SEQ ID NO: 65172 - DNA, 477 bp, Glycine max
  unsure (1)..(477): unsure at all n locations
gctgaagtggncatgataagcaatttatcaactgttggattcatctatnttatatggttccaatgtacaccactcacactagatttattgcttccttcctagcaaccttctgataaccatttgctgttgtcgaagtcaatttctggcaacagaatttantaaatcttttccttaccacctttgttcctttctctccccatcaatcccttgtcttcgactgcaactgtctttcacaaaatattggcacccctaaaatttgaaattaaggccattccaagattgaaaagtgaaacacgacataaacatcaaaagtgatgcgtatgaccgaaagtgcattcaacatactaatcttcaacacataaacaaaaaaatgaaaaagttaaaaaaaaaaaagaagcttcatttagacctactttccagagcctgctttacactttaatgggaattcgagttgatgcagacacagattcactatac

SEQ ID NO: 65173 - DNA, 450 bp, Glycine max
  unsure (1)..(450): unsure at all n locations
gcttttcgattcattctatgtgcccgtagtggcccacattgtgtttcgtgcttttttattctcgnnttgtttactttttataccccctgttgacgtgcttaagccattttacttaagtcatttctcgcttaacttaaaaataaaataaatttccaccgaacatttgaattgtattatccattaacttcggttaaaataaattccgaccgttcggtcgtgccgtaaccacgttggaaatcaaaaagaggtaaaaaataatataataatcaaaaagacatcttttagtaaaataaagcggaaaatcaagtggacgttttctctttgggatttctcattcttaatcgaattgattaaaaactaaagtgaaactaaaggctaaaatcaattcgcctagtcaagctcgtccataaaaaataggcttttgaagttggtcatttcatttcctcacta

SEQ ID NO: 65174 - DNA, 407 bp, Glycine max
tcggaagaaagtgatgaggtacaagccctaaaggcagagcttgaaagatcccgggtagtcgaagagaagttcaagtccatagccatcaaagtctgaagagagtatgatgaactaagggacgtcaatatggccaccgatgaagccttggaatgagaaaccaagaaggcccgaaaggaagaacacgaccaaaaccaagtttgaggggctttatagggcatcaatagtgagctcaagctccgaagaggtgaaaggaatcatcacgggtcaaaggcatgatcttgaaggatgagctaaaggcttgccttatgtcgaaaagaaatatgtcccaacagttaagtgagactgaagggaatatgtgggccatcatcgatgagtgcaaagagaagctaaatctatcagcgactcat

SEQ ID NO: 65175 - DNA, 475 bp, Glycine max
  unsure (1)..(475): unsure at all n locations
gacccggatgttacatcacctgcngctgcaacttgaaatatggttgtagggaaaactgctgtctggataaatatacttctaaagtattcttgttaatcttatgtagatgctttgcttgcttctctggtttggatgataatttcttaatctgtgatatgtgatctaatgctggagctggtatccttctcgtagaactatgattaagctttgtaaagtaaaggaaaaacagagagaactggcagaaaatgcgagtggcggaccacccgttaagaagcaaagtgccggcgagttgcgtcttcacaaagggtttattctttatattatatggagtgtcttttctatgttttactatgcccaatatgtgtagcattctaaagtttcaaacagtggaaacggctatggcaagaggaatataaaaagtccaattctaatatgttaagccatatatgatgtaaaaacctatgaaccacgaaca

SEQ ID NO: 65176 - DNA, 476 bp, Glycine max
  unsure (1)..(476): unsure at all n locations
tatctccaccgtgtgccttacgaccttaatccctattgttaatatatacagatcgagagacgcgcatacctacacatacacacgagcctcacacgctaccttataaaaacattaataatttaattaaattattcctgctcaatctcaatgattttggaatcatgtattgacgcggataatttcaatcttctgtactttaaccaagattgagatatacattttttttanagatgaaacatatgcttggttttgatataatctttgtctcttttatacatatttcatctaggttgttataccgagtagcaacatataggtctaggtttacaggtttaacaaacaataaactaattcaataatagaatacattaaagagttaacttgtctttttcttcattgtatgagtgtgtgtgtgtaaattggtatatatatatatatattcatcccttttatccaacttacataatcttatgtag

SEQ ID NO: 65177 - DNA, 393 bp, Glycine max
  unsure (1)..(393): unsure at all n locations
cttcatggatgtgctccctaaacctgcattaatttttttgctttaccatcccttgccttggtggtacctcatttttctccatgatcaactacagtttggctaacgttgtaacatgattctttaaaagttccaccgataaacttgctatagaagctagannatattttctatggttcaaaatttatgttcttgttcttgaaccatgaattgtgttgagtttacgttcctttgagttttgtcttgttaatttttgtggctgagacctaaaccataggattgttacaaaaatattaaagtagaagaaaccctcaaaatctagagtgacttgctcacctattgtaattttgtcatagaagtcatgtctagtcatgaaacttgtcacataagatttct

SEQ ID NO: 65178 - DNA, 410 bp, Glycine max
  unsure (1)..(410): unsure at all n locations
atctgagttcttattaccaagtaaatggatcattnttaaggtccaacgccttataatgaccaccttccaagtaaaaagaatcgcttgattcacccttaaaaaagaactacgtaggtctgatttcctcttcgatggagggtacgtaggagcaagagccccgcttttgtcgacctcaaaaataaaaaaggaaataaaagttaaggtaacacaatttcacacaattctaaaaataggttgttgtcctttgagacaaacgtgagaggtgctaatacctacctcaaacgtaaatacaactcccgaacttggaatttctttttcgaccggtttccttcagtttttccgacgttttccacanataaacgttggtggcgactccacgcatctttcctcctttggaaagcgcacccatg

SEQ ID NO: 65179 - DNA, 431 bp, Glycine max
  unsure (1)..(431): unsure at all n locations
gccagcttctcggcttcgaatactcaaatcaatacatacctggtccctccaaccttggtgcagatgctctttcgaggaccaattgtgataattccggccagctcctncttctctcggtccccaattttgtcttcattgatgatctccgccggactctacatgacagccctacgttcatggcccagttcgataaagtcaaggcccaacctactgcctttcctgattntcaccttcataacgggcttctcttcttcaagggccgtatatggttggatcccaccaaccccttcatccacaaccttctgctcgaatttcacgctacccccttgggaggtcagttgggggttgccaagaccctccatatacttcagtcgagctttcactggggacaccatccgcaggatgtcacgcgctttgttcgggaatgtcat

SEQ ID NO: 65180 - DNA, 462 bp, Glycine max
  unsure (1)..(462): unsure at all n locations
tccncanagcanaattcanatgagcatagattttttatttctcaccggtcaccaacactgtatcaatagtgtactcgggatccattctctttcatatttcaaacagtatcaacagattgtatgtccagctgttaaaaatggcttacacgagattgaagatgagatttctacatcgaccacgattttgaggccccaaatttcacctgcctttcaagctcttataggaccaaaaacaatacaaaaaagacaagatattcaagcctgcagagtgtatctcaaggatgccattatgcaataaactcacaaaagatgagatttatgaatcaaattaagcaaaactatatctaagatgaaatgtgtaatattgaagggctatgttttacattcctttttcactttggtcttaagttcatgtttatcattctatgggacaaatagttttacaattgcacttgtacttta

SEQ ID NO: 65181 - DNA, 438 bp, Glycine max
  unsure (1)..(438): unsure at all n locations
agcttgcttgttggacttctatgggggctggatctttgagcttcaatgaggtccttcaatggagattttccaccatggagatgcagcggaaggcaaaggagaagaggagaggggaggcaccatccactaaggaataagccatggaagaaggagcttctccaccaagaatgtgccttggataagaagcttggagaggatgcttcaatgcacgaaaagaaagagagagggaaagagagagttgggagcacaaaattgaaggaggaaaagggggagagaagttgaactttgagttgtgtctcacaagactcccattcatcaaagttacaacaagtgttacacatgcttctatttatagactangtagcttccttgagaagctntcttgagaaaacttccttgagaagctagagcttagctacacacacccctataataact

SEQ ID NO: 65182 - DNA, 471 bp, Glycine max
  unsure (1)..(471): unsure at all n locations
tctatctcaacacttaagcaaggtaggatggccaagaggtgaatctagantagaatttgaaattatgttttccttgattcaaattctcagattttcttttttgcttgttgaccatatctctatctgtccaagtaatctatttttgattttgtaattcttggttggatttgataaagggttttcaagagcatcaatctgaaaatgagtgagaatgagaatacccaaaacttggacattgtaggtgagttagtccttagcctctaatatataattatgatgtttaactagcatattttaaatatggttcttagatataatatgttgatttacttaattattntatgtcatctttcctctcttgatataattcttatgcataatggaaatcatgaatatgtatatgttcaagaaaaagtgttccatatacattttggcaagagggtgtgaaggaagagtagaaaaattaaattt

SEQ ID NO: 65183 - DNA, 431 bp, Glycine max
  unsure (1)..(431): unsure at all n locations
agcttncatcactnaccggacttgaaccgtaccagtcctaaagacaatntcccctgccacgcattgatatattggtagataatacaaccaagttcgcccttttcttatttatggatggtttctcggggtataatcaaataaagatggcacccgaacatgtagagaagaccactttcgtcaccctatggnggacgttctgctataaagtgatggccttcgggctgaaaaatgctggggcaacctatcagcgtgtcatggtggcgttgttccatgatatgatgcataaggaaatagaggtctacgtagatgacatgattgccaaggctcgaactgaggatgaacaccttgtcaatctgcgtaagctgtttggaagggtgcggaaataccaactaaaactaaacccaaccaaatgcaccttcggngtaaagtcg

SEQ ID NO: 65184 - DNA, 429 bp, Glycine max
  unsure (1)..(429): unsure at all n locations
tctnccctattntgctataaatagggggagaagtgaagaatataagggttcagccttcttggcacttctctctctctcgaaattgctgaggaaaattatttccgtgaagaaaatccaagccgaggcacttctgtaacgtttccgtgagtaattacgcgaagattctcgaccgttcttcaacattcatcgttcgatcttcggtttcttcagtcttcaacgggtaagtacttcgaaccgagcttttcaattcattctatgtacccgtggtggtccacattttgtttcatgtatttttattctcgttttcattttctttttatacccccttttgacgtgcttaagccatttacttaagtcatttctcgcctaattctaaaataaaataaattcccaccgatcatttgaattgtatcatccgttaatttctgt

SEQ ID NO: 65185 - DNA, 372 bp, Glycine max
agcttgttatatcccgagtagtcaaagagaagttcaagtccatagccatcatagtctgaagagagtatgatgaactaagggacgtcaatatggccaccgatgaagccttggaatgagaaaccaagaaggcccgaaaggaagaacacgaccaaaacaagttttgaggggctttatatggcagcaatagtgagctcaaactccgaagaggtgaaaggaatcatcacgggtcaaaggcatgatctggaaggacgagctaaaggcttgccttatgtcgaaaagaaatttgtcccaacagttaaagtgagactgaagggaatatgtgggccatcatcgatgagtgcaaagagaagctaaatctagcggcgactcacg

SEQ ID NO: 65186 - DNA, 479 bp, Glycine max
  unsure (1)..(479): unsure at all n locations
tctgtccctgagaaactggttcccagaagacatcttggtgtgaagattgctgaanaccctagccttgcaacaagtcctagggaagtagacacggagatggacaagaaaatccgcggtattgtgagtagcattctgaaggatgcttctgtgcctgatgctgagaaagatgttccaacatcttccaccccaaatgtttctgtgcctgatgtcaacaaagatgttccaacatcttccggcccaaatgatgaagtactctcttcccccagcaaagagagatcaacagaggaagatgatcgagccgcagaggagacccctgcaccaagtgcaccagaacctgctccaggtgacctcattgacttagaagaagtcgaatctgatggaagaacccattgccaacaggttggcacctggcattgcggaaagacttcaaaacaganagggaaaaaccccccttaagaggtctggaagaatcaagacta

SEQ ID NO: 65187 - DNA, 383 bp, Glycine max
  unsure (1)..(383): unsure at all n locations
acaaaacacacaaccattattttatttatcttacgcaagcaaaagccaaccaatcttgggcgacatgtgtttatttaggtaattgcaagtgttaccatgcaactaattaaaacaaatcacacattgaggcatattagtattattactattattgctattttgtgaagaacagtctacagtaacttagatgcaaagtgcctatcatagtgtagcatgctcaaccaataatttaggctaatttcacccaatcactttcacatatttatgtaattcatgtattttgcattcaaaacaaggtctagatttctaagcctagctcatgctcttggcattntgatctaacaacctaagttgctcacacattctaaatgatggctatacac

SEQ ID NO: 65188 - DNA, 422 bp, Glycine max
tatcattcaagaatttcatagatattgtgtgttcatcacattccacccagaggttatgtttactcattctgagttcttcataatctttgtgtgtgtgcgcatattctcttcatagatcatatctttcttctttctgataatcataaagttcattcatctccttcaaatccttttaaagatctttcagttcggcttccaattcctaaaagttcttgagaggagtagattgttccttggcaattgtctcattcttaagacatagcttggactctttctccttaaccttgtgtttggatcaggaatttcaaattttcaaagaatttgaaatgtctagaatttgaattgctttgattttaatgttcttcatttctcaaatgctgtgttacgacaaatcaattcaaatttcttccatctaaaattct

SEQ ID NO: 65189 - DNA, 382 bp, Glycine max
  unsure (1)..(382): unsure at all n locations
tttgtcttataccttcattacacttcatttgtacctgagcttgcttccctatttttattaattttggtcatgtttatgtgtgagttgaatcttccccgcgagggtcaaaagataaaaaaaattgttaatataagaaccaaaatgaaagtcttaaattatagggactaaaaaaaattatcacaactataaggattaaaagggtaattaaatcaaaataaaataaactagagcaaaataatggtggtgtggttagacactnttaatcctaaatgtctccttgtagacatatatacctctacatatgtgtgcatttcgcaaccaccaccattagtggaataaaattntaaatgcaaacccttctatggtatatatcctatatagg

SEQ ID NO: 65190 - DNA, 467 bp, Glycine max
  unsure (1)..(467): unsure at all n locations
ntagcattgccaattgccatgatgtaatctccttcttcattgtctctcatcaagttggagtggtatcatagcattgaactaagttgatcgttctaatggtagtatgtgccttcatggttgggatgatgttgcaggttccggtttgttgttgagggaaaagatgatcagccacgtcttgtgtgtgcataagagagtgtctttgccctctccacaaccttaatttcaacaattgacgttagtcgaaacttgatggtgagaatcaaaagagtaaaaaaaaaatgtgtttaattcataatatatattcgaccatttgatctttgacaaattttttctttaaaaaaaatctttaatatttaaaattttttattttaaatctccatcgttaaataatgacgtaccttcaatatttatttgaaacttgtctttcaccccgtcttcctcaagctcttcacattcacacacatatg

SEQ ID NO: 65191 - DNA, 425 bp, Glycine max
  unsure (1)..(425): unsure at all n locations
tggagaaaaggtatcagagaaattgattcctttgggaagttccatataaacttcttcaaacaaatctctattcaaaaaagcattattaacatctaattggagaagacactagtttctagcagcaacaacacagagcaaaactctcacagtggtaagcttggccattggagaaaatgtatcacagaaattgattccagcttattgagtataccctttggcaaccaatcgagctttgtatctatccacaaagccatccattntatatttaaccttatacacccatctacaacccatacaatgcttatcaggtggtaagggaacaagtgtctagggggaattntcctcaagatctttgatttcctcattcattacctgacgccatttaggatagggggaaactcaatgatgaaattgaggttaataca

SEQ ID NO: 65192 - DNA, 478 bp, Glycine max
  unsure (1)..(478): unsure at all n locations
ntccgcgaagagatctangagggacgccgcggctgaagggaccagtgctgcccccgagtttgatagccaccatttcaggagcgctgagcaccagcagcgcttcgaggccatcaaaggatggtcgttccacagagagagacgcgtccaactcagggacaatgagtacacagattttcaagaagagatagctccccaacgttggacgtcactcgtcactcccatggctaagtttgacacagatattgtcctggagttttatgctaatgcttggcccacagaagagggagtgcgggacatgcaatcatgggtgaggggtcagtggattccctttgacgcaaatgcccacagccagttcttgggtgacccgctagtgttagaggaaggcctggagtgcgagtttagtcagaggaggaacagggccgatgggttcgacgaagaggccattgcccaactattatgcattccangtcaggatttt

SEQ ID NO: 65193 - DNA, 367 bp, Glycine max
  unsure (1)..(367): unsure at all n locations
tttctatttttcggtactacaagtctttgagttagattangggtttaaaaaagtcaagtgatgccttaaaatcacttatcataaatacattggtcaaattttgaaaaatgtgcaagacttatttaacatacatttctagntggggatgacctatttctgtcctccataactcacctattttctttgattaatggattattggagctggagctttgatttgctagcaagacgagagtgaataattttttaggcttatacatatatattcaacgaaattatgtatgaatacaccaataaaatataattccactattatttaaaaattaaatacataacgaaattacgattctattatatatatattttt

SEQ ID NO: 65194 - DNA, 480 bp, Glycine max
  unsure (1)..(480): unsure at all n locations
nnttgccattcctagccattccctttttggcataatacctttatctcgccattatcaacagtggaacaacactgtccctgtcagaaaaaagttcactgtgtccagattggcgaaacacacatgctgtggttttgcttcacacctccagggtttttcttgtagctactggtcaatgcctagctntgtttcaggttactgcattatccaattgatgttaatctaaacccaccggcctatttgttacagcagagggagacaatcgagtagatagaaataatgaaattgtgtgttacggcagattcattacagagctacaaatttcatatttatttaaataatactattttcatagttaaatgatatatgtttgagaataaatattttcaagaatatgaattnntgtgaaaagaagacanaaaacgaaagaaaataaaagttacgtactctgccaacaatctttaataataagtggtgaatttg

SEQ ID NO: 65195 - DNA, 470 bp, Glycine max
  unsure (1)..(470): unsure at all n locations
ctcgccggatcttaagctacgccgctgcagcttacattacatgccatctgcagagctagtgtcatttntatttctaaatttaacaactggaaattgaaactttggaaagtattttatttctacgttactttttctttaacggcaaatattaattggttattgttagttttctactagtggggagattcaaacccacaacttctcccctctccattctccctttcccactaagccaacattatatctcctatttctatgttacttaatctgcactngtcatctatgtcaatgaaatcttaacttttattgttgtaatcctcaaattgatgtcgtcatgtggtcctatttatgacacagcttaatattgaaaagagctntcatttcatctgtcattagaattntttccaagaagttaggacagcacaaattcaaatgtgaagtttaagctaataattgtngatcaacttctg

SEQ ID NO: 65196 - DNA, 465 bp, Glycine max
  unsure (1)..(465): unsure at all n locations
gaaatctacctagttgaataggcattntcattaagtttcatatttgattcccaccatacaatgatttattacatgtctcaattgattggatgattttcaggtggtgattattgaaggaggggatattcatgtggttgccaggcatgccgcanattcagttatggtgtcttctggtgtagggtacacaggttataaatcgttagatgtcacgtaatanaaagacgtgttgaggtacttaagttcaacaagagcatcattagaagggatattactatctcagaaggaaaaatagaattccacggttgaggtatcaaccatttgtacagttngacatcggttgaaatttcaagattactggttntctctcgacctaaggagacatgctcatttggngctttttgactnagttaaggcaattttaaaaccaattatcanaaagtaaaanataaaaatactagttgagta

SEQ ID NO: 65197 - DNA, 461 bp, Glycine max
  unsure (1)..(461): unsure at all n locations
agcttatccaaacaagtgtaacaaaattagcatattaactntgagaatatgtcaattctgaaacttacttcagtgcgaaattccttttccacaacacctacagaaacccctccatgtcgtgctccaacaagcataacggaacaaatccatataagcttctccaacatctacttttgaaacgcctccttgtcaagaacctggattttgagacatacatcagcgtgtgatatacatatcagacgtgtaaatatttgcttttgacattgcacaaggacatcctaccacttcaacctcgaagttaagcaaatcaaaaacacttaaatcccaaaaattaaaaagaaccacccccaacctaaatgagcacaactaaacaattcccaagtatcctatagttgctatcaaactaaataaactacaactataatgatcctcaaagtacaggctctntaacaggtcacaag

SEQ ID NO: 65198 - DNA, 479 bp, Glycine max
  unsure (1)..(479): unsure at all n locations
tatagtcattacttggtgagaaccataagccannagtgaatgttcctttgatatagtaaataatttgttttggggccttgagatgagtagtggttggagtctccatgtattgactgatgagtcgagtaccatatagaatgtctggtcttgtggacgtcaaatatcacaaactacccaccaaactcttgaaatttgtagcacccatcttttttgcttcgtcaaactttgataacttcattntgcactccaccggtattccaattggcttgcatagttttgctatgaaatgaagattcaatcttccttttgctttacctcaataccaagatagtatgacattagtccaatatcggtcatcttgaactccttgaccattgctttcttgaacttttcaaacatacttggattacttcccatgaagatcaagttatccacatatatgaacatgatcaagatatctccatctttgatcttgacat

SEQ ID NO: 65199 - DNA, 449 bp, Glycine max
atgctagaattgcatctggacacctacttttaatctcctatgctgtacctacatacataaaacagcctcaccatcccaattttacaaaatcatattcatacaccattggggcgtttcaccgaacacttggtgagcgcatgtttggacatgaattgcaggagaataggagcaatgtggcatgccccattgcttcataatacaacctacgcctaaggccttttcattcaaatcctcaattgaagaaaacaagcaccaaagcgaaccaaaactacctcacaaatataagcatgttctcacaatttaaggaccaaaagatgaagaaaacacatcaatgggaagcaaaaacatcaaggatggaatacttacttggtggagtgaatagaaacaccaaaaactaacacttaatgcgatcaaaagtggcttatgggagcaagaaactgcaagccttc

SEQ ID NO: 65200 - DNA, 485 bp, Glycine max
  unsure (1)..(485): unsure at all n locations
tatgaatgatatgaatcgaactcattngctatattcaatttctaattataattattatccatactttatttatttatttattntatcaagaaacatttaatgtgaatttaattaattaaaacacgtcacttagtaaatcattaaaatttatacattaattatatttttgtattaaattaaataatataataatgaaggaaaaatccctcgagaaaaacataatttatagaaatgaaccactcctctcacattaaagttctaccaacacatgtatggggcgtatacaaatattgtttttatcangcgtatgagaatggttctatagtacccttttgagatcctatccattgttatccatattgatgatccatttttgtgctcaagagctactcatattttttatactagtaataggtataattnttatttgtaataaaatactcatacaatgttaaatggttttctagaatactntnntaatgtat

SEQ ID NO: 65201 - DNA, 275 bp, Glycine max
  unsure (1)..(275): unsure at all n locations
gagagtcttgtgagacacaactcaaagntcaacttcttttcctcttttcctccttcaatttcatgctccctcctctctctttctctctctctttcttttcctccattgaagcaccctctccaagcttcttatccaaggcacattctcgatggtgaagctcaaagatcaagcctccatagaagctccacaagcaagcttccatcaaggagctctagtttcttggtcctccaccaaggaaccagtagtaacattgtcatcctatgaagctgagtata

SEQ ID NO: 65202 - DNA, 440 bp, Glycine max
  unsure (1)..(440): unsure at all n locations
ngaaggtgtgtagcccaccatcttttcatagtagaatactggtaatgtgtctactatcattgntattatttttttctccgtcattgaggtgccacttgagctgccaggtctctccacctttgggcgtattcttttgaaagattcgtgccccccttttgcacatgttctgtagttgcatcctatctgaagacattatactgacactgcctaacgaaggcaaccactaggtccttccaagaatggactcgggaaggttccaagttagtgtaccaggtaacagctaccccagtaagactttcttggaaggaatgtataagcaattcctcatcttttgcgtatgcctccatcttctgataatacatctttagatggttcttggggcaagtagtccccttgtacttgtcaagtccagcaccttgaatttgggaggggtgatgata

SEQ ID NO: 65203 - DNA, 395 bp, Glycine max
catattaactaaacaagatgggaaaaggtaccgacgcacacctttggtaaagttagaacattttgtgctggagaagccctggatacatatgtatcaccatctacaagaaaggaacggtacccactaacgtgataagcattatatacaccccatcctttacgaagcttctgttgaactatcaatattttaagtgatgcctgacgcattcaccagaaataaaaacataataaattatgatcagagaaaaagatgcgtttgctaaacatctcagttcagtttcatatgcttcccaactgacaaaccacaatgcattgtctaacagacattatcagatcatcaagcagatcagattagagtactattcagtgatgaatatttagcagcgcatcgcttca

SEQ ID NO: 65204 - DNA, 455 bp, Glycine max
  unsure (1)..(455): unsure at all n locations
ngctgcatactaccaactccgagatctttcaccccagcatttgtacaccagaaaagagtatgtatatatgatatgtattgagttgggttttgccgatgatattctttatatccccctgaatgattgctagatatggcgttttgggtggaaaaaggtcttacacatcagatacttgcccattcgtagcatcattacaatatattatatggaacaagtgaatacatacttgtgccaatgcaccttctttttgagagtttggatctattgcataagaccatgctctaaattaacatattctgttcattgtgggacttcgcggtctatacatacctgctgatcattattatcaatctatctttcacatgagctgcattgatgcatccatacataatacgatacttgacagcaggctggctggaccaatggcattttaaaacaatcgaatccacacattc

SEQ ID NO: 65205 - DNA, 303 bp, Glycine max
gagcttagttacacacacctctctaatagctcagctcacctccctgagatgagaagcttgagcttatcttcgccccccctataatagctaagctcacccctctgagcaaattcatgataataccaagaaacatccctactacaaagactatctaaaatgcctcgacatacaaggcgtgaaccctatactactagaatggccaaaatacaaggccctagacgagggacaacctattcttataattacaaagataagcaggctcatacttagcccatgggctcaaaaatctaccctagggtcatg

SEQ ID NO: 65206 - DNA, 462 bp, Glycine max
  unsure (1)..(462): unsure at all n locations
ngtagaatggctagacatgatacatgtcagggtttggtttggttcaaggataaaaagggatgccccacattatttccatgacacaaaatgcaaaaaaatgatgatttggaaactttatgcaaaactggtcatgcatgcacctatgcggacactcaagtgtcaaatttttatggtcatgtgatgctagggctcaagattcatttcctctattttaatcaacccaatgtttccaaaatatgttcttttatcaatttgtgcattcatccgagtccatttcgggcgtccggngaaatttcacagcattcacccttcaggtgtagacacattttccaaaaattggttatgatcaatgaacttttttttggaaatcgtctcttttcanaagcatgtcgttttttagctagacaacttattttctttntttctccttcttntttttttttatcaattntatcattatca

SEQ ID NO: 65207 - DNA, 275 bp, Glycine max
ctgcagctaaattatgagtccgatatttttaatattttatcaaggagacagaattattaggatgtacccgacccgagcaatgaattagtctatagagaccacattgtcctaggagttgctgtgcatcccagccttatttattagccattaatctttctgagacatgcacactccgaacgtcttgtttcctcctagcttcggtatgcagatttgtctagcatctccttcctggagaagagctatggcttactagcaacaaatgaaagcaacaatct

SEQ ID NO: 65208 - DNA, 443 bp, Glycine max
  unsure (1)..(443): unsure at all n locations
tcatgcctcttcatttcaatattttgcttctcaagttgcatttctggctcaagaagatgcacatatggctcgagatttggaagtataagcaagcgaatctactcaaagtgaaggaacatacacattagttgacaccaatacaactagaggttctaaatcacaaagcataaaagtgacctgtgaaccccatacaaagacatgcattnaaaacagttgcaaatatttaagaaacatcatataaaaaaaagtaataattcttcattattattatccatgagaactaaacagatggtaaagaatagtttataaaaaataatcatatataatctaaaagggaanagtagagctgtctccattagttattatccgcaagagatcatcaaataattaatatgaaaccgaattaacaaccagaagccatcgaacaatctactggcctgaaa

SEQ ID NO: 65209 - DNA, 407 bp, Glycine max
  unsure (1)..(407): unsure at all n locations
agctttccattaactaatcattagttaactcgtagatatcatctcatcttttagagaagttatatgagaaagattttacaaattagttgattgttagctaatgaaacattcatttttgcttataaataagnncatttttggtttttcttcttattgtttctcttagaaattcttttagaaaaatacatccaaacaaaccccttgctttagaagtataaggttggataatatgcttctatggtctataactctcttacaagcaaaccaaaattaaaaaatacaataaaagttacaaaaacaaatattttttcatcaaagtaaatagaanaantacacttagttctcaggtatgaataatttttttaaaacatattaacannttaatggtcgagtgataccttttcttg

SEQ ID NO: 65210 - DNA, 453 bp, Glycine max
  unsure (1)..(453): unsure at all n locations
tattaggacctatgaaactcagcttcctttacacanagagaagagaaaaatgaaggattgaagaaatacaagtagtggggatgtctcctccacctctagaacctcacaatcactcacaaactcatctcatgttctcaggatggcttcctcttcatcttagttctctatcagtcttcgtacaacaaaagctctcaaaactctctggaacttggacctttctctctctagaaatctataaacatgcaaaagcttcgagaattgcccaaactccctctccatttctgattttaggcttaaataggtggccctgttggtgcttgcgggcttagcgcactctggctcgcttagcgtgcattagtgaattttggcttagcacgcgtcttctcgcttagtggatggactcaagcggcgcttagtgggatgatacctcgctcagtgaacaagcacaactca

SEQ ID NO: 65211 - DNA, 419 bp, Glycine max
  unsure (1)..(419): unsure at all n locations
gcttttgccaaccatgtttatcaacactatgaattcaacaatgctttnggagaggtaagatttagttctagaatgtaatcctgtttattgtaattggatatccctagtcagcttatttttatcggtgcaatagcattcatttgtttgcagactttntagacacactaagaggtcaaaggaataaaacctaacacacttgtacaatttgattcactcgtcacatgatgaatggcaccaccatgtgtcaccagctatctgtcgctcttgggttaaaacatctaattcatctatagaaggacagtggagtgtgtagtcatttcacaatatgtgctacacttccacttttataaatgctacttaagtttgaatctgtagcacattaaataattaaggttaaattacccatttngtccttataa

SEQ ID NO: 65212 - DNA, 469 bp, Glycine max
  unsure (1)..(469): unsure at all n locations
ntanaagacctatgctagtcaaataaattgcagcatatcttatatgtgtaatcaagagntttttgttggtagagaagaaaaaataataagtgatctcagatcattatatattcaattaatctttgtgtaacatgtaataagatgctattaatttttttacaagttaaaaatctgaatgttacataaattacccccgggaccctaaataataagcgatctgagattattataaatccaattaatctttgtctaacatagaaaaaataataagtgatatgaaatcattttataaatataagatgttattactttttttttttgtaagttaaaaaactgaatgttacataaattacccgagaccctaaataataagtgaatcgcgatcattataaattcaattaatctatgtgtaacatgcaataggatgttattatatttttttgtaagttaaaaaactaaatgttgcata

SEQ ID NO: 65213 - DNA, 375 bp, Glycine max
  unsure (1)..(375): unsure at all n locations
tcgatgtgggtccgaaaagagcaaatttgatcatcctactangacgactgagaaaactggggcaaataaagagggtgaggataagggagaaacccatgttgtgactgccattcctgtacgaccaagtttcccaccaacccaacaatatctttactcagccaataacaaaccttctccttacccaccacccaggtatccacaaaggccatccctaaatctaccacaaagtctgtctaccgcacttccaatgacgaacaccacctttagcacaaacccaaaaacaccaaccaagaagtgatatttgcagcgagaaagcctgtagaattcaccccaattccagtgtcctatgctgacttgctcccatatgattcaatg

SEQ ID NO: 65214 - DNA, 464 bp, Glycine max
actaagcttatatgtgcgggtctgggagacgaaggtcaagtggtcgcgatatgtgaagatgatgttccaagtactttggatttggtccgaccatgccctcctgatttccagctgggaaattggcgggtggaggaacgccccggcatttacgcaacaagcataatgtaaacctttacggttttaaaagctctatagttgggcctaggctctagagttctcattttgttaaggctctgtgtcttttgtctttgaatttataatacaaggatctttcttcatctgttcctggtctctacccattctcattcatttgcatgtttacttcttttctgaaacggcagattctatgacgagtcccccgaaggtactaatacctgtgacccgtctatcaacttcgagcaagaaatgaaccaaacggaagatgaaggagatgaggatgtgggacttccttcggaactagaaag

SEQ ID NO: 65215 - DNA, 356 bp, Glycine max
  unsure (1)..(356): unsure at all n locations
tccgtctcagagtcttatcaaagattggtcctagataattaatatcctccctttctaattaaaccgagaggtaagagaagaaatatttttgtttattgaaaaaaaggaaatatttttgtaagttatatcggaacctacgnttgggtaatttattatttttttggccggcagtaagtttagtgaaaaaaagcagaagctaatttcacaaaaaaaaaagaacgaaaaaaaaaaacagaagccaaattggttaaaaagcttaccttgataagggtatagatggtaattccctcaaaattaaagaacacaatagacgtcagacaaaactgagggaagtgatcatggtatattttattagt

SEQ ID NO: 65216 - DNA, 482 bp, Glycine max
  unsure (1)..(482): unsure at all n locations
taccgaactntcataaacaaatgtccgagaaagaaaaaaacataaagtcactttcaagtgcccagaaacaaaggtcattggaaaaaagaaaagttaaaggcgaagcttttgacgtagtttagactttggaaggttgaagaaatttcgtgaaatggggaaggaaaaaaaaagtaaatagtttatttagtaattatgcattcactgacaacttagttactatattttttaaatcatcgatttaattttaaataatcaatttaatccacaaatatgcaaatactacaaaaattagttcaataaatatggaaaagatgaagaaataatggtatcgtttaataaaaatattacagtgggataaagcatttgttacaagtttagtgcatcctanaaatagaataaaactatacacaatgacccttgcttcaaaaagattattaataagtggtacattntagtttcactaaacagacagaanaacattt

SEQ ID NO: 65217 - DNA, 484 bp, Glycine max
  unsure (1)..(484): unsure at all n locations
attcttaagtctcctgccgtcatgcaagcttgtccgcaaaaatcactaaaaaccgttttaaggtctaatgccttaaacgggccgctttgctttntatcggtaatgtgaaccgttcaaaagcatgaagtcaacatgtaactttaccacttttgcaagaactacgtaggtctgagttcatcatcgcaattgaggatacgtaggagcaaaagcccgctttggtcaaccaccccaagagatcgttaatggtccaacgccttaacgtttctctactttcaaaaaacaacagatccttaaatggtccaacgccttaacgtttctctcctttcaaaatcaaaagattgtttaatggtccaatgccttaaacgacttctgtttggtcaaaatatatcttgcaaaaaaagataaaaacaacttaaccaacgttcagttcttgaagaactacgtaggtctaatttcctcatcgcaattgaggaatacgtaagag

SEQ ID NO: 65218 - DNA, 468 bp, Glycine max
  unsure (1)..(468): unsure at all n locations
gacactatgaaactcagcttgaagtatnntgttagtataattgcctgttccattaggcttttaatgtctctagaggttacttcctcgttgacatcttttgttttgaatggaattgccataacacgtttgttgttactgtctttgatatttggtagttgatattgtgttgtgggaggtaattccgattggattaactcaccatccttcacttgccaatttggtatgacnatttgttgttggatcacctatgatgtcgttgtttccaagggtaatctatatcctttctgatggcataagcatgaaaccaatcaaagaaaaggacattaattttgactctttcgacaaattcgtagaacttgtcttggatatgttntctgtttgtacccttgtaatgttggacaaaccatctcctttgaggttcattttccggagaatagaaatctttcctaaagggttccttatcaatgc

SEQ ID NO: 65219 - DNA, 470 bp, Glycine max
  unsure (1)..(470): unsure at all n locations
cctgccgcatgcaagcttncaagtgaaaactgcatcttttggaggaattttcatattccatagtaattgtgatgttctcctatccgaggctggtgtagaaggtgttatcagtaatttataagcagacttagtggtatacaccccactagggtcagctttccataacatgacatctttaacatatctctgaatgtgtatggaattgatctcctccataaaattcacagcttgatcactctcataatcaaacagattccttcgccacttgaagttccacctccacctgtcctggtcaaaattccccatcattaaaatgagatcagctcgctgttcattgatgagaaagagctgattgtatttctgttggagagtataatcctcccctagccatttgtctttccagaaatntactttatccccaaacctcttgaattataagaaaggatgatcataactgcttgcttttaatg

SEQ ID NO: 65220 - DNA, 488 bp, Glycine max
  unsure (1)..(488): unsure at all n locations
gaccttgaaactcagcttaatgtcttggatgattntgaaatctcttcgtaggtttttataagcttttgaaagaatcaatgagttaagtaatagttcatgataggcttttctaagagacttagggtcatcaaaatttaccacatatgcatataagccccttcttttctttagtcctaaagaatttcttatcttggcttttctccaaatctggacattccgacttgaagtgtctaggctttgtgcattcatagtagactatggagcttttgtctttttccttcttgtcctggggcattcttcttgaagagcttctccacttagacccacttttgtttctccacatcttatagattttgtgatagatgaaggcgagatcgtcctcatccaagtcttctttagattcatcatcaaatgaatcattgactntaagcactntggaggagcttcttcatacttgttctctagatgatgggtctttcttgttcttc

SEQ ID NO: 65221 - DNA, 393 bp, Glycine max
agcttgagctgctacagtccaatgtgcgatatcacatttgctacgataaatgtctcgtagccatgatagtcgtacatatgcctcatgacattgtactgtctcagctctggcttcatctacactcacttcaagtaattccactaacaacaacaccgttttgtcaacatgaagagtctcaaagctatagaaggcccctgtgatgggcagatggagcaaagaggccacatcattgagggtgatagtcgcctctcctacaagaagatggaaattgcacgtttccttgtgccacctcttcgcaaaagccgatataagtttccaattgccagtgtccaaggaacatgtgattagaagacttaatcctgtggcagcaactaagccttcaatctctatagc

SEQ ID NO: 65222 - DNA, 443 bp, Glycine max
cactagtgaacactcaagctctcactcggatgtgtgactgagtaccgtaatatatcaagactctggaaattgattatcgcagctctgagcaaattcaaacgacaataactgtttacttggatgtctgaatgagacccgtaatatatcgagatgctcgaaatggaataccggagctctgagcaaattcaaacgacaatgatgttttactcggatgttcgattgagtcccataacatatcgaaacgctcgaaattaaatgtcgaaactctgagcaaattcacacgacaacaactgtttactcggatgtctcattgagtcatttaatatatcgagatgctagaaaatgaatgttgaagctctgagcaaattcaaaagacaataacttttcactcaggtgtctgagtgagtcccgtaatatatcgagacgctcgaaattgattatcg

SEQ ID NO: 65223 - DNA, 437 bp, Glycine max
  unsure (1)..(437): unsure at all n locations
gaataaaaagagcacattagatatgattgatgagcaagaaccttatgcttgtgatccttctagtcttccaaaagatccctcaatcaaggaaatggatgctaaatgacaggatgacgaaacaaggaggtgccttttctctcaatttgcttgatgcatattagaagtgaggtgcacatgggtgtgaatatttttaaaaaatgatattattttcttaaaacaaagggagggattatgacagaaaanatggaggaaattatgaacattgaggataaaaatgtaaggtgtttgtgaaaatgctacagtgaggaggaaacttccaataactctctcactgagatatcttcctttattttaaactctattgttaattacaagtttaattagtgattattatcgatatgtacctaagaacaaattntaagcacggtaagaaaata

SEQ ID NO: 65224 - DNA, 444 bp, Glycine max
  unsure (1)..(444): unsure at all n locations
nnggggtgtaactagcattgngaccatctagaacattctgtatggaggtgcactcatcaaattgngggatgcgctcaggaaacttcatcactaagcaacctggagggggttgcattcaagaaacttcatcactaagcaacctagaaagggagtgtactcatcaaattgggggggtgcgctcagaaaacttcaacattctagagaggggtgaacttatcaattggggggtgcattcaaaaatcttcctcaagaagtctctgggcggaaaccacctccccttttctcctataaataggggaagggggctgaaaggatccaacaatttttgcactaagctttcacttgaaattagtgaggaaaagagaaagaaggaaaaaatccaagccgaggtgcttccgtaatgcttccgagatatttccgtgagcgattctgacgtgaatctta

SEQ ID NO: 65225 - DNA, 356 bp, Glycine max
tgatttctaaataactcttaaaatggattcagttgttcctttgtttgaagcatgatattcttctttttaagtttgaaaacttctcactcatcttttttcctagtcctaaaggtgttcccagcatctgaagctatatagtagtttacaaaaatataatttattcataaaagagaacaaaaatgagaattatcaatcattggttccataatattatatagtagactgatttaatttggtcatgtatttcgtccttgctgaaattctagaggagtttatcatcatatgaattggctattataaattagtttcactcacaaatatacctaaccaaggatctattttaatttttttttatt

SEQ ID NO: 65226 - DNA, 469 bp, Glycine max
  unsure (1)..(469): unsure at all n locations
tataagaaccaaaatgcctaaatcatttccaaatatgcatgtgaattangaagcatcaacaagaatcaagccaaggctattgtgcaagcaatcaatggggcaaaacaccccaaaagattatgatgattgatggctcaaattctcacaaaggtaaacttatcacttccacattgagctttcaaaactatcatgacatgtagaggaaaaacaaggatttcaaatcacaaaatgttgagagacttttattttcaaaacaattacccattacttgaacatatcctataattcaaagaaaaacatgcaaagttgtacatgcaaataaaattgacctaaaatattaaactagaaacccaacaaaactaacaaaattaacaaatttaacacaactaacaaaattaacaaaactaacaaaactagcaaaaccaaaaccaaagaacactccccccccccccatacttaaacattacat

SEQ ID NO: 65227 - DNA, 290 bp, Glycine max
agctgtatataaattgaaatggtcataacttttgacacggatgtccgattcagacacattacatatcgagacgctcaatagtgtataacacaagctctctagatactccatagtcatgacttttcacacatgacgccgcgattctgggatattatatatcgagacgctcgaaatggtacattgcatgctctcgagaaattgaaaaggtcattacttttacctatgatgtccgcattaggagcatcacatattcctgacctggaaatagaacagcggatgctcatgagaaa

SEQ ID NO: 65228 - DNA, 418 bp, Glycine max
  unsure (1)..(418): unsure at all n locations
nntacagcagatttagtaatgacccactaacctataattaatataacttaatgccattaacctagggaattaaaacaaacttaatggctgagtgtaactgaaattgtggcaaccaaaagtcaccctcaacagccaacaagtcagccaccatttggtctcccaaaaggctgatgcctangttgccaattgggcccttattacaacttgaactaaagcccttttagttgattaacccaaaacatatttttggtcagccaactttacaaggattgggccattatttagacaaactaaacactctaaaattgaaataaagtggtgtcatttagtcctcctccatttgggccatgatacaactcacaaccttggacttttctccttgaaacttgngcttgtattcaaatagtatggacagcac

SEQ ID NO: 65229 - DNA, 403 bp, Glycine max
gcacatgtgtctttttaaattcacgtgtcacgaatgaacgatatgttcgcatgctttaattcaatgaaaggaatttgcaccaggcctcttcgatcatattcaagttgtcaaaagggtgcttgttagtggtatacacgctcgtgattcatatttctgatacaattaattctactagaacattttcgatattttgtgatgactagtaaacatgcacaaaaaaatattctttattaaacatgctacatgtattccgaataagtgtttggtgtgaggcttcaccaaatcaaaatctttccatagtgatcctaagaatttgtcttggacacttgtcaaaaaatgttaactcattggctgaaatgcaagatcctcctacatgtttcaactgtaatgcaccacttttttt

SEQ ID NO: 65230 - DNA, 490 bp, Glycine max
tattacgtgacactatgaaactcagcttacgtgtgatatgtttcttaattatgagtgtcattgctgtgtgttcatttgtatttaaatagattttgaggtgaaatgatttatattcgtatgttgttataagcaagatagtagtagtattcattataagttttatatatatatatatataaaatacaaaggttatctaaaattgttttgactcaaacaattatagagtgagtctaatgtttgaatcatctaacgtgaatccaaagcccgaacttgcatgttatatacaaggttcaacaaaatctagtactagtaccgctgagggaatctctgagaaaacagattctaaggatgacaacttattatttgttgcgggtgccactgatagagatggctcacggacagtgaggtacatctattagatcttgatctatagctctcttttctaggataataactctgtaaaaatgcttaggagcgataggctctctca

SEQ ID NO: 65231 - DNA, 173 bp, Glycine max
caactctggcttcatctacactcactttaaagaagttcacttacaacaacaccgttttgtcaacatgaacagtctcaaagctatagaacgcccctgtgatgggcagatggagcaaagaggccacatcattgagggtgatagtcgcctctcctacaagaagatggaaattgcac

SEQ ID NO: 65232 - DNA, 480 bp, Glycine max
  unsure (1)..(480): unsure at all n locations
ngaaggttaaggacaagctagaagatgtgttgacttttacatgcctaactcccttgagtggcatttgtattggttgttatcttgtatgtttcatcttagtacatatgatatctatcttgcatcattcatcatcatagttagtgtgaagaaaaaagtttctaagtaagaaaagtttcttcaagaggcaaaaactctggtttaagcgattacaagtttatcgtaatcgattacaacaagctgtttgaagcttaaagagttgagtctcgtatcgatttaatcaattaacgatatcttataatttattgctctattgtttgagacaatgactgatttattcaggagtctttgctttaatcgattaccaagtgggttaatcgattacttctctttcgtttagttgttcaaaagtgaacaacaacactntaatcgattactgtgagtatctaatcgattacattgttcttgtgttatttcaagatg

SEQ ID NO: 65233 - DNA, 310 bp, Glycine max
attgatcatactactaggacgactgagaaaactggggcatatcaagagggtgaggatgagggagaaacccatgttgtgactgccattcctggacgaccaagtttccacctcccgcattatcttactaccaatacaacctttcttaccaccaccagatacacaaggccatcctaatctaccaaaagtctgctaccgcacttccaatgacgaacaccacctttagcacaaacacaaaaacaccaaccaagaagtgaatgttgcagcgagaaagactgtgtaattcaccacaatttcagtgtgctatgctgac

SEQ ID NO: 65234 - DNA, 459 bp, Glycine max
  unsure (1)..(459): unsure at all n locations
ntatatgtgcgggtctgggagacgaaggtcaagtggtcgttatatgtgaagatgatgttccaagtactttggagttggtccgaccatgccctcctgatttccagctgggaaattggcgggtggaggaacgccccggcatttacgcaacaagcataatgtaaacctttacggttttaaaagctctatagttgggcctaggctttagagttttcattttgttaaggctttgtgtcttttgtctttgaatttataatacaaggatctttcttcatctgttcctggtctctacccattctcattcatttgcatgtttacttcttttctgaaacggcagattcgatgacgagtcccccgaaggtactaatacctgngacccgtctatcaacttcgagcaagaaatgaaccaaacggaagatgaaggagatgaggatgtgggacttccttcggaactagaaagaa

SEQ ID NO: 65235 - DNA, 371 bp, Glycine max
  unsure (1)..(371): unsure at all n locations
gtagtttgatgatgaccaagatgatgacatatatcccaaagaatgatttctaggatgagtccacaagttcaggatccagactaatttcaagcctcatgaaaagaaatcaagaagattcaagattctagagaagtttgattctcagattcaagagaaatttggtttctagattcaagagaagaaatcaagaagacttcacaaggaaagtattgaaagatttttcaaaaaacaaacatagcacacgtttgttttcaaaagaagttttctcanaaatttctaagttaccagagcttttacactcttggaagtcgattaccagatttctgtaatcaattaccagtggcaaagtttgattcaaaagcttttaactg

SEQ ID NO: 65236 - DNA, 471 bp, Glycine max
  unsure (1)..(471): unsure at all n locations
ntntccacgttntacttgatacttgtgtggttatgcaatttcaaaattctgttataacaacttagcaaaatatcttgtatgaaatggctataaaaaggggtaatgatgaaataaaaagatatgagaattattccctgcaatttagcttttcttttattccagttagctatcaacagactaataggaaagaacaaaatactaaacatttatttaattaaatctaataaaaaatttacttcaatcacattatttaacaaaatacttgcaaggtaggggtgtcttctaagagatggagtgtttggcagcctattataaggaagtttgaagccaagcttgcaaaatggaagcaaagaagtctatctatggggggcagaatcactctcattaattcagttttatcaacaaagtgtaccataattctatntaatggatatccacgtanggagtgtttgtagcctatanggtgtctat

SEQ ID NO: 65237 - DNA, 377 bp, Glycine max
  unsure (1)..(377): unsure at all n locations
gtttacacgaggatctcgacgaacttagttgagtagtctaacctatgagggtcgtccacttgagtctaatccaacaagagggatctgaagatgaaacttggatttgattggtctgacgacggatcgatgtttaataatttaggctgcgacctataacacacgagcatgattgattatagaaatatatttctatgcatcagcttgtttatttgacagacccaacatttctacctactactgttacttttacttaccttgcattttataggttttagcataaaagattatgttaaattctgtttgaaattatcaatcatacatgttctctcaacaatgcttcatttctgaacttaacttangctaacattagttccttg

SEQ ID NO: 65238 - DNA, 426 bp, Glycine max
tatcaagagacctactcgtggcgactgtattcaagagaaggtcttcttggttgacacactgtacacaagggaccaacgttccttgtgttcattgcaagaagcacgatttgcttgttggttgatcactggacacaaaagaccaacgtgttttgggtgtcattgcaagaagtgggtataacttcttggttgttatcaatggacacaagggaccaacgttccttagggttcattgcaagaagtgggaataacttcccggttataatcaatgaacacaaaggagggaagtcctttgtggctcattgcttgtaaaggattttacaaggatagtggaaatttcaagcatgttgcttgaggactggatgtacgcacaggttgtggtcgaaccattatgaatccagtgttgcattctctttttccttaatctct

SEQ ID NO: 65239 - DNA, 463 bp, Glycine max
  unsure (1)..(463): unsure at all n locations
gcttgtaattcttgatccgcagataacatatgtggtaatagttgggactggaacgagtcaccaatggctttcttgaggaaagagaaataaaatgtcagatgaattttactgtgagatggaagatccaacttataagcaacaacaccaaccttgtttaacacctggaaaggaccataaaaccaaggggagagtttttcattaatccttttagccaaggatcttctcctataaggttgcatcttcaagaacacccaatcaccgactgcatattctatgtctcggtggcatttgttggcatttgctcacatgatatcttgagacttcaacaaattttctcttagagtagccaataattcattccaagaaatttttagtttattgacttcttcaaggcgggaaggaatggtggatcccttgagaatgtgaggnggatcatgtccatacaaagctttgaaaggagaca

SEQ ID NO: 65240 - DNA, 474 bp, Glycine max
  unsure (1)..(474): unsure at all n locations
gaccttgaaactcagctngtatagtggtgtaggttntatggtattcatgtgtggaataatgatttatatagtgtgaaaaatcttgtttgattatctctgtgtgcataattctcttaagctaacatcaacagacatagacttaagcagaattaatctttgaccaagtaggttgagagatattgtggtctttggcacatgaccaaaataaagctaattaattttacttaatttcgtccattatgtaaaagttaaataaccatattatccttaatttgggtccatgtaatttgttacatgtcatttttctcttattctataaatttgttaattgattatctaactaaaataatttaactagttttaaactatcaacaggggtgttcactgtgacaccctccaccccgatatacatatttatataataaaatacatgaaaatacaaaattacataaaatgaaattttattntaagcat

SEQ ID NO: 65241 - DNA, 415 bp, Glycine max
  unsure (1)..(415): unsure at all n locations
tcatcaagtggtgatcacagcataagagcttcaagtcggtgctccttatacctccattgattntcagatnttccttctccgccattgttgttacttcatttttctccatgtgtctcctcacatgtcttgagctaaatgttgttaacatgattctttacaatttccaccgattaatcttgctatagaagctagatctgattttctatggatcaaatttcttgttcatgttcttgaaccatgagtcgtgttgagcttaggttcctttgagtattgtctcgctacttttttgtggctgatacctaaaccataaaattctcacaaaaatatgtaacgaaaagacaacctcaaaaatctagagtgactagtttgtagaagcatagcttcatgatgaataaagagtgattcaagatgtttt

SEQ ID NO: 65242 - DNA, 459 bp, Glycine max
tggtggatgggagaaaaggagaagaatgctacgtgagagagagagagagcttctgaatttttttctcttggctgagtgaggagagagaacagctcttggttttttaaaaaaaaggttttctcttttcctattattttatttaagctatgccacgtgtctccatttgagtggagcaaaaaagggcccactttctcttttgattgtgacccatactcagccacaaaaagtgagaaaaatctgacctttgaaacgctaaaatcctgcctcagtttgcgtgtcgtttctttggttccagttcctcacgtttctctgcgtctgtcgaggccagttttcgaaagtaatcaatatatatatcaaaacgctcagaataagaccccaagcgtggttcagaggttggtttcgttaaattttaagtcgcacgcaaaacaatgatttttaaactaattaattaagaattaa

SEQ ID NO: 65243 - DNA, 452 bp, Glycine max
  unsure (1)..(452): unsure at all n locations
gcagcttgatgatgtcaagaagaaatcacatgtttgtcatcataaaaaagggggagaatgtgaatatatgaatacgtgaatnttgatgatgccaaaagaagaatcaaacaaagttgtttcaaaagataaacatggcttcaagattaatacaagattgtttcaacaaacaaagccttgcttcaagattaactcanagatcaagccttgccttaaaacatagtgctttcaagacatgcaaggctctggtaatcgattacaacgcagtgtaatcgattaccagaagacagggttgacatgcaaagtgctttcattgatgagacaaaatttactagaggttgcattagtattgtagtgcattgctaagagatcaaccaaaacanattacaattgagtcactggtgttactctagagatgattgattatgagacttagtggttaaaatatcacttaa

SEQ ID NO: 65244 - DNA, 472 bp, Glycine max
  unsure (1)..(472): unsure at all n locations
ngacatcctattatgtacatctggaataatacccgagagatgactgttggaaacatccagagaactaagtttgattagtcttgctaattaggggtggaaataggcccgactaggtcaggctatgaaaggtctgagcctagcctacgatgaattttttaggtctaagcctggcctatagcctatcaaaggcatttattttggctcgacctgntctttntaaaagcctagcttggcctgatagcctctttaaaagtcttcttcacattaaatctttaatatctctttgctctcgagtagtaggaacgtaataggaaagttaaagaaaaaggaaacgttaacagaactagaaaagccaataaaaatgaggaatataaatgggcacatgactcacacctatattgtaattaaagtcttacttgattataggaatagaagttatggaacagtaatgtgtaatcaatagttntaaaaa

SEQ ID NO: 65245 - DNA, 458 bp, Glycine max
  unsure (1)..(458): unsure at all n locations
agcttangatagagctttgcaagtgtagagttataagtggtagtgaacaatacttgtaattntgataaccagaagtggtagtgaaaaattcttgtaattttgataagttagtggaaccttagtggttatcaagaactggaagtagtctctggtttgagacaaaccaatataattctttgtgtacttctctcttnttttttaatcaacaaaggatttgaatttatttttatattctatatctttttttgttttacaaagaaatttgtttgtatcaatgttggatatagtctggtgtctaactattcttaggtcaatctacattagacgataaatgtgctatcaatcttagaaaaagtttttaaatttctaaaaatgcaattcaatccctcatattgttttgnttacttctacaaatggtaatgttgtggctaaattggataaggttcgtgaggaatcta

SEQ ID NO: 65246 - DNA, 452 bp, Glycine max
  unsure (1)..(452): unsure at all n locations
tctatataagctgaaccatnttatcaataaacacaagttgtgttntattcagaaaattagagtttatctcttttatcttagtgagagtgcttctcctaagttcttgagtgattcaagaacaccttggctgtatcagaggactttcacaacctttgtgtgttgccctcgccggaaattgattctttccttcctttcatcttcaaccttgttctttcaaaccacaattccaaaaaatccacttctgtccagaattatctcatggccataactcccgttatacgcactcaaattaagttattcttgagcctaaattgaatttcgaaacgagacctttcacctcgttttggaatcacctcatttggagccctgtagcttgagttattgtcatttctatatttctgtctagccaccacttaacctacattntatcatctcattcttccattttatgc

SEQ ID NO: 65247 - DNA, 376 bp, Glycine max
aatatgcacctgtcgccagactctgtggtttatgctcctctgccaaccaccacataaacctttgcccttctgtacaacaatctgaagcaattgaacagcctgaagcttatgctgcaaacatctacaatagacctcctcaacctcagcagcaaaatcagccacaacagaacaattatgacctctccaacaataggtacaatcctgggtggaggaatcatcccaaccttagatggtcgaatccttcacaacagcagcaacaacaacaacaaccttattttcaaaatgttgctggcccaagcagaccatgcgttcctccaccaatccagcagcaacaacagcaacagccccaaaaatagcaaacagttgagagccctct

SEQ ID NO: 65248 - DNA, 444 bp, Glycine max
  unsure (1)..(444): unsure at all n locations
tgcattagtgcatataacatcctctaaggtctatctcatcctatttctaanaaacacaagaggaaaaaaacccacaagggcaaaatggttaattaccaaacgtgagggggaagaagtggaatgaggagtgaaaaaggcgaaaacttgacctggtgggagtgctagtgagagtgtctgggagagccatggacggaagaaggagcgaatccccgaagtagtgagagaactgcgaggaaatttaaaaaaaagaaaaacgagaaaattagggttaacagagaaaacagagtggaaaatgagaggagatattccggcgaggctttacatggtacgatgccggaggcgaatttggagatggggtcgggtttctacgagaggaggggcgatttggggattgcgggatgactgtgagtaaaagaaaaaaaaaatctttacgaatcacaatgc

SEQ ID NO: 65249 - DNA, 381 bp, Glycine max
  unsure (1)..(381): unsure at all n locations
gatcgtgagatcagatagaggtggggagtactatggtagatacacagaggatggacaagcaccaagttcatttgtgaaatttcttcagaacatgagattgttgcccaatacactatgcctggttctccggatcagaatggtgtggcagaacgaagaaatcgaaccttattagacatggtgagaagcataaggagtaatgtaaagcttcctcaatttttgtggattgatgctcttaagacggctgcgtatatattaaactgagttccaaccaaggctgtctcaaagacaccttttgagttattcaagggttggaaaccaagtttgcgacatatacgcgttnggggatgcccgtctgaagtaagaatttataatccacaagag

SEQ ID NO: 65250 - DNA, 443 bp, Glycine max
  unsure (1)..(443): unsure at all n locations
ggacacaatgtngataacaagacaaacttcaattgcttcttgtttgtggcaactntgttttcatccaaatgatgtacaactaactnggtagaatatagtccagaaattttcccaaattattataaagtgatatcataatatttagaatttttcttgtgaaaatactgttgtagggcaacaaaggaacaataattatgaaaaatagattcttgtaatttgtttggcttgagaaaaatatatgacatattattaaggttatggaaactccctgttaaattttatataattcagagctgtctaagtattttttttaaatttaaaaatagcatttcagaacaattttaatgttaaaaattaaattggaaaaaatgtttctataatgatttttggggaaccaaaaatcctttatgatgaaatctttctttatatatgtaaaacaaagc

SEQ ID NO: 65251 - DNA, 419 bp, Glycine max
agcttagaacaatatacttgtccttcatttaactatctttgggcttggcggccacgatcaacaaagtactctcgacacctactatatgttgatttgaccaacgctgttatctgtatgttgcggcaatccctcaataccttatttatacattctgagaggttcgatgtcatgtgaccatatcgacgtccttctctatcataagccatggtacacttttcctttgaaatgcgatcaatccatgttgctatggctggactcagtagacggaatttttctaaattgtgataaaaaataatatgcttgcaaggagtgtagcctgcatgatattaggtagcaacaataatttgaagtatacatgaaagttaaattaacgtgaccatgataaatgaaatcttacccaatttcttcatagttctttt

SEQ ID NO: 65252 - DNA, 470 bp, Glycine max
  unsure (1)..(470): unsure at all n locations
ngcatcagtataaccctttagtttcaattcagagtctccataaatgaggaattggtctttagttcttcttaagtacttaagtatggtcttaaccacttttcaatgttcttcaccagggtttgcttgatatctactagttacacctagtgcataagcaacatcaggacgtgtacaagtcatggtgtacatgatagctcccactgttctagcatatggtactctactcacgtgttcactttcttcaggagttgttggacaattctccctactaagagtaattccaacacctacaggcaaataacctcatttggaattatccatgttatatctctttaagatagtatcaatgtacatagattgggagagtccaagcaaccttttagatctatctctataaatctttatacctagaatatagagtgcttctcccaaatccctcatggagaaattgtttgatagccaaatctttg

SEQ ID NO: 65253 - DNA, 474 bp, Glycine max
tccttaagaagattcctaaagaagctagagcttatctacacatacctctctaatagctaagatcacctccttgagatgagaagctagaacttagctacacaccccttataatagctaagttcacccccatgacaaaaaacatgaaaatacaaaaaaatgtccttactacaaagactactcaaaatgccccgaaatacaaggctaaaaccctatactactagaatggccaaaatacaaggcccaaacgaaggaaaaacctattctaatatttacaaagataagcgggctcatacttagcccatgggctcgaaatctaccctaaggctcatgagaaccctagggcctacccttggatctctagcccaatctacttggagtcttctacccaatgcccttgcgggataggattgcatcactttcctagattgggttaaagatacaatctttgcttatgataatgcttctgaaacatta

SEQ ID NO: 65254 - DNA, 440 bp, Glycine max
  unsure (1)..(440): unsure at all n locations
agcttgataacaagatgttgagagtgtttgacaganatcacaagctcattntgaagtcccctctttcaaaaaataaaacatttaaaattgagattgatgtgatagaacagaagtgttgtgccactacagtgaacagagaagagtggttatggcattacagatttggccatttaaattttagagatctgattcagctaaactcaagagaaatggtgctgggtttgcctcagatcaagcctcctagagaagtatgtgatggttgtttacagtgtaagcaatcaagaagcactttcaaacaaaatgtaccaatcatggcaaaggagaaacttgaagtgatttactcttatgggtgtgggcctatgcagactaaatctcttggtggaaacanatacttcatatcccttatttgatgaatgaccaagaaagtatggtgttatcta

SEQ ID NO: 65255 - DNA, 460 bp, Glycine max
  unsure (1)..(460): unsure at all n locations
ggagggggagtgttatgatacattccataattatcacagattntattatgtaattagtacaaatttgattttttttatttttacagattttgttccatttcatttctttccttaattaggtcactgatagcttataaataagtcttgtattcgctctttgaaagatagaattacaataatattcaaattattatcttttaagtggaattgataggcaaattattngacattatttgtgtagatttgttggccctttaaaccagcatatcttgcatgattgtatagatgtcactgtgtaattatatccttaattagttagcacagctataggttaccatatatagtttttagcaaacttcaaggctacaaatcagattgtatcatattatataaatgagaattctccagaggagaggacacaattttcatccgaattttctaagttaacatggatcagtct

SEQ ID NO: 65256 - DNA, 168 bp, Glycine max
atctgactgggaacgggtgaaacagagatctggaaaacaataatttggctattatattttttcataactcccggtgattatttggtgaaatcttgttacaaatgaattgtgatgttgaagtgattgttttagctgtattgagaactgttacaagaattatataataca

SEQ ID NO: 65257 - DNA, 470 bp, Glycine max
cttgatgatatggtcttcaccgacgaaaggatcgatgtgggtctaataagaggcaaatttagtcatcctgcttggacgaatgagaaaactggggcaaatgaagagggtgaggatgaaggagaagcccgtgctgtgactgccattccaatacagccaagtttcccaccaacacaacaatgtcattactcaggcaataacaaaccttctccttacccaccgcccagttatccacaaaggccatccctaaaatcaaccacaaagcctacctaccgcacttccaatgacaaacaccacctttagcgtaaaccaaaacaccaaccaagaaatgaattttgcagcgagaaagcctgagaattcaccccaattccagtgtcctatgctgacttgctcccatatctacttaataattcaatggtagccataaccctaaccaaggttcatcaacctccatttctccgagaatacgactc

SEQ ID NO: 65258 - DNA, 309 bp, Glycine max
  unsure (1)..(309): unsure at all n locations
cacgacatgttataacctctataaccaactattcattggcttcaactaacaacttaagcttttgagagaggtggtttaaactttcatttcatctccaattttgagtgacaatgtacgagtattccttcattgattctatttggcagctttagtgtgataaacaattaattgcaattatacttggagatttttagtgcatgttttgattagcatattttccttttntttgaaaagataataataaagatgtgggagtttaaattgcgagacttttttaacatgaaaataagctattctgacttcactaat

SEQ ID NO: 65259 - DNA, 468 bp, Glycine max
  unsure (1)..(468): unsure at all n locations
atccaacaggacgctacagtatagagagaatggttagttataaaacattnttttagtagttataggttggattttagaaagaaaaaaaaaatatgaattagaagaattttccagcttactcatgctgtgggcatacacccatggtagtatatatttcatccatttgagttcttatgtccaagccttgaacaaacgccctaccagaggttggctttgtgagaccaatcatctataagcacacaaaagctcattcgatttatgacttaaggagaaaatcactcaaagaaagtagcgtgattcattctattagaatttcataacttggtgaatttatcctattacagtctattttcgtaagctatttttcaaagttcgaacttattctgttctcttatgtcagctcagacaactcaagcaaattccaatgcacatatcaggtgaacaattttaactaaccatgttgataaa

SEQ ID NO: 65260 - DNA, 425 bp, Glycine max
  unsure (1)..(425): unsure at all n locations
ggatcttattacgcgctgcagctggtatacattaggtgttctattctgactggttgtataatgttactntttttttggacatttcttactgcttgtattaccttttatgttgncaagagtgctgcgttgtgatataaattttcaattgttatttttctcaattctgtttttgagttctgcaggtatgtggccttttggttggtggtacttgccgtcaaatttacttttgcttactttctccaggtgaggcaatacgtttcatatatatatatatagacacagacgttgtatgtatctaggtgaggctattgaccctccagtatgctgatattccgcttttagatttttactttggttatactttctatactttcccttatttgatttnttcttctatatagacattgacatantntaaatttact

SEQ ID NO: 65261 - DNA, 475 bp, Glycine max
  unsure (1)..(475): unsure at all n locations
ggctagcaatgatctntactttctcagtaacattcttaaatgcatattggtattgtgaacatgaggtagctttctgctgacattttcatccaaatgcagctatacagcagatgaagatttcttaaatgcagatgcagtctttgactgcattggtgatcctcctgaggagaganttgatttggctttctgcggaagccttcttgagaagcaatacgtgagctagctctntgttaagtgacactcttaagattttgtttgatgcaagtctccttcaatatttcctatgagtgtccaattcgacttatgtgtacaagcccaccctttcaagtcaatgatgaaaatatcaccatgagtcgaataaagaatcttcatttcgtgttaagcttaatttcttctcaagtaccttttnttagtattcgtataaatagaatagaatgaatgaggcttaaaattctaaattaactctggaaacatc

SEQ ID NO: 65262 - DNA, 451 bp, Glycine max
tatacagctatatagtataatccatctctaagccacgactaaatgtttctgtgttgtagcattgggaagagaggggtgtaacgtacaagatatctcaataacactgctccattcttggacaatataagaaatatgtattcatcctcgtagtttcattgcctatttctcttcaaacctttatgacattgtaggccatctaaggtgggatttatctcagcttagtcaaatctatgaaataagaccaagggccttgcctatatatgaatgggttccttacttcaacgttctgcacaaatgcttttagtgtcaaactgccaaggtctcccctgtgttgtaactacttagagaagccgagagtccatcatccaatatttttaaaaccttccatccaagagaatttcatggtaacttcattaaatgggagagtgaatgatgcgacagataagattat

SEQ ID NO: 65263 - DNA, 440 bp, Glycine max
  unsure (1)..(440): unsure at all n locations
ntcatgtaatgcaaccaatcaaatatgactgaagagaatatatagcttatagccatatagaattcccagtagaattgatcaatctatcatgatttcatgtgattcagcttcaacttgataaaacaatagctgtgagaaaataaaagcatacagcagaattctctgaaagttatatatcagatgccttttgtgtttgtggaatatcagataccttttataagtacgccaagcttctgtttctgtgcatcaatatatgtcgatatttgaaccgntatgatcttttaacacatggagctntctttgcgaagaaagacaactgactgggtaacatttttattagaggctggacttagtcacaatttcttagtttgaaaactgacatgttgccggccagagcaatacataaatgtcctttacccnaacagaaaacaatatctaac

SEQ ID NO: 65264 - DNA, 452 bp, Glycine max
agctctacaattaacatgcacatcttgcagaagctagtgtacaattttatttctaattctaacaactgaaatttgaaactctggaagtatttttatttctacgttacttcttctttaacggcaaatattagttgtttattgttagttttctactagtggggagattcaaacccacaacttctcccctctccattctccctttcccactaagccaacattatatctcctatttctatgttacttaatctgcacttgtcatctatgtcaatgaaatcttaacttttatgttgtaatctctcaaattgatgtcgtcatgtggtcctatttatgacacagcttaatattgaaaagagctctcatttcatctgtcattagaattttttccaagaagttaggacagcaaaatttcaaatgtgagttttaagctaataattgttgatcaacttctgtga

SEQ ID NO: 65265 - DNA, 476 bp, Glycine max
  unsure (1)..(476): unsure at all n locations
tgaagttgctttgatatctacctagttgaataggcattttcattaagtttcatatttgattcccaccatacaatgatttattacatgtctcaattgattggatgatcttcacgtggtgattattgaaggaggggatattcatgtggttgccaggcatgccgcanattcagttatggtgtcttctggtgtanggtacacaagttataaatcgttagatgtcacgtaataaaaagacgtgttgaggtacttaagttcaacaagagcatcattagaagggatattactatctcagaaggaaaaatagaattccacggctgaggtatcaaccatctgtacagtttgacatcggttgaaatttcaagattactggttttctctcgacctaaggagacatgctcatttggggctttttgactagtttaaggcaattttaaaacaatttatcaaacagtacaaaataaaaatactagttgagt

SEQ ID NO: 65266 - DNA, 484 bp, Glycine max
  unsure (1)..(484): unsure at all n locations
gggattgttacagtcacctgccgcatgcaagcttgtgatgggttatcttctagatgcatttgttccttgcctgagcaatgcaagccttcaacttctccttctcagaaggttcagaaacaagcaaatgagcctgctcaaaaaggcccagtccagcattccagaaacctggtgctgtatacctggtcttcaacacagtagcaactcggcatataaccaaataaaactgccaccaccagcaacaacacagncaatttcctagcttttagcttttcagcaaacaataactaacattttcttttacatcaaagntgagaaaaaggaaaggttgacctattcaaaggtcacacctgccacaagcctaccaagaaagcacagatacaatacatgacacanatgcaataccacacatactataaatttttaaaatcacgaagacactacacaactataatacaccatatataattgattaaaattaacaata

SEQ ID NO: 65267 - DNA, 470 bp, Glycine max
  unsure (1)..(470): unsure at all n locations
gaccttgatactcaagcttgcaaatgcatatctgatcaaaatcatggtccttctcatcatagtacacanaagtgcaccnagaaaccgatgaataaaacccaagtcaacaaaacgcgaccatcttattgggagtatgaaatgctttcattctacgccaataacaattcgntagtgaagcgtagtgcattatcttctgagcaacccaatccaagaaagatcatgcctatgttggatcaatttcagccatttatccatgacttcattgataacattgttgatgtccaggctgatggaaactgtgggtatctggcggctgctggtttattaagtatgggtgaagactcttagtcgctggtccgcacccatctgctnttagaacttgacagattctcaaaagactatatcaagctcttatgtgacacagacaaatttgaggaattaaggatgtcactacatgttgatggggtaac

SEQ ID NO: 65268 - DNA, 446 bp, Glycine max
ctgccgcatgcaagcttgagatgaggaagtggtgaagggtgtttcttcctgcttttattggtgaccacagagtggtacctggagatatgtcgtgggggtcaagagaccttggggacgtcaggtggggtgctattgcccaaaaccaagcttgaccaatcccgacccaacccgggcatagtcggtcagtgagaacctgtgatgtacctaaacaggcgagctcctggcagtcaacagataaaaggaacaaagaccacaaagcaaggaggcttgtggtggctggccagctgtgaattttgtgtaatatgtggattatggcctctggtaatcgattaccaagggtgggtaatcgattacaaggcttaaaattgaagacaggaggctaagatggtctctggtaatcgattaccaaggggtgtaatcgattaccaggcttataaacgaagtca

SEQ ID NO: 65269 - DNA, 464 bp, Glycine max
ttgagccaaaatcttgactcaccataaaccttgacccagtgtgagaatgtcaatccttaccctcagaagcaaaaaaagaagagaaggagaatttccaatcaaaggaaaaaggagaaggaaaatttccaatcaaagaggaagcaaaaaaaggaaagaaggaaaatttccaatcataggaaaaagagaggataggaaattcccaatcaaagagtgggagaaagcaaaaagaaaagaaagaatattcccaatcaaagaatgggagaaagaaaaaaagagaaggagaagaaggaaagaaagctcatgatcaaggatcgaaagaaaacaaaagaaatgtgcagagaggtctttggaccagacaatatctgaacaatacggaattgtcaccaaatgaacaaaagaaagaaaaggaaaccataacctaaaagtggtcttctccctttgattaccaaccaaaatcctgtgtg

SEQ ID NO: 65270 - DNA, 315 bp, Glycine max
ctggcgacaagtgcagatttttattcatggctagttgggttaccaagttaaccaaggcatctagtataccttcaagcttcttagtcttgattgatgaagattaattcgtggctacttcatgcactcctctaatgacaatagcatcacttctagcactaaattgctgggattttgaagccatcttctcatattaaattctggcttcagcaggggtcatgtctccaagggctccaccactggcaaaatctatcatacttctctccatgttactgagtccttcataaaatattggagaagaactgctctgaaatctgg

SEQ ID NO: 65271 - DNA, 428 bp, Glycine max
  unsure (1)..(428): unsure at all n locations
actaagcttataatacacagtagcaagtagctcaaatcatttcactttatatgattaggcactntcaacaagataggtaattntggcttacatgcacctttaccattgcctatgttaataggattacgaataagataaaaaaaagataaagaagtcaaactggactcaatgaggcccagcanaccaaaacaaaaaaagaggaaaataactgatggaatagatngaagccaatgactgcagtanggcaatgactgcaacagagcaactataaaagtggcccatttgtgatcaggaatagattgattatgtcacaatgccaaanggactcttgacctaaaagaatgtatgtccaatattaaaaatatttggacctcggcaaaaacaatgggatttgataaataaaatcaaaattagaagcttttcattac

SEQ ID NO: 65272 - DNA, 326 bp, Glycine max
aaatgtcaccccttcctgtattcgagatcacttgaattagtgaaaaaattgtttcgtgaagaaatccagccaggcgcttcgtaacgttcgtggtgatttcggaagatttgaaccgtcttcgttcgtcttcgtcgtcatcggtcttaatcggaagttccgaaattgaactttcaattattctatgtcccttagggcctatttgttcacgtactttattttatttcatttactttcgtcccctttgacggcttagtcttacttaagcatttctcgctaatcaaaataaataatttcccgacatttgatgtacatctgtattttgtaaa

SEQ ID NO: 65273 - DNA, 474 bp, Glycine max
  unsure (1)..(474): unsure at all n locations
ngaagagacctcgactcagtttatgcaggtaacaatgtctaatcataaaagcactgagtcagcacttaagaaccttgaggtccaggtgagatagctagcaaagcagatagctgacaagtcatccaacggttntgtggtaaatacaggacaaaatcccaaggaggaatgcaaagctgtgatgacaaggagtaaaaggtttgtgaaggctgaggatgaggatagtgttgtgcataagaagaaaactgttgacaagaaaggtactgatggcaagaaaaatgaggagagaggtgaaagtaatcaagaaaaagaggaacaaataatggtcaagataaaagaattgaaggaccaagataaaggaaaataagtagaaaaagaaatagataatgaaaaaaatgtaaaagaagaaaaaaattataagaatgcaaagaagagtagaagtganaaagttgtggatgaaggtgtggaagtaccata

SEQ ID NO: 65274 - DNA, 419 bp, Glycine max
  unsure (1)..(419): unsure at all n locations
agcttgtattttctcttagtanggaatctattcttcctaagatggagccaaacccaatcccccttattaagaactaactcctttcttcctctattgcctttagatgcatacacctttgtttggttctctatatgggtcctaaccctctcatgctacttctttacaatctctgacctagatttcccttttttatgtataaaagaagtgtcaagtgggaggggaattaggtctaatggtgttagaggattgaacccatagacaacctcaaaaggggattgcttggtggttctatgaacccctcttgtgtacgaaaattctacatgaagaacgtactcatcccaagacttatggtttccttttataaaaacccttaaaagggtggatagagacctattcactaccctttgttcccatcagtt

SEQ ID NO: 65275 - DNA, 443 bp, Glycine max
tccagattagtgtaccaaacaaccgcggctccggccatgctatcttggaaaaagtgtattaatagcttctcatccctagagtgcacgcccatcttgcgacaatacatcttgagatggttcttgggacaagtcgtccctttatacttgtcgaagtttggcactttgaattttggggggataacaacatctggtaccaagcaaagatccgtcatgtctgcgaatggatagtcaccaaagccttcaacagccctcaatctctcctcgaggagattgagtttcgttctttcttcgattgcccgtggtggtccttctgtggacaagattattggttgtgctgtgaggttgggctgaggcaaagtgttgggtgtcggcccctcgacgaggattgggcggtagaactcgacatccctttgggcatgctcttgatgttcgtgaacctcgtc

SEQ ID NO: 65276 - DNA, 431 bp, Glycine max
gctttcttgttcaatatcgagcgtctcgatatgtgatgtgcctgaatcggaccttcgtgtgaaaagttatgaccatttgaatttctcgagagatttcgtttttcaattttgagcgtctcgatatatgatgtgcttgaatcagacctccatctgaaaagttatgaccttttcaatttctcgagagctgccgttgttcaatttcgagcgtctcgatatattatgtgcctgaatcggacatcctagagaaaagttatgaccatttcaatttctcgagagcttccgttgttcaatttcgagcgtctccatatgtgatgtgcctgaatcggacctccgtgtgataacttatgaccatttgaatttctcgagagatttcgttgttcaatctcgagcgtcttcgataatgatgcgcctgaatcggacatccgagtgaa

SEQ ID NO: 65277 - DNA, 380 bp, Glycine max
  unsure (1)..(380): unsure at all n locations
tgcgagctccgacgcanattacagcgtctcgatatatgatgcgcctgagtcgaccatcggagtgagaagttatgaccctatgaatatctcgagagctcttggtgttcaattccaagcggctctacttatgatgcgccggaatcgggcctacgggtggaacgctatgaccatttcactatctgcagagcgtacgccgttccagttctagcggctctatatgtgatgcgccggaatcgagcctccgcgtgagaagatgtgaccagtctaatgtctcgagagctatcatagatcgatctcgagggatccgatattggacgcgcccgaatctcacatccgagcgagaagacttgaccatctgaatctgtcgagagcttgactag

SEQ ID NO: 65278 - DNA, 263 bp, Glycine max
  unsure (1)..(263): unsure at all n locations
aatgacttgttctgacattggtcgatgtgtgaagtacaccctcttggctgtgattcctcgggaggagagcacactaatgatggaagaatangcggcaatgtagatgtataagagatgattactaggttcgacgacagcaatgataaccatggtagcctactcagngtgtggaccggatccgggggtataccacgctctacacatctgttattatgatgtgaagatgatggtgagcatattcatgctgtgagccgactgtgatt

SEQ ID NO: 65279 - DNA, 413 bp, Glycine max
tgtggaagaatgtggaaaccttcgttatattctgaagatatgcggaaccttaagtaaaagtatgggaggatattggagagagtataagagttgaaagactcttaaaatgtgtggagcatcctaaagaattaatctccaccttagaatacaagtaatctccaccattgtggaggtggagtaatataaataagggtaagagtcttcattcatagccatctaatataagagtgactcacactgtagagtaagtcaagttagagagcctctttgagaaagaagataaatagtttggaaactctctgttctcaagcttgagagtcaccctagagtgaatctctatcctcttttgtataatgatagaatctccatattgaagaaatataatcgtgtgttcctattattaccttaaatac

SEQ ID NO: 65280 - DNA, 337 bp, Glycine max
  unsure (1)..(337): unsure at all n locations
tgttcaagaccgtcacagtccgatgcggccattgcactatcctcctcccagtgaacatgcgagggttgcttatgccatctcccactcaatttcatttgggtcactctttcttctccccatctcataaccttctggtatgtgtatatatacacacaccaccatagntttctttttctcttgtttactctttacctgtntgataaattagtgtatgtatgtacgtactgttacccttttatataaatataaaagaattaattactgattaaagagctaaagataaagaggtgatgatatgttgattctctctcactctctctctctctctctctgtatc

SEQ ID NO: 65281 - DNA, 461 bp, Glycine max
  unsure (1)..(461): unsure at all n locations
ttcttaagcttttgctacaacctttttctcccccnttggcaacatcaaaaagccaaagaacccggaaatcaacacagttataacaatggagtagcaagatataagcatcagagtattaaatacaataagccaaactcacaaacaagaaataatcaaaccagaatccaaataactgaaaatgtcaacaaccacaaaacatccaagactgaaatttaaaatccacaagataaataagcaaagtacttagcttaataatgtaaattctaagaaactaaaagccaaaatacacggcttataaaagataaataatcagaatctaaaagctaagaagacggaggaggtggtggaagatcgaaactctgacgaatgtatccgacatcctcttcaagctgtgtaagacgaatgtccataccggcaaagcgtgaatctaacgagtcanagcggtcaccaacatacgaacg

SEQ ID NO: 65282 - DNA, 442 bp, Glycine max
  unsure (1)..(442): unsure at all n locations
actaagcttaagaatttggtggaaaaggatagctntagttctgtgcaatatataaatgttgaattagtccttgtgattaagattgttacatgctcaagtgcaattgcttttaacagtgacacgacacgatctcaattgcgacaacatctggcaactatcgcaattgggatcatgatgatcagtatgcgaaaatttgtacccttcgagctgcacttcagtgtgtatatgactatgagtacaatgcttttaagagactgcatttcaagcacatgtttatccatttgtgtaaaataggtgcttttggactgtggagctgttcaggctgatgctttgactgttgatcgtcttgcctctttggagaaggtatggcaatgcccttgcctttangattacttatagttgtagtgctttgaggtagatgctntaatctttttttctttct

SEQ ID NO: 65283 - DNA, 455 bp, Glycine max
  unsure (1)..(455): unsure at all n locations
gcttaaattgtttaactattattcctntgtaccttataatgatgaagtatgtatgtttctgttggttgctnggcgaacgcatgatcactggtggagcaacaccaactgttttctacaatttgaggcagagacaccccacccttgattagcctgtgattgactatgacttagcacttcttttccaaccaatgttgatgcttggaatcaaaattggtgtttctttcaatgtgatttttcctgactggatgttaacaactttgttaataatatctttcaccggtaagaattgcttaaaagataaaaaaattcagtcagctttagcactatttcctttcattggctatcctttaatgtaatttgagtgagaaacaggcatttctggctaatccttctttaagggtgttgacacatggaaacaagatacccttatgatgaatgtagcttacacatgactc

SEQ ID NO: 65284 - DNA, 472 bp, Glycine max
  unsure (1)..(472): unsure at all n locations
aactaagctcgtatcggaattctcaacaataacttgttcatttgacaactaccttacaaaaatntaaaaccaagaacaaccacaaactccagataacatctcattcttgacggcgacccaacgcaagtttcggtaaaaatatcgtgttcgtttgttttgggtaccggttgtaacaggagccctccccttccatagttttcgtcgcaaaagtgacatccggtgccacctcaaatacctccgccgtgatcgccagcctcccctttctcccctccgccgcaccctgcagccgaatcttgaagtccttgaccttcgccacgcggaacctcagcccccacgccgccgctgcaatctttgccacaatcgtcgccgcgagcacttcaacatgaacatcgccgttgtcttcctcttgctctcgaacatacccaaaaggtcaaacctggaagacatggacgaaataaactcaaacgtgttg

SEQ ID NO: 65285 - DNA, 453 bp, Glycine max
gcttgtggaagaatgtggaaaccttcggtatattctgaagatatgtgggaccttaagtataagtatgggaggatatggaagagagtagaagagtgttctgactcttagaatgtgtggagcatcctaaagaattaatctccaccttataatacaagtaatctccaccattgtggaggtggagtaatatacataagggtaagagtcttcattcatagccatctaatataagagtgactcacactgtagagtaagtcaagttagagagcctctttgagaaagaagataaatagtttggaaactctctgtcctcaagcttgagagtcaccctagagtgaatctctatcctcttttgtataatgatagaatctccatattgaagaattataatcgcgtgctcctattattacctttaattactaagtgtctattttaacttcatgaaatgaaacagtc

SEQ ID NO: 65286 - DNA, 331 bp, Glycine max
  unsure (1)..(331): unsure at all n locations
tgttcaagaccgtcacagtccgatgcggccattgcactaaccttcttccagtgaacatgcgagggttgcttatgccatctnccactcaatntcatttgggtcactctttcttctccccatctcataaccttctggtatgtgtatatatacacacaccaccatagctntctttttctcttgagtactctttaccctgttgataaattagtgtatgtatgtacgtactgttacccttttatataaatataaaagaattaattactgattaaagagctaaagataaagaggtgatgatatgttgattctctctcactctctctctctctctctc

SEQ ID NO: 65287 - DNA, 473 bp, Glycine max
  unsure (1)..(473): unsure at all n locations
ctcgacccggatgttacagtcacctgcngcatgcaagctttgtccgcaaaatcactaaaaaccgttctaaggtctaatgccttaaacggtccgctctgcttttatcggntaatgtgaaccgttcaaaagcatgaagtcaacatgtaactttaccacttttgcaagaactacgtaggtctgagttcatcatcgcaattgaggatacgtatgagcaaaagcccgcttttgtcaaccaccccaagagatcgttaatggtccaacgccttaacgtttctctactttcaaaaaacaacagatccttaaatggtccaacgccttaacgtttctctcctttcaaaatcaaaagattgtttaatggtccaatgccttaaacgacttctgtttggtcaaaatatatcttgcaaaaaaagataaaaacaacttaaccaacgttcagttcttgaagaactacgtatgtctaatttcctcatcgc

SEQ ID NO: 65288 - DNA, 329 bp, Glycine max
ctcgtgacatcttttggttcgaatggaaatgccattacagggctgatgctactgtctttgatatttggtacatgatattgtgttgtgggagggaattcctattggattaactcaccaatcctcacttgccacattcgtttgacatttgttgatggatcacctatgatgtctctgttccaaaggtgatctatatcctttctgatggcataagcatgaaaccaatcacagaaaaggacattaattttgactctttctacacattcttagaacgtgacttggatttgttttcttgttgcacccttggaatgctggaaaaaccattttctttg

SEQ ID NO: 65289 - DNA, 455 bp, Glycine max
  unsure (1)..(455): unsure at all n locations
agctnntaatttcanatctttnntcatttgaattagtttgggctaattttgaaaagctttgaaagcattatttttcaagggtaaaaacaaagtccatgtaaatctagaatagttatccataatcactaatgcataatagttccctcctatgctcatagttctagaaagaccaaacaagtctaaatgcaaaagttcaagagatctagaggtagaaatcatatttttagctntgaaagaaattctagattgcttaccatttgagaagcatcacatgaaccatctttcacaaacttaagcttaggaatttccctaactaactctttagagataagtttatttaaatgattcatgtgaatgtgagctacccttctatgccttagccataaacatgtcaagcgtgatgatgaagcacaatctacattaagcatgtacgtattttcaatggcagtaccaat

SEQ ID NO: 65290 - DNA, 489 bp, Glycine max
  unsure (1)..(489): unsure at all n locations
actanagctgtagagaacttacatcattggagctagaattccatctatgcaatatttgcattgcacattgaggtgtactgtaacttgtctttgtgtgaggactactctaagcgcatgtatccctcaggagagtaacacaataatctaggaagttagtgcgttaatctagatgtttaatataagattactagtgtatgactagacacaatttttatccatatatgcctgaacaggctgtggcttgggtaagtgggcatccgaccttcaccatattgtttattatgattgatagatgatcgtgatcatatccatcatgttagccaactgttgctgtgtgactagtgatttctacttcttaagggactacaattggttcctgagagtagtacatatgactgagttccgtctttgtttattgcttgctcgttatatgcatctgctgatacacgtggcaagatcgctatgcacgtgctgcaataacagaagtca

SEQ ID NO: 65291 - DNA, 372 bp, Glycine max
  unsure (1)..(372): unsure at all n locations
tagagatgcaacagaagatatatgaaaagaggtgagaagaggcgtcatccactatggaataaactatggaagaagaagcttcaccaccaagagagtgccttggataagaagcttagagaggaagcttcaatggaggaaaagaaagagagagagaaagagagaggggggaacacaaaattgaaggaggaaaagagggagagaagttgaactntgaagtgtgtctcacaagattctcattcatcaaagttgcaacaagtgttacacatgcttctatntatagcctangtagcttccttgagaaaatntcttgagaagcttccttaagaaacttccttgagaagcttctttgagaagcttccttgagaagctaga

SEQ ID NO: 65292 - DNA, 469 bp, Glycine max
  unsure (1)..(469): unsure at all n locations
ntgngttcgatggccncaatgacatctatcccncacatggtttaaggccaaggggcagacatgacattcagaggatgtggcggaacattgacattgtccgtgtacgcttgacatttatggcatttccttacatgggcgtagcaatcgctttccatagtgagccagtaataacctactctaaggatcttcctggccatagcatgcccattggcatgtgtcccaaatgaacccccgtggatttcctcaatcatgtagttcgcctctttggcgtctacgcatcgcaggagggtcatgtcgtggttttgtttgtacaggatggtaccactcacaaagaaactagtagccaatctcctcaacgttcttttgtcattgtcggaaatccctggtggatattctttgttctcgacatactanttgatgtcgaaataccacggtttcccatctcgctcttcctctatcgcacaacaat

SEQ ID NO: 65293 - DNA, 354 bp, Glycine max
  unsure (1)..(354): unsure at all n locations
tctttcttccttttgtggcttgtttaacattactttatttttcctctcaatttgatctttgactctctcatgaagctttttcacatagtccgcctttgggttgacccttcttatgcttaaaaacagaaacattangcatatgcaaaagatcaagaggagttagtgggttaaaaccataaacaacttctaaaggagaacaattagtggtgctatgaacagctctattgtaagcaaattcaacatggggtaaacaagcttcccaagttnttaagttcttcctcaaaactgtcctaagcanagttcccaaagtcctaataacaacttcccgttgcccatcgngttgtgggtgacaag

SEQ ID NO: 65294 - DNA, 450 bp, Glycine max
  unsure (1)..(450): unsure at all n locations
tctccccattntcttataaatagggggagaagtgaagatgaatttcgttcagccctcctggtaattcagaatcacttaaaattagtgaaaaaaattggttccgtgaagaaaatccaagccgaggcgcttccgtaacgtttccgtgggtgatttcgcgaaggttttcggccgttcttcgacgttcttcattcgttcttcgacgatcttcggtcttcaaccggtaagttccctatatcgaacttttcaattcattctatgtacccttagtggtcctcatttgcttttacgtgctttcatttacatttcctttacttttcgtacccccttttgacgtgctttagtcatttgcttaagttattttctcgcctaatcaaaaaataaaataaatctccaccgatcatttgaattgtaatatccgctaatttctgttaaaatgaatttcgaccgttc

SEQ ID NO: 65295 - DNA, 367 bp, Glycine max
  unsure (1)..(367): unsure at all n locations
agcttagacttggtcaagggttgtgaggtctctacgaccataattacagttgcattgggcacatctgtctgcaatttcttgcaatattaaagaatgcaatgaatttgtaaccgcgactgcaatttagaatcttggtcatagtttcaatcataatcagtgttgacctgtacagcttggaattggtaatacaaacagatatggcatcaaaagtttacttaatatcacagtttgcacatgttttctgacactattagcggnttaaaaaaatcttgataaaaaattattgctttataaatcctctatctctctcttgtgatattcaattcttttcctgctttcagaaatatgtataagctggcatttttta

SEQ ID NO: 65296 - DNA, 475 bp, Glycine max
  unsure (1)..(475): unsure at all n locations
tgtnnttgtggggtgagttangtcctaacccaatttataagagtattctttnttctctattaattgccaaggtgagcctgactgaacaattgattttgttttattaaaggtaactaaaaagttaaaaccactcagcacagttggaagatgagagaaactttcagatctgctgaagtttttttttttgtatcttttaatatatgatgtatagtatgttaaaaatagcggagatcaatattggatggttatccagttacctggcatatcagacccatttgtttagaactctactttttccacttattgtaccctttgtcatggtccctaattaatcactccttgtttgtcccctgtgctaggcatatactaacttttatttactaaaggataacttgagaactgatatgctgcataaattgactggcaatagtagtaacttgtaatatacccaaattttctacttccattctttaat

SEQ ID NO: 65297 - DNA, 415 bp, Glycine max
  unsure (1)..(415): unsure at all n locations
agctnggactgtgctagagagaagaacaaatgatcaaagtgaacaaagagccatttctagggcaaaatttgggtgttgaagagtcaaattttgattcggtggaattttaggtgtaaattcagtttgagcaagtttagattgatgttatggaccattgtgaggtgagagtttgcttcaaatttacctcattctaaatttcacttttcaaacctagaaaacccattgaattgaggggtgttggacacctagattctgtgttgctgtgctttaaagcttgactttggtttagacatgattgatacatgatttgggacttgtaggatttgatttgggcaagattggatgagaggaagggtgattttcgaaatctgcacttatgcagaattttgctgtcaaaataggtgcagcagaattt

SEQ ID NO: 65298 - DNA, 453 bp, Glycine max
  unsure (1)..(453): unsure at all n locations
nttttgttcggtgttgccaacanatatacaatgtaggtcggctagggtttttcgtgcgagctcaaccgaggttgtgtttcggccgacattggcatgttcccatgcactcggccatgaaaacattagcccacatcgaaaagaaaaaaaaaacattaatcaccgatattgatcggaaaaaatgctggttgacgtcggccaggaaagatgaccgatcgaggtctaaaaataaaagaatcaccggatgacgccgatcgagcatttcctaattgacatcatccaaatattattcagggattggatagaaaaaacaatagctgataccagtcgttatgtagtcccgactgacatttttcagccgacattgcacagtatttttttacaaacgctggccgataatatatctttacggtagaggagggtttgttgttcggtgtcgcctacgaaatttacaat

SEQ ID NO: 65299 - DNA, 437 bp, Glycine max
  unsure (1)..(437): unsure at all n locations
agcttgcttttaaatgtaaagtgaaagacacgcattcatctttcaaaataagaggaaaaggtacagtataaccgcgtattatttctcctttcggagattacgaaatctatttattatggtgtgattattataagagcaaagtgaaaaacatgaagttatggagcaatcctcaacggatatagcccatacgttgccatttttgcaacttcaatatctcaatcggagtgcaattgcgattagggactagacgctcatctccgccgcgaacttcctcgtcacagcactccctgatccctcgagatcaaaacatgttaatgtaatatattgtaatcataatacttatatcaacaatttattattactaaacgaatgctatagttatgactacaatcacaacgttttattttttattncgtgataaatgaattttttaatat

SEQ ID NO: 65300 - DNA, 453 bp, Glycine max
  unsure (1)..(453): unsure at all n locations
tgatgatgttccagcagggttatattcagtccattgcttacctcttangttggctggtgctgagggatcaccaatacggtgcattctgattaaaaattagggtatgtgtggataacttggatttacattttttggttctcttttgtctggaacctatgaagcacgaacactccagtcccttgtcatgtctggtatctgacaccgacacgatactcatactacattctatattntgaacattacaggtgtccacatgtctgtgttcggtgtccgcgtcggtgtcggtgcttcataggctggaactgataaattggcatgggggtgtggtgtccttatggagcaagatagtttcaatgttgtgcaacaactnttgtagcttattgttacacttactaaaaacatgcataagcactttcaaaaatcattttgaaaggaaaataatgatatatagat

SEQ ID NO: 65301 - DNA, 404 bp, Glycine max
  unsure (1)..(404): unsure at all n locations
gtcttaacggcagccaatcttctctggtttcttctgtggaagatgatgaatgggaaacagtggggccgaagaataaatctgctgtgacaaggactcaaagctttctcccatcggatttaagtggtatttntggaggacaacttagaagtttggtgagagctaaaggtacaaaacataactctcttatatattagtgaaggggtttgtttttgttttaactgtcaagttcattaagattttgtggaatttgatctggccagtctgttgcttcgtgctgaatagttgtaattttgaacttttactttctttttacttttgtgctcgcccaaattctccttatccgtcattngtgatattcttcaaagaanaaatgaacatgtaattaaagtttataataaaaatta

SEQ ID NO: 65302 - DNA, 441 bp, Glycine max
  unsure (1)..(441): unsure at all n locations
tcagtaacaaaacttccaattaagagatccagagattctttaacttgctgcattgcttcacacaaataatcactaacaaagttacaattacataatattgaagctaacaggcagactacaataacagattcttcatcattttaattaatcataggatcaaccatatatgcaattacctggatttatgctcctctaaggaaagcccaacttttattctctctgataggtttacaacttctgcatgagagagcaattcctcactcactatgcctttcacatagcccttcaaacggtgttgaagcagctctggactgattttggacttcagctgcatagcaccacaagttttaatcgcaagcttcctcttggattcattcttctttgccttgcagacaccccagaacaagtcaccgccactttcttacannttttttccttact

SEQ ID NO: 65303 - DNA, 357 bp, Glycine max
gcagcttctgttcaacttttcacatctagaatagaatcagccacgaaacacatgttaaaaaaaaataagatttttatctatgataataagaaaaatatccggtagagatatttatataattgaaatagtagtccaataagggagcccaaaatgaataagaataaattacattggtgtgggcttggggtcatgaaccagcccatttgcttgtgaaaccttaaaaagactagtgcacggggttacttttacttatgtaaaaaaaaaaggctccatccacaatgctcaccagcctcgcgttccctttggatttcacttctcctttacatctcctgtctttcctattttatatctccttcc

SEQ ID NO: 65304 - DNA, 469 bp, Glycine max
  unsure (1)..(469): unsure at all n locations
ngtgagttgtgagtggtagtactganaatacccccaccataccctctttccccttatcacaaactntgtggaatactattgctactccagaacaatgatctttagttaatctacactctagggtaattccatcatctaattaccttgcagaccctaaaatcagagaagattgagtttgttgtagctccatatgaagcagatgctcagttagcgtacatgtctcagcttggagtataaaatggtggagttgcagcggtgatcacagaagatagtgatctaatagcatatggctgtccagctgtaagaactcctccaatactgtgatattgtgcatggaggtttactgcttttttgatatcttgatttatntactgtttcactattcagtttcatagaagtcatgcatcttggattataattcgcagtggttttgaacagatttattttaagatggaccgtcatgggaatg

SEQ ID NO: 65305 - DNA, 377 bp, Glycine max
tatggagtcagcaccacttttaatatttctgaattaattccttttgcaagtggagctgatataaaagaggaggaaccaatagatttgaggtcaaatcctcttcaagggggaggggatgatgcaatcctccctatgaaaggaccagttaccagagccatgagcaagaggctccaagaggattgggctagagttgataaagaaggccttatggttctcatgaaccttatggtagatatttgagcccatgggccaaggttgggtccactcttctttgtaaatagtagaataggttgttttcttcttttgggccttgtattttggccattctagtagtatagaggtttagcctttgattttaaggcattttgagtagtctt

SEQ ID NO: 65306 - DNA, 469 bp, Glycine max
  unsure (1)..(469): unsure at all n locations
ggaatcggacctcagtgtcaaaagttatgaaccattgaatntctcgagagcttccgctgttcagtttcgagcctctcgaaatattatgcgcctgaatcggacatccgtgtgaaaagttatgaccatttgaatttctcgagagcttccgatgtttaatttcgagcgactcgatatattataagcctgaatcggacctcagtgtgaaaagttatgaccatttgaatttctcaagagcttccgttgttcaatttttagcgcctcgatatattataagcctgaatcggacctccgtgtgaaaagttatgaccatttgaatttctcgggagcttccgttgttcattttcgagcgtctgtatatgtgatgcgcctgaatcggacatccgtgtgaaaagttatgaccattngaatttctcgagagctntctgtgttaaatttcgagcgtctcgatataatatacgcctgaatcgga

SEQ ID NO: 65307 - DNA, 410 bp, Glycine max
  unsure (1)..(410): unsure at all n locations
agtgaacgactagctatgagccataatatttggctgatatctgattttagaatgaaatgtattaattaggacatgatgaaggccatgattgtacatacacaagctctctgaccaaaaaacttaccttgaatgatacttgtatcttttgctcccatgtataaagtttattgatttgtcattaactgaaccctgaactttaaatgagtatctcctaataccttgtttagattctaggagagcatatggttcaagacaaatttactctaaatttgngggagaaaagttgaaaggaatgaatagaaaaaggttaagcatcagcacacacaacanataagttgtatgttaaaaaaaagagagaagaaagaaaagaataaatggtgttgttacaataagggtaaaagatacttgag

SEQ ID NO: 65308 - DNA, 470 bp, Glycine max
  unsure (1)..(470): unsure at all n locations
ntcttgtatttaactntntctgttcctacggcctctgtattgtntgctaaccaacgagtaagccaaaacaacttacttttttattattaaatattgtctaacattaaaattattttgaatatttaattatttaatttttatttaatattgaaatttttatttttaaataaatatttaaaaatgaaattttgaattttatagaaattgaattactctatccaaacaaggaaattaaaatacaagaaattaaattgcttcgtccaaacaaaatatttataaaatgaaagaaatttaaatcaagacaattaaaatgttgtgtgtttgaatntcttaaaaattatcaaatccttcatccaaacacaaggttaaagttggtcacaatccgtatgtaattaattcatttgatttaaggaatgagacatacatatatttgtngctacctcgtggtctttaatataatatggacaatc

SEQ ID NO: 65309 - DNA, 429 bp, Glycine max
  unsure (1)..(429): unsure at all n locations
tagaattgcattctgactctcattntanatccttcatgttgtccctatatatataaaacagtcccatcaccccaattttgcaaaatcatattcattcctcattggggcatttaaccgagcacttggtgggcgcatgtttgaacacaaattgtatgagaatgggagcaatgtggcatgccccattgcttcagaatataacctaggcctaaggccttttcattcaaatcctcaattcaagaaaacaagcaccaaaacaaaacanagaatgcctcacaatcataagcatgttatcacaatttaaggcaccaaaagatgaagaaaacacatcaatgggaagcaaaaaatctcaaggatggaacacttacttgttggagtgaattgaaacaccaaaaacgaaagcaaaatgcgatcaataggcttatgggagca

SEQ ID NO: 65310 - DNA, 484 bp, Glycine max
  unsure (1)..(484): unsure at all n locations
ngtccacaaaaatagggttntgaagtttgtcatttcaatttctcactaagtaaaatggatcattntcaaggtccaacgccttaaaatgatcacctcttaaaaaagaaatcacttgataagaaagaactacgtaggtctgatttcctcatcgcaattgaggaatacgtangagcaaagggaaacacccttgtcgaccacaaaaagagaaaaaaatataaaaagggtataaaggatataaagacataaaaagggaacataaaaaatcaaagtcatgtttgcacattcgattaaaggctgccgtaccttgggacggacgtgtggggtgctaataccttccccgtgcgtaaatacaactcccgaacctttcacttaaaagttcgtagatcgcgtcttttccggttnttccgacgttttcctcaaataaacgttgagggcaactccgcacgtattccttttgtggaacacgcatcccgcgagtcacgcg

SEQ ID NO: 65311 - DNA, 457 bp, Glycine max
  unsure (1)..(457): unsure at all n locations
gcaagcttcacgagtcctaacaactctattaccatactcaagacactcaactgtcttgatcctttcaactagctntgggaactctctaatagtcaccgggatgattgttntctgtatctcaattctttctccttcttcataatttcaacatctccattcttttgaagtagtctaggtgcaaaatctagacaagtattcgaatttggatgagtactcgttcatagtcatgttctcctgaattagtcgtagaaactccatctcctttgcatgtctagcacctattggaaaatactttcttaggaaatgttctttcaagcttgcccctgtgatagcctcttcactagattccatgagttgactagctccatgccaccaatactttgcctcacaaatcaacatataagtagcaatacgtcatnttttggtcatctggacaattcatagctctgaagatttc

SEQ ID NO: 65312 - DNA, 488 bp, Glycine max
ctaagctatggcggaaagggtaagctatcaagcctcaagcatgttgatgttggtgcttgtgaacattgtatccttggaaagcagaaaaaggtcagtttctcaagggcagggaagactttgaaagctgaaaagctagaattggtgcacacagatgtttgggggccagccccagtgaaatccgttggaaactcacgctattatgtcacctttatcgacgactctaccagaaaggtatgggtttattttcttaaaaataaatctgatgtgttttctgtgtttaaaaggtggaaaacagaagttgaaaatcagacaggtctaaaggttaaaagtctgaaatctgacaatggtggggagtatgatagtcaggagtttaaagacttctgttcagaacatgggatcagaatgatcaagacaataccaggaacacctgagcaaaacggtgttgcagaaaggatgaatagaaccttgaatgagagagcaaggtgtat

SEQ ID NO: 65313 - DNA, 431 bp, Glycine max
  unsure (1)..(431): unsure at all n locations
ctatgcactanggaatgacattataatctatattggtaatccatggaattgactaatgtgccgnataccaaagcattttacttcaattcatgaatgagttgtgcatgtgatagcaatataatagcatgcttcttttctatatgattttgatgtcattacaaactattgaatgccatattcaaccataaaacattctaagaatgagacaataatgaaacaagcatatttagctaacatatttatatcaacaaagtgaagaattgaataacaactacatatggtgtggaagaatcataccgtaatgaccccttgcagtgactgcatctgaagcatgttttatggttaggtataccttcaagagttaacatgtcaaccacataaacagtcttatcacaagccttgcatttatctgtagttcctgagaatgacat

SEQ ID NO: 65314 - DNA, 426 bp, Glycine max
ctgaaactcagctcttcggtatagctaatacccaattatcaatatattatcattgttttcactttaaaaaatcaattagaaagacaaaagaaacctatctttcatatctttgttcatatctaaacaaactaatatcatcaacaatgaatgattatttaaatgagttatttatcttatttttatgagtcctacaatttcaaatatgtgtaaatactatacacagtcactctactgattaaactcctatattgagtgtcaagatgagtgtataaatgttggaatacttgaaaaaaatattatttatgatataaatgttgttcaacaacaattaattatataagtaattctatatcatgtatcaagtgaaaaaaaattaaaccatgttgtctaaagttaaatcatttgtgtaaacataacaacatgata

SEQ ID NO: 65315 - DNA, 356 bp, Glycine max
ttatacactgaagcttcatttataactgaaccatgagtacataatttatacactacattgcagctgcattaaacatgttattgtattaaccaatttcagacctagaggaccccttcccttatttttgagaaaactagcttaatataatttacttctataattaactaaggagttgagagaagctatcccaaaaatgcaatatcaccttcttatgttagttcacaaagtttaattagataatcttgataaagagaacagtatataatcactaattaatagtaaatattatagagattcaaacctggtttcagttttcacaatggttgtaggggcttccaaaagcaagcagtagacaa

SEQ ID NO: 65316 - DNA, 454 bp, Glycine max
  unsure (1)..(454): unsure at all n locations
cttggaaatgatttctatacaaaagttagtcgtatgaagcgactaacaggtagcatgtgatgaaccttgagagggtgaaaatgtgtgggacaagggcactattccttaaaccaatggaatcattagatagtccaccttcatgttactatttttgaccatttcctattacccttttatataactttttttatttttcatcccttacccttangatgtagagacttaacttgattatcaccattttaattatatattttttacacagaacttgccagtaaattttttggtttaaagggtgtagccagcagtataattaagacttcaatatcatatgttaatcatacctatcttattaaaaagttgaactcgaaacaactntcaagggatatcttttttttttcatttctcttttaaaatttgaaagatatgcatctagcagagaggatctaaactg

SEQ ID NO: 65317 - DNA, 413 bp, Glycine max
  unsure (1)..(413): unsure at all n locations
agcttctggtctncgatgaggctcgcanggagttcttcaatctccatcacgccttcgatgaggtaaactccaactccaaaccaaagttagccagggaccttctttcctttccatcgatctctccctttcttatacatttgatttacaatgcgaatttccctttctgttgttcatagatgttagatcgattcgattttagggctcataactaatttacaccattttctattttatttcgttgtcggtttagattataagttgttttcaatgcaataagctaatctaaacctgcacttagtgtccctatattgtttgtgctgcttctttctgaaatccctcattcaaacatattctaagaatgtattgttaaatgggtgtgtgtgtttcacatctaactgagtgcgttatatttt

SEQ ID NO: 65318 - DNA, 461 bp, Glycine max
  unsure (1)..(461): unsure at all n locations
tcagtggcttagtgaagaatgaaaggtaaaagtgactcaacaggttgaggtgagtctcaccattgngagatataatgatagggtgttgtgtgatatggtcccaatggaagcgacccatgtgctgttaggaagaccgtggcagtatgataccaaggcagtgcatgatggcttcaccaacaaaatctctttcaagcaagatgacaacaaaattgttctcaaaccgttatctccgagagaggtttgtgtggatcagataaaaatgagagaaaagaaaaggagtgagacacttgagaggaaaaagagtgaaacacttgagaaggaaaagaggggaaagaaaaagagtgaaacacttgacagggaaaagagagaaaacaaaaagagtgaaacacttgagagggaaaagagagaaaacataaagagtgaaacacttgagggcaaacaactntgtatagcaacaaaaa

SEQ ID NO: 65319 - DNA, 346 bp, Glycine max
  unsure (1)..(346): unsure at all n locations
agctnggataaataacgacaattcaggtggttgatgagagttgcgagtgtctctaatgttgtcttcanagagctctcttagagtaaccacacttttctctttcttcaaatggaattctccaggggcctagtgagaagaataaaagtgaacatcgcgcgcatacgaaaagattatcgctatgttttgttgggaataaatcaacaaaggagaaaaatacactaataacgacaaattttcttttgatcttaaactaacgtgctatggagctagcatagtatataatggtgctatcattctngactctatgaagacacgaaaatcatgtgtttgattataaaaaaagaat

SEQ ID NO: 65320 - DNA, 475 bp, Glycine max
  unsure (1)..(475): unsure at all n locations
nttcagagagcttcaagctntagtcttcatgttgctcatgttgctccccctatctcaacaaaccccatttctagtgtgattnttcgtatttcaattggtatcagagcatggcctattttaatgagtattcttacaaatatagaggaaagatcctaaagtcaaataaatatggaagaaggatactccatatacaagccacaattattcanaggcgtcaaatatgactattggaaggaacatatgatagctcatttctagtccattcatatagacctttgggacatcgtagaacttgacaactacgtaccattggatgatcaactgaatgaagtttccataaccttttaggcaaatgctcaaagacaaaggtttatagtgaactttaaagctcanaatgttgtattgtgtgccctttctgaggaagaatattcaaaggtccacaactacaaaagtgcanaataaatgtcagacacat

SEQ ID NO: 65321 - DNA, 411 bp, Glycine max
  unsure (1)..(411): unsure at all n locations
agcttccccanatatgagcttcatttctagtaccagagtgtccttgtcccatcaagtatggacggtgaataatcataatagaaactaatttctctctatgtgatcttctgagattcctctttgtctctcaatgtctagaatttgtttcagcttcatacgccaccatgctaaaggagaaaaccactctaacattgtccataanagatattcatctttatatggatctttcagcatgttgtatgtcatcaaagaatttatggcgatggggattgactattgtactgtattacaccaaatggcccatatggttggttcacacaaatcccacccaatctcacggaacaattcatatatacctccaaagggtatctcanggtcaaatatttatgttggagtgttgttgaatctcat

SEQ ID NO: 65322 - DNA, 475 bp, Glycine max
  unsure (1)..(475): unsure at all n locations
nttaagatgtgctcgnttgtataaacaacatctatatattggtagtaattcatgctcacgtaaccacaagctgcaataatgtgtgaacatggatagtgaagcgcagaataccttccacattgacaatgatgaccattcaagttaactgcccacttttgtccgccacgttgcgttataaggttgaagctcttctctacttcaaaccttgtggagtggatatcatacacgtgaacgatgtgcgtacaagcttgttcttgattttccctcagttctttaacaagctttgaacaatatacttggcctttatttaactgtctttgggcttggcggtcacgctcaacaaagtactttcgatacctactgtacgttgatttcaccaatgctgttatgggaatgttgcgacaatcctttaaaaccttattgatacattctgagaggttcgttgtcatgtggccatatcgacgtccttctctat

SEQ ID NO: 65323 - DNA, 410 bp, Glycine max
  unsure (1)..(410): unsure at all n locations
ctacaccaccatcacacatgactntatctataaatgattctgtacatcgctcacaaagacatacagtcgatggttctttcatccagagaaatttgatgtcatcttttgaggagaaaagaaataaacaactgcttctacattcacatgtcaaggcagtaattcttattccaatatgacacagttagacattcatagaggtaatttttattgatatgctattatcaaatatctgcatgcacacattttttttattattacatccttttcaaagtttgttctacagtcaacttatatatagaatgcgcaactgtctggttattatgctgattaacttgagagagcaactaacactacatagcataattaattttgtcgccatgacagcttacattccaccgataatgatgtaa

SEQ ID NO: 65324 - DNA, 470 bp, Glycine max
  unsure (1)..(470): unsure at all n locations
gggagaggatgcttcaatggagganaaganagagggagagaaagagagaggggggagcacgaaattgaaggaacaaaaagggagagaagttgaactttgagttgtgtctcacaagactctcattcatcaaagttacaacaagtgttacacatgcttctatttatagactaggtagcttccttgaaaagatttcttgagaaaacttccttgagaagcttccttgagaaaacttccttgagaagctagagcttagctacacacacccctctcataactaagcttacctccttgagaatcttccttaagaagattcctaaagaagctagagcttagctacacatacctctttaatagctaagctcacctccttgagatgagaagctagagcttagctacacacccnctataatagctaagctcacccncatgaanaaatacatganaatacaaaaaaaaaaaaatatccctac

SEQ ID NO: 65325 - DNA, 422 bp, Glycine max
  unsure (1)..(422): unsure at all n locations
agcttagacagttgttgtatcgatatcatgagtgtatanataaaaccagagttttgtctctaaagaaatttctaacttcgagacttttcttcacacagactatcatgatgcacaatgcaacacagatatcanatgtactaagatgtaacaaccaagataacagccaatataaatgccactcaaggaagttagacatgtaaaagccaaaacttctttaagcttttccttgagcttcaagctttagccttaggtttttcaccatgttgctccccctatctataaaaaaacaaatattcacacaacaagaaattgaggcaaggatcaaacatacgtattactcttaagaaatcaatctcaatctctcaaagtaataaaaagaacatggttattcatgaacaacataacaactgacatacaatcat

SEQ ID NO: 65326 - DNA, 421 bp, Glycine max
  unsure (1)..(421): unsure at all n locations
nggatgttgcttataggggaaaccttatgttaaatccaccgccatcattaataatgcattcccctacaacaactcagggaataagaggattatgaaaagcaatgttaatcaagtggggatagatgaatcccaaactgaattgggaaagcaaaacaagctctatcaatgaaaactaagacactcatgagagctcaagctcaagtccncattactatgccttcattcctaacctatgataaatgagatattgtgcatgggtcaggagaatgcattattaatgataagatagttacaaccatggatgagatcaactttgttaggggaggaaacaattcttataatcaataacagaataatttcaatcaaggataaggcttcaagcaaagtcagggaatgcttangcctcaacccatgcaaaatc

SEQ ID NO: 65327 - DNA, 471 bp, Glycine max
  unsure (1)..(471): unsure at all n locations
cttggtcttggtctcacatgtacggaggatcactgacaagtacactaccatttgcatccctttgctccacagaatttgaaataggaatgcttgcaacctccttaaaccatttttgatctttaaaacactcagcttttggtgctaagacaaccatgacagttgcatcgtcatcatactctatgaaatctgacttcaaaagcttgattntctttntctcttcaagtttgttatgatcataaaggtccatcttcttagcaatttctgttgtaggcccattcgaatagtgtgattcagatggctcctactccatgttttccaacttcacaacttcttctaaaacatgatgtgtggcattnttcttccattccagtgggaaacttttatccctcattttaatggacataagctcacagccgggatcaaatataatgcaactcatattcttaaaacataaggaataatttctctcta

SEQ ID NO: 65328 - DNA, 414 bp, Glycine max
  unsure (1)..(414): unsure at all n locations
tagaatngcattcggactctcattntaaatccttcatgatgtccctatatatataaaacagtcccatcaccccaattntgcaaaatcatattcattcatcattggggcatttaaccgagcacttggtgggcgcatgtttgaacacaaattgtatgagaatgggagcaatgtggcatgccccattgcttcagaatataacctaagcctaaggccttttcattcaaatcctcaattcaagaaaacaagcaccaaaacaaaacaaaaactgcctcacaatcataagcattttctcacaattgaaggcatcaaaagatgaagaaaacacatcaatgggaagcaaaaaatctcaaggatggaacacttacttgttggagtgaattgaaacaccaaaaacgaaagcaaaatgcgatcaaa

SEQ ID NO: 65329 - DNA, 442 bp, Glycine max
  unsure (1)..(442): unsure at all n locations
atgtcaatgtctagtgtatanctattttctacaatgtttcaattgtacgtagcttgtgtcttcttcatagatggggcacgcacgatatccctgaacactgtatccactcaaattcacatatgctgggaagttattaatgataaaaaaaaagcattacacacaaatggaaagtctcatttcaaaacctatcaaacactgaaaccccctcgtcccacaactttctcaagtcatcaatcaagggattgagaaaaacatcaatgtcattacatcatagtttctcccttttgcatggcatgtaaggtcttttgtgtcatctctattagcaaacaaacgcttaaaccttggaattatcagaagataccacaccaccttcgttagagggcctttctttgagttaacgtcacaactacattcatcatcatcgttcactttgtaccgtgat

SEQ ID NO: 65330 - DNA, 308 bp, Glycine max
  unsure (1)..(308): unsure at all n locations
tatacagttttttcataaacttgagtgtaccccttctcaaaatcctaattaagatccaagtgtagaagactgagagttgcaccaactgggataatgactaaccataatgctgcaatctccttcatagtttctgatctaaccttgttaagtccccttgaaaatgcaacggccattactccacctactagacgggttgcatagatagggacgccgaactttgaagcaaacagaaccagagcgatagcaacaaactcaaccacaaccttctagtgactagttggngtaaatattgttatcttcttccctat

SEQ ID NO: 65331 - DNA, 476 bp, Glycine max
  unsure (1)..(476): unsure at all n locations
tctaatatggattgtatntatcaatgccatctgttgttgccgaggctcttatattctgaatatagaacatacattcttctaagtcaagagttcttttggcattgtgacataatcaatctattcctgatcacaaatgggcctcttttatagttgctctgctgcagtcattgccttctattaatcacgcaagttaacatttgaagctggcattgtgaagggaggcccactatggtggcatcataagccgcaatggcatgttcatacttcatacgtggaatatttgctttccaccacctgccatttataaccttgtcgttacttcatactgctaatgatatttgatacaagagaaagagaaagtaatttatgcatgcacgtgcatgcgtgtgcatgtagggatgagaataagaatnntaaaatgatggaactggatacaaagagataggtaggcccaaattggtgagcttattcatagt

SEQ ID NO: 65332 - DNA, 441 bp, Glycine max
ctctatggagggtgtatctttgagcttcaatgaggtcctttaatgttggttttccaccatggagatgcagcggaagacaaaggagaagaggtgagaggaggcgtcatccactagggaataagccatggaagaaggagcttcaccaccaagatgagccttggataagaagcttggagaggatgcttcaatggaggaaaagaaagagggagagaaagagagaggggggagcacaaaattgaaggaagaaaaagggagagaagttgaactttgagttgtgtctcacaagactctcattcatcaaagttacaacaagtgttacacatgcttctatttatagactaggtagcttccttgagagaaaacttccttgagaagcttctttgagaaaacttccttgagaagctagagcttagctacacacacccatctaagaactaagct

SEQ ID NO: 65333 - DNA, 458 bp, Glycine max
  unsure (1)..(458): unsure at all n locations
cttatatcagttgtggatccncactagttatccagtgaggtttcatgtgaacatgattaggatatacaggcctcatccagaatggagtttctagagatacatttgcatgagggaaaagccttgtatgcttttgaaggagaacgtgtatagtcataccttctacaaggagttggatacataatgatgtgatgccttcgtacaggttcttgtgatagtcattcaatgatgtcactttttctgtaaaagttttgcttgttcctattgaagaaggcgataagaaatctccttcttgtaatttcctctagtgagggcttcttctaatgtctccacgtagctttccaactaaagcctaagggcttgaacttgtagagattgatgggagatagagctgaatgatttttgttcacttgagtgttggacttatgttgtgttaaggagtaagggggttaacatgactc

SEQ ID NO: 65334 - DNA, 426 bp, Glycine max
  unsure (1)..(426): unsure at all n locations
ctgcacgcatgcaagctttcgattcattctatgtacccgtagtggtccacattgcgttacgtgttttttattctcgctctgtttactttntataccccctgttgacgtgcttaagtcattttacttaagtcatttctcgcttaacataaaaataaaataaatttccaccgaacgtttgaattgtattatccgttaacttctgttaaaatgaattccgaccgttcggtcgtgccgtatccacgttggaaatcaaaaagaggtaaaaaaataatataataataaaaaaaacatcgtttagtaaaataaagcggaaaatcaatcggacattntctctttgggatttctcattcttaatcgaattgataataactaaagtgaaactaaggctaaaatcaactcgcctagtcaagctcgtccataaaaaat

SEQ ID NO: 65335 - DNA, 473 bp, Glycine max
  unsure (1)..(473): unsure at all n locations
ntaacctcatcgtccctcacagtctntagaattgggagccaatccaatccttgtgttcggactctcagccacttatgatagccgccgatgatcccattactgcttcccctaagctctctgtcctttcttcacgccgcatcccatgccttgcgaactccttggagtacctttgcattggggtcactgaaaccccgtgtaatgaaaggcgtgatgctttcgtctaatggcgctcctctcatggggtagccaagctgtcttatggcgaggacgggattataattaatacaaccccatgttctcatctagggaacatttggacatccttcgcatgaagatacaatcctgattcttccttccttctagcgagggaaccaattaacagacgcccctccatgctagccaagagttggtcccaattcgcctttcctttttcaacgcacgagcggtgaccttgtagcggatagacgggccta

SEQ ID NO: 65336 - DNA, 433 bp, Glycine max
  unsure (1)..(433): unsure at all n locations
agcttgtctcagcatttatgcgagacggtgaccaacatgctagctatcatcgccaagtaccaagaagagttaggtctagccatggcccacgagcatagaatcgcggatgagtatgctcaagtatatgcggaaaaagaggctagaggaagggtgatcgactctttacaccaagaggcaaccatgtggatggaccggtttgctcttaccttgaacgggagtcaagaacttccccgcttgttagccaaagccaaggcgatggcagacacctactccacccccgaagagattcatgggcttctcggctattgtcagtatatgatagacttaatggcccacataattagaaattcgtaggaaacttgtatggtctctcagaccttgactggatacgacttcttttntgaaataaaatgagntggtcccatgtttctac

SEQ ID NO: 65337 - DNA, 445 bp, Glycine max
  unsure (1)..(445): unsure at all n locations
tgngttgagaaatntcaggtacattgagaccatcaaagaagccttggaaagagaatgcccaaaagttgtttcctgtgctgatatcctcattctctctgccagagatgacattgtttcggtaatttactcctcccatcttgtccctttcttttttgttttgttctatttcccactagatctgttttgttcctttttaaaaagttcccttttgaaagttaattaattaaagtccatgtacatataccctgtccataattctagaaagatcagtctatttttagtgaggatgagtagttggagacttatttggtccagatttgttttagcaattaattgcttcgatagtttatccattgtcgcaacctacccttcagtgagagggcgaggcgagataaaaacacgtcttcgaaaagaagaaaatgcgtagagtcaccaccaacattta

SEQ ID NO: 65338 - DNA, 409 bp, Glycine max
  unsure (1)..(409): unsure at all n locations
gcttcatcaattcaacgancatacttttttcctcagatgtctgattgagacccgtaatatatcgagacgatcgaaattgaattctgaagctctgagctaattcaaacgacaataatgatttgctcggatgtctgattgagtcccgtaatacatcgagacgctcgaaattgaatgttgaagctctcagctaattcaaacgacaataactttttactcggatgtctgattgagtcccgtaatatatcgagacgctcaaaattgaatgttgaagctctcagcaaattcaaacgacaataacttttttcctcagatgtctgattgagacccgtaatatatcgagacgatcgaaattgaattctgaagctctgagctaattcacacgacaataatcttttgctcggatgtctga

SEQ ID NO: 65339 - DNA, 464 bp, Glycine max
  unsure (1)..(464): unsure at all n locations
ttacgtgacctatgaatctcagcttagaattcatntcgagcgtctcaatagattacgggactctatctacatccgagcaaaacgttattgtcgtttggattagtttagagcttcaagattcaatttcgatcgtctcgatatattacgggtctcaatcagacatctgaggaaaaaagttaatgtccgttgaatttgctgagagcttcaacattcaattttgagcgtctcgatgtattacgggactcaatcagacatccgagttaaaagttattgtcgtttgaatatgctgagagcttcaacattcaatttcgagcgtctcgatattttacgggactcaatcagacatccgagtaaaaagttattggcgttgaatttctgagagcttcacattcaatttcgagcgtctcgattattcgggactcatcagacatcgaggaaaaagtattgctgttgaattcctaaac

SEQ ID NO: 65340 - DNA, 394 bp, Glycine max
  unsure (1)..(394): unsure at all n locations
ncaagcttgcttctacacttaccgaacacctttgcggatgtctccctatgtggtggtttttggtaaggcatgccacattccggtggagattgagcactatgcgtattgggcggcgaagggttataatatgacatttgatgaagcagggatagaaaggaagcttcaattgcaagaacttgaagagattctcttagaagcctatgagaactccaagatttacaaggagaaagtgaaaaggtttcatgactctaggattcttagaaggagttccatattggccaaaaagtgttcttgtttaactctcacctcangcttatttccagtaaacttcgatctagatgggatggtactnttcttaattactattnttttccatggtgcaattgagaataaa

SEQ ID NO: 65341 - DNA, 467 bp, Glycine max
  unsure (1)..(467): unsure at all n locations
tctatcangggtgacgggaactctgtagaactgacaaaggcccgtaatcagagctggaaaccccagggccctgttggacttctccgggtccactgagtgtcttgtgggcacgatcgctgcaaacagtagatggcattagaaataagttgagccacgtgcatacttacatatgtcctgatggcataaaccagcagacacttcaacagggggggagatcggagttgtggtcactgggcagaatgctactaagtagcaacatcatccatgtgttggtgcgcatgatccgcactcgtctccctacagcggtctgagcgaaatcttgccctggtttgcatagtagttgtgtgatagcctcctcatcaaagctgtagacctgcctcctcctctggctgtgctcgtacaattgccccccccccaagatcaatgggtggaccaggaactgataaaaggaaactactggcccctca

SEQ ID NO: 65342 - DNA, 436 bp, Glycine max
  unsure (1)..(436): unsure at all n locations
agcttncaatagaggccaacttcaggctctcatatngcaagtccaccctcgcaaagcctccaccctacaccctcgcaaatctggttgtcgatgtagaggcatccatcggaggaagagacagtggtgcacagtgtcagggttgagccaatagaggaggtggaaggaccgacttgatgaggaggaagtcattgtcggagtcctagatttggagggagaaagaaagaggggaaggcgaacaacttgtcatcgaggttgtcatggaggtgagaggaggaagggcaagggcaagaagggttccgagtagaaatagagacggtgaagggtagagaaagagaangaagagaggctatgatcgttgtgatttagagagagagagagagagagagagaganagggaaagaaaaagtctgatagtgtctggttttagtggcacaca

SEQ ID NO: 65343 - DNA, 479 bp, Glycine max
  unsure (1)..(479): unsure at all n locations
ctgtggttattagatcatntaatgctggcattaaacgcatatcctgcttcatgtagganaaccactatgattggctttcgtgttgatcactataacaaaaaatcagttccttttagtcaaagtagatctatcacagtaaaacacatcttttgatgttgtttggaaacttttagaacttaaacttcatttattcttcataggattcgacaaatcctgaaagaatgtcttgtgagacaatttctgcgaaatgaacctcagacacaaagtactaaatgaagtcttaaatgtcatctttaatattgtatcagatcatgacttattcatatttctgtctgaaatatcaaacagaagatcatgaagcataatctgatatcacataagacaaaacttttaaccggtgtatttatttgtatctaataaaaataattaagggtcttgattcatcttanaatatctttngacttaacaataacaaaaag

SEQ ID NO: 65344 - DNA, 300 bp, Glycine max
acttagattccttttctcgaggtggtagacacacaacacatatgccgctagcgacacatgctagcaaataagaaaactctcacagaatcaattttagtgagcaactgtcacgattggtctggctcctcacttctgcacattcatgaacacaatatattgatctataatacacattattctaataaatgacaagaatatcttaatatacgtaacaaagaaactcactcgcatcaaatcacgtatataaatattttaacacatcataaaatattatcatttcataaaaatactatttatata

SEQ ID NO: 65345 - DNA, 462 bp, Glycine max
  unsure (1)..(462): unsure at all n locations
ntagatattntattacatgttattcattaagattgttagacataatgaaggatttctatagatattctattacttagatntcaatgagacttatctctagaaaattgctnttgatcattaagattttatgaaattgtggattcatggtaggtgcatccacagtcaagcatagtaaggattttgcaagacatagtgaagctggttgggctctacactatgcaacataatggtgattgtaagttgtgccatgctaattaagagtaaccttagcacgtgtcacaaccaggctggggcaggtaccccactcccatatatgatgctagatatcaccactcatcatatcccattaacttcctaaaggatcatgactgactaatgcccaaacatttttctattataggatctaatttagttctctttngtaatatccttcactgtggaactgatacatgaattcgcaca

SEQ ID NO: 65346 - DNA, 428 bp, Glycine max
  unsure (1)..(428): unsure at all n locations
gcttagctaactcttctatttctaggctcattcaatcagattgcaaagaaaatttggtccctatgagatggcattttgttcaaataaatctaatcttagaatattcaagcttttatcaagaaaacaaaataatgttgagcctttgtccctaaaacattagacaagaaattgttttaaacttagtttgtaggagaactggtaatggtatatatatgaaggggcatttgtcgtggcaaaaagcaaagtgccagcagaaatcaacagcatagccactgctaaaagcatgtcgcaatttctacaatctacatattgattaanagtgaatggcaaaaaatcagacccccaattatgcgagcaccctgtaatgccctccatntaaaacagtaattagaaacttggaacaattaaaaagacagatcctagttact

SEQ ID NO: 65347 - DNA, 471 bp, Glycine max
  unsure (1)..(471): unsure at all n locations
ntagagatcagaagtacggccctcgacacagacattgtggtctcaaaacaatgaaagtgtcttccgaaattggcctntaatgtcatctatcattgtttattgtggtttttcacttcatgacaatgcttattctgaggtattattcctacttaaagatgttgctatttaaaggtcgtttattttcagaacatgttctcttctttaattnttatttttctcgttaattatgaatttttcaccttttcaatttatttgtaattaagaaagatctgtacaacaaaaagagaatataaaaaaaaaattgtttttaatgtttacgggataaattaatctttaaaacagggaatagatttaatgtgacagtcaaaatagaaaataaaaacaaagaaatatttttcaaagtaaatatttcataacctttctctcatttcttttgctatacgtccanatgtgcgttcatttatcttatcc

SEQ ID NO: 65348 - DNA, 447 bp, Glycine max
  unsure (1)..(447): unsure at all n locations
ggatcttaagcaccgcggctgcagctttccctatttttctataatagggggagaagtgaagagaaaaaatgttcagccgtcctggtaattcgagatcacttgtaaatagtgaaaaaaattgtttccgtgaagaaaatacaagccgaggcgcttccgtaacgtttacgtaacatttccgtgggtgattcgcgaagattttcaaccgttcttcgtcgttcttcggtcttcaaccggtgagttcccgaaataaaacttttcaattcattctatgtacccttagtggtcctcatctgttttcacgtgcttttattttcatttcatttacttttcgcaccctcntttgacgtgctttagtcatttacttaagtcantttctcgcctaatcaaaaaataaaataaatttccaccgatcatttgaattgtacatccgttatttatgtaaaatga

SEQ ID NO: 65349 - DNA, 359 bp, Glycine max
  unsure (1)..(359): unsure at all n locations
tgtgcttaagtaagtaagacatgtgcctgagatgcatttaaaccttatctcaacaggaaagctagctaatgttgggatgataaaccagttcggtgttggcaaatggaagcttagtagaggaagcatagtcgttactcgaggtaagaaggaaggctccttgtacatcatgtatggaactatatgcaaaggggagacaaatgttgctcaagatgcagccaaagaattatggcacaagagattgggtcacatgagtgagaaaggtttggagtttctagcaaaggatcactttccaaacataaagtgatgtaagctccatgtggagcttgaaggcctangatcttcttcatcaatggattcct

SEQ ID NO: 65350 - DNA, 456 bp, Glycine max
  unsure (1)..(456): unsure at all n locations
agctaaagaggggcataaaaaaaaatcaccctctctaaatagtngataaggatgctaacaacggagaatcttcttatgctactatctttagtgaagtgggtatcaagccaagaagattcccctttataatgtaaacgaacttttgctcttttggtaaggagcgggttcgggaagctccactacattccgcgtctccttatatttttgccaagcgcccgcacacatatacatatattaaaaacattaactaaaaaactagccggaaagtttttctatagctgaaaactgatttttattaaatttatagaagtttgataaattaactggtaanatagttaanaaattanaatgataaagaatataaattatatttatttnaaaaatactacaaccctgataatatatgaaacacaaaaaaatataaaattaaaggttgtttttaaaacatgtcactga

SEQ ID NO: 65351 - DNA, 434 bp, Glycine max
  unsure (1)..(434): unsure at all n locations
gcacctgttgcaagagtctgtgatctatgttcttctgcagatcaccatacagatctctgtccttctttgcagcaatctggagtcaatgagcaacctgaagcttatgctgcaaacatttataatagacctcctcagcagcaaaaccaacaacagcggaataattatgacctttcaagcaacagatacaatccaggttggaggaatcatccaaatctgagatgggcaagtcctccacaacaacaacagcttgcccctccctaccagaatgatgctggtccaagcaagccatatgttcctcctccaatgcaacaacagcagcaacaacaacaaagacaacaagcaactgaggcccttcctcaaccttccttagaggagttagtanggcanatgaccatccagaatatgcaatttcagcaagagacaacaacctccat

SEQ ID NO: 65352 - DNA, 430 bp, Glycine max
  unsure (1)..(430): unsure at all n locations
gcttctttggacctcgaacaggcaactaactcctctttcataaccatgctatgtgctcgcgactggtccctttcctcccttcgcaacttgagttcattattgctaccccatagggctccgcgaaatttgttccggccatactcttccttgcgagccctcttagtctctcgatcaagggctcttgcagtaattgcattctcttaccgtaacccggcacactacctccgaacgtgtgtagcagccaactcgaacttctccttggcgagttntgcctttcctaactcgcttttagagcttggacttcatcgcctcttgcgtgcttaaaatctcttcctgacactttacttgcgaccatctaacctcgatgcgaacttcaccattctgggaccaccatgatgcattacgatgctctaactctgatctttcttac

SEQ ID NO: 65353 - DNA, 395 bp, Glycine max
acacatgaactaaacgcaattcattgcttcgaataaggcggagaatggagaacagatctcttaatcactacgcatggctccaaactcagaggcggaggacgcatgaacgagaacaccattcatggagctccgaatattgggaagacaatggaacaatgctctaaacgatcactacgcttatgtacagactcaaatgtggaggacacatgaacaacaactcactgcatggtgctaccacaaaggttgataatgaagagatgcgataattaatcactacacatagctccaaacgctaaggtggaggacacatgaaagaccacgcaattcatggtgctcccaaaaaggtgtagagaatggagacgtgcgctaatcaatctctacacatggttccaaac

SEQ ID NO: 65354 - DNA, 488 bp, Glycine max
  unsure (1)..(488): unsure at all n locations
acctgaggcatgcaagcttccttaagaagctagagggggggctactcattccctttcatttttaagctcaccccatgccaaaatacatgaaaatacaaaaaagttcatactacaaagactactcaaaatgccctgaaatataaggctaaaaccctatacttctagggtacccttaacttgtacccttaatttgtagggcaccctacaaacctataatggccaaaatacatgggcccaagagaaggaaaacatattctaatatttacaaagaaaattgggctcatacttaacccgtgggcccaaaatctaccctaaggctcatgagaaccctaaggccatctcctgcatctctactccaatcttggtggagtcttctctccaatgcccttggaggggaggattgcatcatgacccctcataatcatgaatttcgttgtanggcattaagaggaaatgtgacctctgccaagacatctgaagcatttaat

SEQ ID NO: 65355 - DNA, 429 bp, Glycine max
atgatgaccaaggtgatgaacataaagctcatagatcaaagaacaactcaagtgaatcaagaacaagtcaagagttcaagaatcaagaagaattcaagactcaagaagaaagtctacaatcaagaatcaagaatcaagattcaagatctcaagaatcaagatcaagattcaagactcaagattcaagaatgaagaagagactcaatcaagataagtattaaaaagttttttcaaaactttgaatagcacatgagtttttgacaaaacctttaccaaagagtttttactctctggtaatcgattaccatattggttgaatcgattaccagtagtaaaatgagttcgaaaacagtttcacactgaatttacaacgttccaaatattttcacaaggcagtaatcgattacaatgtgttggtatccgatacct

SEQ ID NO: 65356 - DNA, 499 bp, Glycine max
  unsure (1)..(499): unsure at all n locations
ttaagcaccgcagctgcagctgaatgagaaacaccttntgaatggagattcctttttctgtgtgtgtgtgtgtgtgcaaaagcttgaatcaagaatctatctaagtttaatgcagcatccctaggctgcattaaatctcattacaggagcatcactacatccaacagatgggaagtcacaaagacaatgggtgggagtggagctttatatggagaaggccattgttttacaataaaattgatcggcatgtgtttttctaatgaggtcaggatatggccattcacaacatggacctgatgtctgggaatgggctgctgaccctacaggtcagtatacagcacacaatgcatataatgtaatatagggtaagcacatcatgaagaacgccaattaacacatatatgataaggaagacagagctgaacagcaggctaagcacatacaatgtgggcctcagttggccacactacagatttgcttatgaacctcaacttacttg

SEQ ID NO: 65357 - DNA, 452 bp, Glycine max
  unsure (1)..(452): unsure at all n locations
tttcatctcttcntcctttgccaaaaagaattcgccaaggactaaccgcctgaattctttntgtgtctctcttctcccttttccaaaagaacaaaggactaaccgcctgaattcttttgtgtctcccttctcccttgtcaaagaattcaaaacgacacagtctgagaattcttttgattcttccctttcccttatacaaaagtgttcaaaggactaactgcctgagaattcttttgtatccccattcacaaagtatgaaaggtttaaccgcttgagatctttgtcttaacacattggagggtacatcctttgtggcacaagtagagggtacatctacttgggttngactgagaacaagagagggtacatctcttgtggatcagttctagtggagggtacatccactanggtntcaaagagaacaaagganggtaccatccttgtggatcttt

SEQ ID NO: 65358 - DNA, 466 bp, Glycine max
  unsure (1)..(466): unsure at all n locations
agctntgagaatcattaattatggaggtagaatttttgctacattataagatccaagtataaacatagtatggatgcctaaaggggactgccctagactgactatggcaagagcctttggaaatttttgcttaaaagactatggtgtcaccttgatccctgatgtatcatacagaaaacttaccatgtaggatgangttggtggtttggcttttgatggngtaagtattttaatatcaggatgtcaactttaaaactgggatcttaactcatgaataatcagttacagaataatcatcgttagtggttaaactatgctcaattcttgtattcctctcaatccaaatatgtntgcaaatatttggtcaaatagtgtaaaacaagaaataactaggaaggttaaatgaattaacagcagatagtttccatacatancgtgttagtttatattggacaaaaattagatg

SEQ ID NO: 65359 - DNA, 503 bp, Glycine max
  unsure (1)..(503): unsure at all n locations
ctatgatcaaactcatttctctttttttctctcaactattcttcattcttctttctctnttcactnttgntcttcctttctcttgcacaaatttcatggcttttccattggtgatgatcatggaaggctaaacacttaatcaatttaaggattcactccaagcaagactgaatttgagttctggtttagtatttctaatctgtgtgaatgttcattnttttttcttcaatcctattttcgattntcatgattatgattatgcttaggatngaaaatggattangttatggattcatttcctactttntaaaattaatcacanaatgtttggatgattntccaacctaattngtgatttcaacaatntanggatngattcgattaaactatctctaatggcattgattgaactttcacactttgaacatcattcgtagtaattgtgataattcaatttgcattggnttgatgaatnggatngatgttataaactcgatcatatt

SEQ ID NO: 65360 - DNA, 420 bp, Glycine max
  unsure (1)..(420): unsure at all n locations
gagattnattcnttttaaagattgattgaataagtgttccagataccttataatgcaaaacaaagccttgcttttatagactcttcatgtctggtcaagacaaccattagaagagttatgtcttttagaanaacttaaaaaccaatttgaaaaagtcaaaaacctttttgaagagttacatcttttgattntttttccagaaacaatcactggtaattgattacacgaagcttgtatgtgaaaggatgtgactcttcacattngaatttgaatttcaacgttcaaaggcattggtaatcgattaccaaaacatcgtaatcgattacagatttgtngaaataattggaacgtngtaaattcaatttgaaaacttttccaaaacaattttgctactggtaatcgattacaacaatctggtag

SEQ ID NO: 65361 - DNA, 322 bp, Glycine max
  unsure (1)..(322): unsure at all n locations
agcttatgcacctangcaacacaacaacatataattattattaactaatcttatttggtaggaaggattattaataaatggtatataattgctgtatattctcatgttaggtgtgtattttaaatgtagggttgaataagctcattgggctctcaaaagagtactacaaaataacgttggagacctatgtaatgttttggatgccatgaacaacatgatcacgctgcagcatgttgaattaaagcatcctttgaaaccactacgcatgtggttgggcatgtatattaaaaaatcttatacaacacggcttcttgggatggtt

SEQ ID NO: 65362 - DNA, 478 bp, Glycine max
  unsure (1)..(478): unsure at all n locations
gaagaagaagaagttcagagagatgtagggcttgtaaaagattgattgaataagtgttccagataccttataatgcaaaacaaagccttgcttttatagactcttcatgtctggtcaagacaaccattagaagagttatgtcttttagaaaaacttaaaaaccaatttgaaaaagtcaaaaacctttttgaagagttacatcttttgattttttttccagaaacaatcactggtaattgattacacgaagcttgtatgtgaaaggatgtgactcttcacatttgaatttgaatttcaacgttcaaaggcattggtaatcgattaccaaaacattgtaatcgattacagatttttgaaattaattggaacgttgtaaattcaatttgaaaactnttccaaaacaattttgctactggtaatcgattacaacaatctggtagttgaataccagagagntaaaactctttggtaacatgtt

SEQ ID NO: 65363 - DNA, 432 bp, Glycine max
gacttaagcgacgaggatgcagctataagaacaaaatgcctaatcatttcttatatgcatgtgaattaggaggcatcaacaagaatcaagccaaggctattgtgcaagcaatcaatggcgcaaaacacaccaaatgattatgatgatggatggctcatattctcacaaaggtaaagtcatcactttcaaattgagctctcataactatcatggcatgtctaggagaatcacggatttcaaggccaaaatgtcaaaactttatttacaaacaattcccattcttgacatatctatattcaagaaaacatgaaagcctacatgccaccaattgcccaaatattaaactgaattcgatgaactacacataacaaataacacactacaattacaaaccacaaactgcaaacaagacactccccatactaaaaacat

SEQ ID NO: 65364 - DNA, 459 bp, Glycine max
  unsure (1)..(459): unsure at all n locations
ctcagctttatcaggctcatctgtgggaactctttttattctatcctatgatgggccgcttaccttttcttgcttcgtgcatcttatggggaaataccataaaggacctcattgaagctcaaagatccagcctccattgaagccccacaagcanagcttcatcaagtggtaatcagagcataagagcttcaagtaggtgctccttaaacctcccattaatttttgctntaccttctcttccattgttggttcttcattntttctccatgtatctcctcacatgtcttgtcttaaattttgttaacatgattatttagagtttccaccgattaaacttgctatagaagctagatttattntctatggttcanatttcttcttggtgttcttgaaccatgaatnngtgttgagtntggttcctttgaagtttggcttggtattnttgtggctgaaacctaa

SEQ ID NO: 65365 - DNA, 494 bp, Glycine max
  unsure (1)..(494): unsure at all n locations
gaggatgctntaatggaagataagaaagagagaatgtgggtgttctatattgaaggaataaaagagggagagaagtggaactttgaagcgtgtctcataagactttcattcatcaaagttacaacaagtgttacacatgcttctatctatagactaggtagcttccttgagaagctttcttgagaaaacttccttgagaagcatctttgagaaaacttccttgagaatctagagcttagctacacacacccctctaataactaagctcacctccttgagaagattcctaaagaaacttccttgagaagattcctaganaagctatagcttagctacacatacctctctaatagctaagctcacctccttgagatgagaagctagagcttagctacacacccnnctataatagctaagctcaccccacgacaagatacatganaatacacanaaaagtccctactacaaagactactcanaatgccctgaaatac

SEQ ID NO: 65366 - DNA, 498 bp, Glycine max
  unsure (1)..(498): unsure at all n locations
taaaactagctcactttcctggcttcttttggtcatacattgttgttaacttcgagcataganttttcagatgcataagatcatcactaacacccacttcaacagacccaggatcagaaggaaagtacttgtctttaaaagcattagcaactgagctaatggatgcacggatactagaattagttgttggagtttccacagaacttggtggcaaaccaacatttactggaactggactcttcaaatcatccgaacggttcgcatcgggatttgaattaccactgcgcaggcgatagcgtctagagcgagatgaagttccagatacagaatcagtatccttctcagcagatgatgttnggtagatatattaagtgcatctccagccaaaataagttggtcaactgcatgaaccacaccctctctgacaaaccatttatagaaaattccangaagcttttcataagaaattctgaattgcaaggacgaaccaaacatgtg

SEQ ID NO: 65367 - DNA, 376 bp, Glycine max
accaataatctcagctgagcaatgcaacgacgatgctacactttgagttttttgttcccgaataatggcatgcacgcacaataaccggactcctagcatattcaacgacttaacttgtactcggaaggcgatagaggccgtctatatcaagacgcttgatattcactaccgaagctcgcagacaattctaacgacaataacgtttcactcggaagtcctatcgagtcccgctgtatatcgagacgctccatattgaggagcgaagctggtataaaatctaacgacactagctctgtagggtgctgtgcgattgagtactcgaacatatcgagatgctcgagatataaaaccgaagctcgtagaagattcgaacgac

SEQ ID NO: 65368 - DNA, 187 bp, Glycine max
ctatctgtaccacctgctgacgtgcttaagccattgtacttaagtcatttctcgcttaacttaaaaataaagaaaatacgcactcgaacgtaagaataagattatccatgaactctgggtaaaatcaatatcgaccgaacggtcctgccggtgactctcgttggaaatcaacatgaggctaaaaata

SEQ ID NO: 65369 - DNA, 482 bp, Glycine max
  unsure (1)..(482): unsure at all n locations
ctgatttagttnttgctgacgaaaggatcgattgtttcattaacaggannaattaattatcctgcttggacgaatgagaaaattgnggcaaatgaagagagtgagaatgaaggagaaacctatactgcgactgtcattcctacatggccaaacttcccaccagcccaacaatgtcattactcagccaatatcagctcctctcattacccaccacccagtcatctagaaaggccatccctaaatcaaccacaaagcctgtctaccgcacttccaatgacaaacaccacctttagcacaaaccagaacaccaactaagatatgaattttgcagcgaaaaagcctacagaattcaccccaattctggtgtcctatgcaattcaatggtagccataaccccaaccaaggttcaatcaacctcatttctccgaggatacgactcgaacacaacatgtgcttatcatggtggagccctgnggcattcc

SEQ ID NO: 65370 - DNA, 378 bp, Glycine max
  unsure (1)..(378): unsure at all n locations
gtggttggctgtgtgttgtgcttgctagcttctgttggntgcaacctttcatttcattttctcttccgttntcgatgtgttgtgcttgcttgcttctgttggttgcttcgttgtgttgttgcttgcttctattggttgcaacctttcatttcatttttgntggtgtgggcttgcttgcttcntgtgggttcatgtgttttgcatctcactgtcgtttatacatacatgtttatctcctattactttttagggtctctgctttcangttttttgctctaatatggattaacttgtggaattgctttgatttgatctgaatgtgatggttgtttttcgtaactacatatgatgttgtgttggttttcattttttgacaaa

SEQ ID NO: 65371 - DNA, 458 bp, Glycine max
  unsure (1)..(458): unsure at all n locations
tatcgtgcctgngagcaacaggatcaattgatgctctcgtggcttcaatctattatttcagctnntgatttgttcatcagatgcacgagttcgtggttcttgtgggatgtggatttacttttctttgataaagtgagaggaaatgagagagagattggagagaaaactgatattattcactctgaaaagtcagttacagaattagttataaagaggtatatatagacctctaatcctttgaactaagcaaaacagaattaaccataaggagggaaattctgttaatagaagctaacatcctaacaccagtggggtgctgntagcaaaagctaacagcccttacaaactgtnttcacagttatacaaacatatactctaatacccctctcacacacaaggggaagaattttcagaggaaaaactcttcaccattgagttacacctaagaacttcaaatc

SEQ ID NO: 65372 - DNA, 411 bp, Glycine max
  unsure (1)..(411): unsure at all n locations
ctgcagcttactgaatggctggtcttatagaagaactttgctttctgaacaaaacactttgccgaanaatcactacgaggccaaaaagatnttgtgtccagtgggaatggagtacaagaagatccatgcatgccctaatgattgcatattgtatagaaatgagtatgcagaactacagcaatgccccacgtgtggggtatcacgatacaaagtgcaacatgatgaattaactgatgatgcacgaaccaaaaaggtcatcctgccaaggtgtgctggtatcttccaataataccaaggtttaagcaattggttgctaatgcacatgatgcanaatacctttcatggcattcggatgaccgaaaatctgatggattactgcgacatcctgccgattcgccgcagtggaagaca

SEQ ID NO: 65373 - DNA, 294 bp, Glycine max
  unsure (1)..(294): unsure at all n locations
ttaacaggctataattcttacgatggtgtggcataccgtgctatcttactctttttccactgtcggtcctagtacacagttctttttttgatgagccatctttggtctcatgatactatttctcaacttcggggaagtctacatctcgtctcttatcttcatcgattcgttttgtcgaatcatgtcangcccagtattatacttcgaggactatcgcagattgcgtttaacataagaataacatcaatggagcaatggtaacacgangaacaagaaaaatatttgatataatta

SEQ ID NO: 65374 - DNA, 496 bp, Glycine max
  unsure (1)..(496): unsure at all n locations
ctgcagctgaattgaattttaaataaatnttttaatgttttaaggaagaanactgactcttggttttaatataaatcataataatatatttattaacttattcattttaagatcataaattctttaatagataataaattaaaataaaaagattntatgtgtacatattaatattaatattttcattggatcatatgttatgtgttatatatttgaaatcatttgatgtgatataactaaaaatcaaaataacacacaaaaaaggagaaataaaatccaatgatatttttttataaataaataaataaataaaataagcatattaaaattgagaaaatgatttcaaagaagaattcttcttagactatctcanaantatagattacaatgaatatatataaacacacaacatgatatatatatatatatatatatatatacatatagatatagagatatacacactattagagatgggagagtgtctcacataatc

SEQ ID NO: 65375 - DNA, 440 bp, Glycine max
  unsure (1)..(440): unsure at all n locations
agctnttcactcggagatctgattcaggcgcatattatatttagacgcttganaatgaacaacggaagctctcgagaaattccaatgctcattacctttaactcggaggtctgatttaggcgcctaatatatcaagacgctcgaaattgaacaacggaagctctctagaaattcaaatggtcataacttttcactccgaggttcgattcaagtgcatgatatatccagacgctcgaaattgaacaatagaagctctcgagaaattcaaatggtcataaccttaaactcggaggtccgatttatgcgcataatatatcgagacgctcgaaatttaacaatggaagctcttgagcaattacaatggtcataactttcatctcggagggccgattcgagtaataatatatcgagacaatcgaaattgaacaatggatgctctc

SEQ ID NO: 65376 - DNA, 499 bp, Glycine max
  unsure (1)..(499): unsure at all n locations
ctaagctacgtgctcaatacaagcgtctcgatatattatgcacctgaatctgtcctncaagtgacangttatgaccatttgaatttctcgagagcttctgctggtcaatttcgagcgtctcgatatattatgcgcttgaatcggacctccgagtgaaaagttaagatcatttgaattgctcaagaacttccatttttcaatttcgagtgtctcgatattttatgtgagtgaatcggacctctgagtgacaagttatgaccatttgaatttctcgagagctatccgtgttcaatttcgagcgtctcgatatattatgcgcttgaatcggacctccgagagaaaagtaatgaccatttgaatttcttaagagcttccgttgttcaattttgagcgtctggatatattatgtgcgtcaatcggacctccgagagaannagtatgaccatttgaatntctcaatagcttccactggtcaatttcgagcgtctcgatatattat

SEQ ID NO: 65377 - DNA, 507 bp, Glycine max
  unsure (1)..(507): unsure at all n locations
ttaagtcacctgaggcatgcaagctncannacccttcanacccgcctagcatgcctatttataggcttatacccaatttggggcagttgatgctcacccaggagagctgaaccttagccttgaagtaatgagctcactcaggcgagttggttgcttagccatgaagccatttcatggcccaggcgagccatatgctagcatgggcaagctagggtcccaagaaacccaaaaaggacccttttgccccctttctatggtacactttgttttcttgatcaaaacactaagtgattccttgctttgtattgcaactggcgcttaatatcgtaattcgattaacaagaatgaaaatatcagaatatgatagtccccggacgaaattatgatctgacagatgccttcattangctccagatagaatgcagctacttaatatatgcaagatagacaatgaatctttcaaagaatatgctcacaggtggagagatctgacagctcaagtagtgc

SEQ ID NO: 65378 - DNA, 433 bp, Glycine max
  unsure (1)..(433): unsure at all n locations
ctaagctggactatgacttgcttaatgaatacaaaatcattctttatctttatgcaataatatccaacccttagaatctttcgagccatggcatgcctattggcatgggtgccaaaggagccttcatgcacctttcttagtatctgttcatcttcacttgcatccacgcaccagagaaacaccatatcattgtttcttttatatagtacatccccattcaaaaggaagctagccgccaacatctatagtgtgctcttgtcattctcagagaccctgngtgggtactccctatctttgatatatctcttcatatcagaataccaaggtttgtcatcctcctctttctctatcaaacaatagtgtgcaggctcactgtgaaatctaatttctatacacagtanatcgccatgacggctcatctggaacatggatg

SEQ ID NO: 65379 - DNA, 442 bp, Glycine max
  unsure (1)..(442): unsure at all n locations
aactcagcttgaactctcggacactgctttaacactagccacttgattatttatgactcttgaaagaatcttcgcaaacaagtcacttgaagaattgtgactcttggaaatgtatttttcgaaatcagtcactggtgatcaattaccattaatgtgtaagcgattacacatcaacagatgtgactcttcattntgaatttagaaaatcttaacgttttaaaacactggtaatcgattacagctttgtaaatcagttcgaacaacaatgctggctactggtaatcgattactaccttttggtaatcgatcaccagagagtaaaactctctgtaaaagattctgagataacttcatgcgctacttaatgatatgaagagctctatagtactcatcttgattgagcatactcttgattcatgaatcttgagtctcgaaacttgat

SEQ ID NO: 65380 - DNA, 510 bp, Glycine max
  unsure (1)..(510): unsure at all n locations
atccttaagcaccgcggctgcagctgtagtcttatacagaaagtcttgttttgaatgagtnggagcattgagcccaattggtgattctattatcttgaagtgctcctagccactcccaaggcttcttggttagagtgaaggaaaatacaaccaatcttatgtattcgttactaacgctggactgcctaatagtgtcacacaacctcaaaaaccaccttaaatgcatcatggagtctttgtgggatgctccactaaacaggttactttcaatcatttgaaagaatgcaggtttgaaatcaaaagtaaccccttgaggaagtgttggcagttgaatgttgttggcttctcccaccttgggggtgagataatccatcaatatcttcaagagattctctaccacaagcttagccattgctcttggtctcttagcaacactggtaacataagaaaaagtgatcacacacaatnggcaatatgcacacgcgcgcgtgcacacacacacacacacac

SEQ ID NO: 65381 - DNA, 461 bp, Glycine max
  unsure (1)..(461): unsure at all n locations
tctctttgatganatgtctgttaatttccacgtgctntgttctatcatatnggacaggattgtgagcaactgctatagtcgacatattgtcacagtacaaactcatagtttcatttgatttaaagcccaaatcttatagcacatttttaacccacaaaagttcacatacaccgagtgtcatgcctttgaattctacttcagcactagatcttgctattgcagttgttttttactcctctaccctaagttacaagattccctcctacaaaagtaaagtatctagaggtatgatccttcatagacttggtaaacctttcaaaccatgttcttggggattgttttaatccatatagagccttctttaatttgcaaactntcattccatttgaattgtctttcctggaggggaatccatataaagttcttctaaaatttctccttgaggaaaagcattttacatc

SEQ ID NO: 65382 - DNA, 458 bp, Glycine max
  unsure (1)..(458): unsure at all n locations
agcttctccttcttttccctataaataatgtatgtgtggaagaacaaaaatgttcaaccctcctagtatttaagattcacttaaaattagcgagaaaaattgttttcgtgaagaaaatccaagccgagacgcttccataacgcttccgagacgtttccgtgggttatttctcgaagattttccactgttcttcgtcgntcttcggtcttcaaccggtaagttcctgacaattgaacttttcaattcattctatgtaccattagtggtcctcatttgtttcgcgtgcttttatttttatttcatttactttccgtacccncttttgacgtgctttagtcatttatttaagtcattttctcgcctaatcaaaaataaaataaatttccaccgatcatttatattgtaacatcttctaattnntgaaaaatgaaatcaaccgttcgtcatgccgcaccacg

SEQ ID NO: 65383 - DNA, 504 bp, Glycine max
  unsure (1)..(504): unsure at all n locations
actccgcttatatttcttcttcatcatgaatgcttatgttattcattgttttgtatagganatctctttccccttccaatgatggaactctcgaaggtctcaaacagtcaaaatggacgttgtccaacatggcctctattgtgtgcacaacctttggaaacttcacctgatgttgtttgtaatgccttgcaaatttgataattgaaaataaatgtttgatgttnttcttgtgttattcgattacttgattaatttggatgagttaaggtattgtgtgaattagccatgtgtgatctgcttgatgtggattggtgtaagctccattggagcttgtaggcctaggatcttcatcaatggattcctttgcttcttggaatatgaatggtagcggaatagagaaggaaaagagagaggaaacgccacttcaaggagaagatgagtctaanagaagctcaccaccatatgaggccatggataagaagctcgaggaagaatgagatgaat

SEQ ID NO: 65384 - DNA, 493 bp, Glycine max
ctacactgaggcaatgaggggcatcgtgcaagagcctcatgtgttcttatttgcagatcaaaagtcctcacccgtcgatgtttttaaacaaaaaaaaggggggacaaaccctggaatttcaaatagattgattaaacgtcaaacggctccattgctgtcactccaaaatggtcaagtgactaaatcaaacagaacatacactctgagggagttctcggagagatttgcaaaagataggataagggtgcatgaattatcacctttttcaaaaggacagtcaatctgtgttttccaaaaagattaaatcaaaatcaaaatcacaaaatacggaaagaatgtcatgaacattgtacaactttccattgcattgcattgtttcatatgaggtcagcgttaccaagtttcacaataaaggttgcatgcgtctgcatccctaaaaatcgtgttaactgcatagaatttctacatctcgtgtgcaatctctttggatgac

SEQ ID NO: 65385 - DNA, 467 bp, Glycine max
  unsure (1)..(467): unsure at all n locations
agcttgcttagtttgaaatgtgatgaatttcttattactattgaaagctgtatattattgaaatgcaatagccaagttnttagaacaaatggtattttgacatgggagtagggtaccaagttaatcctaaggttcactattgttactccaaagtactgtaactaaaatgtcaatgttaagttgtctgtacctccaataattttgccttgtagacttgtagtctgatatccatatatatttaaggccttgcaggctttcatatgtgagggatgttggaattctaaaagctatctgaaaggtcaatgggctttttcacttgtgatatgattcataaaggcatcctgctgtgcaaatagagtattgaatttgcacttgtcaatcacggtatttgatggttttatgtcaaattaacttctatagtaatgctgaaatataaacctaatatagntagtaagttcattatatgg

SEQ ID NO: 65386 - DNA, 417 bp, Glycine max
  unsure (1)..(417): unsure at all n locations
tatgatggtgatgaagtgctagttttaaatgaacgctcttgctagtggatctaggaccaggactggttccatatatcacgaaagagattgatcagtgtatcagtgttataagatatgagggatgaacacaaatcccaacagatagaaagaactttttcatatagtataaacttgacataaaaactataccaagaaaacaaatcaaaggcacatatataatgagatgccatatatctagaaaattgaaataagcagcagcaatgaagcctaagaattaaacaaggggactgagccataaacttttcatgcaagataaaatatacgcaagaaaactacatgctagttgccaacaagtaaaaaaggacacatctaanaaaggtcatgagccatannaatagtggttcactcgcatattat

SEQ ID NO: 65387 - DNA, 413 bp, Glycine max
  unsure (1)..(413): unsure at all n locations
gctgagaacctatataacagcaccaaggttttagttttatttagcncntnncgnnncgggggaaagaatgttaagttttgtaattccagttctcactattcacgtagcaataaaatttcgttgtctgcttcaatctgcaatttcgttttctactgattaatggaaggctaagtctctagcgtcgatttctcttgaggatcaagcacagctctctgtgaggttctattattactattgaattctgatcagctcttactctataccaattactctatatntgttgctattaatacatgcatgcttagtgctcgcttaattatcgttgtggttaatttacgttcatgctcaatgatcagttccgatcatgattaatcggcgtatgtgctgctcagtcacataatgactgccttatg

SEQ ID NO: 65388 - DNA, 259 bp, Glycine max
  unsure (1)..(259): unsure at all n locations
tcatcaaacacgcggagaatgtgaatgtatgtctacatgatattgatgatgcccaagaaccatcaaacaaggttgcttcaaatgataagcattcgcttcaagactaatccangagtgcttcaacacacacagccttggttcaagattgactaccgaccaacccttgccttataacacaatgctatcaaacatgcagtgctctggcatcaattaccaggaagtggaatcgactaccataagacatggctgagaaatatct

SEQ ID NO: 65389 - DNA, 493 bp, Glycine max
  unsure (1)..(493): unsure at all n locations
ctcggaggtccgattcaggcgcataatatatctagacgcttgattttgaacaatggaagctcttgagcaattcatatggtcataacttttcactctgaggtcggattcaggcgcattgtatattgagaagctcgaaattgaacaatggaacctcttgagcaatttaaatggtcataactnttcactaggaggtccgattcaggcgcataatatatcgagacgctcgaaattgaacaatggaacctctcgagcaatttatatggtcataacttttcactcggaggtccgatccaggcgaataatatatcgagacactcgaaattgaacaatggaagctctcgagcaattcaaatggtcataacttttcactctgaggtccgattcacgcgcatagtatatcgagacgctcgacattgaacaacggaagctctccagtaactcatatggtcataactnttaactcggacgtcggattgacgcacagtatatatcg

SEQ ID NO: 65390 - DNA, 472 bp, Glycine max
  unsure (1)..(472): unsure at all n locations
cccaactttgaagctcatgcttattttatactcatgactaggaacccaaagtgtggttttagaattagaaaagcatgtaaatacggacttgtttgtaagaacttgngctgccccatgattggtactttgcacctaagtaacgtgggaaatgcttttcaatggtgtgtaaatatgtgtgtaaatattaggggcataaaatctctcgccaagtatgaataaattgtttcctaaatgaatgtatgatagcatggaatgcccttttgaatgcaaatgtgtgcaggatgtaattagctttccgatatgcatataaataaatatgagtgatacaataaaaatttgtgcggtgtacttcaaatgtatgtaagtagtttgtgatagcaaaatgttatgatgtaaatacgtgcaaagttgacgcacacttgagcatgaaggtgttttcttttagatgatatggtgatgcaattgatatgtg

SEQ ID NO: 65391 - DNA, 277 bp, Glycine max
ttatgatagccggcgatgatcccattactggttcccctaagctctctggcctttctttacgccgcattccatggcttgggaacttcttggagtaccctcgccgtgtggtcactaaaaccccgtgcgatgaaaggcgtgatgctttcgtctaatggcgctcctctcatggggtaaccaagcttgtttatggcgagaaccagattataattaatacaactccttgttcccatcaagggaacatttggacatccttcgcatgaagatagaatctcgattc

SEQ ID NO: 65392 - DNA, 459 bp, Glycine max
  unsure (1)..(459): unsure at all n locations
agcttctttgggaccttgaacaggcaactaactcttctttcataaccatgctatgtgctcgcgactggtccctttcttcccttcgcaacttgagttcattattgctaccccatagagctccgcgaaatttgttccggccatactcttccttgcgagccctcttggtctcttgttcaagggctcttgcagtaattgcattctcttcccgtaacccggcacactccttccgaacgtgtgtagcagccaacttgaacttctccttggcgaagtttgcctttcctaactcgctcttgagagcttggacttcttcgtactcttccggtgcttcaaaattctctgtgctgacgactnttaacttggcgagccaatctaaacctcgtatgcgaactttcagccattcgtggtacccaccaatgatgccattacgaatgcctctaagctcttgatctctncttaacg

SEQ ID NO: 65393 - DNA, 456 bp, Glycine max
  unsure (1)..(456): unsure at all n locations
ctctggnctctggctgaaactgcatggactgctttagtttttgtctcacaagatctctgaaggaaggttgtggaggggtcttaactgttggctatttctggggctgntgtttgtgntggattggtggaggaatgtatggtctacttgggccagcagcattttggaaggaaggagtangctgctgttgttgctgttgagggctagaccatctgagattagggtgattcctccatccagggttgtatctgttgctggagaggtcataattgttctgctgtggttgattntgctgctgaggttgaggaggtctattgtaaatgtttgcagcataagctccgggctgctcaattgctccaggatgctacatggaagggcaaaggtctgtatggtggtcatcagaggagcacaaaccacatacccttgcgacaggtacatatttttgattcaaggccagct

SEQ ID NO: 65394 - DNA, 409 bp, Glycine max
  unsure (1)..(409): unsure at all n locations
cctacccacgctgatgtgaggaggagtgccctacaaagaaagggtangagcatgggccagcggcaaggatcgtaagtaaaaagaactcccgtatgtgacctcaacgagagttttgtaagtgcgggctggatgtgtgaagggaagatcaccatgatccgcgatgaagttccccaaaagaaatcatactggttgtggtcctgccctcttgagttcaagttgggaaattagcaaattatcgaacaactcggagttntcgtggcaaacataatggtaattgttagtcttaaccctatagctaggcctangagttatagttttttctttctgtatagggctggtcttttgctatcatatatataaaaatgatctctcttaaattgttcgtgcacttccatcgattctcattcat

SEQ ID NO: 65395 - DNA, 427 bp, Glycine max
  unsure (1)..(427): unsure at all n locations
atattattactagctgttgttgagaatacggattagtgtttaatttctgattatatatggcattattggttctcgtgctctctggtttattttatctgtgacccaaaatcattgtaggtgtggggaagagttgtctacttatgaggttttctgatggctcattcacaacaagttntatcaccaccattgggttagtatattatgtgtagacaccttttgttatcgcttgtgaaaaatgctgcagctgtttcttgtcttgtttcaagattcttacatccatatatgctctttccactcactatngactatattgtctatagcgcccttgtttctcttttagtgttcttttagaagcatagcaatattggacttaatgtctaaagctcatttagtgaagacatacgttatttgtataccagattatata

SEQ ID NO: 65396 - DNA, 455 bp, Glycine max
  unsure (1)..(455): unsure at all n locations
ctgcagctagcagcattaattccagtttactttttatttttgatgaacttgctaagccggcatgctgcgctaagcgagttagtttagttaggtctgagtctttgaggctcttggtattctgtttgtggctaagcgagccacactcgctaagccaccaagcctttgaatgtcaaataaacctgggctaaacgggtcagtctcgctaagcccaaggcaatntaatgttctgaaaaattgttcatgcgctaagcgagtcgtactcgctaagtgcaatttcttttctgtttttgaataaggcttagtgagcctgctcgctaagccaattaagttccagtgctcaagttaggctaagcgcccactggtgctaagcctgtatagtgtgtcgcgctaagcgagcctatctcgctaagcacaattaactctttgttggagaataaagcttaatgagccatgct

SEQ ID NO: 65397 - DNA, 507 bp, Glycine max
  unsure (1)..(507): unsure at all n locations
ctaagctgtgcttgtttatntanattcctaggatcatgagcaactaggtgtgttctctatgactngagaaacaaaaagtgatcaaataacaagcagagatttaaaaggtactaggttgcctcctagtagcgcttctttaacgtcttgagctggacgcatgatggcttgtcggtcacagacctagtactttgcttacctttgactttgggacttggtcgcctattggtcggccgtgggtcgtaagcaacgctctaacctttntgtggatgagctgaggtgaactctataggtgatggcggtgcatctgttgcccgctgctggccatccctaggctgctgtggtgtttcgccctacgcttgcctgnggacgcagtacttcttgatgaaagctcgattagtagggggcttgatgcccttgctggaggtgacaggtacttcgtagaactgacaaagacccgtaattagagcttggacactccaagacccctgtggacttcttcgagtcact

SEQ ID NO: 65398 - DNA, 492 bp, Glycine max
  unsure (1)..(492): unsure at all n locations
catgcgagcttaccagctgtaaagggaggaggctggcctctattgtatgtttttacctanagaagacaaacattggagacaatcaaaacttagacatcaaaatgtcttatataaaataccaaaatgtagtagtctactaacataagcataccaaatatactttattgaaacacttctacaaggtggataggaagcaaagcccacataatatgaagaaataaatatctcactatcttgcaaatccaaacatgtaaagaccataacatgaattattaacatcaagtattctaggatgtatgccttgcataaataaatacatatagtacttatattacatgcatataaatgtccaatggcattgtatttcccaactataagtgactcatctaacgaaacctcanagggattgcgttaatagtaatgcaaaaaaggaaaatgatggagataataagctacaagtggattattactatggaatggacgcactctcat

SEQ ID NO: 65399 - DNA, 484 bp, Glycine max
  unsure (1)..(484): unsure at all n locations
ctaagctgggagaggatgcttcaatggaggataagaaagagggagagaaagttatatgatgtatcacgaaattgaaggaagaaaaagggagagaagttgaactctgagttgtgtctcataagactctcattcatcagagctacaacaagtgttacacatgtttctatttatagactaggtagcttccttgagaagctttcttgagaaaacttccttgagaagcttctttgagaaaacttccttgagaagctagatcttagctacacacacccctctaataactaagctcaccttcttgagaagcttccttgaaaagattcctaaagaagctagagcttagctacacacacctctctaatagctaagctcacctccttgagatgagaagctagaacttagctacacacgccctataatagctaagctcacccccatgacanaatacatganaatacanaanaagtccatactacaaagactactc

SEQ ID NO: 65400 - DNA, 448 bp, Glycine max
atctgggacctagccatggtagaagtcttacatagatgccattgcctcccttgcccagtattatgatcagccattgaggtgcttcacctttggggacttccagctatcacctatggtagaagaatttgatgagatcctatgatgccctccagggggaaggaaaccatacctcttttcagggttctatccctcattagctagaatctccaagatagtccaaatctcggcgcatgaattagaccacaagaagcaagtaaaaaatggggtggttggaataccgagaaaatacttggaggtagaagcaagaatcttggcaggtaaaggcgagttggtcctgttcatagatattctcgcactgctgatcttcgaaggagtcctctttccgaatgtggatgggttggtggacctagcaacgatcgacgctattctcgcctatcataaccacaag

SEQ ID NO: 65401 - DNA, 455 bp, Glycine max
  unsure (1)..(455): unsure at all n locations
atccttgagtcacctgcggcatgcaagcttcatattnggatacaagagtgtgcttttctttttcttcttacatccgnagtgccttcatgagtgacttcaagcattntccatatctcctttacacttttgcaccttgcaatatgaaagaattcatcaaaagataaaccagaagttaaaatgctcttagctntttgatcatcttgcacttttcttttctcgtcatctttcatctcatcccatnttttaggaactagttcatcattgacctctntagttggtataaatggctctttaacaatagcattccatgcattgagatcaagtgactgaataaatattttcattctcttataccaaaatgaaaaatgttctccctcaacaatggtggtcgattgagagaagcatcctctttgaaagtgatgtgttagagcctgttaggtgtattcataagttag

SEQ ID NO: 65402 - DNA, 470 bp, Glycine max
atcgattacactgagttggtaatcgattaccagtgattgtttctgaataaaatcaaaagatgtaactcttcaaatagtttttgactttttcaaattggtttttaagtttttctaaaagtcataactcttctaatggctgtcttgaccagaaatgaagagtctataaaagcaaggctttgttttgcatttcaataatcttgaatacttttccaatcaatctcttacaatcctttacaagccttgaatctctttgaacttcttcttcttctttgtaccaaaagctttctaaagttgtctggttttctaaaccttgaaaacttgtgctattcatcttttcattctcttctccctttgccaaaaagaattcgccaaggactaaccgcctgaattctttttgtgtctctattctccttttccaaaagaacaaaggactaaccgcctgaattcttttgtgtctcccttctcccttg

SEQ ID NO: 65403 - DNA, 419 bp, Glycine max
ctcttgaccttgacttgatagaacctccttttaagtgaaggcatttgacttgatcccatgttttactaaagtgaacaaaaatcggtgcgaattaaaactccgacatctatcatgggtggaatggatgaatgcatgaagaaatgcatatgacatagatgcaatttatgaatactggagcctgagaaattgtctccgtatttaagaaggtggcacggaccctacgatggtttgccaaagagaggggatcaaaatagaatccgtgcgtgatgaatatgcgaatggcgcaacacgggaatgcacagtatgacaatattcacataatataagcataagggtacgtgacacttatgcatggcagtgtgaaaaatggacgcaacgtgttcgctcatgccctatcaagggacctattggaagagcta

SEQ ID NO: 65404 - DNA, 329 bp, Glycine max
  unsure (1)..(329): unsure at all n locations
gtcacctgcggcatgcaagcttctgatatttctccagatatcgttttcatatnctttgaatcngagaaggcaccttgtttacatgcactgaatatattagagctgcccacaacaatgctagctgaatttttcctatcaccgttcttcacactcctcctactttagaaatcaacggacgttctataggtgccaatgggagttgcaaactcactcctaatacactcaattccggttgatgtgctcaaaaaggaggattgcctactcgatatccacatttttcttgcgatgaaacatgactgtggggatgacgactacctttaccttgtatc

SEQ ID NO: 65405 - DNA, 464 bp, Glycine max
  unsure (1)..(464): unsure at all n locations
ctaagctctnacaatctggatccttttctgcatctatggcttacttatttctatataggtgcctcccctgcaagagagtcaaaataatgagttattatagagatacaagtcagatcttggccatcatattttagtttattatattagttggatatcttattctctgctcttgtacttcatcactttataccgccaataatatttattggtataaaaaaaaattgagtaaattgcaatatgtacacctcaatttatgcaaaagaagaaagatacactgctattttcaaatactgcagccacatttgagagctaaatgcttctgtcaatattttttgcagttctctcacgatattaaaagaaacaatggtttntccaaaataagctaatccaaacacgctcataaaagttaattaacattagaagaattcacacttttcanacatatgactntatattcaatcatg

SEQ ID NO: 65406 - DNA, 425 bp, Glycine max
  unsure (1)..(425): unsure at all n locations
agctntataacctgagtcactctcattctctttctttgtagtcaccaggtgagtgaacatcatcccctcaatccgtgtttcagaacaaacttggtgtttaacaatagtcacgagagttaatttttgtcagaaaaatattaagatcaattcttaattgttttttatcagcgaaagaattaaatttatgaatgtttttctttttttatcactaactcaatcttataattttaataagagtaaaattaattaaccttatcttaaccaaaatccagttaggcaataaagttgcacaaaaaaactaacatatactntacaacatgcatgtactgtgtggcaaagcagttggctatggcaaaaagagttgttcctcccgtttcattgtgccgacagtgccgtcgtaagcataagaaaaacgtatttttctg

SEQ ID NO: 65407 - DNA, 316 bp, Glycine max
  unsure (1)..(316): unsure at all n locations
ggtcttatgataataaagtagagaatgctttttattctaaaatgaatcaaatcattataggtctaactttcatttgtgaaatgtcgacaaaatgttaaacaactaagaagaaaattaaagttagactcagacctcaaatttgcaaaagaaagattcgtaagaattgagcgttttgaagacgcaatatgcggcagtaccacaacacgaaaaagttagcatttaccatcagnaattgttattagcttttgaacatctgattcgggtaatatacataggcaccacaggaagcaggattctattacaaaagagatatcta

SEQ ID NO: 65408 - DNA, 410 bp, Glycine max
  unsure (1)..(410): unsure at all n locations
ttagagacacctgcggcatgcaagctggagatgaggaagnngagattggttatacttcnctgcttnatncatggaccacagagtggtacctggagatatgtcgcggtggtcaggagaccttgtggacgtcaggtggggtgctattgcccaaaaccaagcttgaccaatcccgacccaacccgggcatagtcagtcagtgagaacctgtgatgtacctaaacaggcgagcttctgggcggtcacagataaaaggaacaaagaccaccaagcaaggaggcttgtggtggctggccagctgtgaatcttgtgtgacatatgggttatggtctctggtaatccattaccacgggtgggtaatcgattacaatggttaaaaatgatgacaggaggctaagatggtctcttggaat

SEQ ID NO: 65409 - DNA, 472 bp, Glycine max
  unsure (1)..(472): unsure at all n locations
cgagttacatgtagaagataatatgataggaatatttataatangtattaggctcaacctcaggtggacattgaatttctcacatgcaatattcgcgtagagaatagagacgagacgattaanatatggagtcatacactcactttatttcttcagtaacaaacaaatattgatgggtattattacattgtaagacaatacagaggtaaacaaagtatcaactacaagttgtaattatcaagccccagatccctcaacgcatctgtagcagcattcttacaggtgcgatgtgattgctttgctttgcttatgtatttctcaattccattattaagcagaatatgtctggtcaatagaaaaagtgtaagaaggtaaccataatgagcacacttggcttataataaaatattactacactgcatgactaccaaactacaaatcgagaagaacggaatgaatgccagcacctatg

SEQ ID NO: 65410 - DNA, 441 bp, Glycine max
  unsure (1)..(441): unsure at all n locations
agctntacatcgttcattngtcannatctttaatgttaattttgttatgcaaattatcgagataaaacttcaattctgattggaaacagtacaaacaataactaaaacactatctaagttttctcctttctggatataaaatcaatttggaggctgctaatgaatgcttttcagttccttagatcatcatggacatgatatttgaatctcttccacattcattcagagagcaacatgcatataatgctagtgttttacttctgcatttatccatgaacttctagctgttntggcgcaggttacagagagaggaagccaaaatcatcgcatgggagaatntgcagaaagcaaaggctgaaactgcaatacggaaactngaggtntttctattcatagtatagtgtatttcttatatcatgtatgtgtggggtctaacacaat

SEQ ID NO: 65411 - DNA, 444 bp, Glycine max
  unsure (1)..(444): unsure at all n locations
gtgtattaatgcangaaaanaacgttcttatttaattaatggaatactgacaaaaagcatgcgctactccttgatcttatatatttatataaactaaacctatatgaaattattgagtggtgtctggaagcaaacattaactattccagtgtacgtggaacatgagggcaggggataattntctttattagtcaaggtccaccttaagtagatattaaataaatagatataaaattatttaaataaatctaaccactaagctaacgtagattgctaggttnttttttttttgaaaggaacgtagattattagagttaatcacttctaatcgcagaanatagaaattgagaatgagaattacaagatagtagtaaatttaatattttctttcgggccaccatacgaattttttaaaccaccacgcgaattatcacggctgaaact

SEQ ID NO: 65412 - DNA, 386 bp, Glycine max
  unsure (1)..(386): unsure at all n locations
atggcttattccctagaggatggcgcctcctctcacctcttctcctttgtcttccgctgcatctccatggaggaaaatcaccattaaaggacctcattgaagctcaaagatccagcctccatagaagccccacaagcaagcttccatcaactacgttcactaaagaaagggttgtgatgaatggcttaagtcngtgcccattgaccttaaaagctctgattgcggagacgcttttgatctcaactgtaccataaggaaaaacattagtaacaacaaaaggaccagtccacttagacctcaacttaccactcatgagtccaagcctagaattatacaataacactgttagcccaaccatgatgtgcttcttaattatcaagctatca

SEQ ID NO: 65413 - DNA, 476 bp, Glycine max
ctctccactaagttgcctgatgcctgacatgtctattctgatgtgttgtgttcctagatgcagggaagaatttctccatgaacaccctcttaaggtcattccagctgaaaatggacctaggagcaaggtagtatagccaatcttttgtcactccctctagagaatgaggaaaatcctttagaaagatatgatcttcctggacattagggggcttcatggtggaacaaaaaatatggaactccttaagatgcttataaggatcttcacctgcaagaccacgaaacttgtgcagcaaatgtattagtccagtcttgagaacatatggaacaccctcatcaggatattgaatgcacaagctttcataagtgaaatcaagtgcatccatctccctaagagtcctttcacgaggtggaggttgagccatgttctcagtatgaaaattagtagcggaatgtcaaaatccaatattcagatca

SEQ ID NO: 65414 - DNA, 344 bp, Glycine max
  unsure (1)..(344): unsure at all n locations
caggcagagcaaccggtttatttttcattcatgcacatcgcgggatgcaacaatngtggngcgggctatgagtcacgcatgcgcaaggtacataatgatgtacccaaagaagtcaactatatgaccaatccacaccatcaaggatcccatcaaggaggacctccatgatacaaacaggggggaatctccactaagggccacggttggagaccccaccccatgaagaacatcaacagagatcaaggagcttcatctaatcggcctctcaatcaaaggcctgatgtatatgagaaaaccactcagctacaagacacattgaatcangttatgtaggttacactatc

SEQ ID NO: 65415 - DNA, 317 bp, Glycine max
  unsure (1)..(317): unsure at all n locations
atcgattaccagagcagattttcataanatattatcaatagtcacatctttttatgtgggtcttgaatggctatcaaaggcctatatatatgtgactcgagacaccaatttgctaagagttctttagaacaaaaaggtcttatcctcttaaaaaagaaaatcattttatcctcttacaaattccttggccaaattacttgtgattcaataaggaattatttaaattctcaaattgttcaatctatctctttcaagagagatttcttcttttcttcttcttcattctgaaaagggattaagagaccgatggtctctta

SEQ ID NO: 65416 - DNA, 504 bp, Glycine max
  unsure (1)..(504): unsure at all n locations
atcctctcagtcacctgaggcatgcangctntagcctntaggtngttcaccatgttgctattgttgctccctctatctctagcataaaattngncaataagtacttgtagtttttcatgaggaaaaatacttgtacttgggggcatgtcacttggtttgaaactttcttgagactaaggttgatcaccatggttaggaagttgcttgtgcacgacagggtgacctcgacactcgttgcctagttttcctaagtgaaagtgtcgtgtggacacacttangctatttcttgacaaatgataccgcattgtcattgagatttgaggccaggtgcatgcatcatactgagcatgattaattggaatgttggaaaagttgatgaatagttattaagtgtatgttgtattgatcgataattatgtatgagcatgatactctgtatggcttctctttctaattatnggtatntgatacatcgtggtttcttttgtaataaaatcacccttg

SEQ ID NO: 65417 - DNA, 463 bp, Glycine max
  unsure (1)..(463): unsure at all n locations
agctggaagatgntttaaagaaattttgtgttttacatgctctcactcccttgagtggcatttttattggttgttatcttggntgttgcatcttagtacttttgatatttgtattgcatcatgcatcatcatggttagtgtcaagaaagggcaaaaactctctatttaaattgattacaacaagttgtctgaagcctgtagagttgagtctcgtatcggtttaatcgattacaactttcttcaaaatgattatactattgtttgagacaatgacttgattattcaggagtctctactttaatcaattacttagattatctaatcaattacattgttcttgagtttttcccagatgttgggaaaaacactttaatcgattactttgataatctaatccaatactntattngaataatnngatactttgtagaattaaccgatacaagtgttataactattttct

SEQ ID NO: 65418 - DNA, 379 bp, Glycine max
  unsure (1)..(379): unsure at all n locations
aaactccgccataagctaagntgataccataaacccttacatttattttgtttcaccagatatggacggaatgatcaccatccattagaatatctcaacctgcacatggagatccaatattgaacatttcacacatttatatctaaaactggcggtttgctgatgagaatatcaccaaaatgaacatactcgaacagccaactgagaagaacattattggagcaaagggatatgaagcattcattacatacctcgatcacgcgatttttgtgagacacattatatccagtaaccttaattactgcacgctcctttataaatccaatggctggctttgtcttcctatagccgataatataccctatacatcagttcgaac

SEQ ID NO: 65419 - DNA, 403 bp, Glycine max
  unsure (1)..(403): unsure at all n locations
acagtatgcacccaactatccggtagtgatgacaatataatcaatgccttcacctcatactcaaatgtaatctgcactaattccaattgggcaataataatattaaattcattaatatgatcagttacagagataccttctcccatcttgagggtgaacaatcggcgcatcaagtattacttgttggctgncgacggcttctcgtacatatctgataacgccttcattaagcctgcattagtcttctcgtttacgatgatgaacgcgacattcttggctaatgtcaatctgatcacgccaagagcctgtcgatcccaacaagtccattcttcttgcttcatgtcgtctggcttaaccactgataagggctgatagaacttcttctaatatagataattctcta

SEQ ID NO: 65420 - DNA, 494 bp, Glycine max
  unsure (1)..(494): unsure at all n locations
ctggtcatcaatattgagagcctatnntaaatttgaaattttttatcttgaacaaagtttgtttaagatgcatgcttaatgggtgggttatggnggtgtgagcttaaacaaactaacttacctgtgtactcaggtctattatgagctcgcttttttaattgagttaggctcaaactcatattctaatattttcctccacaaaaaaatccaccaaattaatccaattaagtttaatttaatacttaaaagaaataaacttgtatacaaaatgattattttttatttgatcaaacagtgaatcaatgatcactattatgcgatcaacttaattacactgatgaacaataaacttgacctattagtattaggtttaaatatctttttaatccttattatntaatattntntaattttggtcttgcanacattatttttttggctttataaaaatatatttgtttattnttcgtccttaaatactttaaataacactt

SEQ ID NO: 65421 - DNA, 438 bp, Glycine max
  unsure (1)..(438): unsure at all n locations
agcttatcattaatataaatcaaaatggttgattatgccatgatctatatctttcaatttttgtatgattacttgtatgatatgtctaaaagtatttgattgattgctcatgttttttcaaaactattatattctattttcaaataaaattattttgatatattaaaactttctatgttaaacaaaaattcatcttggtaagtgttgatatnntttttttacacatagctcttaanaaaagtgtctggtaatcgattaccttcacatgtaatcgactacagatagttaggctaagtgtaatcgattataacattcctgtaattgattatagagtgtctatatctataaatttgaaatttcagacaccgtgagaacgcgatttctacagcatgcgacctttaaatccctaaacttcataactcgattctctctcaattc

SEQ ID NO: 65422 - DNA, 495 bp, Glycine max
  unsure (1)..(495): unsure at all n locations
tctatatatggtttataacaagtctcccgtcatttgtatcttaagtttcatgggatcatttcttcatttggttntgatgaanaccccatgaatcaatgcatataccacaaggtcagtgggagtaaaatatgtttcttgttttatatgtagaagatattctagttgcggccaatgatcggggtttgctacatgaagtgaaacaatttctctcttaagaattttgacatgaaggatataggtgatgcatcttatgccattggcattaagattcatagagatagacctcgaggtattttaggtctatcacatgaaaaacattccttatgcttcagttgttggaggcctcatgtatgctcaagtgtgcacaatgcttgacattgctctttgcagtggaatgttangaagatatcattagagtaatccaagtatcgaccattggagagctacacagagagtcatgaggtaccttcaagggaccaaagaatacatgcttat

SEQ ID NO: 65423 - DNA, 281 bp, Glycine max
attttcttctgtatgaattagaaaattaagacaaaaacaaaattacatcatctctctcggtaatcctgtgcgatcaggagttggaggcatcatcagacactccattggtgactggtgcacacgatttccagggtattgtggtgttattattattttgaatgcagaatttcacggcatctattatgcgataaatcttggtctgtcctgtggtttcaccagcatccatggacagattcagattgcgatgagaggggggcatataaaaaatcattcaacaatta

SEQ ID NO: 65424 - DNA, 402 bp, Glycine max
  unsure (1)..(402): unsure at all n locations
ctcaagctctgaaggcaagataagtcaagacctaacaataacaacttgtccataatctattagccacagctgacttggacaaatgtagaatatagacggactcagcctgacaccagctagcacaatatcgatcgaatttgacatcattaccgtcgccactagatggtgatgtgatgtggattacgggacatattggcaaaacattaagaactctatggacgaactcccgagagttccattngtattccatagagtttcgatagtgtcgacaattccgtgtggaaagagagtggttatgaagaaaatgatgtttcggagactgaagttccaactcgataatatcagtagtgactcactatactggacaaaactagggatgatggctgtgcaccaccatcctga

SEQ ID NO: 65425 - DNA, 402 bp, Glycine max
  unsure (1)..(402): unsure at all n locations
agctntgagaactacgcctcgctcgcacatatagtgaggtttttagtgagcttaaacgaattacttacaaagcaagcatcaaattcaagtgaacattattatcactagatctcaaacaaaaagcccaaacgagatacgccgatagtgctacatttgctcgaatacaaaactgatggcgctggattataccgcttgatcacagcagcaagataccaacccgaagtcccttgtaacatatggtagaaaaatgtgatgaaagggaagcaattggtagtcatttacacaaatgaatattcaacaccgattgcagccatcttcgaacaaatagcaagatactgcatagggcatgcatataaattggaagtattagaaggtgttcgttgctccttctgctaacatcac

SEQ ID NO: 65426 - DNA, 496 bp, Glycine max
  unsure (1)..(496): unsure at all n locations
agtggaagatatcccttgtgtgcgaaggcaatntacgttgtcatgccaanatttgaagcanaaagcaagctgggcagggtgtttgtctcagattggaaggtgtttaccaaaatcccaaggaggcttgggagttagggatttggaattgtttaatatggcactgccagggaagtggagatggaacatgcttcaggaggatgattctcttangaatggaattctggtttaaaattggatgtgggagtagggtgaatttctggactgatgaatgggtggngggctggagccgctagcagaaaatntattgcgcctttntgtcttgtctgaacaacaaaactgcaaagtagcgcagatgggctttatggngggatcttcttgngaatgggcttttgttnggagaagaaatttcttcangttgaactgaataattatagtattcngccaagtgaacaggatangcggatgtgggtggctgtgagtgaaaatctatacactg

SEQ ID NO: 65427 - DNA, 354 bp, Glycine max
agcttgtgaagagtgaagatgatgtctctattgttgtaactacgtatacggagatagcgggtagcctgaagtttatctgtcacaccacgccacaaatggatttcaatgttgaggtaggtccacaggctgatgagtgatcctctacaaccacacttgatcgctgtcaaaggaatcatgatgtatatgagaggaacactcatatctgggctcttgttttttagtacactaatggagatgatagcctacatcttgtaaccgattctgatattgactggtgcggtgatctacttcacagattgagcaccatgtgacatgttctcctgatgtgagagtgtctcatatcctgtagttcta

SEQ ID NO: 65428 - DNA, 459 bp, Glycine max
  unsure (1)..(459): unsure at all n locations
ctatgatactcagctgaaggtaagaaagctgaagatgtttgacttttacatgcttaactcccttgagtggcattcgtattggttgttatcttgtatgtttcatcttagtacatatgatatctatcttgcatcattcatcatcatagttagtgtgaagaaaaaagtttctaagtaagaaaagtttcttcaagaggcaaaaactctgttttaagcgattacaagtttatcgtaatcgattacaacaagctgtttgaagcttaaagagttgagtctcgtatcgatttaatcaattaacgatatcttataatttattgctctattgtttgagacaatgactgacttattcacgagtctttgctctaatcgattaccaagtggtataatcgattacttctctttcgtttagttgttcaaaagtgaacaacaacactntaatcgagtactctgagtatctaatcg

SEQ ID NO: 65429 - DNA, 412 bp, Glycine max
  unsure (1)..(412): unsure at all n locations
ggtcnngaaggcagtcctgtaagcctatattgcatcatccaacttgcttgaccaatccatccgagctgaagccacaattttctccaagatcttcttaagttccctgttggaaactctcgcttgaccattcgcttgtgggtgatatggtgaggctactttgagtgggacatgaatactggnctaacacccttttgtagttggctgtcgcccaagtgacagcccgttcattgattaggaccctaggcaccccacagcgagcacgaatattgtttcttaagaaccttactacaactttggcctcattcttttgggcaacccactgcttcactcacttgcagatgaatccagagccatacgatatattattgcacaagatgaggagaggcctacaagtaattcccagcggcaaaac

SEQ ID NO: 65430 - DNA, 215 bp, Glycine max
  unsure (1)..(215): unsure at all n locations
gacagcgccttgtatcagaagcttatttaggtattttcnatggacgaagagagcgagagagagggggggaggcgcgggaattgacagagactagggagagaagacaaactttggaatgtttcttacaagactctcatttatcaaagtgatgaccagtgctacacatgtttctatatatagcctaccacatgggaagcttcctcgacaagcaagga

SEQ ID NO: 65431 - DNA, 530 bp, Glycine max
  unsure (1)..(530): unsure at all n locations
tcccgtgatccttaagtcacctgcggcagcaagcttnnaccggaatctgctcacataatgatgtcttgtggatgttataaagccatattaaagagagcgtagagatatcagttnttgcttctataagccatacgatgtttatttaatatcaaggaatgtcatgtgcagatgtgaacctgcctacaccagatcagaaaccttcacatatggcaaatgttcatatgccaatgccctggccttacaatgtacctncatatatgtataatcttcaaaatccgcanatgccttcataccaaggatatcctatgactaatatgcagtctgttcctccttaccttgtaccaaatatgcaatggtctcctgaactgggagtgaatcaaaaatcatcagcaaccaaaagggataaatctcacaagaaaagagctgaagaatatgaagaccagcagactgagtncagtgaacctgattctgggagtgaatctgattcagatanacagaatcactccagtcattcttcgaaggatgatctg

SEQ ID NO: 65432 - DNA, 497 bp, Glycine max
  unsure (1)..(497): unsure at all n locations
tactaagcttgctacagataagttgtaagtcagcacaatgcaatgacattgttactaaggggaattanggatttttcactaatcctacaaaatctttctcttcacgttntggtaacaattaaaagttcctccaaattgtgggattttctagggaaaatatgaattacccatttagcttaaaaaaattgtctctctaaacaaagttttccttatctaaaaaaaataaaaattcaccccctctaagaatntatctctaanaaagctctctcataaacagttnttagagaataatgtttagagatagaattttttaagagacaattgtttaaaaagagtatgttttttaggaacaattgtttaaggggcaaaatggataaataaaaaatattataacaattcctcanaaatgatatgcagaannattaaacatcacatagaagagacattgtttgataccagggagacccctgatagccacttcgtaacaactgcaatat

SEQ ID NO: 65433 - DNA, 271 bp, Glycine max
  unsure (1)..(271): unsure at all n locations
tcttgaagaaacttaaacatttcttcacaaaaaccatgatgatgaatgatacttcgatgcatcacataagataacaatcaattcagatgtccttcaaaggaacgtttcaactgcacaatgtttttttctataaaaaaaacttactattagactgaaagtgtccttgacatacatcacgtatgtgaaattntatattaagccaaaatcattttataccgtcatcatatatantcaaagttgacataatataaagattttaatatattgatca

SEQ ID NO: 65434 - DNA, 482 bp, Glycine max
  unsure (1)..(482): unsure at all n locations
tcttgaagcantggctaaccttggaatgtttgntgtatgaatctagaaagcaaccttggttgattatgtcttggcatcatcaaaatcatgtattcatacattcacattctcccttttttttatgatgacaatcattatcaagtgaattcttttcgacatcatcaaaacctgcatgattcacattctccccctttttgaagatgacaaccatctgtaggttaggagtaaaaacaaaagaatatctacttgtatagtttactcccccttgattntgcaatgattgcttatatgacacagttgaagattgcatatattgcatatatcaaaaggtggctcataaacccttactatcttatcttttatctatctctccccctttgtcaacatcaaaaacaaatcatgagcagagaggagataaaccttcaacaatntataatgaattaaaagagtagagaatgccatactggtcaagtatcatttca

SEQ ID NO: 65435 - DNA, 140 bp, Glycine max
gacactcgagcaactagtaggggccgctggagtcgacgattatgtgtgaaagcgcagagtagcttagagctaaagcacacttgaactgtctgacactcaaggcgagtctgacagaatacccgaaatggcactagcaagac

SEQ ID NO: 65436 - DNA, 451 bp, Glycine max
  unsure (1)..(451): unsure at all n locations
gtcacctgcngcatgcaagcttctaatgaatcaatggatgagattagcccattctttatacggttaatggttctcttgggcttgggtgtaaaggttgtctttgggtcacgaatactatcaggtggggaaaccaaaaagctcatgtttggagggtaatggtcacatatttaatagtgtatcttcctatatgcagttggcaattgggaaagattaagtttgctagtttntgtaagtgtgatctttatgatttgtatatctgacctatacaaggttgtagcttgatacttatgacatttcttgtcttgcttacatacttaatgtgctgataaaaaaaattcctcttcttattagtgggtatcacaaagtanggttgaaacctaaactacacacgcctgattctatgttanactatgcctataaccatatctcttatgagaatgataacacacct

SEQ ID NO: 65437 - DNA, 511 bp, Glycine max
  unsure (1)..(511): unsure at all n locations
ctaagctataagtagagcctataaactactactaggcagtacttcccactattttacaaagggtagagaagtaggagcaataatacaagagagaagagattcatagtatttgattaattgtcatatcattcattagtttaaagaccccacagttgttatcccagtgcttaaatttcttgggtcctacactatttacaaattccctgtcaccccaaagatattgaatgaaagatgtaagaaaagcctggttattctgaaatggcatgggatttcatttaaaaatataaggaacaaagaatacttacggccacgggccatcaccaaggagaagaatgtcattcccttggtcaacaaatacaagctgccagtctgatctcacagggtcctctaacttaccttcaaggccgaacatacgagcaaagctcgtcagtcaatcgttttgagaaaaaagatcaatgcanaatatgtanaaatgcaataccagactntcaaagtatgtaataatatatac

SEQ ID NO: 65438 - DNA, 357 bp, Glycine max
gaaaagacagcaggaaattcctgcaataaggctccaacactacgagaaacataaatagttaactgagtagaattatcactctctctcttttgagtatcactctattcctcgggagaatcactcttctttttcatattcctttgtggagcctcactatatggattctcttgctcactctttctctcattctgactgggtcatcacatgctcctctaggggatagagggttaagagtacacgaggaagatttgactattcgtctgtagggctcttctttgttacagatcaacacacgttgcatttgtatagtccacgcgtccacaaataagcgctgagattcgaccagctgatgatata

SEQ ID NO: 65439 - DNA, 58 bp, Glycine max
ccaaacagacgagaatgcgtgtgttttaactcgatattaaagagatgctccgatgtac

SEQ ID NO: 65440 - DNA, 370 bp, Glycine max
  unsure (1)..(370): unsure at all n locations
ctaagaaaagtcaaacgacaataactagcaacgcggatgttcattgagtcccgaagagacgagacgctgggcaacgaaaatagaagctctgaacaaagtcaaccgacattaacttttgacttctatgtccgattgtgtgccgnaagatatcgagacgctcgacatacaaaacggaagctccgagacaaagcaaacgataataactataaacacggatgtccgatcgagcccaggaatataccaagacgctcataactgaaaacggaggctctaagagaagacgaacgacaagaactntggacacggatggcagagcaagacccggatgatatcgagacgctcgtaaatgacaatggaagctcagagaaaa

SEQ ID NO: 65441 - DNA, 433 bp, Glycine max
agctcctgcgtgtttagagaattctatagttagtgttgtctatgttccagagaggtttaggagcttttactgtgcgaagactggcttagaactaaccttgaagaggaagccatcctcgaagcatgagatgggtttatgagtgattgtgaggttctacaggtggacgagacatccgcactacttgtatttcttcaatacttcattactctcttatctttggtgccatgacgcttaccacatatggaaagctaaatcctctgtcggttctcccttgtacgtacttgatgtatatacatgtatatctatttaatgatattttatgtattcgttatgctatcagatcgtcattatagtgcgcttttgccatgatcacactacatgcatgctatgtatgatatataacagcggaactggctgatactataacttgtat

SEQ ID NO: 65442 - DNA, 482 bp, Glycine max
  unsure (1)..(482): unsure at all n locations
gtcctcgccttttattttcataggactcttatgttcccgcctgggcgagcttcaagaccaccaagtgccctcatttcctataaataggcgtgagggaggctgaggaaggggttggtctctttagtactaagagtattttgagagaaatcagagagaagaaaaagaataagagaaaaatgaggtcgaggcgctaccgaattgcgaccgcaatcgacttctacatcgntcttcgttcagtgttctttgttcatcattcggtttgtatttgttttaaggatttggatacagtctatgcacccttaggggtcctctntgttgctttgcgcatcttcatctcattcttctaccatcagttatcacttttcttcttgtaaagttagtttcaaccgatcattaatgtcgtanatcattctttnttaaagagaatgaaagtaatgaataanaacaagatgaaatcaacatataattgaatttctcttcat

SEQ ID NO: 65443 - DNA, 257 bp, Glycine max
aagtcaccgcagctgcagctatctctgtcctgagactcgattatgttattccaattcgaagcatgaacccaaagtgaatccctagagcgtgagtcgcatgaagtgttggcggtcattgatggcagaggtcttcttcgagaatgtgggcttccgctttagaggaagtcatcatcacttggttcataaacgaggggaggtgaggggggtttgtctttttcgccactcgaagactcacgatttgttatccgacctatacc

SEQ ID NO: 65444 - DNA, 399 bp, Glycine max
  unsure (1)..(399): unsure at all n locations
gctcatatctttgtcttgaagatcaccaatccatcacttaagctaaataaataacatacgaacaaaagaccttatgaaactaacaagggatttctcttacttgccacctccaatgattgaactgatatggacattcatattttttgtcatctagattaactgatctaaaagttgctaacacacaccacccttttggtattaagtgccctttgtatttcaacatcttataaggcttgtctcataactccaattataatatntcccatccttaaaagttcactgatgacctatatatacaagtagagcacataataagttacgtgaagactatggatcaattttacatgtccttgatgaggaaccaatagctatggtttccttactggttgagaaatggaa

SEQ ID NO: 65445 - DNA, 421 bp, Glycine max
  unsure (1)..(421): unsure at all n locations
atctctgagtcacctgcggcatgcaagcttaaatgtgctcatgggtcattctcgtaatattcgatatgactngtctgatgcagaacatgtcatttttttatcatgccttagttcgattcttattgattatttctctctaaaaaattagactctgtatattcttggttgcatttcaattttgcagatagcaagaaccaaacatcaatcttatgaggaaccttcttctaatgaagagtgaagcgaactattctaagggactaacccataaagaagcaaccttnccaaaacctcaaattcaaggacccttgagccgccaatgatattgataggttctttaacaaattatgtcgaggcaagatattatgttagcctcaagagggagggttatattgagagaaacgcataagctaaggaatatgag

SEQ ID NO: 65446 - DNA, 502 bp, Glycine max
  unsure (1)..(502): unsure at all n locations
ctaagctcgagatgatgcttaatgaaagaaaagaaagagggagagtatttattgttgtgagcacgaaattgaaggaagaaaagagggagagaagtggaactctgagttgtgtctcactagactttcattcatcaaagttacaacaagtgttacacatgcttctatttatagactaggtagcttccttgagaagctttcttgagaaaacttccttgagaagctttcttaagaaagtttctaaagaagctagagcttgactacacacacctctctaatagctaagctcacctccttgagatgagaagctagagtttagctacacccccctataatagctaagctcacccncatgacaaaatacatgagaatacaaaaaattccctactacaaagactactcanaatgcctcgaaatacaaggctaaaaccctatactactagaatggccaaaatacaaggcccanatgaaggaaaaacctattctaatatttacagagataagt

SEQ ID NO: 65447 - DNA, 352 bp, Glycine max
agctcgccgtctaccaaggacacggaagagcacttttgttttcataggcggtatgatatctctctctctctctctctgtttctctgtgcgagtgctcatctaagaaagcgccatgtctgtgtgactccagcccctgaacggacataacacaacgatctccacatctttgtcattcattcacagggcacaacttaacacgtgtatgaagtgacgacattcacacatattagcggactaacaaaacaagcattttcttcctttctctactaattacagcaaaacacaccgcacattcctttataacaacactctcattttctttatttaatacctcacatacaatttcaatcct

SEQ ID NO: 65448 - DNA, 376 bp, Glycine max
  unsure (1)..(376): unsure at all n locations
aactaagctcgtcaggtgagatccaaacttgagggatgangagtttctttgttttgttgaatgcgtcctgccaacttggtgtgagataagttgagaatctgacatgcacttgcaattgcacatgangaagagaagccatcactgattgagttaaaactaacatcaaagtaacccacttgtttgttccactagaattggtccaatgattggttcaatctgttctgagagaggtccaattcagataaccatatttcatgcggacaattttgcactctacctttaagtgtgttgttggacaaatagagcgatttccaacttgtgacttttcccaataattttggaaattcagttaacccgtagaagatatgcccaactg

SEQ ID NO: 65449 - DNA, 427 bp, Glycine max
caaaaactagcctgagttggctaccgcaaaggactttgtttctttttgaggcacatctgatcatcatactttgattaatgccacataaactacggccaatgaacagggtgagaatgatggttatacccatgttgagactgccattcctatacagccaagtttctcaccaacccaacaatgtcgttactcaatcaataaccaaccttctccttacccaccgcccagttatccacaaaggccatcctttatacaaccacaaagattgtctaccgcacttacagtgacgaacatcacctttagcacaatccaaaaacaccaaccaagagatgaatcttgcaacgagaaagtctgccaaattaaccccaattccggtgtgctatgctgacttgctcccatatctacttgataattcaatggtagccataac

SEQ ID NO: 65450 - DNA, 86 bp, Glycine max
tcatatacttacactactgcaagactctaagtgttattgaactccactcaactttaaagaaggggatatgatataacatatgcaac

SEQ ID NO: 65451 - DNA, 426 bp, Glycine max
  unsure (1)..(426): unsure at all n locations
atgatgtttttacttattaaacattattgtaaagtaatattattaatgggttttaaccatcatataattaatcactacaaaatataataaaatatttaaaaattaatgccacaacatcagttaacaattgacgatgaaaactaaaaatattaatgagataaaagttcagggactaaaactacgtaaatttttctttgcaaaatctaaaaaatcaataanaaaatttaagaactaaataaataaaacatcaatcctattctcatgcttcaatgagcanacacagttaatcatatggtgaatttgttagctggagcttataataaatacaacgtggcggtctctcgagctgatcatcgtttgacaaggattttgacataacgggttcatataatcaagtttttgcataacgggttgaaccacaatatg

SEQ ID NO: 65452 - DNA, 522 bp, Glycine max
  unsure (1)..(522): unsure at all n locations
gatctctgagtcacctgcggcatgcaagctnggaatngagccttatgtcgtcctcgctttctttaagtaagtatgtcntaatggaggatggtagcttaagtttgtgatctgattcattggatttattttttgtttaatttaattntataaaatcagcatagtcacataatttaaagttgtcctttcttctctaaaactgcataatctaatgttgctaaatttgttatgcgaatacatatgaagtcttgaatcatttattcatctgctgcttttgtaggctgagggtgcagcaatgtctggcatttcaccttgagttgctaaatgaagcagaagtggcagcggttgcagaagagaaagaaactcattcantttgaaatgatccttcttangtaatgtatgtgtgagctnntggagaaaaatacagatttttactctcttactctnngatctgtttttttattttatgctaagagcacaaatactttataatagtacttttttgtgtggacaaatgtcaaacac

SEQ ID NO: 65453 - DNA, 436 bp, Glycine max
  unsure (1)..(436): unsure at all n locations
gttcttatctcatacctagtgatgctctttagctgaaagtaagcatgacaccttttgagtggataccgaccttacctacaccagttatcagacctttctgattcccttcgaaagtgaccaccccaccagacataaggcttanggatcaaaacatagaactttttcctatcatgtgttgtgagcatccattgtccangtaccatgactagtgtttctttcttgctatcaaggaggtttacaaaaggaattatcttactcttagatacctatatcttnttgggtcctttntccttggtagctngtgaatgctggtaagcactggatggaccatttgatgggttaccctttatgggaggtccttgcacttatgagttccatgacccacttttncacaaaagtaacaaacaatgacttcttcactatgtacaatcttttt

SEQ ID NO: 65454 - DNA, 405 bp, Glycine max
  unsure (1)..(405): unsure at all n locations
agcttaacagcaataaanagcatcanagtaattatatatttactcacattaactaccacaagcacgattgacagtgaaaaatcataagatatgatttaatgcctaattgcacacctgacatccagtagatcaactctaactcatgatgataagaaaggaaacatgcacaacaacaatttcattaccttcctctaatgaaagctgaatngatctcttctctaactcaacagcatgcttgctaagttcaactgaggacagggagcgaagcactgccaaaggatgagatatcagctatataaaatatcaagaacttcataagaaagcatntgagggattattttaaggttcctggacatactgtggatatattcttcttgatctgagtggtccatatactcaaaaaca

SEQ ID NO: 65455 - DNA, 394 bp, Glycine max
  unsure (1)..(394): unsure at all n locations
gtgggggggctagttgggttgggatgggatgtggacccacttgctcatgtctggaattntgntagcaaaatgaagaatcacagcaagcttagattgagaataacataatccttagtaacaatttatctcatgtacaatntgaattatcctacaaccaggaaccagaatnctgatatttcttttctaacctcagataactctntttccccgtccttcaagaaacttttaatcaacaaaaaaaagaagctagagtttcagaattctggcttcattngatcaagagcacanactgccttagaatctgaatcttgcattagctntgctcgaattagcaactanagcacgttcagcattcaatntaaagctttcatgcagcagangatagcactcgatg

SEQ ID NO: 65456 - DNA, 464 bp, Glycine max
  unsure (1)..(464): unsure at all n locations
ttaagcaccgcggctgcagctaacctnaatccttataccatctagtgttattatagatgaagaaagggcaaaaggttctgagagcgagaatctaacattgattgttagaaagtttaagtttctaaagaacaagaatctcagaggaagatccatccaacataagaagaactttaagaagaatgactcaacctcctctaattgtacttantttgagcgtggcacatcgggccacataaaatctgaatgctccattagtattataatgtcgattcaaatttgagtcgatcttaagattgcattctaacattagttcaaattagaatcgatgttgaatgggtttcttccttatactaagattaaagcagttattggtgtataactttaactagtattcatcaaatagaaaattaacattctaatggcacacatgacttactaatttagtggaataaccttaaatagta

SEQ ID NO: 65457 - DNA, 241 bp, Glycine max
  unsure (1)..(241): unsure at all n locations
gagaagagaagctagaacttaactacacacccccctatataactaagctcaccccatgaccaaaaacatgaaaataccaaaaaaaaagtccttactaccaagactaactcatagagtggcccaaatacaaggcccagaccaaggaaaaacctatntataatattacaaaaataatcgggctcatacttagcccatgtgatgcaatcntaccccgcagggcattggataaaaaattcaagta

SEQ ID NO: 65458 - DNA, 514 bp, Glycine max
  unsure (1)..(514): unsure at all n locations
agtcacctgcggcatgcaagcttatgagtatgtgttaagtgtgaatagttgttcaggtatgcagataagttcattactatgtaaagtaggaatgtaactatgtaaggtgccttgttctgtcaccattccctcgccactttcaatcatacaaagattattgacgacaatatctagacaatgttggttcactttttctttttatatagtcaacttgattccactataataagatatacttcgaccctagaagcatttgcatttgtatctcctatactaagtgcatgattgaatttaaagttagaataattcaaaagtaattttactttaaaagcaacaaattttttcttcttattttatatttttatgcactggaacacatatatttgcattgaaatttgcaaaatacttttataactntaaatcaaacatattttaagtctaatcgtcaaacaaaacatttcagtacgaaagattanttccttgataataanatatgtgacatgctatatgctca

SEQ ID NO: 65459 - DNA, 384 bp, Glycine max
ctctcgctttatcaagccaattcttttgtctttatcgaacctgcatgatttatattctccccctttttgatgatgaccaccacctatagggtaggagccaccaccaagaaaaaatatctatttacatatagtttactcccccttggttttgcaatgattgcttatatgagacaattgaagatttcatatttttttcatatataaaaaagtgtctcataaagaatagataatttttccttactattttatcttttatctttctctccccctttgtcaacatcataaacaaatcatgaatagagaggagaaaaatgttgccacttggtgcaatgtctaagagtcaagtggtaccaaaaggcattaaaacaatcattcaatattaat

SEQ ID NO: 65460 - DNA, 443 bp, Glycine max
  unsure (1)..(443): unsure at all n locations
agctttaccatanaccatttggaacgaagacagttctatattggtctngaaggtagtcctgtaagcctatagtgcatcatccaacttgcttgaccaatccatccgagttgaagccacaattttctccaagatcttcttaagatccctgttggaaacttcagcttgaccatttgtttgtgggtgatatggtgaggctactttgtgtgtgacatgataatggcctaccactctttgtagctggctgttgcacaagtgagagcccgtatcattgattatgaccctaggcaccccacagcgagcaaaaatatttttcttcaagaacttcactactaattaggcatcattctttgtggcaaccactgcttcaacccatttgctgatgtaatccagagccataatgatatattcattgccaaaagatggaggaagaggacctacatagt

SEQ ID NO: 65461 - DNA, 339 bp, Glycine max
gacagtgcctcgtataagaagcttagagaggtttcttcttgtgtgacgatagtgatagagagggggggaggcgtgcgaattgcatgagactagggagagaaggtacactgtgaaatggttcttacaagtgtctcatttatccaagttatgacaagtgttacacacgtttctatatatagcctaccacatgggaagctttcttgagaagcaaggaagggagctctcttgtgaagctagaggaagaaaacttccttgagaagcaaggaacgtagctgccttgtgaagctagaggaagaaagctgtcttgagaagctatggtgtactcacacccctccaata

SEQ ID NO: 65462 - DNA, 420 bp, Glycine max
  unsure (1)..(420): unsure at all n locations
acctatgaaactccgcttctttacttgtatnggatgtcactttntggatggaatgttgttctgatacaaattcgcattgatataggaaggggtaacagattgttggatctaaatatgagaaatgccatgcgtcataccttaatttcgtccgaggattattatttgatgatatacaacctttgattggccgcttcgagatacttggcaccctctgttgcacaatatgtgaagtcccgagacgtgccgaanatcaaaaggaagcgggcttacgtgatccgtgaaaattgtgtaatgtgacggatatcgaaaggaggtgtttttcgcaatccgtgagttttcgtaacttcttcgaaagctaaaaaagagtaaatacataatccgtaaggattcgtaaccttgcggaaggaaaataagtatcgt

SEQ ID NO: 65463 - DNA, 449 bp, Glycine max
  unsure (1)..(449): unsure at all n locations
agctngannggaaactngatgcgctggctttctattgctaagcttgccatgaatcagaaatctgcatctgcacctgttgcaagagtttgtggtctatgttcttctatagatcaccatacggatctctgtccttctttgcagcaatctggagtcaatgagcaacctgaagcttatgctgcaaacatttataatagacctcctcagtagcaaaaccaacaacaacagaataattatgatctttcaagcaatagatacaatccacgttggaagaatcatccaaatctgagatgggcaagccctccataacaacaacagcctgtccctcctttccaaaatggtggtggtccaagcaggccatatgttccacctccaatgcagcaacaacaaagacaacaagcaactgaggccccttctacacctttgttagagggagtagtgaggcaaatgac

SEQ ID NO: 65464 - DNA, 493 bp, Glycine max
  unsure (1)..(493): unsure at all n locations
ntacataagaatttagtaatgacccactaacctagaattaatattacttaatgtcattaacctagggaattaaaagaacttaatggctgagtgtaactgaaaatgtggcaaccaaaggtcacccccaacagccaacaagtctgccaccatttggtctcccaaaaggctgatgcctangttgccaattgggcccttattacaacttgaactaaacctaactaaagcccttttagttgattaacccanaacatatttttggtcagccaactntacaaggattgggccattatttagataaactaaacactctaaaattgagacaaagtggtgccatttagtcctcctccatttgggccatgatacaactcacaaccttggactnttctccttanaactngngctngtattanaatagtatggaccaacacttgtgaagagatccttggctttcttgctctagcccttgcataagtcctcaaagtcttcagtggat

SEQ ID NO: 65465 - DNA, 396 bp, Glycine max
  unsure (1)..(396): unsure at all n locations
agcttcttataattataggtcttcttcattagttaccattatctctaaacagcctcatttcttcggtataggcttacgtctgaagacgtgttcattgaggtatttaatagccctctccatgctaggagactctctgtagctttcttgaagcatacgtcaacagacaaaccatgtgcttatgctcatagtgngtctattataacaagcataacagggcacttctaatgagatgtttgaacttatacgcgacaattattntctccttaggactatgacaatcctaggaagaatgtttttaaaacaactactgcaaaatgaatctcacacacagaatagtaaataaagtgttacacgctataccacaatgtaacattcgtctactttgactgatgtatc

SEQ ID NO: 65466 - DNA, 358 bp, Glycine max
atgtagacgaccacctcatagctaggagcgacagcaaagatctagattcaattacatctagatgacaaactcatgtctagagaagagaacgatctatatgagacaatagctagatgagatctttttcaatataacagttgctcatagagaatagataatctatccttactataatatcttatatcgtcctctccccctctgtcaacatcatagacaaatcatgaatagagaggagagaaatgtagccactgcgtgcaatgtctaagagtcaagtggtaccaacaggcattaaaacgatcgttcatattaatcaagcagcctataaatcgacgtctatgacacatcaatcattaacacg

SEQ ID NO: 65467 - DNA, 436 bp, Glycine max
ttaagtcacctgcggcatgcaagcttaacagcaataaagagcatcaaagttcttttatgatttattcacactaactaccacaagcacgattgacagtgaaaaatgataccatgtgatgtaatgcctaactgcacacctgacatccaacagatcaactctaactcatgatgatgagaaaggaagcacgctcaaccactatttcattaccttcctctaacgatagctgaatagatctcttcactatcacacagcaggcttgctatgtgcaactgaggacacggagcggagcactgccgtaggatgagatatcagctattttaaatatcaagcacctcatatgatcgccttcgttggaatatttatgcgctgcagcacatacattggatatgtaatcttgaactgactggacactttctcacaaacatctgcaattgtg

SEQ ID NO: 65468 - DNA, 201 bp, Glycine max
cgtctggaaattagtatcaaatagatgaagcacaccacgccttgattgtgacaagcatgcttcttagaaacaattgaacacatgaacaatttgaaatatcctacaagctggaaccagaagaatgagatatctttccttaccacagaaaactctatctctccgtccttcttgagactcttcatcaacaaatcatggatgcta

SEQ ID NO: 65469 - DNA, 495 bp, Glycine max
  unsure (1)..(495): unsure at all n locations
agctntggagaaccaagccaatcagaatgttattataaatttatatgggaatagaggtaacaatggtggtaatgacggaccgaggcacaaccgggttgagggagtaaagctcaatgttcctcccttcaaaggtagaagtgatccagatgcctacctggactgggaaatgaagactgagcacgtatttgcctgcaatgactacactgatgcgcagaaagtcaagctagcaacagctgaattctccgactatgcccttgtttggtggcataaataccaaagagaaatgttgagagaggaaaggcgagaggtagatacatggactgagatgaanagggtgatgagaaaaaggtatgtgcccactatctataacagaaccatgcgacagaaactccaagggctgtcccaaggggaattaaccgtggaagaatattataaagagatggaaatggcgttagtgagggccaacatcgaagaggactccgaagacacaatgac

SEQ ID NO: 65470 - DNA, 188 bp, Glycine max
accttggatttggtaccaacatgcccttctgaattccaactgggaaaatggccaatggaggaacgcccccacctttacgccacgagccttatggtaaaccttaccaattttaaaactctattagtaaggccaaggtttaaaagttcttttggtaagggtttgtggcctttggtttggatttataatac

SEQ ID NO: 65471 - DNA, 319 bp, Glycine max
acagaacagctgagcataatagaagagactatgtggattatcatcgaccaatataaggagaaggggaacctagctgctagtcatggacatatgctggatggtatcggctctgtacactggaacggaagcaacacagacggtgatatgattattgttcgagcgaaccatgacatgcatgagtagatacgctctcactctgaaagagagacaagagcttacaaagtctgcagcctgagcctactgtccaggataacacatactcgactccggactaagttcacggtcctctggattaccgacaacacactggcacacttgt

SEQ ID NO: 65472 - DNA, 387 bp, Glycine max
tagcatagaaaatagaacggcctctaagcatgaagaagagtattagctagctagaaaacattacaaagaaatactatataagcagcacattgtccactccagatccaaggccaagcaatctaacaggtcttattaccttaagaactttagaatccactgtcttaactgccggtggcacggggaacgctaaagcacaattgggaagagggtgaattagcaccaccaccacatcctgtacaatctcccttgatatcattacatgatccatagcttaagagcttcttcttgccaaacttggccatagggacacacttggaggagcttgaacaagatgagggccacgaagaatggtatgatgatggcgatgagagaatcatcttcttgatg

SEQ ID NO: 65473 - DNA, 459 bp, Glycine max
  unsure (1)..(459): unsure at all n locations
tcgagacagagnctgtaagaggaggctattttgtaatttgtgtcccctatggnnttcattgcactatatcggtccccatattctttaattcatatcatgttatttttcaaaattcactagcttagaacattgaccgccacgtgtccgcatataattggtcatttaagaaatattcatgtgtttaggaaatatcattattagtaactaaagtgattaattatttaggttatctccaatctatcatcattactaattaggtcactaacaattatctcacaaataattaccccaacccagaatgtaaacttcatccactcaaaatctttaaccttcctattaccaaaaattcttaattctcacaatcagtaacacgaacccaaactgagtaacgagaacctgagacgcgtaaaacaagctaattatcaatgtttaaatntttctctgagaactcagatagtg

SEQ ID NO: 65474 - DNA, 467 bp, Glycine max
  unsure (1)..(467): unsure at all n locations
agctnttcactcggagatctgattcacgcgcatattatatctagactctnganaatgaacaacggaagctctcgagaaattccaatggtcattacctttaactcggaggtctgatttaggcgcataatatatcaagacgctcgaaattgaacaacggaagctctctagaaattcaaatggtcataacttttcactccgagggtcgattcaagtgcatgatatatccagacgctcgaaattgaacaatagaagctctcgagaaattcanatggccataacctttaactcggaggtccgatttaggcgcataatatatcgagacgctcgaacattaacaatggaagctcttgngcaattccaatggtcattacttttaacctcggacgtccgattcgagtgcaaaatatatcgagacgatcgaaantgaataatggaagctattgacaattacatgatcataactttca

SEQ ID NO: 65475 - DNA, 474 bp, Glycine max
  unsure (1)..(474): unsure at all n locations
agctngnggaattgactctgatcccaatgccatattttgtctngctaccatcctcgaccactaaccagatggcggtggtggacctctagaagatctaccaatctccatttcctcgatggtacaaccgcaatgcaacctatgcctatcatggtgtgtctcggggcattctatattgcaatgtgtggctttcacacacaaggtccagagtttgattgacatatggcggctaactgtttgatttcccctgcaattacttttaggaacaattcttactttatacaaatatgttcaagggaaatccgatttgacggacagcgcaccgggtcgtcaagtatttttaaaattaaaactgaatgatctgagtgtcgaactcagggaacttgcttattagacatgagtttattcagacataaggcattggtggaataacatagataatggatcggtaaaacagaaatatactacttctatgat

SEQ ID NO: 65476 - DNA, 433 bp, Glycine max
  unsure (1)..(433): unsure at all n locations
tcaaggtttgagaagtgaagatgagaatggcgtaaatatagagcaaactctcacctcacacaagcctataaccttaatctaaacttgctcaaactagttatacgcctaaaattccaccacatcaaaattagactcctcaacacccaattctaccctagaaatggctcttgccttcactctggtctatggtttgtctctctatcacagaccaagctttctcataagtcctaaatgacatttcanactaggactaactcactgtaacctccaatttctactgaatccagatttagcctttcaaacgctcagagcatcacacttttccactcataacactacattctcactgtctaaccctaggttaactctacccttcatccctaagcagtgtccatcaacaatntcagcacataaacatcacaagcatcatcat

SEQ ID NO: 65477 - DNA, 276 bp, Glycine max
ggacggaaatctaatcactctagtcatatctcatctcttatatattatccaaaccaaataacttaccattctctgatcttaaatacttttatgatatgtaaacataaaataaaatttctttatcagcgtcacgctcattcatcaatttcgctctaaatgaagtgagtttagttttcaacctatctccaccctccttaaggtgggttgaaaatacataaggacggacttggcactcctccacactactctgaaagacagggaaagacaatggaaaat

SEQ ID NO: 65478 - DNA, 321 bp, Glycine max
  unsure (1)..(321): unsure at all n locations
attaatcattttcatggcattttatggggtcaactatataattttgggatgcttccggacaagccctctcacgatgaaggagatagaatgtactctcaatgtgaaagagatattctaaaagaactaatgaattactcatgtaatgcctaaagtaaataatctaatatataatagggtaatgacttttataaaattttatcaaagctattattatctgctatcttagacagaattgacgggtacantatttagatctatgctgatagaaaaaaaatgatatacatatctagtcaacttgctgaacagctgatctatcttatg

SEQ ID NO: 65479 - DNA, 358 bp, Glycine max
  unsure (1)..(358): unsure at all n locations
cacagaaaaagaaacanaccatatcngccaccaagagaggggaagaaaaannacgccatcnccttaagtaaaaattaacatccactactcattatgctttttgcaaagcatataatggaaatgcttaaggaaagatgtatgttttcaggttgccatttatttgtcttcaaaattatagccaaagtcaaaatgcatgtatgaagattatgaataagactttctcagaattgtgtctgtgaattacaatttgttctagatatgtgaccttggctcgataatattatttaacgtggcccgagacatttatgatttatttgaattataattgccacaaacatttgacatgttgttagtactc

SEQ ID NO: 65480 - DNA, 496 bp, Glycine max
  unsure (1)..(496): unsure at all n locations
gtctactggtaagcctcgacaagggatacctaacttactatatttgcaataccatgccgagagaggaactcagtcaaagtgactcaagagtccgagtaccacttcgccatgttggacacttgaaggagagcataaatgaggaaatatggggcatcgcgaagatagatatacctctatgatcactgcgcacattaacgactctcatatcaagtaactacgtcagtgtgcctagaaatccactatctatcccaccaaaaggcatattggtaatctaatttgatgctaacacccttacctgccttttatcattatgtttttaagttgagtgttagagtgtctttacatatatttctaccgtcatggaaggaggaaataaaagacgagcaattagtangaagggttccaccaatttaggtcaaaacataagttaaatatgataaaaataattgggggcttaattttgtatgctcggtaactntttcatatactaccttta

SEQ ID NO: 65481 - DNA, 478 bp, Glycine max
  unsure (1)..(478): unsure at all n locations
tgaggcatgcaagctntataagcgcgggtctgagagacaaaggttttttgttctctatatgcgaagatgatgttccgagtactttggatttggtacgaccatgccctcctgatttccggctgggaaattggcgagtggaataacgccccagcatttacgcaacgagcataatgtaaacctttacggatataaaagctctatagatgggcctaggctttagagttcttccttctgttaaggctttgagtcttttgttattgaacttataatacagggatctttcttcatctgttgctgagctctacccattctcattcatttgcatgtttacttctttntctgaaacgggagatacgatgacgagtccctcgaaggtactaatacctgagacccgcctatcgacttcgagcgagaaatgaatcaaacggaacatgaatgaaatgaggatgtgggacttccctcataactagaaagaatg

SEQ ID NO: 65482 - DNA, 409 bp, Glycine max
  unsure (1)..(409): unsure at all n locations
gagtaggggtatgtttttttgcttggatagttacaattcgtgtttgcttatgctcaattatcttgaataacacaattcaagagagcttaaaacttattctgattcacaaatccagccacaaatcagcaccacaactcaacttcatcataagcatcatgtaggaaacttacaaaataaaataaaaagttcgacaacaagactacttctaggaattgatttataacatgttatgaactaaataacatgcatgaattagactcataattcaaaagttaggctaagaatgacaagaatacatgaacaaatgtatctagaattcaatcaacaaagtaaatattcaacacaaacttagaacataatgtgacaattactatgactaaacatgactctaagacaacnatggataagt

SEQ ID NO: 65483 - DNA, 132 bp, Glycine max
  unsure (1)..(132): unsure at all n locations
agatatgtgagcgcgggtcacgagaccttggngaccgccagcggggcgctgttgtccaaaaccatgctcgaacgatcctgacgctagcccgtcctatgtggatatagcgaacctgtgatgtaccttatctgg

SEQ ID NO: 65484 - DNA, 492 bp, Glycine max
  unsure (1)..(492): unsure at all n locations
agcttctacgcatactngcatctagagcttctctctatcttacttcaagcaccacagcacgggcgcaatcttgccgatcttggtgtgcagctaacagcattaagcaccatgatgctgtgattgcaatggtctcatgtccagcaaataatatatttttgcagttatctatcacaaacctgtcatgtgacatnggaattgataagaggccatcactactacccgtgcaattctttgctccctcaagtatcatttgcaagagatcatgctcatgagtttccttctggtgatgttttatgagccttgatatctttgagtttaactctttctccaatctccacatctgtctggtgctttggttttgcatgtatgtaaacagattatgataccatttgtcacattagtagcatcactaaaaagaacaagaacataatatgcagatatatggtaaaagatgcataccgacatccaggaattccagcatgtatcttggac

SEQ ID NO: 65485 - DNA, 491 bp, Glycine max
  unsure (1)..(491): unsure at all n locations
tatgcttcctgaactgtaacctatccatacacattntccatatgttaaagtcaaaaaaccatgcaacacaaacaacacanaggcctaaaaccagtttcatgacaatttaaaaacaacaaaaatatacttaaaaaaaataaaaaagcaaaaagaagggtggcagatgttcaatcaatggcgttaaatgatcccccctgctgatttcaacaaacagcagtcaagtcaactctgataagaaaagtggaacagagatttaagagaaagagaccatactacaaccaataaaaaatttggaactttnttttttcatgtaacatctcttcatatatttttctcatttggtatactttagtttactggtgcaattttttttttatcaaaatccctcttcctaaaaggggaagaagaagggaagatttntacatttaggaagaatttttggctttgttgtggttcctgtgatatgactcacaaacacagactactcatgt

SEQ ID NO: 65486 - DNA, 315 bp, Glycine max
ttaaataaaattttaagcccaaaccgaaagaatgaaaaaatataactaaaattaaaaacaatcaggtaagttcaacaacataaatgagcaatcaaacaaaactataataagatataaagaaacaagaccatcacataaagacattatcaacggatatattaggcatcgattattaaagtctgaaagagtccacgtggataattggtgtgaaactcaatgtgatttaaaacaaaaaaaaaataaaaaaatctataagcgtgcgtcttccgagaagctcaatgtgcaaaacctatcctgaagtaatcctccctcaca

SEQ ID NO: 65487 - DNA, 231 bp, Glycine max
  unsure (1)..(231): unsure at all n locations
catatcacgccgatatagncaaaacatgataatctcaaatgttcatcataacttattagtaatgtaacacaaanaacaacttattactaataaaattaccctttccataagtatcataatacgtgcttcaattagttagattcttacaaaatacattcttgagaatggatcaaatttttaagtatgactaaactttttataatgggtcaaacttatggtggaacatatgtg

SEQ ID NO: 65488 - DNA, 276 bp, Glycine max
  unsure (1)..(276): unsure at all n locations
tatgtcctaagaacaatgttgtcgccttatatcattccttgcacaatanacatgacaactacttgagaggaatggctaatacgctagatctaatttgcaacaaatttactttatccttagtatgatacataaatattttagtcttgaaatatacatgtatgtttctcttaacccaatacttgaagggattcaatgataaacacataagtaaatctgacgcaaatgctatatggatataagtaatttaaacaatgttcgatctcttcacaatgacaa

SEQ ID NO: 65489 - DNA, 232 bp, Glycine max
attttactggcaacgtgcgaggctgatttctctctacaggaacattatttcgcaaatcttaatggtgagactatgctgaaatgacatacaaaggtgggctccaaatggcgcgatgatcccacaattaatgagttggggaacatagttttactcggacatgtttgggtgtatgccggaaaagagaaagctcattgtaacggacatttctttcaccagagacattatctcaaaa

SEQ ID NO: 65490 - DNA, 423 bp, Glycine max
  unsure (1)..(423): unsure at all n locations
caagcttgagggtgcgtagcccactatcttttcattgtatagtaccgataatgtgtctaccatcacgattatcgtctccctttttgcacatgttctgtagttgcatcctatccggaaccatatcagaatagtactgatactgcctaacgaaggcaaccattatgtccttccaagtatggactcgggaaggttccaagttagtgtaccatgtaacagctaccccaagaagactttcttggaagaaatgtattagcagntcctcatctttgcgtatgcccttatcttccgacaatacatctttggatggatcttggggcaagtagtccccttgtacttgtcaaagtccaacaccttgaacttgggaggggtgatgatattgggtactaagaacaactcttttagttagcaaaggcataatcttca

SEQ ID NO: 65491 - DNA, 290 bp, Glycine max
gatctttagctaaataagcctttatgttgattttgtcatggagttgcaacacacgataaatgaaaagatgtgagaggaggcgccatccactacggaataagtcatggaaggagaagcttcaccaccaatagagtgtcatggattacaagcttagagaggaagctctaatgttcgaagagaatgatatatatggagagagagagatgtgtggaaattgaaggagaatatgggaagaagttgtgctctgatgtgtggcacacaatgttctcattcatcaaagatacaacaag

SEQ ID NO: 65492 - DNA, 409 bp, Glycine max
  unsure (1)..(409): unsure at all n locations
ttaagtcaccgcngctgcagctaattaattaccttctattcttttcttataagtgncgatagagaaatgtattcatacagggccttaaagaatagagaaaactgcatttacctgaagcccacttgtttgaggacaaccatcgcaggagttgcaactaacccagagaacatcactaccagtgtcaatctgcacattaaattccactggaggagtacccaactgcactttcgtatagtagagcctgcaatcagtcataattcaaaaaaatatcattaaaggaacgccctattatcaataaataaatacgatagaacgatttacagaaagtcgttattcaaacccagcaaattcaaagcctaacatgatgaactccgaacaaaaagaataaaaaaaagtgaagtgaaacgag

SEQ ID NO: 65493 - DNA, 435 bp, Glycine max
  unsure (1)..(435): unsure at all n locations
actaagaaactaagcttaacaaagtctagatcanaatgtagactcacattgttatttctttccagaacccgaggaacaccctcacttgggccatcaatgccgggaatgaaatccattcgtggaccaatccaattaaaaggcctcacaattgtgaattccaagccattttcagcaccctcagctgccaacaatgacatctcagtgagacaaaggtcaagacatgacaaaatggagacagtgtacgcaatatacaattaaaccatacaaaatcagctcaccatacacaagcctctcaatcaactgcttatcacaggcataggaccatctctgctcttcaattgaaccaataatacaaggagactcatcctgcttaagtacgtagtatgcacgatcctacaccaaatngaagacaacataacataactcagttcatta

SEQ ID NO: 65494 - DNA, 439 bp, Glycine max
  unsure (1)..(439): unsure at all n locations
cggnctatnnataancaagaaangaaaaggaaagaancgcnggcagaaaaaaaaaacaattttaaaaacttttcaagaatttggatcatcacattanaaatattcgaaacgtattttaataatacatatttgagtagttgttttttaaaaataaaatattttcactttatttttaaattacaactaaacactacaaacganttataagtatttctatttttactctgtagcaaaatacaaatttggcaaaaagataattacaggtattttttgcgtgcatatccatgagactaatattcaaatatgtctctataactttgttcttttctcactggggtgatattaagcatcaaacaactagatgatacaatctccgtctctctgattacttctcatttctgcgagtctgctcaataggcaagagaatcatgcctctata

SEQ ID NO: 65495 - DNA, 459 bp, Glycine max
  unsure (1)..(459): unsure at all n locations
aagaagtgttataccaaaannaagctttttgttctttatttcccaactcttangaaaggcaaatacaaagcactttagatacatctcacagatctcattaagattctcaatctggccatcaagttgagggtgatatgaagagctcatggccaatattgtgccttgagctttgaataatatatatatatatatatatatatatatatcttacaagttgaattcttattatcctaatttctacaaagaagacataaggaaaacgcttcaaggcttgaacttcatcctcaaacccgtgtggactatttaaactaatagacaactttaacacacacacacgcacgttttttataagtgcggngctttttgggttctgagcttcaagttgttaccaaagagagagtagaatgaatgacgccacagttgagctggaagagaggaagtgaagtagtggcataaccc

SEQ ID NO: 65496 - DNA, 479 bp, Glycine max
  unsure (1)..(479): unsure at all n locations
tctgagtcacctgcaggcactgcaagctntaccttacaagcacataaacacattactttattattgcatcacacggtactctattggaaaagggatcttttactctgtgcctgcaaggactgctgacccttccacctgatagtacatcgcatcatatagacaaaatatatcatatgatataagtctgaaaggtcataaatagagagagccacacggtcaanataaacaaactaaccatgaatgcagaagccaatatcgaaataaataataccactattatgtgtaggggagctttccaacttttggacctaactgaaggagacttgtcaaccacttgagagcctgtagcagatgcaatacggtaattaatgaagcttcattgtgagaactgtggtaaaacctatagtgacagacaattagtcatcattatacgcctnctcatagctgacggaagaaactgtcataggacaaagtctatc

SEQ ID NO: 65497 - DNA, 434 bp, Glycine max
  unsure (1)..(434): unsure at all n locations
cgagtgtccccattgaaagacctttattcaaacctttcaaagntagtgataaggctaaacgaaaaattagggaacttagaaaaactaaatccttaattgaaggcgtaggtgacaatcatagcgaattactaaacaagattagtagtttgcttaaggtcattccagatactccccaagcttcggaaaatacttccaaaatggtaacaagaagtacctccaaattaattaatgttattaatgaagatagtgaccaaaacttagataacacaactgagataggatcagtgtcagaaaagaatataaatccattaaactccaaacactggaaaaccccctccaattatattatcaacgtccaactggccctgacttctattagagaaagaggtgaaacaatttaaaagtttagtgcaataacatctatgaatggacat

SEQ ID NO: 65498 - DNA, 401 bp, Glycine max
  unsure (1)..(401): unsure at all n locations
agcttcgggtntatatattgagcgtctcgatatattacttgattctttcagacttccgacggagaactnattgtcgttcgaatttgctaccagcttccgctttaaatctctagtgtctcatatatattccgggactcaatcggacttccgagtgaaatgctattgtcgttcgaatttgctagcagcttcggttttaaatttcgagcgtctctatatatttcggactcaaacggacatccgagtgaaatgttattggtcgtcgagattgctacaagcttcgactttaagattcaagcgcctcgatatattacgggactcaataggactgccgagagaactgttattgtcggtcgaattagctactggcttctgtgttaaattacgagcgtctcgatatatta

SEQ ID NO: 65499 - DNA, 323 bp, Glycine max
  unsure (1)..(323): unsure at all n locations
tatatcgacatgctcgaaattaaaaccgaagctcctagcaaattcgaacgacaataacttttcactcggaagtccgattgagtgccggaatatatcgagaagctcgaaatttaaaaccgatgctcgcagaaaattctaacgacaataacttttcactcggaagtcctatggagtcccgctatatatcgagacgctcgaaatttaaaaccgaagctcgtcgaanatttaaagacaatagctttgtactcggatgtccgattgagtactggaacatatcgagatgctcgaaatataaaaccgaagctcgtagaaattcgaacgac

SEQ ID NO: 65500 - DNA, 260 bp, Glycine max
caaattaatgacattaaccaatattatacttgttgaacctaaaaacggacctccacactagggcgttataccaaacaagtcctagcgatctggtgagggcatatcaacatgtggtggccaccccatgagagctttcacgttgtgttattagataaaatgcctatatagagggcaggacctctgccttttattaacaacaaacaatactggttgtttgtttcacaacttgaacttgatgcccttataacatatgatgactg

SEQ ID NO: 65501 - DNA, 398 bp, Glycine max
  unsure (1)..(398): unsure at all n locations
cactcgtgtaagcgagtatgatcagcttgtaatcgagtaaaacaaaacaacttcactacataagaaagcttgtaactgtagaacttttcttcttactctgacaagatgatgcatgaggcgcatacgatatgatacagactaagatccatcacataatgcgncaatcaatacaaacgcggcgtcagaaagttgggcttgtaaaagacaaaactgcttgagggcttcttaagcttaaggctaagcttcatgtgctcccttatcttagaaaatgacaccacggggaagtgctaatcaaagcatgatatggcaagggtactgaaaatatgttggataccatgaagcttgtctagttgaagattgactaattactatgttgcatcgtactacgggtggcatga

SEQ ID NO: 65502 - DNA, 423 bp, Glycine max
  unsure (1)..(423): unsure at all n locations
acatgatacatgtcagggttnggttttgttattgataaaagggatgccccacattatttccatgacacanatgcaaaaatgatgatgtggaaacttcatgcaaaactggtcatgcatgcacctatgtggacactcaagtgtcaaattattatggtcatgtgatgctagggctcatgattcatttcctctattttaaatcaacccaatgtttccaaaatatgttcttttataccattgtgcattcaaccgagtccattttgggtgtccggaaaaattttcacagcgttcacccttcaggtgtatacacattcttttcataaatagctatgatcagcgacattttcaaagaaaaagtggaagtcatctctcttcataagcatgttgagttttcagctagacaacttatctttcttttttcctctc

SEQ ID NO: 65503 - DNA, 493 bp, Glycine max
  unsure (1)..(493): unsure at all n locations
agcttaaagagggcataanannnaaaatctctctcctcttaattattgataaaggatgctaacaacggagaatcttcttatgctactatctttagtgaagngggtatcaagccaagaagattcccctttataatgtaaacgaacttttgctcttttggtaaggagcgggttcgggaagctccactacattccgcgtctccttatatttttgccaagcgcccgcacacatatacatatattaaaaacattaactaaaaaactagccggaaagtttttctatagctgaaaactgatttttattaaattataagagtttgataaaattaactgttaaaatagttaaaaaatttaaaatgataaaaaataataaaattataatttatttaanaaaataactacaaacttgaataaatatattgaacacaaagaaaaaatatcatangataaaagttagtattttaaaaacatgttcactgaaccgcaaacaaatttt

SEQ ID NO: 65504 - DNA, 427 bp, Glycine max
  unsure (1)..(427): unsure at all n locations
gcacctgttgcaagagtctgtgatctatgttcttctgcagatcaccatacagatctctgtccttctttgcagcaatctggagtcaatgagcaacctgaagcttatgctgcaaacatttataatagacctcctcagcagcaaaaccaacaacagcggaataattatgacctttcaagcaacagatacaatccaggttggaggaatcatccaaatctgagatgggcaagtcctccacaacaacaacagcttgcccctccctaccagaatgatgctggtccaagcaagccatatgttcctnctncaatgcaacaacagcagcaacaacaacaaagacaacaagcaactgaggcccttcctcaaccttccttagaggagttagtaaggcaaatgaccatccagaatatgcaatttcagcaagagacaacaa

SEQ ID NO: 65505 - DNA, 461 bp, Glycine max
  unsure (1)..(461): unsure at all n locations
caagcttaggaaaagtccttcgtgattctggnttatcattttnntatctttatggcanngagaactgaagagcagaagaatgggacccctcttgcctagttcgtctattcaatgaaataccttacaaccacttanntgcgtgagggaaacacatggcccatgagaactgtggnttaagacttctttcctctgatatctaatcttaatgcctaacttcatcctaattggntcaaggctacaattttaattcttcttcttctggataaactacactgccccttgtaaaagagaaagttgatgaaggggcattaactctcannttctcttatccatgcacatcacgtaacccttttggttgcattaccacctcttgtaccataagtcacctgcatggttatttggtcacttgcgggaccacgtgacactgttcttttatttgcttgaggacaagccaaatctat

SEQ ID NO: 65506 - DNA, 444 bp, Glycine max
  unsure (1)..(444): unsure at all n locations
ttaataatcattaatcatcaaccatcaatcatctttgaatcatctattctttcaatctttacaacatcatctctcaacatctttcaatcaatctttcaatatctttctacagaattttctgagtcatttctcttcatctttttaaaagtttttgatcaacactttctcttccaagaaaagttctttgttcaaaaaattgtgctattcatttttttcattctcttctccctttgccaaaagaacgagggactaaccacctggattcttttgtgtctctcttctcccttacaaatgattcanaggactaaccgcctaagaattcttttgattcttcccttccccttaagcaaaagaattcanaggactaactgcctgagatatcntttgtttcccctttacaaagactcatagggactaacggcctgagaatctttgtccaacaca

SEQ ID NO: 65507 - DNA, 449 bp, Glycine max
  unsure (1)..(449): unsure at all n locations
tacaacanggaagnactaagtgtttattacctatacttaacagaaaatacttataacactacatagtaaccataaattggaagagtttgatacaatttatacaaggattacacacaagagttagtcattttcaccgactaacaacttctncagaattacagctttgcttgtccgtaagcaaaaagagaacaactcacttgtcctcaagtgacaatgacatgcagtgactatgtacaaaggtgtatgcaacaaaagttactggctgcatgataagagaatggagtaaaatgccctcatcacttgtctttcacaaggcatgcatttatgcaaagagataaatataatgttacctgaacaattagatggagttaggcataagatagatatcaaggaaagtagcttaaaccacagtctcacgactactgtctcactcaagcacaaagtgttaa

SEQ ID NO: 65508 - DNA, 484 bp, Glycine max
  unsure (1)..(484): unsure at all n locations
ctgagcanaatcaaacgacaataactctgtactcggatgtttgattgntgtttgtagtatatcaagacgctcgacattcagaacataagctctgagcacaatgaaacgacaataactttttactcgtatttctgattgtgtcccatagtatatcgagacgctcgaaattcagaatagaagctttgagcacaagctaacgacaataactctttactcggatgtccgattgcgtcccgatgtatatcgagacgctcgaaattcagaacggaagctctgagcagtatcaaacgacattaacattttactcggatgtcggattctatcccgtagtgtatcgagaagctcgaaattcagaaccgacgctctgagctaaatcaaatgacaataactctttactcggatgtccgaatgcaatcggtaatataacgagacggtcgaattcagaactgagctctgagcacatcaaacgacataacttttactc

SEQ ID NO: 65509 - DNA, 441 bp, Glycine max
  unsure (1)..(441): unsure at all n locations
agcttgtagaattatggggtacccatcacatgtgttactangtggcggncgggcgatggtgcacaacaagctttccacatccacaatgcgcgcataaacccaccatcccctgttgcccacctccaactgagctcacgtactcccacgtagcccatctcctcgtttctctcaacaccgggtccccatcaatcctctcaagcttccacaacatccaagcaaaacaacgttcaaacagcacaagctatcacagccaagcaaaacagagcanaggcagaatactctgctcaacacatcaaccaaaatcacagcttttctcacgtaaagaccacagtaacaattccttcgatctcaattcgtaaccgttggatcgactccgaaaatttactggaagtctatagtgtataagcctgcatnttgacccgtgggatatactagcaaaca

SEQ ID NO: 65510 - DNA, 487 bp, Glycine max
  unsure (1)..(487): unsure at all n locations
ctcagcttcgcaagttttaagttattcctcagaactggcctatgcatagtttctaaagtcctattaacaacttccgtttgcccatcggtttgtgggtgacaagtggctgaaaataacaatttagtgcccaacttgctccacaaagtcctccaaaaatgcaaatcatcaagcctaggtataggatgcctatatttaatggcgatgttattaagggctctacaatcagaacacatgcgccatgtcccatcctttntatggaccaaaatcactatgacagcacaaggactcatactatctcttacccaacctttgctaatgagttcatccacttgtctttgaatctctctggtttcttgtgaattactatatgctggcctattgggcagagaagctcccngaatgagatcaatttgatgctcaattcccctcaaaggtggtagccacttggacatttggtggaacatgtatgaaatcctgaaagagtcta

SEQ ID NO: 65511 - DNA, 466 bp, Glycine max
  unsure (1)..(466): unsure at all n locations
ttaagtcacctgcggcatgcaagctgtttctaaaattctatactggtaatctattttctgtttctggtaatcgactacacagatatattttgaacggtcatgtcttttcaaagtgttatctgaagtgtcagagctgcgttatctattacaaacatctgataattgattacatgatgcacaagtcaaatttccaaaccctcatgaaaagctcatttgaaatcttgtcttctagcaattgactacactcgcctgggtaatcgaataccactgccttgatttgttagctaataactatatgaggccacaactgatcaactagtgagattacttttacaaatgaactgangatatatctntttcttggtcataggtgcttgaccatgaattaatcttgaaacaatctctgttcgctcaaccttgaatgtatcttgaagcactctngatcgaatataccttgngcattatc

SEQ ID NO: 65512 - DNA, 422 bp, Glycine max
  unsure (1)..(422): unsure at all n locations
gagggagagatagatatatgtgggagcacgaaattgaaggaataaaagagggagagaagtggaactttgaagtatgtctcacaagactctcattcatcaaagttacaacaagtattacacatgcttctatttatagactaggtagcttccttgagaagctntcttgagaaaacttccttgagaagcttctttgagaaaacttccttgagaagctagagcttagctacacacacccctctcataactaagctcacctcctggagaagcttccttaagaagattcctaaagaacctagagcttagctacacatacctctctaatagctaagctcacctccttgagatgagaagctagaacttagctacacaccccctctcataactaagctcaccttcttgagatgataccacttgatggaagc

SEQ ID NO: 65513 - DNA, 362 bp, Glycine max
  unsure (1)..(362): unsure at all n locations
cccaaangcatccaaaaacataaagttgtgcaacttttttaagtggatgggtaacttttaaataacttctaacaatggtcatccatgtaaaattgaatgatcaaaattagctccttctacatctcattacaagataatgttcacttgatatcacctttacgatacactcaaccatcatatgctcatttaaagaagaggggtagaaaatcttacgggtttttgctgccacgggacatgagtgtgtcatttccagaccaagagacagaactgcatgcatctcctaacgctaacctagcaacagagtagaccacactttcatgatgcaacttcacatctgcagagagaactgcatctggaggggg

SEQ ID NO: 65514 - DNA, 412 bp, Glycine max
  unsure (1)..(412): unsure at all n locations
actgaaacaagcggtatttttattctttatacttaaaaataattcattctagtgtttatacatatcattttttaattctctaatctcccttaatctttatcatctaaacttataaagattaaaaaagttaaaaataatatctataaaaattataagaggcaattcttaagtataagaattaaaagataaacttaatataaatataaagatgaaatgagtaattaaacattaaaattattttaatttttactgattccaagtttattttaatatcctaattacctaaatacttaatttggtaattttaataattaaaataataatatttaaataattgatcaattcttacattggttttcctaagctgttntgaaacaatgtaatcaagtatataaaatactcaccatatatt

SEQ ID NO: 65515 - DNA, 358 bp, Glycine max
  unsure (1)..(358): unsure at all n locations
agaatgtcaatccttaccctcggaagcaaanaagaatagaggggaagattccaatcaaagaanaagagaaggaaaatttccaatgaaagcaaaaaaagaaaagaaggaaaattccccaatcaaagagtgggagaaagcaaaaaaagaaaagaaggaaaattccccaatcaaagagtgggagaaagcaaaaagaaaagaaaggaaaattcccaatcaaagaatgggagaaaagtaaaaaggaagaagaagaaggaaagaaagctcctgatcatggatcgaaggaaaaacagaagatatgtgcagagaggtctttggaccggacaatatctgaacaatacagaattgtcaccanatgaac

SEQ ID NO: 65516 - DNA, 402 bp, Glycine max
  unsure (1)..(402): unsure at all n locations
tacaggtgttgcacatccaagaatattntctagcgcatgattaatatagatggttacctactatatattnttgtaatggntattggaaaactttgttgcagaccatagttggttttaaaataacagtgtataaacatagaaacataatatgcacatgttcctttntgtgtctaattgcctatgatagatgctaaattatgcatatacttacctggatttttaactatcagtatgcagaaacatgtgatgataagtccaaaaactgtcacaccagcagtgattactactatctttttcttgattccagggccaccattatctaaaagaaacagagcaacatcagttgccaactttaaaataaacagatctaaccattgaagcttaaaaagtgagtctaatttc

SEQ ID NO: 65517 - DNA, 336 bp, Glycine max
  unsure (1)..(336): unsure at all n locations
agatgaatcgagtcacatcactgcttcgtctactgccaaacatatntaggaaatgtgatgtccttgttactgccagtttcaccttgacaaagatgtcatggaccatgttgaaaatctaaaatgattcaaccccatatcctgcgtaaaaattcgcaatacttcaactgtacatcattcgcatacatccatgctnttcattggttgcattgctcattgcattctttccttgaaaaataaaataaaataaaataaaatgaactttaatcattgtataaaaaagaaagggacacgctntacgacgcccttaccgaactcgtgctagagctagagtaatgg

SEQ ID NO: 65518 - DNA, 427 bp, Glycine max
  unsure (1)..(427): unsure at all n locations
agatcgattaacgatgaagagcgaatgaagaacgtttaataacggtcgaaaccttcgttaaattcttcacggaaaacgttacggaaacgtttcggaagcgcctcggcttagattttcttcacggaaacaatttttccaagcaaattcgaaagagagagaagtgcctaaggggctgaaccccttccttcttcacttcctcccctatttatagcaaaataggggaggtggttgccgcccagctcgcccaggcgagctcagcttgcccaggcgagccaggttgcttcctccagaagcaacagccttctggaggaatattctggagggcccaagtgggcctgggtgttatttgcacccccatttttactaagtacacccncctttgctgttttttggtgattctttnttcgtanaggtacggaaacttatg

SEQ ID NO: 65519 - DNA, 402 bp, Glycine max
  unsure (1)..(402): unsure at all n locations
gtgatactctgctttgtcttcagtgaagcctaagaagagatgctatgtgtgggatatactccaattactggtcacttatagagaaaatcaacccttgagtattcaggagtgagtctagacttcaagagaataagactgtgtcatcaagagaatcangagtgaccatggcagagagtttgaaaacagcaggttcactgaattctgcacatctgaaggcatcactcatgagttctctgcagccattacaccacaacagaatggcatagttgagaggaaaaacangactctgcangaggctgctagggtcatgcttcatgccancagaacttcctatgatctctgggctgaagccatgaacacagcatgctacatccacaacagagtcacactgagaagagggac

SEQ ID NO: 65520 - DNA, 467 bp, Glycine max
  unsure (1)..(467): unsure at all n locations
tgcaagctngcttgtggagcttctatggaggctggattttcaatgaggtcctttaatggtgattttccaccatggagatgcagcggaagacaaaggagaagaggtaagaggcggcgccatccactagggaataagccatggaagaaggagcttcaccaccaagatgagccttggataagaagcttggagaggatgcttcaatggaggaaaagaaagagggagagaaagagagaggggggagcacgaaattgaaggaagaaaaagggagagaagttgaactttgagttgtgtctcacaagactctcattcatcaaagttacaacaagtgttacacatgcttctatttatagactaggtagcttccttgagaagctttcttgagaaaacttccttgagaagcttctttgagaaaacttccttgagaagctagagcttagctacacacacccctctcataactaagctca

SEQ ID NO: 65521 - DNA, 354 bp, Glycine max
  unsure (1)..(354): unsure at all n locations
actttagttattagtcaattcaattaagaatgagagatcccaaagagaagacgtccgatngatctttcgcttttattttactaaaagggtatgtttgattattatattattnatttacctcttttngatttccaacgtggttaccgcacgaccgaacggtcggaattcatgttaaccaatattaacggatgatacaattcanacgatcgatggaaatntattttatttttagattaagcgagatatgacttacataaatggcttaagcatgtcaaaagggggtataaaatagtaatgactacgagaattaatatacatgaaacgaaatgtggaccaccacgggtacatagaatg

SEQ ID NO: 65522 - DNA, 438 bp, Glycine max
  unsure (1)..(438): unsure at all n locations
agcttccatctttgaggcatcatagcacaagagcttcatgtangtgctgcttanacctccattaattnttttgctttaccttctcttctcttgntgnttcttcatttttctccatgtatcacctcacatgtcttgtgctaaatgttgttaacatgattctttagagtttccaccgattaaacttgctatagaagctagaatttattttctatggttcanatttcatgttcttgttcttgaaccatgaattgtgttgagtttaggttcctttgagttttgtcttgttattttttgtggctgaaacctaaaccataaaattgttacaaaaatattaaagtagaagaaaacctcaaaaatctagagtgacttgttcacctattgtagttttgtcatagaagtcatgtctagtcatgaaacttgtcacataagatttcttat

SEQ ID NO: 65523 - DNA, 393 bp, Glycine max
  unsure (1)..(393): unsure at all n locations
gtaaatggatcattttaaggtccaacgccttataatgaccaccttccaagtaaaaagaatcgcttgattcacccttaanaaagaactacgtaggtctgatttcctcttcgatggagggtacgtangagcaagagccccgcttttgtcgacctcaaaaataaaaaaggaaataaaagttaaggtaacacaatttcacacaattctaaaaataggttgttgtcctttgagacaaacgtgagaggtgctaatacctacctcanacgtaaatacaactcccgaacttggaatttctttttcgaccggtttccttcagttnttccgacgttntccacaaataaacgttggtggcgactccacgcatctttcctcctttggaaagcgcacccatgagcc

SEQ ID NO: 65524 - DNA, 179 bp, Glycine max
  unsure (1)..(179): unsure at all n locations
aaacgtaacatgacaattatagctggtggtngaatgcctcacgccactcagacgtatcacaccatcatggctattctctaatgaaacactctagactttgaccactctaaatacccttgagctcttaagcaactcaagagactatggccacaacagagaacaagtcaccaatatgtgta

SEQ ID NO: 65525 - DNA, 343 bp, Glycine max
  unsure (1)..(343): unsure at all n locations
tcaatgcccggaatgaaatccattcgtggtccaatccaattaanaggcctcacaattgtgaattccaagccattttcagcaccctcagctgccaacaatgtcatctcagtgagacaaaggtcaagacatgaaanaatggaaacagtgtacgcaatananaattaaaccaaacaaaatcagctcaccatanacaagcctctcaatcaactgcttagcacaggcataggaccatctctgctnttcaatngaaccananatacaaggagactcatcctccttaagtacgtagtatgcaggatcctacaccannattgaaacaacataacataactcagttcattac

SEQ ID NO: 65526 - DNA, 380 bp, Glycine max
  unsure (1)..(380): unsure at all n locations
agcttcttgcgtagccgctcttggtgctcagaatattccanaaacaaatccctcttattactagctaatttgaattctttagttcctgaatgtacaaccttcaaattgttgctcattcccctctttgttttctgcaaaaaagaaaatcaatatcaaagaaaacatggagagaattgtcatggttattattactcgaaccagaaggaataacatctaaacaagtcattttattcttacgtttattgttgnnaaacccananntatgctatcatcccttcatgtcttgtttatcacaactttagccgaattgtctattttcacacantctgatttgttgattattttccaatacacactgtgatggccttatatatattttt

SEQ ID NO: 65527 - DNA, 400 bp, Glycine max
  unsure (1)..(400): unsure at all n locations
tgtcattccttgtcttctttgtggtaccaatggatatggcacctnctccctttngctngggctttcctcttttctcttttctctagccagcttactctnggnctttntcttctctttntttctctcattctctttttctttntcatttctttcattnnntttcattntctttntctttctctctttctttntctttntctttcttttgcttctcacttatttctttttcactcacaattattggtatcttcttctgttgatcatcttctgctntcacttcttcctcagtctcactcanaggttccatcactaggtcaatntctggttcagtcactagttgttcttcacctatcctcttctcaccttcattcatgctcaccattntgcttctagtcataac

SEQ ID NO: 65528 - DNA, 435 bp, Glycine max
  unsure (1)..(435): unsure at all n locations
agcttatgcgcatatttccttacaaacgttctcttgcacaagacatttaaccgaaaaaatgcacccatatacaatcaaggcagcttcgttacctagattatttacacgtacctncaagatgtatttgttacttacatcacacacatctctttggctaaattcacatacatgcatactcaaagcattttggggtaccaaaaattgcacatgtgcacatcttggcatttctaatacctattcatacgcaaacttcatgatgaatcttgactacccacacaataaggtgctacatttcatgctctntntttcaagtttttgctacctaaagccgcatgcaaattcaagcatattttcctttgctgactaaanatngtattcaaataaaaggtatatattntttgaatatgttttctcacataacatgcaacacattta

SEQ ID NO: 65529 - DNA, 401 bp, Glycine max
  unsure (1)..(401): unsure at all n locations
atcctgactcaccatanaccttgacctattgttataatgtcaatccttacccttggaagcanannagaaaagaaggaannattgcaatcaaagagaaagcacaaagaaaagaaaggaaattcccaatcaaagagtgggagaaagcaaaaagaanagaaagaaaattcccaatcgaaaaatgggagaaagtcaaaaaaagaagaagaagaagaagaaggaaagacagctcctgatcaaggatcgaaagaaaaaaaaaagaaatgtgcagaaaggtctttagaccagacaatatctgaacaatacagaattgtcaccaaatgaacaaaagagagaaaaggaaaccataacctacaagtggtcttctccctttgataccaaccaaaatcctgtgcgtcggtgac

SEQ ID NO: 65530 - DNA, 438 bp, Glycine max
  unsure (1)..(438): unsure at all n locations
agctttcattntcaatttcgaccatctcgatatattaccggactcatccggacttccgtgtataaacttattgtncaattcaatttctcagagcnttggatcaaaattttgagcgtcttgatatattacgggactcatttagacatccgagtaaaaagttattgtcgttagaatttgatacgagcttccgttttcaatttggagcatctcgagataaattgtgacactctgtcgggcatccgaaaaaaatgttattgtcgtttgatatttctaagagtttccgttttcaatttggagcgtctcgatatattacgggactcaaccggacatccgtgtataaagntattgtcatttcaattggctcagagcttctagtctcaattgtgagcgtctcgatatattacccgactcaatcggacatccgagtaaaaagttatt

SEQ ID NO: 65531 - DNA, 435 bp, Glycine max
  unsure (1)..(435): unsure at all n locations
actaagcttgagcaatgaatgacatacttatacacggtttcctgntgagtcccgtaagatatcgagacgctcaanatttagatccgaagctctgagaaaattgaattgacaataactntatacacggatgtccgagtgagtcctgtaatatatcgagacgctgcaaattgagaacggaagctcgtatgaaattcacacgacaataactctntactcggatgtgcgattgaatcgggtaatatatctagacgatcaaaattgagactagaagctctgagcaaattgaaatgacaataactctatacacggatgtgcgcgtgagtcccgtaatatatcgagacagctccaaattagatccgaaactctgagaaaatagaaacgacaataactctatacacggatgtccgaccgagtgctgtaatatatcgagacact

SEQ ID NO: 65532 - DNA, 360 bp, Glycine max
  unsure (1)..(360): unsure at all n locations
atgtttatatgctgaaatttcttatggaaaactgttagaggtgaagggtagagttaacctanggttagaaagtaagaatgtgatgttatgagtggaanaagagtgaggctttgagggttggaaggttaagtctgaattntgtggtaaatggaggttaaagtgagttaatactagcttgaaatgtcatttatgacttgggagaaagcttggactgtgctagagagaacaacaaatgatcaaagtgaataaagagccatttctagggcanaattgagtgttgaggagtcaaattttgattcggtggagttctaagtgtaaatccagtttgagcaagtttagattgatgttatggactggtgt

SEQ ID NO: 65533 - DNA, 415 bp, Glycine max
  unsure (1)..(415): unsure at all n locations
gctacaaacactngtgtaatcgaatatgatcaagttggaatcgtgttaaacaaaaaaatttaactacctaagaaattttctaactttaaaacttttcttcttactcttacaagatgatgcatgatgcgcatacgaaatgatagagactaagatccaacacataatgcaacaatcaatacanatgcaactcaagaaagttgggcatgtaaaagacaaaacttcttcaaggtcttcttcaagcttcaaggctaagtcttcatgttgctccccttatctctagcaaaattgaagccaacgggtgaagttgctaaatacaacgcatgattagtggccaaagggttactgcagaaatatgttttggattaccatgaagtctttgttctagttgcaagactngaactaattagacttatgg

SEQ ID NO: 65534 - DNA, 423 bp, Glycine max
  unsure (1)..(423): unsure at all n locations
atgccccacattatntccatgacacanatgcaaaaatgatgaattggaaacttcatgcaaaactggtcatgcatgcacctatgtggacactcaagtgtcaaaattttatggtcatgtgatgctagggctcatgattcatttcctctattntaaatcaacccaatgtttccaaaatatgttcttttatccatttgtgcattcaaccgagtccattttgggtgtccggaaaaattttcacagcgttcacccttcaggtgtatacacacttntttcaaaaatagctatgatcnagcgaattttcanagaaaaagtggaagtcatctcttttcaaagcatgtnggttttcagctagacaaactattntnncttttctctcnnttttttcttnntttcaatggtaaattctttcttgttggttttgtt

SEQ ID NO: 65535 - DNA, 438 bp, Glycine max
  unsure (1)..(438): unsure at all n locations
actgcgaactatttgatgggccgatatgcagaatgtccaactgcaacctttgtgatgctctccacaaactcttcttagagatcgcatcccttgtgttntttcccaccatacaatcaatgcatactttaaatgatgcattcaaatgaggtagccctctcatcatctccttatactgcaaggttctcaaacctttgtagcttaaatgttcgtacctacaatgccaaaggtgagtgttgtccttaagagttgcttgaaaacaagtcagagcctttggtaaaactcttgcaggcaacttgaacatcttgtttgttgacattgctatttctataataagtcctttctcaagatgatagactntacatactcctttgttgataaaaaaggctacccccctctcttacaatnggccaattctcaataaattatttcttaactcac

SEQ ID NO: 65536 - DNA, 546 bp, Glycine max
  unsure (1)..(546): unsure at all n locations
ccttgatactcagcttctatccaggcaattctgggtggtgaagctccttcttccttgtcttattctctagtggatggngcctcccctctcctcttcttctttgcctttcgctgcatctccatggtgaannaataccattgaaggacctcattgaagctcanagatccagcctccatagaagctccacaagcaagcttccaccagagtatcttgaatttcaaacaaagatttctaggagacactagacacaacttatagagcccatgtctaaatatgaccctgaagcanatgcctggcctatngaggaaggtgttatcgataagcactccanagtgcggggccaatggattccttatgacatagatgccatcaaccaatttttagggaatccatggatcttagaggaggggcaacaatgtgaatacacggcaagaagaggtcagactacaggttttgatgaagaagctataggtaaagctacttgcttccangatgtatatatggacatggcngggaatgatgtgaatatcatacaacatgacactc

SEQ ID NO: 65537 - DNA, 451 bp, Glycine max
  unsure (1)..(451): unsure at all n locations
tgcaagcttatgcgtatatctccttacaaacgntctctttcataagacatttaaccgagaaaatgcactcatatacaatcaaggcagcttctttacctagattatntacacgtacctccaagatgtatttgttacttacatcacacacatctctttggctaaattcacatacatgcatactcaaagcantttggggtaccaaaaattgcacatgtgcacatcttggcatttctaatacctattcatacgcaaacttcatgatgaatcttgactacccacacaataaggtgctacatttcatgctctttttttcaagtntttgctacctaaagccgcatgcaaattcaagcatattttcctttgctgactaaaattgtattcaaattaaaaggtatatattttntgtaatatgttttcttcacataacatgcaacacattntatatacattt

SEQ ID NO: 65538 - DNA, 308 bp, Glycine max
  unsure (1)..(308): unsure at all n locations
gcaatcaaagagaaagcaaaagaaaaaaaggaattcccaatcaaagagtgggagaaagcaaaaagaatagaaagaaaattcccaatcgaaaaatgggagaaagtaaaaaaagaagaagaagaagaagaagganagaaagctcctgatcaaggatcgaaagaaaaaaaaaagaaatgtgcagaaaggtctttagaccagacaatatctgaacaatacagaattgtcaccaaatgaacaaaagaaagaaaaggaaaccataacctanaagtggtcttctccctttgattaccaaccaaaatcctgtgcgt

SEQ ID NO: 65539 - DNA, 434 bp, Glycine max
  unsure (1)..(434): unsure at all n locations
ttcttctttagtccagtcttcttctggcttcaattcattagtgggctntccttctgtgtccagcatcttgggatgttcccagcctttgatgacagctttccaggttctgctatccagtgatttgaggaaggccaccattcttgctttccagtattcatagttggctccatcaaaaagtggtggtctgttcactggtcctccttctttctccatgttcattagaatttatctccctagatctcactctgtgatttcgagtgttggctctgataccaattgaaattctgatactgggggacagatgtcgtaccggatgtcacgacatcacgcttcagaacatgcagattatatgtgtccgtatgaacagattaaacaagtaaataacacaagagaattgtttacccagttcggtgcaacctcacctacatctgggg

SEQ ID NO: 65540 - DNA, 350 bp, Glycine max
  unsure (1)..(350): unsure at all n locations
atcttagatctacactttgtcatgcatttcgatggttcanaatttatagatctactctngaatcatcgttgttgcgttgattataggctctatcattntcactcataatattcttgtgctgaaactntagatctaagatttcttccacaatattgattagaaagaaaaacacagaaatctaagtgtaaatcacttaatccatcgtgtcttagagtcatgtctagtcacaataattgtcacattatgttctaacgttgtgtngaattgttattntgctgatngaattctagatacatgtgttcatgtattctagncattattagcctatcttttgattttgagtctattca

SEQ ID NO: 65541 - DNA, 348 bp, Glycine max
  unsure (1)..(348): unsure at all n locations
gcccctttttatctgcagaccactcccaaggaacagaaccctgangcnggaaaccatcttcagcaataactctgagaaagtttgccgctgaagtgatctcattggcccacaatgcttcttcttctagcatagttccttacccacaccatgccttgataccactcccatgagatcctaatgaagttgatgctgctgcaatgagacagcaaaaaggctaggtacttctctaccattgaccacaactaaaatggatgtagaattgacgcacccctcaatacatttgatccacttatagctgaagcccaggctttgaagcatatacttatagctgatatgtgctatggatct

SEQ ID NO: 65542 - DNA, 289 bp, Glycine max
  unsure (1)..(289): unsure at all n locations
acttcaccagagtatggtcacctntcaatgttggattattacaaaattttacttcctcctgcttaacagaaccattgactttcacaattagtgagacaaacttaatgttggaagcaagataacacaaaaggtcattatgagtgaaagatatagtgagagcacttgctgtgatcatctaattctcatcagtcatatacgtaacttagtttgtttcattctntcaccatcccatatattcactactacatgtngaccttacaggatgcctcttactatctaccgcactgtg

SEQ ID NO: 65543 - DNA, 389 bp, Glycine max
  unsure (1)..(389): unsure at all n locations
atttcaacatggggtattgtgtaactatgatggtaaaattctattccatggcggntgtagcgaggcactgatgaattgatgctggttttacgttggtttacttttagatgtatngactgttgctaatacctactgatntaataagtttgtactgatactattagttttgatgctgacaactggtgctttaatggcatttcagctttctgattagacagtttttttgtgttggtactcgaatcgagttctggtttggcagtttattaggggggcgtntcgttcaagaaaaagttttccattntctgttttaaaagatttgtataggaaataatggaaacagaataaaaacatagaccgatcaaaattgtttctgatcttgtagctagatc

SEQ ID NO: 65544 - DNA, 313 bp, Glycine max
  unsure (1)..(313): unsure at all n locations
aggtctatcctatttattttcattgtaaaatagaaacaaactntaattctcttctttatataaatgtacgtctcgctctcacattagagtctaatataataattctgtatacatctatgatctaanaatcaagagctgtcanaattctaaatatgatgattntaaacaaggcctaattaaagattcgatccactatcaaatctatttntaaaaatggcctttgaattcacgatagacaagaaaagctacanctaaagcaccgcatttttagaattaatgggccgtcaccactgatntnntcgtaaaaactatg

SEQ ID NO: 65545 - DNA, 358 bp, Glycine max
  unsure (1)..(358): unsure at all n locations
gctatacaggttcttgacgagttaaccaatggggaagctattgtgagtaccagagttggacagcaccagatgtaggctgctcagttttacaagtacaagaggcctangcagtgggtaacatccggtggtcttggtgctatggggttatggatgccggctgccattggtgcagctgtggctaatcccagtgcgggtgtggttgacattgatggtgatggggagtttatgatgaatgttcaggagctcgccaccatcaacgtggagaagctccgtgtaagatattgttgatgaatagtcacacttggtatggttgtcaatgggaggatcngctctataagtctaacaaggctcacacata

SEQ ID NO: 65546 - DNA, 386 bp, Glycine max
  unsure (1)..(386): unsure at all n locations
agttttgttccattagaagagaatgagcatgtgattggaagtatgactgaaaatgttagtcacgttgtcaaattgattgtgaacgaatgcattaatcatatcccggngagagtgtgatcctttaattgtgagagaaacaactatcatttagtactgattttngcttgaatctctgaagtatggactgaatgcatgaaattgacgatgatgaanggcccatgtttgattgtgatagccacttagccaaaaagctgaccatgtgcttgaatgaattattgattgattgaacctcgagcctatagtgttatctctcgctaccttgacttangntgtaggagagcatcatccatangaaacgtggttcaaagcacatatgtccctatttg

SEQ ID NO: 65547 - DNA, 465 bp, Glycine max
  unsure (1)..(465): unsure at all n locations
ctaagctataatagtgtgaaggactaagccagttgttatttatcaactcttgcttacccaagcacacatattaacccacatactacacagccctaccaactganatgatcagcgaaatccacccataaggctacttctcatatccttgaaactcctatatatgttgcagcccccanactcctacgtgcctcaagcattgggtcataaaacaactcctttttggtcttcccaaggctgaacacaccacaggccacaactcaagtccatgccaaacacacacacacacacacacagagacacacagacacagagagagagagacacacacacacacacctacaataataaagcataagcacccccgaaccccacaattccaaattagttacataaagaactggtgatgtcgatattngtatgtaatngaaaattacanntttgtatgtggtggatggtcttggataa

SEQ ID NO: 65548 - DNA, 394 bp, Glycine max
  unsure (1)..(394): unsure at all n locations
atatttgnagttaatgaacaactttcttaactatttgtccttcagaatttactggtttttttttcttatatgtcaatataaataatataaggctatggcttatggacatggtcattcttacccctaacaatcataaaagtaaagttttctattttttacatcaattcatttcctaagggactcaattccgcattcattgaaaccagtatgcagcattttacatcaaacaccagtatataacattttatagcaaacaccactatataatatnttaaatgaaacaatagtatatacatgctatgtcctacgtacgcacctggagttgctataacccgaacgaccttcaacaacaatgtcaattaaaagtagtctatgataaccttgaaaaaaaaaa

SEQ ID NO: 65549 - DNA, 327 bp, Glycine max
  unsure (1)..(327): unsure at all n locations
gccataacctagagacntaaaaaaacttaatggctgagtgtaactgaaattgtggcaaccaaaagtcacccncaacagccaacaagtcagccaccatttggtctcccaaaaggctgatgcctatgctgccaatngggcccttattacaacttgaactatacctaactaaagcccttntagttgattaacccanaacatattgttggtcagccaactctacaaggattgcgccattatttagacaaactatacactctattaatgagacaaagtagtgtcatttagtcctcctccatttgggccatgatacaactcacaaccttggac

SEQ ID NO: 65550 - DNA, 431 bp, Glycine max
  unsure (1)..(431): unsure at all n locations
agcttgtcttagtataataggaagcaccaatatttatatctngatgcatactgangatcttgattcctgctagctgatttaggaatatcatgctgatttatagagcagtttaagattctagatccttcccccatttgtttttcacagtactttatgtaggccagtctgattaatcaagagcgcagcatcataagatatctgcacaatgaaatcatgcctcaccttccttgtatttctgagcttttattgcaaatcccacattgcatggtattaatgttattatatacattgtcttcatgtctgtgcatcctacaatggataataatatagcttgggttacttttattcggaaagcanatggtgcttcgttaattaactttctaaggtgtactgtgccttggcatangatgctaaatgttctttcctggata

SEQ ID NO: 65551 - DNA, 383 bp, Glycine max
tcttggaggaaaactagctagctagttagctaatactcatgataaaatctcaagtatggataatataatagtaatacgggtgctcccggagacaacaagcaaagcaatgtctataaaaaaaaaaacaaatgaagacaatagacagtgctttgtttaattactctaattaatcagtttcaaagccacaaggcaccagcttgtttgagaagaggaacaagggtgccactgatgtggaaagccaaaaccctgtccatggagccaacaagtttccctccaatgaagaccacaggaacagcagcagaagcagtggaagtgattccatttccaattcaattccaaggagtctcataagtgcactctccatgtctttttcctttggatct

SEQ ID NO: 65552 - DNA, 346 bp, Glycine max
  unsure (1)..(346): unsure at all n locations
tcaattctttctcccgctttgagggaaccacttgggctgccagatctctccacctttgggtgtattctttgaaagattcatgccccctttttgcacatgttctatagttgcatcctatccggagccatatcagaattgtactaatactgcctaacgaaagcaccattatgtcctttcaagaatggactcgggaagggtccaagttagtgtaccangtaacaactacgctagtaagacttttttggaagaaatgtatcagtagttcctcatcttttgcgtatgcccccatcttctgacaatacatctttaaatggttcttggngcaaagagtccccttttactctct

SEQ ID NO: 65553 - DNA, 429 bp, Glycine max
  unsure (1)..(429): unsure at all n locations
gcattattccatgacacananatgcanacatgatgatttggaaactttatgcanaactggtcatgcatgcacctatgcggacactcaagtgtcannattttatggtcatgtgatgctacggctcacgattcatttcctctatattaatcaacccaatgtttccaaaatatgttcttttatcaatttgtgcattcatccgagtccatttcgggcttccgggagaatcttcacagcattcacccttcatgtgtagacacattttccaacaaagggtatgatcaaagaaattttttaaagaaaagttggaatcgtctcttttaaaacatgtcgtttttagctagacaactattttctttttttcacttttttttcttacttgccttctctttntcttatnactctcttttctttcacttcttctccttctat

SEQ ID NO: 65554 - DNA, 402 bp, Glycine max
  unsure (1)..(402): unsure at all n locations
agctngcttctacaatctcgccccttttgatgatgacaaccgngaaatcaagaaacacatacacattctttttcctagtcgatcactcacttaattntacatattcctcccctttggttttgattttaagcttcacttgaaattaaaatacttaattatattagttcttgatttaatccctattttctctccccctttggcatcaacaaaaagccaaaagtcataaaacatacatgattttagaaaaatcctacacatagcatccattggtaatcaatcataaaagattctaaactaatcatgaagcaagtcatgaataaacccaaattaaatataaaccacatagtcatataacataattcataaatgttcagtcatactaagcaaatattaaaagaatac

SEQ ID NO: 65555 - DNA, 363 bp, Glycine max
  unsure (1)..(363): unsure at all n locations
catcttagtnattatcatttcatatgtgcatcatgcatcataaatgaaggagttagaagaaaagttctaaagttataaaatggcttctcaagttaaaactctttgttntaattgattacaagatgatcataatcaattacataagtgtttgaagcttgtagagaagtgtctcatattggtttaatcaattacaagcttatagtaatcgattacatagctctttntgatacaatgattgattcttcaggagtctntgatttaatagattaccaaatgatataatcaattacttctctcttaaaagtgtttcagaagtgatcaagaacactttaatcgattacatcaagaaactaatcgaataca

SEQ ID NO: 65556 - DNA, 331 bp, Glycine max
  unsure (1)..(331): unsure at all n locations
gttcatgtgactattttnttaccatggncaaatcagntatatttatcactggaggatccttggcagagtgggtgcctttccttccagaaattgcacgcgattcagcagcaagaagagaatcataatagttagatctctcttcanagtcacgatgtctaatgacagttccaaagccacggcccactattaactcagcaacattcaccccattttgctgacttccagcaggtggagccgatgatggngcatcatcattgtcaaccttggcaccagacaatagaaagactgatccanaatccattactcgggaatcagcggctgatggaactac

SEQ ID NO: 65557 - DNA, 428 bp, Glycine max
  unsure (1)..(428): unsure at all n locations
cagaatcagtatcaacatgcgtgtctgtgtcaagggccccacacctctcagatatgctgtgtgtgcgtgcaaaagtctgggataggcatggttgtggtcacgtgaggaagggtaatcttggaaagaacttanatattanatgttcaattagataaatattcaatagtagaattaaagacagatgtcaattcttgattggctcggtatatatnttggctggtttctggcgaaggattagcatttcttgagaaaataatattgtgcagataacggataaaaatatatgcatatacaaaacaatctggaattgagcccaagggaaaaaaatgtaaatgagggtaaaaaaaaataaataaaacacacacacatgagcatagatcgagtaannaaaaaaagtcttgaaatgaatggtagtggtaaaaaaaatg

SEQ ID NO: 65558 - DNA, 419 bp, Glycine max
  unsure (1)..(419): unsure at all n locations
ttcgatgaagtgggtaatatatctggacgctcaaaattgagacttgaacctccaagaaaattgaaacgacaataactttatacacggatttccgacagattgccgtaatatatcgagatgctccaaattgaaaatggaaactcgtagcaaatntaaacgaaaattaatatatacacagatgtccaattgagtcccgtagtatattgagacgctccaaattgaaaacggaaggtcgtagaaaattcaaacgacgataactttttactcagatgttcgaaagagtctcgtaatatatcgagatgctccaaattgaaaacagaagcaggtatcaaattcaaacgacaataactttttactcagatgtctgattgagtcccgtaatatatcgagacgctcaaaatnttgatctgaagctctga

SEQ ID NO: 65559 - DNA, 329 bp, Glycine max
tacgagcttgcgtcttcaatttgcagcgtctcgatatattacaggactcaaccaggacatatgtgtataaagttatcgtcaattcaattatctcagagctatggatctaaattttgagcgtctggatatatgacgggactcaaccagacatccgtgtatgaagctatgtgcagattagattgctcagagcttctagtctcacattctgagcgtctcgatatactacccgactcaatctgacatgcgagaaaaagatgttgtcgttagataatctatgaccattcgatttcactatgagcgtctcttatataggtgactcaaccggcata

SEQ ID NO: 65560 - DNA, 453 bp, Glycine max
  unsure (1)..(453): unsure at all n locations
atgcatgctngnggntngatcacctattggtgtgtgctggtaggaactttagtttttacaaatgnatngnnncctnggaactngatggagtanggctagataactgtagtgctagacatagtgtgcagggntctagtttttattatgttgtgcttataatgctatttaaattaggctaagttcaacaagagacatctgcgaacgaagcttagtttatattagtccaaactcacgagacatcggtgttggtatttttgtcctcagcatagaacacaagaataatttcaaatagtgaaaaaccctaattgcatcaattatctcggtgaaaggacctaacccttttacttatttgttntcacactcaattgttcacgtttactatttctttgattaaaatagaatatacctttgttttcaattcatgatacttaattctttntacaaacaattgta

SEQ ID NO: 65561 - DNA, 431 bp, Glycine max
  unsure (1)..(431): unsure at all n locations
attttactaaatacaccccttgctcttttttggtgattctctatccgtaatgttaccgaaatttacgaatttcgtaacgatgctcgttttctttccgtaatgttacgaaaccttacggattacgtaatcatccctnttttgccttccggaacgtttacgaaacttacgaattgcgcattaacacttctttttatatttcggcatgtcacggaacttcaccgattgtgctacaatgctttcttttgacttccggcctgtcacggaacttcacgaattgcctaacgatgggtgccaagtacctcgaagtggcaaacgatggtcgcatcccacaacagatgagtcccggacganattanggtatgagcatgtccaacgtcttatacggtcctctntgctnnttatcggtaacacggaccattcaaaagcataaa

SEQ ID NO: 65562 - DNA, 292 bp, Glycine max
  unsure (1)..(292): unsure at all n locations
ctctgagagcttctgcgacagcccttgtactcatttgcttcgaggtaggnggccttcttcttagcgttggnggtgatatgcactacattatggcaggctagtgcaacgttaggttagcggaaccttagggtagaagacgaaacctagggtaaaagacgagaggggagactacaagaggacgccggaaaaaatgggggaaatcctgacggaggagtcttccggaagaccctttaggggttcttccggaagttccggaagaactttttccagaaagtttccggagaggcctaaa

SEQ ID NO: 65563 - DNA, 401 bp, Glycine max
  unsure (1)..(401): unsure at all n locations
ctctctctctcctctctctcttctaattttcgnntttagtctctcttctctnntctttttattntcgnnttttacaattccagttcagacttttagttntatcaataaaatttcgttctctatttgattaatggaacgctaagtccgcaacattgacttctcttgaggatcaagccagagtctctttgaggttctattattcatgttaaattctattcagttnttcctcttcactaattacatttgaatttntgctattaattcgtgcatgcttagtgcttgattaattgtctctgcacttaatntatgttcatgcttaatgatcgnttatgattaattggtgtgtgtgatgcttaatcacataatgaatgctntatgttaaatntcgctttagtaattaa

SEQ ID NO: 65564 - DNA, 432 bp, Glycine max
  unsure (1)..(432): unsure at all n locations
agctttatgcaaattcaaatgacaataactntgtacttgatgtccgattgagtcatttaataattcttgacgctagaaattgaatacagaagctctcaccaaatttaaatgacaataactttttactcagaagtctgattgtgtcccgtaatatatctagatgctcaaaattgaaaacagaagctctgagcaaattcaaacgacaatagcttntgactcngatatccgattgagtcatttaataattcgagacgctcaaaattgaatacagaagctctaagcaaattcaaatgacaataacttttgactcgaatgtccgattgagtcattntataatttgagacgctcaaaattgaatgcaggagctctcaccaaatttaaatgacnaataacttttactcagaagtctaattgtgtccctgtatttatcta

SEQ ID NO: 65565 - DNA, 498 bp, Glycine max
  unsure (1)..(498): unsure at all n locations
tcagaccaaagcaactcaagatctaagtatctaagactgctctttnntattggatttcaagggttgagaagtgaaaatgagaatggngtaaatntggagcaaactctcacctcacacaagtctataaccttaatctaaacttgctcaaactggttttacgcctaaaattccaccaaatcaaaatttgactcctcaacacccaaattttaccctagaaatggctcttgccttcactttggtcttttgttnttctcctttgcacatcccaagctttcccacagtcctaaatgacatttcaaactaggattaactcactttaacctccaatttctactgaatccagatgtagcctttcaaaccctcaaagcatcacacttttccactcataacactacattctcactttctaaccctaangtaactatacccttcatccctagcagntntccatcagcaatttcagcacataaacatcacaagcatcatcatanaaaccct

SEQ ID NO: 65566 - DNA, 416 bp, Glycine max
  unsure (1)..(416): unsure at all n locations
agcttatagtatgcccgagtcattcatccctatgtgatngtggtgaagnattggcgaacagaactgccattccttggattatagggttgaaccaagctcatgcttttacaaaaaggttcatcaagtcaagttgaaatatggaagtaaccatcttgcaaaattggggcaaaaagatgaatcgagtcacatcactgcttcgtctactggcaaacatatttaggaatgtngatgtccttgttacttctaggttcaccttgacaaagatgtcatggaccatgttgaanatctaaattgattcaaccccatatcctgcgtaaaaaatcgcaatacttcaactggacatcattcgcatgcatnccatgctttctttggttgcattgctcattgcattctttncttttgaaaataaataaaat

SEQ ID NO: 65567 - DNA, 437 bp, Glycine max
  unsure (1)..(437): unsure at all n locations
ctttatctagctctaccatgactacctgaataatccttgatactcttttgagccttgttccttttcctttgttttgaagctcactacaagccttaagtgaaaaccatgatttaccatatcttaagaatttggagctttggaatngttttgggaataagtgtggngggttnttgtttcattggacaacttgttttgttgactatgcttcatgatgtattttgggccatacttgatgtacattgtatattggttaaatgttggacatgctgaatgaaatgttgtttctcanaggcaaaaaanaaaaaaatatttcgaaaaaaaaaaaaagaaaaaacaaaaaanaaaagcaataaagttgagtgaataggatctttaatggcacaagaatgatgaaactcttggntctactcttcatgntnnaattttatctttacttc

SEQ ID NO: 65568 - DNA, 430 bp, Glycine max
  unsure (1)..(430): unsure at all n locations
agctttgttagaacatcacaagaaaatnggnttatttcatatcctatnntgttctagggttcaatttagaaggaaaaataggaggcaataaccttcttgactcaaaatttggaaatatttaagtaaaataatatcaccatgacaacacaatcataggtaaatacatacatgtacttaagccgaatcaatttggatcacatctttattttatgtttggtttggatgacttgttgtctaaaaataaaactaaatcaaaccatactaacaccataataagattgttttacacatcaagtagttaatctcttattcatggacaaaatacaactttntacaaattacttatctttattctttaactcttggtttttttttaaattttaaattttaacaaggacgtgatattcataagtttacttactcaaaacta

SEQ ID NO: 65569 - DNA, 528 bp, Glycine max
  unsure (1)..(528): unsure at all n locations
ctaagctttcaatgggtaaaggctcacatngactntcttctacatcttattcatacttgnccaaataaataataaagtcatctcgactcanagaaagtcatataagtctcatacaattaatatagaacctatatcctaatgtcacatcctatcagagcgtggtgttctcgtgtcctctagcatgaggttcttcatagtcatccacctattcatctgctcccccgaacacaagttcaagatcatcacaggatccaaacacaacaacacacagggagtgagttatcacattcctagctaatagagaaacaagacaattaaatatatatattatataaatgagataccacttgcttaaacatagctcacgtaacttcaccacttcgtcattcaaaattcacttttcaattatcaatcacattacacaagaatcccacacttcgatcaagatataataacacatcaattagcaagcatatgcaatagttatgctaagactcaattctatatgcaatgtggtaccatgtcagt

SEQ ID NO: 65570 - DNA, 427 bp, Glycine max
agcttttatgattatggggtacccgtcatatgtgttactaggtggcgatcgggcgatggtacaaatcaactctcccacatccacaaatcaaacatgaacccaccatccagagttgcccaccttcaactgagctcacgcacccccacgtagcccttatcctcgttcctctcaacaccgggtccccatcaacccctccaagcttccacaaaattcaagcaattcaatatccaaacatcatgaactaccctaaaccaagaaaatagggcagaggcagaaaaatcttcctaaaacacattccaataccacagctttccctactcaaataccccagtaacattctcttcgttctgattcgttaactgttggaatcaactcgaaaattactggaggtccctagtacataagtatacattttgaccggtgggat

SEQ ID NO: 65571 - DNA, 504 bp, Glycine max
  unsure (1)..(504): unsure at all n locations
tacgagaacaaacatttagatgtatgtttacaagacaatccttatcttaacgcannaaatgtcatgctaatccctctgattntagaacgaactcatataatctatttatgcacacgcgtatgtgtggaatatcctactatttatatcaacatagagggacatccaacacattctaattgtcatacacatatatgcatttgaaaagaacatacattctcacgcccaaggcattgcgtcaaagttcacacttaattatatcctaaacatttactattacaaactacctacacacatttgaaatatatatcatacaaattttattgtttctctcacatttatntatatgcatattggaaagctaattacatcctgcacacactngcattcaaaagagaattccatgctatcatacatccatttaggaaaataatcattcacacttggcagggatttcatgccccttatattacacatatatctatataccatngaaaagcatttccc

SEQ ID NO: 65572 - DNA, 397 bp, Glycine max
cacccgtcatatgtttgtctaggtggcgatcgggcgttggagcaaatcaactctcccacatccacaaatcaaacaagaacccaccatccccagttgcccaccttcaactgagctcacgtactcccacgtagcccttatcctcgttcctctcagcaccgggtccccatcaacccctccaagcttccataatatcccagcaatccaaatacaactatcatgaactaccctaaaccaagaaaacagggcagaggcagaaaactctgcccaaaacacattcacatattacaactttccttactcaaataccccaataacattctcttctttccgattcgttaaccgttggatcgacttgaaaattttactggaggttcctagtacataagtctacattttg

SEQ ID NO: 65573 - DNA, 419 bp, Glycine max
  unsure (1)..(419): unsure at all n locations
gcgctagcgcaagctaacctcgcttagcgaaatacagagatgtgctcagcgcatgatatgcgcttagcgagtgggctggttccttgaaaatgttnttaagttatttttagtccactttctcaaaacatgtagaacaatcccctaatatctctgactcataagaagctgatatcccccttttcaatgatcaaaaagaaaattccaacttatgcaatgtatganaaacaaaatgaaaggaatcagaactgngttgcctcctaagaagcgcttctttaacgtcattagctcgacacatatacctcaatgggtgataaaatgcaagaatggtgttgccttctcanactctccactatggtacaatttcaatctttgaccattcaccacccatgttctgtaagggtctngagattgtggatcat

SEQ ID NO: 65574 - DNA, 323 bp, Glycine max
  unsure (1)..(323): unsure at all n locations
tctatggnggattctcagagcattccagtttaattataaatacttggcgacccgatgcgcttgccgggatatcacttatgctttgatgtaagtctttgtaaacttaagaaaaaggaactgtgtggggagacgaacagcaccacattgcatttgagagttgaggtcaggtgcatatatcatactaagcgtgattgattgatactatggacgaatgatgactacttgttgagtgtatgtggacaacggatgtttgcgatgtttatggcatctgataatgtctcttactacatatttgatgttttgattaacttcttttatataaa

SEQ ID NO: 65575 - DNA, 421 bp, Glycine max
  unsure (1)..(421): unsure at all n locations
tactaagctatcctatggctggccttcggacttcacttccccgtaccacttcggannagattaagccaagccctactntcgaggggcagctcccaccttatgacgactatcccgggcaagacgatgaggaaggagatacccatctcggtcccctgctccacctcanagatctgtccccccatgaactaccccaaccaaacatagtccgccatatcccgacttcacccacactcgtaaaagaatctgttcccttcgtggaacataagggaaagattgaggcgcttgaagagaggttgagagcagtcgagggcctcgaanattacccattcttggatctagcggacttatgtctcgtacccaatatcgtcattcctcccaagttcaaagtaccggactttgataagtacaaagggatgacatg

SEQ ID NO: 65576 - DNA, 265 bp, Glycine max
atatttatatccggggcatgtccactcaaactcaacgcgatggtggacttccttcgatttgcacaaaactatggtaccatgggatctccacaggatgcgagcatttgctaacttgtatcttcaggtagccgtttacaagcatactcgtgcatggcatcacctgcaaataggtattatatcattcatcgacttttatatacagatggggtggactaactcctctataaagcgcctgcacattatttcatgccaaccacaaatatat

SEQ ID NO: 65577 - DNA, 323 bp, Glycine max
  unsure (1)..(323): unsure at all n locations
tatgattacctcacagcatggatacacaccgatcacncacatctaatggatgcattacacacacctagatgatagctccaaatatgcacttgcatgcgctacaaacatgacagctgcatgtactagctgcgatgagaggaatacatgtacttctagtattgcaatctgcatcagtagacgccacactattatgttcaccactactacgagtactgacacgcatttgtgaactctgtctacagctgntataacgtcactcgaagcatgtgctaatgctctgcgatcatgataaccatcaactgaaaacacacaattatggagtg

SEQ ID NO: 65578 - DNA, 345 bp, Glycine max
  unsure (1)..(345): unsure at all n locations
gtatgcccgagtcattcatccctatgatatttgttgtgaagtattggcgatcagaattgccattccttggattatagggttgaaccaagctcatgcttttacaaaaaggttcatcaagtcaagttgaaatatggaagtaaccatcttgcaaaattggggcaaaagatgaatcgagtcacatcactgcttcgtctactgccaaacatatntaggattggtgatgtccttgttacttctagtttcaccttgacaaagatgtcatggaccatgttgaaaatctaaattgattcaaccccatatcctgcgtaaaaattcgcaatacttcaactgtacatcattcgcatg

SEQ ID NO: 65579 - DNA, 481 bp, Glycine max
  unsure (1)..(481): unsure at all n locations
actagctctaccatgactacctgaataattccttgatagttcttttatgcctgttccctntccttggtntgaagctcactacaagccttaagtgaaaaaccatgatattaccatatccttaaggaattntggagcttttggaattgtttgggaataagtgtggngggttnttgtttcattggacaacttgttttgttgactatgcttcatgatgtattntgggccatacttgatgtacattgtatattggttaaatgttggacatgctgaatgaaatgttgtttctcanaggcaaaaaaaaaaaaaatatttcgaanaanaaaaaaagaanaaacaaaanaaaaaagcaataaagttgagtgaataggatctttaatggcacaagaatgatgaaactctnggttctactcttcatngtnaattnttatctctacttctntttaatttctaattntntttcttaatatgcacttattcccct

SEQ ID NO: 65580 - DNA, 452 bp, Glycine max
accttgtggtcctcctcatagctggtgcatgagaaaacatgctctattttcatctcctatttcaagtaggcctccgaatcattctttcctttaaatggaggaatgttgagtttaataccatcaattcggttttgtctaggaacaccatcattccctcttctcctcctttcttcttcattatgatctctattctccatttgatccaacctctcatggagcgcatcatctcgttgtttcattaacctctccaaatgttgcatcaaagcttgcatttggaattgcgaaagccccactccatcattaggattagtacctgacatctcaaacaaacaaatcaaacgtaacaagacaattatagttgttggttgaatacctcacccactcaagtgtatcacacaattatggcttttctctaatgaaacactcttgccttttaccactctaattcccct

SEQ ID NO: 65581 - DNA, 433 bp, Glycine max
  unsure (1)..(433): unsure at all n locations
actgagcttctgtttcaatttcgagtgtctcgatatattacgagactcaatcggacatctgagttaaaagctattgctctttgtatttgctacgagcttccgatttcaattacgagcgtctcgatacattatgggtctcaatcggacattccgactaaaagttattgtcgttagaatttactcatagcctttattttaaattttcaacgtgtcgatatattacgggactcaatcggacatccgagtaaaaagttattatcatttngaattgctcagagcttctggtttcatattggagtgtgtcgataaattgtgggactcaatcgaacatcccgagtaaaagttattgtcatttgaatttggacaagcttcattttcaatacgagcgtctcgatatatacgggacttatcggacatcgagtaaaagtattgc

SEQ ID NO: 65582 - DNA, 454 bp, Glycine max
  unsure (1)..(454): unsure at all n locations
acaacatagcaacacanaatctaggtgtctctcacccctcaattcaatgggttntctatttttgaaaactgaaattgagaatgaggtaagtttgaagcaaactctcacctcacacaagtccataacctcaatctaaacttgctcaaactgaatttacacctaaaattccaccgaatcaaaatttgactcttcaacacccaattttgccctagaaatggctctttattcactttgatcatttgtttttctctctagcacagtccaagctttctcccaagtcctaaatgacatttcaagctagtattaactcactttaacctccatttaccacagaattcagacttagccttccaaccctcaaagcctcactctttttccactcataacatcacattctcactntctaaccctaggttagttctacccttcatctctaacagntttccatcagcaa

SEQ ID NO: 65583 - DNA, 153 bp, Glycine max
gtattgcaccccattttacaaagacaccccctgccttttgtgattttttcgaagtacgaactacattcgacaactgttcttcgatgcacgacctgaatactacatcctttgatacgatgtacgactatatggcacagctcattattcggggcc

SEQ ID NO: 65584 - DNA, 449 bp, Glycine max
agcttaaaggaagtgtatatatttgaaacagtgattgttgccagatgtaaattaacatgttcccaatatgaagcttgcaccttatgacaaaccattaatatgtatttgtggtactgagataggtatccacaccaaggtcattaaaaaacatgatcaattaaactttcaatcaccagggaaagatattcagtttctttcttaccaataccaagtccacggtaaggtgccaaaacacctaacgtcatgatgtaaacccgaacttgccccccacctttcttcttctccagccggcatgcaattgctccaacacaaatatcactatagtaagctgaaaggcaaagtactcaacggtgttagacacattctataggtcccttgtatacccatcccttctttctgtatcattcatatatcaagcaaactgaaagcacagagatatcaaacaagct

SEQ ID NO: 65585 - DNA, 474 bp, Glycine max
  unsure (1)..(474): unsure at all n locations
cactcagctatggggctgaaatggctaactgacataccacattctttgaagttattaattatgacacataccttcgcgagaaaccaacacattcaatggaatctggatgagaagcgacgaaatcaataacatgtcaaccacgatactcgttttattaaagacgtaagaagaagcttaatatacatgctcaaatccctttacaaagaattccagagacaaatggaacaattggctcaatggataagtgatcgaagtcttgatgtttgggcacctactttaatactacacagactacattatgcaagaagataactttggtatgaattatattttcataaaacacaaaaatactanggtttgttagtggttggctctactgagctnntaaagaatggctaagaatttgttaaaacataagcacttagacaatgaaggaaagctggagttgctgacatgatgtccaacgtatgtcag

SEQ ID NO: 65586 - DNA, 385 bp, Glycine max
  unsure (1)..(385): unsure at all n locations
caaatgttgtagagccagngtgttctgatagttctaatggtagctagtcaatgtgctatgtatgttgagataatgagatgggaagccttatgttgcgtgtgaaatctagtatataaccactacaaagtggatgatagtggtgtgtggtttaacttgcgataaggctttttgtgcttggttgatgaggtgaaaagaatcaccgctactgttttttaggatcaaatgcagttagagctagtgcttgagctagagtgtggagtaagcaaatggtacccaaatgtggcacggggtgtcgaccactttattgagtacctcagattcatgatgatgtccttagttaagccttgagaggcaccagtgtacgtgaagtacttcatatgtggga

SEQ ID NO: 65587 - DNA, 537 bp, Glycine max
  unsure (1)..(537): unsure at all n locations
acacanacattcattagtccaacacacactcaacatttattattatccatccatagntncaatcaatcatgcttagtatgatgcatgcactngacctcgactctcaaatgcaatgtgataccatccctaagaaaatagcctaagcgtgtccacacgacactctcacttatgaaaactaggcagtaagtgttgaggtcaccctgtcgtgcacaggcaactcccccccatggtgatcagcctgagtctgaagggagttccaaaccgagtgacatgcccncaagtataagtattcctcctcatgagaaactacaagtacttactgacaaagtctatactatttccatatcatatgaagcatganacatgggaatcatcaatgcactgaccatggataattaaagaatctaagccatccctctccagagatgcttannactctctaaccactctatntctcccaccanggatatccaacaaggtcactgcacncnccatgtacatacacaacatacatcatcacaatgacatttttcacat

SEQ ID NO: 65588 - DNA, 340 bp, Glycine max
  unsure (1)..(340): unsure at all n locations
agacatcctacacttgtatctaattctcctcaaaacctcatcttggtgttgaaaggtgctaacangcaatggaaggctaaatctcttggtggggatttctgctgagctctgatgtaaaactcttcattatctatgtaaagnntttttaatgtgttcattgcttctatctatatttaattcttgcatgcttcgggcttgatcacccatttgtgtgtaaagctaggattnttagcattgggaagtgatttaaatccttacaattggatagagtaggctagagaatngtatgtctggacacagagtgcacggatttagtttataatatgtcgtaatcttaatg

SEQ ID NO: 65589 - DNA, 211 bp, Glycine max
tcaacttaaaatcacatgtcacacattaaaacaatatttttttaacaactcatcaagcaatttctattatatatgttattaattaaaatgataataataaatgtgagttaagaagttaaaaaaatatattcttatattataaatcctaaactctaattgaatgagactatgttaaggaatcatatatttcttagaaatggtttttaatgag

SEQ ID NO: 65590 - DNA, 440 bp, Glycine max
  unsure (1)..(440): unsure at all n locations
tactcagctatcatcaacatacagcacacagcagatcacactctttctttctcattatcacagacacctgaacacacatcnagtaagaatattttggatagagcatgccgagcaacagctctactcggcattgccttgtcagtttcccaaaatagagggaaaaatgacatccactcactgtaggaacatcagccttctaatggaggtagaagaaataaaagaatatgcatggcgtgctgctagtcttggtgaacatagggaacaaactgtactttgctgtagttactgctattatagccatagtctttggttcgaaagcgagattgagatctatattgtacataaacctctgacggaacggaatatngctacttattcttattgatccaatatacattgacttagttggttgacctttgtgtntagtttctaaataatat

SEQ ID NO: 65591 - DNA, 348 bp, Glycine max
tcttcacgtctggaaatgaatttatttatagatccaaagaccctaatgtgctttgctgatggctactttccgatccaagcttcaattggagacttgtcttttacagacttagatggacatctgtcgagtatgtaaacagcagtgtagactgcgtcagcctagaatgtgatatgtagtcattattgcgtgagcatcgatctagccatctccataactatgcgatgctttctctcggacacctccatttgttgaggagaatatgcgactgtaagatgtcgctcaatgccttcatcctcacaaaatctttcaaactcgcgagaggcgtactctctgacgcaatcacttctt

SEQ ID NO: 65592 - DNA, 430 bp, Glycine max
  unsure (1)..(430): unsure at all n locations
agcttaggttaaattaggctaaactttagtaagctacttaagttgagactagactatatgatggatttgcggacgaagctcagtttaagttagtctaaacctaagagggccatctaaattaagcctagtccaacaagagggatctgaggatgaagcttggattgatttggtctgacgagggatcgaggtttcataattttggctacaacatagaacacaaaagcatgattgattagagaaatacatttatatgcataagcttgtttgttagaaagacccaactttctacctactactgttacttttatttaccttgcattttatagnttttagcatanagtttagtttaaattctggttgcaattatcaatcatacatgttctctcaacaatgcttcatttctaaacttaactcagactaacattagttc

SEQ ID NO: 65593 - DNA, 454 bp, Glycine max
  unsure (1)..(454): unsure at all n locations
cttgcacgtatcagtcaagtgtatggaccatatcgtattcaattgcttatcgataatggntccagcttaaacgtgatgtctaagagcactttggagaaattaccattcaatgcctcccacttaaagccgagttcaatggtggttcgtgccttcgacggcacccgccgagaggttaggggagagatcgatctcccagtacatatatgccctcacacctgtcaagttactttccaaataatggatattaaccccccctacagctgtctgttggggcgcccgtggatccactcagtgggagtngttccctctacactccaccaaaagtngaaattcgtagtggaagggcatctggtcatcgtatcaagcgaggaagacatcttggtgagctgcccatcctctatgcctgatgtggatgccacagatgagtcattagaaaccgctttccagtcttttg

SEQ ID NO: 65594 - DNA, 449 bp, Glycine max
  unsure (1)..(449): unsure at all n locations
gctatttctgaattgcacggctccttctgcattgctctanngctgggngcctcacccctcagagcacaagctggattctggcaagccacctgtgtcagaaacctcattgtgctcataatagatggcaggcctgagctcgggagactctgcatgataatggtctgccctctgtggaggctctacatcatagagtgaagcatctctagagtaagcacaaaatctgatgcangagcagaagaagctgggagctgaattggaaattgagctggtatggaagcaggagtggctggagtagaagaagaaggtgttgctgaagtanggtctggtaaagtagatgaagaaggagcagaggcatctggtgctgctgaagtanggggagcctcagatctcttacccttagccttcctttgccctctgaatgtcactggtggatcatctagatcccctac

SEQ ID NO: 65595 - DNA, 347 bp, Glycine max
  unsure (1)..(347): unsure at all n locations
tgagtcatttaataattcttgacgctagaaattgaataccgaagctcttaccaaatttaaatgacaataaccttttacttagaagtctgattgtggtccgtaatatatctagatgctcaaaatgaaaacagaagctctgagcaaattcaaacgacaatagcttttgacttcgatatccgattgagtcatttaataattcgagacgctcaaaattgaatacagaagctctcagcaaattcaaatgacaataacttttgactcgaatgtccgnatgagtcattttataatttgagacgctcaanattgaatgcangagctctcaccaaatttaaatgacaataactttt

SEQ ID NO: 65596 - DNA, 444 bp, Glycine max
  unsure (1)..(444): unsure at all n locations
tggatttcaagggttgagaagtgaaaatgagaatggngtannattggagcanactctcacctcacacaagtctataaccttaatctaaacttgctcaaactgggttnnntacgcctaannattccaccaaaatcaaaatttgacttcctcaacacccaaatttaccctagaaatggctcttgccttcactttggtcttttgtttttctcctttgcacatcccaagctttcccacagtcctaaatgacatttcaaactaggattaactcactntaacctccaatttctactgaatccagatttagcctttcaaaccctcaaagcatcacacttttccactcataacactacattctcactttctaaccctaangtaactatacccttcatccctagcaagtttccatcagcaatttcagcacataaacatcacaagcatcatcat

SEQ ID NO: 65597 - DNA, 255 bp, Glycine max
aaccccatacccacgaaatttaagagagaaagaagtccacccaaaccttgattttcgaagtcccactcgtagccacgcacttcacgaccccgaaaatgccctcctttcgcgatttggagcagaaatgagcaccaaaggttggagctttgttggggtttcaatggagaatggaggagaaggaaaaagaacgggaggaagagggagagcttctgaattttctggtttggctgagtgaggagagagaaaagctttttg

SEQ ID NO: 65598 - DNA, 284 bp, Glycine max
tactactgatgaatcctacatctcctacttatcagtgagccagaccaaccatatggcccaaagggtaatgaattcctccacctccaattcactcagggagcacatacataccatatggctcaaaatgaatgaaatcctccatactcctactcaaccaagtgagacctaataaccatttggctcaaaatgaaagaaatccacatcctcctactcaactaggggacctataatcatttggtcaaatcatgaaacctacatctcctctaactaagggctctacaaac

SEQ ID NO: 65599 - DNA, 410 bp, Glycine max
  unsure (1)..(410): unsure at all n locations
tagaggctataaaagattactcatctcttttcttttcttttgccaccttattataaaagttagttgttggtgcattacctcacgaagagcatcagcataagaactcatatctgtgagtatcacaagaacatgcttgccacattcatatgccaaatattcagcagtagtaagagcaatacgaggagtgatgatacgctcaattgtaggatcatttgcctataatgaatcacagcaacaaaagagagaattntaatgatcagttccttcatacaggtcatgaaatcaaaatttgaaaataacacaatgataatccacaaaaaanacaactgggaggtcataatccatcaaatgggtacttctatagaaaattctatttcaaattttacaagtaattagcttaacaaggaaat

SEQ ID NO: 65600 - DNA, 402 bp, Glycine max
  unsure (1)..(402): unsure at all n locations
acatngagctataaattcttattgaaatntgaaacatctacccttttaccanataaaaaagaataaaattcaattgtatttgnggctatgntgtttggtntgtttattgtttctggaaattacacttcatttgaaaaaattgtaacgtacaaaatttatagcttgctctgaacttgtaacagctactttggcacccatgtttcacatgcttggtttttntgttttttgtttgcttgtgctgtataccttgtgagatcaaaataacatgtcactctctacttattctttctattattaaatattggttataattatggcacgagaaattcttagtgctgaatcttcaattcgcaggaggagtgcttgcagagactacanagtcgcattgatattccatacgat

SEQ ID NO: 65601 - DNA, 480 bp, Glycine max
  unsure (1)..(480): unsure at all n locations
atccttaagttggcgcctgctgcaagcttgcagctggaatatatatcctatcttctcagccaatgggtgagtcccgtccaagtagttcctaagaaggtaggcctcacagtgatcaagaatgaaaaggatgagcttatccccacaagagtgcagaacaactggtgagtctgcattgattataggaggctgaaccaagtaaccagaaaagatcattntccgctgccattcattgatcaaatgcttgagcgcttggcaggtaaatctcattactgttttcttgatggtttttctggttatatgcaaatcactattgctcctgaggatcaggaaaagaccacattcatctgccacttcgacacttttgattataggaggatgcctttcggcctgtgcaatgtccctagtaccttccagcggtgcatgattagtattttcagtgaatttttaaaaaattgcatatangtgtttatggatgatttc

SEQ ID NO: 65602 - DNA, 468 bp, Glycine max
  unsure (1)..(468): unsure at all n locations
ctatcccatactcgccctttatttaggcacttagctntcattattttgcagcatacacacttattcattnntattgtacttacnagtttttttaacacataaaacattatatacataaacagtgtgtgtatactattntctttgaccatntcaatcgttacccagtgcctcccccanatttgggacaaatttgctntgaacctagctttngtggatgatgctctcctacaacctanaataaggtagcagaagatacaactgaataggctccaggttcaatcaatcaataaattcattcagctcanactgngtgcaagggataattcattcanacatatggtcagctntttggtaagtggtattctaataaacatggattcatatctcaattatgcatcagccatactcagagattacgcaaaatcgtactaatgatagtgtttctctanaatataaaatcacactcta

SEQ ID NO: 65603 - DNA, 400 bp, Glycine max
  unsure (1)..(400): unsure at all n locations
gcaccaatatatttatcttgatgcatactgatgatcttgatttctgctagctgatttaggaatatcatgctgatttatagagcagtttaagattctagatccttcccccatttgtttttcacagtactttatgtaggccagtctgattaatcaagagcgcagcatcataagatatctgcacaaatgaaatcatgcctcaccttccttgtatttctgagcttntattgcaaatcccaaattgcatggtattaatgttattatatacattgtcttcatgtctgtgcatcctacaatggataataatatagcttggtttacttttattcggaaagcaaatggtgctcggttaattaacttctaaggtgtaactgtgccttggcataagatgctaaatggtctt

SEQ ID NO: 65604 - DNA, 182 bp, Glycine max
atgcaagtgcttaccaccgataatgaagagaacggcttaatttgtatacgtataatctttgaccttttgaggaactttacgccaactctagaaaatgaagtccagccgtttcttgacttcgtctgccagaatttaccaaatttaaactaactgttagccatttctttgaccacatggcaatg

SEQ ID NO: 65605 - DNA, 387 bp, Glycine max
  unsure (1)..(387): unsure at all n locations
ctatagtgaacatatatttaacttcgcaactgttatgatcaacatattggttctttgattcgtttacatgcggtgtaaagtatggataagatttctttcttcttttcaactatatccctctgcattgcacccttcattctatgataaagaattgaatcagcatctgatcagcacgtttgatggggaaagtgattcatgtataataataatgaatctcataaaaagaaaacaataatacttcaattttatatttataatctctaattatgagaaagagaactccaacaatgaggatggattcatggagacgccaccaagaggaatatatgtaatgggagtgggagtatatgcanaaggagtatcaattaataagtattttaaaaaatg

SEQ ID NO: 65606 - DNA, 420 bp, Glycine max
  unsure (1)..(420): unsure at all n locations
gaaagcgtggaagagtcagtctttctatctttgttgttgaccacatagtggtacctggagatatgtcgcggnggtcaggagaccttggggacgtcaggtggtgtgctattgcccaaaaccaagcttgaccaatcccgacccaacccgggcatagtcagtcagtgagaacctgtgacgtacctaaacaggcgagcttctagcagtcaaccaataaaagaataaagtccacacagcaaggaggcttgtgtggcggctggccaactatgaatcttgagtggtatctggaagatggcctctggtaatcgattaccaagggtgtgtaatcgattacagggcttagaaatggagacaggaagttaaaatggcctctggtaatcgattaccaagggtgtgtaatcgattacagggcttaaaaatgga

SEQ ID NO: 65607 - DNA, 436 bp, Glycine max
  unsure (1)..(436): unsure at all n locations
tgaccactgttcttccttcccacgatgcttcttttcatgtccgcctgagtgggcttatagcctaaaccatacttcccacgatttccttgggtatttatcaggctagttatgccgccgttgtctttgcctatacccatcccgggttcataacctgtccccaacataactcgggccatcattaccgctgcatcggacagacaaggctgcccatagagggagtccacggaggaaatgctgactcacctcaaagactggaaagcagttctaacgattcttctgcggcttccacataaggcatggaggatggngcagctaccaagatgtcttcctcgcctgacacgatgaaccaagtgccctccactacgaatatcagctttgggtggagtgtagaaggcacaactccactgagtggatcacgggcgccccacagaacact

SEQ ID NO: 65608 - DNA, 366 bp, Glycine max
  unsure (1)..(366): unsure at all n locations
agctttgcttctacatcaagaaccttgatggccattatctcattgagaggaatcttctgtattaagagcaaatcttttctccaaaacatgcctccattttcttcttataccataacatcaatatggttattattaaatgcaccactgagaaaatagaccacatactggagtagtgaaatcaatgttataatactttcaagttgctagcattttcccttttcttaaaccaaactagaaagtacattcaaaaactttacaaagatgcttttttcccaaaccanaatgttcctttcaactccactgataatgtaattgacaaatgctctcattcaatgctaattaatatcgcaaactttaaaattgagt

SEQ ID NO: 65609 - DNA, 462 bp, Glycine max
  unsure (1)..(462): unsure at all n locations
gtctcggcaaccaacttcgacggatcatgatcattctgatagaanaaagagggttagaaacttacctcagccacaaaagaaatagttaaggtaaaaatgaactcatttcacctgaagcaagcaagtccttccatctattagaaggcgagttccagctgcttcttcctctgcatatattacatgactgtttccatccaactgtaacaagtggaaactgctagttaataactcaagtaccagatatagaacanaagaccagttataaaatagtgatgttatcgataaaataccactgtgttagctaaattggagataaatntatagatgcagcacaataatattgtagtttatgactagcatgaattataaagatgcactntatgcacacatgtcatttctagctagactgaccaatcgtagactatccatactanagaaatatctgatgctntaataaatatc

SEQ ID NO: 65610 - DNA, 311 bp, Glycine max
  unsure (1)..(311): unsure at all n locations
acacaagacgaananaacccaataggtgcaaatggacaattaccacacgtgagggggaagaattggaatgaggagtgaaaaatgcgaaaacttgacctggtgtgagtgctattgagagtgtctggtagagccatggactgaagaaagagcgaatctccgaagtagtgagataactgcgaggacattttaaaataagatagtcgagaagattacggttaacagagaaaacagagtggataatgagaggagatattccggcgaggctttacatggtactatgcctgacgcgaacttgtagatggtgtcgggtt

SEQ ID NO: 65611 - DNA, 435 bp, Glycine max
  unsure (1)..(435): unsure at all n locations
agctnttctntcctacattgaaccacgaagttgtttatatgcttttcagagtaaagttgtatataatatgcttgataatctattaacttgaatgattaaaatgattatttcaacaagtcctctatttttttctttgattagctatgaacatttaactatatagtcaatgtatagtatacatactaataccattgcaaatataaaatgggaaacaaaatccattatactcacttagcacttccatcattngaatcatcatcaacccttatgggcactgcctcactggtgcctcactatctaaagtttattcattcaccaattcaacttaagattaattcaaattaaaacatctccacatactaaatgcaacattnttctttcaaacctacaaaaactngagtttctttagctttgacaattggttagatgtttctt

SEQ ID NO: 65612 - DNA, 398 bp, Glycine max
  unsure (1)..(398): unsure at all n locations
tcttggtggtgaagctccttcttccatgtcttattccctagtggatggcgcctactctcccctcctctcctttgtcttccactgcatctccatggtgaanaatcaccattgaaggacctcattgaagctcacagatccagcctgcatagaagcctcacaagcaagcttccatcaagtggtaatcagagcacaagaacttcaagtaggtgctccttagacctccattaattntttttctttaccttctcttccattgatgatgcttcatgtttctccatgtatctcctcacatgtcttgttctacatgttgttaacatgattatttagagtttccaccgattaaacttgctttagaagctagatttgattntctatggttcacatttcttggtcttggt

SEQ ID NO: 65613 - DNA, 343 bp, Glycine max
cctaatgcccataacctatggaataaaaagaaacttaatggctgagtgcaaccgaaattgtggcaaccaaaagtcacccccaacagccaacaagtcaaccaccatttggtctcacaaaaagctgatgcctatgttgccaaatgtgcccctaatacaacttgaactaaacctaactaaagcccttttagttgattgacccaaaacataattttggtcagccaactttacaaggattgggccaatatttagacaaactaaacactctaaaattgagacgaggtggtgtcatttagtcctcctccatttgggccatgatacaactcacaaccctggacttttctcc

SEQ ID NO: 65614 - DNA, 338 bp, Glycine max
  unsure (1)..(338): unsure at all n locations
ttacatggatcgctcgaaagcgtagaatcaacacatcactgccttttgaaagaactacgtaggtctgatttcctcttctatggagggtacgtatgatcaagagccccgctcttgtcgacctcaaagataaaagagaaataaaagtttagatacataatntcacacaattctaatctaaggctgttgtccttagggacaaacatgagaggtgctaataccttcctcaaacgtatagataactcccgaatctggaatattcttcatgaccagtttcctttggtttttctaacgtttcctttcataaacattggtgggactccgccattttcctctatgga

SEQ ID NO: 65615 - DNA, 389 bp, Glycine max
  unsure (1)..(389): unsure at all n locations
gatgccccacattatttccatgacacaaatgcaaaaatgatgatttggaaactttatgcaaaactggtcatgcatgcatctatgcggacactcaaatgtcaaatttttatggtcatgtgatgctagggctcangattcatttcctctattntaatcaacccaatgtttccaaaatatgttcttttatcaatttgtgcattcatccgagtccatttcgggcgtccggngaaatttcacagcattcacccttcaggtgtagacacattttccaaaaattggttatgatcaatgaatttttttcaaagaaaagttggaaatcgtctcttttcaaaagcatgtcattttttagctagacaacttattntctctttntccacctttttccttac

SEQ ID NO: 65616 - DNA, 421 bp, Glycine max
  unsure (1)..(421): unsure at all n locations
cacttccatgcatagttttttggataaaatgccctcatataaaaagggcaaggagactcttctgtgttgttggggcaacaaacgatatanttgtgtgatttcgtttcaacaaccttaaaagtttgatgcaccttcatcacatatttgttcagtgcatttttgaccgcatctntactgtcaaaatccatgccaacatataattcttgtccaacattaaaagtcgttggcatgtccagaccacaaatgtcctcctcgtccggatgactccaattgatattattataatgcatagcatcattccaaaatgggatttgaatntgtggtacacctaataatttttaaaaaaaaatcacgtcaacaaactactcctatntagttacccattaatacaattctcataanaagatagatgtattcaaat

SEQ ID NO: 65617 - DNA, 417 bp, Glycine max
  unsure (1)..(417): unsure at all n locations
ttttaatgtttaangaattactatatactnngagcccacgttagatatcagattctaaagaattaattattttttgtattaattttaaggtagagatcatggatgtttttaataaatttcaatttattaaattaaagattatatttatttggaatgtgatccgtgttggtctaagaaattttgtgcatagtatgcataattatacaatgattaaaaaattattcttgcatacttttacagcaatacttcctaaggttatgtaattatacaaatattttttatttttttaatcattactttcgtccttcttgtagggggtgttgtttaatgcgctcagaattaaaagagatagtgtagaanaaaaaagtggnggtcatcttgtattatatgaaaccttaagcggagtgttagcctaat

SEQ ID NO: 65618 - DNA, 441 bp, Glycine max
  unsure (1)..(441): unsure at all n locations
ctaagcttactattgcgagtggctacttcataatatgacatgcttttattttatagtcatacaanggtaataagggggatagctgnttgaattatccactatatgctatngngatgtaatactgatgattatatgaattattgttgccaatggtagatttctttaatcattatagatgtatcatttacatgcttcagtctcacactgatattatctatataatcaggtttctcactcatatgtggagggcagaacttctgtagaagaatacattctatctataaagtctattgttggacttggtgttcttgtataagcactangtattgtaaaggataaggaagaccttacaagccttgctgtggaactagcgaagaacaatcgggtgttttcagtaccaacttgtatagcttgtgcttctcttgcgcccagtgatataat

SEQ ID NO: 65619 - DNA, 446 bp, Glycine max
  unsure (1)..(446): unsure at all n locations
agctttanattgagacatgaatgacgctctgattccacttgntagacaagtggcctcagatatcttaagaagggggggttgaattaatatattccaaacttttctcctaattaaaaatctatcttactttttacttaagttatgaattcccttaatgacaatcttcttaaatattaattcaaatgaagcaacttgaattatgaatataaagcaataataaataaaggagattaagggaagagaaaatgcaaactcagttttatactggttcggccacacccttgtgcctacgtccagtccccaagcaacccgcttgagagttccactaacttgtaaattccttttacaagttctaaacacacaaggacaacccttcctttgtgtttagagattctttacaacaagagactcacagtctcttaatcccttagagaatgagaagaaga

SEQ ID NO: 65620 - DNA, 388 bp, Glycine max
  unsure (1)..(388): unsure at all n locations
tcttagctgcttttctttcttacccactcctcacgnttggtttttatggaanaacaccataactaaacgcgccgcaagggatccctatcgcaccagatccaaatctagaacgatgggtgatcaagaggagacgcangaacagatgaaagccgacatgtcggctctgaaagaacaaatggcctncatgatggaggccatgttaagtatgaagcagctcatagagaagaacgcggccaccgccgccgctgtcagttcggctgccgaagcagacccgactctcttggcaactacgcaccatcctccctcaaacatagtaggacggggaagggacacactgnngcacgatggcagccctcacctgggatacaaccgagcggctacccttatg

SEQ ID NO: 65621 - DNA, 440 bp, Glycine max
cagtcactagccttcaattatgtaaaagttttctttaagacatagtaaaaagaattattttgataagaagaagggtcaaacaaagaaatatcagtccttaatgtcttgttgtaggaacatacttagctctgtcctctttagcaatcttgtgacgtctcatcttttcccacagacgtgcaagctcctgtttagaattaaataacacctcgtgaattcccagccatcaaggttacagcactgatgaaagaacaataaataaataaataatatgtcttacttgctcaagagtgaaatgtcgctttctcttcttttttctagcatctgctagttcctgatacgaaacaatcataatctcatctaatcaatcaaaaacaaataatctctaaatgccctcaacaataactaatattggcataaaacaaaacagaaaattgctatta

SEQ ID NO: 65622 - DNA, 389 bp, Glycine max
  unsure (1)..(389): unsure at all n locations
atgctagagtgtgtgatacattttcatgaaaggtaggtatcataactcccatttttcgtgtgttcttacttgacanacagtgtgcatataagaattttttcaattgagtacaactttgccccactgaatttgtcgtacagggtttcccatcttacctaccaataccatntgcaaaggcctaaacttagtttgtcagtgcttgcaggagttaacgtaagagaagttaatgatctttcttcataaaaataacccgaagtctatgtagaaagaaaaatataatttagttaccaactttctttatttttggttatggaattaggccaggtagaaatctttgatataattctgaanattcccaaaaaataattatcacgatggacagatcacga

SEQ ID NO: 65623 - DNA, 409 bp, Glycine max
  unsure (1)..(409): unsure at all n locations
tttttcttaccccataaagttattatgttagacattngtgagacanaatgatcaagaggcaatgggaccctgaaagtgtgaagttgagagaaacctagatgaagtgtaggctactttatgagtggcgttagtctatgctcaagtccttggaaagtggttattgtgtgtggaactgtatggttcatgttggatcaagtcgagaatctagaagggggttgaatagaatatttcaaaatcttgtgttgtcaccacaatctgttgcccttgcactttagcacacaagaacccagtatcaccatcaatatgagttatggtatagaaaaattntacaaggtctatgtagtaggtgcacttcatctccaccaatttcttcaacccgtgataatactagttcaactcaggaaaaaaa

SEQ ID NO: 65624 - DNA, 437 bp, Glycine max
  unsure (1)..(437): unsure at all n locations
tgtagttagtttgtcagatggattgtgaaggaatgcattgaccgtatctcggtgagagtgttgatccttatatttgagagaaaagactatcatttagtactgatttttgcatgaatctctaaagtatggactgaatgcatganattgaggatgatgaagggccatgttgattgtgatagccacttagcgtanaagttgaccacgggcttgaatgaattatcctttgtacccagtttgagctaagtgaattattgattgattgaaccctaagcctatacagtgttatctcctgctaccttgacttangttgtaggagagcatcatccataggaagcgtggttcanagcanatntgtcccanattngggagagacactacgtaagaatnggatggtcaaagtanatagcatacacacactatgtctgtatatacacata

SEQ ID NO: 65625 - DNA, 399 bp, Glycine max
  unsure (1)..(399): unsure at all n locations
agcttagttatgagatgtttgtgtgtagctaagctctagctttctaaggaagttttctcaaagaagcttctcaaggaagttttctgaaaaaagcttatcaaggaagctacctagtctataaatagaagcatgtgtaacacttgttgtaaatttgatgaatgagagtcttgtgagacacaactcaaagttcaacttctctccctttntcttcctttaatttcgtgctcccccctctctctttctctccctctttcttttcctccattgaagcatcctctccaagcttcttatccaaggctcatcttggtggtgaagctccttcttccatggcttattccctagtggatggcgcctcctctcacctcttctcctttgtcttctgctgcatctccatagtgg

SEQ ID NO: 65626 - DNA, 468 bp, Glycine max
  unsure (1)..(468): unsure at all n locations
cctttcatgaatgatgctctcctacaacctaagacaaggtagaaggagataaactgtacaggctcaaggctcaatcaaacaatcatactnttagctcaaactgngtgcaagggataaatcattcatacacaaggtaagctttttggctaagtggctacttttaattaaaacatggccttcatcttcttcagactcatgcattcattccatattcagagattcatgcaaaaaccattacttactgctagtcgttctctcacaattaaagatcacactctcaccaggttgtggctaacgtgttccttcataatcaacctgacaaaccaactaacattttcagtcatgatcctaattccatgtcttttctcttctaatgattgcatgctcattcaaagcatatgaattacgcatttcaattcactcacatcatacaatcgatccattcanatcaatcaacanacactgatt

SEQ ID NO: 65627 - DNA, 351 bp, Glycine max
  unsure (1)..(351): unsure at all n locations
cggagtgagaaacatgngntcatttgctatgatgcaagctcaaaatgctacaatattgtacaatccaaacaatggaaagacaattgtgagccgagattgtctagttctatgaagaaggcacatggaattgggaggagaaagaagacacttatgattttttcccgtactttgaagaaatagatgaagaagccttgactccaaatgattcaacttcagcactttcaccaactccttcaaccaatgaagcctcatcatcttncgaagggagttcaagtganaggccaagaagaatgagaaatattccagacttatatgatgaaactgaaagtatanatgatttgttttgtcttt

SEQ ID NO: 65628 - DNA, 375 bp, Glycine max
  unsure (1)..(375): unsure at all n locations
taggttcanacgtgactcanngtgtttgtgatcaactaccgngactaaacacgctnggcatagctntggctcgcatagantttgcaccanagggtttgaacgctccccacactcaccctcgcggcactgagatccttatagtccttgagggtactctntatgttggatttgtgacttccaatcaagatggaaatcgcctcttcaccanagtgctgaacaagggtgatgtgtttgtgttcccaattggtctgattcatttccaattgaatgtgggatatggcaatgctgttgccattgctggccttagcagtcaaaatccaggagctatcactattgcaaatgccttgnttaaagctaatccgcctatttcttctg

SEQ ID NO: 65629 - DNA, 328 bp, Glycine max
  unsure (1)..(328): unsure at all n locations
agctttatgatgatgaatcaaagtagtttgatgatgactaaaagcccaaaagaatgatgtcaagattgagtccacaagttccagatcaagattgatttccagattccagaaaagacatcacgaagattccagattcaagagaagatgaattcacaagcgaagtattgaaaagggattttcaaaaaccaaacatagcatagttttgttttacaaaaagagtgttctcaaatttttctaagttaccagagtatntactctctggtaaacgattaccagtttcctataatcgattaccagtggataaaattgatttcaaaaagtttttaac

SEQ ID NO: 65630 - DNA, 433 bp, Glycine max
  unsure (1)..(433): unsure at all n locations
tagaccggngacccctangctctngatcttgactngatagaacctctntntaagcggaggcgcctgactngatcccatgttntactaaagtggaataaaaaccagtgcgaatcaagactctgacttctatcacaggtgaaatggatgaatgcatgaagaaatgcgtatggaacagaatgcatttacggatacgagagcccgggagattgtctctttcttaaatacaacagattcacctccactccttatgttcccatggacccgggtatagggccccttttcaactcatcgtgtgtgcaaaanaggtgttggtgtngtgtgcatcanatgaatacatatntatcacatgcatacattanaacacgcttaaagcatcgaagaagtttatacaagaacataaaggaaaagggaaaccgatgaaggggaaacacaa

SEQ ID NO: 65631 - DNA, 369 bp, Glycine max
atgctctttcgaggaccaagtgtgataattacggccagctcctccttctctcggcccccaattttgtcttcattgatgatctccgccggactctacatgacagccctacgttcatggcccagatcgataaagtcaaggcccaacctactggcctttctgattttaccttcataacgggcttctcttcttcaagggccgcatatggttggatcccaccaacccattcatacccaaccttgtgctcgaatatcacgctacccccttgcgaggtcatttgtgggttgccaagaccctacatagacttcagtcgagcttccactgggacaccatgcgcaatgatgtcacgcgctctgttcgggaatgtcatac

SEQ ID NO: 65632 - DNA, 470 bp, Glycine max
  unsure (1)..(470): unsure at all n locations
caacactggatcaatagtgtactcgggatccattctctntcatatttcanacagtatcaacagattgtatgtccagctgttaaaaatggcttacacgagattgaagatgagatttctacatcgaccacgaatttgaggccccaaatttcacctgcctttcaagctcttataggaccaaaaacaatacaaaaaagacaagatattcaagcctgcagagtgtatctcaaggatgccattatgcaataaactcacaaaagatgagaattatgaatcaaattaagcaaaactatatctaagatgaaatgtgtaatattgaagggctatgtnttacanttccttttcactttggtcttaagttcatggttatcattctatgggacaaatagttntacaattgcacttgtactttattgcataatgcagtgttctgcattaagtttatattatatgtctgctgagatatcaactcc

SEQ ID NO: 65633 - DNA, 311 bp, Glycine max
  unsure (1)..(311): unsure at all n locations
attgatgagccatgatttgtgggttgtaaggctcgacataaaatttgatatacctggatccagggtgtaacacgctaaaggtattatcataattacacttttgattctaaaatatgaaaaataaaaatatttatacaacaatcttatgcgaaagctaacatataaacattacaacttgattccattgataatatcaatacaacttatttctcatagctttcacattatacaaaatataagaaaatacagaccanataaaataacttagctacatatccatgacgaggttcatgctcaacaaattgaccata

SEQ ID NO: 65634 - DNA, 478 bp, Glycine max
  unsure (1)..(478): unsure at all n locations
gactcctccatatanggacctagatgagctagtccaactttttataagagtggagcaacaacttanaaaanatctttcttcanaatcttatggctntcactctattctaaggaagaaccaagccanaggaaatttgtgggttgcaccttcaaaacccaagaaagataagggtaagaccatagagaaatacacccctaagactagttcccaagcaaggactagccacattaaatgcttcaaatgtcttgggagaggtcacattgcctctcaatgccccacanagaanatcatgattatgaggggtcaagatatttatagtagtcaaaaggagactacttctttcccttcctcgagtggaagtgaagatgaagtaagggatgaagagtgtagtgaggaattctacccccatgaagaaagtgacctcctaatgngtagaaggctccttggaggtcaatcttgtgatctatctcaatcctaa

SEQ ID NO: 65635 - DNA, 291 bp, Glycine max
  unsure (1)..(291): unsure at all n locations
tcttgacatcatcaacatctgcatgattgacattctccccctttatgatgatgacaatcacctgttgggtaggagcaacaacaacacaaaaatctatttgtntatagagtactcccccttggatatgcaatgttcgcttatatgagacaggtgaaaatttcataattttcatatatgaaaagatgtctcataaagaagagaaaacctttcctactattttatctgttaactttctatccccctttgtcttcatcagacattatatcatgaatttgagaggagaaaaatgtg

SEQ ID NO: 65636 - DNA, 328 bp, Glycine max
ctataaccagagaaacagaaggtgatctaataacatgcagagattcaatagtcacttggctgccttctagtagcgctcctataacgtcttgagctggacacctaatgatttgtcagtcacggacctaggactattgactacctttggctatggactatggtcgcatataggtcggccatgtgtcgtaagcaacactctaacctttctgtggatgagacgaggagaactctacaggtggtggcggcgcgtatgttgcccactgcccgccatcctcatactgttgaggtgcttcgacttgcgcctgcctgcgagcacaatacttcttgat

SEQ ID NO: 65637 - DNA, 354 bp, Glycine max
  unsure (1)..(354): unsure at all n locations
ctttccctatgtacttgggtgatatgttcaatcctaatctccacaagaactcatcgtccaatctatcaaacatggcaggattntttagatgccctacccacgcatnncttcaaccaatggtatcttctggtcctatgtcgaggtgaaccgaggatattgaagtgtcatgtctttgggaatggttgttgtaagccaacctttgtcccggaggtctgatatttcttgtcagcaccgccatgtatgagctcgggtttatatggtgttgttttctagctcaatcagcttcagttggattactctcgacgtggtcctgtgggttgtttcctgaagccacctttcttggcatctccctac

SEQ ID NO: 65638 - DNA, 446 bp, Glycine max
  unsure (1)..(446): unsure at all n locations
tcttccacttctattccaacttcaccgatgaattcctcttttcacagcaatggcccgggaggtggccgcattttctcttgcagtggccatagtggtggtcgcggctatggtgatggccatggtggtagattgatangaattctgctatcaactggaacaagcctttccaagtgtattctcgtgggcccaagcccaataaggcctaaccgtatctgtgtggtttgtgtagtggaagttagttatgggagagagaatgttgagtgtgaatgctgttatatatgaatggngctagtatttgtaggggtatgggggatttggaaatataattggagacctgagaacctctctgtgttgttggaggagcatggctgtcatcttgtgttatcctatctcattctctgtgttacagtttcctttgtaataaacacctatagaaatatggacat

SEQ ID NO: 65639 - DNA, 389 bp, Glycine max
  unsure (1)..(389): unsure at all n locations
agcttctttaggaatcttcttaaggaagtttctcaggatgtgagcttagntatgagtggtgtgtgtgtagctaagctctagcttctcaaggaagttttctcaaagaagcttctcaaggaagttttctcaagaaagcttctcaaggaaactacctagtctataaatagaagcatgtgtaacacttgntgtaactttgatgaatgagagtcttgtgagacacaactcanagttcaacttctctccctttttcttccttcaatttcgtgctcccccctctctctttctctccctctttcttttcctccattgaagcatcctctctaagcttcttatccaaggctcatcttggtggtgaagctccttcttccatggcttattccctagtggat

SEQ ID NO: 65640 - DNA, 338 bp, Glycine max
  unsure (1)..(338): unsure at all n locations
gcttcttagtttcagatgatgcagatgggtttgtagctacctcatngcactctctaatgactatggcatcatttctggcgctaaactgctgggagttggaagccatcttctcaattaaatttctggcttcagcaggagtcatgtctccaagggctccaccactggcagcatctatcatacttctctccatattacagagtccttcataanaatattggagaagaagctattctgaaatctgatggtgggggcaactggcacatagtctcttaaatctcttccagtactcatacaggctctctccactaagntgtctaatacctgagatatcccttctg

SEQ ID NO: 65641 - DNA, 466 bp, Glycine max
  unsure (1)..(466): unsure at all n locations
atccttaagtctaccgcgtctgcagcttcattgcacatgaccgactactgcttgngcgaccaaagcaccctagtcgtgtttgtgctactggagccaatgtcgcaattaaacaatactttggaccggctacaaggagttctctcatgtctacgtccatggctcttgaagacaaaaaatcagggaccagctggaggagtcgatcacagaanaagtgactcgacaactaatgttgtccttcagccagatgcaatcacagggactcacactgttggacaagtggcctcaataacttaagaggggggtgaattaagttttaaattttcccactaacaaactttaacccccttttaaattataggctcaaaatgcagaagaagaagcaacaatcaatttaatcgatgttctttaaacgtgcaagacaaaattgattgcaataaaataaatgagataagggaagagagaaatg

SEQ ID NO: 65642 - DNA, 397 bp, Glycine max
  unsure (1)..(397): unsure at all n locations
tcttatatattagtgatctagagtgcatgctatatgagtacacttatantacanacctaggcgatttttgagcagctgatctcagatccttcatagctccctcccaatcttctggtaagagtttagcttctccactctacaacaaataacaccaagatangataagtagtaagtgcaacctatactacagtatattttactacaattntgtatttgtcccatttgcactcaacaaagcaatcaaaaaagaagagacanatngctagcagactattgcctanaaaatatagctaanagtcanaacaagcacanatgcacaatgattntcaatattatagtgaacctgaacaagagcttncacanagctctcatcaatcttanaagctttcactacact

SEQ ID NO: 65643 - DNA, 392 bp, Glycine max
  unsure (1)..(392): unsure at all n locations
ccttggtgctcatttctgctccaaatctctaaaggagagcattntttgagtctttatttgcgtggctacgagtgggacttcgaaatttcaggtttgggtggacttctttctcctttgatttntcggggtatggggttttgggagatatgatgggtagttttgttagttttctgctccatgatagttatttgtgaagactcttgttgaaagcttgttgaacttgctatgtttggatgagttgaacatacccattctattttnagggttttatgatgatgcttgtgatgttcatgtgctgaaattgcttatggaaaactgttagaaatgaagggtagaactaacctanggttaaagagtgagaatgtggtgttaggagtggaaaaagagtgaat

SEQ ID NO: 65644 - DNA, 357 bp, Glycine max
  unsure (1)..(357): unsure at all n locations
gtggtgtggatgatttcttcagattacctgggtcaacttatcagagagaaatcagaaaccctttgaagtattcaaaagagttgagtctaagacttcaaagagagaaagactgtgtcatcaagagaatcaggagtgaccatgcagagagnttgaaaacagcaggttcactgaattctgcacatctgaaggcatcgctcatgagttctctgcagccattacaccacaacagaatggcatagttgagaggaaaaacanggacttgcangaggctgctatggtcatgcttcatgccanagaacttccctataatctctgggctgaagccatgaacacagcatgctacatncacaacagagt

SEQ ID NO: 65645 - DNA, 440 bp, Glycine max
  unsure (1)..(440): unsure at all n locations
cactaagcaatcactattcatagctccaaactcgaaggggtaggacacatgaacgaaaacacaattcatggngctccgaaaaagggggtgagaatggagaattacactaagcaatcactacgcatagctccaaactcgaaggtggaggacacatgaacgataacgcaattcatggggctccgaacagaatgagaatggagaattgcactacgcaatcactacgcatagctccaaacgcgaaggtggaggacacatgaatgaaaacgcaattcatggggctccgaaaagattgagaatggagaattgcactaagcaatcactacgcatagctccaaactcgaaggtggaggacacatgaatgaaaatgcaattcatgcggctccgacaagattcggaatggagaaatgcactaagcaatcactacgcatagctcgaaactc

SEQ ID NO: 65646 - DNA, 309 bp, Glycine max
  unsure (1)..(309): unsure at all n locations
tgcacaacaagatntatagagtactaatgcgcgcataaacccaccattccctgaagcctacctccaactgagctcacgtactcacacgtggcccatatgctactgtctatgagcaccggagatcgatcaatactncgaagcctccactacatcacagttatgcatcattcaagagctcaaactatcacagccaagaaaacagagcaaacgcagaatactgtgtctaaacaccgaccatatgcacagactacctcactacatgaccccagtaacaattccttcgttccaattcgttaaccagtggatcga

SEQ ID NO: 65647 - DNA, 357 bp, Glycine max
  unsure (1)..(357): unsure at all n locations
gaagatctgtaaagacaagagctcgaagcggaagccgttctgagagcttgagatgagtttgtgagtgattgtgagatcctagaggtgaaggagacatccttaccacttgtattnttgcaatctttcatcttgttcttctctgtattggaaaggagggttccgaactatgaaaagctaaatcctctgttggatcttccctgtaggtacctgatgcaaatatatttcgatctatgtaatgatgttttgtgtattctctatgctatctgcttttcattccagtatgtctntaccttgatcacgtagatgcatgcttttgtanggtcattcaacagtgtaaactggtctgattctaaagtc

SEQ ID NO: 65648 - DNA, 362 bp, Glycine max
  unsure (1)..(362): unsure at all n locations
tcagcttcagaaagaatgtcatctctgtgaagagccaccaaattcagcatctgatagagagaatctcgctgccattgagggtgtcggattgaagctgccacagcttctgctctgcggaaacgagacaccgatgtttcttgaggccgaagggtaaaatggtcttgcacagagaagatattgagtcgtgcagggtcgagtagtacgctgtgggtgccttcgaatacaccattntcctaacaaggaactcannatttgcctacaaatatatatataaatggtgtttttgtgaagattctggatganacaaatcacaagggagcaatgatttgttttaatattgtgaccaacanaacgagatgctc

SEQ ID NO: 65649 - DNA, 271 bp, Glycine max
  unsure (1)..(271): unsure at all n locations
cgcacatcgnacgcgtgtatgatatccactcgaccaggcttgaagtagaggagaccgacaatcctataacacaacgtggcggacaaaaatgggcaagcaaacaagaatgagcattactagcaatgcggaaggtattctgcgctgcactatccatgtacacacatcattagcagctaagtgggtacgcgagcatgaactactaccaatagatagatgctgtctacaccaatgagcacatcttaaaagcatactccgcacagtggtggcctct

SEQ ID NO: 65650 - DNA, 269 bp, Glycine max
  unsure (1)..(269): unsure at all n locations
ctcagcttctatccaggctcatctngggatgaagctccatctancttggtctattccctaggggatggcgccgcctcttacctattctcctttgtcttccgctgcatctacatggtggaaaatcaccattaaaggacctcattgaagctcacagatccagcctccatagaatctccacaagcaagcttacatcaagtggtaatcagagcacacaagcttcaagtaggtgctccttaaacctccattaactgattgctgtaccttctctt

SEQ ID NO: 65651 - DNA, 336 bp, Glycine max
  unsure (1)..(336): unsure at all n locations
tgacattngggtaaagaanaacaagatgaggatatattaggacaattgtttctgctatgatcatgttgcccgataaagccacatttttttctacttgcttgttcattttcatcttccgccatctcagtangaatgcgagttgaaatgggacgaccctttgtagtcctctttctccttggatcaggactccactaatctccttcatattcttgccacattgattcgtgtggcaataaaccaaaggagttgtcgtagatgtgcaaaatgtgttgtaaagtgaataacatcgacacataggtcatgggatcaacattgacagatttacagacagtcatg

SEQ ID NO: 65652 - DNA, 232 bp, Glycine max
  unsure (1)..(232): unsure at all n locations
tcactacagagacactcatcagacaaatgtgggacacaatcagactcatccaaagcggatccagaacaaggaatactctggtttcgatcccatccagaattcctcnaaacacctgatccagagactgctgtgtctttgaaccataagtctcatgtaacagcatttatatccagatcgacatcataggaggtcttatcttattatctgaaggaagatctgcagatgtgacagc

SEQ ID NO: 65653 - DNA, 416 bp, Glycine max
  unsure (1)..(416): unsure at all n locations
gcttctattgaagctacctagtctataaatatatttatgtgtaacactttntggtactttgatgaatgagagtcttgtgagacacaactcaaagntcaacttctttttctcttttccttcttcaatttcatgcccccttccctctctttctctctctctttcttttcctccatggaagcaccctctccaagcttcttatccaaggcacattctcgatggtgaagctcanagatcaagcctncatagaagctccacaagcaagcttccatcaaggagctctagtttcttggtcctccaccaaggaaccagtagtaacattgtcatcctatgaagctgagtatattgcagcctcagaagctgcattgccagcagtgtggctagatgccccgatgaagaaattgcaactgggaaaatca

SEQ ID NO: 65654 - DNA, 416 bp, Glycine max
  unsure (1)..(416): unsure at all n locations
tctactatcattggtattanttttntctccgtcattgaggtgccacttgagctgccaggtctctccacctttgggcgtattcttttgaaagattcgtgcccccctnttgcacatgttctgtagttgcatcctatctgaagacattatactgacactgcctaacgaaagcaaccactangtccttccaagaatggactcgggaaggttccaagttagtgtaccaggtaacagctaccccagtaagactttcttggaaggaatgtataagcaattcctcatcttttgcgtatgcctccatcttctgataatacatctttagatggttcttggggcaagtagtccccttgtacttgtcanagtccagcacctttgaattgggaggggtgatgatattgggtactangaacaactcttct

SEQ ID NO: 65655 - DNA, 331 bp, Glycine max
  unsure (1)..(331): unsure at all n locations
tctagnacttcaattttctttatgaagaaggtacttcaattntcaaattaattttaaaattaaacatgcgttcatggnggaaatgccacaagagaacgaagaaagcttaacgccccaaaagaataatttaatatgaattcggttgtcgatcaaatacgaatgcaccattaaaaaacaactctatattaaaaatacaattgctttttgactgcaaaaagacaactactttaacaacttananaagtattatccacacgacaaaatanaaaataataataaaatattttaatcattaatgcatgtaagaaaagttagaaagagaaacaccgac

SEQ ID NO: 65656 - DNA, 313 bp, Glycine max
cgaacacaaggataggaagaagtgcaagccacatggctgctattacaatcctgtagtatccctttagcatcaaagcaagtgcagcacaaaatgtacacatcatggatgccacagacaaaaataatgtaacaagaccaaagagtaacttcatgggcaaccactcgatgaaatcttgctcagcataacgcgatgtgagaattccaataaacatcaacaccgatgatgaagatgtgatgagggatatagcgtctgatacgatgaagaacgtaaatgtgctttcacctaagaagacgggtgtgccatgtttatcatc

SEQ ID NO: 65657 - DNA, 404 bp, Glycine max
  unsure (1)..(404): unsure at all n locations
tagcatatgtcttaggctcagtagatgtagaaatggaaagaacanaatgtctgtgggatgatgatagacgcgaataagatagtacagaatcgagaggatgacacactanagctgaataatcgagaggatggctcactgaagctgaattggtattagcagttgaagtgagaaatgcatgatagtcgtgaaggtatgtaagaggtcttctatctcatgtgaaacggcgtanaggtgtggctgaattattttttgtatatgcactagatgtgggtaagcttacaggcacaacatcatgtgtctcanaaggaaaatgatcaagtacaaatggtgtaggggaaaccaaaggttgtgaattgtgtgtttanggtgtgagggtaagtgattntcatagaanatcacatttc

SEQ ID NO: 65658 - DNA, 424 bp, Glycine max
  unsure (1)..(424): unsure at all n locations
tggtcataacttgttacacggaagttcgattcaggcgcataatatatctagacgctcgaaattgaaccatggaagctctcgagaaattcaaatggtcataacttatcacacgaaagtccgattctggcggatagtataccgagacgctcgaaattgaacaacgaaagctctcgagaaatttaaatggtcataacttttcacacggaagtctgattcaggtggataatgtatcgagaagcttgaaattgaaccaaggaagctctcgagaaattcaaatggtcatatctntttaaacggaagtccgattcaggcgcataatatatcgagaagcttgaaattgaacaacagaagctctcgagaaattcaaatggtcataacttatcacaccgaagtccgattcacgcgcataatataccgagacgct

SEQ ID NO: 65659 - DNA, 402 bp, Glycine max
  unsure (1)..(402): unsure at all n locations
ctcaagattgctttttgagaagctaaatacttatctatccacacccctcttttaacttaattaaccctcttaaaaataattacaaatgaaaataaagcaacaaataatcaaacatcaaacataattactaataatatatatatatatatatatatatatatatatatatatatatatatatatcagggtgttacaccttccacttcagcatcagaggcaccaataccttcttctttttcagtacctttctcttcatccactcagattttagttattcctctagtacctctacagatgccacttctagctcctctctctgcaggtccatcagaatttatttttacaccagagatgttgcactccatgctctagagcatncacaggggactatccatcatcatg

SEQ ID NO: 65660 - DNA, 330 bp, Glycine max
gtgaactactaactgcaggacaattgcttttacttccgcagagagagacaaccgagcagtgccttaacctctcctccatgctatctgcgcagattccaatagggcaagaatagtgtgtaactcgttgatatgatcaggggccgagagaccgtttctcatcttgacgatgaacaagctgcgcatctagtatactctgatggctgctgacgggtctatgcgcatatctcataatagactgagtaatcctgcagtaagattctcgttcactatgttgaacgcgacgttcttggctaatgtgagtctgatcacgccaagagcttgtctatctag

SEQ ID NO: 65661 - DNA, 396 bp, Glycine max
ttgagactggaagatggaatcagaaactctgtcattcagtctcatcatagaagttgaagcatccaatccaccactggatagtcctgaagaagaaacaagggaaccaactgggtgcaatatgagaaagaaccatctaaaaagccaaatcattggtgatcaaacataaaaagttcaaaccaaagcatctctcgggcttcaaggtcataatgcattgatcttagaaattgagcccaaagacatagatgaggcaatgcaagatcaaaattaggttaaggccatgcaagacgagctcaactagatatagaaaatgatgtatggaaaatagtagagctacccaaggataaaaaggtttttggagctaagtgggtattcaaaaacaaactggatgaagaatct

SEQ ID NO: 65662 - DNA, 431 bp, Glycine max
  unsure (1)..(431): unsure at all n locations
atcttcttccctctactgctngaactacttcctgtatgttatctnngaactcacctantacatcatcangttctggntcactcaatggtnntttgtgtaattgcatcattggcttcttgcttggatcatgctngtccttcatccatgtgttcagctcatcanatngcacantccctactgaaactatntgattcgttcttggacttaagagnttgtatgaccctatangattgtagccaacanagatcatgtgttcactcttgccatccaatttcttccttgtttgatcaggaatatgtctgtaacatgttgagccaaaaactctcatatgcttcacagatggtgttnttcttgaccatacaacttctggtacttgattnnttaagtngtgtgtggggcacctattcagtacatatgtngctgtgacaact

SEQ ID NO: 65663 - DNA, 412 bp, Glycine max
  unsure (1)..(412): unsure at all n locations
acatggacttgatggngcctattctagttgaaagccttggaggaaagaggtatgcctatgtcatccacaacagagtcacacttagaagagggactccaaccactctgtatgaaatctggaaagggaggaagccaactgtcaagcacttccacatcnttggaagtccatgttacattntggcagatagagagcaaaggagaaagatggatcccaagagtgatgcaggaatattcctgggatactctacaaacagcagagtatatagagtattcaattccagaaccagaacagtaatggaatccatcaatgtggttgttgatgatctgtctccagcaagaaagaaggatgtcgaagaagatgtcagaacatcgggagacaatgtagcagatgcagctaanagtggagaaaatgc

SEQ ID NO: 65664 - DNA, 357 bp, Glycine max
  unsure (1)..(357): unsure at all n locations
ctaagctgagcggaagtgtggagagtcagcttcttcttaatttgnttttatatagngcgacctggagatatgtcgcacgggtcaagagaccttgtggacgtcatgtggggtgctatagcccaaaaccaagcttgatcaatcccgacccaacccgggcatagtcagtcagtgagaacctgtgacgtacctaaataggcgagctcctgncagtcgaccaataaaagaataaagaccacacagcatggaggcttgtgtggtggctggccagctatggatcttgagtgatatctggaatatggcctctggtgatcgattaccaagggtatgttatcaattacaatgcttataaatgaagac

SEQ ID NO: 65665 - DNA, 427 bp, Glycine max
gagcgaattattatattattccatcccatgttaggctagctatctcatatattaatgtgacggtttgcacgacagatacacacatcacatgtagaggagagatataactggtggcaggacattgattaatatacgtatccgtatttgataaacacaaatattgcattattatgtggaactattatataagcctaacgtatattccatgtactctagtattcatgcagggcttgctagttacttctaaatgcaataattgaaaggcatgatacatgtggtgtttgtgttgtgcattaattaataaaatggtatcctactctattaattctatatctcctctcacacaacacatcattccaaaaaaatcttaaggaacaatgtaagaacctggtacttttttcccgcttttctacttcattaatatata

SEQ ID NO: 65666 - DNA, 432 bp, Glycine max
  unsure (1)..(432): unsure at all n locations
atctttcatgccttactatggagtcatngaagagtattgggaggttgattacggtgaatttagagtacctcttttcaaatgtaagtgggtcaatggaaacacaggtgtgcgtaaagacaaaatgggattcactttagtagaccttaaaaaagttggttacaaggacgacccattcataatggcagcgcaagctcgacaggtgttttatgtaaaagatccatgcgactctagatgggcagtggttntgcaagggagaacaatttgtattggtctccatgttgatggatcaacacttgatgtcattgacatgccatctttctccaaagatatgccttcaagtactattgaacaagaagaggatgatgtatatgcaaatcgtactgatcatgacgagggtttatgggagaacattcctacgtaactatgtaagca

SEQ ID NO: 65667 - DNA, 464 bp, Glycine max
  unsure (1)..(464): unsure at all n locations
gctgctgctctctcctctgcctatgctacatctgtctttcttccctngtgcagaagaagctgcctncatgaatggtagcttaaactctactggggttacttcagggttacctggtttccgtccagagaaaagacaaaaacttgaaaaacaaatgcatgcttctgagtttaacagtactgatatggngagctcttcttttctgggcactttacaacaaccatcagtagcaaatgtgccactgacacactcaatcagcttgcaacccataccacaacccaaccaatcacaagctgcatttgcttcaggtcccccacctcctcattcccccgtgaacccaccagcaaatcagtttgttcaatctactggattaatggttggnggaattccttatggatatggatcaaacaacctaccaccttcaccttcaccttctttttactcacatgtggcaatggggtatcaat

SEQ ID NO: 65668 - DNA, 389 bp, Glycine max
  unsure (1)..(389): unsure at all n locations
agcttttcanacttatccaagcctcctttattattgattatntaagcaannnngaggctttagnnaactgctntgnggggctaaacccctctttcttgctaagctgttttatctcgaaattgaaataaaaaattaagcatgaagtcctagctcactagcccaccatgctttccaaagcggtaggccttgcgtgattgcatgaagagaagttcnctgatcagctttagtccacctgtactcgtcctttgactttgcatttatctccttcacactcatgctcgttcactcctttgttcatcggcatgtntctgatccgcaaccnctccaacaactcccttagttaattcctaaaccatagtctctgctaaagtacaagcacttctttgatg

SEQ ID NO: 65669 - DNA, 285 bp, Glycine max
tactaatacacccttcctttttgctgatctttttcgtacgtatgaacttacaatttgtacgaactgtttcttcctatgcacggacctatgatatgattctccttttggcttcgaagtacaacctacgatggcacatgttcttgactcggagtacaacttacgatggcacatgctctttgattcgctgcacggacttaatggccatgttcttgactcgctgacgactacgatggacaagtcttgattgctgacaacatacgatgcaacatggcaaactcacgcaca

SEQ ID NO: 65670 - DNA, 448 bp, Glycine max
  unsure (1)..(448): unsure at all n locations
ctaccatcacgattatcatctgcctttccatcagttggggtgccacttgngctgccagatccctccaccttngggtgtattctatgaaggattcatgctattctttgcacatgttctatagatgcattatatctacagccatatcagaattgtactgatactgcctaacaaaggcaaccatctttccaagaatggactcgggaaggttccgaagtagtatacaagatgaccgctgccccaataagactttcttgggagaaatgtatcagtagtttctcatcttctgcgtaagccccccatcttccgacaatacatctatacatggttcttgcngcaaatagtccccttgtacttngtaacgtccagcaccttgaacttgngaatgaccacgtctgggtactatgaacaactctgttatgtcagtaaaggcataatctctgcctccttc

SEQ ID NO: 65671 - DNA, 239 bp, Glycine max
  unsure (1)..(239): unsure at all n locations
ttcttaaaaaccaaagggggagggagttagggacaagaaaaaaatnggagggaaaaattatgaaccatctgagggatannaaaatggtaagggtgtttgggtgaaaatgcctacagtgagggaaggaaacttccaataacctctctcactgagatatcttcctttaatttanactctattgctaattacaagtttaattagtgattattatcgatatgtacctaagaaacaaatttaag

SEQ ID NO: 65672 - DNA, 439 bp, Glycine max
  unsure (1)..(439): unsure at all n locations
ctagaacattctggttggatgtgcactcatcanattgnnggatgcgctcatgaaacttcatcactaagcaacctggnagggggtgcattcangaaacttcatcactaagcaacctagaaagggagtgtactcatcaanatgggggggtgcgctcagaanacttcaacattctagagaggggtgaaccttatcaatgnngggtgcattcaaaaatcttcctcaagaagtctctgggcggaaaccacctccccttttctcctataaataggggaagggggctgaaaggatccaacaatntttgcactaagctttcacttgaaattagtgaggaaaagagaaagaaggaaaaaatccaagccgaggtgcttccgtaatgcttccgagatatttccgtgagcgattctgacgtgaatcttacggngcagaacgttngacacat

SEQ ID NO: 65673 - DNA, 307 bp, Glycine max
  unsure (1)..(307): unsure at all n locations
gagttttattaccaagtaaatggatcatttttaaggtccaacgccttataatgaccaccttccaagtaaaaagaatcgcttgattcacccttaanaaagaactacgtaggtctgatttcctcttcgatggagggtacgtaggagcaagagccccgcttttgtcgacctcanaaataaataaggaaataaaagttaaggtaacacaatttcacacaattctaaaaataggttgttgtcctttgagacaaacgtgagaggtgctaatacctacctcaaacgtaaatacaactcccgaacttggaatttc

SEQ ID NO: 65674 - DNA, 393 bp, Glycine max
ctagagagagtattgtccaagctccagagagttcttatagattctgttgtgtgaagatctgtagagacaagagctcgaagcggaagccgttctgagagcttgagatgagtttgtgagtgattgtgagatcctagaggtgaaggagacatccttaccacttgtatatttgcaatctttcatcttggtcttctctggtatggagaggagggttccgaactatgaaaagctaaatcctctgttggatcttccctgtaggtacctgatgcaaatatatttcgatctatgtaatgatgttttgtgtattctctatgctatctgcttttcattccagtatgtctttaccttgatcacgtagatgcatgctttggtagggtcattcaacagtgtaaactg

SEQ ID NO: 65675 - DNA, 425 bp, Glycine max
  unsure (1)..(425): unsure at all n locations
ctatctntgatgatgaaggcatgatcctggtgcggangttgtgtatcaagaannggttcgagcaaatgggtcctgaaagccgaaacctcagcttcagaaagaatgtcatctctgtgaagagccaccacattcagcatctgatagagagaatctcgctgccatttgaggttgtcggattgaagctgccacagcttctgctctgcggaaacgagacaccgatgtttcttgaggccgaagggtaaaatggtcttgcacagagaagatattgagtcgtgcagggtcgagtagtacgctgtgggtgccttcgaatacaccattttcctaacaaggaactcagnatttgcctacaaatatatatataaatggtgttnttgtgaagattctggatgaaacaaatcacaanggagcaatgatttgttttaata

SEQ ID NO: 65676 - DNA, 314 bp, Glycine max
  unsure (1)..(314): unsure at all n locations
cttcaatataccccataaaagtattatttttgacattngtgagacaaaatgatcaagaggcaatgggaccctgaaagtgtgaagttgagagaaacctagatgaagtgtaggctactttatgagtggcgttagtctatgctcaagtccttggaaagtggttattgtgtgtggaactgtatggttcatgttggatcaagtcgagaatctagaaaggggttgaatagaatatttcaaaatcttgtgttgtcaccacaatctggtgcccttgcactttagcacacaagaacccagtatcaccatcaatatgagttatg

SEQ ID NO: 65677 - DNA, 468 bp, Glycine max
  unsure (1)..(468): unsure at all n locations
aaagagaatgagcatgtgattagaattatatctganaatgnnagntagttggtcagatcgattgtgaaggaatgcattgaccgtatctcggtgagagtgtgatccttatattntgagagaaaagactatcatttagtactgattcttgcatgaatctctaaagtatggactgaatgcatganattgaggatgatgaanggccatgttgattgtgatagccacttatcgtataagttgaccacgggcttgaatgatntatcctttgtacccagtttgagctaagtgaattattgattgattgaaccctaagcctatacagtgttatctcctgctaccttgacttaggttgtaggagagcatcatccataggaagcgtggttanagcanattgtcccanattgggagagacctangtagaatggatggcacagtaatagcatacacacactatgtctgatatacacatat

SEQ ID NO: 65678 - DNA, 423 bp, Glycine max
  unsure (1)..(423): unsure at all n locations
gcttgtcttgngtcgacatggtttgcaagaaagagcactttcttggaaaaaccttctcttgtcatctgggttttcaccattgacctttagtaactttacagaatcccaggcagagtgtttggtgcaaaggactcctagtaaggggttccatgttgagaagaggcagtcttcccttgttctttgctggcaaaggaaagatctcatctcagtttcaacttggagatgctaagcagagccattttgcacctttgaactaccaatttaattttaaattctaaagtgctacataacttacagcttctattgatctttcttgcttgaatttgccttgtctatggttctatgctaattgtctgtttttaggatttattattttcagctaaggaagggaagtgaacatattaattaacaactgaatgacca

SEQ ID NO: 65679 - DNA, 425 bp, Glycine max
cgcaagctttcacttgtcttcacaaaatcaaagttcataacattacttaaaaacattgtaccagcttgagagttaaccaaaaaattaatgatgcatctttgtttctgatcagtccatgcatcggacataatagtacaaccatacttgacccattgctccctatggcctttcatcaaattttcagtgtattcaactttctccttcaagagagaaactctgatatcatgatagcttgaaatggacaaatgtgacccatattgaccaatggctgcaaccatattctcagagcttttcaatttaatgagggtgaatgacgagccagcttggtaccaaaagcgagcaatatattgatgcaccttcaatacttcattcttatccattgactattttatgttcctttgcctcaacattttcaattttctccg

SEQ ID NO: 65680 - DNA, 420 bp, Glycine max
  unsure (1)..(420): unsure at all n locations
agcttcacttgagcagcgtcatgcactcgcttatgctcgtgccgtatgacgncgnnnggatcgnggnggaggccggaagagtcaccaatgagaccgctttcattatagccaagtcagggctcagaaccatccacgttggcttcaatcaccgaatgacgatttcgtggagtgatagacacaaattggaggctatgatgcgccttcatgctttgaggtcaacatttctgttttccttttttaaaactccaatgcttaaattttcaatttgagagatactgtgtttcccgctatttggcgcataagaaataattgctccacataaggaataatttgttacctataatactagtcttacctggctcacccaggattgtatctgtttgaagattaaaattaaaagctggtgaattggttcaagat

SEQ ID NO: 65681 - DNA, 432 bp, Glycine max
  unsure (1)..(432): unsure at all n locations
agacacctgcggcatgcaagctntgtgtaatcgattacactgattnggtaatcgattattattgattgtttatgaataaatcaaaagatataactcttcaaatggttcttgattttttcaaattggttttaagtttttctaaaagtcataactcttctaaatggtcctcttgaccagacatgaagagtctataaaagcaaggctttgttttgcattttatatcaatccaatcaatctaatacaatcctttacaagccttgaatctctttgaacttcttcttcttctttgtgccaaaagctttccaaagttttcaggttttctaaaccttgaaaacttgtgctattcattcttttcatctcttctccctttgccaaaaagaattcgccaaggactaatcgcctgaattatttttgtgtctctcttctcccttt

SEQ ID NO: 65682 - DNA, 431 bp, Glycine max
  unsure (1)..(431): unsure at all n locations
agcttgaagaggatgctntaatggaggaatttatagagagtttggggtgtgcaccaaatgaacgaataaaagaaggaaagaagtggaactttgaagtgtatctcataagactttcattcatcaaagttacaacaagtgttacacatgcttctatttatagactaggtagcttcctttagaagctttcttaagaaaacttccttgagaagctttcttaagaaaacttccttgagaagtttttttgagaaaacttccttgagaagctagagtttagctacacacacccatctaaaaactaagctcacctccttgagaagctagagcttagctacacacacccatctaaaaactaagcttacctccttgagaagctttcttgagaagctagagcttanctacacacccctataatagctaagctcacccccatg

SEQ ID NO: 65683 - DNA, 392 bp, Glycine max
  unsure (1)..(392): unsure at all n locations
agctttataagctcaagaaatatttaaagtatgntgtttacctcagagaaagggcgcaatgaataacaagcttaggcacccgacacttaataatctataattgagtggactgagtacgcaacgtgggagctgcttaatatatgtgagagagagaataatgaggaacaatctatcaaaacagggacagagagagagaataaacagtcactggtcccacccaccattgttttttttttttctattaaatggcatcttgttgggcgcaactatttttttttaattagcatatttagacgctgaattttatatccgctcgacaatatagtgtttatatcttttcaatgatgaatttaattcacaaattagaggtgtttataggtaggggttatttt

SEQ ID NO: 65684 - DNA, 406 bp, Glycine max
  unsure (1)..(406): unsure at all n locations
agctnttgattggtactcttacctaatggagactatgatacatcgnagagntacatgattttgttaaatgtggaaactaaaataataacattttcataagatctaaaaccataaatcatgatattttcaaggatcgaatgcatatttaacttaaaattatcaagaataaaaacataacaaaaatgggtgataaaactacatatgaaaaaaacaaatgcttttattcaagagaaaaaactgtgtattacatttgatactgttctcaggacaatgaagaacaaagagcatcaccatacagttgatgaatgtgactgccaaggtgatgtaaagacagccaaattttcagcaaaaaaaacagaactaaaactgataacttatcagtgaacacaaaaaaacaaatgctttt

SEQ ID NO: 65685 - DNA, 418 bp, Glycine max
  unsure (1)..(418): unsure at all n locations
agcttgccacccagctcgcccaggcgagcatggttgcttcctccagaagcaacagccttctggagcaatcttctggagggcccaagtgggcctggttgctatttgcacccccatttttactaagtacaccccctctgcttttttttggtgattcttttttcgtaaagttacgaaaacttacgaatttcgtaacgatacttgttttctttccgtaatgttacggaaccttgcggattacataattatcccctttttgacttacggaatgttacggaacctcactaattatgcaacgatgcttccatttgatttccggtgtgtcacggaaccttacggattgtgcatcaatattttcttttgtttntcggcatgtcccggaatttcacaaattgcctaatgatgggtgccaagcacctta

SEQ ID NO: 65686 - DNA, 412 bp, Glycine max
  unsure (1)..(412): unsure at all n locations
agcttagggatggaatacttacttgntggttangtaacattagcgcaaaacggaatcaaaaaatgcgaaaaaggatgaccctatggctgcaaattcgtcaatcccgtgggtatggcttttgaaagggggggaaaagaagtttttgaatgtaaaaatgccccccctttcgtcatttttataatttggtgcaggggtggctcgcccaggcgagcccagctcgcccaagcgagctaacctgcactttttttnttttttctcttttttgtggttgaggggaacattaaccatgtcccctcccttttcatggattaacattctggctaacttgaacttacttatgctagaatcaagcgtggattacttatttcattattaccctattccttttaaaacacacaaatcctataataaa

SEQ ID NO: 65687 - DNA, 418 bp, Glycine max
  unsure (1)..(418): unsure at all n locations
agcttctgttttcaatttcgtgtgtctcgttatattacaggactcaatcagacatccgagttaaaagttattgtcgttggaaattgctacgagcttccgttntcaattgcgagcgtctagatatactaagggacacaatcgtacatccgagaaaaaagataatgtcgtttgaatttgctcagagcttctgttttatatttcgagcgtctcgatatactacgggactcaatcggacatccgagtaaaaagttattatggtttgaattttctaagagcttctattttcacattggagcatctcgatatattacgggactcaatcggacattcgagtaataagttattgtcgtttgaatttgatcagaccttatgttttcaatttcgagcgtcacgatatactacgggacacaatcggaca

SEQ ID NO: 65688 - DNA, 371 bp, Glycine max
  unsure (1)..(371): unsure at all n locations
agcttanggaaatgagcttcattcttcattctatactcgantcttcttcattcttntattttagcttctctcataacttgcaactatcattgttttactcacgaagggaaactttcaagaactgaaaattcttcattcttcttcaagatttcataagatcatcaagaggtgataggggtctctccaactctcgaaccatatgcttgttgctgaacttccttgaacatgtcggtgcttggaaacttttgagctttctttcatgtgctaaatatgcgtgctgagctattttccttgagatgtcaatgccaaaaatgatttatttgcatgttaaaacatagattaagcctcacacttcacttatatcgtgagtt

SEQ ID NO: 65689 - DNA, 413 bp, Glycine max
  unsure (1)..(413): unsure at all n locations
agcttagccagatacttaatgtttatnnagtattatcnccncangccnccatcacgacattcgttttcaaccttaagtccagacttccctctactaccttggccattcaaactagccctaccctagtttccaccataattgttacagatgcttcgacttcccttccctcatacactgccccgatttatacttccctcaccctacccttattgatccctattacaacccccatctttactatgacctcgtccacaacaatgtctaccatagcattgtccaccacaaacatgactagttttgtcccaccaggctttattctcccatgtcatgttctgctaaagtttatgccttaactaggtcattctcggtttacttttccaaaattcaatattacccctcacttcacaaactcc

SEQ ID NO: 65690 - DNA, 429 bp, Glycine max
gcttatgctgcaaatatttacaatagacctcctcaacctcagcagcataatcaaccacagcagagcaattatgacctctccagcaacagatacaatcctggatggaggaatcaccctaacctcagatggtccagccctcagcaacaacaacagcagcctgctccttccttccaaaatgctgctggcccaagcagaccatacattcctccaccaatccagcaacagcaacaaccccagaaacagccaacagttgaggcccctccacaaccttccctcgaagaacttgtgaggcaaatgactatgcagaacatgcagtttcagcaagagaccagagcctccattcagagcttaaccaatcagatgggacaattggctacccaattgaatcaacaacagtcccagaattctgacaagctgtcttctcaagct

SEQ ID NO: 65691 - DNA, 431 bp, Glycine max
  unsure (1)..(431): unsure at all n locations
agcttgaaatgcagaaacttctntntatgattctcttgttcctatganatgcaaatatgcacccaaaaaaaaaaaaactaaaaacaacctaatcatttcctaaactatatttttacttttttattcacaaaacaaggaattaaaggtaaaaaatactcaaaaatactatgataattgttcataaaataaggtataaaaaacaattattagaacacgacaagtagttgtgtatgtccagtagcatgcgttattgagggtgaagcctagagaggtgaaagaatactcaagtggagcatgtagaggcttagaaactactagttttaagagcctaggaaggcttcaagaaagaaagaataccacataatgtttggtcttagtaaatcatacaagtataggtaatggacataacccatgttggggtgaaccagtat

SEQ ID NO: 65692 - DNA, 375 bp, Glycine max
  unsure (1)..(375): unsure at all n locations
tatgcacctcttgcatttgaaaattgcttgattgtggtgccactattgacattgggaccaccaaacagatcacgcaccacaacttcatccttcaatctatgtcaatgaatgtattgatcacgtttgagaagcttcacaattcttgaagaacgatatgcacttcttgcattgntaaattgcttgattgtggtgcaactattgacattgtgacaccaaaacagatcacgcaccacaacttgatccttcaatctatgccaatgaatgtattgatcacgtttgagaagcttcacagatgttgcatttcggtattagctcctcttattgaagaacgatatgcacttcttgcattgtaaatttgcttgattgtggtgcaac

SEQ ID NO: 65693 - DNA, 424 bp, Glycine max
  unsure (1)..(424): unsure at all n locations
agctnttcgattcattctatgtacccttagtggtccatatctgtgtttatgtatttttattctcgnttcatttactttttataccccctgttgacgtgcttaagccattttatttaagtcatttctcgcttaacctaaaaataaaataaatttccaccgatcgtttgaattgtattatccgttaacttcggttaaaatgaattccgaccgttcggtcgtgccgtaaccacgttggaaataaaaaaaaagaggtaaataataatataataataaaaaaataccttttagtaaaataaagcgaaaatcaattggacgttttctctttgggatttctcattcttaatcgaattgactaataactaaagtgaaactaaagctaaaatcaactcgcctagtcaagctcgtccacaaaaatatgtttttg

SEQ ID NO: 65694 - DNA, 438 bp, Glycine max
  unsure (1)..(438): unsure at all n locations
acctgcggcatgcaagcttcatatttgcaaccatagaggcatatgttatgttttacaatnttataccctcaaaatgcatgcaacccagcatcatttttcagaagaaaaagatccatgaaatgattttattgttttaagtcaaggaatatttctagcagctcatgtatcataaacttgtaatcctcaatgctgtcattagaatggccatatttatctaccgaagaaaatattatgacagatctaaaagattgaatgctagcagcatactctttggaacatgccattattgaatgaaattcatgtgagacttattaaatcatgtgagtcacttgtactacttattgaagagtattggtcaaagagtgtgttactgccatttccctatctaaaatggaacgtccacagcagattgatataaagtatctgcatccacatcac

SEQ ID NO: 65695 - DNA, 410 bp, Glycine max
  unsure (1)..(410): unsure at all n locations
agctggagaggatgcttcaatggaggaaaagaaagagggagagaaagggagaggggggagcacgaaattgaaggaagaaaaaagggagagaagttgaactttgagttgtgtctcacaagactctcattcatcaaagttacaacaagtgctacacatgcttctatttatagactaggtagcttccttgagaagcttctttgagaaaacttccttgagaagctatagcttagctacacacacccatctaaaaactaagctcacctccttgagaagcttccttgagaagctagagcttagctacacccctctaataactaagctcacctccttgagaagagaagctagagcttatctacacacccctataatagctaagctcacccccatgacanaatacatgaaaatacaaa

SEQ ID NO: 65696 - DNA, 416 bp, Glycine max
  unsure (1)..(416): unsure at all n locations
agcttcccttacctctataaactaagaagtttactntgagaggaaaaaaggaaagaagagggctttgggtccaagatgcaagctttctatcactcacacaacaactccacaccattcatagcacccaaaccccaaaaaccaatagaaaccacatcaaaaccatgaaaatgaacacatttatgaacttcatatagttctcatggagggtgtcataccctaattttgtctggggattatcgtttattgatcttttgatccttgctagttaacttatggtactgaacgccaattatagtgcgaaatagatgatcattcaatgttttgactaagaatgcgaaagatactgaaaaggagggcaaaagggtcattttaagcttttttcagaaccttggctcgcccaggctagcctctagctc

SEQ ID NO: 65697 - DNA, 415 bp, Glycine max
  unsure (1)..(415): unsure at all n locations
agcttataagtgcgggtctgggagacgaatgntatgtgttcgcgatatgtgaagatgatgttccaagtacttcggatttggtccgaccatgccctcctgatttccagctgggaaattggcgggtggaggaacgccccggcatttacgcaacaagcataatgtaaacctttacggttttaaaagctctatagttgggcctaggctttagagttttcattttgttaaggctttgtgtcttttgtctttgaatttataatacaaggatctttcttcatctgttcctagtctctacccattctcattcatttgcatgtttacttctttnttctaaaacggcagattcgatgacgagtcccccgaaggtactaatacctgtgacccgtctatcaacttcgagcaagatatgaaccaaacg

SEQ ID NO: 65698 - DNA, 416 bp, Glycine max
  unsure (1)..(416): unsure at all n locations
agcttgtaatactatattagatatatgtgattntgnttatctttacctctttaggaatatgataactcactccatgtgtgttgtttgtgtttgaatcttatgatgatctcgaaccttgtgtttatgagaacaaatgattacatggatgaatttaaagaacctcgtgctaaaagaggttgagacacaatgctctgataggatataacattaagacatgagtttctatactaatagcatgaaattttggacatgcagttttatcattttatttcacatgctgagtctttagttcattcattggagtcaaccttattttgggtggaagatgttttcatacccttatttaataagtttttaatatgatgattaacatggatattaaccttttacacacgtaaactcttttatgttcattg

SEQ ID NO: 65699 - DNA, 380 bp, Glycine max
  unsure (1)..(380): unsure at all n locations
ggaccttaagcaccgcagctgcagcttcaaactttgtgatttgaacttttcaaggnaaacctttcaccttccttcatactttcttcatctgggtgttgcttgctataaaaatctagctaaaatttgacgtttgctttcagcaagagctttatcttaattatcaccacgaatttatatggcagccatggattattcatcatggatgattaacacttccttggatctcaacattaatccccacaggcttcatgaagaacttcccgtaagtataaacatattgggcggaagatcttctgtgaaatgtttccctcacaataaaaaatctttccttctttcttcttgtggggtcatttcagaaaaaggaggtgcgaaacaacttt

SEQ ID NO: 65700 - DNA, 406 bp, Glycine max
  unsure (1)..(406): unsure at all n locations
aagtcaccgcagcatgcagccgcacgatgancatttgtgtncttttattctannncgngnccaccttccattgatgatcatatatcataagagactaggtctttgtttacattcaagttttgatttgtttacaactatcaattataaagttttttactggtccttgtgataatacttcaactgctagctatgatttaactaatttttctgtatgccttgggattattattctcctttgcaggctctgctgaaactaattttcgattgtgcggtatcagcgctaaatccaagtagaaatgattcaggaaatgaatctcctctaaagatagctctcttttccctagcaaagatgtgtgcacatccattgtgcagacagttcatacgttcatcaccattgttccctgtg

SEQ ID NO: 65701 - DNA, 430 bp, Glycine max
  unsure (1)..(430): unsure at all n locations
nagcttangaacccaagcttttaatttcaatgcatggaagtatgacttatgcctaggaatctaaattntggttttgaatgtggaaaggcatgaatattatgacatgcttgaaagggtttttactataatttggctgccccatgaggaatactttgcacctaggtagcatggaagatacttttcaatggtattatatatgtgtgaatataggtagcatggaaaacacctttcaatggtatgtatatatgtgaatataggtagcatcaaaaatacctttcaatggtatgtatatatgtgtgaatataggtagcatggaaaatatctttcaatggtatgtatatatgtgaatataggtggcgcagaaataccttgcagagtgtgtgaatatatggcataaaaataccttgcaaagggtgaatgagtagcaaaa

SEQ ID NO: 65702 - DNA, 426 bp, Glycine max
  unsure (1)..(426): unsure at all n locations
agctngcactgtaatcaaaacattncgaaattattatttttcttggagaaaataaggacaaatgaacagggttaacttaaaatttaatacaaagaaaaaataggtatcaaatatcaatcatcatccagctaatagaacatcaacatcaacaaaccacaacaataaaatatcttttgcttatcaaaaacattaaaaaaaaaacatcaatagacaacaggttaattggtaccaagtacaaatgttatagaggaaatttctagtgttgggttcagatgattcaatagaaaccatccactggtgaagaaacaaaagtgacaacttgactgaaatggtcagcaaatattgcacacccgggacctcagcaaccatctgtatcaacatttccaaatcaatattatcaataagaattggcaacactgtaataat

SEQ ID NO: 65703 - DNA, 425 bp, Glycine max
  unsure (1)..(425): unsure at all n locations
agcttgcttgttgagctactatggaggctgttattttgttcttcaatgttgtcctcnaagggnggctctccaccatggagatgtatcggaagacatatgagaagaggtgagaggaggcgccatccatttatgaataagccatggaagaaggagcttctccatcaagatgagccttggataaaaagcttggagaggatgcttcaatggaggaaaagaaagatggagagaatgatagagggggggagcacgaaattgaaggaagaaaaagggagagaagttgaactttgagttgtgtctcacaagactctcattcatcatagttacaacaaggggtacacattgcctttatatataaactagggagcttccttgagaaagcttcttgataaaacttccttgagaagcttctttgagaatactttctt

SEQ ID NO: 65704 - DNA, 427 bp, Glycine max
  unsure (1)..(427): unsure at all n locations
agctntagccacaatattgttggtgtaatcaaacttcattgcaacaaaaagactatactttttcaatctatcaatcacgaccataataacagtaaatccactagagttaggcaatctagtcataaaatccatggtgatatcctcccatgcatggttaggaatgggtaatggttgcaaataaccagcaggtaagacatgctcagacttggcttgttgacaaacggtgcaagttcagataaactcctttacatcttgtttgagtttaggccaataaaattgggccgaaattctagccattgttccagcaaaccccccaatacgagagctatgcagcttgcttaacatgttttggataagagggcttttggaaggtaacacgaatctccccttccaatataataacccatctttgacattatatggatag

SEQ ID NO: 65705 - DNA, 390 bp, Glycine max
  unsure (1)..(390): unsure at all n locations
agctgacatagacccattgttcacgctattgtgacatattttcgctgggcatctacacgagtcttcatggtattctggaccttgagcaacctgcgttgaagggcaatgtgaatgacatgcctggactatattatagaatccacggcctcgatgttggaagagcctgctatgtactaaagtattgatggcagaggtttgccgtaaaggatttcatatggtgtaaagctggtactggagtggagagacgtgttataagaccactcagctaatagtagaaacttgaaccaactcgtaggttgagaatgggtgaaagcacgaagatactgctccaagacccgattcataacttcngtctggttggtaagttttggatggtatgtcgtactcata

SEQ ID NO: 65706 - DNA, 185 bp, Glycine max
aaaccaatcccccttattactagctattttggattctttaggtcctaaatggaccaccctccaaatggtgctcattccccttttttttttctgcaaaaaaaaaaaatcaatgctggccaaacatggatgaagtcctaagaaaatccatattcaagaaaacatggatgaaatcaccatttaaaaag

SEQ ID NO: 65707 - DNA, 397 bp, Glycine max
agcttcaacctagaggagacgaaccatttctgtgttggagaagatcaacgacaatgcctacaagattgacttgcctagtgagtataatgtaagtgccactttcaatgtgtctgatctatctctttttgatgcagatggaggagccttggatttgaggacaaatccttttcaaggagggagtgatgaggacataaccaagggcaaggaccatgaagcacttgaaggtcccatgaccagaggcagacttaaacaagcccaacacatcatagagacaaggctggtcatttgtatagctgtcattgatgatgattgaaggcccaagtggagaaagatgaaggcccagaggcagaggcactaccaagactactaattgttgctgaaggcccaaactaacttg

SEQ ID NO: 65708 - DNA, 403 bp, Glycine max
  unsure (1)..(403): unsure at all n locations
agcttgaccggatgtaagatacatcttcttttatctttgtcattcttgactccatttcattgaagcgcatatccacttgcaattccaaagtatcaaacctctcaccaacaaagttntgaaggctatcaaacctttccataatcttcgaaagaagagatgaatcttctccttcatgtccttcttcaccaacatttctagcacccttctttacccaagagccatcatgctcctttatatatccaaaggatgctatgactgaagcgcctataaggaatgatctcttgattggaacataaggttcaaaatcaagagggatgttgaaatgttgaaggaaaagggtaataagatgaggataagggcaaggggcattcaattgcaatgccttatgcatgcgatatctaac

SEQ ID NO: 65709 - DNA, 277 bp, Glycine max
agcttcttagtttcagatgatttatatgattttgtggctacttcatgcactcctctaatgactataacatcatttctggcgctaaactgtggggagttggaagccatcttctcaattaaatttctggcttcacaggggtcattgatcgaggccgtccccgattcaaataaccttgaaatggcataaccttgaaatggatcttaggcgttttcccaccagccgggaccaaccaaatgttcattatatacttgcagtaacacgaacgaatggggggggg

SEQ ID NO: 65710 - DNA, 404 bp, Glycine max
agcttgcccagataaggagtttatggatgataatgtttaccacctcaaaagactggaaagcgcgttctaatgacttctctgcggcttccacataaagcatagaggatgggaagctcaccaagatgtcttcctcgcctgatacgatgaccagatgccctttcactatgaatttcaacttttgggggagggttgagggaacaactcctaatgagtggatccacgggcgccccaacagacagctgtagggaggggtaatatccattatttggaaagtaacttgacaggtgtgagggcctatctgtactgggagatcgatctctcccctaacctctctgcgggtgccgtctaaagcaccaaccaccgttgaactcggctttatggggacgcattgaatggtatattct

SEQ ID NO: 65711 - DNA, 429 bp, Glycine max
  unsure (1)..(429): unsure at all n locations
agctngccaacatgactctgcaatttgccgatggttctgataacaaagcactatggaaatcagtaagaatgacaataaaagaaaatcatataacatttataactaatttttttgtcatggatatagaggagaactaccaaattccaatcattctaggaagatccttcataagaaccactcatgcaaccatcaatgttcgtaaatgagtctacacagatagagagggcaagaaacacatgttctaccacattcaagccattgaagattttcccaacgaattagctcaccaacaacaccatcatatagcaacttggcaatccatatgtcatacgtcaagctattgatgttaaagaagcacttattaggaggcaacccagctttcaaactcttacattttacgttacattcatttaggatagtttctagctt

SEQ ID NO: 65712 - DNA, 411 bp, Glycine max
  unsure (1)..(411): unsure at all n locations
accgagcatgcagctataaaacctatagcggctttttatttttttnanncncgggcccaaaaaaattatttggatacaataattttttttgaaactatcaaacttgattaccacattactggtccataacttctatttctataatcaagaactttaattacaatttatgtgggagtcccgggctctcattatatggagtgactttcctttgttcttaaccttccttttatggtcatactccataaaaaattaaatatttacttgtgaagaaggctcttaaaaggctatcagaccaggtcagactcttataaaggccacgccgaaccaaaataaaagcctttgatatggtatatgtcacgcttaagcctcaaagattcatcgtaggttatgctcatgccttataaacctggc

SEQ ID NO: 65713 - DNA, 409 bp, Glycine max
  unsure (1)..(409): unsure at all n locations
agcttcatgatgatgaatcaagttgatncttttgttttgtgatgacttagatgacgacaaacagcccaagagaatgatttcaagattgagtcaactagcttcaagaatcaagagaagtttgatttcaagattcaagagaagatgaattcctgattcaagagaagaaatccagaagacttccctagggaagtattgaaaagatttttcaaaaaacaaacatagcacaggtttggttttcagaagagtttttctcaaaattttctaagttaccagagtttttacttctttggtaatcgattactagtttcctgggattgattaccaatggccaagtttgatttcaaaaagtttccactgaatttgggacgcttcaattgatttcaaatggtgtatcgattacaagatattg

SEQ ID NO: 65714 - DNA, 414 bp, Glycine max
agcttataatatatcgatacgctcgaaattatacatctgttactctcgggaaattcaaatagtcataacttttcacatggatgtccgattcgggcgaataatatgtcgagaggctcgaaattgaataacgcaagctcttgagaaattagacaggtataacttttcacaccgaagctcttgtgaaattcatatggtcataacttttcacactgaggtccgattcaagtttataatatatcgatacgcgcgaaattaaacatcggaaactctctataaattcaaatggacataacgtttcacacggatgtccgactccggcgcataatatgtcgagaggcgtgaaaatgtacaacggaagctcctgaaaaattcaaaaggtcattactcttcacacagatgtccgattcatgctta

SEQ ID NO: 65715 - DNA, 424 bp, Glycine max
  unsure (1)..(424): unsure at all n locations
gcttgacacctagcactaagntggaatgacttctttgctgtgctgccacatggacttagattgacatcttcatgaatgggaaacacaacatcaagagcttgccaccttacactaaggtggataattntaataaagcaagaaacttttatggacatgatatggggattttttgaggaagttgccaagaaaatagcaacaggtaaggcttgaaataaaaaaaacaaaaaaagtatatgagaagagtacaaaaataaacctaggattccttaggcattatgccttgggcttgtttgtgttagtgtcacacagccagtagatagcagtttgtctgaaaaaaacaatatagctaatttaagtagacatccaatgtatctcatgcttgcattgatcttagtgcactcttttttccaactgcattttatgt

SEQ ID NO: 65716 - DNA, 55 bp, Glycine max
gacccagagcaccgcagctgcagctgagattctatagtgttttcttattgtctgt

SEQ ID NO: 65717 - DNA, 419 bp, Glycine max
  unsure (1)..(419): unsure at all n locations
agctnttccattgctcagntcatcaagttcatttactccttccccaaaagaaaaagaaacaaaagcagaacaaacattagattttgcaacatgtcaaaggtgaccggtcagaacaaaaatttgagactgtggcataagattaagttactaaaatttgagatggtgccataagattaagttacctagtgcatcggcaagaccaagaaagttcattcaaatgctcacgcttcattttatctctttcagccttgtgaactctcctggggagtttcctttggtcctttttactgggacaagaccttcagcacatcaacatcaagcctacagaaactgaatccagacattgaatttgaagctattgttccccataaactactcatgcaggagacattttactaatggaatacattaaaatggag

SEQ ID NO: 65718 - DNA, 409 bp, Glycine max
agcttgacattaataactcataaatagctctgttttaaatagaatataaaaattaaaattacatagattctacaatatcatatcatatgtttaacacatattttatttgtagattattacatagtattaaaatattttattaaataataaattgacagttaaaaaatgatttaataatttttttgcaagttaaaaaataatcaaattttaaatgagctaaaccattcaagctcaagctcatgctttagttttttcaaaaaagccaaactcaagcttataattaggtttgtttaaataaatgagtcaagcttgagccactcctttttttcacaagccaagcttcaatccctagtgttgagctcatttacacccttatcttcagggactaaaatgacaatacataattaag

SEQ ID NO: 65719 - DNA, 410 bp, Glycine max
  unsure (1)..(410): unsure at all n locations
agcttatgtttagttcaccacatcatttattttcagacttgagnaagcaaaacataaatgtaggccacaaaagacctaaatgttagagtcggttatgaccttatcaaatacaaaaatacaaaaaccaatgttagatggcataaacaaagatagattaacatagatactctctattatattaaagcataacagttgaaaattttccaaatttatcatcatataacatagtttttgatcaagagcagaaccaggcagtggccagcatataaacattgctactacaacaactctagcacatcaacttgtgtaactacaatagaactaggtaggggccaacataaaaacattgaatggactcgtcataccaatgttattataatgggggatggtggaaggcaataacatgctgt

SEQ ID NO: 65720 - DNA, 406 bp, Glycine max
  unsure (1)..(406): unsure at all n locations
agctngcattggtntctctttttttttttctatgaagtttcttatgagggtcaatctaggtgagtgcgtagcataacgacgaagcggatatctcacgttttttttggaagtatcagcttcaaagattcacacccttttaattggtggagtaacaagtcaataattttgttagtcaaccagcttggtttttttattccttttactttcacatccggacaaacagtagcttatcacttccaaaagattaattagtgacagatgcagaaatttttcagtggaaacaaaaaataatctaatattcttttcaaacaaaaaattatgagttttattaaatgcgtaaaattagnatcaatntattatcttttatcttttataattatttacattcatcttattaaaaaaaata

SEQ ID NO: 65721 - DNA, 401 bp, Glycine max
  unsure (1)..(401): unsure at all n locations
agctntatatagacttcagagcttcgatccgttgagaaattctagctagtcgttctctaatagctctggcgcttgatatgaggccgctactgtgcatagaaagaatggggaccaccaatactttctgcagcatatcttcaaagaagtacaatatgctagtgccacctagtgctcaacattgaattttagcatacaaatcgaaagaaacattaacaatataagacaaaaataattaagaatgtccagataagacaatttaaatattcccttttatgtgatatgacacgagttgcttactgaacctatggaaattactttctgatgattgttttcagtacttgaggatcgagcgactgttccattgcctttatactatgagccaagtgctatagcacttgtct

SEQ ID NO: 65722 - DNA, 409 bp, Glycine max
  unsure (1)..(409): unsure at all n locations
agctngcacaacaagnagctaattctatnttttntttttgcnncgaaaangaagtaactaactaaattttattaatatatagagtgactactcataaggaagggatggaccttgattaggctcatctgatctacttaattaaattaatttcataaaacaaagcccaaactcatgcctaattattaaagggcagaggttctgacttccaagctcaatttgaccctcgaaatgacaaaattggccaaagctttcaagttttgattgatgaaaagttttgtttagcatagagtaatcagaaccatgtgatttagggttcacatgtgtgtaattgatttaaggtgaattaacaagtgaatacttctggaacttcattaagcgtgactcatgcactaccaaaatgccttaacat

SEQ ID NO: 65723 - DNA, 422 bp, Glycine max
  unsure (1)..(422): unsure at all n locations
agctttacttctcattntaacctttagaacttctcggccggtaatatcatagataagaagtgttgatgttcgaaggacactttaaatccccttttaatcaattgacctacacttaaaaatttttggtcaatgtcaggtgcataaagaacatctgatattattttggtacctgaacatgttgaaattgcaatggttccttttcgttttgcagaaatatagcctccattcccaattctgacctttgagacattagttggcttcaaatccttgaagagagtcttatcatatgtcatgtggttcgtacaacattcagaactactcctcatcgaatagcatgttgcagcaaaaatataatcttcttcctcctgctcaacaacttgggcattggcttcatgctgctgaaatttgcttctacaaattat

SEQ ID NO: 65724 - DNA, 418 bp, Glycine max
  unsure (1)..(418): unsure at all n locations
agctntcagccaattcacacgacaataactttttactctgatttctgattggagccccgaatataacgagacgctcgaaattgaatgttgaagctctgaacttgttcaaacgacaataactttttactcggatgtctgattgagttccgcaatatatcgatacgctcgaaattgaatgttgaatctctgagccaattcaaacgacaataactttttactcggatttctgattgagtcccgtaatatatcgagacgctcgaaattgaatgttgaacctctgagcaaattcaaaagacaataactttttactcggatgtctgcttgagtcccgtaatatatcgatacgctcgaaattgaatattgaatctctgagccaattcatacgataatatacttttactcggatgtctgattgagt

SEQ ID NO: 65725 - DNA, 361 bp, Glycine max
  unsure (1)..(361): unsure at all n locations
ccgcggctgcagctaacatcaattcagcggccgattatngtttatccattttacaccgagcaaaagcattgtcgttgattggctcacacgttcacattccatttcgagcgccccgttatattacgttactgaatcacacattcgagtgaaaagttatctgcctttgaattggctcatagctttacattcatttcggcgctcgattattcgggctcatcaacatccgagaaaaagcttatgtcctttgagttgtgtctaggttcaacattcatatttagcgacccgatatattacgccactgaatctgaccaccgagaaaaaagtttttgtcggctgaattggcttatatgcttcacattta

SEQ ID NO: 65726 - DNA, 427 bp, Glycine max
agcttcctatacaaaaatgttgtcttcacatccatttgttctaacacaagatcaaattctgccaccatagccataagaattctgattgacctgtctttcactacaggagagaaaacttcattgaagtcaattccctccttttgagtgaatcctcgagcaacaagtctagctttaaatctgtctggttcaactccttggatgccttctttcttcttgaagaaccatttgcagctgaccactctagaaccaggtggttttttaattaattcccatgtatggttgtcatggagagacttaatctcttcattcatgacacttagccatttttctttctccttactagctaagacaactttaatagtttttggatcttcctccaaaacttcactagtagctaccagagtaaatgctattatatcaacatatt

SEQ ID NO: 65727 - DNA, 428 bp, Glycine max
  unsure (1)..(428): unsure at all n locations
agcttctttgggaccttgaacaggcaactttcttctctttcttaaccatgccataagcgcgcgactggtccctttcttcccttcgcaacttgagttcactattgctaccccatagagctccgcgaaatttgttccggccatactcttccttgcgagccctccttgtctcttgttcaagggctctcgcagtaattgcatttctcttcccgtaacccggcacactccttccgaacgtgtgtagcggccaacttgaacttctccttggcaagtgttgcctttcctaactcgcttttgagagattggacttcttcgtcctcttccggagcttcaaaactctctttgctgacgacctttaacttggcgagccaatctaaacctcgtatatgaactntcagccattcggggtacccaccaatgatgccattacg

SEQ ID NO: 65728 - DNA, 418 bp, Glycine max
  unsure (1)..(418): unsure at all n locations
agcttatcaaattccctagaatatatgtcacatagccatatttcaaatgaaccagaaactttgcccgtggctaaaagcatcttggaagggtattgaacatgcgtggttactgaaagtacagaaactgggacagcattgacagttataacctattttggaatgaaagntgcataaaggaattattcacaataaagagtgagaaacgaaaagtgatgcagaaaatacacatagcaagtacctccttcaataatgagaaggaagtttgatccacttttgatgatttcagcaatttgtcattgtcagccaaccaaatcttcacactgcaaagaacatacatgatacattcagctaaactaagatattaggcacaaaatgtaatacaccaaaaagtcaatccaattatgagtatgagggaaat

SEQ ID NO: 65729 - DNA, 416 bp, Glycine max
  unsure (1)..(416): unsure at all n locations
agcttgtctttggtttagatgtggtttatttatgatttatgacttgnaggatctcaattgggcaaaattggatgagggcaagagtgatttcgaaatctgcccaatttgtgcggcaaaaagctgtcaaattttgtgcagcagaaaattgtgcttgtgcagaaaatgtggtgtattgctgtgtgtggaaagggttgtacatattgggttctggatattttctagcatatcccaacggtcaaaatgtagatttatgtactagggacctccagtaaaagttttgagtcgatccaacggttaacgaatcggaacgaagaaaatgtttctggggtatttgagtaaagaaagttgggcattggaatgtgttttgggcagagttttctgcctctgccctattttcttggtttggatagctcatg

SEQ ID NO: 65730 - DNA, 327 bp, Glycine max
agcttgatagcacgtagagactaacctcgtcttctgcccccttcgtcaatcgcgggcgacaagcccgttagacaagcgggtgatatacatctatttttcgcgctacatgatttgtatactgacttttgtatctcgctgacgggcgcatatacgcgagtggttatacatataaactttttgctgtctgtaagacgatatgcatgatggcacgcagagactaacgtcgtctgctgcgcccttcgctaatcgcggtcgacaggcccgttgacatgctgagatttacgtcatcttccgcgctcacaagatctgtcatactgacttttgagt

SEQ ID NO: 65731 - DNA, 412 bp, Glycine max
  unsure (1)..(412): unsure at all n locations
agcttgtganagttccttatgacagcatattttatttttaggaagctaaaagcttttttttttatcggcaaatatttgtctctaattattagtcttttgttagcaggggaaatcgaacccatgacctttccctccctcccttctccttttaccacccacccaaccttataactcctagtaagctaaaagttataaaagggtcataagccatattcacaagctcagcctttcaaaataattttattgaatataagagcttaattatgccccttatatcatgttcgtatgacccacaaaaatgaagtcagtattgaacgtgacaatcactgaaaagtttataactgaatatatttcaagtgctaagtttcaaaggaaagcacttggattatcttaaaaataaagttgaaggggg

SEQ ID NO: 65732 - DNA, 412 bp, Glycine max
  unsure (1)..(412): unsure at all n locations
agcttagatagttacaaacgttttaactattattttaatcnganagaaatgcggaccaacttatcaacaaatctccaccttggttacataactaaacaaggatcaaagtgggtgctcccttnttgaaattagactaactgacattacttcaattttataaggtttaggcaggagaaaacttgttgctcggtaaaactttaatgatcatatcagagggattatgctcagcggatactttctttacaaacatagctctttcagcaataatctctttcacaaagtgtagcttcacatctacatgctttgtcctttcgttattaaacctggctctctgaaaggtggataacactttggttatcacaatggataatgataacatgactctgcagcatcagctcttgagctattcccc

SEQ ID NO: 65733 - DNA, 428 bp, Glycine max
  unsure (1)..(428): unsure at all n locations
agctttangttaggcaacaatgaaataaaaaataaagcaaataaaaaaatttgcaaaaggagagtgaaggaaaaagagacaaaattcctcccaattttacaaggaaggcgcaaaagtgaaatgaggattaatgtttaacacaaatgaggaaagctcaaaagtcctctcaagtttcttactcaatatcactcttaaacactctttgagcctctctgatcctttctttcatagctctcttactccctgatcatgttactagctcaataaagcccatgtggaccaatgaatgactaattttgcttttgagtttggattctagaatggaacctgcacatacttgtgattgttaaaaaaaatgcttcgaggtttgcacttgtacatttgagaagaaaactcattcgacctggagctcgtggaagatgcccaaa

SEQ ID NO: 65734 - DNA, 426 bp, Glycine max
agcttggaaactacatgggccttaccaagctctttgagatatagtccaatcctcactggaatcaagtttttgccttctctaatgaaaggattcaagcttttgttctggaggcagtgatcaaagacaaggatattgttgggaagactttgcaaggagagggaatgattgatatttaatgaaaatcccaaaactatatttcccttctcttatctaggtttcattaacaaattcttctatatcttactaaccttagagaagaaaatatgtaggaagagcaaaattaacccctacatatgtagcactatcacatggaggaagcaatttactacatttactaaacatgagctcttcacagaactcattgtattgcacttcaatattcataataacatatccaagcttgcaaaaaaacatagtgactcatat

SEQ ID NO: 65735 - DNA, 420 bp, Glycine max
  unsure (1)..(420): unsure at all n locations
agcttaactacacttaaggttcaatgccccttctaaactatgtgttcatttaagcaangcattaaagacatgttaatttaattgaataataaatgcgagtctttattaggaggcgtgattaattcatctaatataataaatgggcagattattcagggagtagttgaagatttgatctattctagactattactttttgttggacaagtgacctcaataacttaagagggggtgaattaattaagttttaaaatttccccgctaacaaattttaacccctctttaaatgatacatgataaactcaaaatgcagaagaagaagaagaaacactcaatttaataattttcttttaaatgcacaagacatagtaaactgcaataaaataactgagataagggaagagagaattgcaaactcta

SEQ ID NO: 65736 - DNA, 422 bp, Glycine max
  unsure (1)..(422): unsure at all n locations
agctntgatagttgtttagttcgttagtttcaaaattttatctccctgttctcaaatacgattaacccaatactacttaacatattctgtttggaaggcacgaaagtagaagaatagaaagggagagaaggaaaacaatcaattttatttactttttttcatagnttaatttggtatatcacttanaagaagaaaagagggaaaaattgtaataggcatttttaatcattttcaaattaacacgaaaaacaacttatataattaaaagactgaatttatctttatatattatactttttaattagtcatgtttacattattttacatatatatttaactttttttcttttattttttttttttggtttaaatcacatgtattcttcattggaagagtcaattttatttggtaggataattat

SEQ ID NO: 65737 - DNA, 425 bp, Glycine max
  unsure (1)..(425): unsure at all n locations
agcttgcanagctgcatactcaacagnagcgtgttntatctttcctttcaattatagagaagggtggcttggataatggtgccaacctctttgggatccttatctagcctgcgtcagatttgggggtgctaaccatgttaggatgcctaaatttgacaggttattcctccaaaacatttggttgtattcatgtcctttttcttttaataagatgagtcatgcaagcatgttttgattatcacttacttgtacatggtcagcatcgacatgaataacattactatcttaccaccatgatacttatggtacattgtcagcatcaacacgaatgatatgactatcttaccgccatgatacctattgtacatggtcagcatcgacacaaatgacacgtctatcataccattatgatacttgtgggacat

SEQ ID NO: 65738 - DNA, 417 bp, Glycine max
  unsure (1)..(417): unsure at all n locations
agcttagcatgctntcaacaaattccttcacagataactaccataaggcataaacctagtagaactacccatcatatctgccaaagacccaatacccacgaatttcatgtgagaagaagtccacccatacctgaaattcgaagtcccacaacgtagaggtgcgcttcacgacttcgaaaatggcttccttttgcaatttggagtagaagtgatgagcaaagtttggagctttaatgggcaacaatggtggaggagaaagggagaagaaaagcaacgtgggagatgaggaaaaagcttctgaaaatctgctgagtgaagtgagagagtgtggctttttaaaaaaaaaattttctttttcctattgttttattttttaaaagcacttgccactcgtcccattttgagtggaacaaaaag

SEQ ID NO: 65739 - DNA, 445 bp, Glycine max
cgacccggatccttaagtcacctgcggcagcaagcttagaccaagcaacattaatctatgtatccaaaacccctcaatttaatggattttcaaggtttgagaagtgaaattgagaatgaggtaaatttggagcaaactctcacctcacacaagtctataacatcaatctaaacttgctcaaactggatttacaccagaaattccaccgaatcaaaatttgactcctcaacacccaattttaccctagaaatggctctttgttcactttggtcatttgtttttctctcttgcacaacccaagcttcctcataagtcctaaatgacatttcaaactaggattaactcactttaacctccaaataccactaaattcagatttggcctttcaactctcaaaaactcaccttgtcccactcataacaccatattctcactttctaaccct

SEQ ID NO: 65740 - DNA, 403 bp, Glycine max
  unsure (1)..(403): unsure at all n locations
agcttattgagatgcctttcggttatcttattatacgctttggntnaatncactaacttattagagataccgatattaaaataatcaatgaatctagaggctagcacaacatacgaaaactcatattctactaaccgacaacttttcaacatgatgtcttcaataagaagtacccaattcatttgaatacctgattttagaccatacacgatctgtaaatcattgtcaaccatctgtgcatggatgctagaccttggtgtgacaatgtaggttatgagataaacgagcattctgtcttaacagttaaaccacctacaactaggcggttcctcatattccttgttggctcaaggagcatacctttgaaagttgcatcttgttgaaccatcagagatcttcaact

SEQ ID NO: 65741 - DNA, 410 bp, Glycine max
  unsure (1)..(410): unsure at all n locations
agctttaattactcgtggaaaaacacaagcttggtanggaaaacgattgttcaccgctagttggtcttgggtttcactgtattcaaatcattcttcttctttattttatttacggtgcaaaattaattgcggtcactccatccacattaaaatattcactttttatttaccaagaagatatagaaggttcattttggttaagatatctttaggttcattaagatatagaaggttcaaagcatttagtcttttaagatttgtttgcaacttgcttctttgtagttccccccacatgcaaggccacatttaacggatgcattagcagtaaaatatgtactaccttacactggattttctttangaagcatggaaaattatggttccatctanngcagacaagatgcattaca

SEQ ID NO: 65742 - DNA, 407 bp, Glycine max
agctgaagcacgtagagactaacgtcgtcttctgcccccttcgccaatcgcggccgacaagcccgttgacaagcggcgatttacgtcatcttccgcgctcacaagatctgtcatactgacttttgagttacgctgacgggcgcaaatacccgagtggctatccttataaactttttgctgtctgtatgacgaatagcatgatagcacgcagagactaacgtcgtcttctgcgcccttcgtcaatcgcggccgacaagcccgatgacatgctgtgatttatgtcatcttccgcgctcacaagatctgtcatactgacttttgagtcacgctgacggacggaaatacccgagtggttatccgtataaactttttgttgcctgtaagacgaaaagcctgataacacgcag

SEQ ID NO: 65743 - DNA, 396 bp, Glycine max
agcttagcaatcggttgcgagtactctctttatcaatcccacgggattgagatgaatgtaccaaatgataaggggtgtgcagcaaccgaagtgtgtggaaatgggtatggcggccatggaaggccgcaatgactctcaatgaaagcaccaaacgttatgtgctgggcttgttgttaatggtttcgagggtccaacacctaccgaagaagaagagaagaagaagataaacttcaggtaaggaggaaattctatttctcatatcctatttgtttatttacatggctatatatagaggaattcaaataacagatttgtgtcaattcttatccaaaaggaatattctaataacaaaatttgttatgcatgtcttgctatgaaggagcacacaccacaagc

SEQ ID NO: 65744 - DNA, 447 bp, Glycine max
agtcacctgcggcatgcaagcttgtcaaaataataattttattttttcagtaaacttcacactcatgtttacaaataagctctcattttataagaacttacagaataaatgcttagttaacttgtttaccaaaacatgccaaagtctcaattaaaaaacctggaaaggaagctataaagaatttaaaaggtcagtcacctgtagtttagtaaaaagtcatataaagcatgtacattgttgatgccactaaaagccagcaaagatgctgggctattatcaacatcagagaatgaccttaatcgccaagtctgtgttatttcaaatagcaagcaccaattaatataaattatacatagagaagaaaaaaatagcactagaattaattgatagacaaactcagaacaccataatatgcataaaaaggacagccaactattaacatgaaat

SEQ ID NO: 65745 - DNA, 427 bp, Glycine max
agcttgtagaattatggcgtacccatcacatgtggtactatgttggggtcgggcgatggtgcacaacaagctttccacattcacaatgcgcgcataaacccaccatcccctgttgcccacctccaactgagctcacgtactcccacgtagcccatatcctcgtttctctcaacaccgggtccccatcaatcctctcaagctttcacaacatccaagcaaaacaacattcaaacagcacaagctatcacagccaagcaaaacagagccaaggcagaaaactctgctcaacacatcaaccaaaatcacagcttttctcacgtaaagaccacagtaacaattccttcgatccaattcgttaaccggtggatcgactccacaaatttactggaagtctatagtgtataagcctgcattttgaccgctggga

SEQ ID NO: 65746 - DNA, 336 bp, Glycine max
agcttagaaaggtatcttacagtgcaaacaatagagatttatgaaatatttggtcctactttccaagcatgtgccagcaatgacccaatctgcatccccagagaaataatagtttttttttttaaataagcaataatatctccaaaaacaatcccaatgaaacatgcttaacatgagagaacaaatcataccttctctgcaatgcttctagggtgagtggcacagccccgcttggcacgaattttgctaggaacaaaatccgagagtggaagaaacttctcaagggctgtcatttctgcagaagtgtttggcaaactcaatggaggagccaaagca

SEQ ID NO: 65747 - DNA, 414 bp, Glycine max
  unsure (1)..(414): unsure at all n locations
agcttgagcgagtcactgtatagtgagncatatcttgttacacatccctgggaccctgccattcttttgtatagcggaagaatctccatattgaagaattataatcgtgtgctcccattattacctttaattactaagtgcctattctaacttcacgaaacggaaaagtctgagttttcccaacagctataactcctatatgccaatggttatgttttacctcaacaaggaagggttacgagaaccctctcatatctgtgctcaattgaagcaatcactgtttgagacactaaccatttgctaccctgtatcaggcagaagagaacaccactccttcatcacttgtaatgatgagggtgcactttacttggaagccaaggtgaaccttaacttgatcgagttcctcacaccacc

SEQ ID NO: 65748 - DNA, 420 bp, Glycine max
  unsure (1)..(420): unsure at all n locations
agctntgataagttagttaccatttggaattcttggaccaaccgaacaatatgtcaaacatatcaataacttgatggcactttttgaattaattcattggaggtaaagatataaactttagattagacgcattataaacgaaaaacaaagaaggaaagggttcaagttattaataaacctgaggaaaaagcacctggttagtacggataaaaagagtagttgtagaaatgagaaaaaaaaagtgagggaagatcatggtagagtaattaactaaaccggccatcacaaatttagatgagagtggtttgaaaaatgcagactgtaacaaattagtgggacttaatttgaaagaaggaagaaggagacaattgtcgtctctttgtccactactccacctcagttntttggacatgtctattt

SEQ ID NO: 65749 - DNA, 342 bp, Glycine max
  unsure (1)..(342): unsure at all n locations
agcttcttatccaaggctcatcttnggggttatatctcttctttcttaatggatggcgcctcctcttacctcttttcctttgtctttcgctgcatctccatgggggaaaatcaccattaaaggaccccattgaagcttaaaaatccagcctccatagaaaccccacaagcaaagtttttgcaatctccttaagagaagaaagtatatttcccacatacttggtgagtatctaataatattggcaattatcctattgtgaaagataagatcattgtatcctacttatagggagatatttttctagactcggtcccataatttttatttttatactgagggggt

SEQ ID NO: 65750 - DNA, 415 bp, Glycine max
  unsure (1)..(415): unsure at all n locations
agcttcaataatttattatcttacccttattaagagcaanggnggtgaaataacttgaagacgttgacaattgattactcaactaataatttaaaaaagagtaaacaagcaaaagttagattaacacatattaactgttacgtagtagttttttttttaccaggagatctaaatcattcttttttagcagaatgtataatgttgtataaatataaaaatacttgattcgtttattatggataaaaataaaatactaatgcttttcattctttatatttggtaaatttgatgttgaacatgtttatactaagcatattataaacaaaatttttttttaaaaaaaagattatttagaatttctcactaaacatatcaactaataatttataaataattaacaattttcaagtaatta

SEQ ID NO: 65751 - DNA, 401 bp, Glycine max
  unsure (1)..(401): unsure at all n locations
agctngcgaagtatattaattggatagctttaacaaattattcttaggtgcgaaagggtaagagacccaaatgttgatttcttatcaagttttaagatggacatacaaagtgataaacaaagataaatatctcatttggattagcaaaaggaaagacttactttagaatttagaattaccacaacaaaaaataaaatagggcatgatcacaacattgaagtcccaaaaaggcaaaaatgaaaaacttacccgtaacttctgactggttgaaattgagagtaaattactctgactcttgtattttacttgcgctacactaacctcttctgtactttaaaaaccttcacttataatatgcattggaaaccctgcatgcaccactctatttttttacacatttt

SEQ ID NO: 65752 - DNA, 310 bp, Glycine max
aaatagaataacactttgacaaggcggcatctccgaaacttctatcatatttgcgtagaccaccaagccctcgaaatactttgtacacgctgagagacgagacctaaaggactgagcggcttacctatccataagggcatccaaacttaacagtgagcaaccataacaaactttttctattcgacagaactaacacagaccttggaggacacagaataatgcgagcaagtcaaccttggggtcgaacacgcctggggaaagtgaaacaatacttgcaaccttgaaagaaaatgaaaactcgggggggcgc

SEQ ID NO: 65753 - DNA, 424 bp, Glycine max
  unsure (1)..(424): unsure at all n locations
ccgcagctgcagctcttacttgttcattatagcatatctcatttttatgctagctaactnagnagcgttaggttgaatttctgttaatacttagctctgttaggttagttgttcattatgctagaattagggttttattgtggatacaatgtgcttgttttgattagggttagacgacctaataagggcctaagtggaggggtgaaaaagccgtgatttctctggatatcgcgatgagcgcgctaagcgccttgctgtgctaagcgagttcatcatttttgttgaacatctggatttccagatgaactcgcttagtgcggtcctgttccgctaagcgcatttatcttctctgaatgaaagttcaattgcttatgaactcactaagcgcgtctgtgcactaagtgagtagtgtgttctcagacac

SEQ ID NO: 65754 - DNA, 449 bp, Glycine max
atcctcaagtcacctgcggcatgcaagcttgttcataattacttgattagcttattgatgcacttgatgcaagggtcgcatgaaggtctgttactataagcctaaaagaagaatgaaatcagatctttgcttccatctttggtgtttgagttttgtgctttttgttagtgctttatgctttctattctacatcaaacaattactcacttgtataaataagatgaatgggaatgaccttgggaagattagacatatatgtttatgggatatccatctctacaagagcactgctatttatagccatcgcagctttatgaatctgattagcacaatctcttttctcattcaagcgcttctgcaaaggtgggagggtgatgtaaatatctgatcttggtttgttcgtcatcatctaagagacaccactagattacatgtcacacacattatga

SEQ ID NO: 65755 - DNA, 408 bp, Glycine max
agcttggagattgagagaggttttgaaaattggtaaccaagagagatcaaagctagttgctgcttgtattaaacttgtaatgtgtcatgatcaatgtgatgatgatgagctgcatttcccgtggatgtaggcacattgccgaaccacgtaaactcatggtgtggactcttgcttggtgctttgatggggtttctatttttcttttgatcttgcacgttcttttggtaactaaacaaaggataatgaccaacaagtggcgccgactgtggggacaagatcaagctcaagaaagatgggaacaacaaagtacgatattgagaagttttcatgggaaaatgacttctggttatggagaatcaagatggaagcaatcttgattcacatgggttgccaacagctcttaaagga

SEQ ID NO: 65756 - DNA, 436 bp, Glycine max
  unsure (1)..(436): unsure at all n locations
cagagngacctgcggcatgcaagctggagatgaggaagngattattggtgttatcttctgctttnacccgcggaccacagagtggtacctggagatatgtcgcggtggtcaagagaccttggggacgtcatgtgaggtgctattgcccaaaaccaagcttgaccaatctcgacccaacccgggcatagtcagtcagtgagaacctgtgatgtacctaaacaggcgagctcctggcggtcaacagataataagaacaaagaccactaagcaaggaggcttgtggtggctggccagctgtgaactttgattgatatgtgggttatggcctctggtaatcgattaccaagggtgggtaaccgattacaatgcttaaaaatgaagacaggagactaagatgatctctggtaatcgattaccaacgggtgtaatcgattac

SEQ ID NO: 65757 - DNA, 415 bp, Glycine max
agcttctacttatgtggcagggcgggctttcttcactttcttgtctccaacgcgagctctgaccactgtccttccctcccgcggtgcttcttttcatgtccgcctgagtgggcttatagcctaaaccatacttcccacgatttccttgggtttttatcaagctagttatgccgccattgtctttgcctaaacccatcccgggttcataaccgttccccaacataactcgggccaagggcgccccaacaggcagctgtagggggggttaatatccattatttggaaggtgacttgacaggtgtgagggcctacttgtactgggagatcgatctctcccctaacctctcggcgagtgccgtcgaaggcccgaaccaccattgaacttggttttaaatgggaagcattgaatggtaac

SEQ ID NO: 65758 - DNA, 414 bp, Glycine max
agcttctatagaaggttcattcctaatttctctactattgcatcacctctcaataagctagtgaagaagaatgtggcatttacctggggtgaaaaacaagagcaagcctttgctttgctcaaagaaaagcttactaaggcacctgttctagctcttcctaacttttctaaactttcgagctagaatgtgaagcctctgaaatgggagttggagctgtattgttacaaggtgggcaccctattgcttattttagtgaaaaaattcatagtgccaccctcaactaccccacctatgataaagagctttatgccttaataagagccctccaaacttgggaaccataccttgtttcaaggaatttgcattcatagtgacatcaatcacttaagtacattagaggcaagcaaggtaaca

SEQ ID NO: 65759 - DNA, 406 bp, Glycine max
  unsure (1)..(406): unsure at all n locations
gacccagagcgactgaggctgcagcttaattgtagagaatatagcttttgatntttttctgttcaaagatcagacagactcatgtctatcaacaaaagaggaatggattcacatttaaacccatcataatgaagaaaataataaataataaactatagagaatacgttcctagattgttataaagaagaggctttgttaagactattctcaggccgtgttttaatagtttatggcaaacatgttgttcacaatgcttatatgtcaccactcattgcaggatgagatttcacgcccgattagtgctccaattttcatacttgcgaccccgattctttcccacacactgtcaaatctgaggtacctccactcaaattgttgcatgaagaaagttctatatgcacaacc

SEQ ID NO: 65760 - DNA, 415 bp, Glycine max
agctttatagacttaactccctgatacagaaaaagttacaacttactggtattggattcagatttatgcatcagcacaacttgacttagtaattcattgatcgtccattcaagtgcacataatccttaaagttatcttagaaaagatatatatcttagactcgatcaaatggtgagtaagatctaaaacaaattttaagataaacattttacaatgagatatttatactggagatctatattttgttaatattgtcggtatatgagacattcttgctatataaaaaatatcagaaaatatttttttaggtgaacctaaaacttgaaccttaactgctttattattaagtcggctctactaagactggctactagatattggttctttctcttcttgttggtggatattatctcac

SEQ ID NO: 65761 - DNA, 407 bp, Glycine max
  unsure (1)..(407): unsure at all n locations
agcnnacgggtttcatatttagtgcactgttagttgagacacgcggctatgaattgagtgacctcactcctcagaccagaccagtaaaagttctcgggaatgctcgcaattggctttgcgatcccgacttgtactataggaggaataacatgatattctcgtaccaacatggggatcattgggaggacccgcggaagccaaatctgacctcggaggagaatcatgttgctgccaatggagaagtccgagttgggtgagggatagtcactgattgcaatgcgttgctggacatgccctgagtgagcttctagttggcgccgaagttctttcaggaaggtcaaacaatgaaccgagaggatcatagaaactgaaggttcttgctccagcaatctcgatagcacatccac

SEQ ID NO: 65762 - DNA, 395 bp, Glycine max
  unsure (1)..(395): unsure at all n locations
attgaagaaatacaagtagtgnggatgtctcctccacctctagaacctcacaatcactcacagactcatctcatgctctcaggatggcttcctcttctcactctgttctctaccagtcttctcacagcaaaagctttgaaaactctctggaacttggacctttctctctttagaagtctctaaacatgcaaaagctntgataatttcccaaactcccctccaaaatctgatttcaggcttaaataggtggctttgtttgtgctagcacgcttagtgcaactatggaccgctcagcgtgcattagtggatttcggcttagcgcgtgcgtttctcacttagtggatggactgaagtggtgcgcttagcgggatgacccttcctcagcgcatatgcac

SEQ ID NO: 65763 - DNA, 405 bp, Glycine max
  unsure (1)..(405): unsure at all n locations
agctnttcaactctntgtgtaaggtcaanttgttctcataatttcaaagggttcattcacgcaggcgcagattgtaatattgcatcacgttgtgtcaactcaaggggtccaaccagttgcctctaaagtccaggcagttcaacactggccaatacctcatagcacgagagctttacgcagcttctttggtttggccggattctatcaaggtttattcgaggatatgtctttttgacagcaccattaacatctttgatgatgaaggaaccttttctatggtctacagaagctcaacttgcttttaataagatcaaggaagccttatcatctgctttggttttgtccctccctaatttcacccttccatttacagnggaaacagatgcttctgggacaggtatgggc

SEQ ID NO: 65764 - DNA, 490 bp, Glycine max
  unsure (1)..(490): unsure at all n locations
tgcaagcttatactgtattgcgccacaagggctcctatatggtgntgtataatgttgggttccatagggaggggatagccacagatttgtactttccggngaagagtgatgattgctatatttttagatttttgtcaacagatgaaattccttctgtgattgtttaattagtaattggtaataagtggacatgtttatctcttttgctgcatttggtacaactattgcaatataatttgttttttgagcaatttgtttttcagtaacattaatattctcgaatcacttacttataatntaatagttgtatttcttttcttcacacctttcgaattcctttcttcttttttttactgncagggtatcatcatttctttttgtgaaaaataatgttactcgtgagaaatatggtggacctaaaggttaaatatcatatatgtcgacgaaaaagactttatatatatatatatatattccacatttaattatg

SEQ ID NO: 65765 - DNA, 371 bp, Glycine max
  unsure (1)..(371): unsure at all n locations
gataccgcgatctctgagtcacctgcggcatgcaagcttgatatgaagcagtgacgagcggcgattttctctgctattatcgttttccgcacaggggaacgtgcagatatgtcgtgtgggacatgagacctagtggacgtcacgcggagagctattgcacataagcaaccgtgatcattttccatgcgagccgtgcatagctcgtgagcgagaacccgtgatgtacctgaacacgctagctgctacccggcaccctatttacggacctgagaccacgccgcacggaggctcgtggtggctggctagctgctaaactagattgatatgagagaatggactctggaatctattaccgngggtgggtaatctat

SEQ ID NO: 65766 - DNA, 279 bp, Glycine max
  unsure (1)..(279): unsure at all n locations
actttgggcccctttcaccaatcctaatgacaatcatcagctgcaaaagaataacagtattcctgtactttgatttgcagaacttcggagtcccaactccactgcctacagttgcccttgcagtaacagcactggtgggtgcctngacagcagtttttatcttccaatcagcctcanagagctgattacatgcttaggctggttgggattgttgtaaattcttaagctgggaagtttcaattgtcaagataaaatatatctttntgtatcctgtaatat

SEQ ID NO: 65767 - DNA, 307 bp, Glycine max
  unsure (1)..(307): unsure at all n locations
atcgnacgcatgtatgatatccactcgacaaggtttgaagtagaagagaccttcaatcctatcacgcaacgtggcagacaaaagtgggcagctaacttgaatgaccattattgtcaacgcggaaagtattctgcgctccactatccatgttcacacattatagcagcttgtggctacgtgagcatgaactactaccaatatatagatgttgtttacacaaatgagcacatcttanaagctntctccgcacaatggtggcctcttgggaatgaagcgagcaattcttcttctgatgacgcatggacac

SEQ ID NO: 65768 - DNA, 463 bp, Glycine max
  unsure (1)..(463): unsure at all n locations
atgcaagcttatcctanagggatttctttgtatnattaattttctaactcagacgttnttatagtgctactaaatgaatacaaagtgacttgcagtagtttggtgagtaagtcaacattgtatataataagtacaaaacacctctatctgtcaaaatttaaaatcatatacatatctaagatgaacttaatgttaatttcaagatgtgtcaagtatcatgtactcatttatgagaggtgcaagattcacccatctgaatttaaaagggattacggaatgcacaattgtttataatcattggaggaagttngtaaaaattggctatggatggaggacttttacacaatcacaaaattttgaagntagaagtcaaatacaatntgagtttctagatgcaacatctaactntgtntaatttggatttgttggaattaaagacatatactatactaatatttgtaat

SEQ ID NO: 65769 - DNA, 469 bp, Glycine max
  unsure (1)..(469): unsure at all n locations
agcttgcacaattcacacttgtattttatgatatttctgcaactaagtagaatgcttaatgaaagataaggaaaaagataacccatgcaacttccaactttgggaaagagtgaacccaatgaattcataaacacggtccaattcatctcatcctagcaacatataacaaatttgacacaatttagcagaatgggtggtgtttttaacatgatgcctgcagtttgaagcataataaactccatacaggcaaagaggatacaaagaacatgtggttgactaacaaagagaatatttgtttctgcggatgatatgtcttcaagttttccaattaagacactgaagtagagcccaaaattctaaccaaaatacttactctgcattcttttgaaatgaagaacttacaatagtatatgaaagggcacaagaagttgaaatcagtgaaagaatgcangacgggagagacatgcct

SEQ ID NO: 65770 - DNA, 460 bp, Glycine max
  unsure (1)..(460): unsure at all n locations
atcctgagagtcacctgcggcatgcaagctgggtgagatgccctgtgcgacgagttattntgctcacacattgcctgagtgcactcaaggggaatcacacccctgacgcatagtcaacactcaagatgattcatgtctctcccacatgcatcgtcctgtagggaaaactactcatcgacacccgttcgttgaccaaatcatggaagttgacatatccctaggttggaaaccactcaacctanagaggtatgatgggaccatcgatctagatgaacatctggatgctttcctcacctaggcaaatttgtacaccaaggatgatccaatcctgtgtcgtgtcttccgaacgtctctcataggggatgcattatactagtacggtggacttccttcaaggtccatcgacagctctgacactattgtctagcattcagtgtgcaccagctggtcacatcgtgtg

SEQ ID NO: 65771 - DNA, 473 bp, Glycine max
  unsure (1)..(473): unsure at all n locations
acctgcggcatgcaagctntcctganatatcatcctccatgtgtattaataattcatgtcttacttcagnttcaaacaaagaaaccacaaaacaacatagttaaccacgcttttgcaaataactttcatcaatcatgcgacgcataatattcattgttgatacaatgctaaaactaacacattttgttttactcgcattatcatctaatctaactgcattattttcaatgctcgcgtagaatttgataccaaggtatctatctgacctaaaanaatgattaacttcaagtaacattntaaaaaaatactacaaactattaaaaaagttactaataaacttatttattgaataataaaagaaatctttcaactaataaaaaaagttaaaagataactgaaataccttatcaaatataacctcagtttacttaaaaattatgcanagatcgaaaaatacatataanngtttgtat

SEQ ID NO: 65772 - DNA, 344 bp, Glycine max
  unsure (1)..(344): unsure at all n locations
agcttaanaanttttgtattaanatttatgttttactatacaagactgttaattaataaaagaaagacaggactgttaattatattcacatccaattntcttcatattttttattttccaattttcaacaatcttttatttattcttctatacacttattatacatattagctattatatatacatactgattgtattctaaccaaataacaggtgcgcagaggagaaaatagttcaacttctctgtctcaatcatttcattatagttgtctctccctttcaatcacaacgatctccagaattaaggtttcctgatttctgtctcacttggttgtaccatctta

SEQ ID NO: 65773 - DNA, 340 bp, Glycine max
  unsure (1)..(340): unsure at all n locations
tctttctctgaaccaaaccctacaaatttggagagagcaatgcaggaagcatgttgaggttgagtcnatcagactcaacttctttccaaagaaaatccttctgcttgctaaatgacaaaataaacctcctaactaatctgtatgcacaataacatanatatagccttctaggtgtgtgttcaaaagggaaaatcatgtcatatattataaataatctaattgtggatgcttatatcttttatcatatatattattatttatgactttttattcatgtttatctcttataatttattcaattatttatacggtacattacactaatatgtatattggtata

SEQ ID NO: 65774 - DNA, 465 bp, Glycine max
  unsure (1)..(465): unsure at all n locations
agctatgacaanttgaaattcgcgagagctttctattgataatttcgagcgtcttgatatattataagcctgaatcggacctacgtgtgaaaatttatgacaantttgaatttttgagagcttccgttgttcaatttcgagcgtctcgatatattatgcgccttgaattgacttgcctgtgaaaggttatgaccatttgaatttctcaagagcttccgttattcaatttcgagcttctctatatgtgatgcgcctaaatcagacatccgagttaaaagttatgacaatttgaatttctcanaagcttcggtagttcaatttcgagcatctcgatatattatgcgcctgaatctgacatctgtgtaaaatgttatgaccatttttagttatcgggaagcttccatttttcaattcgagcgtctctatatgtgatgagcccgaatcggacatttcgagtaaaaagta

SEQ ID NO: 65775 - DNA, 468 bp, Glycine max
  unsure (1)..(468): unsure at all n locations
tgcggcatgcaagcttctcccncatattcctataaataggggtataagtgaattgtataaatgttcagcccttcttgtaattcgagaatcacttgaaattagtgaaaaaaattggttccatgaagaaaatccaagccgagccgcttccgtaacgttttcgtaacgtttccgtgggtgatttcgcgaagattttcaaccgttcatcgacgttcttcattcgttcttcggtcttcaaccggtaagttcccgaaatcgaacttttcaattcattctatgtatccttagtggtcctcatttgttttctcgtgcttttattttcatttcatttactttcccgtaccccatttgacgtggcttagtcatttacttaagtcattttctcgcctaattaanaaataaaatannattccaccgatcatttgagttgtaataatccgtaattttggtaaaatgaatctcaccgtcgat

SEQ ID NO: 65776 - DNA, 456 bp, Glycine max
  unsure (1)..(456): unsure at all n locations
agcttaagngtccatgttctgggatttttttaaatgatgtcttacacattactaatatttgcgaccccttttatccataatttaaacatcaaagaatcccaaaaaaaatatatcatgcaccagttccatggacaaccacctcaaaataggagaacaaaattaaaagaactatgatttggatccttgcaacaaagcttaagtgtccatgttctacanttntttaaaattatgtccaacacattactaatatccgtgacatattttttccatattttaaatgtcaaagaatccaaaaaaatatatcatgcacaagtttcatggacaaccacctcanaattggagaacaaaattaaaaaaagaaatctatgatgtggagccttgtaacaaagcttaagtgtccatgtnttgcattttttaaaaantatgtccaacacatatctaatatccatgacacat

SEQ ID NO: 65777 - DNA, 440 bp, Glycine max
  unsure (1)..(440): unsure at all n locations
gcataaaacacctaggaataatttagcttctacatactctggctacttggtttacaattcataataaaaaaaaccagcactaaaagcatctagagttcttcaatcctatatagtttccttcaaagatggaagaatttttcttacggataccaacgataacatcaatattaaatctgacanatgctgctccttgaaactcagccaaaacttttcagtgacgaaatcaaggttataactgtgatctccaagcattatggttaatgctctcacaggaagaaaaanaaaactctacaggaattatagaatataaaacggatcaagcatgttcccaattcacatttacggaaagcaagtgggaanaacaaaccttgatgcacataatcatccaccananacccagagaacagaaattcacttatcaagatccatgactgatcatt

SEQ ID NO: 65778 - DNA, 396 bp, Glycine max
agcttcctaggcacaatattatctatgtatctttcccaagcctctggggaagtgaatttgcaacaccaaaaatctttctgcaatatgcgcttagcctgagatgcgaggcttagcgtacatcaagcttcaacttacagtgagtgattcaggcttagcgccactacctgtgctaagcacacttccaatgacttcaaaatagaatgatgttggcgcttagcgcatcctttcctgctaagcttagcttgaaagctcaacttacataatgaatctggggcttagcacaggatggtacgcttagtgcaactataataaattttttcacagagaggaagtgacgcttagcgcatcatccacactaagcccatggcttaaggtgcaacttacattgaagaatgt

SEQ ID NO: 65779 - DNA, 454 bp, Glycine max
  unsure (1)..(454): unsure at all n locations
ctgcagcttcttttttggccataagatgcattctatttatatcttaattgannaattgaaaagacaatatgcaatgtttgacaacatttttaagcataatggccgtttgaacatataatataatgttaatgtatctgaatttctcacatctagttcaatcttagtggcaactttttagacaaatttttaaaagaaatgcccatggtatactntgacactcttaattnttattatcaagtaaagttttatgataggcttggcaataaaaaaggcgaagtcattgttaagtcaaattcttcttcatcctctgggttgctagataaatcacaagaatttacatgagtaatttcgagttagtttatgctgtcagagttcttaacagaaattntgatctcttagttgatgcttacactttgngggcagggggaaatggaatgcttggtgatggtgtgtc

SEQ ID NO: 65780 - DNA, 441 bp, Glycine max
  unsure (1)..(441): unsure at all n locations
catgcaagcttgcacttcagaacgtgcttgctagtttataattgtggnactgagctgcttgaataatcctcataggtaatcctctagtgctactcatctgccatggtagtggcttcaggcaattgagtagcggattcccttgatgatggcgaatcaggtgataatgaatcagagaaatgagtttcttcctcaagaatggatgcaactatatttgtctcgcaaaagttttcttctcctctcggccttgttccttcttaatgtagcttcaatttctaaatccaaaggaactaaattgcctatgggagatctatgcatataaaatactaacagaataacggttatccaactcaataagagaagacagataggaattgagaacaaatattcacatataatcacagactacaaataaaataggccctaaaatgaactacttccaat

SEQ ID NO: 65781 - DNA, 391 bp, Glycine max
  unsure (1)..(391): unsure at all n locations
agcttcacacaattttattnnctcttacttttgttttggaagaccaattactaagtctttcttaactagatgattaagatgatgcatgtttatgtgtgcagtcctacaatgccacaaccaagagtcatctatcttaccacacaactcagctcctaaaatgatgcatgttcaatatttaacatatagatattacctactctcttgccaatatggacatcctgaccagacatagcttcactaataagacaataattcttgttgaattcaattntgaagcctttgtcacatagttgactaatacccaagagggtatgctttagtccatccacatatagaactttctttatctgagttttgactgattccaatattccttcttcattatctttct

SEQ ID NO: 65782 - DNA, 466 bp, Glycine max
  unsure (1)..(466): unsure at all n locations
agctcttatccaggcaattctgtgggtgtagctccttcttccttggcttattccctagtggatggtgcctcccctctcctcttctcctttgccttccgctgcatctctatggtgaaaaatcaccattgaaggacctcattgaagctcaaagatccagcttccatagaagctccacaagcaagcttccatcaagtggtaatcagagcacaagagcttcaagtaggtgcctccttaaacctccattaattttntgctttaccttctcttccattggtggttcttcattntttctccatgtatctcctcacatgtcttgtgctaaatgttgttaacatgattctttatagtttccaccaattatacttgctatagaagctagaattgattttctatggttcanatttcttggtcttggtcttgaaccatgaattgtnngtgagttaggttccctttgagtttgcttgta

SEQ ID NO: 65783 - DNA, 457 bp, Glycine max
  unsure (1)..(457): unsure at all n locations
agcttatacttttcactgttttatctgnnattgtcacattaaganggggggataccctgagaaatcctgagaattgaaaggcgagtgctaccttgaacattaatgccatgctcagaagaaatcatgaaaatcataaaccaagctactgccaactacttcatgattgtgatggtgatantttacttggtatgagaattgctcaatggtatgtgaagtttttctcaatagtgttatatctggttctcaactgaaactctttaataagagaactaaagttntgatgtatgatatgtaaatcattgaatctctttcacaagttcatacttttttatataagctatgattagatgtactgatcattctaaagttgtgttaattgtgaatacacattntctgattntcattatattgctaccctatataaatngaagattcctcatgacaattctattaatcg

SEQ ID NO: 65784 - DNA, 411 bp, Glycine max
  unsure (1)..(411): unsure at all n locations
catgcaagcttgcctaattaacctgaanatgagagattatganttatattcacattttatggaagnactaagtatttattacctatgcttagtagaaaatacttataacactacaaaataaccataaattggaagagtttgatacaatttacacaagttttatacacaaaagttagtcgtattcatcgactaacaccagtccccatgaaaagttagcaatttccagtgttgaaaccaaacataattntgcctcatcatccaacaccagtaccataaacataaaatgcttcanatgcttaggcagaggacatatngcttttngatgtccaacctggaggaccgtgatcatgaaggcagatggagaaatcaccagtgaatctaanatcaatgaagaagaagtggaagaatagc

SEQ ID NO: 65785 - DNA, 376 bp, Glycine max
  unsure (1)..(376): unsure at all n locations
agcttgaagtgagaaagtgtggaagagncagtcttcctacttttattcgnngaccacagagnggtacctggagatatgtcgcggnggtcaggagaccttggggacgtcaggtggggtgctattgcccaaaaccaagcttgaccaatcccgacccaacccgggcatagtcagtcagtgagaacctgtgacctacctaaacaggcgagctcttggcagtcaaccgataaaagaacaaagaccacaaagcaaggaggcttgtgtggtggctggccagctatgaatcttgagtggtatttggaatatggcctctggtaatcgattaccaagggtgtgtaatcgattacaagggcttaaaatgaagacaggaagttaagat

SEQ ID NO: 65786 - DNA, 491 bp, Glycine max
  unsure (1)..(491): unsure at all n locations
catgcaaccttaacanaaggcatgcgaagtgggggatttttagagcattttccttatgnnatcaaacataanaagggaaaaggtaatattgagttgatgctctttctcggcgtcatgcattactntctatgcttgaaacacaatngattggtcttgaatggttgaaaagcatgtatgaaaatgatgaaacttttggagaaatttttaanaactgtgaaaatttttcagaaaatggtttctttagacatgaaggctttcttttcaaagaaaacaaattgtgtgtgcctaaatgttctacaagaaatttgcttgtttgtgaagcacatgaaggaggtttaatggngcattntggggtccaaaagactctagaaacattacaagaacattnttattggcctcatatganaaaaggatgtgcacaaattntgtgaacattgcattgtatgtaaaaaggcanagtctaaggtaaagcctcatggattgtatactca

SEQ ID NO: 65787 - DNA, 362 bp, Glycine max
  unsure (1)..(362): unsure at all n locations
agctggacaacgctaccagtatgcactatattttgttaaggngannaanggngacaacaccacttttccccctcttttatatacttcttctccttctccttctctatgcactcactttgcaaacgtgagcaataaaaattatgtccaaaatgagtgactttcgcaaaagcaatagttctttgcttctaatggaaatacatcaagtttggaaagatacaaaaacaagcacaagattaatctcgattcaaaatttttattggattattatttaggcttaaatatatgttttgtccttaatatatatccgactcttgcatctagtgcttcataaanaaaattcttcaaaattgaatcctaatatt

SEQ ID NO: 65788 - DNA, 237 bp, Glycine max
gatgggcttcttgcatcaacacagccccaatcccaacatttgaagcatcacactcaatttcaaaagattttgaaagttttcaacgcaagatggaacattagtagctttgcttaaaacattgaagcttttcttgttctctcccatttaaacaacatttttttgacacttattgaagggctgcaatggctaaatcttacaatcgctaaaaactgctaagcataaactctcactcgcaca

SEQ ID NO: 65789 - DNA, 417 bp, Glycine max
  unsure (1)..(417): unsure at all n locations
gatgacaccataagctctgatatgatatcagctacgaatgagtccaaaatgaaatacctgttgctnttggcgtggtctggaggcatctgatgaacgagacttcattgtgtccacttccgaaacaccattggttgccgaatnggctcgaataggacgtgtcactccgccaaccttgagtttaaccttattaactcggttctcattccccaatccatcctgagagccaccaaactgtgccagactcatgctctcaggattccttccaccatacanatctgcatttctcaactctgaatccaagctatcctttgtttgctagaacctctccaatttgctggagcaagaaccccttcactacnagcgttattatttgaaccgctcccgacatgctcattactataaaatgtatgaaccctc

SEQ ID NO: 65790 - DNA, 429 bp, Glycine max
  unsure (1)..(429): unsure at all n locations
cttacagcacctgcggcatgcaagctnnggattggtggcacccaattaggggtttattcatcctcagtggtggcagctttcagctcaagagggccaaatgtgctcacaccaaanatactcaaaccagacctgattgctccaggagtcaacatcctagctgggtggactggtgcagttggaccaactggctngactgaagacaccagacatgtggaattcaacatcatttcaggcacttccatgtcctgcccccatgtcactggcttagctgcccttcttaagggcactcacccagaatggagccctgcagctataaggtctgccctcatgaccacagcttacagaacctacaaaaatggccaaaccataaaagatgtcgccaccgggctaccggctacgccatntgattatggngccggacacgttgat

SEQ ID NO: 65791 - DNA, 397 bp, Glycine max
  unsure (1)..(397): unsure at all n locations
gctntataattaaatatgccaattgaaacattatatttaattatatggttggtattaaatgtttatgagaatcagaatttcagacccaacaaaattaacaaataactgaaatatcagtcatatgatgacacataaatgatattatgccaattaaagaatgaattattagaagttggatatgaactttctataataactcattagaagaatatagttacacctacctttanaaaattgaaattgacaagatttagagtgcataacagcagtttcaagtgatggaagggtggtctaattctttatcctagaatttccttgataaacttattcttgtactaagcagatgaatgactgggggcacaagctaagaaagaatttcgtgatcaattgaagtttt

SEQ ID NO: 65792 - DNA, 496 bp, Glycine max
  unsure (1)..(496): unsure at all n locations
agcttgtgtattgctgcattctactaatatatggaattgcccattgctttttctgagaataacaattggttgaccacaacagcgctgggggcggcaacggacaatggtctttcaaataaacttgttgtacatgaacaaacattagatcatgcgctgaccgtgccaaacgaaccagcgaagtcattgcataattggtacactaactatattcaatgtacctgaacaaaatgatttccaaacacgtgaccgacacatatgatgcggtggccagaagagtcaggtggtggttgacttctaagagggaaaaatgtcatgctttgttgntgggacaacgatacaaggattacgttataccgtgaagcaatcacatatcccatgtatgttatatncatccacttgtccacactaacctgaatgaaccaaacatacacatgtaagntaattatacattggggtattaaaaaaataaccctaaaacatacctttgnaaatcatc

SEQ ID NO: 65793 - DNA, 467 bp, Glycine max
  unsure (1)..(467): unsure at all n locations
agctgtgngttcgatggcttaatgacatctatcccccacatggaaaaaggccaaggggcggacatgacattcagaggatgtggcggaacattgacattgtctgcgtacgcttgacatttatggcatttccttacatgggcgcagcaatcgctttccatagtgagccagtaataacctactctaaggatcttcctggccatagcatgcccattggcatgtgtcccaattgaacccccgtggatttcctcaatcatgtagttcgcctctttggcatctacgcatcacaggagggtcatgtcttggttntgtttgtacaggatggtaccactcacaaagaaaccagtagccaacctccttaatgttctttngtcattgtcggaaatccctggtggatattctttgttctcgacatactnattgatgtcgaaaactatgngttccatctcgtcttctctatcgacaacaat

SEQ ID NO: 65794 - DNA, 482 bp, Glycine max
  unsure (1)..(482): unsure at all n locations
atcctcagagtcacctgcggcatcaagcttacggntcgcaaatatcacctcttctctcacctaangagnngagtctttttagtttctttnggtgttcctggnttctaaatttgtttattttgttttggcctttttttttggtntggggtgtgtggtatttgntatttttataatcgngtagattgtgcctttgtgttgttatttggagtggtcttttagcttatatggtcttggccctgtctggntttggttatatcattggttngtttntattgcttgttattgngactgcaagaaactgattangtaaagntctctttcgccttctgatgctttttctttttgatctttgaatgatatttnttgtttatttggaaagagtgagggatggaacagaaacatgaacctgaaattaaaggaaccanatttgattgatcanaggattgatgctaatgtttataattggtgtgtttgaatgaaaa

SEQ ID NO: 65795 - DNA, 383 bp, Glycine max
  unsure (1)..(383): unsure at all n locations
agcttgctgccacggagttttccgactatgctcttgtgtggnggaacaagctacaaaaggagagagcaagaaatgaagagccaatggttgatacatggacagagatgaaaaagatcatgaggaagcggtatgtgccggctagttactcaagggactngaaattcaagctccaaaaactaacccaaggcaacaagggggttgaggagtatttcaaggaaatggatgtgctcatgattcaagcaaatattgaagaagatgaggaggtaactatggctcgattcttaatggtttactaatgatatccgtgatattgttgagctgcaggaaagttgtgaaatggatgaattgcttcacaaagcaatccaagtggagcaacaattaaa

SEQ ID NO: 65796 - DNA, 472 bp, Glycine max
  unsure (1)..(472): unsure at all n locations
agctgggtgatggtcatattgtgataacatattgagtgtgtaaaggggtcaatatgaagatggngggattgaagtgattgtggatgcgttggtgttatagttgtcaataccggcatagcggagcggagcggccgactctaaaagtgggatagcggatagcgggatgaccgctattctaatgttttttttatatatgttaaataattaataatatatatatatatatatatatatatatatatatatatatatatgtgcgaaaacaaaaatataaatatatatatatatatataagtgnttaatattatacacattattatttaattattaacattattattatatattaatatggtgtgactactatctaactagatatgttaaactctaaaacaaaaatataaatatataaataattaataatatatatatatatgtgtgcgaaacacatatatatatatatatatatatg

SEQ ID NO: 65797 - DNA, 497 bp, Glycine max
  unsure (1)..(497): unsure at all n locations
acctgcggcatgcaagcttgacactgacctggtgattaanaaatttataattctattcataacaggagatgcaaaaatcatcataaatgaatataatgatgaattgaagtccatgtaccttccacaaagaaccagcatagaaaacttctggggaatgcttaacctggccctcaccaagcctatgcacattctcgaaacgtacactatcaaaccagtacaaatttacagaacatttaaatatattgatgaagcttagtgccccaagaaattgggaaccccgaagatagaanaacacaaacagaagcagcaggggcaagacaaaatgtatgatgtatatgacaaagcaactganaacagaaatacaagatataatagaaactgcaagaggtccttctaaaatcacacacagattgcattgcaagacaccttccatggattcanganacaacattgatcataatatattagacacatatatctgagagagagaagaatta

SEQ ID NO: 65798 - DNA, 427 bp, Glycine max
  unsure (1)..(427): unsure at all n locations
agcttctcaaggaggcgagcgtagctaacagtggggtgngtgtatctaagcnccagccncgcaaggaagcttctcaaagaagcttctcaaggaagtttctcaagaaagcttctcaaggaagcttctcaaggaagcttctcaaggaagctacctaggctataaatagaagcatgtgttacactttgtgtaactttgatcatttgagaattacaacttcaaagacagtacaattctgatatggctccatattgaatgtacctacagaacttgtgcaagaaggatcatgagtcgttcaaagaatacacccagaggtggagggacctgtaagctcaagtaatgcctccaatgactgagaacgagatgataaaaatgatagtagacaccttaccagtgttttactatgataagttggtgggttacacgcctt

SEQ ID NO: 65799 - DNA, 167 bp, Glycine max
  unsure (1)..(167): unsure at all n locations
tatacgcgtaccaataagtgcgatgggattaacagacttctacataaaacacgaagtattaaaatatagcagatatgacagaatccggcgtcgcccataaatgtctatgaatccgcttacatgatatgnacagaggaaatggtaccaaacgatggttcatgtgacct

SEQ ID NO: 65800 - DNA, 509 bp, Glycine max
  unsure (1)..(509): unsure at all n locations
tacatcacctgcggcatgcaagctggcactatggtttataggcggacaaatttatgtgattatatgaataactgcagnaaaatttcaaggatcaacctagcacaaagcttgaaaatcgactaaaagtagcaccggtaatagttttcttttgtgccaaactaatttgaaattcctagtacttcatgaaaatgaatttaattcctgtgagattgagacaggtttgattgcaattttcaataataaactcttatccgatgcaaactaactgaatgttgtttaattaaataagatgccttgccaacagggttggagaaaaacagtagttttatgagtggacaagccaggatccacgttgggccttagttgtagtgagtcctccatagtgggaatagaagagcctcgtggggtgcttatttggaggactgatgtatctattcttcttaaacgctacatggacaaggtatgtgnagcaattcttataattcntttagtggtaatctgagtcaatg

SEQ ID NO: 65801 - DNA, 492 bp, Glycine max
  unsure (1)..(492): unsure at all n locations
agcttatgcgcatatntccttacaaaccgttttctcgcacaagatattctattaaccgaaaaaaatgcacccatatacaatcaaggcagcttcgttacctagattatttacacgcacttccaaggtgtatttgttacttacatcacacacatttccttggctaaattcacatacatgcatactcaaagcattgtggggtaccaaaaattgcacatgtgcacatcttggtatttctaatacctatacatacacaaacttcatgatgaatcttgactatctgcacaataaggtgctacatttcatgctcttttcaagtttttgctacctaaagccgcatgcaaattcaagtatattttcctttgctgactaaaattgtattcaaattaaaaggtattatattttttgtaatatggtttcttcacataacatgcaacatatttatatatattntctgtgagacantttgactaccanaaaatatatatacataca

SEQ ID NO: 65802 - DNA, 446 bp, Glycine max
  unsure (1)..(446): unsure at all n locations
agctgtgtcaacacaccgttcgttctttcctctataagacaaacattgtgaacgcggtgtcaagagaaaatcataatagcataataaaaataatagtcaatgcataccaattgtatagttgaagcataatggtaaacaaaatgcagcaagcatacctgcagggtcaacttgtctggaaaccttgatggcatctgatgttgctatatcttgatttgctgaagtaatggccaaaattaagcaattgggctgcaatacagaaaaatatataaaagtattctcaaaagttccattaactgagtgaatagtaaatccatcaaatttgaaaacatcaaatgctgtaaaatcctgaggaattagatggaaggtgcgacttcaaattattaatatcatnttgccacccgttcaagggcataatgtcagaatggaaaatgttaaaaagtcccaat

SEQ ID NO: 65803 - DNA, 418 bp, Glycine max
  unsure (1)..(418): unsure at all n locations
ngctagcacctctcctactatctatctactttctctctttctctcaatcgacgtgctctgctccatgaccacattctcaacacctccggccaccaccgtaacacctacgcgtggccttacctatactttgcgtcaccacctctggccatggtagcgtgtcgcgccaccttcgttggcgtcaacaaggaaccacatggtcgggtctccaaccatggtctcgtctcctgccatggtcgcgtttccggccatggacacatatagcgtaaccattaaagttgcatgtcgcgactccggccatggtcttgtctcagacatggtgcagtttccttcaccttgattgcgtttggattctccatcttgccgtttactgaattgcttgatgctggatttaaatcactttttctttctaatctatgat

SEQ ID NO: 65804 - DNA, 480 bp, Glycine max
  unsure (1)..(480): unsure at all n locations
agctngagtcctntaagcttataaactctattagacatntccatgacgtactctaatgtttctttttccgttatacttcatgganattaagtgttgtagcaatgtacttgtttttgccttatcattttttgaaaagtatttctttagttaatcaaggaaatctttagcattggtgatcccttcagacactacacccctaaaggcttctagaataccacacttaatgatcattagactcatgcgatttgagcaatcccacttctcaaagtgtctccgttcttcaaaggaacttgcatcattaactgaagtaggttggttagtttataatgcaaggtttagatccatgcaacccaaatcaatctaaatgttatctttatattccttganattactctcattcaacacgggaatagaactttaaattgaaaatattgatgaaatagtagctaaaacaaaataatacaacataatcatactcaa

SEQ ID NO: 65805 - DNA, 351 bp, Glycine max
gtgagagaccactattatgataggattatctttattcccttcattagcgagagtattctaaagaagagactacaacgtaatgtctcttctttatataaaagatcgttttacatccaaatcctatccgaacatgtacttaattgcacgactgccatcaataccatatattatattaaaagcaacacacaatattctacttgttgaagcctttaataaatttgggttataacaataataagtgcgaatgcttacctaactaactattagacatcgcgataacacaaatgccatgggtaattatgtttatatatatatacacattattcacccaggagagagattatgatatta

SEQ ID NO: 65806 - DNA, 459 bp, Glycine max
  unsure (1)..(459): unsure at all n locations
gagtcacctgcggcatgcatgcttgatgcacattttataggttaatgttcaactagatgatgcgctccatgagaggttggatcaaatggagaatagagatcataatgaagaagaaaggaggagaagagggaatgatggtgttcctacacaaaaccgaattgatggtattatactcgacattcctccatttaaaggaaagaatgatccggacgcctacttggagtgggagatgaaaatagagcatttttctcatgcaacaactatgaggaggaccaaattgtgaagcgtgccgccatggagttatccaactatgctcttgtgtggtggaacaagctacanaaggagagagcaagaaatgaagagctggttgatacatggacggagatgaacaagatcatgaggaagcgatatgtgccggctatgtactcataggactngaaattcaagctccaaaactaa

SEQ ID NO: 65807 - DNA, 428 bp, Glycine max
  unsure (1)..(428): unsure at all n locations
agcttataaaatttattattaattcaacatttctaactactataagtgtctcttaaaaaaataatgaataatatgcttttcaaacaaacaaaaataaaaactgttagatcttatacataattcaantttttgtatttaaattttctagcatgcaagaactacataataaatacttgtaagtcaccggttatattgatctaaatcaatttctataagtctttcagtagtactacaagttgtcataccctaatcagattgttgtcgatcacattgagctgcttaaagccaattgccgcgtgatctgtaagatttcacaacgtttcaagaggaaatgaagcaaaaaaactcagaatggnggtgaaaagaatcaattanggggtgttcttcagccctgggcccatctagcccattaggaagcttcaacatga

SEQ ID NO: 65808 - DNA, 452 bp, Glycine max
  unsure (1)..(452): unsure at all n locations
agctntctaaagttttctggtntttcaactttgaaaacaaaacttgtgctattcatccttttcattctcttctccctttgccaaaaacaattagccaaggactaaccgcctgaattctttntgtgtctctcttctcccttttccaaaagaacaaaggactaaccgcctgaattcttttgtgtctcccttctcccttatcaaagaattcaaaacgacatagnctgagaattcttttgattcttccctttcccatatacaaaagatttcanaggactaaccacctgagaattctnttgtatccccattcacaaagtttcaaaggtttaaccgcctgagaactctgtcttaacacattggagggtacatcctttgtggtacaagtagatggtacatctacttngtgtgttgactgagaacaagagagggtacatctcttgtggatcacgtctagt

SEQ ID NO: 65809 - DNA, 489 bp, Glycine max
  unsure (1)..(489): unsure at all n locations
agctntgtgtaattgattacacctgattggttatcgattacctgtgattgtttctgaataaaatcaaatgatctaactcttcaaatagtgttttactttttcaaattggtttttaagtttttctaaaagtcataactcttctaatggttgtcttgaccagacatgaagagtctataaaagcaaggctttgttttgcatttaaaaagtcattcaatcaatcttttacaagccttgaatctctttgaacttcttcttcttctttgtaccaaaagctttctgaagttttctggttttctaaaccttgaaaatttgtgctattcatctttntattctcttcttcctttgccaaaaagaattcgccaaggactaatcacctaaattctnttgtgtctctcttctcccttttccaaaagaacaaagggactaaccgctgaattcttttgtgtcttccttctcctttgtcanagaantcanaatgacacagtctga

SEQ ID NO: 65810 - DNA, 355 bp, Glycine max
  unsure (1)..(355): unsure at all n locations
agctntgagccaattcaaacgacaataactttttactcggatgtctgattcagtcccgtaatatatcgagacgctcgaaattgaatgttgaacctctgagcaaatgcaaacgaaaataattttttcttggatgtctttatgagtcccgtaatatatcgagacgctcgaaattgaatgttgaagctctaagcaaaatcaaacgatcataactttttactccgatgtctgattgagtgctgtaatatatcgagacgctcaaaaatgaatgttgaacctctgagcaaatgcaaacgacaataatttttttctcggatgtgtttttgagtccccgaatataacgagacgctcaaaattg

SEQ ID NO: 65811 - DNA, 504 bp, Glycine max
  unsure (1)..(504): unsure at all n locations
cttaagacacctgaggcatgcagcttgtaatgaaagatagaactctttttcatagnggttgtcatggttataagnccaatcagaaccttctttgaatctgcctgaatgagacactntgagagacagacatttccatatagactagccatagcctcaaggacacgctcttgaattagtttgttgtcctgaggctntaaaagagttactagaatatcctctatctgagttgcatcanaatgtttctcatcaacatcaactttntcctcaaagaccatgagtgtataagcaagagcgccaattatatcaccaactggtgcatcagggcgaggagaacgtgaaagttctccaagatatagtattaaagcagacatgccaccacagatattggctaaagctcgagttgcatgctcctgcagagcctggccaccatcaccttgcatacactcattagaaggagcaactatagctccaataaggatnggaataccatctgcattaacaatg

SEQ ID NO: 65812 - DNA, 495 bp, Glycine max
  unsure (1)..(495): unsure at all n locations
acctgcggcatgcaagcttccatcaagtggtaatcagagcacatttatcttaagnatttgctccttaaaccttcatntaatttttgctttaccttctcttccattgttgnttcttcatttttctccatgtatctcctcacatgtcttgttctaaatgtttttaacatgattttttagagtttccaccgattaaacttgctatagaagctggatttgattttctatggttcaaatntcttgttcttgttcttgaaccatgaattgtgttgagtttaagttcctttgagttttgtcttgctattttttgtggctaaaacataaaccataagattcttacaaaaatattanagtagaagaccacctcanaaaatctagagtgactttgttcacctattgtagtttgtcatagaagtcatgtctagtcatgaaacttgtctcataagaattcttatgttgngctgaatnnttattttctttgtttcttngctaaactca

SEQ ID NO: 65813 - DNA, 488 bp, Glycine max
  unsure (1)..(488): unsure at all n locations
ctgcggcatgcaagctgggagaggatgcttcaatggagganattanagagggagataaagagagagggggagcaaaaaattgaagganaaaaaagggagagaagttgaactttgagttgtgtctcacaagactcgatctcattcatcaaagttagaacaagtgttacacatgcttctatttataaactaggtagctttcttgagaaaacttccttgagaagcttctttgagaaaacttccttgagaagctagagcttagctacacacaccctctcataactaagctcacctccttgagaagcttgcttaagaagattcctaaagaagccagagcttagctacacacacctctctaatagctaagctcacctccttgagatgagaagctagagcttagctacacacccnctataatagctaagctcacccctatgccaaanaacatganaatacaaaanaaaagtccttactacanagactactcaaaa

SEQ ID NO: 65814 - DNA, 413 bp, Glycine max
  unsure (1)..(413): unsure at all n locations
agcttgcggattggtctttccagngaaatgatcgatgnngggctgaaaaaaggcannattagtcatcctgcttggacgaatgagaaaactggggcaaatgaagagggtgaggatgaaggagaagcccgtgctgtgactgccattccaatacagccaagtttcccaccaacccaacaatgtcattactcagccaataacaaaccttctccttacccaccgcccagttatccacaaaggtcatccctaaaatcaaccacaaagcctacctaccgcacttncaatgacgaacaccgcctttagcgtaaaccataacaccaaccaagaaatggaatttgcagcgagaaagccttagaattcaccctaattccagtgtcctatgctgacttgctcccatatctacttgataattcaat

SEQ ID NO: 65815 - DNA, 330 bp, Glycine max
  unsure (1)..(330): unsure at all n locations
gcatgcaagcttatgcgcatatttctctacgaacgtttatttgctcaagacatcctattaactnngannaaggcggcgatatacaggcaaggtggctgcgttacctagattagggacatgtgcgtgcaaggtgtgtgagggatgtgantnncacacgcctccttggctaaatttacatacatgcatactcaaagcatttcggggtaccaaaaattgcacatgcgctcatcatggtatttctaatacctatacatatacaaacttcatgatgaatcttgactacctacgcaataaggtgctacatttcatgctcttttttttttttctttt

SEQ ID NO: 65816 - DNA, 458 bp, Glycine max
  unsure (1)..(458): unsure at all n locations
agcttgaaaaacaatntttcttaaagnattcttattccaataagaattagaatttttgttcgttaatgtgcataaaatttacatgtaagattgacatagattttatagaggtcaatctgtattntgcggcctttaagaaaaaatttcattatgaataaaaaantttaagattttaattttttagcatcatgtncaaaataaaaatcaaatntaattagataaaataaaatattcaatacattagttaagtaaaaaaatagtaagttaaggaaaaataaattaatcttaaaatttanaatattataaaaataaattaagaaattcaatttcactcttacaataaataattgatcctgtagctaggtcaagtgtaaattcctacttgatttttaaaaaaatataaatttcaatggaatttaatttatatattatntctatattcaataaaattggcattc

SEQ ID NO: 65817 - DNA, 460 bp, Glycine max
  unsure (1)..(460): unsure at all n locations
agctntggagtttccaagtgccaattcgtcttcttcttttgtccagtcttcttctggcttcaattcattagtgggctntccttctgtgtccagcatcttgggatgttcccagcctttgatgacaactttccaggttctgctatccagtganttgaggaaggccaccatccttgctttccagtattcatagttggttccatccagaaatggtggtctgttcactggtcctccttctttctccatgttcatcagaaattatctccctagatctcactcagtgatttagagtgcccgctctgataccaattgaaattctgataccaatgccagatgtcgtacaggatgtcacgacatcacgcttcagaacatngcagatatatntgagtgtatgaacagattaaacaagttaataacacaagagtaatggtaacccagttcggtgcaacgtcacctacatctg

SEQ ID NO: 65818 - DNA, 449 bp, Glycine max
  unsure (1)..(449): unsure at all n locations
agctttgtggcttatttangggtgttctttgtggatgattgggtattcttgactgatagggtggtgggtaatgagaagggctgatattggctgagtattgacattgttgagctggtggggaattcggccatgtaggaaaggcaggcacagcatgggttcctccctcattcttactttctncattttccccaagcttcttatttatcaaggtatgatgatcaaatttgcctcttttcagacccactttgatcctttcgccgacaaaaaactaaatcgacaaatcttgaaggcgtgtaacccacaatcttctcatagtagaacactagtaacgtgtctactatcattngtatcatctacttctctatcattgggggcactacttgagctgccagatccctccatcggtgggcatattctttganggatacatgctcttttacacatgctct

SEQ ID NO: 65819 - DNA, 466 bp, Glycine max
  unsure (1)..(466): unsure at all n locations
agcttgntaccattcaaaaagagttttgaatatacatcaaatagcactaatttaatttctacttggcaattaatgtgtccatgcatgtaatcatggtggttaaacttcccaaacagtgcatattcaagtttttctctttttatttatttatttattgatcactcaaaatttactagtgtcctgaagcaaacaagtgcagagagagataganaagaggaaaaaatttactagccaaaggactgcttcatgatcaaactggtctgaacaggtctaggttttaaaactatgatttctctatgaaaaggacaaaatttgatatgaaaaacagccttaactcgtgccanagagagaagctagtgcacaaaatgattatgagacttaataaagtcaagaaccatatgtataatatattctaactagactntaagaataaatgaatgcaaatacataacttgaaaatatacct

SEQ ID NO: 65820 - DNA, 517 bp, Glycine max
  unsure (1)..(517): unsure at all n locations
atcttaagtcacctgaggcatgcaagcttataggaatatggngtacccatcacatttggtactaggttgcggtcgggcgatgatgcacaacaagttttccacatccacaaatcacgtataaacccaccatcccctgttgcccacctccaactgagctcacgtactcccacgtagcccatatcctcgtttctctcaacaccgggtccccatcaatcctcccaagcttccccaacatccaggtaattcaacatccaaatcatcacanactacaaaccaagcaaaacagggcaaaggcagaaaactctgcccaaaactcaaaccaaaatcacaactttntctcacttaaagaccccagtaacatttccttcgttccaattcgttaactggtggatcgactcgaannatttactagaagtctctagtacataagtctacanttttgacagtgggatctactagaaaacatncagaactcattctgtactactctnttcacagccaaccacacacaagcatt

SEQ ID NO: 65821 - DNA, 256 bp, Glycine max
gcaagtgcaagataaagtaataacacaactcagagctgtattgacctgattttctttcttctttcgcacgtcatatattgccgaatcaagcttctctctacttgacagcctgtaacacaaacaagcctgtctgctgagacagttagatcttttcaactagattatgcagatactaacaatgcattaaatagaatatttaacaaactactatatatattaatcaagccacttattacacataaacgctttactgata

SEQ ID NO: 65822 - DNA, 340 bp, Glycine max
  unsure (1)..(340): unsure at all n locations
gaaaaaaaaancccagaagctnctatagggcgcgcccaccccacactaccccaancataaaagtttagtgtgatcccaccccatcatctctttcggcttcactctcctcaaacttctcatcgagtcatcccaccccgctttcaacaccattgggtccccttatcgggccatcacccaactcgacgccaatcacacacaacaccacccaccttcccgtcacctaacccacgatctcggtatgcgcaatccacgatgttcaaaattggtcgccataatggtattggagtcatgatcactattctgttcgaccttttaatttgatttgtatttattatgagtt

SEQ ID NO: 65823 - DNA, 426 bp, Glycine max
  unsure (1)..(426): unsure at all n locations
cttatgagtcttcatcaacatgaagagaatgataaaaagaggaaaggaatagcactcagagcctcatcatcttctattcaagaagaaagtgacaaagaggacttgaatgaaatagaggaagatgatgatttcagattttttgtaaagagattcaaaaaatttctgagaaacacaggacatcaaaggagatcaaatatcaatccanagaagagatgagaagattcctccttagccccaaaatgctatgaatgcgatcaacctgngcacttaagattagattgtcctgtccttaanagaagaatggaaaaatctgacaagagaaatttcaaagaaaaaaaagaaaagaaagcatacatcacttgggaagacaatgacatggatcctttcagttgatcagaaaatannatcatanatctgggtctcatg

SEQ ID NO: 65824 - DNA, 338 bp, Glycine max
  unsure (1)..(338): unsure at all n locations
accttacctggaacatcgaaacaatgagtaagcattaatttgcaaagctttatagtcacaagaaagagagagagtaaaatgacaagatgatgacactaagggttatgtttattctatgaacctttcaaaaataaaggcataaggagcgatgacagcggaggcaaaagcgtggcgataaaccacaaggacatagtggctcatgccttggttgagggaaaccttagtgataatgttcatgccagcatagcacaaatggaaagagatcatggccaagtagggtttagagcttgcaaaaactttgacaacctctaagcttttcagtgccatntaatttcttc

SEQ ID NO: 65825 - DNA, 460 bp, Glycine max
  unsure (1)..(460): unsure at all n locations
agctttcntctcaacattctatctacngtcnattatttctaatngcaagntcagattcttgttctttctttgtctaacatacacactngntcaaactcctgaaaaggaacacaaactacatcacaatcatgcattcaattcaaaataaaagcatacaaccattttcacaaatcaataaaagtgcttcattggcgtatcattaaaaatcaagttaaactgttcaaaatgcttcaggatgagaaaatcaactaattataaataaaactagcagtgtatgtagacataaaggaaatactatactaaaaccataataataataataataataataataataataataatccgaagaggacatcagtgtacaaactagagaatcggtgagagccacaacttcctcagatgagaaatcagaaagatcagcagttcattcaatcagaaaagtcagaaccatcatcta

SEQ ID NO: 65826 - DNA, 460 bp, Glycine max
  unsure (1)..(460): unsure at all n locations
agctatggagnnnccaagatcnctattcgtcttcttctttagnccagncggtcttctggctataattcatcagtgggctntccttctgcgtccagcatcttgggatgttcccagcctttgatgacagctttccaggttctgctatccagtgatttgagaaaggccaccatccttgctttccagtattcatagttggtcccatccaaaattggtggtctgttcactggtcctccttctttctccatgttcatcagaatttatctccctagatctcactcagtgatttcgagtgtctgctctgataccaattgaaattctgatactggggacagatgtcgtacaggatgtcacgacatcacacttcagaacatgcagattgtgtttgactgtatgaacagattaaacaagtaaataacacaagagaattgtaacccagttcggtgcaacctcacctacatct

SEQ ID NO: 65827 - DNA, 430 bp, Glycine max
  unsure (1)..(430): unsure at all n locations
tagtaaaaataccttggatatgcatgtatgtaatttaggtagcaaaaaaatacctcacaaaatatacatatgtatgtttaggtagcaagataccttggatatgcatgtatatagcaacaatatatatgtgtatgtttaggtagcaagataccttggatatgcatgtatatagcaaaaatagctcacaaaaatatacacatgnttaggtagcanaatacctcatgaaaaanaaaaacaaaaaacaacaaaaaaattaaaataaaaataaatttggttagctaaaaagccaacatgcttttgaaaggaaatgaacttgccattcagaacacaanggttttgaagaaaaatatgtatatacctgaagggtgaatgctatgaaaaatttcccaaacgcctagaatggacttggatggatgcatgnagtgataaa

SEQ ID NO: 65828 - DNA, 463 bp, Glycine max
  unsure (1)..(463): unsure at all n locations
agcttagctacacacaccctctaatatctattctcactcccataccaaaatacatgaaaattcaaagtctctgcctcaaagactactcanaatgccctanaatacaagactaaaaccttatactactagaatggccaaaatacaaggcccaaaagaaggaaaacatattctaatagttacaaagaagagtggnacccaacctggcccatgtgctcagaaatctaccatgaggttcatgagaaccccagggccttctttagccactctagcccaatcctcctggagtcttctatccaatatccttgggagtaggatngcatcaccaagcgagccanatgctagcctgggtgaattanggccagaaaccttcatgaaaagaccatttgcccttcttttgctttgttcttgatcatanacaaccataaactacaaatcatgatgatcttctattagcacatataat

SEQ ID NO: 65829 - DNA, 442 bp, Glycine max
  unsure (1)..(442): unsure at all n locations
tcttgagcgacctgcggctgcagcttcacctattaaatgtggatnatcttttttgcatcattattttatcttctacagggcttatcttttactttagaatcttttatctattgtatcttctactttntatctttaaatctattatctctttaaattgttatcttatctcctaattgtctatgntaaagtttcttatcctttntatctcttacttcctttcaattgtacatttaaatttcttatcttttgctggaaattgagtttgcatcaatctaagtacaaaccaaaattttatgaattcgacattcgaacttccaagtactntattacttgagacaatttgatgtactatcaataagttaacatggtcaaaatgtcatatggacttccacccatgttgacattaatcggcaaataggtattntacttactattacttaac

SEQ ID NO: 65830 - DNA, 466 bp, Glycine max
  unsure (1)..(466): unsure at all n locations
gacctggtgcatgcaagcttgtggtgtaaccaattctgtttctnatttaacaaattttctggctnttaaaaaacaaaaaaatataaatgattntaacaacccactatgatagaaagaagtgtgttaagaagaaaacattctccactcaaaatcttggtagtaatgcttatgactaacggatcaaatttttgtctacattgtacagaatgacaaagtcgtgtcatacacccactatgtacagcatatttagtctcttggacacaccataatcttcaatctactagatcatgcataatacaaataaaagtaacaaaaaatgactactttgtcataaaatcaaactttctaatattatngaaattagcagatgacacagcctctgggattctcttcgtaacttgagacatagtaactntgagtatactgtgatgtcatatgataataaaggggataagggtcatggagc

SEQ ID NO: 65831 - DNA, 495 bp, Glycine max
  unsure (1)..(495): unsure at all n locations
cgatccttagagcacctgcggcatgcaagcttctcncctattttcctatacatagggtttgatgtgaatgtgaaaaaatgttcagcccttgtggtaattcgagatcacttgaaattagtgaaaaagaattgtttccgtgaagaaaatccaagccgaggtgcttccgtaacgtttcggtgggtgatttcgcgaagattatcaaccgatcttctacgttcttcattcgttcttcgttggtgttcagtcttcacccggtcagttcccgaaatcgaacttttcaattcattctatgtacccttagtggtcctcatttgttttcacgtgcttttattttcatttcatttcctttccgtacccactnttgacgtgctttagtcatttacttaagtcattgtctcgcctaatcaaaaaataaaataaatttccaccgatcatctgaattgaacatccgtaatgtctgtaaaatgaaatccaccattcggcatgccgtaccac

SEQ ID NO: 65832 - DNA, 368 bp, Glycine max
  unsure (1)..(368): unsure at all n locations
tgcggcatgcaagctgtctttggaccttgaacaggcaactatctcctctntcattaccatgccatgtgctcgcgactggtccctttcttcccttcgcaacttgagttcactattgctaccccatagagctccgcgaaatttgttccggccatactcttccttgcgagccctcttggtctcttgttcaagggctcttgcagtaattgcattctcttcccgtaacccggcacactccttccgaacgtgtgtagcagccaacttgaacttctccttggcgagttttgcctttcctaactcgcttttgagagcttggacttcctcgtcctcttccggtgcttcaacattctctttgctgacgacttttaact

SEQ ID NO: 65833 - DNA, 438 bp, Glycine max
  unsure (1)..(438): unsure at all n locations
tgcggcatgcagagctaantattatnattcatattttttattttcttgaatttctcgctggtggcgaatgtataaaattaggagatttcattcacggatttccaatatgtctaatgcatgatatatgattttatgtgatgatattatcgttgctctacgctccaagtagaataggagccttgtcagattgacaagctaagtattgagaagccttgcacgcctttatgaggatgcatcagagcggcatatgtcaacatcacaattgtagatgatagtgattgttagcaatatgcctgaaacccatacaagtatgcccaacangaatgtggcatgacctcactccctacaatactatgaggctngaaggaattagcttacttctagcacatagacaattgcaaccaattacatattctagaagaaatgattgttaaaata

SEQ ID NO: 65834 - DNA, 423 bp, Glycine max
  unsure (1)..(423): unsure at all n locations
agcttagtcaaattcagattgtattgagttatcttatctcaaccttggccagcttagcggaccaaatcagcctcaaatgcaagggttgggcgctaagcgcttgagactcgcagtttagcgcatgaacagagatgcgcttagcatgaggcttgcgcttagcgaaaggactatttttagaaaaaaaagntttctaagttattatttagtcctttttccaagaaattgaaacccttatgttaaacattcaaagattagctgatatactcctatgtacagatcatacaacangttccaatgattgaatgcatgaaaaacaaagataacataaattaaaactgggttgcctcccaggaagcacttttttaatgtcataagcttgacgcttctacctcactgggtgatctttatgttgggttcttactt

SEQ ID NO: 65835 - DNA, 465 bp, Glycine max
  unsure (1)..(465): unsure at all n locations
agcttcactctctntcacatttcaatttgtttatattctctctcanacagaggtgaattacactatgtccctatgcaaatattatttgctctaanaaatttctcttcttcctctcttatctattgaattaaaaaaaatcatctctattcactcaaaaaaatctctaattccttatctctttcctaatttaaactaatctgtcccctcatttatattttcatggagtttttttaatttatcgggaaaaaattanttttatatcttttgaattgcatatcgatttaatggtttatttcttacctgattntaaataatttatttcatacttgacttaaactatcatgttcatctccaatntttgagggaataaatggccgataatgaattattatttaccttttttcctgacataaggataacattatttttttcccctttatttagatatatntaatggtcttttat

SEQ ID NO: 65836 - DNA, 451 bp, Glycine max
  unsure (1)..(451): unsure at all n locations
agcttagaacccactntttataacctaccttattacaggacggcgaacgagaatataggggcatttctgtcttctaggaagaaaacgagtgggagtttccatcattgtttatttaaggaaaacgttagaagaaccaaaaaaaggtttgcgaattttgaaaggaagggtttgggagttggttacgcatagggaaggtattaacaccccgcgcgtccgtcacangggacgataacctttaatcgagtatgcaaaacgtgacttcaaaattatttattttccttttttttaatcaacaagggtgttgcccttgctcctatgtatccccaggtgcaatgagaaaatcaaacctatgtagttctttaaataagaatggtgcgtgtatttaaaagacttattntaatcgcaaacaaagagtcattatggcattggacctttgaacaacgttttaatt

SEQ ID NO: 65837 - DNA, 473 bp, Glycine max
  unsure (1)..(473): unsure at all n locations
agctntgcttccacaatcttctcccttttgttgatgacaacttctgagatcaagaaacacacacacactntntccttgtctatcactcttataaatgctccccctttgttcttgaatttatggttatcttaaaattaaatggtttactcatgtgagttcttgatttatccctatttctctccccctttggcatcaacaaaaagccaaagtgtgtatcanacttaaagtatgcaaatatatcttaaacattcatacagcattcataaaaaatattaaccacaacatgaagtaaaaaccatgaagcaacaatcataaacagattaacttataaaatccacatagtcaaataacatacttgttcaaccaaaccatgcaaataaggaaataataaattgttcanataccatagtaatatagagaattatntgatatgtcactaacatctattagtcctaattctcttctttatgtat

SEQ ID NO: 65838 - DNA, 400 bp, Glycine max
  unsure (1)..(400): unsure at all n locations
agcttcaccacctatagagtgccctggatattatgcttagagaagaagctntaatggaggaagagaatgagagagagagagagagagagagagagagagagaaagggggggatgggatttaaaggagattagggagagaagttgaactntgaagtgtgtctcacaagtttctcattcatcaaagttatgacaagtgttacacatgtttctaattatagcctacgtagcttccttgagaagcaaggaaggtagcttccttgggaagctagaggggggctactcacaccnctttactagttgagctcacccccatgccaaaatgcatgaaaatacaaatgagttcttactacatacactactcaaaatgtactgaaacacaaggcttcaaccctatactact

SEQ ID NO: 65839 - DNA, 336 bp, Glycine max
  unsure (1)..(336): unsure at all n locations
tgccccacattatttccatgacacaaatgcaaaaatgatgatttggaaattttatgcaaaactggtcatgcatgcacctatgtggacactcaagtgtcaaattttttatggtcatgtgatgctagggctcaagattcatttcctctatgtttagtcaacccaacgtttccaaaatatgttcttttatccatttgtgcattcatccgagtccatttcgggcgtgcgggaaaatttcacagcattcaccctttaggtgtatacacatttntcaaaaactagttatgatcagtgaatgttttcaaagagaagttggaagtcatctcttttcaaaagcat

SEQ ID NO: 65840 - DNA, 209 bp, Glycine max
  unsure (1)..(209): unsure at all n locations
agcttgngaggtttgatggcgacctcgtcgttgataggaacgaggataagggctacgtgggagtacgtgagctcagttggaggtgggcaacaagggatggtgggttatacgtgatttgttgatgtggagaatcgtntttcaccatcgtccgaccgccacctagtaccacatgtgatgcctcctccctatccttacacgcctgaatctgc

SEQ ID NO: 65841 - DNA, 272 bp, Glycine max
  unsure (1)..(272): unsure at all n locations
agcttagactgtcaacgtaaccgttttcttcaaacttagcggngaaagccataacctggctggttccgtcgacggcactggctatgtaaaatccctgcgccttccccaccaaaccggaaccaaactcatgcccgtgagtgagctcatcgtcgaacacagtcattgtcccaaacatgaccttctgcagcgtcattcccgccgggagctggttggtgttggtgacagggaaaccggtgccgccgttgttgaagacgttggccgtggtgccgccg

SEQ ID NO: 65842 - DNA, 306 bp, Glycine max
  unsure (1)..(306): unsure at all n locations
atggtaaaaactgacatatcttactatgcacactagaatctatcctaagttacgttttcacaaagggttgggacttatangttaagttcttcctttccataaatgcgttgaagctcccgtgttgcttgttgaaatgaatctggattaaagtgacaggagataaaaaaatttggataagtgacataccaaacaaacgtaaatgtgtttgcgtgtacagtggacagaaggtttccattacctttccagttgcgaaatgctttttgatgaattggtgcaccacaaactgnttgaattgtatcaaacaac

SEQ ID NO: 65843 - DNA, 365 bp, Glycine max
  unsure (1)..(365): unsure at all n locations
gctaggtttcttcgggcgaactgaaccgaagttgtgtttcggccgactggcatgttctcattttgtcggccaggaaaacattagcccacctcggcatanaaaacatgattcaccgatatttgacaggaaaagaaaaatgctagccgacgtctgccaggaaagatgaccgaccgaggtctgaaaaagaagcatgaccggatgactncggtcgaacatttcctaacagatatcatccaagtattattcacggattgaatagaataaacaatagccgacatcggtagttaaatagccgtgactgatatttttcggccgacatagcgcaatntctttacaaacgctggccgctaantattctttacgga

SEQ ID NO: 65844 - DNA, 351 bp, Glycine max
  unsure (1)..(351): unsure at all n locations
tcacctgtttcaagcacgactttctttctgcttttggtggcttgccttgcatagctcgcatttttcttttcaatttgagccttcacttgctcatgcagcttcttcacatactcagctttagcctgtgcgtccttatgcttaaacatagcaatgttaggcatangcaacaaatcaagaggagtcaaagggataaatccatacactatctcanatggtgaacaattatttgtgctatggatgatacgaaatcagagtgtggtaacggaagcaaacaaccaatactaaggtactatgtaccacccttattagtcgaaattccttaaagtattttggaatttgtgtgttgggttt

SEQ ID NO: 65845 - DNA, 472 bp, Glycine max
  unsure (1)..(472): unsure at all n locations
ggagagagagactgtgacatttgtgatacatctttcaactcaacttggaagtgagtctttgtgganagctcttcacaagctggagaanagtcactccaaggagctttttaaaaatctccttgtttctaaaatttctttttaaaaaataaggtctttatatttttaagacttcttttcataaagcgtgtttaactcaacttctctttgtaaggagaagaagataaaaaaaactggaccatatactactaaagcatgatgtattagctatgcttataacattnttgtattatagtactagttattcactatgagacactttttattatgttgaagaaattactgggctcaagattagatatctagatgaacaattgagttatagcctatgaattgtagcctatcatgttaatagatntagatatatatccctactttcanacctggctatgtacatattgaatcctataatata

SEQ ID NO: 65846 - DNA, 333 bp, Glycine max
  unsure (1)..(333): unsure at all n locations
agctntacgcannagatttgagattcttcanatgaatgatagagagactttgaatgcatatttttctcgtactctagccatagccaacaaaatgaaggctcatggtgaaagtattagtgaaatagtcattattgcaaagattntgagatcgatggtctcaaaatttgattatgtggcatgctcaattgaagaatccaacaacttaaacatgatgactattgatgagttgtaaagtagtcttcttgttcatgagcaaaggatgagaagtcgtggagaagaaagcaggttctaaagatctcccacgatgacaaagtangtagaggtagaggtaac

SEQ ID NO: 65847 - DNA, 376 bp, Glycine max
tattggagtctatattaattcttcttagtctacggagctggcgaaggtacctgccgaaataatggtctttcttaattatttgactaacaagttggtaatttgaaaattatcttattcgttgtcaaaggtgcctatgatagacatgatggatcacagaattatgaggtagtgcatctacaaactatgatattataatgctcttacgagatagcaacttatatgttttaatcaaataatccaaaattcgaatcttaagtgtctcttatatataacataaatgatattctcggaattaactcacaagtagaattatacttatatatctatctatacttagacttatatatatatatatcatatgcaccatatatatata

SEQ ID NO: 65848 - DNA, 437 bp, Glycine max
  unsure (1)..(437): unsure at all n locations
atcctctgagtcacctgtggcatgcaagctngttaagtgtcttcctaccgattaaagcattgtatgatgcgtttgcttccataagtagatatcttatggtgaagctcctggagagcttgtgtttgaccaaaggtggtcatcaagtccacatagcctctagtctcttctttcttgcctgcaaagacgaggagtcaactgacatgaggatggacaatgtcaggggagacctcaagtctctaaaaagttttccaatacaggatatcatggaactaccctagacgataaggactcttgacaccatgaagtttgcaatgataatggagaccaccacgaggttgtcttggttgacaaggttgatacccttgaatccctatccgtgaaagtgatangaggaagacttcgtngtagtggtgcgttgacaaaattaatgttgatgt

SEQ ID NO: 65849 - DNA, 310 bp, Glycine max
  unsure (1)..(310): unsure at all n locations
taatctcactgacataattgtccacatttttatcatcattgattatgtgctctgctggatcgagtggcctcataataactaagaacgngggggggttgaattaatcattactacacctttactaattaaaaaatactcttttaacgcttttacttttcgtgctaagagaatatgaagtcgaagagaaacttaacagaaagtaaaagcggaaattaaatgcacacctgaaagtataacagtagggaagaatgaaacaaacacactagagtctttatactggttcggcaacaacccgtgcctacatccactc

SEQ ID NO: 65850 - DNA, 470 bp, Glycine max
  unsure (1)..(470): unsure at all n locations
agcttatcagaaggtgaatggtataataccacctctatctgatattaagaaggtggcatagtgtttcttttgcaagaagaagggacacatgaaaaagaattgccccggattccagaaatggcttgagaagaaaggtaaatcaatctcattagtatgttatgaatctaatatggntagtgttaatattaacacctggtggattgattctggatctactattcatattgcaaattctttacagggtatgcaaaacctaaggaaaccagtgggaagtgagcaaagcattntatcangcaataagctaggctcacatgtggaggccattggaactttgcatttgactttaagtagtggctttatttaaaattagaaaggactttntatgtaccaagtttttcccgaaacttgatttctatttcagggcttgtaccgntnggatattccttttattcanagacacatcatttgag

SEQ ID NO: 65851 - DNA, 350 bp, Glycine max
  unsure (1)..(350): unsure at all n locations
gctcactatgaaatgatcacattntatctattatttgtaagaatcacatgtcttatgatcctattagttntctattattgagaaccctagaagattatatatcatggtcttaagctcgcttgggatcttggnttgcatcattagatatgtgagactaatctgtgacatactgaataaaattcgtgacatggtgtcctatgattagagtattcacaacatatatgcctatcatgaatctaacttatgtgttgactggctggtgaagcatgtatgagctatcgattctccagtccatgtatggaagggctccactttggcattaggcaacaatctcctagcttatgctgctc

SEQ ID NO: 65852 - DNA, 417 bp, Glycine max
  unsure (1)..(417): unsure at all n locations
agctntataagttgttaagctttatgatanccccatactacttaactatgaagcttagcctctcaacaatccaatatctagcacttgctcacaccataagaagggactaagaatgaatattgattaaatcaaatatagcgctagcagaactagcatatgactcgctcttcccattgagactttttcatgggatctcccatcacaaaggttgggctaccatcactatttcgtttaaaatcggcttatgtaccatacccctcgaggtttctaatatcatgtctctacatcagggtctatgcaaacgatctactaagtttccttctgacttcacataaactatgcgaatgattccattcttgagtacgatgtntaccacattatgtctcaattctatatgtctattcttcccattggaag

SEQ ID NO: 65853 - DNA, 424 bp, Glycine max
  unsure (1)..(424): unsure at all n locations
agcttctagtcgtccatagaccttctctgtggtactttctagcaaacgttgcatctgtgcattcatcgcatccactaacagacgttgagcgccgtccaactgatggtactcgtcaccaccaccacctgctccagccataattcaacaggaaaaaaaaaatgtgcaataaaaattattaaggtttcaggacctcacaacactctactcacgtctcttagatggtagtacactcgtgtttaatgctctcaataggcttttgtgtaatgtataccctcttgccttttaccactcgtgtttcctcttaagttgctggatggaccanattagacacacaaggtaatataaaataaaaggaaagacaatataatgatcacaaacagagttgatttgagaaacaacttggacttgatgtggataataatat

SEQ ID NO: 65854 - DNA, 399 bp, Glycine max
  unsure (1)..(399): unsure at all n locations
agcttctatgacctgcttgcatggtgggatcaacttgttgatgctatcataatcagcctttntaagtagtcccatgtctaatgcgtagtctgtatatgaatggtactgaatttcaggattggttaacccattgccaatagcaaaaccctttntattatacggngtcaaaggaatcaatacaatgaagaaaaaaacaattaacctttcatagttatactataaattatgagatattaattaaagacctttagatttatatatatatatatatatatgaattccttcttttgctttgtttccttggtgaaccctggatgcaagagctagaatgtagtgtctagcatatgaatctacaagcagttgttgtcatatgtttgaatgccaaaagcagttgtttct

SEQ ID NO: 65855 - DNA, 335 bp, Glycine max
  unsure (1)..(335): unsure at all n locations
ntccacacagagatctatgagggacgctgcggttgatgggagcattgccgctcccgagtttgacagccatcgcttcaagagcgctgagcaccagcagcatttcgaggccatcaaaggatggtcgttccaccgagagagacgcatccagctcatggacgatgagtacgtagattttcgggaagagatagctcgtccgcgttggacgttgctggtcacacccatggctatgtttgacccagatatagagctagagttgtacgcttatgctcgggccacaaaggagggcgtgcgggacatgcagtcatgggtaaggtgccagtggattcttttttatg

SEQ ID NO: 65856 - DNA, 290 bp, Glycine max
  unsure (1)..(290): unsure at all n locations
tgtgactcttcacattttaatttgaatttcaacgttcaaacacattggtaatcgattaccaaaacattgtaatcaattacaacattttgaaatcaattggaacgtttgtaattcagttgaaagctttttgaaaaccattntgctactggtaatcgattaccaaagagtaaaaactctttggtaaaggttntgagaanaattcatgtgctactcagtttgtgaanaacctttttaatacttatcttgattaagtcttttcttgattcttgagtcttgaatcttgatcttga

SEQ ID NO: 65857 - DNA, 379 bp, Glycine max
  unsure (1)..(379): unsure at all n locations
tggtagtggaatggagaaggaagaaacgtgattggagacaccactccaaggacaagatgagtcaagaacaaactcaccaccatatgaagccatggataagagcttaaagttaggagaagatgagtgaagggagaaagagagaaggagcacgaaattntatgcctcaaatgaggtctgaactttgaagtctaatttcaaatgatcaaagttgaaaaatttcacacacaaggcctctatttatagcttcaatgtcacacaaaattggagagaaatttgaatttctattcaaatttcactttgaattgaatttgaatttgtggagccaaatttggagccaaaaatttcactaattatgattagtgaatttcagctatagttt

SEQ ID NO: 65858 - DNA, 311 bp, Glycine max
  unsure (1)..(311): unsure at all n locations
gcttctcatgcattaataaatgaagcttacaaatgttaganattattagctctaacacacaatgaatactttatctctcaagcgtatgaaagaccttaggagaagataagaagcaagagaataatgtatatattggaggaaacattttttcaaacttgttatctcanaagctntgtaaaaaaatttcaaaaaaagcttttaaacttaacatacacacattcaacctatntctagtgtggttcttctttttcaagtattaccgcgagaataaaatgatgtcgactntaagcttgaaaaactctgaccaccta

SEQ ID NO: 65859 - DNA, 505 bp, Glycine max
  unsure (1)..(505): unsure at all n locations
gatcctctgagtcacctgtggcatgcatgcttaacacacttagaaatcaagtgatcatgtattccgaaatatatggggagaaaacggatgcacattntatctatatacagttgtttgttgtttgcttgaatcttgatttcaggtattgtattgtcatcatcaaaaagggggagattgtagatgcaattggctttgatgttttgatgatgatcatgatgatgtgttgcaattgatgcaaatgggcttttcaagattaaaattcaagacaatacttcaagattacaagtcacaacatcaagatgatcactataatattaggaagggaatctctaattgaattagcanagggttggccaagtgatttaaaataaaaagtgttcttcagagggtttactctctggtaatcgattaccagaggatgtaatcgattaccagtggccaaataccgtttataacagctataanaatttgaatcgaaatttaaaacctgtatcgatacacaatt

SEQ ID NO: 65860 - DNA, 420 bp, Glycine max
  unsure (1)..(420): unsure at all n locations
atataaaatcatggccttcatcatgtcctcattcatacatttcattctaaaattcagatattgatgcaaagactattactcaaagctagtcgttcactcacagtttaagatcacactctcactagttatggttcaagattntctttctcaatcaacctatctattgcctaacaattctaattgcaagttcacattcttgttctttctttgtcaaagatacatacttgctcaaacttatcaaaagaaacacaaactccatcacaatcatgcattcaatccaaaatcaattcataacaccaattttcacaaaaagataaaaatgtttcactgcataatcatctaatntaagttaaatggttccacatgcttcanaacatgcatactaactaaccacanacaanaatagcagtgtatataaac

SEQ ID NO: 65861 - DNA, 393 bp, Glycine max
  unsure (1)..(393): unsure at all n locations
gtctatacaattcatggcccttatcatgttctgagacagacaaatccttctggaaatcagagatatatgctgagatcgatattcacagcttgtcgttcactcacagagtgaggtcacactctgaccggatttggttcaagcttgtcttcacaatcaatctggttactgactgacaattctaattacaagtgtacattcttgttctgtctttgtctaacatacacacttgcttcaactcatgatatgagacacaaactccatcacaatcatgcgtgcgattcanaatataagcatacacccatcttcgtaagtcaataaaagtgcgtcactgccatgtcatctaacaagtanactattcaaatacttagagtagcaactactaccctatgaact

SEQ ID NO: 65862 - DNA, 422 bp, Glycine max
  unsure (1)..(422): unsure at all n locations
ctaccccattttctccccctgtggtatcatcaaattgttaaagatcatgggaattaatatagataaaataatgaagtggacaaagatcaattataagtcataaccaacaaaaatcataaataagttataaccaaaatataatctaaacagacataattcaaaaccacatagaatctaaacataaaagactcaagtccaaagattaaaagataaataaagtgcaaaaaatgataacttaactaccatagccaaaatacaaggcttaaaagaaaattagaaactaaactctaagaaggtggaggtggtggtggaaggtcnaagctctgacgaatataacccacatcttcttcaagctgtgtgagacggatatccttgccgganagcgagtatctaaagaatcaaaacattcgccaacataagta

SEQ ID NO: 65863 - DNA, 329 bp, Glycine max
  unsure (1)..(329): unsure at all n locations
aatatgacaacatctatattataccatatcctaagagttattctagactnntttgctgatgatacaacttgacatctatttattcnngttgttctattatatcaaaacaatattcaggttgaatagtatgtgacattatgttgttatacccaaacaagttctaaatatagaatctagaagcacatttctcatatcttttgcatagtctatcaattcaaattcaacttggctaaacgcggcaaatagtcaaagttggtaaattgacatccaataattgatgcaatgtgcttgaaattgaaaatccttccatgttacatatgtatatgtgt

SEQ ID NO: 65864 - DNA, 329 bp, Glycine max
  unsure (1)..(329): unsure at all n locations
agcttcatgatgaatcaaaggtgtttcanaggtgttttgatgataaaaatgatgataacaaaagatgatgaccaaggtgatgacaaanagctcaaagatcaatcaaagaacaactcaagtgaatcaagaacaattcaagagttcaagatagaatcaagaagaagaaagttaagagtcaagaatcaagattcaaggttcaagatctcaagaatcaagatcaagattcaagactcaagattcaagaatcaagagaaggcttaatcaagataagtatgaaaagtttttttcaaaaactgagtagcacatgaatttttctcanaacatgttta

SEQ ID NO: 65865 - DNA, 298 bp, Glycine max
  unsure (1)..(298): unsure at all n locations
agtatgaacaatctattaaatatgaattcccttaatttaaaatcacacaaaaatatgaattccatcaattccattgaattaaaatccagaggtatagaagaaggaactgagtttcttcttgtcgactatgaatagaagaagccatccaaaccttgttttgtctaagctctagtctcagattttctatatcaattctacctctttccttgactcctanatcttctattactaaatgaaaagcagtgatgagacaagattagcacagaggttgttttaatcatttatcagtactgagtgt

SEQ ID NO: 65866 - DNA, 448 bp, Glycine max
  unsure (1)..(448): unsure at all n locations
ctgcagcttctaaagtttctggtntccaaaccttgataacaaaacttgggctattcattcttttcattctcnttctcctttgccaaaaacaattagccaaggactaaccgcctgaattctttntgngtctctcttctcccttttccanaagaacaaaggactaaccgcctgaattcttttgtgtctcccttctcccttatcaaagaattcaaaacgacatagtctgagaattcttttgattcttccctttcccatatacaaaagatttcaaaggactaaccacctgagaattcttttgtatccccattcacaaagtttcaaaggtttaaccgcctgagaactttgtcttaacacattggagggtacatnctttgtggtacaagtagatggtacatctacttgnngtgtgactgagaacaagagaggtacatctcttgtgatcagtcta

SEQ ID NO: 65867 - DNA, 396 bp, Glycine max
  unsure (1)..(396): unsure at all n locations
agcttgttggtggtaatggcaagatggacatggaggaaaaatctcacatcactcttccgagggctaaccccataatttgtgtccctattccaagaattaaaccattccttactatgtgattaaatgctattcattaatacctagtgaaagagagaaaagtaagaataataaattaatgataagtaatatgaggtgataagaagaaaaattagtgttaataaagagtttttttttcttctaagaaaaacctttgcttttgaaactcttgtccttccactattagttctgtcgcaacgtgcccttttgcgggcgagcaaaggcgaggctcacgggtgcactntccaaaggaggaaagatgcgcagagtcgccaccaacgtttatttgtggaaaacgtc

SEQ ID NO: 65868 - DNA, 302 bp, Glycine max
acattggagttggtacgaacatgccctcctgatatccagctgggaaatagggagtggggaacccccacatttcgcaacgagcataatggaaccctacgggttaaaacactatattaggccatgcttatagtgtctttgttaaccgttgggcgtcttgttttgaaatataatacaaggagactttatcatctggggctacgtctctacccattctcatacatatgtagtgtgacttttttatttctgagacaacggatccgatgacgagacccccgcaggtgctaatacctgtgacccgccta

SEQ ID NO: 65869 - DNA, 464 bp, Glycine max
  unsure (1)..(464): unsure at all n locations
agcttgcttccaaagcgtgtgagtgtatcttanattcantttgtgtagtttgaaacgatcattgtttttccttattttttctgtgcttagaatgtgccaaaagagaatggtgtacattacttttgtggaacttcatgttaagcaagaaatgtggtattgtagtggtggtgatgaacttattataaacacataataaacgagattaattaagagctaaacatttagtggtagaaagtttattagttctcttgcagcttgatgcgctntaagaatntgattaacatgtacacaattacgtacactacccttttacttgngggaaggagaagaagaaacaccttaatcagcatctttgactaatgctttatcttttcaccaataatgttactatagagagtttgctntgtctggcttaatgatnnntattatngcanagagcaagaactggtggaaatactttaata

SEQ ID NO: 65870 - DNA, 455 bp, Glycine max
  unsure (1)..(455): unsure at all n locations
gcacanaggtctgaaagtccatttaactttgcannatttagatcacatcgaacattnttaacataattctgaagctgatgtcgcaccaccactttcggcacatctacaaaatcatttggataaagttcaaccatcctcaacaattttttcacatcaaaatcttcaaatgatgatgagggactcaaacatgatacacattgtaaacgttcaatattctctttatcaaacctagcattgagctcatgcaactgcaaatctaaaacactaaataaacaatcatgcttataatgatgcanattagaaacactagaagtggtagcatgtcatctaggtttcttcccttgcacatacggtgcatccaaatcaggcatatcaatatcatgcttattgcanatttncataaacttagatataangttttcccatccatcattcctcatttcttggaattcttc

SEQ ID NO: 65871 - DNA, 468 bp, Glycine max
  unsure (1)..(468): unsure at all n locations
agcttgtttctaagcagggatccattattagtgattgtagaactacccttgccacttatccaaacttttcggtcaagtttattaggtgacgagctaatatagctgcaaatagcttaactaaaacagttattgcatatgttagtcgtgcctgttttaatcatatttcacattgtattttagaagttatcaataatgaaatgatataagttgattctggtataaaaaagagtaaaacatgtgtgtgtatgtgtgtgtgtttttatttttttatttttacgataaatttcaaaatagtaatataaatcaaaatcaacatttcttttaattntttcttctattaaacattacanntttgttaaataatttattattcggttatgcataaatctctntatgatatntngtaataatgttcttaaatttttaattngttacttatttactttttttattattatatatatctat

SEQ ID NO: 65872 - DNA, 235 bp, Glycine max
cattgggatttatctacccagactagtttcttcacctgggcaactatatattatggggtataacacgtgacacattgaagaatcttatatgttttgaagatggaaagtatgtaatacatatcacttcaaaaattggctatagagaagtcccttcaaacttgaatcacgatctgtgctacatattatttttatcatatattgatcacttaacatcttgatatttactgacacttta

SEQ ID NO: 65873 - DNA, 364 bp, Glycine max
  unsure (1)..(364): unsure at all n locations
agctngtatggttaaagtctcacaattgtcacgttctcatgcaancaattgtagccgtggctatacgagacatcctgcttaacaaagtcagggtcacgataactcgcatgtgatttttctttcctgctatatgtaacaaagtgattgatccagtaattgtttgatgaagtggaaaatgaggcccacattatactcttgccaatggagatgtantttccccatgctntctttgacatcatgattcacttgatngcgcatctggtcagagaaatcanatggtgggtcctgttatctacngtgatgtacccgttgagcgtacatgaagatctaanggtatacaaagaattatatcgctggagcatct

SEQ ID NO: 65874 - DNA, 438 bp, Glycine max
  unsure (1)..(438): unsure at all n locations
tttactgctgcatttggccttttggactaaccctgctaattccataatcttggagcttacatggttaaatatttcagattaagttattggttaaaactttcaaaaaataaaaagaatatagttagagggaaacaatgtccatgagttagattattaaaatctagttttgacttaataaaaaacaatgaataaaagagttacaaattaagcatatatttatgatacaagaaaaaaatatgcaaaaagggtagttgtagctcctttcaaaattaatatcatctcgctttttggcattagaatcttcacttaatttgtggtatcaaattctttgatattggccatctaattcnttgatttttttttggtgctataatctacttgattacacaaggagtattctcangtagtctttgcacttnctcttcacattaatactca

SEQ ID NO: 65875 - DNA, 441 bp, Glycine max
  unsure (1)..(441): unsure at all n locations
agcttgtatgaatatggngtacccatcacatgttgtactatgtggcggtcgggcaatggtgcacaacaagttttccacatncacaaatcccgcataaacccaccatcccctggngcccaccttcaactgagctcacgtactcccacgtagcccatatnctttgttctctcaacaccgggtccccatcaatccttccaagcttccccaacttccaagtaatacanaattcaaacaacacanactatcacaaccaagaaaacagggcaaaggcagaaaaccttgcccaaaacatcaaccaaaatcacagcttttctcacttaaagaccccagtaacaattcctttcgtcagttcattaaccggtggatcgactcgaaaatttactggaagtctctagtacataagcctacatntttaccatggggatctactagaaaaacatc

SEQ ID NO: 65876 - DNA, 227 bp, Glycine max
attcatttttatacagcaaataactattgttttttgatgacaaatattttattgtgataaactgtggtacaacttattttttgcagatcacacataagaacaacttttacctgcccttgaaaaacaatattgcaacagtgccgggtgttgagctaattaccccccgtgcaaaatctcatctatgttatttcccatttatatcctaaatggttacctatgtaaaatgt

SEQ ID NO: 65877 - DNA, 463 bp, Glycine max
  unsure (1)..(463): unsure at all n locations
atgaanaccatctactttcttctcaatgctgatttcagtcagaacttcctcttcatttatgtgcttangcaacgggagctgaaccaatatacctgcggatattaacaaaccaatcctcacaataaaaaaaaaaggtccaaaacaaanagtagaattaatatttaaaatagcacatgcatganaaagaagtaggtgtataggcctgtaaagtaattaaggcacaaaaatgtgaggttaattgataagtgtgatgaaaattgaaggggaaagaggtaataaaagagtgtaataagtgacgaaccatgtacgtcagggttagcattcaactggtgaacttgtttgattagttcagcttgggagacttgttcgggaaggtccacatcgaaggaattgattcccaattcagcgcatgcctttctcttcattcaacatagctctgtgaatctttttctgtccctactat

SEQ ID NO: 65878 - DNA, 407 bp, Glycine max
  unsure (1)..(407): unsure at all n locations
acagacatctggttacatgcccattatatatgtgctttgattgcagatgctggtgccaacttatttcccagaaacaatgctaaagtagacaaagatgtgcctgatgatgtaggtagttccttaagttccaaggtggcagaggacaacaatcaacggaaagtttcacctctgattactgtgaaagaagacttgttgaatgctctggaacgatcanagaaaagaaatgcatcagtgttgtgtactccaaaggtaaattgagtgatcaggcttttatgatggttttcttgtctgcatttaagcagaacaatntactggtgttttgatgccaaaaaatgtatatatagcacggaagacatgttctgggagaaaatatgtcctcaatgacagaaatttgaagatggattttc

SEQ ID NO: 65879 - DNA, 456 bp, Glycine max
  unsure (1)..(456): unsure at all n locations
ggtgttttaatgatatttatgatgataacaaaagatgattacaaaggtgatgacaaaaagctcaaagatcaatcaaagaacaactcaagtaaatcaaagatcaatcaagaacaattcaagatttcaagataagaatcaagaagaattcaagactcaagaagaaagtctagagacaagaatcaagattcaaggttcaagatctcaagaatcaagatcaagattcaagactcaagattcaagaatgaagagaagactcaatcaagataagtattaaaaagtttttcaaaactttgaatagtacatgagnttttgacanaaccttttaccanagagnttttactctctggtaatcngataccagatgggtgaatcgactaccagtagcanaattctnttgaaaaaagtttcanantggaattacaatggtccaaataatttcaaaaggttgtaatcgat

SEQ ID NO: 65880 - DNA, 440 bp, Glycine max
  unsure (1)..(440): unsure at all n locations
caacacacaaatctntaattatataagagttagaaaacaagaatattctttagttgcttaagagggacagatatagcagactagaagcaacaagtaacacatcacatacgctttttctgacttgaacccggatgagtgcaaaagcaatgtctgtgatgccggtgttcggatgagtggaggtggcatccatagttgatggtcggagatagaatgctggaattaaaaattggaaagaacccaagtgcaagtagaagaagagtctcanaaagtcaaaaactcattaataaaataagcatcatcatttgatgatcattgcattngatggcctatatattgggataactcatgctcatttaaagcactatcagttttgaaagctacattacatacatatgtgactgatccgacacccccatataataaagcactcacacttaaag

SEQ ID NO: 65881 - DNA, 514 bp, Glycine max
  unsure (1)..(514): unsure at all n locations
ccgcgatcctctaagcacctgttgcatgcatcttagtcttgttaagaagcttatccaggcatatggagacatatataaagaatntcattgccaatgtctttcatggtatggaagttggggagtttgctacatttatggcacttggtttgcacttcgtggtcttgcagcggcgagtaaaacttacactaattgtgctgccattcgcaaaaccgttaaatttctactttcaacactgaaagaggatggtgggtggggagaaagctatctttcatgcccaaaacaggtttgtcattgaatggtcatggtaaacaggatactatatggtttattaaactatattaaatatgcttgtatgtatgtctttaacctcatttnagttggatgaatagagcacatattctttatgtgggttcaggacattacacttctcttcccctcggntntaaatttaaatctctattagctaattcactggttttcgttcacttgacttatcatgtgaaaaactgacatg

SEQ ID NO: 65882 - DNA, 460 bp, Glycine max
  unsure (1)..(460): unsure at all n locations
gctnggcactcgtctgcattcacacactggagtattaccatatcatggtttcttttatataggacatcccattcagaaggaaactagctgccaacctctgtaatgtcatcttgtcattntcagacgccccaggcgagtactccttgtccttgatgtatcgtttgatatcgaaataccaaggcttaccatcctcttcttcttctaacaaacaacaatgtgcaggcttaatgtgacatttgatgcctatgcacagcaaacctctgtgagggcttatttggaacatggacgatagagtggcaagagcatcagtcattnggttttcctctctaggaatgcgatgaaatgatatatcatcgaagagctccatcaattccttgatgtanacctaataaggtatcaactttatggtaaaggnttcccattcacctttcaactganaaaataccaaagctaaatcccc

SEQ ID NO: 65883 - DNA, 479 bp, Glycine max
  unsure (1)..(479): unsure at all n locations
gtgaggacactccaccaaaatatatggaccaatctctgatgggtaatgtcatggtgtggactctcttgttccctttacacaaagtttccaatgtctcttatgtactaattctaatgaaattccttaagaaggaatttatgcactagttccatttagtgatattgttctcaggtagtgagcatagctagtcccatgccttcccatttagagaggcangaaaggcatatagtctgatgtactctgctagtacatggttttgtctagccgtgttgatcaacttgatgaacttcctcaggtactgcataggatcttcatgggcgctaccactaaacgggttgttctctgacatatgtaagaactcatgctagaagtcaaattgactccctcaggtagatcaggcaggtagatgatattagcttcccccaaagtangggtgaggtagttcatangtgttngagtctgattaactagcattactc

SEQ ID NO: 65884 - DNA, 430 bp, Glycine max
  unsure (1)..(430): unsure at all n locations
gatatttatgctatactctgcctgcctaattcgtttgacaatgggaccaaggtgggtagttacctttattccataagttatatgaagatctataggtgtttttgatgttgttctttgatcagaattggagttcgactttgataacctatgttgatctttaatataaacatttaatatgtggataattaggtgagactttaattgtggagtttatttgggtaaatgtcttcataagtacaccatgaactaaaattagcttatatatatgttaaaaataagctatcggagaagcttatatgagacaattagcttatttaacttatggagaagccaacttcatttttccttcttaatttcttctnctataggggcgtatagtagtgaaagttatcannaaatggaaaacaacatatataacgcttatattact

SEQ ID NO: 65885 - DNA, 434 bp, Glycine max
tatatctttctaatacttatcacctctatcatatctaagtaatttcacatttatgtctaattgccattatacttcattgcagtaaatttctaaggcatccattgcctaagaaatctcgggcagtaagtagacataaccgtaacgtgcataatcatcaataatggtgataaagtatcattcctttccgaaagaactaacatcaaaaggtccacaaatatcagtatgcacaatttcaagaagctgagtgcttcttgtagctcctttctttgcatgttttgattgttttcccttaataccacccacacaaatatttagatccgtaaaatctagataaggaagaatttattctttattaatctttccatcctttctctagaaatgtgacctaaacgtttatgccacaagaaaacagatcgttcattcactatactatg

SEQ ID NO: 65886 - DNA, 383 bp, Glycine max
  unsure (1)..(383): unsure at all n locations
gatgatgctaatgaggaggttactattctcaaagaactatgagaatcacaatgctggtatcaaatgtgctggtgaggaaagggatagtaccaagaaaccttatgcatgtcatctagatgacaagtagaatatgtttaggttcaagtattgttgtttgatttaatttacctgcttctttttttcttttttagttatttcttttactatctcatgtatntgaacctttaccagaaaaagagattatgagtttaagaaatcacaacaatcttattcaactgttggttattagntttttttttaactctcattatggctgcttatatattctaacagtatgatagtttagattcatcttgtcaagtctagatgatgtgatgattaag

SEQ ID NO: 65887 - DNA, 327 bp, Glycine max
  unsure (1)..(327): unsure at all n locations
agcttgacagtatcataaatctcaatatacgttgtctagtgtgagtatggatcttcattcggtaaccatgaaacanattgctctatattagctgatcaatgaaggtgggtaagttaagttttgtccctgaacctctgccatgtagcactagagaaatattgtggcactgaagtacttgagtaatcttcccaggtcactcgtcgaggttgctctacagccatgacttcagcttcaaattctgttgtttgagattcctnggatgtangtgaattagaagatgatgactcataaaagtgagcctcttcaaagatcgatgctactgttatg

SEQ ID NO: 65888 - DNA, 427 bp, Glycine max
  unsure (1)..(427): unsure at all n locations
agctntgagagaactacaaacattacacacctgttttgataaaaatcgttgcttttcttgagataaaaatcaaagctntagtcttgtccgggcttctatgcgaaacaaagtagtagagggatgaggaacacccaaacaataaaccaaaaaaaattaagctttgaaagaactacaaagaaaacgcacctttgtgataaaaattgatggttttcttgagataaaaatgaaagctttagtgttgttcgggcttctatgcgaaacataatagctcgaagtatcacgaacacccacaaaaaacatgcaagataagatacgttaaagcaacaaagaacaccctccgtacacaagaagcaaaatggcatataacatatagaaaaaatgcagaagacgagtgggcaaatgaagacatgtgaatgtaaaaatcgca

SEQ ID NO: 65889 - DNA, 476 bp, Glycine max
  unsure (1)..(476): unsure at all n locations
agctagaactctagtgtgtgtgtgtgtgatgtgtgtagtangttaccagcttctaagagttatgtagacttagggtgtgtttgacctattcaactctcccctttcttttattttattactttggaatgtgtaaaacctccgtccagtcatggtgaaacgagtttccatacacacacttagccactaacaagtgatatagtttcctgagtgtaagtttaatttagttaataaagttcaaatttcatttccttccattatatcgcttcaaaacaattttgttgacttacacacttgaatccaaaaacaattgtattgacgcatttttacgtgtctctttgaaagggaaataaagagatctgtcaacactgaggacgcgtttggtaaaggagaaatnntttatattcgaaattatgattcgtgagaaaagtctattatgggaantctagaatanattgttacattatattagtacttaa

SEQ ID NO: 65890 - DNA, 115 bp, Glycine max
tccaatgtggagaaaaaggggggatgactttgtgtggttccaaactttttttcaatcacgagggtaccggctttttattaacaggaacttcctgaaactttttgaaaaactcctt

SEQ ID NO: 65891 - DNA, 392 bp, Glycine max
  unsure (1)..(392): unsure at all n locations
agctgggactgattcagtctgactagggatcgatgtttagtaatttaggctacatcatagaacacaagagcatgattgattagagaaattcatttatatgcatcggcttgtttgtgaganagacccaacatttctacctactgttgtcactattacttactttgcattttatagttnttagcataaaagtttagtttaaattctgtttgaaattatcgatcatacatgttctctcaataatgcttcatttctgaacttaattcaggctaacattagttccctgtgttcgatactcggattcatccattntaatttttaaatactttacgatccggcgtgctttccggcaaactggatttccttgaatatanttgaacgaagaaaaatggaca

SEQ ID NO: 65892 - DNA, 404 bp, Glycine max
  unsure (1)..(404): unsure at all n locations
ccccgggttgtaaagtagctatattatcattgattgngtgaagctctctcattgnggttaccagtatcatactctgcctgttccagataatctaaagcctaaagaggaatgtggattgcattaactaacaagtatttctaaaaaaaaaatagcaagattgattcgtatatacatgcacaatttgtgaacttagaccatcacaatttatactcactttggttactgctcgcagaacaaagagaaaagtgaaatacanatttctgacatgatcagggtatcttaagactcggtcatacatcaaagtaagattttgtccccactggaataataaaaaggaaagaaagaaattagatattgaatacatttttctcaagttcatagtgaaatgtattagagtaacatgg

SEQ ID NO: 65893 - DNA, 361 bp, Glycine max
  unsure (1)..(361): unsure at all n locations
naagcttgatgttacattggagagggtaatgaatcttcgagatgatgcgctccatgagagggtggatcaaatggagaatagagaccatatgaattgctcaagagcttncattgttcaatttcgagcgtctagatatataatgcgcctcaatcggacctccgagttaaagttatgaccatttgaaatgctcaagagctttcattgttcaatttcgagcgtcacgatatattatgcacctgaatcggacctgcgagtgacaacttatgaccatttgaattgctcaagagcttcattgnntcaatttgagcgtcacgatatattatgcacctgaatcggacctgcgagtgacaacttatgacca

SEQ ID NO: 65894 - DNA, 446 bp, Glycine max
  unsure (1)..(446): unsure at all n locations
agctntgtacctttcttatagcagatatctccatctttatcatagtgcaattttattgtcactcaataaatggaacctaagtcatacactgaggcatncaaagatactaattggattcaagtcatgaatgcttgagatcaggcatacttatngatcttcctncacacaagactgccattggtgtaagtaggtctataaaatcaaacataaatcagatggttcaatagaaagatacaagacaagattagttggcaagggatacactcaagtggagggtcaggactatctagatactttntctccagtggctaaatggactatagccagaatattacttgctctagttgctattaacaaatgacacataaagcaangtgatgtagattattctttcttacatgggagattaaatgaagaagttacatagtgattcctcaacgtatgaa

SEQ ID NO: 65895 - DNA, 418 bp, Glycine max
tattctgactctctctatgtattatttcatgagtgcccaaatattgctgttggatagcataacattgatggggtctcatatgagccatgcgatggataataaattctttggcgatcgctatttccactcttccattttgctaatgtactctccttttaaatttgtttacccaaaaaaccctctcacaataaaacagattctggaatttatttacactcccctctttctggaatataatttatggaaggctattctatgttatgaacttctgaatctgattacactttcatcataagcaaatacatatatgacttctgctgcaaagcatggaaaggaagaactttattgcatgtgcgggtcactacatgcctttcattaaactctagaagctactagaaataacctatttattaaataa

SEQ ID NO: 65896 - DNA, 473 bp, Glycine max
  unsure (1)..(473): unsure at all n locations
gcttatgctcagcctctcgaagacccaaatgtgacttatatgaacttaatgcagtattcaacttacacattntggttgatctgttatttagcaaaaattataatattatatattctttntttttggnttaaatgcttgtttacaacgtggcagtgtgtggtttacaacatgacagtatgtagtccttcctggtatattatagatgctaataatacatcatgcaaaaattttaattactataatttatcgtacaaaanattgatgaagacgtagttatttattttaaaatcattgatgtatatatcaatatcaatatcatgaattatttataatacagaaatgtctaagaaaattttacatagggattgaaatccattcaagtaattgcatacctaaatcaattctgataaaagaattcaaacagcaattatttatanataatggtctaatatctattatgcaaaaaatgatga

SEQ ID NO: 65897 - DNA, 469 bp, Glycine max
  unsure (1)..(469): unsure at all n locations
ggctggagatgaagatgattgtataagtaccagtggatntgtgtntttcataggaaacacaaccttcacttggatgtcaaaaaagtagccgatattcactcttttgactcgtgaggcagaatacgtagcagctacttcatgtgtttgtcatgcaatctagcataagaatttattaaaagagttgggcatgtcacaagaagagttgaccaagatcttttggataataagttagtcattgctctagcaaggaatccagtgttctatgatcgaagcaagcatattgataccccttaccactacataagggagtgcatagcaagaaaggatgtacatgcagaatatgtgaagtctcaagaccaagaagctgacatcttcaccaagctgctcangcaagaagactntatcaagttaagaagcttacatgcaaaggcaaatcaaagtttatgggggggtgttaatatataaacat

SEQ ID NO: 65898 - DNA, 421 bp, Glycine max
  unsure (1)..(421): unsure at all n locations
agcgtagggataacttgtcaatatatatatgtccttataatcataaattttctgngaataattagctnctacatactctggctacttggattacaattcataataaaaaaaaccagcactaaaagcatctagagttcttcaatcctatatagtttccttcagagatggaagaattttccttacggataccaacgataacatcaatattaaatctgacaaatgctgctccttgaaactcagccaaaactnttcagtgacgaaatcaaggttataactgtgatctccaagcattatggttaatgctttcacaggaagaaaaaacaaactctacaggaattatagaatataaaacggatcagcatgttccgcaattcacatttacggannagcagtgggataaacaaacctggatgcacataat

SEQ ID NO: 65899 - DNA, 483 bp, Glycine max
  unsure (1)..(483): unsure at all n locations
tcttcaccctttcgaacataacccggtggttgatccacatacacgttctatgtcaaattttcgtgaagaaattgcgctttgacatctagtngatacacattccatcccttttgtgctgcttgagctaaaaccatccggactgtgtaccaccttgctaccggggcaaacacttcgttgtagtcacatcccttgttgctgagcatagcctttagctactagtcgggctttgagcctatcaacttcaccattctcatgtaacttggttctaaaaaccatttcactccaatcttcttagcanccttgggcanagttgtaagctgccaggtttcattctttttgattgcttcaatctccaaatccattgcctntctccatttctcatctctttcagcttcttcaaatgagcttggatcttcatgagagggaaacatngcanaataatcttcatcatcagagatanacattgcaaaataatcttcatct

SEQ ID NO: 65900 - DNA, 440 bp, Glycine max
  unsure (1)..(440): unsure at all n locations
ataatacaaaatatgagatattgtcaaccgattagcncctattatatnacaaattttttgttccattcatttagctatctataagttcttgcatttctcaatatagatgaaatctaacagacaaaccattcaataatcttcacagagagagaatgagagattcagaattccattaaggaaacacaccaaatacattaactatgatagcctcaaaatgaagacaattaaccatagacagcccacccatcgggggaaaaggtcaatgcacataaggacatttagtcaaggcaatccatgatattagcaataaataaatctagcctgctgaaccactgattaaatacaagatacaacctatccctacaagacacctacaagcaaaatcaatatgcacaatacattatgatagatatctaaaaattataacattactaccttct

SEQ ID NO: 65901 - DNA, 493 bp, Glycine max
  unsure (1)..(493): unsure at all n locations
tgctgcatgcaagcttctcatgccattgacanagctcanaatgggattanattaatgtctctatctcataatagatacgagatctctggtgcctatataaaagcatgaagaaaagataggaagaagtctaacgaatatattggacaaaaccttctctctgatacaatcattctagacaatgtgcttttacattgcaaagatattgtaatcacactaaactttcatatccttactctataagtagattgttgtaatattttcaaacattatttatgaaagtcatgactgtgttaaagaatacttacgttttcaatttaaagagaagattngttggtgtaatcataagtgaataggagaatactctntacaatcttgttnntaatagtgaaaccttcacaggctagaggagaactaaatgttacttaggttgaataaatcaatataaaagttggtgttctcgtgtttttgctttngttgatccttacgtgtttct

SEQ ID NO: 65902 - DNA, 493 bp, Glycine max
  unsure (1)..(493): unsure at all n locations
cctgatcgctaagcgacaacttatccctggctaagcgtgtattattgtcgccaagtgcaattccttacagccataattgaggtccatgaagctatgcgccagtcatggtagctaagcgagattcattgcggcaatatgagcgctaagcgagtccctctcagctaagcgcatgctcctctgtacttaagatgcatcattntagctaagttggccagagcctcgcttagcgatagttgcagcttttctaatctacagacctcgctaagcagacttacccttgcgctaagccaagtctctgttcaaaaaaaaaaaactgattntgaatntgaaacgtcggctaagcgcacgggtccactaagcgagccttgttgagaaaccaaacatctctcttgctcgcttacacagaggtccgctaagcgagagtatcgaanaactgcttaagtgagtgtaacagcagttacactcacatttgtcagatntcggaaacttcgtc

SEQ ID NO: 65903 - DNA, 491 bp, Glycine max
  unsure (1)..(491): unsure at all n locations
gatccttgagtcacctgtggcatcgctgcttgatcgcccatgttaannaaaattgcattatagagtttctctttcttcgggtgtacattcctttgccataacaataactacattctctgttcaattcttgcgaactttggtgtcttttcactttaattctcgtgagtcattccgttcttattaggtatctcaatctctctatctgagtcatttcctatttggctcttgaatctctctattcatcgcttttcacttctccgtttataatttcctttatgaacatgataggagtgtatagggtccaaatttatttgtatggaaacagatagcttangcagcacaaaaataatttatatatttgtatttaaacaaaatatcaaaatccaacccttgggaaacaataaataactaatcccactatatgtataaaagccagtattaacttaagggttgagtcataaaataaaaattctaaaggtcgatatgatata

SEQ ID NO: 65904 - DNA, 356 bp, Glycine max
  unsure (1)..(356): unsure at all n locations
gaaatgtggaattttgtctactattaatatactatntatctaaatatataaatacatagtttttttttactttaaatagtatatcaattttatatttattaaattcaatcattaaaaactaattnttttaaacgtgtgaactctttggtatataaaaatctatggtagataaaaaataattcctttaaaacagataaaaaanaataattattataaaatctatacatatatatacattaaaatataccttanaaaatttatttattttattattatctaaacaattagtatatataaatattctaaaatagaaaaactcanatatataaatatatagtacatagaatttaatatat

SEQ ID NO: 65905 - DNA, 414 bp, Glycine max
  unsure (1)..(414): unsure at all n locations
agctagagcaacgtgagtctgtctctctaagccgtatgcaatntagntntgctgaattntgttcaggtgctaagcgagtcatactcgctaagcgtaatttcttctctggttntgaataaggcttagcgagccatgctcgcttagccattgtcttgtttcagctaattgagggtgtctcgcttagccatattctttaattttcagtagtcgcgctaagcgcgccctgcgcgctaagcatatcatgttatttttggaaggcgtgctaaacgagcttgtctcgctaagcgagcctgtctcgctaagcgagcctgtctcactaagcgcccagtncctttttttctggtttatttntttggtntcattcttcaataaaacctatctaattntcttcccttgtgattctttgatacatat

SEQ ID NO: 65906 - DNA, 324 bp, Glycine max
  unsure (1)..(324): unsure at all n locations
tattcttccatcattcgagaagaagagtctcgtaaattgngtataataagagagactattgaagttctcgtcatgattgacagaaggaggaaccaacagcccttgctattcagcacaaatctggttagtcttctcgtcccaactccaataatcgtataccgctacattgttcccactataacaaanatcattacgcacgggagacatgttgaaagtacatgattaaccaccaggacagtccaagcataccacgaattatgatttcaagtgcaacgataataatcaatcttcagcatataatgccaaagaaaccctatcagcaca

SEQ ID NO: 65907 - DNA, 388 bp, Glycine max
  unsure (1)..(388): unsure at all n locations
agcttgtgcgagcanaagcattttatcgaccgttattntctcttcctgtntaagtganttttatctttaataaatatttaattnttatgtttatttcttaataaatctttattttgcgttgaatccctaataaaataatttttttattttttatctttgatattttattntagttcctgataaattaaaaaattgtatttgtttcctaataaattaacaaattttgtatttgtttcctaatataaattaacaaattntattttaatctgtatttataaaaatggaaaatatttatcatgaatcanacacaaaatntactaatttanttgggattaaaaataattgtcaaggaccaaaaataaaattattattttattagagactcatc

SEQ ID NO: 65908 - DNA, 355 bp, Glycine max
  unsure (1)..(355): unsure at all n locations
gaacatgaatagggtttgtatagatcgtgttgacgtaaagagaaagagttttaatgcgtgtgtatacagaanaagttcgtcatgtataggaatgtaggtgtacaaagaanagttntttttttatagatggtaatggacgtataagtttttgtgaacataaaaaattgaaacaaaaagggaaaaagaaagaaagaccttgaaggtcggcatgttatggtcgtaggaaaaataaatcattcgtagagagcaaacatatcttttggaaacgagggactaacgcttagagtttattttcctgaataaccgatgtcgcaacctacccttcggcgggagggcgacgcgtgactcgcgggaa

SEQ ID NO: 65909 - DNA, 450 bp, Glycine max
  unsure (1)..(450): unsure at all n locations
agctnnttcttttaaccaagaagctgttttctctctctctcactcagccaaagaaaatttcagaaagctcttttctctctctcacattgccattctcttcttcttcctccaccattgaagctccaacaaagctccaacctttggtcatcatttctgctccaaatcgcgaaaggaaggcattttcggagtcgtgaaacgcatctctacgtgtgggacctcgaaatttcaggtttgggtggacttctttctcacttgactntcgtgggtattgggttttgggagatatgatgggtagtcttgctaggtttctgcgtcatgatggttatttgtgaagaaaattgtgaaagcatgttgaacttgccatgtttggatgaagttaagctacccattctgtntanggttttatgatgatgctgtgatgttatgtgctgaaattgctatgaaaactgt

SEQ ID NO: 65910 - DNA, 368 bp, Glycine max
  unsure (1)..(368): unsure at all n locations
taaagtatgcccgagtcattcatccctatgagatnngtgtgaagtatnggcaatcagaatttccattccttggattacggggttgaaccaagctcaagcttttacaaaaaggttcatcaagtcaagttgaaatatggaagtaaccgtcctgcaaaattggggcaaaagatgaatcgagtcacatcactgcttcgtctactgccaaacatatataggatggttgatgtccttgttacttccagtttcaccttgacaaagatgtcatggaccatgttgaanatctaaattgattcaaccccatatcctgcgtaaaaattcgcaatacttcgactgtacatcattcgcatgcatccattgcttttcgtggg

SEQ ID NO: 65911 - DNA, 356 bp, Glycine max
  unsure (1)..(356): unsure at all n locations
agcttctatagtgtcttcgagtgtctaagtagcatttggatgccacaagaacctggatgttacgaaaggcagtgacaatgaagatattagaaatatacaattaanaaccttaaccagaaaatagaatctggaaaatgaatatattcacatttttttattttctgaaaaaccaaatccggaacattaaaatccttaaccagaaaatgaattccagaaaatgaatttattcacatgtttttatattccagaaaaccaaatccggaccattaaaaaccttatccaaaaatacaattccggaattatgaaaccataattcaggaataacaaatcctgaagctgtccaacaatggtctaga

SEQ ID NO: 65912 - DNA, 301 bp, Glycine max
  unsure (1)..(301): unsure at all n locations
aacttccacaggtacaagtgttcaatagattttcgaatggctaccatagagctcataaactagtgactcgggactcgaaacttaatacagagttcttcagatccaacattgtcttatgcttctaaacaaagctctattccaacacttgcagaatctataaagattcttgcgagatcttcatatcatactattgctctcttcaagagagaaattatcttcttcttactcaagagagtattgttccggagactgtgggcctcttatgatgaaacgagctctgaacacaacggaanggtatctc

SEQ ID NO: 65913 - DNA, 451 bp, Glycine max
  unsure (1)..(451): unsure at all n locations
agctngtgcagtntgttaactcccttggtatgggttcaganatctggttgtcatagaggtaaatggagctcaatctctgcagccttccaatctccaacggaattttacctttgaagaagttaccaaataggaaaagactttccaagctactaatgttgccaatttcaggaggtaaagatccaacaaaactgttgttgttgagcacaagatctgtgaggttctgcagtttgtccaagctggaaggaagttctccttcaaagctgttatcagaaaggtccaactgttggattgaggagcagttgagtaactccaagggaaacttgccagagagcatgtttctagccaagaaaagctgctgaagctttgaacctctgaggcagaagttacttggaatgctacctgtcagagcatttatcagacaaacaagagtttcaagactttgcaatttaca

SEQ ID NO: 65914 - DNA, 286 bp, Glycine max
  unsure (1)..(286): unsure at all n locations
agctntgtctttagagatagggtcgacgaccacgttgctgcatcccgtgcgtggaagtcatggaagaatcaggcacaacaatctaaaggcaaagtctggaaattgttcaagcttcgctttctcacacctncaactctgtttcttcccttgccagatcgctcctccccgcacctcgtcgtcttaagcttcatccttccaacaagctctaacttcctttgatgctttcctcttcttccaatctttccctctacttctntgcatctgctgcttttattcttattccact

SEQ ID NO: 65915 - DNA, 468 bp, Glycine max
  unsure (1)..(468): unsure at all n locations
tctangatattggacatggcagatngatgatgtccgtccagtatgttctggtctgatgattgcattacagctagtcgggctgtatccaacttggttgagctgggcattcaccatcggtctcaacatatctgtgtcgntagccttgtattctctggtggtcttttaccatgtgtttgctaaagaactggcaccacacaaacctctagctaaattcttgtgcatcaaaggaatcgttttcttctgcttttggcaggtaagctcatacagaataagaacaaaagaacaaacaaaacctgtgtttacatatagaatcaatataaataattggactagctgatnggtctcaaccactcttccctttgttntaatggttaattttttcataatgcttntacttatttattntggtgtagccaacaagacaataaactcaatgtatgaaaaatgacgaatgtgtgtcggatggat

SEQ ID NO: 65916 - DNA, 452 bp, Glycine max
  unsure (1)..(452): unsure at all n locations
agctntgtacccttttntgttcaaggcataacctatgataacacattngatagcccgaggatctaactntccccaatggggaccatgaacatgaacaaagacagaacatccaaagacatgactctgaagatgggtcataatgggaacagacagataaaatgtggtcatgaagtgagtaggactaacaccatntaaaacacaagaagttaacctatttatcaagtaagtagcggttagaacaactntccccagtaagatttaggaatagacattnggaagagtaaaactctagcaacctcaaagagatgtcgattnttcctttctgtaaccccaatttggtgaggggtgtccacacaagttaactcatgaacaataccatttatcttgaggaaattggaagggtntttatcacatactctctcccattatagaaactcatcttttatcaaact

SEQ ID NO: 65917 - DNA, 348 bp, Glycine max
  unsure (1)..(348): unsure at all n locations
tactaagcttagttgggagggtgaagaattctaccagtcaactttgtcatttctcttgatactnggaagttgaattctttttcctgatcaccactgtcaaaatcatttcaaggcattagaaaataatacaaaagcaatatgaatatgcaaaagtaaaaagtcaaagaaaggatccatagaagtacataagaggtttagaaccatactatctattcaacanaaaagaaaaaatggaactactatagtatcttgaagttaactacctggtaggcccaacagttcctctcatgactccttcgacaatggtttttcgttctgccggtctttggcagcccattttgagtattc

SEQ ID NO: 65918 - DNA, 510 bp, Glycine max
  unsure (1)..(510): unsure at all n locations
atcctctgagtcacctgtggcatcgctgcttctatcttaacacatcatatataanaagttatatntattatcaaatgatcactatagactntntctatttttattaattaagccatacatatatctcatgaatactcctttgaaacaggttcctaacgcactaatcccaggaacagcttgttttccacaacttctgacaccaacggtaactactcattacaagccttactactattttggaaccatgtaaattgtcttcttcacctttgaatcttggaatcttttacaaacattaacagtgtaaaatcattgacatatttactggggcaaccacaaatacaaaccatatagtagcattaaattattgtcatatntacttgcaaccacaaacacaaactatatatatatatatagnntgtataatntggctcactcaccatagtggaaatgcanatatcatgcagagatttggaagtcccnctgtgcccgggcatccaccccatgccatgt

SEQ ID NO: 65919 - DNA, 427 bp, Glycine max
  unsure (1)..(427): unsure at all n locations
atgtgtgttcatttccagttgtaaagcattcaatctgaaccataataaaatacaatcagatacttgaattgatttcgtccatttagttgcattgttgatgtggttnggtatttgactatttttntaatttcttatttagtttgtatgacaccatggtacctatnttaagtttttttagttctctttttctcccatttccttgatgcatggttaattttgccaatgaaatgaaattttatactgtttcaccttattttatagttactcanataactagtttcaccttatttttttattttatactgttttctaaacgataaggatctgcttaaggttatttgtgcacgattttacattaaatgtagttcaaaacccaaaagatgtatatatgtntattgaaaccttataagcctttttactggttatc

SEQ ID NO: 65920 - DNA, 278 bp, Glycine max
atatatatatatacacatatatatagcgtatatatatgcgattttacttattgatacagacgtatattattatacagtatcgctatcatacatttataatacccataataattaattcaatgcccatagaccaaagtaaaattagtgctaatccattacacttgtcctattaagaaacctagacacacgtgtcgttaagtttctacaaacttctctcttttagactgttgaaagtcgatcattaaccaatagactatttaacattgtgcccacataat

SEQ ID NO: 65921 - DNA, 378 bp, Glycine max
  unsure (1)..(378): unsure at all n locations
atataacactttagcactatatttttaccagtttaaacacccacttgtcatgaatttgaatgatgctaaaactctaattattcacataaaagcaatacaagagaggaaatctaataatttttatatgacttaatcataaaatatacccatacacaacaattatcaaactgcatgatatgagatggcaacgcctagaccacttatttagataaggtcaatcttcccaccatggacaacaaattgctcttccacctactaaatctcttattgaccttgtcaatgatgaaatcataggtatgactagtatggttnttgtggaatatatgaactcccaagcacttacctaaatcatcccgactttgtatcccagaccacttg

SEQ ID NO: 65922 - DNA, 211 bp, Glycine max
ttggagtcttatttacgtttttggttttttgtatgagatggaattgactgatgctattgtgcgcgcctccactgcattatagcacacattattatctagctaggaatatgacactgatggccggacaaatgctgattggacgttatgaccaataatccaatgtattcaaattgaaatattgttggctgataatgatttgaataagcgccgt

SEQ ID NO: 65923 - DNA, 392 bp, Glycine max
tgctgcatgcaagcttcacccaccttgccagtataaccagccttgtttatggcatccatgagtaaaacaagcccctccctgttatcttgaacattgggagcaaatcctccttcatctccaacattacatgcatcttgtccatattttgccttgattattccctttaatacatgataaactgttctaccagaaataaccaagttaactgattgtcaccatatgtagatcgctggtgagattgaaaaaatcatggaatttatgctatagataatatgcagtaaggaaaattggaattaagactagctatcaaatcatatgtaatacctatctaagaacctaatattagcacagaagttaatatctgaactcatcaattcacactcaccatacaa

SEQ ID NO: 65924 - DNA, 503 bp, Glycine max
  unsure (1)..(503): unsure at all n locations
tccgctcgaggtgtgtaacccaccatttccataatagaacactggtaatgtgtctactatcattgtcatcgatatttcgtcattgaggagccacttgagctgccaggttctccacctttgggtgtattctttgaaagatccgtgcccgcttttatgcacatgttttgtagttgcatcttatccgaagccattataccgaccctgcctaacgaaagcgaccattaggtcctcccaggaatggactcgggaaggatctaagatagtgtaccaggtaacaactaccccagtaagactttcttggaaggaatgtatcaacaattcctcatcttttgcgtatgcccccatcttccgacaatacatctttagatgggtcttggggcaagtaatccccttgtacttgtcaaagtccatcaccttgaacttgggaggggtgatgatattgggtactangaacaactcttctatgttagcagaggcataatcttcaccttcttcaatggccg

SEQ ID NO: 65925 - DNA, 365 bp, Glycine max
  unsure (1)..(365): unsure at all n locations
catgcaagctcgtgactctnggcaatgtctctaagactagttatttaaaaagctgctatttttgaaagaatcttcagaaacaagtcacttgaagaattgtgacttttggaaatgtatattttgaaatcagtgactggtaatcgattaccattaaggtgtaatcgattacacatcaatagatgtgactcttcattttgaattgtgaaaattaaaatgtttacaaacaccagtaatcgattacaagtattgtgtaatcgatgacacaagttaaaaatgtttaaacacaaattgtgactctctgaaattgaaatcttaacattgtacaacactggtaatcgagtactaccttctggtaatcgatcacc

SEQ ID NO: 65926 - DNA, 417 bp, Glycine max
  unsure (1)..(417): unsure at all n locations
agctntataagcgcgggtctggtgatacgaaggtctagtggtcgcgatatacgaagatgatgttccgagtacattggatttggtacgaccatgccctcctgatttccagctgggaaattggcgagtggaggaacgccccggcatttacgcaacgagcataatgtaaacctttacggttntaaaagctctatagttgggcctaggctttagagtttttcctattgttaaggctttgtgtcttttgtttttgaatttataatacaaggatctttcttcatctgttcctacgtctctacccattctcattcatttgcatgtttacttctttntctganatggcagatccaatgacgagtcccccgaaggtactaatacctgngacccgcctatcgacttcgagcaagaaatgaatcaaac

SEQ ID NO: 65927 - DNA, 347 bp, Glycine max
  unsure (1)..(347): unsure at all n locations
gtaagaacttcgaaaaatcaagatcatgcttgttcgcacatcgttcgcgtgtatgacatccactccacaaggttngaagttgaggagaccttcaatcctattacacaacgtggccgacaaaagtgggcagataacttgaatggtcattattgtcaatgcagaaggtattctgcgcttcactatccatgttcacatattattgcagcttggtgttacgtgagccttgactactaccaatatatagatgttgtttatacaaatgagcacatcgtaaaagcttactccgcacaatggtggcctcttgggaatgaagcgactatttctacttctaatgacgcatggacact

SEQ ID NO: 65928 - DNA, 447 bp, Glycine max
  unsure (1)..(447): unsure at all n locations
gatccttaagtcacctgcggcatgcaagcttacacaatnntattttctcanacttgagttttggaagaccaattactaagtctttcttaactagatgattaagatgatgcatgtttatgtgtgcagtcctacaatgccacaaccaagagtcatctatcttaccaaacaactcagctcctaaaatgatgcatgttcaatatttaacatatagatattacctactctcttgccaatatggacatcctgaccagacatagcttcactaataagacaataattcttgttgaattcaattntgaagcctttgtcacatagttgactaatacccaagaggttatgctttagtccatccacatatagaactttctttatctgagttttgtactgatttccaatatttccttcttccattatctttcctttggtattggctccaaaagtgacata

SEQ ID NO: 65929 - DNA, 441 bp, Glycine max
  unsure (1)..(441): unsure at all n locations
agcttaccactataagaagccgtgtataagagctttaaggaggaaaagatgaggggaaggagaaggagaaaaggagcacgaaattntgtgcctcanatgaggtatgaactttgaagtgtaattctcaaatgatcaaagttgaaaaaatgcacacacatgacctcgatttataacctaaatgtcacacaaaattggagggaaatttgaatttctattctaatttcactagaatttgaaattgaatttgtggagccaaaatttcactaattatgattagtgaattagcccactaatccaagatcaagtcaaggattctccactaagtgtgcttaggtgtcatgaggcatgtanagcatgaacgacatgcacaaagtgtgactatatgatgtggtaatagggtgtagcaagcaaatgcctcacctcccctctatagttaaatgg

SEQ ID NO: 65930 - DNA, 415 bp, Glycine max
tgagccgatatcccaacttaccatattactcttgacccagggtgttattgtccatccttgctctcggaagaaaacaaaaaaaaaggaaaaaaggagataattcccaatcaaatatcggaagaaagaaaaggaaaaaaaattcccgatcaaggaccggaagataaacagaagaaatatgcagaaaggtctttggactagacaacatcttgacaatacagaattgtcaccaagtaaacaaaaaagaaaggaaaccacgatctaaagtggtcatctccctttggttggcaaccaaaatcttgtgcgtcggtgacttgttcgcctcatactatacaaaaacagaataggaaaagggccagaatacttcaagccaaattttccacaagagaacaaccatttcccagaaataatctattga

SEQ ID NO: 65931 - DNA, 464 bp, Glycine max
  unsure (1)..(464): unsure at all n locations
agctntcatctagccaagattattcaaaggtgttattagagaacctaacgattcctaattatatgggccatcaaatctatcatgtgttgacagtaattgattagccgatgaatctcctcgggggccgtacacacttcggccatggcttttgctttggctaatagatgtgggaggtcttgacttccattcaaggtcaaggcgaacctatccatccacatagtcgcttcttgatgcaatgcatcaatcaccctccctcttgcttctttttagacgtacacttgtgcaaaatcctccactagcttttgtttgtgggccacagactggttcaactcttccttgtatagccctatgatagctagcatgctttgctctgtggcttccaagtgttgagccaaacttcttttggacctcgcgcanngcaactaactctctattaagatcatgccatgcacccgtgaccgatc

SEQ ID NO: 65932 - DNA, 445 bp, Glycine max
  unsure (1)..(445): unsure at all n locations
tctcagctgtccttggttagaccatgatgatacatgtattgngacttgtatgattcaatatgtggcaaaatggatgagggaaattgtgatttcgaaaatctgcactttatgtagaattttgctgtcaaataggtgcagcataattntggctttgtgcagaaaatgttgtgtatttgctggttgtggaaagagtattacagattgggttctagacgttttctatcagatcccaactgtcataatgtagaattgtgtgctagagacttccagtaaaattttcgagtcgatccaacggttaacgaattggaacgaagagaatattactggggtatttgagtgtgaaaagctgtgatattggtttgtgttttgggcagagttttctgcctctgcccttgtttcttggttgtgttagttcatgatgctnggatngtgaaatactctgatg

SEQ ID NO: 65933 - DNA, 433 bp, Glycine max
  unsure (1)..(433): unsure at all n locations
agctntcataagtganatcaagtgcangccattctctaagagtcctctcacgagggggaggttgagccatgttctcagtataaaaattagtagtgaaatgctcaaaatcagaatgctcaaaatcaggatgttcaaaattaccaaccacagaatgctcaggatactcaccaataactgaatgctcagaatacataagatgcacactatgcctaactaatctatgaaatgttctatctatttcaggatcaaagggttgtaagtcagtaggagcaaaagttatggccgtttgaagttntgctaaacacaagttctcaaaattnttntgaatctctcaaatccagccacaacaagtattcctggtatttttcacacaaaatatgagtcaaaagaacccacgacacanaaattcagccaaaaataacaaccctaacta

SEQ ID NO: 65934 - DNA, 363 bp, Glycine max
  unsure (1)..(363): unsure at all n locations
ttgctntagatagatgaagagaaatgaattagaatattctatagaaagatattgcaagattgattgacagatggttgagagatgatgtngaaaaaagatttaanaatagatgattcanagatgattggatgattttgaaactcatgtcatggtcacatatttatatctcttgatgactcaagtcaaagcttgtgactcttggcaatttcttttaaaactagtcacttaanaaaatgtgactnttgaaaaaaatcttcaaaaacaagtcacttgaagaattgtgactttnggaaatgtatntntcgaaatcagtcactagtaatcgactaccattaaggtgtaatcgactacacatcaatagat

SEQ ID NO: 65935 - DNA, 399 bp, Glycine max
  unsure (1)..(399): unsure at all n locations
agcttccnctaagatgatgttntcttcatantttactttntctcccnctcanatgatgcactcaactntcaactnttactttntctccttcttttgttggacaacttcttcatcaagctntcttaaaaatcatcaccaaaataatcaaaatctgatgagagatcaatangagtaggggagacatggctgcctggaggtgtangagttcttggaggttcacatccaatgatcttcttgtaaaagtaatccccaatgagaaatcatctcctagcttctttctcagcatagtcacgatcttcaagagctntgagcagtgattccctcgtcttgagtagctcaacctttaccaaccttacatactccctttggtgaatccacatcccctagtntaattatgac

SEQ ID NO: 65936 - DNA, 297 bp, Glycine max
  unsure (1)..(297): unsure at all n locations
tgcacatatagggtatggnttggtgacctaaaatatctgaacaatgtangtttatcattngntattgagcatggaccaccataaagcataatatgtatagttntctaagtagactctttctcctagtccttttcaaacaccatgccttattttggacacccaaacgcaacaactatggtggcaagaaagatgataacactctttctttgaatgatgcctctgatggtggcatcatcgtgtcatgcaattccccataacaaagcatacatgccatcatgccaagagctgaacttttca

SEQ ID NO: 65937 - DNA, 448 bp, Glycine max
  unsure (1)..(448): unsure at all n locations
tgcaagcttgtatctatggataatggacccattagaattttcttaatcttttcttaccatcgaggtttgcatgagagaagcttagcgaggaccagttctattggcgtagtaaaagtaccaaatgtgaggtcaaagtagtaacaattttgctgatggaaggaatggactctgaggatttcgtggtcctcttaggaatggtttcttctagaacagattgttgcccatgaattcagagtgtangaaaagtcatgattaatctaaattggttgcaggcttcgtgttcacacatttagccagttatcgaatntatatncaaataaaattggagaatttaaatcttaaatagatantgtttaagtcgaattattgaagaaaaagatatataattattcaatcttaatcaacaatcanagtgaatactcaaagataaaatagttttttcttctca

SEQ ID NO: 65938 - DNA, 463 bp, Glycine max
  unsure (1)..(463): unsure at all n locations
catcatgtactctctctaagtaccattctttgcctatcaactccaccagaccggatctagacaaggtaagcagaacttctggacttggattggatattgcaatctgcaagaagaataagctcaagttggttggtggagacattgcaaacctgtggcgattatttcaagaattctaacagtagttgaaactttggtatcttattctacctgaatgtcccgtaatttgtactcctgatacaagtctttcaaagcctgaacagcactagaatctatgtaggtcacagctgcagtcatcacaagtcataaccacatgattagaagagagtagaattatcatcattatccctttcatagtttagctataaacaaactgtagtggaaaacaacattcacaaatttcagtgcaatatgaaattatgtattcagcatgaggtaacttaanagtaatgaaaatgatcaacac

SEQ ID NO: 65939 - DNA, 433 bp, Glycine max
  unsure (1)..(433): unsure at all n locations
agctctgagccanaatcctgactcaccataaaccttgacccagggtgtgattgtcaatccttaccctcggaagcaaaaaaggaagagaagganaatttccaatcaaaggaaaaaagagaggaaaggaaattcccaatcaaagagtgggagaaagcaaaaagaaaagaaagaatattcccaatcaaagaatgggagaaagaataaaaaaagagaaggagaagaaggaaagaaagctcctggtcaaagatcgaaagaaaacagaagaaatatgcagagaggtctttggaccagacaatatctgaacaatacggaattgtcaccaaatgaacaaaagaaagaaaaggaaaccataacctaaaagtggtcttctccctttgattaccaaccaaaatcatgtgcatcggtgactttgtcgcctcgcgtcaacaaaaac

SEQ ID NO: 65940 - DNA, 477 bp, Glycine max
  unsure (1)..(477): unsure at all n locations
tctccgctctaacanaagtcttcacanataatcatcacacagcagaaacctatgctgactacccatatatatctccaaaaccccatacccacgaaaatcaagagggaaagaagtccacccaaaccttgaatttcgaagtcccactcgtagccacgcacttcacgaccccgaaaatgccctcctttcgcgaattggagcagaaatgagaccaagggtggagctttgttggggtttcaatggagaatgagggaggagaaaatggcaacgtgagagagagagagagctgtctgaaaaagtgtgggggctgagtgatgagagagaaaaagcttttggtntaaataaagggtttcctctnttttttttattatttattcagctctgcacatgtcctatttgatggagcaaaaggccacttctcttttgactggaccatactcgcacaagtgggaaattgccttgaacctaaatctgctcgtt

SEQ ID NO: 65941 - DNA, 507 bp, Glycine max
  unsure (1)..(507): unsure at all n locations
tacgcgcgatcctctgagtcacctgtggcatgcaagcttatgataagggtagctgatcttatgttcgatatgttatgtattttctgggctttgctgcgacgngggttggagtggtgtctatgtgccttgaatcagttaagtattcaattcttatgaattaggagaaggtgggaccaatttatcctagtaataggttaaggaaaggggattcattgtcctcttacctgttcattntatgtgtggaaggcctatcggctatgatcaagagggtggagagtaaaggagaggtgcctggttttgggtttgtaggaatgcccttctatcagtcatctgttggttgcgggtgatatctattctttgaagcatccaataaggagtgtatgagtatttcacatatttttgaagaattatagaggaacatcacgtcatgagatcaattttcacaagtcanaatcttttttatagaaatacatatgatcctatttcgtgtttaatcttcgataacct

SEQ ID NO: 65942 - DNA, 481 bp, Glycine max
ctcatgtgctacaaccaagccatgtatgggtttgcaccctatggtccttattggcgctctctaagaaagaatgtaaacttagaaatcctctccaatcgccgagtagagcaactacagcacgttcatgtctcagaagttcaaagttcaatcaaagagctcttcaatgtttggtcaagcaaaaagaatgagtctggctatgcgttggtggagttgaatcaatggttttctcatttgacattcaacacggttcttcgagtggtcgttggaaagcgacttttcggtgctacaactatgaatgatgaggaggctcagagatgtctgaaggctgtggaagagttcatgcgtctgttgggggtgttcacggtggcagatgccattcctttcttgagatggtttgattttggcggccatgagagggctatgaaagaaactgccaaagatttggacatgattgttggtgagtggttagaggagcacaaac

SEQ ID NO: 65943 - DNA, 214 bp, Glycine max
  unsure (1)..(214): unsure at all n locations
gcttctagtcaaatggacttaccttgaattaattctcttgatagcctctntgagcctatgctcccctttctttgttttgaagctcattacaagccttaagtgaaaaaccatgatatcaccttacccttaaggaattntggagctttggaattgttttgggaataagtgtgtgtgtgtgggggggggagggtatgtttnattgnnnatattgatt

SEQ ID NO: 65944 - DNA, 454 bp, Glycine max
  unsure (1)..(454): unsure at all n locations
gttagaacaactattttgtgtagaagcaaagcttcatggtgaatgtgattcanaggtgttttaatgataacaatgatgacaataaaagatgatgacaaaggtgatgaacaaaaagatcaaagatcaaagaacaactcaagtgaattaaagaacatctcangtaaatcatgaacatgtcaagagttcaagaatcaaggagaattcaagactcaagaatatagcctagaatcaagaatcaagactcaagatctcaagaatcaagatcaagattcaagactcaagatttaagaatgaagaaaagactcaatcaagataagtattaaaaagttttttcaaaactttgaatagcacataagtttttgacaaaacctttaccannagagttttactctctggtaatcgattaccatattgntgtaatcgattaccagtagcaaaatgagtttgaaaaagt

SEQ ID NO: 65945 - DNA, 171 bp, Glycine max
aggcgcatactgtgaataatagcaatgccatgtatcgtgatttgcttatatatcttaaacagatatctccataataccaccacagaaatggcttctatctctcacctaagagattttacttttgtttgcatttatgcttgccgcatacatagatataatagaagcgtacca

SEQ ID NO: 65946 - DNA, 374 bp, Glycine max
  unsure (1)..(374): unsure at all n locations
agctcgttgaagtctaaatagatgtgtgactagacttttttgtgattcacactccatagaaggtatatagcaactatttaattaaaaaacaacctaagaattcatttagttcatatatttcgacgagagctactggtttgtttggagtagtgcattcagatgtgtgtggaccatttatggttccttctcttggagggaacaatattntgtttcctttgtagatgaatttagcagaatgttgtggatctttcttatcaagtccaagtcaaaaaaattttcaatctttaagaattntaggttacttgttgaaaagcaatctgaaaaaacatattaagatacttangactgatggtggagttgagttgagtatacct

SEQ ID NO: 65947 - DNA, 424 bp, Glycine max
  unsure (1)..(424): unsure at all n locations
agcttctanactntatacaagaatgaagctctgattctcacttgttagacaagtggcctcagttatcttaagaaggggggttgaattaagatacacaagttatcccccaattaaaatttaactctctattntattaacaatgcaacccttattatgaattattctaagaacaattcaaagacaaacttctttaaagaanaatataaacaataataaataacaaaagtttaagggatgagagaatgcaaactcagttnttatactggttcggccacgccctgtgcctacgtccaatccccaagcaacccgattgagatttccactatcttgtaaaatgccttntacaaagtctgaaccacacagggacaaccctttctttgcgtttagaaatccttacaacttaagagaccctcgtccctttatc

SEQ ID NO: 65948 - DNA, 344 bp, Glycine max
  unsure (1)..(344): unsure at all n locations
tgccccacattatttccatgacacagatgcaaagatgatgatttggaaattttatgcaaaactggtcatgcatgcacctatgcggacactcaagtgtcaaatttttatggtcatgtgatgctagggctcangattcatttcctctattttagatcaacccaatgtttccaaaatatgtacttttatcaatttgttcattcatccgagtccattatgggtactcgagaaaatttcacagcattcacccttcaggtgtacgtacattttttttttccaaaaactagctatgatncaacgaattttctttaaagaagagttggatgtcatctcttttcacaagcatg

SEQ ID NO: 65949 - DNA, 450 bp, Glycine max
  unsure (1)..(450): unsure at all n locations
agcttcttcttctgagaagctttctattgtgtgttcttggctttcgctccttccaattntgtttctcagccatttcccaattcggttgcagagaaacttgatgactccaattatctgcactggcatcaacacgtgtcaatctggaatcacagaaataagatagtcttccaaaaccacacgtttaatgggagtagattaatggatgaagcggtttttgtcctctggtcgtggattaaatctatggagaaggattntgctgtacacctaaatcagtggtcttcaaacataaaggaagcttttaatagctaggtagggtggggtggtttatatacatgtaacagtcttaagggtaatagctggggtctctgtattcacaagatccacatgctttatttctatncaatagtgtatctatagtacctctggtacttcttcataataatatatatc

SEQ ID NO: 65950 - DNA, 460 bp, Glycine max
  unsure (1)..(460): unsure at all n locations
tactaagctttaagggatggttattgcaattaattgtcttataacgcgttatttctaaataaccgtcttagaaagcgatttatatggacttgtattaatattaatttattaattcctacttttttcctttatgttntatgcccttaaatataaaataataatataaataagaaatattggattgaatattctattcatgttacaaaatgaccttaaagcatgtttacaaaatacaataaatgcatgtataaattgctaaaaattatgaataagatcttctatccatttctgtggaactagtaatataaattggtaaaaattatgaaaaggaataacatataacctaaatttaatattggcaaagggttcaatgagcgccatcatcggccttgtcttctaattccatnntcttgctctctgctagaacttgattaacattccaanttgaccattatgtcat

SEQ ID NO: 65951 - DNA, 441 bp, Glycine max
  unsure (1)..(441): unsure at all n locations
agcttatgcgcatgtttccttactaacgttcactttcggaagatatcctattaaccgaaaaaatgcacccatatacaatcaaggcagctntgttacctagattatttacacgtacttccaaggtgtatttgttacttacatcacacacatctccttggctaaattcacatacatgcatactccaagcatttggggtaccaaaaattgcacatgtgcacatcttggtatttctaatacctatacatacacgaacttcatgatgaatcttgactatctacacaataaggtgctacatttcatgccctttntcaagtttttgctacctaaagccgcatgcaaattcaagcatattttccttngctgactaanatngtattcaaaatatatatatattnnttgaaatatgttttctttcatacaacattcaacatnattatatat

SEQ ID NO: 65952 - DNA, 282 bp, Glycine max
tatatatatcgatacgctcgaaattttcatcggaaactctctgtttattcaaatagtcataactattcacacggatgttcgattcaggcttataatatgtcgatacgctcgaaattaaacatcggaaactctcgcgaaaatcaaatggtcataacttttcacacggatgtccgattctggcgcataatatgtcgagacgctcgagtatgaacaacgaaagttcttaaagattaaatggcttaactttccacggatgtcgattcggagatacatatcggacgc

SEQ ID NO: 65953 - DNA, 397 bp, Glycine max
  unsure (1)..(397): unsure at all n locations
agcttagtcttgatgttactcctcatatctctatttatctctccccttttggctntgatggtgccaaacttgaattgccttttgagtgcatttggagattcttgagagtagagactttttttaaaaaaacctgaaagtttataatcactaagagaagtgtcaaatcacatcttcatcattaagtagagttgtatacggatgtatgtatacaatgcattacttcctcctaatgcaatgtttctccccttttttccattataaggccaaaaagtcacaactactgatagagtaaacaaaaaaaaatatgatgtgaatagggaaaaaagatcataacatttaattcataanaaacattacaactattataagagagcataactacttaatcaaacatcac

SEQ ID NO: 65954 - DNA, 378 bp, Glycine max
  unsure (1)..(378): unsure at all n locations
gatactaagcttaagcgttattaagccatatgtctctgtataacgctaatattaatatcaacttatcatttgtggtggaatgtcatttaatcaatgttaaaacaaaatctaaccgatcgttcacgctataacctcggttaaacaaaaaaagggtaaataataataaaataatccaaaaaatcaatcggacgttnttctttgaaagattccttgaattaatggactaataacccaagtgaaaccaaggctaaaatcaactcacaaatcaagcttgtgcgcaaaaaatcactcaagaccgttttaaggtccaacgccttaaaacggtcctctttgcttatattggttaaaatggaccattcaaagcataaaatcaacata

SEQ ID NO: 65955 - DNA, 369 bp, Glycine max
  unsure (1)..(369): unsure at all n locations
tctggatcgcttagtgcgcataagtagatgagctaaagtggtgtgcttgatgacctgnagcggtgcactcaacgaacctgacaactcatcttcttctggattcttccttgtgcttagccactgagtgtcacccttagtgaatgctcgctaagccagcannatggcttagcaagaagtgaaaaacacattnttgcaattttcctattaacctgaaatgagagaaattgatattaacacacaaaacaaagtataaatatctatacctatattaacataaagacttatatactataaaacactataaatggagaagttgatcaatatcacagtttataccaaagtagtcgttcacgatacactgacatactg

SEQ ID NO: 65956 - DNA, 271 bp, Glycine max
gcttctttatccccatatcaattattgcagctggtagtaacatgaatggcccttccaatattataggaatgtcattatcttcacagacatccattaccacaaagtctatcgagaagaataaatggtttactctgaccaacacatctttaattactctgtatggtctggtaatggagcaatcaacaagttgtaaagtcatcctagtgggcatgatctccaactcttccaaccttctgcacatggagagtggcataagttaatattggctcct

SEQ ID NO: 65957 - DNA, 401 bp, Glycine max
  unsure (1)..(401): unsure at all n locations
agcttanggtgcaggtacgaataggtgctagacctatgatcgatcaatcgttaccccgcgtccggctaaagatgttaaagaagcgctcctaggaggcagcctagtatctctaactttgcttgttaatttcttggttcatacttgttcatttccttgaattatatcctaaattcgcctaagtttatatgcgattataggaatttttacaaaanaaaaatatatatatatatataacaatgaacaacacaactttgcaaagatctttttgcanaaaaataaaaataaaaaatcatcagctcgcctgggcgagcgtgtctgacgtaaaaatttaaaagggggaggggtgaagccattttcaccccatttcttntcccaaactcaaagcctccaacaagcttatg

SEQ ID NO: 65958 - DNA, 377 bp, Glycine max
  unsure (1)..(377): unsure at all n locations
gctatcatattccgaagggtntagggcgacttgttattgcatcaatctttgaagcttattgatttccaaatataagtctttaaactgcacactaagctactcctttaccaaacaagattttacacttgaacatttgaccgaaatattcccaaccaataaaaacatgaagtttcatttgtcttatcaatacttgaacaattgcgcaatcaaataaaatatagcttctcttattaaagtaattagcttttatacanataaagtagaaccaatagaatgacaggatatattattcatttaactataatanttttatcacatcgagcaacattcaatacttgaaaatggcaaaaaaaatatatataagtttattcacaata

SEQ ID NO: 65959 - DNA, 334 bp, Glycine max
  unsure (1)..(334): unsure at all n locations
gcgtgctatcaggctntntgtcttacagancacaaaaactttatacggatcaccactcgggtaatttcggcagtcagcgtgactcaaaagaagtatgacagatcttgtgagcgcggaagataacgtaaatctccacgtgtcaacgggcttgtcngccccgattgacgaaaggcgcanaagacgacgttagtcactgcgtgctatcaggcttttcgtcttatagacaccanatagtttatacggataaccactcgggtatttccggccgtcagcgtgcactaaaagtcagtatgacagatcttgtgagcgcggaagatgacatanatctccacgt

SEQ ID NO: 65960 - DNA, 418 bp, Glycine max
  unsure (1)..(418): unsure at all n locations
attcctttattaatatatatgtgaggagtagagggtgtcacaggagaggtcacattgtctctcaatgcccccacaaagaaaaccatgactatgaggtgtcaagacatttatagtggtcaagaggagactacttcttcctattcttctagtggaagtgaagatgaagtaaagggtgaaaagtctagtgaggaagtctaaccccatggtgaaggtcacctcctaatggttagaaggttcctcggaggccaatcttgtgatctatctcaatcccanatagagaacatctctcatacaagatgcaaaattntagatgaaactnngtctctcattgtggatagaggatcttgcttgcaatgttgancacaagaatagttacanagtgaacccactatcatccacacncaaaccctataaactt

SEQ ID NO: 65961 - DNA, 434 bp, Glycine max
  unsure (1)..(434): unsure at all n locations
taatggtttattgcattatgtgaatatctatttaaaaaatctttaaaaaatgttntacaactttttttttttcagtaaactcctttataattgataaaatattgagttccgttccggttattggattttctaagataaatcacaaatttgcaacagaaaatgatgcacacatatgacataccaacatgcctagtctgagttccgttccggtattatttgcctctcagctcccaatcactattgcagacaagttggacagctagacaacaaactcatgatctagcaaaaagaaagtcttgcaagcggtgagctacgttagccactgagcatacattgnngaactgggcaattggctttgcaatcaaatacgttatttggtttaattataacaaattaccctctttcactgactatataagtaaagcaattctgta

SEQ ID NO: 65962 - DNA, 402 bp, Glycine max
  unsure (1)..(402): unsure at all n locations
taccatcatangaagccatggataagagcttgtaggtangagtttatgagtggagggagaaggagctcaanaatttgtgtctcacatgaagtctgaactttgaagtgtaattctcaaatgatcaaagttgaaaaaatgcacacacaaggtttctatttatagcctaagtgtcacacaaaattggaggaaaatttgaatttctattcaaatttcacttgaatttgaatttgaattggtggagcagaatttggagccaaaatttcactaattataattagtaaattttagctatggttcagcccactaatccaagatcaagtccatctccactaagtgtccttaggtgtcatgagacacgtaaaacatgaaggacatacaagtgtgactatatgaagtgacaat

SEQ ID NO: 65963 - DNA, 477 bp, Glycine max
  unsure (1)..(477): unsure at all n locations
ctgcagctgcggcacccctcctttttccctattttaggggatttatggcagagtnaattggctcaacccttctggaatttaggattctcttgaaattagagagaaaaatggtttccgtgaagaaaatcaataccgaggcccttccgtaatgcttctgagacattttcgtgagcgatttcgtaaagattcttcaccgttcttcatcgntcttcgttcgttcttcgtcgttcttcggtcttcaaccggtaagttcctgaaataaaacctttcaattcattctatgtgcccatagtggtccccacctgtttcacgtgcttttattttcatttcgttggttntccgtacccctttttgacgtgctntaaccatttattaagtcgttntctcacctaatcaaagtataaaatgaatttccaccaatcatttgagttgtaatnatcgttaatctctggtaaaataaaatccaatcgatctttc

SEQ ID NO: 65964 - DNA, 478 bp, Glycine max
  unsure (1)..(478): unsure at all n locations
tttctcanacttgagttatggaagaccaatttctaagttnttcctatctagatgattgagatgatgcatgtctatgtgtgcaatcctacgatgccacaaccaagaatcatctatcttatttaccaaacaacttatctcatgaaatgatgcatgtccaatgtttaacacatagatattacctattttctttccaatatggataacctcaccgaacattaataagacaacaattcttgttgaattcaattctgaagcctttgtcacatagttggctgatgctcaagaggttatgctctagtccatccaaatatagaacattctttatttatgttttgtattgatttccaatattttcttctcccattatctttcctttattgttgtctccaaaagtgatgtatcctacttctttngacatanagttagtgagtttggacttgtcacccatcatgtgcctagagcagccactatccaagta

SEQ ID NO: 65965 - DNA, 469 bp, Glycine max
  unsure (1)..(469): unsure at all n locations
gcaccctatgcatgccacattcttctatangaatcactctttctctctatctatatcgngagccatttctgtagaagtgttggtatattaaatacactccgtgatctagtcagtggtccaagggatagagttctgaagttaatttgattgtcttttcttcgctttttactaggtttggctcttgttgtttggttgtgttctttgaagatgttagttntttactttntagtaatttagttatccactagctagtatgctgccacaacacaatagaacccatgacagaaaacaatagaaagatgtataaggcgtccagctacgagcacgttgttgctaattaaaattatggtcaagtttactgagtgatngtgtcagctaattgctgttttggttatctttttatgacaagctaagttacgtgagtgaatatatttcatacaataagacagtctanggttaaatatactcc

SEQ ID NO: 65966 - DNA, 372 bp, Glycine max
  unsure (1)..(372): unsure at all n locations
atgttctgtgtgangctcaattttatgattntnttttctcttatcggcaaatgttagattgttagtttttgatagaaatgtcagtggaggattcgaacctgcaacctctcccccctcctcccttaagccccccttcccaaccgaccaaccttatatctccgctcaatattatgatgttcttttcttgtgcaggctttacttttatcaaaatcatggtttcaaagttcaaagcattacaatcttgtttttcacttcttctttntttacccattccttaattttaacagcattcgttgggagtcttgtttgcattttatgtggctttaaagctagccctatctgtttatcaattgaaagctaactatagaatga

SEQ ID NO: 65967 - DNA, 443 bp, Glycine max
  unsure (1)..(443): unsure at all n locations
agcttcaagaataacggnctcatttttatatntatttcctcgaaggaattctataaataggccttctatttttaatggcgtgggttaccattattggaaaacccgcatgcaaatttttatagaggcaaaagatcttaatatctaggaagcaataaaaattgggccctacattcccattatggtagcaggaaatacaaccatagaaaaacctanggaagaatggagtgaggaagaaaagagattagttcaatacaatttacaagccaaaaatataattgcatctgctttacgaatggatgagtacgttagggtattcaaatggaacagtgcanaagatatgtgggataccctacaagtaacacatgaatgtacaatagatgtaaaaagatccaggataaatacattgactcgtgaatatgaaaatattagaatgaataccaatg

SEQ ID NO: 65968 - DNA, 378 bp, Glycine max
  unsure (1)..(378): unsure at all n locations
tctggtgggacagtcatgactgctnttttatctgacattcaccatagattctgccttcttctattttcagattgngaatgcctctaacagcaccttggtcaatgattttcttcatgcctcttaagtgcagatgtccaaatctttgatgccatattttgacttcatcttctttggaggatagacatgtggaggagtaactggattcttgaggtgtccatangtaacagttgtcctttgatctgctgcccttcattagaacttcactcttctcatttgtcaccaagcattctgactttgtgaagtttacattgaatccttcatcacacaactgactgatgcttgatcaagttgcagtcagtccctttaccagcagtactt

SEQ ID NO: 65969 - DNA, 285 bp, Glycine max
agctgaactattaagcaaaagtgtgatctcaagatttatcaagttcacaaaagcatatgtgcttaacgcacctaagagatgccgaatctaaactcaagcgaaatgagactgaccaatcacagaatcaattgactgtaaagagatggaagatgtgtaaggagatgaacatgagaagttgtgaaatccatgaatatttgacgcgcgagaaggaaaaacggaaacaaatctcgtgtaacatgagatgcacaatcatgaggaaaaaatgaaatagatgatcagatccgt

SEQ ID NO: 65970 - DNA, 377 bp, Glycine max
  unsure (1)..(377): unsure at all n locations
gcttaagaactgcattcatctggatcaatatatttctggtattcattgttcttattattanggtgcttaacatatatcttaaatcttgctagctagtagaaattctttctgctctcgtacaaagatgtcagactaaacctatttntgctgaagttattatggctgcatcacttacatgcacaccggtctttattagggggtatattttaatttcagcttctataaaaagtcatacacctattggacattcacagaaacctctaaattattatgtttgtgtgcagcggaattatgatgtgtctctcccacataacaaaatccctgaagcattgtgcgagcangccaaacaattggcaaagacctgcttgcctactggt

SEQ ID NO: 65971 - DNA, 376 bp, Glycine max
agcttcagacaacttgttgtagtctattacaaatttgatatcaaatgtactaagatgtatcaatcatgataacaaccaatatgaattccactcaaaggagttgggcatgtaaaagccaaaacttcttcaagctttatccttaagttgttcaccatgttgctcccctatctctaacaacccatgcatgtagtccaagttcaaaggattatagtatgttgatagtgggcgcataaaccatatgataagggactcaagtctgttaaactctttagacaagggctgtagaaccaaagtcaagaatggaaatggagaaattgtcaagctaaaagaagagcacttgttctattcacatttagccaaagcctaaattattcat

SEQ ID NO: 65972 - DNA, 364 bp, Glycine max
  unsure (1)..(364): unsure at all n locations
actaagcttagttnggagggtgaagaattctacctgtcaactntgtcatttctcttgatactttgagtatgaattctttttcctgatcaccactgtcaaaatcatttcaaggcattagaaaataatacaaaagcaatatgaatatgcaaaagtaaaaagtcaaagaaaggatccatagaagtacataagaggtttagaaccatactatctattcaacaaaaaagaagaaatggaactactatagtatcttgaagttaactacctggtaggcccaacagttcctctcatgactacttcgacaatggttnttcgttctgccggactttggcagcccattatgagtattcttgctgtttgatcatca

SEQ ID NO: 65973 - DNA, 440 bp, Glycine max
  unsure (1)..(440): unsure at all n locations
agcttcgttatttcagaccagaaccaattccattgttgagtaagtctagtgtgatcagaggttctaaaaggaaacccatcaatgccccagacagatataatttgctttgtatcaatgttctccacccttccctcaggacttatcaatgggataatagacctttccttgtagttaaacacctctctaataagcttgatgcctgtttcaaaattaaaatgtttcaccacataccatccaaacttagtacgttgtaatttggtttctaatgttttcctacgttcctcgttccattcatccacaatggggatccacaaaatctngaaatcgtccttcctgtaaccctcaacctctctttggttctccttcaatntctcgtatattgattatagaagtaaagtctcctcttcaatgctatcaaagccagaaataaatacaacaca

SEQ ID NO: 65974 - DNA, 411 bp, Glycine max
  unsure (1)..(411): unsure at all n locations
agcttctggtgggacatcttgactngctttccaatctgacattcaccacagattctgccttcttctattttcagatngggaatgcctctaacangcacctggtcaatgattntcttcatgcctcttaagtgcagatgtccaaatctttgatgccatatnttgacttcatcttctttggaggatagacatgtggaggagtaactggtttcttgaggtgtncatanagtaacagtgtcctttgatctgctgcccttcattagaacttcactcttctcatttgtaccaagcattctgacttttgtgaagttacattgaatccttcatcacacaactgactgatgctgatcaagtttgcagtcagtcccttcaccagcagtacttttgtcagactangaagnntcatcatggact

SEQ ID NO: 65975 - DNA, 417 bp, Glycine max
  unsure (1)..(417): unsure at all n locations
naagcttgagcttcaaatactcccnctntgaatatgcactcattcctcacaagccaaatgttccacgcaatcgctacccacaccacaatccatctttcgttgtctttggtggtntgaagaagtgatcatgttggctcatacgtgcttccggtgagttcggtaagaccgattttatgcccaactaccaatagcaagctttccatacttccaccactcccttgcatgtgaaaaaaacaacgattcatggtctcttcacacctattacaaaaaacacacttgcaatcctcttcatctacaatgacatttcttgcccgaagaatatctntagttggtaaattgttaagtagcaacctctatactcaaagaatagcnttttggtgtaccttttaaattcataacttttccatcaacggtata

SEQ ID NO: 65976 - DNA, 457 bp, Glycine max
  unsure (1)..(457): unsure at all n locations
atttttcttttatacgtaggagtgctcttagtgtcatgatngcgtgagaagaatactgtcatgagggacaaaataataacgatattttccattgattctaaatacgagagttgataaaaacaagtgtcacttggtaattctacgcaatcgaaacaaaatactacaacgtttgtaaacctaaactaggtggctcattgaatacttatgagattatccaattaaagcagcttcactataagaaaaatgtcctttctagtgagacaaaatctatcactaanagttaatagtttgtagataaaaatatatntgacatttatctacgtacattttttatgtcaatttaagagatttattcagactagaaaaccgatgtaacataaacgcggtggataattatgaataatgtgcatccgtaacatcggtttcttaaaatcaatgtaacgaagtgacgtaatat

SEQ ID NO: 65977 - DNA, 453 bp, Glycine max
  unsure (1)..(453): unsure at all n locations
ttaaaaatgtgttatcaattacaatatgctggtaattgattaccagtgtatctgaacgttgaaattcaagttcatttgtgaagagtcacatcctttcataaaatgctttgtgtaatcgattacatggttttggtaatcgattaccagtgacaagttntgaacaaaaagtcaagagatgtaactctttcaatggttttcaggaatnttcttaagattataactcttccaatggttttcttgaccagacatgaagagtctataaaagcaagaccttgacttgcatttcaataactnttacaactttttagaacaactttngagaaatcttgaagcctttgctattcatctttcttcttcttcctttggcaaaagctttctaagttntctggtttccaaaccttgttctttcacagaanacanaaatgtgctatatcttttcattcttttctccct

SEQ ID NO: 65978 - DNA, 343 bp, Glycine max
  unsure (1)..(343): unsure at all n locations
agctctgcacgtatcagtcaagtgtatggaccatatctcagccaatgttgctatcgataatggntccagtttaaacgtgatgcctaagagcactgtggagaaattaccattcaatgcttcccacctaaagccaagttcaatggtggttcgcgccttcgatggcacccgccgagaggttaggggagagatcgacctcccagtacagataggccctcacacctgtcaagttaccttccaaataatggatattaacccccccctacagctgtctgttggggcatccgtggatccactcagtgggatgtgttccctctacactccaccanaagttgaaattcgtagt

SEQ ID NO: 65979 - DNA, 441 bp, Glycine max
  unsure (1)..(441): unsure at all n locations
gatgaatctatggccacctcatgtgtctaatctaagaatattagcatcatttcttgcactgaattgttgagagttggaagccatcttctcaatcaaattcctagcctcagcaggggtcatatcaccaagggctccaccactggcagcatcaatcatactcctctccatgttgctaagtccctcatagaaatattgaagaangagttgctcagaaatctggtggtgaggacagcttgcacacaatttcttgaattttttcccgtactcatacaagctttctccactaagttgcctgatgcctgaaatgtcttttctgatggtagtggtcctagatgtagggaagaatttctccaagaacaccctcttaaggtcatcccagctgaaaatggacctgngagcaaggtagtacagccaatctttngccactcccttcagagaatg

SEQ ID NO: 65980 - DNA, 307 bp, Glycine max
gagcgtctcgaactattatttgactcattcgtatatccgagccacaagctattgtcggttgaatttgctcaaagcttccgtctgaaattcgagcgtctcgatttattacgggactctatcgatcatccgagataaaagttattgttctatgaattcgctcagaggtactgttttcaatttcgtgcatctcgatatactgcaggactcactcaaactctccagcaaaaaggtattgtcatttgaattttgtgagagcttctatattcaatctcgagcgtcttgaatattaaatgacctctccgacatc

SEQ ID NO: 65981 - DNA, 389 bp, Glycine max
ttcgagtgacaatctcttttgactcggatatttattgagtctttctataatccgaaacgctcgaaatcgcggacagaagctctaatcacattcaaatgacaataactgttgactcacatattcgatagagtcattctataattcgagacgctcaccattgaatgcaccagctcttagcacattcatatgacgataactttttactcagatgtccgattgagtcccgtaatatatcttgacactcaagatggaaatcatattctctgagcacactcaagcgaatgtttcttttgactcccatgtccgattgagtcatttaataattactgacgctcggaattgagtatgtaagctgtcacaaaatccatatgacaataacattatactcg

SEQ ID NO: 65982 - DNA, 479 bp, Glycine max
  unsure (1)..(479): unsure at all n locations
catgcaagctngtatactgaatngagtatggcacacacattttatgtctgatatgcctttcagaggcttgaaaagtgcgagaaaacgggctgtgttttctgcattttctggaaaacacaatgaactcactaaacgagcatgcggtgctaagcaagttcatcaatactcattgtgtataagcattatctgaagaactcgctaagtgcgcttaccgcgctaagcgagttcatcctttgaggatgaacactcatcctcttgctgaactacctatggctaagcgaggctgaaccgctaagcccaggtaactcaaccaaattttgtgttgtaagcctttgcgctaagccaagttacttgagctaatcgtatttcatcactancaactttangctaagcgagcttagcttcagctaagccaacanntgtatgttcttaaggcgcgctgagtgagctntatcccgctaagcatctatggtaaattt

SEQ ID NO: 65983 - DNA, 458 bp, Glycine max
  unsure (1)..(458): unsure at all n locations
gcttccttgagaagctntcttgaganacttccttgagaagcttccttgagaagctagagcttatctacacacacccctctaataactaagctcacctcctcgagaagcttccttgagaaactttcttgagaagcttccttgagaaaattcctagagaagctagagcttagctacacacacctctctgataactaagcttgcctcctttagatgagaagctagagcttagctacacacccnctataatatctaagctcacctccatgccaaaatacatcaaaatataaaaaaagtccctactacaaagactagtcaaaatgccctaaaatacaaggctaanaccctatattactagaatggccaaaatacaagcccaaaagaagaaaaaacctattctaatatntacaaagaagagtggacccaatcttggcccatggactcaataatttgatgatata

SEQ ID NO: 65984 - DNA, 387 bp, Glycine max
  unsure (1)..(387): unsure at all n locations
catagcctcttttttttntattgcacatttattccgtcatgaatatatatgctatatatcatgatgtcaaatgaatcagcaatataattaggttaccaaatgagtaaaggactttgttgtcgtgtagctcaaggtttgtttattggtatttatctgttttaaaggctaggggataccgttgaaggagttaatttaatgttggaatattttcttacaaaagaagttaattagtcctaaacatggccgtaagttacgggagagaaagatactaactgttgggatcagtggggagaatatatgcaaactgcaaagtaaaacaggacagtcattatgctaaagtccccanagtanatgtgatacgtagagaagagacaatggagcaccata

SEQ ID NO: 65985 - DNA, 465 bp, Glycine max
  unsure (1)..(465): unsure at all n locations
nttcgattcattctatgtacccacgggggtccacattgngntttgtgtatatttattaccggtgcatttactttttataccccctcttgacgtgcttaagccattntacttaagtcatttctcgcttaacttaaaaataaaataaatttccaccgaacgtttgaatggtattatccgttaacttcgggtaaaatgaattccgaccgttcggtcgtgccgtaaccacgttggaaataaaaaaaaagaggtaaaaaataatataataatcaaaaagacatcttttagtagaataaagcggaaaatcaatcggacgttntctctttgggatttctcattcttaatcgaatggattaataactaaagtggaaactaaggctaanatcaattcgcctagtcaagctcgtccataaaaatagggctttgaagttggcatctcattttttttcactacgtaaaatggatcat

SEQ ID NO: 65986 - DNA, 282 bp, Glycine max
  unsure (1)..(282): unsure at all n locations
agcttcagtgacacagagagggtgacnttgaggatttactctatgaacataaccacaaattccgggagggtcacactaagtggaagacaaacagaacactaataatggggctctgatggaatgtattgaatacaaacctttgagcggagggaaaagctttcgaaggacaatgatgaactacagctttcgaaggaggatggagaaagggtttgccaaactgagtgcgcggtggggggggggagacacccctccnnctgtcttgttgcgcatccgtggattcac

SEQ ID NO: 65987 - DNA, 380 bp, Glycine max
  unsure (1)..(380): unsure at all n locations
agctnggtctaacaccctcattagagcctcacggtgtgcttctgagttcaatagcagagacaaaatggatatcttagagggagtttgcagcagctggtctactactttatactcactcttctggatcagtttcagaatttcgtcatgatcagaattcttgctagtcccattggattggcctacttccttccttgtaccggcgccgttcactgtcacctgtttaactgccggatcattcactttctttgcaaacaatgtggggataacacgtccattcctcagaaccttactgtcactagcaatgttgtccacagaaatcgcangagttagagagggcaaaggcacctcctgcccaccttccaacatcgtggcactatact

SEQ ID NO: 65988 - DNA, 463 bp, Glycine max
  unsure (1)..(463): unsure at all n locations
tgcaatagacatattctcaaagataaaatgagaatttggttgtatcaacttctctataaatatntatataggagaatatgataacaagcataaaattttattctataagctaaatttaacttgtgcattagtaaaatgagcttttggagaagttaaaattagcatattaatattctgtaacttgcaggggatggatggattatttgcattgggtgctaggttccatcttgtatataggttggggcaccctttgtgcccttcatatataatacaaataatttgctgagtaaaaaaacaaaattgtttggcttcttcaaaaagttgattgtaacttatgggagaaaatgatttcaatttttcttttcattctcttctcttataagtggttatggacaaacttaacgaaacatggtcttaaccaatgatattttgcttgatggggaaacaatattacatgtacatg

SEQ ID NO: 65989 - DNA, 398 bp, Glycine max
  unsure (1)..(398): unsure at all n locations
agccttgtcgttcacattcttctatatgaataacttattcattaatagatatcgngagccatttctgtagaagtgttggtatattaaataaactccgtgatctagtcagtggtccaagggatagagttctgaagttaatttgattgtcttttcttcgttttttactaagtttggcttttgttgtttggttgtgttctttgaagatgttagttctttactttntagtaatttagttatccactagctagtatgctgccacaacacaatagaacccatgacaganaacaatagaaagatgtataaggcgtccagctacgagcacgttgntgctaattaaaattatggtcaagtttactgagtgattgtgtcagctaattgctggtttggttatcttttta

SEQ ID NO: 65990 - DNA, 443 bp, Glycine max
  unsure (1)..(443): unsure at all n locations
tatctgtatgcctnttagactgggtagtctcattctggatgtatcgtgtgatgctcatatttatgattatttcttttcttatcggcaaatgttagattgatagtttttgatagaaatgtcagtggaggattcgaacctgcaacctctcccccctcctcccttaagcccgccttcccaaccgaccaaccttatatctacgctcaattttatgatgttcttttctggtgcaggctttacttttatcaaaatcatggtttcaaagttcaaagcattacaatcttgtttttcacttcttctttattacccattccttaattttaacagcattcgttgggagtcttgcttgcatcttatgtggctttaaagctagccctatctgtttatcacatgaatctactatagatgacatatccgcaatcaaaaatatatagtgtgcatcttat

SEQ ID NO: 65991 - DNA, 319 bp, Glycine max
agcttgcatgaggaaaggcatgctatagtcacgtttttgtgcaacaaggggaagccagggctgtaccagacatctcgccatgactagtgaggttagcgagcactcgactaagctcaaacttccatgctatatggagcaagaggagcgatccagtcgagtgaagacgaaatagcaaacgatggctgaactatatggagcccgttgaaaatgtgcacactgctacgatatgacgacatcatgagatacttgagtgcgcactaggtcagagagatcacatgttgtagctagcgtatctacagtggatgcacccactatagcg

SEQ ID NO: 65992 - DNA, 444 bp, Glycine max
  unsure (1)..(444): unsure at all n locations
agncttgatggtgtcgagaagaaatcacatgtttgtcatcatcgaanagggggagaatgtgaatgtatgtatacatgattntgatgatgccaaagaagaatctaacaaggctgcttcaaatgataagcatttgcatcaagaataattcaagattgcttcaacaaacaaaaccttgtttcaagattcactanagaccaagtcttgccttanaacanagtgctttcaagacatgcaaggctctggtaatcgattaccaggaagtgtaattgattactagaagacagggttgagaaatagctggtgaaaaatgttnntgaatttgaatttcaacatgtaatcgattaccatatgtctgtaatcaattacaaacaacggaactttgtannatcanattcaaaagtcataatccttcaaaatataactgtgtaantcgatacacaaaca

SEQ ID NO: 65993 - DNA, 394 bp, Glycine max
  unsure (1)..(394): unsure at all n locations
tatagctgacttattatccacaaaangcttctctccatcactctccttgagttttaattcttgtaataatgtgtccaaccagacagcttggcaagcactcattgcagctgcaacatactcagcttcacatgttgataaagccactatggattgcttcttagaactccacgatattggtgttgcaccatacatgaatatgtaacctgtagtactctttcggtcatctctgtctcctccccagtccgcatcagtatatcccactaattcctctaagttgctggtgtctttatttggaaatagaattccagtattaatggtcccttctatgaaccttagaatcctcttagcagctaggagatgaggaattctgggtcttttcgtatatctacttacc

SEQ ID NO: 65994 - DNA, 353 bp, Glycine max
  unsure (1)..(353): unsure at all n locations
agcttctatataaggttcgntcctaatttctctacatagcatcacctctcattgagctagtgaagaagaatgtggcatctacctgtggtgaanaacaagagcaagcctttgctttgctcanagaaaagcttactaaagcacctggtctagctcttctgactttctanactttgagctnaatgtatgctttggagtgggagtggagcttgtttgtgcaggtgggcccctattgctattttatgaaaacttctgggtgaccttactacccccctatgatagagcttatccttataaagcactagagctggacatacctgttcaggaattgcattctatgacatcatcactagtaa

SEQ ID NO: 65995 - DNA, 422 bp, Glycine max
  unsure (1)..(422): unsure at all n locations
ntagatgtgtcagaaatacctgggaagatttctttatccacctttgaatcaaattntgcaaaatgatatttgatcttaaggacaaaacactcatatttggaaagataaaagtatgaaatattaggtcttcttcctatccatagttcataacgagtctttttttatcaatggtctaatcaattatgttttgaacataggaagtcatttcactattttttcccanaagtgtttacgaagagagttttcacaaagcatggtcctagccattttgcagagttctatttttcctttcaactaccatattctattaaggtgttctcaatgaagagaagttgtgaaagataccattcctttaaaaaaaaatgaattgaactccatattctaaaactcagttccatcaccacttttgatggaagagatgc

SEQ ID NO: 65996 - DNA, 425 bp, Glycine max
  unsure (1)..(425): unsure at all n locations
agctnttgcttgctggaatcatttatcctatctccgatagccaatgggtgagtcccgtccaggtagtcccgaagaagaccggcctcacagtgatcagaaatgagaaggaggagttgattcctactcgggtgcagaacagttggagagtctgcattgactataggaggctgaaccaggttaccaaaaaggaccattttcccctgccattcattgaccagatgcttgaacgcctggcaggtaaatcccactactgtttccttgatggtttttctggttatatgcaaattactattgctcctgaggatcanganaagaccacattcacctgccccttggcacttttgcttataggaggatgcctttcngcctgtgcaatgcccctggtacctttcagcggtgcatgaataatatnttcagtgattttt

SEQ ID NO: 65997 - DNA, 366 bp, Glycine max
ggccacccagctcgcccaggcgagcaaggttgcttactcaagattcaacagtcttctggacgaatcatctggagggcccaagtgggcctggttgctatttgcacccacatttttactaaatacacccgcttgctctttcttggagactcttttttcggaaagtacggaaacttacggatttcgcaacgatacttgttttctttgcgtaatgttacagaaccttgcggagtacaaaatcatcccctttcttgacttatggaatgttacacaacctcactaattatgtaacgatgcttacttttgatttccggtgagtcacggaatcttacggattgagcatcaataccttcttttgacttccgggat

SEQ ID NO: 65998 - DNA, 481 bp, Glycine max
  unsure (1)..(481): unsure at all n locations
tgtggggagtcatagtggattttctagtggacagcctgtctcttttgtcagtgaaagatgacaggagcactacttgtagccgaaacttgcccacctagatcatatacttttcttgcataaacatatattatgattaaaatttacagtcaacttgatcagctagagagtcatattaagatataggataccttcaatttctactaattcacacatgccaccaactgtatgatgcttctccaagatagtgatattattataaccaagcctatccagtgcataagcaattgataagccacttgaaccagcacccactattccaattctggtgtttactggcatggaaggatgcagcttggagaattgatcctctattgatctttttggatccatctctgatttcaaatcctgaaacctatggaagtattntagatcagttgacaagntagtctaatgattgcattcaattcaattgagtcagtga

SEQ ID NO: 65999 - DNA, 389 bp, Glycine max
  unsure (1)..(389): unsure at all n locations
tcaactgaggctgcaagcttgagccattanacgacaaaactattactcgttgtctgtattagncccgtaatatactcgagacgctcagaattgaatgatgaacctctgagcaaatgcatacgacaataattttttcttggatgtattggttagacccgtgatatatcgacacgcttgaaattgaatgctgaatctctgaacaaatgcaaacgatgataacctcttactccgatgtccgattgagtgctgtaatatatcgagacgctctaaattgaatgctgaacctctgagcagatgcagacgacgctcatatttctctcgtatgtctctatgagtccagcgctagaactagacgctcaaaattgaatgttgatgctatgagcaaattg

SEQ ID NO: 66000 - DNA, 473 bp, Glycine max
  unsure (1)..(473): unsure at all n locations
tgagcacattcaaacgaagataactntatattcggatgtgcgattgagttcttgaatatatcgagaggctccaaattgaaaacggaagctcatatcaaattcaaaggacaataactttttactcggatgtccaatagagtcccgtaatatatcgaaacactccagattgaaaatggaagctcgtatcaaattcaaacgacaataactttntactcagatctccaatagagtcccgtaatatatcacgacgctccaaattgaaagtggaagctcgtatcaaattcacacgacatttacttttaacttggatgtccgattgagtcccgtaatatatcgcgacgctccaaattgaaagcagaagctctaagcaaattcaaacaacaataactgtttattcggatgtccgattaagtcccgtaatatatcgagacgctccaaattgaaaacggaagctcgtatcaaaagcgaaccac

SEQ ID NO: 66001 - DNA, 422 bp, Glycine max
  unsure (1)..(422): unsure at all n locations
gagagaggggggagcacgaaattgaaggaatanaagaggtagagaagtggaactttgaagtatgtctcacaagactctcacaagaagtgttacacatgcttctatttatagactaggtagcttccttgagaagctttcttgagaaaacttccttgagaagcttctttgagaaaacttccttgagaagctagagcttagctacacacacccctctcataactaagctcaactccttgagaagcttccttaagaagattcctaaagaagcttgagcttagctacacatacctctctaatagctaagctcacctccttgagatgagaagctagagcttagctacacacccnctataatagctaagctcacccncatgacaaanaacatganaatacaaaaaaagtccttactacaaagactactc

SEQ ID NO: 66002 - DNA, 431 bp, Glycine max
  unsure (1)..(431): unsure at all n locations
gcgtagcccaccattntccatagtagaatactggttatgtgtctactatcattgtcatcgtttatttttttttgtcattgaggtgccactttgagctgccaggttctccacctttgggcaaagaagcatgtctgaggtttcctggggcgtttgaactacattgccagattcatatcacagctcaccattatctgtgagccgttgtttaagctcttacgcaagaaccaatccatccactataacgaggactgtcaagaggcgttcggaaggatcaaacagtgcctcatgaaccctcccgtgcttatgctgccggtgcctgaaagacctctcatcttgtataagaaaatacatgttgagccataccacctagctgatatccaaaatggacccggtcaagtacatctttgagaagcctactctcacagggtgga

SEQ ID NO: 66003 - DNA, 472 bp, Glycine max
  unsure (1)..(472): unsure at all n locations
cgctctcnctctntctaatcttcacaagtcaggttcgtataagctctatattccatgttaactattacacttgtacagaaaaaatgaattgaattgcttattcacttctcaattgattacaataggaaccttgcttatatagcaggttaatagtaactacttgttggttataagaaaacaaagttaaccaaccttatagctaccagtttacagctttttaaaactttgaattattcctaacactggagggttgagtgcgacacactcctctccaaagtatatttgcggccaagcgcacttgccggctgcgatggcaactctgcaatcaacgatctcgtagtcgcaaccttctgtttctacaccgcaccttctgttcgagcgatcccttctcagtgtatcgatgaagaatatgtcatcattccatctccagatctggtcgcagatgcactgtttgtgttcctttgtcactctt

SEQ ID NO: 66004 - DNA, 478 bp, Glycine max
  unsure (1)..(478): unsure at all n locations
tgcgagctntttggagtagaaacatgggaccaactcattttattttctaaaggaagncgtatctagtcaacgtctgaaagacatacacagttctaacgatttctaattatgtgggccattaaagtctatcatatgctgacaatagccgagaagcccatgaatctcttcgggggcggtgtaagtgtctgccatcgccttggccttggctaacaagcggngaagttcttgactcccgttcaaggtaagagcaaaccaatccatccatatggttgcctcttggtgtaaagagacgatcacccttcctctagcctctttttccgcatatacttgagcatactcgtgcgcgattctatgctcgtgggccgtggctagacctaactcgtccgcataaacgctgagacaagcttcttttggaccttgaacaagcaattaactcctctttcagaaccatgctatgtgctcgtgactggtccctttc

SEQ ID NO: 66005 - DNA, 168 bp, Glycine max
gggcaaaaaactttttaatccccaccttttccaggattagagaaaagccttcgtgggatctaaccggaaacaaatacccgcattgtgggataagaaaggataatatatataagaactctttattgaattgtaatctatgagaaaatttttgacagtgtaaggactggg

SEQ ID NO: 66006 - DNA, 473 bp, Glycine max
  unsure (1)..(473): unsure at all n locations
aacagtgcatttatattatccaatggttgatacttgattttggaattcagtgtttgtgattggtttgaattgatcaattgtatgatgtgagtgaattaaaatgcgtagatcatatgccttgaatgagcatgcaattatcacacgtcatgaatcatatacacatcacacaatattaatatatacatggcacacacatagactntacctatgaactatgcaatacacacaactactcaattgtttttaaaattattttaactggtcatgcttcaaagtgattcaactcgttgggttccgatagtggatcccatcacaataatcatcgcgcaaaaacttgtcatccttaaagggtcttatagttgtgtaattacataggtcatagctcacaatgcaatacattcaatatcttaatacacatgtatctcacaatntatcacatattcaatttatcacttactcacattttcaatcac

SEQ ID NO: 66007 - DNA, 266 bp, Glycine max
  unsure (1)..(266): unsure at all n locations
atgctgtttttttttctagaaaattcctcatcagtgtcacacatttgagcatggntgtgctactgacaatagcatgacccatgttgttccaaagccaaaaatcagaatcaatgtcacacatttgagcacgattatgttgtcctcaaccggccatgctaatttagcgtggcccatgctacctctgcattggtggttaattatcattagtataaatagaaaggggagaggcattnttaggtaaaattntacttatttntgaacatcaa

SEQ ID NO: 66008 - DNA, 460 bp, Glycine max
catgataataataataataataacgaagaagattaaagttattctagatatactcgccaaaactatgtcatcccactagtatttgaaaagactcgtgacaaacacatagtttgcaacaagataccatttttgaaatttttccttgtacttgcttgaagcaacattgtatcattttgtgttgacctggtctacttcattacaaaattgtaacctcatcttccattaaccattcagtcgataagggatatcttgtacttttattgaacctagtcctttgtcttcaattgcgaatctcatttactacaaggcattgatgtgtgatgcattttaacaaagggatataataaaatagtatcctcctaagaatatcattgtatcacaaaacctgaacaccatagccttcatataccaatcacaattaataatattattataaaactacgaagccgatagattcgta

SEQ ID NO: 66009 - DNA, 476 bp, Glycine max
  unsure (1)..(476): unsure at all n locations
ttaagtcagcgcggctgcagctagctgagtagaagaatgaagtagctttgctcaaccctggccagcttagcggactaaatcaatctcagatccagggttaagcgctaagcgcttaagactcgtagcttagcgcatgaagagagatgtgcttagcgaaatgttttttttttagaaaatctttttctaagttatttttcagtctttttccttgaaattgaaacccttatgttaatcattcaaagattggctgatatactcctatgtacagactatatagcaagttccaaatgatttaattgcataaaaattaaagataacaganattaaaattgggttgcctcccaggaagcgcttctttaacgtcattagcttgacgtttttacctcactgggtgatcttatgtnttggttcctactttcagaacctcttgagcagacattgtgttctggagcagggttatcttcaacaaacaaatc

SEQ ID NO: 66010 - DNA, 418 bp, Glycine max
atacataagccctgaattctagtcaaacaactcctcaaacatatgctaatacttatgcatcttttacattcaaaaccggaaacttggattcctaagcatgagtcatcctttcggcactttagtctagcttccacaaactacccacacactcacaattcgcacaatttattttgcacgctaagttccacaaaatcatgcgcaaatgccattgaggcatttcaccgaatacttggcgggcgcatgtttaagcatggaaatcaagggaatgggggcaatgtggcatgccccattatctcagaatgcaccctaggcctaaggccataccctacaaccccacaattcaacaaaaacaagcaataattcaaggatgaatccctcacgttctgagcaaatacatgcaacttagagcaccaaaata

SEQ ID NO: 66011 - DNA, 434 bp, Glycine max
  unsure (1)..(434): unsure at all n locations
agctntatcctatgaaagctcaactatttgttattttgtttaataataccgancctaactaagcattagaccaaggtgaagattgttgtacatggtctaatattagtcggctagctagggggggttagctaatagccttaagtagaaaaatatttttctattattctggttataacacatggcatgctatcacatgtatataagtctatgttctttttctgataatccacgcatagcctcatttttgatcccaatttttggattctcaacaaattcatcttcctccatcctaacaccacccactaaccactcttcactatttcatatatatcccctcttttatttagcaaatggtactttattttggtggatgctncacccctctaactacacactctcttacctgaaacgacacacgaccaacctttaaacgt

SEQ ID NO: 66012 - DNA, 454 bp, Glycine max
tcatctcgtatatgagtatgtgccagatgggaattatcgtatatcttctctcaggttagtgtggcataatataatagtatgcatattattaaaagtgcataaatttccctacttatctatttggcttcaatatataaagaatacctcaattgggatgtgtctgcataaataactctagtttaagtttgtggatcttgttgctattgaagaaggaaaggtgtctccacttagcatggagaaattttccttttcatttagaaacagattgcattcaagttctgaacaataatcatacataaatttgataattggaaactagtatgccacaatgacttgatatttttataagcaaaaaaaattattagaatagtgagtacaaagggtatcaaacccattaacatgagctacaacattcacatagcacaagagctaccgaaatataatgtcatacacc

SEQ ID NO: 66013 - DNA, 461 bp, Glycine max
  unsure (1)..(461): unsure at all n locations
agcttgccataacagaatgacaactgatgaatatttatgctgagtcagaatgctggctcagcttatactctatctagatggagtgtgttaacacatatgtgcaatcctcaatatgttgtacgaaaaccccttagaagtgcacacattacattagataggatgaaatgcctaatcttattccatgtgaactgctgtgccataaaaacctccttaatcaaccaagcatataacacgnatattacgagatagtgctttttgtgtgatattcaaatctgcaacaatagttactgatagctgagttgggaataacgacaaggataaaataataaaataaagaactcttttaatttgaaacttgcaaaatctagttgatgaaacatctttcttgacaggctgatgatgcaactgtggtgtatcctatgagattcaacgattcaatagacattgctcttgcaacttca

SEQ ID NO: 66014 - DNA, 460 bp, Glycine max
  unsure (1)..(460): unsure at all n locations
cgcttctacaatatccnnctnttatgagcaagacacacattctctttctttntccttgtcgatcactcacttaattctccatatttctccccctttatttttgagtttaagcttcacttgaaattaagttatttaattatgtgaattcttgatttaatccctattttctctccccctttgacatcaacaaaaagccaaagtgcgtaagacatacatgattnntaaaaatcatccgcatagcatccattgtaaatcaatcataaaagattctaaactaatcatgaagcaagacatggataagccaaattaaaaatgtaaaccacatagtcatataacataattcataaatgttcagacatactaagcanataataaaagaaatactaagtattcaaatgttataaaatataaatcatttagataagtcactagcatctaacagtcctaattctcttctaat

SEQ ID NO: 66015 - DNA, 464 bp, Glycine max
  unsure (1)..(464): unsure at all n locations
agcttctagtatatatagacctttatcttcaagtgttnngtgnctttaaatgaatataattttcctttgagattntntctaatgtttatggtcgctggagcatttaatacttgcattaaatgaacatacttcttcatgttgaaacaccactctcgttggctttcatattgagactatagcataaaatcacttcctttgtgctagagcaggtttgttaccacataacccgtcttttgatatcatctggcaacttctagatcttgagattcgtttattcttcatagaatttgacatacaataggtgaatgtcttgtgagacaatttatgcaaaacaactcttagacaaagagtatattagatgaagtctttgatgatattntcaatggtgtatcagatcatgacttatgtagcaccctgaaatttccttctcaatttatntttctacacgtgtaaaatggcactat

SEQ ID NO: 66016 - DNA, 465 bp, Glycine max
  unsure (1)..(465): unsure at all n locations
gtaatgcggcgtatctggaatgtgaagattagccatttattgatgacgctacaatgtcgtgagaggctacttcgaagcacaccactcatttcaagagggggtattttataatacatctactgtgtaaaatgcttgaacaaatggattctgctgagactgtgtaccctaatacattagctttcgcttttattggtaatccaacaacagctcatatattctataaattgacaaacgtcattttctacacgttgacaattacttgattcaatacaaatttgcttcattatcttcatagtatcaagtaccagagatgaatgatttntatatgtaataaaacgcttaaaggattatatacggtcatgtaaaactattcttaagaacatgagaagtatttatttacacagaaactcgcactgatctacccncaagttacaaaatacatgtcttcatactagatgctactac

SEQ ID NO: 66017 - DNA, 452 bp, Glycine max
  unsure (1)..(452): unsure at all n locations
ttaatcaccgcggctgcagcttgttctttntataaatgagaagttctgatcttatctcgttatctaaaaaaaaccttggggtggatccaagcgcttcgatcattcattagcatattcatgttttggtggcatactcaccgttgtttatttctttaggaatttcatcataactaagaaagcacaaaggcacccctataacactcgatccagaaaaatggataatgaagagggcatgcaggaacagatgaaggccgatctatcggccttaaaagatcaaatggcttccatctcggaggtcatgttaaaactccagaaaactatagaggataaagccacgacaaccgtctccagtaaagttagggaagcgaagccggtgctgcagcccgccttaaatccgggccgagacagaaacacggcagtgttgggtcgaaggtatagtccgcaagcttacc

SEQ ID NO: 66018 - DNA, 437 bp, Glycine max
  unsure (1)..(437): unsure at all n locations
tagtagagtatcgataatgtgtctcccatcacgatcatcgtctccctttccatcattgngggtaccacctgngccgccagatccctccaccttttgggcgtgttctttgaaagatccgtccccctttttgcaaatgttctgtagttgcatcctatccggaaccatatcaaaattgtactgatactgcctaacaaaggcaaccattaggtccttccaagaatggactcgggaagattccaagttagtgtaccaggtaacagctaccccagtaagactttcttggaaggaatgtatcagcaattcctcatcttttgcgtattcccccatcttctgacaatacatctttagatggttcttgagacaagtagtccccttgtacttgcaaagtccagcacctgaacttgggaatgaccatgtttgggattatgaacaactct

SEQ ID NO: 66019 - DNA, 477 bp, Glycine max
  unsure (1)..(477): unsure at all n locations
agctttcaactgaatntataatgtttcaatcaatttcaatttggtgtaatcgattacaatatatnggtaatcgattacaagtgtgtttgaacgttgaaattcaaattcaattgtgaagagtcacatcctttcacaaaaatgctttgtgtaatcgattacaatgatttggtaatcgattaccagtgataagttttgaatagaagtcaaaagatgtaactcttccaacggttttcaagtttttctaaaggtcataactcttctaatggttttcttgaccagacatgaagagtctataaaagcaagaccttgatttgcattttatattcaattcattcaagaacaatcattacaatcctttacaacctttgaatctctntgagcatcttcttgaatttcttcttcttcttcctttgcaaaagttttcttaagttttctggttttccaaaccttgaaaacaaaacttgtgctattcatctt

SEQ ID NO: 66020 - DNA, 481 bp, Glycine max
  unsure (1)..(481): unsure at all n locations
tagtggaagaatatagagagnaagttgaactctatgctggtccgttatagagtgcagaaccaacgtgcttgagagggatttttttgaatggactaaaggaaataattagggcagagttaaagctccatccaacagaaagtttgtctgatttaatggattgtgcatagcgagtggatgagaaaaaccagttgtccatcaaggagggaaatccaacaagtgcgatgagcaggccaatgaggacgtacaacagcaaccgcacagtgacgggaaccgggagtgaagcaataatccaatgtgtccgagattggaagttctaccggagagggaggtgtagtgaaggtttccaataccttcagaggaagaaactntagaaagttaacagatgcggagttccaagagaggtcttggaagggattgtgttttcggtgtgatgaanagtttggtccaggccatgtgtatgccaacaaacaagtacaagttt

SEQ ID NO: 66021 - DNA, 474 bp, Glycine max
  unsure (1)..(474): unsure at all n locations
gagctnttagatccattcacagttaatattccagattgaattgtgactaatctcaatgcattcatgtcagcatgcatgagagaaaatcatgaatataaaaagaaagtcaacctaagcatcggaacaacatgttttgacttatttcgaagagtaaaggagcaaatgtttactatttaattataacttgtgtactgcgttcaaatgatcataaagcaaaagatatatagtgcatgcgaagttctccttacaaagagtatttatgcacatctatgaagatgcataattaaatataattagcaacatcttggaatttgcttggatttaaaataacattgaagacagtcgatgaaaaatgaagtgaaccttgttcatgttgtactttaaattntatantaattttttctagggaactcaattttgaacatgaattgtgtaaacacaattatatggaattatcgatcattatcattgata

SEQ ID NO: 66022 - DNA, 440 bp, Glycine max
  unsure (1)..(440): unsure at all n locations
agcataatgctcatgtatgcnntgtattaaatttaattgaagcttcacataatacttggtggattgattctggatgtacaactcatgtttctaatatgatgcagggattccttacaacccgaaccataaacccaaatgagaaatttgtctttatgagaaatagagtgaaagttctagtggaagctgttgggacttatcgcttaatccttgacactgaatttcatttagacttatttgatactttctatgtacctaatatttctagaaatttagtatctttgtctaaacttgatgttgctggatgctcttttaggtttgggaatggttgtttcagtttgtataaacatacctgtatgattggatctggtacactttatgatggtttatataacataaatcttgatcattatatgttgaactcttatacccttcatcataat

SEQ ID NO: 66023 - DNA, 469 bp, Glycine max
  unsure (1)..(469): unsure at all n locations
tctcgatatgttatgcgtctgaatcggacatgcgagtganaatttatgactattntaatttcccgagagcttccgttgttcaatttctagcatctcgatacgctatgtgcctgaatcggacatgcgagtgaaaacttatgaccatttgaatttctcgagagcttccgttgttaaatttctagcgtctcgatacgctatgcgcctacatcgaacatgcgagtgaaaagttaataccattttaatttctcgagagattccgttagtcaatttcgagcgtctcgatatgttatgcgcctgaatcggacatgcgcataaaaagttatgactattttaatttctcgggagcatctgttgttcaatttctagcgtctcgatactctatgcgcctgaatcggacatgcgagtgaaaagttatgaccatttgagattctcgagagctctacgtggtcaatttctagcgtctcgatat

SEQ ID NO: 66024 - DNA, 341 bp, Glycine max
  unsure (1)..(341): unsure at all n locations
agcttgtgttcacatatacagatcaagagatcattatagaatactcaatacatctcgaaaataatatcttagccttagaatgaacaagattntgtgttgtcattagtgaataagagaagagaaggannaaagtatatagtaactcacaacttcttaatcgtttggttatgaagatcttttcttgaaagtgagttgtgtcttttgaatagaagaagatcacattctcaatctagcatagtttttgtggaaagattggtcagactgtatctctcctactngggtnttcttgggtatgattnntacatgatctttgttttatgcctgaatcatttaccgcatgc

SEQ ID NO: 66025 - DNA, 362 bp, Glycine max
  unsure (1)..(362): unsure at all n locations
tgcaatgctaaagatgagcaaatcttgatacaaacaaaaattgtacaagaagcagtagcaggtaatattcaattattcatgcaatgctaaagatgtttctcatttcccttcagttcatgaatttggacaataatagtcatcaattatttattattcttagagtaatttaaccagttttttttttattaaagtttcctttgaagaatgggagaaagcaaaagctgaaatactatatatgaagcaacatctgaatgaatctatacaacaacatttagtttataaagaaagagtggcccgcccaatttgatggtgttgtcaaggaatgtatgcaacagttacattntgntagagaagaacaaaaa

SEQ ID NO: 66026 - DNA, 440 bp, Glycine max
  unsure (1)..(440): unsure at all n locations
tgtccgtgaggtacgtaggtcagcttcgtgtatgctaagtttgagtgggtgttcatgttttattgatgataataataataataataataataatacgtcttcagttgcagtattgctgattgaggtatgaggaaagcttcaagtttcgtgccattntgttagatctcactgctattgtcactgtttgggttcgaggtaagcttggtctctttttcatttgtagtttagttaggaaacatgttgaagtttgtctctgttaagaggattataaaattcccacctatatatgatgtacatattataaaatgcagtgtctactaaaaaatgcttaacagctacacaatcccagtcactggcctaacaatagaaatttgaggggatgtttgtttgattaatctagcataaatgaanaaaattgaaagaaaagtataatacattta

SEQ ID NO: 66027 - DNA, 425 bp, Glycine max
  unsure (1)..(425): unsure at all n locations
gctgtaagccagatcttgcctacttcatgtgcttgacaatcaacaaatgtgttgttgcccatgactactcatatcatctacagacaatatgtaatttatcacttaatcctttctctctgatgccatctacccccaggcatgataaagactccagaagattggtcagagatgcangagaaggccctnaggttctgatgagccttaagatagattntgagctcatgggctaaatatgagcccacttatctttgtacatattatatttgagtttcattatttntgggccttgtatttagggctccatagtgtagggagtgtatcctagtaatgtagaatttttcagcccttgtattttttggcacttagactagttnttgtattaagggtagttntgtaacttcacatngcataagtgcactattgat

SEQ ID NO: 66028 - DNA, 466 bp, Glycine max
cgtgtgttagagaggaattgttcgccttgtggaccaaagatcttttagggttcttcttgtctaatgaatgtactaggaatgctgatatagtttgcattggtgtttctttttatcataacagttattgttttggtgtttgtgtacttttttccacagtaaaaggatttatattaatattaagtgaaggttatgcttgtcacaagaagtgccagacccaacctcataaatgcatcatggagttccttccaaaacactactactcctttacatatatattgattctacaacattataaggaacagatggtatcaacaatattccatagtaccctaccatgcttcctagtgttcccttggtccttatttctcacctctcccagttgcaaactcgataggcctacctatattacgccaaacaattttgtgaagtaatacacgatacataaagtgagcaatcaaccctttta

SEQ ID NO: 66029 - DNA, 462 bp, Glycine max
  unsure (1)..(462): unsure at all n locations
agctntactgtgantgngctgactngtttgtgatattgaaagnntatgaaagaacatgtgacatggtctgtggccccggaatctaatatccaggggcccgaaaaagaagtgaaggaagatggcatacctgagcttatcagggtgttaacggtacatgatgagatcgaggcaatttgtttgggttgagtggataccgtgtgtcctgtagatggctcctggattaaggcaaggagtgccttgtactgctcgggggagagtcgaaccaactcatgggactcgtggtgctgagcttgatcatcgttacccttgttttcaactgtcatagcactgttcacggtggttcttccaccgtaaggcttgtatcccggcggatacccgtgcttttgatagcaaacatcgactgtgtgtcctatcttgccgcagngggtgcatgtttttctttcttcattattccttgttctc

SEQ ID NO: 66030 - DNA, 394 bp, Glycine max
  unsure (1)..(394): unsure at all n locations
ctgatgccatcttannaatttggggttggacctaacatgctatctcatcccanaagctagctagctcatgaagtgagagttaccctcacttatattcactattgtaccatatcactagttaattaatgtaggatctccagcaatttcctttttaactaaagttccacatctactactcactagtaatgcatgcatctaacattgtaccattctccccagatctcaacaagagagaatgcagaaaggggaaaaaaaaaataccttgccacgcatcttgtgacacgagatgggaatgaagaagaggtgtgcctcatcgggattttcggtgcagaagcgactctctctgatgttctggaagaaatagccttcgctggcgtactttccggtgagcttc

SEQ ID NO: 66031 - DNA, 446 bp, Glycine max
  unsure (1)..(446): unsure at all n locations
ttaagtcaccgcggctgcagcttgagccgatcctacaggactattggttgnaagtcgatacgnaggangagccgcagaatgctgtactatttgcgagaaaattggaggagactatggattttatcattgtggatctctgctatgcatgggcttgctacgtggaagttcatcgagtacaagaggaaaaaatgctatcatatcatgggttactgtcttctcgcggacataagtgctgctgagactcttaagttcaacatggcacttatactcttgcccgtctgcagaaataccataacttggctcatgtccaccaagttggcttacattgcacctttcgatgataacatcaactttgataaggtacgcccgcacacaacaccgccagacaatacacgttgaatagtgtataataggtagtgaacgctgtctagtattataattatcat

SEQ ID NO: 66032 - DNA, 449 bp, Glycine max
  unsure (1)..(449): unsure at all n locations
aactctccctacgtgtagaatgaaattataagccaagatgggcgtcatttttaagatggccaacgctaaacgcctatgccaattcgcctaaaaaattatgcttcgatttgtctctggtttatggaagaggataccctaaataattatatactatcatctaaggatataccagtgagatgtttcgatcttgttatttaaattatattccggctgtaagttgaggtaatattagagatcacatttttaaaatgtagtgaactgtttaacgctggatacataatgccatgcatcacaaaacaaaattttccttagttaaaatctttaattagactgagcaaagtaagcggacagatatttcctgttacatatatgttcggctncgcctaattgcgaaagattatctacttattatattatttaaaaatatattaggtacatagagctttttc

SEQ ID NO: 66033 - DNA, 456 bp, Glycine max
  unsure (1)..(456): unsure at all n locations
tcattgcctaacaagccaacttacaacagcaagccccatgagactcagcataaggatgcacaggtcaaagttgagtatgtgaaaagattgtatgaccaagtgaaggtgcaaattgcaaagaagaatgaaagttatactaagcaagccaacaagaaaaggaaggaagtggtacttgaacctggtgatgatcctggacatttgagggcaaatattntccaagaaggagggaatgatgagaatcctgaaattggccaaatacaggctaaaggcccaagtggagaagggcgaaggcccaagtggagaaggataaagcccncgagtggagaaggatgaangcccaagtggagaaggatgaangcccanaggcagagacactatcaagactattaattngtgctgaagcccagataatttgaggcccaagnntaatatgttttagtataattttatttatgg

SEQ ID NO: 66034 - DNA, 429 bp, Glycine max
  unsure (1)..(429): unsure at all n locations
gcaagcttcttagtctcacctgatgtattcatggctacttcatgcactcctctattgacaatagcatcacttttggcactaaattgctgggagttggaagccatcttctcaattaaatttctggcttcagcaggggtcatgtctccaagggctccaccactggcagcatctatcatacttctttccatgttgntgagtccttcataaaaatattggaggagaagctgctctgaaatgtgggggtgagggcaactagcacatgattttttaaatctctcccagtattcatataggctctctccactgagttgtctaatgcctgaaatatcttttctgatggtcgtggtcctggaagcagggaaattnttttctaagaatactctcttgaggtcatcccaggtcgtgatggaccttagagcaagggaatat

SEQ ID NO: 66035 - DNA, 414 bp, Glycine max
  unsure (1)..(414): unsure at all n locations
ctcagcttctcaggaagttntctcaagaaagcttctcaaggattctacctattctataaatagaagcatgtgtaacacttgttgtaactttgatgaatgagagtcttgtgagacacaactcanagttcaacttctctccctttttcttccttcaatttcgtgctcccccctctctctttctctccctctttcttttcctccattgaagcatcctttccaagcttcttatccaaggctcatcttggtggtgaagctccttcttccatggcttattccttaacggatggcgcctcctctcacctcttttcctttgtcttccgctacatctccatatggtggaaaatcaccattaaaggaccccattgaagctcanagatccagcctccatagaagccccacaagcaagcttctatc

SEQ ID NO: 66036 - DNA, 491 bp, Glycine max
  unsure (1)..(491): unsure at all n locations
ttaagtcacctgcggcatgcaagcttctatagtttactggttacaggagatngtcatgcgtctccttgattatatattngcagtttcatcacatactgtagcaagtgcctcaccagatattctggctaacctcgagaggttgttcgaccagagatcatctgagccatggagtcaccgtcggctgcctactccaactgctactttccctgccatcatcaacagtgaagaggatgatagtgagatagagtttcaaaggacttgcgacaaacccatganattggagaaagtccacagactagattcttttctacacccaaaggatgatcctaataaagaaatctccaaagtagtccgagctataaggaagaagttgcagcagattgagatgcttgaagataagcagtctaatggacatcttcttgatgaccagcagatngcanagcttcaatctaagtcagctcttgagagctcacttgcagaagctaggtgtc

SEQ ID NO: 66037 - DNA, 399 bp, Glycine max
  unsure (1)..(399): unsure at all n locations
ttaatatttttcatctgttcttttataccaataactgtcatttctatctgcttgcagtgatacctcagttggtgtagcacatgatgctttcaacaccttcttcagcgagacgggatccggcaagcatgtgccaagggctntatttgttgatctggaacctagtgttattgatgaagtaagaactggtccttacagacaactctttcaccctgagcaattaatttctggcaaggaagatgctgctaataacttcgcaaggggacactacactggtaattcaatttctgacgtagatcaaaattggcgattctcttccttgttttagctggaaaatgccatttactgtgtatntatgatgcagttggaagagacaatgttgaactatgccttgatcgtatc

SEQ ID NO: 66038 - DNA, 421 bp, Glycine max
taaaaactcacggcgaagaattgaatatctatactaaggatataaaacatgcaggtcataattagaagctaacaacaaggctggtaaatgaaacctccaatctcaagccgaaatgcatcacctgtcactatcgtactgatagcagtagaagtggataagacctacagcataatttaagcacacaacatgcgccggttgacttcacctgagaaactgttccggaccatgtgtcaacagacatcaatcgtgaagtgtccttcagatgactaacgtctgtcctgtctattgcttctttgcgcacaggtacctcactgatcttggcattccttatgaatgcttcatgagacaaactagtcctagttacaagacgcatcacaacgagggaagagggtgagaatagttcagctactcatcatctact

SEQ ID NO: 66039 - DNA, 379 bp, Glycine max
  unsure (1)..(379): unsure at all n locations
ttttcgaaagcctgagnccagccagcgaggtacataggtcagatcacgtcacactttatgacgacaggtcgcatgtccctgtacgccgggctgacctattcccacccttataactaactaactaagaaagccaataactcgctaacacaagcagctattagctaaaccactggatgaatgtacaaatgacagagaataaatctaattctaatcgaacaataaattaattatgattgcacactaatgcgtcgattattactctctccctgccctagtctcaaatgatgtcaagcactttatgacgaagtgcactatatctgggggaggttcagaactcatcataacatgtatgcatctacttatcctcttcatagtcaag

SEQ ID NO: 66040 - DNA, 466 bp, Glycine max
  unsure (1)..(466): unsure at all n locations
agcttatatgcattacagatggtccaatactggatgattgtggacaccttattcgnttcttgactcttcaagaggcagacatgttaattcgtaagcggcttgagcaaagtgaaacaactgctaactatgtgaaagctgttgctgaagaaagtttcaaatctcttaaaaattttaatggggcagtccattcttcacagaatggaaaaccattttcagaatgtcataattcaacctttcataatggtgttggttttgacaatgggaatggcctatctgaggagcagggttttgctattggaggtcaagagtcactatgtcgaacaaatggttacctgtcagaactggctgctgcagcctttgtttgtagagtgagttgatggttcaacttttcctttgtgtcattggttatttaagtctatattgccttagcatcttgagtcactgaaagtttgaaattnttatttct

SEQ ID NO: 66041 - DNA, 482 bp, Glycine max
  unsure (1)..(482): unsure at all n locations
cttgaacaatatactnggccttcatttaactgtctatgggcttgttatccacgctcaacaaagtactttcgacacctactgtacgttgatttcaccaatgctgttatgggaatgttgcgacaatcctttaaaaccttattgatacattctgagaggttcgttgtcatgtggccatattgacgtccttctctatcgtaagccatcgtccatttttcctttgagatgcgatcaatccatgttgctatggctggactcagttcacgaaatttttctaaattttgataaaaaatgtgcttgcaaggagtgtaggctgcataaaaatagttatgaataacaattttaagtataaatgaaagtaaaataaacgtgaccatcaaatatgaaatcttacccaatttcttcaacatttctttntgtttggcattattgaattntcgattgaagttgcttgctatgtgtcgcacgcatagacatgatacccg

SEQ ID NO: 66042 - DNA, 429 bp, Glycine max
  unsure (1)..(429): unsure at all n locations
tttgattaaggcgttggagttccatctcgtgttcctacaatntaccaaataaagtagcaagagacatggaagagagatctttactttcagaaatagcagttactgaaattctgatatcaatgaggacagatgtcgtaccggatgtcacgacatcacgcttcagaacatggagattatatttgactgtatgaacagattaaacaagtaaataacacaagagaattgttaacccagttcggtgcaacgtcacctacatctgggggctaccaagccagggaggaaatccactaaaatagtgttagttcgaagatctaacagccactgtttacaaccttctcacctaaccactacccgtgcaacctctacctaagagccactcttagatatgagaacccctctcactccctctcaatcactctcccgtgttta

SEQ ID NO: 66043 - DNA, 223 bp, Glycine max
  unsure (1)..(223): unsure at all n locations
gagcttcaattctaaaatgatgtttagaataaatatccgtcttagagtggtaccattctaagacgattgtcattgaagatcatcaaanaatgtgttcttggacataagttaataattttctaatgattatttcaaaagcggtcttagaatgcatacaatctaagatgattgttcaaatgacagtcttagaatgtatatttaacataaatattccaagatggtt

SEQ ID NO: 66044 - DNA, 356 bp, Glycine max
  unsure (1)..(356): unsure at all n locations
gacctatgatactcaagcttactnttcttggataaccttgatgactcatatgcattcattctcatttcctccagctccaagagttgtaactttctttnttcccctgatatagcctcatcaaaattcagaaatttcaaagcccggtatgccttaagctctatttccaccggtaagtggcaggcttttccataaacaatttggaacagagacaggcctataggggtcttgaagacagttctgtaggcccatagtgcatcatccagtttgcttgaccagtccttccaagtggaagccacagttttctccaatattttcttcaattccctggtggaaacttcagcttggccattnttttt

SEQ ID NO: 66045 - DNA, 401 bp, Glycine max
  unsure (1)..(401): unsure at all n locations
ctatggttatttctttagccttgtattttggcttntanagcttatttactttgattactttnttagttatggttgtcatggatgttttccagttatgtttgctttatgtttggtgatnttagcctttgtttggctcttgtcttggtttgaatagacttgcttgaattatgttatggattatgttgtggtttgtcattntctggatatatntaagctcctgacttagttcttttccttggatgttttttgcttttgaatgttgccaaagggggagagaacttataagggtagaatttattatggagttaggcataaattccaatcttaagggggagtaagggttgagagcacgcattatncaatngatattttttatcttgatttcatattatggtcatcat

SEQ ID NO: 66046 - DNA, 357 bp, Glycine max
  unsure (1)..(357): unsure at all n locations
tactttcngcacctactatatgtngacttgaccaacgctgntattggaatgctgtgacaatctttcaacaccttattcacacattctgataggttggttgtcatgtgaccatatcttcatctagatgtatcgtaagccatgctccattnttcctttgaaatgcgatcaatccatcttgctatggctggactcagttgacgaaattnttctaagttttgatcaaacacatgcttgcaaggagtgtaccgctgcatcaaattgttatcatcaaaagttatacgtagacatcaaactcaaattaaattaatgtataaaataaaccttacccaatttcttgaacatctctttntgtttcgc

SEQ ID NO: 66047 - DNA, 476 bp, Glycine max
tggcaaggtaaggtgctcaataataatatataagttgaaatatgaaggttcgtatacttggacaaggaggattgacacgaggacaatggtttgatgctagatatacacaactggtttggtcaaaagcacttggtggtccattagctgatagtgataaataaatagtacataacatgcttaaatttatataaaaaaaacaaaaagaagaagaagaaaatgtacattctgttataagaggatattaatgtaaatatttctttggctagaaatgaagaaggcatgtgcttgaatgcatgtgtgacaccttaacttagatgatgatagctatgatgcaattccaatttgagacggtaagctttaggtcattaagtactatagtagtttgcacaatgtaattgaagctagtcatttacttgcgaaacatgcacttaatttctcgcggattgacatattacaagcaaatatttaaaatcttt

SEQ ID NO: 66048 - DNA, 486 bp, Glycine max
  unsure (1)..(486): unsure at all n locations
ggaccttaagtcacctgcggcatgcaagcttgtggcacgctgagcaagcatatctctgattgattctcttctaggggttcccagcacgctaagcgagctgcatgcctcgcttagcggatgtcactcgctaagcgcacatgccttgcttagcgagacaccagctgtttcaaccttctcttcttttagcctgaaattgaagtgatttcaacattaattcacaaaatgggagtattcactatataaaatcaaactaaacatgagaatatgtacaattcctacaaaaagaaccataaattaggggaaagaggttaattttatgtaactattcaatacaaaagttagtcgtaaataacgattaacaagtacaaggtaggttcatggttcggtgtatggattccttgagcctcaatccatacacaatgcanaggataagtgtgatcaatgtcaacattacattgaaacatgggtaaacaaatcacaatgaga

SEQ ID NO: 66049 - DNA, 478 bp, Glycine max
  unsure (1)..(478): unsure at all n locations
atactcagctgggttaataatatgttgctgacgttagccacagtttcgacatatcatttcacgtgtttcattgacatgtatttagttaatcgacacttacaaatgtatgttgtatcatcaaccgacaacgactcccaaaattaatattaatgcctaccacgaatcaatgcattacatctttgcaatctactatgttgaattgccaaaaaaggatcaggaatattactatctcttactaattctattacaactttgacatattcatcacaaaaaacacactcaatagtgttcctacacaataatacatacaattgactatcagacattgggtattatacataatgtaacttcaaaaaaagtgaaccatactctccatcagtaacatgagcaaatatcctttgaatagtggtgccattctttntacagnagtttccactaacgatattgctgaaatccacccaggcatgtcttcattaca

SEQ ID NO: 66050 - DNA, 419 bp, Glycine max
  unsure (1)..(419): unsure at all n locations
atatatatatatatatatatatatatatatatatatagnagtctttcaagctttggtagatgttggttgatcttttactttcatatgcaaaagtggtgtaccccaacataattgttttagaagtgatataataactaaaaccagaaccatgtctatagacataataaataataatacagaaacaaaaaatttcactatccaattatctacaaatggtgatattttttgcaacaaaatttttgtaaataaagcagacgttgtagatttgcaaccagccaaagaananattattttaggacttgactttatcgcacatgataacaaattagtcactattacaaaagattacttattaatttctacaaactcataaatgtcacccataatagacgaactcacatcagagttacgaataaagc

SEQ ID NO: 66051 - DNA, 403 bp, Glycine max
  unsure (1)..(403): unsure at all n locations
atctttagntagagatctatcttctctttaatatatatagacacaataatgtgtcaaaggaagaagcttacttgttcaagggtggcgaagctgatttttaagaatatatagatggccataatacattagaatttcccaatttagcttgtatttgggtttatattgttaagataacaaatgtatctaagctattaatttatcgtatttggaatntgtaatgatcgataaaagcaaagttacgttggttgtctttgggtttacatatcaagttaaatatatcgtacgttgacatctatgtataacacaagatagccagaaacaatcgaaataatttaacaatgagtacttatcagaataagttaaaaatatgtttaaagtcataatacataagaatttttgtttg

SEQ ID NO: 66052 - DNA, 352 bp, Glycine max
  unsure (1)..(352): unsure at all n locations
catatcctcctatatcacactcttgattcttaaaaccaatagcgactgatgcaatcctaccacgtagacaacgtcttatggttctcacgacccttacggtatatatccgtcccatctgctaagcctgattcctcttatattcgtacatatcagaccaatgtttcattatttttgcgccttgcatttagggctccatacaataggtaaggtaccctagaaatgtatgatttttcagcttttctattctagggcacatacactagttnttgtattaagggtagttgtgtaatttcacatgcattaagtgaatatttgatgtgtgtggttggaaataaattntattgaattggga

SEQ ID NO: 66053 - DNA, 469 bp, Glycine max
  unsure (1)..(469): unsure at all n locations
agcttggtggagttcanagagaatcgtataatgttcgggctangatataagcctacacgcaccgacatgaagagaaacaccctagaaaggagaggcagaagtgtgggccagcagcaaggattgcaagtaaaaggaactcccttatgtcacatcaacaagagttttgtcagcgcaggctggatgtgtgaggggtgggttgccatgatccatgatgaagtccctcaagagcaatcaaactgggtgcggccatgccctcctatgttcgagttgggaaattggcaaattatcaaacaacccaaaatttttgtggcaaacataatgtaatttgttaatccaaaccctatagctgagcctcggcttgtcttttgctattagatatatataaaatataatctgtcttcattttttcttgcactttcatccctatttgggcttgtcttttgctattagatatatataaaatataatc

SEQ ID NO: 66054 - DNA, 411 bp, Glycine max
gtacagcagaatttagtaatgacccactaacctacattttaaataacttaatgccattaacctagggaattaaaacaaactaaatgactgagtgtaactgaaattgttggcaaccaaaagtcacccccaacagccaacaagtcaaccaccatttggtctcccaaaaggctgatgcctatgttgccaattgggcccttattacaacttgaactaaagcccttttagttgattaacccaaaacatatttttagtcagccaactttacaaggattgggccattatttagacaaactaaacactctaaaattgaaataaagtggtgtcatttagtcctccatttgggccatgatacaactcacaaccttggacttttctccttgaaacttgggcttgtattcaaatagtatggac

SEQ ID NO: 66055 - DNA, 439 bp, Glycine max
  unsure (1)..(439): unsure at all n locations
gctngagatgaggaagtgttgaagggtgaaactttcttcttttatttgtgaccacagagtggtacctggagatatgtcgcgggggtcaagagacttggggacgtcanggtgggtgctattggcccaaacccaacttgaaccaatcccacccaacccgggcatagtcggtcagtgagaaccctgtgatgtacctaaacaggcgagcttctgatagtcaacagataanaggaacaaagaaccacaaagcaggaggcttgtggtggctggccagcttgtgaatttgtgtgatatgtggattatggcctctggtaatcgattaccaagggtgggtaatcgattacaaggcttaaaaatgaagacaggaggctaagatggtctctggtaatcgattaccacggngtgtaatcgattaccaggcttgaaaacgaggtcaggaagc

SEQ ID NO: 66056 - DNA, 491 bp, Glycine max
  unsure (1)..(491): unsure at all n locations
tactcaagctgtacagattatctaacatagtattcaatcgcacttctagtgtgatattgttatttcaaactgaacatagcaaaataaaaacttgataagaaatgggccacaaaaattagctcatatcaaggcattaaagatatgcaataaaatcataaaaaaacaataaaagacacatgacaaatatcccaattcccgtgggtattggcccgaacccatcctgacttttacgaggagtgcctgttttggtcgagtataggtatgggtattacccgaaaattttaagcgtggatggggatggggatggggatgaggacgtgtatcaaattatacttatagccatacctgccaccattacattttttttataatttttntgtcacaacatatatttacagaatatatcttgaatattttattgctataaatttttaaataattaaataacaaaagtaaaagtataattgaattcttatttttatccttaaatc

SEQ ID NO: 66057 - DNA, 486 bp, Glycine max
  unsure (1)..(486): unsure at all n locations
ttaagtcacctgcggcatgcaagctnntgcggattggtcttcaccagtgaaaggatcgatgtgtgttctaanagaggcaaatttgatcatcctgcttagacgaatgaganaactggggcaaatgaagagggtgagaaagagggagaaacccatgctgtgactgccattcctatacggccaagtttcccaccaaacccaacaatgtcattactctgtcaataacaaacctcctccttacccaccacccagttatccacaaaggccatccctaaatcaaccacaaagcctgtctaccgcacttccaatgacgaagaccacctttagcacaaaccaaaaaaaacaccaacaaaaaggaattttgcagcaaaaagcctgtagggttcaccccaaattccgttgtcatatgctaaacttgatcccatatccactcaataattcaatggtagccataaccccaaccaaggttcctcaacctccttttttctg

SEQ ID NO: 66058 - DNA, 434 bp, Glycine max
  unsure (1)..(434): unsure at all n locations
tccatcaagtggtaattagagcacaagagcttcaagtaggtgctttttatacctccattaattnttttgctttaccttatcttccattgttgtttcttcatttttctccatgtatctcctcacatgtcttgtgctaaatgttgttaacatgattctttagagtttccaccaattaaacttgctatagaagcttgatttgattttctatggttcaaatttcttgttcttgttcttgaaccatgaattgtgttgagtttaggttcctttgagttttgtcttgttattttttgtggctgaaacctaaaccataaaattcttacaaaaatattaaagtataagaaaacctcaaaaatctagagtgacttgttcacctattgtagttttgtcatagaagtcatgtctagtcatgaaacttgtcacataagatttcttat

SEQ ID NO: 66059 - DNA, 476 bp, Glycine max
  unsure (1)..(476): unsure at all n locations
gcttctgtgaagcanatagttgatctggaaactgtgatttggtttttgtgttcangctggccttgcactggcttttgatcggctactagctgangcttctggtgctatacttgaagaaggtgctcccttgatacattcgttgctggatggggtgattaagcatctacctgatggagtaccagaaaaggaagaaatcangagaatgagaacagtggcaaatactgtaggtgttgttaatgatcatgattcagtttgggtaagatcaattttggaggaggttggtggtgcaagtgatggatcatggngcttgttaccatacttatttgccacattcatgacatctaatatttggtccaccacagcatttaatgttgacacagagggttttagtaacaatatccattgctttggcaggtcagtatggttataacatggccctatgccagtagaataacttccatgcagtaattctacag

SEQ ID NO: 66060 - DNA, 454 bp, Glycine max
  unsure (1)..(454): unsure at all n locations
gacactatgatactcagctggtcttcttctggatgttggtgttgctgacttcagcccntgtggctntgtttgagaagaatattattatattcttgtggagtgaatcatgtgtatatgtatcaaaataacgaaaatttgggataatacatccttcaagttgcaaaatggagtatctctagtatgatctatattaaaggtacctattttgcagaaatcaggaccaacacacactttctaaatgatgagggcaacaaacaaaatctgcaatacggcgaagaggcaaggcaattcaattcaattcaattcatttggaagatcaactttcacagagtggctacactttcattcacttaccccgccattagtcacattccagcatcaaccatgtggcaatgacgttagattgagcttattttaagaagataagatccaaaaagccacttcattcatttat

SEQ ID NO: 66061 - DNA, 495 bp, Glycine max
  unsure (1)..(495): unsure at all n locations
atcttaagcaccgcggctgcagcttatgcgcatactttttacaacgttattttgacaagacattcttataactaagaanaatgcacccatgtacaatcaaggcaccttcgttacctagattatntatatgtgcttccaaggtgtatttgttacctacatctcatgcacttccttggctaaatttacatacatgcgtactcaaagcatttggggtaccaaaaattgcacatgtgcacattccagtatttctaatacttatgcatatacaaactntgtgatgaatcttggctatctacacaacaaggtgatacatttcatgctttactcaagtttttgctacctaaagccgcatgcaaattcaagtatattttcttttgcttgactaaaatgtattcaaattaaaaggtattcttgtaaggtattttctttacataacatgcaacatatatatattttttgtgagacattntgactaccanannatacatgtacata

SEQ ID NO: 66062 - DNA, 453 bp, Glycine max
  unsure (1)..(453): unsure at all n locations
gattntgagattcttcanatgaaggaaggagaaatattgaatgcatatttttctcgtaatttaaccatagccaacaaaatgaaggctcatggtgaaagtatgactgaaacaatcattactgcaaagattttgagatcaatgatctcaaaatttgattatgtggcatgctcaattgaagaatccaacaacttagacatgatgactattgatgagttgcaaagtagtcttcttgttcatgagcagaggatgagaagtcatggagaagaagagcaggttttgaagatctcccacgaagacaaagcaagtagaagaagaggtagaggtagaggtaatggttcatttagaggaggtcgaggaagaggaagacaattattcaataaagctgttattgaatgtttcanatgtcacaagttaggacactatcaatatgaatgtcctgattgggagaaaaat

SEQ ID NO: 66063 - DNA, 455 bp, Glycine max
  unsure (1)..(455): unsure at all n locations
ttaagtcacctgagcatgcaagctaagctttggggagtgtgaatttatattttataatccgattctattaataatagtggtttataggaacataatctttgatttagaggaaacagaatatcctttatttatctataattaatgtaattaacatgtataaacacaaatccgctatgcactctaacacatttttaactcaattatccctctgtttctcctattttaacagttgcattgataaacttaaaggaatattctcttaaattttctagtaaataaaaatcaatggagggaggcaatgctatgcttactatatgatcaacatgactttcataaatcataccttctgccttagtgaagtgtcaggtaattcaagaacttgtgcacactgctgcctagctntgtttctcttttcaatatcagcattctttttccgaataanaaaccaccgaaca

SEQ ID NO: 66064 - DNA, 444 bp, Glycine max
  unsure (1)..(444): unsure at all n locations
taccttanaactgtcgctntcagacgggacatagatgaagtgtttatagctgcagctgtaggaggagtaggtggtgtacagacttcacggattgcatctgaagccaacagagaatatattttctcgtcttcttttactggtgataaacagtaagtgaccttattttcaattattttttgctatcgatgaataaattgctagtccttaatatatattagccttaaatatggttgggtgcttttcctgtgtattaattnttttttgaaaggcatttctatgtattaattaagtatgatgccttgtggaatttgaatgttgacaacttccttgctcttttcattcctaaatatgtcagagaacttacctncaccagcttagagaanaataaagatacacaacagaagggtcagggagtacatccttcacagaaccttacagatagca

SEQ ID NO: 66065 - DNA, 459 bp, Glycine max
  unsure (1)..(459): unsure at all n locations
tactaagctttagccnatggacttaccttgaattaattcctttgatagttctttgagccttgtttccctttccttgttttgaagctcactacaagccttaagtgaaaaaccatgatatcaccatatccttaaggaattntggagctttggaattgttttgggaataagtgtggggggtttttgtttcattggacaacttgttttgttggctatgcttcatgatgtattttgggccatacttgatgtacattgtatattggttaaatgttggacatgctgaatgaaatgttgtttctcanaggctatagagtaaaaaaaaaaatcgaaaaaaagaaaatgaaaagcaacaaagttgagtgaataagatcttaaatgggacaagaatgatgaaactcttggntctactcttcatgggttaaatttatctttacttctttttattttcttatttttttctta

SEQ ID NO: 66066 - DNA, 490 bp, Glycine max
  unsure (1)..(490): unsure at all n locations
ttaagtcacctgcggcatgcaagcttgtgcattcaatatcctaatgaggttgntctatatgttctcaagactggactaatacattngcttgccaagtttcatggtcttgcaggtgaagatccttataagcatcttaatgagttccatattgtttgttccaccatgaagccccctgatgtccatgaagatcatatctttctaaaggcttttcatcattctctggagggagtggcaaaagattggttgtactaccttgctcccaggtccattttcagctgggatgaccttaanagggtgttcttggagaaattcttccctgcatctcggaccactgccatcagaaaagacattntaggcatcagacaacttagtggagaaaacttgtatgagtactgggaaagattcaagaaattgtgtgcaagctgtcctcaccaccagatntctgagcaactcctttcttcatatttctatganggacttagcaacatgg

SEQ ID NO: 66067 - DNA, 406 bp, Glycine max
gtggtgaagactccatccttcttgttgttattgccctgagagagataggtgcactactactcactcgtgtgagtcgaatcgtcgtgcagatgcatcaacatggcggaaaatcaccgataatggaccctattgaatgtcaaatagacaatctctatagagacctatcatacaggctcctatcttgcggaaatcagaacacacgagctctttgtaagtgatgattggacctacattatatctgctctttagctaatatgccatggaagtcacttcatttcactccatgtgtaagatcacatgtcacagagtggatgcagttaacatgactcactagagcttacaccgattaaacttgctatcgagactagatgagattttatatggctcatattacgtagactagatc

SEQ ID NO: 66068 - DNA, 484 bp, Glycine max
  unsure (1)..(484): unsure at all n locations
taagcaccgcagctgcagctcatgatgaatcagatgagtctgaatttgattgtttcagggntgngatgataacaaagatgatgacaaagagcccaagagaatgatttcaagattgagtcacgaacaattcatgaatcaagagacatntgatgtcaagattcaagaatcaagtttcaagattcaagaatcaagttgcaagtttcaagtttcaagaatcaagaatcaagaataatcgagatcaaganaagactcaatcaagataactactaaaaagtttttcaaaacattgagtagcacatgaagttttcacaaaatgctttaccagagagtttttactctctggtaatcgattaccagtttactgtagtcgattaccagtagcaaagttagctttcaaaagctttcaaactgaatttcaacattccaattaatttcaaaatggtgtaatcgattacaagattctggtaatcgattaccagtgtgt

SEQ ID NO: 66069 - DNA, 455 bp, Glycine max
cttgatggtgttgagaagaaatcacatgtttgtcatcatcttttatgtgtagaatgtgaatgcatgtatacatgattttgatgatgtcaaaagaagaattaaacaaggcttattttgcttcaagattaatacaagattgtttcaacaaacaaagccttgattcaagatttcttcaagatcaagccttgcctcacaatgaaaggtttcaagtcattcaaggcacatgtaatcgattaccaatacatgtaatcgattaccaatggtttgaaagtgtgtaatcgattacacatcatatgtaatcgattaccagagactctgaacattgggaattcaaattttaaatgaagggtcacaactgttcaagaaaaacaactgtgtaatcgattacactaattctgtaatcgattaccagagaggattttcaaggaatatcgccaacagtcacatcttttcat

SEQ ID NO: 66070 - DNA, 283 bp, Glycine max
tgcgaacgtgcgaaggcgaccattctccatgatctaatgctggtgatgtgtcactatcatagacatgagactctcgacattgaggtgccacttgagataccaagatctacatctttggagcgataatatgaaagatacgagccccctctattgcacatgatatgtagagaggacctagacgagacctctatacctggactgtctatggtaggccaccattacgtcatcctagggatggactcgggaatgattcaggtatgagcaccatggacggctaccccag

SEQ ID NO: 66071 - DNA, 408 bp, Glycine max
  unsure (1)..(408): unsure at all n locations
tcaagctccgcagaaattttaccttacaaaaaggaagatatggtaaaagtcctgggaaaatgatacaaagggaactaaactataatagattaaatataaacttgactgtacagaaaggctatttgcggaaagtcaggtatgagtaccagatttgctgtcattctcatcaatgtccataattcccaaatcatcatcatcatcatatccagctntgttgccattaacaacacctccaggaggaacaagtgtaggaacttcaaagcacatgaagtgtgcaaaaaaagaactctgcaatttatgccatgatgaattatatacatttgaaatattaaagagaaatttgtgtagaaaatgaatgaatatcaaacgaccacctcatccaccagaagtgggaaaaaattgaagcat

SEQ ID NO: 66072 - DNA, 246 bp, Glycine max
  unsure (1)..(246): unsure at all n locations
tatcatctcacccttgtctttcaaccacaattccagaanatccacctctgcccaaaattatctcgtgaccataactcccatttcacacactcaaattaagtgattcttgatcctaaatngaatttcaaaacgagatctttcacctcgttttggaatcacctcatttggagccctgtagcttccgttatttccatttctatatttctgtccagccaccacttaacctacgttttaccatcccattca

SEQ ID NO: 66073 - DNA, 332 bp, Glycine max
  unsure (1)..(332): unsure at all n locations
ctcagcttcttataagctngaaccatttattaataaacacatgttgagttttattcagaaaattagagtttatctcttttatcttagtgagagtgattctcctaaattcttgagtgattcaagaacaccctggctgtatcaaaggactttcacaacctttgtgtgttgccctcgctggaaagagtgattctttccttcctttcatcttcacccttgttctttcaaaccacaattccagaaaatccacctctgcccaggattatctcgtggccataactcccattttacgcactccaattaagtgattcttgagcctaaattgactttcaaac

SEQ ID NO: 66074 - DNA, 390 bp, Glycine max
  unsure (1)..(390): unsure at all n locations
tcaacatgcacaaactgcagacactacaaaaatggcgtggagtgaagacaccaagatgaagttaatctgagcgaccaagaggcatgggtatgaaaatctccaattcaactctataaatagagatgacaaggaaatgaattctatacatatgactctcactgctcgatcacagnaactacatctacatccgtaattccttctatatgttttgcatgagcattttagaaggaccaacatgtagctgcaagaagtaatggagagagaagaanagaaaccattccaatgtgaggtggcaagaggaanaacaaaactgaatgaagaagggttggtacgatggntataaancggattttaattcaatctccaacatgtggcttcactggtggatcc

SEQ ID NO: 66075 - DNA, 497 bp, Glycine max
  unsure (1)..(497): unsure at all n locations
agtcacctgcggcatgcaagcttcggatccagcttcgggaacgcctcgaactatattctttatatnaacgctctccgacaattgctttacttacagcagatcgtggcgtagtgtgtaataaaaacggcaaaagggaaaaggcattgcttaatcgggtttgggtcggagaattcgggtcaaagagaatttgattttttgggggggtgtgaaaatggaaaaacagtgggtgtggatggnggttgttgcggcaaaattacgtgccggagtgtgcggtgagggaggaggaagaatgtacgtgtggcacgagcgagtgggagttagttaagttttagcgggagaacggagatagcttcggattaaaggctgccaaaactcanaagtcaagattcggtggngccctacccttctttgaaggattcggaagttaattatggccatgtagtataataaaatatttcaagtntaagagtntaagtttaaaatgtaatgaatcactt

SEQ ID NO: 66076 - DNA, 362 bp, Glycine max
cttctttgatagatgctggagtggactagagctcgcatactacacgccaagcctgcgctgatcgctcagcgtgggtgcctgggtatgggcttaccacatctctacttgattaacaccagtacttgcctatgctctgaacgcgcgctgcgcaatgagcgggctcttatgactgaacctgatgccaacatccttgattttatgctatgctctgcatctttgaggctcaaatgacctgtttcttgtatctacagactattataagaaaaacattaattattaacaactatgcataagtgacagttgaatacccatcatcaaggatatactcgttatgttgttagtacaaaaaacatcatctattt

SEQ ID NO: 66077 - DNA, 489 bp, Glycine max
ctgcggcatgcaagctggccacccagctcgcccaggcgagctaggtttctttctccatatgcaaccgccttctggaggaacatcctggaaggcccaagtgggcctggttgctatttgaacccctatttttactaaatacaccctctgcctttgtttggtgattcttttttcgtaaagttacggaaacttatgaatttcgtaacgatacttgttttctttccgtaatgttgcggaaccatacagattacgtaatcatcccttttttgctttccggaacgttacggaactttacggattgcacactaacacttccttttaatttccggcatgtcacagaacttcacggattgtgctgcagtgccttctttaacttccggcatgttacgaaacttcacgaattgcctaacgatgggtgccaagtacctcgaagtggtcaaacgagggtcgcatcccaacaacggatggtccccagacgaaattagggtatga

SEQ ID NO: 66078 - DNA, 443 bp, Glycine max
  unsure (1)..(443): unsure at all n locations
attttgtaagacattntaganattattnttgccattggtaatcgattacaacatctagtaatcaattaccagagagcaaataccatttttatgaaacctcaaaaagcttttggaaaatatcctttggccaaacctgtgtatcatcaattaagaaactctttctatgattctaggaactaagttcatcaattatcttgtatttctagattcttgacttggatcaaacatgagaagcacttatttttggcatcatcaaaacttcatatcatatatgcttctacagtttctggatccaacaaacaaccatcaaaacataagaaatgcatggatgaatcttccatatttaaacaaaaacatttatatatgtacaatatataaaaaaactagaattaagtaaagtttataagaaaactattaaaatcaaaagataaatgataagaatc

SEQ ID NO: 66079 - DNA, 474 bp, Glycine max
  unsure (1)..(474): unsure at all n locations
caagctttagcagntgaggatagtcattaaatcctttcgatctacaatttctcacttccaaatgtgttatgtaattgtaagatactatggatgatgctaaatttgtcaatttcatacatcgactaatgactaagcgttctatcctctgaagaagtgggtgatgctcaaatcctatctcttctaaagacaacaaactctttaattccaactccttaagttgcataacaacacctattttatcacgtgaaatgaggcttgcaggagcccaaatgcttttcaattgacaactccccaatgttaagcttttcaaattgggaagtctatgaagaaaccaaaagagaatttcagtattcttcaatccatacaagacaagtctttgtagtttgtgcattctgtgaacactgacaatgtatttctgcaaccactctgcttccttcaagctgatttccatagaattccaagtgtatatcacct

SEQ ID NO: 66080 - DNA, 435 bp, Glycine max
  unsure (1)..(435): unsure at all n locations
caacaccaaaacatgagaaaatntcgatacagagtcctgtattggattacagaaccaaccttctgcacttatcatacagtccaagacaccctgaagctaaaacatcaacctcaagcaggacaatacgtgatacacatttcgtgtacaaattaacaatagttaacccatcaaggagctaaacaacttgtgtgcagctgtatgctagacttcttccacttgatccataagataaatcactgaagttatataatggtattgacaccaacaagacaaaattcgtgctgagtcatgctagacttctagatatcaagaatgatatcccaccataaagtgaatagaaaacgtctgaagaatgaacagaggcgagtgaagaagagaatatatagaaaataaggggtgtcgtgtcacctttccccttcacaccttaatatggat

SEQ ID NO: 66081 - DNA, 463 bp, Glycine max
  unsure (1)..(463): unsure at all n locations
cacctgcngcatgcgagcttatagaactatccaaggaaacaggcaatttggtttttgtttgtttanaaacaagctagacaaggcaagtaaagatgtgagaaacaaggcaaggttagtttacataggctactcacaatagaggggtatatattatacagaaacttatgcccttgttgcttgtttggaggctatatgcattgtaccatcatttgttgctcatactanaatgggactatataaattggatttaaaaagtgcactcctcaattgatttatacaaaaggaagtctatgtagaaaacccccctaggtttgggagtaacacttttccacaacatgtttttaaactcagtaaagctctatatgagctaaagcaagctccttgagcttgctatgaacgtcttcgttcattccttttgaataacggctttgaaagacgaaaagtggatacaactctgttctgc

SEQ ID NO: 66082 - DNA, 472 bp, Glycine max
  unsure (1)..(472): unsure at all n locations
cgatcaanacagacatctaatcattccagtccactcaattcagatttgtgttcattcaagtcattcacaaacactcatttcatatcaaacaaaccacagaaacatgattcaatcatttcattgttcaaacaagctttttgtacaggcaatcaacactaaaataactagaatttaaatgactaaaatttaaagcaaataaataactaataactaaattgttcaaaattttcagaaatttaaacaaaaaaaaaaattaaacatcctactcattctatggctaatcttcatttaaatttagcactggagaagctggtacatcctgaagaatgggctgctctggctccatggctggtgctgatggctgggaatcctcangaatgggtgctgaagagatatgaactggagaagtacgctcctgagttgttgcttcctcctgagcaactggatcagtctcaaagataaatggcttatg

SEQ ID NO: 66083 - DNA, 494 bp, Glycine max
  unsure (1)..(494): unsure at all n locations
agcttctcatgtaagaatccagagtacctttctggattttnggttccctcgcggctgattcgagcctttcacttgtctcattctctcaaattgaaccgtcttgactcatctctnntcttcttgagcctataaggggaagtggcttcagctggttgagggccactgaattctagttaagaaaataattcagcaagagtggagatgttgttgtaaatgttggttcaagtcactctcactccaactcaaactagcacaggtttgaaagtgggtgctgcaggttcagacatgacaaanaaagagtgttctgaagttgaagctctntgtctaggtaaggtataggtaggtggaatgtgcctttggtttggtatcaatttcaagactacgcatgcctaagtagttctgtgaggagtgtttgtctccctgagttctgctctttcactctttgaatctctatggtgcaacgacatagcctcanatattatcattctatattt

SEQ ID NO: 66084 - DNA, 452 bp, Glycine max
  unsure (1)..(452): unsure at all n locations
ctagttcaggagggaccttgacctcgaaccaaggcaantttcttctttctcttggctctaacaattggtccgacctatcgtccatggctgcctcccatggttgcctctacctttactccggccatgccataacacaccaccttccagaccacctcttttggttgcaacctcttcacacaaccatccacccgcaaccacccttgcaggagtcatcccttccatctcagcacctaccttctctttatgtacatccaactcaatcccttaggattgattttaagagtacccgaatccgcttactagccttgtgtggtaccctagctctgcaaactgtgcagaccatgccgactccaccttccatggattttgcagtgtcaacggcaatgttggaacaccaaaacacaagccctttctacaccgttcacctactcgccaacagcaagccccacatg

SEQ ID NO: 66085 - DNA, 333 bp, Glycine max
gggaagaagaatgtcacaatcactcggggtgaaaaacaagagcaagcctttgctctgctcaaagaaaagcttactaacgcacctgtcctagctcttcctgacttttctaaaacttttgagctagaatgtgatgcctctggagtgggagccggtacttgatttgttacaaaagtggtgcaccctattgcttatttaagtgaaaaactccatagtgccaccctcaactaccccaactatgataaatagcttcatgccttaataagagcccctccaacttgggaacattactttggtaacaacgaatttgtcattcatagtgattatcaatcactt

SEQ ID NO: 66086 - DNA, 424 bp, Glycine max
  unsure (1)..(424): unsure at all n locations
tactcagcttaatgtctttctgttgaggctgagctaagcgccaacatgctgttcttatccccagtcctccactatttctaanaattgtagacttaggctaaatgtgcctatgcactaagcctattctgcagaaaaaaaatgttttctgtgtcttcgagctaagcgcaagcttgttgcgcttagcgcttgtgttaatttcataaggtgcactaagcatcagcgtgctgcactaagcgcccggctctattttcagtttaatttttctgttttcttgagaataaccctatgctaatcttgcgtgttttgtcttacattttgcagatggcttctaagaaaagaaaggcaccatctacacctacccaagccagatttgaaaaatcaagattcacttcccaagaggcttgggaaagatacactgatggta

SEQ ID NO: 66087 - DNA, 387 bp, Glycine max
  unsure (1)..(387): unsure at all n locations
tatttgataaaatattatgggattcaatcaagattttaaataatataaatacatcttgtgatattcaatcatcactatcataattttgtatgaatgtaacaacaattggtggtattctaaaaaaaatcttcgatagataaatgtcacttagaatgaatttcgatagatttctcatgacattttagtataatatataatgtcacacctatctagcaatntcacccaaactgttgagactnttctaaactctcattctntcttctttagtggatagttaaacttttctttatcccatcacatataattccttctctcttattgaaggttgtccagacattggtatacttagacatcttttctttcaattctacatagcttctctatgat

SEQ ID NO: 66088 - DNA, 409 bp, Glycine max
gtataatgaagtcggctatgatgaggagtttgatcatgtctccaatactaaacgccaatacataagctacagaggagatcagaatagctcacacatcccttgcaatagcttgtactgttggatactttagctcattcaatctccaccacattaagatatgagcatctgaacttgttggcaaaacttcctcctataagtaatgatctaactacattagcatagcagaagatcttgccttcctctttctttcaatatatctatcataatcacacaatatactctttccatcactaactacatcgtgcgaccctcaagacctaatagaagcatgatggaatctggctagatatctcgagaccaaatcatatcgccagtttcggatcctattaacttgcgatacagtatccac

SEQ ID NO: 66089 - DNA, 462 bp, Glycine max
  unsure (1)..(462): unsure at all n locations
agctggccacccagctcgcccaggcgagcanggttgtcttttccagaagcaacagccttctggaggaatcttctggagggcccaagtgggcctggttgctatttgcaccccatttttactaagtacacccccctgcctttttttggtgattcttttttcgtaaagttacggaaacttacgaatttcgtaacgatacttgttttctttccataatgttacggaaccttgtggattacataatcatcccctttttgacttacggaatattacgaaacctcactaattgtgcaatgatgcttccatttcatttccggtgtgtcacggaaccttacggattgtgcatcaatattttcttttgctttccggcatgtcccggaatttcacaaattgcctaatgatgggtgccaagcacctcacaaggaccaaacaaaagttgcatgtcatcaagcanaggtccccgga

SEQ ID NO: 66090 - DNA, 491 bp, Glycine max
  unsure (1)..(491): unsure at all n locations
ttaagtcagctgaagctgcagctttgacgcgtgcaaaaattcttttatttattatataaaagataataatgattgaccttgagctgcttgctgggtaaatcatgataaagttcattccatttatttattgaccatcccatatgctgtaatatgacttccaccaagagcaatccactcatagcatctccaacagctggattgatcaacttactgacagccaataatctcagagcagctttgtccccttgtgaacctgaaactaacaatcacacatttctatttagttgaatcttgtaagtgaagtgaaaatagtcagaaacctcagaacaaacctttggatcctaaagaaatctcattagttctagcctccaacgactctatgaaagattctgacnataagacagttccatggccatgtgcctcanagtagataccaatatcagattcggtggctctttcatgcagatatttcactccagttggagtaaaag

SEQ ID NO: 66091 - DNA, 452 bp, Glycine max
  unsure (1)..(452): unsure at all n locations
tctctggattntgcgcgatttagttagttataatctctnagctttttcgtttaaagattaaatatttcattaagaatattaaaaaagacataatcattaatataagtcgtacaatattaaaggagaaattttattaatgtaaatggtgtaatattaaagaaagaaataaatggagaaaattattaaagccctgagatagagattaaaaaaaatattaaattgtaatttataagttcaaacgatactaaagcaatgtgtttttttggtgaacaaaggattgaaaagacaaattacaaagcatgggctaagtcatggcccaagggagctaaagtaatgttttgagacaagcttataaattcatgagagaaaattaattactaaatgttcttaaaataacttgtacgggagatgacagtacatgcactatcactaattattaatgcgttacgaat

SEQ ID NO: 66092 - DNA, 353 bp, Glycine max
  unsure (1)..(353): unsure at all n locations
tcacctctgaatgagctggtgacgaagaatgtgacatttacttggngtgaaaaacaagagcaagccttcgctctgctcagagaagagcttactaacgcacccgttctagctcttcctgactttgctaaaacttatgagctagaatgtgatgcctctggagtgggagtaggagctgtattgtacaatgcgggcaccctattgcttattatagtgacaaacttcatagtgccaccctcaactacgccacctatgataaatagctgaatgccttaataagacccctacaaacttggaaacattactctggctccaacgaagtcgtgcttcatagtgatcatccatcactgaagtac

SEQ ID NO: 66093 - DNA, 403 bp, Glycine max
  unsure (1)..(403): unsure at all n locations
gctccataatgtaggtaggataccttatatatgtaggattnttcaacccttatattttagggcacctagactagtttttgtattggggctagttttgtaattttacatgcattaagtgaatatttgatgtgtgtgctgggaaataaatttaattgaattgggagaagcccaatccaattaaattttagagggggaggtgagcatttgcttgctacaccccattgccacatcatatagtcacactttgtgcatgtccttcatgctttacatgcctcacgacacctaagcacacttagtgaagaatcttggacttgatcttggattagtgtgctgaaacatatctaanattaagtaatcataattagtgaaattttggctcaaaaatttggcttcacaaatttaa

SEQ ID NO: 66094 - DNA, 371 bp, Glycine max
  unsure (1)..(371): unsure at all n locations
gtttgggggaatagtgacaaaactgagacggaaagacaacgaaagtttgtgcagatatgtagacggtgtgtcaaaaaaggagtgtttggagagagagagagagaaaaatactcttattaaattctgagaggtaaaaaaaaaaaaaaaaaaaagaaaggagacagagagggtgatgactttgtagcccataaaagttagtttgggtgttatgttatcctctatgggtgctccgttctgttatcgatatttcgtctgtaccttggtttttatatccccaaagcctctcattattaatttgtctcgctaatcacactcatcatctcgggctgtggattaattaaggaagattagttntttaattgcgtcatctt

SEQ ID NO: 66095 - DNA, 408 bp, Glycine max
actatcgacgtcactccgatacatgtctgttgtggtgttcgatctttgacactttttgatgggaaaagattggacgagtcatccggacatgcgccactggaggcccgagctacctatgctatattgatcatctggatcatgcctctcatagtataaagaactatcatatgatgttctctgcgctagacaagaccgatgtggagatctatgaatccgtacacggcgataactgcaaagttattatcagctccattcaattatcttgatgcgaattgccacctatatccaatgtcagagccatgattacatgaccactctgattatcccgacacctgtaatatcattaacccgtcccatgtctcagaattgtgctcagagcaataccacggcacatactatctgatcata

SEQ ID NO: 66096 - DNA, 487 bp, Glycine max
  unsure (1)..(487): unsure at all n locations
agtcacgcggctgcaagctttacagagataagagattctgatgttatattttatatgaaagatcttggggaagcctcttttgtattaggaatcaagatactaagagatcgctttcaaggtatcctaaggttgtcacaaaagagttatatcgataaggtcttagataaattcgacatgaaagatagtaaaccaggagataccccgatagctaaaggagacaaatntagtctcaaacaatgccccaataatgaccttgaaagaatagagatgcaaaagattccttatgccccaataatgtcccaatatagcatttgtagtaggagttctgggcaaatatttgagtaatcctagaatgtagcattggaaagtagcaaaacatgtgatgcgttacctaaagagaacaaaggggtacatgctcacttatcagaagtcntgagaattggagatcattgngtactcagactntgattntgctggatgtcaagat

SEQ ID NO: 66097 - DNA, 435 bp, Glycine max
  unsure (1)..(435): unsure at all n locations
tatactcagctcctggtgctatgtnattanaaatatgtttcctaacaanatcantgtattgaagagtcactatgaggcanagaataaattatgtcttgtgggtatggagtaccagaaaattcatgcatgttctaatgattgtattctgtacagaaatgagtttatgaaaatgcacaactgcccgacatgtggggtatcacgctacaaagtgaacgatggcgaatgcagtgatgatgcagccacaaacaacagttgtccagcaaatgtttgccggtatcttccaataatatcaaggtttaagagattgttcgctagtgcagatgatgcaaaaaaccttaggtggcatacagatgacagaataattgatgggttgctctgacatctcactgattctctataatggaagacaattgatcgcttgtattcggaatttgg

SEQ ID NO: 66098 - DNA, 494 bp, Glycine max
  unsure (1)..(494): unsure at all n locations
ttaagtcacctgcggcatgcaagcttggtcgaaatgttcanatcccttcatgtagattggctcacaatttagacatatctttaataaatagaaacaattgaacactaatgaagcaacttcatcatatatttgttagatacataacactntcatatttttcaagtatggatttagagacaataatttatatcgtcttatgcacttcctaggtgctctaatctgataaaactacgaaagaaataaacataattccttccattaaccagtagaaaacacttcctatagtgaggctataagactatactaaattgaaatttcaaagacccatataatgctaactaaagccccacaatccatccattagtttgtattgacagataaaattgtacaattgaagaacttctgcttagaatacctatatatacggcagaagctcaaccaagtgagaagtcagttataactgtctgacaatgatagttataactgactataac

SEQ ID NO: 66099 - DNA, 467 bp, Glycine max
  unsure (1)..(467): unsure at all n locations
cgaatcttccttggttgggtacatgagcatatgcaatgctccctaattctctcaagtgatcaactattggcttcactccactccatgtttcttgtggtgtttgatctttgacattctttgttgggaaaagattggacaaataaacggcacatgcaacagctttggcccaaaattcctttggcatatttttagccttcaacatacatctagtcatattaagaacaattctatttttttctctccgctaccccattttgttgtggagatctaggaaccgttagagggcgacaaatcccatgtttttcacaaaattcattaaattcttttgatgtgaatttcccacctctatcgaatcttagagctttgattacataaccactctccttttccacaagagctnntaaaattttaaaagctacaaatgtctcagattntgctttagaaaatanacccagtattatactata

SEQ ID NO: 66100 - DNA, 418 bp, Glycine max
  unsure (1)..(418): unsure at all n locations
ttctctctctcanagcaatcaaatctacatcttntttgtgattagatattttcctctactgtgtaactttcctaggctagtattntattgttgggcagagagagagagaggttttttattttttttctctctctatcaaagcagtcaaatctgcatttttcttctttgtccatcacaatcacatgtttcatctatctcaacttgatcaatttcttattcttcttcttcaatattgataaatttaacaccttcatcatgatcaccatgatagcatccctataacaacaaaatcccaaaaataaaaaagcttcattagaaaaggattcacaatagaaaacaatgatacaatttccaaatataaaccaacttcaaatcctttatttnttatttatcggtgaacaaatcanaagaaacaaac

SEQ ID NO: 66101 - DNA, 450 bp, Glycine max
  unsure (1)..(450): unsure at all n locations
gcttctgatgatgaatcaagtatgagtcaagtagtttggatatgataatagcccgaaagaacccaaaagaatgatttcaagaatgagtcaaaaagttcaagatcaagattaatttcaagattcaagaaaagacatcaagaagaatcaagattcaagagaagatgaattcaagattcaagagaagaaatcaagaagcaacaagtcaagacttcacaagggaagtattgaaaaggatttttcaaaaaccgaacataacacaattttgttttacaaaagagttttctcaaatttttctaagttaccagagtatttactctctggtaatcgattaccaatttcctgtaatcgattaccagtgttaaattntgatttcaaaaaacttttaacttgaattgctacgttccaaatgatttttaaatggtggtagcgattacaatatattgggtatcg

SEQ ID NO: 66102 - DNA, 493 bp, Glycine max
  unsure (1)..(493): unsure at all n locations
ttaatcacgcagctgcagctgtctatacatcctccactccctgcattttatttgtcccctntgctttcgcctnctcatatctagaaacagttaagcattgtcccaaatacacaataaccataacataattgcatctaatgacatgtcataaacagactgctctttcttactgtttgattntaaaattaagacaatgtcaatgtgtcaaggaatctagctcagttgattgagtacggtacgtgagttattgtaaactccctaacgattcctatagataaaaaaaattaagacaatgaaacaaccttgtttaatttgaataaaattttaataagaaaattacaccggcaccctgagagatttcgtcaattttctccttatacctttatttcctatccctttgaaaaatattacattgacagtttcacactccttattcattacactaaccacttaaattataggggagtagtgtgcaatctcaaaaaatcacagg

SEQ ID NO: 66103 - DNA, 457 bp, Glycine max
  unsure (1)..(457): unsure at all n locations
taagagagtgtcttatattctttngaggggaaaaatatgtaagtattctgagaatgtttttcctagggattctaaatattacattctctgctatctacaggaataaaaaacaacagtagttctgagaccaaattagatgatgaatgggatggcagaatatagaacaaagtgaaggatgttagaattagaaacctggcaatgtgataatttctaatcgaagcttaatagattatgcctaagggagcatgggtgcatttggataaacaacttaattaagtggttgttcaataggctcttatcacgtaaggtcttatgccgtgaattttcctgtgaaacattntggaacaagctaaaaggagcctattttgataagctacacaaagaagcttatagaaataatctgaanagaacttatgagagtcataagtaagttattttcataagcttcctataagct

SEQ ID NO: 66104 - DNA, 445 bp, Glycine max
  unsure (1)..(445): unsure at all n locations
agcttcaagaaactaagctggagagntttgttgttcttcatgatattagggacttaagatttaaagattatgggtcttcttgccttctttaggtgtctgtgagtgccatggtattgctgtttggacaccagatgtgtttctaaaatcagttcttttcttggtaccttttcagtttcagtttccttggatgtcaaaggatgagggaattggtgcttgacttcagtttatgggcctcattctccatatttgtgctcttttgggattagcttagtttcacgttttacatagtaataggagagagttggaggaccaagataaacagaattaaaaagaaggaaagctgaataaaaataaaagaggagagtttcctataaaagagaacagagagaataaggagaggttgccagagaggataacaaaggacagaaggaatagaanaaagata

SEQ ID NO: 66105 - DNA, 465 bp, Glycine max
  unsure (1)..(465): unsure at all n locations
atactcagctctgagtgnaggatggactcttacattaaanttgaatttatcgttcaagggcaatggtaatcgattaccaaaatattgtaatcgattacagccttttgaaaataattggaacgttgtaaattcaatttgaaaactttttcaaactcattttgctactggtaatcgattacaacaatatggtaatcgattaccagagagtaaaaactctttggtaaaggttttgtcaaaaactcatgtgttattcaaagttttgaaaaaactttttaatacttatcttgattgagtcttttcttcattcttgaatcttgagtcttgaatcttgatcttgattcttgagatcttgaatcttgattcttgattctaggctttcttcttgagtcttgaattcttcttgattcttgaactcttgactttgtcttgattcatttgagatgtctttgattcacttgaggtgtc

SEQ ID NO: 66106 - DNA, 490 bp, Glycine max
  unsure (1)..(490): unsure at all n locations
gacctatgatactcagctcgagataaaacccgttgagttcatgagtttaatgagtcgactattaatattggtataattatacgaattntaaaaaaaatcattatttgctagatccataggtttaagcagtccacatatctaactccgtatatccactccaaccagtacttctctatattcatccaactgagagagaggtcagataatctccgttacatctcgctaacccacacaaaatcccaagtacaatttttaaaccaatttttttttttttttacatatctaatcaaatacattgtcaaaatatttatagaagcttaagttagagaatatctagaaaaaaaaagttgtaaaagtatcctaaaatttagttagagcatcatgttcataaccatgtgtggcatataccggtacggtacggtacccaagcagaaatgttaatcccatagcaatttggttaacacaaatgcgtgtccatgacaactcacat

SEQ ID NO: 66107 - DNA, 356 bp, Glycine max
  unsure (1)..(356): unsure at all n locations
tatttatttttttaaacgaaaatttatatttaattttcttttaaaataaataaaactataattattcttttattaaaaaaatgatggagtgaatcttaggatttattaaggtaagacaagtctcaatcaagactcatacaatgtttacaaattaaatacttacccaataaattctcacataaataaccatgttagactcatgcctttaatgagatgtatgatttttaccaactgtagtaactnttttgtggcccgatgaaaaatattcttaaaattggacggctaanaaatatgtgtgatggtatagtccaagttgttgtagtcgcatacttgtaacgtttcgacttccgaatata

SEQ ID NO: 66108 - DNA, 335 bp, Glycine max
actctccgctaacatctatgtaagtgtgtgtctggatgagcgatgatagaatagattttgaaggaaaccgattttgaatgaaactgattgtagtcaattgattctacagagctgtatttgtgttagaatgcatataatatcgaatcaagtcagcacttgcatccactatagggccatattatcctatgtcatagatagagccatcagcattcacacatactcatgatgagctccactatatcatgctaacaccgaacgcgataaacatgtgagacacaggcataagcaagatggactagctctacactcaaatacggagttcatacaatgaacca

SEQ ID NO: 66109 - DNA, 447 bp, Glycine max
  unsure (1)..(447): unsure at all n locations
gtctgacaccaagggttctaacttctaacagaaggtaatttgtttcagttaagattgacacagaagacctttatttgtgcaataacataggctaattcaatgccttaggaatgttccatgaaagatgctagttcttctttacgtaagacattatgaacatgaaaacttagtgtggaaaactacaaccatgcgggattcttcaaagcagtgacaacagctntaacttgaaggtagcttctaacgctgcatattccccttactctcccttgtccactcatcttatatccaccaaaaggtattgctgcatcatagacatcatagcagttgatccatactgttccaactcgcaatgcgcgcatcaaggtgttggcagtgtccatattgtgagtaataactccagaagccaggccatatgaagttgcattggctcttcttatcactttctct

SEQ ID NO: 66110 - DNA, 314 bp, Glycine max
  unsure (1)..(314): unsure at all n locations
acttttttgtttaacttttttaaacgtaacattaacctttgttgtagactgctttngagtagggaaaaaggaaccatacccaccaaaagttgcaccggacaacaaacactgctctttgatttcttaatacaaggtttgagttntattattccaatcatgtttaattgtgttataaaatatgcaattattagacaaaagtaggtacctagttnttagctcccacaaaaccatgatttatcaataaaatcattagattatgataataaatttcaaatttgactatccctnttgctagcaaccatgatntttgttat

SEQ ID NO: 66111 - DNA, 392 bp, Glycine max
  unsure (1)..(392): unsure at all n locations
ctccttcttggaatgtaccacaggatatggcacttctgaaccttcattcacagctgtgtctcttttcttctctctagctggtatacttgtactcctctctacattcttatatatttcatcattatcgttttctttttcttggacatttaattcttttttcttgaccattatttgtttttctttatcctgattgtaatcacctctcacatcatctttgttgatatcagtacctttcttttcaatagctttcttcttggatacaaaactatcctcatcctctacctccataaacctcttactccttctcatcacaactatgcattcctacttgagatntttttctgtatntgccacaatactatnggatgacttgtcaactatcttcttggaca

SEQ ID NO: 66112 - DNA, 376 bp, Glycine max
  unsure (1)..(376): unsure at all n locations
gctatagtttaattgcatcagctcatacaagatgacatatttttatataatgtttgntggtcaacttttcatttgactatctattgtgtctcccttattcatgtgcttcatacgcaacaaacattgacattgtgcacaaaaataattattcatctgatctttcatccatatggaactgagttttctgtaccataaattccattttgtattagatactccaatgataatgcttcataactaaaatctagcctacatgcaaagtagatttttggataaaataaagcagtggggatcactcatcattaaaaaacgacaattcattctcaacaatatcaaccgttaatgaaagaaatcagattcaaaatacaactcgtgc

SEQ ID NO: 66113 - DNA, 468 bp, Glycine max
  unsure (1)..(468): unsure at all n locations
agctngtacgtgccctgatgaatattctattagttgtctacgaaagccataggttatgggaaccaatccagtgcttaatcaacattgataccgaaacatacggcgcatgagacaaaacttacatgaatggattacttgaaaaatcaaaagccctttgggaagtgattaacactaaactaaagtagaaatagcgcttgatctcgaaatccaaaagctatcctttgttgcgtttgtgaaataggatagggttagggtagtgaaatagtatgtggtaattatgtgtaattgactaaatgggggccatctaaagtagctcatcaagtgtgaactaaacatctcanattaaactgcacaaacacttaaataattaatatagactagtaagcaacaattgacacacaatacgtaaaagggtatacggtaatggtatatgtgcactatgaatctatgttaaatatatagagatac

SEQ ID NO: 66114 - DNA, 454 bp, Glycine max
  unsure (1)..(454): unsure at all n locations
tctgtgctggaatgttcttcaccaataggtacttgttcttctgtttctctatattacagtatcaagtttcattgttttagttgctttctgtgagtgagtgagtttttaggctgcaaagggggttatgctctaaggaataatatttcaatgcctgtgccttctgccatagggcatttaatccatccttcttttttgtttgttttatacttgcaatcttgtataaatatttctgttcaatttcccatatgattttttattggtttcattaaatgcccaaagctattgagactcattttattcttttctcttatccacttcttgttntcccttatgttccgctgaatcaaaaaagtgatgggtgggtatctatattatattccccctgccctctctcttcatatgaaaatcgtgaagttgtaatcgaatgaagacatagcggtgagcttaactaaat

SEQ ID NO: 66115 - DNA, 373 bp, Glycine max
  unsure (1)..(373): unsure at all n locations
ctggtgatgtgggcatggtgatcttctctcatctccattttgagttgatacaactccatctttcaaaagaggcaaatggttagcgactttgatgcataaatattcttgagcttctcccacaaggccttcaatggtgtccccttcaacacgttgtgcttatttcgagagcaaggactaactgaatcgtgctcacatccctcctttggatcttagtccactcggtttcatttatagaagatgacctttcattntctaacacttaatcaagaatcttgtgcaccaaaaggtcttgaatagtactctgtcaaatcttaaaatttatttttccatcaaacaatgatatctcgaatctttatgtgttcctgaccataac

SEQ ID NO: 66116 - DNA, 442 bp, Glycine max
  unsure (1)..(442): unsure at all n locations
tgcaataataatgccatgaactcatgaggaattangttgacaaaaaggatatagtttcataattagcagttatgggtgcaatgttaatgtcgctggaatggaatggaacaccatgattggacccagcaaccaacttaacaaataggcttattattgttactttctatatatctcataactcttgtcattttcattggtaccccattactattaagcacttctttgtccaatacacgggtcatatatatatgaagtatgagtttaatttagatcatactacgcaaaattagcagtatttaatgacctgaaaagaacacataaattgaaggtataggcaaatatcaaactactccatcaaataacgaccccttgaggatgaacaagcccccacacatgtgaggagtacatcaaagtccaatgccggttatatgtattgcatctc

SEQ ID NO: 66117 - DNA, 421 bp, Glycine max
  unsure (1)..(421): unsure at all n locations
cttcatataaaagctttcatagtggtgtgttagagtggtagcttttctaagttggacatcttatgttcctttatagttgatgattagagagttccaaatcactttggttgtttttaatctgcatatcttgttgtactcatttttggaaacagcgcgtgacaatgtgtaacaagattgtgtgtttagctccattatagtcagatcttcgtttgtgcattctactttaggtttgggaatgggtatgtcaccatttgtgatgatcatccagagcttgtagtgattggacttgatgtacatctccattntgtcattccaatatgggtagtcttctcctgtgaagcctggtggttttgtgagagatgctccctcaatgatgaactaatcattgatggttgtatttgtcgtcaggatcttttcctct

SEQ ID NO: 66118 - DNA, 493 bp, Glycine max
  unsure (1)..(493): unsure at all n locations
actatgatactaagcttctgttcaacctatggcaagctttaactcgtctttcanaatatttctttctactcgcgactgatccctttcggctcttcggagcttaagctcgttgttgctgccccataaagctcctcggaacttgttctgactgtgttcttccttttgggccctcttggtttctcgttctaaggcttcggtggtggccatattgacgtctcttagttcatcgtactcttttcgaactttgatggccattaactcgaacttctctttgactactcgggctctttcaagctccacctttaaggcttgtacttcctcactttcttccggagctttagcctcttactctcttgcagccttttgatttgggagccaattcaacccttatgtttagactctcagccacttatgatagccaccgatgaccccattactgcttcccctaagctctttatctttcctttgcactgcattccatgccttgcggact

SEQ ID NO: 66119 - DNA, 335 bp, Glycine max
taaaattattggcgttggatttgctcaaacttccaaatccatttcgagcggctcgattattacgggactcaatcagacatccgagtaaaaaggtattggcggttgaattttctcagagcttccgtatttcatttcgagcgtctcgatatattacgggactcaatcagacattcgagtaaaaaggtattggccgttgaattttctcagaacttcggtattccatttcgagcgtctcgatatattaccggactcaatctgacatccgaagaaaaaggtattggccgttgaatttgctcaaaaattctgaaatccatttcgagcggctcgatatatta

SEQ ID NO: 66120 - DNA, 441 bp, Glycine max
  unsure (1)..(441): unsure at all n locations
ntgagccaaaatcctgactcaccatanaccttgacccagggtgagtangtcaatccttaccctcgaaagcgaaaagaataaaagggaaatttccaatcaaagaaaaggaaagaaggaagatttccaatcagggagaaagcaaaaagaaaagaaagaaaattcccaatcaaagaatgggagaaagtaaaaaaggaagaagaagaaggaaagaaagctcctgatcagggatcgaaggaaaacagaagaaatgtgcagaaaggtctttggaccggacaatatctgaacaatacagaattgtcaccaaatgaacaaaaagaaggaaaggaaaccacgacctanaatggtcttctccctttgattaccaaccaaaatcccgtgcgctagcgactntttcgccccgcactaaacaaaaacagaanaagaaaaagccaacaaaaaaat

SEQ ID NO: 66121 - DNA, 416 bp, Glycine max
  unsure (1)..(416): unsure at all n locations
gctaagaaaaagcttaacaaacttagaaatcttttgattcatgtttccgaaatatagggggagaaaaccgatgcacattttatctttaacaattgtttgtgcttgcttgaatctttgattcaggtatttgattgtcatcatcaaaaaggggagaatgtagatgcaattggctttgatgttttgatgatgatcataataatgntgtgcaattgatgcaaatgggtttttcaagattaaaattcaagacaatacttcaagattacaaggcacaacatcaagatgatcactagaatattaggaagggaattcctaattgaattagcaaaggtttggccaagtgaattaaaataaaaagtgtttttcaaaggttntactctctggtaatcgattaccagaggatgtaatcgattaccagt

SEQ ID NO: 66122 - DNA, 475 bp, Glycine max
  unsure (1)..(475): unsure at all n locations
agcttggaagattccgctccgattgaaggttnctttctcgtgtggngnttcaacggagaacaacagcggtccatggtggccactagtggagaagaatcttgggacggtggggaagggttttgaaagaaagaaggagaaaggaatggcttctttccaaggctacacacaaaagaacgtttgcaacactcaagtgctcctgctctcgggaaaggaagcgtttctcacactctagatgttatatcgcagatcgcaatagtaagattgtgtacatctgtcttgttaacctccagaccaaatttcgagaagatccaacggttaacgaatgcaggagggtgtttttatggagacagcttcaggtagcttccttgagaagcttttctcgggaagcttccttgagagacttctttgagaaactagagttntaactactcacactcttctaataactaaactcaccttcttganataaaacatg

SEQ ID NO: 66123 - DNA, 399 bp, Glycine max
  unsure (1)..(399): unsure at all n locations
agcttntatgagagccnctaagtagaggaggaaattgtggngttcttctctntggtcttgccaccaattttatgttatgatgtcccttgaatggcacttgaggaatttcctttcccttttcttttatatgttgttcctttgtttgcatttcattacatgctcacattgaggacaatgtgcatttcaagtatggggggagggtttagaaaaatttgttttctgtttttctattttgctntatgttttctattttgttgtatttgttttgttgtgttgttttactgtttttacataaaggaaaaaaattagttcctgaaagtgtaaaaagtgtgacaaatatatccaaatattaatagtagattgtgactaattattataattttgaaaaatttatattga

SEQ ID NO: 66124 - DNA, 361 bp, Glycine max
  unsure (1)..(361): unsure at all n locations
gctccaccttgcatgtctctgactcatctctttctgatgcagatggagaatccgattagaggacaaatccttctcaagagggagagaatgatgaggacatgacctagagcaacggcaacgatccacttgaaggacttggaagacctatgacaagggctagagcaacgaaagccaaggaagctcttcaactagtgctgtccatgctatttgaatacaagccccggtttcaaggagaaacagccaaggttgtgagttgcatcatggcccanatggaggaggactaagtgacaccactttggttcacatttagagcgtatagtttgtctaaataatggcccaatccatcggaaacgtggctgac

SEQ ID NO: 66125 - DNA, 450 bp, Glycine max
  unsure (1)..(450): unsure at all n locations
ttaatttacgcagtctgtttaattntatgactatatttcttccacaaaacaggttggtgcaacaactttntgtatctgtgaatataatgcatctggtggttggtcacgataatattaaaaaatatgcattctgagatttttaaaacatgatatattggtggtggaattagcagcagagagtttttctgatatgctacattcttaatctggtaggcaagtaatttacgagtgatgcttttgggaatggttgatgatccacgtgttgtgctcatcaagcttgcagatcgtcttcacaacatgagaacaatgtacttactatgagcttcttaaattgttttccttttacacccaattattgttggtcttccttattttccctgttttggtcctttaattcagatcttgtattctctgaagatganggaataattattctattcttacacggtt

SEQ ID NO: 66126 - DNA, 386 bp, Glycine max
  unsure (1)..(386): unsure at all n locations
agccaattttaaagaaattaaaaccatttttgacccaacgccattcattaaaatcttgaaccgatttgaagcattctagttacatgacttacantccagtatctgatgatgcntaattaaatgacacgatatcaatgctgataaaaaaaaatgaaaacaggataacaattaaaagaaaaagctaaatgaatggaaaacttaagtctaagattagaanaggagaggatattaattaanaggaaacttttactttatattatactaaatggaatntcattagctagatagtgtgcatgtgagaccataaatatgaacaagaatgccaccatanacatttactatntatgggtnntaccttggaatataagaaaacattactttatatt

SEQ ID NO: 66127 - DNA, 457 bp, Glycine max
  unsure (1)..(457): unsure at all n locations
nttcgattcattctatgtacccgtagtggtccacattgtgtttcttgcatttntattctcgttntgtttactttatataccccctgttgacgtgcttaagccattttacttaagtcatttctcgcttaacttaaaaataaaataaatttccaccgaacgtttgaattgtattatccgttaacttcggctaaaataaattccgaccgttcggtcgtgccgtaaccacgttggaaatcaaaaaagaggtcaaaaataatataataatcaaaaagacatcttttagtaaaataaggcggaaaatcaatcggacgttgtctctgtgggatttctcattcttaatcgaattgattaataactaaagtgaaactaaaggctaaaatcaattcgcctagtcaagctcgtccataaagataggctattgatgttngcatttcaattctcactacgtaaatggatc

SEQ ID NO: 66128 - DNA, 405 bp, Glycine max
  unsure (1)..(405): unsure at all n locations
tactagtatcacaccaacatgaagatatacctgtcaagagtaatagaatattcttagtggtcaaagtgcatataaatgccatcaactaaagcccacaccaccaaattcctcgatcaacagcacatttagtgtttgaagggaacaaatgaaaaactttttttttctgtcacttacaatagctgtcaagtgtcaaaggatcaaccagccaaggatggctctaaaggtaaaaccataaaattgatcacctcaaggcttaaagcttgtctagtggaaaaagggtacacccaaatctttggcttagctgcttangctatggngatattntctttctaatggcagaaaagacatttgtttggcagtttggctctttttcctaatggctgctactcaccccaaaccacttta

SEQ ID NO: 66129 - DNA, 445 bp, Glycine max
  unsure (1)..(445): unsure at all n locations
tactcagcttgcctngacaagctcttatcacgcgagttgcatgccattttttgttatattacatgctaatggcaggctagacaagtgtcaatctatctatgttgaagttcgaggtatgaatgctcgtcgaagcttgaagactctagatttgagttaccttgagattctatcagctgattttgaaggtgcacagtgtatagagagctacatagaccactggtgatgccatatggagtgggttgtgaagcaactgctcaagaccgagtgcacgctctcatctattgtctttgagaaaatctgtccagatgcacggatggagtgttttgcaaccattgcctttgaatcacgaattctttctattattcaacttggaacgatcgctactgacaggaacaatgagcccttcacgttagctgacctgctgtccatattcaaggtcttaaat

SEQ ID NO: 66130 - DNA, 174 bp, Glycine max
  unsure (1)..(174): unsure at all n locations
agcttgaacatacataggggtgtccattgngaatttaccaatgcgaggagggcacttccaatattcattcaaggtcaatgctccgttgccgcaaaaaaatattctgcattttttttttgggggatcagacatatggtgtaaaactatggattgtaacctcaaataattttttta

SEQ ID NO: 66131 - DNA, 434 bp, Glycine max
  unsure (1)..(434): unsure at all n locations
gattatatgaagcaggcattagaagttgtttgcatattatactacattaactcactactatttactattttataatttttttaatcataacattggtgaaaaaatatattaattgtatttatgattagttattatcgaaaaatttaattgattattcttagtagaatttttccttttaatcatgtttaatttattcataaaatttaaattaaactttatttaaaaggattgaatccaattttatttgaaccaaggaataattgatagaatgtttacattttgaaaaattgaaaactatgcaaattctattttacaattttcttatttcaaccgacatgtatataataaacctaacatatttgtccgtgtttagttnttaatccgtanatggattcacagagagaaataaagtcttggtaaattagaaactcttt

SEQ ID NO: 66132 - DNA, 455 bp, Glycine max
  unsure (1)..(455): unsure at all n locations
nttgcagggaagaagaagaacaagaagaagaagttcattaaattgttcaaagagattcaaaggttgtaaaagaatatgcggaaaagttgtttgtaaagattgtaagtgttctatgtcttattcaaatgcaaatcaaggtcttgcttttatagactctntaagtgtggtcaagaaaaccattagaagaattatagcctttagaaaaatctaaaaaccattggaagagttaaatcttttgacttttgttcaaaacttgtcactggtaatcgattaccaaatccttgtaatcgattacacaaagcattttatgaaaggatgtgactcttcacaattgaatttgaattccaacgttcagatgcactggtaatcgattaccaatatcttgtaatcgattacaccattttgaaattaattggaacgttgcaaattcaattgaaaacttttgaaatcaaact

SEQ ID NO: 66133 - DNA, 307 bp, Glycine max
  unsure (1)..(307): unsure at all n locations
atccgaccacccggcatagcggtcatgagaactggatgactaacagcgactctgcagtcacagataaaggaacaaagacccacaaagcaggaggcttgtggtggctggccagctgtgaactttgattgatatgtgggttatggcctctggtaatcgattaccaagggtgggtaatcgattacaaggcttanaaatgaagacaggaagctaagatggtctctggtaatcgattaccaaggggtgtaatcgattaccaggcttgaaaacgaagtcaggaaactaagggagcctctggtaatcgattacc

SEQ ID NO: 66134 - DNA, 478 bp, Glycine max
  unsure (1)..(478): unsure at all n locations
gggaaggtagtcatacctcacataatatatgtatgcgtgtttatgtgtgaaaaataccttagatatgcatgtatgtaatttaggtagcaaacaactacctcacaaaatatatatatgtatgtttaggtagcaagataccttggatatgcatgtatatagcacaagtacctcacaaaaatatacacatgtttaggtagcaaaatacctcatgaaaaaaagaggaaaaaaaaacaaaaactaacgagaaaaagaaatgaacaaatgaaaaataaaagagaaaaaagaataataagttatctagctaaaaaaccaacatgcttttgaaagagataacttccaacttttctttgaaaaaaaattcactgatcataaccaattnttgaaaaaatgtgtatacacctgaagggtgaatgctgtgaaaatcttcccggacgcccgaaatggactcggatgaatgcacaaattgataaaagaacat

SEQ ID NO: 66135 - DNA, 395 bp, Glycine max
  unsure (1)..(395): unsure at all n locations
aacccaaaaaaatgccaccctattaccatcagggcagttccgtaactaaaataattacccctaccttccaaggggatttggtaactaacataacacaccttttcctggcttaaatcacatacattcctacttcaagcattttgggggaccaaaaaatgcacatgtgcacatctttgtatttctaatacctatacatacacaaacctcatgatgaatcttgactatctacacaataaggtgctacatttcatgctcttttcaagttttgctacctaaggccgcatgcaaattcaagtatattttccttcgctggctaaaaatgtattcaaaataaaaggtatacattnttttggtaatgtatcttctttacatagcatgcaacatatntatgtata

SEQ ID NO: 66136 - DNA, 465 bp, Glycine max
  unsure (1)..(465): unsure at all n locations
cgccgccacggagttntccgactatgctcttgtgtggtggaacttgtatcataggagagagcaagaaatgaagagccaatggttgatacatggacggagatgaaaaagatcatgaggaagcggtatgtgccggctagttactcaagggacttgaaattcaagctccaaaaactaacccaaggcaacaagggggttgaggagtatttcaaggaaatggatgtgctcatgattcaagcaaatattgaagaagatgaggaggtaactatggctcgatttcttaatggtttgactaatgatatctgtgatagctgcaagagtttgttgaaatggatgatttgcttcacaaagcaatccaagtggagcatacaataaaaaggaagggagtggcttagagggagtttaccaactttggttcttctagttggaaagacaaaggtaagaaagatggggctgctacttctagtt

SEQ ID NO: 66137 - DNA, 476 bp, Glycine max
  unsure (1)..(476): unsure at all n locations
ctgcagctgagggaaactgatgcctggcaactttatcttagctgccatgaataagaagtctgcacctggtgcaagaatctgtggtctatgttcttctgcagatcaccatacagatctcttgtcttctttgcagcaatctagagtcaatgagcaacctgaagcttatgctgcaaacatttataatagacctcctcagcagtaaaaccaacaacagcagaataattatgacctttcaagcaacagatacaatccaggttggaggaatcatccaaatatgagatggacaagtcctccacaacaacaacagcctgtccctcctttctagaatgttgntggtccaagcaggccatatgttcctcctccaatgcagcaacagcagcagcaggcacaacaaagacaacaagcaactgaggctcctcctcaaccttccttagaagagttagtgaggtcaatgaccatccataatatgcaatttc

SEQ ID NO: 66138 - DNA, 446 bp, Glycine max
  unsure (1)..(446): unsure at all n locations
tgcatgtggaatggcgaaagcnccactccatcattaggattagtacttgacttctcanacaaacaaatcaaacgtaacacgacaattatagttgctgtttaaatacctcacccactcaagtgtatcacacaattatggcttttctctaatgaaacactcttgccttttaccactctaattccccttgagttcttaggcaattcaagagattatggccacaacaaagaacaattcaccaatatgtgtaaggtaaggctagagagacaaggaaaaggttaaccaagaaaaaggataacaatgtttttacgcacaaatgaaggaaataaaatttagaatttaggaattcaagtaacaatccttcatgcaaccactatattatcttaaagagaatttttttttttaagttcttcaagcatgaaccattcagcccaatcttattctttttt

SEQ ID NO: 66139 - DNA, 476 bp, Glycine max
  unsure (1)..(476): unsure at all n locations
tcacctgcggcatgcgagctcgtcttgttaagcagagattaactctnggcgctattgatacatttcacactaagngaaatttctcttctggctagaattgtgcttagcgagccaactcgctaagcgaattattccctctggatggaattgtgcttagcgagccggtttagctgagtgaattttttcttctgggtggaattgcgcttagtgagccggtgtcgctaagcgaattgttccaatgtagatcaatcaanatcaacataacctaacatccacaccaaacagttgcacaaggataattcacacaacactacaactaatggtagaatgaaaactattattatgggtgaactctatcaacggcagaaaattctcccaaccccctttntattctaatacacatgctctaaaaaggtgcttcaatgactaaatggtttggttagtctggccatcagtttaagggcgataggatgaac

SEQ ID NO: 66140 - DNA, 474 bp, Glycine max
gtgcaagttggcatctaaattctgagagctctggacagataagtctgttatagttggaagtggggctgaagtagaggatgcacggatgccgactattagtgcaaaggaagagggaacatcaaccgctctgagcatggtcttccttgcctcttgaaatttaactgtttggttattcacattccaacatttccttatgatataagctaagtcaatggccgaccttaagttttcatagaaggtaagggcatcagatcctactcccctcgatctacacaaggcagtgattaaagctgggaagcctaagcgagaagagttagactgagccatcatggtcatttttccagagatcaaactgccaatgttcatgtccatccttgtgactaagccatagaacaacctagctctgtctgtgttcaaatctgtagtgcgggaggtatgagctaggtttgagtacgagaagacactccatgtctg

SEQ ID NO: 66141 - DNA, 372 bp, Glycine max
  unsure (1)..(372): unsure at all n locations
agcttacacaatactattttctctatcttgatgttnggaagaccaattactaagtattttctagctagattggtgagatgatgcatgtttatgtgtgcagtcctacaattccataaccacaaatcatcaatctcacttaccaaacaactaagctcatgaaatgatgcatgttcaatgtttaacatatagatatttcctatcctttttccaatatggacaatctcaccggacatagcttcactaataagacaataattcttgttgaattcaattttgaagcccttgtcacatagttgactaatgctcaagaggttgtgctttagtccatcaatatatacaacattctttatttttgtcttgtactgatttcaa

SEQ ID NO: 66142 - DNA, 366 bp, Glycine max
aagctcattgctaggaaggaaaatgaaatagagaagataagatcaagaagttgagttgtatacacatcgcttaatagagaagataagatcaacaagttgagctgtgtagacatatctttagctgttgatgatggtcttctttagactaaacactctaagacttaaagtcaaaatctattcagccatagagtggttgtaaatacctactttagagaagtattactaatgaaagcttcttataggtgtcttatgaacatgtccttaaacaagattctttacggtaggaaaaccttataagaataattaaggggattggtgtttttggaggttgagaagatacaacaagtgttgtgagtcaagcaacat

SEQ ID NO: 66143 - DNA, 383 bp, Glycine max
  unsure (1)..(383): unsure at all n locations
ataaaatggatgccccacattatttccatgacacaaatgcaaaaaatgatgatntggaaattttatgcaaaactggtcatgcatgcgcctatgcggacgctcaagtgtcaaatttttatggtcatgtgatgctagggctcaagattcatttcctctattntagtcaacccaatatttccaaaatatgttcttttatcaatttgtgcattcctccaagtccatttcgggcgtccggggaaattntcacagcattcacccttcaggtgtagacacgttttttcttcaaaaatcggttatgatcaatgaattntttttcaaagaaaagttggaaatcatctcttttcaaaagcatgtncgattttagctagacaacttattttctc

SEQ ID NO: 66144 - DNA, 402 bp, Glycine max
tcggaagaaagtgatgaggtacaagccctaaaggcagagcttgtatagcccgggtagtcgaagagaagttcaagtccatagccatcaaagtctgaaaagagtatgatgaactaagggacgtcaatatggccacagctgaagccttggaatgagaaaccaagaaggcccgaaaggaagaacacgaccaaaacaagttttgaggggctttatagggcagcaatagtgagctcaagctccgaagaggtgaaaggaatcatcacgggtcaaaggcatgatcttgaaggacgagctaaaggtttgccttatgtcgaaaagaaatttgtcccaacagttaagcgagactgaagggaatatgtgggccatcatcgataaaagagaagctaaatctagcggcgactcacg

SEQ ID NO: 66145 - DNA, 306 bp, Glycine max
cgctaagtgccaagtattcatacgctaagcgagcccctgctcacgctaagcgcttaaacccctgattattggctggaaggtagcgctaagcccaattatctctctagaatctgaatttctcgaattaggcttaacaaggtgatgcgctaagcacaattgcctctctattttggaaatctttggaatagcactaagcgcaagccatcactgtatggaggagcatgcttatgcgctaacccccacctttagcagctaagcgcagagcgcatgccctcgcgctaagcctaaaaacctttgtggaatttg

SEQ ID NO: 66146 - DNA, 461 bp, Glycine max
  unsure (1)..(461): unsure at all n locations
tcatgatgaatcaagaatgattcanagagttatgatgataacattgatgatgacaaaaaagctcanaagtcaagaacacttcatgttaacaaagatgatgacttcaagaatcaaagaatgagttcaagattgaatcaagaacacttcaaggatcaaaaggaaatttgatttcaagaatcaagtttcaagattcaagttccaagattcaagatcaagattcaagactcaagattcaagaatcaagagaagattcaatcaagataagtattaaaacgttttttcaaaaactgagtagcacatgattttttctcaaaaaccttttaccaaagagtttttactctctagtaatcgattaccagattattgtaatcgattaccagtagcaaaatgtttttcaaaaagctttcaactgaatttacaatgggtccaattgatttcaaatcttgtaatcgattacaatg

SEQ ID NO: 66147 - DNA, 440 bp, Glycine max
  unsure (1)..(440): unsure at all n locations
agcttaccttgatggatgagactaagaattagcttcaatagtatcaatntaagggtgtgccaaagcattcatacccgtagagagggtaganaaaacagacttaaatcttgtcagaaaaactactaactaaattcaattgttaaaatgtaaggaatattatcaaatttatactcaatgagtggtgttntatttaattaacgaggcaagcttaccttgaaggatgagactaagaattagcagcaatagtatcaatttaagggtgtccaatagcattcataccatagagagggtagaaaaaaacaagactaagaatctgttccaagaaaaaactactaaactaaaatttcaaattgcttaagaatgtaaaggaatagacattggaggaagatgcagccataactntcaatttgcattgatggttcccataataattaataagt

SEQ ID NO: 66148 - DNA, 475 bp, Glycine max
  unsure (1)..(475): unsure at all n locations
tcatgatgaatcaagaatgattcaaggaagttctgatgattacttaggtgatgacaaaaagctcaaaagtcaagaacacttataataacaaagatgatgatctcaagaatcaaagaatgagttcaagattgaatcaagtacactttaaggatcaagaggaaagttgaattcaagaatcaagaatcaagattcaagattcaagattgaagaatcaagagacgactcaatcaagataagtaataaaaagttttttcaaaaactgagtagcatatgaatttttctcaaaacatttttaccaaagagtttttactctctggtaatcgattaccagattattgtaaacgattaccagtagcaaaatggttttcaaaaagcttttaaaatgaatntacaacgttccaattaatttcaaaatgttgtaatcgattacaatggtttggtaatcgattaccaatgtgttngaatgttggaattc

SEQ ID NO: 66149 - DNA, 482 bp, Glycine max
  unsure (1)..(482): unsure at all n locations
accttaagtcagctgcggcatgcaagcttgtatcatcagttggactgcagnnattnnatagagtatctgctcggaaggttgggtgtggggaaaatatcaaattctggtctgacaactggctanggaaacaatacaccctacagcagaagtacaaccagcttttcctcataagtagacaacaaaaggctctcatgtcacaaatgggccattataacaataatagttggtgctgggacttgaagtggaggagaaacctatttgatcatgaaagtcagatggctgctcagtttttggaggagatcagcaatgtgcctattcaaagccaggtcaaggataatatgatatggttgcctgaacctaatggacagtacaccaccaggtcagcttatagtttatgtatgaataccagctcagtaaattctgaagacaagatctttaaggcaatttggcagctgcatattccccctcgggcagtcattttc

SEQ ID NO: 66150 - DNA, 444 bp, Glycine max
gaagtgggttactctctattgagagggttgaagctgttcttattggcacgtttctctcaaagattctagctcgagtttttttttcactaggatgtcttcaacttatcttcaagacgctccttgctgatctcttaatgctttaaagaagactgctgaagtggagcccactcaactgacatacttctagaagaaacataaataggtgacaactgtcaagtcatgacaactagcaaagtcgttatgaggttcccattttaaggaacctttctgatgagcattctgaagatacatccgaatgatgattctgatgttaggcgaacaaatatcctttctaaatagatctttatgatgaagtacagctgatatatctgtctgaagtaacacaatttcatcatacataacacttcttcacaacacagagcattgtaaagtcaactgcttcat

SEQ ID NO: 66151 - DNA, 371 bp, Glycine max
  unsure (1)..(371): unsure at all n locations
agcttatgctaaactntatagtattacttatgatttangaanatatgttgcattcaacaaccacatacaacagaacttaatttcactctccaaagtcatttcttttggtcgactcgccgcaacttagctatcggtcaactcaacacaaattatagtatttcacgaaatgaaaaaagtagaataaaaagctatggaatatggcggaatcatcacaaacaccgtggcatggaaaaggttaccggttacagaacccaacaaaagcatatagctaagctgaaaaagggttcgaaaaagggatggagtttagcaaaacgatatggaccatggaaattggagggtaagaatgtgatttaaaaacaaaatattcacac

SEQ ID NO: 66152 - DNA, 474 bp, Glycine max
  unsure (1)..(474): unsure at all n locations
gcacanaatcagggtgccgctcacaatcttttatctttctgcatggaaagaatataaataaacacaaaaaagaatataaacatcaatgtatcaagtccaagtccgaggtgctggattaattacttctccagccatcagaccattcagcttcatctgtaacaggtttagtgaaggatgaatcttgaccccattctccattatttgatgaatcttgaccccattctacattgtttgagggcgatgcattatcttcagtaaagcaagtgttctctccagcgtcctcatcttcataaagttccaccctttcaggaagagaacaaccctgataagatgaattgtccacacagtgccacaacatttggctccaatggtcgtcctgccaaatggcaagtgaagaatgatttcataaacaatcataattatcatgataagaatctagctaacaatcacgggttgaacctgttttcatattat

SEQ ID NO: 66153 - DNA, 473 bp, Glycine max
  unsure (1)..(473): unsure at all n locations
gacctatgaaactcagctataggattatggngtacccatcatatgtggtactaggtggcgatcgggcgatggtgcaagtcgactttccacattcacaaatcacacataaatccaccatccccagttgcccaccttcaactgagctcacgtactcccacgtagcccttatcctcgttcctctcaacactgggtccccatcaatccctccaagcttccacaacatccaagcaatttcaacatccaaacatcatgaactatcaaaaccaagaaaacagggcagaggcagaaaactctgcccaaaacacaaaccaataccacaactttttcttactcaattaccccagcaacattctcttcgttccaattcgttcaccgttggatcgactcgaaacttttactggagatccctagtacataagtctacattntgaccggtgggatcttctangaaacgttcagaacccaatatatac

SEQ ID NO: 66154 - DNA, 332 bp, Glycine max
  unsure (1)..(332): unsure at all n locations
attaaaattaaaatttttagaggaaaaaaaaatgggtccacttatccggctggtagcaacacaagtgagaatcacatcgaccgattacgcaattaggagagggtaattgacatgacctttatgtgatttaataaagtcccacgaaaattctttgtgggttgatgtgatgtatgaattatataaagcgtacaatagtagacaaagtgaggagggataatcataatagcgggtagtagaanaacttcttttattngcactatatcttacaagttggtgccgtaaaataagaatttgcaccaagagaaatcagaatcggtcctaaagattttaca

SEQ ID NO: 66155 - DNA, 315 bp, Glycine max
  unsure (1)..(315): unsure at all n locations
tactactanagcgatcatctgtttctccatcattgagggaaccactcgggctgccagatccctacaccttagggtggattctatgacagattcatgcccactacttgcacatgttctgaaaacgcatcctatccggagtcatatcacaactgtactgatactgactaacgaaagcaaccattaagtccttacaagaatggactccgcactgttccacgttatagaacccggtaacagctcactcactaagacttatttggacgaaattatcacgagctcctatcttatgcgtatgccccatatccgacatacatc

SEQ ID NO: 66156 - DNA, 304 bp, Glycine max
gctagccctagaggggatggacctttccttgttttggagaggatcaatagcaattcctgtaggttggacctcccagaagagtatggagtcagcaccacttttagcatttctgacataattccttttgcaagtggatctgatattgaggagggaggaactaacagattgaggtcaaatcctcttcaagggggaggggattatgcaatcctccctaggaagggaccaatcactatagccatgagcaagaggctccaagaggattgggctagagctgctgaagaaggccctacggatctcatgaacc

SEQ ID NO: 66157 - DNA, 325 bp, Glycine max
  unsure (1)..(325): unsure at all n locations
tgaattcttgcaccccggatacaaaggcttatttgaatcactttgcgatatatcatacatacaggcatgtgtttgcttaaaagacactagtccaaggtcacgaatcatattctacaagcgatctcccatttctacattaaacggntcagagtgggacctactcttcatgtctatcaattcaccatgccatatacacgtcgtgcaattcttcttaatcccatcacacaatagatgctcccgtatgtcggccagtatttgtcgtcttacatacaaacaatagatgcaaggacaataatatttttcgtccccattcggtcgacttttt

SEQ ID NO: 66158 - DNA, 285 bp, Glycine max
  unsure (1)..(285): unsure at all n locations
cctagaggggatggaccttggctttttttggttatgatcaataacaatgcctataggttggacctcccagaagagtatggagtcagcaccacttttaacatttctgatttaactcctnttgcaggtggagctgatattgaggaggaggaactaacagatttgaggtcaaatcctcttcaaggggaaggggatgatgcaatcctccctaggaagggaccaatcactagaaccatgagcaagaggctccaagaagattgggctagagctgctgaagaaggccctacg

SEQ ID NO: 66159 - DNA, 404 bp, Glycine max
  unsure (1)..(404): unsure at all n locations
ttttggaaaaacttttcaatacttcccttgtgaagacttcttgatttcttctcttgaatcttgaattcatcttttcttgaatcttgaaatcaaacttctcttgattcttgaaacttgctgactcaatcttgaaatcattctctttggctntttgtcatcatctttgttatcatcaaaactactcgaatcaacttgattcatcatcatgaagcttgcttatacaatctccccctttttgatgatgacaaacctgaaatcaagaaacacatacacattctttntcctagccgatcactcacttaattctccatattctccccctntgtttntgagtataagctttacttgacataaagttattcaatcttgtgagttcttgattaatccctatttctctccccttg

SEQ ID NO: 66160 - DNA, 493 bp, Glycine max
  unsure (1)..(493): unsure at all n locations
cgcgatccttaagtcacctgcggcatgcaagcttacccattctgttntagggtgtttatgttgatgcttgngatgtttatgtgctgaaattgcttatggaaaactgttagagatgaagggtagagttaacctaaggttaaaaggtgagagtatggtgttgtgagtggaaaaagagtgagactttgagagttggaaggccaaatctggatttagtggtatttggaggttaaagggagttaatcctagtttgaaatgtcatttacgacttatgagaaagtttgggctgtgcaagagagaanaacaaatggccaaagtgaacaaagagccatttctagggtaaaattgggtgttgaggagtcaaattttgattcggttgaaatttaggtgtaaatccagctgagccaagttaaattgatgttatagacttgtgtgaggtgaggttntactccannattacccattctaatttcacttctaaacctttgaaatcatt

SEQ ID NO: 66161 - DNA, 444 bp, Glycine max
  unsure (1)..(444): unsure at all n locations
tagcagtggtcgtattgacatctcttagtttattgcattctttccggaccttgatggccgacgtcttgaatatttccttgaccgcttgtgctctttcaagttcttcctttaagacttgcacctcctcactctcctcgggggtttcagcctctgcctcgcttgaaacctttagctntgggagccaatctaactcttgcatccgagccttcagccacttatgataaccatcaatgatcccattgctgcttcctctaagctccttgtatttcttttgcaccacgctccatgctttgtggactccttgaagtatctgttagtcgatgaatacgactaacttttgtgtaagaaatatgtgaaaattgtatctaactcctcccatttatggttattttgtagnggtgaattactttttggtaatataggaataaatcttagcactccctt

SEQ ID NO: 66162 - DNA, 414 bp, Glycine max
  unsure (1)..(414): unsure at all n locations
aacctggagacgcgctgatgagctgtcaatcctttcaactttattcaatgtnttttctggcgacnattgcatcaatttttttctaaagcacttaacatctttttcttttgacttgcgcttatcaaaaattacaacgatattaatttcttcattatctcattaaaaacaatatcaaggtgaataaatngcaatcattattagccaaaattaactcaaatttcacatatgacttaattgttcaagttcaaatcatgtgttagaagttagcaccctatcattaactataaccacttttcggttatgcttgaaagcaagggtttggaggaagagagaggaaatgacatatgcatatatatgttctcataattattattaaaacgatcaaattccatgcatatctttggggaattactt

SEQ ID NO: 66163 - DNA, 116 bp, Glycine max
gttgagctttattcagaagatgagagtttatctcttttatcttagtgagagtgattcttctaaattcttgagtgattcaagaacaccctggctgtatcaaaggactttcacaacct

SEQ ID NO: 66164 - DNA, 388 bp, Glycine max
  unsure (1)..(388): unsure at all n locations
tattcagaanattagagtttatctcttttatcttagtgagagtgattctcctaaattcttgagtgattcaagaacaccctgtctgtatcaaaggactttcacaacctttgtgtgttgccctcgctggaaagagngattctttccttcctttcatcttcacccttgttctttcaaaccacaattccagaaaatccacctctgcccaggattatctcgtggccataactcccattntacgcactccaattaagtgattcttgagcctaaattgactttcataacgagacctttcacctcgttttgcaatcacctcatttggagccatgtagcttcagttattgccatttctatatttctgtccagccaccacttaacctacattttacca

SEQ ID NO: 66165 - DNA, 216 bp, Glycine max
  unsure (1)..(216): unsure at all n locations
agctngtgacattgcatacagaagaattattctctgtanatcanggtaaaataatatacatttattattagtaggaaagtagaatctgattttgaggaaacaaactaccctctcatgtgtttattgtnatgaccacaatataatagaacatccgttgtgtactcacacacatggntttcaagccattaatatacctttngtttctcccattttaac

SEQ ID NO: 66166 - DNA, 211 bp, Glycine max
  unsure (1)..(211): unsure at all n locations
tctaactgaaagcttcgaaatggtaaaggcatgttcatcattgttgtgtccgaacctactccatttttctctaatatcataaattttagagcgatatctanttacaaattgcctgccccaagagttcatttctgtagatgaaattgacagcatagcaaggagatcatgaccatttggatttgttcatgcatactgagaaataaattccgat

SEQ ID NO: 66167 - DNA, 499 bp, Glycine max
  unsure (1)..(499): unsure at all n locations
agctngaaggcatgtaacccaccatcttctttagtagaacaccggtaatgtgtctactatcaatgttatcatctccctctccatcattgngggcactacttgagctgccagatccttccacctttgggcgtattctttgaaagattcattctccttcttacacatgttntgtagctgcattctatccagagccatatcaaaattgtactgatactgcctaatgaaggcaaccattatgtccttccaagaatggactcgggaaggttccatattagtatactaggtgacggctaccctagtaagactntcctgaagaaatacatncaacaattttcattntgtgagtatgcccccattntcctactatacatctttaggtgattcttaaggcaagtagtccccttgtatttatcanaatcccgaaccttgaacttcnganggataacgacgtcgggaactanngcacagttttgccttgtcagtaaagggcataatctct

SEQ ID NO: 66168 - DNA, 491 bp, Glycine max
  unsure (1)..(491): unsure at all n locations
gttcttacagatccctcttgtagactaggcttatcttatacagcattatcatcacagcatattcagaaaaccaaaaccccacaatccatccctggtaatgtagttatttagtcccgcttctatcaagttctaaggcaatagtacatgtgccaatgctaaagtcacctaacagtacacacaaatgggtgatcagaccaagaacatgcagtaatttagcattgaaagataattacatcaattgttccttagaaatctccaactagggtttttagtcagccatacacaaatcctaacacaaatgaggtagagagtgcataataattgttgcttacacaagaagggggatccctcctcctcttcttggcacctcacaatcactntaacactcactaatctctctaaaaatgtagaaccctaggcttctctgcacaactactcctctntgctgccttcagattactattatcgaagtctatgcanaaatatgcagc

SEQ ID NO: 66169 - DNA, 485 bp, Glycine max
  unsure (1)..(485): unsure at all n locations
agcttctggtgggacatcttgacttgttttctcttctgacattcaccacagattctgccttcttctattttcagattgggaatgcctctaacagcacctttgtcaatgatattcttcatgcctcttaagtgcagatgtccaaatctttgatgccatattttgacttcatcttctttggaggatggacatgtggaggagtaactggtttcttgaggtgtccataggtagcagttgtcctttgatctgctgcccttcattagaacttcattcttctcatttgtcaccaagcattctgactntgtgaagtttacgttgaatccttcatcacacaactgactgatgctgatcaagtttgcagtcagtcccttcaccagcagtactttgttcagactangaagtccatcatggactanctttcccatccagngatctttctttagagccatcncaaatgtcacatactagtggagcatgttcaatgtcac

SEQ ID NO: 66170 - DNA, 478 bp, Glycine max
  unsure (1)..(478): unsure at all n locations
tgtcngaacttcatttggaatctcgacatttcttctatctgaatgtagcccttggctcgctcccgtaactcgtccatgctgctggaaagcttcttgcacaatctgttagcaagtttgccaagttgtagggctagcaacatagaatgcaacgccacctcaggattaaggttcctaatttggacaacaagctgaccaaatctgcccaaaatttgtagagtggctcttcgtctacctggcttagactagcaagggcggcagaagtcacatggtgcgatcagcttgtcgcatattgagagctgaaatgaccgacaaaggtatcaaaactatcaaaaggtcggngaaggagtgctctataccacgtcaatgcagctcccttaatggacgtagggaagaatcaacataagactgtgttatcattagtgtagaggttggcctgagtgaagaatgcatacangtgctcgtctangtcggtggtctc

SEQ ID NO: 66171 - DNA, 493 bp, Glycine max
  unsure (1)..(493): unsure at all n locations
agcttatattaaanactcatcanaatttacttatatatagaaatcatagtttataagttatattattaaattttagatacggccctcacattacgattttattggattataagtatttttatgataatttatttcacacaacaaaatgaattttattttattaaattaaaaacttaaagttatatatttagtttaaaatataaaacgaattatctaacatgtaagaaagacaactagttaaaaattagtaatataatttattntgaagagaaaataggttaattattaacaatannatataaaataatttacgctatcatttcattatgaactatcttatgataaatttattgattttatattaactacctaaaaaatcattctaacaantaattttaattatctaatagtgtaaaagtttttatataaaagtagctattaaaagtgtgtagtttatattaaaagtccataattagtatttttttattttatt

SEQ ID NO: 66172 - DNA, 490 bp, Glycine max
  unsure (1)..(490): unsure at all n locations
tatttatgcatggatgaatagaccaaaacaattcacaacttactttgatgggggctagaggattgtgctctccttttcacaggttcccacttttgacttggtccaagcgtagtgcaaatatgatacctgatagaattgctcaataagcttttgtttttcgtgaacaatattggttagatgatgcctcatctcaagtggctacccatatcaacaacgatgtaatgcttttatcatttgttaatgaatgaatcatctaaccttaacgtaaaaaaaataaaaatacaatgaactagtattcaagtaagagtattgtaaatattgaaaatggatttgcataaacttactaatttatgtcttcttaatattcatgcaactaagttgactaagactccaatacatattgaaaaagtaaaaaagttcaagtgttgagttcatttcatgagaaagtagtaagtccattatgtagagcanaaatacacaagcgtgtatg

SEQ ID NO: 66173 - DNA, 347 bp, Glycine max
agcttgtagacgatgcagtatattattgtgtacatggctcataaatctggacaaagatttcaaacttcacttcaaccaatggtcaactcatatcagagagggatttttgttttaattattagtatctcacagcaagagatgtagcagttctcacttattgtagccatactatggttcctcttcaaacctcttgtcgtttattgtgggaaccatgaatattgatctaccttttgtacgttttaagacctctggtacttctatcaatatataatacttttgctgagcaaaaaaaaaatctagtactgccctattatattatctatttttgctggcaaaaaaaaataata

SEQ ID NO: 66174 - DNA, 504 bp, Glycine max
  unsure (1)..(504): unsure at all n locations
aagtcacctgcngcatcaagctaaaggtgtgaccccattcatttttttatagtaaaacactggtaatgtgtctactatcactgttatcatctccctttccgtcattgggggcaccgcttgggctaccatatccttccatctttgggcatattctttgaaggattcatgcccctttttatccatgttctgtagttgcatcctatccggagccacatcaaaattgtattaataatgcctaacaaaggcaaccattaggtccttccaataatggactcgggaaggttccaagttagtataccgggtggcagctgccccagtaagactntcttggaggaaatgtatcaacagtttctcatctttcgatgcccccatcttccgaaaatatatctttagatggttcttggggaaagtagtttccttgtacttgtcaaagtccgacatcttgaacttgggaggggtgacgacantgngtactangaacaactcttaaaggcataatctctg

SEQ ID NO: 66175 - DNA, 461 bp, Glycine max
  unsure (1)..(461): unsure at all n locations
gaacttaaactagctgtatcataccacaactgaattgtttccataggtagttttcagataacattctcaacagtcacatatttttatctgattctcaagtggccatcaaaggcttatatatatgtgactagagacacgaattttataagagttttgaagaacaaaaaggtcttatcctcttaacaagcaaaattgttttatcctcttacaaattccttggccaaaacacttgtgattcaataaggaattatttgagtgctcaaatttttcaatctatctctttcaagagagatttctttgtctcttcttctttattctaaaaagggattaagagaccgagggtctcttgttgtgaaaggattctaaacacanaagaaggattgtacttgtgtgtttagaacttgtanaagggaattacaagatagtggaactctcacgcgggttgcttggngactggacgt

SEQ ID NO: 66176 - DNA, 160 bp, Glycine max
  unsure (1)..(160): unsure at all n locations
gcttctntgagaaaacttgcttgagaagctatatctttctatacacacccatctaaaaactaggctcacctncttgagaagcttccttgagaagctagagcttaactacacacacccatctaaaaactaagctcaacctcttgacaaatacatgaaaata

SEQ ID NO: 66177 - DNA, 165 bp, Glycine max
  unsure (1)..(165): unsure at all n locations
tctgccagttgaattttatgtttctactntaactcacataatccgtttttcatatttttgtcgtgtgttcaacaataatcttgatcttctgtttatgctggatattaccagcatgtttactcttcacgatggaccatgataccaagtttacataatcttttttat

SEQ ID NO: 66178 - DNA, 217 bp, Glycine max
  unsure (1)..(217): unsure at all n locations
gaatggcctcgttgagtngtaaagttatctgtttgaactcaaatgagtcgcataggtcactggcatngtactcaatgttgagtcttcttgtaggagtcactgcttcctcattctcactactaaagaaaaggtgttttacgacgcgcattatagaacggttgtccaaaacccgcgtcatttggatagcggtggtatttttgaaataattatagttttc

SEQ ID NO: 66179 - DNA, 463 bp, Glycine max
  unsure (1)..(463): unsure at all n locations
gctaagtgaataactttgtgactatnactttggttggcatangncacatcttagacctcactcccatagaagagaaaaggaaagaaagcctcaagaggctaacattaaactctcatacttccatgggaaggacaatgtagaggctaacttagatcgggaaataagggtagagcaacaacttaaaaagaagtctacttcaaaatcttatggctctcactcttatccaaagaaagaccaaggtcaaggcatcttaagggtgacaccttctaagcccaaagatgataaggggaagacaataganaagcaagcccctaaggctagtatgcaagagaaaactagctctataaagtgctttaaatgcctaggaagaggacacattacttctcaatgccccaccacanaaaccatgattatgaggnngccaatacattatagtagccaagataaggctactacttcacct

SEQ ID NO: 66180 - DNA, 289 bp, Glycine max
gactacccatgagactaagaaaacgttatacttctgtgaatctgaagaacggtcgagaatcttcgcgaattactcacggaaacgttacagaaacgccctagcttggattttcttcaccgaaataattttcctcagcaaattcgaaagagagagaagtgcctaatgggctgaacccttttatacttcacttctccccctatttatagaaaattggcggagaagcttgccagcttgccacccagctcgcccaagcgagcagggttgcttcctccagaagcaacagctttct

SEQ ID NO: 66181 - DNA, 404 bp, Glycine max
  unsure (1)..(404): unsure at all n locations
gctaacanacttagagatcaagtgatcatgtattctcgaaatatagggggagtaaacggatgcacattntatctatatacaattgtttgttgcttgcttgaatcttgatttcaggtattgtattgtcatcatcaaaaagggggagaatgtagatgcaattggctttgatgttttgatgatgatcatgatgatgtgttgcaattgatgcaaatgggcttttcaagattaaaattcaagacaatacttcaagattacaagtcacaacatcaagatgatcactagaatattaggaagggaattcctaattgaattagcaaaggtttggccaagtgatttaaaataaaaagtgtttctcanaggttntactctctggtaatcgattaccagaggatgtaatcgattac

SEQ ID NO: 66182 - DNA, 433 bp, Glycine max
  unsure (1)..(433): unsure at all n locations
atttaatagcttatgtntaataatatactgttatataattnattnngataagctcattgaaataagtttgcttataaattattagttattttttttcaattttatttgtattattttattggaaatttctcttatccttttattgaattttaaaaatcctcttacttttttgttggttgtttgaaaaactcttgtatctatttttttataatcatgcaagtgagatatacacattcaaattcttgtttacaaataaaaaatgaatgttttaaaaaattataaggaaaaacactctntcattnttttaaaataatattattagtaaagtatttaaatgttaaaaaataattctaaacaatataattctaataaagtttatttaatttattttacctttaanaatgagaatnttgatttatcatttttacaatat

SEQ ID NO: 66183 - DNA, 211 bp, Glycine max
gagaatgccaatccttaccctcggttgcataaaaagaatagaggggaaatttccaatcaaagaaaaagagaaggaaaatttccaatgaaagcaaaaaagaaatgaaggaaaattccccaatcaaagagtgggagaaagcaaaaaaaggaaaagaaggaaaattccccaatcaaagagtgggagaaaagcaaaagaaaagaaaggaaatttc

SEQ ID NO: 66184 - DNA, 453 bp, Glycine max
  unsure (1)..(453): unsure at all n locations
tggacttaccttgaattaattcctttgatattccctttgagccttgtttccctttccttgttntgaagctcactacaagccttatatgaaaaaccatgatatcaccatatccttaaggaattttggagctttggaattgttttgggaataagtgtgaggggtttttgtttcattggataacttgttttgttggctatgcttcatgatgtantttgggccatacttgatgtacattgtatattggttaaatgttggacatgctgaatgaaatgttgtttctcanaggctatagagtaaaaaaaaaaaacaaaaattcgaaaaaaaaaagaaaaagaaaagcaataaagttgagtgaataagatcttaaatggcacaagaatgatgaaactcttggttctactctttantgttaaattntatctttacttctttttattttctattnntttctta

SEQ ID NO: 66185 - DNA, 291 bp, Glycine max
  unsure (1)..(291): unsure at all n locations
gcttctatataagctgaaccatnnattaatttacacaagttgagttttattcagaagagtagaggttatctcttttatcttagtgagagtgattctcctaaattcttgagtgattcaagaacaccctggctgtatcaaaggactatcacaacctttgtgtgttgccctcgctggaaagagagaatcttttctttctatcatcttcacccttgttctttcaaaccacaatttcagaaaatccacctcttgccaaaattatcttgtgaccataacttccatttcacacacctc

SEQ ID NO: 66186 - DNA, 440 bp, Glycine max
  unsure (1)..(440): unsure at all n locations
tcagaccaaagcaactcanaatctaggtatctaaaacccctcaattagtnggatttcaaggcttgagaagtgaaaatgagaatggngtaaacttggagcanactctcatctcanacaagtctatatcatcaatctaaactcgctcaaactggttntacgacgaaaactctaccgaatcanaatttggactcctcaacacccaatttaccctagaaatggctctggttntcactntggtcactcatattcctcattggcacagtctaagctntctcataagtcctaaatgacatttcanactaggattaactccctttaacctccanataccactaaatccagagttggcttccaactctcaaagcctcactctttttccactcataaccccacattctcactttctaaccctanggtaactctacccttcatctctatca

SEQ ID NO: 66187 - DNA, 223 bp, Glycine max
  unsure (1)..(223): unsure at all n locations
agcttcttatccaaggcacattcttggtggtgtatctncttcttccaaggcttattccttagtggttggcgcctagtctcacctcttcttctttatcttccgctgcatctccatggtgaaaaatcaccattgaaagacctcattgaagctcaaagatccaagcctcatataagccccacaagccagccttcatcacggtgggtccactctatttataaatact

SEQ ID NO: 66188 - DNA, 463 bp, Glycine max
  unsure (1)..(463): unsure at all n locations
ctttgtgtgaaaggatgtgactcttcacatttgtatttgaatttcaacgttcaaaggcactggtaatcgattaccaaaacattgtaatcgattacagctttttgaaaataattggaacgttgtaaattcaacttgaaaactttntcaaaacaattttgctactggtaatcgattataataatctggtaatcgattaccagagagtaaaaactctttggtaagggttntgtcaaaaattcatgtgctattcaaggttntaaaanactctttaatacttatgttgattgagtcttctcttcattcttgaatcttgagtcttgaatcttgatcttgaaccttgaatcttgattcttgattctaggctntcttcttgagtcttgaattcttcttgatacttttcttgaactctnngacttgtctttgatctctaagctttttgtcatcacctttgcatcatcttttg

SEQ ID NO: 66189 - DNA, 373 bp, Glycine max
ctaaaggaactagtgccgctcctaagttcgacatccatcgtttcaagagcactgagcaccagcagcgtttcgaggccatcaaggtatggtcattccaccgagagagacgcatccagctcagggacgatgagtacacagatttctaggaggagatagctcaccggcgttggacgtcgctggtcactcccatggccaagtttgatccggatatagttctagagttttatgccaatgcttggcccacggaggagggcgtgcgggacatgcagtcatgggtaaggggccaatggattccttttgatgcagacgccctcaaccagctcctgggatacccgctagtggtggaggaaggccaggagtgtgagtatagtca

SEQ ID NO: 66190 - DNA, 478 bp, Glycine max
  unsure (1)..(478): unsure at all n locations
ntgatgaaggcaacattgatgttgccatagtattagaattttattcaaacctctatgacccataagacaagtcacctaagcaggtgcgagtcaggggtcatttgattaaatttgatgaagatactttgaatacttttatgaagaccccagtgattgtagaagagggggagaatttatatgtttattcgagatttgcactcctgaggcctgatcctcaggagatagctgctaaactctgtatcccagggaggggatttaagctgaatgttgatggtctccccttgatgatcttaaggaagaacatgactactctcgctcagacatggagtgttctttctattgtaacttgatcccaacctcccacacttctggcatcacattggaaaaggccaagttaatctatggcatcttcatgaagatggatatgaatgtggggtaccacatctnccaccagatctctattactgaacaacacgat

SEQ ID NO: 66191 - DNA, 477 bp, Glycine max
  unsure (1)..(477): unsure at all n locations
agcttctaaactttatacaagaatgatgttcttataccactnngtnggctnctttaaagatcttcattcaggttntccaataatgataaccctcaccattgaacatatgagcctattgatagaattntcctcagaaaatggaaatttggatgaggccatatctattcttgaagtttttaaactgtatacaagaatcctgctctgataccacttgttggaccttgtggcctcaataatcttacgagggataggcttagaatacagaagaagcaacaacaatcaatttaacaatgttctttaaacatgcaagacacaattgattgcaacaaaatatataagataagggaagagaaaatgcatacaccaatttatactgggttcggcactttccgtgcctacatncagtactcaagaacccacttgagatttcactatctttgtaaatccttacaagtctgaccacacaggacaaccatc

SEQ ID NO: 66192 - DNA, 457 bp, Glycine max
  unsure (1)..(457): unsure at all n locations
tctncccttatttgctataaatagggggagaagtgaagattatattgtgttcagcctcttaggcacttctctctctctcaaaattgctgaggaaaattatttccgtgaagaanatccaagccgaggcgcttccgtaacgtttccgtgagtaattacgcgaagattctcgaccgttcttcaagattcatctttcgttcttcattttcttcagtcttcaacgggtaagtacctcaaaccgagcttttcaattcattctatgtacccgtggtggttcacattatgtttcatgtatttttattctcgttntcatttgctttttatacccccttttgacgtgcttaagccatttatttaagtcatttctcgcttaatctaaaaataaaataaatttccaccgatcgttngaattgtatcataccgttaatttggtaaaatgaattccgactgttcggtcatg

SEQ ID NO: 66193 - DNA, 98 bp, Glycine max
  unsure (1)..(98): unsure at all n locations
gcttcaccaccaagagagtgccttgttaatatgcttatagaggaagcttcaatggagaanaagaatgagagagagagtgatgntagatccattggagc

SEQ ID NO: 66194 - DNA, 406 bp, Glycine max
  unsure (1)..(406): unsure at all n locations
ctcaagcttctcccnncatttgctatatataggggaagattttgttattanaagggttcagccccttaggcacttctctctctctcgaaatttctggcgaaaattagttccgtgaagtaaatccaagccgagccgcttccgtaacgtttccgtgagtaattacgcgaagattctcgaccgttcttcaagattcatcgttcgttcttcgttttcttcagtcttcaacgggtaagtacctcaaaccaagcttttcaattcattctatgtacccgtggtggtccacattttgtttcatgtatttttattcccgttttcctttactttntatacccccttttgacgtgcttaagccatntatttaagtcatttctcgcttaatctaaaaataaaataaatttccaccgat

SEQ ID NO: 66195 - DNA, 338 bp, Glycine max
  unsure (1)..(338): unsure at all n locations
catgcaagcttagaccaggcaactcattactaggtatctaaaacccctcaatntagtggatttcaaggtttaagaagtgaaaatgagaatggngtaaatttggagcaaactctcacctcacacaagtctataacattaatctaaacttgctcaaactggttttacacctaaaattccaccgaatcaaaanttgactcctcaacacccaattttaccctagaaatgaacccttgtttcactttggtcactcatactcctcatttgcacagtctaagctttctcttatagtcctaatgacatttcaaactaggaataactcacttttacccccaattacc

SEQ ID NO: 66196 - DNA, 401 bp, Glycine max
tgccgctggagctgacccattaacttgtctatctttttatacttgtgatccctaggctcttgaccttgacttgatagaaccttttttaagcgaaggtgtttgacttgatcccatgttatactaatgtgaaacaaaatcggtgcgaattaaaactccgacatctagcatgggtggaatggatgaatgcatgaagaaatgcatataacacagatgcaatctatgaatacgggatcccgagtaattgactccttcttagatacaacgacatgggggtagcaaagagctcgacgtatgtatttaagaaggtggtacggaccctccgttggattgccaaagagaggggatcaaaatataatacgtgcgtgatgcatatgcgaaaggcacaacacttgtaatgtaca

SEQ ID NO: 66197 - DNA, 392 bp, Glycine max
  unsure (1)..(392): unsure at all n locations
catgcagctngtagagtagaagtatttgttttttatatggagcnganngccttatcatctcattatatgtggatgatcttcatttgacaggaagcaactcatatctttgggagaagttaaaggaagagatgatgatggtgtctgagatgctcaatcttggttcaaggaaattctttcttggaatggaaattaaacaaggagaacatgaagtcttcatctctcaaaagaagtatgccaatgagatcttgaagaagtttatacttgaagaatgcaaagagatgaacacttctatgaatcaaaaggaatagatttgtcacgaagatagaaatgagaagatagacgaggcatatattataagcatgactggttgtngatgtatcttatagaaactc

SEQ ID NO: 66198 - DNA, 456 bp, Glycine max
  unsure (1)..(456): unsure at all n locations
ctgacatttcagcaatgaagaggttgtgagtttgcttacatttttcggatattgcgtcgaagacaacctataagacatcattgtttgagtccgatggtccaattgacgaagatgtgctgaggcagtttgagaaggaggttaaggatagagtgaagattgcacggatgatcattgttgaggcgaaagagaattatgataatcagttgaagatccagaagttgaaggacacaatatttgcagttcatgagtcacttgcaaaggcgaagaagaatggggcgttggcgagcttgatttcggccagatcgattcccaagagcttgcattgtttggcgatgaggctgatgggtgagaagatttcaaatcctgagaagtatagagacgaggagccgaagctggagtttgaagatcccactttgtatcattatngcatattctcggataatgtaatagctgtgt

SEQ ID NO: 66199 - DNA, 430 bp, Glycine max
  unsure (1)..(430): unsure at all n locations
ctactcatcttatgttttattacagntaagaacaatgtattcaaaggtgtactctntntccttactntgctttnttccctataagaatgtgaaagggttttttccgagaaggttttaacgagacaccccttcaattaatgaatatgaatcctttttccacatatttgcgaaccttcaattgttaccaggtttccctcccaaatacccctattcaactaaggacatacttcaattgttataaggtttccctcccgaatacctctattcggctatggatgtaccttcaattgttacaagggttccctcccgaatacccctattctgctaaggacatacaatcaattgttacaagggttccctccctaatacccttattcngntaaggatgcacattcgatcatttacaagnttccctctngaatacccctat

SEQ ID NO: 66200 - DNA, 446 bp, Glycine max
  unsure (1)..(446): unsure at all n locations
aaccctacaagaaaatcataaaccctgtgtttttcaataaataccttcggaacagcagcatcttcagcacaattagtcttaattactttgtgatgaactaattccatccaaagagactttaaatggtcagcatattcagtaacagaattgtttccctgttttgcagctaatggtttcacctttacatcatagacatgagcaaacaacttagttttagaataagtttgttctattgcgtcccaaatttcttttgctgtgctgagaaacataatggtatcactaatctctggattcatagaattccataaccaagcaattatcaatgaatcttcctcatcccatgcctgtannatttgggtctcccttctttggtccagcaccagtcaaagtggctgatttcccttntncattttagagtcgaaagataagctgtgacgacttcaaat

SEQ ID NO: 66201 - DNA, 423 bp, Glycine max
  unsure (1)..(423): unsure at all n locations
atgatcagttgagtnattactttttataaataagagtgaaaatgtattcacaaatatagtggtttccaccagaagaacaaaccctattagagtaaactagaacaaataaaatgttcaaatttcagaatagaattaaatatcaaatattagaagcattaggcaatagacattaagaacatcntttgtatcagtaatgtatttgcatttgaacaaaaaactgcaaaaatataatttataatgattttacttttctattgtggccttcgaactacagntaagatatttacaatcaaacaagaatcaaacataacaaaaatatactctaatcaagtagacctaggatcactgcttatctgtaactactatatttactatattcataactaanagtgatgctaatgcaatgcttactggtgtagacat

SEQ ID NO: 66202 - DNA, 376 bp, Glycine max
  unsure (1)..(376): unsure at all n locations
actggttcccctaattaaaaatctatttcactttttacttcaggtatgaattcccttaatgaccatcttcttaaatattaaattcaatgaaacaatttggatatgaatataaagccataataaataataggagattaagggaagagaaaatttaaactcagttttatactggttcggccacacccttgtgcctacgttcagtccccaagcaacccgcttgagagttccactatcttggaaattccctttacangttctaaacacacaaggacaatccttcctttgtgttagagatcccttacacagagactacaggctcttaatcctagagatgagaagagaagagaacaatctcttagaagagaggatttcagat

SEQ ID NO: 66203 - DNA, 481 bp, Glycine max
  unsure (1)..(481): unsure at all n locations
acgcacctgcagctgaagcaactgatgcatnggtatcttgttttctcagctggccttgaatcagaaatatgtacctgtcgcaagggtttgtggnttatgctcctctgctgaccaccatacacacctttgcccttccatgcagcaacctggagcaattgagcagcctgaagcttatgctgtaaatatttacaatagacctcctcaacctcagcagcaaaatcaaccacagcagaacaattatgacctctctagcaacagatataaccctggatggaggaatcaccctaacctcagatggtccagccctcagcaacaacaacagcagcctgctccttccttccaaaatgctgctggcccaagcagaccatacattcctccaccaatccaacaacagcaacaaccccagaaacagccaacagttgaggcccctccacaaccttccctcgaagaactngtgaggcaaatgactatgcagaacatg

SEQ ID NO: 66204 - DNA, 457 bp, Glycine max
  unsure (1)..(457): unsure at all n locations
atgattcanagagtttcgatgataacaaagactatgactaaaagctcanaagtcaagaacacttcatgttaacaaagatgatgacttcaagaatcaaagaatgaattcaagattgaatcaaaaacacttcaaggatcaaaaggaaatttgatttcaagaatcaagaatcaagtttcaagattcaagttccaagaatcaagatcaagattcaagactcaagattcaagaatcaagagaagattcaatcaagataagtattaaaaagttttttcaaaatctgtgtagcacattaatttttctcaaaaaccttttaccaaagagtttttactctctggtaatcgattaccagattggtgtaatcgattaccagtagcaaaatgtttttcaaaagctttcaactaaatntacaacgttccaanntgattcaaatcttgaatcgatataatgagttggaatc

SEQ ID NO: 66205 - DNA, 234 bp, Glycine max
  unsure (1)..(234): unsure at all n locations
aactaaggaacattatgtggtttgttggacggctatgataacagttttccatctacatggttgcgcaaatgaggcgatagaattgtttgaggagatgctcaatgaaggggttgtgcctgaatacattacttttatttccatcttgtcggnttgcagccatacggagaagattgatgatnggtttaagtacttcatttccatggctaatggtcataacattaaacccnggcttga

SEQ ID NO: 66206 - DNA, 441 bp, Glycine max
  unsure (1)..(441): unsure at all n locations
agctggaattatatttctatcctggctgcatggtttgtgtcctgatctgatgaataagtttgagtggtcgagttctgaagccatcattttgtctgatgacttgttgctttcctcctataccgctggatgggtgggtttgtatctgattcatatgtttggattaaaagcttttgtgccggaaaatagttatatatcccttgaacgttctatgtagtgttttttaattacctatttttttgtcacttaaagtactaggatgatgcatttgccacacaatatggaagatttattntttatagattattggaaaatgacctagacatcctggagatgcaatggattntagtagagacttctaacatggtggcatgacattatatcacaatntacgttcatctctcatttctaaaacttctatttcaggcgtttcatacgtaaatg

SEQ ID NO: 66207 - DNA, 398 bp, Glycine max
  unsure (1)..(398): unsure at all n locations
ttaatggnggntttccaccatggagatgcaacggaagacaaaggagaataggtgagaggaggcgccatccactanggaataagccatggaagaaggagcttcaccaccaagatgagccttggataagaagcttggagaggaggcttcaatggaggaaaagaaagagggagagaaagagagaggggggagcacgaaattgaaggaagaaaaaaggagagaagttgaactatgagttatgtctcacaagactctcattcatcanagttacaacaagtgttacacatgcttctatttatagactangtagcttccttgagaagctttcttgagaaaacttccttgagaagcttctttgagagaacttncttgggaagctagagcttagctacacacacccc

SEQ ID NO: 66208 - DNA, 101 bp, Glycine max
ctgcactataatcaatgctatttttttctttctggaatagaccatacaaaataatcaagctttggcagcatcatgggcaaacacccaatgatatatgatga

SEQ ID NO: 66209 - DNA, 477 bp, Glycine max
  unsure (1)..(477): unsure at all n locations
gaagaactcagaattatgatgtagtgaggcatgtatatttaaatgttgattatgnatagggggtattntgaaatttgattaattgtttgcatatcctatgtataacactataaaatgggataaatacattggtcttcagatttcacctcaataaacaaagttgatgcttcacgtggttgcaacttttgaaccacctctgcaactacttcctacaagagacaacacagattaataaacattacaaaaaacaattgtatgacttatgtaaatgaatctatcanaatcacatatatgaatagaaaattacattagacgatgttaattaattctccttcatcatgatcattacgattagcatgaacatcatcagcttcttcttctccgacaatgttaggagtgatttgtgtggacaaaggactaacatangtgtccatgtatgaatcatcatcttctatattaacaccaatnngtttgcta

SEQ ID NO: 66210 - DNA, 497 bp, Glycine max
  unsure (1)..(497): unsure at all n locations
agctngngctcttgcctcactcaccgtctntttggtttcatttctagctatcttatacttatcccaagtttcagaatttctacacctagaccactccttgaaacactccttttttactctaactntgctctgaacactntcattccaccaccacgattctttacccctaggtccaaaacctctagattcacccaacgtctctttagccactataataatctcttgggacgtcttgttccacatatcatttgcacttccttgtgattgtccacaccatccctcccatatcttttgttggaagattccttgtttctcaacccttcaagtgccaccattgatccttggtgctatcataggacttcttctctntgccctatctctaattcttacatccataaccaaaacttatgttgngtagtcaagctctctcccgggataactntacagttcaagcaatacttnctatcagacttcctgataaggaagaaatctatctg

SEQ ID NO: 66211 - DNA, 470 bp, Glycine max
  unsure (1)..(470): unsure at all n locations
ttttgcttcttgttgagtaatggcctggtgatctcacttttttgtctcatngnnattggggtttccccatatctgtgtttatgcatatttgcatatggttgccataatggttcacaccatgtcttccttgattcccctttttgattatggtttctttcccattaatggaagatctctnttttatccatttctccctgcaaagggtttatcagctgttcctttcattgaaagcgaaaagtttgacccactagttcccaattccatgctgtgtcccattatttaataatttgcataggaaccccatcacttctcccaaattattcccccacttcatttaatttcccttaacccccttgaattgattgaagctaagcttcacaccaccaaggtgttagttaagactcatttaatttaactcctcacaatntacagtacccttttcctcccaattaagtctcacatttcattaa

SEQ ID NO: 66212 - DNA, 444 bp, Glycine max
  unsure (1)..(444): unsure at all n locations
ctgatacaatactggaaggaattccatgtaaccttactacttctttgatatacaactctactaacttctccattntatatttcatatttaccgggataaaatgagcagatttggtgagtcaatctactatgacccacacagcattgtgtccacgactcatcttgtgtaaactagatacaaaatccatagatatactctcccatttccattntggaatttccagtggctntaattctcctgatggtcgctggtgctcagccttggccttttgacatgtcaaacattttgctacatattcagctacatccttcttcatgccatgccaccaaaaacttctcttcaaatcttggtacatcttagtcattcctggatggaaactaagacgactnttatgtgcttctttcaagatcttaactntcaaatcatctagaggcgggacacata

SEQ ID NO: 66213 - DNA, 474 bp, Glycine max
  unsure (1)..(474): unsure at all n locations
actggatgcattggttaacttggtaacccatctggtcttgaaccaganatctgtacctgtcgcaagggtctgtggtttgtgctcctctactgaccaccatacagacctttgtccttccatgcagcaacctagagcaattgagcagcccgaagcttatgctgcaaatatttacaatagacctcctcaacctcagcagcaaaatcaacctcagcagaacaattatgacctctccagcgacagatacaaccctggatggaggaatcaccctaatctcagatggtctagccctcagcaacaacagcagcagcctactccttccttccaaaatgctgctggcccaagcagaccatacattcctccaccaatccaacaacagcaacagccccagaaatagcaaacagttgagggcccctccacaaccttcctcgaagaacttgtgaggcanatgactatgcagaacatgcagtntcaaca

SEQ ID NO: 66214 - DNA, 287 bp, Glycine max
  unsure (1)..(287): unsure at all n locations
gcatgaaacacgagcacaatgaatgtcanaagagttggttgaaataagtgcatggtaatcattaatccactcagaaatacccagagataaccctatttcatgaagcatgagacgttgctccatattgctgcattcacatanaataggtgaagcggccttctttgaaacagattgcatcccataaagcaacacattagaagcaaaactgtgaaattcaggctgttagtacccagaacatcaggacagaccttgaccgatggatgctccttactcacttatgcatgtgt

SEQ ID NO: 66215 - DNA, 500 bp, Glycine max
  unsure (1)..(500): unsure at all n locations
tattggttcccataatactacagaatttctcttcctggttgtgtgaaagcattngattggcaacattgcagcaatatgaacttacgggtagcatattgataagaaaaaatctgtcaaaactcaactgatactgaccaaatgaccatgcctccgattaccaaaataggattttaaatctaatctaatctataatccactactaacaggaaggtcatgatttataaaagaacagacctggcgactntcatgatttcccctcagaatagtaatacgctgacgataacgcactttaagggcaaccaaaagctgcattatgacttaattagcaccaaaaatgttacaaaacatataccatatggtagcaaaatatacacaatctaaaatacgccaattaaaaatagcattatcaacttgtacctcagacttcagttgaatgtcatacacatctctgcatggtaatggttaatttaatttttttttgctccgcaatggttacttat

SEQ ID NO: 66216 - DNA, 471 bp, Glycine max
  unsure (1)..(471): unsure at all n locations
agcttgtcagcagtcttttctccatatacttctcccanaacttcatcacctagtgataataatattgcactatatngccttttcattatcaccattttctgtgcagctgtcatttcggctggcagcatttcttctccttccaacgccaactcacattcttgttgcgtgaggagagcgagcatctttacccgccataggttgaagttatntttgccagtaaatttctcaacgtcaaactntgtagacggcatagctctgataccagtttgttgtgcttaatcgtctatgacgtgaaaattatactgcaaagaatctctntattaatgagaaaagaaaacaactacaaagaagaattctcttgaattctttatctctcaaaactctctgatgtttcttgatggaatgaaaannttataaccttaatgaccctnntataataggatccaaagaatataaaccctctacttacat

SEQ ID NO: 66217 - DNA, 475 bp, Glycine max
  unsure (1)..(475): unsure at all n locations
ctatccaaataaagtacctnntaaatttatgaagcttccttttgtgattagaattttgtctccaatttgagatcaattntgtttgctcagtgtgtgattntcgtacaagccattcttttgttctttatgttaaagcttgcattctcaacgttntgaaaggaagattctgttnttatttctttttcttttcccttacgatcttatgcttctcttgactctgcatgcttttaactttttcttttttactatatactgatgactgtactttcaatagtattattaaaggttaatttcttccaattacccttattaatgtttaccttccatttcaggatcaggaattaattaattaacatgtttcattcccacttaattagcannagtttctgaattaacaaaaggaanaggggactatgttttctttctgtctctctttacacataagagagtatcctggtcaatactcaactcacgt

SEQ ID NO: 66218 - DNA, 413 bp, Glycine max
  unsure (1)..(413): unsure at all n locations
gctttatgcatggaaatgaattatgaaatttatatgcccgaagaaacaccatttnctagttaaccatgcattaggtaccatgttcaattatttgtttttaagtgaaacgggtttatgatcccaacatggttggctcgtggtgcctaacacatgaaactaagaatgtagtgtgaagtttcacgcttcctctttttttggttttgtnttgtagaggaaaacgcaaggatgagcaaacatgaaaacaaatggtatgcaattttgcagatcanaaagtttggtgaacgcatatgcatgatgatgccatgactcatgcaaaatgtgaggctggaatatgataacggacaaatgcatgatatgtncattatgatgttatgaagagatgcttatgcgatgcatgatatgaattgcattta

SEQ ID NO: 66219 - DNA, 228 bp, Glycine max
taagccatctttcatataacaatcacttcacccagtacttcttatttacagttcggcattccattaactcaacactcaaacctaacaaaggatgtactatcacatgaattacacttccaatttccaatcatctgaaaaaacagaccctaattcaaccctcccaattaaaaaaagcacaccaatcaaccctagcccctacatcaaccctcttcatggcaagagcagtac

SEQ ID NO: 66220 - DNA, 396 bp, Glycine max
  unsure (1)..(396): unsure at all n locations
atcgtttatacaagaaattntagcaatatanttttatttatttntactgtaagtgtataaaataattaagaataattgaataatatataaatataattaaaataattaaagattaatattatcttaaatttttaatgcaataaaacaaatatgagccatttttaaatatgtcaattgataactgctaaataaatgtgcttttgataatgagaaataaagtgaaattgtatttaaaaataattatttagcaattatttatgcttaattgttaagaattaatgtttttctaaattatggttgtagatataaaaattggagggattaaaaacaaaaagttacagaaattacgaagaaagaatgaagaattagcatcagacccagcccaagacgcgctcg

SEQ ID NO: 66221 - DNA, 500 bp, Glycine max
  unsure (1)..(500): unsure at all n locations
gctggaggaagaaggagatgaatgaaggtatatgaaaataatagcacganattttgtgctctaaaagagctttngaaatctaaatttaattttcaaatcatcaaagttgaaaaaaattcacacacatgacctctatttatagcctaagtgtcacacaaaattggaggggaaattgaatttcaattcaaatttcacttgagtttgaaattgaatttgtggagccgaactttggagccaaaatttcactaattatgattagtgaattntagttatggttcagcccactaatccaagatcaattccaagattctccactaagtgtgcttaggtgctatgagacatgtaaagcatgaaggacatgcacatagtgtgactatatgatgtggcaatgtggtgtagtaagcaaatgcttacctccccctctaaaatttaatgggatggggcttcaaccaattcaattaatattatttccaactacacacatcanatattcacttagt

SEQ ID NO: 66222 - DNA, 475 bp, Glycine max
  unsure (1)..(475): unsure at all n locations
gctgaactcttggcaattcttgtaaactattcttcttaaaagttatgacntttgaaagaatcttcagaaacaagtcacttgaagaattgtgacttttggaaatgtatttttcaaaatcagtcactggtaatcgattaccattaaggtgtaatcgattacacatcaacagatgtgacttcattttgaattttgaaaatcttaacattntaaaacactggtaatcgattacatgattatggtaactgattacagctntgtaaatcagtttgaaaaaaatgctggctactggtaatcgattactaccttctggtaatcgattaccagagagtaaaacactttggtaaaaaatttggtgaaaacttcatgtcctactcaatgggtttgaaaaagttttagtacttatcttgatngagtcttctcttgattcttgaatcttgagtcttgaatcttgatcttgattcttgaaatcttgaac

SEQ ID NO: 66223 - DNA, 453 bp, Glycine max
  unsure (1)..(453): unsure at all n locations
tacgtcgtcttccgtgcagacattctattttattctaactcgngaagntagggggcaggcggaaatacccaagtggttatccggataaacattcttttaatatctctaagactcaacgcatgatagcatgcagagactaacgtcgtcttctgcaccttttgtcaatcgcggccaacangcccattgccacgtggagatttacgtcatcttctgtgcagacagcctctgtcagtactaactcgtgaagttagggggcaggcggaaatacccaagtggttatccgtataaacattcttttgctatctctaagactcaacgcatgatagcatgcagagactaacgtcgtcttcggcaccctttgtcaatcgcggccaacaagctcgttgacatgcaaagaattatgtcatcttccgcgcctgtcatctctatcaatactatcccatgaagttaggg

SEQ ID NO: 66224 - DNA, 465 bp, Glycine max
  unsure (1)..(465): unsure at all n locations
ctaactactctgattaaaggaaatatatcaggacttaatattcntgaaataaatatgaatctgtatctttctttaaaagtaaattatttatatattcttcttattttatgacatgtattataaatattgatataaatcaagagtttaaatataataaagtaccgatttattttaaaagaaaatcatcagtgaacaataaaatactacattattaatgaaatactatacaataaaataggaaataaatattaaatatttatattctaaaaagattaaattaataaaaaaatatgatattaactaagaacctaattgattagatctccttctctcacaaagatagtctgtcacacactccctccaatcacatncaacggttggaaacaaagcaaattcttntgatgttntaacnttctagaatgtctcttgcatgagcacttttaacatttattaatatttaaaata

SEQ ID NO: 66225 - DNA, 463 bp, Glycine max
  unsure (1)..(463): unsure at all n locations
atatgtatgatgaaatatgatatgtacttcatcccgtccatttcttttttaaaaccctcgtagatatatagacacattgcaccttattagtttccttatggtataggatgcacttccatttcgttttagaactcatgtagataggcatattccaccttttagtttcttagtagtagtgaataataaataatatatataatatttaaaagatttctctgaaaacgatggttgttatcaaactatcgactcaaaaagaagagaggagttggatttctcattntctacggatataaggggtaaaaaaaatgcgagttggaattattcaaatgactagaatattcttcagttacagtttgactccattaatattttctggctttttaaacanaaaatattttcaaattaaagaaataaattcaactcttacagggtagtgcccaccgtattaatattataatcttat

SEQ ID NO: 66226 - DNA, 469 bp, Glycine max
  unsure (1)..(469): unsure at all n locations
agctnggatgaagatgagaatctcttccttcttcatctctaaatcncatccaccaccacttgcatcaccaaggagagctccaaaactttgctttcctcaagctcttactctactttctcttaaactctctactatgagtgtttttaagtgtgttaaacccaaataatccttggggtatttatagggtaaatgtgaggcatangtagtaaataagaccaatgagtgttaaggatcatatatgtctttaggtacacattaattgttcttatcttttaactttatctttttcttttcttttattaattagatattctagatgcttcatgggttattagagtagagattgtaaatgtatgtatacatgattgtgatgatgccaaagaagaatcanacaacgccgcttcataaggataagcactgcttcaagattaatacaagattacttcaacacacaaagcattgattcaag

SEQ ID NO: 66227 - DNA, 345 bp, Glycine max
acctttatcttaaaagcaagttcataacccagcagcttatcaagtgcttggggtgaagcagttaaatcaacatcaccatccttgtgcaaagagaataattgtatcacactaactaaaaataacaaatcaaagataaagagttacttttgaatccaaaaacgtaccttcaatttaagcttattaactgcattagctgattgaccaattaattcactacattcacggtcccaaagcaggaatattgtgctttcatctccgtggttgatcatcacctcaagcctatacctgctaccatatgtaccaacagtgtaaaaaagacaaaggtatgaagaatacataacattt

SEQ ID NO: 66228 - DNA, 441 bp, Glycine max
  unsure (1)..(441): unsure at all n locations
gcttaccctctttaatgaatttataatgcagaaganaaagaagaagaaacaatcaatttaacaattttcttttaaatgagtaagataaaattgattgcaataaaataaatgagacaagggaagagagaaatccaaactcgatttatactgattcggccacgccctgtgccttttcaaaatggtttgaagagatatgtcttttcaaaaagctntnttnttttttttttgaatttttcactcgtaatcgattagaggtttatggtaattgattacacagttatattttttgaagagtcatgacttttgaatttgaatttcaagtgttccgttgctggtaatcgattacaaacatttgataatcgattataggttcaaaattcaagttcaaaaccctnttttaacaactattttcaaaattgtcttctagtaatcgattatact

SEQ ID NO: 66229 - DNA, 360 bp, Glycine max
  unsure (1)..(360): unsure at all n locations
acccggaatgggtttaggcaaagacaatggcggcataactagcctgataaatgccaaaggaaatcgtgggaaatatggtttaggctataaacccactcaggcggatataaagagaagcatcgcgggaagaaagagcggtggtcaaagctcgcggttgagacaagaaagtgaaggaagcccaccctgccacataagtagaagctttattagcgcgggtctgggagacgaaggtcaagtggtcgcgatatacgaagatgatgttccgagtacatttggattggtacgaccatgccctcctgnattacagctgggaaattggcgagtggaggaaccgccccgcatttacgcaacgagcataat

SEQ ID NO: 66230 - DNA, 384 bp, Glycine max
  unsure (1)..(384): unsure at all n locations
agcttagccctagaggggatggaccttttcatgttttggagaggatcaataacaatgcctataggttggaccttccagaagagtatggagtcagcaccacttttaacatttctgatttaactccttttacaggtggagctgatattgaggaggaggaactaacagatntgaggtcaaatcctcttcaaggggaaggggatgatgcaatccttcctaggaaggaaccaatcactagaaccatgagcaagaggctccaagaagattgtgctagagctgctgaagaaggccctanggttctcatgaaccttanggtagatntctgagcccatgggccaaggttgggtccaattatctttttacatattagaatangatgtcattata

SEQ ID NO: 66231 - DNA, 419 bp, Glycine max
  unsure (1)..(419): unsure at all n locations
tggngtacccatcacatgtggttctatgtgtcggtcgggcgatggtgcacaacangtttttccacatccacaatgcgcgcataaacccaccatcccctgtagcccacctccaactgagctcacgtactcccacgtagcccatatcctcgtttctctcaacaccgggtccccatcaatcctcccaagcttccccaacatcaaagtaatacaacattcaaacagcacaaactatcacagccaagaaaacagagcaaaggcagaaaactctgccaaaacaccaaccaaaatcacagctnttctcacttaaagaccccagtaacaattccttcattccaattcgttaaccggtggatcgaactccaaattttactggaagtctctagtacataagcctacantttgaccggtgggatctacta

SEQ ID NO: 66232 - DNA, 500 bp, Glycine max
  unsure (1)..(500): unsure at all n locations
gcttgagccataatctcaactcaccttatttctttatacgagatgagaatntctatcggcacccttggaagaaaacaaaaaaagaaaaataaagttcccaatcaaagatcggaagaaatcatattagaaaaaagttctcgatcaaagatcggaaggaaacaaatgaaaaaaaaagttcccagtcaaagatcggaagaaaacaaaggataaaagaaaatccccgatcaaagatcggaagaaaatgaaagaattatacagaagggtctttggaccagacaaatatccaaacaatacagaatagtcacaacccaataaggaaagaaaggaaaccatgacttgaagtggtcctcttcctttgattgccaaccaaaatcttgtgcgctgatgactttctcgccccgcactaaacaaaaacagaaaagggaaaggtcaaacactcagagccaatatctaccaaaacaccattctcgaatagtcctattgtccatgatacacatgta

SEQ ID NO: 66233 - DNA, 478 bp, Glycine max
  unsure (1)..(478): unsure at all n locations
aggcatgcgaagtggttggaattcctatagcaatttccttatgttatcaaacataaaaagggaaaaggtaatattgtagccgatgctctttctcggcgtcatgcattactttctatgcttgaaacaaaattgattggtcttgaatgtttgaaaagcatgtatgaaaatgatgaaacttttggagaaatttttaaaaattgtgaaaaattttcagaaaatggtttctttagacatgaaggctttcttttcaaagaaaacaaattgtgtgtgcctaaatgnttctactagaaattgcttgtttgtgaagcacatgaaggaggtttaatggggcattttggggtccaaaagactctagaaacattacaagaacatttttattggcctcatatganaaaggatgtgcagaaattatgtgaacattgcattgtatgtaaaaaggcaaagtctaaagtaaagcctcatggatggtatactccat

SEQ ID NO: 66234 - DNA, 131 bp, Glycine max
acaggcagatgagagacctttttatacaacgagccgcacgatatcactaaaaagcgggggagcggacaataacaaagtaaagaaaaccccctccagtacaacaaaaggtaggaaaaaggcccacttgaccc

SEQ ID NO: 66235 - DNA, 400 bp, Glycine max
  unsure (1)..(400): unsure at all n locations
ccaccattgaaaatgttgatatcatttatctatgtcccttttactttatcatggggaaaaaaaatctctgtctaaggtgactttcgtggtgactcaattcacagatagctttgtcctctgggaagatgaggaaattttactaatgatgggatttcaccaatcacaatagtagcattgtagtctcactctcacatcccaatcttattttacagagactgtcttcaatttggacatcttagctaaagggaagttgccttcaaatagcatatgtagttntaaattgggaagttctgttctatcttacaatgtattaagagaaanacannatcttgtcttcaaacttctatagcttaacaatgtaagttattgaatgtttaacatcttccctacaaaacatcag

SEQ ID NO: 66236 - DNA, 465 bp, Glycine max
  unsure (1)..(465): unsure at all n locations
agcttgcaataggctcattcaatcacttatttcaccannaagttttggatccattccttagaagcccgagggagttatgaaacaaagtattaatattntgcttaataccatatcaaagagaagaagtaatatgtgcccaagtgaaatgatgattgtttgcaactctagctcacaacgttaaagcccattgcacatctgtagaaactagctcccaatcaagttgccttgttgatatccaagaccaatgataaacctgaatttgactatattttgatgtgaattttcatgtcatatccatgcatattgatatatnttattttggcaaaactcatggttgggtattaatttgtgaaagacatgtgcttaagacgctaaatgtggaaaagaactaaanaatcatgaacttttcacctaattagaagatcatagtcaaggtgantntgtacaatcgcgggtaattttatg

SEQ ID NO: 66237 - DNA, 467 bp, Glycine max
  unsure (1)..(467): unsure at all n locations
tctatagaaggttcgntcctaatttctctacaattgcatcacctctcaangagttggtgaagaagaatgtggcatttacctgnggtgaaaaacaagagcaagcccctgctttgcttaaagaaaagcttactaaggcacctattctagctcttcctgacttttctaaaacttttgagctagaatgtgatgcctctagagtgggagttggagctatattgttacaaggtgggcaccctattgcttattntagtgaaaaacttcatagtgccactctcaactaccccacttatgataaagagctntatgccttaataagagccctccaaacttgggaacattaccttngtttccatggaattgtcattcatagtgatcatcaatcacttaagtacattagaggacaaagcangttaaataagaggcatganaaatgggtagagtacctagagcaatttccatatgttatc

SEQ ID NO: 66238 - DNA, 474 bp, Glycine max
  unsure (1)..(474): unsure at all n locations
gcaagctnggaaaaggcagagagcttgttatcttttttacctcatagcactaaggggcacaaaccccaaatggcactaagatccacatatggggttaatccttaaacaagaagaaagcatcctattctttggcctcttgagatagcgtggggggtttatgcgttgagcgtaagaaccccagccttgttttgtgagattaatgaatgaattaactaaccaatgactttggaaacaccaatatttgtaccttcacctttgagcttacatatggcaatggttttatacaaataatataaaatttgttggtgaagtatacatacatatatacatacatatttgatcaattagaacttatacttggagtaaacaacactaagagggtgtttntttgttattttggacatatgatttcttaaaantctgtagggtggtctaattgtgaagggtggtattcattatatcttaatcattctc

SEQ ID NO: 66239 - DNA, 474 bp, Glycine max
  unsure (1)..(474): unsure at all n locations
gagttgaagagggcgatgacaatatctccattgttttatttgcccgaccctaagagaccatttgaagtgtattgcgatgcgagcgggcaaggcttgnggtgtgtgttaatgcaagagggaagagtagtggcttatgcttcacgccaattgcgtcctcatgaagttaactatccgacccatgacttggaactagcagcggtggtctttgctttaaagagttggaggcattatttatacggtactcattttgaagtgttcagcgatcacaagagcctcaaatacttgttcgatcagaaggtactcaatataaggcaacgaagatggatggagttcctcanagattatgattttgctctttcctaccatccaggaaaggctaatgtagtagtcgacgcgctaagccggaagtccttacatgttgcgaccatgatgagtctggaacagagatngatagaggaatttcgagatctgaat

SEQ ID NO: 66240 - DNA, 483 bp, Glycine max
  unsure (1)..(483): unsure at all n locations
gctgctntagataataagttattattgatcttttgatatccgggcatgtagtactattaattttactgttaaaaaaagtacaactcatactcgtggtgtgaaaaaaagaggctcctcctccaaacactttgttagtggaccccactatctggaaacttaaagaaaggttgaagattgcacgacacttcacttttttataatctggtaaagttgtctgcttttccacatcatccacacacaacacaaccaacatcaacatgcttcagatnttgaatttcaaatttgaatgtatagtgtaggcgcccacaaacaaacggccacatacataaaacaaagtaaaatataatatttctaatagtaatggtaatactaacaaggataaatcataataataattgtgaataaagttggatcttttggggttcctcgttgagtgaacatggggactcacttgctatgcacaccatctgtatgctcaggatt

SEQ ID NO: 66241 - DNA, 297 bp, Glycine max
tgcaagcttagcaagacgacttcattcatccaacactacttctatagattccaccgaggccaaatgccagaatctgaaccaaggggaaatttgctattgatgttacatgtacttgtgtgttatcaaatgagtcattctaagtatatgctttatacaaaaaatgaaatattagcttactatatttgtgtgaagctttgaaggacaatcattaagtgttgtatcattgatgcaaatagagtattttgaatgtggacaagatacccgagtctcaacaacatatacatccctgtgaatttc

SEQ ID NO: 66242 - DNA, 304 bp, Glycine max
  unsure (1)..(304): unsure at all n locations
atgagttcaagatgttcaagataaaatcaaaaacactctcagattcaagaggaaagttgaattccagaatcaagaatcaagattcaaggattaagcttccaagaatcaagatcaagattcacgactcaagattcaagaatcaagagaagacttaatcaagataagtatgaagaggttttttcaaaaaatgagtagcacatggatttttctcataacatgtttaccaaagagnttntactctctgggtatcaaataccagaatattgtaatcgactatcagtagcaaaatggatttgaaaaagtt

SEQ ID NO: 66243 - DNA, 425 bp, Glycine max
  unsure (1)..(425): unsure at all n locations
tgncttagnaggttcctcatgacatcttgaatntttcatacgatgttttttgaagactgttctccaagaagccttctagtgatgattatgataattgcatttcttttgcatcaattttcttatctttnggttgctttgattgaatgaggacttgattcttccataagtctgtggttttgaactcttgcaagtattttctagagctagttgttgttggtccaatgcttatgaacactggagcatgactttctgacattgatcttcttgtgtgtgcttctaaatagtgcagacttcattgtcttaattcttctattatgcaatgcatctattgatgatctctagtcatactcaattttagtacctacactttgatctnaagatatgattgccttcatgctttggtagcttctttttttttcatctga

SEQ ID NO: 66244 - DNA, 412 bp, Glycine max
  unsure (1)..(412): unsure at all n locations
gctnggccggaaaaagtgtgtggtatcattctctttctgatggngatctgcgccattggctctggactatcgttcgggcaacgccgaagtccgtcatggggacgctctgcttcttccgcttctggctgggcttcggcatcggcggagactacccgctctccgccaccatcatgtcggagtacgccaacaagaggacacgtggcgcgttcatagcggccgtgttcgccatgcagggcgtgggaatcattttcgcaggtttggtcttcatgaccctctcagcaatcttcaagcactactaccctgctccagcgtacatcaacgaccctgtcttgtccacgcaacccgagggtgaccttntgtggcggctggntctgatgatcggcgctgtgccagcgatgatgacttactactg

SEQ ID NO: 66245 - DNA, 454 bp, Glycine max
  unsure (1)..(454): unsure at all n locations
atctaatcattctaatccactcagatcatacaattgctcattcaaatcattctcaaacactcatttcatgcaaaacaatccactgcatatcattttcaatcaattcactattcaaacaagcttttggtacaagcaaacaactcatagtgctaaaatttaaaacaactgaaatataaaaattgaagagaaaatgactgaacataaatcataaaataactgaaaataaacttaaatgttcaagatgcataaatttaaatgtcctgctcctatggttgctcctgtgcatgctcattaaggcccaacacctgagcaactggtgaatcctgagagataagttgttctaactcagatgctagtgcagatggtatggcatcattaggtatgggtgttggggatggctctgggatctgaattgtaaagnctcttttctctgaccatatgataactacataaa

SEQ ID NO: 66246 - DNA, 442 bp, Glycine max
  unsure (1)..(442): unsure at all n locations
ttcattcttattgtgttcgctgtcagacaacagcatgcttactttcggtatgaggngcctccgcttttaacatgcattcaaccgtttaattaagtcgttatctcatttaataattgataaaatgaatttcaaccaataatgtgtgttgtaatctcgtttaatcactgttaagataaaatacaaccgactgttcacgctggaacctcggttaaataaaaataaaagcggataataataagataatcaaaatatctttgaataaaatactaaaaaaaatcaatcggacgttgttctttgagagtatccttgagtgaattgaataataaccagagtgagactaaggctactatcaactcacaaatcaagtttcgtctgcaaaaatcacttaaaaccattataaggtccaacactctttgctattatcgtgtaacatggaccgttc

SEQ ID NO: 66247 - DNA, 442 bp, Glycine max
  unsure (1)..(442): unsure at all n locations
catgcaagcttatatatcatatacaaacacaacttgctgaattatnacatacaagaaacatgagtaagtaatagatggaaaaattcctagcaacacactacccaatacaatacaacatgaaagaaatatcaaaacacacacaaacctgataggtggtgggtcagagtaatcattaagggttcagggaaataatgcaacacctctagagcaagtaacaagacaataggggagaaaaacaatactntagaacacgtcaccttacaaaagactggcgggttcaatttctcaaccataatatattataaccacgcaccttagtcattgtttttcttcttcttttaacaatttcctgcaatatatcttatcactgcaataatacataaactgcctaaaagatgaatagaaataccttaccttcatatcgaacaatatcgttaatgat

SEQ ID NO: 66248 - DNA, 411 bp, Glycine max
  unsure (1)..(411): unsure at all n locations
ttccatgaaagnngacatgagttattctaatgatcaagtggattggacgtatctcacagctattacggngaagatggattctgtagctcgctagattgattggataataatgtgtggattcaattaattaattatattattctcgttaatcataagcctattgagtccattgttttaaggagagggtttcgtcgaggtgagcttctctctccgattggttatattatntgtgtagagggcatatcaactttgataaaaaaaaattaacaaatataaaacgagaacgaaatttcttggtaataagaattttaagagagcgtgaattattttatcttctatttgtagatgactatattatgttcctcatatccaatgtatatgctaaatgggtgtacttaactataacatatg

SEQ ID NO: 66249 - DNA, 395 bp, Glycine max
  unsure (1)..(395): unsure at all n locations
atttagngaagcaaaatgtacatgtagtagcactctatcggagtcttgtgagagtgtgagactatgatcacatatggngaactttctaaattctaacacgattgatggngggttatctaatctttatgtcttggattttaaattatataaatactcaaattgagtggaagaggagaacacgttattgcctcagcatattttatgcaagataattttagagacactattgaactttgttnttcttttcttattacttacacttggaggttcaatgatgtgtatgagaaaaataatttatggaagcatagtgaagcctacatctatgggccaatgtgggtaaacacttagacagtgaaaaaaagatgatttgcgtcaaaaagatatttttatatgat

SEQ ID NO: 66250 - DNA, 374 bp, Glycine max
  unsure (1)..(374): unsure at all n locations
tgacccagtataatgtacttggagtgttctggcagtacctccacccaaatgcccagagaacttttttgccaaaaactggtggaagggaaaatctatgactgagcatgaaggagatatattagtaatttatacatgctgtagtgaaaaccccattatttttaagttagatcagacattaatgaaatgggaagagatgacaacactagatggagtaactctttntgctagttttttgtcatctcattcaaggactgacctcattggaataatgaggaacagtgtctacttctccaaagttcgtttctatggtaagcgttgcatttcattctctcttgatgactatagatactatccncgtaaacagtgtcatgact

SEQ ID NO: 66251 - DNA, 393 bp, Glycine max
  unsure (1)..(393): unsure at all n locations
caaaacaatngggaagcttcttcagtatcccattgaaaacctttattaaacctttaaagttagtgagaaggctaaacgaataattatggaacttagaaaacctaaatccttaattgaaggcataggtgataaccatagtgaattacttaacaagattggtagttacttaaggtcattccagatactccccaagcctcggaaaatacttccaaaatggtaacaagaagtacctccaaattaattaatgttattaatgaagatagtgacctaaactcagacaacacaactgagataggatcagtgtcagaaaagaatataagtccaattaattccaaacactggataacacccttcaaattatattatcaacgtccgactgcccctgacctacta

SEQ ID NO: 66252 - DNA, 485 bp, Glycine max
gaccaatcccgacccaacccgggcatagtcagtcagtgataacttgtgatgtacctaaacaggtgagctcctggcagtcaaccgataaaagaacaaagaccacaaagcatggaggctcgtgtggtggctggccagctatggatcttgagtaatatttggagtatggcctctggtaatcgattaccaagggtgggtaatcgattacaaggcttaaaaatgaaggcaggaagttaagatggcctctggtaatcgattaccaaggatgtgtaatcgattaccaggcctagaaatgggatcaggaacgtgagagggcttctggtaatcgattaccaatgctgtgtaatcgattaccaggcttagaaatggagacagtatgttgtggaggcctttggtaatcgattaccaatactgtgtaatcgattacgcagagtaacaggccactggtaatcgattaccagttatgtgtaatcgatacacagtgcata

SEQ ID NO: 66253 - DNA, 240 bp, Glycine max
  unsure (1)..(240): unsure at all n locations
gctaacgctcttacttaggaatnttttttttggagcaaggccaccgctggacgtatccaacatatgcacaaaacatcgctatctctactctacataattactcctaaagagagaactctataaatctgccttcccgcaagtgatatgggcctcactgtgtgaggacaaacagctatttgcacacgatcacctcactgctatagctaaagcgaattaggtgtggcgtatggaacccgaata

SEQ ID NO: 66254 - DNA, 482 bp, Glycine max
  unsure (1)..(482): unsure at all n locations
ctgttgaacgttacatcaagacatattttcctgatgcttatattgatgcctttattgcttccttctcctggaagattcccgctctacgatccaatggtcctttctcctctctcttttcagatgttgactntttttctcttttttagtttaacaccaggacatgtcgccattttcattntcttttgtggttgaggttttctcatttcttgctttanaatgcgtgagtttcgttttttcacgatgttgatttcatggtaataagctccctgctgagttcaattgccctgtcgttttttctgaactgagtttatatgtgtaattctaattgtgatcacgcagtcatgaatgcatacagataataatntatntaattangagctgaaatctgactacaaaacacttaagaataaagaataangtttttgacatgatagtgtacaggtatatgaatnttatttatgcgatagtaaacgattttgctc

SEQ ID NO: 66255 - DNA, 433 bp, Glycine max
  unsure (1)..(433): unsure at all n locations
tcttaganggctcgcctatgtgtgggatcttattacaacaactatccaacaggctagaaatntataaactctagcttgggatgaactattaggtattctaagagttcatgaagttcatattcagaatagaggtcatctttcaaaaagaaacttcgctgccctcaaaaccagagaaactagctccagacgtgaagaaagaaagagctcatctatggctatgaaggtacaaatggcttagtctgacacctcagctaacagctctgaaggatccatagatgatgaagtggccttatgtcaagaaaattcaaacaaataatgaagaagagaggaaatttcaacactcctctagacaaaaagatacatgatttataatgatacacaaggaggagaacaatgaggtcatctattntgagtgtacgaaatatggtcatat

SEQ ID NO: 66256 - DNA, 358 bp, Glycine max
  unsure (1)..(358): unsure at all n locations
cttgttacctcggcggcatcctcctggccgaggtcgaccgacatattttgcgatccatttcggtgaataatattatgttgccgagatgggcaaaatgcctgnttcggtcgaataaatgggaaaatgccagtttccgccgaaacgaacagtcggttgggctcgcacaaaanaacctagccgacctacagtttaaattttttatgcaacaccaaaacaagaaaactttctgtgccgtaaaaaaaaaacattacatgacagcgagcgttttgaaaaacaaaattgcgcaacgtcggctgactaatattaatcggggctatttcaccaccgatgtcggctggtgagttttcaatacaatccg

SEQ ID NO: 66257 - DNA, 438 bp, Glycine max
  unsure (1)..(438): unsure at all n locations
tcactcctgcattttatctctatcatgcattctttctttctttacccactcctcacatttggttntttagggaaaaacaccataactaaacgcgccacaaggcatccctattgcaccagatccaaatctagaacgatgggtgatctagagaagacacaggaacagatgaaagccgacatgtcgcctctgaaagaacagatggcttccatgatggaggccatgttaggaatgagccagctcatggagaaaaacgtggccaccgctgccgctgtcagttcggctgccgaagcagacccaactctcttggctaccgtgcgccatcctctctcatacatagtangacaaggaaggaacacgctggggcatgacggccaccctcatctgggatacaaccgagcggcttacccttatggattgccgccaactactcaccacccg

SEQ ID NO: 66258 - DNA, 427 bp, Glycine max
  unsure (1)..(427): unsure at all n locations
gcatgcttctattataattatgagccagatagatcaatgaaggggacttgaattccaatttttgtcacttgtgtttcaaaggcagaaaatgaaagaatcaaattggtgtcattaattctaaccatggttagattgaaggagtagaagctataaagaatgaggttttggtgcactttgaaagagtatatcaagaaaactctttcttgtacctaaatctggaaaaagtcatttttaatcagctnttggtcgccgatagagctactctcttagccctttcctctagtgatgagatcaangaagttgtttggaacttttatgccatggtcctaataggtataacatatccttttgcaaagagtgtnggaatattatanggaaagaaaatgtatggtnntgtcaagaatntcattcacatgtctgtctccca

SEQ ID NO: 66259 - DNA, 343 bp, Glycine max
  unsure (1)..(343): unsure at all n locations
tcactggntcacacgactatcccctaactctgtggactcatttggaaccttggtgacccactttgggatacaatttgcaataagtcgacaagaccaactaacgtctatggctctcatcaatatacaatangagaaaaagggagccgtgtggactttcatggaatgcttcagaaaggttgcattgaacatccgaaacctggacccagcagtggctatgtaccacctgatgacggcattgcggccagggccctttgtcaaaacctatgaaggaagcctacagttgatcttgaaaaattgcgatcaagggcagccaagtacatgcaaatggagaaactggtcgaat

SEQ ID NO: 66260 - DNA, 425 bp, Glycine max
  unsure (1)..(425): unsure at all n locations
gcttgataccagatgatgtgatcctgacttgatctgatcgctngatacaggctacagagatgtggatgacgccacttccagtgaagaaagataagtcagggtagatgccacaaggattaccttgataagtttgagattggttcaacaaggaacccaaagagaagctctcaccaaatnttatgaaaattccaaaagttcctttattgaaaacaaaaaccaatacttataatgtatctaaacaaaaagataaaaatagatatgagctntcaaaacagtttgggccaaaattacaataaattaaaattattaataaaaatagaacatatttggtatgagccttcaaattaatctaggccttcaacaacgattatgcttagtagtgcctttgcttttgggccttcatctttctncacttgggtctttcg

SEQ ID NO: 66261 - DNA, 395 bp, Glycine max
  unsure (1)..(395): unsure at all n locations
actaatacacctttagagtacgagacatatctggtaggcgaactcggcaacaaagagcatataaatttatctgcattgggaatgaaaagatctttactggatgcatcagccatcgcccactggccaagaatgaaggattaaatgagatatgaaaaaactattaagttacaaatttttagatcaaaatgtaaaaaataaagtgtggttgaaagattagtaacctgcaaaacaagcacatttatgctagcatgcttgcaatcccatctaaattcatcaagctagctaggtaataaatacccagggtgaacatgaacatgacatccgtgtattataggaaaaatcttctatgaaatngcattccgagaagtttttgtaaaaccttcaatgaaatcaat

SEQ ID NO: 66262 - DNA, 416 bp, Glycine max
  unsure (1)..(416): unsure at all n locations
acaagatccaccaatatgtgtgcggtacgacaggataagctagtggaggcataccttataatctgaatcaatataaggaactaatgttacaatttacaaataatatgtttccttntatggtcacaattatttaggagtaaccacgcgtaaaataggaaacttaatacattctcctctcacaaatagaaggtggtagaacataaaaactcgaattacattgtagttgctatatagattacctcanaaaatataaacctacagcgaaccatataactnggaatatcaaatgcataaatcagtgcataatgtaattcatataaaaattacttgattacagtttaacatttaaatataaagaatccgtgcatcgcttcattaacactataataaggttagttctattcctagaagctctt

SEQ ID NO: 66263 - DNA, 454 bp, Glycine max
  unsure (1)..(454): unsure at all n locations
agctntgatgttggtgttgaatgcattaaagtgtttcataccaaaagcaagaaattaggtgcatatagagctacaatnttcttggaattgatacatacagacatttgttggccatttcatacaccttcatggaatggtcaacaatattttataccattcatagacgattactctagatacacatacttgtttcttatacatganaagtcataatctctgaatgtgttcagaacatttaaagttgaagttgaaaatcaactcaacaaaagaataaagtgtgtcagatctgaccatggtggtgaacactatggcagataagacggttcaggtgaacaacgtccggngccctttgcctagtacctagaggaatgtggaatcattccacagtacaccatgcctgagtcacctagcatgaatggtgtggctgaaagacaaacaaactcttaagatatgg

SEQ ID NO: 66264 - DNA, 478 bp, Glycine max
  unsure (1)..(478): unsure at all n locations
cggataacatctatataattgactagtttaactnggaaacagcttanatcactttgaaaaaaatattctttaagcatgaagattctctttattaatataatntgtctaacaaaatcgtaacaataaaaattacagatccactaatcgcatgatatattatactaacctttgaattatattatattacgggtaattnttatactaaaaacatttatntattgtataatgtataatattaatagtttaaacttgcaatatctatattaataactaagatttcattcaataaaaatgataggaaattaatccaacactaagacgttacaaaattaagttcatgttaagaaagatatttcagttaaaattttaatttttttatttggtgaaaaacttggttgactgttcggtaaataagttttttttatagcgttttaaatacttgaagtagtattttttaatgcctagttctagcttttat

SEQ ID NO: 66265 - DNA, 483 bp, Glycine max
  unsure (1)..(483): unsure at all n locations
agacctataaatgtgtgacttgtgttctatattctttagagttntttagaacaataattgtcatatcctctcaaaagaaaacctttggccaaacacttgcaaaatcattaaggattcttataagatcttcatcttgtaacattcttctctataagagagaaacactcttctttacttcaaagaaaacaactgttattcgagagacagagggtctcttgatttgtaaagatctctgaacacaagggaagggtatccctgtgtggttcagaaattgtaaaaggaatttacaagttagtggaaatctcaagtgggttacttgaagactagacgtangcacaaggcgtggctgaagcagtataaaactaagtttgcatttctctcttccctanacttctttaatttattgcattntaattntactttgcttattataaagaagtatngattgaattggtctttactttgttatattaagtctgcata

SEQ ID NO: 66266 - DNA, 394 bp, Glycine max
cgtgtatgcttacaatgatgttattattcacaaagaattgtttcagttcaagtggattgttttgccactacctatttggatgtggaatgagaaatcattgcagccctcaacatgggaattgccattgtttcccgcttcaacctcaagcacccgctcttcttacacactgccacgaaaaccaacgtttatcatcattttcatcttgccaacaactataacaactatattaaattaatattcaaaatgttttcaacaagcaccagtggtctagtggtagaatattaccctgccacggtacagacccgggttcgattcccggctggtgcagaatgtaaatattttttatcccgaaactaaaatgcgaaagaatattaaaaatctttgttcttacaac

SEQ ID NO: 66267 - DNA, 489 bp, Glycine max
  unsure (1)..(489): unsure at all n locations
gcaagcttctaagattataggatgcaactaanacttatattaagtaaaatataattatatntataaattgcttatatgtcattaattnttctacttgatttctatatttttagatgatatttatcttggttttctatcatcatctcattattgnttgtctttaatctcttggaaaaattactaatgaagcataattgtaatcaaatttctataaaaaaaattatattcaattattcacgttaagataatgatcccttcactatccaaagaaaaaatgtatgccatttgaagacaaggcaatcatgctttgatacaggggcagctgtataacacatatcgttatctgacatgtatacggcaccaattttgaagtatctgtgcatcatagccagaaaagtattatataccaatatgaatntagtactattattatctcangcanaaattcanatcttttgangaaaaanatcatggaaagatgagttaatg

SEQ ID NO: 66268 - DNA, 485 bp, Glycine max
  unsure (1)..(485): unsure at all n locations
actaagctatcggacaagaatntccttccctanatatatgtctacattttatatagaaagaacgagttataactatacaatttaaccaattattcctaatttcaaaggcaccaagttaggattatgcaatgctagaataacaaacttgaagtcactttctggccacaaattgcaccaacccttgtcgttagctatttcaatgtccattatagctcccaaaagttctgtgtgagtggcaaagttaataccaacagagcaaataagaaacccaaagtgatagcagatcggtctctgaaaattcccacacaaccagcaggtccaggagctcctttggcagcgccatcagtattacatttaatccagttgcaaaatggaggggtccaatcaacctgaattattgaaggagctgtctttggatgacctganaccgaanaagctttcagaatgtngaattctgagaatttagaacacattcaaacagagct

SEQ ID NO: 66269 - DNA, 339 bp, Glycine max
  unsure (1)..(339): unsure at all n locations
gcaagcttcagggtgagccacgaaagatgtgttttttatggaagaaggcgtagagacactaattgatgcactttggcaaaaggatttctcatatactcaaatgaagggcttggatgctttactatntcttattggacatgtaactttgtcaggaaagtcatatactaaagnttggctactcaagaatgtaggatttgatcaaccttacaatgctttaattaaggccaagcggnttgagcagtatggtaatgattcaatggacataatagtttagggctatgtagatttttggtgaagtgaagactatagtagataatagagttctcttcatactaacac

SEQ ID NO: 66270 - DNA, 462 bp, Glycine max
  unsure (1)..(462): unsure at all n locations
agtctntagagtaaacttaccacagacatcattttcttctttatctttggatatagnttccattactttccttgatgctcacctcgggctcagataacccttggtctgaaaaactgagtctcctctagaaaatatggattgaatctagtgggatgcaaccaacaacatatttggatagctcacaagcataatgaagaccgtgcgtgattctcatcacacaactacaagtggaaggattcttgccagcaaagtgaacacgctcaaattcagcagcaatctgatttaaaacataccttgaaaccataccaagaagcctcttgtataaggtttttttgaagacatgtccaacaacatgtgtacttgtttcaaatgatgctttaattntcgtgtgttgtagncgtatcatattgttcatggcatcccaaacactacataagtctccaaggctattctataacactc

SEQ ID NO: 66271 - DNA, 415 bp, Glycine max
  unsure (1)..(415): unsure at all n locations
gcaagcttctagcctaatggactgagcttgtttttatttcttgatagccctcttgagccttggttccctttccttggtntgaagctcactacaagccttaagtgaaaaaccatgatattaccatatccttaaggaattttggagctttggaattgttttgggaataagtgtggggggtttttgattcattggacaacttcgtttgttggctatgcttcatgatgtattttgggccatacttgatgtacattgtatattggttaaatgttggacatgctgaatgaaatgttgtttctcataggataaagagcaataaaaacattccaataatgaaaaagaagagcaataacgttgagtgaataagatcttatatgggcaagaatgatgacactctcggttctactttcatgttaat

SEQ ID NO: 66272 - DNA, 348 bp, Glycine max
  unsure (1)..(348): unsure at all n locations
tactacgacgactgagacaactgcggcaaataaagagggtgaggatgaaggagaaacccatgctgtgattgccattcctgtacggtcaagtttgccaccacacccaacaatgtcattactcagtcaataacaaacctccttcttacccaccacccagttatccacagaggccatccctaaatcaaccacaaagcctgtctatcgcacttncaatgacgaacaccacctttagcacaaaccataaacaccaaccaagaagtgaattntgcagcgagaaagcctgtagaattcaccccaattccagtatcctatgctgactttgctccatatctactngataattcaatg

SEQ ID NO: 66273 - DNA, 496 bp, Glycine max
  unsure (1)..(496): unsure at all n locations
catgcaagcttgtaggattatggngtacccatttcatgtggtactaggnggcggtcgggcgatggtgcacaacaagttttccacatccacaaatcgcgcataaacccaccatccnctgttgcccacctgcaactgagctcacgtactcccacgtagcccatatcatcgtttctctcaacaccgggtccccatcaatcctcccaagcttcccaacatccaattaattcaacatccaatcatcatggactaacaaaaccaagcaaaacagggcaaaggcagaaaactctgcccaaaacacaactcaaaatcacagcttttctcacttaaagaccccagtaacaattccttctttccaattcccttaaccgtggatcgactcgaannatntactggaagtctctagtacataagcctacattttgaaccgtgggatctactagtanacatncagaactcattctgcactatctctttcagaaccagcaaaacatagcat

SEQ ID NO: 66274 - DNA, 450 bp, Glycine max
  unsure (1)..(450): unsure at all n locations
cttgaaggtgtgtagcccaccattctttatagtgatatatttataatgngnntaccatcacgattatcgtctccttttccatcattgngggtaccacttgagctgccagatccctccacctttgggtgtattctttgaaggattcatgctcctttttacacatgttatgtagttgcatcctatccgaagccattatactgacaccgcctaacgaaggcagccattaggtccttccaagaatggactcgggaaggttccaagctagtgtaccaggtaacagctaccccagtaagactttcttggaaggaatgtatcagcaattcctcatcttttgcgtatgcccccatcttccgacaatacatctttagatggttcttggggcaagtagtcccctcgtacttgtcaaagtccagcacctttgaactgggaggggtgatgatattgggtact

SEQ ID NO: 66275 - DNA, 359 bp, Glycine max
  unsure (1)..(359): unsure at all n locations
cttgacccaggatgagaatgtccatccttgttctcggaagaaggaacaatggggtctcccaagaaaaaaagtcattcactattaagttgcaaacacgcttccagaacaaagaaagttcctaattaaggattggaagaaagcaaaagaagaaaatttccaatcaaagattgggagaaagcaaaaaaagaaagaaaattntggatcaaagatcggaagaaaacagaagaaatatgcagaaagggcttggaccagacaatatctgaacaatacagaattatcaccaccaaataaggagagaaaggaaaccatgacctgaagtggtcctctccctttgattgcaaccaaaatcctatgcgtcg

SEQ ID NO: 66276 - DNA, 352 bp, Glycine max
  unsure (1)..(352): unsure at all n locations
gctgtgtgcattagtgtgcanaggaatatctatttcgtttttataccaggtcgagttcagaatcctgtgccatttgacgggccagagtcttggacacaactccgacctaagaaaacgggaaagaagccgttagggataagtaatgaatatgaaaataacaagacaaagaaatcactaaactaaccatgatctgattcccatcaatgagcctcacggaagctgacctgttaccgtaaccaaagtgctcttgaacaatcgaatccataaatgctatgcttgcaacgaacgagatgagtgaaatagagagagagagtagtacggtaccttantgcggcgatgtcgaggccgaggg

SEQ ID NO: 66277 - DNA, 482 bp, Glycine max
  unsure (1)..(482): unsure at all n locations
tctaagttggatacttacgttcttttttattatggtcagaaacatctcccaaaaaaatctagaatatactcaacaccattaatgaccattttgtaataggttaaactactaaaaatggacttgggtttccatctaagatcaatgtaattgattaccaataccttataatagattaatttaatcatacataaccatctaagaaagttagaagcattgtaacaaattaccaaaatttcgtaattaattaccagaatcttgtaatcgattacagagagtttacagatgttctttctaatatgaaaagcaatgtagtcgatcacccaaaggttgtaatcaattaattcgacaaatctcacttagaatgagaagtaaacctctatgaatcaatcttgaatntgagtaatngatacacacatgcattgtaatctattaccannagtcataaatagtcaattgaacttctaatcttcaaagataactaa

SEQ ID NO: 66278 - DNA, 352 bp, Glycine max
gaactttgagcgtgtctcataagactttcattcatcaaagttacaacaagtgttacacatgcttctatttatagactaggtagcttccttgagaagctttcttgagaaaacttccttgagacgctttcttgagaaaacttccctgagaagcttctttaagacaactatcttgagaagctagaacttagctacacacacccctctaataactaagctcaccttcttgagaagattcctaaagaagctagagcttagctacacacaccgttctaatagctaagctcacctccttgagatgagaagctagagcttagctacacaccccatataatagctaagctcacccccatga

SEQ ID NO: 66279 - DNA, 424 bp, Glycine max
  unsure (1)..(424): unsure at all n locations
gatgtggctcgtccttgtcacgggaagccggaaggtccatatcaccttcttaatngtacacatggngcactgcgcccccanatgcgcaagtaagaagagantaatttccgggctctcgtgtccgtaaaatgcattcatatcatgcatcgcataagcatctcttcataacatcataatggacatatcctgcatttgtccgttatcatattccagcctcacattttgcatggtcatggcatcatcatgcatatgcgttcaacanactttntggtctgcaaaattgcatatgnttgctcatccttgcgttntcctctacaaaacanaaacaaaagagggggaagcgtgaaacttcacactacattcttagtttcatgtgttaggcaccacgagccaaccatgtggggatcataaaacccgttcactt

SEQ ID NO: 66280 - DNA, 378 bp, Glycine max
  unsure (1)..(378): unsure at all n locations
ccccacantatttccatgacacaaatgcaaaaangatgattnggaaacttcatgcaaaactggtcatgcatgcacctatgcagacactcaagtgtcaaaattttatgggcatgtgatgctagggctcaggattcatttcctctattttagtcaacccaatgtttccaaaatatgttcttttatccatttgtgcattcatccaagtccatttcgggcgtccgggaaaatttcacagcattcacccttcaggtgtacacacattntttttcaaaaactagttatgatncaatgattttttttcaaagaaaaagtggaagtcatctcttttcaaaagcatngtggtttttcagcttgacaaacataattttttcttttttc

SEQ ID NO: 66281 - DNA, 473 bp, Glycine max
  unsure (1)..(473): unsure at all n locations
acatgaagagatggcgcttagttctgtgttngcgctntgcggataagcaatttgaaaattntctaagtcattntctacttatctcttcacacataattntaacaaccctttntgttcattactaaacaagctgaaatcaatcacaatcacaagcaagatgacctaactacatgcaagaaataaaaatgaagatagagaagggaaagaaaagctgggttgcctcccagtaagcgcttctttaacgtcattagctggatgcatcatcctattatctaggatccaataatgttcccacttcaaggaccttcttcttaggttttctttcctccttcacatgaactntaaaatagacattccggtcaggtggctctttatcttcatgaaataaatcanagcttgatttctaatcttctatgcccattagcaacatcttctttcccatatctactacacagcttacaatagacatgaat

SEQ ID NO: 66282 - DNA, 317 bp, Glycine max
  unsure (1)..(317): unsure at all n locations
atgaatatgctcaagtatatgccgaaaaagaggctagaagaagggtgatcgactctttacaccaagaggcaaccatgtggatggatcgggttgctcttaccttgaatgggaagcaagaactttcccgattgttaacaaaagccaaggcgatggccgacacctactccacccccgaagagaatcatgggcttctcggctatttgcagcatatgatagacttaatggcccacataattagaaatccgtaggaaacttgtatggtctctcagaccttgactggatacgaactttttttttntttattttttttttttttt

SEQ ID NO: 66283 - DNA, 198 bp, Glycine max
  unsure (1)..(198): unsure at all n locations
cctttctaatcaatgcttagtatttaatctatgcacaatcgaaggtggtgcatgatgtggctgtgcaacatctgcctgtaatagtaactcatcatttattaagatatgtatgccatggtgatcaacatttattaaagtgtcaagntttgataacagcattactttgtaaagtaaagaatgatgatatgagtgatgtca

SEQ ID NO: 66284 - DNA, 396 bp, Glycine max
  unsure (1)..(396): unsure at all n locations
cactctatggtttccttgaacctcagtgtatccactatgcatagaacanacgtgaagatcatcaacattacattcaaacatgggtcaaggaatcacaatgagaagtgtacttgggaccttacctaaatcaagtagttgaattgatgttgtacaatatggatattatgtgaattatttgtgcctaactaatgtttttcatcttcaaggcacattagcaacttgttgttcggtgtccacgggacaatgttgttggttggttttgttctttgcgtaagaagcctgatgttaacatcaagactgtagtgaacatgttagttttaacattaaaagtcaattgaaatattgcaattgtacggtaacaaaacaatgattatttgattatattcgttaacatca

SEQ ID NO: 66285 - DNA, 458 bp, Glycine max
  unsure (1)..(458): unsure at all n locations
ctctaccatttgtccacgtgaacccggggccttgatctgttattgcccactggaccaaggtctgcataacactctgcanaatccttcagctcataggcactagcttcagctccattgaaccgatcaaagggagaaaggatggaattgaagttgccaatgaggagccaaggatagctcatagctgcactgatgttgtacagattaatccataaagctcttctggccatgacagagtaaagcccataaatgacagaaactcggaaatgcttgtttgtaattntacagtcaatggaacaatgaattaactaagcactagattccaagacagatagtttaactatgggaattaaaattgtggacaaagtcccaatctgcaaactntctcttcattgtatcttccaatgaaatattatgtcaattggtttccaaaatgaccattacattaacttcattacaac

SEQ ID NO: 66286 - DNA, 476 bp, Glycine max
  unsure (1)..(476): unsure at all n locations
gcttgagatatgcttcaatgatgtaatanatagggagaganagagaagggggagcacgatattgaatgaataaaagagggagagaagtggaactttgaagtatgtctcacaagactctcattcatcaaagttacaacaagtgttacacatgcttctatttatagactaggtagattccttgagaagatttcttgagaaaacttctttgagaagcttctttgagaaaacttccttgagaagctagagcttagctacacacacccctctcataactaagctcgcctccttgagaagcttccttaagaagattcctaaagaagctagagcttagctacacacacctctctaatagctaagctcacctccttgagatgagaagctagagcttagctacaaccccnctataatagctaagctcacccncatggcannaaacatgannaaatacaaaaaaaagtctttactacaaagactac

SEQ ID NO: 66287 - DNA, 425 bp, Glycine max
  unsure (1)..(425): unsure at all n locations
catacaatcataagcaattaatctatctatatgctggataaagaaattaanaaaagagctgggttgcctcccaacaagcactcgtttaacgtcattagcttgacgcatcgtcctgttattctggattgaagtgtagaacagtgttcaatctctcaatagctccaccatgatattgcttcagcctttgtccatttaccacctgttagtcgtcttatatgactaaattntgtataaaaaacattttcaaaaacttgtatagctctccaatttatggttattttgtaaatgaatcttgttttattgttaaagttgtctctagaatagttccattggatttaattatgaaatctgtgcaatttcaggtgaaaaagaggctaagtaataaagtgctaaaagtgagagttgggcttagctcatcagtgggc

SEQ ID NO: 66288 - DNA, 379 bp, Glycine max
  unsure (1)..(379): unsure at all n locations
tgactnngaatattatatatttgtcaattagagatcttggtgctttgtcattttgtgaactctctgcttcaaccattttcttttttagttcatcctacataaatacacctttgtaattattatcatacatcaatatcctcaatacttcaatgtcactaaacaaaactcatctccacattagttactcctcctcatcccataaccttctattagaaaattgagcaaaacanagaanaaatattaaaattaaaattaaaattcttacaattacaatagcagcctttttagtaacaatgctttcatcttttcgagtttgagtgtcaatataaatttttgccctagaaggttgcactcncttagccttttgtgctaacattag

SEQ ID NO: 66289 - DNA, 482 bp, Glycine max
  unsure (1)..(482): unsure at all n locations
ttcgcgagaggaggccaaagacgagtcctgcttataagttatgtataacattgacttctcttgcaatcagatgaaccanagtttctcttatgagtctaatttatatacactgtcaatgtaaaacatttttacatagatatcctataagatttgatcgttttatcaagttatcttattcattaatataatatgatgataagataaattattattggatgcttatgtaaaactgttttacactgagagagtgtatataagttaaactaaacttgtatttgatatccaagaaggtaaagtagtcgaattaaattttggtaatgtacatcaatgtatctctggaaagaaccaagcaaaatgaacttgagagcatgtaaacatgagcaaaagagatgctgtaaatcattatgtaatgaaattttttctgtcagtaatccaacatctangataactggctttcatattagtgtatccgttagatagta

SEQ ID NO: 66290 - DNA, 364 bp, Glycine max
  unsure (1)..(364): unsure at all n locations
acctgcaacaaatccaatgcagaaaaatntaatccttaattgacgagaagtgcactatctgattataactttgtatgttttaatgaaacatgaatgcttctgatttatatntgtttccaaataaagacttaattcttacttggattgattattccttcagggaggctcactagcatgactagtgagaaggcaaaaacaaaatttgaaagtaaattcaatctgaaagagagccattccattgcagacacattatgaaaccatggccttgagaagccatccacaaggagaagatntgtgtatatgaaacggccttcctgatcgaaagctcgtattgatgctgctcctgctaatgattctgaaaaat

SEQ ID NO: 66291 - DNA, 432 bp, Glycine max
  unsure (1)..(432): unsure at all n locations
gcttaacanatggcatgcgaagngggtggtttttcttagcaattcccttatgttatcaaacatatataaggaaaaggtaatattgtagccgatgctctntctcggcgtcatgcattactttctatgcttgaaacaaaattgattggtcttgaatggttgaaaagcatgtatgaaaatgatgaaacttttggaagaaattttaaaaattgtgataaattttcagaacatggtttctttagacatgaaggctttcttttcaaagaaaacaaatngtgtgtgcctaaatgttctactagaaatttgcttatttgtgaagcacatgaaagaaggttaatggggcanntttgggtccaaatgactctataaacattaccagaacattttattggcctatatgaaaagaatgagcataaatttgtgaacatgcttgat

SEQ ID NO: 66292 - DNA, 438 bp, Glycine max
  unsure (1)..(438): unsure at all n locations
cttacaacagcaagtctcattttactatcataaggatgcacagaccaaagttgcgtatgtaaaaaaattgtatgaccaagtgaaggtgcaaattgcaaagaagaatgaaagctatgccaagcaagcccaaaagaaaaggaaggaagtggtacttgaacccggtgatgatcttggacatttgaggacaaatgttttccaagaaggagggaatgatgagaatcatgaaacaggccaaatacagtctaaaggcccaagtggagaaggacgaaggcccaagtggagaaggacaaagcccccgagtggagaaggatgaaggcccaagtggagaatgatgaatgcccagaggcagagacactatcaagactattaatngatgctgaaggccaagattaatttgaacgcccataatannatatgtctatttagttataattgtta

SEQ ID NO: 66293 - DNA, 284 bp, Glycine max
  unsure (1)..(284): unsure at all n locations
cacgcgcctacaagtgttattgttatacatccatcagatatctctaatccaaatgaaattatgcggttcattacagaaaataaaatatttactttttatatgagaaaatcaaatgctgatattatgaatacatatataataaactagagtaacacccgtgctatgtagaagtaggggaagaaanaagttcanagtagtgctccatacttttaagtaaagagagtgtagaggtaataaaacaagatgggtgtgtcgccatacgattttatttcttacagatatca

SEQ ID NO: 66294 - DNA, 465 bp, Glycine max
  unsure (1)..(465): unsure at all n locations
tgtaacctgaaccgctatcttttattggctatgcttctgcaaagtcacagatgaaacatttattttttacataattcacgaaagattgaaaaaatatgaggagaagtggaaagaatcaaagaaattcattgaattggaattgtagtgcttatttcaccttctgatttgcactntgcatctctcgttgtgctcttccaaggtcctctgacagagtactatgtgacctctcaatgtcaagcctagcttctctctctttaacaagagactccactgcagccttgtatttacaaagataataaaaagtttagagttcatcatatgacatttcctttcaccagttntgttttcttccaattgactaaaaattctttcttaccgactnttccatttcttccttgatcaattttctttgtaggaagtgcaattcttctcatttctgtgataatgaattaatcttcttcttga

SEQ ID NO: 66295 - DNA, 321 bp, Glycine max
  unsure (1)..(321): unsure at all n locations
taccaattcgncacctaacaccctccttgacatnctttcagctagatcatatgcccttccagaaatttgagctattcatcttttttttccaccactggaaggaatgccattatttccacacttatatcttgctctcactacatcggcccatagagaattcccgtttagtgcaaattctccaaccagatttcatacaggacttattcatagcgagagaagatcttaagcccacaccaccaatctatgttggcttacatacatccttccaagctattgcatgaactttcattgcgttctcctcctcacacacaaacgctctac

SEQ ID NO: 66296 - DNA, 451 bp, Glycine max
  unsure (1)..(451): unsure at all n locations
acctgaacccttgaactaacatgtcatagatttgtttttgttgngatccatattgtttgagaaacaaatagaagttttctatgtacaatttttttctctcccagaaatcctataaaagttgttcaagatagaattaacacacttcatttgagagttgttcgcttctccaaatagactagctcttgtatacacaactaccttgtatgtccacaatcttctagaacatatctatcacgttgagatgagtgaggttgtataggccattntagcaatgcatattaatcttcaaggaatgtctttacatttatcaactgtttatttgtctctctctaactaagaatttctctcacttgagtgctgggccattaacaaacaattaatacactaagacacaaacataagctaaattcgaggttgtactggcaaatatagtaatcaagaggcaaaaaac

SEQ ID NO: 66297 - DNA, 332 bp, Glycine max
  unsure (1)..(332): unsure at all n locations
ttttttttntgaaaaaccaccccgacttgtttttttgtaatcaatttgtcaagaccatgagcttgtaaatagtgaaaatgaaggggaaaaataataaaaagtttcaatttgcccaagtaagactaaagccagttctacgtttgtcatagcccttcttgcataaccgaagcagattattttgcctctattggcctgaattataaatcttattaccaaatgcatatggatggaaagtttttttgtttaatcaaaaagcatcgccggtaattcaaacatttaaacttatttctaaccctaatgtttccttcaagggaaccttatataatggaact

SEQ ID NO: 66298 - DNA, 442 bp, Glycine max
  unsure (1)..(442): unsure at all n locations
tggcaacagcctcgtcactatccacatactgatgctgactaatgccttctgtaacatattcaacttgacttaaatcaggatcatattgagttacaatactaggcgaataatggtgggaaagtgtgcaatcatctaggagatgaagaccccagcgaacaacatcgggatccagttcatatattgccatgtgcctgcaaaacacatgtaactctaactactccagaaaccaacttgctttacgtgtattatgcccctaaagagtacaattgctgaaaatggacaaaaaataatagtcaaactaaataaatgctttcatatgtgtgtgttgcagaacatagtttgataaaaaacaatgaactttatacaaggagcgaaaatattaatatgattaaatgatgctctttntatctaactaatgaaacacaattcatcatgggaaata

SEQ ID NO: 66299 - DNA, 55 bp, Glycine max
  unsure (1)..(55): unsure at all n locations
gaccgttgngggcgtttcaatcaaattatacactatgacgctgcactagcttaat

SEQ ID NO: 66300 - DNA, 301 bp, Glycine max
  unsure (1)..(301): unsure at all n locations
ttttttggaagaacaanaccgtcacacgtatgattatagtcataaagaccatacccatgctgtctataatgaacaatttgacacaagagcatggataaccagatggatatatccatacatcagggataaacaactttgacataacggttggctcccggggggtgagggatgaaaaaaaactacaaggcctaatttgtctaaatttataaaaatgataaaaatataaataattatgttactagtatgacacttacttgatgaataatcgcagtcgataaataaaattattaaagttccaaaa

SEQ ID NO: 66301 - DNA, 287 bp, Glycine max
  unsure (1)..(287): unsure at all n locations
gctngaaaggtttataatagtgactggtttcgtgatgcaacatttaattaatttagaagcgggtaaattgggcatctggatattaagattactaggatatagccattggtgctaatgatcttgtatgaggaaaatcaaattatgatgaaatggacaatttggttgttatgaatttaacccaataatgtagtagaacaactatggtaaagaaaatgttggcactttgtatgtagatatggcttacatgcatatcattcatttaacactattgtggaagggtataatat

SEQ ID NO: 66302 - DNA, 458 bp, Glycine max
  unsure (1)..(458): unsure at all n locations
gtatgttgtatgactcttccaaattccatattcccgctngagggcccatgggttttctagccatgttttacgatatgtgataatgtatntgaactctngtcttatgaatgcaatgaatgtangaatggttaagtgctcattttctttaaccatttgtagggatatttatgcctacaagtttcaaattcatcttattgtgatcttgtgaaatggttggcatgacacatgtgtgacgcccttctatcattctaatttcccaatcttttagattttttctttcagacgctctaagtttccactagcacccttcagttgggcaacaaaagacccatgcatnctttgcacacctctttgatttgagagttacatggntcttaatgtgcccacatctttatggcgtgttcanggtcctcaatngacanaatcactgaccaacatacaactcgtcatcgtgcgag

SEQ ID NO: 66303 - DNA, 445 bp, Glycine max
  unsure (1)..(445): unsure at all n locations
tggcaacatcaaagagccaaagaactcggaaatcaactcagttataacaatggagtagcaagatataagtatcagagtattaaatacaataagccaaactcataatcaagaaataatcaagccagaatccaaataactgaaaatgtcaacaaccacaaaacatccaagactgatatttaaaatccacaagataaataagcaaagtacttagcataataatgtaaattctaagaaactaaaagccaaaatacacggcttataaaagataaataatcagaatctataagctaagaagacggaggaggtggtggaagatcgaaactctgacgaatgtatncgacatcctcttcaagctgtgtaagacgaatgtccataccggcanagcgtgaatctaacgagtcanagcggtcaccaacatacgaacgaagaccccgtaattcggaga

SEQ ID NO: 66304 - DNA, 471 bp, Glycine max
  unsure (1)..(471): unsure at all n locations
gttgaatgcattaaaggtaaactgaccactatcatganattaggtgcatatagagctacatatgtcttgaaattgatacatacagacatttgtgggccatttcatacaccttcatggaatggtcaacaatattttatatcattcatagacgattactccagatatgcatacttgtttcttatacatcaaaagtcacaatctctggatgtgttcaaaacatttaaagttgaagttgaaaatcaacttaacaaaagaataaagtgtgtcagatctgaccgtggtggtgaatactatgacagatatgacagttcaggtgaacaacgtcccacagtacaccatgccggggtcacctagcatgaatggtgtggctgaaagatgaaacagaactcttaaggatatggtaagaagcattcattctaacttactagagtcactttagggagaggcactanagaatgcagctcacattct

SEQ ID NO: 66305 - DNA, 497 bp, Glycine max
  unsure (1)..(497): unsure at all n locations
gcttgcccagagaaggagtccacagatgattatgcttaccacctcanaagactggagagcggtttctaatgtctcctctgtggcctccgcataaggcatagaggatgggcagctcaccaagagtcttcctcgcctgatacgataaccagatgcccttaaactacaaatttcaacttttggtggagtgtagagggaacaactcccactgagtggatccacggccgccccaacagacagctgtagggggggttaatatccattatttggaaggtaacttgataggtgtgagggcctatctgtactgngagatcgatctctcccctaaactctcagcgggtgccgtcgaaggcacgaaccaccattgaactcggctttaagtgggaagcattgaatggtaatttctccaaagtgctcttangcatcacatttaaactggcaccattatcgatgagcactttggctatgatatggtccatacacttgactgatacgtgtaa

SEQ ID NO: 66306 - DNA, 460 bp, Glycine max
  unsure (1)..(460): unsure at all n locations
tccgcttattagtgcacagctccttcaagaatttggcatatctngtgaattgctntattgcatccaacagaggtatgtttacctctacttttctaaatgtttccaagatctctntctctgcctcttccattnttttgttggaaactgctctttgagggaatggaagagggggaatgtgctgcttctgcaaatcagaattacctgtggaagaagattcacctgcacagaaattgttaggtaaatttttgtcatcacctttttctggagtagagtgaagtttggcaggttcatttgcagatgaggaaggtgctacgggttgaggtccttgacactgctttcccgacctcaatgaaatgacactgacattnttgggattttgacagcttgagaaggagcttgtcagattctgggactgtgtgatcaatgtgagctaatgtcctctgatagtcagcttgatgga

SEQ ID NO: 66307 - DNA, 449 bp, Glycine max
  unsure (1)..(449): unsure at all n locations
gatgatctatagaagcacggcaacaatgttgttgtttggttcanatgagaaagagatgcacggaaagggaagagaaatgctaccttatttggttcataggaaaaagaaatgagccaaaaatatgatgaattctagcgtgcactagcaaatgatgtttgtgtatgtgtcaaagtgtctattaatagttagatttgttaatttcagaattttttttctttntaattttttttattctcttattccttttctttaccagatttactcctcgtttattcttcgtgtctcctaaaacataatctataatagtcctctttacgctctcacatgctatattttcctcanaatcaacacagaacacacaaggaatctcttcaataatgcgttacaggcttcagaagcagaactgcaatacacaaattagagtggatatgaataaaaagtacctaaca

SEQ ID NO: 66308 - DNA, 187 bp, Glycine max
gcttcggaagaaagtgatgaggtacattctttatttgttagcttgaaagagcccgagtagtcgaatagaagttcaagtccatagccatcaaagtctgaaaagagtatgatgaactaagggacgtccatatggccaccgctgatgccttggaacgagaaaccaagaaggcccaaaaggaagaacacgt

SEQ ID NO: 66309 - DNA, 385 bp, Glycine max
  unsure (1)..(385): unsure at all n locations
actaagcttgggctgaagtgtttatcttttacatttctaactctttgtgtggattagattgattgtgcatctcattctctatcttttcatatgtatatcatgcatcatcatgtagaggtaggaacattgtttctaaagttagaaacttctttagtgcataaaactctatgttttaatcgattataaggctgatcctaatcgattacagaagtgtttctagcatgcaaagaaattctagttntggtttaatcgattaccagttaaccgtaatcgattacatagttcagttgagaccatgtctggtttttcatgagtctctgctntaatcgattactaggtgatcataatcaattactttgttcttaaaggtgttcccagaagtgat

SEQ ID NO: 66310 - DNA, 360 bp, Glycine max
  unsure (1)..(360): unsure at all n locations
agcttgagccataatcttgactcaccgtattcctngacccanggtgagaatgtcaatccttaccctcggaagcanaaaaaagaagagaaggaaacattccaatcaaaggaaaaaagagaggaaaggaaattcccaatcaaagagtgggagaaagcaaaaagaaaagaaagaaaattcctaatcaaagaatgggagaaagaaaaaagagagaaggagaagaaggaaagaaagctcctgatcaaggatcgaaagaaaacagaagaaatgtgcagagaggtctttggaccagacaatatctgaacaatacggaattgtcaccaaatgaacaaaagaaagaanaggaaaccataacctaaaagt

SEQ ID NO: 66311 - DNA, 472 bp, Glycine max
  unsure (1)..(472): unsure at all n locations
ctagacatgatacatgtctatggttggtttttctcaaggataaaagggatgccccacattatttccatgacacanatgtaaaaatgatgattgggaaattttatgcaaaactggtcatgcatgcacctatgcggacactcaagtgtcaaatttttatggtcatgtgatgctagggctcangattcatttcctctattttagtcaacccaatgtttccaaaatatgttggtttttcagctagacaacttatttttctttntccatctttttccttacttgctctcttttttctcatttcctctcttttccatttcattntttttttcttttctatttttatttntatcatgattttgggttggtttacatatattnttttttgacgatgttcttaaacgaagaactctacacggttccagaatttanacatcattgatataatgatataacactacgcaacaatcaacaaaat

SEQ ID NO: 66312 - DNA, 399 bp, Glycine max
  unsure (1)..(399): unsure at all n locations
ctgcagcttaagaataagatggcctcagcatatttcttatttccagaagggaattctatcaatagacctccaatctttaatggagagggttaccactactggaaaacccgaatgcataattttatcgaggcaatagatctaaatatctgggaagccatagaaatagggccttatatacccaccacagtagaaagagtttcaatagatggtagttcatcaagtgaaatcataaccatagaanaacctagagatagatggtctgaagaggatagaaaacgagtacaatacaacttanaagccaaaaacataataacatctgccctaggaatggatgaatatttcagggtttcaaaatgtaagagtgctaaggaaatgtgggacactcttcgattaacacat

SEQ ID NO: 66313 - DNA, 469 bp, Glycine max
  unsure (1)..(469): unsure at all n locations
ctaagctgtgccctaccacttgtgaattattaccctgtccatataactttgtggaaatgggataggaaacaaccatgggagaaggggaaagaaataattaatgtgaaaaattaattntgaaagacttgaggtacttactcttttaaccattgggagaaagggaaagaaatccccacatatgtgcatttattgaccaaatgtctcttttatgtcctttaaatacaactattgatacttgatctagaagtctccaaacacgagttgtacgatcctgatgggatacaagtaaaacaataataatgataagtatagtgaaaacactaattttccaaaagtaaaatgaaaagtaaagaaagaaaagccactgaagtatctagttacttttctttcttctcacttagaagtcagaagagaaaagaaacatacatatgaggtggcagtcctttttctgcaataattagatacttga

SEQ ID NO: 66314 - DNA, 324 bp, Glycine max
gaagcatctccttacaaaaaaagggatccataaaaaagagaaattcatgagccaaataaagaggaattcccctccaagtgggaaaagcccacaaaaaataggggtgttccctccaaaaatgtgtaattaaaccgggaaaagaaaggaaaatcctctgacgggtcaaaaaaacaataatggcaagagttttgaccaacatttccacaatacaattgccccgaagaacgagaaaaaggaagggaccccactatattttttttctttataccaacaaatcgtcgctacacttttttttgccccctaacaaaaacaaaaaaaaagccg

SEQ ID NO: 66315 - DNA, 283 bp, Glycine max
ccaataagacttgagatacaaatggtgatcatatagcatgcagaaatttaaaagttactaggttggctcctacaatcgcttctttaacgtcttgagctggacgccatatgacttgtcggtcactgacctaatactgtgcttacctttggctttggacttggtcgcctatgggtcggccatgtgttgtaggcaactctctaaccttcttatggatgagctgaggtgaactctacaggtggtggcggtgtgtctattgcccgctaccgggcatcccaatgttgat

SEQ ID NO: 66316 - DNA, 364 bp, Glycine max
  unsure (1)..(364): unsure at all n locations
tgcaagcttgcacactatgatgggcacattgcatttttgtttcgtataangcnnnncaaaaaaatattcatacgcactggtgtgtgatttgtnttataagttgcacggtcacacttgcgattagcaaataacacacaccacccaaaattggatgacttcttgcttgcttaagataaatgaaataatgggtgtgcgtgttgtgcaaactaactttttatggatgtgttcttgcaggaaatggctccaaaaaagattctctctaatagggcaaggaagggtgccgcataataatgatccagtgcaactccacaagcagacatagatattgcgaacaccgttacgaagtgatgaacataatgccttt

SEQ ID NO: 66317 - DNA, 387 bp, Glycine max
  unsure (1)..(387): unsure at all n locations
agcttagtgcgagtacgcatgtccaagtccacttttgtatctataaaaaagagtcaaatcaaggagaaaaaatatactgagtcttaaagcactttaatacacgcctaaagcctcataactctcccttagagaattctttcttcactccaatcattttctattntctgtttccattccttctcttgcatcagtttctaaacctattttcagtgtaagatctcttatggctatgagaggctaaacccttatatagttagggtctagcagacctaanaagataaaagatgtattgtatacttcatatctatcaatggaaacaaggggtttttttcctattatcctttcttacttttagnttcatggatcattcatccttgcatcatcttt

SEQ ID NO: 66318 - DNA, 369 bp, Glycine max
tgtcttatatgtctggtttgcgacatgactatctctatagttgctatataaccgtcatagtatattcaacatactaagacgattatgtaacaaccgacgtcatattaaatatattttttgtttggagatcactttctacgactgttttagtataactgacgtaaaaactctaacatacttagaacggtatagtataatcgacatagtatatacgatacttctcgtttgtattatgtatcgctttctttatgcttcctcataaacaacattgatgggaaccaaagctgtcattttcaacataaactaaatcatttaactacagcacgtgtgaaatcatttaactacaacctctaatcatcatcatcatta

SEQ ID NO: 66319 - DNA, 430 bp, Glycine max
  unsure (1)..(430): unsure at all n locations
gctagtgcgagtacgcatgtncaagaccactttngctactataagataagagtcaaatcaaggagaaaaaatatactgagtcttanagcactgtaatacacgcctaaagcctcataactctcccttagagaattctctcttcactccaatcattatctattgtctttttccattccttctcttccatcagtttctaaacctattttcaagtgtaagatctcttatggctatgagaggctaaacccttatatagttagggtctagcagacctaataagttaaaagatgtattgtatacttcatatctatcaatgtaaacaagtgtttgttttcctattatcctttcttacttatagtttcatgtatcattcatccttgcatcatctntgagggttaggtgctcgacagaaaggaatccttaataaaaatat

SEQ ID NO: 66320 - DNA, 388 bp, Glycine max
  unsure (1)..(388): unsure at all n locations
tgtctaatatgtctgtnttgcgacatgactttcttctatagttgctatatatccgncatagtatattcaacatactaagacgattatgtaacaaccgtcgtcatattaaatatattgtttgtgtggagatcacttcttacgactggtttagtataactgacgtagaaactctaacatacttagacggttatagtataatcgtcatagtatatagtatattgtggcttagtattctgttttgctctttttatccttaatcattaacaacattgataggaaccaaaactatcattttcaacataagataaatcatttaactacaacaagtgtgaaatcatttaactacaacctctaatcatcatcatcattaactccaattcaatctgta

SEQ ID NO: 66321 - DNA, 451 bp, Glycine max
  unsure (1)..(451): unsure at all n locations
agctnggccttgtacctagacacttctncatttggcttcantttggttntataaacccatttcacatcaattggtgtctttccttttggaaaatcaactaattcctaagtttcaattntctctattgacttcaattcttcttccatagcatctctccaatgagcactctaagaggcttcttcttgactcactggttttgattcagcacgcaaggcaaaatggactaattctctttttgcactgattggtgtaccagaataaacttcataatctatgagtgctngtgatgcctgcctctccctttggactntctgagttgaatatcaattgattcaacattctccattgcactatcttcattgcaagatgcataatcacattcctttcattgctattagttggtggagcagtacaatcctaacccttttgatcatcaatcaacacatctcta

SEQ ID NO: 66322 - DNA, 388 bp, Glycine max
  unsure (1)..(388): unsure at all n locations
cttctncaactcctctcttctcttctctgacttgcgtcctcttctctacgagtcaaccttctcgtgaggcaccgcaggggaggttccttgcctcaacgctggcatatattgctatcaggcttacttgggagatatatgggataaggattcatggtgatgctgaatatatattatatatatatatatatatatatatatatatatattatatatatatattaatatataaattaatcaataatattattaaaaatggtatattatattttatatgattattctacagatacaaaaaaatctttcatatatttcaccaaataatataccttattctaataagaagctgctttcacagtttttctaggtggtcaatacctggctttctgaa

SEQ ID NO: 66323 - DNA, 373 bp, Glycine max
  unsure (1)..(373): unsure at all n locations
agcttgctctaaatnntacattgatgtttggtatttattgtgaggagggttgtattgccgntttttgttttaagggggtagcatttcttgggtaaaaactaaccctttccaaatgtnntgccttcgcagggaaaatggccccgaggaagcttgcctcaaagaggtccaggaaggacaaggcggccgaaggaactagttccgctcctgagtatgacaatcaccgctttaggagcgttgtacaacagcaatgcttcgaggccatcaagggatggtcgtttctccgggagcgacgcgtccagctcagggacgacgagtatactgatttccaggaggaaataaggcgccggcggtggacatcactggttactcccat

SEQ ID NO: 66324 - DNA, 497 bp, Glycine max
  unsure (1)..(497): unsure at all n locations
gctgcatgattacatctcccctntctcaagcaaattcttcttgatatcatcaaaatcttcatgatttacattctccccctctttgatgatgacaaccacctgcaggtgaggagcaacaacaaagaaaatatctatttgcatatagtttactcccccttggttttgcaatgattgcttatatgagacagttgaagatttcatatttttcatatgtaaacaaattgtctcataaacaatagaataattttcttactattttatcttttatctttctctcccnctttgtcaacatcaaaaacaaatcatgaatagagaggagaaagatgttaccacttgttgcaatgtatgataatcaagtgataccaaaaggcattaaaataatcattcaatattaatcaagcaaaaacaangtcaacgacacatcaatcaaacacaatcaaatacaatcaatcatcaaatatttcaaatcanantaattaaattaacaanntcactac

SEQ ID NO: 66325 - DNA, 463 bp, Glycine max
  unsure (1)..(463): unsure at all n locations
agcttaggctaaattagtctaaactttcgtatgctatntaagctgagtctagtccaacaagagggatctgagaacgaagcttagtttaagttagtctaaacataggagggttgtctaaattaagcctagtccaacaagagggatctgaggacaaagcttggattgattcagtctaagtggggattgaggtttagtaatttaggctacaacatagaacacanaagcatgattaattagagaaacatctttatatacatcaactggtttgttagaaagacccaacatctttacctactgttgtcaatcttacttacttgcatttntactggttttagcctagacttagttntattntgttctaaatcatcaaattatcaatggttctttcaacaatgccttatttctgaattaaccatgtctaagactagttccctgagttcgatactcagattcatcccgttta

SEQ ID NO: 66326 - DNA, 346 bp, Glycine max
cgctctacgaattgctcaagaataatgagcctcttctgtgggatgaaacctgcgaacaagccttcttaaccttcaagaagaccattgctacaccgctggtcctaagtcgacctatgccaggagtacccgtactcctatatctctcagtagttgacgaagccgttagctcaacccttgtacaagaggaaggagagcaccaactccctatcttcttcaccaaccgcatactccatgacgccgagaagtgataccaaatgatagaaaaggtggtgctaacactcattacctcaactcaatgactaaggccctacttctatagtcatcaagtggtaatcaaaatgaacta

SEQ ID NO: 66327 - DNA, 426 bp, Glycine max
  unsure (1)..(426): unsure at all n locations
agcttcaccggatgacgccgatcttacatgttttaaccgacgtcatgcanatttcggtcagggattgaattgaaaactcgntaggcgacatctgtcgtgaagtagcgaccgatattcttcagccgacattgcacaattctttttagaaaagctcgctggtcgataatggtctttttacggcagagtaagttatcttgttttggtgttgcataaaaaagatacaatgtacttcggctagggttttcgtgcgagttcaaccgacattttgtttcggccaggaaaacattagcccacctctgcaaaaaaaatattcgctaaccgtcttcatgcatatttcattcaacgattgaatagaaaactcaatagccgacaacggtcgngaaatagtcccgactgatanttttcagccggcattgcgcatttctt

SEQ ID NO: 66328 - DNA, 313 bp, Glycine max
  unsure (1)..(313): unsure at all n locations
ctcaagcctcttgttagacctcgatcggncatctctatctgccgatgtctacctgtcattttgtcgagccattcctgtgaataatattatgttgccgagatgggcaaaatgccagtttctgccgaatagatgggacaatgccagtctcggccgatacgaatagtcggttgagctcgcacaaataaacctagccgacctacattttaatgttttatgcacaccaatacaagaaaacttcctgtgccgtttaaaccaacatacatgacagcgtgcgttgggacaaacacaattgcgccacgctcgctgaaaaata

SEQ ID NO: 66329 - DNA, 473 bp, Glycine max
  unsure (1)..(473): unsure at all n locations
agctggttcatgtcacanatattctatagcttgaggaagtgtgagattctgtcttaatattattcctaaaattatatttattattggaatattctatttcctattaattagtaattgattgatcttgtaatcaatattgactccttcttcatattataaataacatgaggtgtggtctactttgacacacaacacaacagttaaaaatactgttataagtagtaactcattgacctattactntgacgtagataaatgatggtatttttataactacataacaaaggcattacatttaaagtttgttacagggagtgtgactctacagttgcctttgtatgtcattgggttgacatactatgaatttgagaaaacccctttccgatggctattgctattcanatattcacggtactcgtcatacttattgttttcagaagagtgcattacatgcagaagagcaattcttacat

SEQ ID NO: 66330 - DNA, 371 bp, Glycine max
  unsure (1)..(371): unsure at all n locations
tgcaagctaaggtgcgacccactattntttttagaaaacactggccacgtgtctactatcactggtatcatcttcctgtccgtcattgggggcaccgcttgggctaccatatacttccaactttgggcatattctttgaaggattcatgcccctttttatccatgttctgttggtgcatcctatccggagccacatcagaagtgcattaataacgcctaacaaatgcatccattatgtcctttcaataatggactcgggaaggatacaagctagtataccgtgtggcagctgccccagtaagactttcttggaggaaatgtatcaacagtttctcatctgttgatgccctcatcttccagaaatatatctt

SEQ ID NO: 66331 - DNA, 395 bp, Glycine max
agcttgtagggttaaagtctcactattgtcatgtgctcatgcaacaattgttagccgtggctatacgagacatcttgccaaacaaagtcaggttcacaataactcgtctgtgctttttcttccatgctatatgtagcaaagtgattgatccagtaatgtttgatgagttggaaaatgaggccgcaattatactgtgccagttggagatgtattttccccctgctttctttgacatcatgattcacttgattgtgcatctggtcagagaaatcaaatgttgtggtcctgtttatctacggtggatgtacccgattgagcgatacatgaagatcttaaaatggtatacaaagaatctatatcgtccggaagcatctattgttgagaggtacattgca

SEQ ID NO: 66332 - DNA, 499 bp, Glycine max
  unsure (1)..(499): unsure at all n locations
tggattctagagtgtggtatntntttaaattctattaagttaacttatcatgaatgactaatttatttcttctttcaattcaatttcctgatcctaatattactttactcataaagttcaaactcattaccaagagctgatggatcccttcttgaataatcattaattctacaagtatttatttatattcaatctctattcaactagtaatctgaagcgttaggtgtctggaattaaaatataacanatgacttattaattactatgataatctcggataaaaaaaaatntacatttcttctcgagaatattctattgacaatctaaggtaacaccaaccattangaaaattcatttgagtcaattcattgatcgcatctctatgtgcatcannttatatgcgtaattaatatataagatctactaatattcatccaaatgaatactatatacatatattgatctacctaaggtattgtgtctaattacatgatctatg

SEQ ID NO: 66333 - DNA, 438 bp, Glycine max
  unsure (1)..(438): unsure at all n locations
agcttatgctgcatatattactttagacctcctcaacctcagcaaaatcagccacaacaaaacaattatgacctctccagcaacaggtacaatctcgggtggaggaatcatcccaaccttagaaggtcgaattcttcacaacagcaacaacaacaacaacaaccttattnttagaatgctgctggcccaagctgaccatacattcctccaccaatccagcagcaacaacaacaacaacacccccagaaacaacaaacggttgaggctccttcacaaccttcccttgaagaacttgtgaggcaaatgactntgcaaaacatgcagtttcaacaagagaccagagcctncattcagagcttaactaatcagatgggacaattggctacacagttaaatcaacaacagtcccagaattctgacagaataccttctcaatct

SEQ ID NO: 66334 - DNA, 487 bp, Glycine max
tactcaagcttcaccttaatgtcctcctcagtgtggcatgataatacattgctctatttcatctcccactccaagtaggcctccggatcattctatcctttaaatggaggaatgttgagtctaataccatcaattccgtcttgtctaagaacaccatcattccctcttctcctcctttcttcttcattatgatctctattctgcatgtgatccaacctctcatggagcgcatcatctcgttgtgtcattaacctctccaaatgttgcatcaaagcttgcatttggaattgcgaaagccccactccatcattaggattagtacctgacatctcaaacaaacacatcatacgttacaagacaattatatttgctgtctgaatacctcacccactcaaggttgtcacacaattatggctttctcttatgaaacactcttgcatttaccactctaattcccctgagttcttgggcattcatagattatggc

SEQ ID NO: 66335 - DNA, 431 bp, Glycine max
  unsure (1)..(431): unsure at all n locations
gacgtaactctntgaagtcactgagagatgggtattcattattgttgcacgaaggcattttagtaatcactaacttttcttctgcgagttctgtgatctttttggaaccaacggtggcttcttcctcctcaaaatgaatatcatccttaaccgctagctcgggtaggttgttccctttgtagtcatcatatgaggttgggaactttntctgaagaactaggtcttgtttcttcaagttggttatgggtgggacgagttttagttttctcacaaaccttcctctcaccattattcctttcgagttttggaggttagaaaaatggatggcatgtgattggtggttgtgtttgtcactcaaagattgaagaanagaagagggtgagaatgaatgagctacggtgggggtaacgatgagttttctctttggtttc

SEQ ID NO: 66336 - DNA, 469 bp, Glycine max
  unsure (1)..(469): unsure at all n locations
gctgagaagaccaatattagcttgtaatgcttggatgtataacatggaaaattcttcaacatgaaacaaccctactcacatgagaattgttggtcattttcattttccaaacctagtaaggagtataactntaaaatattaggaacattctcatntaaaaggaaaatttagtgaaaaaataggagtgagtcagatcctatccatactagtgattgctgacactgcaactgattcaatacacatggctaaattaaacaattatatcatcggcttagtcggataatcaagtcgagaaattggaaaatgattcccagtatagtgaagaaaactganagttctttctttatgttataacgtcacaaatgcaaagagatagtgtgtggggcattatcaaatggttattaacttgtgcactatatcactttcaatttttttaatgctgtattctttgccttattatattcttcta

SEQ ID NO: 66337 - DNA, 478 bp, Glycine max
  unsure (1)..(478): unsure at all n locations
agctngagttgaggaagtgtagaagggtgatacttcctgctnttattcgttgaccacagagtggtacctggagatatgtcgcaggggtcaggagaccttggggacgtcaggtggggtgccattgcccaaaaccaagcttgaccaatcccgacccaacccgggcatagtcggtcagtgagaacctgtgatgtacctaaacaggcgagcttctggcagtcaacanataaaaggaacaaagaccacaaagcaaggaggcttgtggtggctggccagctgtgaatcttgtgtgatatatgggttatggcctctggtaatcgattaccaagggtgggtaatcgattacaaggcttaaaaatgaagacaggagactaggatggtctctggtaatcgattaccacggngtgtaatcgattaccatgcttgaaaacgaggtcagaaagctaggggagcttctggtaatcgattaccagggggatgt

SEQ ID NO: 66338 - DNA, 413 bp, Glycine max
  unsure (1)..(413): unsure at all n locations
ngaaccataaccggtggtagtgtgatcttaaactgtgagtgaacgactatcnnttgagtaatagtcttgcatcaatctctngaaattagaatgaaatgtatgaatgaggacatgatgaaggccatgaatgtgtatatacaagccaattgaccaaaaagcttaccttgaatgataattgtatcctttgcaccctttgtgagctaaattacactttgcaaaatgaaccctgaactngaatgaatatctccagataccttgcttatattctaggagagcatatggttcaaggcaaatttaccccaaatttgggggagtggagttgattgngatgtaaagtaaaaggtgaagcatcaacacacacaatatatatagttgtgttaaaaaaagagaaaagaaatcaaagaanatgtgtg

SEQ ID NO: 66339 - DNA, 488 bp, Glycine max
  unsure (1)..(488): unsure at all n locations
tgcaagctnnttaaaattaaattcaaatttctaatatctgttataaacagtttaaactgttggtaatcgattacataccttgtgtaatcgattacaggcttttaaattcaaattcaaaatttgcaaattatttcataaatcaatttagccattggtaatcgattaccagagaggaaatatcatatttttgaaaatataattgctcttaaaaaaaacttgtaaaatatttcctttagccaaacctgtgcagtattaattaaggaattctttctaagatcctaactaagtacatcgttcttcttgcatttctgaattcttgacttgaattgcgctcatctttggcatcattaaaacttcatatcatatatgcttctacaatctcccncttntttatgatgacaataatatgaaatcaagataaacgatatagcattgataatgtgtgctcacaaccttttactcgccttaagaatggaattatgcataag

SEQ ID NO: 66340 - DNA, 412 bp, Glycine max
  unsure (1)..(412): unsure at all n locations
caccactgtcgttgtgaacaatggatccattttggaaaataaaacctaatgtagagttcacaattgtctgactgctngtctctcccaagaatgccatagttattnttgtaagagttgggttatgactgaaacttgtggttntttacagtcttaggcgatgtcatatatatatatatatatgagttttaatatcagtgttgcattttttaaagattaaaaatacacatacacatgctttcttatgtgttgttaactacaccaatgacgtgacacactctatcttgcatcagatctacatgtgtagtcatgttgtgcaaggtcttgtcacgcactttatgttaatgcagacaacaatttatcatacatgtgttttcacaatgtgttgccaactatacaacgatatatcatacat

SEQ ID NO: 66341 - DNA, 455 bp, Glycine max
  unsure (1)..(455): unsure at all n locations
gccccactccatcattaggattagtacctgacatcttaaaccaacaaatcaaacgtaataagacaattatagttggtggttgaatacctcacccactcaagtgtatcacacaattattgcttttctctaatgaaacactcttgccttttaccactctaattccccttgagttcttaggcaattcaagagattatggccacaacaaagaacaattcaccaatatgtgtaagggaaggctagagagacaaggaaaaggttaaccaagaaaaaggctaacaatggttttaggcacaaatgaaggaaataaaattcagaatntaggaattcaagtaacaatccttcatgcaaccaatatattaccttaaagagatttttttaaagttcttcagcatgaaccattcagcccaatttttttttttttaattttgatatacnaaatctgcttcttttttttt

SEQ ID NO: 66342 - DNA, 394 bp, Glycine max
  unsure (1)..(394): unsure at all n locations
gctctcgagaattcanatggtttaaactnttcaaatggaagtccgatcaggcgcataatatatcgagaaggtcgaaattgaacaacagaagctctcgagggaattaaatggtcataactttgtacacggaagtccgatttaggcgcataatatatcgagacgctcgaaattgaacaacggaagctctcgagaaattcaaatggtcataacttgtcacacggaggtctgattccggcggatagtatatcgagaaggtcggaattgaacaacggaagctctcgagaaattcaaatggtcatatacttttgaaacggtagtccgattaaggtgcattatatatcgagaagattgaattgacaacggagctgtgagaaatctatggtctacatataca

SEQ ID NO: 66343 - DNA, 446 bp, Glycine max
  unsure (1)..(446): unsure at all n locations
agcttaagtactggtttttaaatgcttttggtgttattctccaatcataactaaagtttcgcttcatcactcagctgttgtgtgttaattattaacttgttctttcctcttttttatctactccggtacagatgtattcgtggagctaaattaaatcctgaagaattagattgcatggtcttaagttctatctattctgaggtgatgatgatgaacaaacaagtttactgctataacatccagtcaggcagtgagcatgaggtactacaagagatattaagcactgttggatggccataaaagcaaaggcttttatctnnttttttcttttcttggtgtataattattctgcaacacaatatgtacatatatgtgttgtagatgctctgganatgaccttctttgctctgaaaggtcctcttagactatccgattacactgataga

SEQ ID NO: 66344 - DNA, 478 bp, Glycine max
  unsure (1)..(478): unsure at all n locations
ctcaagcttattctcctactgtntaggtgctaagtatggaaagctgattttgaggatccaacacctcatgaagaagaagagaagacgataattagaggaaagagattctgtatttttcattcatgtcttacagttntattacacatgcatatttatagtgtgaattttctaatacaattgtgattntgtgctagaanaagattacaagcaaataaattatattattgttgttccctaattctcgacaatcatgatctcgagatttcttccttgtcaactcagtcatgagactcatgatcatatatgcagacttggtgatggttctttgtggttttccttctagctgcaccccttggtgctagatctactatttnctctgtctctctatcacctatcctcttaattntaaaattataagactatatttataaaatgattctggagaataatgattngtgatagtaataaaattcattat

SEQ ID NO: 66345 - DNA, 479 bp, Glycine max
  unsure (1)..(479): unsure at all n locations
agcttatagaatatataacaagatttcaatgtcttttgaagaatcaattcatgtttcctttgatgagtctaatattatttctccaagaaaggatattttagatgatattgcagaatctttagaacaaatgcacattcatggacaagattctaaaggaaaaggagaaggaagcaatgaagatccaccagtagaagtcaaagcatataatgattttccaagagagtggaaaacttcaagagatcatccccttgacaacatcattggtgacatctcanaaggggtaacaactagacactctctcaaagatttatgcaataacatggcttntgtatgtatgattgaacctaannaattaaatgaagccataatagatganaattggataatagctattcaggaagaactataaccaattgaaagaaataatgtttgngagatagttgagaaacctgaanactacccaatcattggaacaaaat

SEQ ID NO: 66346 - DNA, 284 bp, Glycine max
ctacaaatatttgcattatcacagtgaagtcatgaagggtgtgacatgacataatagacgcacgaacggtgctatattatcgcatcgacttccttcctaccatgagagatatcacatttctatgcacactatgtgatggatatgcctcttagcatgttgcacactcactaaaacacataatagccggatgcctgagcggcactcatcaaaaacatattcagctttaggaaaaaaacacatttaaagtatggattgtaacacaatagacccatgactctcgtgtg

SEQ ID NO: 66347 - DNA, 472 bp, Glycine max
  unsure (1)..(472): unsure at all n locations
agcttcctctctaccatgtaagaatgatgcacctcaattgtcaaggagcatcacctatggtggataaatccaaattatttatcaacaaatgaagattctgcaagatcaatggcacgagcaagagctgcagctttgttctcgcactctctttgttcatcagcaggatcactgtcagccacaattcccgctccagcctggagatgggcaacccattctctgcgtttcttcatatcctgtaggagtacatttgtgtcataacgagcatttgtagggaaaactatggtcctcagagcaagggctatgtccatatcgccattgaaagataagcctccaaatcccccactatatggccccccaactcattaatcaactccatggctntgacctgttttacagcaaccgtaataatgagaacaatntaggaccaaacaagtcgaaccaagactgcaatnctaaactagtgacaatcaac

SEQ ID NO: 66348 - DNA, 466 bp, Glycine max
  unsure (1)..(466): unsure at all n locations
ntgatatagtgtggttgtggagatcttcttctgaccaattcgganatactaatatgctcatcacaagacataggccacaacctatggcaatggtggacatgcgatcttttgcaatgttccagacattatcaatgcggtagcttgatacagctatcaaattaaaggtcaggagaaagatcagaacaccatagtcataattcttcttgatataggggatgaacctcacataagtagtcattgctcctgccaaccaaaagtgaaacgggtttgacatgtgactctaaatgtttgcgctatgtatgatagacacaagttttacatgtcaattggttggcttaagattcaacaaaagatactctgtggatggactattggatagaacaggaactaatcaccgaatcagagcaactatacagagaggtatcttatttggtatctcgaagccttcaatttttttaactacaac

SEQ ID NO: 66349 - DNA, 478 bp, Glycine max
  unsure (1)..(478): unsure at all n locations
agctntagtcatggttgatcgttaaaattagtatttcaaataacgaataaaanaaacgcagactttcactaaatcaatgggagaactagcttcatatattctaattataatattctacaaccaattctctctttctttctctcccatgtattctaaatgaataacaaataaaaggaaatcagatactattactgtacaagtacactgtaaatacacatgcagacacatttagagaatgcaacaaattttgtaaatatagcaagcaacaactaaacattatattattatatcacacatctgttaatacatatcataattctgtcctggtccaaaatagagaaatataaccacgttgctgtattcaacagaaagtttcttcacattngtcttcaactctttttgtaaacaagcagaacctatatggngcattatggtttgtgaatgatgacntgtttcccaatatattccatcactccat

SEQ ID NO: 66350 - DNA, 360 bp, Glycine max
  unsure (1)..(360): unsure at all n locations
gctgacaacaagtactaccattgttttgttattatgaattagctgactaaatttcactaatatatacagtgactactcagaaggaaatgatgagcctagattangcccatctaatctacctaattaaactaattacacaaggcannagcccaaattgtagcccaattgttcaagtacaaaggttctaactgccaagcttatttctgacaaaattgaagctctttttcttagatttctaaggacttctcatatgctccatttggtgttctgtagtgtcctataggccctgcacaaggcagataggtcaagtaagcacaaaaattcaaaaataagcaataattatcaattaagctcaatcat

SEQ ID NO: 66351 - DNA, 397 bp, Glycine max
  unsure (1)..(397): unsure at all n locations
agcttatgcagcattagaaaacatgcaaaggttaggcattaaaccttccatagaaacctacactgctttactagatgcatttagacgtgccggtgacacccaaacattgatgaaaatatggaagttgatgaggagggaaaaagttgaaggaacacgtgtcacattcaacactctngttgatggttttgctaaacatggttactacaaggaagcacgagatgtaatatctaaatttgcagatgttggattgcacccaacagtgatgacatacaatatgctgatgaatgcatatgcacgaggagggcgacactcaaagctgccagagttgttggaagagatggcagctcataacttgaagccagattctgaacttatncaactatgatatatgcatttc

SEQ ID NO: 66352 - DNA, 477 bp, Glycine max
  unsure (1)..(477): unsure at all n locations
agcttcatcttcaacccaagaatgtagtgatattgaggattcaaatgaaatagacaaagatgatgatctcagtctttttgtaaaaagattcaacaaatttctaagagtcagaggaaatcaaagaagatcaaatttcaaatcaaagaanagggcagaagattcatcctctactccaaaatgttatgaatgcaatcaacctagacatctgagggttgattgcctaattttcaagaaaagaatagaaaaatctgaaaggaaagcttttaatgaaaagaaagctaagaaggcctacattacatggaatgacaatgatatggactcatctgaagattcagaanacgaagttgtaaacctaagtccgatggccaagaattatgaaagcgatgaagaggtagcatcttctgataacaacttatccatttcatttgatgaagtacaagatgcatttgcttgattacataaagaatcagttaaact

SEQ ID NO: 66353 - DNA, 414 bp, Glycine max
  unsure (1)..(414): unsure at all n locations
aaactaaattnnttacttcaaatgcaaggactgcgtatagacgttatacgttgtcattaaatcctagattgttatgtatgggatatttgttgactttcataataactacttcaatagtcataaataagaagatttctgattgtgtgacaaccgtgcatgagaactaaactcttaaactaattagacataaaatttagtgtatgtttntcataaatactatntagataacttggacatattttcatctagatttgttgggggtgaaacaagttgtatttggaaggaatttcatagctggagatatgggtnttcgcaacacaatcggtccacagaagcatcaagcagtggcactaatgacaagctcagatcaagtagtntactatagatgtcacattgatgcatatcagaacactc

SEQ ID NO: 66354 - DNA, 428 bp, Glycine max
  unsure (1)..(428): unsure at all n locations
agcttagtgcgagtactcatgtccaagtccatctttgcaactataaaaaaagagtcaaatcaaggagaaaaaatatactgagtcttaaagcactttaatacacgcctaaagcctcataactctcccttagagaattctttcttcactccaatcattttctattttctttttccattccttctcttccatcagtttctaaacctatattcaagtgtaagatctcttatggctatgagaggctaaacccttatatagttagggtctagcagacctaacaagttaaaagatgtattgtatacttcatatctatcaatggaaacaagtggttttttcctattatcctttcttacttttagtttcatgtatcattcatccttgcatcatctntgagggtaggtgctcgacagaacgtatccttaataaaaata

SEQ ID NO: 66355 - DNA, 458 bp, Glycine max
  unsure (1)..(458): unsure at all n locations
ggcctgtcttaatatgtctggtttgcgacatgactntctacgatagttgctatataaccgacatagtatattcaacatactaagacgattatgtgacaaccgtcgtcatattaaatatattgtttgtttggagatcactttttacgactgttttagtataactgacgtagaaactctaacatacttagacggntatagtataatcgtcatagtatttagtatacttttggtttggattctgctttgctttntgtatccttaatcattaacaacattgataggaaccagaactatcatattcaacataaataaaatcatttaactacaacaggtgtgaaatcatttaactacaacctctaatcatcatcatcattaactccaattcagtctgtatcccagcatgtgactttcacttcagtaatgaacagaggaagagagagagcatcattaactaaccc

SEQ ID NO: 66356 - DNA, 381 bp, Glycine max
agcttataatatatctatacgctcaaaattttacatcgaaaactctcgagaaattcaaatggccgtaacttttcacacggatgtccgattcgggcgcataatatgtcgagaggctcgaaattgaacaacggaagctcttgagaaattcaaatggtcataactcttcacacggatgtccgattcaggcatatcacatatcgagacgctcaaaattgaacaacggaagctcttgagaaattcaaatggtcataacatttaactcggatgtccaaattaggcgcatcacatatagagacactcgaaattgaacaacggaagctctcgagaaattaaaatggtcataacttttcacactgcagtccgattaatgcttataatata

SEQ ID NO: 66357 - DNA, 417 bp, Glycine max
agaatcggacatccgtgagagatgttatgaccatatgaatatctcaagagctatcgctgttcaatttccagcctctagacatattatgcacctgaatcggacatccgggtgagaagttatgagcatatggatatctcgagaggttccgatgattaatttcgagcgtatctatatattataagcttgaatcggacatccgtgtgaagagttatgaccatatgaatttgtccagagcttccgttggtgaatttccagcgtctagacatgtgatgcgcccgatatggacatccgtgttaagagttatgagcattagagattctccagagttccgatgataacttcgagcgtatagtatattgtaccctgaatcgacctccggtgagagtttgaccatttgattgacagagcgttcgtgtg

SEQ ID NO: 66358 - DNA, 366 bp, Glycine max
  unsure (1)..(366): unsure at all n locations
caaacccccactaggatttttgaacttccaaacctcatcgagcattattaagtcaagattttgaatgaagcccacatagcacaagacatatncgtggagggtttcggaggtataatcaacaacatcatgaccaacaactacctcacattcaccgatgaggaaatacccgtcgagggcaggggacacaacagagccttacacgtatttgtcaaatggttggaccacatagtggccaaagtgcttatggacaatggctcttcccttaatgtcatgcccaaggctaattnggacaaagtgtcttttaatgcatcacacctaagaccaagctccatggtagtgcgagctttcgatggcagccgctgggat

SEQ ID NO: 66359 - DNA, 293 bp, Glycine max
  unsure (1)..(293): unsure at all n locations
cttctggctttattcgttgaccacagagtggtacctggagatatgtcgcggnggtcaggagaccttgnggacgtcaggtggngtgctatngcccaaaaccaagcttgaccaatcccgaaccaacccgggcatagtcagtcagtgagaacctgtgatgtacttaaacaggcgagctcctggcagtcaacagataaaaggaacaaagaccacaaagcaaggaggcttggtgtggtggctggccagctatgaacttgattgatatatgggttatggcctctggtaatcaattatca

SEQ ID NO: 66360 - DNA, 456 bp, Glycine max
  unsure (1)..(456): unsure at all n locations
agctntngatctncggggtcaccagaatgctctaagagtctggaaagattactatgctaaggtctttctctcttgtccctctcctaacacatacacacatttgtgcatatttttatacctgattgcaccccaacagttgacttctcaactctgttttacacctgcaaacatcacttgatggaacttggctatatacctataagaattgtctggaattaggattaaatcttactcctcaatctgatatggttttagacttttggtctacatgctaatattaatgtgtggttggacttggaatatgtttattngtcgttctagctgttaacaaggataaagttttctttctatactcattactgaacttgcgctgtaatgatcaagttgccaagaatactcatgntgtgaatattactatattangactatngtctaatntatgtgactagagcttag

SEQ ID NO: 66361 - DNA, 430 bp, Glycine max
gtcttctgttgtcggctgcaaataaataaatggttaaatacaaccaccccacgcagaagcatacagctcccccaccaccaccctaccccaaatatcctttctttagcatgcatcaccatgctcataacaacatcacaccacaataagcatacccaaatccaataataaacatgaacaaacgtgttttgcaatcaagagctacccttttaatttcatacacagacgaacgtatgatcatatatgaataaagaataatatacctgttcgcggacatcatcactaggagaagcaagtagcttcacgaatattgtgacagccccgtgatcaatcacaacctttgtgttttcagacagttcagaagctagtattgtcaaagcccaagctgtctcaaactgcaacatgcaatatacaaacatcaccataagtaaca

SEQ ID NO: 66362 - DNA, 481 bp, Glycine max
  unsure (1)..(481): unsure at all n locations
agctcacacaattattttctaaacttgatttttgtagaccaattactaagtctttcttaacctagatgattaaagatgatgcatgtttatgtgtgcagtcctacaatgccacaaccaagagtcatctatcttaccaaacaactcagctcctaaaatgatgcatgttncaatattaacatatagatattacctactctcttgccaatatggacatcctgaccagacatagcttcactaataagacaataattcttggtgaattcaattntgaagcctttgtcacatagttgactaatacccaagaggttatgctttagtccatccacatatagaactttctttatctgagttttgtactgatttccaatatttccttcttccattatctttcctttggtatnggctncaaaagtgacatatccttcttctttngacacanagtaatgtagctccatgtggagcttgtagccttggatcttct

SEQ ID NO: 66363 - DNA, 398 bp, Glycine max
  unsure (1)..(398): unsure at all n locations
gggacccggtgctgagaggaacgatgttaatggctacntacgtgtgcgtgagctcaatttataggtgggcaactgtggatggtgtacttatgcctgngcttgtagaaatgggatatttgttntgcgtcatcgcccgatcgccacctattaccacatatgaagggtgccctataacccaataatccatgtgtgagatagcgtggaagagtcagtcttccaacttttattagttgaccacagagtggtacctgaggatatgtcgcggnggtcaggaaacctnggggacgtcaggtggggtgctattgcccanaaccaagctttggcaatcccgacccaacccgggcatagtcagccagtgagaacttgtgacgtacctaagcatgtgagctcctggcagt

SEQ ID NO: 66364 - DNA, 484 bp, Glycine max
  unsure (1)..(484): unsure at all n locations
gtccatntttagataaagaatatnctccgttgtcactccatgccttaagctaggaatcaaactccaaaccttttcaattatacattttcttgataatagtaattatgagtagaaaaaatcttattttaaaatttcataataaggtactttacaaaggatgagtgtaaaacaaaaatcttattttcaacattntattctcgacacgacacagtaaataatcattccaagggggggggggcgcatttttccagtcacaacttanaataagctatgtggaatttaatattcacagcacagccaaggagtaccttaccgctatctgaataaattaatagcgtcaggcgttgtcgttcaaatgaagtatttgtgttgcatcggatgaaaaaatcgttatagccttaaagcanacaagcggtggaccatgtanaanagtgacangtgtaatggaattatgggaatcatactgagaaatgacattttttag

SEQ ID NO: 66365 - DNA, 364 bp, Glycine max
  unsure (1)..(364): unsure at all n locations
tgaggaaacaagggacaaaagtgattccacaatggaaatgctggtcattcttacttctcttagcacatcaacaaccaatactnagctttgctcattaattggagggtgcattgtggcggntngactcttcatacccttcaaccacttcaatgtttctttcttcagtttcttcctatagcaattgtaggcttcgatttttcctaattcctggacaccaatgcttgcttatgcnagtgaactgaagttcttggaggtgctcttttactagcaagagaacatctnttgagatgccacacacctncaacatcctcagagatgactctgacacatcatcaaaccatttttcttctctttgatggacaag

SEQ ID NO: 66366 - DNA, 387 bp, Glycine max
  unsure (1)..(387): unsure at all n locations
tcttttactatctnattaatgctatctatatgtgttcattgcttctatctatgcttattttacatattaggggcttaatcacctatttgtatgtgcagttaagaattttagcattgggagaactttgtagagcaagctagaaatctggatgtctaggaatgaagtgcagtaatctagctcatactatgttatagacttaatgaaactcttttatttatacggacattatgtcttggctgtcattgaactttttaatttggcttatgtaacaataattttattgctgtgctatctctctctttgcttaacaatatatgtgtgcgatgaagatattaaatgttcgaaaatatactttgatattagttattttataaacgctatctgatt

SEQ ID NO: 66367 - DNA, 335 bp, Glycine max
  unsure (1)..(335): unsure at all n locations
ttgtgaatgcatcctattccacagaacgtgtngaggtcaccacaagtttgtcctgccaattgctagctctaccttgaattctgacttgccgctcagatccaaccaaagcgaaatgaagcattggatctagtccatactcaggctcaaaatttgcaatatttcagtaactaaatgtaattaatcatccagacatacacttaatgcatttgagtttgtcctgttaagattgttcagagccaaagctatgtttattgaaatgtaatcaaatccacagtctggatataacatgtaaaaatagtaaaaagctttntacctagatgtaaagatacccaatg

SEQ ID NO: 66368 - DNA, 413 bp, Glycine max
  unsure (1)..(413): unsure at all n locations
agcttattatctgttatagatgacttatngttttacattaccaattntgactcccaaatttaattcctattttgactgctagaccaaagaaagatacattgttctccctatctcttctattgcttcgtattaaattgcaagatgtttccatatattggtcctaattttttatactcgctcatgcatgttgaatattttgacaacattaggttttttataatttatgaatgatccttattgaaggactgctgtctgttaaaggtcatatataaatcactatcccagctttataattcataatactaatttgagaacaaaaccttattctacattaaaaattcaaagtcatagaaattttgtagcatacgccattgaatattgtctgccctaatatgcacaatacaaacaatttg

SEQ ID NO: 66369 - DNA, 308 bp, Glycine max
agatgtaactgttcagaaggcttctgactctttcagatgggttctaagctcttctaacaagatataactcttctaacaggtattcttgaccagacatgaacagtctataagagcagggctgtgctttgcattttcaattaattcattctttcaatcttgaatacatctccaatcaatctcttacaatcctctacgagccttgaatctctttgaacttcttattcttctttgtgccaacagccttctgaagtttgatggtttgcaaaccttgaagacttgtgctattcatctgttcattctcattctcc

SEQ ID NO: 66370 - DNA, 464 bp, Glycine max
  unsure (1)..(464): unsure at all n locations
agcttgtaggattatggngtacccatcacatgtggtactaggtggcggtcgggcgatggtgcacaacaagttttccacatccacaaatcgcgcataaacccaccatcccctgttgcccacctccaactgagctcacgtactcccacgtagcccatatcatcgtttctctcaacaccgggtccccatcaatcctcccaagcttcccaacatccaattaattcaacatccaatcatcatggactaacaaaaccaagcaaaacagggcaaaggcagaaaactctgcccaaaacacaactcanaatcacagctnttctcacttaaagaccccagtaacaattccttctttccaattccttaaccggtggatcgactcgaaaattntactggaagtctctagtacataagcctacattntgacgcgtgggatctactagtaaacatncagaactcattctgcactactc

SEQ ID NO: 66371 - DNA, 331 bp, Glycine max
  unsure (1)..(331): unsure at all n locations
tgaaatatctataatgtgtntaccatcacgattatcgtctccttttccatcattgggggtaccacttgagctgccagatccctccacctttgggtgtattctttgaaggattcatgctcctttntacacatgttatgtagttgcatcctatccgaagccattatactgacaccgcctaacgaaggcagccattaggtccttccaagaatggactcgggaaggttccaagctagtgtaccaggtaacagctaccccagtaagactttcttggaaggaatgtatcagcaattcctcatctttngcgtatgcccncatcttccgacaatacatc

SEQ ID NO: 66372 - DNA, 397 bp, Glycine max
  unsure (1)..(397): unsure at all n locations
ctgcagcttgtagagtcaaatacatgtataatatatggagctgatgttcttatcatctcattatatgtggatgatcttcttttgacaggaagcaactcaaatcttgtggagaagttaaaggaagagatgatgatggtgtttgagatgttaaatcttggtttaaggaaattctttcttggaatggaaattaaacaaggagaacatgaagtcttcatctttcaaaagaagtatgccaaggagattttgaagaagtttatacttgaagaatgcaaagagatgaacacttctatgaatcaaaaggaaaagatttgtcaggaagatagaaatgagaagatagacgaggcatatattataagcatgattggttgttngatgtatcttatagaaactcggtctg

SEQ ID NO: 66373 - DNA, 357 bp, Glycine max
  unsure (1)..(357): unsure at all n locations
actaagctggacatttcagcattgaaatgttngttattnggccacaattttcggatattgcgtcgaagacaacctataagacatcattgtctgagtccgatggtccaattgacgaggatgtgctgatgcagcttgagaaggaggttaaggatagagtgaagattgcacggatgatcattgttgaggcgaaagagaattatgataatcagttgaagatccagaagttgaaggacacaatatttgcagttcatgagtcacttgcataggcgaagaagaatggggcgttggcgagcttgatttctgccagatcgattcccaagagcttgcattngttggcgatgacgctgatgggtgaga

SEQ ID NO: 66374 - DNA, 389 bp, Glycine max
  unsure (1)..(389): unsure at all n locations
cgctcactgaggaaaagattgtctttccctgggcactttgagcctggaatgcatcttatgtgccatgctttaaatcctactttctttcgagtctggatcttctggagaccacggtggctccttcctccttaaaatgaatatcattcttaaccgctacctcgggtaggttgttcccattgtaggcatcatatgatgttgggaactttctctgaagaactangtcttgattcttcaagttggttatggctgggacgagctttactgttctcacaaaccttcctctcaccatgattcctttcgaagtttgatgttagaaaattggatggcatgagattggtgtagccgttggcactcaaagattgaacaatagaagagggtgacaatgaatg

SEQ ID NO: 66375 - DNA, 411 bp, Glycine max
  unsure (1)..(411): unsure at all n locations
agcttagtagcttctcttcttcttttgctctttaacaatccaagacatcattcagcatgtctagtcctagaatgacaagtagaaatgatgcatggactccttcacaatcaggaataggagaggatattcaaggaatggatgatttgaaccttgatgatgacccanatccggtgccggctcaggattcctcttcctctacacnagaaagtgatgaaccacgtagtaaggaacaggtggaggattttgatcttccagatttcgaggttgtggataaaggggttgaggttcaagagaaggaagaagatggaggagaggaagctgacgaacctgtccaacaagaggaatcaacttcaagtgatgttgtcaaggaagtagtgcttgatcatgtgcaccttactagattgtctgagc

SEQ ID NO: 66376 - DNA, 443 bp, Glycine max
  unsure (1)..(443): unsure at all n locations
tctacttctactgtgttatacaacatatattgctgctntattgttgaccactgatcatataggccacaagatnttgtgatgcctacccctaagacagactcatgaagggcaatgccttatcataaaggctaatgggtgcttatatttataaacaaattctattatattaaatatgtatattcttaacaaatattcttaagaaactcatgaataaaactattattgcaatnattgtacatgctatgcttctttttacaaatttaacattatgaatattaaatgtgtaataatattcctaattaaacaataatttgaaaagtacaattacttcgtaccaataccaatatgatagttagaagtaaacatataagtgattatacaatacacactaccgaattttgaaagaaatatatcgccacactaattgattacatgttntactt

SEQ ID NO: 66377 - DNA, 390 bp, Glycine max
  unsure (1)..(390): unsure at all n locations
agcttagggatggaatacttacttggtggtgatgaacaaaaacgcaaaatggaatcaaaaaatgcgaaanaggatgatcctagggctgcaaactcgtcaatcccgtgggtatggcttttgaaaggggggacgggaacgttttgaatgcataaacgttcctcctttcatcagttttataatttggtgcaggggtgcgctcacatacgatgtgattcacccccaaactatatgcactatcacatatttgcctagctgtgctaaggcagaacactctgccaatacaaacttaagacacagctttttacttaaaaccccataacatttctttgttcaacccttaccgtagatcgacccaaattactgtaggtctaacatacactcatttgccga

SEQ ID NO: 66378 - DNA, 330 bp, Glycine max
  unsure (1)..(330): unsure at all n locations
gtgtggaagggtgagacttcctacntttattcgttgaccacagagtggtacctggagatatgtcgcggcggttaggagaccttggtgacgtcaggtggggtgctattgcccaaaaccaagcttgaccaatcccgacccaacccgggcatagtcagtcagtgagaacctgtgacgtacctaaacaggcgatctcctggaagtcaaccgataaaagaacaaagaccacatagcaaggaggcttgtgtggtggctggctagctatggatcttgagtgatatctggagtatggcctctggtaatcgattaccaagggtgtgtaatcgattacaa

SEQ ID NO: 66379 - DNA, 355 bp, Glycine max
  unsure (1)..(355): unsure at all n locations
gagtaaaatttgtaaataaattttgttntatggttaacgttgtctctagaacatttccattagatttaatgatgaaaagtagcagttgagctaagcgcttatccaccgctaagcgcagctttagcatgcttagcacaaaggagaatctggcagatcatcagcatcaaagccgcgcgctaagcacgagatcagtgcgctaagtgtagcaggtgcattcagccaggctcagcgcaagactagcgctaagcccaattccacttactcgagctaagcgcgagggtggcgctaggcgcaaggtcgcgaattctaagcctatttaaagtctggttttttgcagagtagggtacacaccttt

SEQ ID NO: 66380 - DNA, 414 bp, Glycine max
  unsure (1)..(414): unsure at all n locations
ngcaagttatgtctcgtatcggtttaatcgattacatccttatcataatcgattacacagttgggtttgagacaatgattgatttattaaggaatctctactttaatcgattatcatgtgatataatcgattacttctctttctataagtgtttcagaagtgaacaagaacactntaatcaattactttgagtatttaatcgattacattattcttgagctttnntccaagtttgggaagaatactttgatcgattaaaaagataatctaatcaattacttcattgaattaatcgattaccttgtagaattaatcgataataggcaattataattgtgttctctataaataaccagcttggtgtttctcataatatacaacaaaataagcttctgaatgagctaagatcacgtg

SEQ ID NO: 66381 - DNA, 485 bp, Glycine max
  unsure (1)..(485): unsure at all n locations
agctntatcgaaataattagacctaatgagttatcacataagattattgaaggtgtttgataaaggagcatggccctcgtgaatcatgtggtgtagaaaagtgagggcttggtcggttgaatgagaatgaacataggcattgacaattgcgtcatagagaggagtgtaggttgaacaagaggtgaaatgggcttgtgttagttgaagcattaaggaggaggggattcgaccagagattagacgcaggatcagagattgggcttggggtagcatgccagaggaaaggagatgatttatgatgaaggagatagagtgggaagtgtggtgaaggccttgatagcttgcggtgttgaacaacaagagtgtttntattggaggcactttcactcatttttggatgagaatcagagctntgtgcgactgggacatgtttcactaacccctcccacatctganaatcatagattacaatgaagtcaacatgg

SEQ ID NO: 66382 - DNA, 450 bp, Glycine max
  unsure (1)..(450): unsure at all n locations
gcttgcgcttactcgcatatctggctgaanacctcactcaaataaactagcatatcatatggaaggaataactgacctgttgatgagaataattgtaacctanaatcaccaaatgtgttagaagattgccttctccatgcattacatcagacgatagaaattctaatttccaaccaaataaaaaaagaagagaaaagtcaaactacaatgtcgaagctgctgttacaaaaatattaacacaaaatacgactaaagcatgaaagaagacccaccatgaatcagctgactacttgatttaatccaggattctggttgtaataacaaaggggaaccctcatccaacccatcaataccgtactccagtgggaggtaactctggcatttagctntatccaggacaagcacaagtaacanaattctctttcaaatcacattccccaaatctcatag

SEQ ID NO: 66383 - DNA, 473 bp, Glycine max
  unsure (1)..(473): unsure at all n locations
gcttgngaaatcgattacattgatttggtattcgattaccagngattggttctgaataaaatctaaagatgtaactcttcaaatagtttttgactctttcaaattggtttttaagtttttctaanagtcataactcttctaatggttgtcttgaccagaaatgaagagtctataaaagcaaggctttgttttgcatttcaacaatcttgaatacttttccaatcaatctcttacaatcctttacaagccttgaatctctattaacgtcttcttcttctttgtaccaaaagctatctaaagttttctggttttctaaaccttgaaaacttgtcctattcatctnttcattctcttctccctttgccaaaaagaattcgccaaggactaaccgcctgaattncttttgtgtctctcttctcccttntccaaaagaacaaaggactaaccgcctgaattcttttgtgtctcccttc

SEQ ID NO: 66384 - DNA, 425 bp, Glycine max
  unsure (1)..(425): unsure at all n locations
atctctatcaaacacaatggtcctaggcaaactatggagtctcacaacttccctataaaagagttttgagatgtgggaagcatcatccaccttgtggcatggtataaagtgtgccatcttgctaaacctatccaccaccacaaagatagagtctacacctctttgggttttatgaagcccaaggacaaagtccatactaatgtctactcaaggtgcagatgagatgggtaagggtgtgtatagcccatgaggcatcacccaagacttggcttgtaacaagccacacacctagtgcaatgcttatggatatctttcttcatatggggacaataaaatntttctttgagtaagacaagggtcttgtctatcccaaagtggcccatgagcccaccctcatggctctctttcacaagtaatttcttgat

SEQ ID NO: 66385 - DNA, 489 bp, Glycine max
  unsure (1)..(489): unsure at all n locations
tgcaagcttctcatgcattaattaatgaagcttatatatgaatgaattaaaagctctaacacacaatgaatactttatctctcaagcgtatgaaagaccttaggagaagataagaagcaagagaataatgtgtatattggaggaaacatnttttcaaacttgttatctcaaaagctttgtaaaaaaaattcaaagaaagcttttaaacttaacatacacacattcaacctatttctagtgtggttcttctttttcaagtattaccgcgagaataaaatgatgtcgactttaagcttgaaaaaactctgaccaccttatggtttggcgagaagaactaacatccattggtgtaattgagaagtgtctggataatagcttcactcctactaattacttgtgatgaataaactaatgtatattagcatccattctgangtgtgccttgaaagtaatatnaaaataaactntaataaataagttttatcactt

SEQ ID NO: 66386 - DNA, 465 bp, Glycine max
cttggttaaaagatgtatgacatgggactgtgggaactagaataggatgctgtagcagctgaggaattctccacctttcattgcgatcccatgctagacaccttctcataagatccagaagccatggatttgaaactggtgcgtacataatttcatgatttggatcagttataactttgaatgttgcccataatgtcttgtaatctgcaaatggtgttctcccatataccatttgataaagaatgcagccaagggaccagatatctgatggccgaccacattttatgatgtttccacttgcatcactctcattgcacataaatgcttctggtgacatgtaacttagagtaccaacctgcagtaatcgaaagataactaagtaaatagtagcattttcagatataattgatctgttaaagcttagcaaagtaaagatcacctattcacatgaccttaagatgtctt

SEQ ID NO: 66387 - DNA, 470 bp, Glycine max
  unsure (1)..(470): unsure at all n locations
gcgctgtggcgccacttattactgttttggctccacaaccaatactgtacagagatacacgtgcatagaagtacttagatgggacaccacanaactgacacatgcataaggctcagcgaatcattcttcttacttcatgatgcctcccttgttcattaatattaatttactgaagaatttagctctattcataagttcatgcattaatttatagttttagaatttcaagagaatngtctgccctaacttaattagttcgtctcatatgcaatgcatatcgggatccattatatataaatatgtactctcggtactggtcagttntactgggttaggtatattaatccaattgaacatgctcggtctgtttaaatcagtcaatgtgaattattttatgtttgttttctctaacgtactagtgagaacaactatanatgaatgcggtctttaatcatattcataattatata

SEQ ID NO: 66388 - DNA, 390 bp, Glycine max
  unsure (1)..(390): unsure at all n locations
ctacccgtgaactgaaaacatatacactatgtctgaaaacgcgaaatctccgtaatctccatcatgtaccgacgtactgaaggctcgctgatttcttcacaaataatttctagcacatccaagataagaggtctagggctgaccctttctcttcacttttccctattatactaatagggagaactgccgccactcgccagcagctcactgccagcgagcaagttcttcctcaaacaacacttttggagattttggagcccagtgggcggggctttacccccatctacaagcaccctgttatttgcgaatcgtntcgacgcacaactcagatgtgacaactattgtttccaaggcgacctacaattttttctttttgttcaaagtacgact

SEQ ID NO: 66389 - DNA, 450 bp, Glycine max
  unsure (1)..(450): unsure at all n locations
agcttcagacttgtgtttatatcagttgtgcatcttttaagcatgaaacacgagcacaatgaatgtcagaagaagtggttgaaataagtgcatggtaatcattaatccactcagaaatacccagagataaccctatttcatgaagcatgagaacgtgctccatattgctgcattcacataaaatagttgaagcggcatccttgaaaacagattgcatcccagaaagcaacacatcagaagcaaaactgtgaaattcagccggtaagtaccaagacaatcaaggacaaaccttgacagaatggatgctaccttactcactntatgcatgtgtttgctaaacacacttctcantttagcagtgaaatttagttaaaaatttgtttacttaatgcttcacagactggtgggagcattccatcattactaactcaacatctttacagagttctg

SEQ ID NO: 66390 - DNA, 513 bp, Glycine max
  unsure (1)..(513): unsure at all n locations
gctattggttccanaatactacagaatgtctntcatctggatgtgtgaaagcatntgattggcaacattgcagcaatatgaacttacgggtagcatattgataagaaaaaatctgtcaaaactcaactgatactgaccaaatgaccatgcctccgattaccaaaataggattttaaatctaatctaatctataatccactactaacaggaaggtcatgatttaaaaaagaacagacctggcgactttcatgaattcccctcagaatagtaatacgctgacgataacgcactttaagggcaaccaaaagctgcattatgacttaattagcaccaaaaatgttacaaaacanataccatatggaagcanaatatacacaatctataatacgccaattaaaaatagcattatcaacttgtacctcanactcagttngaatgtcatacacatctctgcatggtaatgttaannttaattttttttgctcgcatgttactatatgtcgcgtatacaat

SEQ ID NO: 66391 - DNA, 509 bp, Glycine max
  unsure (1)..(509): unsure at all n locations
ctgacctggatcttacgtcacctgcngcatgcaagcttggaagcgtaattgaattacttgacttatgcacacaacacanagaataggttgcactagaattagaaggtatggtcaaaagtgtattctttatgaaatatttttttttatatgagtcattgaactatagagtatcaccatcgctaagaacaagaatctcaaacaaccatactctgtatgcaattaaggtaaaacaccatactacaagtatacatagaattataaggttcttataataagtatacaacgtacatataagaagtaagaattaaatagttaataaggatgtattaaggaatcataaacttcaactactacattcacgactacacacaaaataaagggagttaaatagtcatgtgtttacacatcaagaaagacacactcatccaagacatatatatggttcanaaggttttcacaacactaatccacacatcaagatagaaatangtttattaacaacatacatg

SEQ ID NO: 66392 - DNA, 468 bp, Glycine max
  unsure (1)..(468): unsure at all n locations
cttcatcaagagatgcaagagaaggccctatggttctcattatccttanggtagaattcgggcccatgggctaagtatgattccacttatctntgtacatattagattaagggttcattattnttgggccttgtatttagggctccataatgtaggtagggtaccctagaaatataggatttttcagcccttgtattttatggcacctagactatgttttgtattaagggttaatttttatatttgcatgcattaagtgaatatttgatgtgtgtgttggaaaataaatctaattgaattgggagaagcccaatccaattaaattttagagggggaggtgagcatttgcttgctacacctcattgccacatcatatagtcacactntgtgcatgtccttcatngcttacatgcctcatgacacctaaacacacttagtggagaatctttgacttgatctttgattagt

SEQ ID NO: 66393 - DNA, 434 bp, Glycine max
  unsure (1)..(434): unsure at all n locations
agcttaaactatacttcattggaaacatatctgaaaggaagaagcactgaaatcttcaaacatggcctgcgggaagcatcaaattttacacctcagagtctaaatagttatgatcacaacgaagataattttcagtctcaataaaacacatggtgcaatatggaaaaataagatgaanatctgaaatctgcatagaatgaaatattccccacatccctctccattcttaatcacattggacacttcaaacacctctaatattatgccattataggaaggagggaataggatccatgttatacctgcacaggcacaccaatcattatattcactgccaattataaaagtcaatttggagaatgtgagctatntttggccagtcctctcctatttccttctcacatcgcttctctaactcagggcaaccatagata

SEQ ID NO: 66394 - DNA, 372 bp, Glycine max
  unsure (1)..(372): unsure at all n locations
ctattatatcatggtatttaataactccattgcaggatatttcatgatngagatatgaactatgtccacgtgctatgaaagaaagaacactttggaagatatatttcacacttgtcaacactcatgtggctccgtaagtactgtatcatgctgatattccatgtactatgttatatttgtcaatgaagggggaaactagcttgtctattttcttaagtatttttggttaacttaactctgattgtttctttattcttcanagaataaatatttacataaataaaagacgtacaagaaggaaaaatataaaatatgctagttattagagtattcttactccagctaatttacttagtggagtaagaatactct

SEQ ID NO: 66395 - DNA, 440 bp, Glycine max
  unsure (1)..(440): unsure at all n locations
gcttngatnatgtcgagaagaaatcacatgtttgtcatcatcaaagggggagaatgtgaatgtatgtatacattgatttgatgatgtcaaagaagaatctaagaagggtgcttcaaatgataagcattttcttcaagaataattcaagattgcttcaacaaacaaatcctttgttcaagattcactaaagaccaagtcttgccttaaaacaaagtgctttcaagacatgcaaggctctggtaatcgattactaggaagtgtaatcgattaccagaagacagggttgaacaatagctgttgaaaaggattttgaatttgaattntcaacatgtaatcgattaccatatgtctgtaatcgattaccagcaacgaaatttctgaaattcanattcaaaagtcatgaccctttcaaatataactggtgtaatcgatacacaaac

SEQ ID NO: 66396 - DNA, 431 bp, Glycine max
  unsure (1)..(431): unsure at all n locations
acgtgaagactgagcgcttatcggatagactatngcanannaaattccgagtcttnttttgtctatctcttcacacaagcttaaaaccccttgttcattacaaaaaaagctgaaattaatcacaatcacaagtaagatatcctaactacatgaaagatataagaatgaaaaatagaaaggggaaagaaaagctgggttgcctcccagtaagcgttcttttaacgtcactagctngacgcatcatcctgttatccaagatccaacagagttcctacttcaaggaccttcttctcaggtctctnttcctccatcacatgcactntaagacagacantttggctaggtggatctttgtcctcatggaacaaatcanagctaatcttctgatcttctangcccatctgcagtatcttctttcccatgtncaccat

SEQ ID NO: 66397 - DNA, 441 bp, Glycine max
agcttccatcaacaactttagcaataaggaattatccgcttgaaaagcaatcgagctcctgagaatcatccaacagagcgagttcaagatgattgaacaactaaacaaaaccccaactaggattttgaactccaaacctcatcgagcattattagtcaagattttgaatgaagcccacatagcacaagacatatcggtggagggtttcggaggtataatcaacaacatcatgaccaacaactacctcacattcaccgatgaggaaatacccgtcgagggcaggggacacaacagagccttacacgtatttgtcaaatgtttggaccacatagtggccaaagtgcttattgacaatggctctttccttaatgtcatgcccaaggctaatttggacaagttgtcttttaatgcatcacacctaagaccaagctccatggtagt

SEQ ID NO: 66398 - DNA, 356 bp, Glycine max
  unsure (1)..(356): unsure at all n locations
tttattcgntgaccacagagtggtacctgtagatatgtcgcggcggtcaagagaccttgnggacgtcatgtggggtgctattgcccaaaaccaagcttgaccaatcccgaaccaacccgggcatagtcagtcagtgagaacctgtgatgtacttaaacaggcgagctcctggcagtcaacagataaaaggaacaaagaccacatagcacggaggcttgtgtggtggctggccatctatgaactctgatagatatatgggttatggcctctggtaatcaattatcaagggtgggcaatcgattacaaggctgaaatatgaagacaagaggctaagatggtctctggtaatccattac

SEQ ID NO: 66399 - DNA, 266 bp, Glycine max
  unsure (1)..(266): unsure at all n locations
aaatctcacttaacctggagaatactttattcggtaaatagtacaggtaatcttttttttcaatgccaaataaattaattggcgaacataactttcaagagataatgattctacttacacgngaggataatgaatgtggatttttttatttactcttagtcttatgggaagactnttataatcagattcgacatatttcgtaagacaaaatcaatgatcatcctatttatacataatattatatacggattgactctatttttatg

SEQ ID NO: 66400 - DNA, 494 bp, Glycine max
  unsure (1)..(494): unsure at all n locations
gctatnggtttatacncttgtctacaccacctgtgacttgacaccaaatggccttcctttacctttaaagtcaccacgaatgatgagaagtgccatacaacttattttttcacactggcctcattggaataggacaacaggggaagctcatttctttgtgacccccatngaattggggcgtgcttccattatcaagtaagaaatntagtgtaccattttagttnttttatttacatcactattagttatattaagaattcaaacaaattttgtggtgtttggtgatagggaccttggattctactattaaagttgtacatggatattggaatatgcactnttatcatgtntattggtccaagaagagaaagcaattgagagaggaactctttcattgcttcagcgtgctaccttggttcannacattggacagaggaatcatgtgtgcttgaaagaagtactatacacctcgaaggnggtactatacatatgga

SEQ ID NO: 66401 - DNA, 468 bp, Glycine max
  unsure (1)..(468): unsure at all n locations
agctntctaaagttttctggttttccaaaccttgaaaacaaaacttgtgctattcatccttttcattctcttctccctttgccaaaaacaattagccaaggactaaccgcctgaattctttttgtgtctctcttctcccttttccaaaagaacaaaggactaaccgcctgaattcttttgtgtctcccttctcccttatcaaagaattcaaaacgacatagtctgagaattcttttgattcttccctttcccatatacaaaagatttcaaaggactaaccacctgagaattcttttgtatccccattcacaaagtttcaaaggtttaaccgcctgagaactttgtcttaacacattggagggtacatcctttgtggacaagtagatggtacatctacttgggttggtgactgagaacaagagagggtacatctcttgtggatcagttctagtggagggtacatccact

SEQ ID NO: 66402 - DNA, 298 bp, Glycine max
  unsure (1)..(298): unsure at all n locations
tctgtctctgacattgatattcccttcttattcctcaccatagaagctgcatcaaagctccaacctatgctcaccaattctgctgcaaatcacaaacggaagccatcttctgagacgtgaagcgcacctctacattgtgggacttcaaatttgaggtttgggtagacttcttctcacataaatgatcgtgggtatcgngttatgagagatatgatgggtagacttactacgtttatgccttatggtagntgtttgngaaagaatttgttgaaagcatgctaaacttgacatgattggt

SEQ ID NO: 66403 - DNA, 450 bp, Glycine max
  unsure (1)..(450): unsure at all n locations
agcttcagacaacttgttgtagtcgattactttacagatatcaaatgtactaagatgtatcaatcatgataacaaccaatatgaattccactcaaaggagttgggcatgtaaaagccaaaacttcttcaagctttagccttaagttgttcaccatgttgctcccctatctctaacaacccatgcatgtagtccaagttcaaaggattatagtatgttgatagtgggcgcataaaccatatgataagggactcaagtctgttaaactctttagacaaggctgttagaaccaaagtcaagattggaaatggagaatatgttcaagctaaaagaagagggcactgttctattcacattagccaaagtcctaaatttattcatgattgtgttgtgatttcaaacttaaatcaaaatttgctacctggttgcacaataatgaanaaaatattcac

SEQ ID NO: 66404 - DNA, 448 bp, Glycine max
  unsure (1)..(448): unsure at all n locations
gggagcgacagcgacggaggaccgcgaggcagtgacggctatggaggatggaggaccgcaagtgagggctntcatagcagaacaacggtgagtagcagcttcagcgcaacacgaccacggagtcgcgactcgtgagtaaaggagtagttatgcttcataacgacgttgtttcgaagatttcgtgaactcgcggactcgtcgcagattcgcgattctacctaaactcgtccgagtttgcgctaaatcggacgagtctactccgatttcgattctacttccgatttaactcgctgacccttggtagaatcgtaaaatcgtacgattntacgaagtaaatcgcgatttaacaaccatgtntatacttatgtcaccttataactntgcacttttgagtganggttcaactgggtgttacgatgtctaactctatactaagacactagtcatg

SEQ ID NO: 66405 - DNA, 343 bp, Glycine max
  unsure (1)..(343): unsure at all n locations
ctggtccttgcattcttttaatggggttgatcatgacattacattctgtatgagatgagatttacaataaaataagcgatgttgattggcgcagatgtagtatatttggtgccctacttcttccagtattcctctccatgaccatccggngatgactgtatttagcagacttctctatggctctttacatgtgaaagcttatgactgggttgagccgtcctgcatcatagagagcanagaaccatgatatgctcagggctgacttgtatgtacatttactttgaggtgacttcttatttcctccattcttcattactggctctactgtcattttaattttgat

SEQ ID NO: 66406 - DNA, 384 bp, Glycine max
catatgctgaacttgatcccatatctacttgataattcaatggtagccataaccctagccaatgttcatcaacctccatttctccgagaatacgactcgaacgcaacgtgtgcttgtcacggagaagccccggggcgttccattgagcattgtagggctctgaagtgtaaggtgcgaggtctaattgatgctggctgaaattagaggaggatcgtgtgtaaatcctgacattgacaagagatgccacacatggaggcaatttgaaagctgttgttagatgtctctaataactcaccaggattgtcaactttcatcggaatcgggtgcaagccattggtctattagctcaagcgacctgtgaccattcaatcagaggtgactcgt

SEQ ID NO: 66407 - DNA, 480 bp, Glycine max
  unsure (1)..(480): unsure at all n locations
gcaagcttcatcttcaacccaagaaggaagtgattatgatgattcanatgaaatagacaaagatgatgatctcagtccttttgtaaaaagattcaaccaaatttctaagagtcagaggacatcaaagaagatcaaatttcaaatcaaagaaaagggcagaagattcatcctctactccaaaatgttatgaatgcaatcaacctatacatctgagggttgattgcctatatttcaagagaagaataaaaaaatctgaaaggaaagcttttaatgaanagaaagctaagaaggcctacattacatggaatgacaatgatatggactcatctgaagattcagaanacgaagttgtaaacctaagtccgatggccaagaattatganagcgatgaagaggtagcatcttctgataacaacttatccatttcatttgatgagttacaagatgcatttgctgattacataaagaatcagtaaactt

SEQ ID NO: 66408 - DNA, 412 bp, Glycine max
  unsure (1)..(412): unsure at all n locations
actaaatnntttacttcaaatgcaaggactgcgtaaagacgttatacgttgtcattaaatcctagaatgttatgtatggtatanttgntgactntcataataactacttcaatagtcataaataagaagatttctgattggttgacaaccgtgcatganaactaaactcttaaactaattagacataaaatatagtgtatgtttttcataaatactatttagataacttggacatatnttcatctagatctgttgggggtgaaacaagttgtagttggaaggaatntcatagctggagatatgggttntcgcaacacaatcggtccacagaagcatcaagcagtggcactaatgacaagctcagatcaagttgtttactatagatgtcacattgatgcatatcagaacactc

SEQ ID NO: 66409 - DNA, 60 bp, Glycine max
  unsure (1)..(60): unsure at all n locations
tgctgctgcangcactctaagatcncggtcttactcaattcccctataggagcgattcaa

SEQ ID NO: 66410 - DNA, 479 bp, Glycine max
  unsure (1)..(479): unsure at all n locations
gctttacattcttgagcgactcgccaatttctcttttacttatcctaaagggctntctcaagctttaagtgtgtcttggatagacttttgaaatatctncataggttntataagtttttgagagaatgggtgagttagataaaagttcatgataggcttttaaaagacatggggtcatcaaaattacctggtcgtcctagtctgatttggatccttcagaagctaagtctgccattaggcatatgtctccttctttatcatcttcatcagatgaggtgtcgtctagatctccccacattctcatatgccccttcttttctttagtattaaagaagtatttttatctttgactttctccagatctggacattctgacttgaagtgtccaagatttttgcactcatagcaaactatggaacttttgtctttgtcctccttgtgctaggtcattcttcttgaagagcttctccatttaaacc

SEQ ID NO: 66411 - DNA, 450 bp, Glycine max
  unsure (1)..(450): unsure at all n locations
gttcttagaaacgtgacctaagcgcttatgccataatgctcatgnaattgtactatgaattctacgcttagtaccacacaattccgcattaaaggattcaccatatgaagctacagtatcaagtaaatatagattatcataagtcaatagtgaaccagttccaacaatatctaaattgaaagacaacctaaacacattggttcatataaacacaaatatacccaattgtccaaataagatattgaaaccaaatttcgtctatgtgatggtacaacaagagtgcctttcaaatcgaaatatagaccaatacataatgataatctaaagtacctatagcttcaccttcgctaattaccatctccagtgatatccatctttcagaatcaatggctccagtatctagacaaccctttattatacactgatgtatgagtgacactaaatttacat

SEQ ID NO: 66412 - DNA, 431 bp, Glycine max
  unsure (1)..(431): unsure at all n locations
agcttcagttntcaattaccagcgtctcgatatattactgtactcaatcagacatccgaattgaaagttattatcatttgacttttcatagaaattccgttntcaatttcgagcgtctcgatatattaaagggctcaatcggacatccgagttaaaagttattgtcattttatntttctaagagcttctgttttcaattacgagcgtctcgatatcctacgggacacaatcggacatccgagtcaaaagttattgtcgtttgaatgtgcacagagctttagttttcaattacgagtgtctcgatatattacagggctcgatcagacatccgagataaaggttattgtcgttcgaatgatctagagctcccgtttcaattatgagcgtctagatatcctacgagactcaatcagacatccgtgtcaaaagtt

SEQ ID NO: 66413 - DNA, 502 bp, Glycine max
  unsure (1)..(502): unsure at all n locations
gactcaagcttgagcaaactcanacgacaataactgtngaatcggatgttcgattgtgtcccatangatatcaagacgctcggaattgaaaacggaagctcttagaacaatcaaacgacaataacttctaactcgaatgtccgattgagccctctaatatatcgagacgctcgaaatttaaaacagaagctctatgaagagtcatatgacaatcactatcaattcggatgtctgatngagtcccgtaatatatcgagacgctcgtaattgaaaactgaagctctgagcaaattcaaacgacaataactcttgactcggatgttcgattgtgacccgtaggatagcgagacgctcataattgataacgaaagctctgagaaaaatctaacgacaataactcttaacacggatgtccgattgagtctcgaatatatcgagacactcgcaattgaaactgatgctctgagcaaattcaaacgacaataactttgactcggatgtc

SEQ ID NO: 66414 - DNA, 428 bp, Glycine max
  unsure (1)..(428): unsure at all n locations
cattaccaatnttgactcgcaaatttaattcctattttgactgctagaccaaagaaagatacatatttctccctatctcttctattgcttcgtattaaattgcaagatgtttccatatattggtcctaattatttatactcgctcatgcatgttgaatattttgacaacattaggttttttataatttatgaatgatccttattgaaggactgctgtctgttaaaggtcatatataaatcactatcccagttttataanttataatactaatgtgagaacaaaaccttcttctacattaaaaattcaaagtcatagaaactttgtagcatacgccattgaatatagtctgccctaatatgcacaatacaaacaatttggctttactctcattatttgacttatacacactagaatctgatgtctaata

SEQ ID NO: 66415 - DNA, 442 bp, Glycine max
  unsure (1)..(442): unsure at all n locations
cactgatctggtaatttattaccattgactggttctgaataaatcanaagatgtaacttttcaaaaggttctcgactctttcatattgcgtataagtatttctaaaaagttataactcttctaaaaggtattcttgaccagacatgaagagtctatanaagcaaggctttggtttgcattttcaattaattcattctttcaatcttgaatactttatcaatcaatctcttacaatcctgtacaagccgtgaatctctttgaacttcttattcttctttgtaccaaaagctttctgaagttctctggttttccaaacctcgaaaacttgtgctatcatcttttattctctntctcctctgccaaaaaattcgccaggactaaccgctgaattcttttgtgctctctttccctttacaaagaacaaggacaaccgctgaatctt

SEQ ID NO: 66416 - DNA, 472 bp, Glycine max
  unsure (1)..(472): unsure at all n locations
ctgcagcttctccgaaagatatttttgtttttaagcatttnggcaaacgcatgacattatgtactttacatctgcaggagctacaatgctgcaaatttctaaccatagtctctgtgatacactgtgataaccactattcacttcatgctgcttcatgcgtggtgcctcacaaatttccatgccttgtgatccacggcttcttgtggccagcgactgaaaattttctttcaaactaagcttggaaacttcgctgtatgatctctttggagaccaaagattcttgaaccggacaccctccatgcttgtgtnttgcttgtagacatgaacccccatcaatttgacggttcctctcttggctctgcatgaatgtggaaaggcacttggtctcacatatgaaatctcaacatggttccacacatccttctcatacacactntgcaattcgccatagaaggaattcagctgcacatcg

SEQ ID NO: 66417 - DNA, 378 bp, Glycine max
  unsure (1)..(378): unsure at all n locations
tttctagtcttggaaatacatctgacatgcatgactaccttcaccggacgccgcgacagaatttccacgactgaatcttattttattaagaaactcatacattctactctatataatttactgagttgttcaatccttatctggatatactttcatttaacatatttatctccgtataatantgttatttaagcatatgaaacttagtagatatgtacctagtatatattgttcataactaaccagataatacacatcatatcattaaaagaattacactgaagaaaaaaaatgtatctcttctctgctgtaatagggtggcatgaatgcggcacaaatgatatttactactaattgagaaaaaanaatatccttttt

SEQ ID NO: 66418 - DNA, 432 bp, Glycine max
acttcatcacctagtgataataatattgcactatatgcctttttcattatcaccattttctgtgcagctgtcattttggctggcagcatttcttcttcttccaacgccaactcacattcttggtgcgtgaggagagcgagcatctttacccgccataggttgaagttatttttgccagtaaatttctcaacgtcaaactctgtagaccgcatagctctgataccagtttgttgcgcttaatcgtctatgacgtgaaaactatactgcacagatatctcttattaatgagaaaagaaaacaactacaaagaagaattctcttgaattctttatctctcacaactctctgattgttcttgatggaatgaaaatttataaaccttaatgatccttttataataggatccacagaatataaaccctctacttacat

SEQ ID NO: 66419 - DNA, 429 bp, Glycine max
  unsure (1)..(429): unsure at all n locations
gcattcgaccttcaactagctatcaaataagaccttagttatttgctcctatggataaatctgctcaattgagatcaattgttgctcatggtgatttcgacaagccattctctagctctttatgtgaaagcttgcattctcaacgttgtgaaaggaagattctgttnttatttctctttcttttcccttacgatcttatgctcttcttgactctgcatgctgttaactctctcttttttactatatactgatgactgtactttcaatagtattatgagaggctaatttctgtcaattacccttattaatgtttacctctcatatcatgatcaagaataattaattaacatgtttcatttccacttaatcagcacagtgttctgatattaacaaaatgtatagggtactatggtttcttattgtctctct

SEQ ID NO: 66420 - DNA, 288 bp, Glycine max
gagctatcatggaacttcgtatgctaatatgaggaagacatggcattctcttacgcttccgcgcggatcttatatacctcactcacttggggagaggattcctcaacatgtggatgcatagacaaactcagagccttactgcctgatgtgcgcagcgtcaatctgacctggaagatgacctgcctatacttagacaacctgatgaggagacattcctacgggtgctttgcatgcattacctctgtgcccactgagcaaatagagcctggttctcactctctattgctc

SEQ ID NO: 66421 - DNA, 406 bp, Glycine max
  unsure (1)..(406): unsure at all n locations
agctntctaactggttgtctactatggatacttagntgcggttaacaaatgctcttaacccctgctgcagcagcgtgcaaatcaaatcaatcaacataatttatgattatacttttaaaaattgaaatcattnttttaaaaaacgaaaaactacctgaagtggagtcagattgttgagtgtgaggtgaaggtttactaactctacgaaattggccaaccacgttatctgcctaatttccaaagtttgaaaagtatttttgttggttaaaattgtaaaaggggtattttactagaagctaacctcgaaaagacctttgttagtggtaacgcaagttacatcagcgacatggatgagagctcangcagaagacgacacaatgcacacacctctcgggatgaggagcgc

SEQ ID NO: 66422 - DNA, 62 bp, Glycine max
acttcaactcaccttttaatatacataaatagtttgtcaagggcatgatttcaagggaattg

SEQ ID NO: 66423 - DNA, 388 bp, Glycine max
  unsure (1)..(388): unsure at all n locations
agcttatcagaatgttaatggtntaataccatctcaagctgatattaagaaggtggcaaagtgtttcttttgcaagaagaagggacacatgaaaaagaattgccccggattccagaaatggcttgagaagaaaggtaaatcaatctcattagtatgttatgaatctaatatggttagtgttaatattaacacctggtggattgattctggatctactattcatattgcaaattctttacagggtatgcataacctaaggaaaccagtgggaagtgagcaaagcattttatcangcaataagctaggctcacatgtggaggccattggtaactgcatnttgactttaagtagtggctttatattanaattagaaaggactttttatgta

SEQ ID NO: 66424 - DNA, 472 bp, Glycine max
  unsure (1)..(472): unsure at all n locations
tcactatgggagatgatacacatttttatctattatntgttagaatcacatgtntcaagatcctattaggtntctattattgagaaccctagaagaatatatatcatggtcttaagcttgcttgggatncttggttgcatcantttgattgtgagactaatttgtgacatagtgaataaaattcgcgacatgtngtcctatgattagagtattcacaacatagatgcctatcatgaatctaatttatgtgttgactggctggtgaagcatgtacgagctttcgattctccagtccatgtttggaagggctcccctttgcattaagcaacattctcctagcttatgcttgctcaagtgttattctaaggagcccctttcttgcttattgtatcttccatattggtacaaaatacttattaatatattatttaaaccaaaataagtttttcttttaatttctaacattattttt

SEQ ID NO: 66425 - DNA, 374 bp, Glycine max
agcttgatactgaattgagtatggcacactcattgcatgtctgatatgcctttcagaggcttgaaaagtgcgagaaaacgggctgtgttttctgcattttctggaaaacacaatgaactcactaaacgagcatgcggtgctaagcaagttcatcaatactcattgtgtataagcattatctgaagaactcgctaagtgcgcttaccgcgctaagcgagttcatcctttgaggatgaacactcatcctcttgctgaactacctatggctaagcgaggctgaaccgctaagcccaggtaactcaacccaaatttgtgttgtaagccttgcgctaagccaagtttacttgagctaatcgtatttcatcactacaact

SEQ ID NO: 66426 - DNA, 322 bp, Glycine max
  unsure (1)..(322): unsure at all n locations
tccttgagaagctntctggagatacttccttggagaagcttcttgagaagcttcctcgagaagctagagcttaactacacacacccctctaataactaagctcacctcctcgagaagcttccttgagaaactntcttgagaagcttccttgagaaaattcctagagaagctagagcttagctacacacacctctctgatactaagcttgcttctttagagagaagctagagcttagctacacacccnctataatattaagctacctcctgccnaatactagaatataaaaaagtcctctacaagactagcnaatggctaaat

SEQ ID NO: 66427 - DNA, 435 bp, Glycine max
  unsure (1)..(435): unsure at all n locations
gcttcagtaatccatttcgagcgtctcgatatattacatgactcaatcagacatccgagtaaaaaattactgtcgtttgaatttgctcagagctacaacattcaatttcaagcgttccgatatattacgggacttaatcagacatccgagtaaaaagttattgttgtttgaatttgctcagagcttcgatattccatttcgagcatctcgatatattacgggactcaatcagacatccgagtaaaaagttattgtagttggaatttgctcagagcttcggtattccatttcgagcgtctcgatatattacgggactcaatcagacatccgagtaaaaagttattggtcgttgaatttgctcagagcttctgtattccatttcgagcatctcgatatattacgggactcaatcagacatccgagntaaaaagtatt

SEQ ID NO: 66428 - DNA, 352 bp, Glycine max
  unsure (1)..(352): unsure at all n locations
cgacaataactgttactcggatgtctgatngagtcccgtaatatatcgagacgctcgannatgaataccgaagcgctgagcaaattcaaacgacaataactntttactcggatgtctgaatgagtcccgtaatatatcgaaaagctcgaaatggaatgttgaagctctaagcaaattcaaacgacaataactttntactcggatgtctgattgagtcccgtaatatatcgaaacgctcgaatgtgaatgtagaagctctgagcaaattcaaacaacaataactntntactcggatgtctgattgagtcccgtaatatatcgagacgctcgaaatggaataccgaagctctga

SEQ ID NO: 66429 - DNA, 426 bp, Glycine max
gctcctcaccagagagcttatcatcaattggcttactagctaattaaacttgttgatgtggtcatggagatctcctcccatctccatttgagttgatacaactccatcttcaaacaaaagcgattggttaacgactttgatgggtaaatattctcgagcttcttccacaagaccttcagtgttgtttccttcaacacgtagtttatctcgggagcaagagctaaccgaatcgtgctcacaacactcctttggatcttagtccactcgatttcatttataaaagccgatctttcatcttctaacacctgatcaagaccttgctgcaccagaaggtcttaaatagtactctaccaaatcataaatattatttttccatcaaacaatgatatctcaaacctttgtgtgctctctgccatagctctgata

SEQ ID NO: 66430 - DNA, 519 bp, Glycine max
  unsure (1)..(519): unsure at all n locations
ttctcgtcatgaatggtnggcttanagcaatgcaagccgagttcatgctcttcanatgaacaatacttggactcttactactcataaaactgccattggatgtcgttgggtatacaagattaagtacaaagctgatggctctatcaaacagtataaagcacgccttgttaccaagggctatatgcaaatggagggattggatnntttggataccttctcacctgtggcaaaacttactactgttcgcttcctgttagctcttgcagccctcaatggatggcatcttcgacaactagacatcaacaatgcctttcttcatggcgagctccatgaggaggtatacatgcaacttcctccgggtctctcttgtgctaatccacaccaagtgtgttgtctcagcgttcttatacngctatagcaagcaacaacaatggtcacttgcttcttcttcctattctatggtttcacaagctgcgtgatcatcctctcttagctcatggtaatcactctgtctcctgt

SEQ ID NO: 66431 - DNA, 381 bp, Glycine max
  unsure (1)..(381): unsure at all n locations
cttgtgccatacctatggatttcctttgatggataatagaaatgcctacatttgattggatagtntactaagattaatcttataaagattatctttcctcttagtagtgaaaaagttagttctcatttttgtgttggacaacacacccttctttgctaaaggaaacatcaagttcattagcacataattgacttatgctaagcagattgtgtttaagccctttaacaaaaagtaaattatcaatgtgaggattgagatcaatacttatctttcctactcctactattttctctntttgatttcttctgaaagtgactgttccaccatgcatgggagtcaggcatnggaacatacatgtttctcttatcatgtgaagtggca

SEQ ID NO: 66432 - DNA, 428 bp, Glycine max
  unsure (1)..(428): unsure at all n locations
gcttctngagatgtgaacctagatctatcatatctggctctaggtcggtgtagaaggagccttccttttcttagatgccatattcaaaatataagataaaacacaagagattagcacaggttattttcacaaaaacataaaaataaaactaaaattttgactgggcgcttagcgcagctgtcgctacctacccttcggcgggagggcaacgcgagactcgcgggtgtgtgttccaagaaaggaatacgcgcggagtcaccaccaacgtttatttgaggaaaatgtcggaaaaaccgaataagacgtgatctacgaactttaagtgaaaggttcaggagttgtatttatggacggcgaaggtattagcaccccacgcgttcgtcacaagagacggcaacctttaattaaatgtgcaaacatgacttcaa

SEQ ID NO: 66433 - DNA, 387 bp, Glycine max
  unsure (1)..(387): unsure at all n locations
gcttcacaagagtcttcacanataaccatcatgaagcagaatactaacantactacccatcatatctcccaaaacctcatacccacgaaaatcaaaggagaaagaagtccacccaaacctgaaatttcgaagtcccactcgtagccacgcacttcacgactccaaaaatgccctcctttcgcgatttggagcagaaatgagcaccaaaggttgaagctntgtttggagcttcaatggagaatgagggagaaagaaaggcaatgtgaggaagaagggagagcttctgaattttctgctttggctgagtgaggagagagaaaangcttttggtttaaataaagggttttctctttttctatntatttattataaactatgccacatgtc

SEQ ID NO: 66434 - DNA, 501 bp, Glycine max
  unsure (1)..(501): unsure at all n locations
agtcacctgaggcatgcaagctntanaccttcatttatagatgttgctgttaaaatgtggcactcattaattccactacagttattttaatctctagtgcaatgcacgcctggcgcgcacatatccctattattattttcttgacagtgaagtatcaaattaatctgggaaaattaaaaaattgtgcacgagtagaacatgggagttttctattgcccatgacattaactatttttttagtttctttattagaattagcatgggtcatttaaatttcaaaaagaanaataattcttgaacatccttgtaccaggtaggtgtagacactttaagtgagaataaaaaaaaaaaagaaataaataatttatttgattgataataaaggatgatatgaaaaaagagaaaaaanaatataagagatgtttgaaattatatcaccctttggaaagcactatntggtacaaattcgtgcgcatactacaacgtaaaagtatataatca

SEQ ID NO: 66435 - DNA, 343 bp, Glycine max
  unsure (1)..(343): unsure at all n locations
agcaactagagtatgctgcaacagatgctctcgcttcttggtatctctatcacgtaaatactaaatcttagtgtggataaacttttcaacaactattagaagaaaatcacaagataaaatatagttagaggtttctcataataccaaatcaacttatatacctcaattttgtaaaagcttctaatattaaggtgcataatttgattgtaaatttttacctcttatgttcttttcgtatttgactaaatagtagataccaacatcatacgatagttgttgccttatcttgaatcgaactactaacgtccgtagtcttctcgtccattttatngatacttgattc

SEQ ID NO: 66436 - DNA, 395 bp, Glycine max
  unsure (1)..(395): unsure at all n locations
tatggttttctaaaatagaaatcgaataagcaacaaataaagaataataaagaaggataaaacacacacataaattatactagctcacccataatcttaggacatcaatgttcaatccctacacttataaaattttcactaacacatgcaccaattgtagtattctttcttctgaagccatcacaagctcttacaactagtattctccaagtctctattgaattccccaagtatttttntttatccaaaatgtctttccttgctccacccaagtattcttttaaaaagtatttatagacgtcactttagtattctctaagcctccagtggttctctactagtattttccaagactttcgtggctctacccaagtattatagaaaaacattcatat

SEQ ID NO: 66437 - DNA, 412 bp, Glycine max
  unsure (1)..(412): unsure at all n locations
acatccatactaagcttgcgaggagatgatggctaggcttgaactttgaanatnggaaaatcgtatgatgtgacactcttatattctggttcttcatatctaactgcanactgttttcccccccatagatttgtctaattaaaattggcttgattgagtggactagctgtggtatggatgttattcatgaaatggttgaatctacgaattgtcaatttgagaaatgctggtgcgtgatgaccagcgtgtggttggatgtattgattatacccgatataaagatgactcgttggattatttttccctcacatttttggagacacagctgaatatgaaaatataaacgtaacaactatttgttaaagtctggatacggtatatatgatattggagccacttttagctaatattt

SEQ ID NO: 66438 - DNA, 427 bp, Glycine max
  unsure (1)..(427): unsure at all n locations
agctnnttggagtagaaacctgngaccaacttattntatttcanaaaggaagtcatatctagtcaaggtctgagagaccatacaagtttcctaacgatttctaattatgtgggccattaagtctatcatatgctgacaatagccgagaagtccagcggaatgtttgggtatcttccacatgagaaaaggactccttcttttccttccttccatcgggggaaccaactgattgttctacctcctatcccggccaagagctggtcccaatccattctcctcttttcagtacacgagcgatggctcangagcggacatggatgtcttgtgtcttgttggaacaagtgtgaaaccaaccaaacacagagggcgggtaagcaacagatgatccgtgcgctactcttctcgcaccttcggtcaaatgtgtcaa

SEQ ID NO: 66439 - DNA, 284 bp, Glycine max
  unsure (1)..(284): unsure at all n locations
atttcttggtaaaaactaactttccaaatgtttgccttcgcatgaatggccccgaggaagcttgcctcaaagaggtccaggaatgacaaggcggccgaagggactatttccgctccggagtacgacagtcaccgctttatgagcgctgtacaccagtagcgcttcgaggccatcaagggatggtcgtttctccgggagcgacgcgtncagctcagggacgacgagtatactgatttccaggaggaaatacggcgcctgcggtgggcatcactggttactcccat

SEQ ID NO: 66440 - DNA, 450 bp, Glycine max
  unsure (1)..(450): unsure at all n locations
agcttatgctgctaatatatacaatataccttctcaacctcagcagcaaaatcaaccacagcagaacaattatgacctctccagcaacagatacaaccctggatggaggaatcaccctaatctcagatggtctagccctcagcaacaacaacagcagcctgttccttccttccaaaatgctgctggcccaagtagaccatacattcctccaccaatccaacaacagcagcagccccataaacaaccaacagttggggctcctccacaaccttccctcgaagaacttgtgtggcaaatgactatgcagaacatgcagtttcaacaagagaccaaagcctncattcagagcttaaccaatcagatgggacaattggctacacaattgaatcaacaacagtcccagaattctgacaagtttgccttccaagctgtcanaatcccaaaaattta

SEQ ID NO: 66441 - DNA, 492 bp, Glycine max
  unsure (1)..(492): unsure at all n locations
acccatcacatgtgttactaggtgtcggtcgggcgatggtgtacaacaagtnttccacatncacaaatcgcgcataaacccaccatcctctgttgcccacctccaactgagctcacgtactcccacgtagcccatatcctcgtttctctcaacaacgggtccccatcaatcctcccaagcttcccccaacatccaagtaatacaacattcaaacagcacaaactatcacagccaagcaaaacagggcagaggcagaaaactctgcccanaacaccaaccaaaatcacaggttttctcacttaaagaccccagtaacatttctttggtccaattcttaaccggtggatcgactcgaaatntactggaagctctagacataacctacttntgccgttggatcactaganacatcagaactattctgactatcttctacagcaacaccacaacatttttctgactatcacattctctgataatcacagcaatctg

SEQ ID NO: 66442 - DNA, 407 bp, Glycine max
  unsure (1)..(407): unsure at all n locations
agcttgctccatccctagacataatacccattatgtgttcctctccatttctaagttcanaagtattttccaatgacaattcanatcacaacatcaagcaaagagtgattaagccaaaacaagtataaatgcatagaagagaacacttaataatgaacaataaacagattaataatcaaaatgtaaacataagaacgggttcactacatcaaccccaaaataactacatgactacaagaagaaaagaagacaatagatganaaagatgatgaaaaacagtaggaaagccatgaagggcaagagagagctttcccgctgcaacctanaaccataaatagtttccctaaccaaatatgccttctatttgcatccttggtgaataaatagagctaatgcactgcactatt

SEQ ID NO: 66443 - DNA, 476 bp, Glycine max
  unsure (1)..(476): unsure at all n locations
ctaagctaatgcatgattattatgagatattacattatctctacatattgtcaagaagatttttttattaacgatntaaattgttctggcatttaaaaaagcatcttttattacaattataattntatatgtttggtgaccaaataaaaattgaacttttaaatctttataaaaactattaatgctctatattttgacaattttctattcttattcattttgtatacatatatataacagtattttttggtttattttattgaattatattcacaacaatgaccacaacaataccccatgcatggcacanatacaaaaactagtaataataaatgtgtgntctatacacagctcgagaataacatgtgactctaggaagatttcatgcttatatataaatgcatgcaagacaagtagatacatggtcttataactgttcttagaatggttgataaacaataatacatgatatgtca

SEQ ID NO: 66444 - DNA, 369 bp, Glycine max
  unsure (1)..(369): unsure at all n locations
agcttgcttctacacaactaaactattatagttgaattaacaaaaagtcaaagagaggcgtagagaaggcttcacttatggctaaggagctctcaaaatctcctcttatacatagtagcctcaccacctccctggacaacaattacatggtcctccaattgagctggccattaacaaggatgcacatgatgaacaaaactaataagcataagttagtgctatgctactgaatgatatttttttttgaactccaaaantgaagctaaaaaactatgaatgtaatgtaaaaagtaagagttaggaagttggattgccacccaataagcacttctttaatgtcaataactcgacgtatggcatatggattgt

SEQ ID NO: 66445 - DNA, 435 bp, Glycine max
  unsure (1)..(435): unsure at all n locations
atgccctatatccttaccttgacatgggagattataaccgccaaggcagaccacaagatagcacaacagtgttatgcagaaagcctgaaggtagtaccatatcctcccaccacggagcttgccaagccttaccccacagtggctgaaggcactcaagtcatgagcatggacgaagggtctcaaatctgagccctgatcgtctaccaagcaagcctgggagatgaattcgacatagatccacgagacgatacctctaatagaggcctgaaacccatcgaagagctngcaacttggacctatacccgggcaataaatgcggctcaagaaggacctcactagtcatgagaaccgacacatcactaatgtgctacacagaaatgcggatttatttgcctggaaccatctgacatgctgagaatacatcccagcataatc

SEQ ID NO: 66446 - DNA, 422 bp, Glycine max
  unsure (1)..(422): unsure at all n locations
agcttgattaacacgcagtggtatctaacatcgatcacgaacaattggtttaatgaccttcctcaaccaaatcaccttcttccttatgggacattcgttttctcttcagatgagaagaggagaaactatttattgatttggtgtgttgaagaccataatcatgccttaggttntaacctatntagggtcccattatcccctaatgggccaaactggttttcactcattaagctcatatncaatttttggtggtagtctaatgggctcattgaattagataactctatattaaatccatctaaatgtaaataattaatataaatgttataatataatatgtagtccatattaattaattaggaattantaaattcttaacaatcttccacttgagcttcatattaaccttagacatttatatc

SEQ ID NO: 66447 - DNA, 251 bp, Glycine max
  unsure (1)..(251): unsure at all n locations
tgttcgcacatcgtccgtgtctatgatatctactcgacaatgttngaagtagaggagaccttcaatcctataacgcaacgtggcggacaaaagtgagcaagtaacttgaatgaccattattgtcaatgcaaaaagtatttngcacttcactatccatgttcacacattattgctacttgtggttacatgagcatgaactacttncaatatgtagatggtgttacaccaatgagcacatcttaaagcttact

SEQ ID NO: 66448 - DNA, 411 bp, Glycine max
  unsure (1)..(411): unsure at all n locations
agcttgccgnccagctcgcccatgcgagcaatggttcttcctccagaacaacagccttctggaggaatctgctggagggcccaagtgggcctggttgctatttgcacccccatttttactaaatacacccccttctatttttttggtgattctttttccgtaatgttacgaaactttacaaatttcgtaacgatacttatttttcttccgcaaggttacgaatccttacggattatgtatttactcttttntagctntcgaagaagttttggaaactcacggatggcgcanaaacacctctttttgatttccgccacattacggaatttcacgaatcacgccaagcctgcttctttcgatntctgagacgtctcgggacttcatttattgacatcatcaataataatcccc

SEQ ID NO: 66449 - DNA, 370 bp, Glycine max
  unsure (1)..(370): unsure at all n locations
tcccgccaatggtatntgaggtttaatgatgccattgtttcctttaaatntaaggcaaatactgtttatcagtgtatgtatctgaaggttagtgggagtaaggttatttttctaattctgtatattggtgatatcttgcttgcaactaacgatcttggtcttcttcatgagactaagaaatttctctctagaaactttgaagtgaaagatatgggtgaggtaagctatgtgatanggatagaagtattccataataaatcacaaggattgtcagacttatctcagaaagtatatatatcgataaagtactagagagattcaagatggaaagggtgttaacaccacctattctaattagaaagagactaat

SEQ ID NO: 66450 - DNA, 469 bp, Glycine max
  unsure (1)..(469): unsure at all n locations
gcttgtgccatcttatatacgttaaggacctctaatactgtgtttacaaagagctatatataattggaattatgattaggttacattccaaatatttgtggaactctaattaatctcaagcctcacgcgattatctctcaccanacactataatatatatctcatttaagtgttgcaacaataaagagattcgtttcatccgatgattatcctcttacatgcacctagctagaagtagctaggcttctcaaaactgagtctaataatgcacattttcaatgaagtaaattaacttgcttcaaagaaagtcgttgacatataaaaaagaataggtactcatcacaactatagttacatataattcttggtaaaagagatnattcagcgcaccgatcgacaataaaaccttatattgttcaaatgaaatattgctatcataaatggcatttggntggaattataaaatatg

SEQ ID NO: 66451 - DNA, 397 bp, Glycine max
  unsure (1)..(397): unsure at all n locations
gctgtctctctncctattgtatatatatatggttattggaatgacataaaactaagcaacagagggagaagtttctctcctcacatattcaaaacttcaagtctaactattagcatttagcactattgcaataattcctgagctgcagtgagtcaaaactcaaaagggcttcagcgaatcatgatttagatgaatctccaatttggaggtatattactactggtttgattactgactaggtaatcgcttctctacttaaatcagatgggaacacattagctactgcagcagcacaattgaagattnttaactgttctaatcacaaaaagattcaaaagttctctggtcatcctgtgagtcgtcgatatttccagatatacatgcatatactctatca

SEQ ID NO: 66452 - DNA, 382 bp, Glycine max
  unsure (1)..(382): unsure at all n locations
atgccccacattatttccatgacacaaatgcaaaaatgacgatttggaatatttatgcaaaactggttatgcatgcacctatgcggacactcaagtgtcaaatttttatggtcatgtgatgctagggctcaagattcattttctctattttagtcaacccaacgtttccaaaatatggtcttttatcaatntgtgcattcatccgagtccattttgggcgtctgggaaaatcttcacagcattcacccttcaggtgtatacacanttttttaaaaactagttatgatcnagtgaattttccaaagaagaagtggaagtcatctcttttcaaaagcatgttggtttttcagcttgacaacttaatnntttctttttctccttc

SEQ ID NO: 66453 - DNA, 364 bp, Glycine max
  unsure (1)..(364): unsure at all n locations
gaagacggcggngtggtggtgaggagcagtatcaagtnttccatcaagaagtgcctgaggaagtgcttcagcaagttggtttcgcgcgaagaccaccacgaagcgatgatcatgttgaaggacatgccgtctgagccaaactggtaccaagggaagtggaggagggcaaggcacaatgggaacaatgaggagctcataggagagaataataacaacaacaagggagttcaaagaaacagaaccattgccttatcanggcctttggatgggaatggaagaataattcatgagaagatggtgaacaacaacaaggtgatgaaactctctggtcctcttgatgggaaaatgaatggtggtaacaatg

SEQ ID NO: 66454 - DNA, 303 bp, Glycine max
  unsure (1)..(303): unsure at all n locations
acacacaaaaatgaaaatactaagtatttattacctatacttaatagaaaatacttataacactacaaaataaccataaattgaaggaggttgatacaatttacacaagttttatacacaaaagttagtcggtttcaccgactaacattgttgcaccataaagcctctcagaacttgttccggccgtgttcttacttccaggccctcttggtttcctgttccaaggctttggcggnggccatgttgatgtccttcagttcatcatactcctttcngactttgatggctgttgatttgaacttt

SEQ ID NO: 66455 - DNA, 466 bp, Glycine max
  unsure (1)..(466): unsure at all n locations
gttggatgagttaaacatacccattctgttntatnggttttgtgatgatgtttgtgatgtttatatgctgaaattgctgatggaaatctgttagagatgaagggtagaattaacctatggttagaaagtgagaatgtgatgttgtgagtggaaaaagagtgaggcttgagagttggaaggctaagtctgaattctgtggtaaatggaggttaaagtgagttaatactagcttgaaatgtcatttagaacatgtgagaaaggttaggctgagctagagagaaaagcaaatgaccaaagtgaaccaagagccatttctagggcaaaattgggtgttgaagagtcaaatttttgattggtggaatcttaggtgtanattcagtttgagaaagttagaatgatgtatggacttgtgnaggtgagagtttgcttcaattaccccatctaatttactttcaaactagaaact

SEQ ID NO: 66456 - DNA, 266 bp, Glycine max
actgaggcacgtctgctgatgcctctcgtaagactagactcagctcgagcaccttacgatagtttagcctaacttagcctaagcttcctccacagatcgctgttgtgagactcggcctagagtaaacaacatgcttgctacaacatagtgaataccaaaacttaatccggagatgcctcttgaagactaagttgcggtctacctaatcaactctgaggatcagtacatttcccgaggctcagacacctgactatgccacaattgga

SEQ ID NO: 66457 - DNA, 437 bp, Glycine max
  unsure (1)..(437): unsure at all n locations
agcatgcanttttctttctttacccactcctcacgtttggttttttagggaaaacaccataactaaacgcgccgcaagggatccctatcgcaccagatccaaatctagaacgatgggtgatcaagaggagacacaggaacagatgaaagccgacatgtcggctctgaaagaacacatggcctccatgatggaggccatgttatgtatgaagcagctcatggagaagaacgcggccactgccgccgctgtcagttcggctgccgaagcagacccgactctcttggcaactacgcaccatcctccctcatacatagtaggacggtgaagggacgcactgtggcacgatggcagccctcacctggggtacaaccgagcggctacccttatggattgccgccaactattcaccacccgtcttgcaagaagatgcgtgccac

SEQ ID NO: 66458 - DNA, 247 bp, Glycine max
catcagctaactacgcgttgaattacgatttagactgtataacacgaaagaatcattatggcacctataatcgaatggtttcaagcgtgataaagggaattgtggggctcctttgatcaaaaggattgttgtgaggtcgttacttgcacactatacgtagttggagcatattttgagaaactatgatccacttgttttgctgtctatacaattgtagcgactgatggtcaagagaacacttggtttg

SEQ ID NO: 66459 - DNA, 481 bp, Glycine max
catgcaagcttctactgatgtggcagggcggtgccccttctgcttggtgtcccaaccgcgggctttgacctttgttcttcctttccgagatacttttccttatgtcagcttgcgtaggtctatagcctaactcaaacttcccgcggtttcctctggtgcttaccaagctagttctgccgctgttgttcttgcccaaacccattctgggctcgtagccgtaccccaacatgacccgggccaccatcattgccttatcagacaggcaaggctacccagagagggaatctacggaggcaatgcttactacctcaaaagattggaaagccgtttccaatgactcctccgcggcttccacatatggcgtagaggaagggcaacttaccaatatgtcttcctcacccgatactatgaccaaatgtccctccactacgaacttcagcttttggtggagtgtagagggaacgactcccactgagtggat

SEQ ID NO: 66460 - DNA, 441 bp, Glycine max
  unsure (1)..(441): unsure at all n locations
ctcagctggttcgcctgttgaataagctaccctgcactntcttatatgaatatatatattgggaattatgtaagcgtgttcagaacctcgcatttaatgtatggatggagagcatgaatcattttggtggctccttagcttaattaattcgtccgattattctattggctatttctaatgcttgaatttcattggattgaatgatttattttaatttatatatattgtagtaagttagtacgtgatcttcgaaaagggaaattgattctctcaaatatgttattcatgggtcggtcttcaaaatggtttaaacaaagcagaaaatgaagacaggtattttaatgtttcgcccatttttctataatctcctcttatatacganataccaaactatgattggcttatggtatgatgtntatctgtgaattccccatttgatgc

SEQ ID NO: 66461 - DNA, 425 bp, Glycine max
  unsure (1)..(425): unsure at all n locations
gatctttgagcttcaatgaagtccttcaatggtgattttccaccatggagatgcagtgaaagataaggagaagaggtgagaggagcttccttaagaagattccttgagaagattcctagagaagctagagcttagctacacacacccctctaatagctaagctcacctctntgagatgagaagctagagcttagttgcaaacacccnctatagtagctaagctcacccccgtgccaaaatacatganaatacaaaaaaagtccctactacaaagactactcaaaatgccctgaaatacaagactaanaacctatactactagaatggccaaaatacaaggcccaaaagaaggaanaacctattctaatatttacaaagaagggtggacccaacctttggccatgggttcaaaatctaccctgagc

SEQ ID NO: 66462 - DNA, 357 bp, Glycine max
  unsure (1)..(357): unsure at all n locations
tgagaagctagatctttgctctcacgcncctctcataactaaactcgcctccttgagaagcttccttaagaagattcctaaagaatctagagcttagctacacatacctctctaatagctatgctcacctccttgagatgagaagctagagcttagctacacaccccctataatagctaagcttacccncatgacaaagtacatgaaaatacaaaaaaaaaatccctactacaagcaaagaatgggagaaagtaaaataggaagagaagaaagctcctggtcaaagaaaccagaagaaatgtgcagagaggtctntaggccggacaatatctgaacaatacagaatggtcaccaaat

SEQ ID NO: 66463 - DNA, 382 bp, Glycine max
agcttgccacccagctcgcccggcgagctttgttgctttctcaaaggcaccaccttttggtggaacttgctggaagggccaagtgggcctggtttctattcgcaccccctatttactaaatacaccccctttgccttgtttgctgattctttttccgtaacattacgaaaccttacaaattacgtaacgatatttgtttctttgcgtgatgtcacgagaccttatggattacgtaatcatcccttctttggcttccggaatgttacggagctttacggatggcgcattaacactttcttttgactttcggcatgtcacggaacttcacggattgagaacaatgctttctttgactcttgcatgtcacggactttaaaaatgc

SEQ ID NO: 66464 - DNA, 347 bp, Glycine max
ctaagctttcaggaagtttctaagaagcttctcaggagcttctatttataatagaacatgtgtacacttgttgaactctgatgaatgagagtcttgtgagacacgaactcaaagttcaaataactgtgcctatttcttccttcagtttcgtgctccccccctctctatttctctacctctttctttttctccattgaagcatactctccaagcttcttatcaaaggctcatctcggtggtgaagctccttcttccatggcttattccctagtggatggcgccacctcttacctcttctgctttgtcttccgctgcatctgcatggtggaaaatcaccattaaaggac

SEQ ID NO: 66465 - DNA, 428 bp, Glycine max
  unsure (1)..(428): unsure at all n locations
agcttgtcttgctaatcaagatgaccaaagatgtaattnggaaaatcccaatggttaaaacatgaagacataagttatgcacctgcaattcaagtttgaaggcgatccaacgattaatgaattcgagatgatggtttcaccaaaacaggttttttaggtcaaacttgaaatctcacatttccaacataggtcaatcaaactccacataacctaacattcacaccaagcaatcacacacagataattccccaggtctctagactctcccaaaatctagaggtgaatctaggatctctatcatacattataccagatggcacaccatgttattngacaatctcactaatacatagggaggtcaacttttttaaagaacacctaatatcgatggggatanagcgagctgatttagtcaatctgtaactata

SEQ ID NO: 66466 - DNA, 289 bp, Glycine max
  unsure (1)..(289): unsure at all n locations
tggagatatgtcgcggnggtcaggagaccttggtgacgtcatgtggggtgctattggccaaaaccaagcttgaccaatcccgacccaacccgggcatagtcggtcagtgagaacctgtgatgtacctaagcaggcgagctccttgccgtcaacagataataggaaaacaagaccacaaagcaaggaggcttgtggtggctggccagctgtgaaacttgattgatatgtgagatatggtctctggtaatcgattaccaagggtgggtaatcgantacaaggcttaaaaat

SEQ ID NO: 66467 - DNA, 430 bp, Glycine max
  unsure (1)..(430): unsure at all n locations
agcttgtagagaggcttggctacaataattcattgggctttctaggattcaaaggtttagattctcagagagaacaaatcccagacttatcccaatggtctttttaatacacttagcttgctcactagctttttactttcatttgcttttgaccttgttacatccatacactctattctttccttttctttttcttttttataacatacaacttatnttgtgggggnttgatgctntctctctttctttgcatcccaattagttccactcccccaaatttggggtaaatttgccttaaactatatgctttcctagaatctaagcaaggtatcaggagatacttatttaagttcagggttcaaaattttgataatatcattcagctcagaaaggggtcagaggatataattatcattcaaggtattgcttt

SEQ ID NO: 66468 - DNA, 392 bp, Glycine max
  unsure (1)..(392): unsure at all n locations
tccactacaactacaagcggtatgtccttctcattcttctattatgcaggtagggggatgtcacatatgtggaggaacacatgagtcacgcttatgcacaatccaacaagagccctctcaagaaatataatacatgtgcaatcctaatcgccacggattccacggctacaaccaaagacacctgtctggatacaatcagggggcaataggatacaataacagaccaccaggatntaaccaaggaaaaaactttaaccaatgttcaggctggagaaatcaaggaaatcagtacaaggagcctangaaacaaccaccgtaccagcaccctagtcaaggtccgagtcagcaagagaagtcgcctattagtatagaggaaatgctattaaacctcg

SEQ ID NO: 66469 - DNA, 392 bp, Glycine max
  unsure (1)..(392): unsure at all n locations
caagcttcaccggtgtatttgtttataatanttcgggagggagaaaaatgaatcgtatgaagacagtacaagtggaggtttcaatctcttctccgtctctctgtactttgggaattctatcggagtagtcggatgaataattgaaagaatttctgggaaccgctagagatgttgntatcgctggctgaagacacgtgagcccgcttagaggtaagggatgagtttatcgcaattggggattagaatgaacatgtgtagggatccttagagaactaaattcgngtttaatttgggatgtatattgagatataattctctctttatgaatataaatataatattatggcgttctatgtaccaattggatgtctgatgagaaaatgattgataac

SEQ ID NO: 66470 - DNA, 407 bp, Glycine max
  unsure (1)..(407): unsure at all n locations
gcttgtgaatcgatacactaattnggtaatcgattaccattgattgtttctgaataaatcanaagatgtaactcttcaaatggtttttgactntttcaaataggttntaaggttttctaaaagtgataactcttctaaatggtcctcttgaccagacatgaagagtctataaaagcaaggctnntgtttgcattntaaataacaatccaatcaatntaatacaatcctttacaagccttgaatctctttgaacttcttcttcttctttgtgccagaagctttccaaagttnnttggttntctaaaccttgaaaacttgtgttattcattcttttcatctcttctccctttgccaaaaagaattcgccaaggactaaccgcctgaattcttttgtgtctctcttctct

SEQ ID NO: 66471 - DNA, 460 bp, Glycine max
  unsure (1)..(460): unsure at all n locations
gcaagcttgtagaatggctagacatgatacatgttatgtgttggttnggttcaaggataaaaagggatgccccacattatttccatgacacaaatgcaaaaatgacgatttggaaattttatgcaaaactggttatgcatgcacctatgcggacactcaagtgtcaaatttttatggtcatgtgatgctagggctcaagattcattttctctattttagtcaacccaacgtttccaaaatatgttcttttatncaattgtgcattcatccgagtccattntgggcgtctgggaaaatcttcacagcattcacccttcaggtgtatacacattttttcaaaaactagttatgatcagtgaatttttccaaagaaaagttggaagtcatctcttttcaaaagcatgttggttnttagcttgacaactatttttctttttctccttcttttttttatcataac

SEQ ID NO: 66472 - DNA, 375 bp, Glycine max
  unsure (1)..(375): unsure at all n locations
tggtggtgaggagcagctatcaagtttccatcaagaagtgcctgaggaagtgcttcagcaagttggtttcgcgcgaagaccaccacgaagcgatgatcatgttgaaggacatgccgcctgagccaaactggtaccaagggaagtggaggagggcaaagcacaatgggaacaatgaggagctcaaaggagagaataataacaacaacaagggagttcaaagaaacagaaccattgccttatcanggcctttggatgggaatggaagaataattcatgagaagatggtgaacaacaacaaggtgatgaaactctctggtcctttgatgggaaaatgaatggtggtaacaatgagagagtgaatgtgtatgcaaatgc

SEQ ID NO: 66473 - DNA, 456 bp, Glycine max
  unsure (1)..(456): unsure at all n locations
gcttgtactatccaattaatcactattattttgtacctcttacggataagatctcccatgttgcctcaatcatcttaacttgcttgcaaagatagaatctaaggagagagaaaaggggacataatattaagcaaaagagaaaatattaaagcaagattaggttaatagaagcgtctaacttgatgcaacattatatcatagtgatctatttggatacctattgttggtgtagtcctgcgtatgtgtattttttggatgctacgtcaccttgcaggtaaaacttcttttttttttaactctatcaagcaaagcanaaagaacattttcaagtgagaggggactcccgatacacgaagtgaaaatttaaccttattgaaaaaaaacaacacatggggtgggggtcaaaatatgaataaacatgcagggcatgtgctctataacggcaaatatggcgtg

SEQ ID NO: 66474 - DNA, 494 bp, Glycine max
  unsure (1)..(494): unsure at all n locations
gcccacagcaatgcacagaagacactatatgtntcttattgttcgcttcgcanaagagacaaaatatttttctacttccagtggggatataatggcactataaatactagattccacgaaanaattgtttcctatgaggtcataccggagaaaagagttcaatgagattactatttcaattatcaaggaaaaagagccacataacacgtacaggggacttagggaatatatcagcangcagttttctgtatcgtttgactggctggcgtgatcttgacctcaaagctggacagcaaacacacatgttcccacatgctgggaagatcttccgagagatgacacccatttcctgcaattacaagaaccagagcanaatgtgtgcaatatcagaacanaccaagcttaaatatcccaacanatacccaaatcaaccagcaaaaaacaaagcctaatattactcaccaaaaagaagagcagtaacacgaagccaaatg

SEQ ID NO: 66475 - DNA, 456 bp, Glycine max
  unsure (1)..(456): unsure at all n locations
agcttatgaaatattctctgtcaagngagctttcaacatccttgntaggctntgcttttggggcaacaagtaccctcactgagtctggaccactcacctctgctgtgtaaccatcctatagaacatgttgcagtacatgcatagcacgttaacatttactatatgttggtgtgaatgtgtacgtaacaaattaaagttgggaaagtaattagcaattacctgacatttccctttcccattattcacaaagcaaagtggatctctaagtccttgttgaacatggccactatgcaccccactcttttctagattgaatntaggaactcttcggccatcaaagaaagggttggagccatcagataccccatatggttggtttgaagtgaattacagtatgttcatatattccatttctgcaaaatcatcttcacctttttnnggtgtgggcttactcat

SEQ ID NO: 66476 - DNA, 374 bp, Glycine max
  unsure (1)..(374): unsure at all n locations
tgaagatgatctanagaagcacggcaacaaggtgtttggtttggttcttatgagaatgagatgcacggaaagggaagagaaatgctaccttatntggttcatagganaaagaaatgagccaaaaatatgatgaattctagcgtgcactagcaaatgatgtttgtgtatgtgtcaaagagtctattaatagttagatttgtttaatttcagatttttttttctttttaattttttctattctcttattccttttctttaccagatttactcctcgtttattcttcgtgtctcctaaaacataatctataatagtcctctttacgctctcacatgctatattttcctcanaatcaacacagaacacacaaggaatc

SEQ ID NO: 66477 - DNA, 381 bp, Glycine max
  unsure (1)..(381): unsure at all n locations
tctaataccaaacattccttaatgtggtggcatttgtgtgataagttcgtagctcttgcataattctttggtttagaatttaaatttactgtctacctctaatcatatactgttttgaataaaattaagttacaacatgggcaataagacatgaacaacattgattagaaactgcttttgttgcttggtttttacttagaaagtttttacatttgtaattttgtaattttattgtatttaattatatatatagtcgggttcgtgtcctatattgtggacactaaatatccacgtngttcagtgccatgttcatgtacgtgctttatagataatagntcttctgacatttctgtaattttgaagagttttttgagggagtat

SEQ ID NO: 66478 - DNA, 432 bp, Glycine max
  unsure (1)..(432): unsure at all n locations
aatgtgtgaagtttgttatccatcaccatatgtaatgtcaaagacacatacttggatcaggctgatgatagaacttntggacatctgcataaggaaggggaacaaaatataaagcgttacattgagtgaataaaagtgataattgaaaatgagaatgacatgatagatattagataccgatggtgagggccttaatgatgccatctctgtggcccttgaaatctctgaagaccaagagaatgagctcctcctcctcctgcctccatcttcattattctgtgtgtgttgagttaaaatgaaattgaatggaggtaaggacaactatttatttgactccnttctctctcattcanaaccctaatcttacattcggtgtccacnctgtgcttctccatgaccttctcacttattcgcaacttcagtgccacgatc

SEQ ID NO: 66479 - DNA, 428 bp, Glycine max
  unsure (1)..(428): unsure at all n locations
agctngatatgtggttctctatattatacgaacaagcccccacacagaagcatcgttatccccgctgctcagagataaatcttaaactattgtatcttctttcgctgtcaaaatatatccttaattgaggatatctttaaagagaatatatgctaactgacaacaccacacatgttcattaatgatatgaaagacttatattaataatgcatgcctcactaattgacctttttttttgtntgctgaatgctattaaactcatcttaaagtgtatccaccgagacagaacccagtgtcatgaataatatacattgataagaactacaaaagtctaattaattatacgagatatttgtgacgatgaagctantgatagcacattttttataactggcgcaggactctcatggttggtgatactcataaat

SEQ ID NO: 66480 - DNA, 302 bp, Glycine max
  unsure (1)..(302): unsure at all n locations
atcaacggttatattcatccgatttatatggttgcaatntacactacccacactagatgtactccttctgcctgccagcaaccttgcgaccaccatatgtcgtcgtccgaagcaatctctcacggatggcatatgtatgatctttccttaccaccatatggtccataacaacccactcgtgtgatcaccgtctctttcataatatacatgtacccctagaatgccagattgaggttattccaaagatggagaagtgaaatgcagcataaacatcacacgtgacagatgtgacagaaagaaca

SEQ ID NO: 66481 - DNA, 446 bp, Glycine max
  unsure (1)..(446): unsure at all n locations
gcttgtagacaacattgnggctgtcacattctatgttgactntttccaacctctatcacccttngtgcccaaattcctttggtctctcattacatcaactaatacatgttccatctccaaattccccctnnaataacttcttgtttcctcattattatttcctaagaattttcttttgctcgccattttttcattagatgactccattgaagttaatgtcacttatttaacctacacataacanatattagatacaacctactttagtcatttgattagtccactgcacaatcatagaaaatatttcaagcaaagtttttatgcaatagcacagtacgtaaaagtctatcttcaatagcanagtacaatagtaacaatagtacaatngtaagtgacatccttggtcaaagtgggtttgattgggatggcactaaccacatgatcac

SEQ ID NO: 66482 - DNA, 281 bp, Glycine max
  unsure (1)..(281): unsure at all n locations
gaatgattcaagataaatcaagatcaaattcaagaatcaagagaagtttgatttcaagattcaagaaaagatgagttccagttgcaagagaagaaatcaagaagacttcacaatgggaagtattgaaaagattttntaaaaaacacacatagcacaattgtgtttntcacaagagttttcacaaaattntctatgttaccagagtttttactctctagtaatcgattacccagttcctgtaatcgattactagtggcaaagtttgatttcaaagctttaac

SEQ ID NO: 66483 - DNA, 368 bp, Glycine max
cactccttcaactaaggccatgtactctgctttagatgtagaaagagcaacaactgaatgttgatatgcttttcaactgatagttgtacccaacaaagcaaacacatatcctgtataagatttccttgtgtctacatttactgcagaatgtgcatctacataacctgtgaatgctgcctcatatgctgtcttcttgtaccttaatccaactatcgaagatccatttagataccttagcgtccacttcacaacttcccaatgtgcactgccaggagctcccatgaatctgcttataatacttacagcatgagctaagtagagactgctacagaccatggcatacattatgcttccaacaccactggcat

SEQ ID NO: 66484 - DNA, 219 bp, Glycine max
gcttgctctgctgccgtgctctgctgaagcgtgtggcggttgatatcgatctctgtacacgagatactctctcagtgagcatactgtcggctcattgagtgttgcctaccctaccgcttacacttacttactgtcatcgctctgggcatgtatgtgatgcctacactcttgggctctagtgttaaatgccatgagcgacatgtcactattctgtaatag

SEQ ID NO: 66485 - DNA, 452 bp, Glycine max
  unsure (1)..(452): unsure at all n locations
agctnntctgtcgtccttttggttttggatgctgtcagcttggnttggtctgggtggngaattacttgctagcattcaatccattaaccttgtagttaacctaagttagtgaaaacttatacaatgctcgagtttggactataactaaactaaagaacgctttggctcttttcttgtagtccttttagatgtgaaaagagcagggaaaactgaaaagcataggagtcctaataagtgataatgaaaangtttgttgtaacatataaagtatttgttcagaatttgcctaaatgggttgagtgtagttggttgagttttaagggtacattggcatgttcctgccttcgtgaaattctagcatatatgggactaactcttttcctctcttgcctgcatcangaatttcaaaactagacttcatctgtccgtccaacttatctattctgcatata

SEQ ID NO: 66486 - DNA, 434 bp, Glycine max
  unsure (1)..(434): unsure at all n locations
ctaagctatatggtaaaaggtgcgtngctgaagaatctattgagttttgttcccagtacatccgcgaagttaaatctgtcaagattcttgaaactcgttatgagcggacacagggaggtaggggaacatgatgatacaatgttgtcacaatgactcgataggaggtctcacaagagcatttatatatattaaacaacacaccagaggtgtttccgtacatagaaacccacanacaaattcttagagttagacacctaataatgaacatgatgaaggtattgcaagaacacaaacgaactttcattaaatgggttagagnaatcaatcttgtngatgatanngtcttcaaaacattaagattgttagctattaggccatatttcaatgtccctactcggaagggatatgattatcaacaatattgcttctacacc

SEQ ID NO: 66487 - DNA, 469 bp, Glycine max
  unsure (1)..(469): unsure at all n locations
agcttcatcaagtggtatcagagtacaagatcttcaagtaggtgctccttaaacctccattaagtttttgctttaccttctcttccattggtgtttcttcatttttctccatgtatctcttcacatgtctttttctaaatggttttaacatgattatttatagtttccaccgattaaacttgctatagaagctagatttgantttctatggttcacatttcttgttcttgttcttgaaccatgaattgtgttgagtttacgttcctttgagttttgtcttgttattttttgtggctgaaacctaaaccataaaattctaacaaaaatattaaagtagaagagaacctcanaaatctagagtgacttgttcacctattgtagttttgtcatagaagtcatgtctagtcatgagacttgtcacataagaattcttatgntgngctgaattntattttcttggttctttgct

SEQ ID NO: 66488 - DNA, 457 bp, Glycine max
  unsure (1)..(457): unsure at all n locations
ngtctcttacgttgacatgcccaacccaatcagcagcagtatcacttttacattgataggaggtagtgtgatgcacatacacctttgatatatgggcaagaatgtnttctgtggttatcntgcattaatatttaataagagggtgaagttgacatgacttgaatccgtgaggcacaacataaacgaagaaggggtttaatcaaacacatcaaccatagtccattaccttcttcccttgctgaagaaccagtgagtgagtttgaggggttaagctccaatggaagacaacatggtgatggacacttctcccactcccagttacttcgaccctcacaacctctctttagacagcagttcccagattaggaccatattcactctttcattcaaccatctcaattcaattagaactcttatatcaatnttaacttcatctcctcactacatataacaatca

SEQ ID NO: 66489 - DNA, 404 bp, Glycine max
  unsure (1)..(404): unsure at all n locations
naagctttcaactcattctatgtacccgnggtggtccacattntgtttcatgtatttttattctcttgtccatttgctttttatacccctttttgacatgcttaagccatttatttaagtcatttctcgcttaatctaaaaataaaataaatttccactgatcgtttaaattatatcatccgttatatttggttaaaatgaattccgaccgttcggtcgttccgtaaccacgttggaaataaaaaaagagggtaaataataatataataatcaaaaaataccttttagtaaaataaaagcgaaagatcaatcggacgttttctctttgggaattctcattcttaattngaatgactaataactaaagtgaaactacggctaaatcaaacctcgctagtcaagct

SEQ ID NO: 66490 - DNA, 182 bp, Glycine max
  unsure (1)..(182): unsure at all n locations
gctgctgattacatctccncctttctcaagcaaattcttcttgatatcatcaaaatcttcatgatcccgactcgttggtggaggatgcatgaatgacaatcaattcatggtgctccgaataaaagtggagaatggaggatatgcgaatagcgctatgcaatcaattcgcggttctccacact

SEQ ID NO: 66491 - DNA, 352 bp, Glycine max
  unsure (1)..(352): unsure at all n locations
agcttcacacaatttatttntctcatacttgttgtttggaagaccaattactaagtctttcttaactagatgattaagatgatgcatgtttatgtgtgcagtcctacaatgccacaaccaagagtcatctatcttaccaaacaactcagctcctaaaatgatgcatgttcaatatttaacatatagatattacctactctcttgccaatatggacatcctgaccagacatagcttcactaataagacaataattcttgttgaattcaatattgaagcctttgtcacatagttgactaatacccaagaggttatgctttagtccatccacatatnagaacttctttatctgag

SEQ ID NO: 66492 - DNA, 310 bp, Glycine max
  unsure (1)..(310): unsure at all n locations
nggaggggttgatggngacccggtgctgagaggaacgagtataanggctacgtacgtgtgcgtgagctcaatttaaaggtgggcaactggggatggtgtacttatgcctgngctagtagaaatgggaatatttgtttgcgtcatcgcccgatcgccacctagtaccacatatgaagggtgccctataacccaataatccatgtgtgagaaagcgtggaagagtcagtcttccaactcttattagttgaccacagagtggtacctgaggatatgtcgcggcggtcaggaaaccttggggacgtcaggtggg

SEQ ID NO: 66493 - DNA, 275 bp, Glycine max
cagctgttgatgcatttgacagagctaaaatgggaagaaattaacgactctatcttataatagatacgagatctctggtgcctatataaaagcctgaagaacagataggaagaagtctcacgaatatattggacgaaaccttctgtctgatacgatcattctacacaatgtgcttctacaatgcacagatattgaatcacactaaactttcatatccttactctataagtagcatgggtgtgtattttcatacattatttatgaaagtcatgact

SEQ ID NO: 66494 - DNA, 407 bp, Glycine max
  unsure (1)..(407): unsure at all n locations
ntagcctgatcgctaagcgacaacttatccctggctaagcgtgacctattgtcgccaagtgcaattccttacagccataattgaggtccatgaagctatgcgccagtcatggtagctaagcgagattcattgcggcaatatgagcgctaagcgagtccctctcagctaagcgcatgctcctctgtacttaagatgcatcattttagctaagttggccagagcctcgcttagcgatagttgcagctnttctaatctacagacctcgctaagcagacttacccttgcgctaagccaagtctctgttcaaaaaaaanaaactgattntgtaattgaaacgtcggctaagcgcacgggtccactaagcgagccttgttanaaaccaaacatctctcttgctcgcttacaca

SEQ ID NO: 66495 - DNA, 191 bp, Glycine max
  unsure (1)..(191): unsure at all n locations
acgaattgatctcgtgctttgcgcggggtcttgatgctgatgcactaccagaattctttatcgcactaagcacgatgaagctgcgcttatcgatggatgcacgcttagccactaatgagctaaactcaactaaaacttttgcacttcatgacttagactcttnttcactcaaacttgacatatttcatcat

SEQ ID NO: 66496 - DNA, 399 bp, Glycine max
  unsure (1)..(399): unsure at all n locations
tgggctcagttgttatgcacttctctctctttcgaattggcttacgaaaactggttccgcgaacaagatccaagccgaggcgctttcgtaacgtttccgtgagtgatgtcgcgaaggttttcatctgatcttcaccggtcttcatccgatcttcgttcttcaacaggtaagatttcgaatccgagactgtcaattcatttcttgatttttctaagctctcatctttatttcgtacattttcgatttcttttcttccttctttaacgcgctnttaccatntatttaagccgtcttctcacctaataaatgataaaatgaatttcaaccgatcatttgtgtcgtaatctcatttaagcactcctaaaacgaaatctaatcgatcgctcacgctataacctc

SEQ ID NO: 66497 - DNA, 409 bp, Glycine max
  unsure (1)..(409): unsure at all n locations
gatgccccacattatttccatgacacaaattgcaaanatgatgatttggaaattttatgcaaaactggtcatgcatgcgcctatgcggacgctcaagtgtcaaatttttatggtcatgtttctgtttttgtttagtgcggggcgaaaaagtcgctagcgcacgggaatttggttggtaatcaaagggagaagaccattttangtcgtggtttcctttccttcttttttgttcattggtgacaattctgtattgttcagatattgtccggtccaaagacctttctgcacatttcttctgttttcctgcgatccctgatcaggagctttctntccttctacttcttcctttnttactttctcccattctattgatgggaagtttctttcttttctttttgctttctccctg

SEQ ID NO: 66498 - DNA, 428 bp, Glycine max
  unsure (1)..(428): unsure at all n locations
ttctaacgacaataactntntactcgaatgtctgactgagtcccgtaatatatcgagtctctcggaattgattatcgaagctctgagcaaattcaaacgactataactntttactctgatgtctgattaagtcccgtaatatatcgagacgctcgaaatggaataccgaagctctgagcaaattcaaacgacaattactttntactcggatgtctgattcagtcccgtaatatatcgagacgctcgaaattgaataccgaagctctgaacaaattcaaacgacaatcaattttttactcagatgtctgatgaagtcccgtaatatatcgagacgctcgaaattgaagaccgaagctctgagcaaattctaacgacaatacacttttactcggatgtatgactgagtcctgtaatatatcgagacgctc

SEQ ID NO: 66499 - DNA, 349 bp, Glycine max
  unsure (1)..(349): unsure at all n locations
ataatttttcactcngatgttcgattcacgcgcatcacatatacagacgctcgaaaatgaacaacggaagctctcgagaaattcaaatggtcataacttttcacactgaggtccgatacaggcgcatcacatatacagacacctcganatgaacaaacgaagctctcgagaaattcaaatggtcataatttttcacactgagggtcgattcaggctcataatatatcgaggcgctcgaaaatgacaacggaagctcttcgaaaattaaatggtcataactctttacactgagggccgattcggcttataatatattcgagctgctcgaaattaacatccgaagctcttt

SEQ ID NO: 66500 - DNA, 472 bp, Glycine max
  unsure (1)..(472): unsure at all n locations
cgaggtactttacccgttgaagatcgaagaacgatgaagaacgaatgaagaacgtcgaagaacggttgaaacctttgcgaatttcttcacggaaaacgctacggaaacgtttcggaagcgcctcggcttagtttttcttcacggaaacgatntttccaagcaaattcgaaagagagagaagtgctaaaggggctgaacccttttcttcttcacttcctcccctanttatagcaaaataggggaggtggttgccgcccagctcgcccaggcgagctcagctcgcccaggcgagccaggttgcttcctccagaagcaacagccttctggaggaatattctggagggcccaagtgggcctgggtgctatttgcacccccatttttactaagtacanccccctctgctttntttnggtgattcttttttcgtaaattacggaaacttacgaattnnntgtacgatactcgtttctt

SEQ ID NO: 66501 - DNA, 507 bp, Glycine max
  unsure (1)..(507): unsure at all n locations
gtcacctgcggcatgaagcttgagaggatgcttaatggggaaagattgattttatatttagagaggggggagcacganattgaaggaagaaaaagggagagaatttgaacattgagttgtgtttcacaagactcgcattcatcaaagttacaacaagtgttacacatgcttctatttatagactaggtagcttccttgagaagctttcttgagaaaacttccttgagaagcttctttgagaaaacttccttgagaagctagaacttagctacacatacccctctcataactaagctcacctccttgagaagcttccttaagaagattcctaaagaagctagagcttagctacacacacctctctaatagctaagttcacctccttgagatgagaagctagagcttagctacatnacccctataatagctaaactcacccctatgacananaacatgaaaatacaaaaaaagtccctactacanagactactcaanatgtcctgaata

SEQ ID NO: 66502 - DNA, 481 bp, Glycine max
  unsure (1)..(481): unsure at all n locations
agtgatccttgaagttgttctattgtcatggtttctaaatctttggttttctcatttgtcacaataatgtgctcaaatntaggatctaatgagagtagtatcttctccataatttgtacatattctaacttctcaccatttctttttagttgattaacgagaattcttgaaaaataatcagaaatggactccgactctttcatatgtaaggattcaaactcacctcttagagnttggagatgcaccttctttactttgtcttctcctttgagagaggtttgaagcttatctcatgcctccttaacagatgttgcatcagaaatcttctcgaatgcatcatcatctaatgcttgatagatgaggaagagagctttcttgtctctctttcttgaatcctttaaagtctccttttgttcttaagatagtgaagtctcatcttgcggctccttatagcctttntcaaccatttccctaacatcat

SEQ ID NO: 66503 - DNA, 424 bp, Glycine max
  unsure (1)..(424): unsure at all n locations
tacaacttgctaactaagaaactcgtcatcagtcgagatgttgaagntgagtagtacgcttcttggaattgggataaagaaaaagtggagaagaacgttcttatacccgctcaactacctcaagaagaagctgatgaagaagacgcangtgaaccaccttcaccttctccacaacaacaggatcaagaactatcatcaccagagtctactccaagacgagtaagatctttggtggacatatatgaaacctgtaacttgtccatacttgaacctgaaagctttgaagaagtggcanagcaggaagtatgggtcaaggcaatggaagaagagatacagatgatcgagaaanacaacacatgggtagtagtaattcgtccccttgaaaagatatattggggttaagtgggctatangacaagctcac

SEQ ID NO: 66504 - DNA, 462 bp, Glycine max
  unsure (1)..(462): unsure at all n locations
gtctcacgaatgtcacgtgctcatgcaacaatttttagccgtggctatacgagacatcttgccaaacaaagtcaggttcaccataactagcctgtgctntttcttccatgctatatgtagcanagtgattgatccaataatgtttgatgagttggaaaatgaggccgcaattatactgtgccagttggagatgtattntccccctactttctttgacatcatgattcacttgattgtgcatctggtcagagaaatcaaatgctgtggtcctatttatctacggtggatgtccccagttgagcgatacatgaagatcttaaaagggtatacaaagaatctatatcatccggaagcatctattgttgagaggtacattgcagaagaaagccattgaatttgttcagaatacttagagaaggctaaagctgttgggcttcctgagtgtcggcatgatgacagagt

SEQ ID NO: 66505 - DNA, 277 bp, Glycine max
  unsure (1)..(277): unsure at all n locations
tggaacgagtgatgctgtgcacttttccatcctaatctctagtactttatggatatatgctntctgagacacgcctaacaatcctttgggatctatttcagaatatttctatccctatcacatagctggcctcacccatnattttcatttcaaaggtgctagagagaaacttcttagtctcatgaagaagaccaagatcattagttgcaagtaatatatcatcaacatacagagatagaaaaataacctcacttccactgaccttcagatatataca

SEQ ID NO: 66506 - DNA, 504 bp, Glycine max
  unsure (1)..(504): unsure at all n locations
gctaactnngttacaattatgataataaagtaagggaaatatnntttagtaatatatattaaggtnttttaatatatccncttgacataaattattaacanataaccaccatttaatatttaaaactatgggaaataattcaagtctcacatcgattaanagtaatcccacattataatatatgagtgaggngcaaccctcaccccttgagctaactnttagagttcagntaggtctctcacattattcattctgatacggtatcagagcaaactctgatcctgngaccacgcgaattcttaatgtgaatagtaagattattattttcctttcaaaaaaatagtaatattatcaaatgttaaagcatttcacatataaaaaatttaagaaagtaaacaaaaaaatagattagagtttacatgaatattttcactttccttgtcatattatttangcatggcaatggngcctaaacccacgaggcccgctcatactcgagtgact

SEQ ID NO: 66507 - DNA, 452 bp, Glycine max
  unsure (1)..(452): unsure at all n locations
ttagagtcacctgcggcatcaagcttaaggtatacaagagtcacattgcgtgttaaagcccgtaggaaagataaagaacttangggcatccgtaatggcatcttcggtggttatcatgaatggctgaaagttcatactcgagggttagattggctctccaaaatgaaagttatctacgaggagaacttcgaagatccggaagaggatgaagaagtccgagctctaaaaacagaactaggaaaagcaagacttgccaaagaaaagttcaagttagtcgctatagacgtccggaaagaatgtgtcgggttacgagaaganaatgcagctaagatcccttgaatgagaaaccaagaaggctcgcaaggaagagcatggccgagacanatttcgtggagctttgtggtgagcaacaatgagctcaagcttcgaagggaagagagagaccagtcacg

SEQ ID NO: 66508 - DNA, 441 bp, Glycine max
  unsure (1)..(441): unsure at all n locations
ttctccccaattntctataaatagggggagaagtgaagtgaattagggtttagccncttaggcacttctctctctttcgannattgcttggaaaaatgtttccgtgaagaaaatctaagccgaggcgcttccgaaacgtttccgtaaggaatttcgcanaggtttcgaccgttcttcgacgttcttcatcgttcttcgatcttcaacgggtaagtacctcgaaccaagcttttcgattcattctatgtacccgtggtggtccacattgtgtttcgtgtatgtttattctcgtttcatttactttttatacccctttntgacgtgcttaagccattntatttaagtcatttctcgcttaacctaaaaataaaataaatttccaccgatcgtttgaatggtattattcgttaacttcggttaaaatgaattccgaccgttcgg

SEQ ID NO: 66509 - DNA, 411 bp, Glycine max
  unsure (1)..(411): unsure at all n locations
tgcggcatgcaagcttatcagatggggacctttctggtgnatctancgcagtacctggtatttctttttttttcccattgttcgcaccctcaaatgaatcattgaaaccttgatttataaacatatttaagcatgttattgctctattttgaaaaactaacaatccaaaactcctaggtagttagcctttttttattactccatttcatgaaaattcttaattcaagtgacagccataatacttactgtattgactgcttctattttctaaagctcctgaaattatatttataacctttttttaaaaaaaataacagaacattgttgatcctatcgctttatgtcatattgttgacgaaaggacacgccataaaaatattgcagtttggagaactttaacgctaaatatag

SEQ ID NO: 66510 - DNA, 437 bp, Glycine max
  unsure (1)..(437): unsure at all n locations
gtgattccaactgantttatgtacataatgaaatcattgaagaaggtaccttctcaaatggagatctcgtanccattggaaccgttcaaatcgaaccacattctactgttttaaattacggacaggtcagctattgctttttcattcacaaattaaatattcaatttagtggaatgaaaaggaaaaaattggaaagagagaggaagagatggagaaagaagtttttatttatttatttgaagttntgtttaaagttaaagcaagaaaaggagacaaaacacctaacaaaagataagggcacaaaacttcctccccacatggaaaatgctaaaataagggttttgatcgctttcgactcctgtttggcttntaagtgcaccttcttctcttcttctntttttttttttaagtgcttctcatcatacttagcattacaa

SEQ ID NO: 66511 - DNA, 129 bp, Glycine max
  unsure (1)..(129): unsure at all n locations
gtaagaaagagcaacacacacaacttctaataagtgcatgtattaaaaaaaatagtaagtataaaataatagtgtgtgctgccaatcaacacaaaganaagctaagtgcgtaatagcatagaatagagc

SEQ ID NO: 66512 - DNA, 333 bp, Glycine max
  unsure (1)..(333): unsure at all n locations
caacgtgacgccgcactgaggactcgcacacatgtagacgccacttcaggaagaaataagctgggagacccacttccggtaaggaagataagtctgggtagacgccacttccaatgaaagaagataagtctgggtagacgccacaaaggataccttgataagtctgataatggtttcaacaaggaacccagagagaaactctcaccaaattntatcaaaatgccaaaagtttttttattaaaacanaaacaatattatagtgagctgaacaaaagaaaaaaagacatggccttcaaacagtttgggccaaatagaataaaataattatactaa

SEQ ID NO: 66513 - DNA, 343 bp, Glycine max
  unsure (1)..(343): unsure at all n locations
acanaaggagagagcaaganatgaagagccaatggttgatacatggacggagatgaanaagatcatgaggaagcggtatgtgccggctagttactcaagggactngaaattcaagctccaaaaactaacccaaggcaacaaggnggttgaggagtatttcaaggaaatggatgtgctcatgattcaagcaaatattgaagaagatgaggaggtaactatggctcgatttcttaatggtttgactaatgatatccgtgatattgttgagctgcaggagtttgttgaaatggatgatttgcttcacacagcaatccaagtggagcaacaattaataaggaaggga

SEQ ID NO: 66514 - DNA, 427 bp, Glycine max
  unsure (1)..(427): unsure at all n locations
agcttgtataatgactccctataanttttaatttatcattatatatagggttgcagctatttttgaagaataaatggtatatgtacgaacaatacatttttttatatgttgttatttaatcagacatgattatacataataaatttattaatatttataataattaaataaaaagttatattaatattttttttattaatgctatatatgtaagatttgacactaataatacatgtatattaaactcattgtgaaatcttgaacgcttactcattctagntataatgtcacactgaatgtttggagtaacaagaggtgaaatccaagacaaatagtttatgaaagggaggaaatttaggtatagagaactatatttaagaattattgatctatatgaacttctagaatattggtatggaattatcaa

SEQ ID NO: 66515 - DNA, 470 bp, Glycine max
  unsure (1)..(470): unsure at all n locations
ntaagatgcaaccgantactcaaaatttgtctgtgaatttgtttattaacacactatcaataaggcaatattgctttntaaaatcttcacaacatctaagagcaacattatgaggtgaattaggattatttcctatatgagataaaaatgcataatcttttccactattcacctttttccaatttctaaatcctttcagagtaaatgaacttgattntttagaaaatagataacatggaaagcaaaaggcaacatcttcttctagtgaatactctaaccaaggaaaagttctaaatgaataagcttgaaatcgatgaggatgatcttcttgaccagaaagtggaaatacacccatcaaaaattgatatggtccaaactntatatacgctctatgaatntaatctttntgattagcatgataattccaactggtggatggtttccatgatcacatatcaatattaattatc

SEQ ID NO: 66516 - DNA, 498 bp, Glycine max
  unsure (1)..(498): unsure at all n locations
gctattggacaaatgaatatttttctagctttcagggttatctcacactctctcattggaattctatagggtcttataggccctgcacaagatagataagtcaagtaaacacacaaatccaaaaataagccacaattatcaattaagttcaatcattntcctaagaccaaaactaagttaaagtgagaaaataagaataaaaaagatgtcaattgagctaagaagaataaaaaaatactaaactacaaatactcaatcaacaattcacaatacattgatttgtcaaaacagagaaacaagagtaattaatattgatctaggtcagtagcacctgtgaggttcccttaaaatgagtatttatagaaacatcttanaatggaaattctaaagcaataaccatggagaatgtaatgtaaaaataagacccgagtgcataggngggagtngntanagacannagaaataacgagaatacataagaaagagccatactataat

SEQ ID NO: 66517 - DNA, 214 bp, Glycine max
  unsure (1)..(214): unsure at all n locations
acagcatgtttaacgtntttactntccttgcngatgcatattcaaagggttttgatgccaccaaagggtttgactgagaagctaaagaagagtgtgtctgatatgactactgtccttgaaagtgtgtgaataggctggagtgggagcgttcgcaagagcaagctaggcaataaggtgatgatgagataaaacatgtaagaatacaaacgggtat

SEQ ID NO: 66518 - DNA, 246 bp, Glycine max
cacacatactaactaacttatcgacccgattctgggaagctcacactcagcctgcactataaggactttagatcagatcagtttcattgttgatgatctaacaaaacatgcatctactgacaaggaaaggcaactggatgaaagcagatagccaagacacacaaacatattaaagaaacataattacataggacctacaggaagaccaacaagattagcttcatacagaagcttttacacaaggag

SEQ ID NO: 66519 - DNA, 239 bp, Glycine max
  unsure (1)..(239): unsure at all n locations
cgcgtgtatgatatccactccacaaggtttgaagtagagtagaccttcaaccctataacgcaacgtggtggacaaaagtgggcagntaacatgaatggtcatcattgtcaatgcggaaggtattctgcgcttcactatccatgttcacacattattgcagcttgtggttacgtgagcatgaactactaccaatatatagatgtcgnttacacaaatgagcacactttataagcttactc

SEQ ID NO: 66520 - DNA, 149 bp, Glycine max
gagtgcgaatgcctataacccacctttgatcatgattttcttcatgcctcttaagtgcagacgcccaaatctttgatgccatattctgacttcatcttctttgcagaatagacatgcgcaggagaaactgggttctcgaggtgtccata

SEQ ID NO: 66521 - DNA, 464 bp, Glycine max
  unsure (1)..(464): unsure at all n locations
gtaattcaacatccaagcatcatgaactatttctcctgatacagagcaattganacttgccaaacacnatcaaatacagctttcacactcanataccccataacattctcttcgtccaattcngtaaccggtggatcgactcgnaaatttactggaagtctctattacataagtctacattttgaccggtgggatctgctagcanatatccagaaccccatatgtactaccctttccaccaccagccatacacaagcatttttctgcacatatacaaaattctgctgcacatanttgacagcaaaattctgcataaagtgcagattntcgaaaccacacttgccctcnatccaatttgcccaaattgaatcctacaagtnctaaatcatggataaatcatggttaaaccaaggacaagcttcagaccaaagcaactcanaatctaggtatctaaaacccctcaa

SEQ ID NO: 66522 - DNA, 298 bp, Glycine max
  unsure (1)..(298): unsure at all n locations
caagctggaatcaattatcctatctccgttagctcaatggttgtagtcccgccatgtagtcccgaagaagactggcctcacagtgatcagaaatgagaaggaggagctgattcctactcgggtgcagaacagttggagagtctgcattgactataggaggctgaaccaggttaccaaaaaggaccatnttcccctgccattcattgaccagatgcttgaatgcctggcaggtaaatctcactactgtatccttgaaggttcttctcgttgtatgcgataaccattgctccgggggata

SEQ ID NO: 66523 - DNA, 206 bp, Glycine max
  unsure (1)..(206): unsure at all n locations
gacctaagcaccgagcagcgctgtagggtaaagatcacgttccnatcatagcattagagagacgaatatccacatatatgagtactgaactgaatgctanactacaatatatgacatatttgcatagtatctcttacaatggatgaatgcatatctagaatgcaatggtagaattagacttatagcggatttcttggataattgac

SEQ ID NO: 66524 - DNA, 170 bp, Glycine max
  unsure (1)..(170): unsure at all n locations
gcttctatggaggctggatcttgagcttcaataggtcctttaatggngattntccaccatggagatgcagcggaagacanaggagaagaggtgagaggaggcgccatccactagggaataagccatggaagaaggagcttcaccaccaagatgagccttggataagaagc

SEQ ID NO: 66525 - DNA, 272 bp, Glycine max
  unsure (1)..(272): unsure at all n locations
tacatatactactttatattaaatttttcctctatttcngtgcatcatatcaatcatcttatctattgtttgttttcatatctctctnttaaatnttgaactttggtttacaatatttataaatgatcgagtattatcatccaaattcatttcaattaattggtcatatatggggngcagnctttcatccctaaagagaacaatatggggattctccaagaaagctatggagatgctttgggacccatcgtggatacgttcgttttatatgg

SEQ ID NO: 66526 - DNA, 191 bp, Glycine max
  unsure (1)..(191): unsure at all n locations
gctatacatgatagagcttatattaaattttactaggaatcttcgngaaataggctaaaaaagtctatatgatagtcactaataactttctagatgctntnttaagggaccactaaaagcttaagttanacgaagacacatcatgaatgatttgttacatctttaacaaactcctaacacacaagagccac

SEQ ID NO: 66527 - DNA, 137 bp, Glycine max
catctcagcccaagcgaaccaaattacaaacaacacctttctcccaccgtttataaatcttccgctacacttctcactctattctcacttctaaaatggaccgcagaagcctcctctgcctcgcaatcatcggcatt

SEQ ID NO: 66528 - DNA, 88 bp, Glycine max
ggagctacattctttacacaagtattatatattaatttttaataagtaactacttaaatcgatataattctcacataaatatttacta

SEQ ID NO: 66529 - DNA, 195 bp, Glycine max
  unsure (1)..(195): unsure at all n locations
gggaataatcctagatagaagtgtgaattaagttcctgagcgtaattcctcttgtgatgagannaattgtaatctgtgcagttaatcacaaacctattttctataaagtccaacagtggttgggaaaaggagaaatctagtgatgtagttggtctagccgagactaggattacaatccagcggaaaacattagta

SEQ ID NO: 66530 - DNA, 289 bp, Glycine max
gcatgcaagctggcatacaatgtgctctgcattttgtgcgttgtctatgacaataaaaataagccagggcacactcacagatcccaagtcagtgaaggttaagagacccctcttaagggtactaattggtggcatagacgtggctccaaagcaatactagggagaatctatgcacacacatagggttatgcttaataatggtgcttggttcttgcgcaagtgggtttattcttaaacccaggtctagtcagcaacccaaccttacggtgattgtgtttaagtggctgtc

SEQ ID NO: 66531 - DNA, 192 bp, Glycine max
catgtatccaagtgacaccaacttaagagcaacaattatgatataggtttaagttactagtcagcacatcaaataacgatttacaagaataaccataaataattagacaaagcccaagagggcaaatccaatgacaaacctaagaaatcggatctaagacaaagagaactactaagctcactcgctcatgaa

SEQ ID NO: 66532 - DNA, 405 bp, Glycine max
  unsure (1)..(405): unsure at all n locations
tcgatattgaaggttgtattccattaaaacaaaagagttttgactactgcaaaanaattctaactttataaactttctccttactcctaaatgatgatgcatgatgcacgtatgaattgatagagactaagatacaacacaccatacaacaatcaatacaaatgccactcaagagaagtgggcatgtaaaagacanaacttcttcaagctttaaggctaagtcttcatgtttctccnctatctctaacaccaactaggaaggcccattgagggtcacaacaagcctggataacggagcatacagactacaagaactggatggtaagcaattccagaacatggaacgcccccacctgaagttttttcagttgactaaatgcaacccaatcttgactctttttctac

SEQ ID NO: 66533 - DNA, 482 bp, Glycine max
  unsure (1)..(482): unsure at all n locations
ctcctctcattactgattcaagcttaataggtgtttcttgtggtgcttgcgcgcttagcgcaactctggctcacttagcgtgcattagtgaatntcggcttagcacgcgtcttttcactcagcggatggactcaagtggtgtgcttagtgggattagccctcgctcagcgaacatgcacagattcagcctaattatacctgaaatgagagacaatgattattaaacaccaaaaatgggagtactaagtatttattacctatctttaacaaaaagtaattacaactttacaaaataagcataactgggaggagtttgatacaatttacacaggttttatatacaaaagttagttgtattcatcgactaacacatatgtagcgaagtcattgaccctctaaagttagatgatttggaaaatgaggctgctattatcttatgtgagctgaagatgtattttcttccttcattnnttgacatcatg

SEQ ID NO: 66534 - DNA, 411 bp, Glycine max
  unsure (1)..(411): unsure at all n locations
aataagacatttgacacgactaatgtctaaatataagaacatgggacactgcatacatagacaaagaaaaacattatagtgaaatgaaatatgaattacaacctataacaaaatatttagattgatagtatattcattattttaaccattcttatatatttttcaagtgtcttaattatgtagaagtgtagtttaagtgtccaagttaacacaaaataattttaatactgggcacctaataatcagtgtcaaataagtgttagtgttgtaaatatgtatgatacgacaatactttatacaagagatgttcgtgcctcataaganaaagtatcatacttgcctctatggggatttccccatgcaactgattgaaaacacaccaaatgtgacaagaaagatagttcaccatgt

SEQ ID NO: 66535 - DNA, 388 bp, Glycine max
  unsure (1)..(388): unsure at all n locations
acgattgcaaggcttccgagccagagttcttcttgcagtgggggaacaggaagaggctgagatgtgtgagggtgaatgaccctctgatttcagcgaggctcagcggtggagtcagaacgaaacatggttctgcaatggagcatcatcgctctggcctcactgtgccagaanaagaacatcatcaccatcatcatcatcaacaacttaatcgccttacaaggtgctgaaaacaacaacatcaactaaggggaattggtttcttcatgattntcttcccacactttcctaccctatgtcttttttctggcttatggctggcttcccagagaagatgtgattttggggtgatgggatgtaatgatgtcgcccctctccagtnttctttcat

SEQ ID NO: 66536 - DNA, 432 bp, Glycine max
  unsure (1)..(432): unsure at all n locations
taactctngcgtctgagccttcatccatttgtgatatccatcgacgatcctgttgctgcttcccctaagttccttatcctttctttgcaccacgctccatgccttttgaaccctgtgaaatatcctcacattgnggtcactgaaacctcgtgcgatgaagggtgtgatgctntcttctgacggtgctcctctcatgggatagccaagttgtcttatggtgaggacgggtttataattgatacaacccctcgttcccatcaaggggacatttgagaacccctcgcatgaggacaaaaccccgactcttccatccttccatcgagggaaccaattaatggatgcctctaccatactagccaagagttgctcccagtttgccttccctttctctgtgcacatgcggtgactntgcagaggacagacaggtctact

SEQ ID NO: 66537 - DNA, 447 bp, Glycine max
  unsure (1)..(447): unsure at all n locations
tctcggacttagcacgagctcagctacaaggctgcaaggggtggaatttctattcaattcccttatggtatcaaacataaaaagggaaaaggtaatattgtagccgatgctctatctcggcgccatgcattactttctatgcttgaacaaaattgattggtcttgaatgtttgacaagcatgtatgacaatgatgaaactnttggagaaatttctaacaattgtgaaacattttcagaaaatggtttctttagacttgaacgctttctttagaaagaaaataaattgtgtgtgcctaaatgttctactacgaaattgcttgtttgtgaagcacatgaaggaggtataatggggcattttggggtccaaaagactctagaaacattacaagaacatttgtatgggctcatatgaaaaaggatgtgcagaaattttgtaacattgtatt

SEQ ID NO: 66538 - DNA, 469 bp, Glycine max
  unsure (1)..(469): unsure at all n locations
taactcctctttcagaaccatgctatgtgctctcgaactggctctntcttcctttcgcaacttgagttcactattgctaccccatagagctccgcgaaatttgttccggccatactcttccttgcgagccctcttggtctcttgttcaagggctcttgcagtaattgcattctcttcccgtaacccgacacactccttccgaacgtgtgtagcggccaacttgaacttctccttggcaagttttgcctttcctaactcgcttttgagagtttggacttcttcgtcctcttccggtgcttcaaaactctcttcgctgacgactnttaacttggcgagccaatctaaacctcgtatatgaactntcagccattcgtggtacccaccaatgatgccattacgaatgcctctaagctcttgatctttccttaacggnngttcccatgccttatgngatctttgtatagtcttg

SEQ ID NO: 66539 - DNA, 299 bp, Glycine max
  unsure (1)..(299): unsure at all n locations
atctagactctctatacttcggcacgaacgatggagaggcaattcntttacttttgtanacctctctttacgcgacattacacattctggtttagaatcgtgtatgttatatgactttctacatctgtgtcttctagagatgacgagcccacttagatataatcatcacagatggtgagtcacggactacatatctatctatcagaatgcatcttgtagtgatggaatgatcaacgataaataagatcattcttgtgaccacacaagagtgactaatatcatggggtatatattatata

SEQ ID NO: 66540 - DNA, 466 bp, Glycine max
gaccaaaaactcagctgaagactatgacccaatatccaacttctagcacagtcctacttagccaaactcctggactacgattacaccatcgaataccgatctggctctggcaatgccgcagcagacgctctgtctcgggttccaccacaggggcaatgccttacactctcttttcccacttttgaattccttggcaccctgtacgcctcactccttcaatctccaggttttttggatatgcggaacatagtgcgaacaagtcccaatgattatcccgactacaccatccaccgagacttactcttttatcacaacaagctctggcttccttcagactgctcctttatcccctcgttacttgaagaatttcattccacactgttaggaggccacaccggcatcgccaaaacattccgccatctcccatgccaattctattgggaaggcatgcatcgcgatactcatc

SEQ ID NO: 66541 - DNA, 392 bp, Glycine max
gttgagagaccactggtgcatgttgatcttgctaccgggaacgacgaccgtccccacacgaagaaattaaaaacatattcggtgactgtggcgcgcgataacgtggacgtcacctacaacaactggaaggaggaccccattgctcatcatgacccgagttgggatgatatccacggatctctcttttcttatatgagtttgtcgattaatagccaaaaaacattattgtacaataaacttatttgatgtgcaggcggaattgaatcccaaggctctactatagacgaaacgaagtactcaaccgggggagagaggggagttaaacatacctcacagaatggccttcaccaacagacgtggaggactgttggaaaacgctcgacagaaagggc

SEQ ID NO: 66542 - DNA, 453 bp, Glycine max
  unsure (1)..(453): unsure at all n locations
atctgctnggatttcaaaattccttttatgaatgatgctctcctacaacctaagacaaggtagaaggagataaactgtacaggctcaaggtttaatcaaacaatcatactttcagctcaaaatgggtgtaagggataaatcaatcatgcacaaggtaagctttttaactaagtggctatcttcaatcaaaatattgccttcatcatcttcaatttcatgcattcattccatactcagagattcatgcaaaaatcattactcaatgttagtcgttctctcacaattaaagatcacactctcaccgggttgcggctaatgcgttccttcacaatcaacctgacaaaccaactaacattntcagtcatgatcctaattccatgttctttctcttctaatgattgcatgctcattcaaggcatatgatctacgcatttcaattcactcacatcatac

SEQ ID NO: 66543 - DNA, 510 bp, Glycine max
  unsure (1)..(510): unsure at all n locations
acctataaaactcagctgagggntagtgcatagttccatgccactttatcatagattagtcattaacatgccttcctagccttaaaccaagacctttcttctgatggaaatctttaatttttaatccttatataagttnttctttattctttatgcggaagcctagattcacaagtatacaacctagaacaattaccaaaggtcctaagatctacaacatgtttgactattaaggattagatcgataaaatacttggatctatagttggtttctggtctaagtattctttgagagttgttataagatctttgcggctatccatcacaaatatagacaatgaaattatgattnttttctcaatcgaagtctctttaattcctcaacaaaatttcataactctttgtatgggaaaaagagaaactatgtgcaacgattngacatattanggaccataaccttcttatgatncgtaatctaatatggttntcattattctctaatggtcaaca

SEQ ID NO: 66544 - DNA, 503 bp, Glycine max
  unsure (1)..(503): unsure at all n locations
actcagcttacatggagctacatcatgtggtatcaagagcatcttcatctatgtgatgttctttatcttcctctnaccttttgttcagtcaaatcactttaattccttgttcttcatcttattctccatgtatatcctccattgtcttgtggtttggtgctgtttagactagattcaagaaagtaaaccgattaaatcttagatctacacttgttcttgcatttcaatggttcanattttatagatctactcttgaatcatgtttttgtggtaattttaggttctatcatttttcagttataatatttttgtgctgaacctttagatctaaattttcttccaaaatattgattagaaaataaaacacanaaatctaagtgtaaatcacttaatccatattgtcttagagtcatgtttagtcataataattggcacattatattctatgnttgtngtgaattttaatttgtgaatgattctaatacannttgtcatgtattttt

SEQ ID NO: 66545 - DNA, 369 bp, Glycine max
  unsure (1)..(369): unsure at all n locations
agcttacttcactgcttcaagtagtgctcgatctgcttccagaggaaaacacgttgcctaaaagttactatcaggccaagaaaatactgtgtctgatgggtatggagtatcaaaagattcatgctcgccccaatgattgcatattgtacaggcatgaattcgaagaaatatccaaatgccttaggtgtggggcatcacggtacaaagtgaaggatgatgaaggatgcaattctgatgaaaactcaaagaagggccctccaacgaaggtgttgtggtaaccttccatcattccaagggttaaacgactttttgctaatggagacgatgcanaagaccttacctggcatgcaaatgggacaaactctgatg

SEQ ID NO: 66546 - DNA, 496 bp, Glycine max
  unsure (1)..(496): unsure at all n locations
atactcagcttcaaccttggcctcatttctgctccanatcgtgattggatgtcattttcggngtcgtgaagtgcgtggctacgagtgggacttcgaaaatccaggtttgggtggacttctttctctcttgaatttcgtgggtatggggttttgggagatatgatgggtggttatgttagttttctgctgtgtgatgattatttgtgaaggcatttgctgaaaacttgttgaaattacccatgttggatgagttagacatactcattctattttagggtttttgtgatgatgtttgtgatgtttatatgctgaaattgctgatggaaaactgttagagatgaagggtagaactaacctanggttagaaagtgagaatgtgatgttatgagtggaaaaagagtgagactttgagagttggaaggctaagtctgaatttcgtggtaaatggaggttagagtgagttaatactagctngaaatgtcatttagaacatgtg

SEQ ID NO: 66547 - DNA, 233 bp, Glycine max
accttctctaattgtcttggcttgggaccacaacaacaaggactttcgccctactatatgtgacttgaccaacgtgtattgaatgtgcgacatctttaacacctattccacatttgatagttggtgcatggacctatcccgccaaagatcgaagcatgctcattttttatgaatgcgacaacctttgcttggtggatcactgacaattttttaatttgatcaaccctgctgca

SEQ ID NO: 66548 - DNA, 450 bp, Glycine max
  unsure (1)..(450): unsure at all n locations
atgatttctatacaaaagttagtcgtataaagcgattatcatgtataacactaattgtcgtagagagtggacgccatttagttntagcgtgttggatgttgaatagataggtaacagagcaatccttcttagatgatacatcctatcattaagtcctttaggaaataaaatttttccacttgtcaaaaactcattagaatattattgatttacactntttgtaattcataanaatccaaggtagatgagacgagtggtcgtccagacctaacaattatgggtctactatgatgcgaaaaatagtttaaaaaatttatgtggaaaccattgaagatctaggagaattttcactccaatgatttctcatatactacctattaccaagggaaatggataattaaactatcaccaagaaaaattgagaatangtctatttcatttttagaacgg

SEQ ID NO: 66549 - DNA, 350 bp, Glycine max
  unsure (1)..(350): unsure at all n locations
ggcttattccctagnggatggcgccacctcttacctcttctcctttgtcttccgctgcatctccatggtggaaaatcaccattaaaggacctcattgaagctcatagatccagcctccatagaagccccacaagcaagcttccatcaagtggtaatcatggcacaagagcttcaagtaggtgctccttaaacctccattaattttgtgttttaccttctcttccattgttgnttcttcatttttttctccatgtatctcctcacatgtcttgtgctaaatgattgtaacatgattctttatatttttcaccaattaaacttgctatagaagctagaattgattttctatg

SEQ ID NO: 66550 - DNA, 483 bp, Glycine max
  unsure (1)..(483): unsure at all n locations
tcaagagatcatcccttcgacaacattattggtgatatctctttatgtgtaacaactagacactctcttaaagatntatgcaataatatggcttttgtatccatgattgaacctaaaaatataaaagaagccataatagatgataattggatcattgccatgcaagaagaactaaaccaatttgaaagaaacaatgtgtggaaattagtagaaaaacctgaaaattatcctgtcataggaacaaaatgggtttttagaaataaattagatgaacatggtataattattagaaataaagcaaggttagtagcaaaagggtataatcaagaagagggaatagactatgaagaaacatatgctcctgttgcaagattagaagccattagaatgcttttggcatatgcatccataatggactntaaactttaatcaaatggatgtaagagtgactttctaaaatggttaattcaagaagaagatatg

SEQ ID NO: 66551 - DNA, 391 bp, Glycine max
  unsure (1)..(391): unsure at all n locations
cccacatggaaaaatattttaaattagtcactacacataacaaaacgtaatgcgaagtcaaaaataaggacaatgcaacaaaacanaaacaatccattacaattatacataaaanatctgagcaagttttttcatgggttttggcctaataaatgaagcacaactaaagagaggccttccactactccaaaananaattcaatggatttggccaacgaaagtcagtctacattcactccttctgatcatccataaagagaaaacccttacccaactctcaaacaccatcttcgtgtcgcaatctccataaaccacctcaagctacaacaaacttgttcaacgccagtatatactaagctttgggtgtgaaaagccattatttttgcatgtg

SEQ ID NO: 66552 - DNA, 490 bp, Glycine max
  unsure (1)..(490): unsure at all n locations
cgtggattatgaattcacaagtttaaagattacggaaccatatgtttgcagggtatagttggaaaatatgataaagtgctgggtacacaagaaattttctgtgtgcgcaaagcaatttccctcttaccatatcattctgggcttattatggatatgggcctcaagaaatcgaacccaatccaatggtttgaacaaatccatcattctaaagtttcactttcttctattgcatagtatagttaatagtatgactcttcctccatccttatcggagccaccctcactttccgattcattctcaccgttaaacccaaccctagccatggatagtctccaagccacttacaaagacgaagaagaagatgacgaagacgacccacagccgcaaccaccaccaaccaccgacgccgattcactggaagcccctcccgccaccaccagcaccccattcgacaccccaaccgaacccncgaacgacgcccgatcggag

SEQ ID NO: 66553 - DNA, 351 bp, Glycine max
  unsure (1)..(351): unsure at all n locations
tcaaacattactccaacaaacccaccanagcctctcagattcccagctctaattacggctctntgtgtccaccaaggagtaactntcaatcgtcttccccttctcaacctcaaggagccaattaacttgcactatattgatcaacattgttgcaatcctatnggaattgaagaaaagcaaccccgaatcccttttgctattgaacccctaatcttactcannatggtgttgctntcttgttccttttccaacanaatgcagccatcaatcaatccatgcagagcttaaatgcttcaacctatcatttccttaaccctgtagccccaagagtagcccaaagtcatttcatat

SEQ ID NO: 66554 - DNA, 498 bp, Glycine max
  unsure (1)..(498): unsure at all n locations
acttgatgacgatcccatataccggatgctcttgatgatcttgcaacttttcctcaagcctatgcaggtgttgtgggatgcatctatgtttanggtgtacaatgataatgtccctttgtacataaagcatgaagatcttggggaaatagcacacggtggtcaatgtctgaacatcattgctatacagttgtggattatgtaagtaaatttagattacaatccattacctaatttattgtattaaattgatgcataatttacttgatttcaacaaaaatagacatatgaatgagttaagtttgtgatcgaggaatgactctatatacgaattccttgagccacagtccatacaaagatatgtgcaatcacaattagaatctgaggattatattaggaaatgaatgcagaatntaccgagagatgtctacttacgggccttcttgaatgggtaagtaaagctgaacaaatacatntaaatagtgtatgaattataataat

SEQ ID NO: 66555 - DNA, 401 bp, Glycine max
  unsure (1)..(401): unsure at all n locations
tccgatcattctttcctttaaaggangaatgttgagtttaataccatcaattcgcgtttgtctaagaacaccatcattccctcttctcctcctatcttcttcattatgatctctgttctccatttgatccaacctctcatggagcacatcatctcgttgtttcattaacctctccatatgttgcatcaaatcttgcatttggaattgcgaaagcccccctccatcattaggaattgttcctgccatctcaaacaaacaaatcaaacgtaacaagacaattatagttgtgtttgaatacctcacccactcaagtgtatcacacaattatgacctttctctaatgaaacactcttgcctcttaccactctaattcccttgagttctatgcaataaagagatat

SEQ ID NO: 66556 - DNA, 466 bp, Glycine max
  unsure (1)..(466): unsure at all n locations
cgagcgtctcaatatattacgggactcaatcagacatcctactaanaagntattgtcgtttgaattagctcggaggttcagaattcaatttcgaacgtctcaatagattacgggactcaatcagacatccgacgtaaaagttattgtcgttggaattagctcagagcttcaaaattcaatttcgatcgtctcgatatattacgggtctcaatcaaacatctgagtaaaaaagttattgtcgttcgaatttgctgaaagcttcaactttcaatttcaagcgtctcgatatattacaggactcaatcagacatccgagtaaaaagttatcgtcgtttgaatntggtcggagcttcaacattcaatntacagcgtctcgatatattacgggactcaatcagacatccgagtaaaaacttattcgtcgttgaattngctctgaggttcagaaatgaagttcgagcgtcta

SEQ ID NO: 66557 - DNA, 243 bp, Glycine max
  unsure (1)..(243): unsure at all n locations
cacaccttcatccacatcnttttcactcctactcttctttgnattcttattatttttatcttccttttcatttttttcattttctaattctttttctttttcttggcccttcaattcattattcttgaccattatttgttgctctttttcttgattactttcacctatcacctcatttttcctgccattagtactcttcttgtccagtagtttcttctcatgcacaacattatcctcatcctc

SEQ ID NO: 66558 - DNA, 464 bp, Glycine max
  unsure (1)..(464): unsure at all n locations
cctgcgaaggcaaacattggaaagttagttttactagtgttacattactcttaaagcanaaatggcatataacctcctcccataaatacaaacatcaatgtaaatttagagcaagcttatgcgcatatttccttacaaacgttctcttgcacaagacattctattaaccgaaaaaaatgcacccatatacaatcaaggcagcttcgttacctagattatttacacgtacttccaaggtgtanttgttacttacatcacacacatctccttggctaaattcacatacatgcatactcaaagcattttgnggtaccaaaaattgcatatgtgcacatcttggtatttctaatacctatacatacacaaacttcatgatgaatcttgactatctacacaataaggtgctacatttcatgctcttttcacagttttgctacctaaagccgcatgcaaattcaagtata

SEQ ID NO: 66559 - DNA, 416 bp, Glycine max
  unsure (1)..(416): unsure at all n locations
gtccatcgaggtactgaacaaaaccatcaatgagatatggaccaacataagaagccaaagtgtttaacaatacaagaaaagctgtgataagaatctccttccatgctgaaattattaacgatttcaccaacttcagtgtggtgacactattaattccaccacaatcagcctcaactttctctctgaaagttggaaaagcaccaattacactatctctgctgtctagttgaggaacatactcaaggtccagggtcttcttattaccaacggctataagaggacccacccaagagaaggaagaatgctcacaattcagcatatgagagaggggtactgagtccncacccttggtctctttgacttcaggaatagcattcnaagaggttatgaatgcgtatcacatgacctcgttttac

SEQ ID NO: 66560 - DNA, 469 bp, Glycine max
  unsure (1)..(469): unsure at all n locations
gagaagcgacaagactacgaacaaggcanagatgggcttcatttcttctctaagatgtgtgcttctcgttagatgtggcctttcctttagttntaatttatttattttactggccagaggtggctcgtatatatatagagaatgaagaggttaagatcaatgcttaattctactttttatcacaaatttttatttttatttttattttattctcaacaaattaatttaatgtattttatcttcaacttttaagaaaattgtaatattactttatgttattttactcctaatataatgataccttttatctctcccattnttttttgacaaattttacatttaatttttttattnttttgtncaaatttatgtcaaacttctttntttttancaaatttacctccaatttttatatttattaataaataaaattcaagtatttcttacaagnttagaggtaaaatgtgtc

SEQ ID NO: 66561 - DNA, 338 bp, Glycine max
  unsure (1)..(338): unsure at all n locations
tctgttntcaatttcgagcgtctcgatatactactggacacattcggacacccgagttaaaagttattgtcgtttgaattggctcagagcttctgttatcaattacgagcgtctcgatatactacgggacacaatcggactccgaggcaaaagctattggcggttgaagttgctcaaagcctttgttttcaatttccagcgcgtcgatattttacgggcctctattcgacatccgacgataaagttattggcgtctgatgtttgtaagagctctcctgatcaattacacgcgcgttgatatattacgggacacaatcggacacccgcgttaaaagcta

SEQ ID NO: 66562 - DNA, 335 bp, Glycine max
  unsure (1)..(335): unsure at all n locations
acttctggtttttctaatgttttcctcacataaacgtcggtggcgactccgtgcgttttccttcattggaagacgcacccgtgagccttcgcatcgccctcccaccgatgggcaggttgcgatagaatgctntgagggcatcttacaaatattacacgtaagaactacctcaccttcactaaagaagagatccctgtcgaagggcggggacaaaatatggccctacacgtggtcgtcatgtgtatggaccacatcgtggctaaggactcgtcgcaacggctcatactcttgtcatgcctagagacactaaacaagctgcctttcacgtgccatat

SEQ ID NO: 66563 - DNA, 469 bp, Glycine max
  unsure (1)..(469): unsure at all n locations
gggagaggatgcttcaatggagganaagatatagggagagaattagagagaggcggggtggggagcacaaaattgaaggaagaaaaacaggagagaatttgaactttgagttgtgtctcacaagactctcattcatcaaagttcctacaagtgttacacatgcttctatttatagactaggtagctttcttgagaaaacttccttgagaagcttctttgagaaaacttccttgagaagctagagcttagctacacacacccctctcataactaagctcacctccttgagaatcttccataagaagattcctaaagaagctagagcttatctacacacacctctctattaactaagctcacctccttgagatgagaagctagagcttagctacacacctcctataatagctaagctcaccccatgacaaaatacatgaacataccaataattctcttctacaaagaatac

SEQ ID NO: 66564 - DNA, 417 bp, Glycine max
  unsure (1)..(417): unsure at all n locations
attataccactagtattatattatcataaaatacgcaccttgtggggaacacatgttatgaataataaagaaataaaataatagacattaaaattgaaggaaagattaccaaactctgtattctaatgactaagacatgcaacatagatggtggcaaaaagtggaggcattttcatgactaagacattcattataataggagccagatgtacattccatgacactaaaataagggggagatattactttagtatgatacaaaaatattgttataatttccaattaaatagatcaagttaaaactatggagtatagacgatggatccttgcttatacttatntaagagggaataaaagagactatactacgagtacatactcacaagatctgttaaatgtgagcctattgcaacaagt

SEQ ID NO: 66565 - DNA, 505 bp, Glycine max
  unsure (1)..(505): unsure at all n locations
tataaaactaagctgtcaagaagaataaagaacttataaacagagccatagtgttgttgttttgtatgaacttccaccaatagcctcttcacaagttaactccctttaatgaaaaaggaaataagtcgcaataatctattcagtgcgtagcgtctatttatacacacataagttactatcacgtccggatactcatttattgcacaagcgagactaattggatccagcggttgattatgcatttacttctcaactttnttaacacaaaaaaagaggaagtagatgggaattgacaccaacctcaagtggtttggcatgtacgtacggcgggattcaaaatatttactagtatgcgattgtaactnttttctttctaacccacgtctatatattctttactgtaagntaattatgtccaattcaaataatattattatagttaataaacaatttctttaatatttttatgactcgatataagacatttcgataaaataaataattt

SEQ ID NO: 66566 - DNA, 429 bp, Glycine max
agcttgtagaattatggggtacccatcatatgttgactatgtggcggtcgggcgatggtgcacatcaagctttccacatccacaatgcgcgcataaacccaccatcccctgttgcccacctccaactgagctcacgtactcccacgtagcccatatcctcgtttctctcaataccgggtccccatcaatcctctcaagcttccacaacatccaaacaaaacaacattcaaacagcacaagctatcacagccaagcaaaacagagcagaggcagaaaactctgctcaacacatcaaccaaaatcacagcttttctcacttaaagaccccagtaacaattccttcgatccaattcgttaaccgttggatcgaactccaaaatttaatggaagtctatagtgcataagcctacattgtgaccgttgggatcg

SEQ ID NO: 66567 - DNA, 504 bp, Glycine max
  unsure (1)..(504): unsure at all n locations
tactcaagctgagaggatgcttcatggagganaagaaagttggagagaattatagaggngggagtacgaaattgaaggaagaaaaagggagagaagttgaactttgagttgtgtctcacaagactcttattcatcaaagttacaacaagtgttacacatgtttctatttatagactaggtagcttccttgagaagctttcttgagaaaacttccttgagaagtttctttgagaaaacttccttgagaagctagagcttagctacacacacccctctaataactaagctctcctccttgagaagcttccttgaaaagattcctaaagaagctagagcttagctacacacacctctctaatagctaagctcacctccttgagatgagaagctagaacttagctacacacccnctataatagctaagctcacccncatggcaaaatacatganaatacaaaananaaagtccctactacaaagactactcanaatgcctcgaaatac

SEQ ID NO: 66568 - DNA, 328 bp, Glycine max
  unsure (1)..(328): unsure at all n locations
cgagctntcactgcccattctctcaaattgaactgtgactcatctcttcttcttgagctataaggaagtggttcagctgctgaggcccatgaatttagttagaaaataattcagcacagtggaatgttgttgtaaatgttggttcaagtcactctcactcctactcaaactaacacangtttgaaagtgggtgttgcaggttcacacatgacaaaaaaagagtggtctgaagttgaagctntttgtctagaataatataatttatatttatactttcacgaggtaggtataattaacacggggtacacatattcccttggtttatctc

SEQ ID NO: 66569 - DNA, 477 bp, Glycine max
  unsure (1)..(477): unsure at all n locations
gtatgagttttaataaaattcagtcaaaatgaaatatgtatttataagaacagtagacagtctattattaacatttcttaactttntattattattattaattaatcatgttctttccattagaagtaaaattagcacaatacctatgcctccacacgtgtgaatcgactattttcacacattttataggcaagtaaactatattttggtatggtcagtaaaaacgtaacaataagatgaaaactttctagtaggagcaaatacaatgcaaatttatatattaagatgccatgcaaaataacagtagtcatagataaaattcaaatttaatatattacaaacaacaagaagatagacaagataaattatttgtgtataataatatgttatattataaattgatttaataaagacgtgtgaatagaccanagtattttttaaatttagaanaaaattaaagcccaaaaataaaataat

SEQ ID NO: 66570 - DNA, 443 bp, Glycine max
  unsure (1)..(443): unsure at all n locations
agcttctccaaagggcatggttatntccaattttctganaatatctaagaatctcaccaaatggcggtccttctccttcttggaagataccacaggatatggtactttcgcaccttcattcatagctntttctcttttcttctctctagcttgttcacttttattcctttcttcattcttattttttttcatctttttcatctttttcatttttcattttctttttatttttctacttctttttctttttcttggtcatttaattctttttcttgaccattatttgtttttctttttcctggttcctttcacctctcacatcatctttcttttcatcagtacctttcttttagcagctttcttcttgatacaacactatccctatcctcccgctncatannacctctactccttgtcatcatagctntgcattcctctttggg

SEQ ID NO: 66571 - DNA, 477 bp, Glycine max
  unsure (1)..(477): unsure at all n locations
gtcatcaagaagtactgcgtccncaggcttgcatagggcgaattaccacaacagcctggggatggccggcagcgggcaacagacgcaccgccatcacctctagagttcacctcagctcatccacaaaaaggttagagcgttgcttacgacttatggccgaccaagtccaaagtcaaaggtaagcaaagtactaggtccgtgaccaacaagccatcgcgcgtccagctcaagacattaaagaagcgctactaggaggcaacctagtaccttttaaatctctgcttgttatttgatcactttttgtttctcaagtcataacaggacacacctagttgctcatgatcctaggaatttaaataaaacaagcacaagctcggaaggtagtcatacctcacaaaatatataatatgtatgtttaggtagaaagataccttgaatatgcatgtatgtagcanaaatatctcacaaaacatatat

SEQ ID NO: 66572 - DNA, 361 bp, Glycine max
  unsure (1)..(361): unsure at all n locations
cgggttaaagaatggagaaaatccaaaagagaaaacgctcgcactgactttccgtttattttactaaaagggcatattttttattattaatantaatnntttttaccctctttttttggattcccaacgnggttacggcacgaccaaacggtcggaattcattttaaccgaagttaacggataatacaattcatacgttcggtggaaatctattttatttttatgttaagcaagaaatgacttaagtaaaatggcttaagcacgtcacaaggcggtataaaaagtaaacacaacgtgaataaaaatacacgaagcacaatgtggaccaccactggtacataacaatgaatcgaaacgcttg

SEQ ID NO: 66573 - DNA, 466 bp, Glycine max
  unsure (1)..(466): unsure at all n locations
gctgtaggttagcactttgcgtatatcagnactaatatcatngtccttttgtgtataccagaactaattntcctctaactnttggttcccttgcccctttcctagaccttttgttcctagntgcaaattatggtacagtttaagaaaaattacatgatatattctttgaagtgattcaatgtattaaaaaacatggtggaaccaaaccaaaggtagtaggttcttgtatagaacataggactagaaaatgggtttcccaagtcacacttggacttgacaaagagactcttaaggagaaacccattactctccaattacatgcaatttccattgagtgtttgattaacatacttcctactgaagaaagttcaatgacatgcaactagaactaactntnnatttggtgaatagtacacacttgaattnntggcttccaccattcatcactaggagcaatggttttctt

SEQ ID NO: 66574 - DNA, 259 bp, Glycine max
caacggcggcataactagcctgataaatgccaaaggatatcatgggaagtatggtttaggctataagcccactcaggcagatgtaaagagaagcatcgcgggaaggaagggcggtggtcaaagctcgcggttgagacaagaaagtgaaggaagcccgctctgccacataagtagaagctttataacgcgggtctgggagacgaaagtcaagtggtccaatatacgaagatgatgttcccagtacattgtgattggtatg

SEQ ID NO: 66575 - DNA, 519 bp, Glycine max
  unsure (1)..(519): unsure at all n locations
ctcagctgtgcattcatatcctgatgagggtgttccatatgttctcaagactgaactattacatttgttgcccaagtttcatggtcttgcaggtgaagatcctcataagcatcttaaggagttccatattgtttgttccaccatgaagccccctgatgtccaagaagatcatatctttctaaaggctnttcctcattctttggagggagtggcacaagattggctatactattgctcccaggtccattgtcagctgggatgaccttaaaatggtgttcttggagaaattcttccctgcatctaggaccaataccatcagaaaagacatttcaggcatcangcaacttagtggagaaagcttgtatgagtactgggaaagattcaagaaattgtgtgcaagctatcctcaccaccagatttctgagcaactccttcttcaagatttctatganggacttagcaacatgaagaggagtatgatngatgctgccagtggtggagctcttggtgatatgaccc

SEQ ID NO: 66576 - DNA, 308 bp, Glycine max
ggaatgagctcaaatatgtacggcaattctgcgttgttctcttgctcgaatgggttgaattgtggattcgtatgagatggccctatgcctataatgcatattgaagaaatggagcatgccacattgtccccatattcttgctattgatgcctaaacgcgcgcccactaagtgatcggtgaaatgcctcaatggcattagcgtgtgattttcgtaaggaaacaacccacgcggagtaatgagttgcacattcctctattctttggacatgcattcactatacgaagggctagaggaattgcccacatat

SEQ ID NO: 66577 - DNA, 473 bp, Glycine max
  unsure (1)..(473): unsure at all n locations
ctaagcttttaattatctntcattgtcttcatcctcaacattggagatcataaatcattgatctctcgacaacgaagcanaagaaagaaacacaccctgttatgctatggaattccataaccactccctggcacacattatcattggctacattagacacacacaacgaanactacaatttccacttaacatgataataaacacacctcaacaatacaataactcattntgtctatccttcttgttacattatatgatttatcatattatgatgtctcacccttctgtttctttatctttcattgtgttgattagaatttattgtcaacaatacaatattcatttccactactaaatctatctattccatctacaataattccaaaaaccatcatgcactgccacaaaagaatattggttntacatgaacttgcaattctctcaaaggaacaaatcgcatgaacggaaaaata

SEQ ID NO: 66578 - DNA, 481 bp, Glycine max
  unsure (1)..(481): unsure at all n locations
actcagcttaacatcagaccacttccagggtgctggaactacttcacatggacttgatggtgtctatgcaagttgaaagccttggaggaaagaggtattcctatgttgttgtggatgatttctccagatttacctgggtcaactntatcagagagaaatcagacacctttgaagtattcaaagagttgagtctaagacttcaaagagaaaaagactgtgtcatcaagagaattangagtgaccatggcagagagtttgaaaacaacaagtttactgaattctgcacatctgaaggcatcactcatgagttctctgcagccatcacaccacaacaaaatggcatagttgaaaggaaaaacaggactntgcaagaagctgctanggtcatgcttcatgccaaagaacttccctataatctctgggctgaagccatgaacacagcatgctatatccacaacagagacacacttagaagagggac

SEQ ID NO: 66579 - DNA, 421 bp, Glycine max
  unsure (1)..(421): unsure at all n locations
gaaccactccgtggaagagttggacttagggaggaggacacaacaagcatctctaggttcctaaatagtttaacaatggacgatgagaatatcgcagaggctcacccctatgaagaaggtgatcttctaatgctgagaacgcttctcgggagtcaatcttgtgacctaacccaaactcatagagagaacatctttcatacangatgcaaggttttaaacaaatatttctctctcattgcgaatagcgggtcttgctgcaatngttctagcacacggctggtatccatattgagtctcactatcatttcccacccatagccttacaagcttcaatggctcaatgagcacggggaaattgatttcaatcaacaagtaaagataccattctctataggagaatattgtgactaaagtttatatg

SEQ ID NO: 66580 - DNA, 438 bp, Glycine max
  unsure (1)..(438): unsure at all n locations
gatgcagcagtaatgatggcccgagttatgttgtttgaacggtactatacccggaatgggtttaggcaaagacaacggcggcataactagcctgataaatgccaaaggaaatcgtgggaagtatggtttaggctacaagcccactcaggcagatataaagagaagcatcgcgggaaggaagagcggtggtcaaagcttcgcggtgagacaagaaggtgaaggaagcccgccctgccacataagtagaagctttataagcgcgggtctgggagacgaaggtcaagtggtcgcgatatacgaagatgatgtttcgagtacattnggattggtatgaccatgccctcctgatttccagctgnngaaatggcgagtggaggaacgccccgacatttacgcaacgagcataatgtaaacctttatggntntaaaagctctata

SEQ ID NO: 66581 - DNA, 419 bp, Glycine max
  unsure (1)..(419): unsure at all n locations
aggaaacanatcactatgctactgtaaataanagtcnataacataaaagctgaaatttaaatgtcataaatcataaaataactgaaattaaattaaagtgttcataatgcaaaaaaattaaacgnnctgctcctcctatggctggtcttcattaagatccagtgctggagctgctaaagaatcttgaatagtctgctcaggctccaccactggtgtggcatcattaggtgcatgtgcaggggctggagatggctctggaatagtctccttcttctgagtcgtatgtgtacctgcatcaaaatcaataggctcaagaggagtgagctcatcctcatcctttgctgctgnnnnnncttgaggctcctcagtcacaggctcctatgttntgcatgccccacccccctcataagaagaaggct

SEQ ID NO: 66582 - DNA, 294 bp, Glycine max
  unsure (1)..(294): unsure at all n locations
ttaagaacactgattatattacggaataaattagaagagatctgcttcgttaaccactatgtagtctgaagctctcacatttaatagaaaaattgaagagaaacaatcacaaaaattgaatgccaaaagaagacaatagctcggcgaactaaaatagaanagtaattatatctaatatcaccacactattgttaagtctgaaattttttagctttcacgatgagatgttcttatcaaataagtttacgctcatatgaaacaatactcttaatatttattaaagtacatactatt

SEQ ID NO: 66583 - DNA, 457 bp, Glycine max
  unsure (1)..(457): unsure at all n locations
cgcaagaggatnggtagaggagatctcatccaatgcctttangttttatatctcaagttcactctngcttgcaaatttactgattctgntataaattcacatacaaatttcattccttgtaaaaatgctcatatttagcattctagatttggtcatatttcagacaaagttttaaaacatctgaatcataaaattggtttacatttttctcccaatttctcttggtttaattgttctatttgtccacttgctaaatttagaagactatctttttctaactctaaccatttatctgaattaccatttgacttactttactgtgatatatggggcccctatgctcaccctacctatgagagagagagatttcttcttacactgtgcaatgactgcttcacactcaattgactatntctgcttaagcacanatctgaagcttcaatctatgcgacacaat

SEQ ID NO: 66584 - DNA, 460 bp, Glycine max
  unsure (1)..(460): unsure at all n locations
cttctcacttgtagcttgagcctatattctatatagcatggntaacacttgttgaagagcttccttggccttctttgttccagcccttggcataggtcctccaagtccttctaaaagttctttgccaaactgccgaggaagtagtttatagttgaagcgctgggtcatgcgctacttgcagacttcagtcatgacaattgcatcttctcatgcttgttcgacaaggtccaactctattcacaatgcttcattattcttggctttagcgaggtagcacctctagagagagacttctccaaccttgaccaataggatggcgattgtcccataggttagctgaaaagatgtttcctaggcttagattctgcggtgcatctatatgcctataagaccttcataagctctttgaccctttttctttcgctctatcaacccacttcttagctcacctacgaatatc

SEQ ID NO: 66585 - DNA, 424 bp, Glycine max
  unsure (1)..(424): unsure at all n locations
atatagtcggtggaggaccctttgagggcgtgtgtcttagagcaaaagggaaagtgggagagttttttgccattgatagagttcacttacaancaatattttcactctaccattggcatggcttcctatgaagctctgtatggtagaaggtgttggacacccctattgtggctagagcctggagaagacctcaccttangacctgaagtggtacagcannaccaccaaaaggtgaagttgatccaagaaaggatgangactgctcagagtagacagattagttatcatgataagaggaggaaagacttggaantcgagggtggtgatcatgtattctcggtagtcactccatggaatggngttggtcgagcattgaaatcccngaaactcacacctcactttatcggtcgtttcaaattctaca

SEQ ID NO: 66586 - DNA, 387 bp, Glycine max
  unsure (1)..(387): unsure at all n locations
actctcccacatccacagatcatacatgaacccaccatcccggcgttgcccaatcgtcaacctgagctcacgtacttctacgtaacccttatcctcgttcctctcagcatcgggtccccatcaaccccttcaagcttgcataatatccaagcaattcaattccaactatcatgaactactctacaccaagagaacagggcagaggtatataactctgtccaaaacacattcacatattacaactgtccttactacaataccgcagtaacattttcttcattccgattcgtaacacgtggatcgacttgataatttactggaggctcctaatacataagtctacattttgaccattgtgattngctagaaaaatgtctcgaaccaata

SEQ ID NO: 66587 - DNA, 505 bp, Glycine max
  unsure (1)..(505): unsure at all n locations
tcattagttggtgtatttcggtattactgtctcttatggaagattggtatgcatttcatgcattgtatacttgcttgattnttgtataactattggcattgtgctccttcaacgttagcaaatatatgtcttnggttcatcattgactttatcatatcagcaataataatcttttcctccttagtcgatcgaccaacatatgaatgtctaactaatgacttggccaattcatgattgtgactcccacacattaacttcaccatccatccttcacctccaaccattggtttcccacacaacttanagggacaaccacattttctactgccagtaattgtttttatcaaatctttcttcctggccctatattgaccacttcttttacaaccaantaagacaaatgatgtccttcctctcataccagtatttgtgtttgacctcataatcactgncacaaaacccaattcataagcaacaactcagcctaattcagaacatcatcact

SEQ ID NO: 66588 - DNA, 87 bp, Glycine max
acacctgtgtctctatcgagggcgacctcaatatcaatcaccgtccttacattgactacggttgctatagactaactgaggaccttg

SEQ ID NO: 66589 - DNA, 412 bp, Glycine max
tgagctcgatactgctaccgcacagagcccttgtaaactagttcttgctgcattcttccatttgggccctcattgtataccgctctaacgctatcgtcgtgagcatgtggacatctttcatctcatcacactctttcttgaccctagagagtgtcgtcttcaacttatctttcaccactctcgacttttagagttctaccctctaagcaagcactacctcactttactcaagatctatacaccatatggcacttagactctagaggcgcgaggagtcatgcacctccgctgcggcacatagaacatcacgtgcgatagccaccggagcatccaccgcaccaattccaccattcttgacattctctacactgtctatatcaggcgaacaacatatctgatagtactctctctt

SEQ ID NO: 66590 - DNA, 328 bp, Glycine max
  unsure (1)..(328): unsure at all n locations
tctgcgctgggtntaagtctacccaagttgtttatatgaaatttctattttgcccttgtatttgagtaaataggtaaatcacttaaaacttcaccaataaccagtaatatatatatatatatatatatatatatattcaatttcttatcctcttctcttttttttcctagtgactntcttccttcaaagagtgttgaagcatgatctttgtacaagacccatccaatataaatccctaaaacgtaatttggggacgtttgagggtcaccaatcgaggtcaacgtcgccaaagttattaatattcttaacagatgtcatttcattaata

SEQ ID NO: 66591 - DNA, 330 bp, Glycine max
  unsure (1)..(330): unsure at all n locations
caaagatgatgacanaaagctcaaaagtcaagaacactttatgataacanagatgatgatctcaagattcaaagaatgagttcaagattgaatcaagaacacttcaaggttcaaaagaaaatttgatttcaagattcaagttccaagaatcaagatcaagattcaagactcaagattcacanataaagatgagactcaatcaagataagtattaaaaagtttttttttcacaaactgagtagcacatgaatttttctcaaaaccttttaccacaagagttttactctctggtaatcgattaccagattattgcaatcgattaccagtagc

SEQ ID NO: 66592 - DNA, 207 bp, Glycine max
  unsure (1)..(207): unsure at all n locations
tctaaattttggctagtggcactaaaaacggaacaatggaaggagaagaaatctaacgggtatttcaaaggtaaggtaaataaaaaagagagatgctanttatactaaaaaaatggagcatatttgcaacacatagagatagaaggaggagtgtaaataatataagtgatgtatggaaaaaaggataagaaaaaaatatgattttga

SEQ ID NO: 66593 - DNA, 252 bp, Glycine max
  unsure (1)..(252): unsure at all n locations
tcttgctcttttgataaacttcatttatgtatgtcanaagaaaatatctacttatgatgaacgatatgatttaagagggctaaacttgttataacttatttgaaagaataaacanagatgcttgttntcgtaacaatntattgttgagacattgaaggaactntgagcctttcacatttatctctcggaaacgcagcagacctaaacgcggctatcaataatctgacggttcgctgacactctttccttctt

SEQ ID NO: 66594 - DNA, 360 bp, Glycine max
  unsure (1)..(360): unsure at all n locations
gctncattcttgggctcctcagntctttntctttntcccttgtctttagaggtactcacaacatgagcactntcagtccttccttgcttcagtctttactcttcttgcacacagtatgaaatgagctcattaaaagaccatttctccttttgacagttacaagagatcttaaactgactaaactgtgaaagtagagaaattaacactaaatgaataagcaagtcttctgatagctcaagctntagtgtctttaattntgaagcaatatttgacattcccataatgtattccatgacatttcctttacctngatatttcatggaaatcaagctctgatggagagcactcgtttccgtacta

SEQ ID NO: 66595 - DNA, 422 bp, Glycine max
  unsure (1)..(422): unsure at all n locations
agcttgcatttcctctagtaggatgaggngagttatgttatagatattatgaacacaccttctgtagaagcttgttaacccatggaagctcctaatatcttctacactttttggtgtgggccattcttggatggccttgattttcttagggtccacttggaccccatttctaccacatacaaatcctgagataactatattatgtacacagcaggtacacttctctttattggcatagagagtatttttcctaagaactgaaagaacttgccttagatgtcctaagtgattctaggctcctactatacactaatacatcatgaaaataaacaaccttaaatctacatatgaaatcccttatgacatgatgcatatgcctcgtaaagtcgcttgctgcactatngagactcaaacgcatcact

SEQ ID NO: 66596 - DNA, 463 bp, Glycine max
  unsure (1)..(463): unsure at all n locations
agcttgattcgttagaactagaagtgactatgaaattatacttgttacctgngataagttatgtggaattagtgggttgcanagaactagacgtagtctcagtggcagaggcaaaccaatgtaattntctgttgaaaagaggatggtactcataaacgaagaggngggagggttgaattgttttcataacaacatgaacttttataaccagagttacaaacaacttattttgtgtggatcgtatcacacaactttgataaaccaaacttaatcaatattgaatcaatcatcctttacacaagatcctttggtaangttctctctttcacanagatattntcttcaacctttagtgaaccaactaagactcgaatgagatagaatgatcagattaagagatgaagtacacaacntcttatactggcttactctctatcactcagagagctaatccatatatcta

SEQ ID NO: 66597 - DNA, 366 bp, Glycine max
  unsure (1)..(366): unsure at all n locations
acctacacaatcngattgaacaactaatcacaccactgcatgatgaacaacttcacatattttgcagttctaaagggttgtggctggcaaccaccataatgaccacaatatccacctctttgtgatgcacgctacccacacttaagttctctcaggcaaacctaccaaaccacatgcacagtcacacacaatcacaaacattggaaaatatgaaagaacactatgaaaaaaacctagatcatatttgcttaaaacatgtacaacaatctttgctttgacgagagagaagaagcaaatgcatgtctgagaaggatatacctttgcgaagtcggacgctatacgagacgacactgctaacgaactcat

SEQ ID NO: 66598 - DNA, 411 bp, Glycine max
  unsure (1)..(411): unsure at all n locations
gcggattggtcttcgtcgngtaaaggatcaaagcgggtttgaaaagaggcttatttaatcatcttgcttagaggaatgagaaaactggggtaaatgaaaagggtgagaatgaaggagaaacccatgctgcgactgtcgttcctaaatagaaaatcccttaccagctcaacaaacatcattactcagccaatatcgaacttgatggaagcttgcttgtgcagcttctatggaggctggatctttgagcttcaatgaggtcctttaatggtgattttccaccatggagatgcagcggaagataaaggaggagaggtaagaggtggcgccatccactatggaataagccatggaagaaggagcttcaccaccaagatgagccttggataagaagcctggagaggatgcttcaat

SEQ ID NO: 66599 - DNA, 327 bp, Glycine max
  unsure (1)..(327): unsure at all n locations
acccaggtcgcccaggcgagctaggttgcnttcnttatatggcaggcacctttggagaacttcttggaaggcccaagtgggcctcgatgctatttgcacccacttgtttactaaatacaccccttgccttttttctactgattctttttacgtaacggtacggaatcttacgaattacgtaacgatacttattntctttcccgaatgatacaaaaccttacggatcatgtaatcatcccttttttgacttccgggatcttacggaactttacatgatgcacactaacactttcttttgacttgcgggatcgttcggaactctacgaa

SEQ ID NO: 66600 - DNA, 484 bp, Glycine max
  unsure (1)..(484): unsure at all n locations
atagtgctacggggcgcttcaattctttagggatgcggaaccggtactacagcccgcaataaacttggaccgagacagaaacacgacgggtttcaatcggaggtatagtcctcaagcctacccttatggtttgcctccggacttcactccccgtaccgctccagacganttgagccaagcccctaccttcgaggngcaactcccttctcatgccgactatcctctgcaagaagacgatgaaggagatgcccatttaggccctatacttccnctcaaggatccggccccccatgaattgccccaaccaaacatagtccgccacgtcccgtctccatccgcacccgttaaagaattcgttccctatgcanaagacanaggaaagaatgattacttgaagagaggctgagagcggtagaaggccttggcaactacctattctcgaattagcggatctgtgtctagacctgacatcgtcatcccttcc

SEQ ID NO: 66601 - DNA, 331 bp, Glycine max
ctcctacgtctcatctctagtcatgcatttctttctttacccactcctcacgtttgggtttttagggaaaacaccataactaaacgcgccgcaagggatccctatcgcaccagatccaaatctagaacgatgggtgatcaagaggaggcacaggaacagatgaaagccgacatgtcggctctgaaagaacaaatggcctccatgatggaggccatgttaggtatgaagcagctcatggagaagaacgcggccgctgccgccgctgtcagttcggctggcgaagcagacccgactctcttgccaactacgcaccatcctctccatacatagt

SEQ ID NO: 66602 - DNA, 173 bp, Glycine max
  unsure (1)..(173): unsure at all n locations
acctagcttcagcaattcagcttttcctgtggctcttcccctcctttntcatatctttntctctgtctaaggaagggtgcagcanaaaaaagaaaactctgttactcagtatgttaatatgacgacaaaaagggagaactggccaccttaccgcactcccatccttttctttt

SEQ ID NO: 66603 - DNA, 160 bp, Glycine max
  unsure (1)..(160): unsure at all n locations
tgtcatacnctaaattcgtccagngacctttgcttgatgacatgcgaccttcgcttggtccttgtaaggtgcttgccacccatcattaggcaatatgtgaatattcaggacatgccggtaaacaaaaaaatattgatgcacaacccgcaagttttcgtga

SEQ ID NO: 66604 - DNA, 362 bp, Glycine max
  unsure (1)..(362): unsure at all n locations
ctattacggacactaagatactcaagcttatctagccaagatcatacacaagtgttacttcagaacctatcggtttctaattatatgggccatcaaatctatcatgtgttgacggtaattgattagcccgtgaatttcctcnggggttgtacacacttcagcgatggcctttgctttgactagtagtcgcgggaggtcttgacttccattcaaggtcaaggcgaacctattcatccacatggncgnttcttgatgtaatgcatcaatcaccctccctcgtgctctctctcggcgcacgctcgcacataaacttctactagctgttgctcatgggtcaaagactgtgtcaaccttatactgta

SEQ ID NO: 66605 - DNA, 192 bp, Glycine max
  unsure (1)..(192): unsure at all n locations
tactccgccatcaatggcagaaatagaatgcagtgacgcttatcctcgacggttgacactaacgatgctccctcgacggtggaaggcggttcgtggttcatggctccttttcatagcaacaacaatcgaacgcaatacgaaaatggctcgtggttcgtggnttgtgtccgangaagaacaagaagaattaaa

SEQ ID NO: 66606 - DNA, 292 bp, Glycine max
  unsure (1)..(292): unsure at all n locations
ttatggcgaccacagagtggtacctggagatatgtcgcgtnggtcaggagaccttngcgacgtcaggtggtgtgctattgcccaaaaccaagcttgaccaatcccgacccaacccgggcatagtcgtgcagtgagaacctgtgacgtacctaagcatgcgagcttctgacaagaactatgttaaggaactcatgaccacatttacttgagccagcgctggctgcctcaatgaatgaatgttttctaagaccctaactaagtacctcctctcttcttgcatttctgaattctc

SEQ ID NO: 66607 - DNA, 438 bp, Glycine max
  unsure (1)..(438): unsure at all n locations
tggagaagatgcttcaatggaggataagaaagttggagagaaatagagnagggggagttcgaaattgaaggaataaaagaggtatagaagtggaactttgaagtatgtctcacaagactctcattcatcaaagttacaacaagtgttacacatgcttctatttatagactaggtagcttccttgagaagctntcttgagaaagcttctttgagaaaacttccttgagaagctagagcttagctacacacacccctctcataactaagctcacctccttgagaagcttccttaagaagattcctaaagaagctagagcttagctacacatacctctctaatagctaagctcacctccttgagatgagatgctagagcttatctacacactccctataatagcttatgatactcgcatgacanacaacatgaaaataata

SEQ ID NO: 66608 - DNA, 138 bp, Glycine max
atcaagatcaagtataataaagaattttttcaaagaaaagattgatagcacaatttgtccaaaagaatttttcaaagaaaaatctttatcaaagctttactctctggtaatcgattaccataaggcagaaatcgatta

SEQ ID NO: 66609 - DNA, 295 bp, Glycine max
  unsure (1)..(295): unsure at all n locations
tagacatgatacatgtctatgggttgggtggtcataggataaaagggatggcccacattatttccatgacacanatgcanaaatgatgnattggagattntatgcanaactggtcatgcatgcacctatgtggacactcaagtgtcanattttatggtcatgtgatgctagggctcaggattcacttcctctattntaaatcaacccaatgtttccaaaatatgttcttttatccatttgtgcattcatccgagtccatttcgagcgtctcgggaaatttcacagcattcaccct

SEQ ID NO: 66610 - DNA, 430 bp, Glycine max
  unsure (1)..(430): unsure at all n locations
tgcanaacccaaggtccgtccttggtaagtcttgcatcatcattggcttacaaaacccaagatccgcctttggtgagtctcgattntccaaaggctcgcanaacccaaggtccacccttaatgagtcttgcatcgccaaaggcttgcaaaacccaaggcctgcccttggtgagtctcgcattgccaaaggctcgcanaacccatggttcacccttggtgagtctcgcttctctaaaggctcataaaacctaaggtccgcccttgctgagtctcgcttctccaaaggctcgcanaacctaaggttcgtccttggcgagtctcgcatcacaaaaggctcacaaaacccatggtccatccttaggtgagtctcgcattgctaaaggctcacataacccaaagcccccatttggagagcctcgatgccactcta

SEQ ID NO: 66611 - DNA, 278 bp, Glycine max
  unsure (1)..(278): unsure at all n locations
agatgaagtttatcacactaatgacaatcatacaatgcactcagagagttgacatgtaaaagacaaactcttcaagctcttcttcaagcttcaaggctaagtcttcatgtgggtccccctatctctaacacctagcctttaccatatggatntgcataganaaatgcaaactctaactcaaggttccataaatgaggaggagtactacaaggagatagaaatagccatgattagagccaatgttgaagagaccgtgaacaactatggccaattcattg

SEQ ID NO: 66612 - DNA, 319 bp, Glycine max
  unsure (1)..(319): unsure at all n locations
acatttctgattaactcctttgcagtggagctgatattgggaggaaaactacagattgacgtcaatcctttcacgagaagggatgatcaatcctccttangaaggaccaacactagaccatgacaagagctccaagaaattggctaagctgctgaaaaggcctaggttctatgaccttaggtagattctgagcccatggccaggtgggtccaatgctttgacatatagacangatgcatatattggccttgattacggctctatgangagggaccctaaatatagattcaccctgattttggccctaactagtttgata

SEQ ID NO: 66613 - DNA, 279 bp, Glycine max
  unsure (1)..(279): unsure at all n locations
taccctgattggcctaaattaacgactntaaaacatgaataaatattctataattatccaaatatcagtctttaaaatataacattaaaataaatttaaattccaaaactttgataagtgtcacctcatatatcaataacaatattattatgatattctaataatgagagtaactgaacaactgttatactttggtattatagaaaaagtgtatgatctgtatatacgaaacttagagaacaatcanaataaagattgagattccaaattattttctat

SEQ ID NO: 66614 - DNA, 512 bp, Glycine max
  unsure (1)..(512): unsure at all n locations
tcagctnggtaagaaagaaagagaactaagaaagtaagaacagttctattcaactgtttcttgctatttcattggtgaccaatcacattccagtgagctttccgtccttgtggttgttccgtcattttgtgatttgtgtaaaataaaatatttctcggccaaaaactaaaaatcaattcccaaatttctaaaatttatttaaaagattaatatcttttaacatatttttttataagtacagattatgagaaatattcaagtcacacatcgtctaaaaataaaatcaaattaaaatatataaataagaaataacccttatccttcgaattaattttggaattggattaaatctttcacgttattcattctaagaggttatcataacatattcaattcaatgttaatccaaatgggtcacacttcattcattattcangcaccaagaaaatccaataaatgatagatatacgacaatatatcagaaaatacttatatcacatatatctaaaaat

SEQ ID NO: 66615 - DNA, 152 bp, Glycine max
ttaccttctctcattgttgttcttcatttttctccatgtatctcctcacacgtcttgtgttgaatgttgtcaatatgattttttagaatttccaccaattaaacttgctatagaagctagaattgattttctatggttcaaaattcatgttc

SEQ ID NO: 66616 - DNA, 482 bp, Glycine max
  unsure (1)..(482): unsure at all n locations
cgccaaatccatctctcatcttctctagataacagacatgttactttntgtttgctaagaactttcagatcaatttcgncgtctaacagtgaagaatgacttgtcatcttctgtcttgactatggatttgtctttgttgaaggacacaatataaccattgtcacaaaattgacttatgctaagtcggttatactttagaccttcaacatataagacattntctatggagactataaaaggaataccaattttacctatactagtaacatttcctttgcccatgcctccaaaggtaactgtttctccctccataagcatggcaattgccgcatccttatccatatgctcataattctaaaaagttccattaatggaatatgcagtaacgataagacatcacctattatctctccttcatgcanatggaagatgtaagtctctctaagcctcctatgtaaaagtagacaacatttaattgtcta

SEQ ID NO: 66617 - DNA, 476 bp, Glycine max
  unsure (1)..(476): unsure at all n locations
ttaagcaccgcggctgcagctgcctaagggtccggaagacaggtttcatttgaactagttccgctccggagtatgacagtcaccgctttaggagcgctgtacaccagcagcgcttcgaggccatcaagggatggtcgtttctccgggagcgacgcgtccagctcagggacgacgagtatactgatttccaggaggaaatagggcgccggcggtgggcaccactggttactcccatggccaagtttgatccagaaatagtccttgagttttatgccaatgcttggccaacagaggagggcgtgcgtgacatgagatcctgngtaaggggtcagtggatcccgtttgatgccgacgctatcggccaactcctangatatccgttggtcttggaagagggccaggaatgtgagtatggccagaggaggaaccggtctgatgggttcgatgaggaagccatcgcccatctgctatctata

SEQ ID NO: 66618 - DNA, 503 bp, Glycine max
  unsure (1)..(503): unsure at all n locations
ggtagaatggctagacataatacatggaggaggttggtttggttcaaggataatatggatgccccacattatttccatgacacaaatgcaaagatgatgatttggaaattttatgcaaaactggtcatgcatgcacctatgcggacactcaagtgtcaaatttttatggtcatgtgatgctagggctcangattcatttcctctattntaaatcaacccaatgtttccaaaatatgttcttttatcaatttgtgcattcatcctagtccattntgggtactcgggaaaatttcacagcattcacccttcaggtgtacacacattttttcaaaaactagctatgatcnagcgaattttctttcatctcttttcgaaagcatgctggttttttcagctagacaacttatnntttcttttttctctctntntnnttcttttatgaaggattntgctacctaaacatgtgtatatntntgtgaaggtattttgtatatacccgcata

SEQ ID NO: 66619 - DNA, 304 bp, Glycine max
caagtaggcctggtgtctatttgcaaccgcttgttactaaatacaccccctgcctctatttgctgattcttttctcgaaacgttacggaactttacaaattctgtaacgatacttggtttccttccgtaatgtcacggaaccttacggattacgtaatcatcctttctttggctttcaaaatgtgacggcacctcacggatactgtaacaatgcttccttttgatcttcggcatgttaccgaacatcacggatcgagaacaatgctctcttttgacttctggcacgctatggaacttcacgtat

SEQ ID NO: 66620 - DNA, 462 bp, Glycine max
  unsure (1)..(462): unsure at all n locations
caagaancattccaaggctattgagcaagcaatcaatggagcagaacacaccaaatgattataatgatggatggctcatattctcacaaaggtaaaatcatcactttcaaattgagctttcagaactatcatgacatgtagagaataatcaaggatttcaagtcacaaaatgtcaagaacttttattttcaaaacaattacccatttcttgaacatatcctataattcaaagaanaacatgcaaagtcgtacgtgcacacaaaattgacccanaatattaaactgaatatccgacgaaactatcaacattaacaaattaacacaactaacaaattaacaaaaccaacanaactatcataaccaaagaacactcccnnccccccatacttaaacaacacattgtcctcagtgtagcacaattaaaagaataaatacaattaaatcatcatagagaatcggaca

SEQ ID NO: 66621 - DNA, 313 bp, Glycine max
  unsure (1)..(313): unsure at all n locations
ataaagaattttacagtggtcgatcatatccatacattggaattggataaatatacttatatggtgataattattattacacattcaatatacgaaaatcaattattattgcgtatccaattgggtggtgaaagtaatgacgccggtgttatcaaacgggacaaaatattntacgaaatctgaanattacaacagaagagaaaaatganaacactcatatcaaacgttcgttccatatcggcctctcttttctctgtcactgtagcatttntaaattcccgatgaaaaaaaatagatgcatgttgagtattta

SEQ ID NO: 66622 - DNA, 486 bp, Glycine max
  unsure (1)..(486): unsure at all n locations
tatctagtattatatattttcggcacgaacgttttattggacttgcattatactttgggtnntccttttttacgtgacattacacttttggttntagaatcttgtatgttatttttctttctacatttttgtcttctaaagttgacgagtccacttaaatataattatcacaaatggtgagtcacggattacatttctttttatcgtaatgcatcttgtagttatggaatgatcaatgataaaaaaaaaaattatagtgaccaaagaagagtgaataatattattttntatttattatatatttttctttntatcatatcatttgttttatttcatttttcctcttctcttcttattttcttttcttttctatgtatatatgtatagaaaatgaaaacaaggtaagagtctgaactgaatcctcttggacctcttcatattcaaataaggtgagttatatggtatctatattcanaatggaattat

SEQ ID NO: 66623 - DNA, 345 bp, Glycine max
  unsure (1)..(345): unsure at all n locations
ttttctttttttcggatttaagggatcccgcccgttaaatcaacactaaaattaaatatttttttttaattcaagatttcttttttcttttaatatattatntgtataaaataaataaaatatttttattttaacgatacttcgttcatatttgagaattaaccaagattcanatttaaactattacgtgattaaggttgttgcattntgtgtcagttccaaatattcatctagttcacttttttctttttttttattctacagaaatgacccttgcttaataaaatgcttctgtttccgtaaccgtttttttattatttatttatntttgaattaaaactatca

SEQ ID NO: 66624 - DNA, 494 bp, Glycine max
  unsure (1)..(494): unsure at all n locations
taaaactcagcttctctgggggaagattatgttggttttgctggaactgctttgagaaatgtgtttgagtcttgtgtgaaacaaggggaagaaatgcttgtattttcaaggataactcttttgactntgataaaattatgcaggaaatcacgttttatgcttggttgtggatgaaaaaattgacaaactctgatgtctgctcttttgctcagtggcaatcttaaactgctgtgagtatattggagtgtatgcgcangtaaggtgggggagttggacagttggtgctatatcggttattgcttggttttggtaatgagaaggtgatattggaataaatgagaatatgataagggattgggcttcagccacaattaattgaaggagggaattatgggaatatttatatgggttgcgtatntattgctcaaggaatgtagctgtgctattngcttcctgtgatgggttaatattcccatgcatttatgaataatact

SEQ ID NO: 66625 - DNA, 393 bp, Glycine max
attagcctataagggggttttgaccttctttaaaacttcttaagttattataaagaataaaataaaatgaacattattaaggaatggactgtcgaaagagcacagagagccaagagtgggattagagagatatatggagaaagtatcatcttttctgcttgacaaactccttgtattctaaatcatctacagatgctgaggatgcgggatatgatgatgtcattgttgaggatctgtcataccccaatttcgtccgtggactgttatttacaacccattaaattcttgccagtcgagttgagatgcttaacactctttaccgcgtaatccgtcaagtttcgcaacatttcggagggaatgacacaatactaaaatggggtgagctgatcattt

SEQ ID NO: 66626 - DNA, 477 bp, Glycine max
  unsure (1)..(477): unsure at all n locations
tcctcaatatccaaacaattcgatctcatgtatcatgaaactatcctataccaagataacagagtagaggcagaaaactctgcccaaaactaatccaaataccacagttntccctactcaaataccccagtaaaattctcttcgttccggttcgttaaccattggatcgccttgaaaantttactggaggtttctggtacataaatctacattntgaccgttgggatctgctaaaacatgcctggaacccgagatgtactactcttcccatgactagcaatgcacaaccatttttctgcactatgttaaaaaaactgctgcacaattntgacaacatttttctgcattaattggcagaattcgaaatccaactggcccacatccaattttggctcaaatggatcctacaagtcctaaatcatgtataaatcatatntaaaccanaaacaaacttcagaccaaggcaaatcaaaatat

SEQ ID NO: 66627 - DNA, 388 bp, Glycine max
  unsure (1)..(388): unsure at all n locations
agctngctgccacggagtnttctctactatgctcttgtgtggnggaacaagctacanaaggagagagcaagaaatgaagagccaatggttgatacatggacagagatgaaaaagatcatgaggaagcggtatgtgccggctagttactcaagggacttgaaattcaagctccaaaaactaacccaaggcaacaagggggtaactatggctcgatttcttaatggatgtgctcatgattcaagcaaatattgaagaagatgaggaggtaactatggctcgatttcttaatggtttgactaatgatatccgtgatattgttgagctgcaggaagtttgtgaaatggatgattngcttcacaaagcaatccaagtggagcaacaattaaaa

SEQ ID NO: 66628 - DNA, 493 bp, Glycine max
  unsure (1)..(493): unsure at all n locations
ctcagctctcgatatgtatgctctgatcggcttgcgagngnatattatgaccattntaatntcccgagagcttgcgttgttcaatttctagcatctcgatacgctatgtgcctgaatcggacatgcgagtgaaaacttatgaccatttgaatttctcgagagcttccgttgttaaatttctagcgtctcgatacgctatgcgcctacatcgaacatgcgagtganaagttaataccattttaatttctcgagagattccgttagtcaatttcgagcgtctcgatatgttatgcgcctgaatcggacatgcgcatgaaaagttatgactaatttaatntctcgggagcatctgttgttcaatttctagcgtctcgatactctatgcgcctgaatcggacatgcgagtgaaaagatattaccatttgaatntctcgagagcattccgtgttaaatntctagcgtctcgatatgctatgcgcctaaatcggacatg

SEQ ID NO: 66629 - DNA, 344 bp, Glycine max
  unsure (1)..(344): unsure at all n locations
aaacaccttggcacattgagagaaaagaataagtgctacaagatatatttgtcgatgagacgatcttatattagtcattgtgcaaacttccaacaaatcttgttgacttgtttagagccaacgatggcttggtaggacaaagaatattgngttaagtcatccttgggcttacatttgtaagggctagaagtggcagtgaacaatacttgtaactttttgataaattagtggaaacttggtgggttgccaagaactatacgtaatctcanggtagagatgaaattgnntttagttcttatantttgtaagaaagatatttttccatcgtctgatagagctttttt

SEQ ID NO: 66630 - DNA, 445 bp, Glycine max
  unsure (1)..(445): unsure at all n locations
tctagactagtgtactagatgaccgctgttctagccaagctatcttgaaaganatgcatcaacaacttctcgtccctggaatacgcacccatcttgcgacaatacattttgagatgattcttaggacaagtcgtccctttgtacctatcgaaatcaggtaccttgaattttggagggatgacgacgtccggcactaagcaaagttcagtcatgtccacgagcggataatcgccaaagccttcaatagccctcaatctctctttgatgagatcgagtttcccctttttctttgctaccaggggtggccctcctgcggacaaaaatattggctgtgttgggtggctttgaggttctcccgtgaggttgggctgaggtagcgcattgtgtgttgacccctcggcggngaacggngagtaggaatcgatgtctccctaagcatgttctc

SEQ ID NO: 66631 - DNA, 376 bp, Glycine max
  unsure (1)..(376): unsure at all n locations
tatacatcttaatgggtcctcttccctcttccattgcttcatcattntaagtaaagttgtttctcttctagccttctaaaatcgaatatgggttaatcttactcgcctcatcttgaaagtattaagaaacctatcttgttcaaagaagtgtatcaacatttaccttgtataaggctccgacctgcacgttgcattgattgtgatggttctattaaattaactttttctacagaatttggccaaacttcttgcaatgccctgcatcatcagaattgaaagtcaataaaaaagttcanaaacattaataaaattataaaatcaaattgtgttccatgaattcaacataattgtaaatatacatatgaatgaacgtgtc

SEQ ID NO: 66632 - DNA, 463 bp, Glycine max
  unsure (1)..(463): unsure at all n locations
ntcatcagtgaatgctatatataggaagtatcatggcttaacatggccattcataatcatcaacccattcatatatttatctgtaagaattntgacccacaacttctttagatgatgcatcaaagactaaacatgtttcccaagtaaagagatgttggcctctcgggatttgcgtatgccaagtcctcctttgcttttaggctaggtgattntgtcccaccctacccaatgcgtagaaggtttatcccaaataaagttcctaacggctacatcaatgcgattacatatgcctttaagaatccacaagttctgcatagtataggtagggatagcagataagacggatttggctaaagtcagcatgcccgccttaattggtaatttagtcttccacctacgctaattgctattcactatgtctataatatgagaaanatctctattatgaactcttcctttcaac

SEQ ID NO: 66633 - DNA, 283 bp, Glycine max
  unsure (1)..(283): unsure at all n locations
ttctttcctttctttccccctctcctctctctctctctctctctntctcccaaatcaaatcaataccaatagggtttgctgatccccttcctcttcttcccctcaccgcatcgtcnttctcttcactggatcaatattcctcccgctgtaagctctctcctcatctccttntcttttctcttcgcttttcctttctttcttcaatctttgcgtcgatttctcctatattaattgcttcttttcttgcctgaaaccatctatntatcttttaatttcgattatc

SEQ ID NO: 66634 - DNA, 499 bp, Glycine max
  unsure (1)..(499): unsure at all n locations
ctatgggttactagctgccctaagcttcctcaacttcctcaactatctcntttggtctatatggtattcttacaagccatcccaatcccaaggcgatactaatgccaatgaaagcattaatctgtttggccacagctctaaaaactactctggagatgacaatattccgtagcaagttgttaatcatatatactctacattaattaattaattaattagtcttgtattaaaattaaagtataaagtacgttatataagaaatctgcacttatctctttccgatcggactagctatagattctgttaagttaatttgcaacacaccttactctntatttatattattcttgaaactttaatgaactntaaaattggactgcaatatttcttaaactatatttttgagagaatgtntagagagaanaanagagaaagataaaanataactatatataatatcnaattttatattcanataaactannaatgaaataatatt

SEQ ID NO: 66635 - DNA, 499 bp, Glycine max
  unsure (1)..(499): unsure at all n locations
gcaagcttgtagaatggctagacataatacatggcggtgtttgtgttggttcaaggataaaagggatgccccacattatttccatgacacaaatgcanagatgatgantttggaaatttatgcaaaactggtcatgcatgcacctatgcggacactcaagtgtcaaaattttatggtcatgtgatgctaaggctcangattcatttcctctattttaaatcaacccaatgtttccaaaatatgttcttttatcaatttgtgcattcatcctagtccattntgggtactcgggaaaatttcacagcattcacccttcaggtgtacacacattttttcaaaaactagttatgatcagttgaatttttaaagaaaagttggaagtcatctcttttcaaaagcatgttgtgttttcagctagacaacttatttaatttttttttgagggtatttgctacctaaacatatataggttntgtgagaatattntgctatatacatg

SEQ ID NO: 66636 - DNA, 511 bp, Glycine max
  unsure (1)..(511): unsure at all n locations
gcttcctctcaacttgngacaatcagataaactcaaacgcttaagacaaggaaaatgataagtgctatcttcaccctcaaatggtagccactcctcccactttgacatctcttcaaactggagactttctagtaatggaaatggctgaaaagtaggggagcctccgttgttgcagtaaaattcatgaccaactattttcatggctntcatgcttttaatgacaagctccttaagagaaggtagttgtccaaattgtggaagtgacaaacaatagttgcaattactgatactaaggactgtaacattagaatacgaagaatcacccagccattctggaaagcttgtgccaccataggatgtgatgttgagtttctttaaatntaatgaacggtgcaggttcccaagtacatctttggcaatttgtgagaatttgcccactccagcgtaagctcctcaatttgctctnttttctttaattctgcttgaaatgcatncatcggatcaccaacat

SEQ ID NO: 66637 - DNA, 368 bp, Glycine max
  unsure (1)..(368): unsure at all n locations
tcgtcctttgtcacgggaagccggaagatccatatcaccttcttaattgtacacatggggcactgcgcccncaaatgcgcaagtaagaagagataattttccgggctctcgtgtccgtaaaatgcattcatatcatgcatcgcataagcatctcttcataacatcataatgaacatatcgntcctgcatttgtccgttatcatattccagcctcacattntgcatgagtcatggcatcatcatgcatatgcgttcaacaaactttntgatctgcaaaattgcataccatttgttttcatgtttggctcatccttgtgtttcctctacaaaaacaaaaaaggggaagcgtgaaacttcacactacattc

SEQ ID NO: 66638 - DNA, 500 bp, Glycine max
  unsure (1)..(500): unsure at all n locations
tcagctngtctgtgcagaatagggtaccaccttgtatagaaatgtacagcagagtttttcaacattccagagcacaccacggtgcctatttcgggaaaagagctctggaggcagcaagaggagcaacttttgcagagatacctaggtttagtaatctcattattattattaggggtttttctataatggttggctaaacacccttgttgggaatttctaatgaacaactaatgtaattattntaatatctaattgattgtgtttcttgtgttcaatgcttctttcagtgcttaaattctatatgctattggtctgatcaaccatttgtgtgcctagctaggtgattntaacattgcgaaatgtattgttgccttagaacttgaatgaagtagaatngacacttagtcttacaagagggatctgcggattaagtnttggtttaaaatatgatgttacaataatgttgtctggtctaagtctagtccaacaagtgggatctg

SEQ ID NO: 66639 - DNA, 475 bp, Glycine max
  unsure (1)..(475): unsure at all n locations
agctnttaaaaattanattcatatttctaanattctgttacaaacagtttaaacttctagtaattgattacataccttgtgtaattgattacaagcttttaaattcaaattcgaaaatttcaaattgtcttagaaatcaatttagccactggtaatcgattacatcctctggtaatcgattaccaaagaggaaatatcatatttttgaaaagataattgtttaaaaaacttttgtaaaatatttcctttagccaaacctgtgcaacatcaattaaggaattctttctaagaccctaactaagtacatcgctcttcttgcatttctgaattctcaacttcaatcacgctcatctttggcatcatcaaaacttcatatcatatatgcttctacaatctcctcctttttaatgatgacagtaatctgaaatcaagataaacaatataccattgataatgcgtgctcacaacccttact

SEQ ID NO: 66640 - DNA, 486 bp, Glycine max
  unsure (1)..(486): unsure at all n locations
cgcatctntnnttaatttactcttccatctaaggaaagaaatgtgttaattgagaacaagacagtgtcccctcgagccagctcaatttgataagatacattatatacatatgtatatatattttgtagatttaattgtatattttatcagtcaaatgtaattattttatgaattntatggctcattntttgtgtgcattttactatcatatcttttaatttccatgtattntactgaccattaaatgtgtactgacatgctgaagtgtctctaaaagagtaaaaaaataaaaacgaaaatgtaacaaaatcacattgttccttgagaaatcgtaacaaaaaaagttaaatgcttanagccacttttggtctctttagttntgctattttaaaatnttggttcctcanaaaaattatcacacatttgatccccaggtagtaatatcagcaatggtggtcaattgtaaaactntgatccaattttaat

SEQ ID NO: 66641 - DNA, 284 bp, Glycine max
  unsure (1)..(284): unsure at all n locations
cacttgtgcttgagtgaaacagatgctgtgagactgtggnttgagctactttccttgatacctgtcttatgattaacttcatctaactgtatagttcacattntggtctcctcttgtctagctgcatattctgggaaaacaagtgataggtacacattgcttcatcttttacatcatgcaatcaataaattttaatgcatacacctttgaacataaacactgcattgtttaccacttgaggacaagtgagttgttctcttttgcttgacgacgagcacaactat

SEQ ID NO: 66642 - DNA, 453 bp, Glycine max
  unsure (1)..(453): unsure at all n locations
tctggtttttcctggcgcggagatcatggtgcagcagctgaaccanaagcgatagtttcctctggtgaggaagccatggagaaacagaccgttaggaatgattgcgcttatctcanaaaactattgtgaaatgctggtgaaaacacgaatgccaaccagatatgaatttgactgaccaatgtagaggggcgtgtgaagcaacagtcgaatttgctttgtggtgaacgtgctattaatgataagcgattcgtttgggcacgttcagattgcagtagctgctataattcctctagcacacaaatgcccagcttgcccctcagttnttcaaactgatttgcatccagagcctgtgcganaatatctgctatttgttcctcagagtcaacatgcttcagtgtgatcactctatcatcaacaagatctctgatataccgatgtctaatgtcaatgtgc

SEQ ID NO: 66643 - DNA, 483 bp, Glycine max
  unsure (1)..(483): unsure at all n locations
ttaagtcacctgcggcatgcaagcttgcagaagctcttagaagctggcctgtgatctgtcactatagcctangctgnagcctncattatgaactaatttttgactatctgtcaattctcgtatgtatatacacacacacacacacatctnagcaaacaaaggctgaggatcctttttgtgtgcatattttcatactcaaacatttcaagtattatgaacaatatttttaaattatatagtttggtcttaatactatcaataaatattattataaggtcaacataataattattataggacaaataataatgacgtcgtgaaatccatgtagcagacctcatctagtggaataaagcgtctggtgtaattacttgagtgtttggcactagactatgactctggtcattgattttaatatacttataattntgatactctaantttaacatgatatatgcgtaagataattgtttatttgataca

SEQ ID NO: 66644 - DNA, 480 bp, Glycine max
  unsure (1)..(480): unsure at all n locations
atctatcattggagaatacagtgaagatcaaatattgacagcttcatatggatatgttggaggtcatgaaggaaagagtgtatacagttggtatattcacgaggtatgtacttacattaatattccatagtttatgtctaatttatttaattaatgttatgggagtccaaactattggactaagaaagttgcagatgaaaagctgtgttatcctgtggagaattttcatacaatttaatttctacatctgtgcattaaatagccaatctgctataaatgctatcctacagctaggataactaattaaggagataattacggctgtataatcatgtaagattcnngtgttgaatgactaacanatttgtgtcaatagtaaccaaatattctgcaattgtgtcaattaataactaatattctgctaatcaattccattgacaatccccctcaattgatgctggtaagtctaaaagcatcaat

SEQ ID NO: 66645 - DNA, 388 bp, Glycine max
ctgatggaaacctggaatgctgatatacaaaaattctcttacataatagacgtgaggagcattaacctaggtatgcatgtatataacaaaaaatttacaaagatatatatgtatgataggtacaagaaccttggatatgcatgttatagcaaaatatctcacaaacatatattgttgtaacgtacaagaacctggcacgctgatatacaaaaacctcacaaaatatcatatgtatgtacaaatacctctggaaaagaaagagaaatacatatatctttattagttgctactaaaacaactgcttgaaagaatactacactttttgaaaaaatatgatataacagtttgagaaaggttcacctgaggaatgtggaaatttccaacctaa

SEQ ID NO: 66646 - DNA, 374 bp, Glycine max
  unsure (1)..(374): unsure at all n locations
agcttgacagagaaaataaactgtctgagttatatttccatctgtgcaataattacattgtgcattgagtcgcaatgtaatttgtctttgtgctagtggactctatgcaaggttcactctgagtacacatatcacaagggaggttagcacactaatctgggaagttagcacactaatctaaaatattaaaataagatttaccagttntagcaaaagtaatttttaccatttttggttaagtctacttcaaccatttctagttaaaaattcaaaaggcaaaatacccatatatggaaacatttggcatgtccaccatggctataaaatggtcattaatgttgtcaattcgatcttgtcaacattaagcctaaaca

SEQ ID NO: 66647 - DNA, 487 bp, Glycine max
  unsure (1)..(487): unsure at all n locations
ctaagcttanacacagcacacaaatcaggatccaaacccctaattaatgggatttaaggtttaagaagtgaaattgagaatgggaataaattgaagcaaactctcacctcacacaagtctataacatcaatttaagcttgttcaaactggatttacacctaaaatttcagcgaatcaaaatttgactcctcaacacccaaatttaccctagaaatggctnnttgttcactttggtcatttgtttttctctctagcacagcccanactttctcattagtcctaaatggcatttcaagctaggattgactcactctaacctccaaataccactaaatccagatttggccttccaactctcanagtctcactctntntttccactcacaacaccatactctcaccttctaaccatangttaactctacccttcatctctaacagttntccataagcaatntcagcacataaacatcacaagcatcatcat

SEQ ID NO: 66648 - DNA, 341 bp, Glycine max
tattataacccattcatagacctccatcttctttaatattagctggaactgtctgaaataaaatataacttggcaacagaatcaccacaaacattacatcttattcactgatttataaagtaacctgcattttggggtatgcttagaacaaatcatcttgattgttgagacgtttcacaacttaatagcttttaataactgaactgtatggctacgcatgcttctgctcaatgttaataaattatacaagctgcattacattctcttataacaaatggatgctttattgacaacaacgcctatttcatatgatgtgtcaggctttgatgcctggagatgat

SEQ ID NO: 66649 - DNA, 301 bp, Glycine max
gacaccgcctgcaacacccacaggcctatctaaccaagtggaccacaagccagctccataagtctggacattcaccatggagtagttacacttgtaagacgccgttttgggcttcagtttgaagcacgggctgtcagtgtgcgccgctatcacgtgaaaagccgtcgcccacattgaacctaagcaaaaacgactccgtcaaactcaaccgtaacggaacaataaagagagaactgcgaaaaagaagtgatctgacttatcttcgatggcgaatgcaatcaaacaggacatgttgcgggtg

SEQ ID NO: 66650 - DNA, 295 bp, Glycine max
  unsure (1)..(295): unsure at all n locations
actaaacacaccccctgcccaacttttttggtgattcttttttcgtaaagntacggaaacttacgaatttcgtaacgatacttgttttctttccgtaatgttacggaaccttgcggattacataatcatccctttnttgacttacggaatgttacggaacctcactatttgtgcaacgatgcttccttttgatttccggtgtgtcacggaaccttacggaatgtgcatcaatattttcctttttcttttctctcttggttttctttccataacttganggaactcaactcatcta

SEQ ID NO: 66651 - DNA, 490 bp, Glycine max
  unsure (1)..(490): unsure at all n locations
ntgcttctacagatgtgtgcggtaaaatctccttgaagagcattataaacttgaatcctataatgtgctggtgtaaaaatcacctccaccaattgaatagcatgcaccatctcatttatatgaacattntgcaccatatattgatggcctcccacatttgatgtctcaattaggatacgagccaatcccgtattcttttatgcatagtatttgaatctatccataaagatgaaccaaatgtactagtaatgtattaaaaaaatcccattgacaatgcatgtaaaggtacccctttgaatcgtactcttacataccattctcgtggtacctgttttgggaccatttactaatctcataaaaaaagtccttcatcaaatcaatcaactntgtcattaactccttcaaattctcactagtgtaagaatggaatntaaataagctnttagattggttctccaataaccaatttaataaaaacatggtgtcattt

SEQ ID NO: 66652 - DNA, 378 bp, Glycine max
  unsure (1)..(378): unsure at all n locations
agctattacctgctgatgattattttatatatctgacgngaatagtaaaataaatgaggaattaataattcagattatacttctaatatattaagagtcagtgataaatactgttaatatatttttagggtaattatttattaactcttttaattgagaataatatagttcgatttaatatatacatgtttcgtgtcatgcaaatattaatattggctgatgtgtatatgacacatggngcgtgataacgtgatatattgngattatgaaagtgtgatgaactgtgcgtaagagacaagctgagtatatgttaaattatgagatcacgcgcgtatcgagatattgtgcggataacttatgaattatgaattggacaat

SEQ ID NO: 66653 - DNA, 490 bp, Glycine max
  unsure (1)..(490): unsure at all n locations
cgttgatgagatgggtagcaacaatgaatgcatgatcccaatttctaatggaagactagcttgctaaaagagtgagctctgtctctactatgtctatggnttatttcaacagaaaccatttggtggcatgtgtgtgaatgtgtgatcagataagtttttagatgagttatgattttctaggtattttgagtaaggttgaaactctcctccccaatctgtgtgaagctgtaactcaactcttgaattgagaaaacattgtttaattnttttttaaaatgaaaagttcaataatacgtgtgtcaacatgtgaggaataaacataatcacttgatgacttaattggggtaggtttccccgcaaattccaaaagataagttcaagagaggacttttaaatagttgtagaatcagatgatgtaaggtgatgtgccttgccaagcaacatgaagagcaaaactcaagtgcaaatttattangtaaagagatattac

SEQ ID NO: 66654 - DNA, 466 bp, Glycine max
  unsure (1)..(466): unsure at all n locations
agctngagctctggtgcaacgaagtttgtgctttgtggtacaagggtaccttgtgaaatgggaaaggttaacatgggaggtggccgaaggtttgtcagtggcagctctacgtgacagagaggaggtgggaatggtggttgcggtgagtgactgtacggagaaagcctccataggagaagctagaaggatgatatctgggaatgagaataataatatgaagatgtgaatagttttgaatttgatcatgtttgttatgttatccattactatcttctctcattggaactggtgccaccctctacagtgtgtggctatgatatgatgcctctaccccacatatgtcactcctcaacctcaagtctcgagttacttagattcgccaccgagagaagatcataacgttttttttttctttcaaatatctattttgatcatggaagtggtaaacggtgataaattaatctta

SEQ ID NO: 66655 - DNA, 368 bp, Glycine max
  unsure (1)..(368): unsure at all n locations
gagcttgtatnntaaaatgtgttagaaatactcttaattaataattgaattcttattcctttattaatatatatgtgaggggtagagggtgtcacagaggcttcttgggaaggactttcctgatgaaagaatagtgcaaaaaatcctggtcactatacccgagaagtatgaatcgaagatatcagcattggaggagtctaaagacctgtcaaccatcaccttgggagaactcataaatgctctacaagcccaggagcagagaagaatgatgagacaagaggaggtggtacaaggtgcgtttcatacgaaagcacaaaattcaagaggtggcaaagacaagaagaacaacaaatggaggaacaaaaaac

SEQ ID NO: 66656 - DNA, 435 bp, Glycine max
  unsure (1)..(435): unsure at all n locations
ggcgggaagcttaacattcaatttcgagcgtctcgatatgttacgggactcaatcagacatccgagtaaggggttattgtcgtttgaatttgctcanagcttcaacattcaatttcgagcgtctcgatacgtgacgggacttaatcagacatccgagtaaaaagttattgtcgtttgagttggctcagagcttcaacattcaatttcaagcgtctcgatatatgacgggactcaatcagacatccgagtaaaaagttattgtcgtttgaattgactaagagcttcaacattcaatttcgagcgtctcgatatgtgacgggactcaatcagacatccgagtaaaatgttattgtcgtttgaatttgctcagagcttcaacattcaatttcgagcgtctcgatatatgacgggactctatcagacatccgagtaaaa

SEQ ID NO: 66657 - DNA, 439 bp, Glycine max
agcttatgaagaatggtggtggagttaaagagcctgttatatatagttgatgatttcaacagatgtgaggagagatcatgggaaacaagagaagatgaacaactcatactggaagtggatgacataagataacttctatccgtaagactacaatgctgcaaatgaagattttgaagttctgagctgaagttgaaaccaccttgatagactaatgatgtcctattattatatgacaggtcaaggataacaagagaaggaaagtttatgcagagaggagatgactaatcaatgttattatcataaagataaagctcctgaagattaacgctaaaggtcgacaacagttgacatgttgaggatgtgagcttatttaaagaaagatcaaggatgcgtagagcaccggtaaagttggaatgcgaataaaacagagattgaatat

SEQ ID NO: 66658 - DNA, 461 bp, Glycine max
agctggtaggaatatggggtacccatcacatgtggtactatgtggcggtcgggcgatggcgcacaacaagttttccacatccacaaatcgcgcataaacccaccatcccgtgttgcccacctccaactgagctcacgtactcccacgtagcccatatcctcgtttctctcaacaccgggtccccatcaatcctcccaagcttccccaacatccaagtaattcaacatccaaatcatcacaaactaacaaaccaagaaaaacagggcaaaggaagaaaactctgcccaaaacacaactcaaaatcacagcttttcacatacaaataccccagtaacatttccttcgttacaattcgttaaccgttggatcgactctaaacttttactggaagtctctagtacataattctacattgtgaccgttgtgatctaccagcatgcatgcaaaactcattctgcact

SEQ ID NO: 66659 - DNA, 441 bp, Glycine max
  unsure (1)..(441): unsure at all n locations
agctngagatgaggaagtgttgaagggtgaaacttcctgcttttattgttgaccacagagtggtgcctggagatatgtcgcgggggtcangagaccttggggacgtcaggtggggtgctattgcccaaaaccaagcttgaccaatcccgacccaacccgggcatagtcggtcagtgagaacctgtgatgtacctaagcaggcgagctcctggcagtcaacagataaaaggaaaacaagaccacaaagcaaggaggcttgtggtggctggccagctgtgaattttgtgtaatatgtggattgtggcctctggtaatcgattaccaaaggtgagtaatcgattacaaggcttaaaattgaggacaggaggctaagatggtctctggtaatcgattaccaaggggtgtaatcgattaccaggcttgaaaacgaagtcaggaaac

SEQ ID NO: 66660 - DNA, 465 bp, Glycine max
  unsure (1)..(465): unsure at all n locations
agcttcaattgctcgtatcaagactaaaaaatatgattntatctacaataatttataaattgttttcaagaaatgttatattatttagaagacagataatgagacaaaaaaaggagtttctaacacattattttttactgaaattttcttatgctcgttaaattatgaatcagccgtattaaatatgaaataaaccccatatcacttggtgagtctgactaatattttagcttanagtagagaatgccctaaaaaaagcagttagagaatgtaagtgtggactgaagagaaaagagttgaaatattgcagaatataaaacctcgatgtttgtataagaaaatggacaacaaatgttgttttagaatgattcttggcattntagttgacttcgtcaaccttgtcttttgtatatcatttggtgcatgctatgaaagatgagctatggtttaaataatggcttatct

SEQ ID NO: 66661 - DNA, 399 bp, Glycine max
  unsure (1)..(399): unsure at all n locations
agcttatctatggtgctgcaagtttgatcagttgtatgcttcanaatttgaagtttctctactgaacagctaacttactattacaaggattgcgtaaacacttgggatgcaaaagaactattccaattagcattnttttaccatgaaccgtataaagttcacataattatgacagttaatatatatagttagtggaaaaacctaactaaagcatgtgaagtgagcttaagcgatacaccacactcctatatgatcaactagtgggccagtaattcttcttatgctctctatttcaattatattcgtgnagacatgtggaaaatgaacgaattaaaatataatattataatagcacttcattagataagccacaaacacaactttcacacaaactaacat

SEQ ID NO: 66662 - DNA, 465 bp, Glycine max
  unsure (1)..(465): unsure at all n locations
agcttgttgtgatctatatgcattgagtnttttttatatgaatatgtttggtgcaggaggaccactggctctataaggtgcgctaagggtggttggagagcgcaggaggttagtctttactaattggagacaactgcttattttttttacttaccaattttttacttatccaaaaagcaaaaaaattaaaaataattaataaatctacatcggttcaggccacatccgatgtagaatgtctagcattctacatcggttattagaatgactgatgttgaatgtgtcatcatgatgaccattctacatcggttattaagacaaccgatatactgaccattctacatcggttattaagacaaccgatgtagaatggtcatcattctacatcaggtgtgtactgaaccgatgtagaatgatgataattctacattgattgtcctgataactgatgtagaatgtcaaaat

SEQ ID NO: 66663 - DNA, 397 bp, Glycine max
  unsure (1)..(397): unsure at all n locations
agctggtatagttccacattnntatggttatttgtagtgattnttgtaaataaatcttgttttctggttaatgttgtctctagaacatttccattggatttaatgatgaaatatgtgcattttcaggtgaaaaggaagctaagttttgaattgcaaaatgtagcagttgggctaagctcaacaattgtgctaagcatagcagtcgcgcttagcaaagcaggtgccttcagctagactaagctcaagactggtgctaagcccaatttcacttactcgcgctaagcgtgagggtggcactaancacagtgtcgcaatttctgagcctatataaagcctctcttgtgtagaattaggggaccatttttatgaaacttttatgacagcttctacagatgac

SEQ ID NO: 66664 - DNA, 460 bp, Glycine max
agcttagaatattgcagcaatattatattccatctgcccgagaactatcacgcttagttggagtctgcaaagccccaatcattcaacactttgctgaaacaatttctggtactacaactattagaagctttgatcagcagtcaagatttcaggaaacaaatatgaaactgactgatggatattctcggccaatgttcaatattgctggtgccgtggaatggttgtgtttccgtttggatatgttgtcttctatcacatttgccttttccttaatattcttaatatctattccacagggattcatagatccaggtgagttattcctatctgttacaaatcaaaatttaatcttctaatgtaatatggaattaaacataatagtttctcttttataacttttttgtgaatttgaaggccttgctggtttagctgttacatatggacttaatttgaacattgg

SEQ ID NO: 66665 - DNA, 469 bp, Glycine max
  unsure (1)..(469): unsure at all n locations
agctntcacacgaatgtccgattcgggcgcataacatattgaacaacgaaagctctcgagaaattcaaatggtcataacttttaacacagaagtctgattctggcgcatcacatatagagaagctcaaaattgaataacgaaagctatcgagaaattcaaatggtcataacttttaactcggaagtctgattcaggtgcatcacataaagagacgctcaaaattgaacaacagaagctctcgagaaataaaaatagccataacttttaactcggaggtccggttcaggcgcataatacatagagacgctcgaaattgaacaacgaaagttctcgagaaattcaaattgtcataacttttcacacggaagtccgattcagtcggatcgagacgctcgaaattaaacgtcggaagctctcgaaaaattcaaatggtcataacttttcacacggatgtccgattccgatgca

SEQ ID NO: 66666 - DNA, 455 bp, Glycine max
  unsure (1)..(455): unsure at all n locations
agctntgagtgaacccattgccttctattntactgtacatctttgatatttgagcattttcatatgttgtacattcttttcactgtggtacttcatttcccatgcatgaataacatgcctacaatctggttaaataatgattggaatgtatgtcctctcttaaggaacttatgttagacctatttattgtgaaagacattctcttcgattntacatgtgttttacattgtatatacccattctcttcgattttacaatgaaaatactcagttttgtgtagtttttttcctcataatcaatttatcatttcttctattgttgaaataagtcaaagaaggctgcttagagggattctcattttcaaccttcaatctcacccaattagaattcaaaaccttataactagtcttgggtgtatcggttggtgcaacaagtggaactagtgatatgtgttc

SEQ ID NO: 66667 - DNA, 453 bp, Glycine max
  unsure (1)..(453): unsure at all n locations
agcttcccttttcttggccaatgctggactcgtttgtcagtgatttccttggcaatttgatgctcagaaacagcaagatccaccactccttcagttggtctgcccaggtatttgttgatcacagcaggggagaatctaacacattttcctctgacaaacactttctgataatcatcactctttctgtttgctatgtcagagggaatgttgacaatgaattccctgactaggctttcataacagtctcccaacttggtgactgtcttcagtagtccagcagccttgatgaggtccatgatctctttgcagtccaaggcatctcttcccagttctctttcaaccgcaagtctgcgttgatatacatatttccacttttcaacattgccaatggagtggaatgagatgtngtccaatggtgcatcanggacttttccaggcacctttttccctgat

SEQ ID NO: 66668 - DNA, 446 bp, Glycine max
agcttatcattaatatggtggagagtattgtggcgggtgcgaacatgatatagtactgggacagcccctgtggcttttactactttggctggttgtcgatatctttgaaggcaaacaaagataaattaccaaattatgagtcaagcaaaattctaacaattcttcatcagtcttttaattttaaaaataactaaaataaattactttcttgtaaaattaagaactagttgagaattcttcatccctttcaacttttttgtttggacatgatctcactgctttgtttctcaccacgtgtataatgtgtgctattctagttcaaaaattgggattcgtactctatagtaacttttctgtggaataaattgtttgggattttctttttttgaagaatatgctattctatcagtttctcccttgtagttgttgagcatggcttctttcat

SEQ ID NO: 66669 - DNA, 486 bp, Glycine max
  unsure (1)..(486): unsure at all n locations
agtcacctgcggcatgcacgctngctgatggtttattctaggaatcttgtcgagtgtggtgtacaaagtaccctggaatcaagtataacgaaattattgtggataactgctgtatgcagcttgtttcaaagcctgaacagtttgatgtcatggtatgtgtatttacatttcaatcctggcttgcagctatttatgcacttatgtaatttgtctaatgtatttgtgcagtaacccccccgccccccgccccccgcccaagttttttttttatcagcaaaaataagtatatattgatagaaaagaagtaccagaggtacttaatacatagattagataccatgctcatggttccaaaataaaactgatgtagtttgagtaggaaccatagcatggctacatatgaaattatctaattatctactataaatccaaaaggagctatngtctactaatacataaatccctgtcggatgtgacttgaccatt

SEQ ID NO: 66670 - DNA, 418 bp, Glycine max
  unsure (1)..(418): unsure at all n locations
agcttgagaggattgatgaggacccggtgtngtcatatacgaggatatgggctacgtgggagtacgtgagctcagttggaggtgggcaacaggggatggtgggtttatgcgcgcattgtggatgtggaaagcttgttgtgcaccatcgcccgaccgccacctagtacgacatgtgatgggtaccccataatcctacaagcttgagatgaggaagtgttgaagggtgaaacttcctgcttttattgttgaccacagagtggtacctggagatatgtcgcgggggtcaggagaccttggggacgtcaggtggggtgctattgcccaaaaccaagcttgaccaatcccgacccaacccgggcatagtcggtcagtgagaacatgtgacgtacctaagcaggcgagctcctggcagtcaaca

SEQ ID NO: 66671 - DNA, 464 bp, Glycine max
  unsure (1)..(464): unsure at all n locations
agcttacacaatntatttgtctcanacttgtgtttcggaataccaattactaattcctttntaactagatgattgagaggatgcatatttatatgtgcagccctacgatgccataaccaagaatcacccatcttacttaccaaacaactaagttcatgaaataatgcatgttcaatattcaacaagtagatattacctatccttttacctatgtcaaaaacctcaccagaaatagcttcacaaatgagacaaaaattcttgttgaattaaattttgatgcctttgtcaaatagttgactaatgcttaagagattgggctttagtccattaacaaataggaaattttttatttgtgtcttgtactgatttccaatttttccttctcccataattcttcccttattggtgtctccaaaagtgacatatccttctttctttgacataagggtagtaagttnggactt

SEQ ID NO: 66672 - DNA, 464 bp, Glycine max
  unsure (1)..(464): unsure at all n locations
agcttagggcaattttagtgaagacgttagtgattaataatgagtgtgcaggcaagtgaagtcatgattcaatattctttctaaaagattcattttccaaatttgatagtaattgtttcggtttaatgtcttaacaccaaaaaaataaattttcaagacatatgtactggaactgtaaaagtatattttgttacacgtttttaatggtatacttgtctataaataaaaactagctaattaattgattgataaaaataaatgattaattttagataaaattataattttggtctctcatcattcttaaaccacgatttttattcttctatgttttattttgactattttgatctcttatttttttaaaaaaaaatctgcaataattnggtctaataatcttcaattttttatacctttatttcttttatctttatattnttatntaactaaatattntntatgat

SEQ ID NO: 66673 - DNA, 427 bp, Glycine max
  unsure (1)..(427): unsure at all n locations
agcttgtcaagaactaattctccttacagatattctctcttgtgtgaaaggccatggatggttttatatctaatgcaccctgtaagcaagagaatctcaagtttgaagtgtagacaatgtacaaacccaatttactgtgtcttaaagtttactttaattatgaataatggtggtgacaaggattgaattctttaccacttggtcgtaaaagctaccaccttgtcaagagctaactcttctaaaagcttaagctcttagttggaggtccttgaatgtgacacttattcattggtttagtggtataaggagctcaacaaaccccattttttactttagaaagagcaattctatntcattttatgttgtgaaaatttattcattcaaatgatgttctatataagttgaagttcttgaaaataacaatgca

SEQ ID NO: 66674 - DNA, 428 bp, Glycine max
  unsure (1)..(428): unsure at all n locations
agctntgagccaattcagatgacgaataactttatctcgggtgtccgattgtgtcccgtagtatatcgagacgctcgaaattgaaaactgaagctctgagaaaaatcaaacgacaataactttttactcggatatccgattgagtcccgtaatatatcgagacgctcgtaattgaaaacaaaagctctgagcaaattcaaacgacaataacttttaactcgggtgtccgattgtgtctcgttgtatatcgagacgctcgaaattgaaaattgaagctctcagaaactccaacgacaataacttttgactcggatggccgattgtgttccgtaatatatcgagacgctcggaattgaaaacaaaagctctgagcaaattccaaccgacattacttttgactcggatgttcgaatgtgtcccgtaatata

SEQ ID NO: 66675 - DNA, 459 bp, Glycine max
  unsure (1)..(459): unsure at all n locations
agcttaattaatttcttgacaggtcgtgctcatttataaccagctcacttttaaagactntattntacatcgtgcggaaatgttgtgttgagttatgtgttaacgcttcaaaggatttagctgagtaagttgccacttctaattcacctccacttccttcataactcatctgagcacaccaatcaatcatcatagttcttgcttatgagaacatgtatagatgatggaaaattttcattcaagacagtcatctcaattttgatatccaaggatcttaaacctcagctctgaatactagtttgttggaacaataaagttctcacacacactcacactatacactctctatcactctatattagaaaataagagacaacaatgaaggaattgattcagagaacatagaggaaacttataaatttgaacaaaaaattctgcactctcaccctttccattgat

SEQ ID NO: 66676 - DNA, 459 bp, Glycine max
  unsure (1)..(459): unsure at all n locations
agcttagttggatgactntntatttttattntatcttatcaatgttgaagaaaaagaagaaagaaagagagaagaggggttgctcctgtggcattattattgtgacgtgtaaagtaaaaattgccactggatgatggaaatatttatgataataccactgatgaatttgttgtgtgagtaggataaggtgtaggcgcgggacaattagtcattggacggtttttgaagtgacgcaactgcgtgcgtgcctcaccctttgtttgactgtttctattaaacgacaaccgtgaggtgagtaaatgaggagcatggacggtggccattcaaatcacacccaccaggactcaaaaaaaaaaaaatgctcaatactaattaaggcttagctntgagaaaatgctagctaacaattgaattggacattgattaaacataaacatggagtcttcaatgagaaattat

SEQ ID NO: 66677 - DNA, 455 bp, Glycine max
  unsure (1)..(455): unsure at all n locations
agctngccacccagctcgcccaggcgagctaggttgtttcctcctgaagcaaccgccttctggaggaattttctagaaggcccaagtgggtctggttgctatttgcacccccatttttactaaatactccccttgctcttttttggtgattctttttccgtaacgttatgaaactttacgaatttcgtaacgatgattgttttctttccgtaatgtagcaaaaccttacggattacgtaatcatcccctttttaccttccggagcgttacagaactttacggattgcgcactaacacttccttttaatttctggcatgtcacagaacttcacgaattgtgctacaatactttcttttgactttcggcatgtcacagaacttcacgaactgtctagcgatgggtgccaagtacctcgaagtggtcaaacgagggtcgcatcccaacaacggatggt

SEQ ID NO: 66678 - DNA, 436 bp, Glycine max
  unsure (1)..(436): unsure at all n locations
agctngcttctacanaaagaagaggaaacgaggttatgtgctgctgaatcacgactganatccatctctacatcattcttggtttggtgttcttcgttcgtcattcggttagtctttgtttttaagatttgaatatgatctatacacccttaaggggtcccctttgttgttttgtgcatattcatttcctccttctatcatcaataatctcttttctttttgtaaaactcaatcttaaccgatcattagcgttgcaaagttcttttctaaagacagtgaaagttaatgaaaccaaaagtaaaaccaactcataactaacttcttttttatcaaacatcactcgagttcattntaaggtccaatgccttaacgattctctctgctttccaaaaatttaaaagaattgtttcaagggccaacaccttaatgattctct

SEQ ID NO: 66679 - DNA, 464 bp, Glycine max
  unsure (1)..(464): unsure at all n locations
agctntacagcagaatttagtaatgacccactattctataattaaaataacttaatgccattaacctagggaattaaaaaaacttaatggctgagtgtaactgaaattgtggcaaccaaaagtcacccccaacagccaacaagtcagccaccatttggtctcccaaaaggctgatgcctaggttgccaattgggcccttattacaacttgaactaaacctaactaaagtccttttagttgattaacccaaaacatatttttggtcagccaactttacaaggattgggccattatttagacaaactaaacactctaaaattgaaacaaagtggtgtcatttagtcctcctccatttgggccatgatacaactcacaaccttggacttttctccttgaaacttgngcttgtattcaaacagtatggacagcacttgttgaagagcttccttggatttccttgctct

SEQ ID NO: 66680 - DNA, 467 bp, Glycine max
  unsure (1)..(467): unsure at all n locations
agcttaagctcaattnttagcaggaccaatatcatatttacctattngataaaagatatattaaaaagatattgctaacgttgcacaatatcctatacatgcctaacatgccttataatgggacagtaaacaatgagctaaattagcaggggaacgacgatgatagtcaacataattcataacatggaacaaggtcaaagatgtaaatctttgcatgttctttagggtacatttaagataatcaaatgagcaaaggcaaatggaacacggaattccttttaatgactaatatggcagcaacgtgccatattcanattcttccactagttgcccatttcattttgtactcccttgacagctagagcttgctgtaacatgtaacaaaagcaagtttcatcttatagcattcagtcaaaaacatatgccagacgaaggaaaataaacaaaataacaatgcttattatata

SEQ ID NO: 66681 - DNA, 487 bp, Glycine max
  unsure (1)..(487): unsure at all n locations
attcttaagacatctgcggcatgcaagctggctatntaatcgaattgcatacgatnattatttatgtgacatgaaactgccgcacaatatcataaccctttttcgtggtgttctgcatagagtaataatatcatatattttgtcaaagtggtaggacattatatggtgccaccgtcatctattaggggaccaatcttatcaaatagtcgttaaagggtttcttcgtatgccattggtgtcacaaaagaacctgattctacaatcattagcatcactttccctttggcatcaattgatgaccttgtacatgtatcccaataaaagaagaaaaggcaaggaaatatggagctagtcaatgaccaatatcttttacttcgtcccaacaacatgttaaagtatgagcaagatgcatcagctaaaaggtaacagcaagtgatgtctcaagggtttttatttgtgttattaacccatcaaaccgattatagat

SEQ ID NO: 66682 - DNA, 444 bp, Glycine max
  unsure (1)..(444): unsure at all n locations
agcttctagccaaatggacttaccttgaattttttttctttgatagcccttttgagccttgtttccctttccttgctttgaagctcactacaagccttaagtgaaaaaccatgatatcaccatgtccttcaggaattttggagctttggaattgttttaggaataagtgtggggggtttttgtttcattggataatatgttttgttggctatgcttcatgatgtattttgggccatacttgatgtacattgtatattggttaaatgttggacatgctgaatgagatgttgtttctcaaatgctacaaaaaataataataataataataataataataataatagtaataataaatttgaaaaagaaaaagaaaagcaataaagttgagtgaataagatcttaaatggaaaaagaatgatgagactcttgngtctactctttatg

SEQ ID NO: 66683 - DNA, 297 bp, Glycine max
taagtcacctgcggcatgcaagcttcagaaagtgaacccttgcatcctatttatattccactgcagaagccacaatgagaaaagcttgtgtctcagttcgtgcccgatcagaagctcccatggtacgtattataattaaatataatatgttctcatcaaccaattaattaagttattctcaaactgaattatctgatttatcattgttgcacattagtgatgggtgcctatgcataacatatggacttttaatggataaagcgaatacatgccctcgagcatactacagatgcacga

SEQ ID NO: 66684 - DNA, 466 bp, Glycine max
  unsure (1)..(466): unsure at all n locations
agctntgcttagaagaccctcctgctntctctttctatgataagggtggaaacttccatcctaggtcaaggttatggcaacaagttgatgtttgactcaaaaggcttgcaaatggcaggacataatgtatgtggggatatctgtttggccagacggctcacaaagatggggatgcccaaatcatttccacgaaacacacatcatgatgattagaaattcatgcaaaatttaattatagcacacattcatgcggacactcaaatataaggctttgtggcgatgcaaacactaaggcttagggttcatttccacattcaagcctaactagtgttccaacgattgctcttttatcaagtcacacataacatctgagtccatttggcattcgggaaagtctttcgttgttttcaccctctaggtgcacatttctttttttctttttcaaaaacctttcgtgtttcgatct

SEQ ID NO: 66685 - DNA, 467 bp, Glycine max
  unsure (1)..(467): unsure at all n locations
agctnngtaaaacatgcactgaataatactatccacagaatcaattgaatcctaaaaagatggaataagaatacttctcaccctcatcatatgtagattctcatgaggtcttaacattgagttgccttgtacagtaccaactccagagtgcatatttacagggcttgacataccaaccatactagaggaaagcatacttccagaattacgcattgatggtgatgccattccttgaaacccaggcctcattgccatgtttttattaattccacccattaagcccataccatttccaccaggaagcatgcgaacaccatgatcacttccagaaagagtccctgtaactggcatactctgctgaatgtttcttccagatagcatttgattgtattgtattctctgttgctcatccactgatgaaggtgaatttctgggaatcccatatctaccacccctgaacaaaagca

SEQ ID NO: 66686 - DNA, 454 bp, Glycine max
  unsure (1)..(454): unsure at all n locations
agcttgacctgaactgacctatntaattaaaaggttaggcttagactntnttaaaagtctattaaattaaatagaccaggcttaggcttattaaaaagtcttataagcctgataggccggcttatatatatttatattattttttgggtaccaatatatacttatattattttttgggtacaattaatttttttttaaactatcagactttgattacactgttccataacttttattcctataatcaggtaagacactttaattacaatttaggtgtgagtcatgtgcccctttatatttctcattaagagtaaagtgatattaaagatttaatataaagaagacttttaaaaagtctatcaggtcagactatgcttttaaaaagatcagaccgagccaaaataaaagtctntgataggctataggccagattcaggtctcanaaattcatagt

SEQ ID NO: 66687 - DNA, 452 bp, Glycine max
  unsure (1)..(452): unsure at all n locations
agcttcttagtctcacctgatgaagatgaattcgtggctacttcatgcactcctctaatgacaatagcatcaattntggcactgaattgctgggagttggaagccatcttctcaattaaatttctggcttcagcaggggtcatgtctccaagggctccaccatgggcagcatctatcatacttctctgcatgttgctgagtccttcataaaaatattggagaagaagctgccctgaaatctggtggtgagggcaactggcacataattttttaaatctctcccagtattcatataggctctctccactgagttgtctaatgcctgaaatatcttttctgatgaccgtggtcctggaagtagggaatatagccagtcctttgccactccttctaaagaatgaggaaagaccttcagaaatatgtgatcctcctggacatctggtggtttcatg

SEQ ID NO: 66688 - DNA, 491 bp, Glycine max
  unsure (1)..(491): unsure at all n locations
atcctcagagtcacctgcggcatcaagcttanattaaaattaatagaatttggatgatatattgaataccaagtagcatgaaattgtgttagaaaacagtttttaaaaccaaaaagcgacaagagaatcaaacacacacttatcttttgttttctatacattttttttccttttgttaatttgttaaaccatggttggttgcgagactagttcaggggtaaaacaactaaaacttgagttttaagcctaccaacatttgctattaattttttaaagtaaaaaggccatacatgttacctataaggcctcgcatatcactttttcctttaaagtaaaaaaagtctctttcaatttttgttttagacctcactttttgttgaaccgatcctggttgattgccacattgcaggttcagcatggatggttttatcgcactcctttgtagaatatgttgtgtggggttgggacaatctcccaaggacccttcttat

SEQ ID NO: 66689 - DNA, 485 bp, Glycine max
  unsure (1)..(485): unsure at all n locations
gatccttaagtcacctgcggcatgcaagcttcgggcctaagagactttcttagagatgcattctttcctctctntttataatgaatgtgtattcgatattcaattgctaaaacctttcatttcattccctgtatactttttctctttgatttggcttttaattttcacaattgccttctcttgacagaatttactgtatattgtaatctttatttgtacaacttttgtttttctgtgtgcttgactagagggtttctacttgcagtggattgaggaacctgcccttctggtgacacgttttgagtatgctaatctttttcacactgttacagactggtacagtgcttatgtttcttctagagtgactggtctgcctaatcgaccacatttgatctttgttgacggccattgtgcggtatgcatgatcagttttgtttatttgtttcatttaatttcaacattctaatggctgtggttgcattcta

SEQ ID NO: 66690 - DNA, 469 bp, Glycine max
  unsure (1)..(469): unsure at all n locations
agctnngatattgtttctctggcaaacatcacaatgtgtgaatgtattacataatggtgttcttcatccncttccaataaaagtttgcagcatggagcttatatgtcttaataaaacccaagtgcccccctaccacagtagaatgaaagtctgctaagagtactggaatcatagcagaagtcttgggcaacatcatgcgccctttgaagaagatgatcccatcacgttgaacatattgtggcaccaaagctggattagcttgaacttgggcggacaattttctaagttctggatcttgctggtcctcggtgcaaatggtggggaagtccacccatattgggcttatggaaatgcccctaactctcctgaacccatttgacgagaaagagcatcagcggtcttgtttttcggcccaagctcttatacaccacttcgaactggaaacccatcagttgtaccaaccaacact

SEQ ID NO: 66691 - DNA, 465 bp, Glycine max
  unsure (1)..(465): unsure at all n locations
agcttgaccaaattcaaacgatgagtaacttttatctcggatgtctgattgagtcccgtaatatatcgagacgctcgaaattgaatgttgaagctctgaccaaattcaaacgatgataactttttactcggatgtctgattgagtcccgtaatatatcgagacgctcgaaattgaatgttgaagctctcagcaaattcaaacgataataaatttttactcggatgtctgattaagtcccgtaatacatcgagacgctcgaaattgaatgttgaagctctcagcaaattcaaacgacaataatttttttagtcagatgtctgattgagacccgtaatatatcgagacgatcgaaattgaattctgaagctctgagctaattcaaacgacaantaacgtttgctcggatgtctgatngagtcctgtaatctattgagacgctcgaaattgaattctgaagctcagag

SEQ ID NO: 66692 - DNA, 390 bp, Glycine max
atctctgatcacctgaggctgcagcgtgaacccggggtgggcatcgaactttatctctttcaaatccttggggagtattcgcattgacctctcaagttgaaaccgttcatcaactcgttcaagaaagtatccatacattatagaagcagcatacagctgtcccaggagaaatctactaattagaacaagtgtctggagaggagcccgcttgcgatctcctaaaaccagagagaaatgagtctgaatgatctccaatgcctatggagaatgaacgcgttctagtctcagctcttgattcgtgcatgaatccacatcaccaaaatgatctgatgttgctgatatttatgggatcatagaaatgtcgatctctaaaaatttatgcacaattga

SEQ ID NO: 66693 - DNA, 386 bp, Glycine max
  unsure (1)..(386): unsure at all n locations
agcttncaaanacgatagaagagacataaatattttcaacaatgatatctatacattntttgtttttacctggaagagacggggtttaaggctctagcaaagccactcatggcaccataacctttggaactaaatcccaagcacccaagcaagccctgcctataaggcaaaaaagttttccttctcaactcctccgcttgcgctctgttggctttataatgcaactcgtgcggcgacgccgccggcactcgcttcttcccgatgccgttagtgggctttccggcgaccttcttgggcttctgcggcccatttccctgattttggggcttcttgtcctttgcggcgggggaaaaggaaatagtggaccagaacttgttattactcct

SEQ ID NO: 66694 - DNA, 463 bp, Glycine max
  unsure (1)..(463): unsure at all n locations
agctnggcactgcagatctgatctgcgtgatccttatccacgtacattgtgtatgctccggttgagtcggtgtaccccttcttcgtgtacacaacctcgttgctaaccctgctcttgcattgcaacataatctcagcacctgcaaacaatcattaatcaaacaatacgtgttacaaactagcaacaactactaaggtaatgtttccattcacattaaatcattcaaaattaccttctaatatgtaattataaatatatgttcacatgtttagtctcatgccaaagaaatgatgttagatctaaaattaattttgactctaattttatttctaagttgcttccagaataaaaagatccaaatataaataactttacttcaaatcaattttaactaaaaccaacgacggaaaaacaattntgcaataccaatgaataaattaacaagtagctactatcatcgagt

SEQ ID NO: 66695 - DNA, 418 bp, Glycine max
agcttgacatctcatgctgagcgagaaatgcttgttcaatcagagttgcagacaacgctaagtgcgtgtcctcgcgctaagcctaaatacctctctggaatttgaaattattgaattgggcttagcgcaagaggtggcactaagcgcatgggccttaaactcaaacatcatgttggcaagctaagcgcgccaaacaaaaatgctaaaataaaatagaactgccaatggcagttaccatttacacttcaaagcttttactcccttgtgcttgtgcccacattcgtgcttttgtcattttgttgcctttgcttcaagttattcttgctttcttgctctcatcttgcatttccatcacaatccaagaaagttttcttgtttattatcattttcttttcaaagcttacaccttagggtagat

SEQ ID NO: 66696 - DNA, 457 bp, Glycine max
agctcgatgcctctctgataacccttttacttttgggatctttccaatatcttctagcatcaagtcaagacaatgtgcaacacatggagtccaaaatatttttggtctcgtgacttgtgaaattctacctaaaaagaccaaaatcaataaacttgtatgagtagtgtaacaattaaaagttataactacaaaaaaaaacttcattaagtatgattgaattctcacccgccaacacataattacttccattgtccgtcaccacttgaataacattcttttctccaatctcctcaacaaagctatccaaaagctcaaagatcttctgaccagtcttcatgtattcagaagcatccacactcctcacaaattgtgttcccaaccaacaatttaccagaaagttaatcaaagttctattcttcctatccgtccaaccatctgacataattgaacacacata

SEQ ID NO: 66697 - DNA, 468 bp, Glycine max
  unsure (1)..(468): unsure at all n locations
agcttaagactaattntatgggcgatgaatcactatttgttacttccacataaaactaacatgagtatcacaagatacatgtaatgttttcagcttaggctggtatcatgactaagtgctatgcattggcaatctttgagattaataatgaaattagaactaaatattaagcatagatgagttactcaggaatattctagatacataaagaaataaaatagcaataagcacaagtattattccattaactacaaacatatcttcacatacgcaaagttattttcatgaaattcaaagcctatataccttaaacgacgatgtttccaactacaaaattttcacgttccttgaagtcaacgaaaacatcaagtgaaacaaaaacacctcgatctccaaattcgtcagccaaaaatagatgaaactgaaacaggtatttgttttcaaaacaacataaccacaaacatcggg

SEQ ID NO: 66698 - DNA, 456 bp, Glycine max
  unsure (1)..(456): unsure at all n locations
agcttctagccaaatggacttaccttgacttaattcctttgantagccctttgagccttgtttccctttccttgttttgaagctcactacaagccttaagtgaaaaaccatgatatcactatatccttaaggaattttggagctttggaattgttttgggaataagtgtgggggattttgtttcattggataacatgttttgttggccatgcttcattatatattttgagccatacttgatacacattgcatattggttaaatgttggacatgctgaatatgatgttgtttctcaaaaggctacagaaaaaaaaatattataaaaaaaatcgaaaaagaaaaacagtaaagttgagtgaataagaaaagaatgatgagactcttggttctactctttatgntttaaatttatctttacttctttntattttcttatgttttcttaatatgcactta

SEQ ID NO: 66699 - DNA, 457 bp, Glycine max
  unsure (1)..(457): unsure at all n locations
agcttccatcaagtggtatcagagcacatgagcttcaagtaggtgctccttanacctccattaattnttntgctttaccttctcttccattgttgnttcttcattttttctccatgtatctcctcccatgtcttgtgataaatgtttttaacatgattctttagagtttccaccgattaaacttgctatagaagctagatttgattttctatggttcanatttcttgttcttgttcttgaaccatgaattgtgttgagtttaagttcatttgagttttgtattgttattttttgtggctgaaaactaaaccataaaattcttacaaaaatattaaagtagaagacaacctcacaaatctagagtgacttgttcacctattgtagttgtcatagaagtcatgtctagtcatgaaacttgtcacataagatttcttatgctgtgctgaattttattttc

SEQ ID NO: 66700 - DNA, 465 bp, Glycine max
  unsure (1)..(465): unsure at all n locations
agctngtagaatggctagacatgatacatgtcatggtttggtttggttcaaggataaaagggatgccccacattatttccatgacacaaatgcaaagatgatgatttggaaattttatgcaaaactggtcatgcatgcacctatgtggacgctcaagtgtcaaatttttatggtcatgtgatgctagggctcangattcatttcctctattttaaatcaacccaatgtttccaaaatatgctcttttatcaatttatgcatttatcctagttcatttcgtgcgtccggggaaattttcacagcattcacccttcaggtgtagacacgttttttcttcaaaaatcggttatgatctatgaattttttttttcaaagaaaagttggaaatcatctcttttcaaaagcatgtcggtttttagctagacaacttatnttttcttttttctccttctctttnntttttat

SEQ ID NO: 66701 - DNA, 443 bp, Glycine max
  unsure (1)..(443): unsure at all n locations
agctnttagacactntgttctttgtctttgtgttattattggttgaatattaagaattcagaggatatataacaagaaagtttaagataatgcaaatactttgtctttggcaactataagtttttcttttgggcttttggccttctctaattcctattgttgttggtgtacttgataaccaactaaccatgataaaccaaaatgataaactaaccttgcaggtcaaagcagaaaaagaaaataaaccttacgaattgaaaccatacaaaactatttttcatttataatgtctattttactatttagattttttgtaattcatacatgtattaatttttagctactaatgtcctattctctcccccttcaggcaagctcgtctaacagtttggcttaattcaaggtacttgaccacttcgtcacatgggatttntagagaaatg

SEQ ID NO: 66702 - DNA, 440 bp, Glycine max
  unsure (1)..(440): unsure at all n locations
agctngagctgctagatatttcngattgttggagttttatatttttacattctctaagcaacaatctacctgcatgtttgatagaaattcagtctatatctttatcctatgttcctgatttaatttatattttagttttagaaagtctcttaaggcttaagcaaatcaaaacaaaaataaaacctttaaaatactaagcaattagagggaagaagagtgttgtttgtatttcagtctaataaatatgacagaaaattttgcacgttacatttgacatgcaacgatatggtctttatggttgatccgaaactcaactattgtttgtatgattcattagttggatttcgtgaaggttcactaattggatttaatgaaggctttnttccttcaccgattgggcaataaatctagctgtatgtacctctatgtattcttagcgc

SEQ ID NO: 66703 - DNA, 447 bp, Glycine max
  unsure (1)..(447): unsure at all n locations
ttaagcaccgcagctgcgctgcctaagagtccaggaggacaggttctcattgaactagttccgctccggagtatgacagtcaccgctttaggagcgctgtacaccagcagcgcttcgaggccatcaagggatggtcgtttctccgggagcgacgcgtccagctcagggacgacgagtatgctgatttccaggaggaaatagggcgccggcggtgggcatcactggttactcccatggccaagtttgacccagaaatagtccttgagttntatgccaatgcttggccaacagaggagggcgtgcgtgacatgagatcctgtgtaaggggtcagtgaatcctgtntgatgccgacgctatcggccaactcctatgatatctcgtggtgttggaagagggccaggaatgtgagtatggccagaggaggaaccggtctgatgtggtcgatg

SEQ ID NO: 66704 - DNA, 464 bp, Glycine max
acagaattattatgatgctatgcgactgttatttgtttactatgatcgaagtcatatacgtgataacataggccttatccacacaagtaacggagaacatactaaagctttggagctatgcattggggcgctcgagcgataatcatgcttaccccaagctataaataatatggccgtgatctgtcattacgtgcgactatctccactatagaaagaaaaaagaaaagaacaagctaatccacaaatactaatataataaatactagaaataaaggctttctacatatacatatatcgatcaaaacaacgatttttatcagctgtagcaaagaatgaaacttcctatgaagtaaaatatgaagaaatcaatatgtctagatactcccttttctatggataaaagaactaatagatgaaggaagcatcgtaaggatccattaacgcggctttgaaccgatacaata

SEQ ID NO: 66705 - DNA, 230 bp, Glycine max
gctctcgatatatcttcactcacggccaacatgatggacttggtatcttgcgacagaggccacgcttgccctctggggcaccctaatgcaaaattttaaggcaactacaccgagctcacaaccatttcttaatacacatacccaagctacgaacttccttcttttagtatcgtaccactaaacacaatctccatttgaaagccttccagaaaaaacacactggtcacaat

SEQ ID NO: 66706 - DNA, 417 bp, Glycine max
  unsure (1)..(417): unsure at all n locations
agctntgactaattcagaatagacaggtaatttctgagacataaatggaataagattggagttttcaaatgcttggaagcattcaaaattctcattagagaagaactccatatctatgaattttgggtctacaatggaacgagaggaaaagaggtttgtgtaccttgtatgctgttcctcttatgaaaataatgatccagagggaatggagggaggaattgnggcttcctgtgatccaaaatgccgctgactccgactcgaggttcctttccgcttttttgatggttctgccatttgaggagtgtttttgggatttcaatcggttcaaatgaaagagattgaaaaaagatgaagtttgggctttacggngagtgatttgggcaagaattgagtgagatatggcaggaagaaaaattg

SEQ ID NO: 66707 - DNA, 335 bp, Glycine max
agcttgttaaccagggctacgcgtggcggttttatttctgtttccatggctggatccctagtggagggcgtattatctcaactactctactgcgaatatgattgcatgtatatggtggagaaaaaccgttaaagcgacgccattgtgagctcacatatacagcctacatataagccccacaagctgccttccatcacgattaattccttcctatctactctctcacttatgcgtgcgcaataagatttcacattaacttgtgcgtaagttcctcttctactccgcattctgttgacaatttacaacaatccttcttatagtgatgactcattttt

SEQ ID NO: 66708 - DNA, 432 bp, Glycine max
  unsure (1)..(432): unsure at all n locations
agcttcgaagaagtgatgaggacaagttcataggcatagcttgaaagagcctgggtagtcgaagagaagttcaagtccatagccatcaaagtctgaaaagagtatgatgaactaagggatgtcaatatggccaccgatgaagccttggaatgagaaaccaagaaggcccgaaaggaagaacacgaccaaatcaaatttttgaggggctntatagggcagcaatagtgagctcaaactccgaagaggtgaaaggaatcatcacgggtcaaaggcatgatctggaaggacgagctaaaggcttgccttangtcgaaaagaaatttgtcccaacagttaaggtgagactgaagggaatatgtgggccatcatcgataagtgcaaagagaagctaaatctagcggcgactcatgagcaaaggctagaggatgagta

SEQ ID NO: 66709 - DNA, 456 bp, Glycine max
  unsure (1)..(456): unsure at all n locations
tgcaagcttgagccanaatcctgactcaccatanaccttgacccagggtgagaatgccaatccttaccctcggaagcaaaaaaaaaaaggagaagagaaggaaaatttccaatcaaagaggaagcataaaaaggagagaaggaaaatttccaatcaaagagaaagaaaagaagaggaaagaaaactcccaatcaaagaatgggagaagaaaaaaaaaaaaaaaaagaagtaaaaaagaagaaagctcctggtcaaagaaactagaagaaatgtgcagaaaggtcttttgaccggacgatatctgaacaatacagaattgtcaccaaatgaacaaaaaaagaaggaaaggaaatcacgacctanaatggtcttctccctttaattaccaaccaaaatcccgtgcgctagcgacccttttttctcgccccgcactaaacaaaaaaacagaanaagaaa

SEQ ID NO: 66710 - DNA, 484 bp, Glycine max
  unsure (1)..(484): unsure at all n locations
cgaccggaccttaagcaccgcagctgcagctttagattatgggacccatttatgtggtactaggtggcggtcgggcgatggtgcacaacaattctccacatccacaaatcacgtataaaaccaccatcccctgttgcctacctccaactgagctcacgtactcccacgtagcccatatcctcgtttctctcaacaccgggtccccatcaatcctcccaagcttccccaacatccaggtaatgcaacatccaaatcatcacaaactaacaaaccaagcaaaacagggcaaaggcagaaaactctgcccaaaactcaaaccaaaatcacagctttttctcacttaaagaccccagtaacatttccttcgttccaattcgttaaccgttggatcgactccaatattntactggaagtctctagtacataagtctacattttgaccggtgagatcttctagtaaacatccagaactcattctgtacta

SEQ ID NO: 66711 - DNA, 452 bp, Glycine max
  unsure (1)..(452): unsure at all n locations
agctngttagttgtgactggtgttagctcttatttntgataagctaaaatatgctctaaatacgtattagatgtcgtcttgagttttgaagcgtattaaagagcaagaatcttgtcagagtctgttgaatcgaaaagaaagaaagtgctattagaaaggattcacaggttcaaggaagtatttacaaaatacaaggctaagacaagaaagagggcttcgaaccattgggcaaatcgagctggcgtatggtcgaatcgaagtcaaggcaacaagatttctggatttggcgcaatttctgacaaaacttcacaaaattagttcgacttcgagcaatgtgggtaaccgttctaaggagcagttatgtgcatgcaaggtgtacgtagcaggacacttggcattatgatagtattcgaccgttagggcagtttattttcgaatgtctatatatatca

SEQ ID NO: 66712 - DNA, 465 bp, Glycine max
  unsure (1)..(465): unsure at all n locations
agctttanaatntatattcanatttctaaaagcttttacaaacagtttaaacttctagtaattgattacataccttgtgtaattgattacaagcttttaaattcaaattcgaaaatttcaaattgtcttagaaatcaatttagccactggtaatcgattacatcctctggtaatcgattaccaaagaggaaatatcatatttttgaaaagataattgtttaaaaaacttttgtaaaatatttcctttagccaaacctgtgcaacatcaattaaggaattctttctaagaccctaactaagtacatcgctcttcttgcatttctgaattctcaacttcaatcacgctcatctttggcatcatcaaaacttcatatcatatatgcttctacaatctcctcctttntaatgatgacagtaatctgaaatcaagataaacaatataccattgataatgcgtgctcacaa

SEQ ID NO: 66713 - DNA, 405 bp, Glycine max
  unsure (1)..(405): unsure at all n locations
agctntgagtttcttcattntcctttgcagatgtttctttgctagcataataaatatatacaattatgttcatccttttctcttagtagcttataatttatttggcataattttatcatctgctttaagtcatttttcacaattaaatagaagacctattgtaaattaattaagattcaggattttcttaattagttcagtatattaaaacgaatgttagcatttagtaaattntaggtttggtttcattctaaaatttattttttattctatcaacttttaaataaaggttctcacatcgacaaggagattcaaacacatgtccatgtgggatataagtccaattcttaccaaatggactaacatttgttggctcaactactactacctctatcaatttcattg

SEQ ID NO: 66714 - DNA, 492 bp, Glycine max
atcctctgagtcacctgcggcgtgcaagcttgaatctgaagctgaacacaggcagctgtcatccattataatatgaaaaggaagaagctgcagcatgatctttggtcagcagcccacgctcacgagtctttaatgaggcagaaggcgagatcactgttaaaatggcttgatgctggttacaaaacctgccccaagacacagcagacacttgtgcatacaacccttacccctaactatgttttgaagagtttgattgctttgtggtgtgaaagcatcggtattgagctaccaaataagcaggggaactgtataacaaacaaatgtggtggcagcagtctttcacattgtgatcgaactgctattggtgctttattggataaactaacgagtaatgatatataacagcgaaaggcacgtggcggtgagcttccgttgctgggtaaaaagaatgctcacatcctactatgcattgctgaggtacgagcactacca

SEQ ID NO: 66715 - DNA, 481 bp, Glycine max
  unsure (1)..(481): unsure at all n locations
agtcacctgcggcgtgcaagcttatgganaacccttcgcattgtagccttttattatcccgcagaaacccaaaactgtctcggtaaaactatgatcccgatttcgttaaccgttggattttcatgaaatttggatatgttatttgaaattcaattgtgcacactgccaacgttgagatttgcgagataatattcgtggagggagaaaaaggaatcgcatgaagacagtataagtagaggtttcaatctcttctccgtctctctgacgtttgagaactctatcggagcagtgggaggaataactgaaggaatctcagggaactgctatagatgctgctatcgctggctgaagacgcgtgagtccgctcagaggtaagggatgagttattcacaattggggattagtgagaacatgtgtagggatccttagagatatcaatcggaatgagctttggggtgttttgcaattntcatctatcctt

SEQ ID NO: 66716 - DNA, 469 bp, Glycine max
  unsure (1)..(469): unsure at all n locations
agcttcaatggagaatgaagaagaagaaagctacgttatagagggagagaaaaggcttctgaatttctgctttggctgagtgaggagagagaaaagctttttggttttaaataaaaagggttttccctttttccattattttattcaagctctgccacatgtccctatttgattggagcaaaaagggcccactttctctttttgactgtgacccatactcagtcacaaaagtgagaaaaatctgacctttgaaacgctacaatcctgcctcggtttgcgtgccgtttctctgattccagtttctctgcgtccgtcggggccagttttcgaaagcaagcaatttatatatcaaaacgctcagaataaaaccccgagcatggttcanaggttggtttcgttaaattcttaagtgcacgcaaaacgatgatttttaaactaattaattaagaattaacccataacctctcag

SEQ ID NO: 66717 - DNA, 382 bp, Glycine max
gaccagctgcgggctgccagctagccacccagctcgcccaggcgagcgctttttcttcctccagaaacaacaaccttctggaggaatactttgtgtggccgaagacgacctggtagatacaaacacccaaatttcaactaggcacacacactagcctatccactggtgatccattacatgctctggtactggaacaccagagaggaagaaccatacttgtgaaaagatcattgcgtaacagacccttgtggaatacatactttagccatacctgagcaacatgaatgaacgaattctttctaagacgctcaactatgccatcgttctatttgcattgcggaactcgtcactacagacacgcccatcataggcatcatcagaa

SEQ ID NO: 66718 - DNA, 460 bp, Glycine max
  unsure (1)..(460): unsure at all n locations
agctntaaggaacatgaacattaggtatgcttatattattttattgcaaattnttctttcctggaataagtgaggctcttgaccacccctcctacttaacattcaaaagacaaaaatcatattcaccacccctcctaaggaaattttttattcgaagtatcattcttcgtcagtcaaaataactattttttaatattttctttcaaactcgaaggatatgtcggatcaaatctctgcaataacatgttctgattgtacatatatatattgataatcaatatctagatactagaaaacgtttaggtggaataggcatgctatttgtagtaatttcattttcaacagttatgaacagaaaagctgcatatgcataacgtgtagaattaggatgaactaagtatgttggtaaggaaaggatccttttgccctntagcagaagataaaagctacttgaaaaaat

SEQ ID NO: 66719 - DNA, 466 bp, Glycine max
agcttatagaatatataataagagaactattattattgattaatatattcatgtttcctttgatgagtctaatgctattcctccaagaaaggacattctagatgatattgtagaatctttagaacaaatgcatatttatggacaatattctaaaggaaaagggaaaggaagaaatgaagatcctccagaagaagccaaatcaaatgatgaacttccaagagaatggaaagcttcaagagatcatccccttgataacattattggtgatatctcaaaaggggtaacaactagacattctcttaaagatttatgcaataatatggcttttgtgtctatgattgaacctaaaaatataaatgaagccataatagatgatcattggataattgctatgcaagaagaactaaatcagtttgagagaaacaatgtgtgtgggaactagtagagaaacctaacaactacccca

SEQ ID NO: 66720 - DNA, 467 bp, Glycine max
  unsure (1)..(467): unsure at all n locations
agctnnggagcattgagttatatgcttcaacttgatgggtagcgttggaatttcacatattgtatgagtagttatttcacacattgtatgggtagttgttccaacaaagaataattattaatgtacctagttagtcacatattcatgtatctaaaaattcacatgcatgtacataggtactagaacttcattaatattcttgtaaatttcacattgtatttactctctatgtctatataaatatagatcagctgagtgggttaagcactcaagcatttcacaacctctagtctcttcaataattagaaaccggatggaagcttcatcctatcccaagtgaaatcgaatgcttcattcctatcccaagtccaaaattagtgtacagataccgtaagatatatcctatagaaatataagaacataatgaataaagtaattgaatcatcagaatacctactcttaattgg

SEQ ID NO: 66721 - DNA, 385 bp, Glycine max
  unsure (1)..(385): unsure at all n locations
agcttgtcttgtcagaatangatttcacagatttctagcatgcactacggtattctatagcaaggacacgacagtgctaattttgagatataagctctggaggcagtaagaggagtagctttgcagagaagcctacggttctttaattagaaagagattagtgagttgtatagtgattatgaggtgctgagacacccttggttgggaatctctaacgaacaactgatgtaattactttaatatctaattaattgcgttatatgtgttcaatgcttctttcaatgcttaatttctgcatgctcttggtctgatcacccatttgtgtgtacagctaggtgactttagcattgagaaatgtactattgccttataacttgatagaagc

SEQ ID NO: 66722 - DNA, 459 bp, Glycine max
  unsure (1)..(459): unsure at all n locations
agctggaatcggacatccgtgtgattagttatgtctcatttgaatttctcaagagcttccgttgttcaatttcgatcctctcgacatattatgcacccgaatcggacatctgtgtgaaaagtcatgatcatttgaatttctcgagagtttccgatgtttaatttcgagcgtatcgatatattataaccctgaatcggacctcagtctgaaaagttatgaccatttgaatttgacgagagcttccgttgttcaatttcgaatatcactgtatgtgatgcgcctaaattggacattcgagttaaatgttatgaccatttgaatttctcaagagcttccgttgttcaattctgagcgtctcgatatgtgatctgcctgaatcggacatccgtgtgaaaagttatatccatttgaatttctcaagagcttccgtngttcaatttcgagcctctcgacatatta

SEQ ID NO: 66723 - DNA, 469 bp, Glycine max
agcttacagacctgcaattctcacacctgttgttgttatcactctcgacactggacaacacttgtccatgcttaggggctcaactgactcgtcacccttctacttgtcgaggctactacccacgacttcaaacaatctccctcgacatgggacaatctcgtttgacaatggacaacctctttcgcccacaagccggctcagagcttagggtcttatgtactgtccaagatccacaaaaaacatgtgtcatgttatgtggcaatacaagacacacgtcaaccctccatgtcaaccctggcacaggagcacaaacgatgcgcccttaacagttgggctcctcaactgacaagttatatttaacatcttaattatttgaatatattgtcatctctttatctctgggcaggtattcaaaactgcacattatctatagggtacaattatctactagcaattatctctaagttac

SEQ ID NO: 66724 - DNA, 466 bp, Glycine max
  unsure (1)..(466): unsure at all n locations
agctntataagtgcgggtctgggagacgaaggtcatgtgttcgcgatatgtgaagatgatgttccaagtactttggatttggtccgaccatgccctcctgatttccagctgggaaattggcgagtggaggaacgccccggcatttacgcaacaagcataatgtaaacctttacggttttaaaagctctatagttgggcctaggctttagagttttcattntgttaaggctntgtgtcttttgtttttgaatttataatacaaggatctttcttcatctgttcctggtctctacccattctcattcatttgcatgtttacttctttntctaaaacggcagattcgatgacgagtcccccgaaggtactaatacctgggacccgtctatcaacttcgagcaagaaatgaatcanacggaagatgaaggagatgaggatgtgggacttccttcggaactagaaagaatg

SEQ ID NO: 66725 - DNA, 460 bp, Glycine max
  unsure (1)..(460): unsure at all n locations
agctatgcgcatatttccnacgaacgtcactttgtttgacatcctatcaactaagaaaaatgcacccatatacaatcaaggtagcttcattacctagattatttacatgtacttccaaggtgtatttgttatttacatcacacacgcctccttggctgaatttacatacatacatactcaaagcattttggggtaccaaaaactgcacatgcgctcatcttggtatttctaatacccatacatatacaaacttcacgatgaatcttgactacctacacaataaggtgctacatttcatgctttctttnttttttttttttttcaagtttttgctacctaaagccacatgcaaattcaagcatattttcctttgctgactaaaattgtattcaaattagaaggtatatattnnttttgtaatatgttttcttcacataacatgcaacatatttatatatat

SEQ ID NO: 66726 - DNA, 463 bp, Glycine max
  unsure (1)..(463): unsure at all n locations
agctgagtcagcttcaaggtgcagaattgttctattggaggcatgtcatcatctttctgggcagcatggacccttctaagagtggcttcagctgcaaactgagctgccattgatgctttcttttcatcgttgatttttttaatttcaagattctgccagaaatattcgattcagaaaacataccacctaacctgngaaaatgactatttcctaaagttgatagaggcttcatgcaataccttgctttctagaagagattcggttagttttagcttcccatcaacctttgacagttcttccgtcagctaaatacaagcaaaaggcagaaaagttacatttcaagttgacctanagcatacaaacaataggacgaaatgcaaaacagcttaagaaatataaacatgtcaaagcatggtagagagtaaagcttcaatgtgctgcagtagcatcatgaaaaanaaca

SEQ ID NO: 66727 - DNA, 393 bp, Glycine max
  unsure (1)..(393): unsure at all n locations
tcacctgctgcgtgaagcttcatggagaatgaagaagaagatagctacttgtgagagggagagaaaaggcttctgaatcgctgctntggctgagtgaggagagagataagcttattggtatgaagtaataagggttttccctttttccattattttattcaagctctgccacatgtccgtatttgattggaacccatagggcacgatatctctttttgactgtgacccatactcagtcacaaaagtgagaaaaatctgacctttgaaacgctacaatcctgcctcggtttgcgtgccgcttctctgattccagtttctctgtgcgcagcggagccagttttcgaaagcaagcactttatatatcaaaacgctcagaataaaaccccgagcatg

SEQ ID NO: 66728 - DNA, 356 bp, Glycine max
  unsure (1)..(356): unsure at all n locations
agctatagccttaggttgttacatgttgctgctctcttatctttaacactggtgatgaaccacattagcgattatggcgagtatccttcattctttcactgccacatcatgtcgtgcaggcttctgtggaatgacttggtggattctgacgacggatcatagactcctctggtcttggagggatttaccatcgacatcaccagatctaatagggttctgattctgcaaggagttctagtnttcttccccgacatgtgcttcacattaccgggcggttgtccatggcgtcaccgatgctttatctacacaagacaatgctctttgcattgatgctgatgaccaagaaatactattgc

SEQ ID NO: 66729 - DNA, 444 bp, Glycine max
  unsure (1)..(444): unsure at all n locations
agctngcaacacatgttagatatgaggatggtcactgctacactaatgcatacattataacgaagcactgtttaacattagccagaggtgtcatggagcaaggcaatgtttatgttcgttcaagacaaaggagagatacacaggggagaaatggtggtggacgaggatcatgattttctattatttgattgactatgtatatgactatgattaacatatgtgtttattttatatctaaatattaagttcggtccaaaacaaacattgtgttcattacgcaaatatgattagtaaagtgttacatgtattatccatggcattacaactgtgtaagttacaaacccataaacaataacaaaatgttcaatcttctcctagatcaacatgttgtatggtcaacctaatggaactagtatgttggtgcgttcaactaatataaaaagt

SEQ ID NO: 66730 - DNA, 460 bp, Glycine max
  unsure (1)..(460): unsure at all n locations
agcttcctggccattatgcgagccatatctgggttattatggatctatccagcttactttgtgcagctatagagcgcctgaaccatgtaaatagctgaccactgcactgaccttgatgctctcttaacatacctaaccactcgaagaatactagtatacttcctatcagccaatcctctctggctgactccgactctctccgaaggatgtctaacgttattaaaatcccccaaaacgcaccatatcccgccttggattgatgatttcagctgcctaatgcgattccacaagattcttttgttttgcacatcacatggagagtatacagctacaatatgcacctgcactgcttcctttatccactgccctatcagccaaatgaatccttcaccaatgactatcctctcaagcttgaacgatatttcgctccacatacataagagacccnccgctaagttat

SEQ ID NO: 66731 - DNA, 477 bp, Glycine max
ttaagtcgacgcggctgcagcttgactgcctaaacttagaacatatttattgtatttggcatgatgagaattgtttggcattggacagagagaatgaataaggcataattttttataagtgattaaaatgagttagaacactttgatcgagtgaccggaagagttagtaaaatatttggttaaaaaaggattcttaagtgttacaatgactaaaaaaaattatacttatattttctgtatttttttaattacattcaatattttttttaaattacttttgttcttattctgttaatttgttaactaacatcaattgaaatacgtgagtagataaagttgtcttaaaacttgaagaagatacaactcttgattgagttactatatcgaacacctaactatcaaaaataaatatttcaaagaaaggagttaaaaacacaaatacacaagtaaaacactataatttgaaacaaatgatca

SEQ ID NO: 66732 - DNA, 440 bp, Glycine max
  unsure (1)..(440): unsure at all n locations
agctntcacaaaaacccgtaagtgttactgtcatattctaatttcgtccggggactattgtttgatggcatgcaacctttggttgaccgcttcgaggtacttggcgccttttgttgcacaatacgtgaagttctgagacatgccgaaaatcaaaaggaagcattgttacgcaatccgtgaaattccgtagcatgccgtaaatcaaaaggaagcattgttatgcaatccgtgagtttccgtaacattctgaaagctaaaaaaggaggaattacatgacccgtaaggttctgtaaccttacggaaagaaaacaagtatcattacaaaattcgtaaattttcgtaacgttacggaaaaagaatcaccaaaaaaagcaaaggggtgtagttagtaaaaaaaggggtgcaaatagcaaccaggcccacttgggccttccaggatg

SEQ ID NO: 66733 - DNA, 399 bp, Glycine max
  unsure (1)..(399): unsure at all n locations
agcttatcaaggatgaaagtcanaatgcttattattgttaactgaatctaggaggcatgcatgcatctattccccagtgcttacaaaagggagggttgtgctggtgtgcatttgaagagggtatctgcattttaatcttcaatgcccttgttcttgaaggaaaactgttctaattatttttctgaaagtagctttattatatttacatctttgcattttatattccaacaatttttaggcaaacatttttggtcatgcattggttggttgcatgtttgtacatttgtttgaggcaatgtttcatttttaggcaaaagttgttacatacatgcatgaagcttacaaattctattgtattggaatggncccacatatatatatttatatgtatatatatag

SEQ ID NO: 66734 - DNA, 461 bp, Glycine max
  unsure (1)..(461): unsure at all n locations
atcctctgaggcagctgcggcatgcaagctttcctacttgggagtagggtcttatattcttngataagacgctgcttgggtcttaaacaactcaacaaattcctacataaaagcatgaggcaaagagcacaatgctcacatatatcttttcattcttatacatgtattctttttcaatttgattgaaatatatatcgataatatagaaaacaattacattgctatttgattatctaatcacatattgtcatttgtaaaaatgattttctttactcttatagntataatacctattctaaaaaatcattctttaaaggttacattactctttacgccctctattttaaaaaaaattgaagatcgatcgaactattaataatgtatgataaaattggtcgtagtactgataaagcttttcccactactatgaaagggacattaaactcattgtctctttgtat

SEQ ID NO: 66735 - DNA, 433 bp, Glycine max
agcttctatggaggctggatctttaagcttcaatattgttcttcaatggtgattttcagccatggagttgcagtgaaagacaaaggagaagaggtgagaggagacaccatccactagagaataagccatggaaggagaagcttcaccaccaagaaagtgtcttggataagaaacttagagaggaagcttcaatggaggaagcgaatgagagagagagagagagaaagagagtggcatggaaattgaaatagaatagggagagaagttgaactttgaagtatgtctcacaagtttctcattcatcaaagttatgtcaagtgttacacatgtttctatttatagcatggcacatgggaagcttccttgagaagcaaggaaggttgggaagctagaggaagaaagcttccttgagaagctagaggggggctactca

SEQ ID NO: 66736 - DNA, 463 bp, Glycine max
agcttctcggctcatgctgggaacgcctctagttcatcacccgtgcagcctaaggcacccacgcagagggaagctccccaagttccaactccgaacacggctcgaccggccggtaattccaacacgacaaggaacttccctccaaagccattgccggaattcaccccgctcccgatgacgtacgaagatcttctaccatccctcatcgccaatcatttggccgtggtaactcccggaagggtcttcgaaccccctttcccgaagtggtatgaccctaatgcaacttgcaagtaccatgggggtgccccggggcattccatcgaaaaatgcttggcccttaaatacaaggtccaacatctaatggatgccggatggctgactttccaagaggatcggcccaatgtgaggaccaacccgctcgccaatcatggagggggagcagttaatgcagttgaatccgata

SEQ ID NO: 66737 - DNA, 466 bp, Glycine max
  unsure (1)..(466): unsure at all n locations
agctntaactccactcatccataagacctatttgatatttcaaatgaaaattgataatcacatatatcataaggaacattaattattagtcaatgatatggaatttacttacatcatccacaactgtagtatagctatgttgaaatattttcacctgatatcatttcatgtacatcagaatatgttaagaagaatgcatctacatcggaatccaaaatttagtctcatcccacccaataggctcttgtaaatatcacacaggttcttaatgaagtcacccaagggatcatgtgaagcaacattattcgacttttgaacaggttcaaccaatttctttggactaatatgtgaatcatatatgattaatgaaaagaagaattaacctaaagctagtaactattttttatcaatcgatgattgtattaaaacatgttaaacaaaataaaaattacctcatgtgatacat

SEQ ID NO: 66738 - DNA, 462 bp, Glycine max
agcttatattgtactgtatatgcttttttttgttgttggaaattttagcttatatttgtgaatgcacaaaaaatatatttaaaattgggtatgcctttgtgtttgcttgcatttctcttgtgctaaatttgatatattggtacaatttcttatgaaccgttaaatttatttatttgtaaataaaataaatgaattatataattcaatgattttaactattctctctcctataataggttgcatgaatgtgaagataaagtaatataagttaatgcaactgtttcctatcatattacttaaaatataattactatagtatggattatgaattttagtgaagtggacatgtatcatggtaaattattgcatattaatcatgtatcatggagctgataacattactatttaagaatttaatgcataggagtatacaatgttgattgtgtaatgaatgtgattgat

SEQ ID NO: 66739 - DNA, 468 bp, Glycine max
  unsure (1)..(468): unsure at all n locations
caagcttgatagttcaatatactaaagaaccaaagtagagctagtaatattgagacatgaactttggttatgcgaaaaactttttggatgagaaaacatatatctggatatggtttataattctatacttaagacatttaaaatagaactgagggaatcaaacttaggtcaatttaattctagtttacgatatgtactcatggttaaattttattttagtgattttaatttaatctttataaattatttagatatgttatgtgatatgtcacttaaatagttattaaagtaacatatatgatttgttatatattacatcatttcatgaataaatcttttttattatgcagaaaaagcaatggattttttaattatttttagaaaaagacattcttagacggtttttgagtaaaccgtcttcanattcttatatttttttaataaaagatattctaagaataatttttg

SEQ ID NO: 66740 - DNA, 386 bp, Glycine max
tgctcgcaaatttaatgagagatgcctttattctagtacctttgagggttatgaaaggatgtgaattgtggcatttggcagcatagtaaaatctctattccagtgatttggcgatacctatgaagcaccaacaccgacacggacaccaaacacgacacggacacgtgaacacctgtaatgtccaaaatatataacgttgtacgggtgtcgtgtcggtgtcagacactgacacggacgcatgtctgacaccgcacactactaaggactggagcgaacgtactatatacggtgatacaatgagcatatgattctggagggagctggtccactggactatcatgtgacatttttttttcttgggggtagaggccatatatataacagct

SEQ ID NO: 66741 - DNA, 459 bp, Glycine max
  unsure (1)..(459): unsure at all n locations
agctnngaataaagtaagagggattcttaaccaatgtatagtattgaacttnttttgggtgtctaccatgatagggaccttattcagaagggcagacaagcctgacgtgtattctttttggggaagattacacaaaaaatgtgtaacattaatgataaagaaagccatacgacatctgggttcacaggtttaagcatgaaacacactgcactcaaggaccagtaattagaacttagaactctgcaaattaaacagttagattttcaatcttgagtcgaatttcataaactggctcagggaaatagtggattcttctatccataatcttgagacatgcaacatcattgttctcagctcctcaaacctctatatggtcgatgttgtccttgagttgctcaggtttgacacacagtttccatcctagtttgtacctataagcaagtgctcgtacttgttgca

SEQ ID NO: 66742 - DNA, 460 bp, Glycine max
  unsure (1)..(460): unsure at all n locations
agcttatccaanagatanaactagctaatgcatatgctaatttatagaaagtttctgatattaatttctccaaaaactgaatcaaaagaattctcaggcggttagtcctttgaacacttttgtattagggaaagggaagaatcaaaagaattctcagactatgtcgttttgaattctttgacaagggagaagggagacacaaaagaattcaggcggttagtcctttgttcttttggaaaaggaagaagagagacacaaaaagaattcaggtggttagtccttggcgaattctttttggcaaagggagaagggaatgaaaaggatgaatagcacaagttttcaaggtttagaaaactagaaaacttcagaaagcttttggtacaaagaagaagaagaagttaaaagagattcaaggcttgtaaaggattggtcaaatgaatgtgaaaagtatattgaaaag

SEQ ID NO: 66743 - DNA, 460 bp, Glycine max
  unsure (1)..(460): unsure at all n locations
agctngtagatgtatgacaccttcgagttttatatatgtctgacgagccttcaatgaaggtatgcacgaatcactttatgaatccattaacataaataaagaaacttccccatgcagaattgatggttaggaaacttgcatgctatagcatacaaattaagaatcaatgggtacagagagaatatcaaataaacatgcagggtagacaaggcactaactataaataacatacttatatttttcttttctctactaccaaaaatttgaaatattaaaagtgaaataactgtggttgcatttgcatctgtaagtatctctaatgcatttatatacagaatgcccatgaagcctttcagataattattacttatacacatcagntagtataacaaaattgtataattacaagggagtgattaccagatagcttctacaagcagcctgaactttatagctgctt

SEQ ID NO: 66744 - DNA, 461 bp, Glycine max
  unsure (1)..(461): unsure at all n locations
agcttctggaagaagcctcttaatgaagtctttgtaggaagcctcttaatgaagcttctagagaaagctacatgaagctgcctcggtaaaaacgctgtccaaccttgttcaaccgttggatcttctcgaaatttgttctgcaacttcacaagacacttgtacatgatctgaccgttgggatctttgagaagatgtatggagtgtgctagaagcctcttaatgaagcttctggaggaagcctcttaatgaagcttctagagaaaactacatgcagctgcctcggtaaaaacgctgcccagccttcgttaaccgttggatattctcgaaatttggtttgcaacttcacaagacacttgtccatgatatgaccttngggatctttgataagatgtctggagtctgctagaagcttccgttcccgagagcatctcttatttaagcatttcagcctttgctttcgt

SEQ ID NO: 66745 - DNA, 433 bp, Glycine max
  unsure (1)..(433): unsure at all n locations
tagtacctgacatctcaaacaaacaaatcaaacgtaacaagacaattatagttgctatttgaatacctcacccactcaagtgtatcacacaattatgacttttctctaatgaaacactcttgccttttaccactctaattccccttgagttcttaggcaattcaagagattatggccacaacaaagaacaatttaccaatatgtgtaacgtaaggctagagagacaaggaaaaggttaaccatgattttaggcacaaatgaagggaaataaaatcataatttatgaattcaagtaacaatccttcatgcaaccaatatattaccttaaagagatntttnttaaagttcttcaagcatgaaccatncagnccaaaatttttttnttttaattntgcttatacgaaaatcttgttcttttttttttcttattttt

SEQ ID NO: 66746 - DNA, 442 bp, Glycine max
  unsure (1)..(442): unsure at all n locations
ctccttgcttgacacttcngaaccttctggttgtgttatatagatgtcttcctctaaatccccatgcaagaatgcagttntaacatctaactgctccaagtgaagattctctgcagctattatgctcagaataactctgatggtagtcatctttacaactggagagaagatctctgtgaaatcaattccttgtttctgctgaaacccttttaccacaagtctcgccttgatcttctttaccgtagattcttctttacctatgacccacctatctgaacgcttcttcctttggaattattaaagacacgtttatttttgaaggagtatctatcttcatcgtgctccactcatatgcattccttggagctactgccatttgctaccactagtacacaatagcatgagggtaccattgggctgaattctaattttgagaggtgtt

SEQ ID NO: 66747 - DNA, 460 bp, Glycine max
  unsure (1)..(460): unsure at all n locations
gctganggatatggtgtacccgtcatatgtggtattatgtggcgancgggcgatggngcaagtcgactctccacatccacaaatcacacataaatccaccatccccagttgcccaccttcaactgagctcacgtactgccacgtagcccttatcctcgttcttctcaacaccgggtccccattaatccctccaagcttccacaacatccaagcaattcaacatccaaacatcatgaactatcaaaaccaagaaaatagggcagaggcagaaaactttgcccaaaacacaaaccaataccacaactttccttactcaaataccccagtaacattctctttgttccaattcgttcaccattggatcgactcgaatattttactggaggtccctagtacataagtttacattttgaccgttgggatctgcaagataaagtccagaaccctaatatgtaaacca

SEQ ID NO: 66748 - DNA, 350 bp, Glycine max
  unsure (1)..(350): unsure at all n locations
caaagatgatgacaaaaagcctatgagaatgatttcaagaatgagtcacgaacaattcaagaatcaagaganagattcaagagaagtttcaagtttcaagttttcaagaatcaagtataatcaagaacaagattctagactcaagattcaagaatcaagaaaagactcantcaagataagtactgaaaagttnttcaaaacattgagtagcacatgatttntcacaaaaccctttaccanagagtttttactctgtggttatcaaataccagtttactgtaatcgataccagtgggnagttttgtntcataagctttcactgaattacaacgttcaatcaatttaaaatg

SEQ ID NO: 66749 - DNA, 391 bp, Glycine max
aacaccattccctaggtgaccatgcattaggtaccatgttcaattatttcgtgtggcgagagtgagacactatgttttctgagaagagggtttatgataccaacatggttggtgcatggctgcctaacacatgcaactaacacggtagtgtgaattttcacactcccccttctttgatgttgttaactatacgaaaacgcaaggatgatcaaacatgaaaacaaatgctatgcaactttgcagatcaaaaagtttgctgaacgcatatgcatgatgatgccatgactcatgcaaaatgtgaggctggaatatgataacggacaaatgcaggaacgatatgttcattatgatgttatgaagagatgcttatgcgatgcctgatatgaacgca

SEQ ID NO: 66750 - DNA, 412 bp, Glycine max
cctagcaactactattcccaaaggattctctttttcagcctcctatatataatggagagggttaccactactggaaaacctgaatgcaaattctcattgaggcgatacacttatacatttgggaagccatattatttgaaccttatgtacccaccatggtggctggttatacacacaatagaaaaacctacagaacagtggtcttgaaaaagatataaaattaatgaagtacagattataggctcaatacattagtacctctaccctaggaattgatgacatatttatggagtcaaattgtcagagtgctaatgatatatgggacactctatcagttacacatgaaggaacaactgatgtcaaaagatctactgataatactctagctcatgagtatgacactattatgatg

SEQ ID NO: 66751 - DNA, 472 bp, Glycine max
  unsure (1)..(472): unsure at all n locations
agcttctggtatttataggcattcatcttcaagtgttctttgtctctcaattgatgaatttcttcactaaagcttacatttgatgcttatggtcattagagcatttaatgctgcattaaatgcatgttcttcttcatgtagcaaaaccattctgattggctttcatgtaaaatactgtagcaaaaaaccacttcttttttgttagagcaagtctatcacaatagagtgcggctttagaatgttgtttgacacttttagaacatggacttcatttattcttcataggattcaacagatctcaggagaatatctctgcaaaatgaatctcagacacagaanaataaatgaagtcttaaatgtcattctttaatgttgtattagatcatgacttgatcttgtttccgtctaatatnttagacacaaaatgtacgtagcatagtctaatatcacattagacgcaacatttaacttt

SEQ ID NO: 66752 - DNA, 495 bp, Glycine max
  unsure (1)..(495): unsure at all n locations
ggtagctgaagttctggagaggtgctaatatgggttaggcaatatcatatgtatcattccnctactttcatttactagaagttcaaaggtacttcatctctctcttatttgataaacattgaatctatttatgtgttacaacgacattacatttcatgatagattttatgtacacctctactagtagctacaagcgtattcatataatttttgcactcattttctggtggttccataggttattattctaaatacctattcttattntataacatatatggtagtagctataacataaaaattggtattgaatcttaggttatgcttcttcccccaccaattattcttcttagttagaataattgttgatagttttcttcttaatttatattataatttggcggaagacttactnttttctatacacagatactatgctatatatcatagtgtgataatatgttataaaatggttaagtatccttgaatggtaag

SEQ ID NO: 66753 - DNA, 429 bp, Glycine max
  unsure (1)..(429): unsure at all n locations
ttctncaaagngaaatgaattggtttcttctaagtcttttccccctcattatatcaagaagaaattgaccactggaataggaaaaataaaagaaaaacggcaacgacaacatttcaaattaattaagatatactccgtagtccatgtagtatcgacaaatacatcaaaccacaaactcaaattaattgcttacctctagttacggcaacggctagcgaaacccgttgttgcagatgttgtcgaatgtgaaatgttggaaaatgttttgtcttgtactgctgctgaagtgaggactgatacttcangtgtttctctagacgttgaagaatcctatgtcaagaanatcatatcgtgtcaatatgtgtttgagaagaatggatgcttgtcaaacacaaaggaagtgtataattcttctgttcttcgagtgag

SEQ ID NO: 66754 - DNA, 150 bp, Glycine max
aacagagactatgttccaaagatagtatctgtccagaatctactactgacttcaagcagacgacatctttgtttttatgatctttcggcgatctccgtgcaaacatcacatatcaacgtacctacaagatgctccatatgcacaaattat

SEQ ID NO: 66755 - DNA, 277 bp, Glycine max
  unsure (1)..(277): unsure at all n locations
tactcagctagcctaagggatggcctttcaggtgtggaaggatctattcaatgcctataggttggaccttccagaagagtatgaagtcagcaccacttctaatatttctgatntaattccttttgcaggtggaactgatattgaggatgaggaaccaacaganttgaggtctaatcctcttcaagggggagggtatgatgcaatcctctctatgaagggaccatgtaccagatccattaacaagagactccatgaggattgggctagagctactaaa

SEQ ID NO: 66756 - DNA, 377 bp, Glycine max
  unsure (1)..(377): unsure at all n locations
cgcaatacagcatactctngaacttccagaccatagactaaccatgctggatgtgattcaagagctgagtgtgttatctgctcatttataatcatctactaaatcatattaaaatcattatgttaatattcattntttaaaaattgatgttgtgagttcttaaacaacattaattnttaaataacggattaaaatcattcagttaatatcaattnttttaaaattaatattaataataaaattttatttcaaaaataccacagcatatgataaccaatataagagttaaaacctattntctcagtagtgttttgtccactttacctgattttgtgcatgaacccctactcgtgaagtaaattgaagttcgttgggtt

SEQ ID NO: 66757 - DNA, 332 bp, Glycine max
  unsure (1)..(332): unsure at all n locations
aaacgtttcggaagcgcctctgcttagattttcttcaccgaaacaatttttccaagcaaattcgaaagagagagaagtgcctaagtggctggaccccttccttcttgccttcctcccctatttatagcaaaataggggaggtggttgccgcccagctcgcccaggcgagctcagctcgcccaggcgagcagggttgcttcctccagaagcaaccgccttctggaggaatcttctagagggcccaaatgggcctgggtgctatttgcaccccccatttttactaagtacacccccctctgctgtgttttggtgattctttntttcgtaagtac

SEQ ID NO: 66758 - DNA, 396 bp, Glycine max
  unsure (1)..(396): unsure at all n locations
cttgcagggaagagagagatcgatcacgagcacatagcatggtcttatattaagagttagcagcttgcttaaggtccaaaaggaacttgactcagcgtttgtgcgagacagagatcaacatgttggctatcatcaccaagtatcaataagaactaaatctaaccacagcccacgaacatatggtggcanaccaatatgcccaagtgtacgcggaaaggangctagangagggtgatcgactcgttcaccaagggcaaccatgtgatggaccaattgctttaccttaacggagtaagaactccccgatgctgccaaggcaaacaatggggcacctactcgccccgagaatcacaactttcactatgcagctatgaaattatggcctatattagaccc

SEQ ID NO: 66759 - DNA, 472 bp, Glycine max
  unsure (1)..(472): unsure at all n locations
tagactatattggagaatcttgagcctgtggtctcaatgattatgttggtcttatcatanaggtggtctatatgctttcttcanatattgagaatccattctgtaagtacaatgtttttcctaaagatatgatcgaggcttcacatcaataatgtggacttatcatttactaaaagtattaggattccagacaaggaaaaattaccaccatatacatcntgtggaacacccacattttgataatatacataaaaaagattcttctaaaaataatagagtttaggaaataatgagatttcgtaattaaataataaaaaaaataatttattactaanaatatgatctaaggtaataaaaattattgtcttataaaaatatgaaatttattattctttgaaagggtaaatatttcttttataaatattaataaagaatagaaaatatagtgaagatatattctaataaattctaa

SEQ ID NO: 66760 - DNA, 346 bp, Glycine max
  unsure (1)..(346): unsure at all n locations
tactcaagctgtaggtggtgaccaactggtgctgttacacttcgtgttgtgtaaggatggngtcctcgattgtctattcaacattgttcaataccaagtacaatgaaactccatagcgatgaagaacatgaaatcactgtgagatatatatgttgagataaaaaaaataacgcattaggatgcatacgagatccgatagataggcacatcatcatggatgttagcttgcgtgaatgacatagattaaggcttctatgtttagttgacgaagtaagaagactctccccttacttttttttaagactagatggcaggtgatgagccgacactccatctcgaggatgag

SEQ ID NO: 66761 - DNA, 423 bp, Glycine max
  unsure (1)..(423): unsure at all n locations
tctcttttcaattttaaaacattgtttctatttcaaaacaccttgaacttcttcacatttatttatttggtccctctagaactatgagtttggatggtaattactatagcttagttatagcagatattactcaaggttcacatcgactttgtttttgaaaaccaaaaataaagcttttcatgcttttcgcaaataaatcccttgaagaaggtgcaagaacccttctaaatgaaacaaagttgcctaagtactnttgggcatacgttgtacatactatntgctacactttgaacaaagtacttatttgttcgattntaaagaaaactccttatgaattctataaaaggaagaaaactgaatatttctcatttgagaatntcttggtgcaaatagtttgtntaaacaatggtaaagattctcttg

SEQ ID NO: 66762 - DNA, 420 bp, Glycine max
  unsure (1)..(420): unsure at all n locations
gtattttattctcgtttcatttactttntatacccncttttgacgtgcttaagccattntatttcagtcatttctcgcttaacctataaataaaataaatttccaccgatcgtttgaattgtattatccgtgaacttcggttaaaacgaattccgaccgttcggtcgtgccgtaaccacgttgggaataaannaaaaggtaaaataataatataataataaaaaaaacgtcttttagtaaaataaagcggaaaatcaatcggacgttttctctttgggatttctcattcttaatcgaattgactaataactaaagtgaaactaaggctaanatcaactcgcctagtcaagctcgtccataaaaaatagtttttttggaagttggcattttcaattcttactaagtaaaatggatcatttc

SEQ ID NO: 66763 - DNA, 457 bp, Glycine max
  unsure (1)..(457): unsure at all n locations
cctctggtcctcctcatagttgtggcatgttataacatgctctatnttcatctcccactccaagtaggcctccggatcattctttcctttaaatggaggaatgttgagtttaataccatcaattcggttttgtctaggaacaccatcattccctcttctcctcctttcttcttcattatgatctctattctccatttgatccaacctctcatggagcgcatcatctcgttgtttcattaacctctccatatgttgcatcaaagcttgcatttggaattgcgaaagccccactccatcattaggattagtacctgacatctcaaacaaacaaatcaaacgtaacaagacaattatagttgctgtttgaatacctcacccactcaagtgtatcacacaattatggctnttctctaagtgaaacactcttgcttntaccactctaattccccttgagttc

SEQ ID NO: 66764 - DNA, 416 bp, Glycine max
  unsure (1)..(416): unsure at all n locations
ctaagctagggaccgtggatcacctggctgcatatcactactcactgcctcattattattgaagggtggtatggttcgttcgttcgttctctctcttctgcgcagcgccaaagagaagagaatgagaaagagaaacgctgcgagtgacggngaaagaaatataaacccttccttccaccacaccccatgtcagcttccctaattttccataataggaccctttgggttaaatnnttaaaataaaataagaagaataaattgctnnttttttaaaaaaaactttntaagtaaaagcaaattaaacaaaacattctaaaatatagaanaatgtctatntaatgagtctaatgtctaagcacggataatgtaaaataaattcacattcacatntaatcacanatcatctgttaaattac

SEQ ID NO: 66765 - DNA, 462 bp, Glycine max
  unsure (1)..(462): unsure at all n locations
gcttgaaagctgagctaagaaagacaagagtagattttgtgaagctgaaggtggcagtcactagagttaggaaagaatgtgataagctgaaagatatcaacatgaccgtggctgaagcgctagagtgggaaacaaaaaaagacagaaaggaagaatggagcaagaacaagttctgaagggctttgttaggcagtagtaatgagctcaaacttagaaaggccgagagagacaaatcaaggatggatagcatgatgttagaggataaattaaagagttttcagatttcaaagagaagtttgaaagagaaattgagcaagatggaagagaatatattgataatcattgatcaatgtaaataaaaagtgaaccaagctgctagtcataggaagatgctgaaagacgaataggcgaaggtgttggccttacnggttgagagggaagcgagagaagaggtgatagaat

SEQ ID NO: 66766 - DNA, 241 bp, Glycine max
  unsure (1)..(241): unsure at all n locations
gcttgactggactcatcaagagattataaatatgtgaccatggcgtgagtttcaatatcatcaatcatctntgaatcatctatcccctaatcgtctttcaacattcttcaatcagtctgtgcaactcttgctacagaacactcggatgcatctgctcttcatctctcttcaagagttggcgcaatactttctatgtccagacaagtcgtttgatccaaaacttgtgctattcatctgttaa

SEQ ID NO: 66767 - DNA, 459 bp, Glycine max
  unsure (1)..(459): unsure at all n locations
ggcaagctcctgaggcctgtgcgcgctctatatanaatagaatatgaggggtattgctcccctggctaaatgactagtggcgtctccagaaaggcattcagcgaggtcgcatcgaacttaatcaacctccctctaactcgaacctattttggtgattngtcttccagatcatacaggttcgagtaaaactccttgaccagggccacatcaatgtgcccgtccatgaactangtcaaggccttgtgctagttccacctgatcagctcccgacggaattcgtcatattctgtgacaaaaagattaacattcctctctgaaaggatgtttcgggagtgaatgttttgagaataacattcccaggccccttcagaagtgaatctggtagtatcatatggctcatagggacagtgatgtgtggctatcctctctctcgaggccatctgcatcaaagatagtcat

SEQ ID NO: 66768 - DNA, 480 bp, Glycine max
  unsure (1)..(480): unsure at all n locations
cactgcggctacaacattcaatgctgaccttntccaacctccgtcacccttgttgctncaaattccttgatctctaagtacatcagccaatacacattccatttccaaattccatgtaaaataactcttgtttcctcattattttttcctaaaacttttcttttgtctgtcattttttcattagatgactccattgaagttaatgtcacttattcaacctgcacataacaaatattagatataacctactntattcatttgactagtccactgcacaatcataaaaaatatttcaagccaaagttttatgcaatagcaaagtacataaaagtctatcttcaatagaaaagtacaatagtaacaaaacacacatagtttgtctgcaatagcaaattacatctnaaaaagactatccctagcaaagttctcctacttgatagtagcaacatatcatactatgnttctgaatctgtcattctc

SEQ ID NO: 66769 - DNA, 452 bp, Glycine max
  unsure (1)..(452): unsure at all n locations
agctatcaaacanaagcaagttctatgtagaacttcttgaagagctgtaatagaagaaatttcaattgttgaaatgtatagtaagtcggtcatgtagtgacagcataacaaagtcacaaatactagtactaagtgggagaacatccagccttccatatctagcctaatttggcagcgaggtgctccttagaaataggagtacctctaaccactaagtagtaacctttcaatagcagcttatgttcctaacattctgcattgttggcctccaccatataagttaaagttcccacccaccaagcttagtgagattgaggtcagctgttgtcaaaatttataggaaacattagttcaaccccatagctntgtaggtgcagcactccacataatttagcaactataatgttactatacaggctaaccacgttacggggtatatgatggannatata

SEQ ID NO: 66770 - DNA, 399 bp, Glycine max
  unsure (1)..(399): unsure at all n locations
atctgcgaatgttggtagaaattatcactatgagtggnagtgtttggtacctatcaattcattagtcttcaaattagaaatatattgagtttcagcccttgcgcactcaacatttgttattataagtttacaaatgagagagaaagcagctgtgcttatatatattaaatatgttgccaacaactttgtagaatataaggttgcgaacaccatgcgggatatagtgccatcatacacncaacatctcgaaagttataaagctggcacaacgttaactttctactctaaccacgcatgaacagaaaacgtggacatacaaatggttgctctatagtaggagcactattaaaagtaactaatagtgttttttacaacttgagtggccactaatgaaaaaac

SEQ ID NO: 66771 - DNA, 362 bp, Glycine max
  unsure (1)..(362): unsure at all n locations
cctccaatatacctaacaatgatgacatctcaagcacctatgagtatcatgtaaatctcagtatataaggctatcgctcactgatatacaggtcaatatcttttctctatgctcatgtattgcttaatgtaacacaaatgaactaatttgaatnttacataccaaataactttagtatattgctaacagcgccgatcatgacattaatattcctctcttggaaacttcagcatggataaactctttcaactattccattgtggatgattggaagcactggcatacacattgctcaattgcatggtattccactaactgtagttatatattatatcaaccacgccttatttatctaaaaagct

SEQ ID NO: 66772 - DNA, 453 bp, Glycine max
  unsure (1)..(453): unsure at all n locations
agctngccaagacaacacacacgtcctctnnttttatgtcctttgactnttgaatatatatatcatttgtccaattagtagaatcttgggtgctttgntaaatttgtgaactctctgcttcaaccattttcttttttagttcatcctacataaatacaccttgtaaattattatcatacatcaatatcctcaatacttcaatgtcactaaacaaaactcatctccacattagttactcctcctcatcccataaccttctattagaaaattgagcaaaacaaagaaaaaatattaaaattaaaattaaaattcttacaattacaatagcagcctttttagtaacaatgcttccatcttttcgagtttgagtgtcaatataaatttttgccctagaaggttgcactcccttagcctntgntgtctaacattagttaaaaaaatcaatcatcctat

SEQ ID NO: 66773 - DNA, 461 bp, Glycine max
  unsure (1)..(461): unsure at all n locations
ntcgcgagaggaggccaaagacgagtcctgcagtagaagtaaatggaatacattgacttctcttgcaatcagatgaaccaaagtttctcttatgagtnntaattatatacactgtcaatgtaaaacatttttacatagatatcctataagatttgatcgttntatcaagttatcttattcattaatataatatgatgataagataaattattattggatggttatgtnaaacctgttttccactgagagagtgtatataagttaaactaaacttgtatttgatatccaagaagggtaagtagtcgaattaaatattggttatgtacatcaatgtatctctggatagaaccaagcnaaatgaacttgtatgcatgttaacatgagcaaaagagatcctgtaattattatgattgaaatctttcttgcagaatccaactctagattactgcttatattagttt

SEQ ID NO: 66774 - DNA, 466 bp, Glycine max
agcttgaaactccaactgttgagtgaatataatctgtcaaggagatagtcattttaatataattttaattacgtagggttaaaattcacagtctggtgcacacctctattgattttatttacatctccagtacacacacaatcccataaattgatagaacttaaagcatacaaaaagcacagatggactcttcactactatatgcttaaatttgattatattatggagaatgaaagtaataaaaaacatacatagaacaattggtcaaagaagctttttaataccatgtatagggccaagggtattatttgttttacatctttaacatcactcaatcaccaaccaaataaaatacaattacatccacaagcacctctttcattttatcttaattcctttgactataattatgcaatgttcacacccatcgtgaacatcacatgtttcatgcatcaatatataacgc

SEQ ID NO: 66775 - DNA, 357 bp, Glycine max
  unsure (1)..(357): unsure at all n locations
ngaacaacagctgaacatcaagtaaacactactatacatatacatctaacctntaacaagtttnttttctaatacttaataaaaatattattaaaaacctttaataatatttaaaaaatattatcaaattatgaatattattaatgttttagtttatgatactttatcaaatattcatcttattaaagtttaaaaatatcaaaaaaaaaattattaatatttttattaagtattaaatataaaatattactaaaagttacacatgtactactgcaaggttgattagatggatgttgctgctccataaaattaattcagagattaaagatgagattgaagtatatcactcaagcatct

SEQ ID NO: 66776 - DNA, 467 bp, Glycine max
  unsure (1)..(467): unsure at all n locations
agctngcttctatagaaagtctctagttacagatcaaactctgtccttaatatcgtcttagaatttgccacaaatgttaaggaattcctaaatccatgacctgtattgtaatggctgggcaaatatatagtttaaataagtcaattagtttatcaaatgacttggtagcaatactcaatttttggttgcaaagattttatcagcactacctgccaagaagcagaattctctccgcatagctgggataccaggcgctatggaatggatatcatctcttctcctaaagctaacaggaattgcatacatgcaattgatgaaattggagaaaacacactcatatttgatcatcccaattatggctacttgacatttaaccatttgggactcctcatcctgaagaaacttgcccatcatgacgacaactgtggatagattggaaacacaatangcctgctcccaaagatcat

SEQ ID NO: 66777 - DNA, 416 bp, Glycine max
  unsure (1)..(416): unsure at all n locations
tctagctttaaacaacaactatcttaattctttaaaagaagttttcaagatggggttagtttttgttttctccaattctagttttaatataaactcattctgaaagtttcatattctatgaaattagtttaagagtgtttttgtgtggtggtgacagcaatgttgtaggtgattacaacatggtgatgatggtgccgatgtcgactatggcagtgattgtggcaatattgatggcaattgttggtttggggaggatggtagtctgtgtgtcgcaacctacccttctgcgggagggcgactcgtgactcgcgggatgcgtgttccacgataggaatactcgcggagtcgccaccaacgtttatttgatgaaaacgttggataaaccggaatagacgcgatctactaactnttaagtg

SEQ ID NO: 66778 - DNA, 458 bp, Glycine max
  unsure (1)..(458): unsure at all n locations
agcttgcattgacaggagcccagattccgtcgtttatcctgtagatagatagaattcataacttagatggcatatttctcccaaatgcatcttgagtaaagtcccattgttatcgataaaattgctgtaatcacgctctacacatgcagggtgtcagagggttctcccagaggtcgtagttagggaaagtctcttctggcaatcccgtccgtgtctggtgagtaacaactacatcttctacaaaaggagcccaacccatatatggatccccaaaagacttggacattagccctttgtcaggcttaattgattttagacggtgacccatgtatctacgtgctccaatgatcagcttatcaaagttgcctccatgggtcatcacgactacatctgacttcaagcacaccaagaaatgaagagctgccacgcttgtcacatgctntctgaaaccatctaac

SEQ ID NO: 66779 - DNA, 413 bp, Glycine max
  unsure (1)..(413): unsure at all n locations
agctnnntttgttcgatgttgcgctaaaaatttactatgcagttcggctaggctaggtttcttcgtgcgaactgaaccgaagttgtgtttcggccgactggcatgttctcattttgtcggccaggaaaacattagcccacctcggcataaaaaacatgattcaccgatatttgacaggaaaagaaaaatgctagccgacgtcggccaggatagatgaccgaccgaggtctgaaaaagaagcatgaccggatgactccggtcgaacatttcctaacagatatcatccaagtattattcagggattgaatagaanaaacaatagccgacatcggtagttaaatagccgtgactgatatttttcggccgacattgcgcaatttcttttacaaacgcgtggccgtaatatttcttta

SEQ ID NO: 66780 - DNA, 397 bp, Glycine max
  unsure (1)..(397): unsure at all n locations
ctaacctcatcgtctctcacagtctttagagttgggagccaatccaatccttgtgttcggactctcagccacttatgatagccgccgatgatcccattactgcttcccctaagctctctgtcctttcttcacgccgcatcccatgccttgcgaactccttggagtaccctcgcgtttgtggtcactgaaaccccatgcgatgaaaggcatgatgctntcgtctgatggcacttctctcatggggtagccaagctgtcttatggcgaggacgggattataattaatacaaccccttgtttccatcaagagaacatttggacatccttcgcatgaagatagaatcctgattcttccttccttctagcgagggaaccaattaacagacgcccctccatgc

SEQ ID NO: 66781 - DNA, 409 bp, Glycine max
agcttaggttgagttctgcttaccacccacagactgacggtcaaaccgagcgcaccatccaatccttagaggacctcttgagagcctgtgtgttagagcagaggggtagttgggatagtttcttacccttgatagagtttacctacaacaatagttttcactccagtataggtatggcgccttacgaggcattgtatggtagaagatgtatgacacctctatgttgggtagattccagtgagagcattgtcttatgacctgaggtagttcaccagaccacagaaaaggtcaagttaatccaagataggatgagagcagccctaagtatgcagaagagctactatgataagagaagaaatgatcttgaatctgctgtaggtgatcatgtatttctgagagtcactccgtg

SEQ ID NO: 66782 - DNA, 413 bp, Glycine max
  unsure (1)..(413): unsure at all n locations
tacccctatggctngcctccagacttcgctccccgtgccgccctggaagatntaagccaagcccataccttcgaggggtaactcccaccttatgacgactatcccgtgcaagacaatgaggaaggagatacccatctcggccccctgctccacctcaaagatccatccccccatgaactaccccaaccaaacataatccgccatgtcccgtcttcacccgcacccgtanaagaatctgttcccttcgcggaagataagggaaagattgaggcgcttgaagagaggttaagagcagtcgagggtctcgacaatttcccgttctcggatttcgctgatttatgtctcgtgcacaacatcgtcatccctcctaagttcaaagtatcggactttgataagtacaaagggacaacatg

SEQ ID NO: 66783 - DNA, 434 bp, Glycine max
  unsure (1)..(434): unsure at all n locations
atcttgaccgntgattagagacagcaatgcccctgcactgttttgattccaatattntttagttgtttgttttctcataaggctttanatcttgcacttcgtgtaatcgagagttggagacacattgaaaatgttctttttgctttgcaggtagagttaagaaaagaagtttttagctgcaaggtgacgtagcacccaaaaaataacatacccaggaggactacactaacaataggtataccaattagatcactataatataatgttgcaccaaatgaaagttatacgctttggttaacctaatcatgctttaatcttttatntttttgttntaattntttgccccccctttttctctctcttctttctatccttagggtctatctttgctagcaagttaagatgattgaggcaacatgggagatcttatccgt

SEQ ID NO: 66784 - DNA, 512 bp, Glycine max
  unsure (1)..(512): unsure at all n locations
taagcttgtatanaatcttgatagcgatagacatgcaagatatagttataacttataaaaatcctgtagcatataagttttgttaactgaacaataaaatcttcacataaatataaatatagtaaacaattggcaaccacattcttatatcaaaataattattttgcagttattttttatttcatcttaaatggaaaatataataaanagacctgaatcaatataattaacgtttgggaacatgaatcagaatcttcctctgttatataaatacataaaagtatgtgttgccaataaagatataatcttcctttttaaaaagaanacatatgaatcatagtgattgacggatgcatcatttcgttttatgatactcaaggaaaagagatagtttaaaagaaccaatgttattatgcgttacttgtcactattaataacgagaattatttcatttgacatgatgttatantttatgagataatgtattttaaattattataaatttatatttt

SEQ ID NO: 66785 - DNA, 370 bp, Glycine max
  unsure (1)..(370): unsure at all n locations
tttcatttggagcgtctcgagatattattgttctctatngngcatccgagtaaaaagttattgtcgtttgaatatgatacgagcttccattttcaatttggagcgtctcgacatattacgggactcaatcggacatccgagttaaaagttaatgtcgtttgaatttgatacgagcttccaatttcaatgtggagcgtctcgatatattacgggactctattggacatccgagaaaaaagtcattgccgtgtgaatatgatacgagcttcccttttcaatttggagcgtctcgatatattacgggactcagtcggacatccgagaaaaacttattgtgctttgaactttctaggagcctctgttttcaatt

SEQ ID NO: 66786 - DNA, 372 bp, Glycine max
  unsure (1)..(372): unsure at all n locations
gtaatatatcgagacgctccaaattgaaaacagaagctctaagcaaattcaaacgacaataactttatattcggatgtccgatagagtcccgtaatatatcgagacgatccaaattgaaaacggaagctcgtatcaatatcaaacgaaaataacttntttctctgatcgtcaatagagtcccgtactatatcgcgacgctccaaattgaaattggaagctcgtatcaaattcaaacgacattaacttttaactcggatgtctgattgagtgccgtaatatatcgagacgctccatatngaatacagaagctctaatcacatttaaacgacaatatacttttattcggatgtccgattgagttccgtaatata

SEQ ID NO: 66787 - DNA, 472 bp, Glycine max
  unsure (1)..(472): unsure at all n locations
agcttgtaggaatatggagtacccatcacatgtggtcctatgtggcggtcgggcgatggtgcagaacaagttttccatatccacaaagcgcgcataaacccaccatcccctgttgcccacctccatctgagctcacgtactcccacgtagcccatatcctcgtttctctcaacaccgggtccccatcaatcctcccaagcttccaaaacatccaaacaaaacgacattcaaaccgcacaagctatcacagccaagcaaaacagagcataggcagaaaactctgccaaaacaccaaccaaatcacagcttttctcacttaaagaccccagtaacaattccttcgttccggttcattaaccattggatcgactcgaaaattttactggaaatctctaatacttaagcctacantttgaccgttgggatctactagcanacatccagaactcattctgcactaccctntccacag

SEQ ID NO: 66788 - DNA, 485 bp, Glycine max
  unsure (1)..(485): unsure at all n locations
tcaaaccacagcaacacanaatctaggtgtccaaaacccctcaattcaatgggttntctaggtntgaaaagtgaaatttagaatgaggtaaatttgaagcaaactctcacctcacacaagtccataacatcaatctaaacttgcccaaactggatttacacctaaagttccaccaaatcaaaatttgactcctcaacacnccaatttgccctagaaatggctcttggttcacttaggtcatatgtttttctctctagctcagcctaacctttctcacatgtcctaaatgacatttcaagctattattaactcactttaacctccatgtaccacagaattcagacttagccttccaactctcaaagtctcactctttttccactcataacatcacattctcactttctaaccttgggttagttctacactgtggctctaacagatctncatcagcaatttcagcatataaacatcacaaacattat

SEQ ID NO: 66789 - DNA, 467 bp, Glycine max
agcttgtttgcagcatgaacttaacgtcacatttgtgtcacaaagctgcctcatccgcacaacaaatcactgttgccggagctctctcacacacatcacactgaattttcatgttaactcttctcttccttctacaacactaaaaacttggtcttcttttagctaacaacttttttcactggaaatgttaacgaaccctttaccagacacggtagttttgtaaagccaaaaatgaagaacgatgtggtgtagaaagattaggacatggtgtggagatgagaacaaaaaaagaagaagaacatagttaacatttgtagtacaatacacagttggtatttaatgtgggaagaaactgttgaacacagaaaatgaagtgtctggatgaggattaagagctggtggggatgcaaagataaggatttggatgttgcatatcagtttctgtaaagaaaatagaaaaacaacac

SEQ ID NO: 66790 - DNA, 489 bp, Glycine max
  unsure (1)..(489): unsure at all n locations
ggctgcatcacaattattatctganataattagaagagagcacatttttcacttggcatattcattgtcccgggtcagagcattttcacttcacantaacattttttcctgataataattgtgatggaataaactctatttggataaacaggatttaagatntaagatttagagtaaccacttctttatataaaagataaatagacgagtaagaaataatctnttacacgtcttccatttggacaattatttatttgtaaaagatataaataaaaataagatttaattattcatttacttcttatacattacataatctttacattgtaatatttatacttaaaaatcactaattgtagtctctatacatatatttntaattaattttattgtctgcatttaagaatacacaaactaanataaattaaataatgtatgtgtagggactaacactaactaaaaagtatattcgccaaattaacatgagtg

SEQ ID NO: 66791 - DNA, 463 bp, Glycine max
  unsure (1)..(463): unsure at all n locations
agctnnntttgttcgatgttgcctaagaaatntacaatttgctttcggctaggctaggtttcttcgtgcgaactgaaccgaagttgtgtttcggccgactggcatgttctcattttgtcggccaggaaaacattagcccacctcggcatataaaacatgattcaccgatatttgacaggaaaagaaaaatgctagccgacgtcggccaggaaagatgaccgaccgaggtctgaaaaagaagcatgaccggatgactccggtcgaacatttgctaacagatatcatccaagtattattcagggattgaatagaaaaaacaatagccgacatcggtagttaaatagccgtgactgatatntttcggccgacattgcgcaatttcttttacaaacgctggccagtaatatttctttacgggaaaggatgttttgctgtttggggtgtcgcctataaanatttcaat

SEQ ID NO: 66792 - DNA, 397 bp, Glycine max
  unsure (1)..(397): unsure at all n locations
ctaacctcatcgtctctcacagtctntagatgtgggagccaatctcatccttgtgttcggactctcagccacttatgatagccgccgatgatcccattactgcttcccctaagctctctgtcctttcttcacgccgcatcccatgccttgcgaactccttggagtaccctcgcgtttgtggtcactgaaaccccatgcgatgaaaggcatgatgctttcgtctgatggcacttctctcatggggtagccaagctgtcttatggcgaggacgggattataattaatacaaccccttgtttccatcaagagaaacattggacatccttcgcatgaagatagaatcctgattcttccttccttctagcgaggggaaccaataacagacgcccctccatgc

SEQ ID NO: 66793 - DNA, 464 bp, Glycine max
  unsure (1)..(464): unsure at all n locations
agctnntaattctgacttgagtgtgcctgtatattcntntacccaaaactgcgcgcagggcataagcttatctccgttttcatgagacactaaggagctctgtaaacaaatttggtttcgatgtattgntttgtttcaagatattttaaggttcctcctttaattaagtgtcgggaagctattgttagcaattgtgaacgttcatgcttatcacggattgatcttgtaaccgtgattaatttgttttctatgacattttggtcaataaagtatatcactttttgtgagttttgtccaacaagattttataaaacttttgacaaataagaaataggatgcgtattattagcatgatagcaagtgttgctgtatcatgactttgcccaaattaattaccatcacggtgttttcttttcctttactccaatagaagacaattaatgtaatgcataactcaatacaat

SEQ ID NO: 66794 - DNA, 456 bp, Glycine max
  unsure (1)..(456): unsure at all n locations
agcttatgaaatattctctgtcgagtgagctcccttcttttcttgttaggcttgcttttgtggcaacaagtaccctcactgagtctggaccactcacctctgctgtgtaaccatcctatagaacatgttgcagtacatgcatagcacgttaacatttactatatgttggtgtgaatgtgtacgtaacaaattaaagttgggaaagtaattagcaattacctgacatttccctttcccattattcacaaagcaaagtggatctctaagtccttgttgaacatggccactatgcaccccacctttttctagattgaatttaggaactcttcggccatcaaagaaagggttggagccatcagataccccatatggtttgtttgaagtgattacagttatgttcatatattccatnntctgcaattcattcntcaccttttggntgttgggcttactcat

SEQ ID NO: 66795 - DNA, 452 bp, Glycine max
  unsure (1)..(452): unsure at all n locations
atgatctagagaagcacggcaacaaggtggttggtttgtttcanatgagaaggagatgcacggaaagggaagagaaatgctaccttatttggttcatagganaaagaaatgagccaaaaatatgatgaattctagcgtgcactagcaaatgatgtttgtgtatgtgtcaaagtgtctattaatagttagatntngtttaattcagattttntttctttttaaaattttttattctctaattccttntctttaccagaattactcctcgtttattcttcgtgtctcctaaaacataatctataatagtcctctntacgctctcacatgctatattntcctcanaatcaacacagaacacacaaggaatctcttcaataaatgcgttacaggcttcagaagtcagaactgcanatacaacaaatntagagtggtatatgaataaaaagtaacct

SEQ ID NO: 66796 - DNA, 466 bp, Glycine max
  unsure (1)..(466): unsure at all n locations
agcttggcattggaattgcgaaagccccactccattattaggattagtacctgacatctcanacaaacaaatcaaacgtaacaagacaattatagttgctatttgaatacctcacccactcaagtgtatcacacaattatgacttttctctaatgaaacactcttgccttttaccactctaattccccttgagttcttaggcaattcaagagattatggccacaacaaagaacaatttaccaatatgtgtaacgtaaggctagagagacaaggaaaaggttaaccatgtttttaggcacaaatgaaggaaataaaattcataatttaggaattcaagtaacaatccttcatgcaaccaatatattaccttaaagagattntttntaaagttcttcaagcatgaaccattcagcccaatttttttttttttaattttgctatacgaaattctgcttctctttttttt

SEQ ID NO: 66797 - DNA, 371 bp, Glycine max
  unsure (1)..(371): unsure at all n locations
cgcatgcaagattctccctgcgtgacactacgacaccatttggttgggttatataggtgtcatccgcgaaatccccatgcaagaatgcaggtagcacaccttaccgtcacacgagaagattatatgcatctatactgcgtcgaacagcattgacggctgacgtctttccaactggagagatgacttctgagcactcaattacgtgctacagctggaaccctggtcacacagggtcatcgttgtactttctagcaccgccagacctttctcacatgctctaaacgacactatacggtaacgtttactcactttatcggcacattaaccaaagaccacagactntgccttccgacggatgaagtctcacttct

SEQ ID NO: 66798 - DNA, 404 bp, Glycine max
  unsure (1)..(404): unsure at all n locations
ggggaataggaactggggttggtgcatatgacacaaagaatgatccacccaacaatgacctttcagtttcatttgatcttgaaactttgtatattccaccactaacaagttctaccaccaagtttcttggtttgccattgccaccatttttgaagattgatatagttcctgaagcatttcaaggaaacattaaccaagaatctggcaaggtaaaacatataagttctggagattatgcttcaacttcaaaggattgtgcattatgtgtacaacttttagtgagcttaatacataggtggctataantttgcttcagcttttcctctgagaagctaagccgaatgctattttagaataaactcttgataaaagaacttacttttaagaacttatattgaacaatc

SEQ ID NO: 66799 - DNA, 418 bp, Glycine max
  unsure (1)..(418): unsure at all n locations
tgtaacatgtnggcgccctaaattaatgactggtttaatagtaatactttaaataacaaaaatcatggtaaattnttttttcttctttttctttttcatttctttctcttttcactataactaggtttagaaggaaaatcctcactataaagtcctgaatggccagttcacaactctattcggagtcatttctttcttaccgctcataattctctaaattattttgctgtttcaaaaggaagaatataccaaccattactttaggtcgtcacgtgaaaaaatggtaaaatacagtcgataaactcttttacaaataaagttgctaatgaattcttttcagataacaagatcgatcataaatgcattcatcatttaaagctgtccaaaatatgggagttttacaaaatatatagtgtca

SEQ ID NO: 66800 - DNA, 286 bp, Glycine max
aacagatcaaactcgatcttctaatcatctatgctcattacaagagtatcctttctcatattcaccacacatccggtggctaacataaagggatggccgcaaatcaacggtgatttatacgccctttcaatatccattatctacaagttctctaggatactaaactgcttaccttaaccatgtacatcttcataatgctataagtcttgtatataactatctacaatagaacgcattcagatggttatctcacattaaatcttctcaatggtggaggataataatt

SEQ ID NO: 66801 - DNA, 285 bp, Glycine max
gactacgacagccataaggcactacctttttcattgttaaattatatctcgcaggatgcaaaattatgataactctgtctgtattatggaggttactgagaggagtgaaataagcataatcatcaggtataatataatgaaaatttgcaattgatctgcagttccaatttcttaattatatttaagggtggatagcaagataaggttttacagctgaatggtttgaatgaaaaagatgtataatacttctgctagaaaactgagatattttcactaatacatctt

SEQ ID NO: 66802 - DNA, 501 bp, Glycine max
  unsure (1)..(501): unsure at all n locations
nntgagccaaatcctgactcaccacaatccttaccttcttatgtctaaaagaatagaagggaaatntccaatcaaagaataagagaaggaaaatttccaatgaaagcaaaaaaagaaaagaaggaaaattccccaatcaaagaatgggagaaagtaaaaaaggaagaagaagaaggaaagaaagctcctgatcagggatcgaaggaaaaacagaagaaatgtgcagagaggtctttggaccggacaatatctgaacaatacagaattgtcaccaaatgaacaaaaaagaaggaaaggaaaccacgacctaagatggtcttctccctttgattaccaaccaaaatcccgtgcgctagcgactntttcgccccgcactaaacaaaaaaacagaatatagaatagccaacataaatcaaanagccaaaaacacacattagccgaaagacccaccataagaacccattcccaagggaagtcctatngatccatgatcacacatgt

SEQ ID NO: 66803 - DNA, 373 bp, Glycine max
ggtacttctaagtcttttccccctcattatatcaagaagaaattgaccactggaataggaaaaataaatgaaaaacggcaacgacaacatttcaaattaattaagatatactccgtagtccatgttgtatcgacaaaaacatcaaaccacaaactcaaattaattgcttacctctagttacggcaacggctagcgaaaccgtttgttgcagatgttgtcgaatgtgaaatgttggaaaatgttttgtcttgtactgctgctgaagtgaggactgaaacttcatgtgtttcttcagacgttgaagatttctatgtcaagaaaatcagaaggtgtctatttgtgtttgagaggaatggaggctttgtcaaaacaa

SEQ ID NO: 66804 - DNA, 435 bp, Glycine max
  unsure (1)..(435): unsure at all n locations
gactagacaaagaatcttccgattgtttctctgttgtgttagtatgaacagagactatgttccaaagatagtttctgtccagaatctacgactgacttcaagcaagcgacatctttgtttttttcattatttggagatctccgtccagacatcacatttcaacatacctccaagatgctccatatgcacaaattatggcaaaatttccaagatctggacagcattattcaatactgacaggtatatacatttcttcagcaaccaattatattacacttgtgcaagaaacgaggaatgtcagatcgatgcatctatacaactntaccatataaagaagtgtntggataacaaatatcaaggcatatataactaatgattagcacataattatataaaataatgacaaagataaggggcggatacctattctttcta

SEQ ID NO: 66805 - DNA, 452 bp, Glycine max
  unsure (1)..(452): unsure at all n locations
gccttctgggtcttctgatngaatattgtgtattccaatgccataattgaataacctaccaggatcattatcaaataaaaggcgatatatttaatatgaaaaaataatgggatcttntctgttttacatggcatgttgaattaactaaaaattggtcagattggttnttcaacggaagaaacaatatgtcttcttaagtctatgaaattgtgcaacgatgtataatattacatactaatactaatattaatacaaaggattaaacataccatgccccattgaagtctaatgaactatgtctcttaataggagaaaacccaagaacattcacgtaaaaatcaacggatttctccactgatgcacacacaattgagatatgattcaatgacttgagttgaggggattggcattccgttttctcttttataacttctgcaatgacagacagtgaa

SEQ ID NO: 66806 - DNA, 391 bp, Glycine max
  unsure (1)..(391): unsure at all n locations
catgcattacaacacttcatggnggcaaatgtgatcattaagaaaccccatnttcactngaaatcatcattccaactnggaaaggctccactccttataagtngtacggattcatccatgaaaccccacaaaacgcattntatatttaaaaaaaaaaaacacaatttaccatggatccacttgattgttcagagtgaatatcgttaaaatntacccctgtcttagtaatttatatacgagcattgaatttttatcaactatgcaatagaaaagtttataaaatttaatttatcgaaagatgatgtgtcgtggtgaagatggaaatctttgtcctatttcttaattattaaacttttcgttggtacgtatgaaagtagtaggaattaaagtg

SEQ ID NO: 66807 - DNA, 431 bp, Glycine max
  unsure (1)..(431): unsure at all n locations
cttncatttttaaaaattatttataactaatggagattagtacttatctctgaggtttattttatgataatgattagtcagtgccatattcagatataaagttgtcagtttcttagttttcccgtcatatcatattctagccagatccattagaactaaagactacggggactgccaatttctattcttttaataatattgggggaatagttcttcatatctcttgaataatgcggntaatattatttattgttgtttttctgttctggtcaggcttcggctagttcataatttatgtgcatatatattatcattatctaaatagttgattttcctatcaacaattgtcagtctgcacattacctctaaatcgcataccccacgtaggagttaagccctgaataatgccagtcaatatggctcatatttgt

SEQ ID NO: 66808 - DNA, 458 bp, Glycine max
  unsure (1)..(458): unsure at all n locations
taagctgtcgctggctagattcaagggagaggaaccaatcaatacattgttatagnaatcctatgggtctaagggtaggaagaatcacgagcgcgaagatatagacaccagagaagaagaagaaaggagaagtaacaagcaatcagcacttagccttgttgatgagagtgacttgtcagatgcttttgatcgagttgtgctgcttagtgtggaaaatgtttgtattgaacactgtagtttgcagagtgaaacagtgaaggctgtatagccaggtggagtgaagggtcgtcctaagaatcaagcgacaaacaaggaaacagtagatttgaggaatcttctgatgatgtgttcacaatctgtgtatgccaatgacaaaagagctgccaatgaatggctagagcagattaggcagcactcttctccctcttgggatgcattacaganggtggctcattact

SEQ ID NO: 66809 - DNA, 457 bp, Glycine max
  unsure (1)..(457): unsure at all n locations
ttaagtgaccgccgctgcagctntnttgcagcgattnttcgttgatggaaagtgttctgtattagcaatggattaaaaaagcttcacttttatccattaataagggttaagatttacatggttttttttttatagaaagacccagacttagaatgaaatcaattatcagaatcaaataatcagtttcatcttttcaatccaaaaacaagttactaataaaatttgttaaattctacaaatattacataaaaactactttaattcagaattaattttaaaatataaaatcaaatatgtaaatgcatttatctaaaattgtattatttgttaactagcactactacttgaatgtgattgtggataattttgtatactcaaagtaagagtggcttacctcgttgttggaatgatgcntttcatgcggcttacgaccacttggtcagtgatgttcggagcg

SEQ ID NO: 66810 - DNA, 468 bp, Glycine max
  unsure (1)..(468): unsure at all n locations
acactaacatactaagctatgtcttcatcatanaaagtatcaagccgcgtatttcattgctttatttcaatngccataggactaggaggtatcttttggttgtaagagagtgacttgcgggctcttaacacatattctcaataatcttatatttaagacgagtggggnttgaataatgatgttcctactacattctttagtcctgtctaacatctcgaacatcaccaaactaagaaccgtgtagtgtattatgcgatccatatatctgttaattctcatacacggaatgggtcatattcaacattatatattttctagagttgctataaaccctgttaccatttataaaagtctggaaaaagaaagtgtcgaacaagatcttggcttatcctctgcttttactaaaacatcactctacctgtgttaggatctactaataactttgttattgcactcatggtgatctat

SEQ ID NO: 66811 - DNA, 449 bp, Glycine max
  unsure (1)..(449): unsure at all n locations
agcttcctcggggccatttcctgcgaaggcaaacatttggaaagttagttntaccagtgggacactactcttaaaacaaaaaatggcatacaacctcctcccataaatacaaacaccaatgtaaatttagagcaagcttatgcgcatatttccttacgaacgttcactttgcgcaagacatcctattaactaagaaaaatgcacccatatacaatcaaggcagcttcgttacctagattatttacatgtacttccaaggtgtatttgttacttacatcacacacatctccttggctaaatttacatacatgcatactcaaagcattgtggggtaccaaaaattgcacatgtgcacatcttggtatttctaatacctatacatacacaaacttcatgatgaatattgactatctacacaataaagtgctacatttcatggctctttcaag

SEQ ID NO: 66812 - DNA, 467 bp, Glycine max
  unsure (1)..(467): unsure at all n locations
tagccatggacaactacccgccaatgtaaattctcaaagtggacttaaccctgggtgctgtccttaaaaaggcccccctaaacagcatcatacagaaactatatatgcacaaaggcattagtgtatccttaccccaaaagcttaaggactaaaaatcatgagaaatacattaccttaagcagagtgctcagagaaataaagcaattgaccagtcaaatacaatgaaaaaaatataacttaactttgaatagcttgcagcaagttcattggtgttacttcataatatacctacttaccaatgaaatatntaaattgcaagcactatntatctagttctttgatcgtgatacaacattattcctggaactatactgatcatatacagtacgaagttgaatcaattgagctaatttgtatgatgtttgatgtgtgatgcataagacttgttaaacactttgtatatgagg

SEQ ID NO: 66813 - DNA, 415 bp, Glycine max
  unsure (1)..(415): unsure at all n locations
gcttattgctgaagtatgtatgacagaacttcattactgttattcaacacatacaagtgagcttgtaacanatcttctacacttggagtgataacatgcagtcctttngaacccttaccgcccactctgtcgtcatggcgagactcaggaaggccaataggtttagccttttcaatgtactctgaataaaattcaatggcttcttctgcaatgtacctttcaacaatagatgcttccagacgatgtagattcttggtatacccttntaagatcttcatgtattgctcaaccaggtacatctaacgcaaataaataggaccacaacatttaatttctctgacctgatgaacaattaagtgaatcatggtgtcaaagaaagtaggaggaaaatacatctccagttgacacagtataa

SEQ ID NO: 66814 - DNA, 399 bp, Glycine max
  unsure (1)..(399): unsure at all n locations
gagagaaggggggagcacgatatngaaggaataaaagagggagagaagtggaactttgaagtgtatctcataagactttcattcatcaaagttacaacaagtgttacacatgcttctatttatagactaggtagcttccttgagaagctntcttaagaaaacttccttgagaagcttctttgagaaaacttccttgagaggctagagcttagctacacacacccctctaataactatggctcacctcttgagaagcttccttgaaaagattcctaaagaagctagagcttagctacacacacctctctaatatctaagcttacctncttgagatgagaagctagaacttagctacacgcncnctataatagctaagctcaccccatgacgaaatacatg

SEQ ID NO: 66815 - DNA, 460 bp, Glycine max
agcttatgaagttgtctggttttctaaaccttgttaacttgtgctattcatcctcttcattctcttctccctttgccaaaaagaattcgccaaggattaaccgcctgaattctttttgtgtctctcttctcccttttccaaaagaacaaaggactaaccgcctgaattcttttgtgtctcccttctcccttgtcaaagaattcaaaacgacacagtctgagaattcttttgattcttcccattcccttatacaaaagtgttcaaaggactaaccgcctgagaattcttttgtatccccagtcacaaagtatcaaaggtttaacagcctgagatcattgtcttaacacattggagggtacatcctttgtggtacaagtagagggtacatctacttgggtttgactgagaacaagagagggtacatctcttgttgatcatgtctagtggacggacatccact

SEQ ID NO: 66816 - DNA, 451 bp, Glycine max
  unsure (1)..(451): unsure at all n locations
tctggggtcctgcanacatgacaacaacattattacttacatgctataaattctntntattcctggaaccctntggtcgaccacgcttctttggcctcacaatctcacctaggcctgcaccttcatcatcggcactaccttcctcaacagaaagcaatggcctttcagactntaaaactgtgataatactcatcctatntgaaccctttggtcgatcacgctttctttggcctcacaatctcacccaggcctgcaacttcatcctcagctntatcttcctcaccagaaaacaatgatctttcagactctanaactgtgacattacttatcctatttgaaccctttcgtcgaccaagcttctttggttcacaatctacccagaccccaccttatcacctgcttatcttctcacagaaatacgatctttagacttaanatgtacatattactg

SEQ ID NO: 66817 - DNA, 456 bp, Glycine max
  unsure (1)..(456): unsure at all n locations
ggctgcaagctaactatatttctgcactcgcatatgtgtattctatacccncatttgtgtttgaaaatatcaaactatcgttntccaacactaacaccttcctcttggtatgaactactctcgggacgacatctccttcacctatgacgacaacttcttctcctacgacttcaccttcttcatgacatcctcacaagtcacgacgccacaaaacgtcctcccccctcctctttcctttacatgtcgtcattgaaggtaaaaatgcgatctagaacatggtatttcatctcctaaaacgaaaaattctataatgttttctttaaaacaatttcaaccattattctagagtcacgattctagaggctatatagtagccttagagaataatcattctataacataaaatggttttataataggctntccaaaatacctaanatgttttttttattttca

SEQ ID NO: 66818 - DNA, 485 bp, Glycine max
  unsure (1)..(485): unsure at all n locations
gtgaactngngcagtaacaatatgtctggtgaatttccaaactccttggggtatctgtctcaacttgagtctttgctgttagacgacaaccgcttctcaggatatattccttcgacactgcaaaattgctctacaatgaaattcatagacatggtaaataaccaactttctgacacaataccagattggatgtgggaaatgcaatatctaatggttcttcgtctaagatccaacaatttcaatggcagcattactcanaagatgtgtcaactntcttcccttatagtgctggatcatggcaataacagcctgtcaggatccattccaaattgtttggatgacatgaaaacaatggctggtgaagatgacttctttgcaaacccttcaagttattcatatggctctgacttcagttataaccactacaaggaaactcttgtcttagttcccaaaggagatgagttagagtacagagacaatctgat

SEQ ID NO: 66819 - DNA, 445 bp, Glycine max
  unsure (1)..(445): unsure at all n locations
agcttgccgctggagctgacccatcaactgctctatctctnttagactggtgatccctaggctgttgaccttgacttgataaaacctctttttaagcgaaggcatttgacttgatcccatgttttactaaagtgaacaaaaatcggcgcgaatcaaaactccaacatccatcatgggtggaaatggatgaatgcatgaagaaatgcatatgacacaaatgcaatttacgaatacgggagcccgggaaattgtctcctttttagatacaacatcttggggtagcaaagtgcccaacgtatgtatttaagaaggtgatacggaccctccgttggtttgtaaagagaggggatctagacagaatccgtgtgtgacgcatatgcgaaaggcacaacatagtatgacaatattcacaaagtataataagggtacatgaaacttatgcatg

SEQ ID NO: 66820 - DNA, 356 bp, Glycine max
  unsure (1)..(356): unsure at all n locations
aaaactcagcttcagaattagnatgacactaccagatttattcttatgccttacctaggaataagaaactaatggtggtgtactgaaactgggcaaccaaaagtcacccncaacagccaacaagtcagccaccatctggtctcccanaaggctgatgcctagagtgccaattgggcccttattacaactttgactaaaactaactaaagccctttagttgattaacccgaacatatatttgtcagccaacttacaaggattgggccttatttacacaaactacacactctaaaattgaaacaaagnggtgtcatttagtcctccttcatttgtgccatgatacaactcacaacctt

SEQ ID NO: 66821 - DNA, 435 bp, Glycine max
  unsure (1)..(435): unsure at all n locations
agcttacaatatttcagaagtcaaaacaagctctgtttcgtaatttataaagttttgtagcattccggaagtcaaaacaagcattgttgtgtaatctgtaaagtttcacaacattccgaaaggaaaagcaagaatcgttacgtaatccataaaccatagaacctgtaaagtttcggcatgtattagaaagaaatcggcagaataacacacaagggggtgtatttagtaaaatgggggtgtaaataacaattttcaaatctgggcccttctagaggattctagaccttttctttctccttggctaagcaaccagcttgcctgngcgagctgggcggcaagcaccttcactgtttgtagaaaatggtttctgggacttccgtaatgcttccgtataatttctgaaaaactagggtacgcattgttcacttaattatg

SEQ ID NO: 66822 - DNA, 395 bp, Glycine max
  unsure (1)..(395): unsure at all n locations
acacttgatactcagcttaaaattgaataanatgtgcaaaactgctggtgatctactatcatatatgtgtcatcgattacacagtgcaaatgttgaattcaaatcttaatagctgtttgaaatcaggtttggccattggttatcgattacatcatctggtcattgataaccagagagtcaatgtgttgaaaaagactttttaacttagaattctcggtcaaaccttgtgttacgtcaagtggaattccttccctatataggataccctttctatactttaaaaacaggctcgatcatgcatcttgtatatctttaatttctttgtcatgaattaagctgagagacgcatgtgatcctttggcgtcatcataacatcaccttgatccttgtctaca

SEQ ID NO: 66823 - DNA, 404 bp, Glycine max
  unsure (1)..(404): unsure at all n locations
agctngaaagagcccgggtagtcaaagagaagttcttgtccatagccatcaaagtctgaagagagtatgatgaactaagggacgttaatatggccaccgatgaagccttggaatgagaaaccaagaaggcccgaaaggaagaacacgaccaaaacaagttttgagggactttatagggcagcaatagtgagctcaaactctgaagaggtgaaaggaatcatcatgggtcaaaggcatgatctggaaggacgagctaaaggcttgccttatgtcgaaaagaaatttgtcccaacagttaaagtgagactgaagggaatatgtgggccatcatcgatgagtgcaaagagaagctaaatctagcggcaactcacgagcaaaggctagaagatgagtacgccaagata

SEQ ID NO: 66824 - DNA, 418 bp, Glycine max
agcttcatagagtgcagccatgagatgttagctcttatatggttgagatcccacattggagatatggcctaaatagcgcttacaaggtttaggtggtcctcaccttacaaggcagttttgtggggttgaattaaacacaaatcccaaattttaagaggatatcaaaacctatcctaaatccattgttggcccacctgcattgccacgctccaagcctatgccttgggtgtgttggaaagccaccttagttgcgggctctcttgctcacctttattgtggcctttcagaattggttgccagtgtctcaaataggactactaggaggggctgactagaaaggttgagtgaagtgtcatataatgccagccaccgggatgtttgtccttaggtggttgatatcccacatcaactatagata

SEQ ID NO: 66825 - DNA, 462 bp, Glycine max
  unsure (1)..(462): unsure at all n locations
ctatggcagggcaaggaaagtggtctgtgtctccaattgagtggagaaattgctggcaaagagtgcaaagtcaaggatttgaaggccaggaaaagcactgctgaagacaggaaaagcaagggcctttctcttaccaacagcaatttggaagtgcaacaacccttgtgggaaaaccatgagctctcccttntttaagcaccttctgataactatgttacctgaagatatgaatccagcaaggatgtgaccttggagaacaatgagtagttcattggcaccagggtgagtgtggagtgggataacaccaccaggaccaaggtctaatcttgctgcagagaggtcaaggccattgagacctgngaattgagcaacataagctggtgtcacagcagcattgattatgtntgtgacatttgcagcttcagctaagcctgtgtacancaaagtcatctgaagtacatt

SEQ ID NO: 66826 - DNA, 441 bp, Glycine max
  unsure (1)..(441): unsure at all n locations
agcttgcaccattattaatatagttaataaaaatattaactaacaattattcaataaaatagtagattattcttctcgaatgctattccacgaattcattcacactctggtgagttttggtcaaatcgaatgtactgtttgtttttgtttttttaaagaaatttatcctttttttttcttattcgttaagtaccgtaatttatgtaggatatgttttgtttaagaaaaattgaaacctgaggtaattttgtaggttatttcatagttttaaaaatctggataggtcattgttttgaattaagaaattaaaagacacactcatggnggatgaactaaaaaatnagcattttaaaattttaggcaaaatacattcatattctctgaggtataacaaaatcttacttaatattcttctttttcttgcctatacanaattccctt

SEQ ID NO: 66827 - DNA, 374 bp, Glycine max
  unsure (1)..(374): unsure at all n locations
gctagagctaattcaaacgagagtgactgtttactttgatgtctgattgagccccgtaatacatcgagacgctcgaaattgaatgttgaagctctcagcatattcaaacgacaataactttntactcggatgtctgattgagtcccggaaaatatcgagacgctcgaaattgaatgttgaagctctcagcaaattcaaacaacaataacttntaacctggatgtgtgaataagtaccgcaatacatctagacgctcaaaattgaatgttgaagctctcagacaaatcaaacaacaataacttttttccttagatgtctgattgagacccgtaatatatcgagaccatctgaattgaatctgaagctctgagcta

SEQ ID NO: 66828 - DNA, 458 bp, Glycine max
  unsure (1)..(458): unsure at all n locations
agcttctggcactccggctgaaaagagggtttgtatgtattattaccaatatctagtttgtgtaactgaaaagcgagtagcaagtagaggtttctgcgccatttgatgctagcaatgcaatatctatgcactgtctcttggattgtgggctctttgtttattcattccccattagtttagaagcattcttgactgttaatttactgttagcagtaatgcatagcagcataggggaatgacttcaagcatataatttcttcaatgttaaataaaaatccaggttgggtgagtcgaatgcattaaattaccacgttgngtgatttatctgtacatttcaaagcatgataaaatgaaagactgaaggttgtcaatattattaatatcccgcaacaacccncatagacttgctaatttccctgtaagatagaatagttaaacacggaagtcgtttgtatcca

SEQ ID NO: 66829 - DNA, 490 bp, Glycine max
  unsure (1)..(490): unsure at all n locations
tgcaactctgngatctactatattcggagctaccatattatttantngnntaccaccactaaatattcctgatcggttgataatcctgtggtgtccgtttggaggcatatggccactgtatacagtcccacattcttcattctcatttgatgctgttagatttttcagtttacagatgattcttttataatctcgactttgnaggtaccttacaatgacctcaacacaatgaggccaacggttggtatggaggtagtctcctcggcgatcaagatgaaagcagggagatatataaacattatgctgagttatgtcaggtatgcaatntaacatgaataatgaaaatgcatatactactttgaatctagacttaattgaagaaagacaccattgcttgcttcatacaatgcactatagtagacttacagacctctacttagtttaactacctgctgggctaattngtatcgtatcgttttaataggaactg

SEQ ID NO: 66830 - DNA, 326 bp, Glycine max
cgaaagactggaaagcggtctctaatgactcctcagcggccaccacataccgcatagaggatgggcagctcaccaagatgacttactcgcctgatacgacgaccacacgcccttccactaccaactccaattatatggcggaacgtagagggaacaacccccaccgagcggatccacggacgccccatcaagcagctgtacggggagccaatacccattatctggaaagtaacttgacatgtgcgagggcctatcagcacagggaggtcaatctctccaccaacctctcagcggacgcccacgaacgcacgaaccaccactgaact

SEQ ID NO: 66831 - DNA, 338 bp, Glycine max
  unsure (1)..(338): unsure at all n locations
gaggatcctttgatctgntngccagatggcagtccatctactgttcatgatgtgtctcttagccgactaatgcagactgatgcaactgaatgtgcgtcctcatataactttgcaaatcagatggaagagcatagagaaattaccattgaaaaagctaaaagcattttaaaaaatatggtgacagctgttaataacgcttgtgttctgatggatggattgcgtactgcattattgaaaaagcttccaggagatggtaagatatgagtgctcgttatatatgattgttgactgtcgggcttattctttcagagcaatctctctgccttattggttacact

SEQ ID NO: 66832 - DNA, 377 bp, Glycine max
  unsure (1)..(377): unsure at all n locations
acctctnttctaaacttaaaagagtgtccttgctagcctgttaaccttctaaacacctaaacctctatttctaccttcatcctttacatccatcaatggcagagtaaaagaatatgaggataaagagcattgggcacagactcccaacccccataatgatgaaagagaatgtaccaacaaaaggtggtccctcaagcagaggataatggattgcatgatctccctctcctcctactactctatacgcaactccttggtttctttaagaacactgagtcttcgttaaagtttatctatgcaacaacagagatgactcaacttgagtatgtctgtatggctagactcaacagtgaatgctttgtattttctgattgatt

SEQ ID NO: 66833 - DNA, 474 bp, Glycine max
agcttgaagatgacgaacacctaacgtacactctttttatatgaggatgcgacctttcagtaacttgcgagagttgaaaagacagcctaaaaatctatgccacaatgtaacccccatcaaaccatataactcgtctttaaggcgtaccctctcatagagtgacatgtgtaaaaaggcaacctgcatgcataacacgcgctcaccttgagtaaaatgaaatgcatcttttcaaagcactttctaacagttagaagtgtcaaaatggtcaaatacatggacctctcataaaacattcaaacacctggctctacttgaagggacgtaaagcacactcaccctagacaatttggtagccttagcccagacaatgctcgtccaggttgggggcttgtctagcctatgactcttaaaattgtcagggtaccaacttctacatggagtatctctttaccagcaactagacctaaagcttgg

SEQ ID NO: 66834 - DNA, 468 bp, Glycine max
  unsure (1)..(468): unsure at all n locations
catttcacttcttgaaccctaactcttgttgtcttttaaagctaggcttcattacatgttgttgagatgtttaaaatttcgtatatgctaccttgaccggaattggacgatatgttgtttttatggaagttttaagtttaaaaatgagttctaagtgttaaaacttaaggttaaccttaaatttcacttatatcggagttttctagcaaaaagttatgaacacaactagttttaaggatattttgtaggattaaatttgtcatgaaatataatggtggttatggatgtatggactgtttntcttaaagagttgacttcaaaaatgagtctgttaggtgtgaaaatatagggtagcaagtaaaatttatgaataaccaattttcgatacacttacaaatttgaagacaagtttaaaagtgaaactttgtgaaacaaggcagcagcttgatactggacattagatgactt

SEQ ID NO: 66835 - DNA, 382 bp, Glycine max
  unsure (1)..(382): unsure at all n locations
agctnttctnggtgggtagatgcactctatctcgtttaatggatgatcactagcagacatattctcaatcaattcagttgcctcttcaagggttttcaattctatcttccctcctgctgaagcatctaacaacagcttggtttgtggtctcaccccatctataaacatgtccaattgaattggctcagagaatccatgtgtgggagtctttcttaacaaacccctaaacctctccaatgcttcactcatggactcatcatggaactggtgaaatgatgaaataacatctttccctgttgcagtctttgactcctggaagtgtttctatatataactctcaacaactacctcctcgtcttcaaaattttgctattgaatgaat

SEQ ID NO: 66836 - DNA, 350 bp, Glycine max
aaactaataaatatatcatcacaggtgtttaatatcaattcttcttatgctattccttaacatcaaattgaactttgaaaatattaaaagtatatgagaaaagttcttaactatcgtgttgcatttatcgttctaaaactatgctcaatgatatttatggtaaaagaagactagtgcatgcgatgaaaggatgatgatccgtttcataaaagaaagaaaggatgatggtaaattaccgcacacggacagtgtggtaaataatattacaaatattaatcaatgtctattaaataaaaaagctctcacttacaacatgacaaatttactccatcataatattacagcaaaac

SEQ ID NO: 66837 - DNA, 473 bp, Glycine max
ttaagagacgcggctgctgctaagaaaaagaggagaggggtagtatattttgcatataaaagataatttagtatagataagaatataaattataaaaaatcacacaatatttcttatataagtgataagtgatgagaataataataattagtaatattaataatgatagttaagcccgataaagatagtaataacgatactaacaataacatttgtaataatgtgatggtagtaataaattagtaatgattataataataataatgacaaaaaccataataaccaaggatagaatttgaacttcattttccagggcctaaaaagcacggtttaatgaagagaatttacaatctcacatacataatatataaaaatttaatatataacttataatgtaatataaaaaatacatatacaaacgtactgagtaagataaatgagaacactaatagaatagatttttttttttttat

SEQ ID NO: 66838 - DNA, 468 bp, Glycine max
  unsure (1)..(468): unsure at all n locations
agctntngttcctttttataaaaagagatgttcttanactcatcacgttgnctaanaaggccttgaggtggatctaagtgctctgataattcattagcatattcatgatttggtggcatgctcaccactgtttgtttctttaggaaactcaccataactaaaaaagcaaaaaggcacccctataacacccgatccaaaatcaagatggataacaaagagggagtgcatgaacagatgaaggccgacatgtcggctttaaaagatcagatggctactattatggaagccatgctaaaaattcaaaaatcaatagaagacaatgctacgtcagccgcttccaatacagctagggaaacggaatcgatgctacaacccacaatgaacttatgccgggacagaagcgcgacaagtntaaatcggaggtatagtccctcagcctactccttatggttgccttcagacttcact

SEQ ID NO: 66839 - DNA, 452 bp, Glycine max
  unsure (1)..(452): unsure at all n locations
acacatagacactaagcttacagagacacagaatgaccactagacctataataataaacttaaggccttaaccaacggaatgaaaaaaacttaatggctgagagtaactgacatcgtggcaaccaaaagtcacccacaacagccaacaagtcagccaccatttggtctcccaaaaggctgatgcctaggttgccaatagggcccttattacaacttgaactacacctaactaaaagctcatttagtagattaacccaaagcatatgtttggtcagccaactctacaaggattgggccatcatttagacaaactaaacactctataattgatacaaggtggtgtcatttagtactcctccatttgagccatgatacaactcacaaacttggactttaatccttgaaactagngctagtattcatatagtatggacagcactagatgaagagct

SEQ ID NO: 66840 - DNA, 431 bp, Glycine max
  unsure (1)..(431): unsure at all n locations
agctnttatcactccaccgagatcttgccttcatgtttaccaaagctaacacagctgacaaccgcgtgaaagatgtgcacccctgatacaatggcgtgttggaatcacgttctattgtatcatacagaggtgcatgcgcttgctcaaaagtctcttgtccaagatcacggatcatttcctctatacgctctccgctgtcttcgtgaaccgcctgagactgagaaacagttggaatgtcggtcgattccccatgccatatccattttgtgtaatttggaatgatgccgtaacatatcagatgtgatcggatttcatcaactgactgtcgtctaccattaagacatttaacacatgggcaataataatcgctcctcaaactatcatcattaagttgcgtatacagtagagattgttccactccgatctcatac

SEQ ID NO: 66841 - DNA, 501 bp, Glycine max
agctcaggaaaatataactaattgaaggggattcatgtttgcttactatgctatcggggtcatatcgtgctcctaacagaggacaaggtctaatatccacgatatgtatatcataaaaggttgcggggacatttcacccctgtccataaaaatactataataagaaggaagagtcagagcaccgaaccaataatggtcggagattactaacggcttttctcgattccgataaccaatatcaccgtcgtattttggcggcgggaggagggacaactgtcccccggcatgtatgtattcatgcatttgagtcgattaatgataatctctttttgtcttacgtcatatatatgttattatatcataaaagtctaagtaattatggtattcttataatttcttgtgacatgtaacaacttataaacaataaacaatgtaatatatatgtttcatactgtcactgaactaaatactttaatcatataattatcacgaaatagtata

SEQ ID NO: 66842 - DNA, 402 bp, Glycine max
  unsure (1)..(402): unsure at all n locations
tttagtaaagcctatntaggtaaacatgtgaggccctacgccattcaaaaagccttttaggtctaacaagttgtcctatttaaaaattcataaataatcattcattattagtattattattgtactaaaatgttataattcattaaaatcttacatttatttgtctttttaaatgttaatcatgttggtttacataaaatgtcaagttaaagtgtataaataagtttattaaaaaaantaaattgtcatttaaatgtattattacaaaatatatttttaagtaagatcatgaatgctatattaaaccttaaaatatgcttatatcatataaataaattagatttgattattgtaaagtttcacatacatatnnttacctctatcatagtgctaaattatcac

SEQ ID NO: 66843 - DNA, 485 bp, Glycine max
  unsure (1)..(485): unsure at all n locations
aagcttctatggacagccacttatgacacatgtcctcaagctagcctcctttgtgagttatngttgcaatggcatgtcggcatggtatccctacatcaaagttgtcaaatcagcacacatataggttaggaatgaaaaaaaaaactgtaaagaacacaacctattagttgccatactccacaagtgcatgtccattcagctaaattgaccttaaccttattcccccacatgtggaccttatatctcagactcatgttatcaccacaccaaatgggagtccattgattagcaaaatgaattcctgtttctagtcttttatactgcactggacataattgtctatgctatccagaaagtttaaccttgcgggcagccatggttctcatgatataacttctaattcttcaagcattggataataggcttgcatctatactgcaaaattctggaatggatacctcacaagtgtggtgcatatattgtca

SEQ ID NO: 66844 - DNA, 470 bp, Glycine max
  unsure (1)..(470): unsure at all n locations
taattttaataataaagagttagaatgataatttacaaactaataaatatatcaacacagttttttaatatcaatttttcttatgttattccttaacatcaaattgaactntgaaaatattaaaagtatatgagaaaagttcttaactatcgtgttgcatttattgttcaaaaactatgcttaatgatatttatggtaaaagaagacgagtgcatggtatgaaaggaggatgatttgtttcaaaaaagaaagaaaggaggatggtaaattaccgtacagggacagtgtggtaaataatattacaaatattaatcaatgtctataaaataaaaaagctttcattaaaaatattacaaatatatctcatcataattttaaagntaaaatatatctttatcntttaattatantttattttcagnttgattccttaaagaatggattctctgtgatcacttagtgaccacatg

SEQ ID NO: 66845 - DNA, 424 bp, Glycine max
  unsure (1)..(424): unsure at all n locations
gcttgatagtgagtntaacaaggtcgatgccttctatttatagaaggtgaattaagtcatggaggaggctgatgattngaggaagcaaaggaatgcttatattgctcagagaaaaggtggtggtagggttcaagagttcagctaccaccaacgattcatttgctagcacaacttcagcttcatataaatgatgccaggcctcgttagtataaatgtcgagcaaattaatccttctagctctctcaacatttagtcatttaatactctaaattgtataattttctctttttgattttttctctctaaaacacaaaactttacaataacaatttatttgggtatgacatcggatacatgaatcgtataatatcatcaggtatagttaaagaccaaattctcaaaagtatttcttgtaagatacttt

SEQ ID NO: 66846 - DNA, 309 bp, Glycine max
agaggaacttatatctctaaagtaaaaatataaaaagatgatctttgatagatcagagatcgagaatcatattaactggggaagagatactctccagctgagatatggtcataatacatttgcttttaaaaagaagctatagtttgtatgaaggacgatggatctggttaccgaacacccgcgaaagctctagagtggccccaccaggaatgatacaaggggaagcgaacagcccgtgaaaaaggccctggctaaggaggacactatacttttaatgactgtaaacagctttttcgtaggataataaca

SEQ ID NO: 66847 - DNA, 411 bp, Glycine max
  unsure (1)..(411): unsure at all n locations
tcaaagaggctatttctcactctaagaagtggattcactctntgtcttggatggataggaatgaaggctcctatccttatttatactactccacctccataatgaatggtggagattacttgtatcctagggtggagattaattctctagaatgctccacacattctaggagtctctacactcttttactcccttccatactctttcataagggtctagaaggttccacacatctccagaatattccaaaggtttccacattcttccacgagcttctagagagttctacactactctagagttctctaggacgttctaganaattctacacttttctaganagctctagaattttctagaacctctccaattaaggagggatcccaacacatctccccctcccgacttaat

SEQ ID NO: 66848 - DNA, 373 bp, Glycine max
  unsure (1)..(373): unsure at all n locations
ctaagctggctgtagatatcatctnggacatatggagaggtggggtgtgtgtgtctatggaagagagggggaaataatgtacacttggattctgcttgagaaggcatgaataacagtgggatctctcaagtgggggggtgggggcacaagaagatgaggctcattgcctaacgttcgcttgaaaattgaacatgctctgaaattggccagagaatcacgtgttggctaaatcctaaggaacaaggctcatatttatttatctttatctcgctacctcgagcaagtttaattgatacttgggtggggtgagtaacctgagttgggttccctgatcaacatccgcatggatattggatggtacccttaacctaca

SEQ ID NO: 66849 - DNA, 477 bp, Glycine max
  unsure (1)..(477): unsure at all n locations
agcttctatataagctgaaccgatttatcaatatttacaagttgagttttattcagaaaattagagtttatctcttttatcttagtgagagtgattctcctaaattcttgagtgattcaagaacaccttggctgtatcaaaggactttcacaacctttgtgtgttgccctcgctggaaagagtgattctttccttcctttcatcatcacccttgttctttcaaaccacaattccagaaaatccacctctgcccagaattatctcgtggccataactcccattttacgcactcaaattaagtgattnttgagcctaaattgaatttcacaacgagacctttcacctcgttttggaatcacctcatttggagccctgtagcttcagttattgccatttctatatttctgtccagccaccacttaacctgacgtttaccatcccattcatccattttatgccaagaaccactctattaag

SEQ ID NO: 66850 - DNA, 149 bp, Glycine max
  unsure (1)..(149): unsure at all n locations
tcttgactgcatctcaagacacatgacgctaggcgtgcttactctgtgtctnattagtggaccaggccgacggcagatgcattggtacggcacttatgcgcttgagaacacacatcttagcgtctgaatcaaaaatacacttagtcgcg

SEQ ID NO: 66851 - DNA, 476 bp, Glycine max
  unsure (1)..(476): unsure at all n locations
agcttcactgatatatcaggaattacaccaatgttgttattgaaagacatatntaaatatcccatatattgcaagttagaaagatgggattcagtgacgtcaccctgcaaatgcacacatgttaccaaagaaagatggaatctcgccttgcagtttgtcattaaagaggtaaagaacttcaagagagttcattactttcccaaatccatctggaatgggaccttccaacatgttattatcaaggaaaaggttatgaagattggtggtggagttaaagagccagtaaaatatagttgatgatatcaacagaattgaggagagatcaaggaaaacaagagaagatgaagaactcataatgaaagaagatgacataagacaacttccatccgtaagactacaatttcgcaaatcaagattttgaagttntgagctgaagttgaagctaccttgaaagactgatgatgtcatattattat

SEQ ID NO: 66852 - DNA, 467 bp, Glycine max
agccttttaccttatggtagaaggaatgagagtatttttttccacctaaaccagtattgttatttatggttgagtaacttaagaccatttcatttcctcgttctcatagaactaggcaaaagatattattttctctgtttgccatgcatgctttaccttatatcattcgccatgcttcttgcatcactgtctttaattcctgccagaccaaacccacgcatgcaaccctttcatgcatgttggatcatcacatttacatcatcactaattaatttatactgggtcaaggtacattttggctactgtgtagacaacatgattgtttctcctatcagaaaatttacaaatgtattctctactcttcaagatttattatgattcattgctgatgatattacaaattacacacctatgggagctagctaggataacgacttgtgtatgcatgagagtaaaaccgtgacctg

SEQ ID NO: 66853 - DNA, 463 bp, Glycine max
  unsure (1)..(463): unsure at all n locations
agctntccaaagttttctgagtttctgaaccttgtttacttgtgctattcattctttttatctcttctccctttgccaaaaagaattcgccaaggactaaccgcctgaattctttttgtgtctctcttctcccttttccaaaagaacaaaggactaaccgcctgaattcttttgtgtctcccttctcccttgtcaaagaattcaaaacgacacagtttgagaattcttttgattcttccctttcccttatacaaaagtgttcaaaggactaaccacctgagaattcttttgtatccccattcacaaagtatcaaaggtttaactacctgagatctttgtcttaacacattggagggtacatcctttgtggtacaagtagagggtacatctacttggtttgttgactgagaacaagagagggtacatctcttgtggatcagttctagtggagggtacatccact

SEQ ID NO: 66854 - DNA, 441 bp, Glycine max
  unsure (1)..(441): unsure at all n locations
ctaaagaagctagagcttagctacacattcctctcttatagctaagctcacctccttgagatcataagctagaacttagctacacaccccctattatagctaatctcacccncatgacaaaaaaacatgaatatacaaaaaaaagtccttactacaaagactactcaaaatgccctatactactagaatggcctaaattcaatgtccaaacgaatgataaacatattctaatattcacaaagataagtgggctcatacttaggccatgggctctaaatgtaccctaacgcttatgagaaccctanggcctaccctnggatctctagcccaatctacttggagtcttctagccaatgccgtggcgggatacgaaagcatcactctcgctccagaacaagtccacccacaaatatgtaatcatagacttcccttgaacttgca

SEQ ID NO: 66855 - DNA, 436 bp, Glycine max
  unsure (1)..(436): unsure at all n locations
gcttcccaccaacccaacaatgtcattactcagtctttaaacaaacctcctccttacccaccacccagttatccacaaaggccatccctaaatcaaccacaaagtctgtctaccgcacttccaatgacgaagaccacctttagcacacaaccattnaaaaaattaattatataaaaaatctgaccaccatcaaaaaggaattttgcagcaaaaagcctgtagggttcaccccaaattccgttgtcatatgctaaacttgatcccatatctacttgataattcaaatggtagccataaccctagccaaggtttatcaacctccatttctccgagaatacgactcgaacgcaacgtgtgcttgtcacggagaagccccggngcgttccattgagcatggtagggctctgaagcgtaaggtgcaaggtctaattgatgc

SEQ ID NO: 66856 - DNA, 205 bp, Glycine max
  unsure (1)..(205): unsure at all n locations
tcactcctacatntcagtgtgtagcgtgcatattctttcgttacccactcctcacgtttgggtttttatggaacaacaccataactaaacgcgccgcaagggatctctatcgtaccagatcctaatctagaatgatgggtgatcaataggagactcangtacagatgaaagccgacatgtctgcttcttaaaaacaaattggctt

SEQ ID NO: 66857 - DNA, 470 bp, Glycine max
  unsure (1)..(470): unsure at all n locations
agctntattgattgaaattataagctatctaagatgtttcaataatatgggattgcaatgaacttattttattgaaagtgaataattggaaatgttctaagataggattgttaagagctcaaacaagaagggtttgtctaaagttcaaataatgcaggcatcttaattagtacgtggtttaatttaacactgcccattggagtgtccggacaatctagaaacacactcacaaaaatataaacaatctagaaattatataatatgagagggaaataacttacttaaaagtaatgcttttagagatattttttatctttattatttattttctttaaatctaataattgtaatgagtaattaattctaatcattaaattcttttanaaataaatgatatgttaaaattaatcttgtacaagttcaaaggacgaaaccaggttgcgcccccgtcctcggcttgtacttttgca

SEQ ID NO: 66858 - DNA, 469 bp, Glycine max
  unsure (1)..(469): unsure at all n locations
agcttatactcgtgtttccatagtgttgacttgtgttatccgatagatgcaaggcatgaccagtcggtaagagccttagcatcatacaatcctcttaatagtcatcgaaactaagatgttgtaagaccattgagctctaggagttcatgatgtaagctccattggagcttgtaggcctaggatcttcttcatcaatggatccctttgctttttggaagataaatgacagcggaatggagaaggaagagagagaggagacgccacttcaaggagaagatgagtctagaagaagctcaccaacataagaggccatggataagagcttggaggaagaaatagatgaatgaagagagagggagagaagagcacanaattttgtgctctacaagagctctgaaatctgaagttaatattcaaatgatcaaagttcataaaaaatacacacatgacctctattatagcctaagtg

SEQ ID NO: 66859 - DNA, 481 bp, Glycine max
  unsure (1)..(481): unsure at all n locations
acacaaaatctaagctcttactttaaagagtaaatccgctcagatatatttgattttataagggtgatnattatttcttctagttaatcgatctatatttgttgatgtatagaataattagtgttaaatcattcctacgggtcatcaatctgacacactctgtttgtttaatcccccacatcttgcaatcgacgtgacgatatccacatataatttttcgttagcacgtaataaatatggatatgtgtgactcttgcaacaaaccataaggcacatggtaagaaaacagttcagattggtcactacttcatagaatagccttatttgattatcatagtaattaagaaagaacgacatgtgtcaaataatatgggtttgcataaactattctaccttaggcctaattatgcacaagtacagacgaccacacacattactaaattgtgattggttttgaccattgcttggccgagctatatct

SEQ ID NO: 66860 - DNA, 450 bp, Glycine max
  unsure (1)..(450): unsure at all n locations
tgcaagcttgaagatacaaactccttccatacagccattatattttgagttaagccattgttagcaaggagttagaattgctaatccaactaattactaagtgcttgtttagcgtgtgtttgtttttccgataaacttgtagcaacatgaagttcgagactacttcagtatagaaagataggtgttgttgcttctccaactntcccaagggagaattaggaattttttaaaagggaatcaaaatgatcttcatatagttgtaccggtgatccaaacacacttagttagcattcaaaattaagtttagagcatccgaaacttaatttacaacaacatttatcttaacaaaagacttgtgactaaagttaatttaatatccacacaaaattgtgtggatatcattatgtgaatngagtcaaacaatataattatgtggcacttggacctaca

SEQ ID NO: 66861 - DNA, 344 bp, Glycine max
  unsure (1)..(344): unsure at all n locations
gcttcctctattactctgttngggtntcatgtgttagaaagatttataaatgtattgagcctctacttcattgtctgcgtgaaatgagaaattctcctttcacagccatttcattacaaatcccaacggtggatatgtgatgaaatgaatttccaacctggtgtacatatttcacgatgatctaacggttaaccagttcgagatcgtagctttactgatataagtttgaattgttgccggagaaacaaagactttgtgctatggatattcttccactaagacatatctcaatatcccacaagcgtgtgtaagaatgagtcctaccttggttcaattcatgatgt

SEQ ID NO: 66862 - DNA, 428 bp, Glycine max
  unsure (1)..(428): unsure at all n locations
gttgtctctaaacggttggatttcttcatgggaagcttacatatgaagatgtgtttggtggagaatttaatgcatgcttccattaaatgcacaccctttccataccgagaaaccactttctttagctttcttgaagaatacttcaattaagcagaaaaccatgtgcttttggtaaaatcagttttgtcacaatagccacaacaatatgcatcttttgaaattgtttgaacttgaaagtgtcaaatgttatcttacttcttaagacttcgacaaatcccggaagaatttttttaagacagttcctataaaacgaatatcagacacatggtattaaatgaagtcttaaatacttcactataacataacatatgtctattttcgtctaatacttcagacgcanatacaatggttttcgtctaaatgcatat

SEQ ID NO: 66863 - DNA, 375 bp, Glycine max
gctgactggtaacgagcaattcatacttttattttccgccttcagtctcctcctattctctctctctctctctctctctcttggttttcctattggttgctgatgtaaacaatcgagtcatcttcgctaaataagatcttttttctccttctgtttgatatataatgtcagtgtattccaattcatttttctctaaattcctggcattgctttagaaacagaagtaattgtcatggggaaggcagtgggtgggtggtttcagattctatattctataatccgtatctttagaagctctgcttctaactgtatgtgtaatttatctgtgtcatcccaaccctccttgtaacagacaccactccaggatgaggctat

SEQ ID NO: 66864 - DNA, 438 bp, Glycine max
ggtgtgtaacccaccatttttttcatagtttaacaccggtcacgtgtctactatcattgtgataatctctttctctgtttttgggggtgctacttgagttgccaagcctctccatctttgggcgtgttctttgaaagatccgtccccccttttgcacacgttctgtagttgcatcctatccgaagccatatcagaattgtactgacaccgcctaacgaaggcaaccattaggtccttccaagaatggactcaagaaggttcctaagttagtataccaggcgacagttgtcctagtaagactttctcagcagtttctcatcttttgcgtatgcccccatcttccgacagtacatctttagatggttcttggagcgagtagtccccttgtactcgtcgaagtccggcactttgaacttgggaatgaaccatgttgggtat

SEQ ID NO: 66865 - DNA, 508 bp, Glycine max
  unsure (1)..(508): unsure at all n locations
ctaagcttacccttacttgcaagaaccacttctcataacaacaacacacactcctctgctaatgtccacaacagtctccttagtccataagaaattcataatactggtgtatctagttcttttaaactttggcatcaaagactaggccatcctaacaaggatgcactagaaattgtactaaataaatgtaatataccctttatcaataaaactaacagggaattttgtaattcttgctctatagccaaatctcacaaactaccctcttctccctcttccactgtttatactgcacctcttngaattagtattcttgatgtttgngggccctcttcagtagagtcatcttatggattcttatatttcctaacttgtgtngatgcctattccagattcacctagatntatctgcttaatcataaatnntgatgttctaacaattntcagctcnttaaagctatggcagaaaaacnagttcaaacaccgctttaatctattcaaattgatg

SEQ ID NO: 66866 - DNA, 461 bp, Glycine max
  unsure (1)..(461): unsure at all n locations
gccttagagtcttcttctacaagtttttgtagcttgctctgcaagtctcacaattctatataaactacagtgtaactaaaaacagttgggaataataatattagaattcataagtcttacagattctgtctctctcttctctctctctntctcttttcgattatctctttctaagatggtatcaaagcctatcctaggtccattcaaagggccacccaccatgtgatcctacattntgaattaagatcctccttctcttcatgtgtgagtggcaacttccaatttaattcagccacttctatatgcaccatttcaagttcttgccttaagccatcaattgtcttttgaaattcattttccagttgtccatttntcttgtctctgtcctttgaagaataatctgaatttgaatcagagtctgagctggatgaagaactccccttttctggctgcccttaatc

SEQ ID NO: 66867 - DNA, 372 bp, Glycine max
  unsure (1)..(372): unsure at all n locations
taagctntcatgatggtgcggataacagctgatattccaaatctgggatggtcatataatgatgcagcgtggatattacatttgatggaaccaacatctggcttactacatgaaacatgctggatattgcgctgggagtgactcgaaatgatctgttcacgagagctacggttgtcatgcaaagacctgtgaatgtatgtatacatgattttgatgatgtcgaagaagaatctaccaagctgcttcaaatgataagcattcgcttcaagaataatcacagattgcttcaacaacaaagccctggttaagatcactacagacaagccttgcttaaacaagtgcttcaaacatcatgctctggtatcgatacca

SEQ ID NO: 66868 - DNA, 419 bp, Glycine max
  unsure (1)..(419): unsure at all n locations
aagcttgtgngaatcggagtgaatcaggtgttttatgataacaaagatgatgacaaaaagctcataagtcaagatcacttcatgataacaaagatgataacattcaagaatgagttcaagattgagtcaagaacacttcaaggatcaagagcaaatttgatttcaagaatcaagaatcaagattcaagattcaagattcaagattcaagaataatcaagatcaagattcaagactcaagattcaagattcaagattcaagactcaagattcaagaatcaagagaagacttaatcaagataagtatgaaaaggttttttccaaaactgagtagcacatggattnttctcataacatgtctaccaaagagtttttactctctggtaatcgattaccagattattgtaatcgattaccagta

SEQ ID NO: 66869 - DNA, 482 bp, Glycine max
  unsure (1)..(482): unsure at all n locations
tctatgntggatctttctnctcagaggagaggagcctntactctcagttctaggacaatccttccatggtgtatcaaagttattaaagactcatacaatacctacttgagcttgctctagatggaggaaaagagtcaacttagtttgtgattccaacactctcttttgtcctcaacctatcaaatgacaataaaattacaaattacaaatatttcaatacacatttatgntattcctttcagagatgctattacatatacaatacataggaatatggctttaatgatagagaagcagagtagaataattacgatactgtatatatgtaaaatgaaatatgctaaggaactcaagatagaatatcaaatggaacacttacagcatatcatcagngataaaataagatatatgaatgatatggtaagtctcaattgtccacttcagtctaacttcagtccacttacacctanggatcaagagtg

SEQ ID NO: 66870 - DNA, 462 bp, Glycine max
  unsure (1)..(462): unsure at all n locations
agctnntctaaattttctggttgtctaaaccttgtttacaaaagtgtgctattcatctttttcattcccttctccctttgccaaaaagaattcgccaatgactaaccgtatgaattcttttgtgtctcccttctcccttgtcaaagaattcaaaacgaaacaatctgagaattcttttgattcttccctttcccataaacaaaagatttcaaaggactaaccgcctgagaattcttttgtttcccccttcacaaagtttcgaaggactaaccgcctaagaactttgtcttaacacattggagggtacatcctttgtggtacaaatagagggtacatctacttgagttgttgtgattgagaacaagagagagtacatctcttgtggatcatgtttagtggagggtacatccactatgttgntcaaagagaacaagggagggtacatccgttgtggacctttgc

SEQ ID NO: 66871 - DNA, 505 bp, Glycine max
  unsure (1)..(505): unsure at all n locations
ggtcanatgtaaaggganagattacaaatgaagggaaagtgtttctcttataatttatcccaggacttagtgtccatcaccaggcttagtgccactgccaggcttagtgccgctccaagtttttgggttattccacaacttagtgccaagggcaccatataaatactatgtgggtacccctagcatgacatcatatatgaaagagttgtaaatactaacttangaaacatgcataacatttcatatagaatgctaactttgcgaagtttatgattgactgatatatgtgaattgcggtgagtttctatgctaactagtgtaagtataattatctatgttngagagatatgaatctacttgactatagttattaatatatttgcttgtgatatacttgaatgttttttcagtcttatagttagatgacaacttgaatgcaagttgaacccttgtgagagaaccattccagtctgatacttgggatcctacgttttacacataaata

SEQ ID NO: 66872 - DNA, 469 bp, Glycine max
  unsure (1)..(469): unsure at all n locations
agctngcatntggaatagcgagagcnccactctattattaggattagtacctgacatctcaaacaaacaaatcaaacgtaacaagacaattatagttgctatttgaatacctcacccactcaagtgtatcacacaattatgacttttctctaatgaaacactcttgccttttaccactctaattccccttgagttcttaggcaattcaagagattatggccacaacaaagaacaatttaccaatatgtgtaacgtaaggctagagagacaaggaaaaggttaaccatgtttntaggcacaaatgaaggaaataaaattcataatttaggaattcaagtaacaatccttcatgcaaccaatatattaccttaaagagaatttttttaaagttcttcaagcatgaaaccattcagcccaattttnntttttttaatattgcttatacgaaaatctgcttctcttttttttt

SEQ ID NO: 66873 - DNA, 421 bp, Glycine max
  unsure (1)..(421): unsure at all n locations
agctngcaatggaattctccacacatgaacccagttcttcctactccctacttttaccttcgggctccatctctccatggaatagaataacggtgtgtctccgtccgttccgtccttcatgatttgctcggcgacctcgtcagtaaggccgaagagtaagacttggtcgtctcctatgtatntgggctttaagtccatccctatccaccaccatacctcatcctctagtgtctcgaaaatggctggattttttaatttccctatccacgcatcttccagccaattggtgtcttctggcctgatgttgatgtgaatcgaggaagttgagggtccatgactatatggtagactggtggggactgttcgatgcctcggtacctagttggtatgtgttaacgcatccaggtatgatactggtgct

SEQ ID NO: 66874 - DNA, 463 bp, Glycine max
  unsure (1)..(463): unsure at all n locations
atccttaagcacctgcggctgcagctggattcctttagtagggaatctatccttcctaagatggagccaaacctagtcaccttgattaagaactagttcttttcttcctttattgcctttagttgaatacacatttgtttggttctctatttggttcttaaccctctcatgaaacttctttacaaactctgacctagattccccttctttatgtataaaagaagtatctagtgggagaggaatgaggtctaacggtgttaggggattgaacccatagacaacctcaaaaggggactgcttggtggttctatgaacccccctgttgtaggcaaattctacatgaggaagatactcatcccaagacttatggttgcctttcaaaagagcccttangagggtggataaagacctattcactacctctgtttgcccatcagtttgtggatgactagtggtagagaaa

SEQ ID NO: 66875 - DNA, 482 bp, Glycine max
  unsure (1)..(482): unsure at all n locations
ctcagctcggtatctccttcttcactatgtcaagaatcacctggttgtgtattacgtgagggcagcttgataccagatcttaatagacaacaatgggctaaagctattaaatggttagctgacgatccaaaacagttagctattgtgaaagcccttccaattcaccaaaagacagattatgttttaacacatcttggagaatgaaacttggtgaagtaaccttttgtctacattttcccaattcaattntcaaattataaatttgtgtcttttttatgcctaattgagctcatattttcactttagttatttatatttcctcttgtgacttatattatctngtntgttctcccctaaatggcagcattggatgttaattattcaggttcctcgaccttttacacttgatgatgaatgaagattatggaatgaagaacgtttntttttcaatntggaccttgtaattcttgttaagatctttg

SEQ ID NO: 66876 - DNA, 384 bp, Glycine max
  unsure (1)..(384): unsure at all n locations
agctttanggcaacacatgcctctcccacaaattatatcacatggatttgttagctagcagagaataagtttaagattgacttagaagatcgatggtggtatgttaaagcctaattgttatacagatgagactattaattctatgagaattaattatggatgcctaggagagagatgctataattgtgaaactgcttgggaaaagtctcacttctatacaatgcgggatagactctcaagctgatttggaaactgcagttcggaggtatgagtatagttgatgcttggacatggatntaatggtaaaatttgatgatcttttggtggacagggtgaaggttatcaatggacgtccttggttggatgatatctttgatcactacc

SEQ ID NO: 66877 - DNA, 392 bp, Glycine max
  unsure (1)..(392): unsure at all n locations
atcccangacttagtgtccatcaccaggcttagtgacactgccaggcttactgccgctccaagtttttgggttatatccacatcatattgccaagggcaccatataaatactatttgggtacctctagcatgacattatatatgaaagagttgaatatctaacttaggagcaggcataacattcatataagattgataactttgcgagttttatgattgactgatatatgcgaattgcggtgaggttctatgctaactagtgtaagtatcaatatctatgcttgagagatatgaatctacttgactatgactatcaatatatttgcttgtgatatacttgaatgctatttcagtctatagttagatgacaacttatatcatgttgagcttgc

SEQ ID NO: 66878 - DNA, 415 bp, Glycine max
  unsure (1)..(415): unsure at all n locations
agcttcanactcaaaacaagtcttagagtttgtcatgagtagcaaagtgagttcctcgagccaaattagtgcatcaaatatcgggtagtcaccaatcgctagttcccctaggttcttcgaacctctctacccattataccttagtgtatctttgtccatcatccactttctcaacgtaatctcactttctcacaaatggaatagaaccaacgatccttactctccattcaatccacttgcttttgtcattgcattgcgtatgtagccctcataccacatacatcaacaatctctcgtacatccaaataaacaagagagaaaatgaggcttagacttacgtaccactcttagggaaccaattatgaccctttaaccggtaaaaatcacttatcacacaataaaatattaacaacat

SEQ ID NO: 66879 - DNA, 470 bp, Glycine max
  unsure (1)..(470): unsure at all n locations
ntatcaaatggatgtcaaaagtgcattcttaaatggctttattcatgaggaagtatatgtagatcaaccccctggatttgaaaactcagacaagcctaatcatgtttttagattaaaaaaggctttatatggcttaaagcaagcccctagggcttggtatgagcgtctgagtaagtttcttttagaaaaggatttctctagaggaaaagtagatactactcttttcatanaaagaaaatacatgatatttattagttcaaattatgttgaaatattattttggatctctatgaatattgtgcaggaattctctcatgacatgcaaggagttgaaatgtcaatgatggagaactaattttttttgattacaataaacaaaccaaactgaatttgtcataatcaatactgcaaataattacaattcgataaaatgctaccatgtcaccaatgacctgtgtattaataaataa

SEQ ID NO: 66880 - DNA, 341 bp, Glycine max
cataactcttgactcggacgtctgtttcttgcgcatcacatatagagacgaagcaactgaacaacggaagatctcgagatatccagaaggacatatcttttaactcacatgacggattcaggcacataatatatcgagacgcccgagattgaacaccggaagctctcgataaattcaaatggccattactgtgtcactcttaagtgcgaatagggcgcatcacctattgtgacgcctgaaatatgaacaacggaagctcttgagatatacagagggtcataacttcaaactgggaggtcgcggtcagagacacataatatatcgacactccagacgtgaac

SEQ ID NO: 66881 - DNA, 468 bp, Glycine max
  unsure (1)..(468): unsure at all n locations
gcttcaacaagttcttacaaataatcatcatattgcaganacctagcaagactacccatcatatctcccataaccccatacccacganaatcaaaggagaaagaagtccacccaaacctgaaatttcgaagtcccacacgtagagacgtgcttcacgactccgaaaatgtcctcctttcgcgatttggagcagaaatgggcaccaaaggttgaagctttgttgggcaacaatggtggaggaagaaaagaagaagaaggctgcgtgagagagagggagagcttctgaaatttcttttgggctgagtgaagagagagagagaggtgctttttggttttaaaaagggttttctctttctctattattttatttaagctatgccacatgtctccatttgagtggagcaaaaagggcccactttctcttttgattgtgacccatactcagccacaaaaagtgagaaaaatatg

SEQ ID NO: 66882 - DNA, 467 bp, Glycine max
gctattattagagaaaacatgtacctttgctttttttaactaaccatatgaaatcatcacaagaaggactagaatgcctgcaatgttgatagaggtgaaggttcttcaactagtccttcaatttttgtttttaactatccgggacatgtgccacatcccatgaatattacctagaaaaacgtgacagggaagttgcccaattgtacgttcttcaacattgtgaagaagttgagccatatttatagtaagtaggtgtagagggcattaactaatgaatttctattcattaagtacatgttacaacttgcctattattttcacttaattaaaatatagatacaaatgcactgggataagatcccaatacacaacaaatatggattacgatattgtagaagaagccttattttctagattataacaaactagttaccttctacacataattaacacatattctttgctac

SEQ ID NO: 66883 - DNA, 459 bp, Glycine max
  unsure (1)..(459): unsure at all n locations
cttagttatattttaataaatcaatggagtgagcggcttattatattttgtanagaagnnaaattaaaaagtttaaaattcagattattatacaaaataaatatttactaaaataaatatattattatacaaaattcagattttaaaacatatattcacccagaaaatatcgtaaataatttaaataatataacaaatatgcttaaattgaattatatcaatttctttataacgaactgagatataaatatgatacatgaataattggtaaataaatattttaaattaattaaaataatttatataagataatattaattttaataatatataaacttttataaaaaaggaagagggagcgggggtgaaaccacttcggaaggacaaagagggtcttggaataagacagtgtgatttagaaaatgaaggaaagcaatggaaaaacactgtgatatggtg

SEQ ID NO: 66884 - DNA, 471 bp, Glycine max
  unsure (1)..(471): unsure at all n locations
gcttcggngttcatgaaaacttgtgttntactgtttattacaaccttatcaaccaagctgatntaaatttgattaaactgttttagacttgaacaggaaaaggttggaagcagtcttgcaattgaaatgtgggagaccaaggaaacggagctaaaatgctaattgtagcattaacttactggaacaaatcttaacaaagagatcagaataattcacctctattgttgaattgggagggatttcttggactcctttgcttccataggcaagttcaggaggaacaattaacagccgctgcagaaaacttactaaattactgcttgatgaagcatatgatccaacctaaaatctaaacaattttaacccctctcaagtaaaactacttacacacatactataatagcttctgagcttaaaaaatntagtgagatgtcaagaactcacccaacttgtgattttataatcttagag

SEQ ID NO: 66885 - DNA, 519 bp, Glycine max
  unsure (1)..(519): unsure at all n locations
tctacaacccaacaagtgtcaacaggatacacagaaatctctgtggattattcagnggaaagcacgtcagaggcactgcgttgctccaaacggagaacactgcaccatcagcagcagcagaataatattggagagggaaactgttccttcactttggaagattacaacacagtgccagtactaccctattggcctggggtcccttattatcatccctaattaatgaatgaatgctatggtgttagtttgaacaataataattaatgtgagtgagcttagttagctaattacataactaaattttgattggtaacgtatgaactgaagagtagtactagatggatggaaaacccttcttccataggaactgacattaggaatatcaaaagcaagcagacctgcatgttggttggacgggaattattgctaaattatagctgtctatcagacatcactttataattagtcgcttccaagtgcatcaagtctctaattgttangtactgctattaatatata

SEQ ID NO: 66886 - DNA, 441 bp, Glycine max
  unsure (1)..(441): unsure at all n locations
agcttgtaggattatggggtacccatcacatgtgtgtactaggtggcggtcgggcgatggtgcacaacaagttttccacatccacaaagcgcgcataaacccaccatcccctgttgcccacctccaactgagctcacgtactcccacgtagcccatatcctcgtttctctcaacaccgggtccccatcaatcctcccaagcttccacaacatccaagcaaaacaacatacaaacaacacaagctatcacagccaagcaaaacagagcaaaggcagaaaactctgccaaaacaccaaccaaatcacagctnttctcacttaaagactccagtaacaattccttcgatccaattcgttaaccgttggatcgactccaaaantttactggaagtctatagtacataagcctacattgtgaccggtgggatctactagcaaacat

SEQ ID NO: 66887 - DNA, 450 bp, Glycine max
  unsure (1)..(450): unsure at all n locations
tgagaatcaagaagctattttgggctcaaccaaaaaacatatgaagatactttcaccaatgaanagtcanaatgcctaatcaatgtgacaacttacaagtgtccttagcatataagccatcnatataatgaaagaatctccataaactagtaggaggcagaatggannacagaaatggnnttctcatgtaaaatagtgaaanaacttntgtgaatagctctctcttgagacatttnttngattccacctattttaatntatgaagagagagatacacacaaactnttaagatgaccttgtcatgagaaaatatcacatgggataatccattctgatcagagtaatcattntcttcatgggaaatggagttagctgaccatgactcatcanacttatgcacacacagaaggcatacgtaagaatacatatatatagcaacaagcacaattg

SEQ ID NO: 66888 - DNA, 456 bp, Glycine max
  unsure (1)..(456): unsure at all n locations
agcttctgttgttcgatttcgaacgtctcgattttttatgtgcctgaatcggacctccgagataaaagttatgaccatttgactatctcgagagcttccgttgttcgattacgaacgtctcgantatttatgtgcctgaatcggacctccgagttaaaagttatgaccatttgaatatctcgagagcttccgttgttcaattgcgagcgtctctatatgtgatgcgcctgaatcggacctccgagtgaaaagtaatgaccatttgaatttctcaagagcttccgttgttcaatttcaagcgtctcgatatattatgcgcctgaatccgacctccgagttaaaagttatgaccaatngaatatctcgagaagcttcgttgttccatttcgagcgtctctatatgtgatgcgcctgactcagacctccgagtgaatagtatgaccatttgaatctctc

SEQ ID NO: 66889 - DNA, 408 bp, Glycine max
tgttcattacttttcactcggacgtctgtttcgagcgcatcacatatagagacgttgcaattgaacaacggaagttctcgagatattcaaatggtcataacttttaactcagaggtcggattcaggcacataatatatcgagacgcccgaaattgaacagcggaagctcttgagaaattcatatggtcattacttttcactcggaggtccgattaaggtgcatcacatattgagacgctcgcaattgaacaacggaagctctcgagatattcaaatggtcataacttgtaactcggaggtcggatttagagacacattatatatcgagactcccgatgttaactacagaagctcttgagatttcaagggtcatcacttatcactcgaggtctatcaggccatcacata

SEQ ID NO: 66890 - DNA, 62 bp, Glycine max
gcaggggtgccgcgctctgtttctccctagggcgagacttcttcagaacggtggccgatgaa

SEQ ID NO: 66891 - DNA, 485 bp, Glycine max
  unsure (1)..(485): unsure at all n locations
gatcttaagtcaccgcggctgcagctaaagccattgcgaattcataattttctttaacggcttntgtgaaaagttctagctcatccaaggagccataaacatcataaacgtcgtcaattgtagttattagagaagtgactttggttaaaccttcgcgaagatcactgaactgaggctcgaatgccattcccatgctccaaaagaaacactccattagcctgtcccggctaaagcttaactttggagctagtcccatccgtttccaccaccttcgttattcgtgattaattaattaaaccaaaaacatagtacatcgttattttttttcttaattaggttagattagattgaatttatctttcttatttggctaatctcatccaattttattcatatcggattgagttggttttcaggttcactcacatcatatgatgcgtagaaaaaattcacattcaaaactaaatataatcagatatgtttta

SEQ ID NO: 66892 - DNA, 519 bp, Glycine max
  unsure (1)..(519): unsure at all n locations
tcatgatgatgaatgaagtatgattcaaggtagtttgatgatgtcatatagtccaaaataatgatattaagattgagtcaacaagttcaacatcaatattataaaaaaagacatcaagaagaatcaagattcaagagaagatgaattcaagattcaagagaagaaaccaaaaagcaacaagtcaagacttcacaagggaagtattgaaaaagaattttcaaaacccaacatagcacagttttgttttacaagagaatgttttccaaatgtttctaagttaccagagtatttattctctagtaatcgattatcaaagtggtaaagtttggattcaaaagcttttaactgaatntgcaacgttccaaatattttttaaatgatttaatcgattacaatatattngtaatcgattactagtgtatctgaacgttgaaattcaaattcaatggtgaagcagtcgcatttttcatanaatgctntggataatcgattacatggttatgataatcgactatcagt

SEQ ID NO: 66893 - DNA, 464 bp, Glycine max
  unsure (1)..(464): unsure at all n locations
ttaagtgaccgcagctgcagcttgccaaccctatgttgcgcatgtgagttctttgttgccatcgncatgaagcgatgctgaggagtatttgttgtcgctgctcatactggaaacgcatgaggaccanacatggttcatggctccgtcgaggactacgaggttgccgtcattggaaatagtgatggctcctccggtgccgttgatcgtgttgtcgcggcttgcgacccatataacttctggtccgggaatgttgtcgtaccaaattccaacgtatcgggaagaggagttgcagaactgacaaacccattaaaagtgagctttctgaacctatgctcatgctctttgtcctgatcgtgacgccctgcgtgatcctggtcgtataactagctgcgaaagacaaccattaatggtggaaagagacgaatgagatgagtaatatatactagtcgattatcgtcgccgct

SEQ ID NO: 66894 - DNA, 421 bp, Glycine max
  unsure (1)..(421): unsure at all n locations
ttcttctacaaatacttggttttaatttatctaagcaggcccttaatgtggtcaattgtagttctacttaagtttctcttctatatggngatataacaacaatatgatgaacgttaatttaaaggactcggtgaaacttanaaactgctaatgaactctgattaatcctcataatttcttgtcaacgtgagtcatctaaagtgtaattgtaaacactagtttgctacagtatattttccttgactaaactactaatgtaattagcgtagtattaggattagcatgtagccttganaatgattngtcaagttattattcgntcacagggattgaaaattatggttctatatcttaatgtggtgtcaaaacagagttaaataagctgttcccttctataccnttggtggctgaagaggactct

SEQ ID NO: 66895 - DNA, 387 bp, Glycine max
  unsure (1)..(387): unsure at all n locations
agcttctactaagcacagataagaacaaagtcttttttatttacaattctacaaaaagaaccataaatttgggaaaatatatatattttgtaaaagttttctatacaaaatttagtcgtacaagacgactaacactattccaaaaaatccatcttagaagggggactcttctgagacagttataacttanaaccgacgtaagaaggggcagattcaaagatggttccaacgtcgtaaccaaaagacagttntgatgttataaccatcataaaacctaccatattcaaagacggttatgacgttggaatcgtcttagaatgtgccacattcaaagacgatggacaattacgaggttataaccatctntgaatgtgtcacattactaaa

SEQ ID NO: 66896 - DNA, 478 bp, Glycine max
  unsure (1)..(478): unsure at all n locations
tctggtgggacatctngactagctgtccaatctgtcattcacttcagattctgccttcttctattttcagatggggaatgcctcgaacaacacctttgtcaatggatttcttcatgcctcttaagtgcagatgtccaaatcgtttgatgccatatttgacttcatcnttcttggaggatagacatgtggaggagtaactggtttcttgaggtgttcataggtaacagttgtcctttgatctgctgcccttcattagaacttcactcttctcatttgtcaccaagcattctgactntgtgaagttacattgaatccttcatcacacaactgactgatgctgatcaagtttgcagtcagtcccttcaccagcagtactttgttcagactaggaagtccatcatggactagctgtcccattccagtgatcttcctgtagagccatctcaaatgcacatagctgtggagcaggttaatgtta

SEQ ID NO: 66897 - DNA, 464 bp, Glycine max
agcttcagaaaacaatagaagataatgctacagttgccgcttccaatacagctagggaagcggaaccggtgctacagccctcaataaacttgggccgagatagaaacacgacggttttcggtcggaggtatagtcctcaagcctacccttatggtttgcctctggacttcactccccgtaccgctccagacgatttgagccaagcccctaccttcgaggggcaactccctccttatgtcaactatcctctgcaacaagatgatgaaggagatgcccatctaggccctctacttcccctcaaggatccggccccccatgaattgccccaaccgaacatagttcgccatgtcccgtctccacctgcacccattaaagaattcgttcccttcgcaaaagataagggaaagatttgattacttgaagagaggctgagagcggtagaatgccttacaactacccgttct

SEQ ID NO: 66898 - DNA, 439 bp, Glycine max
  unsure (1)..(439): unsure at all n locations
atgagttacacatacccattctgttntatggtttttgtgatgatgtttgtgatgtttatatgctgaaattgctgatggaaatctgttagagatgaagggtagaattaacctacggttagaaagtgagaatgtgatgttgtgagtggaaaaagagtgaggcttgagagttggaaggctaagtctgaattctgtggtaaatggaggttaaagtgagttaatactagcttgaaatgtcatttacaacatgtgagaaaggttaggctgagctagagagaaaagcaaatgaccaaagtgaaccaagagccatttctagggcaaaattgggtgttgaagagtcaaattttgattcggtggaattttacgtgtaaattcagtttgagaaagttagaatgatgttatgacttgtgtangtgagagttgcttcaattaccccatctaa

SEQ ID NO: 66899 - DNA, 429 bp, Glycine max
tactaagctggtacgatattgctaccttagccaccgtgagccagagccacctgttgctagagctaaaccgtcattctcatgtctcacaagtctcaacctttcttgcaaattctctttctaagcccgagccacttctctcacaactcacaagtctcgggtctcgcatttcttgacctctctcatgttgctctgtgtagaagcaagctttatgatgatgaatcaagttgattcaagtagttttgatgatgacaaagatgatgacaaaaagtccaaagaatgatttcaagaatgagtcaacaagttcaagatcacgattaattccaagtttcatgagaagaaatcaagaagattcaagaatcaagagaagtttgatttcaagattcaagagaagatgaattcaagaatcaagagaagaaatcaagaagactt

SEQ ID NO: 66900 - DNA, 370 bp, Glycine max
  unsure (1)..(370): unsure at all n locations
gcaagcttgcctctctagcatctttctgggttcttctttanttttagnaccaagttgcccatctggaagtttctttgattgacctggttgctgtatcatttcttaactcttctttggtacaaatcgactctcatgtggacttctttgatggtctttttggctaagtcgagtgcctcactaagcatctttgtatttggctaagtcgagtgcttcaataagcatcttgttattttcttaaaatgggctatacattcctcattccactttgttccctcctacttctttagtagtttgaaagaaggtctggccatataacacctattcacatgtaccaacatgaccatcgntcgaagattaatacttctcatca

SEQ ID NO: 66901 - DNA, 473 bp, Glycine max
tgtaagttaggtttcaaggctgggtgtagaccattcattggtctatatggttgttttttaaagggttattatggtggacaactactatctgctgttggacaagatgcaaataaccataactactgtattgcttatgcaattgtggatgctgagaataaagacaactggagatggtttctcacactactgaggaaagatttgggagattgtaggcagcatgggtggaattttatgagtgacatgcagaaggtacgtgttttagtttattgtactattatgatttttttatatgttctttgaaggaccaaactgacagtaagtgaaatctttcagggactaattgctgttgttcatgaagtattcccaaatgcacctcatacgtactgggctatgcatttgtggaggagattcattaagcaatacacagacttggattgaggtgtgtatgtggaaatgtgaatggcaccacacct

SEQ ID NO: 66902 - DNA, 442 bp, Glycine max
cattttaggttcttaatcttgtaagagataatattcgtcgtgttgtatcttttctgttgctgataattaaattatctgttttagttttaagtattataaagcttgtatgctatatattgtttaagtattaatattatttgttttaggtattctaagttattattcaaatatatggtacattagtttgtattaaattggcatatatatatatatatatatatatatatatatatatatatcgtctaaatttttctctctatattaatttatgctattaaaatatatattgtgctatttatttaaatatgcatttggtgctctaggcgtgtggtggaggaaaaagcttgtgagctgtgtgtctctcagatcatatttggttttcttacacatggtacataactaatattattgcgttctattattttggtgggaaatataatat

SEQ ID NO: 66903 - DNA, 356 bp, Glycine max
tctgcacagatggaaccctacataagagttgtacttgctgattctcggcaaaacatttggaaggtcaatgcggatcctaagtgcacacacctggtaccaagagctagtgagaatattatcccagttagagagaacctccaaaggaagatgcccaacattgatccgatatgcccttgttgtaaacaggttgaaaaaactattgaacatattctgctcaaaagcaaggaggtcatgagggtttggcttgctaaccggatgagcattcatttattatatcacataccatctttcaaccagtggttagcttcttgctttgacatgaacgatatgatgtctttacaacaagtttttatgat

SEQ ID NO: 66904 - DNA, 419 bp, Glycine max
  unsure (1)..(419): unsure at all n locations
gagctngtagccaatagtactattaccgatatgtcttttcaccccaaagggataaccagcaggaatcctattgctacgccaagtaaactcgaggaagaccatatcttggatgttctacatcggtctagaaattagtagatgaagtcacaacattctgagtctgatcaatgcgtagttgttaggttccgctttcgattgttagtactgacattgactgtaaaatagtctaactcctaacacagtacatgattcgtgtgttttgtattacagactttgtgttgtatatattccaactctttattttaaaaacaagtatgtaaatcttatctattatttcgacataataaatacgggataaaanagtctagcttctgacataaagtcacaacatgaagcctattacagaaacaatttattta

SEQ ID NO: 66905 - DNA, 481 bp, Glycine max
  unsure (1)..(481): unsure at all n locations
actcaagctggtgcgcttagctaacattngtgcttaacatgcacaactgttttttataattccaactcatcaaatcactatgatgactgtcaccctgttaattaatgtaataattctcacgctgtcaattaattacttaattagaaatcagtatcgacgcaacttttttttccttttattagcatgcttctcatattttaagataattattttaaaacttacatataaatgcattataaatattaggtgtcactgaatgaaaatataaaaatatgtatactgttaatgcatctatttttttttcgtaatattataaagcaaataggagtatgaaaaatgcaatagataattactttcctatcaccataggctacaattaactgaattaatttatttgaagcgtgagatattataaaggaaagcttgtngaggttccttccagtatctacatgcagatgccacttcgcttatatcgtatatt

SEQ ID NO: 66906 - DNA, 386 bp, Glycine max
  unsure (1)..(386): unsure at all n locations
tagttatgcatgatacagcatgctgaanaatgctgttttgccccatgcacaattatgtatagtggcattgtgttacatgtggagtatgaagacaagtggtggtgtgtctcctcctcacagatccaaaggggtgtaagtgtaaatgggtttagatgtagcatttctctaataccttttatcagctagcaatgagcagacatcattatatgggtgtttaagctatggacagacattattatatatctactaataacttcaaattagaagtgttgtagtatgtggacatttatgcatataatatatctnttcagtctactattgcaaatgctgctgctgntganggacctccatatgctcatgcatcagaatgtgggcctgatgtggat

SEQ ID NO: 66907 - DNA, 267 bp, Glycine max
  unsure (1)..(267): unsure at all n locations
ttagttattagtaaattcaatttagaatgagaaatcccanagagaaaacgtccgattgatttttttcgcttcatttttactaaaaggtattgtttgactattatattattattttacctctttnttgatttccaacgtggttacggcacgaccgaacggttgttattcatttttacagaaattaatagatattacatatcaaatgatcggtggaaatttattttattttttgattacgcgagacatgactttaataaatgactgaag

SEQ ID NO: 66908 - DNA, 254 bp, Glycine max
tgagtatgacagtcaccgctgtaggagcgctgtacaccagcagcgcttctaggccatcaagggatggtcatttctccgggagcgacgcgtccagctcatggatgacgagtattctgatttctatgaggagatatgtcgccggcggcgggcatcactggttacccccatggccaagttcgatccacaagtattctctgggtattatgccaatgcttggcccacacaagatggcgtgcgtgactataagtcctgtg

SEQ ID NO: 66909 - DNA, 458 bp, Glycine max
  unsure (1)..(458): unsure at all n locations
agtcacctgcggcatgcaagcttgttcttgatntttccttagttctgtatttatctntgaacaatatacttggccttcatttaactgtctntgcgcttggcggccacgctcaacaaagtactttcgacacctactgtacgttgatttgaccaatgctgttatgggaatgtttcgacaatccttcaaaaccttattgatacattctgaaaggttggttgtcatgtggccatatcgacgtccttctctatcataagccatcgtccatttttcctttgaaattcgatcaacccatgtggctatggctggactcagttcacgaaattnttgtaaattctgatcaaaaatgtgcttgcaaggagtgtatgctgcataaaaatatgtatgaataacaatntttagtatataggacacttaaatatacgtcccaacanataggaaatcttacccaattttcaaca

SEQ ID NO: 66910 - DNA, 303 bp, Glycine max
taccctgatgaggatgacacatatgttcttatttctggactgatacacttgttgcccaggtggcatggtcttgcaggtgaacaccctcataaatatctgaaagaattacatattgtctgctccaccatgaaacctccagatgtaccagaagatcacatctttctgaatgccgttcctcattctttggagggagtggcacaagatttgtgtattaccttgctccaaagtccattacgagctatgatgacctaaagagagtgttcttatagataattttccctgcttataggaccactgccatct

SEQ ID NO: 66911 - DNA, 336 bp, Glycine max
  unsure (1)..(336): unsure at all n locations
agcttgcttgtggggcttctatggaggttggatctntgagctntaatcagggccttcaatggtgattttacaccatggagatgcagcggaaggcaaaggagaagaagagaggggaggcaccatccactagggaataagccaaggaagaaggagcttcaccaccacgaattgctttggataagaagcttgaagaggatgctttaatggaggaaaagaaagagagaaggggggagcacgaaattgaaggaataaaagagggagagaagtggaactttgaagtgtatctcataagactctcattcatcanagttacaacaagtgttacacatgcttcta

SEQ ID NO: 66912 - DNA, 472 bp, Glycine max
ggaaggcaaactggatgcgttggtcaactgggtaacccatctgtccttgaatcaaaaatctgtacctgtcacaagggtttgtggtttgtgctcctctgctgaccaccatacagacctttgcccttccatgcagcaacctggagcaattgagcagcctgaagcttatgctgcaaatatttacaatagacctcctcaacctcaacagcaaaatcaaccacagcagagcaattatgacctttccagcaacagatacaaccctggatggaggaatcaccctaacctcagatggtccagccctcagcaacaacaacagcagcctgctccttccttccaaaatgctgctggcccaagcagaccatacattccttcaccaatccaacaacagcgacaaccccagagacaaccaacaagtgaggcccctccacaacacttcctcgaagaacttgtgaggcaaatgactatgccgaacatg

SEQ ID NO: 66913 - DNA, 438 bp, Glycine max
  unsure (1)..(438): unsure at all n locations
agcttgcacaaagatgttctgtacatcttatttatatgtcatggcaagcctgcacattactgcttaatataagaagagaaggatggtaagccttcgtactttgatatcaaacactacattgaagacaaggaatattcgcatgaggcctctaacaacgacaagaggatgttgtgaaggttgacggccatcttcttcctgaatgggaatatcttatacaagaggaaccatgacatggtactgcttcgatgtgtcgatgccagagaggctgaanaaatgctggcagaggtacatgagggatcctttggaacacatgccaatggacatgccatggccttgaaaaatctgagagcanggtattactggctcaccgtggagagtgattgttgcatccatgtgaggaaatgtcataagtgccatgcctctgctgataatgttaat

SEQ ID NO: 66914 - DNA, 432 bp, Glycine max
ctcgccaaggcgagcaaggtggcttccttatattcaaccgccttctggaggaatcttctggagggcccaagtgggcctggttgctatttgcacccccatttttactaaatacacccctgccttttttttggtgattctttttttcgtaaagttacgaaaatttacgaatttcgtaatgatacttgttttctttccataatgttacggaaccttgcggattacataatcatcccttttttgacttacggaatgttacggaacctcactaattgtgcaacgatgcttccttttgacttccggtgtgtcacagaaccttacggattgtgcatcaatactttcttttgatttccggcacgtcacggaacttcacaaatggcctaatgatgggtgccaagcacctcaaaatgaccaaacacaagttgcatgccacca

SEQ ID NO: 66915 - DNA, 280 bp, Glycine max
gctgggcatcaacacatgattcactttgtgtttttagccccacaatcggagctgagtgttaaaaactgtactttgctccacaagcattactggatactattatgcgcaaatatcaaccttaaggaaacaagcttagcacatccgcacatccttaactggtgttactaacccgatatatgagatgctggatgaacaaactttttatgcccccatacttttctgatgacaaaacccgcaaatcagacctcagatggacaaccttacaatcagcacttacttt

SEQ ID NO: 66916 - DNA, 321 bp, Glycine max
  unsure (1)..(321): unsure at all n locations
acacataaaactaagcttggaacaaagtaataaacttgttatattttttaaagttttgggggtcctcanaaagagggatggaacggttgattaccttgcacatgtatatagcttgcactgacactcaatcagcaaggagcattgttgtggctccttgagttgaaaaacagtgcatatcttattgaatggtagttgtaacctataagaatatgcacacaacctaagtagatgggtgatggacttatcgccttctaattatattcgaataagagaggatactccattttgtctatatgtacaactctttcattatattacagt

SEQ ID NO: 66917 - DNA, 450 bp, Glycine max
  unsure (1)..(450): unsure at all n locations
tgaatgtccaagtttcttgtgccatacctattgatttcctttgatggataatagaaatgctacatnttgatttgatagtttactaagattaatcttataaagattatctttcctcttagtagtgaaaaagttagttctcattnttgtgttggacaacacacccttctttgctaaaggaaacatcaagttcattagcacataattgacttatgctaagcagattgtgtttaagccctttaacaaaaagtaaattatcaatgtgaggattgagatcaatacttatctttcctactcctactattttctctttttgatttcttctgaaagtgactgttccaccatgcatgggagtcaggcattggaacatacatgtttctcttatcatgtgaagtggcagtcactgtccaagtaccatgattggtgcgtcttttgtggggtgaatatatttgc

SEQ ID NO: 66918 - DNA, 448 bp, Glycine max
  unsure (1)..(448): unsure at all n locations
ttataccaactttattacttaagctgcatttacctgtaaccaggcctctgttatgaacttaagctgtgattcaggctggcactgtgtatcactaagcttctcaatctgccaaaggaaaaatggcaattactagacaattttacaattcctagaaaaagatattaagctctacttatatgcaagaaagtgcctaagcaatccagcagaagttatatttttaagaaagaagcacaatggtttttaagataaaaagaattgcaactatgaggaatgctggaaaggttaagacctgcgctagttatttctagtcagtttaattatataacaaaaaattattccaaggttcatatctttattacaatgaaagaatgaataatnntaacattttactttactgatttatacaaagaaaattaacatttcaacatcacattccattattcttgat

SEQ ID NO: 66919 - DNA, 358 bp, Glycine max
gtcacctgcggcatgcaagcttgagatgaggaagtgttgaagggtgacatctttttgctttattgtcgaccacagagtggtaactggagatatgtcgtgggggtcaagacaccttgcggacgtcacgtggtgtgctattgcccaataccaagcttgaccaatcccgacccagcccgggcatagtccgtcagtgagaacctgtgatgtacctaagcaggcgagcctctggcagtcatcagataaaaggaacatagaccacatagcaaggaggcttgtggtggctggccagctgtgaactatgattgatatgtgggttatggcctctggtaatccattaccaagagtgggtaatcgatta

SEQ ID NO: 66920 - DNA, 470 bp, Glycine max
  unsure (1)..(470): unsure at all n locations
ntacatgaggaagtgtggaagggtgagacttccttcntttattgttgaccacatagtggtacttggagatatgtcgtgggggtcaggagaccttgtggatgtcaggtggggtgctattgcccaaaaccaagctngatcaatcccgatccaacccgggcatagtcagtcagtgagaacctgtgatgtacctaagcaggcgagctcctggcagtcaacagattaaatgaacaaagaccacatagcaaggatgcttgtgtggtggctggccatctgtgaaacttgattgatatatgggatgtggcctctggtaatagattaccaacggtgggtaatcgaatacaaggcttaatagtgaagacaggaagctgagatggtctctggtaattattaccaaggagtgtaatcgataccaggcttgataacaggtcaaaagctaggaggcatctggtattcgaattcaagggtgaatc

SEQ ID NO: 66921 - DNA, 431 bp, Glycine max
  unsure (1)..(431): unsure at all n locations
tgcaacatccggttggatattctatatgaacatcctatttctttgcattggtaccttggtgattagattgcttctcccatatctaatggaaagacttgaatctttcatgtgaatatcatagcctttttcgagtaattgtcccaaactcaaaatattgttcttcatatttaggacgtactagacatttgatatgaattaatgtcttccatctttcagaagaattaagatcataccttcgtcttttataggagtcttataattatcaccaaatgagacattgtcacttactgattcatcacgatccacgaaaatgcttcttttccgcacaatngtgcttgcactatgtcaaggacatttgtgtctcgctccttcatgcctccacggcagagaatgttcaaactcttgcttttcacaagtatctctttcactta

SEQ ID NO: 66922 - DNA, 475 bp, Glycine max
  unsure (1)..(475): unsure at all n locations
tctccctctnttccctataaatagggggaggagggaagaacatatttgttcaaccctcccggtatctgagaatcacttaaaattagtgagaaaaattgtttccgtgaagaaaatccaagctgaggcgcttccgagacgtttctgtgggtgatttcacgaagattttccatcgttcttcgttcgttcttcgtcgttcttcggtcttcaaccggtaagttcccgaaatcgaacttttcaattcattctatgtacccttagtggtccccacttgtttcgcatgcttttattttcatttcatttacttttcgtaccctcttttgacgtgctttagtcatttatttaagtcattttttcgcctaatcagaaaataaaataaatntccaccgatcatttggattgtaacatcttttaatntctgttaaaatgaaatccgaccgttcgatcatgcagtnaccacatttaaaaccaaaaaaag

SEQ ID NO: 66923 - DNA, 441 bp, Glycine max
  unsure (1)..(441): unsure at all n locations
agcttataacatcacatatcctcattccttgtttcatttgattcaaggacatntgtttcatgggtttccaaatgaagacccttacacacaccttgctacttatatataaatttgcaacacagtaaaaattgcctgtgtgccggacaatgcagtgaggcttancttgttctcattttcgctggctggagaagccaagaggtggatgcactcctttaacggacacagcttaaagacttgggaagagggtgtccataagtttttgaagaagtactttcttgagtccaagacagctgatagcagcgcagctatctctttattccatccatttccagatgaagtcctaagagaagcgcttgagagatgtcgtaccttgttgcggaagacaccaactcatggattattcaagccgattcagctggacattgttattgatggtttgag

SEQ ID NO: 66924 - DNA, 429 bp, Glycine max
  unsure (1)..(429): unsure at all n locations
agcgaccttagatactcagctagacaatatactgccttattaactgtctttgngctngtttgccacgatcaacaaagtactttcgaaacctactgtatgttgattgtcatgtggccatatcgacatccttctctatcataagtcatcgtccatttttcttttgaaatgcgatcaatccacgttgctatggctggactcagttgacaaaaattttctaaattttgataaaaaatgtgcttgcaaaaagtgtagcctgcataaaattagttaggaacaacaattttaagtatatatgaaacttaaattaacatgaccatgataaatgaaatcttacccaatttcttcaacatttctttttgtttggcattattgaatttgcaattgaaattgcttgctatgtgtctgacgcagtaaacatgataaccgtgg

SEQ ID NO: 66925 - DNA, 481 bp, Glycine max
  unsure (1)..(481): unsure at all n locations
tgcaagcttaacataaccacttcgggtttggtancttcttacatggattngatggggcctatgcaagttgaaagccttggcggaaagaggtatgcctatgttgttgtggatgatttctccagatttacctgggtaaaatttatcagagagaaatcagaaacctttgaagtattcaaagagttgagtctaacacttcaaagagagaaagactgtgtcatcaagagaatcaggagtgaccatggcagagaatttgaaaacagcagattcactgaattctgcacatctgaaggcatcactcatgagttctctgcagccattacaccacaacagaatgggatagttgagaggaaaaacaggaccttgcaagaggctgctcgggtcatgcttcatgccaaagaacttacctataatctctgggctgaagccatgaacacagcatgctacatncacaacagagtcacactgagaagagggacttcac

SEQ ID NO: 66926 - DNA, 466 bp, Glycine max
  unsure (1)..(466): unsure at all n locations
cgcgcttgtgtgataggatgtgactcttcacattagaagttgaatttttcgttcaaaggcactggtaatcgatggccaaaacattgtaatcgattatagcttgtcgaaattaattggaacgttggaaatacaatttgaaaactttttcaaatccattctgctactggtaatcgattacaacaatcgggtaatcgattaccagagagtaaaaactctntggtaaacatgttttgagaaaaaccatgtgctattcaatttttgagagaaaccttttcatacttatcttgactaagccttctcttgattcttgaatcttgagtcttgactcttaactctcttcttgagtcttgaatatttcttgatatacttgaagtgttctttgaatgagctttgatccacttaagctcgttctctgattgatctttgaagcttttggtatcagccttgtcatcatctttctgtatca

SEQ ID NO: 66927 - DNA, 285 bp, Glycine max
tttattcgaagaccacatagtgatacctgtagatatgtcgcggcggtcacgagaccttggtgacgtcaggtggggtgctattgcccaaaaccaagcttgaccaataccgacccaacccgggcatagtcagtcaaagagaacctgtgatgtacctaaacaggcgagctattggcagtcaaccgattaatgaacaaacaccacacagcacggatgcttatgtggtggctggccagctgtgaatcttgaatgatatatgggatatggcctctggtaatcgattaccaa

SEQ ID NO: 66928 - DNA, 402 bp, Glycine max
tcacccttcgtcccacacttagtccaaacttatcttctgttatcttcttatcctctagccttcaccacttctctcgcacctctatttcccatctccttccttcctttttcgattccagctgctagtcattatacgatctccattggagctcatgcttccaagaagatataacatatgtcaacctatatctaaacatgcaatccaacttcatataaattatttcataaaattagttaatactcaacaaaatatcatggtggattattctgactctcattatgatggttcgcttatcctctacgaccaccagaatgggtagtgagtcatataccacctacatcttcctcactacctcccttctttgatgatcaggaacgtatggcgtatgtggtatcgttaagg

SEQ ID NO: 66929 - DNA, 453 bp, Glycine max
  unsure (1)..(453): unsure at all n locations
agctntaataaattttggaagcaattattagttatgaatttatcgaataatatataacctttatatgttgggggttaaaagatgtttcaaattccatgctatcttcttttcagttgcagctttatgccanatcaagtcactacttgaataaaaccaatgggatgctgagcttcactagcgaattgataggtaaagaatatagaatgtgatactaagtaaaaggtattcaaacaaaaggataaagaggaacggcacatagtgggcattttcctaaataaagtataaaagcatatgttctgaatgttttccctcataaaatattattgaccatttgcatttcacaatttgtaatacctctgcttcctctccattttctgatcacttttctacanaagggtcatttgtggcataactgtaagtaattcaaatcgtattgaaacaatntcacttttc

SEQ ID NO: 66930 - DNA, 331 bp, Glycine max
tgagcttgcgaagatgaatgagacattaacttggtgtgatagacaagagccagcctttgctttgctcatagaaaagctcactaatgcacctattctagctcttcctgacttatctacaaagtttgagctataatgtgatgcctctggaagcgggtggggagttcgattgttcaaaggtgggaccctatcgcttatgttagtgaataacttcatggtgctaccctcacataccccacctatgataaagagctttatgccttaatgatggatttgccttgcagattcttcttattccactctttcttccttcaaatatattcaaggaaaatct

SEQ ID NO: 66931 - DNA, 458 bp, Glycine max
  unsure (1)..(458): unsure at all n locations
tcaccaagagatgattatataaatcgtgccgggcactgtgttttgtttaatgctctctntcataccttggcattacatattctgctggtgaaagaagctgaaacctattgatgtggattttaaagctatgcttctggatcccctgctaatagagtataagttcgagacttatatttcatctgatatatcaccatcttactaattgagaatttctccagatctgtgattttgggctagcataatggttaccagaactgtgtactcaccgtaatggatcaaaatttgaaggcacaatggggtaagcaaatatatatacatatgataaactactagaactatagttagagaattttttgtctcatgatctaatggttacccatgatcattgattgacaggtattagactctgatatttatgacggcatagtagcagaaactgatattattcctctgggctt

SEQ ID NO: 66932 - DNA, 456 bp, Glycine max
  unsure (1)..(456): unsure at all n locations
ttaagtcacctgcggcatgcaagcnttgcagaattggtcttcgccagtgtaattatctatgtgggcctgaaaaaaggcaaatntgatcatcctactangacgactgagaaaactggggcaaataaagagggtgaggatgagggagaaacccatgctgtgactgccattcctgtacggccaagtttcccaccaaacccaacaatgtcattactcagtcaataacaaacctcctccttacccaccacccagttatccacaaaggccatccctaaatcaaccacaaagcctgtctatcgcacttccaatgacgaacaccacctttagcacaaaccaaaaaataacaccaacaaaaaggaattttgcagcaaaaagcctgtagggttcaccccaaattccattgtcatatgctaaacttgatcccatatccactcaataattcaatggtagccataaccc

SEQ ID NO: 66933 - DNA, 478 bp, Glycine max
  unsure (1)..(478): unsure at all n locations
tccncaaaggcatagttatntctagtttcctgagaatatcgtgtaatctcgccagatggcggtccttgtccttcttgaaaggtaccacaagatatggtactttcatgtcctcatttgaagctttttctttcttcttctctcttgctttttcacttctactcttttctttcccttctttatttttttcaactttttctttttctccattttctttttctttttctacctctatttctttttcctagtcgtttatttctttctcctcaaccattattggtttttcactctcctgattggtcacatctgttacctcctcttcctttntcttagtgccatcctttacacaaaattgnttctccaaagccacactatcctcatcctcatctgccaaacactttttgtttcttgtcatcacaacattgcattcctctttgagattcttttctgtgttcgccccaaagctattggatgacttttc

SEQ ID NO: 66934 - DNA, 470 bp, Glycine max
  unsure (1)..(470): unsure at all n locations
gcttgactatcggaagacttgcttatttatattttagtcagtttaagatctcttataactgtgagaaggggaaatggtctcttaatgagctcatttcatactgtgtgcaagaagaggaaagactgaagcaagaaaggactgaaagtgctcatgttgtgagttcctctaaagacaaaggcaaaagaaaagaactgaggagcctaagaatgaagttgataagggtccaagacaaaagaaacaaaatcagggtgacaactatttcgtttgaataagcctggacatgtaaagaagaaatgtaccatataccatgctcggcgagcaaagaaggagatgtgtcttactttggtctgttctgagacaatttagcttcagtacctacaaacacttggtgagtagattctggtgccactactaacatcattgtttcaatanaggattgcctaagctatcggacgccaattgattatgaa

SEQ ID NO: 66935 - DNA, 437 bp, Glycine max
ctttcgagaaaaggaaataattcatgaaagtgatcttgagcaacttatcttatttgaagtggtgatcaaagagacattcatggtacacccacctactcctttatggctccctagagaatgctctcaaccaaccatcattgatggctatgaaatacctgccaaaactaaagtcatggtaaatgcatacgcaatttgtaaggattcccaatattggattgatgctgataggtttgtccctgaaaggttcgagggtagttctatcgatttcaaagggaataactttaactatctcccttttgggggaggaagaagaatatgcccaggcatgacattgtgtttagctagcattatgcttccactagctctactactgtatcacttcaactgggaactcccaaaacagatgaaacctgaggaaatgaatatggatgaacact

SEQ ID NO: 66936 - DNA, 383 bp, Glycine max
  unsure (1)..(383): unsure at all n locations
agctnttaacaaagggancncattaattcatattcttaaaatctagcnaaccaatctttttagtgttatttttctaccctcttttcatgtggctcataattaaacagaaattcaaattatttatttattagtgaaaaaatagttatgagagctgtacattactatgaatttggggaagttgaactgacctgcagagaggaattatctnctcttcattgcacgagtccatagggaccactctatctgtaaagcagtgatgggatgaactgcatgtgctcttcttattgtatctggactcgcttcagataaccctatatacttcactttatcctctgtcacaagtttcttatgtcacccacctaaacaatagaacaacttattga

SEQ ID NO: 66937 - DNA, 383 bp, Glycine max
  unsure (1)..(383): unsure at all n locations
tgtgcgttanatctgattgtgacgtgacgctaagttatatacgtctagtttactttcttgagcagccaaatcataatcgaacattgtttgaaaaaaaaatgcaataatgcatgtttggtatggtatggtaaggtgtcaaaactcaacttgttaaagattgtgtgccccattgcaacgctagtcacgaggaagaatctgttactgttagcgtgtagcttcccttcttctctcttcgccacacttcttaagatcttcttcttccctagcatattactattattcggcatcccaaacagagaaaagaaaacacaaggaacttcttacttcatccaagttcgctaatacaatatattgtaatggcaacagtagaaacatcccatgaa

SEQ ID NO: 66938 - DNA, 448 bp, Glycine max
  unsure (1)..(448): unsure at all n locations
tattctctgtcaagtgagctcccaatattcttgttangcnnttgctttgtggcaacaagtaccctcactgagtctggaccactcacctctgctgtgtaaccatcctatagaacatgttgcagtacatgcatagcacgttaacatttactatatgttggtgtgaatgtgtacgtaacacattaaagttgggaaagtaattagcaattacctgacatttccctttcccattattcacaaagcaaagtggatctctaagtccttgttgaacatggccactatgcaccccacctttttctagattgaatttatgaactcttcggccatcaaagaaagggttggagccatcacataccccatatggtttgtttgaagtgattacagatatgttcatatatttccattctgcaaactcattctcacctttntgggtgttgggcttactcatgat

SEQ ID NO: 66939 - DNA, 463 bp, Glycine max
cttgaagatgatctagagaagcacggcaacaaggtggttggtttgtttcaaatgagaaggagatgcacggaaagggaagagaaatgctaccttatttggttcataggaaaaagaaatgagccaaaaatatgatgaattctagcgtgcactagcaaatgatgtttgtgtatgtgtcaaagtgtctattaatagttagatttgtttaatttcagatttttttttctttttaattttttttattctcttattccttttctttaccagatttactcctcgtttattcttcgtgtctcctaaaacataatctataatagtcctctttacgctctcacatgctatattttcctcaaaatcaacacagaacacacaaggaatctcttcaataaatgcgttacaggcttcagaagtcagaactgcaaataccaacaaattagagtggtatatgaattataaagtaacctaa

SEQ ID NO: 66940 - DNA, 238 bp, Glycine max
  unsure (1)..(238): unsure at all n locations
gcaagcttgggggagaaacatggaagagtanttttttatatttattgtcgaccataaaattgtacgctggagatatgtcgcgggggtcaagggaccttggtgacgtcaagtggggtgctattgcccaaaaccaagcttgaccaatcctgacccaacccgggcatattcaggtagtgagaacctatgacgtacctaagcaggcgagctcttggcagttcaccaataaaagaacacattc

SEQ ID NO: 66941 - DNA, 482 bp, Glycine max
  unsure (1)..(482): unsure at all n locations
tactcaagctcttttcaaggcactctctnggtggtaaagctccttcttccatggtttattccctagtggatgacgcctcctctcacctcttctcctttatcttccgctgcatctccatggtggaaaatcaccattgaaggacctcattgaagctcaaagatccagcctacatagaagcttcacaagcaagcttacaccattatatgttgttgctttatacattgttcaaagaatggtgagtagcgcaagataaatgattctttgagagcaaggaaattacttaattataacctacgatagcattttcttagagaaactttaagtttattttaagaaaaacaatgaacaattataactaatagatnttgagattgttaannattgtttccgtaattgctaaaaataatatgaagcatatataaatgattcaagaaatttagtatggtcagcctaattggtctcttgtagacactctctaataa

SEQ ID NO: 66942 - DNA, 409 bp, Glycine max
  unsure (1)..(409): unsure at all n locations
ttgaagctgccgcttaaagatgattcgctagcgcggcttactttttttttgattagnatgaatagaacacatcataacttcaatttatgtacaacattttggcataaattaagaaggacacttgtgttgtgtttcccatggcagctaatccaaatcaggttggtcttaacatatgtttgtgacaatgacttatcaccaacgtgaagaccatgatcaagacatcggccatgattcataatttaaatgcactgttgaaaaggatttagctaagacagactcttaactcaatgggatgatatctcattattaaccaaacaccatgccaattttcttcatatgaatttgttgatataatatactaagataacaagatctactctggttaacacttcaatctataacataatta

SEQ ID NO: 66943 - DNA, 453 bp, Glycine max
ctcagctcgacacattctggcattgtgcaccaggtgattcaaagtcatgatttcaattattgcaactcagaacaatgcaacagcaaatagggttcccactgaggaatactgtgttgatggggaagacataattagcaaagtgcatgaaagcattcttggtcacattctgtctttccttccaacaatggaatcagtccacactagtgtgttatcaaaaaggtgggttgatgcttggaaatccataactggcctacaattaatgaatacttgcttttgtttgggaaaagatgctaaagaacaagttgtgtgttggtgaacatggtgtttcttcacctgccattcaagtatcacaattttctcttgtttacacgtatcagtatgattcacctgaaagtgcatgatctcttatcttttaggggtggcattacttcatattagatgctgatatggcac

SEQ ID NO: 66944 - DNA, 485 bp, Glycine max
  unsure (1)..(485): unsure at all n locations
cgaacgtanattaagcgcagagacaattaatcaagcactaagcttgcatgaattaaaagcaacaaattcaaagtaattagtgaagaggaaaaactaaacagaatttaacagtaataatagaacctcaaagagaactgtgcttgatcctcaagggaaaacaacgctgcggacttagccttccattaatcaaatagagaatgaaattttattgataaaactaaaagtctgaactggaattgaaaaaaaaacgaaaataaaagagaaagagaagagagactaaaactaaaaacgaataatataagagagagaggagagagagagagtctcccgcgagggagagagggcgtccctaaactagaaccttggtgctgttatatatgttttttcagccccaaagcttacaaatatgtnttaaatccaagcccataagtataatcanatcanatctagataagataagataagatangatctagatgaaataa

SEQ ID NO: 66945 - DNA, 482 bp, Glycine max
  unsure (1)..(482): unsure at all n locations
tagaagggccaaagggacaagtcaagggtggaaagtatggtattataggataaattgaaggcttgtcaaaggtcaaagagaagtttgaccgaacagctacgtagaacggaagagaatatgttgtcaatcattgactagtgtaaagagaagctaaacctagctgttagccatgggcaaagactagaggatgagcatgcgaaggtgtcggctttgcaagtggaaagggaagcaagagagaaagtgatagaatcattgcacggggaagctgtgaaatggatggatagattcgctctcactatgaatgggagtcaagagcttccaaggttgttggccagagccaaggcaatggcaaatatatacctggctcccgatgaagttcatgggctttttgattattgccaacacatgactgggttgatgtcccacataattangaaccgctgaggcgttngtatttatgctttggcttttgcaagataaac

SEQ ID NO: 66946 - DNA, 304 bp, Glycine max
  unsure (1)..(304): unsure at all n locations
acacacacacacacacgcatacacatacaacacacaccttgncaggcacgaggccagagaacataacactngaaacacctcaacaagaacagcactccaccacgcccgcagcggcgccaatactaccggcaccgccaacaaaanacaccgccggcacctgcaagagataggagagggcgggacgacaaccgaagccacataacgggccgttctcccgcagcgaaaccagaaaaatcaatgaacaaacacaaggagaccaatacacggagacaacaacccacctacacagccatgaataaaaaaa

SEQ ID NO: 66947 - DNA, 396 bp, Glycine max
  unsure (1)..(396): unsure at all n locations
ctcctacgtattctctatttgtgatgaggaactcacacctacgtagttcttgataactgtgagactaanaatagtctccgtgttttcttcaccaaaatgtgaacatgctttaataaagagacaaaacttcctactgatcagagcaacatatgctttttggatgaaaaacaatgtgtctattgtggaaggagagtatgctaatgaaattttctcataaccgtaaatgagattttggatgttagcatttcgtttctaaatgaccatttcgaggaagcactgggttcaactaaaatagaagaatatcacttaaagtgtatcaatctcacacatgtaaatgttctatcctaattccgaaccatacatatgtcatgacttgattttgtgatcattactatc

SEQ ID NO: 66948 - DNA, 418 bp, Glycine max
  unsure (1)..(418): unsure at all n locations
cttcaatgcaagagaacatattcatgactatgaacccaaaatatggtgttgaaatttgtaaagcatgaatatacggacttgcttgttagaatacaggctgccccatgattggttctttgcacctaagtaacgtgggaaatgctattcaatgggatgtcgatatatgtgtcaatataaggggcataaaattcctcgtccagtatgaataagtttttccttaaatgaatgtatgatagcgttgaatgcctctatgaatgcaaatatgtgcaggatgtaattagctatccaatatgcatatacataaatatgagtgacacagtataaattattattgagngcatcaaatgtatgtgagntgtttgtgatactaattgttatgatataaattatgtgttaagttgacccactctgtgacatg

SEQ ID NO: 66949 - DNA, 464 bp, Glycine max
  unsure (1)..(464): unsure at all n locations
agcttaaactcaataacaaaggaggagaatatttgtttgatcgattagaagatagagcttgtatgtgtttcttgatttcaggtttgtcatcataaaaaagggggagattgtagaagcaagcttcatgatgatgaaccaagcaattttgatgatgccaaaagcccaagtaattgattcaagattgattcaagacttcaagatcaagcatcaagaatccaatccaagattcaagattcaagagaaaaaatcaagaagcaacaagtcaagacttcatataggaaaagtattaaaagatttttttcaaaaaccaaatagcacaattttgttttacaaaagaaatttctcatattttctaagttaccagagtgattactctctggtaatcgattaccagntatcagtaattgattaccagtgaccagcttggttttcaaaatggttttaaatagtttacaacactccaa

SEQ ID NO: 66950 - DNA, 294 bp, Glycine max
tcttccacgtgtgtcaaagacgttccattacgttctcgtttatatggttcttccgcgggatcccacgaaagtgccatttgtgtcatcttctgctggagtccgcggaagaaaggtactttcgtgggagtgctcttccttcctgcggaagaaccttcttccgcgagtactcgtctaatagaattttggacttttttttaaattattccagaaccatcttttgttcttattactatctaggccgtgctatttatatacgcatctgtgtgtgtgaatagatattatattctggtgtga

SEQ ID NO: 66951 - DNA, 395 bp, Glycine max
  unsure (1)..(395): unsure at all n locations
agctntacagcagaatttagtaatgacccacttttctataattaaaataacttaatgccattaacctatggaattaaaaaaaacttaatggctgagtgtaactgaaattgtggcaaccaaaagtcacccccaacagccaactagtcaaccaccatttggtctcccaaaatgctgatgcctaggttgccaattgngcccttattacaacttgaactaaacctactaaatccctcttagttgattaacccaaaacatatttttggtcagccaactttacaaggattgggccattatttagacaaactaaacactctaaaattgagacagagtggtgccatttagtcctcctccatttgggccatgatacaactcacaaccttggacttttctccttg

SEQ ID NO: 66952 - DNA, 360 bp, Glycine max
  unsure (1)..(360): unsure at all n locations
cgcagagacagagaaggaagcactaagcttgcatgttttaacagcaacanacgccacgtacgtagtgaggacgagaaactaaacagaattgtgcacgaagaatagaacctcaaagagaactgtgctcgaacctcaagggagaacaacactgcggacttagcccttcattaatcaaatacagaaggaaagtatattgatgaaactaacagtctgaactggaatcgataacgaactcaaaatgatagagatagacacgagacgactctactaacaacgaataatacacgagagagaggagatagagagagtcttccgcgagggagagagggcatccctaagctagaaccttggggctgtata

SEQ ID NO: 66953 - DNA, 403 bp, Glycine max
  unsure (1)..(403): unsure at all n locations
agcttattccaattctcttcgacaaatgtaattctcatgaagtccgatgcatgcgaagcaaagtgctttaccacatgatttgaggtttcaagctcacgaccaatgcaataaatctttgtgggggtaatcaaggctctatgacagctcataatgttactatctgtcaaccttttctgcgacgattgtggcagaccttttttcttgttactcagcacatgcaattgagtcttgacaaatgtgagaggctcataacaggtgaagctcatcttgtgcaatatcagaaaaatcacagctctagtttcttcatctaagcctgctaacaagtcaatcaattcatcatccaccgaagcaagactaattttctgggtatgaacaaaagaattcacctgganaagagcctcat

SEQ ID NO: 66954 - DNA, 482 bp, Glycine max
  unsure (1)..(482): unsure at all n locations
ngcagtaatcagtattattgtattttatttatgcaatgttgttctattagtgaggctagctaaccaatttgaagccctcatgatcatgggtgttttgtttttgtcataagtacacctcctgtgtaaaattggtcagctatgcctacatgtgcagctgtgctactaatatattttgagaaatgttaattacaagataaaattgtccatggactaataatatgaaatatttctacactgttattaaattgcaaattatctcatatagtaatttattgacttttggaataattatgttaaaagttaaattaacaatattttttaattaatagtgtaagtttgtttatattaattgtatataattaaactntaattataatatagtttatatgctatncattgtatcttcctgtagtcatttaatataatctataaaaaagtttttttntatttttatctcttcttccacacttcnaccactttat

SEQ ID NO: 66955 - DNA, 396 bp, Glycine max
atcttaagcgacgcagctgcagctggacttgatctggatattttttgtatcgagctaacattcactaatcataattagtgaaactttggctccataaattggctccacaaattccatctccaaatcaagtgaaatttgaatagaaatacaaatttccctccaattttgtgtgacacttatgctataaataaaggctatgtgtctgcattgttgtcaactttgatcatttgagaattacactttaaagttcagacctcatttgaggcacagaatttcgtgccccttctctccctctccctacactcatgttctcctaccttcaagctattatccatgtaatggcatctccaatcatctctcttccttcttcattccgctgccattaaacttcaagaa

SEQ ID NO: 66956 - DNA, 481 bp, Glycine max
  unsure (1)..(481): unsure at all n locations
ggttaaagtctctcgctcttagtgtctagaagacaaagaaggattaatcgtctagaccatcattaagaggtccgtccaaagcaccaagtgtagctagctcctctaatgaagacttcaaaggacaatctgatgaggacgacgagctagccttcatctcgagaaaaatctgaaagatgtggaagaacaagggtggatctaaatagaagaacttctccaagaaggtgttcaatgaaaagaaagacaaagataaaagctccatcattgctatgagtgcaaaaagcctgaacacttcaagtctaagtgcccagatctggagaagtccaagggaaagcatgaataatacaattccaagggtaagaaaagcctcatgagcacctgngaggacctggatggcacctcgtccaatanaggagaggaggaagccaacctatatctaatcgctgctacaacctctgaggaatctgaatcataacanacttat

SEQ ID NO: 66957 - DNA, 471 bp, Glycine max
  unsure (1)..(471): unsure at all n locations
agctngctcaatgttgattgttgtggttatagatcatgagtgtttgaagggagcagtttgtgtcctatatggatgttacttcaaggtggtgaattgttgggctgtgacctaaatccatatggaagattattctattaattttttcttttttcttgtttgtcctctgcctatataaggcaaggatgtcctgtatttttttataaaaaaagcttccacttgtatactgcaaccataataaaagctttctgtttttccctcccgtggatgtaacctttctcaaggtgaaccacgtaatcctgtgngcgttctttctcattctctttctctttcaattctgctgcaatttgcggtgtatgacatttctggtctgctgcatctgctgttcttgcttgttcttcatcacttccataacaaactaacaacaaatattgataataaaataacataatattattaattaacaacacatca

SEQ ID NO: 66958 - DNA, 461 bp, Glycine max
  unsure (1)..(461): unsure at all n locations
tagacggagaagaagagagcgcaagtaaaatagggctcgtgttctaatattnttaaatgtaccttcaacatcaattttcaataaaaaaaaatttgatgttaacaaagcaatgtaaatgttaacatcgattntattaaaaaaaccgttgttaacttatcatacgttaacatcggttatgcagaaaaccgatgttaacgaacttacgttaacatcagttttttgtactctccccttcccttctcctttcactcatttactaccactagaccagccttaggcaaatttttagtatgctttaatttagacttaaagacttctttntattaaccgggagacaatcacaatggtagtcatgttggaatagatgtaattagaaaatataataaaaccaacaactaattggtgttgtaatntatgaaagcatttcctagcttatagtacctccctaggtaacactacta

SEQ ID NO: 66959 - DNA, 395 bp, Glycine max
  unsure (1)..(395): unsure at all n locations
ttaccaaacattccttaacttggtggcatatggttgataagttcgtatctcttgcataattttttggtttagaatttaaatttactgtctacctctaatcatatactgttntgaataaaattaagttactacatggccaatatgacatgaacaacattgattagaaattgctttttgttgttgttctttacttagaaattttctacattgttaatgtagtaattttattttatttaattatatatatagtcgtgttcgtgtcctatatcttggacactaaatatccacgtgttcagtgttcatgtccatgtccgtgctttatagttaatagttctttgacattacngttaatattgaagaattcttttgacggagtattagtcttgaacgatttg

SEQ ID NO: 66960 - DNA, 461 bp, Glycine max
  unsure (1)..(461): unsure at all n locations
gtataatatggaatgttataaaataatattattaaatattaggcacaaaatgtttgaagtttgttatccatcaccataggtaatgtcaaagacaaatacttggatcaggctgatgatagaacttttggacatctgcataaggaaggggaacaaaaaaaaaagcgttacattgagtgaataaaagtgataattgaaaatgagaatgaaatgatagatattagataccgatggtgagggccttaatgatgccatctctgtggcccttgaaatctctgaagaccaagagattgagctcctcctcctcctgccttcatcttcattgttctgtgtgtgtngagttaaaatgaaattgaatggaggtaaggaaactattttaattgactcctttctctctcattcaaaaccctaatcttacattcggtgttcaccctggtcttctccatgaccttcttcacttagtc

SEQ ID NO: 66961 - DNA, 401 bp, Glycine max
  unsure (1)..(401): unsure at all n locations
ctctccagcttcttatccaagacactctgctggtggtgaaacttctcatttcatggcttattctctaatggatggcgtctcatcgcaccttttctcctttatcttccgctgctactccatggctgaaaagcaccattgaaggaccttattgaagctcacagattcagccttcatagaagcttctcaagcaagcttccatcaacacatttgcatgtaggaggaatagtgaattgggaagatgacatttcaggacctcgcattcttgctctctctctcntccacgtaaggttctcctctctctctntatgttattctatcaaaacgggtgggattaggtggaaaatcccattttcgtaggcccacatgtgtttttctaatgggagttngataatggccctact

SEQ ID NO: 66962 - DNA, 486 bp, Glycine max
  unsure (1)..(486): unsure at all n locations
tcgactctcttctattttgaaaattgtagacctaggctatgctcattttgctgcgctaagcttaatctgcagaaaaatattttctatttctgcaggctaagcctaagtctgctgcacttagctcctgagtaaaattttataaggtgcgctaaacgcccagtcaaaatttagtgttattttttctgtttttgttgaaaataacctatgctaatctcttgtgttttatcttatattttgcaaatggcatctaagaaaaggaaggctccttctacacctttccaagtcagatatgatcggtctcggttcacatctcaagaagcttaagagaggtacaccgatattgtggtgcctaggaaactactaccagagaggaatgtggtagtttatttcactgagttcgatgagttcaaggaggaactcaagagaagacactgggatgaggagttgacttattntactgatggcagcatagatgtcaccatcgtg

SEQ ID NO: 66963 - DNA, 459 bp, Glycine max
  unsure (1)..(459): unsure at all n locations
ttaagtcacctgaggctgcaagcttcctcagctccaggtagacgtcgcgttttgttctctgcatccaactcttcatgtaactttctgattcanattgtgattgtccacatctttgaatggactgtggctcaaagaatccatacacatcagaattccccgctcacatacttgtctcagttagatgcctattgttgttaagacaaaattaattatgtatgaatttaaaacaataacttatgtaattaacaataatctaaattgacttacataatccacaactgtataacagatatgttgagacattgaccatcgtgtgcaatttcagaaagattttcgtgctttatgtacaatgtgaagtcttgattaaacaccccgaacactgtagcatcccatataatttagttacagtgaacaaatcaattganaaaaagaagcatataatcagagtaaaatacctat

SEQ ID NO: 66964 - DNA, 458 bp, Glycine max
  unsure (1)..(458): unsure at all n locations
tcttacctctgtgtctctgcattctggttttatcctctgttcatattatctccctctcaacccaagcattntttataggcaacttgccttgttgcaaccattatctctgcgtgtaactaactcaactatcaaattattctatcaaactaactatatgggttagcaatgaatctcaagcttgaccctgaaattcgatcgtatttctttcttatgatttttgctttccaggtaatatgaaatgaaaaatacattgtttttggcatgaacaaagaataggcagcagcttataccctggtgagtgtaaaaccaatataggattggagaccagattttttggcagtaaagaaactgggttagcacatttccaagtggaattattttgagggactaacgaatgatattggcataagtttggagggatcacaatctatttgccaagacattgtgtaactgtaaat

SEQ ID NO: 66965 - DNA, 360 bp, Glycine max
  unsure (1)..(360): unsure at all n locations
agcttgcctgcccgatgtagcagtaatgatggtctgtgttatgttggggaatggttacgaacccagaataggtttatgcaaagacaacggcggcataactagcctgataaatgccaaaggaaatcgtgggaagtacaggttatgctataaacccactcaggcagatataaagagaagcatcgcgggaacgaagagcggtagtcaaagcacgcggttgagacaagaaggtgaaggaagcccaccctgccacataagtaggagctttataagcgcgggtctgggggacgaatgtcaagtggtcgcgatatacgaagatgatgttccgagtacattggatgtggtatgaccatgccctnctga

SEQ ID NO: 66966 - DNA, 485 bp, Glycine max
  unsure (1)..(485): unsure at all n locations
tgttgaaatngccatggttggatgagttaaacatacccattctgttttatggtttttgtgatgatgtttgtgatgtttatatgctgaaattgctgatggaaatctgttagggacgaagggtagaactaacctagggttagaaagtgagaatgtgatgttatgagtggaaaaaaaaagagtgagactntgagggttaaaaggctaagtctgaattctgtggtaaatggaggttaaagtgagttaatactagcttgaaatgtcatttaggacttatgagaaagcttggactgtgctagagagaaaaataaatgaccaaagtgaacaaagagccatttctagggcaaatttgggtgttgaagagtncaaatttgattcggagagaatttangtgtaaatccagtttgaacaagtctaaatggatgttatggactggtgtgaggtgagagtttgcttcannattacctcattctaaaatttcaccttca

SEQ ID NO: 66967 - DNA, 405 bp, Glycine max
  unsure (1)..(405): unsure at all n locations
caagcttgatgatatggtcttcaccgacgaaagtatctaagtgtatctgaaaagaggcaaatntaatcatcctgcttggacgaatgaganaactagggcaaataaagatggtgacgatgagggagaaacccatgctgtgactgccattcctgtatggccaagtttcccaccaacccaaaaatgtcattactcaacccttctccttacctaccgcccatttatccacaaaggccattcctaaatcaaccacaaagtctttctaccgcacttacaatgacgaacaccacctttagcacaaaccaaaaacaccaaccaagatatgaattntgctgcgagaaagcctgtataattcaccccaattccagtgtcctatgctgactngctcccatatctacttgataattc

SEQ ID NO: 66968 - DNA, 456 bp, Glycine max
  unsure (1)..(456): unsure at all n locations
ctaagcttgttacatgaattggatttcatgatcctcaaaacttgaatgttgtgaaacataaacttcctcttcaatgtatccatttaggaaagcacttttgacattcatntggtataacttgaaatcaataaagcaagcataagcaagtggcaatcttacgacctctagtctatctatcggtgcataggtttcaccaaagcctataccttcttgctggtggtaccctaagcttcatgtcttgccttatttctattgatcaaaccatgttcatccaatttatttttaaacacccatttatttccaatgaagttcatgtttatggtataaggtatcaattcccatacactcgttcttttgaattgattcaattcctcatgcattgatatagtccaaaactcatctttgagtgcctttntctatagaataatggtctacttctaacacaaatgtaatatg

SEQ ID NO: 66969 - DNA, 477 bp, Glycine max
  unsure (1)..(477): unsure at all n locations
agcttcttatcaaaggctcatcttggtggtgtttcttcttcttccatggcttattccctagtggatggcgccacctcttacctcttctcctttgtcttccgctgcatctccatggtggaaaatcaccattaaaggacctcattgaagctcaaagatccagcctccatagaagctccacaagcaagcttccatcagtcaatgccaagaatattcctttccctagtcacctcttcacttggtcgaaaagcaaaggaaccaaccccatatgaagtggaagaaaatatgcatcctgccatcgaaactcaagcatggatagacatccttccccatggatctctntctaatactatttcttacaggtcagaccacttgcccatcantttgcgattttttcaaggatccatnttgtaataaaaatattatttcatttgagaattctagcttgnggagatgagctagatagtagtgagactacat

SEQ ID NO: 66970 - DNA, 478 bp, Glycine max
  unsure (1)..(478): unsure at all n locations
ctccgcccttggggctgatctttagcttaatgaggtccttctattgtaattntcaaccatagagatgcagcggaagataaaggagaatatgtgagaggaggcgttatccactagggaataagccatggaaggagaagtttcaccaccaagagagtgccttggataagaagcttagagaggaagcttcaatggaggaaaagaataagagagagaaaggggcacaaaattgaatgagaaaaagagggagagaagttgaactttgaagtgtgtctcacaagtttcacattcatcaaacttttgacaagtgttacacatgcttctatttatagcctaggtcactaactacatgaaagcttccttgagaagcttattggagaagcttccttgagaagctagagtttagctacacacccctctaatagctaagctcatgtcattgagaagtttccttgagaaacttccttgagaagcttccttg

SEQ ID NO: 66971 - DNA, 350 bp, Glycine max
cgcttgtggagctcctatagaggatggatctgcgagcctcaattgttgtttctcaacggtgatttgccaccatggatgatgcatgttagtagctgagactatgatagacgacacaccctcctctgtggaataatctatggaggacggagctccaccaccaagaatatggcttggataacaagctctgttaggatgtgccaatggaggaaactagtgagatagaaagaaatagagaggggggagcacggaattgaatgagcaaataatgcagataagcataactttgaagtgcggtcaacaggactatctttcataagagtaacaacaaggcgctcacatgcttgtatcta

SEQ ID NO: 66972 - DNA, 425 bp, Glycine max
  unsure (1)..(425): unsure at all n locations
taagcttgaatgaggctgaagaagctgcttttatgnttaacaagattcggtggagattaatttatctcagcctcatttgtcacaagatagtgacatggagttgatggtaaatatttgtcacaacaaagtagttttatctcaacctacattgttgtagcactccatttttatatattacaattattcatgtttggcatttgcatgtaagtccctgcaactattgttccaccaatagcaaggaataagctaaccataacaagagccaaacaaaggaaggttgctgataaagatgatgtantataaagacaactgaagaagcattttttgttgcattntgaaagctgatgagtttgaacggtgctgatgaagaaaactcgaaaaacacatttttgttgcattctgatattangatgtgtagttgtata

SEQ ID NO: 66973 - DNA, 475 bp, Glycine max
  unsure (1)..(475): unsure at all n locations
ctntgtctagcagttcatacccnctcgagatagtaagtggtgttcttcgttgtatttttgaatctcttatgcccatttgcgtattcccttacagagacatgcaaaaattatcgagtattaaatgccaacaattacaattccttaattaatttagaaatacaatgaaatgtgacaaacctgccaatttggggtttggcggctttctgcaaatttcgcccaagtagttggatgaataccatacttcactgtaggctcactaattggttgaccctcattgtcagataacacaagattcaaattcagattagacttaaattgcctccatctagttgcgactgtcgacatgacctnttttttgcattttcaccttcagggatgtcaaacttgcactagacacgatacttagaatgtcagagtaagtcaagcattcaatataaacttacaattcagcacaatcacgaaaattagtaaaatt

SEQ ID NO: 66974 - DNA, 447 bp, Glycine max
tcttatccaagactcatcttggtggtgaagctccttcttccatttcttattccttaatggatggcgcctcctctcacctcttttcctttgtcttccgctgcatctccatggtggaaaatcaccattaaaggaccccattgaagctcaaagatccagcctccatagaagccccacaagcaagcttccatcataaacgacgcgctctctttttccgaacttgtcatgttgccccagcatacaccccattgactcgtccaaaatcgtcatatacaggatgagaggtcttccgggcaccagcggcataagcacgggagggttcatgaggcactgtttgatcctgccaaacgcctcttgacagtcgtcattccagcggatggattggttcttgcataagagcttgaacaacggctcacagatagcggtgagctgtgatatgaatctggcaat

SEQ ID NO: 66975 - DNA, 400 bp, Glycine max
  unsure (1)..(400): unsure at all n locations
agcttgaccaatcccgacccaacccgggtatattagtcagtgagaacctgtgatgtacctaaacaggcgagctcctggcagtcaacagataaaaggaacatataccacaaagcaaggaggcttgtggtggctggccagctatgaattttgtgtgatatatgggttgtggcctctggtaatcgattaccaagggtgggtaatcgattacaaggcttaaaaatgaagacaggaggctaagatggtctctggtaatcgattaccaggcttaaaaagggaactgggagatggtggaggcctctggtaatcgattaccagcgtgtgtaatcgattacacagaggaatgggtcactggtaatcgattaccacgtatgtgtaatcgaatacacagngcattcttgca

SEQ ID NO: 66976 - DNA, 459 bp, Glycine max
  unsure (1)..(459): unsure at all n locations
cctcaatcatttccaaatatgcatgttatatatgaagcatcaacaagaatcaagccaaggctattgtgcaagcaatcaatggggcaaaacacaccaaatgattatgatgatggatggctcaaattctcacaaaggtaaattcatcactttcaaattgagctttcaaaactatcatgacatgtagaggagaatcaaggatttcaagttacaaaatgtcaagaacttttattttcaaaacaattacccatttcttgaacatatcctataattcanagaanaacatgcatagtcgtacatgcacacaaaattgacccaaaatattatactaaaaatccgacgaaactaacaacattaacaaattaacacaactaacaaattaacaaaaccaacacaactagcaaaaccaaagaacactcctccccatacttatacaacacattgtcctcaatgtagcacaaa

SEQ ID NO: 66977 - DNA, 453 bp, Glycine max
  unsure (1)..(453): unsure at all n locations
tagctntactcttggcgaccccgctggttatacttatttgcccaatgaatgttgcacttcctctgacacattacaattttcgtgctcatttgatgcaaggctcactccctcatgggtctctggaactctatgctcagcctgattttcacgtttccttgcttcagcatctttcgcgccataagcaacatttttatctatgttagcataaaaatcaagcaaagagtccttcttcttggtaacctatgcaaatattaaatacaaaatatgtcaataatttaaaatagagggataggaattacaccataaacaagcaggtcaggttaattaaaaaaatttaaaatatacactaaaatgaagaagagaggacagactttaaaatccattactaatctaggttgacaaccagaagagatatgataacatgattaaaataatatagaacagaagcataca

SEQ ID NO: 66978 - DNA, 458 bp, Glycine max
  unsure (1)..(458): unsure at all n locations
tgtggttganaataagcatacctcacgtaaaagaaattgaacttctccaatcagatcaagttgattcacgagaaactntggtgtgctaggtaggagctcaacaacttcatcaggaacctcatacaacatgttagctaacatggaaatgagcttacaatgaactaattctgcccaggaattctttctgctggtttctataagtgctttgataacctaaaggcagaatgtgtaagtaaattaatcggggtaatcacaattacaacaactataataaaaaaccttattccactatgttaagtcagctacatggatcacacgacaccatttggctcaattaaagaccgaagtttcaaagatgttacttaccatgaaatccctcttgatcacttccaaatggagtaatcacaattaatgaatatatatttataactctattgacatgaaccacacactaacta

SEQ ID NO: 66979 - DNA, 466 bp, Glycine max
  unsure (1)..(466): unsure at all n locations
agcttaagaatccataaacaactcttattnggttctgaagcctctntttcttggttcactttttactttaacaattgtgttgatgctttgtcttggtttttaccatgtagagagaactatgtgttacctgcgatgtggacttgtacggagaattgctgataattggatgcggaaaagaaaggtttgtctcttgtgtctctcattccataaccaaagntttgaacaacagtccaggaccacagttgccatcacaacatctagggttttgagtctcgtgacaaccgcaattgtgactgaatcaatctcataacatagtttgttgcaatatcaaggattgtgaanaaatgacaactgcaatcatggcttgcaattaacaccttattcaatactaatccataaagaagaaaaaatgggacttggattgctctcttctaaatataccttggtgctgnntgtgaattcatca

SEQ ID NO: 66980 - DNA, 463 bp, Glycine max
  unsure (1)..(463): unsure at all n locations
tgtcaaagctgatataaatggaaaagatcaggtggagattaacttctacggatgtcagcttctgctcatcaaatagtcttaactttnttttataagtgcaacatataatttagcattttcttgctggtggtgttattattggtctttttttttcacgttatatagattgcaacggatatttatgcttaaaaacatttgaattttctccgctgcatagttagcttgggtgatgttctaaaaatatttctatgttgttgattggtcatggagggccgtgttgcagatccaaaaaggcttggactctgccagcaacatttttaaatctggtaattcttgattattttagttgttttttataattagtcataaatggataaaatcaggctcaataataattttccttgtaaaactgagtcttcaaccattangttctcgaaggcttttggtgggagtgggacaagct

SEQ ID NO: 66981 - DNA, 357 bp, Glycine max
  unsure (1)..(357): unsure at all n locations
gcttggaatatntcaagcaagagtttggagtgcactatttttttacaaagatgtggagagccatgaaagaagcaaagcaattagtggaagggaatgagaggaaacaatatgccaaagtatttgattatgcacatgaattgttgaggagcaatcctggatcaacagttaagatcaacacagtgccaagtccagaaggtccaccacaatttcagaggctatatnattgtcttgctggctgtaagaaggaggttgttgctggatgtataccattcataggtctagatggatgtttcctaaagagtgcatttggaggaaacttgctctctgctgttgggcttgatggcaataaccacatct

SEQ ID NO: 66982 - DNA, 484 bp, Glycine max
  unsure (1)..(484): unsure at all n locations
cttgagatggtctctggttngagggatcaattttcaaagagtcatattggagctataggtcaacctgaggactggtgcatctctgctgctgccttccttaatcgtgctctgctccagcttcctttttgttatttaggaattccaattggagtcaatccgaaaagaaaggtggtttgggaaccgataataaggaagtttgaggctaaactgagcaagtggaatcaaagaagcatctctatggctgacagaatcactcttatcaatgctgtcctaacagcattacctctgttttatttgtcttttttcagggccccctcagtagtgatcaataggttatctgccatccaaaggcaatttctttggggtggtaatcgagaagggaagaagattgcttggatatctnggagtcaatgctatgcttctagagatatgggaggtttggggatcaaagacattaagatccctcataatgctcttttaatca

SEQ ID NO: 66983 - DNA, 437 bp, Glycine max
  unsure (1)..(437): unsure at all n locations
gctctagtcgatctagacctcctctgaggtactttctatctaacgttgcaatttgtgcattcatcgtattcactaacagacgttgagcgccgcccaactgatggtactcgttaccaccaccacctgctccaaccataattcaacaggaaaaaaaaatgtgcaataaaaattattaaggtttcaggacctcacaacactctactcacgtctcttagatggtagtacactcgtgtttaatgctctcaataagcttttgagtaatgtattccctcttgccttttaccactcgttgttcctcttaagttcctggatggaccaaactacacacactaggtaatataaaataataggaaagactatatattgatcaccaacacgattgagttgggataacaacttggacttgattnggataataatatattagatctggattt

SEQ ID NO: 66984 - DNA, 451 bp, Glycine max
  unsure (1)..(451): unsure at all n locations
tcagcttcttataagctgaaccattntatcaataaacacaagttgagttttattcagataattagagtttatctcttttatcttagtgagagtgattctcctaaattcttgagtgattcaagaacaccctggctgtatcaaaggactttcacaacctttgtgtgttgccctcactggaaagagtgattctttccttcctatcatctccacccttgttctttcaaaccacaattccagaaaatccacctctgcccaaaattatctcgtgaccaaaactcccatttcacacactcaaattaagtgattcttgagcctaaattgaatntcataacgagacctttcacctcgttttggaatcacctcatctggagccctgtagctttcgttattgtcatttctatatttctgtccagccaccacttaacctacngtttaccattccattcatcca

SEQ ID NO: 66985 - DNA, 438 bp, Glycine max
cagctgcagcttgtgcctatgagaatgccttgcgcttatatgtatgaacaaacccttcgataatatgtatgtatgtaaatatgtagcatgaaacgccttgcgaaatgttgaataaaatgccttgcaaaatatgaatatatatcgcatgaaaatgccttgcataatatgaatatatatagcatgaagtgccttacaaagtgtttggatgggtaacgtaaaagtgtttttcaaaacatatgtatttgtgatgctattgtgagtacgtagcaaaagaagccttccaaaaaaaaatgtgtgtatatatataggatgtagcatgaaaaggtttgtcataaaatatgtacatggatgtgtgtcgtaaaatgcctctcaccacaattttatgtgtgcgaatgcatatgtgttataaattacaccgcctccatatgattattttat

SEQ ID NO: 66986 - DNA, 483 bp, Glycine max
  unsure (1)..(483): unsure at all n locations
cgagatgaggaagtgttgaagggtgaaacttcctggctttattgtttaccacagagtggtacctggagatatatcgcgggggtcaggagaccttgtggacgtcaggtggggtgctattgcccaaaaccaagcttgaccaatcccgacccaacccgggcatagtcggtcagtgagaacctgtgatgtacctaagcaggcgagctcctggcagtcaacagataaaaggaaaacaagaccacaaagcanggaggcttgtggtggctggccagctgtgaaatttgtgtaatgtgtggattgtggctctggcaatcgattaccaagggtgagtaatcgattacaaggcttataattgaagacaggaggcttagatggtctctggtaatcgattaccaaggggtgtaatcgattaccatgcttgagaacgaagtcatgaaacttaaggagcctcttggaatcgattaccaggctgtgtaatcgatacac

SEQ ID NO: 66987 - DNA, 278 bp, Glycine max
gcttcagaactaaagggtctaactttgtactctttgtccgagtcaggctcatcatatctggagacgctcacaaatgaacaacggcagctctcgagaaattaatatttgtcatctcttttcacacgaatgactgatccacgaggatcacaaatcccgactctcgaaattgaacaagggaagctctcgctacattcagaagggcattacttttcacacaaaagaccaatacaggcgcttaatatatcgggatgcctgaaatcaagcatcagaagcgctcg

SEQ ID NO: 66988 - DNA, 267 bp, Glycine max
  unsure (1)..(267): unsure at all n locations
cctcgatcggtcgtctatcctggccgacgctctctgtctattttttcgatcaatatcggtgaataatatttttttgccgaggtgggctaatgttttcctggccgaataaatgggaacatgccagtttcgggcgaaacgaaacatcggttgagctcgcacganaaaacctagccgacctacattgtatagtttttatgcgacaccgaaacaagaaaacttnctctgccgtaagaaaatacattatcggccaacgagcgttttttttta

SEQ ID NO: 66989 - DNA, 379 bp, Glycine max
  unsure (1)..(379): unsure at all n locations
agctatagggtgctcaattgctccaggttgtcttatgttatggcaaangtctgtatggtggtcagcagaggagcacaaaccacatacccttgcgacaggtacaganttctgattcaaggccagctgggttaccaagttgaccaacgcatccagtttgcgttcaagcttcttagtttcagatgatgcagatgggtttgtagctacctgtcataccctaatttcagccggggacctttgcttgatgacatgtgatcattctttggttcttgtgaggtgcttgacacccatcattatgcaatttatgaaattctcagacactgccgaaaaacctaagaaatgttgatgcacactccgtattttctgtgacacatctgataat

SEQ ID NO: 66990 - DNA, 430 bp, Glycine max
  unsure (1)..(430): unsure at all n locations
tgtgcatatcaaatcactcgtgcatttcatctctagcattctttttctctatttctttacccactcctcacgtctggtttgtttatggaaaaacaccatatctaaacgcgccacatggcatccctatcgcaccagatccaaatctagaacgatgggtgatcaagaggagacacaggaacatatgaaagccgacatgtctgctctaaaagaacaaatggccttcatgatggaggccatgttacgtgtgaggcagctcatggaaaagaacgcggccaccgctgccgctgtcagtgcggctgccgaagcacacccaactctcttggcaactgcgcaccatcctccctcagacatattttgacggtgaatggacacactggggcacgatggctgccctcacctgngatacaaccgagcggcttacccttatgga

SEQ ID NO: 66991 - DNA, 226 bp, Glycine max
  unsure (1)..(226): unsure at all n locations
agctnttaactaaatattcaacgttccatatatttttataatgatgtaatcgattacaaaatattggtgatcgattaccagtgtatctgaacattgaaaattcaaactcaattgtgaagagtcatatcttttcataaaacgcattgtgtaatcgattacttgggtatggttaccgattaccagcgacaagctttgaacataaagtccagagaagtatctcttccaa

SEQ ID NO: 66992 - DNA, 428 bp, Glycine max
  unsure (1)..(428): unsure at all n locations
tcttgtgagccatntactgcaaggacacattcataaaatgtattttatttacgacaaaatccaaacaaacttgaatgatgcacatttctattcaccaaatgcaagtgtcaacgtgccattagaaaacaatcatacatcggtgcacatgttatttttatgatatatattctttgaaaagcattttagctacctagatgcaaggtgcctatcatagtgttagaagctcaaatattattctaactctaatcaatcactctcacacacttatgtatttcatacattttacatccaagacgaagtttgacttttatgcctaactcatgctcatggcagttcaatctaacaacctaagtcgttcatacctccgaatgatgtctgtcttgcacatacttatttttcaattaaacatttttacgttcatatgcaat

SEQ ID NO: 66993 - DNA, 239 bp, Glycine max
caggataaacagagaaccaccccgccacaagacagaccattctacagacacaagacaacggtccaatccgcgagggagagacccacaagggctataccaggtgaatgcgcgccccacacaaggcacatccgcaaccgccacatgagcaagccacacaaagaacaccatcatagcgagcgcatgcaggacccgctgacatacacccaggcgagcagaaggtcgccacaagcaataaaagc

SEQ ID NO: 66994 - DNA, 327 bp, Glycine max
  unsure (1)..(327): unsure at all n locations
tgctagcngagatgaggaagtgtagaagggtgaaattctcttctntattcgncgaccacagagtggtacctggagttatgtcgcgggggtcacgagaccttggggacttcatgtggggtgctattgcccaaaacctagcttgaccaatcccgacccaacccgggcatagtcaattagcgagaacctgtgatgtacctaaacaggtgagctcctggcagtcaacagataaaatgaacaaagaccacatatcaaggatgattgtgtggtggctggccacctgtgaatcttgtgtgatatatgggttatggcctctggtaatcattacta

SEQ ID NO: 66995 - DNA, 418 bp, Glycine max
  unsure (1)..(418): unsure at all n locations
acacatgatactcaagctatcaaggaagggggaagcngacagcgtgccgcttgtcctttaatgtagaggacgccatncagaacttccttcatgcaggatacatatgccatgaggctggtcatctcatcaccacaaagtggagtcatacctgagcaatacagctagctctgtctcgtgccgagaaatctcatgaataccaagttcagggccttagagaatccttcacaaaactggataagactacttgttccatgaaatttcaaagaacatctcaatgcccgtcttgacccagttcatcctgatgacttataggatcttgtttcgttgccacagtatctgtagacatgttcagaggatgatcctcataacaacaggaactcttcacagagctaagatattcatgcattaactcctcaca

SEQ ID NO: 66996 - DNA, 441 bp, Glycine max
agctctacaagtttaacattaataactgttgttattattatatatatatatatatatatcatagaagattataataacataaatttcacactatcacaccatatgatttgcacatatttttatttgtagttgttatataatattaaaatgtttgtataaatactaaattgataaagttaaaaattaatataagaaaattttttttatattaaaaaaaaaggttattaatgaactaaacaacccaagttcaagctttaattttttagttaaacccaaacttttaattaaattcatgtaaataaatgagtcaagtttgaaccatttatcttttcaagtcaagtctaaattttagtgctgactcaattcatgtacactctaagagacacatgtggtctctaacagcaaaaaaaaagaaaaacgattaaattttttactaactta

SEQ ID NO: 66997 - DNA, 461 bp, Glycine max
  unsure (1)..(461): unsure at all n locations
cacacaatntatctntctcacactagagtgtcggaagactcttttctatgtctcntcgaactagatgatgtaaattatgcatattaatatgtgcagtcctacaatgccacaaccatgaatcatctattttactcaccaagcaactaagctcatgaaaagaggcatgctcaatattcagcatatagatgttacctattctcttaccaatgtggacaagcttaccggatatggcttcacttatcagacaacaatttttgttgaattcaatcttgaaacctttatcacaaagttgactaatgcttataagactatgctttagtccatccacatataacacattctttatctgattgttgtgttgatcccctatagttccttctccattatatttccttgatattgtctccaacgtgatgtatgcaccatcttgacacgaagcagagagtttgacttgcacccat

SEQ ID NO: 66998 - DNA, 316 bp, Glycine max
  unsure (1)..(316): unsure at all n locations
gtatgcttattctaactcaccacatctcggagcctggcctctacagcagtggcaccaagaagaaataggttcttctcaatcttatctgatacttcctcaatcattataatctgatcagcactgactacattcttggccccacaaaaattactatcaaactccttggatncttctgcatcaagatcaccataggccacgtataagggtgctcagacccgcatcagcatactcatgcacatgctccataggtttctcttcaaactccctcctattcatggcaagcctatcaaacatgcgcagcatgaaaaatcactca

SEQ ID NO: 66999 - DNA, 439 bp, Glycine max
tgaggatagagacttcccaagctatatatcttctctctcaaatatgctctctaactttctagctttctcactccaaggagtggattcactcttgtctcttggatcgactcactctacggtggctcactcaagcttgaggatagagacttcccaagctatttatctactctcttagagaggctctctacttggatggttaggaatgaaggcttctacccttatttatactactccacctccacaatgaatggtggagattacttgtatcttatggtggagattaattctctagaatgctccacacattctaggagtctctacactcttctactcccttccatatccttccataaggttccagaagggtccacacatcttcagaatattctagagggttcaacattcttccacaagcttctagagagttctacattactct

SEQ ID NO: 67000 - DNA, 394 bp, Glycine max
  unsure (1)..(394): unsure at all n locations
ggctcgccacggagtttccgactatgctcttgtgtggtggatttagctacanaaggagagagcaagaaatgaagagccattggttgatacatggacggagatgaaaaagatcatgaggaagcggtatgtgccggctagttactcaagggacttgaaagtcaagctccaaaaactaacccaaggcaacaagggggttgaggagtatttcaaggaaatggatgtgctcatgattcaagcaaatattgaagaaaatgaggaggtaactatggctcgatttcttaatggtttgactaatgatatccgtgatattgttgagctgcaggagttctgtgaaatggatgatttgcttcacaaagcaatccacgtggagcaacaattaaaaaacgaatggagt

SEQ ID NO: 67001 - DNA, 428 bp, Glycine max
gctttgaagaacacttttagtcttatattatcgtagagacgtaggtttatcttgtgtttatgctttctttcgttaaaaagaaaataggaagatgaagaataagaaacaaagaaaatgtgagattattctttctaaaaaaagtatttgaaagtttgataggaaaaataaggtaatagattatgtgccatgaaacaaagcgagattaaatatgaacaaaaaataagagaaagtgagtattagataagagaaaaatgcgttttatgtctatgtatttttattaaacttggctatgtgttttatactttatagttgatatattagacctctaactctatttagcatgtgaatttaattctctctaactttgtgacagtctatcatcatcactaaatgacaagttttcttaagtctaaatgctaagttaaaca

SEQ ID NO: 67002 - DNA, 473 bp, Glycine max
  unsure (1)..(473): unsure at all n locations
gcagcttaacatttattttctanacttgattttttttaccaattactaagtctttcctaactagatgatttanatgatgcatgttaatgtgtgcagccctacgatgccacaaccaagaatcatctattttacttaccaaacagctcaactcgtgaaatgatgcatgttcaacattcaacatatagatattacctattctcttaccaatatggaaaactttactagatatgacttcacttataagacaacagttcttgttgaattcaattntgaagcctttatcacaaagttgactaatgcttggaaggttgtgctttagtccatccatatataacacatctcttttttgagttntgtgttgatttctgataattccttctccattattttccctttgttattggcctcaaatgtgatgtattcttcatcttttgacacacagtcagagagtttgtacctatcacctgttatgt

SEQ ID NO: 67003 - DNA, 340 bp, Glycine max
  unsure (1)..(340): unsure at all n locations
tagtctttctggacaacatggttgttaagtcatctaatttttttatcactagatnggtttaaacgaattgtttgagattattaaactcttcaatntgaaacttaaattcaaagaagtatttgttcggtgttctagtatgaaactttttttgggttgatgctcacccaaaggggaatcgagattaaccctaaataatgctcactcgtcttacatatgacaaatgtgactagtgtgaaggaggttcatgtgctaactaacataacaacttaacttgcttagtttttatcaacatcttaagaccagacacaacctttatgtcnacgactgaagaataatgatg

SEQ ID NO: 67004 - DNA, 329 bp, Glycine max
agccggtttaagagattgagatgagtctgtgagttattgtgatatcctagaggtgaaggagacatcctcaccacttgtatttttgcaatctttcttcttgttcttctctttgctgttaagaaggcttcctggtgtggaaagctgaatcctctgttggatcttccctgtaggtacctgatgtaaatatatttctatctatttattgatgttttgtgtgttctctgtgctatctgcttttcatttagtatgcctttaccttgatcacgtaaatgcatgctttgttagggtcatacaataagggaaactggtctgactctaaagtccttgat

SEQ ID NO: 67005 - DNA, 452 bp, Glycine max
  unsure (1)..(452): unsure at all n locations
gcttcaccttctggtcctcctcataggagtttcttttatttcatgctctatnnncanctcccactcaacgtatgcctccggatcattctttcctttaaatggaggaatgttgagtttaataccatcaatacggttttgtctaggaacaccatcattccctcttctcctcctttctgcttnattatgatctctattctacatttgatccaacctctcatggagcgcatcatctcgntgttacattaaccgtctcaaatgttgcatcaaagctcgcatttggaattgcgaaagccccactccatcattaagattacgacctgacatctcatacaaacaaatctaacgtaacatgacaattatagttgctggttgaatacctcacccactccagtgtatcacacaattatgtgctcttctctcatgaaacactcttgcctctaccactctattcc

SEQ ID NO: 67006 - DNA, 368 bp, Glycine max
  unsure (1)..(368): unsure at all n locations
ctacatcatgtggtagcaaagcatgttcatctatgttatgttctttngcttcctctatcttttgttcgttccattcactttaattccttgttcttcattgtcttctccattgtcttgtggtttgatgttgtttagagtagattaaaaaaaaatcgatctacacttgttcttgcatttcaatggttcaaattttatagatatactcttgaatcatgtttttgtgttgattttaggttctatcatttttcattcataatcttaatgtgttgaacctttagatcttaattttcttgaaaaatattgattagaaatgaaaatacacaatataagggttaatcacttcattcaagctgtcttacagtcatgtt

SEQ ID NO: 67007 - DNA, 295 bp, Glycine max
tgcagctatgagattggtcttcccagtttatttctgtgtgggcctgacacaaagcaaatgtgatcattctactatgacgactgagaaaactggtgcaaataaatagggtgaggatgagggagaaacccatgctgtgactgccattcctgtacggtcaagtttcccaccaaacccaccaatgtcattactcagtcaataactaatctccttcttacccaccacccagttattcacaaacgccattccttaatcaccacaaagcctgtctatcgcacttccaatgacgaacaccacc

SEQ ID NO: 67008 - DNA, 431 bp, Glycine max
  unsure (1)..(431): unsure at all n locations
tttcactgatgtgacatagaggagttctattctcttacggccanngctgcnggcccaagctcttgcccctacattctaaggcgtcttcttctacatcagtgcatatgggcttatatcctaacccgaaccttccacagttctccttggattccaccaagctagccatgccattccctgtccgacctatgctcattcggagctcatactcgggcgctaacattactcgggccaccatcaacacgatgctggataatcatggtgcaccggggggagcttgacataagcattgctcaccacctctaatgcttgagaggatgtcttcaaagattcactcgttgctttcacatacagcatattagaaagaagacttaccataatgccctcttctctcgagacgatgactaactgcgcctctagcataaacttcaacc

SEQ ID NO: 67009 - DNA, 462 bp, Glycine max
  unsure (1)..(462): unsure at all n locations
agcttaatttattttcaaatttaagacttaagttattttnttangttatttacttgacatatataaaccttttattggggtctaaccacttttggaagtntatattaaagtctaatggtcatacgttaataatgctaataatgtaagttaatgtaaaataatttgcacaatcataaaaaactataattgatatgattgttaaggtagctattgcaaaatcaatagacttatcattaataatttaaccactttttttactgttgaatactttccaaatttaacgtgatgtttttttttnttacacactcttagatcttggaacctccacactttcatatgccaatcctttggaaacttggggattacttagtctacttgtaaattgagtgtaaacgacattgatatttgagtaaaaaaatattcgcgtctgccaaattaattgtataaatgtatttgttctta

SEQ ID NO: 67010 - DNA, 471 bp, Glycine max
  unsure (1)..(471): unsure at all n locations
nntgataaacattcgacatcgaacattgtgaagttatatggtgttttgttctcattcacaatcctcattnttggtgtatgagttcttggaaaagggaagcattgataagattttaaaagatgatgaacaagcaatagcatttgattgggatcccaggattaatgccattaagggtgtagcaaatgctttatcttatatgcatcatgactgttcacctccaattgttcatcgagatatatcaagcaagaatattgttttggatttggagtatgtggctcatgtctcagatattggagcagccaggcttcttaatcctaattcaaccaattggacctcatatgttggcacttttggatatgctgctccagagtaattcctttgtctttataccgacgataaaatgattctgcacgttctcattgatagttgtctacctacaaattacggtaaatagttatcagcatttcatgc

SEQ ID NO: 67011 - DNA, 448 bp, Glycine max
  unsure (1)..(448): unsure at all n locations
agctnttacacgggagcaaaagatacttgtatanttttgtaagctatctggncagagagcttgtgtatgtacaatcatggccttcatcatgtcctcatttatacatttaattctaaaatttagagattcatgcaaagattattactcacagtttaaggtcacactctcaccggtttttggttcaagcttttccttcacaatcaatctgtctattgactaacaattctaattgcaagttcacattcttgttctntctttgttcgacatgcacacttgctcaacttgatgaaaggaaacacaaatctcatcttaagcatgcatttaatttaaaacaaagtcatacacccatttttcacaaaaatataaaagtgtntcactgccatgtcatctaaaataagtaaactgttcaaatgcttcggataagcatctaactttcatattaaaacta

SEQ ID NO: 67012 - DNA, 333 bp, Glycine max
  unsure (1)..(333): unsure at all n locations
ataaaaagagaagatctgaactcatcactttttcttaaaacctttgcgnggaaccaagtgttccgatcattcatttgcatattcatgttctggtggcatactcacctttgtttatttctttatgaatttcatcatatctaagaaaacaccaaggcacctctattacactcgatccagaaaaatggataatgaatagggcgtgcatgaacagatgaaggccgatctatcggccctaaaaaatcaaatggcttccatctcggaggtcatgttaaaactccagaaaactataaaggattaagccacggcaaccgcctccagcactgttagggaagc

SEQ ID NO: 67013 - DNA, 464 bp, Glycine max
ttaagtcacctgcggcatgcaagcttgcccacactctgacttgcctgtggtatttgtcttcaagatcaaataagtttgcataatattcctggactagtgccacatcaatgtgaccattagactgcctggtcaaggctttatgccatctcctcctctcaagctccttccggaactcgtcatactgtgtcacgtacaaatccacattcctcttggggaggatattcttggaatgtacattttgctcgtacctctcccaagagacgtcggaaacaaatctattcgtatcatacggttcttgaagtcgggatgtggatgatctcctctttctggagggcatctgcatcaaaagaatcacaagatagaaagttagatctcgtttattgaagactgacatcaacatcataaaacagctaaaaggaatgtgcacttatcgagacagatatgcttactgcacctttatgctt

SEQ ID NO: 67014 - DNA, 383 bp, Glycine max
cctgcggcatgcaagcttgagagatgggatttcagacgctcgtgatttactgtgatgctcacgtgggtgatcaattcctaaaccatggcgtggaagcagatcatctgtatgttgatattgctgcaataattagtgaatcgttcaacaatgattgggaagttctagataatcatgtctatagggaggcaaatggtgtaagtgaattccttgctacactaactcataaccaagagttgtgggtgcatgttttgtctaacccacctactgaggtgtctatgacccctctagcagatgttgtgacggctccgctaacccgttttggtcgccgtaaacagaatctacccctccttattaataaaaaatatttataaactttattttaa

SEQ ID NO: 67015 - DNA, 483 bp, Glycine max
  unsure (1)..(483): unsure at all n locations
ggttatgagaaaatttacgaatgaaagtttagaccacgttatatacattcaaggtcatagatgtagggatgaaggctcaaatgcgttaacaaaatatggcttggatatagagatgggtctgaaccatattaaataaatttatgatgattgttcatttctttatggtgttgccttttgctcttagttatgtgattnttgagttataaaaatacatccactagaagaataattattttcattattaattaaaaaaaaatttaatcaagtgattgaacacaaatgattattgtattgaaattaagattgaatgattngatgcctcacataagcctgaaataagtttctctatagagcttttcttaaaagtcacttttcataaaatttataagtatcaaaatatatnttgaaggatttataactgtggttgttaattaagattgaacactcttaatttntaattatagataattatatatttacttt

SEQ ID NO: 67016 - DNA, 232 bp, Glycine max
ccttttttttgtgggacccacacgagagagaaccaacatgcgactggcagccacaaacctaaaaagccccccacgctatctcaaacaatgcaatacaatgcaccggcgccccacaggaaaatgaaaaaattatcctgcccaacaccggcgagactcctcaaagaccacagtaggggtgaggcattgcaaccacaaccccaaaagggcacacaccatgtaggtcaacactcac

SEQ ID NO: 67017 - DNA, 440 bp, Glycine max
  unsure (1)..(440): unsure at all n locations
ntagactntatggggcaacaaacacatgatagttgctttagtttaatctaattaagatattcgaaggcgttacttgtctactgtttaacataattacatgcatcgaccattacgagcgacctgcatatatctcacacttgcatatgccggtattattgtttaatcttatatttatagtttcatactatatacataccatttatttaaaagtgacgagaattgtcatcatgtaaaatactttatctgttgaaatttatgagtagagattagtttctgaaactaaaaaaaaatagtaaaccatgcataacaagtagtttcattacatccgttgatacttgagtactttattcaactacatatgtaattgaccttccacatactacagaagaccttgatataaatatagatgaaggtgctcgagttgttttttttatacacgt

SEQ ID NO: 67018 - DNA, 439 bp, Glycine max
  unsure (1)..(439): unsure at all n locations
agcnttggttaaagtcactagggaaaatgaattgctactgcaatcagttgaggaatctcataagtctcttgaaagtacagagactaagttaaaagtcgaagaggcctgggaggaggctttgaaggccaagctagtcaagactgaggactctgccgaagctctccaaagaggaggtcgaatgccttaataagaagtttgctctctttaaggaaaattcggagaaggctgangagaaatcgaagggtgatctcgatgaagctgaggctgagatcctcaagactcatgaagtctacttcttcaatgctatccaacaagccaaatgcttcttcaaggaagtcgacctctctctctttgatattgacaacgacataaaacacaaagaagagttggttcctatagctgaagtagaagttggcattgacaaacctacctagctcgt

SEQ ID NO: 67019 - DNA, 473 bp, Glycine max
  unsure (1)..(473): unsure at all n locations
cgaatgtntggggattattntgtgtgccggaggataataattgttttcttttagganaaagactntggggagtatgaaaaataaaaaaaagaggaaagaagtgatagtcgtaatagatgataggaaatgaagaccaagataaaaagaaaaacataaaagaaaaagaaagtgtgcaagaatataagactctntcttacatagtatatattattcttgcatgggttaaccaagttttatttctttttgtggttgagttcctcttataccgatccaaaaagttttcttatatatataaacataaaataacctttttaatatgtgaggatagggatcatatacattagaaaatatcgttagcctaaaattatatggacatcttanatatcaataacacgtaaatcttattgtattttttgttcgtaattaaaatgttaacttttatttattaaatctataaaataattttaattaat

SEQ ID NO: 67020 - DNA, 409 bp, Glycine max
  unsure (1)..(409): unsure at all n locations
gcttcctaacaaaattttcatacatgtggactcttttctagtaattctgacttaacacaggctcctatcccttttctatgtccacctagagcaattccacagaaaaaaatggaagaagcggaaaaggagatcttggagaccttcatgaaagtagaggtgaacatacctctgctagatgccatcaagaagattccaagatatgccaagtntttaaaggagttgtgcacccacaaaaggaagctcaaaggcaatgaaaggattagcatgggcagaaatgtgtcagcattgacagggtaaattgttcctcacattcctgagaaatgtaaggacctaggtactntctatatacctcgcattattgngaacaagtaaattgagaatgtcatgctagatctangagcatcagtta

SEQ ID NO: 67021 - DNA, 448 bp, Glycine max
  unsure (1)..(448): unsure at all n locations
tgcccagagaaggagtccacggagganatgcttaccacctcattagactggaaagcggtttctaatgactcctctgcggcctccacataaggcatagaggatgggcagctcaccaagatgtcttcctcgcctgatatgatgaccagatgcccttccactacgaatttcaacttttggtggagtgtagagggaacaactcccactgagtggatccacgtccgccccaacagacagctgtagggggggttaatatccattatttggaaggtaacttgacaggtgtgagggcctatctgtaccgggagatcgatctcccccctaacctctcggcgggtgccgtcgaaggcacgaaccaccattgaactcggctttaggtgggaagcattgaatggtaatttctccaaagtgctcttaggcatcacgtntaaactggaaccattatcgatga

SEQ ID NO: 67022 - DNA, 468 bp, Glycine max
  unsure (1)..(468): unsure at all n locations
actcaagctggaacccaattcctaccgngangaataatagtgcaattaaaattcttatatctaacgacgcatatggcttcatgctccataatagtaaagcactacacctcttcagtttaattgaaagtcctttatttttacactcagaaagctcattccaccatggcacaaaactaaaattccctttgtgagttgggaacattgcctcaccccttcttcaacattaatactacataaaatatgaaagcaacagagcatgaacacctatcatcttacccaagagaatttgaagttaacaactaatagaacacataatgttacttacaagtacatcatcattgtaatgcgttatgaagccgataatgataaatattctactatcctgatcaatatctactaagcctgatggcaagacatctgatatattcatatagaacacatgctgacatcttcactattaatttctat

SEQ ID NO: 67023 - DNA, 423 bp, Glycine max
  unsure (1)..(423): unsure at all n locations
tgcaagcttagtcttttgtcnactttatacaaatttttattttgtcaatccaaccattgaatcatgtaatattatcttaatgatcatgtattccaaatnttaaataattcatacattcatatgtaattgaataattgacatattttaaatagcatgttaatgtatactgccttaacaaacaatatgcaattgccataatgacaattgatgtctaacattgtttattgatctctatgcagatcttccccctgatgaggaaccactagaatggaacactagaatgaaaattgctgttggtgctgcaaaatgattagaataccattacgataaagcaaattctcctgtcatctacagagaactcaagtcatctaacatattacttngatgaaagataccacccaaaactttctgactttgtcttgc

SEQ ID NO: 67024 - DNA, 454 bp, Glycine max
  unsure (1)..(454): unsure at all n locations
atgctgtgcctcttcacgtctggaatatgaatgtagtttatacatccaaagacccttaggtgctgtgctgatggcttcttcccgttccaagcttcaattggagtcttgtcttttacagactntagtggacatctgttgagtatgtaaacagcagtgtagactgcttcagcccagaatgtgttaggtagtacctttttcttgagcatcgatctagccatctccataactgtgcaattctttctctccgacactccattttgtagaggagaatatgcgactgtaagttgtctttcaatgccttcattctcacaaaatatttcatactcgtgagaggtgtactctttgccgcgatcactctttaatacttttatccgatttccactttgatttaaacaaagaccttgaactttttaatacttcaagacttttgattttttttagaaattacccatgt

SEQ ID NO: 67025 - DNA, 442 bp, Glycine max
ggcattcccatccttaagcttctagaatgatcctccacatgctttttgctgctgtacctccacgagagcctgttaaacttgtagctcatagtcctttaagtgcccaggtatgttgctccttcttctgggcctcgtatcctgaattcctaagttgctattcgtaacattcccgtggtcttcgaatagcaccttgtcctcaaggtgatgctgttccttgaggccttcccactcttcccacgacgtctcgtccgggtgcaagccttgccattgcactagaaccatgcgtgtgagcccttggtctgtctgcaccaatttttgacccagaattgctaagggtgtcgtaagtgtgttggtatccatcgctcctgaaggaagtgttgccgcttgtaccgaatcaggtgacccacgaagggttcataagtgacaatgaacaccggatgaa

SEQ ID NO: 67026 - DNA, 450 bp, Glycine max
gatatcatgagtatttctatagtgagagatgatattatgtcatgtcagaccacgctaggctgtgtgtgaataggcctatattgttttataagacagagacctaagcttgacctattatatattagaggcttttatctttgtctagcctaacctttgtaaagtctagtatgacctattagctgatttaagagctcatattatattctttccaaaggaaactcacaccacatattagtttttcagcatataagacactgacattcgacaacatatttgcatatttgatccattgatcacgtctttcaattggatataataatctatgcatacatgctactgtccttttagtatttgattctcatctataataacggatgtcaagacaatagaagaatataatcacattatccagaactagcctgcatataaaatacagaacataaatctaca

SEQ ID NO: 67027 - DNA, 440 bp, Glycine max
agctctgcagatatggatgccagagactttctttatatctttgagttgggagagaggaaaactcatatatgaatattttttcctacaacattatagggctgggcagtggcagtcacaaaatacatattcagaagggttgtatataaaaatatatatggggggtggagaaatttatattagggaagaaatagcatcttacactcccattggtggaaggaccataagcagctcaatcaaatataggaatcaatcaaaatataagaccaaattcagtggaaggtgcgctgtggagacatgaccagattttgtgaggacaaatggttagggggggacagaagtttaacggacaaatttcctacgctctatcaagtttctaaccaacaacagcaaactatcatacacatatgaagccacaaggaggaacgtggggattggaattt

SEQ ID NO: 67028 - DNA, 276 bp, Glycine max
  unsure (1)..(276): unsure at all n locations
gcatactgtagtgtctaggacctagccattgttttgctttcgcacaggccatagcatgctcacctggattaagatcagccgctagaggtgctgcacattaggggacttactggcgtcacctatggcagaatagttggcaaagatcctaagattccctcgtcattcccttattacagccagtgatcattctttgatgatatgcgancatcgataggacgcttcatgatacctggcacacttctttgatcaatctgacatgtgcctagacgtgcctat

SEQ ID NO: 67029 - DNA, 476 bp, Glycine max
  unsure (1)..(476): unsure at all n locations
agcttgagatgaggaagtgttgaaaggtgaatctttctgcttttattgctgaccacagagtggtacctggagatatgtcgcgcgggtcatgagaccttggggacgtcaggtggggtgctattgcccaaaaccaagcttgaccaatcccgacccaacccaggcatagtcggtcagtgagaacctgtgatgtacctaagcaggcgagctcctggcagtcaacagattataggaacaaagaccacaaaacaaggaggcttgtggtggctggccagctgtgaaacttgattgatatgtgagatatggtctctggtaatcgattaccaagggtgggtaatcgattacaatgcttaaaaatgaagacagggggctaagatggtctctggtaatcgattaccaacggatgtaatcgattaccacgcttgaaaacgngtcatgaagcttacgtagcctctggaaatcgactaccagcctgtgta

SEQ ID NO: 67030 - DNA, 425 bp, Glycine max
  unsure (1)..(425): unsure at all n locations
ntgagccaaagtcccaactcaccataaactgttccctcataatgaaacatataanaaaggagaaagaggaaaggagaaaaggagaaaattcccaatcaaagagtgggagaaagcaaaaaaaaagaaaagaaggaaagttcccaatcaaagagtgggagaaagcaaaaaagaaaagaaggaaaattcccaaatcaaagagtaggaagaagaaaagaaaggaaagaaaattcccgatcaatgatcgaaagataacagaagaaatatgcataaaggtcttttagaccagaccacatctgaacaaatacagagttactaccaagtagacacaaaagaagggggggaaaaccatgacctgaagtggtcctcttcctttgattgccaaccaaaatcctgtgcgtcggtgactttgtcacctcactctaaac

SEQ ID NO: 67031 - DNA, 467 bp, Glycine max
  unsure (1)..(467): unsure at all n locations
taagtccctgcagctgcagctttacttattacttggatagatgtgttttcattactacaataaanaatgaaactacacaagatactatataaagatcatccacatataattactataagtcaaaaactgctgctgattgacctaagtatcaagaagctaaatcaagcatataacctttaagtntaagaggttaattgaggacatctatcagcggcaacatacaaagattaaaaaataattatctcaataaaaagatcatanagcaatactgtcttacctcattcagtttttcccagaccagatcaggttgatttatgtaaccttgttccgtggctagaagatagagctcaccctcaaactatgaagtagagaaaatatctttagtatgaagactntgcaagacaaacaacatttnttcttgatgacacaaatgtgttactggctgcacttgatatcagtnatctaaa

SEQ ID NO: 67032 - DNA, 475 bp, Glycine max
  unsure (1)..(475): unsure at all n locations
ttgaagataaggttcatgtgtgaatgtaagagctgtattttgttttttgggtattgtcattatccttacctgtttaaagtcttggtgtattttatggatatattaatgttaatgagctgcttcttgtttcaggcaccaacacatgggacagatttgagctgcgtgtgcacaagagaattattgatctctacagttcccctgatgtggttaagcagattacttcaatcacaattgaaccgggtgttgaggtcgaggtcaccattgcagatgctcgattnttgccccattttttccccgcatgctagttacttttgtaatttatcctttctgctaggtatgttgagtcccatatgttanggttaatgcatttcctctttgccgtaaaatanttgatgttgattattgtggaaggtgaattattgacttgatcgattatcttttgttttatgtgtatcgacattgaagaataccatga

SEQ ID NO: 67033 - DNA, 413 bp, Glycine max
  unsure (1)..(413): unsure at all n locations
agcttattcatcactgcctagcaaaggtttatacctccttggggctcccctatcgcctttccttctaaacacctctagtttgacacttggttttacataattgcttggctgacatctgctcccctccttatctcctcattttgttgtcgtaaaatgtcttgtgcctgtaatgcctcatctgcaaccctctntgcttcctcattctagtggcataggaagtcccgggctcttaatgcctcatttgctattctactaaaatcctagcctcttctcctcatctccgccatcaaagtttccaacatcaatggtacaacgggaatccccaatgtggaatgggttgtcattattccactcatnttgtcanagaaacaatgcaaaacaagggcgatgggagaagtttaccgtacccctta

SEQ ID NO: 67034 - DNA, 455 bp, Glycine max
tcaagatatggccaaactcccttctctctctagagaaccattatatgcataagctccttgagaaaaatggccaaaatccccttccaaaatctgatttcaggcttatataggtgggtttgttcgtgctcgtgcgcttagcgtaattctgaaccgcttatcgcgcattagtggattttggcttatcgtggcttttcttgctcagtgaatggactgaagcggtgcgcttagcgggatgacccttcgctcagcgagcatgcacaactcatctttcttccagattcttcctcgtgcttagccaaggattgttgtgctcagcggatggctcgctaagccagcaaactggcttagcgaaagggtgaaaatcagcacgttaaaacgtgcctaattatcctgaaattgagagaatatgattattaaacacactaaatggaaggacttagtatttatttcctatc

SEQ ID NO: 67035 - DNA, 432 bp, Glycine max
atacaacctaatattctttgtcttatttagtcattgctgactctatacaaatcaaaagatttgtttgagtgtttgcacaatgactaacttggctaatgtcttaaagacgaatatacaatctaacacttagtcttttctttcaaggagctttgataattcttttctaactttactagaacttatagaaagctttacaaaaataatggaagaaagaaagaatgaattcacatatatttcacttcatgtcatttcttcaatgcttataatctacatagaccttcttcaagtatctattatctcacaatggtttgatttttccactacgacttcatttgaaatcttatggtcgttagaacatataatgcacatcctattctcatgtagatgaacctcctttattgggcttcgtgtagatactacaccaaccagtca

SEQ ID NO: 67036 - DNA, 404 bp, Glycine max
  unsure (1)..(404): unsure at all n locations
tcaggctgttcaattgcttcagattgttgcatagaatggcaattgtctgtgtggtggtcggacagaagggcaaaggtctgtgtggtggtcggcagaggagcataaaccacagagtctggcgacaggtgcaaaatttttattcatggccagttgggttaccaggttaaccaaggcatctagtttaccttcaagcttcttagtctcacctgatgaattcgtggatacttcatgcactcctctaatgacaatagcatcacttctggcactaaattgctaggagtttgaagtcatcttctcaattaaatttttggcttcagcaggggtcatgtctccaagggctccacatctggaagcatctatcatacttctcaccatgttgctgagtccttcatannaatattgga

SEQ ID NO: 67037 - DNA, 399 bp, Glycine max
  unsure (1)..(399): unsure at all n locations
agcttgcttctacactagtatgtcaattccctacataagaaatggccatggagatgccaagttgtgcaacttgtttgccaatgcatgtggtatgtaatcacatgttttacaagatttacatccctgcacatagtcggtcatatcagttactacaattggccaatagtaataggctctcaatatntttcctgccaaagtcctatgtttgaaatgataaccacaacacccctcaagtatctaaaccattatgtactctgcctcagtctcttttggacacttcaggagtggttgggtgaatccttttctatacagtcttccatctattattaaaaaatcggcggctctttgtaatttctgncatagatataaaactctccacttaacctgttaactcttacc

SEQ ID NO: 67038 - DNA, 421 bp, Glycine max
  unsure (1)..(421): unsure at all n locations
ngagatgaggaagtgtagaagggtgaaacttcctgcttttattcgttgaccacagagtggtacctggagatatgtcgcggggatcaggagaccttgnggacgtcaggtggggtgctattgcccaaaaccaagcttgaccaatcccaacccaacccgggcatagccagtcagtgagaacctgtgatgtacctaagcaggcgagctcttggcagtcaacagataaaaggaacaaagaccacaaagcaaggaggcttgtgtggtggctggccagctgtgaactntgattgatatatgggatatggcctctggtaatcaattaccaagggtgggtaatcgattacaaggcttaaaaatgaagacaggaggctaagatggtctttggtaatcgattaccaangggtgtaatcgattaccacgcttg

SEQ ID NO: 67039 - DNA, 436 bp, Glycine max
  unsure (1)..(436): unsure at all n locations
ccggaccttaagtcacctgcggcatgcaagctntctagctnttcattggtgtattatgatctccttttggtgctctaaaatgtgggaatgtgctcaaatatgtggggcaatnttggtttgttttcttgcttgtttgggttggattgcgggtttgtatgggatggccctatgcctataatgcattttgaagcaatgggacatgccacattgtccccgttctcttgctattgatacctaaacgcgcacccaccaagtgttcggtgaaatgcctcaatggaattagcgcgtgacctttgtaaggaaacaacccatggngcattttggtttgcacatatattctatttttcgggacatgcattcattcccgaaaaaaggtagaagtattgccccacatatattctatgcttatgaaccaaagttttatgcataagaacac

SEQ ID NO: 67040 - DNA, 455 bp, Glycine max
  unsure (1)..(455): unsure at all n locations
gggattntntcctaacgtaaacgaaggaaagtgtgctatttttataactntgagctggtcctccttataatcacagcaatgctgaagcttataactgacatatgccaatgcatgccaattccacactacgtggtggaacaataatgtgtcatgatgccaactcaacactacatgcattgggaagaagaatgatcgatttgcaagtaattaatagtagtatatatattaaggaattgtagtcttctgaaaaatttcttaacttttcttatcatcttattgttaaaatattagacttaatttcacttttttcttctaaatattatgataagataactctaatccttttattttcattatgtcaataacttggataatttcttccggtacaattggatctctaagagagaggagttataagttacctgatattgtgaaaggagattaactttatagag

SEQ ID NO: 67041 - DNA, 366 bp, Glycine max
  unsure (1)..(366): unsure at all n locations
agctagccacaccatcgtcgttccaccccanattcattccgagctcgtatccatgtcccaacattaccctgactaccattaatgtggccccagatgggcgtggttgtatcgggggagattccacataaacattgctcactaccttcaatgcttgaaaggacgtttccaaagactcctttgcggcctccacatagggtgtagaagaaggacaactcacaagaatgtcttcttcccccgagactatgatcaattggccctccaccataaatttcaacttttggtggagcgttgaagggactaccccaactgagtgaatccaagttcagcctaataagcagctataggctgagttgatatccctcactt

SEQ ID NO: 67042 - DNA, 466 bp, Glycine max
tactcagcttgagtgtgtgacatggaagagagagtctatgaactcagatgtattactaagtgctcaggcgcaagtaaagggcctccatgcactgggtaactgttactttccttggatctggttgtgttgtgtattttttcaagatgttgttcattcacgatcttattcacgtggtgttgtaattcttctttctgccatctagaagggcgatgcttatatttaaccagtcaatgtattgaaaatggaacttgacaaaatcaattgatagttgttgttttggagttttatgatatcgtttcttctgctcgcatctattttcatgttataaatgacactgaaatttcaatacaacttggcaggtttatggaaggtatggctcctgttttctctcgatcttcctggtattgaacttggcttcttatacaggtaatattcatggtccatatgaatagcaaaaattctataa

SEQ ID NO: 67043 - DNA, 348 bp, Glycine max
  unsure (1)..(348): unsure at all n locations
agcttgtccttggtttagagatgtattgttcatgtattgcgacttgtcaggatcaattcgggcaaaattggatgagggaaagagtgtgatctccaaaatctgcacttatgcagaattttgctgtcaaataggtgcagcaaaattttggctttgtgcacaacatgcttgtgtatggctgcgtgtgagggggtagtacatatggggttctggacattngctagcatatcctaacggtcaaatgttgactatgtactanagacttccagtaaaattttgagttgatgccaccgttaacgaattggaacgaaagaaatgttactggtgtatttgtatgtgaaaagctgtgat

SEQ ID NO: 67044 - DNA, 433 bp, Glycine max
  unsure (1)..(433): unsure at all n locations
ntgacgcaacacttgagcatgagagtatgtgttctttttttatatatgatataggtgtatggcaattagaatatattagatgttcttgtatgttaacatgggtaataggatactctctacacatgcgcgtgtgcataaatggattacatgagtntggtctaaatcagaggggctagcacgacattttcgcattaatataagcattatcttgtaaactaacttctaaatgtttgttctcgcaggaaatggccccgaggaaacttgcctcaaagagatccaggaatgataaagcggccgaaggaaccagttccgctcccgagtatgacagtcaccgctttatgagcgctgaacactatcagcgtttcgaggccatcaagggatggtcatttcttcgggagcgacgcgttcatctcagggacgactagtataccga

SEQ ID NO: 67045 - DNA, 417 bp, Glycine max
  unsure (1)..(417): unsure at all n locations
agcttgtccttggtttagagatgattggttcatganttgtgacttgtangattcaatttgggcaaaattggatgagggaaagagtgtgatttcgaaaatctgcacttatgcacgaatttgctgtcaaataggtgcagcanaattttggctttgtgcagaaaatgcttgtgtatggctggctgtgagggggtagtacatatggggttctggacatttgctagcatatcccacccctcaaaatgtagacttatgtactagagacttccagtaaaattttcgagttgatccaacggttaacgaattggaacgaaggaaatgttactggggtatttgtatgtgaaaagctgtgattttgagttgtggtttgggcagagttttctgcctttgccctgttttgcttggtttatagtccatgat

SEQ ID NO: 67046 - DNA, 432 bp, Glycine max
  unsure (1)..(432): unsure at all n locations
tgacgcaacactttgagcatgaaagtatgtgttctttttttgtatgtatataggtgtatggcaattagaatatattagatgttcttgtatgttaacatgggtaataggatactttctacacatgcgcgtgtgcataaatggattacatgagtttggtctaaatcagaggggctagcacgacattttcgcattaatataagcattatcttgtaaactaacttctaaatgtttgttctcgcaggaaatggccccgaggaaacttgcctcacagagatccaggaaggataaagcggccgaaggaaccagttccgctcccgagtatgacagtcaccgctttaggagcgctgaacactagcagcgtttcgaggccatcaagggatggtcatttctccgggagcgacgcgtccagctcanggacgacgagtataccga

SEQ ID NO: 67047 - DNA, 481 bp, Glycine max
  unsure (1)..(481): unsure at all n locations
agcttataagaacaaaattgcctcaatcatttctatatatgcatgtgaattaggacgcatcaacaagaatcaagccaaggctattgtgcaagcaatcaatggggcaaaacacaccaaatgattatgatgatggatggctcaaattctcacaaaggtaaaatcatcactttcaaattgagctttcaaaactatcatgacatgtagagaagaatcaagggattcaagtcacaaaatgtcaagaacttttattttcaaaacaattacccatttcttgaacatatcctataattcaaagaagaacatgcaaagtcgtacgtgtacacaaaattgacccaaaatattaaactaataatccgacgaaactaacaacattaaataattaacacaactaacanattaacaaaaccaaagagtagggtggagtaaggaagtctctttcaccactacgtccactaaagaaaggttcgtgaagaatggctta

SEQ ID NO: 67048 - DNA, 469 bp, Glycine max
  unsure (1)..(469): unsure at all n locations
cganatggaggctctggtctcttattgaaactgcatgttttgtcttagtcatttgcctcacaagttcttcacgggaagtttgtggaggagcctcaactgtttgctgtttctagggctgttgctgttgttgctgctggattggtggaggaacgtatggtctgcttgggccagcaacattttgaaaataaggttgttgttgttgttgctgctgttgtgaaggatttgaccatctaaggttgggatgatccctccacccaggattgtacctgttgctggagaggtcataattgttctgttgtggctgattntgctgctgaggttgaggaggtttgttgtaaatgtttgcagcataagcttcaggctgttcaattgctttagattgttgcacagaagggcaaaggtctgtgtggtgatcgacagaggagcatanaccacagagtctggcgataggtgcatattttttattcat

SEQ ID NO: 67049 - DNA, 388 bp, Glycine max
  unsure (1)..(388): unsure at all n locations
agcttcaccattaatgaataaaggctgtgtgttgtatctgatcatatttccgataggtggggcgttcctttatatgctgtcttattcattntaatatggtattagagccatattctgcttctgttcggtgggtgccgccagccctctctttgtggtgactagccctggctcgagggggcgtgttaagaatagtcccacatcgggtaattcatgaagatgataagtgtttatatagctgggtagaccaccctcttatgaatcgtggtttaaagcgacacttcggatgccttcgctgcactatataaattaatatggtatcacagcaccttatgtcaagttaaattggatgaaagatgtacgggtcctgtgtgagtagcgagaatgagat

SEQ ID NO: 67050 - DNA, 484 bp, Glycine max
  unsure (1)..(484): unsure at all n locations
gttgtgtctcacacaacacanaagagattgctttcatattgtatatgacacatgaaaaccagagcagattagacaccagatcacataaaagtccaaaaggaagtttttcttgcattcttttagataactcgaacacaagatcttttaaccactgaactgacaagacaaaaaagtaatatgcagcatgcagtttcagagaaatgataaaatactttcaaagttacattacagacttaaacctgccaataaaaccgaagccagttctcatctatggtctggttgcttccatccagttccttccacttttgagacaacatatgagccaaatcaatttccccgtattcaagtaccatgtatatatatccatcatccttgactctaccatccttattactgaaggagccatttatgactccctcaaacaaagcccggtcaatcacctaatcacaagagtgggtaaaaatgaataacactataacacaaa

SEQ ID NO: 67051 - DNA, 415 bp, Glycine max
  unsure (1)..(415): unsure at all n locations
agcttatgctganatattacaatacaccttctcatcctcagcagcaaaatcaaccacagcagagcgattatgacctttccagcaacagatacaaccctggatggaggaatcaccgtaacctcagatggtgcagccctcagcaacaacaacagcagcttgctccttccttccaaaatgttgttggcccaagcagaccatacattcctccaccaatccaacaacagcaacaaccccagaaacaaccaacagttgaggcccctccacaaccttccctcgaagaacttgtgaggcaaatgactatgcaaaacatgcagtttcagcaagagaccagagcctccattcagagcttaaccaatcagatgggacaattggctacccaattgaatcaacaacacgcccagaattctgacaagct

SEQ ID NO: 67052 - DNA, 423 bp, Glycine max
  unsure (1)..(423): unsure at all n locations
tgttccggaagaatatagggcatccttgccttatataagctgttgacttaacaganaanataacagaataaacttccatatggatcttagtcacagcccaacaattcaccaccttgaactaacatccatataagacacaaactgcaccctccaaacacacatgatcttaaacccaacaatcaacattgagcaagcttaagcagtgatcaaacttgctctttggaactggctttgtaaacatatcancgggattgcgcagagtgctgatcttatgaactttgattcttcttttctgatcgaatgaagtgatatctaacatctatattcttggctctatcatgatgaacatgatccttggccaagcatatagcactaaggctatcacagtagatgttatcatattctggattaattctgagagca

SEQ ID NO: 67053 - DNA, 362 bp, Glycine max
atcctctgagtcacctgcggcgtgcgagcatgacattgcgagatgatgttagttttattttctactgtagtattaggcacctcagggtggatagagaaatctcagagagaaacgtccgactgatattatttggtttatttactaacagatattgtttgaatattatattatgattttacctctttttggtttgcaacgtgggtacggcatgaccaaacgatcggatttcattttaacacaaattaacggatattagaaatcaaactgatcggcgggaatttatcttatttttttgatcaagtgagaaaatgacttaagttaatgactagagcacgtctaaagcgggtatggaatgtaaatga

SEQ ID NO: 67054 - DNA, 470 bp, Glycine max
  unsure (1)..(470): unsure at all n locations
gtttctttcttcttctctctggtgttctcacttatactctnttctttcccttctttattattttttcaactttttctttttcttcattttctttctatttttctacctctttttcttttcttggtcgtttatttctttctcctcaaccattattggtttttcactctcatgatttgtcacattagttacctcctctttctttttctcagtgccaccctatcctcatcctcaactaccaaatgcttcttgtttcttgtcatcacaacattacattcctctttgggattctnttatttgtttgccccanagctattggatgacttttcagctaattctttggctagttggcccacctggatctcaaggttcttcaatgctgactcagtgctcttttgatttgacatggtcacctgcatgaattgagttagagtctcctccagcttgggttgtctctgaacaatgttatgccc

SEQ ID NO: 67055 - DNA, 450 bp, Glycine max
  unsure (1)..(450): unsure at all n locations
ggaagcatgctngcaattgatagcctctggaatgtagatcaattcgtacgacagataaaataagatggtccatttatccttttatgcccatgtgctacattcaaacacacttgaaattgaaattttcttggtcaagtactgaagctaaaattatatcagactccggcgtaattgttgactgcttagcaaaactattctatgcattttgttnttgaactgtttgaagtgacattgtttgctgcacctgatacatccatcaactttcctgtgggtaacgttaagacgtttcttcttcacatggttgtaaaatgtcagatgatgcgcanaagcttcagacaaccatatcactgcagtcttcacttactgattctcactctcgttttgagataggaattagtcatcccatgggtaaacttcttaccaaactaatacacttgatatttaacattt

SEQ ID NO: 67056 - DNA, 467 bp, Glycine max
  unsure (1)..(467): unsure at all n locations
agcttcaagaaaaagatggcctctgcatattccttatttccagaagggaattctatcaatagacctccaatctttaatggagagggttaccactactggaaaacccgaatgcaaatttttatcgaggcaatagatctaaatatctgggaagccattgaaatagggccttatatacccaccacagtagaaagagtttcaatagatggtagttcatcaagtgaaagcataaccatagaaaaacctaaagatagatggtctgaagaggatagaaaacgagtacaatacaacctataagccaaaaacataataacatctgccctangaatggatgaatatttcagagtttcaaattgcaagagtgctaatgaaatgtgggacactcttcgataacacatgaaggactacagatgttaaagactaggataaatgcactactcatgagtatgaattattagaatgaatcaaat

SEQ ID NO: 67057 - DNA, 447 bp, Glycine max
  unsure (1)..(447): unsure at all n locations
tgaagatccttagagcgacaccaaatgtgaagctagtgatgtttaagaaatgcttactgggaggcaacccatctttctaactcttaattnttacattacattcatttaggatagtttttagctttaagtttggagttcaaaaaaaattatcactccgtagcatagcgctaacttacatttttgagttttgttcatcatgtgccaccttattaatgaccaactcatttggaggaccatgtactcgttgtccaaggaggtggcgaggctgcaatgggataagaggagatgttgagggctcttaaagccctaagtgaagccttatcttcccttctcttttactttntgttaatttcactttattagtttagttggttagtatatgtgtggtagtttagaaatatggttattactaggaagatanggaacacaattgattaagaacatcac

SEQ ID NO: 67058 - DNA, 429 bp, Glycine max
tatgcacaagatggctatctatgcatgagcttatcattcttctcatggatatggcgggcatggcctcctagcattactgcacagcaaataggctcacgctatcactgacttgggatcggagccttcacacttgattgggcaaggatttcaaataatgatggtagtcccatagttctaccatggtcttccattgataaggtgggaattggatttatcatgttgatctacatcattgtacctctctaggactggaagattaacactttagatgcacacaagttttctatattatctaaccagctgttcacggacagtggacataaatatgacaccaccacgatcctaggccctgtatatctacttaatgtggatgcatacaacaatgacagtgcgagataccttagccctctgttgcattattattgtatc

SEQ ID NO: 67059 - DNA, 448 bp, Glycine max
agcttctaaagtagtataatgaagtcggctgcgacgaggagttaatatctgatctccaatactaaatgccgattcagaagctacagtggagatcggaatagctaacacattccttgcaattgcttgtagtgttggatactttaactcattcaatttccaccacattaagatatcaaaatctgaacttcttggtagaacttcctcctctaagtaatgatctaactccgtgttcatagttgaggatctggccctattctttctttcaatgtatctatgataatcacacaatttactctttccatcactaaccacatattgtgattcaaaagaactagtataatcttgatgctttttggcttgatatttcgaaaccaaatcataacacaagtttcggatcctattcacttgtgataagaaatcaatgggataaattgattcaaagtaaaac

SEQ ID NO: 67060 - DNA, 258 bp, Glycine max
tgcgcaggcatcggactactcgtgtgaatagttataagcatcagaagctccacgagagccttgatttgttcatgccgagcaccccaacatattcatcccctgtatctgactgtcatgagacgagcaaggactgtttgaattcttcgagagcttagcatgtcggccatcctcaatatagatatattacctcctataaaagacgggcgagaaaaaacggatgtggatcagaactactcacgaacttgcgatgctttagtt

SEQ ID NO: 67061 - DNA, 454 bp, Glycine max
  unsure (1)..(454): unsure at all n locations
atgcaagcttcacatganagctacatcaaaggtgttgctagagcataataaaagcttttaaattgttttaaagaagaaagtcttacttctgaaacattgagatttttagctattgggccaaagctaaatgtctccacataaaagggatatgatatcaacaatgttttcttctacacaaagtcacaggatgataagggtacactgcaaaatagtgggataaatatggatgttggttccttacacttttgtagtgcaccagataacaaccccattcacgcatccacaccttactttggagtcattgaagaaatctgggagcttgattatagtaaattcagagtactcatttttaagtgtaagtggactaatggaaatatcagcgcgcgacaaaatgaaatagtgattactttggtagaccttgataaggtcgtttataaggatgagcctctcatca

SEQ ID NO: 67062 - DNA, 425 bp, Glycine max
agctttcttaagaagattcctaaagaagctagagcttatctacacatacctctctaatagctaagctcacctccttgagataagaagctagaacttagctacacaccccctataataactaagctcacccccatgacaaaaaacatgaaaatacaaaaaaaaagtccttactacaaagactactcaaaatgccccgaaatacaaggcgtaaaccctatactactagaatggccaaaatacaaggcccaaacgaaggagaaacctattctaatatttacaaagataagcgggcttatacttagcccatgggctcgaaatctaccctaaggctcaagagaaccctatggccattccttggatctctagcccaatctacttggagtcttctacccaatgcccttgcgagataggagtgcatcacacaa

SEQ ID NO: 67063 - DNA, 88 bp, Glycine max
  unsure (1)..(88): unsure at all n locations
agcataatcaatcgcacttcccctttcattgtgcgtttatccaatctntttatatgcctacattcgtgttcgtacattcgtgttcgta

SEQ ID NO: 67064 - DNA, 385 bp, Glycine max
  unsure (1)..(385): unsure at all n locations
agctntagccgacgagggaagtgtcaaccctgtagcttacctcaatgcacgaatgctcagaggggccctcgactttttctggcctgacaccccaacattgtcatctcactttctcttggctaagacagaggaagaaacactgggagtgacctcagcagcactagcagcagggccaacctcaatagtaggttaacccccttctataacagtaggggcaacaacagcggatggtggcacagtcccgccagcaaatccgtcatgcttcacaaggtgcctccaagtgaagtcacccatgatgttactgcaaaataagcaacaacaacacaatatatgtctattcnggccanatatgtcagtcagacaaggcaaaaacatttttcatctg

SEQ ID NO: 67065 - DNA, 448 bp, Glycine max
  unsure (1)..(448): unsure at all n locations
agctattgattgggtgccctcctattattgtngcagtatagaactggtgaattattgtcacaataaatctttaatgtgctatcaatgtcgtctaccacatgcataccagtgataaaatttctcatccatataccatggatggatgcctaaaaacaagcaatgaactatgcggccatggactaagaagctatcagagattgtctagttgactttccagagagagctccttcagtcagcataaatatgtatacagatgtggagcgtttgctttcttgacatccagcataaacaaagtctgagtcccaatgatttccatattctagacttttatatgtgagcacgatccttctgttctctttagaacacatacacaattacttgattcaatggtgattccaaatactaaatattgccaaactcaacacaatgttatcggacaaggcacata

SEQ ID NO: 67066 - DNA, 262 bp, Glycine max
agcttatcacattacctaaactaacaatgtatacaccgtagcttatactttacaagcttagaacagaagcatagaacccacattccctgttaatgctgttcacaggagcaatggtgacctttccaccaccatattttgccactaaatcctctccgacatcgcttatgaaagccatgggtaactgttttccaattgattcatctgcactacacaatatgctgaaaatttcaaacgtctatattttaaacactaccaactctat

SEQ ID NO: 67067 - DNA, 452 bp, Glycine max
  unsure (1)..(452): unsure at all n locations
agcttctaaggaagctacatgaagttgtctcggtattagcactgcccagccttcgttaatcgttggatcttctcgaaatttggtctggagcttcacagaacacttgtccacgatcggaccatatggatctntgacaagacatctggagtgaggtgcgacgtttcgtttccgagagctntagtcacttgtgcgttttgagccttgtagtccaattagctttggaaaaatgccatttcttctccttctttcttccaaaccattccaatgttcaagcactttctccgtaccccagtcaccagtagccaccacgaccgccttgntctccgtgaaacccacaccgagggaacccttctccgaagcaaatcttcaacttgcttgcgatttggttggagcgaacccgactaacctttgtttccttaaagaaccatggtctaccttattttgttatttat

SEQ ID NO: 67068 - DNA, 432 bp, Glycine max
ctgcaagctgagataaggaagtgtagaatggtgaaactttctgctcttatttgttgaccacagagtggtacctggagatatgtcacggatgtcaagataccttgaggacatcacgtggggtgctattgcccaaaaccaagcttgaccaatcccgacccaacccgggcatagtcggtcagtgagaacctgtgatgtacctaaacaggcgagcttctggctgtcaacagataataggaacaaagaccacacatcacggaggcttgtggtggctggccaactgtgaattttgtgtgatatatgggttgtggcctctggtaatcgattaccaagggtgggttatcgattacaacgcttattaatgaagacaggaggctaagatggtctttggtaatcgattaccaagggggtgtaatcgattaccaggcttgaaaa

SEQ ID NO: 67069 - DNA, 459 bp, Glycine max
  unsure (1)..(459): unsure at all n locations
agcatnttgcttcttcttaattcatcattaagttttctcttacttatctctaagnatattaaggtattttactttatttccttttagaaggactttatgtttaacaaattatactaatcattgtgaggtttttttatattgatactaacctttcaaaaggaatacatggtgtaatgtgtttcttggatagcacgggttgtcactgtaatatataactatatgtatataaagagtagcggtgtaatgttcttcaaacaattaaaggggttaatgtaatgataaaaaagataatggtattggagcaaatataatgaaaccttagtaggtgtttagtataatttgtatttgccttgtgcgagtcttcactcttcacttctagcatttctctagctatgtcgtcattgttgttgttgagtattttgtgtagtggatatggcatgaccaattctctgggtcttt

SEQ ID NO: 67070 - DNA, 400 bp, Glycine max
  unsure (1)..(400): unsure at all n locations
gcaagcttagactaganaagagagatattangagggagattgtgtacgaatcctcattcatcttcttacattactttcaccaaaaatagttcctatcttgtagtatgagtttctgcttgtaatggaaggctgagcctctttgttgggatgctctgctgaataaccttgatgtaccactcttactatctattaaatgctatgcttatgtgccattacttctatctatgcttatcttacatgcttgtggcttgagcacccacttgtatgcataggtaggattattagcattaagaaattctttaaaaccttagaacttggtagagaaagctagaaatctgtatgtctacgaatggaatgcagtgatctagtccatattaatgtataggcttaatgcaactct

SEQ ID NO: 67071 - DNA, 345 bp, Glycine max
  unsure (1)..(345): unsure at all n locations
atgcttgcctatgtatacattttggctttatattgtgtcttttctctaatgcacctatgtgaatctcaccttagctactntggtttgngcatgtgtgacaagaacagtggaaacctaaataattagagtagattatatggagggtgagacctgattaaatctataagcaaaaccattaataaggatttagtggtcaatggtctgtctgctgacatgattcactataatattacgggggttgcttgatccttctagcttgcccctcttgtgggagaaaaggttttatttttttttttgttcttgggactgtggattttggattaggaagcgtggataatgtatgca

SEQ ID NO: 67072 - DNA, 457 bp, Glycine max
  unsure (1)..(457): unsure at all n locations
agctnggattcctaggcctaagtcctattttggctctttattctagcttctacaaactgtccatatactcaaaatggcagtcacatatgtacaaattcgttccacaagctaagtttcacaaaatcatgcgcacatgtcattgaggcatttcaccaaacacttggtgggcgcatgtttagacatgggaaaataaggaacggtggcaatatggcatgcccattcatttcagaatacacaattagcctacggccatcctctacaacctcctcaatcaaacaaacaagcatgaatccagccatgtataattntgcaaaaaataagcaaataaagcactaaaacacatcaatggaagtgcacttacttgtagggatgcataanaacacaacanatggaagctaaaacataaaaatggtggcctatgggcttcaaactcgtcattttctttagcacctacgtc

SEQ ID NO: 67073 - DNA, 457 bp, Glycine max
  unsure (1)..(457): unsure at all n locations
agctncgatgttttcatgttcatttaatcctatcatctgacgataaaaaaaaagccaccagaagcagtgccacacaatggtggaattataggaagatgaaggcttgtggagagagtcatacagaccgagaaaaggaaataagggattaaacgggaaaagtaataaattttgcagtgtattgacaacccttttttcagtgtattgactacgtggaattcatggccaaattcgattatttacatcacttaaaccagtaaaattttgcagctttcgaaattacttggatttgtagtgtgtggtgaataagattcacatgcgtatatatactcttctgatgttaccatgattttggtgctcacattaatatgatcttcattatatccttatagtctccttatgtattttttaactcattagatagatcttttaatttctaatctatattagagtttgtttt

SEQ ID NO: 67074 - DNA, 436 bp, Glycine max
  unsure (1)..(436): unsure at all n locations
agcttcanaatggtcaatcatgtctcttgctttctcttattctcaactgagttgaagttgataacgttcacattaagatctattggaataccaaacaatatcataaaacttcatttggatcgcaaccccccctcccccctaaaaagaaacaaagaagaaataattttaaaaggaatgctaaagcaatactcgtatgaacacaattgcaacatataagattgccattgacaatcctgaaaataccaacaattaatataaatagtcatacagtcatatatccaagaaagaataagtgatcaatcttgcccaccttgcccaagccccaatgactgaatatgtgtggaaattaaggcatatggaacattgtaagtgatcagaaataattgattcaagaagtcaaattatattacgtacaattcttagatagtatatgcac

SEQ ID NO: 67075 - DNA, 435 bp, Glycine max
  unsure (1)..(435): unsure at all n locations
agcttagccctagaggggatggaccttttcaggtnttggagaggatcaataacaatgcctataggttggacctcccagaagagtatggagtcagcaccacttttaacatttctgatttaactcgctttgcaggtggagctgatattgaggaggaggaactaacagatttgaggtcaaatcctcttcaaggggaaggggatgatgcaatcctccctatgaagggaccaatcactagaaccatgagcaagaggctccaagaagattgggctagagctgctgaagaaggccttanggttctcatgaaccttatggtagatttctgagcccatgggccaaggttgggtccaattatctntgtacatattagactaggatgtcattatatttggtccttgtatatagggctccatattgtatgtagggaccctagaaata

SEQ ID NO: 67076 - DNA, 438 bp, Glycine max
agcttgcgctacgtccagtcctcacccttcatgatgatatgtcttttacacaaccagccactgctagaccagatgcattggattataacaacctgccagtactcttactggaatttcaacctagccttaactatactagcaacaccactggatttcaatcttaacacatcttcacaacgcagagcattctaaggaagattgcttcatggatatcgagagaatgtacaattgtgggcgtgttagtattatgtgcaacgtcagactgtgtatgatcttcaatctcttattctaatcattttcatcaacgcttctcatggacatatgcaaatttcaataggtttgcattttctaatgcagctagcattccctttatgatgtgccctcagtgtgtgaggcatcacgtggaaagagagatgttgttaactgtactcatctgat

SEQ ID NO: 67077 - DNA, 459 bp, Glycine max
  unsure (1)..(459): unsure at all n locations
agcttgcctgtccgatgcagcagtaatgattgcccgagttatgttgtggaacggttacgaacccggaatgggtttaggcaaagacaacggcggcataactagcttgataaatgccaaaggaaatcgtgggaggtatggtttatgctataagcccactcaggaagatgtaaagagaagcatcgcgggaaggaagagcggtggtcaaagctcgcggttgagacaagaaagtgaaggaagcccgccctgccacataagtagaagctntataagcgcgggtctgggagacgaaggtcaagtggtcgcgatatatgaagatgatgttccgagtacattggatttggtacgaccatgccctcctgatttccagctgggaaattggcgagtggaggaacgccccggcatttacgcaacgagcataatgtatacctttacgggtttaatagctctatagttgggcct

SEQ ID NO: 67078 - DNA, 478 bp, Glycine max
  unsure (1)..(478): unsure at all n locations
agctttctggtcctagatgcgattgtcaaaatggtatatatctcgttaaatttcgcacaacaaaggtagttatgctagaaaacacacccgcaatatacacctaatgcttatctacttgaaatgaaccacgatcatcatataaaggacgaaattcaggatatctcatcatcggggtttctggattgtaaaccactgtctttgattggttaacaattcattaaataataaaatataaaaatacacttggtagaaatcatgggataaccgttgattgaagttctcatgtactttcgtgcaaattgattttcgtactatccagcactttcctaatttaattgttctaccaccttgttatgatacggcaatggcacaactggtacatctacagttccggtgtngagagagtagacaggatgaaaacattatttgttcggaggaggaaatgtgggttctatatctcatattaatcatgggatat

SEQ ID NO: 67079 - DNA, 487 bp, Glycine max
gctatccacaaagtttttcaacaatgacttaggaacttcacatctttatcactgactatagggcttggcaatccatgcaatcgcactacttcttcaaagaaaagttcagcaatatgtgttgcatcattagttttggaacatgcaatggaatgcaccattttactaaacctatcaacaacaacaaatatactatctttaccaccttgagactgaggtattcctaacacaaaatccattgaaacatcagtccaagggtgattaggcacaagaaaaggtgtatagaaaccatggggcatgactttagattttgcttgtttacatgttatgcacttgtcacaaacaaattgcacatcatgctacatgctatgccaataaaaatgctcatgtagaattcccaaagtcttttttcacaccaaaatgtctcatcattctaccaccatggcattctctaactatacatttacgcaaggaacacacacgcacacat

SEQ ID NO: 67080 - DNA, 395 bp, Glycine max
  unsure (1)..(395): unsure at all n locations
agctaaagtatgcccgagtcattcatccctgtgagatgatgttgaagtattggcgatcagaattgccattccttggattatagggttgaaccaagctcatgctnttacaaaaaatgttcatcaagtcaagttgaaatatggaagtaaccgtcttgcaaaattggggcaaaagatgaatcgagtcacatcactgcttcgtctactgccaaacatatgtaggaatattgatgtccttgttacttccagtttcaccttgacaaagatgtcatggaccatgttgaaaatctaaattgattcaaccccatatcctgcgtaaaaattcgcaatactgcgactgtacatcattcgcatgcatacatgcttttcattgggtgcattgctcattgcattctttc

SEQ ID NO: 67081 - DNA, 442 bp, Glycine max
  unsure (1)..(442): unsure at all n locations
agctngcttctacattcaagacttcaaggtctttcatttgatatacctgatgtccctttcattccttcttttggcaggtttcacatgcttggattccgctaatggccggtcggatggcgagatcgctaggatgaaattagtgtccttatctttacttaccttttcattttcaatgaaaagataagtaaagaggggcaactgtcagaccctaattttcgtcggggacgaatcattgctaatgttttgattcttgccagtcgaattgagctgcttaacaccagttgtcgagcaatctgcaaggttttntggacgtttggaaaagaatgtggaaaatacccaaaagggggggcaaaatggtcattnggtgactntttcaggcccttggctcgcctgggccaccagaaagcttanggctgaagtaaccagctctgctgggcgagct

SEQ ID NO: 67082 - DNA, 392 bp, Glycine max
  unsure (1)..(392): unsure at all n locations
cctgcggcatgcagcttgtcggtcaaataatggcgctttcttcttttttttcangatttgattcaattatatcaccctcttttcttaactcttatgttacttttactctttcttcaagtcactgattaggataataggcgtctcaatcgtttggaatctttactttcttttaaggaatatagcttagtggtttacttactgttcagagttcatcactgttgttctttatttatttacatccgatgtatatgaagatcgtgttaacatggtgagaagatgacgcggatatagcgctctgctttttgttgcgtctatctatatatatatattaaaaataaggtgtttttcagtgtatgaagttcatgtaaacttcattcatgggcgatgtgggg

SEQ ID NO: 67083 - DNA, 261 bp, Glycine max
atccagatacttgttttacttggattgggggctcacatcataaatttgatcgtagcacttctttggagtgtcacacagatgtatgctcttcaattatctttaagatataatttatgagcattttcatcactttctttctgtacaaatgaaaagagagagacatcgtattgatgctcattccattgtccatgcttgtgtacatttgggacacattattgaatcccctacccttgagataacatgccatgttgtacagaatac

SEQ ID NO: 67084 - DNA, 440 bp, Glycine max
  unsure (1)..(440): unsure at all n locations
agcttaagggctttgagtaagcaagaattaaaatctctgtccataacacaatgattactagcagctaaataaacaataataatcaatgtttctatttaaaaataagacatcataaattaatatgtgaataataattagtcttaaatatattcaattcttatattaaaatttcaatttattatatatatacataatatatacattgtaataatacttttaatagatattttttaaaaaaagttaaaagggtaaaataccaatgcaatcatgattagaataataacgaggaaattatttttagttttatagtgtggaataaacattccaaaatgaatagatagacacaattacagaggttctaaaacactnttttatatattntntttntacggatcggaataagcttacatgaagacttttacaaagtgttttattgaaaa

SEQ ID NO: 67085 - DNA, 390 bp, Glycine max
tctatctcacctatactttctctattgccaccgtactaggaacacggtgatgttccttcctccgaggcggagctcgatcctcaatatcttccaatctaaccccaggaactgttgccaacactactcgtacccattccaaatcactgacatgtcctgcagctgcagcatcatacacaccctttctattaattgaagcacaacgatgactgccaccgtgtatatcggccacttcaatctcctctggctgaccatttaactgcatgttcacagaaaaatccacactaacagatttgattgttgcctcagatacatgagtcatcgcctgctcaattgcatgagcagatgaactggacatcctatcgttgctaatgccgtacacctcttgtgctg

SEQ ID NO: 67086 - DNA, 463 bp, Glycine max
  unsure (1)..(463): unsure at all n locations
agcttgctatagttgagcgcgctgcanaatatgaagtacagttgaaagtaataatctggttcttatctattgacttaggtgattagttctcccattattcatggtgaacttttaaaattnttcaggacaaatatcatttacgacttatagtgctagaggagagtttgagaggaaattctaacagtagtaatcgcggcacccccgagggaagaagtatgagcaatggcccttctcgtcgtcaatccctaggtggagctgataacttctcaaaactaacctcaaatgggtttttatctaaaagatcaccatcctctcaactgaggtcatccctatcctctatcacagttttgaagcatgctaaaggaacatctaaatcttttgatggtggtacaaggtcactggaaaggagtaaaatgctgttgaatggaacacctccaagttactcatttaaccaatctatgga

SEQ ID NO: 67087 - DNA, 477 bp, Glycine max
  unsure (1)..(477): unsure at all n locations
agcttcaatgttaatgtcctatcagataatctcanaaatcgtatcatattatagagatcgtggtatggtattgtgagtgacatccttggccagagtgggtttgattgggatggcactaagcacatgatcatagntgagaatgaaaatactnggaatgaatattgcactggaagtattctttaatatattggtatttgttattcaaagcagattgaatttgacttcttttttttttcagtcgcataaatcagctaaatagatttgaatttcatttgaattaaattactttatccaaacaaggaaattaaaatacaagaaattgaattacttcacccgaacaaaatatttacaaaatgaaaggaatttaaatcaaggcaattaaaatgttgtgtatttgaatttcttagaaattnttaaatccttcatctaaacacaagattagggtttcatgggacccanaatgtctatatatatatg

SEQ ID NO: 67088 - DNA, 373 bp, Glycine max
  unsure (1)..(373): unsure at all n locations
caccatctaattgattaatagatgtcataatcaaacattttgagctacaaaaactctcttctnttgaaattgggtgcaagaatcgattaattcgataaaacttgtcaatatttcaagagaagtaagtttggattcttggtctaacactttgtaattgaataattagactcggtacatcattacatattgtcgaacttaatgcttcctaaaaacattgagatcaatctatatatcttctcatgtttgataaccactaaacattgggtaagagaaataaatctaaaacactccgcttgcctagtctataaacatgtaatacagatggcacatctttagaatgtgtgtgcgttgctatctataagaccaaagacct

SEQ ID NO: 67089 - DNA, 434 bp, Glycine max
  unsure (1)..(434): unsure at all n locations
agctttagcttgcaagtccaatngaaatgtttcttttcaatgcctanagtttatataaaaaatgtctntggatgtcacacctataaaagaacattttcgaataataaatttatgatgagaagaagttcgtattgaagttgggattacaggctaagaggattgattgttgtgtggatggttgcatgttgtaatgatggagcgctaacttaatgcaagtttctgaacaagcccctgtatcgtgcgaagactattggaacaatcattaaaaaaccagttccagtaaaggcaatgttctatattcttgtaataccaaggttgcagaaaatatttgcatatgtgcaaattgctagcctaaagacatgacactatgagaatagaagatagtccgccatgttacgttatccctcttttggtgaagcctataaacactttga

SEQ ID NO: 67090 - DNA, 409 bp, Glycine max
agcttacattaggttgctaagaaatctttgcttgtctagggtggtaacagacaaaagaggttttttgttgggtttatattcttaaacctattctaattgtaagactagtcagtaacatctcttacaacttttgtctcatcaaatcaaagaaagaattaacacgggcttctttttttttttttttttgcagatatgttgaaattataaagagagaaggtttggagatatctcaaccagctcttgacccaaattcaacaaagatacaccatagaattacaattagagctagaaccaagaaatttcataggtggatttttgttagcctatccataagcacttgctaagataaaatcaaagcaaatcactgtgaggccaactgagttatatcaaaggaaagtatgtctatcat

SEQ ID NO: 67091 - DNA, 403 bp, Glycine max
agcttctatataagctgaaccatcttatcaataaactgaagttgagttatattcagaaagatagagtgtatctcttttatcttagtgagagtgattctcctaaattcttgagtgactcaagaacaccctggctgtatcaaaggactttcacaaccttcgtgtgatgccctcgccggaaagagtgattctgtccttcctttcatctttaaccttgttctttctaaccacaattccagaaaatccacttctgcccagaattatctcatggccataactcccattttacgcactcagattaagtgattcttgagcctaaattgaatttctagacaagacctttcacctcgtgttggaatcacctcatctggagccctgtatcttgagtatttgccatctctatatt

SEQ ID NO: 67092 - DNA, 456 bp, Glycine max
  unsure (1)..(456): unsure at all n locations
agcttaagagaganaactatgactgctatctcgagattgtgtgtgggataattcctctcatgtatcttgagatgtcgagaagcataagtcactacctgtccctactgcataagcactccaaccaaacccatcttggatgaatcacagtacaccacaaacggtttgctcgagtcaggtaacactaaaactagtgcagcggtcaacctttccttaagggtatggaaactactctcacactgggcatacaacacaaaaacttgacccttacaagtaagcttacttaaaggtgaggctagcttagagaaaccctctatgaatctatggtagtatcctgctcaaccaaggaaaagcctaatctcagacactgacttatgaatttcccaactcactcaccgctctaccgtggaaggatctactgttatccctccactatatataacgtgccctatgaagctc

SEQ ID NO: 67093 - DNA, 316 bp, Glycine max
  unsure (1)..(316): unsure at all n locations
agctntccttctntgaacaaatacccctcagccaaatataatccatcttgggccttattcccacaactcttgtaaatgggagagaaatgttcatctaaagcattcaagtccctaatgttatcagatcctaaaaattgagctcctacggagcaaaacaatgtgtgtctcctagagagggcaccaactaccacatttggttttcccttcttgtatttgataacatatggaaaatgctctaggtactctacccattttgcatgccttttgttaacttgctttgccctctaatgagcttaagtgattgatgatcactatg

SEQ ID NO: 67094 - DNA, 474 bp, Glycine max
  unsure (1)..(474): unsure at all n locations
agcttctacttatgtggcagggcgggcttccttcactttcttgtctcagacgcgagctctgaccactggtcttccttcccgcgatgcttctattcatgtccgcctgagtgggcttatagcctaaaccatacttcccacgatttccttgggtttttatcaggctagttatgccgccattgtctttgcctaaacccatcccgggttcataaccgttccccaacataactcgggccatcattaccgccgcatcggacagacaaggttgcccaaagagggagtccacggaggaaatgctgaccacctcaaaagactggaaagcggtttctaacgattcttctgcggcttccacataaggcatggaggatgggcagcttaccaagatatcttcctcgcctgacacgatgaccaagtgcccctccactacgaatntcagcttttggtggagtgtagaaggcacaactcccactgagtgga

SEQ ID NO: 67095 - DNA, 463 bp, Glycine max
  unsure (1)..(463): unsure at all n locations
agcttatagaanactaaacanacattntcaacatcttgtaaaagagcatgagaatctcaagaaaactcatcaagttcatttagttgactttgttatggaaaccacttcacctagtaatgtacaagacaccattgtctgtgaggaagtcaaggagttattaaacgaaaatgtatctagtagacacaccacttttcttaaggattttcaagacttagaagagaaggtgaaatccttaaccatgactcttgaagattcagaagaaaaacacaaggaaatgctaaaacaaaaacctttacttcaaaaagaatgcacccttgccaatattgaacttgataagctaaataagaagaactcagatctttggacaaaaagatattacaaaaagatgtcttttgatttaaactataagcttaagggacatgaggtgttgaaagaactaccttctgagattgtaaaatctatg

SEQ ID NO: 67096 - DNA, 468 bp, Glycine max
agcttcaggctggtcaattgctttatattgttgcacagataggctaaggtctgtgtggcggtcggcagaggagcataaaccatatagtctggcgacaggagcagatctttgatacatgaccacttgtggtaccaggttaaccaaggcatctagtttaccttcaagcttcttatgctcagctgatgaagttgaatccgcggctacttcatgcactcctctaatgacaatagcatcatttctgacactaaattgctgggagttagaaaccatcttctcaattaaatatctggcttcaacaggggtcatgtctccaagggctcctccactggtagcatctatcatacttctctccatgttactgagtccttcataaaagtattggaggagaagctgctcataaatctgtggtgagggaaactgcacataacttcttaatcatctccagtagcaatatagctctctccactg

SEQ ID NO: 67097 - DNA, 479 bp, Glycine max
  unsure (1)..(479): unsure at all n locations
agctacacacactntccttgtctacttcattggaatttgttaatgttcatctgagttatatcaaatatcatattacaaantttgttagttctaattgttggattgtgtacatggttttcattttattttctcttcttttgatatgatataaccaggcacaaagccccatttcttcatctntgattctattgaccagtagccaatataacttgtaaaacaagtccccttcagattgggtataatagttcatcttgatgataatttagggaattgagattcaacttggtcttgtggtggaaagtcagaaagcaactttgtctgtgaagaggaggttggcatgtgaatagctgatttactttattcaggttcttattcaatcttttcagcctctactcatgattaatggtttaaatcactttagaaacaacttatgataatggcaagtctgcaatttatgtgatggatgaacagaacaactc

SEQ ID NO: 67098 - DNA, 319 bp, Glycine max
tttgagatacaccttaactcatcgtttgtctcggatgataccttgaacctcaagctgggcatgtctacacacttttgtggctgcgagtataatatagtgtttaattaaacagtgacttttttttcatgagacattacaagaatagtcataatcttttatctgtctcttgctatcatattcaacaactatattgtaacgctattactaagttctttacagaaaatatatgcactttaaaataacttgtgctcgtatatcattaatcatagaactcagatattattcatatcggaataacatggatatgtcacatattata

SEQ ID NO: 67099 - DNA, 468 bp, Glycine max
  unsure (1)..(468): unsure at all n locations
agctngtagggatatttgtatacctagggcatggactcattcacttacattatatatatatatatatataccttaactgtcattcattgcgagggatattcggattgactatttgttaaactgtttattgggctggacaaactagattaaccatcagcaatccaatgaccgattgaatttgaatgttttataagcagataaagaatcatcgttgtatctgcctattagtttccacaccttttctttaatttattttcatttctttgtgctcttcatttaattctactcaatggtttgataatgttaaactctatcttttattttatgccttacaggtcagatgttctaggtcaattcatgcctttagtatgaatcgaatggtcacagacaagaattgttcatttattctcagatatcaacgtttggccaccttacagctgtgtttagcttgtttggatactacaacat

SEQ ID NO: 67100 - DNA, 419 bp, Glycine max
  unsure (1)..(419): unsure at all n locations
agctngaagtgaggaagtgtggaagggtgagacttcctacttttattcgttgaccatagagtggtacctggagatatgtcgcggnggtcaggagaccttgnggacgtcaggtggggtgctattgcccaaaaccaagcttgaccaatcctgacccaacccgggcatagtcagtcagtgagaacctgtgatgtacctaaacaggcgagctcctggcagtcaaccgataaaagaacaaagaccacaaagcaaggagggttgtgtggtggctggccacctatggatcttgagtgatatctgggatatggcctctggtaatcgattaccaagggtgggtaatcaattacaagggcttaaaagtgaagacagaaagttaagatggtctctggtatatcgatacaaaggatgtgtaatcgattact

SEQ ID NO: 67101 - DNA, 351 bp, Glycine max
  unsure (1)..(351): unsure at all n locations
agctngcctaagcgtaatgattgtggcacatgatgttatacatataatcaccacttaanaacagcatccggaccttgattcttacgatgagagcttgcctgattagagaaaggaaagacacaaacatacaaggtagccgntctactctaatatatagagacaaattgctttaacataatttatcctagatattaatgtctgtgggcttatctatgagaatntgatatttaattaaataaataactaaaaacatgccgatattcatattcagtgacatatgatgactggtctatgccgcataaatgtatgtgtctatggatattacatacctatagaaatattngactaact

SEQ ID NO: 67102 - DNA, 450 bp, Glycine max
agcttgccttgccccttgatatattagatggactcatggtcactatgaatgacaaattccttgggataaaggtagtgttgccatggtttcaaagcccgtactaaggcatacaactccttatcataagttgaatagttaagggtaggaccacttaacttttcactaaaataagcaattggatggccttcttgcatcaacacagccccaatcccaacatttgaagcatcacactcaatttcaaaagattcttgaaagtttggcaacgcaagtatgggggcattagttagcttttgcttaagaacattgtaagcttcttcttgtttctctccccatttgaaaccaacatttttcttgagcacttcattgagaggtgctgccaatgtgctaaaatccttcacaaatcgtctataaaaacttgctaagccatgaaaactcctcacctcggtcaca

SEQ ID NO: 67103 - DNA, 451 bp, Glycine max
  unsure (1)..(451): unsure at all n locations
agctnntacagcagatttagtaatgacccactaacctatgaataaaataacttaatgccattaacctatggaattaaaacaaacttaatggctgagtgtaactgaaattgtggcaaccaaaagtcacccccaacagccaacaagtcagccaccatttggtctcccaaaaggctgatgcctatgttgccaattgggcccttattacaacttgaactatagctaactaaagcccttttagttgattaacccaaaacatattnttggtcagccaactttacaaggattgggccattatttagacaaactaaacactctaaaattgaaacaaagtggtgtcatttagtcctcctccatttgggccatgatacaactcacaaccttggacttttctccttgaaacttgggcttgtattcaaacagtatggacagcatcttgtgaagagcttccttg

SEQ ID NO: 67104 - DNA, 424 bp, Glycine max
  unsure (1)..(424): unsure at all n locations
gagcaccgcggctgcagctataanatcgggagacaccgagaggagtttatctcttccatgaaggaggaagcgcaaaaagaaatcctcaagctgcttgaagtaggacttatctatccagtctctaacagtgcttgggtgagtccagtccaagtggtgtcctataaaggcggtatgatgatgatccctactgagaagaatgatggcatccctccatgaacagtcaccgagtggagaatatgtatagactagtccaagcttaatgatgccacaaggaacatttatttacctctgccattcatagactaaatgttggagcggctagctggacaagatntttattggttcttggatgggtacttgaggtataatcagatagttgtagatcctaaagaccaagaaaagacccctnttacatgcctattcg

SEQ ID NO: 67105 - DNA, 399 bp, Glycine max
agcttcgaaaatgaacaacgtaagctctcgagaagatataatggatatatcttttaactcgggtatccgagttaggctcatcacatatagagacgctcagaaatgaacaacgcgaactgtcgagagattcaaatggtcataacttttaactctgacgtccgattcacgcgcttaatatatcgagacgctccgaattgaacaacggaagctctcgacaaattcaaatggacataacttttaactcggatgtccgaattgggcgcatcatatatagatacgctcgatatttaacaacgaaagatctcaagaaattcatatggagataacttttaactgggatgatcgactcacgtgcataatatattcgagacactcaatattgaacatcggatgctctcg

SEQ ID NO: 67106 - DNA, 429 bp, Glycine max
  unsure (1)..(429): unsure at all n locations
tagcttatcatcaacccaagaaggaagtgataggattattctattgaaatagacgaagatgattgtcataccctaatttcgtccgggaaccatctgtttgttgggatgcgaccttcgcttgaccacttcgaggtacttgacacccaatgttaggcaatccgtgaagtttcgcgacatgtcgggagtcgaaaggaagcgttaatgcgcaatccgtanagtttcgtaacattccagacgccaaagaggggacgattgcgtaatccgcaaggtttcgtgacattacggaaagaaaacaagtatcgttacgtaatttgtaaagtttcgtaacgctacggaaacagaatcaacaaaaaaaggcagaatgtgtgtatttagtaaacaggggggtgcaatagcaatacgcccacttgggccttcctgatgttcaac

SEQ ID NO: 67107 - DNA, 443 bp, Glycine max
  unsure (1)..(443): unsure at all n locations
agctngagttccacagntctattatgtgataaaatatacagaatggtttctaaagtgtaaaaaaagagagtaaaagagaaaaatttgataacatataaagttagcatatttttgcgagctatatatagtaattaaataaaatatttatatataataaccatttataatttgttaattatataaaatgtaagatgatttttttacataaataacccccttcctctcttaattttataatttggtgaatgtgaattattttaccaataataaccttttcttaccatcatattgtttttaaaatttattctacaccgctagaaattntctagctagaaacaaagtgctgcaacgattaaaatatatttattttgctcgtctatgaacttaaaatatatgaattttaagtatataatggaacagtaaataaagtatatgaaataata

SEQ ID NO: 67108 - DNA, 468 bp, Glycine max
  unsure (1)..(468): unsure at all n locations
agctaataatagggtaagcactacaacatttaaaatttctagcaaagcacataataatagcaattgtacataggtttgatcacacataacacactatagaatattattcgtcataattaacaaacaattctaaaagctatagcgtcatggtactttaagatgacatatagagttntaggtttatcaaagaatttcccataacaaatccaggactatatcccaacattgcaaatagtacaagagcaagcaatcaatatactttagaatctcacacccatattccatttcaagcattatatnttttcatatttagacataacttggcttaggttctaggccaatattggactttattttaaaccagcttattggactntaagaatacatcccgcaacatcaaatgactcanatccattactgcnaaatacaaatacccaaaggaactacaacacaacatantttaattat

SEQ ID NO: 67109 - DNA, 296 bp, Glycine max
  unsure (1)..(296): unsure at all n locations
cactctttctctcttttgaagttgcttggaaaaattgtatccgtgaagaaaatccaagccgtggcgcttnctaaacgttttcgtaacgttttcgcgaggaatttcgcgaatgttacgaccgctcttcgacgtccttcattcattcttcatcgttcttcgagcgtcaacacgttagtacctcgaaccaagcttttcgatttattctttgtacccgaggtggtccacattgcgtttcgtgtatgattatactcggttcatatacgttttatacccccatttgacgtgcttgtgccatt

SEQ ID NO: 67110 - DNA, 424 bp, Glycine max
  unsure (1)..(424): unsure at all n locations
agctnttaatgtatntatgttaatggttttagtacttaattacttatatatacatattaatatttataatacatttgatttcttataaatgtatttaatgtgtttttttatgcaccaatatatatataatatttatctaatgatacgtatattattattgctaattatatatatatatatatatatatatatatatatatatatatatatatatatatatatantatagtatgtgagtgtgtatagatgtattatatatactctacacatataaatatatatatatgtcttgaaaagagaggtgcggcatatatataattatcattattattattaaaataataataatatatgcgcacataaccgtgtagaatatttcgtgattatataaatagtgagatactctattgtagacacacgatat

SEQ ID NO: 67111 - DNA, 379 bp, Glycine max
  unsure (1)..(379): unsure at all n locations
ctctgtcatgagaatncagacaaacatgcatagagtaagtagcaatgagcttacaaagtaaaaaaatcattttaaatatgagcaattcaaagacgatgccaacgaaaatcgtcatgatctgcttatgagcaaaggcatgttttataaaactgcctttgtaacatgcacatcgaaggcggtttataataaccatcgctaacatgtcanagagttcatgtaaatttcacatatgacaccacatgcattactatattggtttttcactaaccgacgtagatctaatgatgttaattctttattttgtagttgtgcttgttccttaatattaaaatgtaagtccaattggatgttgctctanaatatatatgagcactactag

SEQ ID NO: 67112 - DNA, 444 bp, Glycine max
atcctcagagacacctgaggctgcagcttactatctatttaagtccagcctttaatgttatttaataaactagacgaaataaaataaaattgtctactctcttcacgtccaagccggttcaacccaattccggatccaagcgcaattgcttataattctcctgaaattaaattaaaaacacaaaattaatcaagtaggcccaaatgataaaactgcataattaatttgacaattaaggctaatcagtaattaaaatagtgaccaaaagggttaagatataggagaaaataatgacacatcacttagctacacacacccctctaatagctaagctcatctccttgagatgagaagctagagcttaactacacacaaaccctataatagctaaactcacccccatgccgaaatacatgagaatataataaagtccctactacaaag

SEQ ID NO: 67113 - DNA, 464 bp, Glycine max
  unsure (1)..(464): unsure at all n locations
agcttgatgtgaacctcattaccttatntgaagctttattcacttatcatacattgctgacacaaaatttcttgaattatatatggagaaatttcttcaattcgatctggcttattagctgtcacaagctagctggcctcttcataaggtactcacctacacaagttttggcatgttaagatacttggtttgtgcatagtgttatttcatttattaagtggatattcatatttctttttcgttcttgtttatagcaacctaacttgaatttgaagtaggcattgatatcttgtaactaagaataatattgagcaataatgtgactagaatcatatgaagcttgattgtcaaccccattaccttatttgaagttntattcacacaacatacactgctcacacnaaaattcttgaattatatatcagaaaattcttcaattcttggttattagctgtcacaagcta

SEQ ID NO: 67114 - DNA, 333 bp, Glycine max
  unsure (1)..(333): unsure at all n locations
ctcataaacgaatacactcgtgtgtgagacagtgactgatttatatatgagtctctgctttaaaacataactattctctcgattaantgatcacaaatgaacaataacactttattcgattacttagagcatctaatcgattacatcattcttgagttattttcacatgttgggaagaacactttaattcggtacttagataatctaatcgatacttcagagaaataatcgatctactctgtagatttgatcgattacacacggttataaccgttttctctatacataaccatcttgcgtgctctccaaaacacatcaagagaatactcaata

SEQ ID NO: 67115 - DNA, 376 bp, Glycine max
gcgctactaatcaagccttggaaccctatcatgaacttggagcttgctcttgaggacatggattgtgttatggacgacgttttggaacagtatggtaaatattccataagggatcatccactgctgtcaaggataattgatatatgtgggaaagaagaagcacgagtttgtctgatgtactgaaagaagctgaattgcaaggtggtaatatgcgtacttagatttttgtaaggattatggcggtcataaatgtttctgagtgccccacaatcgtgaggattgatgagaaagacattcatgaactactaagagtaatggatggtggcgcctccgagaagagtaatttggatgtgattataataaatgataatagtgc

SEQ ID NO: 67116 - DNA, 368 bp, Glycine max
  unsure (1)..(368): unsure at all n locations
agctnggttaatagggggcttgatgaccttgctggtggtgatgggcactnccgtaaactgacagagccctattataagagttggaaacctcaggaccctattggacttctttgggtccactatgtgtcttgggggcgtgatccctgcanacagtagatgacattaataatcagttgagccacgtgcatacttacctatgtcatgatagtataaaccagctgacactttatcaggggaagatcagagtcatggtcactgggtagaatatttgctagtagcaacatcatctatatgttggtgcgcatgatccgcactcgtctccctgcagcggtctgggcgaaatcttgccccagtatgcatagtagctg

SEQ ID NO: 67117 - DNA, 428 bp, Glycine max
  unsure (1)..(428): unsure at all n locations
agctntaacctccgtccatgagacagagttcttcgtctttttgtgtaaaatgaacagaaataaatttcaatttgaatgctatatatgagttggtacttgattggaattcaatagttggtctgagacagagatctctactaactttctcctattgcttgacttatcagccctttgtagaaagcttgtccagctgtcccaaacatggtgcacacaatccttttaaggcaccagagaggtatgaccagattatcctttgcatctatntatattctttatagaaatataaacatataagaatcttctttctttgttggattgatgtttgtcatataggtcaaagaaagaaaaacaatgatgggaacctcattcttcaatatcaacctccatgccttatattgccatataggagactgttgccaaatgggatg

SEQ ID NO: 67118 - DNA, 474 bp, Glycine max
  unsure (1)..(474): unsure at all n locations
atgtatgcatgtatgcctttcacaaaaaatagcttatattacatagcatgtgagatctctgccatttatcatgcgttgagaaagaacaaagtacaaaagaacaggttacatttcatagacattntgctcaaacaaaacaacatcaccggcgcatgcatcacctgtgtatagcaattgttcagcttccacagcctatgattataaagataaatagaaaaataaaaggccaacatatacaagagatagtgattacacatcttaaggatgtagcaaattgcaaaaactgttaaacagatcatagaaatcagaacagtaaataatataaacaagtaaaaacacacacatatttaatattattaaaaatgcatcccctggtgaatgcttaatagatctggtaaacaaagaactcaattagaaacttgacctatgaataanatgttctagaaacaaatactaagagagtgggactggaca

SEQ ID NO: 67119 - DNA, 414 bp, Glycine max
  unsure (1)..(414): unsure at all n locations
aagagggttttagctacagtttgaggtgtttatctaactaatacaaggagggaatctgtcacattaaattaccttctggggaggtccgtttgggaaatgttggagtaaaccanaaaaatttaagtggagccagatctaaatgttggttaggtaagcatcctgtagtaagaggagtagttatgaaccccgtagaccatccgcatgagggtggtgaaaggagggccccaattggtatgataaaaacccgcaactccttgagatcttccagcacttggaagaagataattagattctttgtcgtcgtactaaacaatatagacaatagaagaatagtggactgatagtgttcatatttaagaattcgagtattctaatatactttctaccaacatagtagttagtttatcattaact

SEQ ID NO: 67120 - DNA, 462 bp, Glycine max
  unsure (1)..(462): unsure at all n locations
atacatctatctacatcttatgtaaagaatagcttaattactactatntgactacacaactctacaatggcttgtagcttctaaatgacccctgcaactgcaagatggaacaactttctcaaaataccacacagaaattatgatagacaaaatgtgcaagcttgaaaatgttgaatttggcctcaaattatgatgaaagtttgatacaaatgtaataaagcatcaccaagcaaaatatttatagtaagaaccatttatcaaacaaaataaattataaaccatcataagataaggcatatcaaagtatgaatgttgtatgaataaaagccaagataaatgatattagaaacacatacaaataatatgcagaaagtgtactacacgattaacacttatattagacactngtaaccaccaataaatgaatcttgcccaaagtagtactcatccataaatgcagtc

SEQ ID NO: 67121 - DNA, 390 bp, Glycine max
  unsure (1)..(390): unsure at all n locations
agctngcattntgctattgatgaaaatanatttaaatatgtcaatgataaataatgaaaacaaattcagcaaaatcatgtttggctgctaaaagtaaaaacaaaaagaagtttaatccacatgtgttgaagcaaaggaactacataagaattataaaagatattcgcatattcaagtgtcgtttgtgatatttctacacacagatataaaggaacaattacaaatatttgttatggtccatgcttcaatatttgaatagatacataatagtatcaatcggtagagtttatgcttgaactaccctcacaatacaattttcaagaaatggtataagagaaaaacaaaacatagaacacaatacaacgtcttaatgtaaggaaatggagaaac

SEQ ID NO: 67122 - DNA, 354 bp, Glycine max
agcttgacagagcccgggtagtcaaaaagatgttcatgtccatagccatcaaagtctgaagagagtatgatgaactaatggacgtcaatattgtcaccgacgaaggcttggaacgagaaaccaagaatgcccgaaaggaagaacacgtgccaccacagtattgaggggctttatagggaagcaatagtaagctcaagctcctaagaggtgataggaatcatcacgggtcacaggcatgatcttgaaggacgagcctaaggcttaccttaggtcgaaaagaaatttgtcccaacagttaaacgagactgaacggaatatgtgggccgtcatctatgagtgcaccgagaaactata

SEQ ID NO: 67123 - DNA, 466 bp, Glycine max
  unsure (1)..(466): unsure at all n locations
agcttcttacacaatcaagcctanattatcccattgtatattattgaactagattatgttaataactactagacatgttctcaccangatgttcaggtgagggtccatgacagaatcaatctgaaataatgtacattcaattgaaacccacaacgcttacctggactntgaatggaaaccgatgagtttttacttctgcacctgaaagaactctaacatccacaccaaggctgtcaaccccaaccaggtaagctccctggaaaccatgtaacaacattgaaataaacaatttggctattaacagtagacatacaaaatcaaagtataaaaatataacgtaccaaataattgtcatttcctatgtgtgagtgtgttgtttggtgtcatgaanggaaatgaattagatagaaaagaaaaggagagaagtaaaggaatcatcactttccttgtctgatatcatccaatg

SEQ ID NO: 67124 - DNA, 467 bp, Glycine max
  unsure (1)..(467): unsure at all n locations
agctnggaggaagatggagatgaatgaatggagaggtttataatagcacacaattctgtgctctaaaagagctctaaaatctaaaggttaattttcaaatgatcaaagttccaaaatatgcactcacatgacttctatttatagcctaagtgtcacacaaaattggaaggaaatttgaatttcacttgaatttgaaattgattttgtggagccaaattatggagccaaaatttcactaattatgattagtgaattttagttatggctcaacccactaatccaagatcaattccaagattctccactaagtgtgcttaggtgtcatgagacatgtaaagcatgaaggacatgcataaagtgtgactatatgatgtggcaatggggtgtagtaagcaatgaacaaaagagtgttctgatgataactatgatgacaacataagatgatgaacaataagctcaagtgaatc

SEQ ID NO: 67125 - DNA, 465 bp, Glycine max
agcttatcaatcccattgccattacagctgcggatacctccaatttctcgtccattcctgaatgagtgtgcacccaaacaagaatggttacgctcacaagttgtcccacagagaatgcaaaatatgcggcattgaagtatgttgagagcttctttaactgctttgggtcgttgtgctcgaactggtctcctccataaacaagcatgtttgtgttcacacacccactccctaatgccaccaagtagagtgctacaaagaatatcatggccttcatgccctttgcttctacgcactgttctccatcgttcacattgcatggaggtggcttcaattgaagaacatgagctcggactgatagcattatgaaaccctgtaatcgtattattatatacatgaattaacgctcttgtatcaatggacgatatatatatctatatatcgagagagagagagagagagagagag

SEQ ID NO: 67126 - DNA, 393 bp, Glycine max
  unsure (1)..(393): unsure at all n locations
agcttctatgagttctagaattatcaattattntgattcacagagagctcttaaggttccagacacaatctaattgattataatatgtcataatcaatcatttcgagctacaaaaactctcttcttttgaaattggattcacgaatcaattaattcgataaaactccgcgataattccatgagaagtaagtttggtttcttgctctaacactatgcaattgattaactaaacatccgaatctatgacatagtgttgaacttaatgcttcttagaaactttgagatcaatctatatatctcctcatgtttgatatacactaaacatgtgataagagacatagatctaaaacactcaccatgcctagtctataaacatctaaatacaatgtcaca

SEQ ID NO: 67127 - DNA, 406 bp, Glycine max
  unsure (1)..(406): unsure at all n locations
agcttaaggatggaacacttacttgttggtgatgaattatagcgcanaacggaatcgaagaatgcgaacagtagagaccctaggggtgcaaactcgtaaattccgtgggtatggcttttgaaaggngggaaaagaagtttttgaatgcaaaaacgtcccccctttcatcactcttatattttggtgcacgggttgctcgcccaggcgagctaacctgcattntttttttgagaggaacattaaccatgtccctccttccttatgggttagcgttttgcctaacttgaacttacttaagttagaatttacgcgttgattacttatttttaaaacaaacaaatagcaaaagaaaattgcaaatacaaaggatacggtgttgccttgcagcgacgttctctgtttgtta

SEQ ID NO: 67128 - DNA, 440 bp, Glycine max
  unsure (1)..(440): unsure at all n locations
agctataaatctgctntaagttcaagccccaaaatttatatataatacaactggatgaaataaaataaaattgtctgctctcttcaagtccaagccggttcagcccaattccggatccaagcccaaatgcatataattctcctgatatcaagataagaacacaaaattagtcaaggtggcccaaatgataaaaatgtataattaatttgacaattaatgctaatcagtaattaaaatggtgacaataagggttaagagatatgagaaaataatgacacatcaaattgctccacacttagccttttgcactcttgggcgaaatataagagtagagcgaggaacaaatgcagagacattaaagagaggcaaacaaacacataaacatttatatatttgctcatgaatctcaaggaatgaaatgaatgggcatcatccaacat

SEQ ID NO: 67129 - DNA, 138 bp, Glycine max
atctctgagtcacctgccgcatgcaagcttgttccacctaaatagcataggttcttcattgtttatcatcctatgctatgggtgctaatttgttgatctctcccacacccaagtttggaccaagtagtaaaagggtgg

SEQ ID NO: 67130 - DNA, 339 bp, Glycine max
  unsure (1)..(339): unsure at all n locations
agttagtgagaccgctgaacgaagaattacggaacttagaaaagctagatccttaattgaaggcgtaggtgataaccatagtgaattacctaacaagattggtagattacttaatgtcattccagatactccttaagcctcggaaaatactatcaaaatggtgacgagaagtacctccaaattaattaatgttattgatgaagatagcgaccaanactcagataacacaacntgaaatacgatcactgtcttacgagaatatacatccaattaattgcaaacactggagaacaccctccacagtatattatcaacgttcaactgcccctgacctactat

SEQ ID NO: 67131 - DNA, 459 bp, Glycine max
  unsure (1)..(459): unsure at all n locations
gaattctggttgctcctggtgcggacatgatggtacagatggtgaaccacgagctgaagtttcttttggtgaggtagccatggaaaagcagagcgtttggaatgatctcgtacatttctgagagctgttggggaatgcanaanacgagattaacactaaaatataagcttgaatgaggaatgtagagggacgtgtgaagcaacggtcgaatttgctttggttcagtagtgaacgtgctattaatgttaagtgattcgtttgggcacgttcagatatcagtagttgctacaattcctctagcagacaaatgcccagcttgcccctcagttnttaaactggtttgcatccaatgcctctgtgaaaatatctgctatttgttcctcagtgttaacatgctccagtgtgataactctatcatcaacaagctctctgatatagtgatgtctaatgtcaatgtgc

SEQ ID NO: 67132 - DNA, 363 bp, Glycine max
cttcctgctattattcgttgaccacatagtggtacctggttatatgtcgcggcggtcatgagaccttggggacgtcaggtggtgtgctattgcccaaaaccaagcttgaccaatcccgacccaacccgggcatagtcagtcagtgagaacctgtgatgtacctaaataggcgagctccgggcagtcaacagatcataggagcatataccgcaaaccaaggaggcttgtggcggctggccatctgtgaatgttgcgtgagatatgggttgtggactctggttatctattaccactggtgggtcatcgattacgacgcttacatatgaggacaggaggctaagatggtctctgagtatcgaatac

SEQ ID NO: 67133 - DNA, 460 bp, Glycine max
  unsure (1)..(460): unsure at all n locations
gcttaccaccaagatagtgccttggataagaagcttatataggaagcttcaatggaggaacaaaatgagagagagtgacatggaaattgaaggagaatagggagagaagttgaactttgaagtgtgtctcacaaatttcttattcttcaaagttgtgacaagtgttacacatgtttctatttatagcctacgtcactaactaaatgaaattcacttaatttcatgtgaatctaaaagaaatattccaagaatatgtcaaaggaatcttagcatattccctttagatgccacaagcatgggaggtgtgactctagcacatgggaaacttcattgagaagcaaggaagaaagcttccttgagaagctagaggttagctactgacacccctcttatagctaagctcactcncttgccaaaatggacttggcttcttgggtaaggaggtggctaacattcatct

SEQ ID NO: 67134 - DNA, 496 bp, Glycine max
  unsure (1)..(496): unsure at all n locations
tgagctctgtataattaacttaagcagtaagtaatgaaatgcaactaaaagagtgtaatatcaaatttggaatttacagttggcaaaatttggatacttntaatttaaatagtaatgacacatgtacctatagacatggattggtaagattgataaggaacttcatatcaactatgttgcaagcaatagaagtagcgttcattcattgataaaatatttagcctcggcttctttaaagtcatatcttgtataatatttaaaaagttaacgacattacatgatgaatacatgacaaccatatttgtttcttcttgtatacatgcggaactggataccagattntggctgatacatataataaattgacttaaattaaattaaactcacgatattaagctcgatacaggtgttgatngataaggaatataatatcaagtatgttgtgacgaacagaagtataattaattaattaattgataaaacatttagcttgact

SEQ ID NO: 67135 - DNA, 382 bp, Glycine max
  unsure (1)..(382): unsure at all n locations
tcttggaggcgaagctccttcttccatggcttattccctagtggatggcgcctgctctcacctcttctcctttgtcttgcgctgcatctccatggaggaaaatcaccattaaaagacctcattgaagctcatagatccagcctccatagaagccccacaagcaagtttccatcaagtggtaatcagagcacaagagcttcaactaggtgctccttaaacatccattaatatcttttgggttaccttctcttccattgtagggtcttcatttnttcctccatgtatctcctcacatgtcttgtgctaaattcttctaacatgactctctagagttccaccgattaaacttgctatataagctagatctgattgtctatgggtc

SEQ ID NO: 67136 - DNA, 354 bp, Glycine max
  unsure (1)..(354): unsure at all n locations
agtacgtgagctcagttgaaggtgggcaactggggatggtgggttcatgttngatttgtggatgtgggagagatgatttgcaccatcacctaattgccacctagtaccacatatgacgggtaccccataatccaacaagcttgatgtgagaaagcgtggaagaagcagtcttgctacttttgttgttgaccacagagtggtaccttgagatatgtcgcgggggtcaagagaccttggcgacgtcatgtggagtgctatttcccaaaaccaagcttgaccaatcccgacccaacccaggcatagtcagtcagtgagaacatgtgatgtacctaaacaggcgagctcctagcagtc

SEQ ID NO: 67137 - DNA, 307 bp, Glycine max
  unsure (1)..(307): unsure at all n locations
cacaaaccacaaacccttgcgacaggtacagatttctgattcaaagccagntgggttaccaagttaaccaatgcattcagtttgccttcaagcttcttagtttcagatgatgcagatgggcttgtagctacctcatgcactcctctaatgactatggcgtcatttctggcgctaaactgttgggagttggaagccatcttctcaattaaattnttggcttcagcaagagtcatgtctccaagggctccaccactggcaacatctatcatacttctctccattattctgagtccttcattaaaatatt

SEQ ID NO: 67138 - DNA, 383 bp, Glycine max
tagcgacctatgatactcagctatgctgcaatattacaatagacctcctcaacctcagcagcatattctaccacagcagaacaattatgacctttccagcaacagatacaaccctggatggaggaatcaccctaacctcagatggtccagccctcagcaacaacagcagcctgctccttccttccaaaatgctgctggcccaagcagaccatacattcctccaccaatccaacaacagcaacaaccccagaaacagccaacagttgaggcccctccacaaccttccctcgaagaacttgtgaggcaaatgactatgtagaacatgcagtttcagcaagagaccagagccctcattcagagcttaaccaatcagatgggacaat

SEQ ID NO: 67139 - DNA, 367 bp, Glycine max
ctcttagacagcaccgagtattttctttcttcgcacctttatatttctttcccgtgattatttgcccactggtggggcctatggatgggcaagtctctattattgaccactaagttaactattataactcgactctattgcggagtgagttttgtcatttgatcaacacgatggtaagttatttaaatcctgggtattagctttgatcctatacaagataatatataagcgtgggcatctaatattatatttatgtgtgagtatttagatattggcatataacatttctatataaaagttatttgtgttgctaattccacctgcgactgttgttctttttctaacattttatcaaataatgccagct

SEQ ID NO: 67140 - DNA, 417 bp, Glycine max
  unsure (1)..(417): unsure at all n locations
agcagtnatgcaagaatccncttcaaacttattaacaaaggatgtcactacatctggaacttgcttggaccagaaccattcatatgctttcggctgcttatttgatagttttttgctaattaaactctccagaggagcagatagctgaagtaaactagatcaataaaatatnntaacaatttaaggcaactagggagtagaataaaatatcaaaactaaataaagaaagaaagaaataataagttatgaaataaccatgaaacatatagaacanaagttcatcatagatcagcagacagtctaactagttttcaagtatgcagtcattttatgacattttcttacttaagctacaacacaaggttctaccttaacactataccagaaattaaacaatatgattctcatattcatcat

SEQ ID NO: 67141 - DNA, 170 bp, Glycine max
  unsure (1)..(170): unsure at all n locations
cacgctcactntcaatctgaatcttcgaacttagatcggttgtaatcagagaccattatataatatatgttgagccacaacaacaagcacacttacctttaagcgtatttttactggatactgacttaacttgcaaattgagtgatagttattattcttaaaatgcctcc

SEQ ID NO: 67142 - DNA, 468 bp, Glycine max
  unsure (1)..(468): unsure at all n locations
agcttctctcagacttatgtaattgattaccataattggtaatcgatttaagcagcgagttatatggcactgaagatgattcttatcttagaaactatcttcctacttgcatatgatgatgcatgatgtacacacacatagactaagaataaaaagcaacatgtcatacaaatgtcactcaacaaggagttgggcatgtaaaaagtaaaaatattctatgttagatcccctatctctaacactcttccccttgtggcgttgatgatgccaaactctaattgccattgagtgcatttcaagaagctctaaagtaaggacttctctcgatacaccacctaaattttttngttaacactatggncaagagaagtgcgaatcatgtcatatatcatcatagtagagtggtcgaatgaataaataagaatgtatgtcatgtgccaatgcaatgacaatgcaatntttctccct

SEQ ID NO: 67143 - DNA, 357 bp, Glycine max
  unsure (1)..(357): unsure at all n locations
ntaaaggagacatcttggcagagatattgaaatatgtattgaaccataattcagctcgggccaagtggttaggccactgttttggttaggttccagttaaacacctcanatacgcttctaagcatcaattagctacttccatctgcccatttgtttgacgatgataggcaatactcatcttcaattgagtgcctgctttcttgaacaatngcttctaaagaggctcataaaaagtctgtctctgtcagtactattgaggcagggaacacatgcagactcactacttctttaatgaataactcagctacttccttagctgtataaggatgacttaattgcacaaaatgagcatactta

SEQ ID NO: 67144 - DNA, 451 bp, Glycine max
  unsure (1)..(451): unsure at all n locations
agctgcaccttacggtcctcctcataggaggtgcatgagaacacatgctctattttcatctccactccaagtngcctacggacattcattctttacagggggaatggtgagttaataccatcaattctgctntgtctaagaacaccatcattgccatctctnctcctttcttcttcattatgagctctattctctatttcatccaacctctcatggagcgctccatctcgctgttgcattaacctcttcatatgttgcatcaaagcttgcatntggaattgcgagagcacccctccatcattatgattngctcctgctatctcaaacaaacaaatcaaacgtaacaagacaattatagttgctggttgaatacctcacccactcaagtgtatcacacacatatggttgttctctaatgaaacactcttgccttntaccactctaattcccc

SEQ ID NO: 67145 - DNA, 389 bp, Glycine max
gacactataaaactcagctcatattaattcgagcgttcttatatacggactcatcatacatccgataaaaagttatcttcgcttgaattagctctgaggttcaaaattcaatttcgagcgtctagatatattacgggactcaatcagacatccgagcaaaaagttattgtcgtttgaattagctcagaacttcataattcaatttcgatcgtctcaatatatttcgggactcactcagacatctgaggaaaaaagatattgtcgttagaatttgctgagagcttctacattcaatatcaagcgtctcgatctattacgggactcaatcatacattcgagtagaaagctattggctgttagaatttgctgagagcttcaacattcaattt

SEQ ID NO: 67146 - DNA, 369 bp, Glycine max
  unsure (1)..(369): unsure at all n locations
caaaaataatgagtctcacattttattaaataactaataattntataaattttaataaattttaatcaataataacataagaagtacatggtttaaaaaagtgtaaaatgtatnggatcttgctgaccaagtcattgcaatttcttttattaacattatgttgaaaataaacgaaaacttacaacanaaacatgttaatactttcttcanactcatatataaacaaaatgaacctaatttatattaattaaaaaaataaattacatcattaattntactaatctcaataaaaaaaaaaataattctataatatcttcttgaactaatctatgaaaaaaaatttaataatgaatgactaatgataatgtt

SEQ ID NO: 67147 - DNA, 490 bp, Glycine max
  unsure (1)..(490): unsure at all n locations
accgcgatctctgagtcacctgcntgatgcaagcttctaaggaatttgatacgtaagctacctaggctataaatacaagcatgtgtaacacttgttgtaactttgatgaatgagagtcttgtgagacacacttcanagttcaacttctctccctctntntgatgtagctccatgtggagcttgtaggccttggatcttcttcatcaatggattcctttgcttcttgaggtttgattgcgatagaatatagaaggagaaagatgaatggagacttcacatcaagtagaagatgggtatacaagaagctcaccaccataggaagccatggataaaagcttaaaggtagaagaagatgaatgaagggagaggaagagaagagcatgatatttactgcctctaaagaagtctgaactttgaagtttaattctcacatgatcaaagttgaanaatgcacacacatgacctctatttatagcctaagtgtcacaca

SEQ ID NO: 67148 - DNA, 460 bp, Glycine max
  unsure (1)..(460): unsure at all n locations
actcatgatcactatgaatgacatattccttgngataaaggtagtgttgccatgttntcatagcccatactaaggcatacaactccttatcataagttgaatagttaagggtaggaccacttaacttttcactaaaataagcaattggatgaccttcttgcatcaatacagccccaatcccaacatttgaagcatcacactataattcaaaagattnttgaaagtttggcaacgcaagtatggnggaattagttagcttttgcttaagaacattggaagcatcttcttgtttctctccccatttgaaaccaacatttttcttgagcacttcattgagaggtgctgccaatgtgctaaaatccttcacaaatcgtctataaaaactttgctagccatgaaaactcctcacctcngtcacagacttangtgtangtcattctttgataagcctaaccttctc

SEQ ID NO: 67149 - DNA, 463 bp, Glycine max
  unsure (1)..(463): unsure at all n locations
acgggaccaactcattttattcagaaaaagacatcatatctagctaatgtctaagagaccatacaagtttcctaacgatatctaattatgtgggccattaagtctatcatatgctgacaatagccgagaagcccatgaatctcttcggaggcggagtaggtgtctgtcatcgccttggccttggctaacaatcggggaagttcttgactcccgttcaatgtaagagcaaaccgagccatccacatggttgcctcttggtgtaaagagtcgatcacccttcctctagcctctnttgccgcatatacatgggcatactcatccgcgattctatgctcgtgggccgaggctacacccaactctatttgggactcggcgatgatagctaacatgaagatttctgtctcgcatagacactgagacaagcttctgttggaccttgaacaagcaatcaactcctctttta

SEQ ID NO: 67150 - DNA, 438 bp, Glycine max
  unsure (1)..(438): unsure at all n locations
cgctctgttcaagctctcccaanaatctagaggtatttctatgatctctatcagatactatgctagatggcacaccatgtaacctgacaacctcacttatatagaaggtggtcaacttctccaaggaaaatctgatattaatggaaatgaagcgagcaaacttattcaatctgtcaacaataacccagatagaatctaaacctctaggggttctaggtagtcctaccacaaaatccatggaaatactgtcccacttccactggggtatctctaaaggttgtaacttccctgaaggtctctgatattctatcttagccttctgacagactangcatgcatacacaaactcactaacctttttcttcatgttgggccaccaaaacgtcgtctttaaatcatgatacatcttggtagcaccaggatggatgctcaaattac

SEQ ID NO: 67151 - DNA, 441 bp, Glycine max
  unsure (1)..(441): unsure at all n locations
atcacatgtggtactaagtggcggtcgggcgatggtgcacatacaagtttccacatccacaatgcgcgcataaacccaccatcccctggtgcccacctncaactgagctcacgtactcccacgtagcccatattctcgtttctctcaacaccgggtccccatcaatcctnccaagcttccacaacatccaagcataacaacattcacacagcacaagctatcacagccaagcaaaacatagcataggcagaaaactctgccaaaacaccaaccaaaaatcacagcttttcccactcaaagaccccagtaacaattccttcgatccaatttggtaaccgttggatcgactcncaaaatttactggaagtccatagtgcataagcctacantttgaccggtgggatctactagcaaacgtncagaactcattntacattactc

SEQ ID NO: 67152 - DNA, 273 bp, Glycine max
tctctcaggtgtagaatcaagcttgacaggttcatgtgcacgtgctggtactagtggaggcacttgaatctggttgtcagacttcacggagatggctctcgcgtctcttggattctgcatattttgttaaggcaatttgtcagaattttgggactgagctcgattcagctgagtatccatctgccccatctgagttgtcagactataaatggaggctcttgtctctcgctgaaatcgcatattctggatggtgatctgcctcactaactcttc

SEQ ID NO: 67153 - DNA, 499 bp, Glycine max
  unsure (1)..(499): unsure at all n locations
agcaagcttgtttgacaacttatntttctccagttaagttggttttataaaataaattatttgaacaataattagtgtgtttcagacatctgttgaaatttgctaaaaagttctttggtgaaaaaaaaaaaagttgtttccgcaaagattatgattatttctactaatttttccctcctaanaaacgttttctccaaattacctcgaaatttcccagcaacttcataccttttttttttaaagttttttttattaatgtaaaacttgattgtttttatccaaacaaaattcattatcttaaagttactttttagcaaacttacccgatcaaaaactaaaataagcttacttctgcaatattttttaacacgtaaggtaagagagataagatagaaactaaaactcaactaagttcatctgctgttntattaatntgttgcagtatntatacaatngaatttccaagctgattctattctttctctttgaacaacaatac

SEQ ID NO: 67154 - DNA, 357 bp, Glycine max
ttatcagtatctggggactcttttctggtatcctaatggatgggcctctctaactcttttcttgtcttcgctgcatctcatggggaaatcaccttaaagacccatgaactaaaaacacctcctaaaggccacaaccacttctttaggggatcaaaccaaagattcaggaggcgccttaccccatttttttcttactttcttcaagggggtcatattttcccgattcttaaaggtgtgttaaggtgaaacagatcttaatttcaccataaatgtataagtaatagatttttggcaattctgtcttgttaacagaatggtgagtagttctgatttttgattttgggtatcaacaaaatt

SEQ ID NO: 67155 - DNA, 492 bp, Glycine max
  unsure (1)..(492): unsure at all n locations
tcgcttaatgccatattnttttcttttgcatataattntttactcagtccttgtacggtgacataaagcttcttgcggctgctattttgaattttagagtaagcatctagcatgcatgttatcttctatgaagcacagacacactggccgaaggatgtgtcacggcggtggacacatgacgaacatgtttttgcagtgtccaattntattnttatttgcttcgacatggtggcaatactacctggacacacatncttctttttttactttntgatatttttaaaaaatgacctacagattaactaatatagcaagttgtttttttttttggattttccttgcattgtggaatatgataactcttaataccttttttgtgaggcttattatgatgtgaaaattataaagcttaacaacttgttttaagatgaaatgatgaatatataaatttttattatcaacttaaatttgtcatggtgantatatataaca

SEQ ID NO: 67156 - DNA, 433 bp, Glycine max
  unsure (1)..(433): unsure at all n locations
gtatggtggtcatcagaggagcacataccacaaacccttgcgacaggtacagaattctgattcaaggccagctgggttaccaagttgaccaacgtatccagtttgccttcaagcttcttagtttcagatgatgcagatgggtttgtagctacctcatgcactcctctaatgactatggcatcatttctggcactaaactgctgggagttggaggccatcttctcaattaaatntctggcttcagcaggagtcatgtcttcaagggctccaccactggcagcatctatcatacttctctccatattactgagtccttcataaaaatattggagaagaagactgtctgaaatctgatggtggnggcaactggcacatagtttcttaaatctcttccagtactcatacaggctctctccactgagttgtctaatac

SEQ ID NO: 67157 - DNA, 419 bp, Glycine max
  unsure (1)..(419): unsure at all n locations
gatcttgcttgaattgatttacagggtatagatatctaaaaaccggtggtgctggtgactggatgaagacaggtgttgccgaccacgataaacttgtgctagtcttcttcttctctacactctctaatatccgctgtgtcctcttaattccgctttactttcgactaagttatttgttaatgttctctactttgncataacatagtagtaaagcctaattgaatctagtaatattaacaaggatacatttttaattagtcaagacacattaataattaattcaacccccccttcttaattattccgacgccacgtgatccaacatcagcgtttagctcgaatcccttccctgngatacgaagcttaacagccaactcttgatgattaagcctcatgagtgcaaacctggaataacacac

SEQ ID NO: 67158 - DNA, 347 bp, Glycine max
acatgagctgtggttcgcgctagagatgttccatagatataagggaaagttgcactatgtctgatattgaacccttgagacaccatacttcctactacaacacgtgtagagaaaatttctaggagcaacgacatgcccccctacctattgttggacgattactttttcacgataacttgactgagtttatatacaaaggataatcattctgcaatgcacttgtagctcattattattcacgcccattggctcagaacacttgaacattttcttactaacctgcgcgtgtacttcatctatctgaactgaatctgttgacactggagcacgtgcggatagataattga

SEQ ID NO: 67159 - DNA, 259 bp, Glycine max
gacctataatactaagctttgcatgtcctttgaaggtctgatcttcactgaagctttccattttcttatggatctccgcaataaaatctctgtgattttaatctcatacaacacaactctgggaatatgtgatcgatgccgtgccccaatcaaataaacattaaatatgcagtatctacgaagagatcctaggtcgtctcccaaagagcaatggtcaaccaacattcataatagatagtaatagaacaataacgaattt

SEQ ID NO: 67160 - DNA, 505 bp, Glycine max
  unsure (1)..(505): unsure at all n locations
agcttgtagaaatatggagtacccatcacatgcggtactaggtggcggtcgggcgatggtgcaaaacgattctccacgtccacaaatcacgtataacccaccatcccctgttgcccacctccaactgagctcacgtactcccacgtagcccttatcctcgttcctctcaacgtcgggtcctcatcaatcctcccaagattccacaacatccaactaattcaacattcaatcatcacaaactaacacagccaagaaaacagggcaaaggcagaaaactctgcccaaaacacaaaccaacatcacagctnttcacattcaattaccccagtaacattctctntgttccagttcgttaaccggtggaatcgactcgaaaatttactggaagtctctagtaccataattctacatttgaaccgtgggatctgctagaaaatgtccagaaccccatatgtactactccttttacaaccagccgatgcacaagcgttttctgcacttatac

SEQ ID NO: 67161 - DNA, 490 bp, Glycine max
  unsure (1)..(490): unsure at all n locations
atgaatttctgacgatagagagagacattggctttntaanagaatttctnttcttttctcttttttttctaaaaagcaatgccacatgtcccattttaagtggagcanaaaggggccacctntttcctttgatttgacttcatactcagccacaaaggagaaaaattttgacctttntggatgctgaaatcttgcctcggtttgcatgccgcctctctgattccagtttctcacgtttctttgcacccgtcggtgcctcgtttcgaaagtaggcaatgtatatatatatcaaaacgctcagaatgagaccctgagcgtggttcacaggttggttttgtaaattttagttgcatgcaaacgaatattttagactaataatagcgattaatctatattgccagctatggttactcttcctaatattctaaccgtgtatgtttccccatgacatacttttccagaattacattgtcgctgatatcattatttt

SEQ ID NO: 67162 - DNA, 453 bp, Glycine max
  unsure (1)..(453): unsure at all n locations
tagcaccncacctgacgtcctcaaggtctcctgacccncgcgacatatctccaggtaccactctgtggtcaacaataaaagcaggaagtttcacccttcaacacttcctcatctcaagcttgtaggattatgaggtacccatcacatgtggtactangtggcggtcgggcgatggtgcacaacaagttatccacatccacaatgcgcgcataaacccaccatccnctgttgcccacctccatctgagctcacgtattcccacgtagcccatatcctcgtttctctcaacatcgggtccacatcaatcctcccaagcttccacaacatccaatcaaaacaacattcaaacagcacaagctatcacagccaagcaaaacatggcaaaggcagataactctgctcaacacaccaaccaaaatcacagcttttctcactcaaagaccncagtaacaa

SEQ ID NO: 67163 - DNA, 496 bp, Glycine max
  unsure (1)..(496): unsure at all n locations
ctgcagctgagctagcttgcatacctctctatagctaagctcacctncttgagatgagaagctagagcttagctacacaccccctataatagctaagctcacccccatgacaaaaaacatgaaaatacaanaaaaagtacatactacaaagactactcaaaatgccccgaaatacaaggctaaaaccctatactacttgaatggccaaaatacaaggcccaggcgaaggaaatacctattctaatatttacaaagataagcgggctcatacttagcccatgggctcgaaatctaccctaaggctcatgagaaccctagggccttcccttggatctctagccaatctacttggagtcttctacccaatgcccttgcggggtaggattgcatcattccctccaccttggaaaggatttgacctcaaatcccgaggttcttcatactctgggctccttccctcaacacctgtaagaagaacanaaacatatgtattagt

SEQ ID NO: 67164 - DNA, 380 bp, Glycine max
acctttgcttgttatcatgcaacttttagttgtttcttgtgaggagcttggctcccatcattaggcaatttgtgaaattccgggacatgccggaaaacaaaagagaatattgatgcacaatccgtaagattccgtgacacacctgaaatcaaatggaagcatcgttgcacaattagtgagagttcgtaacattccgtaagtacaaaaagggatgattatgtaatccacaaggttccgttacattacggaaagagaacaagtatcattaagaaattcgtaagtctccataactgtactaaataagaatcactcaaaaggcgtggggtgtacttagtaaacatgagggtgcacatagcaaccaggcccacttgggcccttca

SEQ ID NO: 67165 - DNA, 329 bp, Glycine max
  unsure (1)..(329): unsure at all n locations
acttcaatatcgcacgatacatcgaagacaagatatacccgcatgacgcctctaacaacgacaagaggacattgctaaagttggcagccaacttcttcctgagtgggaatatcttatacaagaagaaccatgacatggtgctacttcgatgtgtggatgccagagaagctgagcaaatgctggtagaggtgcatgaaggatcctttgagcacatgccaatggagagctgggtattactanctcactatggagagcgattgctgcatctttgtgaggaaatgccataagagccagacctntactgataatgttaatgctacacccatacc

SEQ ID NO: 67166 - DNA, 379 bp, Glycine max
  unsure (1)..(379): unsure at all n locations
atgttagtcttgatacgcagtgctttgatcttccaccaccatcctcatagatntagattattactatattgtgtttctaaagccttgtatctggctatattattgtcgcaacaaacccttcgatgggaaggcgacgcgagggctcacgggtgcgtcttccaagaaaggaaaatgcgcgaagtcgccaccaatgtttattcaaggaaaacgtcggaaaaatcggaaaggtgtggtctacgaactttaagtgtgaaaggttcgggagttgttntacgcacggngaaggtattagcaccccacgcgtatgtcacaagggacggcagactntaatcaaatgtgcaaatacgacttncaaatgatatatcttcccttttctatg

SEQ ID NO: 67167 - DNA, 405 bp, Glycine max
  unsure (1)..(405): unsure at all n locations
tctgagtccctcatgacaacccanatntacttcaattggtgttctttacagaacttgtctattctgaatacacttaagaaaactcatcagtaggcataaattcaaaaggcttatgatttgcgttaagaaggtttgtcataattaatacaacaacggttttggactgaacaaatngctcataaaataagatgtgaaaaacaattatcaaagagacattacagaacattcactagacagtaatagagagcacatatgaactaatcaaactaaatggtacaaatattgaaataataagggactaaacaataaatattcaaacttcatctaaccaagtaaaaataccttctacaaaaaaatcaattttggtgtttcatcgtgcattgcccatttcgaaacatttctaac

SEQ ID NO: 67168 - DNA, 385 bp, Glycine max
  unsure (1)..(385): unsure at all n locations
agcccctttgagcctatgttcctcttgctttgttntgaagctcattacaagccttaagtgaaaaaccatgatatcaccttaccctcaagggaatttggagctttggaattgttatgggaataagtgtgtgtgggggggggggggggancttttccaagactaatacatgccttggtttggttggtgtggaaataaacatcataagttacaatcttttgaaaatatcaaataaccatataaatcgctttaccattcgtcaaatttttaaatagtattagaaaaagtggtgtggggtgcatttttaaaaaagacatagaccctccctttgttcttaaataattagaaggaaaaaataaatgatggataaatttttttttatatttgt

SEQ ID NO: 67169 - DNA, 338 bp, Glycine max
  unsure (1)..(338): unsure at all n locations
acgtgaacctaagagatctcngaacaactgctcgaggaactaacggataaatatagataggtgaggagagnttatngcttgtttacagcttatgataccatagttggtgtcaacgaacccaattatggggatgtatctttgtccttgtgcatgctagttatcaagaaaaactgtgttctaactaatgggatgtgatatatctgctattgatgtgtatgttaggtttcaagaaaacctttgttttaactaatgggatgtgacatatntcttattgatgattgaaaatgtgaatgatgcttacgctgtaatgattggaattattgggaatagtcttaatt

SEQ ID NO: 67170 - DNA, 301 bp, Glycine max
ttttagtagtgatgactcaatggtgcgatggatctaccatattagacatagaaaggtactaaattaagcagtgaatatatcgctaattatttggcaatcatctcccttcatatggatatctcccttagtttgaattagtatcaggatagtctcttgtaatgcggtggtggattgattacgccacaattgtccattgattgtcaatgctttatatttcaatttattgacttgggagaatcaataatatgatgtgaaatctagatcaataggctaatattcttgtcgtcatgatttggatatt

SEQ ID NO: 67171 - DNA, 415 bp, Glycine max
  unsure (1)..(415): unsure at all n locations
ccaccatcattacgtatatggctgaatgataggctctntaagtagtttctgatatatgagttcaactgccattctttatttcttcatacctgcgtaggggaggggatagcangtctggtggaggaccaaacctncaacgtcatcaccacacccaaatcttcaagatttatgaccagtgacgattgagctattacatgaatgtctaatgtcatcatggtcttggactattcttgtatgatgaagtcatgttttcaattntatcttggtagaagaggggtttgcctaatatggtgttctataactaaatgcattgaggtctgctgcttactattacacgtgagagtngagattaaacacaaatgattaccaagagcgtggagttgatcgtgtctttgtggatcacctttggcttctt

SEQ ID NO: 67172 - DNA, 426 bp, Glycine max
  unsure (1)..(426): unsure at all n locations
agaagatgagtgaatggaaatgtatagaaggagcacgaaattntgtgcctcatatgaggtctgaactntgaagtgtaattctaagatgatcaaagttcanaataatgcacacacaaggtctctatttatagcttaagtgtcgcacaaaattggaggaaaatttgaatttctattcaaatttcacttgaatttgaatttaaatntgtggaaccaaatttggagccaaaatttcactaattatgattaatgaattttagctatggtttagcccattaatccaagatcaagtccaagattctccactaagtgtgcttagatgtcatgaggcatgtaaaacatgaaagacatgcacaaagtgtgactatatgatgtggcaatgtggtgtagcaagcaaatgctcacctcccnctctaaaatttaattgga

SEQ ID NO: 67173 - DNA, 392 bp, Glycine max
  unsure (1)..(392): unsure at all n locations
acttatgcatatttttttctgcattgaggccactgactgcccgtctctcacctttggcgtattttttgaagattgtgcccccttttgcacatgttctggagttgcatcctatccgaagacattattctgacactgtctaacgaaggcaaccactatgtccttccaagactggactcgggaaggttccaagttagtgtaccaggtaacagctaccccagtaagactttcttggaaggaatgtatcagcaattcctcatcttttgcgtatgcccncatcttccgatcatacatctttagatggctctttgcgcaaatagtccccttgacttgcaaagtccaataccttgaacttgggaggggtgatgatattgtgtactatgaacaactcttct

SEQ ID NO: 67174 - DNA, 355 bp, Glycine max
  unsure (1)..(355): unsure at all n locations
attattttgggccttgttttaggttataatataagaaggatcctaaaatgtaaattttaagcccttgtattttagggcacctagactagtttttgtattaggggtagtnttgtaatttcacatgcattaagtgaatatttgatgtgtgtggttggaaataaatctaattgaattgcgagaagcccaatccaataaaaatttagagggggaggtgagcatttgcttgtacaccccattgcacatcatatagaacactttggcatgtacttatgcttacatgcttatacacctaacacacttagtaagaatctgnacttgatttggatagtgggtgaatatactaanatcactaatc

SEQ ID NO: 67175 - DNA, 453 bp, Glycine max
  unsure (1)..(453): unsure at all n locations
agctagtttatgatgtgtccaggcacgagaactatgtccctaacataaagggcatgtgtgtgttgagtttatgaattcttcctaaagaggcttgcctggattgaatctcctttctataggaagatagcttcattatgagttttggcccataatctgatagttcccaataagagaaatttggactagcttcaggatcatccaacaaaatatctttagtctgaaaggtcacgtttgtagggttggacgaccatgtgtctcatccaccttagaatttgatgaataacaataagaataaattattgatattctaatgagtctttgagaagtggacatgattactatgttaaaggaaattaaacattanatatcgtccacaacatagagtatggcttattttacctagcgcccacatgatatatcagtgagcatcactctatgcatacattatacatg

SEQ ID NO: 67176 - DNA, 335 bp, Glycine max
tcatcagaaccaaccttcaactgctgcgaaagtacgacaaaacatttatgatctgaaaccaaaagaaaatattgtaccaaaaatcacttcatttagcacaatgtagctaagtaacgagcaccatcaagtatcaaacctttgaaatgagtttgagagcttagtaataaaagttccgataactatgagtatcctagttgacatccacactgcaataaaggaaaaggacttagaaaaattgatcgtataagtttaatggaaaacattgatatatttttaaaggaaaaagaaagctttaatctgagaagagtaaagacacggaatcactctactagtaa

SEQ ID NO: 67177 - DNA, 173 bp, Glycine max
  unsure (1)..(173): unsure at all n locations
agtatgactatttgaatgtnccgagagtttccgatgtttagattcgagcgcctcggattattataagcctgaatcggacatccgtgtgaaaagttatgaccatttgaatttctagagagatttcgatgtttaatttcgagtgtatcgatatattataaacctgaatcggacct

SEQ ID NO: 67178 - DNA, 457 bp, Glycine max
  unsure (1)..(457): unsure at all n locations
gattgtcatctaccctcgctctattatgaatcaatggtcagatcaatttttcctgcctttactattacaagagaaagatattgaattgcttccttttctcattaagaaaacgagtcaacacacaatttagctaggagtgtgttttatttttttcctgggagttggaattgcatgtnactcaaataacgaaatgaattgaaaatatggagatgcaacagagacatattgngttagatattttatcaatgtccactatcccttcatatgtaatataaaagaaaacattatttgctgtaatggcctctttgccctgttgcttatacctacatggtcaaactcattattaatgtaaccaaatgcaaattgtcaagggactaatatagagtcaagagttaagaaggaatgttatatatatctatattgaanatgataacttaagaanaatgaggatcatgaa

SEQ ID NO: 67179 - DNA, 247 bp, Glycine max
  unsure (1)..(247): unsure at all n locations
tgatcttccaactaaaagcatgtaccattctttctctatggtatctccccacataaaagatctttgatgtttgttaatctcatacaacacaactntgggaataggtgatcgaggccgtacccgaatcaaataaacattaaaaatgcagtatctaagaagtgatcctatgtcgtctcccaaagagcaatggtctaccaacactcataatagatagtattaaaacaataacgaattctggggggggggg

SEQ ID NO: 67180 - DNA, 219 bp, Glycine max
  unsure (1)..(219): unsure at all n locations
aactaatattatttttgttttttttnnnnnttcttantggtaataaggcaaaacttaagtagggcttctaacctcataattttgttactttttcatgattttcattttttctcatgtttctactgttgtttatgtgtacataattttaattggccgtttactgctttagtagttattttttgtgaaattatgttttgtttttcaaaattgggtaatttt

SEQ ID NO: 67181 - DNA, 469 bp, Glycine max
  unsure (1)..(469): unsure at all n locations
aagctctcgagaaactcatatggtcatatctttgtaaacggaagttctattcaagcgcataatatatcgagaagctggaaattgaacaacagaagctctcgagaaattcaaatggtcataacttatcacaccgaagtccgattcatgcgcataatataccgagacgctcgaaattgaacaacggaagctctcgagaaattcgtatggtcataactgatcacacgatagtccgattccggcagatagtataccgagactcttgatattgaacaacggaagctctcgagagattctaatggtcataacttttcacatggaactccgattcaagcgcataatatatcgagactctngaaatataacaacggaagctctcgagaaattcaaatggtcataaaagttcaaacgaaagtgcgattcacgtgcataatatatcgagaggctggagattgacaacggaagctgtcga

SEQ ID NO: 67182 - DNA, 486 bp, Glycine max
  unsure (1)..(486): unsure at all n locations
gttcttcctcanaactgtcctaagcaaagttcttctttcctattaacaacttccgtttgcccatcggtttgtgggtgacaagtggttgaaaataacaatttagtgcccaacttgctccacaaagtcctccaaaaatggcttatgaacttagagtccctatcactaacaatgctccttggcaaaccatggagtctcacaatctccttgaaaaacaaatcagccacatgggaagcatcatcaactgttttacatggaataaaatgagccattttagaaaacctatcaacaaccacaaaaatggaatctctaccattgctttgttttggcagccccaaaacanaatccatggataaatcaatccaaggatactccggaattggaatggagatacaatccatgaggcntaccttagacttgccttttacatacatgcaatgttcacaaaattctgcacatccttttcatatgaagccaataaaaatgttc

SEQ ID NO: 67183 - DNA, 457 bp, Glycine max
  unsure (1)..(457): unsure at all n locations
agctnggatttccttttagtagggaagtatccttcctatgatggagccaaacccagtcaccctcattaagaactagctcatttcttcctctattgcctttagatgaatacacctttggttgattctctattaggttcttaaccctctcatgcatcttctatacaaattctgacctagattccncttctttatgtataaaagaagtgttcagtgggaggggaatgaagtctaactgtcgtatgggattgaacccatagacaacctcanaaggggactgcttggtggttctatgaacccccctgtngtaagcaaattctacatgaggaagatactcatcccaagacttatggttgccttcagaagagccctaaaagggtggataagacctattcctacctctgtttgccctcanttttggatgacaagtggtgagaaagaagttattcctacttaccct

SEQ ID NO: 67184 - DNA, 182 bp, Glycine max
cacagaggtccgattcttgcgcataatatatagaaacgctcgaaattgaacatcggaagctctctagaaagtcacatggtcataactcttaactcagatgtctgatcttggcgcataatatatcgagacgctcgaaattgaacatcagaagctctcattggtccaacctttcactcggggtg

SEQ ID NO: 67185 - DNA, 298 bp, Glycine max
  unsure (1)..(298): unsure at all n locations
atgtgtaattgtntaaagtngacacttgnggatacttatngttaatgaatatattttatcttttacaagaaacattaaactgtngtataaaattataaattatattaataagttattggtatttatttcacatttattatatattactagttaaaagaatccgattcaagnccatctgtcctggtagattatacgaatcacaaagactcattngtttgagttggctttttttttttagctcanattggtcctaaccaaggatgactcatcgagcttgtccattttgtagtcttatcct

SEQ ID NO: 67186 - DNA, 447 bp, Glycine max
  unsure (1)..(447): unsure at all n locations
tatcttggtgggaagttcttctttatggcttttccctagtggatggcgcctnctctcacctcttctcctttgtcttccgttgcatctgcatggtggaaaatcaccattaaaggacctcattgaagctcaaagatccagcctccatagaagccccacaagcaagcttccatcaagtggtaatcaaagcacaagagcttcaagtaggtgctccttacacctccattaattntttgctttaccttctcttccattggtattttttcttcatttttctccatgtatctcctcacatgtcttgttctanatgttgttaacatgattctttagagtttgcaccgattaaacttgctattagaagtagatgtgattttctatggttcanatttcttggtcttgtcttgaaccatgaatagtgttgagtttacgtcccttgagttttgctttgta

SEQ ID NO: 67187 - DNA, 352 bp, Glycine max
  unsure (1)..(352): unsure at all n locations
agctcgccacccagctcgcccaggcgagtcatggtgcttcctncaaaagcatcagccttctggaggaatcttttggagggcccaagtgggcctggttgctatatgcacctacattnttactaagtacaccaccctgccttttttttggtgattctttttcgtaaagttacagaaacttacaaattttgtaacgatacttagtttctttccgtaatgttatggaacctttgggatacaataatcatccctntttacttacagaatgtacagaacctcactaattgtgcaacgatgcttccatttgatattcggtggtcacggaaccttacagattggcatcaatattatcttt

SEQ ID NO: 67188 - DNA, 472 bp, Glycine max
  unsure (1)..(472): unsure at all n locations
tgacttatgattctgtggaactagcctaactcttgattctttagcatcatcaaaataatcttggtagtcattgcttgcacagaaaatactaaaagagttaggaagagaacaacatgccttctatagtagtcataacttttgcaagagcctaagtgaagaacttcatgactattatgaaggaaggcatatgtcacatcttagacctcactcccataggagagaaaaggaaagagagcctcaagaggctaacattaacctcccatacctccatgggaaggacaatgtagaggctaacttagattgggaaataagggtaaagcaacaacttataaagaagtctacttcacaatcttatggctctcactcttatccaaagaaagaccaaagtcaaggcatcttatgggtgacaccttataagcccaaagatgataaggggaagacaataganaagtaaccccttaaggctagtatg

SEQ ID NO: 67189 - DNA, 279 bp, Glycine max
tcttggaggtgaagctccttcttccttggcttattccctagaggatggagcctcccctatcctcttctcctttgccttacgctgcatctccatggtgataaatcaccattgaaagacctcattgaagctcacagatccatcctccatagaagcttcacaagccagctgccatcacttttcacacagatgttatattctggcacataatatgtcgagatgctcggattgaaccactgaagctctcgagtaattcatatggtcataacttttacacatatg

SEQ ID NO: 67190 - DNA, 418 bp, Glycine max
  unsure (1)..(418): unsure at all n locations
ggaatcggacctcagtgtgaaaagttatgaccatntcaatntctctagagctttcgttggtcaatgtcgagcatctcgacatgttatgcgctcgaatcggacatccgtgtgaaaagttatgaccatttgagtttctcgagagctttcgtggttcaatttcgagcatctggtcatattatgtgcccgaatctgaccttcgtgtgaaaagttatgaccattagaatttctcgagagcttccgatgtataatttcgagcgtctcaatatattgtaagcctgaatcggagctcagtgtgaaaagttatgaccatttgtatttctcgagagcttccttggttcaatttcgagcatctcgacatattatgtgcccgaatctgaccttcgtgtgagaattatgaccatatgaatttctcgagagc

SEQ ID NO: 67191 - DNA, 465 bp, Glycine max
  unsure (1)..(465): unsure at all n locations
tcaacgttcattntcgagcgtctcgatatgttacgggactcaatcagacatccgagaaaaaagttattgtcgtttgaattagctcagaagttcaacattcaatttcgagcgtctcgatatgttacgggactcaatcagacatccgagtaaaaagtcattgtcgtttgtattggctcagagcttcaacattcaatttcgagcgtctcgatatattacgagcctcaatcanacatccgagtaaaaatttatgggtcgttgtattggctccgagcttcaacattcattttcgagcgtctcgataagttacgggactcaatcagacatccgaganaaaagttattgtcgtttgaattagctcagaagttcaacattcaatttcgagcgtctcgatatgttaccggactcaatcagacatccgagtaaaagtcattgtcgttgtatggctcagagttcaacattcaattc

SEQ ID NO: 67192 - DNA, 328 bp, Glycine max
  unsure (1)..(328): unsure at all n locations
cttcaacactttctcatctcaagcctgtaggattatgaggtacccatcacatgtggtactacgtggcggtcgggcgatggtgcacaacaagttntccacatgcacaatgcgcgcataaacccaccatcccactgttgcccaccttcatctgagctcacgtattcccacgtagcccatatcctcgtttctctcaacatcgggtccacatcaatcctcccaagcttccacaacatccaatcaaaacaacattcatacagcacaagctatcacagccaagcaaaacatggcaaaggcagactactctgctaacacaccaaccaaaatcaca

SEQ ID NO: 67193 - DNA, 524 bp, Glycine max
  unsure (1)..(524): unsure at all n locations
accgcgatccttaatcacctgctgctgcagcttaatgttaatgtcctctcatataatctcaaatatcgtatcanattatagagatcgtggtatggtattgtgagtgacatccttggccatagtgggtttgattgggatggcactaagcacatgatcatagttgagaatgaaaatacttggaatgaatattgcactgtaagtattctttaatatattgttatttgttattcaaagcagattgaattngacttcttttttttttcagtcgcataaatcagctaaatagaattgaatttcatttgaattaaattactttatccaaacaaggaaattaaaatacaagagattgaattacttcacccgaacaaaatatttacaaaatgaaaggaatttaaatcaaggcaattaaaatggtgtgtatttgaatttcttagaaatttttaaatccttcatctaaacacaagattanggtttcatgggacccanaatgtctatatatatatgcataaatgactacatcgtct

SEQ ID NO: 67194 - DNA, 292 bp, Glycine max
  unsure (1)..(292): unsure at all n locations
actatgttcgccctactttcctcagactaaaggccatatcgaacggaccatttagtcgttgaaggaccttctgagggtgtgtgtcttagagcaaaacggaagttgggaaagttttctatcattgataaagttcacttataacaataattttcactctaccatttgcatggctccctatgaagctctatatggtagaaggtgtaggacacccctgtgttggctagagcccagagagaacctcaccttangacctgaagtggtacaataaaccactgagaaggtaaagttgatc

SEQ ID NO: 67195 - DNA, 506 bp, Glycine max
  unsure (1)..(506): unsure at all n locations
ctgcagctagtctttggtanattttaggaatntaaatttgtcaatccaaccattcaatgatgtaatattatataaatgatcatgcattccaaattntaaataatccataaattcataagtatgtaatttaataattgacatattntaaatagctggttatatgtaaactaccttcacaagcaaaatgtaattttcataatggcaattgatgtttattattgtttactgacctctatgcagatcttccccctgataaggaaccactagatnggaatactagaatgaaaatagttgtcggtgctgcaaaaggattagaataccttcatgataaggcaaaatcatgaacaatttctttaattccaaccaataactatatttcataagaaatggagtactaatcanagtcnaatgtatggttgcanggtgtattggtgtagatngcanntggtgcagtactaatcaaaggaagaatgtatggggtagttcctatctattgatacatatat

SEQ ID NO: 67196 - DNA, 463 bp, Glycine max
  unsure (1)..(463): unsure at all n locations
gctacatcatcttttgaaaaaatcaattttgaagttgataagtcataagtgactggttaatcagctttacacatatacatgtatatataacacgtagtaacaatgtgctttacctggactntatataatgaaacagcttccacaacaacaccaatggacaaaccaagttcaactacaacaaactaattcagcttcacctgaagttgatataataggtaatggcattagaagaactcanagccaaaccaagttcaagtacaacaaactaattcagctttttctcaaccaaagtatgtcaaactacttgttggctattaaaagtgttagttattcatgtgacaggaaaagagaagtgtangacgataattcttatttaanaatgtcaatgaagtattgcggcattaattngatacanatngatcaagaacaatgattacatagacaacttgggaagtgatcaaat

SEQ ID NO: 67197 - DNA, 311 bp, Glycine max
taacagcgtaaggatatgagaataatcaattacatgcaactttgtactttcagcaccagaaatcggcatgaatcagcgcataccatgaggcatatatcaatcataatcattgagattcaaccgacagaaatcaatagagcactgatgtttattatagaccactatacaacctcaactatcatacattgactctactccataaagtgtcaacacaatgagtgatccctcaagagactcattccttaacatgaataaattctatgatctaaccatttagggagtctcttggatttatcatataacgaaagtat

SEQ ID NO: 67198 - DNA, 388 bp, Glycine max
tatccttcaattacttcttaaacgtgggtttgtaattgtacacatgcactagcgtctatttatacatttaattgttcgatcatgtgatgtttcttttgtataattattcttctaatgtaaaatatgtgtttaaaatttgtatttgagattaaatagaatgatggaaatatatgaccattattggtccaaatcaacataacacagaaataccatgagagtctagcttgtgcatgactcgttatatataaactccctagtatacgtgttgtttttattcctacgaataataaacatcaacgaagaaatatgccagagtgacactttgtttatagcatcacgcaatcagattactaaacgctgattatatttgttctgcactttctggtct

SEQ ID NO: 67199 - DNA, 409 bp, Glycine max
  unsure (1)..(409): unsure at all n locations
gagtggtctctgtagatatgtcgcggaggtcacgagaccttcgggacgtcaggtggagtgctattgcccataaccaagcttgaccaatcccgacccaaacccggcatagtcggtcagtgagaacctgtgatgtacctaaacaagcgagctcctggcagtcaacagataaaatgataacaagaccacatagctaggaggcttgtggtggctggccaactgtgaattttgagagaatgtggattgcggcctctggtaatcgattaccaaaggtgagtaatcgattacaatgcttaaaattgacgacaggaggctaagatggtctctggtaatcgattaccaaggagtgtaatcgattaccaggcttgaaaacgaagtcaggatacttanggagcctctggtaatcgattac

SEQ ID NO: 67200 - DNA, 403 bp, Glycine max
  unsure (1)..(403): unsure at all n locations
tctatgcacacacgcgtggggcacattgggattcgtgtatttttattctcgntttgtttactttntataccccctgttgacgtgcttaagccattttacttaagtcatttgtcgcttaactcaaaaacaaaatcaatttccaccgaacgtttgaattgtattatccgctaacttcggttaaaatgaattccgaccgatcggtcgtgccgtaaccacgttggaaatcaaaaagaggtaaaaaatgatataataatcaaaaaaacatcttttagtaaaataaagcggaaaatcaatcggacgctcttttctctctgggatgtctcattcttaatcgaattgattaataactaaagtgaaactaaggctaaaatcaactcgcctagtcaagctcgtgcataaaaat

SEQ ID NO: 67201 - DNA, 454 bp, Glycine max
  unsure (1)..(454): unsure at all n locations
ggaatgatatttaagatgatatctatcatctatctntcaatcttctctcagacatcattcaatatctttcaactctttctacacaattttctgattctttttctttccatctttctaaaagtttttgttcaaaactttctcttccaataaattatgttcaaaaacttgggctattcatctttttcattctcttctccctttgccaaaagaacaaaagactaatcgcctgagaatttttgtggttcttccctttcccttaagcaaaagatntcaaaggactagccatctgagatatcttctgtttccccttacacagattcaaaggactaaccgcctgagaattctttgtcccaacacattggagggtatatcctttgtggtacaagtagagggtacattctacttgggattgttactgagtcaagagaaggacatctcttgtgatcagttcaag

SEQ ID NO: 67202 - DNA, 467 bp, Glycine max
  unsure (1)..(467): unsure at all n locations
atctaatctttcgtagattgtatgaaattatacagttatatatntttcatatcggtgtattcaggattcctagtgaggatgcagagtctcaactcttaaaaggcagaatacagcgcagtggaagctntagagacagcccaggttatgggtgttattatgtttgacttgccaaattgccctaagaaacatngtcaactagagacatccactgataatggagacggatcaatgacccatactgttactgcatcttttgaaactaccttgaggtgggcagagaagtagttgctgcagtcaaaactagcattataaggcttgcaaattgtgcttcttttagtaacggtgaattcaaggaactactaagaaaaaatagtgacaatccagatacagtggaaggtaatatggacttgtctgagttctcttcagagtgtgaatctgagtctagctcacagtccgatctagtctct

SEQ ID NO: 67203 - DNA, 401 bp, Glycine max
gttcgcattaagatctattggcataccacacaatgttataaaactgtcattggatctctaccgcccctctccccgaactagaaacacaatagatatgattgttatatgaatgccaaagcaatactagtatgaacacaattgctacatgtaagattgccatcgactatcctgaacataccatcagttgatataaatagtcataccggcatatgtccaagaaagaataaggcatcgatcttgcccaccttgcccaagcaccaatgactgaatatgtgtggaaatcaaggcatatggaacattgtgagtgatcacaaataatagatcctagaagcctaattatattacgtagaagtgtgtaataggtacgcacaaagctgtgcacaattgaggagatcactact

SEQ ID NO: 67204 - DNA, 271 bp, Glycine max
  unsure (1)..(271): unsure at all n locations
agtatgacagtcaccgttttaggagcgcggnacaccaacagcgctttgagggcatcaagggatggtgcgatctccgggagcgacgcgtccatgctcaagacattatacaagcgctactaggaggctacctatcacctgttaaatacctgataggtattggatcagctttgtctctcaagtcataccgggacacaccctagtgatcatgatcctattaatttaaataaaacgagcacaagctcttgaggcagtcatacctcacagaatatat

SEQ ID NO: 67205 - DNA, 387 bp, Glycine max
  unsure (1)..(387): unsure at all n locations
gcattcaaatttattctgttcgtacttcattttcaagtttggatattataggtgtcttagtagtgttgttgctctaaacatctaaattgggttgatttaggtttgaagaaagagcccatcggtgcattaaatgcaagtcccttccattatgataaactaattttcttatcttaccacactcttgttgcagtcttcactagtcaaataaactttatcgtagagtgtatatgttantagcacatcttttcaggtgaggagagaagttgatcttgattgttctttcactttctgcacttcaataaatcctatgatagacgtttgaacattctctacagctaggatcacacacacagagcattaactaagtcttaaatacttttagaacat

SEQ ID NO: 67206 - DNA, 393 bp, Glycine max
  unsure (1)..(393): unsure at all n locations
tttcatagtagagcatcgattatgtgtctaccatcacgatcatcgnctgcctttccatcattgggggtaccacctgngccgccagatccctccaccttatgggcgtgttctttgaaagatacgtgcccctttttgcaaatgttctgtagttgcatcctatccagaaccatatcacaattgtactgatactgcctaacaaaggcgaccattaggtccttccaagaatggactctggaagatccaagttagtgaccatgaacagctccccagtagacgtcttggaagaatgattncaattctcattttgcgatccccatcttctgacaatacatttaatggtcttggacagagtccctgacttgcaagccacaccttaactggaggggatatgtg

SEQ ID NO: 67207 - DNA, 458 bp, Glycine max
tgaagtagtctattatatatagtttgacgagctcaaggaggaactcgagagacgccattgagatgagaagctgactggattttctgacagcaatatagacatcgccattgtgaaggagttttatgtcaacctctatgaccccaaagataaatcacctacacaagtgagggtgagaggtcatttagtgaagtttgatggggataccttgaacacattcttgaagacccctatagtgttggaagaacgggagaacttgtgcacttattctcgatatgcactcctgaggctagatcctcacgatttggctgctaagctgtgtatcccaccgaggggattcgagcttaatgttgatgggaagcctttgaagactctgaggaagaacatgaccacgctcgctcagacgtagagcattctttctttatactaccttattcctacctgccacacatctgatgtgg

SEQ ID NO: 67208 - DNA, 471 bp, Glycine max
  unsure (1)..(471): unsure at all n locations
agcttctccggatcatgctgatcgaacctttcccaagcgacatcatccaattgttcttcagggatggaatagaataaacaatggccggtgtcggtcgctatatggccccgactgatatccttcagccgacattgcgcaatttcttttacaaacgctggccggaaatgtttttttacagtagaggatgtttctttnttttgggttccgtataaaatttacaatgtaagtcggctaagtttttccgtgcggcctcaaccgaggttgtgtntcgaccgacacgggcatgttctcatttaatcggccaagaaaacgttagcccaccccggcagataaaatacattcatcacgaaaattgatcaataaaatgatagctgaagtcngcgtcgagagatgaccgatcgaggtctaaataagaagcatcatcggattacgctgattgaacatttcctaatcgacatcatgcanatctca

SEQ ID NO: 67209 - DNA, 134 bp, Glycine max
actaacagacgctgagcgccgctcaactgatggtacatgtcaccaccaccacctgctccagccatattttaacacgaaagaataaatgtgcaatgaaaattatctatgattcaagacctgtcaacactatactc

SEQ ID NO: 67210 - DNA, 246 bp, Glycine max
  unsure (1)..(246): unsure at all n locations
aaaaaaactctagattctcaagtcataggcatttacaacaacgatcacattagagaggttgaataatatattaataaaaaataataactttttgcaaataaaagttttatcacaggtttagaaatatatatgttttggagtcatctactcatcagtaaaataagtttaataaaacatagttggatcatccaatatatctatgaagtaatatttccaaaaaagggttntaagaaaacacttggtcag

SEQ ID NO: 67211 - DNA, 439 bp, Glycine max
  unsure (1)..(439): unsure at all n locations
tggagctgccccttaactgccctatctatttagactggtgatccctaagctcttgaccttgactngatagaacctctctttaagcgaaagcatgtaacttgatcccatgttctactaaagtgaaacaaaatcggtgcgaatcacaactccgacatctatcatgggtggaatggataaatgcatgaagaaatgcatatgacatagatgcactctatgaatatgagagcccggaaaattgtctccttcttatatacaacgtcttgtggtagcacagtgcccgacgtatgtatttataaaagtgacaccgaccctccggtggttngctaaagagaagggatcaagacagaatccatgcgtgatgtatatgcgacaggcataacacggcgatgtacataatattcacaaacaaatataagcaaaagggtacatgacacttatg

SEQ ID NO: 67212 - DNA, 290 bp, Glycine max
tgcacttgttagttttgactatcattgtcgagaattaactgcattttctgtagtgtgaacctttcatatcagaacctggctagatgtgattaactccctgatctcgtgaaacatcacactaatatgattggttctcgaatgatacaactgagtctgtgcgaaatcaatagtattctatctattgcaatgcaactgaacaacaacttgctcaatgcccaactcattcactaaccctttctaaccacacagtttccttgctagccatagctaccgttatgtactttacttca

SEQ ID NO: 67213 - DNA, 514 bp, Glycine max
  unsure (1)..(514): unsure at all n locations
gatcctctgagtcacctgctgcatgcaagctagctctcatactagagtctcacattntctctaagatatttctttacaaggtaaacacgatatttttaatattttcatttaatctgacttcataggggttattcaagcattgcttttcctcatatttacaacttccggatatagcatcttgatattataaatagtatatacaagaacattnttccagacatacaactatngtatgtgaatagcaataggctntaatccatgaataataacggcagtaagccaagaagcacacctgtgctctttggttgcaagatgaaatacgcccacanagcaacatccaataaaaatggacagatatgcaatccagcagtactgctcatttggaggagtaaaaagtgattatgtttgacaacaactgattaaagatggatccaaataattacaatctaacatacctgattttcaacatcantcatgtgttttcattgatgacactgaatactatcaatgcaac

SEQ ID NO: 67214 - DNA, 273 bp, Glycine max
  unsure (1)..(273): unsure at all n locations
aaaagctgtatatcaaaaagagactgctactcaggtgttcttttaggggaataactctttatagtttatacttgtaacgactatactagaaagctgtattcgtctcgttggcgcacagtcgcgttgagacgtcacatattacagacatatggtacgagatacggtacatcccggattcacgtgactgaggtncgatatatagtacacattagatacgctattgtaaggatagtgactggacactttctatatgcgatcttatacgtcctatat

SEQ ID NO: 67215 - DNA, 491 bp, Glycine max
  unsure (1)..(491): unsure at all n locations
gatgtggagtattaatggtgttcctgcttattacatgttatctggtggggggacacatggtagatngatcatgtcgtattgcatggaggacacaaaggccttacagttggaaaatgggggaaaaatttcttggtttgactctcatcgtanggttttaccaagtgattatgcatttatgaggagacaaaatgcattcaaaaaaggggaagtagaaaaggatgagccacgacctatgttgacatctacacaagtttgacgtaggggtagggatttgccaaaaatcatagaaactggtttgccaccaccaacagtacacagatatggggagtgacctcattggacaaaaagaagcattntttggaatcttccgtattggaaagataatatnttgtgacacaatctcgatgttatgcacatatgagaaaaatttttgacaacatatttaacattgtgatgaatgtcagtgataagacaaaagaacaatgatagta

SEQ ID NO: 67216 - DNA, 422 bp, Glycine max
atgctaatgaagaactcagtatcagaatcagtatatggataaacttacaagagagtttacaaaggctatatctcccctagtcatcagctatacacaaatatatataagaggaacagtaggaaactacaaacagaatagttataacagaattaactgtctaacacacagtgattaaaacagaatgacaacatatgcagaatacatatgcagaagtagcatgcctggtccaataaatattgaactaatttacccttcttctaaagtccaagaacttgagaagacaaataccctcctccaccttgagtacttggtgactaaatcaccgcgaatggatggagaaggcatcgtcaactttgtagaaccccacctactcacaacaatattgtgaagaatgagtgattaacatgtagagatcatcttta

SEQ ID NO: 67217 - DNA, 377 bp, Glycine max
  unsure (1)..(377): unsure at all n locations
tggcggaaagatgtatgcctatgttgttgaggatgatatctccacacatacctgcggtaaatctatcagagagaaatganaggacctttgaagtattcaaagagctgagtctaagacttcaaagagagaaagactgtgtcatcaagagaatcaagagtgaccatggcatagaatttgaaaacagcagattcactgtattctgcacatctgaaggcatcactcatgagttctctgcagccattacaccacaacagaatgtgatagttgagaggaacaacatgaccttgcgcgaggctgctcgggtcatgcttcatgccacagaacttgcctataatctctgggctgaagccgtgaacacagcatgctacatgcacaac

SEQ ID NO: 67218 - DNA, 491 bp, Glycine max
  unsure (1)..(491): unsure at all n locations
taattgtactttatactcatattcgcctcaatcataattgagtatccaccagtattgagagcaacatgtcttaaagntatgtattttatttatttatgattattgaataagtatacaaatggagatgagtttctaatgcatctatgatagcttaagcttttgggacaactttttctacatttgcaactctaatttgtagccaaagactagtagtaagaagtctaagttttgaaatatatgagaagttttgtgagtctcacgttgggtttatttattgtaaaatgaaacacctcanattntaaaatgacaatattgcttgataacactaatttaatatattctagaaatacacatcattttttctacagctacttataaataataaaaacatcttcctatactactttgntttttaaaaaacaaaatgcaatagtctaaaaatgctaaataagttcatcgaattaaaataaatgtnaatgtaaatgtaaagt

SEQ ID NO: 67219 - DNA, 262 bp, Glycine max
attcacattctctcatgagatccgccgatgatcccattactgctacccctatactctctcgccttgctacatgccgcataccatgccttgcgaactccttggagcaccctgccattgaggtcaccgaaacaccatgcgatgaaaggcgtgatgctatcgtctgatggcactcctctgatggggtatccaaggtgtcatatcgcgacgactggagtgttattaatacacccccttgttccatcaagggaacatctggacatcc

SEQ ID NO: 67220 - DNA, 379 bp, Glycine max
tacattggaatccaaggtgagtaaaggttacataaccattcacaagtccaaatcatatatcattcagtcatacatactaagcgccagatactgtaatataactatagttcagagaataatgacttaaaacatagccaagtacatggattataattaacgatataattatctaattctacgagagtggtggatggtcgaagcaccgaccaagattactcacattctcttcaagctgagtgatgcgggtattcattccttcaagcaagcatcaatggcatctatgcaaccatcctaggaatcaaagcgttcaccaacatatgtgtgaaggcctcataattccgacagaacttcattcatgagagctgaagaacatctcttg

SEQ ID NO: 67221 - DNA, 469 bp, Glycine max
  unsure (1)..(469): unsure at all n locations
tgctcgtttgtataaacaacatctatatataggtagttgttcatgctcacataaccacaagctgcaataatgtgtgaacatggatagtgaagcgcataatacctttcgcattgacaatgatgaccattcaagttaactgtccacttttgtccgccacgttgcgttatagggttgaagctctcctctacttcaaaccttgtggagtggatatcatacacgcgaacgatgtgcatacaagctngttcttgatttttcctcagttctttaacaagctntgaacaatatacttgtccttcatttaactgtctttgggcttggcggccacgctcaacanagtacttttgacacctactgtacgttgatnntgaccaatgctgtatgggaatgttgtgacaatcctttataaccttattgatacattctgagagggtggttgtcatgtggccatatcgatgtccttctctatcat

SEQ ID NO: 67222 - DNA, 310 bp, Glycine max
ggcaccgagattttatatttcataacctgccactaggggtattacgctggctttaccatgtgacaactccggttcgacttgattattgattgctagcaaaacgttttcagactacactttgttgtaatgggattgcttaattcatgatatacagtggagccagaacacactgcgtcttggtgcagatgaaacccccaagctcatcaataaagtgcaatatcggccgcctcctctattggagatataaggatttttgcgcaccgataagagggtcaattttcatttacaacctgaaaaactcactgggttt

SEQ ID NO: 67223 - DNA, 414 bp, Glycine max
  unsure (1)..(414): unsure at all n locations
tgntcagaaatgtgcatttgtgtgcatacacaattcccggtacatcatatcaaaatggtgtatcataaaggcggaatagaactctaatggatatgattaggagtatgttaatcaattagactttatccgtatccttgtggatgtataccttgaaaactgccatgtagttgttgaacaggattcctagtaaggtagttccaaagacaccttttgagctgtagacaaatatgatacctagtataggcacctgcatgtttggggttgccacgcagaaataatgatttataatccgcaagatagaaaattggatgccagaacaatcagtggatatttcattggttatccagacnagtcaaaagggtatatgttttattgtcctaatcatagtatgagaattatcgaaacttgaaatgc

SEQ ID NO: 67224 - DNA, 379 bp, Glycine max
  unsure (1)..(379): unsure at all n locations
gtgtggaagggtgacactttctactttattctgtgaccatatagaggtncccggagatatgtcgcggcggtcaagagaccttgaggacgtcatgtgtggtgctattgcccaaaaccaagcttgaccaatcctgacctcacccgggcatattcagtcagtgagaacctgtgatgtacctaaacaggcgagctcctggcagtcaaccgattaaagaacttagaccaccaatcaaggatgtttgtgtggtggctggccagctatggatcttgagtgatatttgggatatggcctctggtcatcgattaccaagggtgggtaatcaattacaaggcttataagtgaagacagaaagttaagatggtctctggtgatcgactac

SEQ ID NO: 67225 - DNA, 408 bp, Glycine max
  unsure (1)..(408): unsure at all n locations
cgtagagttaagtctcgtactggtgtaatctattacgggagtaatttaatcgattacattggtggttgagacaatgattgattntttcaagagtctctactctaattgattaccaagtagattaatcgattacttctctcttgtttaagttgttcagaagtgaacaagaacattntaatcgattacctgcgtcatctaatcaattacattgttcttgagtggctttccagatgttggacggacactntaattgattacttcattgagatatttgattactntatagactttatcgattgcaagcgggtataactatnttctctataaataaccagcttgtgttcacatctatacatgatgagatcattagtgaacactcaatacatctcacaaattacttcttagtct

SEQ ID NO: 67226 - DNA, 456 bp, Glycine max
  unsure (1)..(456): unsure at all n locations
agctntgcttccacaatgtggatgataggagttgatctgatcaattgctctggactgtatatntaatgaaatntatagtatctgtcactattattgttgtagatattataatgattatctaaatttctgccctgttttgggaggccagattatggtctacaggggaagcctatatacaagaaagagaatggggcacccacttttggagggtccacatcttctgcacctagtgtgctgggaaataagacgaaattgaaaaccaagtctgaccatctactgatgttaatacaaaagggaaaatccttcaatttattttgaaaagaagtatgctatcttggcatccagctcttacaatctaatttgtgtatcagtgtaatatatttctcaaacagtagatgattatgtgccaattatgtgccaattattctttggatactctatgtacatagatctttt

SEQ ID NO: 67227 - DNA, 231 bp, Glycine max
tcatgttactattcacgcgcactgttcacgtagcaataaatatcgttttctgcttcaatgtgcaatttcgctatctgcttctgcccttgaattcattttcgatttctgctgattaatggaaggatgagattccagtgttgttttctcttgaggatcaagcacaactctctttgaggttatgttattactattgaattctgttcagttttccccttcaccaactgctctgga

SEQ ID NO: 67228 - DNA, 447 bp, Glycine max
  unsure (1)..(447): unsure at all n locations
cgcttatgctgcanacatntataatagacctnctcatttggataccaacaacagcagaataattatgacttttcgagcaatagatacaatccacgctggaggaatcatcaaaatctgagatggacaagtcctccacaacaacaacagcctgtccctcctttccagaatgctgctggtccaagcaagccatatgttcctcctccgatgcagcagcagtcacagcatagacaacaggagactgaggctcctcctcagccttccttataagagttagtgaggcaaatgaccatccacaatatgcaatgtcagcaagagacaagagcctccattcagagtctgacaaatcacatggcgcagatagctactcagatggggcagatggctactcaaatgaaccaagctcagtcccaatattctgacaaagttgcttcacagactgtgcaaaat

SEQ ID NO: 67229 - DNA, 383 bp, Glycine max
  unsure (1)..(383): unsure at all n locations
atctattttgacttttctatgccgcctctacatacattaaacagccccaccattccaatattgcaaaatcatattcatatatcacttgggcatttcaccgagcacttggtgggcgcacgtttggacacaaattgcaagagaatggtgacaatgcggcatgcactatagcttcagaatacagcatangcctaaggccttctcattcagatcctcaactcatgataacaagcgtataaacaaaccataactgccccacatatatcagtgcattctcacaatgtggagcaccagaagatgaagaaaatataccaatgggaagctaaaaacatcaaggatngaatacttacttgttggagtgaattataacaccaaagatgaaagca

SEQ ID NO: 67230 - DNA, 374 bp, Glycine max
  unsure (1)..(374): unsure at all n locations
tctgagttacctgctgcatgcaagcttaatgatatgaaagaattagcgtgggcagattcttgttcgcattgataggtaaatctgttcctcacattcctcagaaatgtaaagatccaggtactttctgtgtaccttgcagtattgggaacaataattttaagaatgccatgcaagacttangagaatcagtangagttatgcctctatctattttcaattctctatctcttggaccttggcaatccacagatgtggtaattcatttggcaaatagaaatgttgcttaccctgcaagtttcatagaagatgtactagtgagggttggtgaacttatcttccctattggattttatgttcttgatatggaagaggga

SEQ ID NO: 67231 - DNA, 477 bp, Glycine max
  unsure (1)..(477): unsure at all n locations
tcagactaaagcaactcanaatctatgtatccaacacccctcaagttaatggattntcaaggcttgagaagtgaaattgagaatgaggtcaatttggagcanactctcgcctcacacaagtctatgacatcaatttaaacttgctgaaactggatttacaccgaagattccactgaatcaaaatttgactgctcaacacccaatattaccctatacatggctctttgttcacgttgatcattggttgttctatcttgcacagcccagactttctcataagtcctaaatgacatttcaagctatgattaactcactttaacctccaaataccactaaatacagatgtggccttccaactctcgaaacctcactcttgttccactcataacaccatattctcactttctaaccctaggtaactctaccctcatctcaacagtgtgcataagcaattctgcgataacatacaatcatatc

SEQ ID NO: 67232 - DNA, 269 bp, Glycine max
actttcacaccttcattcacaactcttcctcttttcttctctctagcttggacacatctactcctctcttcattcttattctttttcatcgttttcatttttgtcatttttcttatcttactctacatctttttcttggacatttaattactttgtcttaaccattatctgttattctttctcctgattgctttcacttctcacatcatctttcattacatcagtaccttttttttcagcagctcttttcttggatacaacactatcct

SEQ ID NO: 67233 - DNA, 329 bp, Glycine max
tgacataacttaaggagccctttctattattagtctcatctctatatgaactcaaagtacgcaaggtctacccttgacgatcttttctattcctaattcttatctatgcaagaatacaagtctatcaaaaacccaaggtccactcttggtaaaataaacccaaggtccacccttcgtatgcacttctaccaaacccaaagcacccccttagtccactcacttgcagcaactacgatgaccaccatctaaggtccaagttcaataaaacgaactaccactagactgtttggaaagatcttcaattatgtgaaagtcatacgcattcctca

SEQ ID NO: 67234 - DNA, 259 bp, Glycine max
  unsure (1)..(259): unsure at all n locations
ctggacttcttacgttatctaaaaatcttggagtggatccaagtgctccgatcatccatttgcatactcatgttttggtggcatactcaccagtgtttatttctttatgaatttcatcataactaagaaacgccaaggcacccctataacacttgatccagaanaatggataatgaagagggcgtgcaggaacagatgaatgccgatctatcggctntaaaagatcaaatggctcccatctcggaggtcatgttaaaac

SEQ ID NO: 67235 - DNA, 394 bp, Glycine max
  unsure (1)..(394): unsure at all n locations
tagtgtgtgggtggagtggaggagtagctgtttaatttctttattctatatagacaaagatacaacacattgagattgaagataaaatatatagaatgtgtataaggtactctcatacacggaaaggggtaaaaaagcaattacacatgcctataactcanaattaagtatccatcaatgtatgagataattatacaccttctcgtcgagatcaacttgggtctttcttcagtaaacgttccaattttctttaatctntaacaccttgcaatatgtagttgctttgtntttcctccttacagagtgcaccgatttaatactgatagatcttctcaatancttgtcatcttaacgaccaatcaatgcaattttctgtaccaattgctggaaaata

SEQ ID NO: 67236 - DNA, 294 bp, Glycine max
  unsure (1)..(294): unsure at all n locations
agctgatgctctatagcactggttgtgccgcaataattttccagcgactactattcatggtgacaggacacaacacgttagtatgttgtacaactatatctgcctttgtatctgtatgtggatgtagatgcagaatacgccccaactattctcattntttctgctgtgacagtgtgtgatgatcccggaaagcagtgttgaatgcttaatggatagtatggatgacatctgactttcctatgacttacatgtgtagaaataaaaggggagaacatggagtcagttaggacagat

SEQ ID NO: 67237 - DNA, 333 bp, Glycine max
gaggtacttaccgcgtgaagactgattattacgaagaacgaatgatgaatctgtgtgtaacggtcgagaatcttcgcgtaattactcacggtaacattacggaagcgcctcggctaggattttcttcacgaaaataattttcctcatcaaattcgaaagagagagaagtgcctaaggggctgagaccctttcctcttcacttctccccctatttatagcataataggggagaagcttgccgcccagctcacccaggcgagctcagctcgcccaggcgagcaaggttgcttcctccagaagcaacagccttctggaggaatcttctggatggcc

SEQ ID NO: 67238 - DNA, 352 bp, Glycine max
agaaaagaagtctagagattcaggcttgtaaggatcgtcagaaactggttggaaaagtattcaagattcttgaaatgcaaaacagagccttgctgttatagactcttcatgtctagtcaagacaaccattagaagagttatgactcttagaaaaactcgaaaaccaatttgaaaaagtcaaaatactatttgaagagttacatctcttgactttattcagaaacaatcattggtaatcgattaccacattagtgtaatcgattacacaaagctatatggaaagatggatcttactttgaatttgattcaacgttcaaggcactggttaccgactaccaaaacattggaatca

SEQ ID NO: 67239 - DNA, 383 bp, Glycine max
  unsure (1)..(383): unsure at all n locations
cattcaatttcgagcgtgtcgatacgttacgggacttaatcagacatccgaagtaaaagttattatcggttgaattggctcaaagcttcaacattcaatttcaagcgtctcgatatatgacgggactcaatcagacatccgagtaaaaaagtntngnnngttgaattggcttagagcttcaacattcaatttcgagcgtctcgatatgtgacgggactcaatcagacatccgagtaaaaaggtattggcntctgaatttgctcagagcttcaacactcaacttcgagcgtgtcggtatattacgggactctatcacacattcgagtaaaagttatttgtcgttgatttgctcagaccttaacattaatttcgagcgggtcgat

SEQ ID NO: 67240 - DNA, 181 bp, Glycine max
tacctatgatgttgcgacctgctcaatgctatgctctcgttatcgagtcaataatgtatgatcctaaagtagtgtgagtccagatataagatatgatgaactctagttccaagagatgacttcaagtatacctcgcaagggaagtattgaaagattttcataatatcatacttatcacagt

SEQ ID NO: 67241 - DNA, 363 bp, Glycine max
  unsure (1)..(363): unsure at all n locations
tagcacctctgatgatatctctgtagaagtcaagggagtcgagcaattcagctgcactcttgcccttctcattggcagcgagagatgacacngcacttgtcttccaaataaacacctattcccgtgaacttcacaaattcttcttgaatattcaaccctctcacccctacagaagtaaattgtgtaagtaaaagaaaaaacaaactacagcataatacacatatgcagatgaatgcttttacaagatgtatttttacattctatactcacatatgagggtgcagcaacgctcttaaaacttgcaagtttcagtacttaacaaaagcctcgaaaatctttagcttagatgggaacctttatatt

SEQ ID NO: 67242 - DNA, 471 bp, Glycine max
  unsure (1)..(471): unsure at all n locations
gcttatctctcataataagaaagaagactaaaggtgctctcatctaaagaaacaacatcatgatgaagaatctacctgctacttctacaagaagtctagacgcatgatgaaagagtgtccaatgtaagctgcatggtgtgtaaagaaagataaatctcttgctctcgtttgttctgaagctaatttagtagtaaaaaatcctccccatttatgtgcataactagtatgtcttttaattaattgagtgacaaagtaatccctattttgaaaattgatctgattaaaattacatagatttttgtatgacattcattatgcaaatcgtgtttagtcaaaacgaaggcataattnggccaaataatattgtacctactatgataaatgtgtgacaaatataacgtgttttcatgtatataatagtcggtgcacagaaagactattatntgacagaatttattgttaatatttgat

SEQ ID NO: 67243 - DNA, 357 bp, Glycine max
  unsure (1)..(357): unsure at all n locations
agtggttatctagatatcatggaattagaanacgggtaattaagtcataagaagttaaaatgaagggtatttttgtatatgactatacaatagtctaaaaatagaantttagtttaattagttggtgactaattaaagtgtctaattatatgatgtagaataattaaaataagttagagttgttaaactcttgaacattacaactcagactaaagagaagagtctatgttgtgttgcatgtatgaatttaatttcagtagttatatgttttcaatcataaatcttttgcgctatatatatatatatatatatatatatatatatatatatatatagacacacacatatacacatgtg

SEQ ID NO: 67244 - DNA, 480 bp, Glycine max
  unsure (1)..(480): unsure at all n locations
tagcgactcttaaatactcaacttcttacatagtcgcgccttgcttgaccttctntatgcttaanaacagaaacattaggcataggcaaaagatcaagaggagttagtgggttaaaaccataaacaacttcaaaaggagaacaattagtggtgctatgaacagctctattgtaagcaaattcaacatggggtaaacaagcttcccaagtttttaagttcttcctcagaactgtcctaagcaaagttcccgaagtcctattaacaacttccgtttgcccatcggtttgtgggtgacaagtggttgaaaataacaatntattgcccaacttgctccacacagtcctccaaaaatggcttaggaacttagagtccgtatcactaacaatgctccttggcaaaccatggagtctcacaatctccttgaaaaacaaatcagccacatgggaagcatcatcaatttttttacatggaataaaatga

SEQ ID NO: 67245 - DNA, 448 bp, Glycine max
cgcttcatgatgatgaatcaagttgattcaagatgttttgatgattacacaagatgatgacaatttgctcaagagaatgatttcaagattgagtcaataattcaagaatcaagagaagtttgatttcaagattcaagataagatgaattcaagttccaagagaagaaatcaagaagacttcacaagggaagtattgaaaagagttttcaaaaaagcagacatagcacagttttgtttttcaaaagagttttctcaaaattttctaatttaccagagttttactctctggtaatcgattaccagtggcaaagtttgatttcaaaagttttcaattgaatctgcaacgttccaattaatttcaaaatggtgtaatcgattacaagatattggttatcgattaccagtgcatctgaacgttggaattcaaattcaattgtgaagagtcaca

SEQ ID NO: 67246 - DNA, 391 bp, Glycine max
  unsure (1)..(391): unsure at all n locations
agaacgaagaacgtactaagaagggtgaagaacgacggaataccttcacggatccgctcacggaaaaatctcagaagcgttacggaagcacctcggcttagatgttcttcacggaaacaatttttttcacccagaacagctaatatacataaccagggggctgagggatccttagaatagccccattcagcctatttatatganaaagggggaggatgttgctgcccagctcgcccaggccagaagcaatccagctccgaaaaatactctggaaggcccaatccaaaatttcaaaattgctattngcaccacccacttttgatagttcaccccccttctgtcgtaattatggaaaagtactgagcctataggacttattttctctttttct

SEQ ID NO: 67247 - DNA, 291 bp, Glycine max
gtctctcaacatcttggagaccctatgtagcgttaatgcgtcctgtagacctgccaacctactcctgaattaagccttcctccatgtgggccagagacccaagggaggcatgtccctcattcatgtttattcgagtttatgaattattttctctttattatatgctaatgaggctctcaatatattatttactaaacctgcttgtctgatttcttgatagaaaacacttaacgtagcacagccattacatgaaaacacattctgccccagtgtattggacagtttaaaact

SEQ ID NO: 67248 - DNA, 328 bp, Glycine max
  unsure (1)..(328): unsure at all n locations
agcttccacaacatncaagttaaacaacattcaaactgcacaagctatcacagccaagctaaagcagagcagagtcagaaaactctgctcaaacaccaaccaaaatcacagcttntctcacttaaagaccacagtaacaattccttcgatccaattcgttaaccgttggatcgactccaaaattttactggaagtctatagtgcataagcctacattgtgaccggtgggatctactagcanacatcaagaactcattctgtactactcttttcacagccaaccacacacaagcattttctgcaccaagctaaaagcctgctgcaccta

SEQ ID NO: 67249 - DNA, 449 bp, Glycine max
  unsure (1)..(449): unsure at all n locations
tctctcgtcttcacactgctatcatgttccctcactctccaccctgttgtgctctctctctctgtttcgctctctctctctgtatctctctctccccctgattctttctctcaccctgtttctctctctctctctcatttttgctctactactagatactgtgtattcataagagaaaatctaatctctttgaagagaaacaaaatgttgttgcccggtctagtacagaagctcaatatagggtcatggcttcaaccacttgttttttgtatcaacataataatgtattatatatataagattaaacagtaccagaggtactgatacaaaagagggatatacagtccttatatctagacaccagcactaaatggtattctagatactaggagaacatctagtntgttctatttgtatcacccattacatatacanaagccttgtctaat

SEQ ID NO: 67250 - DNA, 460 bp, Glycine max
ctctatcactagagttagaggaataccctgcaacttggccatttgtattccatggcctccaatcatacacaatggagtagtttaaagatcttatccatgcttcagtgcccaacatgagaacattcaagccatgatcgtcactgttagcattatacaaaatttatttgcgtgagaaattaagattgtgcttgtactactcctctcctactaatttttctatcagcaaatgtgagcctttgctagcttttatatattgtatactgcttccctacttggtccgcaatatagtacaatatccttgtgcatcatatgaacatacgtaaagaacatagacctgtatatcagtgaacgatagcctctcctactaatattgacatgatactcaaagctgattgggatatcctgctttgtaggtatatatggaaggtacatcgataccattttctatactttcctgtag

SEQ ID NO: 67251 - DNA, 430 bp, Glycine max
  unsure (1)..(430): unsure at all n locations
ccttctttgaatctgcctgcatgagacactntgagagacagacatttgcatatagactagaccatatgcctcatagacacgctcttgagatagnttaggtgtcctgaggctctaaaagagttactagaatatcctctatctgagtagcatcaaaatgggtttcatcaacatcaactgtttcctcatagaccatgagtgtataagcaagagcgccaattatatcaccaactggtgcatcatggcgaggagaacgtgacagttctccaagatatagcattaaagcagacatgccaccacagatattggctaanactcgagttgcatgctcctgcagagcctgtccaccatcacctcgcatacactcattagaaagagcaactatagctccaataaagattggaataccatctgcattaacaatgaccttttt

SEQ ID NO: 67252 - DNA, 379 bp, Glycine max
  unsure (1)..(379): unsure at all n locations
ccaaccttttgcaaaaaggaaaatggaatctcagctaatttatttgctttaatttggcatctacttcagcaattcactaataattggataaatttcaatccactaaaaacagggcaacatacaaaataacatgaatccaaagaaatggagtttcccattccacctgaggaatgcataacacatgacaacgttgcgcaaaaaatctcataggcacacataagcaaaatcacataattggttgggtaactgtacaacgtggcaccaggccggtcaattagctaaattcatgtaatagcagaacgcctttgctaatttgtggacaaaagctaagctggtgaaatctgtgagcctnctggttcatcatcaatttcattggatg

SEQ ID NO: 67253 - DNA, 227 bp, Glycine max
cactatttctagttaatgtgagacatatggttttcccataagaaaagatagatacttatatctatatataaaattattttaacaaatctgttgagtgaattatacctaatcatgatgttctttgtacaccttcgtaatatttaaacaactacaagtatgtgatcaactaataaatgtttcctcttgagagtaatactattatttagtggtaatataaatggatggag

SEQ ID NO: 67254 - DNA, 385 bp, Glycine max
actaagctctactaatcaattgactttatatacataacatactattatataatgaatacatattgatacgtgccttttctcttttacttaatgggagaatgcgtcccccacgtgtatggatccgaagcctttttagactatcatccttttatgatacatcaagcatatatacatgagtttactgggttcttgggtcgattaatgtgacacgtcttgaacctgggtattccagagcacaatgagtgttacaatatacaagacgataatgcctattctgccaggatggttatggatgcatgacaaacaaaaactgtgacattgacacacaatcttcttggatagaaaatgcacactcacataacacgtcaaagagtgtctcactcat

SEQ ID NO: 67255 - DNA, 407 bp, Glycine max
gagcttgataattttcagactacgtaactcaatttcttgacatgaatctcagacataataccacaatagttgtacattacatgattaaatgtctgatgtaatgcagtctaagttcatattagcaaggatagggaaaataagttactgaaggctattggcatttatacttttctgattaataagtatggcagaagaagcacgtattattcttcttttgccgaagatttattctgtgaagcatgtctttcttacgggtaagaagcatatatatgtcagatatcatatgaatctagcataccaccctagtgaagtgcaatacttttgatggtcagatggagaactttgtttctacagaatgatcaaatgggaaacatgttcatcattatataactattacataataatga

SEQ ID NO: 67256 - DNA, 345 bp, Glycine max
  unsure (1)..(345): unsure at all n locations
ctatcaatagacctccaatctttaatggagagggttaccactactggaaaacccgaatgcaaatatttattgaggccatagatctaaatatctgggaagccatagaaatatggccttatatacccaccacagtcgaaagaattacaatagatggtagttcatcaagtgaaagcataactatagaanaacctttagacagatggtctgaagaggatagaaaacgagtacaatacaacttaaaagccaaaaacataataacatctgccctgtgaattggatgaatatttanggtttcaaattgtaagagtgctaaggaaatgtgggacactcctcgattaacacatg

SEQ ID NO: 67257 - DNA, 462 bp, Glycine max
  unsure (1)..(462): unsure at all n locations
agctctccttctttgaacaaatacccctcagccaaatataatccatcttgagcctttttcccacaactctcgtaaatgggagagaaatgttcatctacagcattcaagaccctaatgttatcagatcctaaaatttgagctcctaaggagcaaaacaatgtgtgtctcctagagagggcaccaactaccacatttgtttttccctttttgtatttgataacatatggaaattgctctaagtactctacccattttgcatgcctttcgtttaactagctttgccctctaatgagcttaagtgattgatgatcactatgaatgacaaattccttggaaacaaagtaatgttcccaagttcggagtgctcttattaatgcgtaaagctctctatcatagttcggagtgctctntataggaatgctatgatgagatgacatgacatactngtattccaaacatttc

SEQ ID NO: 67258 - DNA, 279 bp, Glycine max
  unsure (1)..(279): unsure at all n locations
tctgatgaagtttgcatgaaggagctttgtgacttcttctntgatggctatacagccgttcttatcctgtcttgcttttcttctgtgatataggtttggcctaagggcagatagccattttgtggcagattatgctgggatggatcctcaacatgtcatatggctgtctgacaaataaatctgcatttctgcatagcacattggcgatgcgccgatgctcatgactggtaaggtgcctactaagccagtgcattacctcggtttaagtctgagttacaa

SEQ ID NO: 67259 - DNA, 306 bp, Glycine max
tcatgatgatgaatcaagattgattcaagaagctctgatgatgacttagatgatgaccaaaagcccaaagaatgatttccagaataagttccagatcaagattaatttcaagattcatcaagaagattcaagattcaagaataatcaagatcaaccttcaagactcaaagattcaagaataaagagaagactttatccagaatagtattaaattttttttccaaacattgagtagcacaagaagttgtcacaaaatcattaccaaagaagtttactctctggtaatcgattaccagtggtttaaaa

SEQ ID NO: 67260 - DNA, 308 bp, Glycine max
  unsure (1)..(308): unsure at all n locations
tccttgatgtaattctagctgcttgagaattgagtatgagtacttgcaatatccccaatccccttttggcaagtgcctgctcgccaataatattgaagaaatttttacttgcttttatacctgtgacgactatgatttaatttgaattcagaaggtgagttatgcatatcatctttatctcaaaatgtttgcattgcagatgccattatatatctgatacattntatgaatgtctgagagcagagcctaaatcatatcaatttgatgcctcaatgatgcagncacacagtataatacaagccttaatg

SEQ ID NO: 67261 - DNA, 436 bp, Glycine max
  unsure (1)..(436): unsure at all n locations
tatctatcctcaagtcacgcgtgactctaggaatngaattccaaatctggtgatgtggccacgtggacacatgagctccaagtaacagaaacagctatattccccattggccagctgatactaaagtactgatacaggaacagctagcagagaaacaaagttacaagtaaagtaaattaagaagatcattaatggcttctcttgcaaccttagctgctgttcaaccagctgcgctcaatggccttgctggaagttccctctctggaactaagctctctttcaagccctctcgccacactgtcaaatccaagaacttcaggttccatgcatttccatanattnttaattttatatatatatacacgcacgatgagggggtaaattatacttgtataactacacattattatatcatcttatagtttgatataaatat

SEQ ID NO: 67262 - DNA, 436 bp, Glycine max
ctaagcttttatccaggctcatcttggtggtgaagctccttcttccatggcttattccctattggatggcgcctcctctcacctcttctcctttgtcttccgctgcatctccatggtgcaaaatcaccattgaaggacctctttgaagctcaaagatccagcctccataaaagctccacaagcaagcttccatcattagtcgtataagacgactaacaagatgccacttcatggagaagaagagtcaagaacaaactcaccaccatagaaagccatggttagagcttgaaggtatgagaaaatgaatggagggagagagagagagagagagagggaaacgaaattttgagagaagagggagaataaggtctaaactttgaactctaatttctcatatgatcaaagatgcaaactgcacacataatgtctctattat

SEQ ID NO: 67263 - DNA, 165 bp, Glycine max
cttaggcaaagacttcaacattcacgggatagctactcaacacagtatttgtagaaagtcagtgttagttaacttaacacggtacctaaatttcatcttcgtacagtaagacctaatgcttaatgtatactcttctcttcttatcgtacactttcatattggtgt

SEQ ID NO: 67264 - DNA, 452 bp, Glycine max
  unsure (1)..(452): unsure at all n locations
cttcgaacacttactctcctttcctatagttctggctgtgctgcttctctttatatccaatactacacaactctgttcaggtgcaaccgcagcctccatgtcagccctcccacaaacatgcataattatacaaagtgccccgattacgatctctactacaatgacaaccccaaagctgaagatgcgtctttgagagcatgtacaaaggtcctgcttccaattaaagacgcgcctgacgctaacaacccattcacattcgcaactgcagatatcttcactaaagtagaattaaccgatgaatgtgcagctggccactatcgcagaggagggcagtgtcaacttgacagcagagagatanntttttgtgccactgccaataagtatcggacgctntcttctgcgattattaattcataaanaaataactacaaaaagtctgtgtatcatatgta

SEQ ID NO: 67265 - DNA, 349 bp, Glycine max
actgaattgaacttcacttctcttgtaagttagaatcaacttaagcacttcgacttctataaaagttctctcatctgacttctccgaaaagctgagatatattatcgtttctcttacatgctataagggcttatagagaactttatctaatctgatccacttgatttaattaagttgtctactcaagcactcccgtactatcattatgtcaaacagattataaaatcgattttcctaaatcatgttacaaaagacgaacactccccaaacatccatgattattgatgcgtataaatctgtacccaggatagttgaaaaatatctaacctcttctcaatccatgctcagc

SEQ ID NO: 67266 - DNA, 469 bp, Glycine max
  unsure (1)..(469): unsure at all n locations
ctaagcctttccaatgcttgcgcaagttcttataccatagtgtnaagttcttataagangtttataagctcttcctaanagaccctaaataatacatgtacagactcacggagtaaaagtcttttacactatcatctaatcacggatcatcatgtatgataagttcattgacctttataataaccaccttaaaagtcattcaaaggacaagttcttattgtttgatagcataaaaactttaatattgacagcgcttatcttattagaactcttttgaatctcgtctatctctacatttgggaaaacaaaagtgtctttctaaagtctggttactggctttataaagtaaaattccctctttttgctgttgcacaaggtacatcatgctttgttgagaagcacagttgctgcttgagtgttaaaccatgttgtgcatctcataagagagggacctcgatcttctgttcta

SEQ ID NO: 67267 - DNA, 455 bp, Glycine max
  unsure (1)..(455): unsure at all n locations
ggcttgaggccttggacttacgctgaactgtaatgnctaccttgttggtttcaccctaaaagaaatatagcattattcaatgtatgangcggatttcgatccacatatgacaaatatgcctaataccttgcgattaaatgtcttcaaactatatatggctcatatggctatagaagcagatgcctctacaaaatacttacacattatcctaagaaatacattctaaataagtggcctgattttcttcctagattttggtccttctccacaaatggttgatgatcggtggttgaatcttgatggggttggtgttgatgtatatacaaatggtgatggtgttgagttagacattctattggttggcgcaactgggtcatatgcttcttggactttcgtgttgttgcacaagattgtgatatttcttactatgaattgatgttgtcttatgctttctc

SEQ ID NO: 67268 - DNA, 463 bp, Glycine max
  unsure (1)..(463): unsure at all n locations
tatagacactcaagctcgctattgttatttaccaactatttctttgagtcatatgtgagaatgcaatcatttgctttngatacaattagcttagttgttctgactatatagtggctgaagatattatgagtattctctttacatcccaaaaagataacaattcgagtagcagggaagcaacagcacgctgtcttccacagccatgggctgtctgaaaggatntaactgaacctgcatagtagtgcaatggatattaaaagattgttaatgaaaaaaaaaagtttaaaataatcatttggtccttataaatgacactcatttacgaatcagttcttatatgggaaaaaancttagttntaatcccgctctacaccttaagtacacattgggtccccgctaacatgggcgtctaggaattaaaactcttagaaacacagtaaacaatagaaaccaatgtgttcta

SEQ ID NO: 67269 - DNA, 373 bp, Glycine max
  unsure (1)..(373): unsure at all n locations
aacgattatctacatccataattcacgtataacccaccatcctctgttgcccacctacaactgagctcaagtactcccacgtagcccgtatcctcgttactctcaacgccgggtccccatcaatactcccaagcttccacaacatccaagtaattacacatacaatcatcatggactaacaaaatcaagcacaatacggcaaaggcagaaaactctgcccaaaacacaactcataatcacatgctttcacatacaaataccccagtaacatgtccttcgttccaatgtgtaaccgttgatcgactcaaaatttactggngtcctagtacataagtcacatttgaccgtgggactgtagcaatgctagacccat

SEQ ID NO: 67270 - DNA, 459 bp, Glycine max
  unsure (1)..(459): unsure at all n locations
agtagaaacatgggaccaactcattgtatttcagagagttatatctagtcaaggtctgtgagaccatacaagttntctagtgatttctaattatatgggccattaagtctatcatatgctgacaatagccgagaagcccatgaatttcttcgggggcggagtaagtgtccgccattgccttggccttggctaacaatcggggaagttcttgactcccgttcaaggtaagagcaaaccgatccatccacttggttgcctcttggtgtaaagagtcgatcacccttcctctagcctctttttccgcgtatacttgggcatactcgtccatgaccctatgctcgtgggccgtggctagacttaactcttcttggtacttggcgatgatagctagcatgttggtctccgtctcgcataaacgctgagataaagctcctttggacctcgaacaagcaactaact

SEQ ID NO: 67271 - DNA, 390 bp, Glycine max
  unsure (1)..(390): unsure at all n locations
tagaagtcctttcttttggagaagatgaaaaactaagttgtaacggagaggaaaattagctttaacaaaacatatnttgacttaagttgaatttggatagaggtgcagaactacatagctgcagtatttgtttaagttcacagtttttggcttgagtagacactcacttaagtgtagattctttgggtctgtataaatagattctctggtttattttaggaggcacgcttcctcatcgtgtaatagaaccttgtttactaaagttcttatacgtcaactccctccttccattgatcctgcttttgaatgttaatcatggagatgggtagctaaattccttccgtgtggagtataattaaatatgagtttatgctctcatggtttcttttg

SEQ ID NO: 67272 - DNA, 254 bp, Glycine max
  unsure (1)..(254): unsure at all n locations
ttatttcactaaaaagatattttnttgattaattatattatttttacctctttttgatttccaacgtggttacggcacgaccgaacggtcggaatttattntaaccgaagttaatggataatacaattcacacgttcggtggagattattntantttaagtaagcgagaaatgacttatgtaaatggttaccacgtcacagggggataaaaagtaacaaactagaataaaatgacgaacacaatgtgaccacta

SEQ ID NO: 67273 - DNA, 452 bp, Glycine max
cataagaaacaaaatgcctcaatcatatccaaatatgcatgtgatttatgaagcatcaacaagaatcaaaccaaggctattgtgcaagcaatcaatggggcaaaacacaccaaatgattatgatgatggatggctcaaattctcacaaagttaaactcaccactttcaaattgagctttcaaaactatcatgaaatgtagaggagaatcaaagatttcaagtcacaaaatgtcaaaaacttttattttcaaaacaattacccatttcttgaacatatcctatgattcaaagaaaaacatgcaaagtcgtatatgcgcacaaaattgactcaaaatattaaactaaaaatccgacgaaactaacaacattaacaaattaacacaactaacaaattaacaaaaccaacaaaactaacaaaaaccaaagaacactccctccccccccatacttaa

SEQ ID NO: 67274 - DNA, 313 bp, Glycine max
  unsure (1)..(313): unsure at all n locations
gatggagttccgtaatatattaagatgctcgaaattgaaaacagaccctcctagccaattcaaatgacaataactttttacttaaatgtccaattgagtatcgtaatatatcaagacgctcaaanattaaattgaaagcttggagaaatatcaaactacaataacatttaacaccgatgtccaattgagtcccgagatatatctgtcataacctaatttcattcggtgaccattgttaaatgaacgcaacctttgttgactggttcgagtacttggcacctttgtggcacaatcgtgaagttcatgacatgcc

SEQ ID NO: 67275 - DNA, 414 bp, Glycine max
tactaagcttccttgggccatttcttgttggtgatgaacattatcgcacaactgaatcaaaaaatgcgaaaaaggatgaccctagggctgcaaactcgtgaatcccgtgggtatggcttttgaaaggggggaaaagaagtttttgaatgcaaaaacgtcccctctttcgtcattcttataatttggtgcaggggtggctcgcccatgctagcccagtttacccaggcgagctaacctgcacattttttttttttgagggggacattaaactttgtctactctcttttatagattccatttatcttaactgtactcactatggctctacctaagtgatgaatctcctccttcttttcttttttcatcaacacttacttcagatactttcatcttttttaatcattttttttttcc

SEQ ID NO: 67276 - DNA, 441 bp, Glycine max
ctttgagtgatatgatgtgactgcttacatggtaatttgaactttcgttcaagggcactggggatcgattaccaaaacattgtaattgattacaaccttttgaaaatatttgggacgttgttaattcagtatgaaaactttttcaaactcttttaagttttggttatcaactacaccattatggtcatcaatgatgcaacagtaaaagctctttggttaagcttttgttacaaactcatgtgctattcaaagatattgaaaaaacttttttatgttcgattgaaccttctccttcattctcgaatcttcgagtcttgaatcatgaatcttgagtcttgagaccttatgttattgaatcgtcgatctaggaccttgagatcttgtagcttcgttccatgagtcttgaatcttgatcttgactcttgattctcttagaatgtt

SEQ ID NO: 67277 - DNA, 282 bp, Glycine max
gcctactatcactgttctctccatgttaagtcgtatgaacttgtattttcttcacagatggggcatgcatgatgacccttaacactgtaaccgctgagattcccatatgctggaaagtcattaatagtacaaataagtattgctcgcattgcaaggtcttcttgcgaaacgcattaaacactacaacctcctcgtcccacaacttctcagatctcaaccacggacttagaaaacatcaatgtctttcctggttgctgtggcccgatatatcatagacaacat

SEQ ID NO: 67278 - DNA, 423 bp, Glycine max
  unsure (1)..(423): unsure at all n locations
ngagatgaggaagtgttgaagggtgaaacttcctgctnttattgttgaccacagagtggtacctggagatatgtcgcgggggtcaggagaccttggggacgtcaggtggggtgctattgcccaaaaccaagcttgaccaatctcgacccaacccgggcatagtcggtcagtgagaacctgtgatgtacctaagcaagcgagctcctggcagtcaacagataaaaggaacaaagaccacaaagcatggaggcttgtggtggctggccagctgtgaactttgattgatatgtgggttatggcctctggtaatcgattaccaagggtgggtaatcgattacaaggcttataaatgaagacaggaggctaagatggtctctggtaatcgattaccacggngtgtaatcgtataccaggcttgaaaac

SEQ ID NO: 67279 - DNA, 445 bp, Glycine max
  unsure (1)..(445): unsure at all n locations
agcttcggatgaaagcgatgaggtacaagccctattttcatagctngaaagagcccgagtagtcgaagagaagttcaagtccatagccatcanagtctgaaaagagtatgatgaactaagggacgtcaatatggccaccgctgaagccttggaatgagaaaccaagaaggcccgaaaggaagaacacgaccaaaacaagttntgaggggctntatagggcagcaatagtgagctcaagctccgaagaggtgaaaggaatcatcacgggtcanaggcatgatctggaaggacgagctaaaggcttgccttangtcgaaaagaaatttgtcccaacagttaaagcgagactgaagggaatatgtgggccatcatcgataagtgcaaagagaagctaaatctagcggcgactcacgagcaaaggctagaggatgagtacaccaagata

SEQ ID NO: 67280 - DNA, 452 bp, Glycine max
  unsure (1)..(452): unsure at all n locations
cgtgtaacccaccatcttctcatagtagaatactggtatatttgtctactatcattgttatcatctccctgtccatcattggaggtgctacttgagctgccaagtcccttcacctctgggcgtattccttgaacaactcatgcttctttntacacatgttctgtagctgcatcctatcctgagccatatcagaattgtacagatactgtctaatgaaagcaaccattaggtccttccaagaacagacttgagaaggttccaaattagtatatcaggtgacggatgccccaataagactttcttggaagaaatgcatcaataattnttcatctttcgcatatgctcccatcttccggtagtacatcttcatgtgattcttanggcangtagtccctttgtacttatcaaagtttggcacctcgaacttcggagggatgatgacatcacgcact

SEQ ID NO: 67281 - DNA, 349 bp, Glycine max
  unsure (1)..(349): unsure at all n locations
ttggacttcctgagattggtgcaaaattntacatcacacatgcagatctagcggaaataatatcaggtgacaagtgtttaaacatagcgatactacaattgtggaccatgtaagtcatnttcctacaacctntatgtttgattacttgataaccaatattcttacattcaaacatttaaaataatcatgacttgtctcnaaatagattatgaatagtgcggagaagcaagctgatcagcactatatggttgttggacctaatctatcaaaatgtaaggaagacggaacatgccacatacatgaaatgggcaggatacaaggagtgattagactacttgatagagtcatg

SEQ ID NO: 67282 - DNA, 441 bp, Glycine max
  unsure (1)..(441): unsure at all n locations
actcagctgaagacgattcacgattgggttaactcnatgcacttgttataatgattatcggaaccgcaacacccacacccacatcaagattcgtgaaattcaaatntgattcaacctcacgttactcaccacctagaattcgcaaaaattggaaaagggaattaggattatttgataaagatgagatgtaaagagttagagagcgtcgactgtcgaatcattattgataggcaaaagctgtgggtttttttagcaaataaatgtgctgataaattcgtccctgaaatataaaatttcaaattttagtcctcgaaagtgaaaaaaatatgacaaattcattcatctgttaacttctatccgttattggtaataaaagagtacataggacacattcatggacaaatntgttagggctgtatacattcatggacccaaattgac

SEQ ID NO: 67283 - DNA, 233 bp, Glycine max
gactcagcagggtcctcatgacgatcgagggagcctagaagatatcttgcggttttttcgcatccacagcgcagagaagtttgacacgttaagacacaaacaaactattccaacacacatacacagggtacactagaatcaacgagagatcgctgattcaaacgggagttcaaaatcctgatgcttgccaatgaaagagagcgggggaaccgaagaaaaatcacatttccaca

SEQ ID NO: 67284 - DNA, 481 bp, Glycine max
  unsure (1)..(481): unsure at all n locations
agcctgcccagacaaggagtccacggagganatgcttaccacctcanaagactgganagcggtttctaatgactcctctgtggcttccacatcaggcatagaggatgggcagctcaccaagatgtcttcctcgcctgatacgatgaccagatgcccttccactacgaatttcaacttttggtggagtgtagagggaacaactcccactgagtggatccacgggcgccccaacagacagctgtagggtgggttaatatccattanttggaaagtaacttgacaggtgtgagggcctatatgtactgngagatcgatctctcccctaacctctcggcgggtgccgtcgaaggcacgaaccaccattgaactcggctttaagtgggaggcattgaatggtaatttctccaaagtgctcttaggcatcacgtttaaactggaaccattatcgataagcactttggctacgatatggtccatacac

SEQ ID NO: 67285 - DNA, 441 bp, Glycine max
  unsure (1)..(441): unsure at all n locations
ctgagccanaatcctgactcaccatanaccttgacccaaggtgagtttgccaatctttatcctcggaagcaaaaaaagaaggagaaggaaaatttccaatcaaagaacaagagaaagaaaatttccaatcaaagaaaaaaaaggggaagcaaagaaattcccaatcaaagagtgggagaaagaaaaaaaggaaagaaaggaaattcccaaccaaagaatgggagaaagtaaaaagagaagaaagttctagatcaaagaaactagaagaaatatgcagagaggtctttggaccggacaatatctgaacaatacagaattgtcaccaaatgaaacaaaaaaaggaaggaaaggaaaccacgacctaaaatggtcttctccctttgataccaaccaaaatcctgtgcgtcggtgacttgttcgcctcgcgctaaacaaaaaaaa

SEQ ID NO: 67286 - DNA, 459 bp, Glycine max
  unsure (1)..(459): unsure at all n locations
ttaatgcatctggtcgtgtatttttggaggtattccccacatttgttgctcagtgttttacgattccgtgcacgtctgtcaaaacttngtttgtagcactttcatgataaatattgaagagtaatattatgtctttttactattcctcttaatattttatgaaaaggatgttaaatgacatagtaaattaataatgtaatattttgacatctataaaagctgtcaatattttggttgtcgtctaataagtaagaaagatttagaattgtttaagaaaactctattcaattataaagagataaaatagaagtgaaagtctaaaatatgtatataattgttaatacacaacccgaataatgaaggactgcactaaaattaagtttatacaaaatanatcttaaattattataattgtaactgttaaattttaactaataattattagtatactttatcttt

SEQ ID NO: 67287 - DNA, 436 bp, Glycine max
  unsure (1)..(436): unsure at all n locations
tctgtggttatggaataatcaattatcaaatgtggtaatcgagtattttaacacacaaagaacttctaataaagtttccaaacaaaatctaattgattactaaatgtagtaatggattatctcgagccataaagtcttcattctactgaaacatacatatgtaatcaattattgaaactggtaattgattaattcggttattcttgccaaatttcaagtagaagggagttatgttgcttattctaacactttgtaattgattattaaactttgtaatcgattacattatattgaactcactgcttctaagaaactttgagatcaattcattaatctcccatgtntgatttctactaagcatggatataagaaaactaagactaaatcatccatcatgcctagtctaanaacatcccatacaaacaccacatctttt

SEQ ID NO: 67288 - DNA, 366 bp, Glycine max
  unsure (1)..(366): unsure at all n locations
ctatgctcttgaccttgacttgataaaactccttttaagttaccgcgcttgactcgatgccatgttttactaaagtgaacgataattcgtgcgaaccaaaatatgacatctatcatgggtggaatggatgaatgcatgaagatatgcatatggcacacatgcattttatgaataccgcagcccagtgaattgtctccttattaagaacgtgcacagaccctccgttggtattcaaagagaggggacaaaaccgaatccatgcatgatgcatatncaaaaggcgcaacacgagaatgtacagtattgacatattcactaaatatatgcgaagggtacccacacttatgatggcagcggaaatggaca

SEQ ID NO: 67289 - DNA, 396 bp, Glycine max
  unsure (1)..(396): unsure at all n locations
tgtagccattagaagagaatgagcatgtgattgttatttgactgttaatgttagtcagntcggcaaattgattgtgaaggaatgcattaaccgtatctcagtgagagtgtgctccttaaatcttgagagaaacaactatcatttagtactgatttttgcgtgaatctctgaagtatgggctgaatgcatgaaattgacgatgatgaaggccatgtttgattgtgatagctccttaaccaaaaagtggaccgtgtgcttgaatgaattatccattgtacccactttgagctgaatgaattattgattgattggaccctgagcctatacagtgttatctcctgctaccttgactttaggttgttgagagcatctttacaggaagcatggttcaaacaa

SEQ ID NO: 67290 - DNA, 425 bp, Glycine max
  unsure (1)..(425): unsure at all n locations
agcttaattctctcttgatgtgtggattagtgttgtgaaaaccttttgaaccgtatatatatgactnggatgagtgtgtctttcttgatgtgtaaacacatgactacttaactccctttattntgtgtgtattcgtgaatgtagttattgaagtttataattccttaatacatccttagtgactgtttaattctttattcttatatgtatgttatgtacttggtataggaaccttataattctatgtatgcttgcaatatggtgttttgccttaattgaatagataaagggtgtcacacgggactcatacgacttgcattcatccaacttcgatccatgtaattaatagctctgtgatagtcacaaagttattctatgcatgaaaacctcactttnttcattaaaggtgtgactctatctcattc

SEQ ID NO: 67291 - DNA, 446 bp, Glycine max
  unsure (1)..(446): unsure at all n locations
tgatcaagtagcatagtgatatgttggatagtatttatattattacttgtcaaaatgctatcgtcaacataaacaagaatagttgtgatattgttattagtagagtacaagaaaagataatgatcagctgaagattgtcagaatccatgggaggggagaaaggaagaaagtcgagtgaaccactagtgactggcttgtttgagcccatataatgaacgttgaagacgacaaacaagattaggattatccacggcaagacctttaggaagatgcatgtagacctcttcgttaagatctccatgaaggaaagcgttgttcacatctagttgccgtaaatgccagttattaagggcagctagagcaagaagtaaacgcacagctagtgagtttgctacggnggagaaggggtctagaaagtccaaaccttccatttgagtatacccttt

SEQ ID NO: 67292 - DNA, 227 bp, Glycine max
atctatagcactgggatgctctttatgtatcatgttgctcatggcgttgctcactctatctctaacgaatgtccccttattgtctttgacgacgccaaactttcatctctaacaatctcccaacttttggctttgatgatgccaaactttatctatgacatagagtgcattatagagttcttgagatggaatgcacaacatgatcttagacacttaaaagaaagaat

SEQ ID NO: 67293 - DNA, 428 bp, Glycine max
  unsure (1)..(428): unsure at all n locations
nntgcggattggtcttcgctgtgcgaaatgatcatttgggtctataaagatggcaaattgatcatcacgctntgataaatgcaaaaaaattggggcaaatgaagagggtgagaatgagggagaaactcatgctgtgactgccattcctatacgaccaagtttcccaccaacccaacaatgtcattactcagccaataataacccttctccttacccaccacccagttatccacaaaggccatccctaaatcaaccacaaaacccacctaccacacaaccaatgctaaacaccgtctttagcacaaaccataacaccaacgaaggaaggaattntgcagcgaaaaagcctatangaattaccctaattctggtgccctatgatgacttgctcccatatccactcaataattcaatggtagccataaccc

SEQ ID NO: 67294 - DNA, 95 bp, Glycine max
gaccattatgtgtgactcacctgatacgacgaccagaggccactgcacttgaatatcaagctcgtggtggattgcatagggaacatcttccgctg

SEQ ID NO: 67295 - DNA, 444 bp, Glycine max
  unsure (1)..(444): unsure at all n locations
cactaagacaaccaagcttgaggaatctataagcaagttgaaaaccagtattccaaaatgtctttcactttctagacatgctaagcacaagagtcntgtggactaatcctccactaacaatgctaagctcgactgtctagacaacaagtgctttctagttaattaacgattggacatattatgtaactgcctttcagtgtcattccttatgcgattattattgcttgcatggagagtatgacatgtaccatgtttaaatgctattgatgagataagtgagttattgtttttcaaataactacaatattgcaatgattatgtggatctttgtgaacaagttttatcttgatgtggatcatagaataaatggtgtgatactatttaagcgatggagtaatatctcgcgagaatttctactcgtctaacaactgttaaagggctcta

SEQ ID NO: 67296 - DNA, 404 bp, Glycine max
acaccaatattaattgtgtttaatatatcgacggtattctacatgaaagataatcttatttaaactggataaataagataattataagtgataaaactctgtctccaaatatttaacgtaattatatatgctagactaattaatctaaaataactttgcatgattaacatactcagtgctataacactaatagtttggtaataactaattcattgataaatattataaaaatcatcaatattctgagaagtattagaataaactctacttccgattagaataaaattaattagatgcgaacctattaacgaaatgctttaacttcaccaaatatgtgaatatgaaagcaaagggtagatggcagaagaaagagcacgataaataccatgggaccgtggcatttg

SEQ ID NO: 67297 - DNA, 452 bp, Glycine max
  unsure (1)..(452): unsure at all n locations
ctaagcttattaagaggcttcctctagaagcttcctcgtgtcttctttgataagctttctcaagaggcttctttgagaagctagatccttatctatccacacccctctattaactaaattaacttccttaaaaataattacagatgaaaataacgcaacaaataatcaaacatcaaacataattactaataatatatagatatatatatcagggtgttacaccgtgtggtgttagctggaatatggatgccaaagtggcaagcgcatccgccatctgattttcctctcggggaacatgatggaaggagatctcatcanaggaaccagccaactccttgatataggcttggtagggtatcaacttggggtctctagtttcccattcccctctcaagtggtggatcaccagtgctaagtccccgtacaccttgagtagctggacattggagtca

SEQ ID NO: 67298 - DNA, 435 bp, Glycine max
cttcatccatctcccaagatggtccattgaagaatataagtgaatttatataacaacaaacatgaagacaaagggagtattgtcaatctgtttcttagattcaagagttttttattggcaagtattgacttttaaactaacgaaaaaattatcttccttctgtcttttataaatgacaacataatgaaaaaaaaaaatataagattttagagctacactgttataaaaattaaaaacacaactatttgcagtttaccaagtaacatatgtgtatgtgtaattaagagttaaaacttacaacagcaacaactacttgttcttcttctggaagatcttcaacaaaaatagttcccttcttagaaggcttcgcaacttcatcagttgtacccatcctgcattgtaacaggaaattatagaagaatcaagatcacatag

SEQ ID NO: 67299 - DNA, 425 bp, Glycine max
  unsure (1)..(425): unsure at all n locations
tcaacttacagtgagtgattcatgcttagcgccactacctgcgctaatcacacttccaatgattcaaaacagaatgatgttggcgcttagtgcatcctttcccgctaagcatagcttgaaagctcaacttacagaatgaatctgcggcttatcgcaggatggcgcgctcagcgcagctataataaattttcacagagaggaagtggtgcttagtgcatcatccacactaagcccactacttaaggtgcaacttatagtgaagatgttgggcttagtgcagcgatgtgcgcttatctaaaccattcagccaatcaatcaggggtctttgccctattgcgagcaagctcggtttaacgcgtgaagagatggcgctaancacaaggtttgcgcttatcggataagcaatctgataattttctggagta

SEQ ID NO: 67300 - DNA, 440 bp, Glycine max
  unsure (1)..(440): unsure at all n locations
agcntgtgtttgaggaccgattatattcatttatttatttaatttgaaagaatttgattntgtggtaaaatatgtgaattcaaacaagtcggagacccaatatggtgttctcaaaatttactcacactttattaaaatactaccaagcaagtcagagattcagcatggagtatgcagaacgtgaaaaaggagaatttttaccttttttgtcttattttattttattttgttaaagtcaaagagttgactntaaataacaattttaattgtatttcggacttcacaaaaacgagctaggcccaacatgaaagagggtgcatgtgtaaaaaaggtgcaaatagtggttttcatattatttcaaaactcacaaaaacgggcttggcctgaaatgaaaaaaggtgcatagcttanaaacagggtggatttnttttttttcattt

SEQ ID NO: 67301 - DNA, 455 bp, Glycine max
  unsure (1)..(455): unsure at all n locations
ctctaaatntaaaatatgcaacaaacattgccatgaaggtacatgttgatgattcatggctatgcatggcatcgaagatttggccacttcaacatacatgccttgaagttgttacatgagaagaacatgatgagagatcttccaagcataaaggagaacaatgaagtgtgtgaaggatgtctccttggtaagcaacaccgatttcctttctcaacaagcgaagcatggagagtgaaagatctattagagctgatacatacggacgtttgtggaccaatgaggacgccatcacatgagaacaataggtacttcatactcttcattgatgacttctctagaatgacatgggtatattntctaaaagaaaaatcagaagtctttggagtattcaaaaagttcacagcccttgcttataatcaaagtggaaaacagataaaagtactaagaagtgatcg

SEQ ID NO: 67302 - DNA, 494 bp, Glycine max
  unsure (1)..(494): unsure at all n locations
ggattgacacatctaggatcatggtgtacccatcacatgtggtactacgtgcgcggctggcgatggtgcacaacaattctctacatccacaaatcacgtataaaaccaccatcccctgttgcctacctccaactgagctcacgtactcccacgtagcccatatcctcgtttctctcaacaccgggtccccatcaatcctcccaagcttccccaacatccaggtaatgcaacatccaaatcatcacatactaacaaaccaagcaaaacagggcataggcagataactctgcccaaaactcaaaccaaaatcacagctttttctcacttaaagaccccagtaacatttccttcgttccaattcgttaaccgttggatcgactctcaatatttactggaagtctctagtacataagtctacattntgaccgttgggatcttctagtaaacatccagaactcattctgtactactctntccacaaccagcanatacat

SEQ ID NO: 67303 - DNA, 454 bp, Glycine max
  unsure (1)..(454): unsure at all n locations
atctgccctggaaggacttggcaactgctntcattatgtcttaccagtataatacggacatggctcccgatcggaaccagcttcagggtatgactaaacgagagcatgagtccattaaggaatatgcccaaagatggagagatctcgcagcccaagtcgtaccgcccatgacggagagggagatgatcacaattatggtagatacgttacccacgttctactatgaaaagctgataggctacatgccaactaactttgcggatctcgtcttcgccggagaaaggattgaatccggactatgaaaaggcaagtttgaatatgctgccaatatggcccccaacaacgacagaagagccccagtagtgggcgcgaggaataaggaaggagatgcccacgcggtcaccactgccccaacatggatgaaagcaccccanaatatccaaagctcatacca

SEQ ID NO: 67304 - DNA, 452 bp, Glycine max
  unsure (1)..(452): unsure at all n locations
nagcttgaaagccttggagtgtacgtctctagtggaagcatcgatgtattctgtatcattactaagtactcgttgtgtcagtgcggttcaattttatgttctggattattacttatcattcaagcctttggtcctggtgaaggtgccattcctatattcggtctgcgtatatgtgtaaggtgtggatgcatgtttaagatgactgtaatcactctattttatgtttatagaccgtgcttaccgtgaaccgtatttggatgttatatggaataaaagctaatgctaaaagaatggaacgtgctgaattgagaaataatttagatatttatgtttcaaacaaacaatagtggatgacattattttgttgggggagggaataattctggtaggcttttgagttgagcctaaatattaataggtgggtttaatttacattcagatgtctaccttat

SEQ ID NO: 67305 - DNA, 433 bp, Glycine max
  unsure (1)..(433): unsure at all n locations
gctcgctctanattacattgatgttggtatttatgggaggaggttgtatgtcatttttgttttaattttagtgtcccgctggtaaaactaactttccaaatgtttgccttcgcaagaaatggccccgaggaagcttgcctcatagaggtccaggaaggacaaggcagccgaaggaactagttccgctccggagtatgatagtcaccgctttaggagtgctgtacaccatcagcgcttcgatgccatcaagggatggtcgtttctccgggagcgacgcgtccagctcatggacgacgagtattctgatttccatgaggaaatatggcgtttgcggtgggcaccactggttacttctatggccaagcttgatccagaaatagtccttgagttttatgccaatgcttggccaacagaggaaggcgtgcgtgacatg

SEQ ID NO: 67306 - DNA, 470 bp, Glycine max
  unsure (1)..(470): unsure at all n locations
agcttgnggagctgcgttgaggcttaccaaggatgattcttagaatttgtgaacctgtgacactcaccaagtattaagcttgtgtttaacgaaccttgcgtgtgtagcgcacgtgcaatgctcttgtatacatgttgtttggggtataccatgtactgtagtcatagtgttgtgctattccatacgtgtcactcgcggagtgatacgtacaagagacatggtgctcttgaatacatggcacttatgaagtggcacatactgaacactcggtgtcgtgctattgcatacatggcacgtatgaagtggcccgtactggagacatggtgctcttgcatacatggcacttatgaagtggcattacagaagacgtggtgttgtgctcttgcatacatgacacttatgaagtgcacatactggaggcttggtgtcctgctcttgcatacatggcacttataaagtggcacatactg

SEQ ID NO: 67307 - DNA, 448 bp, Glycine max
attgtgtgcaatacacaattcccggtacactcacaacaaattggtgtatcagaaaggcggaatagaactttaatggatatgattaggagtatgttaatcaattagactttatccgtatccttgtggatgtataccttgaaaactgccatgtagttgttgaacaggattcctagtaaggtagttccaaagacaccttttgagctgtagacaaataggatacctagtataaggcacctgcatgtttggggttgccaggcagaaataaggatttataatccgcaagaaagaaaattggatgcaagaacaatcagtggatatttcattggttatccagaaaagtcaaaggggtatatgttttattgtcctaatcatagtatgagaattatcgaaactggaaatgcaaggttcattgaaaacggtaaaatcagtgggagtacagttctacgag

SEQ ID NO: 67308 - DNA, 450 bp, Glycine max
  unsure (1)..(450): unsure at all n locations
ccaatcaacatgtaagataatgccaaanagagatctcgattggtttgtttgcaaattgaagaatgctgagtccccagtcctccacaacatacaatacaacagagaaatagtatcttaaagtcttccttgtttgtttgtttctatctttcttgggttttctcaatgtatgagagatttcatcttcatcaatgataagtgatgctcaaagattttactgaaaaacaataattaaagaaaagatctctaaatatactcttataccttttccacattatctatatttgagaaatccaatcttctatgctttccccaatagccccttacacttttacgattagttgttaaacaaatctttcttggtcatttanggaatatccaatcttcagaactctcaatagaataacacagtgaaacactgaatccagattttgagtgaatcccctgatactg

SEQ ID NO: 67309 - DNA, 381 bp, Glycine max
ctaataacctcaccgagtaatgacgctctgtccatctatatgttcaaaagtaaagagaagagatgttcacaacttcaaacagtgaatgcattctctaaaatggttatttccactgacatctgagcataaatcatactataagcacaatttcgagttcctctcgcccccttttaggaaagaaaactcaaattgagtcctcgacaatcaaatgcgacaatgcaactaccaactagcatagttacataccaaaatttcaagttccaactattcattcctacacaaagtgagatgggaatggaagcagatgagagtgctaatgatataactgctacaaaatactccataaggcatagctctggtgagatgaatgcaacacgatat

SEQ ID NO: 67310 - DNA, 447 bp, Glycine max
  unsure (1)..(447): unsure at all n locations
tctggtggcgtcttggctcaatcttaataaagcgttcttggagacatgcttatttcaaattcataagcaatntgtcagacgctatttatgtcatggcagcagtgaaagttttcaagtggtgtcacagaggatagctggtaataatattntagtcttcatatatatacttcattttcctttatgataaatagaagtcacaaacctttgtttacaactagaccgtgtttttctcttttgttttgaccttcagtcaaaaattaataaaaaaacaattattcatcaacacgaaccataatttactatcacactgcagataaacaagtcgtaatccgcgtttcttcttataagaagactagctagaacatatatgatatattcttgaatgaagctagtttaactaaagatgagcaagcggttatatgataaccgaaaagaaaagtttaacgt

SEQ ID NO: 67311 - DNA, 416 bp, Glycine max
  unsure (1)..(416): unsure at all n locations
agagtnatattgacatatataactaattctgcatattattaagttttataacaaccttgttatgccaacaatgtttaatctttaatctttaacaattggttttgggtgtaggtacaagtattttactcaaacttaggaaggtaaggcttcttttagcctacaatgtatttgactcaacactcttgtataatatttcactgccatcatcacactcagtgcttttgttagtgaacatctttcgaggtatgtatctctttgtgatactttagggcttattacatgtttgatgacatatgagtattattttatatcaagttatgtgccgtatcagtgaaccttaattgtttatttgagattcatacaatgagtaataatgatagcttacataaatcacttgacttgatcttgaatcgtct

SEQ ID NO: 67312 - DNA, 423 bp, Glycine max
  unsure (1)..(423): unsure at all n locations
atgctgaagcnttaggattatggtgtacccatcacatgttgtatctaggtggcggtcgggcgatggtgcacaacaattctccacatccacgaatcacgtataaaaccaccatcctctgttgcctacctccaactgagctcacgtactcccacgtagcccatatactcgtttctctcaacaccgggtccccatcaatcctcccaagcttcctcgacatccaggtaatgcaacatccaaatcatcacaaactaacataccaagcaaacagggcataggcagaaaactctgcccaaaactcagaccaaaatcacagctttttttcacttaagaccccagaaacatttcttcgtccaattctgtaccgtggatccactccatatttactggaagctctagacataatctaattttgacgtgggatct

SEQ ID NO: 67313 - DNA, 457 bp, Glycine max
  unsure (1)..(457): unsure at all n locations
cnccagatctgatcatggaaggacttggcaactgctttcattatgtcttaccagtacaatacggacatggctcccgatcggaaccagcttcagggtatgactaaacgagagcatgagtccattaaggaatatgcccaaagatggagagatctcgcagcccaagtcgtaccgcccatgacggagagggagatgatcacaattatggtagatacgttacccacgttctactatgaaaagctgataggctacatgccagctaactatgcggatctcgtcttcgccggagaaaggattgaatccggactatgaaaaggcaagtttgaatatgctgccaatatggcccccaacaacgacagaagagccccagtattgggcgcgaggaaaaaagaaggagatgcccacgcggtcaccacttgcccaacatggatgatagcaccccaaaatattcaaagctcat

SEQ ID NO: 67314 - DNA, 448 bp, Glycine max
gggatatctggcagcagagaaacaagtaggtgataactaagaagattgaaatgtgtttcctcaatgatctcctccccagctgttaccaccgtcaaccgtgccggtgccggcatggttgctccattcaccggcctcaaatccatggctggcttccccacgaggaagaccaacaatgacattacctccattgctagcaacggtggaagagtacaatgcatgcaggtaagacaactccacacatatatacacacaagaggcaccaaacagttaaaattcatcttacacatttatatatgctccagaatgttacttaatttaacatggtagtcataggttacttaaattaacatgttagtcataggaaaatgtgcacatgtgcatgtttggtaactaacttttcatgcaaattactaggtgtggccaccaattggcaagaagaagtcgagac

SEQ ID NO: 67315 - DNA, 430 bp, Glycine max
  unsure (1)..(430): unsure at all n locations
agcttgntcacaaccataggagttataaaatatattatcataacacggagtaatcaatatttttacaaaggaattatgtaaaagaaaaatggagggtttgctcgcctggcgagcatgtctggcagaagttttttaaaaagaggggggtgaagccatttattcaccccaaaatcttccccaactttcaaaaacacagcagctcacgggattcacgaagttagcagcccttagtcacacatttttgcattcttgcttccgtttttgcactcttcgttcacccctacaagtaagtgccactttcctttgatctttggctttacattgaagtattttagtgctctaattacttattttttttgcaaattcgtaagcaacttatgtgtgaattcatggntgtttgcttgaattgggggctgtangggatggttgt

SEQ ID NO: 67316 - DNA, 382 bp, Glycine max
gactgttcacagttaatttggaatatctacggtcaagggcactgaggatcgattaccgaaacatcgcactctattacaacctttcgaatatatttggaacgttgtaaattcagattgaaaactttttcaaactctcttagctaatgcgaatcaactacaacaatatggtaatcgattagcaaagagtaaaagctctctggtaaagcttttgtcacaaactcatgtgctattcacagatgcgaagaaacttttttatcttgattgagacttctcttcattctcgaatcttgagtcttgaatcttagatctgattcttgagatcgtaagtcttgaatcttgatcttgactcttgagaacatgagacttgattcttgagtcttga

SEQ ID NO: 67317 - DNA, 246 bp, Glycine max
aaagacgggggaccaactgagaaaaagggagagtgacttgatgtgctacaaacttcatctaagtcacagtgtccatctcttttaactagtcctctgaaactttgaaacttctgaagctttgaaactctgaactcttgaaacttctggatgtactactcaccaccttatactactactctggagctctgaaattcaaaactaactactccacattttaatctactactctaaagagactgactactc

SEQ ID NO: 67318 - DNA, 435 bp, Glycine max
  unsure (1)..(435): unsure at all n locations
tgcttgtggggcttctatggaggctggatctttggtcttcaatgttgttntttaatggtgattttccaccatggagatgcagcggaagacataggacaagatgtgagaggaggcgccatccattagggaataagccatggaagaaggagcttcaccaccaagatgatccttggataagaagcttggagaggatgcttcaatggaggaaaataaagagggagggaaagagagaggggggagcacaatattgaaggaataaaagagggagagaagcgcaactctgaagtatgtctaacaagactctcattcatcaaagttacaacaagtgttacacatgattctatttatagactaggtagctttcttgagaagctttttgagacactttttgaggnctttttgacacacttgcttggagcagagcttagctcacac

SEQ ID NO: 67319 - DNA, 443 bp, Glycine max
  unsure (1)..(443): unsure at all n locations
ctgatcctatcatccaacccaatgaatgagggtatacctctgaatgcacttatcctgcattctgtccaatgccacaaccaaagggtaactaattgtaaaccctagctccagccattgcaacattttactagctcaaccaatcaatacacgaatagagggcaatttcacacattaatacaaaagagtatatatatatcaccaagaaggatatggatgtgagtgattattgtgtcttgtttgttaaggaataatatttatggtgatggctccacccaagcttcttttaaattagtataggagcacttcaaagtcatagcccacttgcactccatgcttttagtaattcaatcatagagcaccaatttttaagctgttgggtgaagaaggaaaagacattgcttcctcctattatgctntgtattcatctttttccccatgtcttt

SEQ ID NO: 67320 - DNA, 440 bp, Glycine max
  unsure (1)..(440): unsure at all n locations
caacaacacctgttgttacaaaagacagtgttgttttagagtcttattcgcatgtaaggatgtaaattccttctatccatctgaaataaatggcttggtgttcttatcagaaacctaatcattaagaaacaaactttgaactttctccttataccaaaccggaatctcagttgtaacaactcccaacaccatatatctctaatgcataaactcacgttctgtatatgaatatccacatctcccagttgattacacacaatagctcttgatgaccagcggtcataacaaatagatagagcaccttgtcctactcgaaatttgaatcctggttccagagattctgcagcttccatcnaagacatccaagtgcacgatgctcctggaaactgacgactacgaacgatggattcctcatgaagatactttgcattaaccacttg

SEQ ID NO: 67321 - DNA, 450 bp, Glycine max
tgcctcaagatgcagtagtggggcgtgcttagcgagatggtctctcttagtgcaattccaaacccgagaaggatttgggcttagcgggtatgacccgctgggcccaattaacatgagggtccagacagagagggaattgcgcttagcgcactggtgcgcttagcgagatgactcgcttagcctaattccaaaagataaaattccagagaagtttttaggcttagcgcaacggtttcacttagcgagacccttttcaaccaatgggtataggttgacgcgcttagctcgagtgatagcttgctcaacgcatgcatgatgattcgcttagcgcacaggacacgctgagtgagtggatgagtgaaaaaaaattctaagttatttctcatccacagcttcaaagaagctttaacaaccccatatgtctatgcaaaacatgttgtgacttactca

SEQ ID NO: 67322 - DNA, 419 bp, Glycine max
  unsure (1)..(419): unsure at all n locations
cgcttgacaccttgagtgttcaagtgaccaaatcttcaatgctatatccatgaatcatcaattggtgttctcatggcaatgttagtattagttgtatacttgaagcttattggaaaacttctatttccattntaactctggaaatctctctcctctttatattcttttatcatagatagcatggttatcaaactctcgagttaactcgctaactcttatgagtntacgagtccacttatcctctgcgagttgactcttgagtaaactcttttttagtagactttcggtaactctataactctaagaaactcagtaactcttgagttactactgagtcacaagttaccaagtaaaaaactagaccaaatatagccattttttaatgttttttttacattcacatccttcattaacgtgta

SEQ ID NO: 67323 - DNA, 443 bp, Glycine max
  unsure (1)..(443): unsure at all n locations
cgtagaatggctagacataatacatggcggaggttggtttggtttaatgataaaatggatgccccacattatttccatgacacaaatgcaaagatgatgatttggaaattttatgcaaaactggtcatgcatgcacctatgcggacactcaagtgtcaaacttttatggtcatgtgatgctagggctcaggattcatttcctctattttaaatcaacccaatgtttccaaaatatgttcttttatcaatttgtgcattcatccgagtccatttcgggcgtccggggaaatttcacagcattcacccttcaggtgtagacacattttccaaaaattggttatgatcaatgaatntttcaaagaaaagttggaagtcatctcttttaaaagcatgttggcttttcagctagacaacttatttttctttnttctctnttttacctt

SEQ ID NO: 67324 - DNA, 477 bp, Glycine max
  unsure (1)..(477): unsure at all n locations
agccttatctctgccactctgcagttaccgnntaatgttaagttgtaacaagtgttccacacaataacccatgttttggtcctctagcaatctcctattacgaagacaagaatataaaagctcctatatagtcatcaacagtccctgtctgcttcaaatctttcatctctacataaggattttcaacatttctccctccataccttgcaacaaggctaccttataattgtcctaagccaaaggtgcctcaattactcttatgtattgtctggattgatggaattacaaaacgaaaaaaataatttattttaactgtttggtacagtaaaaagagaatgaatagaaattggctaaattactaagcataaaactctaccgcttaaatattataatattatcattataataatacaaaaagcacaaccgaagtntgcttctacagggcctgtccatctctctctctctatctctctgtct

SEQ ID NO: 67325 - DNA, 477 bp, Glycine max
  unsure (1)..(477): unsure at all n locations
taacactaagctagctaccacacctttctaatagctaagttcacctccttgagatgagaagctagatcntancttccaccccctataatagctaagctcacccccatgacaaaaaacatgaaaatacaaaaaaaaagtccttactacaaagactactcaaaatgccccgaaatacaaggctaaaaccctatactactagaatggccaaaatacaaggcccaaacgaaggaaaaacgtattctaatatttacaaagaagagtggatccaaccttgacccatgggctcaaaaatctaccctaaggttcatgagaaccctagggccttctttagagcttagctacacacacctttctaatagctaagctcacctccttgagatgagaagctagagcttagctacaaaccccctataaaagctaagctcaccctcatgaaataaatacatgataatacaaaaaattccctactacaaagac

SEQ ID NO: 67326 - DNA, 466 bp, Glycine max
  unsure (1)..(466): unsure at all n locations
cgcttggagcctgtgacgtactcgaaagactggacttcatactctgataaggttactctgtctgcctcctaaaaatttgatctgtttttaaaatattgttgtgaatatatctccttttcttttgctgcttggtctgcaaaaatcttatactcgttctctttgtaatcctttacttctaataaaaagttgtttcaaaaacaaaagttgtatgcacataatttctcatgtactgaagtaagttgtatttgttaatctctagtacgctccttttccttattatcacccctntatcccacatatatatatatgtcccttgtattctaattaccaagcaggatatatttatgacaaattacattatcagacataataatgatgatgataattaacttatcagtaacagatgtatagaaatttacttaaagtcagattttccactagatatgagtatttatgttttcctgat

SEQ ID NO: 67327 - DNA, 476 bp, Glycine max
  unsure (1)..(476): unsure at all n locations
cactcaagcttcgggtgtgcaacatcttctccagtgtgatacaataggagacaagagacaattatttcttanaaagttgcattatcatataaaagtaggagttagcgaataaatcaatattaatttacaaaagtaaataatatctttagtgaataatgtatacttgcacaaagtgatttccattgataaatccaattgcaataagagaagatgtagctagcgtgagactcctatgtggaaagtcatgaaataactagaaaagttaggatagttaggttgtgaatgcatattagtgtcatcaccgcctatattttcatcatcatcatccccatatcaatattattaggctcgactccatataaaaggaaggattggtaaaagaaatcttgactntcatcatctatattttttccatctaggtggcattgtaacttcatcaaatatatatgtatttcaatccattgacttatacaatc

SEQ ID NO: 67328 - DNA, 408 bp, Glycine max
ctgtggatttggtcttgccagtgaaggagtcaagtgagctcttattaatacgcatatctacttattctacttggacgaatgaaaaaactacggcacattgaaatggcgagaatgagggagaagcccatgttgtgactgccattcctatacagtcaagtttcccaccaacccaacaatgtcgtaactcagtcaataacaaccttttacttacccatcgcgcagttattcacataagccatccctaagatcaaccacgaaacctacctaccgcactttcatgacaaacaccacctttagcggaaccaaacaccaacacaacatgaatttgcacgagaagcctgtaaattcacccaattccagtgcctatgctgcatgctccatatcattgaaaaccaagggagcataccc

SEQ ID NO: 67329 - DNA, 293 bp, Glycine max
  unsure (1)..(293): unsure at all n locations
caatgtgtgacaattacacactgttctagttgattatgattcgatgatgtagactactgatatccaactatctctatgaaattatatgtactagggtatctacatacatcaccaacacacagactcagtcttgtcattagcttatcccacacaaatgtatacctcaaaggtaatcgctcacgctactatccatcacaatggcataatgggtgattctgcttatgaagngcagcttccatccatagaaacgcgcatattacatgtgaacctgatgtcacatcgtattaataagc

SEQ ID NO: 67330 - DNA, 455 bp, Glycine max
  unsure (1)..(455): unsure at all n locations
gctcgatgtgttatactgttattgttgtccattcctctattgagctctatctgttccaaatggatttcaaagtaataatctttatgtatgcagaatattaatggtattttatgataggcttgaatttgtgttgataatcataattacattgtgttttttagggtcaaagaatggcttccccatctattcctgcaactgttaatgaggtcaacacggtgaatgcacatgtagaaaataacatacaacatggtgaaaaagacaaaggtcaagtcaatgaaaatgtcatctagaggaagaggcaaaaaacaccaacagtttggaatgattntgaggaaatcgaacttcttggaggtttaaagatagttgtttgcaaatattgcaaagagaaccttggtattggtggtaaaggggccaacactaaccatttgaaaagacataattgtatggaaaagatg

SEQ ID NO: 67331 - DNA, 445 bp, Glycine max
  unsure (1)..(445): unsure at all n locations
agcttcaaccaaggggagatggaccatttcaagtgcttgaaagaatcaatgacaatgcttacaaagntgagctgcccggtgagtataatgttagttccaccttcaatgtctctgatttatctctttttgatgcagatggagaatccgatttgaggacaaatccttctcaagagggagagaatgatgaggacatgaccaagagcaagggcaaggatccacttgaaggacttggaggacctattgatgatgacatgaccaagagcaagggcaaggatccacttgaaggacttggaggacctatgacaagggctatagcaaggaaagccaaggaagctcttcaacaagtgctgtccatactatttgaatacaagcccaagtttcaggagaaaagtccaatgttgtgagttgtatcatggcccanatggaggactaaatgacaccactt

SEQ ID NO: 67332 - DNA, 435 bp, Glycine max
  unsure (1)..(435): unsure at all n locations
tcctctgccgtannaaagatattatcggccagtggttgtaaaaatattgcgcattgtcggctgaaaaatatccgtcggggctatttaactaccgatgtcggctattgttttttctattccacccctgaattatatttggatgatgcctattaggaaatgttcggtcggggtcatccggtcatgcttctttttgaggcctcgatctgtcgtctttcctagccggccgacgtcggctagcatttttttcgatcaatatctgtgtgaatcatgtttttttttgccaaggagggctaatgttttcgtggccgacaaaatgagaacatgccagtgtcggccgaaacacaatcccgcacgaaaaaccctagccgacctacattgtaattntttcaggcaataccgagcgacaaaacttcgtctaccatgaagaaatattat

SEQ ID NO: 67333 - DNA, 423 bp, Glycine max
tgactaacacctaacgtacactcattgttaatgaggatgcgacctttcagtaacttgcgagagttgaaaagacagccctaaaatctatgccacaatgtaacccccatcaaaccatattactcgtctttaaggcgtaccctctcatatagtgacatgtgtaaaaaggcaacctgcatgcataacacgcgctcaccttgagtaaaatgaaatgcatcttttcaaagcactatctaacagttagaagtgtcaaaatggtcaaatacatggacctctcataatacaatcaaacacctgtctctacttgaagggacgtaaagcacactcaccctatacaatttggtaccttagcccaacaatgctcgtcaggttggggcttgctacctatgaccttaaattgcaaggtacaacttcacatgagtatct

SEQ ID NO: 67334 - DNA, 457 bp, Glycine max
  unsure (1)..(457): unsure at all n locations
tcatcaaggtaaggggaacattgtcacttcttgaaccctaaccttgttgtcttttaaagctaggcttcattacatgttgttgagatgtttaaaatttcgtatatgctaccttgaccggaattggacgatatgttgtttttatggaagttttaagtttaaaaatgagttctaagtgttaaaacttagggttaaccttaaatttcacttaaatcggagttttctagcaaaagttatgaacacaactagttttaaggatattttgtaggattaaatctgtcatgaaataaaatggtggttatggatgtatggactgtttttcttaaagagttgacttcaaaaatgagtctgttaggtgtgaaaatatagggtagcaagtaaaatttatgaaaaaccaattttcgaaacacttacaaatttgaagacangtttaacagtgaaactttgtgaaacaaggcac

SEQ ID NO: 67335 - DNA, 381 bp, Glycine max
  unsure (1)..(381): unsure at all n locations
atcattcatcagctgtaggtacaaaatgttgtccacattcaaaggacagccgaatttcaatatgaaaggccaaaatcattatgatgaactatagcattcatatcttttgtatatactcgaaatacaaaaaaaaatgggtgatctatttgttccatggaacacaaatngaagactggacgtgttgcaccataatgtttccagaatgttctttgagaatatactgaacaagacatatgggaacaaccaatcttatggaatacacccaacatttaaacaagctgtctacatgataaatataaccgaggtgtgaaaatattatcaccaggataaacaccacctctgcataacagtttccaaattcaaccattgctattctacttt

SEQ ID NO: 67336 - DNA, 419 bp, Glycine max
  unsure (1)..(419): unsure at all n locations
actaagccctgaacaatatactagccctatcattaactgactctgcgctagtttgtcacgttcatcaaagnactttcgacacctactgtacgttgatttgaccaacgctgctatgggaatattgcgacaatctttcataacctttgtgatacattctgagagggtggttgtcatgtggtcatatcaacgtccttctttatcataagccatcgtccatttttcctttgaaatgcgatcaatccatgttgctatggctggactcagttcacgaaatttttctaaattttgataaaaaatgtgcttgcaacgagtgtaagctgcataaaattagtatgaataacgcggtaagtgtattgaaaggtaataaacgggacatcatatttaaatttacccaattcttgactttatttgttagctta

SEQ ID NO: 67337 - DNA, 423 bp, Glycine max
  unsure (1)..(423): unsure at all n locations
ggctcgagaactcaaagtggtggtcgtgctcatgttttggtacctcgagagctcggatgttgcacaatagaggtccatttgaagctggcgaagttggtgttggaggagcgatatgactcctacacaaccatagacagggtcacggagcctcatctcagcttcataagcaagagaattgacagcatcttcacgttggtgaggatgcaagtcgttgagaagctttgtgacattgcttgccccaaagattctattgaacatttgcaaactttgaggctggtcagggggaaaatatggtgcaaatgcacactcgggttggcatttgcgacgcaagaacttgcatgctgcacatggngaatntgaagatgccatagtagtagtcacttagtactttttttgtgctactcttcttcctagctatagcta

SEQ ID NO: 67338 - DNA, 454 bp, Glycine max
  unsure (1)..(454): unsure at all n locations
tgtatnntaaaatgttntanaaatacttttaattaatatttgaatttttattcctttattaaaatatatgtgaggggtagagggtgtcacatatgggatgtgagtccaacgttaatgtatgaatcatacggatcaagttcgtccgtacaaaccatatggatcaacttgatccgtatgtttaaattatacttacgaatcaagttcatcctacaaaccatagggattaaccacaaactcaagtaccttcgacgtaggttatatttgaaattaaccaaaaatactaagtgcacaagcaataaaattggtgcgcctagaagcacccattgtatagttattatgggctatgggccatgagctgcgtagagagcccaaaaggggttcttaataaaagggaatttgattatttcatagtcctccagtttgttggctcaatatgtttgaaccattttataac

SEQ ID NO: 67339 - DNA, 333 bp, Glycine max
  unsure (1)..(333): unsure at all n locations
ngcttaacatcagaccactgttagngtgctggtttctctatacatggacttgatggggcctatgcaagtcgaaagccttggaggaaagaggtatgcctatgatgtcgtggatgatttctccagattcacctgtgtcaactttatcagagagaaatcagacacctttgaagtatttcaagagttgagtctaccacttcaaagagaaaaagactgtgtcatcaagagatatatgagtgaccatggcagagagtttgaaaacagcataggtactgagttctgcacattctgaggtatcgctcatgagttctctgcagccctcgcacctcaacaaat

SEQ ID NO: 67340 - DNA, 436 bp, Glycine max
  unsure (1)..(436): unsure at all n locations
ccgtaatcgattacacatatactgttatcgattaccttagcagattttcataanatattctcaacaatcacatctttttatgtggttcttgaatggctatcaaaggcctatatatatgtgacttgagacacgaatttgcgaagagtttttcagaacaaaaaggtcttatcctcttaaaaagcaaaatcgttttattctcttacaaattccttggccaaaacacttgtgattcaataaggaattatttgagtgctcaaattgttcaatctatctctttcaagagagatttcttcttttcttcttcttcattctgaanagggattaagagaccgagggtctctcgttgtgaaagaattctaaacacnaaagaaggattgtccttgtgtatttagaacttgtaaaagggaattacaagatagtggaactctcaagcggg

SEQ ID NO: 67341 - DNA, 454 bp, Glycine max
  unsure (1)..(454): unsure at all n locations
aacactaagctctgaaatatctgccccatgtattcataatttttcatcatcttgggaataggaaagctatctttgattgtgatggcattcaaggccctgtaatctgtgcaaaatctccaagtgccatccttcttcttgataagaatgattggaggtgaaaaagggcttctgctangggcaataatcccttccttgagcatgtcagctatcattaattacttcaatctaatcctttcgtaccttcaaccaatgggattgaatgattgtgagttcttctatggggtaaacctgatggcacatcaaagactgttcaataaatgtaaagtatcatggccagttctggttccatatcatccggaatatctaataactgatcctgtggaccatccaacctttgagtattgtaaagtaaatagttctgcaatggcacgcgtatgctgcattcttctcgtgt

SEQ ID NO: 67342 - DNA, 471 bp, Glycine max
  unsure (1)..(471): unsure at all n locations
atccttgagtcacctgccgctgcaagctacacttgaatcgctcgacctcgagagatttatgtataacggatgttacatataatcatgtaaaaaatattcaaataacaattatagatagatggcgtgaaattcatgacctattcaatggtcttagtggatttgcgtggagtccagtgacgaagagatttgaggctgaagatgaggtttgggatgaactaataaaggtaaatgttgttaaacatttcctttatattcttctgttgcaaatggtgtattaaaatattattcatgtaggctaaaccatcggctgcaaaatggagagcttctcaagtgaggcattatgatcttcttgaagaactntatggttcatatcatgccacagaacacatgggatgtactccaaggcaaactcatcgaactatggacaaggagaatgtcaccattgactccaacgaaacgtcgagttcatct

SEQ ID NO: 67343 - DNA, 462 bp, Glycine max
  unsure (1)..(462): unsure at all n locations
gctcatcgaagatatataaaagaataaggagacagctagcgcgagacttcttagnntgtctctctgtattgtatannngaattcccattgtacaaagctacaaatgcaacaacaagatggatatagttgtagatgggatgtttcctttatccttgaacgtcggtgcgagctatttaatgccgaggatgagatgagataacgacactatataaggtggctgtctatattattatgtttcctcttgcatgcatgggtggcaatatgtggtgaccccattggaatggataaataaggagaatagtaatcattagccttgtgacttccatttttttatttttattttgtatcaacaaacgtcttttgaataggaaaagaaaaaaaaaacattgtcctactcgatcgcagttattgattaatttggtgatggctcggagcacataaaatttaataaagagaacaagc

SEQ ID NO: 67344 - DNA, 460 bp, Glycine max
  unsure (1)..(460): unsure at all n locations
cgattcttttatacatttctgattngatggcatgagatgaaatgcanagattgtttcttctgttagttgttatcaatgaatagattaaacacttgtgcttgagtgaaatagtagccatgagactgtggtttgagcaactttccttgatatctgtcttatgattaacttcatctaactgtgtagttcacattttgttctcctctttgtctagctgcatattctgtgtaaacaagtgataggtacactttgcttcatctttctcatcatgcaatcaattaattttgatgcatacacctttgtacataaacactgcatgttttaccacttgaggacaagtgagttgttctcttttgctngaggacaagcaaaactttaaatttgggcgagttgttagtcggtgaaaacgactaacttttgtgtatacaacttctgtatttngtatcaaacttctccaagctat

SEQ ID NO: 67345 - DNA, 471 bp, Glycine max
  unsure (1)..(471): unsure at all n locations
ctaagctcgcacaatgttcgaccagaatactggtttattccctcttccagattggtattacttgtttntatatgggagtggtcttaccggcaagcgcaccgggtcgccaagtaaattaatcaaaatggaatgaaccgagtatcgaacatagggaacttgctcatttagcaaagttttgttaagtaagcaggcatttgcaaacaaagattaatgattgtgaattaaagaaaaagtatgttctatcctaagtaaaagcaataaatgagaacaagtaagtgtgaaaacagatatctaaaggcgttgggtcctcctactgagtaagttgatgcaattaaagatgcttttctaattaaagatgttcctatgttctatgttgaggacanaaataccaaacaccgattcctccagagtttggactaatttaaatcaaacttcgttcgcagatccctcttgttgaacttagcctaattt

SEQ ID NO: 67346 - DNA, 477 bp, Glycine max
cgcttgcagcctgatttacttcagtatggaatctatcctttctaagatggagccaaacccagtcaccctcattaagaactagtctctttctttctctattgcctttaggcgaatacacctttgtttgattctctatatggatcttaaccctctcatgcatcttctatacaaattctgacctagattccccttctctatgtataaaagaagtgtccagtgggaggggaatgaggtctaacggtgttaggggattgaactcatagacaacctcaaaaggggactgcttggtggttctatgaaccctcctgttgtatgcaaattctacatgaggaagatactcatcccaagacttatggttgcctttcagacgagcccttaaaagggtggataaagacctattcactacctctgtttgcccatcagtttgtggatgacaagtgtgagagataagaagtttagttcctaactcaccccata

SEQ ID NO: 67347 - DNA, 301 bp, Glycine max
acactaagcttcagaatcaatgggccaactcttacacggaggtccgactcttgcgcatttttatatattacgctcgaaaaagaacatccgaagctctctagaaattcacatggtcataacttttaactcagatgtctgatcttggcgcataatatatcagcgacgctcgaaattgaacatcagacgctctctatggacctaccctttcactcggtggagagatacaggcgcatcatatatcgttacgctgaccatccacgatcgaaatctgcagcaatttaatggtcctcagtgatcactc

SEQ ID NO: 67348 - DNA, 478 bp, Glycine max
  unsure (1)..(478): unsure at all n locations
cgcttgangcctttggaggcngactctatcgaaattgncactgtctttctatgtaagtggacaatttatgatatatgctttatgtatgtctacaatatcgacaatgtaactcatgtttatctagcttcgggttagtgaatgttagagctatgtgcttaatacacaactctcacattgtaagttattggtgaattcaataaataatacttgttcatctgtatatgatttgtctctacatgtaaatataatgcacttgtgaatgcttacgcttgttcaataagaaacctataaatttaattcacaacttttctttagtactaattggttttgcttagtcgaaattcattaccaaaattaatgttgttatatattataataactgatctgttgcgtctgcatgaccgaagttgtatgttatatttgggttgatataaaaccacaccaattttttaaaacaatcatattcggtataaaaaat

SEQ ID NO: 67349 - DNA, 448 bp, Glycine max
  unsure (1)..(448): unsure at all n locations
cactaagcttgatgagtaatctcaaatctgccttggtcttcatttcttatcctttaacaagttcattnngcgtcttgatttaagcatgttcacgttggttttttgttacttggtgatatatgatttctatcaatactttttttgcatgtcattataactattatatttagatagttttgggacatcaattttaatggttcctcttgttgttgtcctatgttgtgtcattttttaattcatatttttactatgtttagcatatgtcttctcccttgaaaattagcgaaccaatagcatccactcgtacaaatgataatgaggtgaatgtacaagttcatgtagattcaactcaagttgaagctaacaatcaagaaaatgaacatgaagaaccaattgttgtgagaaagaggacaaaaacatcagttgtttggaatgatcttgatgaaat

SEQ ID NO: 67350 - DNA, 433 bp, Glycine max
  unsure (1)..(433): unsure at all n locations
tgggtctaaaaagaggcagatgtgatcatcatgtcttgataaatgcaaaaaatatgtggcacatgaagagggtgataatgagggagaaacccatgctgtgactgccattcttatacagccaagtttcccaccaacccaacaatgtcattactcagccaataacaaaccttcttcttacccaccacccaattatccacaaaggccatccctaaatcaaccacanagcctatctaccgcatttccaatgacgaacaccacctttagcacaaaccaaaacaccaaccaagaaatgaattgtgcagctgaaaagcctgtataattcaccccaattccggtgtcctatgctgacttgctcccatatctacttgataattcaatgtagccataaccctagccaaggttcatcaacctccatttcttcgagaatacgact

SEQ ID NO: 67351 - DNA, 470 bp, Glycine max
  unsure (1)..(470): unsure at all n locations
cactcagctatcanaactcaggtctgcccttggtactcatatctccaaaacttaaggtccactccttagtacatattcttgctaaacccaaggttcgcccttggtacatacctctacagaactcgaggtaccccctcagtccgcttacatgtagcaactacaatgaccatcgtcaagggtccaagttcaaccaaacgaactaccaccccactattttgcaagacttttaattaggtcaaaaccacacctactcctcataaccatcagagatctaaatgtagatcaactctaatttgttattgcgatttgattacttatttgtttatggtgccctatgtacgaattcgagtgaagaatatgttcaattcactagcatggtcataaaacccacatgtgtaatatggattataatgactnttaacactgtaaatcaatctaagagatgctatgaaactctgctttataaaaac

SEQ ID NO: 67352 - DNA, 438 bp, Glycine max
gatcctctgagtcacctgcttgatgcatgcttagcactctattaaagtggagagaagagtttaattatatgatagatcttttctcaatctaagtgttaaaatttaaatctaaatcataccagacaatagaagactggttatttgcttagtccaagaaattcacgtatataggatgaatctggatattgtaaacgtgttagtgtgttgagaggacaagacgattattatgctagagaatgcgtttaaggtcagacccttggctatttgcgttctataaaattatctgctaatttgggacttgagattttattgcttctcgcgtgaatctattctatgctatagcgattaaatctggatagagtatacgttcattcactactataaaaatagtctttctacatcgggtgacaacgcctctctacatcgggtataacgtgt

SEQ ID NO: 67353 - DNA, 450 bp, Glycine max
  unsure (1)..(450): unsure at all n locations
tgtgactctgggcaatgtctgtagaactagtctcttataaagttgtgtactttgaaaaaatcttcagaaacaaatcacttgtagaattatgacttctggaaatgtatttttcaaaatcagccactggtaatcgattacacatcaacagatgtgactcttctatttgaattttgaaaattaaaatgtttagaagctctggtaatcgattacaagtattgtgtaatcgattacacaagtttaaaatactttaaaactggttaaacataagttataactcttgaaatttgaaatcttaacattgtaaaacactggtaatcgattactacgttctggtaatcgattaccagagagtaaaactctttggtaatgattttgtgaaaacttcttgtgctactcaatattttgaanaactttnttagtacttacctngatngagtcttctcttgattc

SEQ ID NO: 67354 - DNA, 378 bp, Glycine max
  unsure (1)..(378): unsure at all n locations
agcttcttatccaatgctcatcgtggtggngaagtttcttcttctatggcttattccctagtggatggcgcctcttctcacctcttcttctttgtcttccgctacatctccatggnggaaagtcaccattaaaggacctcattgaagctcaaagatccagcctccatagaagccccacaagcaagcttccatcagctaatttggaagaactcttagcagacatgataggggcgtccattagttggttcccacaatggaaagaaagaggcgcaagagtgttatgcttatgtgaaggatttccaaatatccctttgataggaacgagggattgtataattataatcccatgttggccataagacagttggattaccatat

SEQ ID NO: 67355 - DNA, 458 bp, Glycine max
  unsure (1)..(458): unsure at all n locations
cttgagacgcatgtganaaccttggcatcatcaattcattcagctttatactntgtctacaagcaccacttttaacatttatgatttatattcctttgcaggtggagctgatattaaggagaaggaactaatagattttaggtcaaatcctcttcaagggggaggggatgatgcaatcctccctatgaagggaccaatcactagagccatgagcaagaggctccaagaggattgggctagagctgctgaagaaagccttaaggttctcatgaacctcagggtagatttctgagcccatgggccaaggttgggtccaattatctttgtacatattagactangatgtcattatatttggtccttgtatttaaggctccataatgtangtagggcaccctagaaatataggatttttcaacccttgtattttaaggcacctagactcgtttttgtattat

SEQ ID NO: 67356 - DNA, 387 bp, Glycine max
tgtttgcaagcttgcttgtggagcttctatggaggatggatctttgtgcttcaatgaggtccttcaatggtgatttatcaccatggagatgcagcggaaggctaaggagaataatagaggggaggcaccatccactatggaataagccaaggaagacggagcttcaccaccaagaattgccttggataataagcttgaagaggatgctctaatggaggaaaagaaagatggatagaaagagagaggggcgagcacgaaattgaatgaataaaagagggagagaagtgtgactctgaagtatgtatcacaagactctcatttatcacaagtacaacaaagtgttcacatgtctttatttatagactatggagccttcttgagaagctt

SEQ ID NO: 67357 - DNA, 450 bp, Glycine max
  unsure (1)..(450): unsure at all n locations
cgtaggattatggcgtacctcatcccactggctatgcattacatgtgtgtngttgtgaaaaaaatnaggtccgtgaagaaaatccaagccgaggtgcttccgtaacgcttccgatatgtttccgtgagcaaatccgtgaaggttctccgtcggtcttcaccgctcttcatccgttcttcgttcttcaatgggtaagttttcgaatccgagactctcaattcatttcttgtgttgttagctttcatctttatttcgatcattttcggctttcttttcttccgtttttaacgagctttaaacgtttatttaagccattttctcaccaaataaatgataaacagaatctcaaccgatcatttgcattgtaacctcggnttaaccaataaaacaaaataataatataataatcaacatatcttgaaagataataataaactgattcaaatatct

SEQ ID NO: 67358 - DNA, 443 bp, Glycine max
ccttagtctcagatgatgcagctgtttctgtagcttcctcacgctctcttctaatgactatagcatcatttctggcgctaaactgctgggagttagaagccatcttctcaattaaattcctggcttcagcatgagtcatgtctccaagggctccaccactggcagcatctatcatacgttctctccatattactgagtccttcataaaaatattggagaagaagttgctccgaaatctgatggtgagggcaactggcacatagatttttaaatcgctcccagtactctcacaggctctctccactgagttgtctaatacctgagatatcttctctgatggttgtggtcctggaagcaccgaacatgttttctaagaatactcccttaacgtcatcccacctcgtgatggacctcggagcaaggtaatacagccagtcctttgc

SEQ ID NO: 67359 - DNA, 455 bp, Glycine max
tataaaactcagcttctatataagctgaaccattgtatttataacacatgttgagttttattcagaaaattagagtttatctcttttatcttagtgagagtgattctcctaaattcttgagtgattcaagaacaccctggctgtatcaaaggactttcacaacctttgtgtgttgccctcgctggaaagagtgattctttccttcctatcatctccacccttgttctttcaaaccacaattccagaaaatccacctctgcccaaaattatctcgtgaccataactcccatttcacacactcaaattaagtgattcttgagcctaaattgaatttcaaaacgagacctttcacctcgttttggaatcacctcatttggagctctgtagcttccgttattgccatttctatatttctgtccagccaccacttaaccttacgtttaccatcccattca

SEQ ID NO: 67360 - DNA, 414 bp, Glycine max
tattcttcatcttataaatgaacgcgcgatattcatcacgcattattaacatatgctagactaaagccaggatgaaatgtctatcactctttcattccattgagagatatgagagtcattgatttctagggattaagaatcaccatataaatatagaaataaaaacccccacaaagttattgacagacattattccctcccgtaatcatctcatcctgccatattctatattactgtttatttcgagacttaccattaatgcctcatcattttgaatcttatacatctcctcattggactcttcatccaactctgacccgccattattaaacctccattctctcgatgaggaagacaatgagctcctatgcatattaaccattgccacctccagaaatcgctgtacaacaaata

SEQ ID NO: 67361 - DNA, 428 bp, Glycine max
  unsure (1)..(428): unsure at all n locations
cagatgttgcatccgccaatatgtatgtttggagatgtgtaacgatgcatcgcatccagctgttgagggagcttacttagagtttctatgaaggtctctaattgcttggccaggagcttgttttgagctaacatagcatcttgagaagtgagctcaagaagactcttctttatgggtgcataggcttgatcacagaggatggcgtgatcactggctgtcatattctctatcagctccatggcttcttctagagtcttcaatttaatcttcccaccaccgaatgcattgaggagctgcttgggatggggtcgcaagccgtcaatgaatatgttgaattggactggctcaatgaacccatgtgtaggagtcttccagagcaactcatagaagtgatctagtgcttcattcagcggatcatcanggaattg

SEQ ID NO: 67362 - DNA, 427 bp, Glycine max
  unsure (1)..(427): unsure at all n locations
tgatataatgcaattatagcctatacgattcctttctctgttgttctctgttatctacctcattaaacaaacaaagagatcttgtttcatctgttcttgcagttccaccttttctcatatcattttgcatgttcttgtttctctggtcttgtttggtatagatatgagggtcgattctttgaggatcctaacaacgagggtgtgacaatcgattttgatagagatataagccaaacgataaacgatgaagatgaagaggacgtcctgtcaccaaagttggagaggttggtcgctcangaagaacgtgaaatgaatccttaccaagaatataccgtaatggtaaacatggcgaccactcgtgaaaagaaagaagtaaaggtatgaaccgatatgatctctcctatccgtaaggcttgaaaccctcttg

SEQ ID NO: 67363 - DNA, 443 bp, Glycine max
gctcggatttccttcagtagggaatctatccttcctaagatggagctcttcccattcttcctcattaagaactagctcttttcttccttaattgcctttagttgaatacacctttgtttgcttctttatttggttcttaaccctctcatgcaacttctttacaaactctgacctagattccccttctttatgtataaaagaagtttctagtgggaggggaatgaggtctaacggtgttaggggattgaacccatagacaaccttaaaaggggactgcttggtggttctatgaaccccctgttatacgcaaattctacatgaggaagctactcatcgcaagacttatggttgcctttcagaaaagcccttataagggtggataaagacctattcactacctctgtttgcccatcagtttgtggatgacaagtggtagagaaaac

SEQ ID NO: 67364 - DNA, 411 bp, Glycine max
tagcaccactattgtaagagtggatatgctactatcaatctcactcttaagatatttctccacccacctagaaagaaacatgttgaaacttctagtagcataattggattgcaccacaattatttattggtgcactgtcatttacttgcctataaaacgccaccatcttgtaacacttggagaatgaatgaaatcaattctagattgtgaaattcaagtctcttactccttagtgtgtgagtgagattgtgtaacatatatttggtctctcattatatctttcgttgtgtaagtgagtgtgtgtctgcgaatataatctttgcgctcaaatgatatcactaattaacatgcactgtgtgattgattatataagtgacggattcacttcacgccattggtgttgcatgtaaa

SEQ ID NO: 67365 - DNA, 468 bp, Glycine max
  unsure (1)..(468): unsure at all n locations
atctaagctcacagggtagaacaatatcaggaaaagaaggggggggctttcttatgctgtcttgattggatcacattgcaaactttcgctagttgggattatcaagactataaaatgaccataaaattagtcaaatcgagatgattcgaaatagtattaatcaataaatattatatatatttaatagtggaatttgcttccattatttattttttggtttcagttagactaacttttttttatatatatattcacaccatttgatgtaaaaaatttaaccaccgttagaagaggctgatctgttctttgaccataattgtgatcaatatctgtaccaggggttaatttttggtggagtattgctctctcattgtatcgggcttcactatttcattgaatatatatntcatttgtctatataaaaatcgatccacttaatattaatataacggatttattatttgaaat

SEQ ID NO: 67366 - DNA, 437 bp, Glycine max
  unsure (1)..(437): unsure at all n locations
cgcttgatagccttctacacttcatacttgtgcctaaattcaatatcatggataacactngatgaagagcttgcttggtcttctatgttctagtccttgatatagatcctccaagttcttctaaaagttccttatccttagtccttgccatgtcctcatcagcatgtcaacccaacttgtgtttatattagattctattttatatggcaagttattgttgcagagaaggaaaacacagggattcaaatgaataactaatcatgattgttgccgtggagaacggattgaaagaacgtgtattgaaatgaacttttcctttacactatgaatataaactgttctctactgatctctgacatgtcaanaaatattgcatgactatgaccaatctaatacttatattcattctcgccacaatgatatgtttctatccctga

SEQ ID NO: 67367 - DNA, 463 bp, Glycine max
  unsure (1)..(463): unsure at all n locations
ntgagatagtctctggtctgagaatcaactatgccaagagccaactgggagcaattggtcaatctgatcagtggatcagatctgctgctgatctcctaaattgtggtcctctgcagcttcctttctgttacctagggctgcctataggtgtcaatccgagaaggaagatggtgtgggaacctatcatcaacaaatttgaggctagactgaacaaatggaggcagagaagcatatccatggctggtagaatcactctaattaatgttgtcctaacagctctgccattgttttatatgtcttttttcagggctccttcagcagtgataaaaaaactcatctccattcanagaagggttctttggggtgataatcaagaagggaggaagatagcatgggtggcttggagtcaagtgtgtgcagctaaagagaggggaggtcttggagtaaagacattacactttta

SEQ ID NO: 67368 - DNA, 412 bp, Glycine max
  unsure (1)..(412): unsure at all n locations
agcttctcatagacttatgtaattgagtaccattattgtgtaattgattaagcagagagtaatatggcactgtagatgtttcttatcttagaaactatcttcctacatgtatatgatgatgcatgatgcacacacnaatagactaagaataaaaagcatcaagttatacaaatgtcactcaacaaggagttgggcatgtaaaagttaaaaatattctatgttagacctcctatctttaacaatctccccttttggcgtgatgatgccaaactttattgccatcgagtgcatttcaagaggctttaatgacggacttctcttgatacaccacctaaatcttattgttacactatggtcaagagaagtgtcaaatcatgtcatatcatatcatagtggagtggtcgaatgaata

SEQ ID NO: 67369 - DNA, 445 bp, Glycine max
  unsure (1)..(445): unsure at all n locations
aggagacatnttggcagagatattgaaatttgtatngatttctaattcagctcgggccaagtggttaggccactgttttggtttggttccagttaaacacctcaaatacgcttctaagcatcaattagctacttccatctgcccatttgtttgaggatgataggcaatactcatcttcaattgagtgcctgctttcttgaacaattgcttctaaaagaggctcataaaaagtctgtctctgtcagtactattgaggcagggaacacatgcagtctcactacttctttaatgaataactcagctacttccttagctgtataaggatgacttaatgcaaaaaaatgagcatacttattcagcctatccaccaccactaagatagcgtctctcccttgagcctttggtaaacctccaatgaaatccattgagatatcagtccatacct

SEQ ID NO: 67370 - DNA, 442 bp, Glycine max
  unsure (1)..(442): unsure at all n locations
agcatgaagaactatccggagaggccataccccattcatggaactccattcatttgaagttttactgcaattaaatcatgtaaaaggtggtatactatttttcctacctcgaccttttatccctataaaaatgtaaaaaggtttttgtcgagaaggttttaacgaggcacacctaaacttatactatcaatgaatacatttttccaacaattatacttgtcanttttttttatagtaccctctcgaatacctcttttggcagaggttgaactctacgataacaacatgtgttccctctcgaataacttatttgatcgaggatgaacttatntcgttaagcaatagttccctcttgaataatccctttggccgaggatgaaattatcacaatatatcgtaaagttccatcccgaatactctcttttgtcaggtcaacaccata

SEQ ID NO: 67371 - DNA, 453 bp, Glycine max
cttccggagccatttcctgtgaggacaaacatttgtaaagttagtttacaagataataccaatcattacgacaagagcctaacaacacttatatggtgcaagtgttaccatgcactttacaaaataatcatattggggcatgtgctattttatgacacatatctatatacatgcatttacacacgcacacataaatttttttggtgaaaggcattttatgacacacgtccatgtatgtttttgacaagcctttccatgctacatcccacatatatgcacattttttgaaaggctccttattctacctactcacaaatatacttattttgaaaggcattttttgcgctacctatccaacatatacaaattttgaaagacattttttgctatatattcacacactttgcaagggcatttcatgctatatattcacacactttgcaaggcattttc

SEQ ID NO: 67372 - DNA, 283 bp, Glycine max
cacagcccgaaaggcgcacatagccgacccaaaaaccgacaacagcaacgccgcaggaacacacactccaaaagcaacgaaaggcgaaacaagaacaagaccacatgagacaaaaacacaggggccagaacaaaagagagcgcgcgggacgccccacaggacacgggacaaacacaaaccgaagacacacgactgcacgaacagcaagaccgagaagaccaccacaacacgacagaaacaaagagaacaacacacccaaacccccactcggaccccagaaccc

SEQ ID NO: 67373 - DNA, 380 bp, Glycine max
tttataaggtaaatttgttaattgactatatgcttcgccatcttatgactacattgtggatgaagatcttaatgatgaggaagaatttgatgaatcatacatgtctcattataatgacgctccataatatagacgtctaatagcaattcatgctgggaagcctaaaggtggattagctgaatgccttcaagcggatcctgattaagtgagacgtctaattataagtgagcaacagctcgacaaggctgtcatatatcatggacaacagattgtcaggcattgttatatgtttctagtaagtccttttaaggtagaattgatttgaatgtggtcgaaccccctttcagaatgaataaatgaccattcttctactctttatt

SEQ ID NO: 67374 - DNA, 400 bp, Glycine max
  unsure (1)..(400): unsure at all n locations
aagtcacctgctgcatgcaagcttcttagatatgggcaaacatggaataagctttacttatcggatatgttttatgttattgtgagatgttcaagcagcttaaatactacacatccacaaagttgttaatcttgtgacctgttaaagagcctgtgctttgaggatcattatagttgtagattatttagttagtggaataaatatcggattcactagatatataagttcttatcatggctatacttgaactttcagttcaaatggagaaatgagtggttttgttctctctctgagaaggctactacccaaggcaaggtagacccatgccctttgcattcccaatggctaanagagttgagaattgatgaaacttgaactctaatgtgtgtgcgtatgtgat

SEQ ID NO: 67375 - DNA, 457 bp, Glycine max
  unsure (1)..(457): unsure at all n locations
ggcctaattaacctgaaattgagaganaatgatctttaaacacattaaatgaatatactaagtatttattacctatacttaacagaaaatacttataacactacaaaataaccataaattgggagagtttgatacaacttatacaagttttatacacaaaagttagtcgttttcatcgactaacaacgacccaccaacggaggatgatgctgatactgatgaatataggaatctagacacaccatatcaatatcaaaataccgatttgggcaatcaactttcaacttacatggtgctttctttaattcctttggattgaggggagaatctaaacttacaaattaatgtgtaggtccaggttacaatgatattggagatccagtttggcaatgcanacactgtaaaactatgatgtggtaagatgaaaggattaacaaagacacacaaacaataaccc

SEQ ID NO: 67376 - DNA, 456 bp, Glycine max
  unsure (1)..(456): unsure at all n locations
tgaagataagactatacgaggtatcttccttggatatagcaatatctctaagggctactatgtctacaacttgcaaactaagaaactcatcatcagtcgagatgttgaagttgatgagtatgcttcttggaattgggatgaagaaaattaaagtggagaagaacgttcttatacccgctcaactacctcaagaagaagctgaggaagaagacccaggtgaaccatcttcacctccaccacaacagcaagatcaagaactatcatcaccagagtctactccaagacaagtaagatctttggtggacatatatganacctgtaacttggccatacttgaacctggaagctttgaagaagtgtcaaagcaggaaatatgggtcaaggcaatcgaagaagagatacagatgatcgagaaaaacaacacatgggagttagtaaatggtccccatggaaaaa

SEQ ID NO: 67377 - DNA, 442 bp, Glycine max
  unsure (1)..(442): unsure at all n locations
ctagaagaaggggaaatntaggtattttgtatattttattgccttaatctagntattnacatgctattatatagatggttctataacagaattgtgctgagttgtctagctatggaatcattctagaatatgcctgctacacgaatgggtatgaatatcttctggaagagtatatatatatatatccttaatgtgcctattcaagcttaaggctaagtctactgctgtgtctgcttctttaaacgtaatcctttaagtactcgtgcttcaagatcttactattgggccttccttcttcttgcacctgcctttcttcttacctcctcgtttgctcttcttgctcagcaccttctttatcactctctatgtattctgcacccggatcataaatgttcttaatgttaagagaactagacgagcttcagacttgagcagtaaattc

SEQ ID NO: 67378 - DNA, 444 bp, Glycine max
  unsure (1)..(444): unsure at all n locations
cgaagaaagagtcatagatgcgttttaaaatctatatattattgtttgtaattgcagnaggtattattgaactcatcacctcacgaacgaattctattaattattttaatacggttaattctttggacataaaacataataacttgcatttgaaggatcaaatcagtataaagtaaaataaaggaggtaaataaggagaaattgtttatctttgaaggacataatgagaaattgttaagaaaataatcaaatactactgcccagttagatactttgacttggtgcccaacagcaattagagtgcatcgacaatntctattntgacttagtgtgcatgtgcaacagcaattatagctttcaacggtcaaggttctcactgccacattaactatntgtgcccaagtggcacttatatatctacaatagtattacacaatataaagg

SEQ ID NO: 67379 - DNA, 482 bp, Glycine max
  unsure (1)..(482): unsure at all n locations
agcttangaataagttcactgcctctgccttcaatcttaaccttgatttcataaaaaagaatagcaagagtaataacaagaagttgccttctgatttctctccaacaccctttaaaggtgcttgcaaccccatcttgaacaaggtaattntttttttgtttttttgtttctgctttcttttttggtttgtggtttctgattcccatttagatttctggtacttntttttcctttctattntatgaagtctgggaaacattatattatagaaatatgaatatgggcattgttttctaaaaagaggaaatgaaagaaaattagtaaaatgggatttgattgaaataaaaaaaaattaaacataatgtgagtttgatacataatatattcatagatcttatttgtaattaacaactaatgaactaaccggtcaagctaactagccaactgactattttaactaactaataacctttaacaaatga

SEQ ID NO: 67380 - DNA, 463 bp, Glycine max
  unsure (1)..(463): unsure at all n locations
cgaagtgagaaagtgtggaagagtcagtcttcctacttttattctgttgaccacagagtggtacctggagatatgtcgcggnggtcaggagaccttgnggacgtcaggtggggtgctatttcccaaaactaagcttgaccaatcccgacccaacccgggcatagtcagtcagtgagaacctgtgacgtacctaaacaggcgagctcttggcagtcaaccgataaaagaacaaagaccacaaagcaaggaggcttgtgtggtggctggccaactatggatcttgagtgatatttggaatatgaccactggtaatcaattaccaagggtgtgtaatcaattacaaggcttaaaaatgaagacaggaagttaagatggtctcgggtaatcgattaccaagggtgtgtaattgattaccaggcctaaaaatggngtcaggaagttgagatggcctctggtaatcgat

SEQ ID NO: 67381 - DNA, 368 bp, Glycine max
  unsure (1)..(368): unsure at all n locations
gatatcgnagactcgtaggtagagacaactatctcactgtcaccaggctatacattgcatttgccgaatgtgagataagccaatacctcaatgcaccatgtgatagacactggcatgctgtcacatgtatccttcgatatatcaagaattcaccggaaaaacggactattagatgaggacaaaggcaaatctaatatcatctgttactctgatactgattaggcacgatcaccaacagacagaagatctacctctggctattgtgatcttatttggagacacccacggcactaagcttattngtgataatcaagccgctcttacaatgcatctaatccggcttacatgaacagcaacacatagagcta

SEQ ID NO: 67382 - DNA, 468 bp, Glycine max
actaagctcgtaaattggatcatgaagactcagcgcagattcttcaacattcttgatcaatctcattcacctatgccaaaaccaacacaagaagccgctccatctgctgctccagtgaagaccttggggattctgaaaccagagggaatatctaggtacatagggaacaagattgaaccaaccatgcaccaacatttcacgacacactgggaaggaaaaaaagaagtgaaggtgtaccctttggtgaaggcctctacccttacacttgtgtgtcaattctacttaggccttgatgaaccaaaatgccagaaagtttgaggacttgtattttgggatccattctgttcctgtgaattttacaggctttatataccatagggcactcaaggctgcagctgcaataaagaaaaaaatccaatttctgatgccaagacttgaaataagcaacatcatcatgtcggtgatgaa

SEQ ID NO: 67383 - DNA, 454 bp, Glycine max
ggcttgacagcctgacattaacaactcataaatagctcgtttattattagaatataaaaattaagattacgtagattctactatatcatatcatatgttcaacacatattgtatttgtagattattacatagtagttaaaatattttattaagataataaattgtcagttaaaaaatgatataataattctttcgcaagtaaaatactaatcaaatgttaaatgagctaaaccatatcagctcaagctcatggcttgattttttcaaaaaagccagactaaccttatatttgtgattgttaaataaatgagtcagcttgagccattgttttgttaaaagccaaaatggatccttaagtgagctcattacacccttatcttagggactaaaatgaaatacataattacttagaaacataatggagtaatgtgttaggtcaagacctagatgacac

SEQ ID NO: 67384 - DNA, 446 bp, Glycine max
  unsure (1)..(446): unsure at all n locations
ggctgagagggacaaatcaaggatggaaagtatggtgctttatgataagttaaaggcttgtcagtggtcgaagagaagnttgacggaatagttgagcataacagaagagaatatgttgataatcattgatcaatataaggagaaggtgaacctggctgctagtcatgggcagatgttggaagatgaacaagaaaaggtatcatctctacaaattgaaagggaagagagagagagggtgatagagttattccatggggaagccatganatggatgaatagattcgctctcactctgaatgagagtcaagtgctttcaaggttgttagccagagccaaggcagtggctgacatgtactcaactcccgacgaagttcatggtcttttcgattactgccaacacatggtcgaactaatgacccacataattaggagtcgctaaggattct

SEQ ID NO: 67385 - DNA, 437 bp, Glycine max
agtctgtcaaaagcttgtaacgtgcaagttacgtttaaatgaaatttatatatacacatttgttatccatactgtctccagtgatgatttagtagatttcttaatttatttgatattaaactacacccatgaatgtgataaatcatcgtaaaattgtatgtgggtaacttttgatcctaaaatatgaatgtttccatattaatagaacagataaagggcaattgattcaagtgggcataaacttttgtccgagagatgctacctgttatatttggattattactttctttgtcatctcatacctttttttcttttattcttcttctttccacaaaatcagattacacataacacatttataaatttgtttctcttaattatgtatttcttatttccactacctcatccatttgtgatctataatcgtgtgggatatc

SEQ ID NO: 67386 - DNA, 461 bp, Glycine max
  unsure (1)..(461): unsure at all n locations
gctcgctgcgaaagagagtnnttgctgttattgcaggcctatagagctctacaacatatttatagagtgngctgaaagatatgtactccttctgcctatgtaaattatgttttatgtgattatttataacttatattgggaattgggatatattgcatgagttatagggctgatattattggtatcattatttctttttttttgaaaattatctctttttctatctgctgtttaggagaatttcttatactatntacttctctttagtaggacctattgcttcctttggttttttatttttacctcttgaactcttccgatctcgggtctctgaagataatatcatcgcatgctgttctaacaatatacatgtctggcttataggcattatacctacggagatgtatggactacaatataatggctaagcgtaagaagaggtaaaatctattatatataat

SEQ ID NO: 67387 - DNA, 338 bp, Glycine max
  unsure (1)..(338): unsure at all n locations
tgtaggaggctgtacgccatttttgtttgaagagtattgtcccactggtttaactaactgtccaaattcttgcctacgcaggaaatggccccgaggaagcttgcctcaaagaggtccaggaaggacaaggcagccgaatgaactagttccgctccggagtatgacagtcaccgttttangagcgttgtacaccagcagcgcttttaggccatcaagggatggttgtttctccgggagcgacgcgtccagctcatggacgactagtatactgattttcatgaggaaatacggcgccgacggtgggcatcactggttactcccatggncaagtttgaacc

SEQ ID NO: 67388 - DNA, 459 bp, Glycine max
  unsure (1)..(459): unsure at all n locations
tctggtgggacatcttgacttgctntccaatctgacattcaccactgattctgccttcttctattttcagattgggaatgcctctaacagcacctttgtcaatgattttcttcatgcctcttaagtgcagatgtccaaatttttgatgccatatttttacttcatcttctttggaggatagacatgtggaggagtaactggtttcttgaggtgtccataggtaacagttgtcctttgatctgctgcccttcattaggacttcactcttctcatttgtcaccaagcattctgactntgtgaagtttacattgaatccttcatcacacaactgactgatgctgatcaagttcgcagtcagtcccttcaccagcagtactttgttcagactaggaagtccatcatggactagctttcccattccagagatctttcctttagagccatctccanatgtcacat

SEQ ID NO: 67389 - DNA, 380 bp, Glycine max
  unsure (1)..(380): unsure at all n locations
agcttcaaccaaggggagatggtccatgtcacgtgtttatagaatcattgactatgctcacaaagttgagctgtccggtgagtataatgttagatccaccttcatgtctttgatgtatcttcttctgaagcagatggagaatccgatttgaggaccaatccttctctagagggagagaattatgtngatatgaccaatagctttggctatgatccactcgaatgacttggatgaccctatgatgatgacctgaccaagagcaatggccaggatccacttgatgtacttgaggacctatgacagggctcgagcaggaaagccatgaagcttttacaagtgctgcccaacttttgattacacccaattttaggaaaaagtca

SEQ ID NO: 67390 - DNA, 436 bp, Glycine max
  unsure (1)..(436): unsure at all n locations
tcctctgccgtaaaaaagatattatcggccagtgtttgtaaaattattgcgcaatgtcggctgaaaaatatccgtcggggctatttaactaccgatgtcggctattgttttttctattccacccctgaattatatttggatgatgcctattangaaatgttcggtcggggtcatccggtcatgcttctttttgaggcctcgatctgtcgtctttcctagccggccgacgtcggctagcatttttttcgatcaatatctgtgtgaatcatgtttttttttgccaaggagggctaatgttttcgtggccgacaaaatgagaacatgccagtgtcggccgaaacacaatcccgcacgaaaaaccctagccgacctacattgtatatttttcaggcaataccgagcgacaaaacttcgtctaccatgaagaaatattatc

SEQ ID NO: 67391 - DNA, 334 bp, Glycine max
tcctctatcgtacgctgcaactgcatggatggaaatcaccattgaatgaccttatcgaagctcaaagatacatcctctatagaatgatctcaagcaagcttctattacacgaggagagcgtctgctcttagaggtgctgatgtctcatattctgatgatcttatccatcgtatgtgatcataaggcacgctccttggtgtatagaagattcagtgcacacatttgttattctcgtgctgtgtgacagatggcttgctgtgctccttgaataaactaaatgagaacaccactaggtgctgattactttgatggtcttgcacgccatctaatgata

SEQ ID NO: 67392 - DNA, 447 bp, Glycine max
  unsure (1)..(447): unsure at all n locations
tgaactactctctgcaagttgaagcttgattgctcgctaagcctttctatctcangctaagcacattttgtagaaaaaattttgtgttgcagaaagtgctaagcgcagcctgcagcactaagccctagatcctctctagaatttgaaacttcaagttgagcttagcgtgaggttaggctaagcgcatgggttttaaactcaaacgtcatgttggcacgctagtagctatgcgctaagtgtgccaaatgaaaatgctaaaataaaataaaattgcaaatggtagttaccattcacacttcatcattttctcccttgttcttgtgcccacatttgtgctttgtgccatttggtgcctgtgcttcaagttactcctgcattctttctcttatcttgcatcttcatttcaatgcaagtaagtttctgttttctttctatattcttttcaat

SEQ ID NO: 67393 - DNA, 133 bp, Glycine max
tgcgcgtaaacacaggctaaattgtgaggcaatctacaattagctgccattaaccctctataccatgtattactgccagcaaacacgcgacaacgccaacaataccgccttataaaataccccccccaccaca

SEQ ID NO: 67394 - DNA, 116 bp, Glycine max
gcccaaaggaccttggcatcatggactgattaggcgcttgatgcggccatagtgcgatctgttcacaaagagatagacaatgaaaatggtctgatagaactgcaaataaagggact

SEQ ID NO: 67395 - DNA, 446 bp, Glycine max
  unsure (1)..(446): unsure at all n locations
ggtgcatccaataccctgatgaggatgtcccatatgttcttaattctggactganccatttgcttccaaagtttcatggccttgcaggtgaagacccgcacaaacatctgacagaatttcatattgtctgctccaccatgaaacccctagatgtccaagaagatcacatatttctgaaggcttttcctcattcgttagagggagtggcaaaggactggttgtattaccttgctccaaggtccatcacgagctgcgatgaccttaagagagtattcttagaanaaatttccctgcttccaagaccacgaccatcacgaaggatatctcangtattagacaactccatggagagagcctatatgaatactatgagaganttaaaanactatgtgccagttgccctcaccatcagatttcggagtagcttcttcttccaatattttatg

SEQ ID NO: 67396 - DNA, 449 bp, Glycine max
  unsure (1)..(449): unsure at all n locations
ctttgaatcaaactntgccactagtatatcaatacttgtaattgtttatngattaccatagagtaaaaactctggtaacagaaaattttgagaaaaactcttttggaaaacaaaactatgctatgtttgttttttgaaaaatcttttaaatacttcctttgtgaagtcttcttgatttcttctcttgaatcttgaattcatcttctcttgaatcttgagatcaaacttctcttgaatcttgaatcttcttgatttcttctcatgaaacttgaaattaatcttgatcttgaacttgttgactcaatcttgaaatcattctcttgggctgtttgtcatcatcaaaactacttgaatcaacttgattcatcatcatgaagctcgcttctacataaaacacacgaaagcagccgagtcactcgtccaaagtgtgacatcctggaaaattctac

SEQ ID NO: 67397 - DNA, 482 bp, Glycine max
  unsure (1)..(482): unsure at all n locations
cgcttgataccttcgaanggcagagagagatcgatcacgagctctttgcatggtcttaaaagaagagttagcagcgtgcttattgtccataaggaactngactcagcgtttgtgcgagacagagatcaacatgttggctatcatcaccaagtatcaataagaactaagtctagccacagcccacgagcatagggtggcatacgagtatgcccaagtgtacgcggaaaaggaggctagaggaagggtgatcgactcgttacaccaagaggcaaccatgtggatggaccaatttgctcttaccttanacgggagtcaagaacttccccgattgctagccaaggccaaagcaatggtggacacctactccgccctcgaggagatccacagacttctcgactattgtcagcatatgatagatataatggcccatataattaggaaccgctagggaacttgtattgtcactcagatcttgactagtt

SEQ ID NO: 67398 - DNA, 464 bp, Glycine max
  unsure (1)..(464): unsure at all n locations
cactcaagctcgtgtgtntagcacgatataccttaggtcaggttaccatcagattcttagtgaagttgatctatattccgaagactacttttaggacccgttatggtcactacgagtatctagtcatgccctttggtgtgactaatgctccaggtgtgtttatggactacatgaataaagtctttcacccttactttgatagttttgtggtagtattcatagatgatattttggtatattcaaagactagagaggaacatgaagagcacttgaggattatgctgcttacccttaggaatcgacaactttatgctaaattgtccaagtgtgagtttttggttagagaaagttagtttcctagggcatgtgatatctcaagggggtatagttgtagacccctctaagatagaagttgttcttgagtgggagagtcctaagtctatctttgagattaggagtgtcgc

SEQ ID NO: 67399 - DNA, 283 bp, Glycine max
gcagcaacctactcactgagcgccattgcatcttgcggaaaggatttgcttatggacgatggtgcttcggccgcggataatcccgtgtacttacattctgcatatggaagactgtagatgacgtgcttggcgatatggtgaccacagacgacgttcagtgtgtttcttggaagacccttaccatctgatataaatgtagtgcacaatgggcgcgcctattcctattctttctacattattgtcgcacagtacgtcacgttcctttgtctcccggagatgtgtg

SEQ ID NO: 67400 - DNA, 288 bp, Glycine max
gatgttttgataatgacaaagatgttgacagaaagcccaaagtatgatttcaagattaaatcaagaacaaattcaagaatcaagagaagttcgatttcatgattcaagaagagatgaattcgagttccgagagaagatatcaagattacttctcaagggaagtattgaatagatttttcataacacaaacatagcaaaatgttgggtcaaaagagtttcacaagagtgttctagtgaccagggtctttactctatggctgtcgcataccagtttttataatcgcatac

SEQ ID NO: 67401 - DNA, 477 bp, Glycine max
  unsure (1)..(477): unsure at all n locations
cactaagcttacannaagttgtatggctngaaacaagcaccaaggcagnggttcttgaagttttatgagtttatgagcaactcaggattcaaaagatgtgacatgggccattgctgctatgttaaaaaatatactaatagttatgttatccttgttgtgtatgttgatgacatgttgattgcaggatctagtatgatagaaattaataggttgaagcagcagttggcagaaaactttgaaatgaaggatcttggtccagctaaacaaatccttggtatgagaattcttagaaacagatcagaaggaattntgaagctgtctcaggagaaatatatacacaagttgcttgacaggttgtaccttggagattctaagaccaggaatacccctttgggatctcatttgaagttttcanagaagcaatctttgcagacagatgaagaaaaatgttacatgtcaagagtaccatatgcatca

SEQ ID NO: 67402 - DNA, 437 bp, Glycine max
  unsure (1)..(437): unsure at all n locations
ctaactccctgatttgaatgtggattacatctttattattgttttgtttgttaaaaacttgagctaagagcatacntaattggtgccctgaatccacacagcttctcttcaagggatttcctgatgactgtgatgctttgaaggtcctcaaatatggtgcattagaaactggttcttcatcaaggtgggctactgaatgggaagaacatgcaaagccgctgataactgacgcaagttcattcttctattctatgcactatgtcattatcaggtcatctactcttgtggtagttgactttttgtgtctcagtgatcagttcttgacttatacgaatagacaaaatcttgaatagacagaagcttcagattctttgtttttctatgacagctagcagggaattcgtttattacttanggacttcattgtttagtacctt

SEQ ID NO: 67403 - DNA, 453 bp, Glycine max
  unsure (1)..(453): unsure at all n locations
tcagactaaagcaactcagaatctaggtatccatttcccctcaatttattggattntcaagggtggagaagtgaaattgagaatgaggtaaatttggagcaaactctcacctcacacaagtctatgacatcaatttaaacttgctcaaactggatttacaccgaaaattccactgaatcaaaatttgactcctcaacacccaattttaccctagaaatggctctttgttcactatgatcatttgtttntctctcttgcacagcccaaactttctcataagtcctaaatgacatttcaagctaggattaactcactttaacctccaaataccactaaatccagatttggccttccaactctcaaaacctcactcttgttccactcataacaccatattctcactttctaaccctaggttaactctacccttcatctctaacangtttccataag

SEQ ID NO: 67404 - DNA, 298 bp, Glycine max
  unsure (1)..(298): unsure at all n locations
aaaacanagcagagagcataagcatgatgcttacgacatcgttaactctgtcatggattgtactatttgtctgatcagctgattagtcgaactcttgttcaaagatatgcattctttcatgttaagtatgtaacgtcatgtgatattagatgaacaagactcactcaactatttgaaaaagaaaaaaagaacaattctttattgaacaaaacagagcaatagattgttacccattatcttcctgcagagaaatagtactgaggaataaggatgcacgaagaacccgtgccacaaattg

SEQ ID NO: 67405 - DNA, 465 bp, Glycine max
  unsure (1)..(465): unsure at all n locations
cacatacaacactcaagctncgatagttgactnttattattntaattaatactttcggagcgttgctctgagtttttgctacccacgcctcatcggtaatgaatgccagttacttttcataacaatctgaatagagtgatcttgctaaaaagtcagcgtattgtttcttctttcacgaaagtaagcgaaaatcaagtaattgataaatatttttattaaaaattatgttgaggatattatcaaatcatattaaaagcactttattctttaataaaattaattagtataaattatatataaaaatatatatttatttaatcattatgacttttaattatgtaacaataaatattcatctcatgtaatgcacactattaaatacttgttaaattaaaaagattgttttaaacacattaaatgtattttctcttttcatacttcgttttatagaatactacgcaaact

SEQ ID NO: 67406 - DNA, 429 bp, Glycine max
  unsure (1)..(429): unsure at all n locations
tagactatgtggctacataaaggggcgacaaccttggttnnanatttgtttcaaaanacgctagctcgagaaacttatactgttgttgctacattggttatgtaatcgtgtagttcatacactgaacacaaaagggtaaaatgcattgtggtatattcttcatagtatttatttttatcttccatctcaatttcacttttgtatctatcatttctaatacaaaactaatgcatatttctcaacataagctttaatgtgttttgtaaagagtgtgctcttgacatttcaaagattattttgaacaatatgcttattgcttgtaatcttaagagtgagactatcttaagacaacttaattgtagttattacaacanagaagaatacaacggttatgatatctggaaaataaatatttgtatacaagatatt

SEQ ID NO: 67407 - DNA, 444 bp, Glycine max
ctgctgcatgcaagctcaagctccttcaactgcacaaggctcttaatatttgaagagtattcttgtggaaccttcacccgacaaagacactgacaaaaacttatcttctcctttctggacaaagtatggcaaactgtgggcaagtaaattttcttcccatcataccttggatgcaactgtgatcgtatgcccatatcagctagatcttgacgggtattcaagccatccttcgtcttgccttgaatgttaaggagcatcccaatcacactgtcacaaacatttttctccacatgcataacatcaatacaatgtctaacgtcaagatcagaccagtatggaagatctaagaaaatggacctcttcttccatatgcaactcttacttttatccttctttcgggtctttccaagtacattattcaggttgtgaacccgcttatatacc

SEQ ID NO: 67408 - DNA, 372 bp, Glycine max
  unsure (1)..(372): unsure at all n locations
gtggattctnaccacttacctgtacgcaagatatcttatgtgcttattgtttgggactttgctatttcaagcctttcatatggagttgatgatcagtctcttaaagatgcatcttctggctctggatatgcggatgatggtaagttctatttgatttcattgttgacacatggtgcccaatttcagccacccgctagtctcactttaccatatgttctttaattatctttgatgacattataattttgccatggcatggtgtaaatccttcaatccgacattaagagtccactatggtgcaacttctatgaatacatcaattacaggctcaatgggatacacatntctgtgaccggaatgtgggactacaca

SEQ ID NO: 67409 - DNA, 417 bp, Glycine max
  unsure (1)..(417): unsure at all n locations
tcatgattgaatcaagatcgagtcttggatcaagtatgatccaatgtgttcnaacgataacaaagatgatgacgaacaaccaagagaatgacttcaagattgagtcaagaacaattcaagaatcaagaatcaagtctcacgtcttaagaatcaagactcaagactaatcaagatcaagattcatgactcatgattcacgaatcaagataagactcaatcaagataagtacttaaaatgttttcaaaacattgagtagcacatgaagntttcacaaaagctattaccaaagagttcttactctctgggaattgattaccagtttactgtgatcgattaccagcattcaaagtttgtttcaaaagctttcatattgaatatacaacgctccaatatattcaaaatggtgtaatcgatta

SEQ ID NO: 67410 - DNA, 444 bp, Glycine max
tgggggaggccaatagagactactgtcaaacccttttatataagttgtttaaacgccataaacgatctactaatgtattggtatgtgacacgtgtaaacgggaggttaaatgagttgcccacgtgccaaagaccaaatgtctaattctacacacaaataagtccattggactctaattatatttgttgctatttttttcctcctcacaatacctattttgagtattttatggccgcaataaaaatttgatcatcatatatgaaaatgattttatatcaatatcatcatcatcagcaaaaaaaaaaaacttccattttttatatttgtatattttgagatatcacatatttccattttttgcctttctcatttcttaattgaaaatggacattgacagtgattattgtaacagcgtgaaaaataataataactgcgaaataaaat

SEQ ID NO: 67411 - DNA, 280 bp, Glycine max
aaaaggggggagggtgggaaaatttgggaaaagaaaaaaagaggaaaaataaaaaatgcgagagaaggaaaggggagaaaaaaaaaaaaaaaagagaatggacggtgaaaataaataaagagaggaaaagaagaaagaaacgaaggaatgagggagaaggagagcaaggagatgagaaaagaggaggagagaagatagagcagggaaggcgaaagagagagagaggagagggaaaaaaaaagaaaggaatagagaaaaaggagaaaaaaaatagagaaga

SEQ ID NO: 67412 - DNA, 446 bp, Glycine max
  unsure (1)..(446): unsure at all n locations
cgttattctgtgtggtttttattattgtgggcttgtatttgnngtatatttgnntttaggggcaatttaaacaacattttgcagaagaggaggtggaaggtgttggagttgagcaaagagcaagaagtgagtgcacttgagcagtgttttgaagtgatgcaaggaacacacaatcggttgttgaagtttttttcttgaaggtctcattcctcatgatgctatgaagtacttggacacctttccaagatgttcatgaattatggtatcatatgggtctggtatgctacactttatgcttccttctataactttgctatnntgttcaatgttaagtagtaagtactttgatggtggtggggggctattacatcacattagagtggatataataagccaaatatagtgtaaagccatacatttagcataaatgataaaaggtatgattt

SEQ ID NO: 67413 - DNA, 216 bp, Glycine max
tttcatgtctctttattgaagaaagctattgggaaattttctgttaggagaactttccaaggaattagaggttggtcctgttgatgacatatatccagagaaggttattggctcaaggctgatcacacaggggggtgtctcaattccttcgagccttattcaatggaagaataagtctagtgaggatgttacttgggaagacgatgctgtcatatg

SEQ ID NO: 67414 - DNA, 318 bp, Glycine max
  unsure (1)..(318): unsure at all n locations
taaaattaanagggttaaacgattatagagaagcagtagtccaagtgaatagttggagagtcagagtttaatattaagatctttnagtaacattttatataataaatgttacacaattttattntaattatgatatggtaacactttagtaaatgttactaagtccactaaatgtagaatatttttttccgcttccaacctagccttttagttatgtttactgaacataaccaattgttgttctctctttagatacaaaactagagtggaaacattcacacactaatacaaatggagtcttctagacgcgtgctcaac

SEQ ID NO: 67415 - DNA, 112 bp, Glycine max
aagcttttgaaagaccatctttgaacatttgaaaagacgatgggcttattatggtgtctgacttgaaagcagagaagaatctaaagatttaatttcaatgcttctacactct

SEQ ID NO: 67416 - DNA, 271 bp, Glycine max
  unsure (1)..(271): unsure at all n locations
ctccattatgttatccaaggagaggtctttctcagttctgcattctctatgatatccttaggcatttaggtgagatctctcttctttgttcaagttctttagacatgatgtcatcttcaagagtagaatccttttcttgaaaacctgtatcttcttcttctaaaaaaaatatcttaaacaatagagttaatttcatcacatactacatgaacaaattcttcaacgcttagagttctcttattgaatactctatatgctntactatgcaatg

SEQ ID NO: 67417 - DNA, 369 bp, Glycine max
  unsure (1)..(369): unsure at all n locations
gatgtaaataatatgattttattctagaaatagaaatcacaagattgaaagaagaaaattatgtattaatggtaagtatgttagatattaagtagggataattaagggttgactaatgatgattagattcatggaatagaaaaagggtggataagtcataagagnttaaagtggagggcattttcataaatcactatacaattagttttaaaatagaattttaatttaattagttctgactaattaaagtgtctaattatatgatgaagaataattaaaataagttaaagttgtaaaccctaaaaattcaactcanataatagacaaaatatgtgttgtgtatctgtgatgtcgaatttatcttagtat

SEQ ID NO: 67418 - DNA, 408 bp, Glycine max
  unsure (1)..(408): unsure at all n locations
tctgtgtagccgctcttagtgctcatattatcccanaaacaaatttctcttattactagttantttgaattctttagttcctgaatgtacaaccttcaaaatggtgctcgttcccctctttcttttcttgcaaaaagaaaatcaaatgttgtgaaaacatggatgaagtcctaagaaaatcaatatcaaagaaaacatggatgaaatcacaattaanaagcacaactacctatctttcagagtcctttggttaattggtcttgtctccttatgatggggggttttgtttaataatattatacttttgccttccaaaaaaaacttatgactgatcctcttttcattaatccaattttgtatgttactgtataaaagatcatgggttctccacctggctncactactttt

SEQ ID NO: 67419 - DNA, 168 bp, Glycine max
gggcctcttcttctgattctgggatgggtttggaaaatagggtagttgctagttcgcttctgaagtatttggaaaaattgtgaagcatgtgactgccatgttgatagtaactacccatcgtttaggtttatgatgagctggagttattctgaatgctatggaactgta

SEQ ID NO: 67420 - DNA, 259 bp, Glycine max
atctaaatgttcgataattgatggtgggatattggaatcaatccatgccacctgataaccttgaactttttcacatttgttttaatatctctatccattatatctgtctgttaatagctatctggtgctccatgtctattcaggtagttctggagttacaagttcatggacttccaaatctgtatggggtaatggggcaatgaaatgatttagataggtctcataccgaatgttcacatagtggctctgtattaagaat

SEQ ID NO: 67421 - DNA, 422 bp, Glycine max
caacaaatctccagacttgatgtttcctgtaattcttccactgattgttatgaatggtaactgtgctacaccatcttatcttccgagtgaaactattgctattgctgaatgtggcttgtaagtattcatcctacattcttcttctccctctattgtcaccttaaagtcttcaaaaccacttaagcctgctgctgtgccataatacccttgcttgatttcctgttgtttggatttccattataaaccctcctattatgtggcctgtagaaagatttaaatgccacagattatagcatctatccacattatatcggacaaaatcaaagagactcctatataacaagcccctgtattactatacaatcacattaatctttaggaaattatgcatatacgtccacttctagatattgatatcacat

SEQ ID NO: 67422 - DNA, 291 bp, Glycine max
  unsure (1)..(291): unsure at all n locations
ttacaccccctttactaatgccccncttattattttctgaatttttttcgaacgtacgaacttacaattcggacgatctatttcctttcgcaagtacgatcctacggttatgattactcttttggtttcaagaagtacggaactacggatgcgcaaaacaccttttcgattccgcacatacggattcacggttacgcagcctgcttctttgattctgagacgctcggactcattattgctgtataattatatcctcgacaaattaggttgacagtgcctcttactaccttc

SEQ ID NO: 67423 - DNA, 246 bp, Glycine max
  unsure (1)..(246): unsure at all n locations
tctcatgtattctatgagggctcttactcttctgctcgtgattctgggaatacataagacctgactaaacactctagccacactctaggataaccaactagtggcctaacgatattttgttactctcncatgtgttctcatttctcagattctacagttgttaagtgaacgatctaagttcacatactgttaagtaatgattatgtaatttgttgttgactatggtagtagtctggttgtgatttg

SEQ ID NO: 67424 - DNA, 177 bp, Glycine max
aaaaaaacactgatattaatttcatcaagtcactgtcaaacacacttttgacagccaacaactcaaatactgaaattaaatactgaacgtaaaacttaattaaatgactgacataatcataaataactaaaatactaaatgttcaaatgcacaaattaaatgcctactctatgatgc

SEQ ID NO: 67425 - DNA, 338 bp, Glycine max
  unsure (1)..(338): unsure at all n locations
catggattacatatatagcattattgggttcccattcagtggcttacaatnccattgaacgaccattnttttcacttaatatcaacaaaaataacatagcatgacgttccctaattgttctagcatacttgtattacataataacatatggctaccttggcttctacctgtcacatgaatgcatagatgcacatactttcaccaataatacccaacaagacacccgttggaaactgtctcagtctataccaatatggacaactgacttactatgaaccacccagcatatgtgaatcttgttgggcctagacatgaatatacgtttcttggataaaaag

SEQ ID NO: 67426 - DNA, 383 bp, Glycine max
ctgcacttcataatctttgtgaacacactttttatatggatattctgatcattttctataaggatacacggtctataatatctaaacctgtcggactcagaaccaacacattgaaataaacatcatctcttgaagattatgtcaaagggagattgtgtctacaatcgtgatacaaaaatagtagctgaatcttacaaacctctcataagaacgttcttgctttagaagaaatacgtctttaatatcaatgatctaacaaggagaactattgagctttgcctcttatgtcatatatgtcttgaggagtagtagtgtataatagcaattaattgctgttgctttaataatgccttgtaccttgttgaattatatagaattaagta

SEQ ID NO: 67427 - DNA, 229 bp, Glycine max
atgttttgatgatgatcatgatgatatgatgcaattgatgtaaatgggcttttcaagattaaattcaagacaatactttaagattacaagtcacagcatcaagatgatcactagtatattatgaagggaattcctaattgaattagcaaaaggttcggccaagtaatttaagttaaaaagttgtttacaaaggttttactctctgggtattcgataccagaggatgtaa

SEQ ID NO: 67428 - DNA, 470 bp, Glycine max
  unsure (1)..(470): unsure at all n locations
acctgcagctgcagcttttgttcatgattaaattaaaagaaacaagctangttgtgatcnatccaccatacataaaaggagtatggagcactatccatttcggacttaaaccatgcatagaatattctggaagtttatataaagtgacatcctaaaatacaatattgttacttattatttaagatgaccatatttaccacaacatgccaaataagataccgaacaaaatgcccgtttaaagacacagtttaactaaacatgatgagcaatgatatatcactatgcaaaaatccatgataaaaacaacaagctatgcatagatagcattccaaatcatatttgtgactgggttggatagtaaaaagatgattaatgactaacttccatagatgaaatacagaacacatgtgcaagctatacactacacttgagacaataatcttctttacacaaaaattactcgagttgac

SEQ ID NO: 67429 - DNA, 193 bp, Glycine max
  unsure (1)..(193): unsure at all n locations
ggactcgagagcncaaacagggctgcactccccaaacaaaatgtgaacagatcaccacctagaccccgaactcaatggccacccgaataaaaagaaatttctgcatgccatccagaaactggaccctccaaagcgcagccacagtgaggacacaggacatacaactaaggcccagacaagactgaagcttcaa

SEQ ID NO: 67430 - DNA, 273 bp, Glycine max
  unsure (1)..(273): unsure at all n locations
cactttcgaaacgtttccgtgggtgatttcgcgaagaatttctgccgttcttcgtcgttcttcgtcattcttcggtcttcaaccagtaagttcccgaaattgaacttttcaattcattctatgtacccttagtggtccccatttgtttcgcatgcttttattnttatttcatttactttttggtaccccctttgacgtgctttagtcatttatttaagtcattttctcgcttaataanaataaaataaatttcactgatcattcgtattggac

SEQ ID NO: 67431 - DNA, 259 bp, Glycine max
  unsure (1)..(259): unsure at all n locations
actctcccactttcacaaatcaaacatttacacaccatccncaggtgcccaccttcaactgagctcacgatctcctacggagccccgatcactcgtcctgtcaacacacgggccccattaacccctgcaagcgtgcatagtatccgggaaatacacgttcaaatatcatgaactaccctaaaccaagaaaacatggcagaggcagaaaactctgcccaaaacacatgccaataccatagctttcgctactcatataccc

SEQ ID NO: 67432 - DNA, 371 bp, Glycine max
  unsure (1)..(371): unsure at all n locations
gcagccaatgctatggatacctagcgagattctgatgttaacatgactacactagctcagacgtttatcattctttccttcttgaacttcattcccacctcccacacttatgatgtcactcttgacaagaccaaactcatctatggcattattatgaagatgggcatgaatgcggggtacctcatctcccaccagatctcccncattgcttatcatgacacatccagacttggattcccagcctngattatagcttaatgttaggctagggaagttcagtatgactcgagatcgttggagagcctgagtcctgccattaatatagctttcattaagaggaactgttgcaatcttgatgatccaacattaac

SEQ ID NO: 67433 - DNA, 371 bp, Glycine max
  unsure (1)..(371): unsure at all n locations
cactttcttgtctncacgtgtatctttaccactggtcttncttctcgcgatgcttcttttcatgtccgcctgagtgggcttatagcctaaaccatacttcccacgatttccttgggcatttatcaggctagttatgccgcccgtgtcttttcctaaacccattccgggttcataaccgttccccaacataactcgggccatcattactgcttgcattggacagacaanggctgcccagagaatgagtccacggaggaaatgctgaccacctcanaagactggaaagcggnttctaacgattcttctgcggcttccacataaggcatagaggatgggtagcttaccaagatgtcttcctcgcctgacacgat

SEQ ID NO: 67434 - DNA, 269 bp, Glycine max
  unsure (1)..(269): unsure at all n locations
ctggggctcgacaacttttacctctactggaaggctactacctcggacatcagacaatctccattgtgcactatctagggtccacataatacatgtgtcacaacatacacgtgtcaagctatgtggcattatgagtcacacatanaccctccatatcaaccctagcatatgagcacaaatggcatgccctcaataactgagctctcaactgatattctcaacattattaacgactgtgatggtgtcatatcatcacttagctgacaata

SEQ ID NO: 67435 - DNA, 366 bp, Glycine max
  unsure (1)..(366): unsure at all n locations
cactgttgatgccacattataagtgtacttgaagtccttatcagcttcattgtcaaaggacaatgcagaaatgagaaccattagaagaattgcaggaccaatgcaattgagtgggaatattgtgttgatttgaggaacccttgctaaggctaagattattagagggagggatattggacctgagggcaaaatgaattctnttgatcgacccaaaaagatctgcctcttcctgaactcatgtccattaccaatatgacaagagtcaccaagtaagaagctgctgtaagagaaggaccaagatatcaacaacaagatggtagtttgaagggtatgttttgcacanaaataatggtantgcaattgatt

SEQ ID NO: 67436 - DNA, 336 bp, Glycine max
  unsure (1)..(336): unsure at all n locations
caagaactatatgtaacaacactggttacattgacttctactcaacctttgtttaactataaataaactcttaaataatttattcatgaacatatgtgtaattttcacgtgttaaacatactggacatagttgagataatacacaaacttcattgntggaggaaacataatcttttatttatcaaaaaggtgtgtcaacatatttaataaatacaactaaattcgataaacatcaaatttattgtatctcatatgaatttgagactttatatgatacttagtatacttgagaccttgtttaaatctaattattatggtntagttttaatatattta

SEQ ID NO: 67437 - DNA, 333 bp, Glycine max
  unsure (1)..(333): unsure at all n locations
ttcatgtaatggccaattcaaaaatggtgatttgacatctaattggttgaaagaccaccctttgaaatatcaattgatgtcactaaaccaaatttctctaacttggccacttgtgcaaacatttcctcatggccattcttccttttgtaaaaccctcttgctaactaaccttgccttgacttagcaatagtttcatttagcatcttcttaatcttgtaaactcattntacattaatgggtttttatgttgaggcaatggaactagttgtcagaagtgattcttcttaattgaatataactcatctttaataacaatcgcttatttcccatctt

SEQ ID NO: 67438 - DNA, 302 bp, Glycine max
ttttcatagacactcattcacgcaaataacacacgacatatgactctcacacaatcacctgagggatacctatccaatggcaccctataacaacacagaacctgctccttcttcaaatgctgttgcccaacaaccatacattctcccaatcaacacaacacaaccccagaacaaccaccattaggcccttcacaacttccatcgaagacttggaggcaatgacttgcgaacatgcttttcacaagaacagacctcattcaacttaccaacaagggacatgctcccaataatacacagccaaa

SEQ ID NO: 67439 - DNA, 388 bp, Glycine max
  unsure (1)..(388): unsure at all n locations
gatcaacgacaatgcctacaagattgacttgcctagtgagtataatgtaagtgccactttcaatgtgtctgatctatcntcttttgatgcagatggaggagccttggatttgaggacatatccttttcaagaaggatggagtgatgaggacataaccaatggcaatgaccatgaagcactttgaggtcccatgactagaggcagacttaaacaagcccaacacgtcatagagacaaggctagtcatttgtatagctgccattgatgatgattgaaggcccaagtggagaaagatgaatgcccanaggcagaggcactaccaagactactaattgttgttgaaggcccaaactaacttgaaggcccaagttaaataagtttttagttat

SEQ ID NO: 67440 - DNA, 277 bp, Glycine max
  unsure (1)..(277): unsure at all n locations
agaaattcgaatggtcataacatttcactcggatgtctgattcgtggacataatatatcgagacgctcaaaatngaacagcggaagctttcgagaaatttgaatggtcatacctttacacancggatgtcgaatcggggatataatatatcgagactctcgaaattgaacaatggaagcgcttgagaaattcgaatggtcataacatttcacacggatgtctgattcgtggacattatatatcgagacgctcgaaattgaacagcggaagctttcga

SEQ ID NO: 67441 - DNA, 191 bp, Glycine max
tgaacgccaaaacagctctcgcagaaggccttagtcaaaaaaaacgcaaaaaaaacagcgaacagagcggcatcaaaaaaacaagcatagaaagtactcaaatactccgaaatcaacgtgagaaaaagaaggcacacgcacatccaaaatacaacgacgaaaacgaaaaaaaaggaaccagagaagacaga

SEQ ID NO: 67442 - DNA, 374 bp, Glycine max
acatccacaaatcacgcatatacccaccatcctcttgtgcccacctacaactgagctcacgtaactccacgtatccgatattctcgtttctctcaacaccaggaccacatcaatcctctccaagcgtaccgctacatactaggaatatacactatgcgatcagcgcaatactatcacagccaagaaacagggcgagcggaaactctactcaaacaccaaccaaaatcacaactatttctcacttaaagacaccaggaacataaccttcgtcgcaatcggaaaccgttggatcgactcagaatattactggaagtctctagtacatatactcacactgttgaccgatgggatctactaacaaacaaccagaactc

SEQ ID NO: 67443 - DNA, 348 bp, Glycine max
  unsure (1)..(348): unsure at all n locations
agagagagctcaagaagccagttagtgacagcttcactcntttcattgcttaaaattatatctaacctgtagcaaaattgtgcatatctggtctagccagttcccaattgccttaatgatatctaatggggggatcatatttggataccggtttgtctaaatattctgtgagaggcggctatttattttttaattatggagagaggcggtgggaatgtactgtatcactaattgaagttcttcttcttgatcatttctgaagatttccttatgtttgcttcactagcctgtcttgatgatagggtatggaaagtatgcaagcttaacgggatcattgtcttgtgattg

SEQ ID NO: 67444 - DNA, 288 bp, Glycine max
atatcaaagaagaggccacataagcattggtcacaatctccaacgcttgaaaccggttctagtaattccttcacgacttcaacatatggaatagaagattggagactaactagtatatccttctcgcctgatactatagtgagttgacctatcacggtcgatgggaccaccccagcaaaatggatctaaggctgactcagcaaacaattgtagcatgagtatatccatgattggaagtgatttgaacgtgcacgaccaatttgaatggagatgatctcttctccatat

SEQ ID NO: 67445 - DNA, 360 bp, Glycine max
  unsure (1)..(360): unsure at all n locations
agcctgagcgttcacatgttgtgcgctgcgtgatcaccntctgcataagtttccaaatcatcgttgtcatatgcgtgtcatggaaataatgtggggctttcctttgtatacctgaacctctggccaaagcaagatcccttacatacgtcatgtcttttcttctatatagcctctctgggccaaaaccccaatccgtcgggcctaagcctcgacccattgtaggaaattttgcccttatcctcgataaaagaacataatgatctataataaaaatgagaggaagaaacagcttcatttactgtcaagttatgaatgtgcctcaaaaggaaaagaaaaagagaaaatccccgatcaaagatt

SEQ ID NO: 67446 - DNA, 241 bp, Glycine max
  unsure (1)..(241): unsure at all n locations
ctctatggtttatgctnctctactgaccaccacacagacctttgccttctgtgcagcaantctgaagcaattgaacagcctacagcttatgtngcaaacatctacaatagacctcctctacctcagcagcataatcacgcacaacagaacatatatgacctcttcagccacaggtacaatccccggtggaggaatcattccaaccttagatggtcaaatccttcacaacagcagcaacaac

SEQ ID NO: 67447 - DNA, 432 bp, Glycine max
  unsure (1)..(432): unsure at all n locations
ccttatatactaagctctccganggctggtattttcatttcctgaaatatctaagaatctctgccaatgatggtccttctccttcttggaaggtaccacaggatatggtacttccatactttcattcaacgagttatcacttctactcttctcctccttttcattattttcaattttntattttctttttctttttctacttctttttctttttcttggtcattaaaatctttattcttgaccattcctttgttctctttttcctgattgctttcacctttcacatcatttttcttgccatcagtaccttntcttttcagcagttttcttattatgcacaacactctcctcatcctcagccttcacaaaccttntactccctttcatcacagctgtgcattcctccttgggattcttttctgtatttgtcac

SEQ ID NO: 67448 - DNA, 345 bp, Glycine max
  unsure (1)..(345): unsure at all n locations
actcccttttcatattngatttcatgcttaaataggtggccttcttcatgctcgtgtgcttagcacacgtatggaccgcttagcgcaccgttagtaattttgtcttagcgcgcttctctcacttagcgaatgagctgaagcggtgcgcttgatgacctggagcagtgcactcagcgatcctggcaactcatcttcttctggattcttcctcccgcttagccactgaaggttgctcttagcgaattctcgctaagccagcagcttggcttatcgaaagagtgaaaaacaacactttgtcaaagggttctatttatacctgaatngagagaaattgattattataca

SEQ ID NO: 67449 - DNA, 317 bp, Glycine max
  unsure (1)..(317): unsure at all n locations
tcaatggggcaaaacataccaaatgaatataatgatggatggctcanattctcacaaaggtaaaatcatcactttcaaattgagctttcaaaactatcatgacatgtagagaagaatcagnggattcaagtcacaaaatgtcaagaactttattttcaaacattacccatttttgacatatctatattcaagaaaacatgcaagtctacgtgcacacganatgacccnaatattaactganatccgacaaactacaccattacaattacacacttataattacaaaccacaaactgcaaacaagaaactccccccct

SEQ ID NO: 67450 - DNA, 170 bp, Glycine max
tagtcagggagaacctgtgatgtacctaaacaggcgagctcctggcagtcaacagataataggaacaaagaccacacagcactgatgcttgtgtggtggctggccagctgtgaactatgattgatatatgggatatggactctggtaatcgattaccaacggtgggtaat

SEQ ID NO: 67451 - DNA, 448 bp, Glycine max
  unsure (1)..(448): unsure at all n locations
tactcacgcttacatangagctgcatcatgtggtatcaagagcatcttcatctatgttatgttctnttgctttctctatctttttattcggtcaattcactttaattccttgttcttcatcttattctccatgtatatccttcatttgcttgtgttttgatgctgtttagagtatattcaaaaaataaaccgattaaatcttagatctacacttgttcttgcatttctatggnntcaaatttatatatctactcttgaatcatgtnnttgtgtngattttaggttcaatcattntccagtcataatcttcttgtactcgaacctttaaatctaaatttattccaaaatattgattataaaanaagcacaaaaatctaagtgtaaatcacttaatctatgttgtcttagagtcatgtttagtcataataatcgtcacattatgttctat

SEQ ID NO: 67452 - DNA, 290 bp, Glycine max
gtacttgagaaggaaaggattgagcatatggaggagaggctaatggccattaaaggaggaggaaattatgcctttgctgaaatgaccaaaatgtgcttggtatctgacgtgttcattcctccaaaattcaaggtgccagaattcgattagtaacaggggaactgtttgccaagaagaatcaattgataatgtattgtatgaagatggggcttatgacagagattaaaagttgttgatgcatctctttcatgagagtcttgatggggcagctattacctggtataccaata

SEQ ID NO: 67453 - DNA, 340 bp, Glycine max
  unsure (1)..(340): unsure at all n locations
catataagtactgggaattaaattcatacatgcacagatgacacgacacatagtttcctctgtcagtccgagttgtaattntataagatgttaccgttctaacttattgtaattattctacatcatataattaaacactttaattagtcaccaactagtttaactaagattctatttttaatttgggtatagtcaattacgaaaattccctncactataaactcttatgactcanttacccaatttctaattctatggaatctagatcaccattaattatcccccacttaattctaacttacttacattaatactaatttatttatgctctaatttattc

SEQ ID NO: 67454 - DNA, 427 bp, Glycine max
  unsure (1)..(427): unsure at all n locations
agcgagaattgtatgtgactcctataccattagcgagagtgtgattttaagtgatagngctgatactggtttcaacgccgcgagagtgacacctatagcgagagtgacactaaaacctagacgatcatgagcaagactgacgattatgggttcagcgtcacaagagtgagagtgagagtgaaagtgacaaatggtttgatggtgccagaaacgtgagggagatgagtgaatttcctaaagcacgaaatatattataaataggacaataccatgtcatgtttttttttcaaaaaatgatgttaacatgagtttggtaatattggttgttgtaataatcgatgctaaagagtcacgataactttgtttttgaaaactatgtaacaactaacctaactcgattttgaaatgaatgtacaagcatatatta

SEQ ID NO: 67455 - DNA, 348 bp, Glycine max
  unsure (1)..(348): unsure at all n locations
ttgtaacacgtctactagtacttcatgtttgtgaggagtcttttattattgcngcaattggtgagaattaaacacctcctttgtatgtcaaaattttaaatgatatacatatctaatataaattcattgtaaattcatgatgtgtcgagtaccatgtactcctttatgaaagctgcaggattcaccaatctgaacttataaaggattacanagtataggatagtntatatttgagtttccagatacaacttctaactttattttatttttggatttatattgtattaaagtacattatactatagnattatcgatcttgtaagtttttgttataagtattagtggtat

SEQ ID NO: 67456 - DNA, 334 bp, Glycine max
  unsure (1)..(334): unsure at all n locations
tgcaaattcataatcctgagcaatcatttgatttaattttcaacatatcatctttgcattgggaagttttaatttcagagtctttctcattgatttttntattcttaatcatgaattaaaaatacctcccggtgctcattccaaacgtagagatatcacatggaattgaaggaaataaatataagtggaggtgaatgtgaatgggtgtgacctcatgagactcaagaaacgcttctgtgctaacaacaactccatattacgagtgggtcgcttttcaagcggaatnttattttaaaaaattcttgtaattactgaaattacaaaagtcatggtt

SEQ ID NO: 67457 - DNA, 281 bp, Glycine max
tatgtgggaaatcgtgtagcaattttactggcctaagagtgctattatctatttatatggatattgcgttttgtttacaagttacgaatgcaagacaattatcaataggaattaaaatatgctatgatattattaaattttgataaagatattgataaaaatcactttaattatttatagcgagctaacgtttatttatgatgaaattaactattagtacatgcttaagacatatataactatattttttggaattatacccactctctatttttaaaaga

SEQ ID NO: 67458 - DNA, 215 bp, Glycine max
gatatatgtctcagtgagcaatcaccccacgctggaagaaccactcttgatcaccatgaccacgatttgtcattggaggtttagtccccagaagagaaacatatttttggtcttttcctatctctcttccaaacatacaaaagctcaactccaagagctttagagacaacaacactccaaggatctcaaccattaactcagcatcaggaagtact

SEQ ID NO: 67459 - DNA, 290 bp, Glycine max
agctggtacatgagttatattcattgggcatgccgccgtatctgaatggttccataaaccgcttggctagcttggaatatgtcggggccaacgacgtctgccggtatggtcggaggcggacgtgtacccagacacccacctcataagatatatcgcggcggtgttattcggagcaaccttcatgagttcctgcgctcgttgaaagcggcgcgtcaattgggcgtgtacttgcagacgcgtggtgagtagcgagtcaacggcatcattcgaggatggaccttggagatagt

SEQ ID NO: 67460 - DNA, 328 bp, Glycine max
  unsure (1)..(328): unsure at all n locations
ttatctatataccattngtttgttgcttgctcgaatcttgatttcaggtattgtattgtcatcatcaaaagggggagattgtagatgcaattggctttgatgttttgatgatgatcatgatgatgtgttgcaattgatgcaaatgggcttttcaagataaaattcatgacaatacttcangattacaagtcacaacatcaagatgatcactataatattaggaagggaattcctaattgaattatcaaaggtttggccaagtgatttaaaatataaagtgtttttcaaagggttactctctggtaatcgattaccagaggatgtaatc

SEQ ID NO: 67461 - DNA, 208 bp, Glycine max
  unsure (1)..(208): unsure at all n locations
aaacacatcacatctacaggcttctactcaatacccagtacattctctttggttcgattcgtaaaccgtggaatcgactgataatttactggagatttctagtacataagtctacattttgaccgttgggatctgctagaanatgtncagaatccaatatgtactacctntcccataaccagcaatgcacaagcatttttctgcacat

SEQ ID NO: 67462 - DNA, 283 bp, Glycine max
  unsure (1)..(283): unsure at all n locations
agtatccctgcgtctaactcaccattgtataccgctatacacgatgctactccctaagtcttatctttctttctactttattccatgccttacggattctctgaagtgtcnttgcattcacttcattgaaacctcacacgatgagaggcgcgataatctcctctgatggtgcacctctcatanggtaacccaactgtcttatggtcaacacgggattataattaatataacccctcatccctatcaaagggagtattggaaatccttcacatgagcataacac

SEQ ID NO: 67463 - DNA, 385 bp, Glycine max
  unsure (1)..(385): unsure at all n locations
taattctaaagaggacacaactaatggcacggaccatgaagcacttgaagggcccatgaccagaggtagacttaataaggcccaacatcgtgatgaagacacaactaatggcaaggaccatgaagcacttgaagggcccatgaccagaggcagacttaaacagatgcaacacgtcatagagacaaggctggtcattngtatagctgccattgatgatgattgaaggcccatgtttccataatctttaattttatnttattatctaatttttgcaattaaataaataaaaatggtggttgtggctgaaaccaatgccttttagttgcaccaatttatttcgtttttagggtttggtgaactatatantatttcgtcaaaatgaatg

SEQ ID NO: 67464 - DNA, 353 bp, Glycine max
  unsure (1)..(353): unsure at all n locations
cttcttatctattctttnatggaaaagacgttttaatttaataaaaaaatctaaattcttgtcttactatacatttatgttaaatattaaaaagagaggtttaatatatatttaaaataaaaaaatatttaataatcatgtaattacctttaaaaaaatggcataactttaagaaattagtttaattcctttatcattttatcctccgcctaattcactcctttaattatttggatataagctntcttaattatatgtctctctatatatntaaattttaaaanattagtatatattttactaccatatancttataaattaaaaaaatacattaaaagtatactaataaata

SEQ ID NO: 67465 - DNA, 370 bp, Glycine max
  unsure (1)..(370): unsure at all n locations
gatcattaatattatacacattttaaaaaaatatgaaaaaaaaggcgaaataaataacaatgtacatggaagtaataccttaagaagctccaactctagtagtccaaaccactggcagttcaacacttggagtaaattctaaaaatttgatcgatttggttggtcaatcaacttgatcggactataagtgataactcgtggcagtgtccaaatcgtcacaagagtaaagtctcggaagccgagtgtcaatccacaggactntgtctgacttaaataatgcaacccaattaaagcgagaataagaattaaaataaagataagaaagaagaagagacgtaagaaagatcgatttaaagataaattgagataa

SEQ ID NO: 67466 - DNA, 242 bp, Glycine max
aaattgttcaagaaacttatttataaactatagtgatggagacaaatagttctatttttgaagatataaaaatatttaagataattatttcagaatcatatgtatgttctcactaaaattctccaaggggggaactcataatctcaggaatgctaaataatctatttctctatcacctctcaatatttataatatttatttaataaataaaaacatctttgcttaaatatgtccaaacttat

SEQ ID NO: 67467 - DNA, 274 bp, Glycine max
  unsure (1)..(274): unsure at all n locations
gaatatcgaaacgaaactncaattctaactgaaaacagcacccattgcacctaaagaactgtatgcaagatttgtccaagaaatataccttgaaaccgtgacacaaccgcagatggcaagaagcaaacctcgtagaaggaatccatatccaccaaaagacaaatcaagttaatgactccacagacaaccaccactgcagatgtgagaaacggaatggctttccaccattggctcattctagtatgaaaccccgcctgagtcaattaagcatcaa

SEQ ID NO: 67468 - DNA, 412 bp, Glycine max
  unsure (1)..(412): unsure at all n locations
gagaaactctcatctcagacaagtctataacattaatntaaacttgctcaaactggttttacgatgaagactccaccgattcaaaatttgacccctcgacacccaatttaccctagaaatggctcttgttttcacctttgtcactcattatattctcatttgctctgcccaagctttcctacaagtcctaattgacattgtaaactatgatcaactcactttagactccaatttacaatatacccatatttagtttctctaaccctcanaatctcacacttttctacctacaacattgtcatcctcacatttaacccctaagttaaactttcccctcattcataccagttttctatcaacaatttcagcacacaaacatcacaaagcatcatcatatataccctaaacagaa

SEQ ID NO: 67469 - DNA, 307 bp, Glycine max
  unsure (1)..(307): unsure at all n locations
atcgtcctttcatatttcaaatggcttggaaatttcgtgagtatagtggtggtgttgaggaaccgtggaagtaccatgttggtaaacttcttgaagctttgcataaagttaatgaggactctattaaatttaacaaagaggtgtttggaaatattntcagatgaaagaagcaacagagtctagactccaagggaattaaagaaaacttgaaattgtggattctttggctttagttaacttggaaaaaacccttcaacatgacaacaaccaaattctttttcaagaagagcttctttggtgtcaaaag

SEQ ID NO: 67470 - DNA, 271 bp, Glycine max
  unsure (1)..(271): unsure at all n locations
tatgcgccatatttcttaccatcgttctcttgcacaagacanaataaaatgcacccatatacaatcaaggcagcttncgttaactagattatntacacgtacttccaaggtgtatttgttacttacatcacacacatctncttggctaaattcacatacatgcatactccaagcatnttggggtaccaaaaattgcacctgtgcacatcttggtatttctaatacctatacatacacaaacttcatgatgaatcttgactatctacacaat

SEQ ID NO: 67471 - DNA, 384 bp, Glycine max
  unsure (1)..(384): unsure at all n locations
aaactccgctctagccaatggactaccttgaattaatcccttgatagcccttttgtgcctgttccctttcctttgtttgagctcactacaagccttaagtgaaaaaccatgatattaccatatccttaaggatatttggagctttggaattgttatgggaataagtgtggggggtttatgtttcattggacaacttgttttgttgactatgcttcatgaacgaaattcatggngctccgaaataggctgagaatggagaattgcactaagcaatatctacacatggctccaaactctaaggtggaggacgcatgaatgaaaacgccattcatggagctccgaaaaagggttagaatggagaattgactgagcaatcactacgca

SEQ ID NO: 67472 - DNA, 138 bp, Glycine max
  unsure (1)..(138): unsure at all n locations
gtcatgctttaattctngtcttactcgctccatgagggacctctcgctctttgtaggaacacgagggccaaaccccatgccatcttgcccatcgaaactactatcaaagagagtggcatcactatctacttggtcatc

SEQ ID NO: 67473 - DNA, 409 bp, Glycine max
  unsure (1)..(409): unsure at all n locations
cctatgatactaagctgttcacccgtttgttatcaccattctgctcaacacaatgaataagatatattggggtgattgcacagggacttacacttcatcgtattacagacagattaacaatcttagcacgtactcttttctctcaaaaaataaaggattttgagagctattttaaactttcaaagaatttacataaagtggattttacaaaaaagaatctgaatgagtgctntagttggttcttcatgtcttcaacaagtgttcaatgtctctaaatggatagaattctcctcttaagctcngtgttgaaaaatgtggtcattgggcatataatgctngattgctgcatgtacttcttcaaaaaccactattctttgctaacatgttgaacacttcaacaagaaatcac

SEQ ID NO: 67474 - DNA, 446 bp, Glycine max
  unsure (1)..(446): unsure at all n locations
aatggatgttnnaactttaaaagtttcttagataaatataagtgggggaatacattctaaatanaatcttgttgtgtttatgagtacaaacgttgatctcatagactatcaaacaatacaaagtgtattttcagcaaggattgaaaatggtgtgatgaagacgccatgcgagtttgactccntgactgcactacaactaatcaaccaaggagatgtctcttttcattcctatgccgctttgatcaacaacataagacaactacgacctcattcgtggaatggttcnttcgttcatacctaacgtgaaggaaacttatgtgtggatgcctttgcaaacttggctcatccaccaccctgctttacaaagatatgtaaacaacacccccatgcaatgctttcctgtcctgacgatatccttgagtcattatactaaaactaatctggtt

SEQ ID NO: 67475 - DNA, 308 bp, Glycine max
gtatatggtagtaatttaagaaaaaaaaaactactaaaaaacaacaaacggaacatgctagattgaaccaccaaatcatcttaatatggttaacccatgacattactgaaatcatttactacatatgcaaatggaaactgaattatttgtttctctttctttcctgttcacgtcacaacacacttcatgcaaataacaaaatggaaactgaagcttatttgtcatgaattatgacggaagcttctggagggattcatcatgtaatctgtaatgaaagggtaagtttcacaaatccattgaatatgcta

SEQ ID NO: 67476 - DNA, 358 bp, Glycine max
  unsure (1)..(358): unsure at all n locations
actacacaatttaatattaaatgaacaaacaatcactaatggtgtacgaattacattctctaacagaaatatcgattgacaaagtggatagattacttttacacctatgatatagtatcagaccgaataagagaacccatagattgggccattttaaacttcttttccctcttnttttcacttggtttctccattttaggagcattgatcaaatcgacttgaaaactcacactctaatcaaatcaattatttggattcacattgcgttggataattagatctccttttttttacttcaaaatgaaatccaatacagttggtggagcctataataaatttctaaaaaaaaccactggtg

SEQ ID NO: 67477 - DNA, 319 bp, Glycine max
  unsure (1)..(319): unsure at all n locations
tttatgncaatacatcaanatcttatgttntacttgtgtcatcatgtaatgcttcctctactattgattccataaaacagaagataaaacactatanaatgaaacctaatatcatcaacaacataaaccacaaattttggctgcttggtttgtgcccatttcccacatntgatcttcgatgatccaatctacaaatctcccccccgccccccataaaaatgaataaaagaaagagaatataagaaacttctaaaccagttcaaaagaaagacgctaattaaaattcattgaaaaataatataagaaaatgagcgaactg

SEQ ID NO: 67478 - DNA, 268 bp, Glycine max
  unsure (1)..(268): unsure at all n locations
accccanttgctttttttttgtgattctttnttcgtagagatactgaaacgtatgatatttcgaaacgatactaggattctttccgtactggtacggaacctagcggattacataatcatcccctatttgacttacggattgtacagaacctcactaattatgcccttccttgatttccggagtgtcacggaaccttacggattgtgcatcaataatttcttttgctttccggcatgtccngaatttacaaattgcctatgatgggtc

SEQ ID NO: 67479 - DNA, 193 bp, Glycine max
taaacatttcaaatgatgtcaacaccgataaaattctttttaatttattttagattttttgccttcttaataacgatttcattcctaagatcccttagaatcacttacaaatctttgcaggtttcttatactgtatacataaaactatttatatgggaggtccaatttataaaaagtcctcgcataaagatta

SEQ ID NO: 67480 - DNA, 260 bp, Glycine max
ttttcgaaatttccacagtcacactttctttgaattgaaggctgcaaggccttaattatgactgggaacaaatggtaaattttgctgtcaaaagtctacctctcaaagttatgagagtttgttgtcaaagtttatctctcaagatgagaagtttcatgccaaatgctatctctaagataaagagtttgatgtcaaaagctatctctaagataaagatttactggtcaagttatcttcaaaatcaatattttttctaattc

SEQ ID NO: 67481 - DNA, 300 bp, Glycine max
  unsure (1)..(300): unsure at all n locations
actagctgctttcttcctctatggctattagtagcatacaccttcgattggttctntatttggttcctaaccctctcatgcaacttctttacaaactctaacctaaattccccttctttatgtataaaagaagtgttaagtgggatgggaatgatggcatcatacccncaagggaattggatagaaaactccaagaatattgggcctaagatgcaagagaatgccctanggttttcatgaacctttgggtagattngggcccatgggcttaagatgagatcacttatctttgacatatta

SEQ ID NO: 67482 - DNA, 199 bp, Glycine max
tactgactggagcgtgccgggcttatctctatgttttggagttaacatgactcgaatggaagcattgatctttaggccgatagatggcttcattattctgcacgccctttcattatcatttttggatcagtgtatagggggccttgggtttcttatttgagaaattctaaaaataacaacggagttgccccaaacacat

SEQ ID NO: 67483 - DNA, 374 bp, Glycine max
  unsure (1)..(374): unsure at all n locations
atactcgctaaacccaaaggcccgcctagcgtgaagtagcgtgaatattaagctaccctatgcctaataaaggagtatgaagcaaaggagaaatacacaccgagactcaaaattctttaatgatacatccaaaattgaacatttctaataggggagaccatccttctataaccaatccccccttatcttcttctttctctatccacatcaacccctaaagtgaaagcctctatgactatgagagactaaacctncattgtgggagcttggcagaccacctcttgtaatgtactcttccttatatctattaatgaattgcagttatattgtcttttcgtgcttattgtgctgatatggtctgtcacccatactct

SEQ ID NO: 67484 - DNA, 406 bp, Glycine max
  unsure (1)..(406): unsure at all n locations
taacatgtagagatgggaacacatcatctaagtatcccaaagggactcgtttgtntctgcaagtaagganggttgaagtataacttctcaatggttcttttgaaaaatngcatttgcaggtgcaaaataaaaaaaataaaagaaaagaaaaggactacctatataagcatgaaagttagccgcttcaagaagctgggacttggctttgatatgcttatgaaggatagggacacaggctagtaaaactagtgtcgagcaagagtaatgttataaactagtgtgcagattatcttcatgtattcattatgaatagaaagggttcaatccttagtgacaccttgatattcgaatatttgaaacgtgtaattngctaagatgaaattcaatcgtcacgatatttcatcta

SEQ ID NO: 67485 - DNA, 357 bp, Glycine max
tgatatattgagagtttgtatctttattggaaactgatctaaattagactttgtgaacaactcaactacaatcttctttgattggttagagacaccatatcttgctaaccaaaaatactggatattatcatttgcgggtagactcgtttgtaaggtaaagtggacatgaccattgttgtacttgcgaaaggttgtaaaacttgtgtttgcaagatattggacatagttcgtgtagagcgacaaccacatactaacttctatgctgaattttgtttatttcctctacttcagtaaccaagtttgattgtattacattgaaactctgactcatatgttgtttcctatcgatgtgttttc

SEQ ID NO: 67486 - DNA, 373 bp, Glycine max
  unsure (1)..(373): unsure at all n locations
ccactacaacattgaagataatactaattagtcacctagatgaaaaagtgaattataaagtgatactcaacatacaattgaaacntgatcctgctccattcattcttcacaccctcgttgactatgtttcacattcaatgcatgacataatatccacactcatagccttcgatttgaacatgactctaaattcaaattgaaatatatataacatgttatgggtacaaagttactaaatgtcactaatcctaaagaaccttgataaatgactaacctttactcaatccaccaatgtgcgggtgatctgattaaccttccaagtattggttaatgtctttattgcactggtacacaaaaaaagaaagcttatatt

SEQ ID NO: 67487 - DNA, 449 bp, Glycine max
  unsure (1)..(449): unsure at all n locations
tactaagctcgagaggatgcttaatggagganaagatttatggagaganagaatatgtgggagcacgaaatcgaaggaagaaaaagggagagaagttgaactttgagttgtgtctcacaagactctcattcatcaaagttacaacaagcgttacacatgcttctatntatagactaggtagcttccttgagaagctttcttgagaaaacttctttgagaagcattcttgagaatacttccttgagaagctagagcttagctacacacacccctctcataactaagctcacctccttgagaagtttccttaagaagattcctaaagaagctagagcttagctgcacatacctctctaatagcaaagctcacctccttgagatgagaagctagaacttagctacacacncnctactatagctaagctcaccctcatgacaganaaaacatg

SEQ ID NO: 67488 - DNA, 286 bp, Glycine max
  unsure (1)..(286): unsure at all n locations
atgctgtgactgccattcctatacgaccaaagttccaccacccaacaatgtcattactcagccaataacaaacctcttcttacccaccgcccagttatccacaaagggccatccctatatcaaccacaaagcctgtctaccgcacttccaatgacgaagaccacctttagcacaaaccaaataacaccaacaaaaaggaattntgcagcatanagcctgtatggttcaccccatattccgttgtcatatgctaaacttgatcccatatccactcaataattcaatg

SEQ ID NO: 67489 - DNA, 354 bp, Glycine max
  unsure (1)..(354): unsure at all n locations
cattgatgatttatccccagatatttcaattatgatcntcgttgctcttgctgtctctactgtcgcatatcctttggacttaccggtgtaagatgttaaacaatgcataacctttatgttattgagcttttactaagttgatcaaattggtttgttctgcacttttgaatcctgtttctgtatctgattggaaatgtgggatcagatttgtattcacagataatgccgtgttatgtgatggatatattgttgggagacattcattttgcctatctattgtgaatgatttatgcggcctgagacactatccattttctgtttgtaacaaatcacacctaaggttgaccatataga

SEQ ID NO: 67490 - DNA, 252 bp, Glycine max
cttcaaaagacacttttccatgatctgaccgttgagatctgtgcgaagatgtcttgagtgtgctaaaagcttccgttcccgagagcatctcttattaagcatttcaacctttgctttcttgtagctaagaaaaatgccattcttcttctctcttcttcaaatccatttctaagttccagtactttcttcatcaccacatccaccattgccaccacaatccatcattgctctccatttgaaacccacaccgag

SEQ ID NO: 67491 - DNA, 101 bp, Glycine max
  unsure (1)..(101): unsure at all n locations
cccccacccaaccacangaaccgaaagcaaaaaaaaaaatnaaataaaccgagacgagcgcaagacgggacgaaccgagcaaaagaaaacccacgaaaaga

SEQ ID NO: 67492 - DNA, 432 bp, Glycine max
  unsure (1)..(432): unsure at all n locations
agcttgttgtaccagaactcaatcatcttttagcaatatttgagatctantaattacttagctccttttaatctcctttttaatgttgcgattggtgtttatgcatatgcattgatttgactttgttaccccatattgatttgactntggtacctgatataacagtaaccaagaagtacgttttccttcaattaattntctgggtttgacacattaataaagcttatttcctctgtatgtgtggtttttgaatgatgatacagagttgcctgttcatgttcacatggttgtaatattaatgttgtttttagatttcaattttgtttatttgaaatttgctttgtttgctggtgtgtggcgcaaatgccgcaggatcgaagtaaccatataaaacatcattgtccatccttaacaaaatataaatctaagtag

SEQ ID NO: 67493 - DNA, 253 bp, Glycine max
  unsure (1)..(253): unsure at all n locations
acatgaaactaacgagagagaatacaaactgtngataatagtacactccatatgtagtgatgctgtgtanaccactacaacaagaaagcactttaaattatagtattaggtagaaatttctatggttgtgttgatcatgctcgccctcactatannatggcaattggattgtgccacattgaagcttttacagttctgccatcactggtggtgactcgaaaagagagggattggccattgacgtatgagtttc

SEQ ID NO: 67494 - DNA, 287 bp, Glycine max
  unsure (1)..(287): unsure at all n locations
tgagtgtaactgaaattgtggcaaccaaaagtcacccccaacagccaacaagtcagccaccatttggtctcccaaaaggctgatgcctatgttgccaattgggcccttattacaactngaactanaccttaactaagccccttttaattgattaacccaaaacaatattttggtcagccaactntacaaggatggggccattatttagacaaactaaacactctaaaaattgagacaaagtggtgtcatttaatccctctccatttgggccatgatacaactcacaa

SEQ ID NO: 67495 - DNA, 293 bp, Glycine max
  unsure (1)..(293): unsure at all n locations
cacaagcatctgaaagaattccatattgtcttcttcaccatgaaaccaccagatgtccaggaggatcacatnattctgaaggcctttcctcattctttagagggagtggcanaggactggctatattaccttgctctatggaccatcacgagctgggatgnacctcagagaatattcttaganaaacatttccctgcttccaggaccacgaccatcagaaaggatatttcaggtattagacaactcagtggagagagcctatatgaatactgggagagatnaaaaaattatgt

SEQ ID NO: 67496 - DNA, 491 bp, Glycine max
  unsure (1)..(491): unsure at all n locations
agctntgatgaattagttntcgccaatgaaagaatcaaagtgggtctgaaaagaggcaaatttgatcatcttgctttgacaaataaaaagcctatggcaaatagagaggatgagaaggaggaaggaacccatgctgtgactgtcgttcctacatggccaaatttcccaccagctcaacaatgtctttacccagccaatatcaacccttcttattacccaccacccaatcaaccacaaaggtcaccctaaatcagccacaaagcccgcctgccgcacatccaataccaaatgccacccttaacatgaaccaaaacaccaaccagggaaggaattttccagaaaataagcctgcagaattcaccccaattccaatgccatatgttgacttgctcccctatctgcttgataatgcaatggcagtcataagcccaacaaagactcctcaacctctgtttcctagacaatataaccncaacgtgacatgtgcttat

SEQ ID NO: 67497 - DNA, 468 bp, Glycine max
  unsure (1)..(468): unsure at all n locations
ttaagtcgactgggctgcagctgctaagtctctggttttcaacctttatatctaaagtgtgctattcatctttntaattcccttctccctttgccaaaaagaattcgccaaggactaaccgcctgaattctttttgtgtctctcttctcccttttccaaaagaacaaaggactaaccgcctgaattcttttgtgtctcccttctcccttgtctaagaattcaaaacgacatagtctgagaattcttttgattcttccctttcccataaacaaaagatttcaaaggactaaccgcctgagaattcttttgcttccccattcacaaagtttcaaaggactaaccgcctgagaactttgtcttaacacattggagggtacctcctttgtggacaagtagagggtacatctacttgggttattgtgactgagaataagagagggtacatctcttgtggatcagttctagtgg

SEQ ID NO: 67498 - DNA, 488 bp, Glycine max
  unsure (1)..(488): unsure at all n locations
agcttctgtttcaatntcgagcgtctccatattttacggtgctctatccgacatccgagttaaaagttattgtcgtttgatttttctaagagcttcccttttcaattacgagcgtctcgatatattacgggacacaatcggacacccgagttaaaagttattgtcgtttgaatttgctcagagcttcagttttcaatttcgattatctcgatatactacgggacacaatcggacatccgagtcaaaagttattgtcgtttgaatttgctcagatcttctgttttcaattacgagcgtctcgatatactacgggacacaatcggacactcgagttaaaagttattgtcgttcgaatctgctccgagcttctagtttcaattacgagcgtctcactatattacgggactcaatcggacatccgagtaaaaagttattgtcgtttgaatttgctcagagattctgttntcaattacgagcgtctcgatata

SEQ ID NO: 67499 - DNA, 486 bp, Glycine max
  unsure (1)..(486): unsure at all n locations
agcttcataattatatcaatctgttaattctggtcttgttctataaggctacatctatttttgtggtttgctgattcgttgcgttgttatgcaatatggaatcccaattagttgatggtaatgatgagatggaagtttctggggatgtgggtttgagtacgtgtgaagttcagatgcatcaagaaacatatgaaggtgttctattctaatcattntaatttgatatggaattctgaatgaataaaaaattatgcatgtcttatgtataaagccttgcatcctgtttatgactttatcctggtctctgcataaagtcacaattgatgtagaaggtgtgtggcttttaaggtaataaaccttagttcttgcacccttcctcttggagtgagaaggaggctccggtttaattaaagagtgggttacctagtgtccattcctcaatatctattctactagctcanataataggctctgattatgggactc

SEQ ID NO: 67500 - DNA, 488 bp, Glycine max
  unsure (1)..(488): unsure at all n locations
agctngaatcggacctcagtgtgaaaagttatgtccatttgaatttctcgggagcttccgttgttcattttcgagcgtctgtatatgtgatgcgcctgaatcggacatccgagtgaaaagttatgaccatttgaatttctcgagagctttcgatgtttaattttgagcgtctcgatataatataagcctgaatcggacatcagtgtgaaaacttatgaccattttaacttctggagagcttccgttgttcattttttagcgtctctatatgtgatgcgcatgaattggacatccgagttaaaagttatgaccatntgaatttctcaagagcttccgttgttcaatntcgagcgcctcgatatattatacgcttgaatcggacctgagtgtgacaagttatgaccatctgaatntctcgagagctttcgttgttcaatgtcgagcatctcgacatattatgcgctcgaatcggacatgcgagtgaaaag

SEQ ID NO: 67501 - DNA, 474 bp, Glycine max
  unsure (1)..(474): unsure at all n locations
agcttctgcatgtctagggtgttctagagtgagatttgtccaagctctagagagtntgagagatnttgttgtgtgaagacctgcaaagaactgagcttgaagaggaagccgtcctgagagcttgagatgagtttatgagtgattgtgaggttctagaggtggaggagccatcctcaccacttgtatttcttcaatccttcatctttctcttctctttggtgtaaaggaagcttcctagttatggagagctaaatcctctgttggtttttccttgtaggtacttaatgtaaatacatgtatatctatttaatgattttttgtgtgttcactgcgctatcagaacttcattctaccatgcttatgccttgatcacgtagatgcatgtatctttaggatcattcaacagaggagactggtttgattcttataacctgataggacatggctagtttattgtattatcacgagggattt

SEQ ID NO: 67502 - DNA, 461 bp, Glycine max
  unsure (1)..(461): unsure at all n locations
agcttgaatcggacctcagtgtgaaaagttatgttcatttgaatttctcgagagctttcgttgttcaatgtcgagcatctcgacatattatgcgctcgaatcagacatccgtgtgaaaagttatgaccatttgaatttctcgagagcttccgatgtttaatttcgagcctctcgacatattatgcgcccgaatcggacatccgtgtgaaaagttatgaacatttgaatttctcgagagcttcggatgtttaatttcgagcctctcgacatattatgcgcccgaatcggacatccgtgtgaaaagttatgaccatttgaatttctcgagagcttccgatgtttaatttcgagcgactcgatatattataagcctgaatcggacctcagtgtataaaggtatgaccatttgaatttctcgagagctcntcgttgtcaatgtcgagcatctcgacatattatgt

SEQ ID NO: 67503 - DNA, 464 bp, Glycine max
  unsure (1)..(464): unsure at all n locations
agctngccttgaattgattactatggntatgattaccaacaagttaagtgaatcaattgtgtagtgcaatagttccaagtttggaacatgaagtgttaaattgtagtgcaatgtgttaaacatgttttagaagtcattggtattgtataattcatgagcaatgtctatgtgcaaaagttgttntaggggttggacttcaattaggaaggtgaggccctaacggattctttgaagtctaggcataggggtaaatacactcggtttgagtgctcctttaagtctatgttgatcccatatggctgaagcattctcgcaaaatagagtgaccctaactagtcaccttatgattttacttagtgagattgacttgatatacccattgtgtggcgtgtcttgttatgtctcctaagcgcccaatgttagttttactatcatggtaccaaactgcatataagtttgagtct

SEQ ID NO: 67504 - DNA, 455 bp, Glycine max
  unsure (1)..(455): unsure at all n locations
cttaagtcacccgcagctgcagctttataactgatagattacaaattatgttttgtatatgagaatgaataagagattcgaaaataaatttgttcttctaacttcaactcttaaaagcttctggtatttataaacttctttagcaagtagtcattatctctaaatgatcttcattctgtgtctaagcttgcgtatgaaggtgtatgtttgcgcattaaacgtatgtctatggtgatacatcactctacttatcttccttgagacacactccaactactagcttcagagatcaaatctactttaaggcagagcaagtctaaccatagtaggtacaattattgtggctgtggctctttgtggtcatcattgtagacgaaccatgcataactctatttatgagtntaccattctatagaatctaacgtaactattaactcgaacaaatatcctattat

SEQ ID NO: 67505 - DNA, 476 bp, Glycine max
  unsure (1)..(476): unsure at all n locations
agcttccatcaagtggtatcagagcacattagcttcaagtaggtgctccttaaacctccattgattttcagttttaccttctcttccattgttgtttcttcatttttctccatgtatctacacacatgtcttgtgctaaatgttgttaacatgattctttagagtttccaccgattaaacttgctatagaagctagattcgattttctatggttcaaatttcttgttcttgttcttgaaccatgaattgtgttgagtttaagttcctttgagattttgtcttngttatttttgtggctgaaacctaaaccataaaattcttacaaaaatattaaagtagaagaaaacctcanaatctagagtgacttgttcacctattgtagttntgtcatagaagtcatgtctagttatgaaacttgtcacataagaatttctatgttgcgctgaattctattntcttggttctttgtctaactc

SEQ ID NO: 67506 - DNA, 463 bp, Glycine max
  unsure (1)..(463): unsure at all n locations
agctnggagagagagatggtgtcctcacttcgtcttatcctngcttgttgngtgtgatggttggggatggagttcaaattcttgggatgtctgttgtgacgatattgtttgctgcacttggattcatgtcaccggcatctcggggaacactgatcacaggtatgctgtttttctatatgatacttggtattgctgctggttatgtctcagttcggatgtggaggacaatcagctttggcgaacagaagggctgggtgtcaattgcatggaaagctgcgtgtttcttcccaggcatttcctttttgatcctcacaaccttgaacttcctattgtggggaagccacagcactggagccattccattttcactctttgtaatactaatcttgctttggttctgcatatctgtaccccttaccatngttggtggctactttggagccaacgcaccncacattgagta

SEQ ID NO: 67507 - DNA, 471 bp, Glycine max
  unsure (1)..(471): unsure at all n locations
agctntccttgccccttgatatatttgatggactcatggtcactatgaatgacaaattccttgagataaaggtagtgttgccatgttttcaaagcccgtactaaggcatacaactccttatcataagttgaatagttaagggtaggaccacttaacttttcactaaaataagcaattggatggccttcttgcatcaacacagccccaatcccaacatttgaagcatcacactcaatttcaaaagatttttgaaagtttggcaacgcaagtatggtggcattagttagctntttcttaagaacattgaaagcttcttcttgtttctctccccatttgaaaccaacattgttcttgagcacttcattgagaggtgctgccaatgtgctataatcactcacaaatcgtctataataactcgctaagccatgaaaactcctcacctcggtcacagacttangtgtaggccattct

SEQ ID NO: 67508 - DNA, 479 bp, Glycine max
  unsure (1)..(479): unsure at all n locations
agctnggcctcanacttgctaataataagttgccacacagacctgcatttagagctcacccctacaggaattccaaggtaagaaaagggaaattccaattgactgcagttgagaaaagaagttgcttccctacaccagccttcagatttacccagacacccgaattggctcttattgtagtttatctttagaccagaaaccaattcaaaacatttcaggatacactttaaaactctaacattatcattagtggcagccccaaagaacaaggtgtcatctgcatattgaagtatattaacttcctcttttttctttcccacttgatagctgctgaagagatnttttgttactgctgatctcatcaacccggtaaggccttccactactatattgaatagcaaaggtgcaaggggatcaccttgccttaagtctcttagggacaaattcctgagaagtacttncattaattaaaatggata

SEQ ID NO: 67509 - DNA, 489 bp, Glycine max
  unsure (1)..(489): unsure at all n locations
tctaagtcacctgcggcatgcaagcttcagcgagttanatcagaagctgaatcgataacttagtagacttgtctgatttagcgcagactcgggcgagtttgggtagactcgtgagtctgctacgagtctacaggtttacgaaaacccgaaatggcgtnnnnctgcaactacttatttgggtagactctgtcttccttattcgagttctgcaaagtgcaaacttatttggttcatgcttcttggcttcttgctacgatgcantcagtgncnnaatgctatggtggggtgcgacagtgaaaggaggtttttggtgttggagtgtgactgtgcaagtgtgtgacacggtgcttctggatcttntgttgaaaggaggttttcgatgaaatgaggttttcggtatatgggatcaagggtgattgttgcgaacaaaagctaaacttcanattgcacantggccagtaaggaacaaaaagtatactgatatacaca

SEQ ID NO: 67510 - DNA, 489 bp, Glycine max
  unsure (1)..(489): unsure at all n locations
agctngagatgaggaagtgttgaagggtgaaactttctgctnttattgttgaccacagagtggtacctggagatatgtcgcggtggtcaggagaccttgnggacgtcaggtggggtgctattgcccaaaaccaagcttgaccaatcccgacccaacccgggcatagtcggtcagtgagaacctgtgatgtacctaagcaggcgagctcctggcagtcaacagataaaaggaaaacaagaccacaaagcaaggaggcttgtggtggctggccagctgtgaattntgtgtaatatgtggattgtggcctctggtaatcgattaccaagggtgagtaatcgattacaaggcttaaaattgaggacaggaggctaagatggtctctggtaatcgattaccaaggggtgtaatcgattaccaggcttgaaaacgaagtcaggaaacttatggagcctctggtaatcgattaccagcctgtgtaatcgattacac

SEQ ID NO: 67511 - DNA, 489 bp, Glycine max
  unsure (1)..(489): unsure at all n locations
agcttcanaccacagcaacacanaatctaggtgttcaaaacccctcaattcaatggctnttctaggtttgaaaggtgaagtttagaatgaggtaaatttgaagcaaactctcacctcacaccaatccataacatcaatctaaacttgcccaaattggatttacacctaaaattccaccaaatcaaaatttgactcttcaacacccaaatttgccctagaaatggctctttgttcacttggtcatttgtttttctccctagcacagtccaagctttctcccaagtcctaaatgacatttcaagctagtattaactcactttaacctccatttaccacagaattcagacttagctntccaactctcaaagcctcactctntttccactcataacaccacattctcactttccaaccctaggttaactctacatttcatctctaacagttntccatgggcaatttcagcatataaacatcacanacatcatc

SEQ ID NO: 67512 - DNA, 258 bp, Glycine max
  unsure (1)..(258): unsure at all n locations
atccttaagcacctgaggctgcagctttaactattctatgtacccgggggccacattttgtttcatgtatntttattctcttgtccatttgctntttatacccctntttgacatgcttaagccatttatttaagtcatttctcgcttaatctaaaaataaaataaatttccactgatcgtttaaattatatcatccgttatatttggttaaaatgaattccgaccgttcgggtcgtccgtaaccacgttggaaataaa

SEQ ID NO: 67513 - DNA, 455 bp, Glycine max
  unsure (1)..(455): unsure at all n locations
agctgtccacaaaagtcactaaaaggttgtgttagtttatcgnctcagttttccttatcaagtaaatggatcatttttaaggtccaacgcctttaaatgatcacccttcaagtaaaaagaattgcttaattcactcttaaagaacaactacgtaggtctgatttcctcttcgatggagggtacgtaagagcaaaagccccgcttttgtcgacctcaaaaaaaataaaaagaaataaaaattaaggtaacacaatttccacaattctaaaaataggctattgtcctttgagacaaacgtgagaggtgctaataccttcctcanacgtaaatacaactcccgaacttagaatnttcattttgaccggtttccttcggttttttcgacgttttccacaaataaacgttggtggcgactccgcgcatctttccttcttaggaaagcgcacccatgagct

SEQ ID NO: 67514 - DNA, 450 bp, Glycine max
  unsure (1)..(450): unsure at all n locations
agctngcctgtccgatgcagcagtaatgatggtccgagttatgttggggaacggttacgaacccggaatgggtttaggcaaagacaacggcggcataactagcctgataaatgccaaaggaaatcgtgggaagtatggtttaggctataagcccactcaggcagatgtaaagagaagtatcgcgggaaggaagggcggtggtcaaagctcgcggttgagacaagaaagtgaaggaagcccgccctgccacataagtagaagctntataagcgcgggtctgggagacgaaggtcaagtggtcgcaatatacgaagatgatgttccgagtacattggatttggtacgaccttgccctcctgatttccagctggggaattggcgagtggaggaatgccccgacatttacgcagcgagcataatgtaaacctttacggttntaaaagctctata

SEQ ID NO: 67515 - DNA, 454 bp, Glycine max
  unsure (1)..(454): unsure at all n locations
nagctttacaagatagagaagatctcatttatgttgcttgcggactggacgtangaacagggcgtgaccggaccattataaattctgagtttgcattctctctttccttaaacttcttttatttattgttatttatcttttgctatacagaagtttatttttgaattttcttttgagtaattcatattaagggtgcatttttaattcaaaaagagagttaaattttaattgggaataatttttatatcttaattcaacccctcttcttaagataactgaggccacttgtccaacagaatcttgtgataggacttaccattatggactccattgctaggctactaaagattttctgtgataacaacattattgtgttttacacaacaaataatatgacttctagatgattaagcacttggagttaagtactcgactgttaatatcttatgaagat

SEQ ID NO: 67516 - DNA, 466 bp, Glycine max
  unsure (1)..(466): unsure at all n locations
agctntgatggtgtcgagaagaaatcacatgtttgtcatcatcaaaaagggggagaatgtgaatgtatgtatacatgattttgatgatgtcaaagaagaatctaacaaggctgcttcaaatgataagcatttgcttcaagaataattcaagattgcttcaacaaacaaagccttgccttaaaacaaagtgctttcaagacatgcaaggctctggtaatcgattaccaggaagtgtaatcgattaccagaagacagggttgagaaatagctattgaaaaaggttttgaatttgaattntcaacatgtaatcgattaccatatgtttgtaatcgattaccagcaacgaaactttggaaattcaaattcaaaagtcataacccttcanattataactgtgtaattgattacacaaacattgtaatcgattaccagtggataagtttcagaaaatctgccaacagtcaca

SEQ ID NO: 67517 - DNA, 277 bp, Glycine max
  unsure (1)..(277): unsure at all n locations
agctntaatcgagtgtgcaacgtgactccaaaattatttacttttcccttntatatatctttnntattttggggtcgacaagggtattgcccttgcttctacgtatcctcaggtgcgatgaggaattcagacctacgtagttctttaagttcaaatgtttgtgtgttaaattgatnttatgtttttgaaagattccttttaattgcaaacaaaaagtcatttaaggcgttagaccttgaaacgatgttttaaattttgaaaagcggagagaatcgtt

SEQ ID NO: 67518 - DNA, 476 bp, Glycine max
  unsure (1)..(476): unsure at all n locations
agctntcttgagaagacttccttgagaagcttctttgaggaaacttccttgagaagctagagcttagctacacacacccctctaataactaggctcacctccttgagaagcttccttgagaagattcctaaagatgctagagcttagctacacacacttctctaatagctaagctcacttccttgagatgagaagctagagcttagctacacacctcctattatagctaagctcacccccattccaaaaacacatgaaaataaaaaaagtccttaccacaaagactactcaaaatgcctcgaaatacaaggctaaaaccctctactactagaatggccaaaatacaaggcccaatcgaaggaaaaacctattctaatatttacaaggccaaaatacaagtgggctcatacttagcccatgggctcgaaatctacctaaaggctcatgagaaccctanggccttcccttggatctct

SEQ ID NO: 67519 - DNA, 438 bp, Glycine max
  unsure (1)..(438): unsure at all n locations
agcttaggaagcatcaatagaccttaagaaaatattccatttaggacaataaacaagaaaattaatgagagttctcctagggtgatcagtccacccatcagccatcatagtacatctagtttccttccaaacttcttggtaaattttaacaagcttcctcccttcatcaaaccatttatataacaaaggaccacaaattctataaaaaaaaaatggagatttatacaccggactcatgctactaataacatcaatcataggttgataatatgtcgagttaattgcattaaatggcactatagcatctatcatccattttgcaatggctttgtcacacttttctacaattttcttattttgcaagacactcttcaagctaggttgagctttangagttgttctaggcatgaaatagtcatctacatgaatagtggtctt

SEQ ID NO: 67520 - DNA, 436 bp, Glycine max
  unsure (1)..(436): unsure at all n locations
agcttagttctctgccagtcttcgcacaacagaatctctcattactctctggaacttggacttttctccctctagaaatctctaaacatgcagaagctttgagaaaatgcccaaactcctatctccatttctgattttgggattaaataggtggccttgttagtgcttgcacgcttagcacaactctgcctcgcttagcacggataagtgaatttcagcttagcacgcgtcttctcgcttagcggatgcatgcaagcggtgcgcttagcgggatgagccctcacttagcacgtgtgtccagctcatcctttttccagatctttcctcacgcttagccgcaggagtggtgcgctctgccgcaagagtggtacgctcagcggatggctcgctaagccggcagattggcttagtgagaagctaaanatcagcacttcac

SEQ ID NO: 67521 - DNA, 491 bp, Glycine max
  unsure (1)..(491): unsure at all n locations
agctntangatcaaactctcttctctgattttctctcttctatnctncactcttcttcctctgttcactcttgttcttcctttatcttgcacaaatttcttggctcttcaattggagatgatcatggaaggcttgtgacaccctctacccttacaattataactaactaattaaataaatcatacaaaatttatttcaaagattataaacacttaataataaaagaaggaaaaaaatatgcaaaattaattaataatttttatttttaaacacatttaatttaaatcaattcaaaaggataaaggtccacatccacttagtgaaaacataatagaatttttttataaataaaaggtaagactatcctggctcacaacaaggtcgtccactctaaataaataataaaaagaaactaaagtagaaaagtataacgcaatcgtatcattcagtatatcataacatgtganaatcataatatgcgaagtaaaatc

SEQ ID NO: 67522 - DNA, 489 bp, Glycine max
  unsure (1)..(489): unsure at all n locations
agctatacgaaattggtcttcgctggcgaaatgatcgaagtgggtctaaaaagaggcaaatctgatcatcatgctttgatacatgcaaaaaaaaactggggcaaatgaagaggatgagaatgagggggaaacccatgctgtgactgccattcctatatggccaagttttccaccaacccaacaatgtcattactcagccaataacaacccatctccttacctatcacccagttatccacaacggccatccctaaatcaaaccacaaaacccacctaccacacaaccaatgctaaacaccacctttagcacaaaccaaaacaccaaccaagatatgaattttgcagcgaaaaagcctgtagaattcaccccaattacggtgtcctatgctaactngctcccatatctacttgataatgcaattgtagcacaccaaccaagaaattgaatttgcagcgaanaagcctgtagaattcaccccaattccagtg

SEQ ID NO: 67523 - DNA, 483 bp, Glycine max
  unsure (1)..(483): unsure at all n locations
gcaagcttgagaatggcccaaactccctcttcatttctgattttaggcttaaataggtggccttgttggtgcttgtgcgcttagcgcgaatctggaccacttaacgtgcattagtgaatttcagcttagcgcgcgtcttctcactcagcagatggactcaagcgatgtgcttagcgggatgacacctcgcttagcgaacatgcatagctcatccttcttctagattcttcctcgcgctcagctacaagaatggtgtgctcagcggatggctcgctgagtcaatagattggcttagcgagcagatcaaaatcaacatttcacaaacttacctaattaacctgaaattgagaggaaatgnatattaaatacataaaatgagagtactaagtatttatgacctatctntaacaaanagtaatttcaacactacaaaataaccataaatgggaggagttagatacaattntcacagatttcttacac

SEQ ID NO: 67524 - DNA, 449 bp, Glycine max
  unsure (1)..(449): unsure at all n locations
agctntangagaaaccattataacgaagagagtttctattcataatcaatcgagggagcttcgtcaagtgtcctcatcgaaattgagaaacctttattcaaaccttttaaagttagtgagaaggctaaacggataattagggaacttagaaaaactaaatccttaactgaaggcgtatgtgacaatcatagtgaattactaaacaagattggtagtttacttaaagtcattccagatactccccaagcctcggaagatacttctaagatggtaacaagaactaccttcaaattaattaatgttattaatgaagatagtgaccanaactcacataacacaactgagataggatcagtaacagaaaagaatataaattcaatttattccaaaaactggagaacaccctccaaattatattatcaacgtccaactggcgctgaccttctact

SEQ ID NO: 67525 - DNA, 381 bp, Glycine max
  unsure (1)..(381): unsure at all n locations
agcttaaggtcactcatggtgctcattttttgttctagttntncatgatatttccgcaacatcccttactttaatttaacacatatatgttagcttaagacggtgcaatctgttaactaaccatgctgttttgagtttggcatcaaacaaggaacttaaaactcttcacttgagagaatggcactcttccaagactgaaaattttactattagatggatgcaggacttttgcacttaagaccgcctgttattagctcactgtatgcattgtcgcttcaatgctgtgtgatgacgccaagcatggaagcagttcgcgtttgttggatctttttaactgtggaggcattacaccgcttgcatttcccggttgaagaaaccata

SEQ ID NO: 67526 - DNA, 483 bp, Glycine max
agcttcatagcttatagaacttgtgtccaatctattcctacctacatcttgaattgtttcaagctcccttatgtgcttcgcgaggacatagagaggatgtcagctatattctattgggggacaacattgaggataggaagatgcactggcttcagtgggagaaactaacaaaagcaaaagttaatggtggggttgggttttcatagaagcaactctgttgtttgttggtggacgataatttcctggcctctagggtgctcaaggcttgctatttccctaattcctctcctttggaagcaaagaaactcttccagtcaagctatacctggaccaacattgcctcaacaaacgatttggttgaagaggggatatcttggcgcatagggaatgatgatgcagtcaagaattggtctaacaggtcgatccccaataatctcatcctcacagaagaatctgtagcaccctagcaacgagaagatgaca

SEQ ID NO: 67527 - DNA, 487 bp, Glycine max
agcttaagctctaactatacaactggacttttgtattgaagcatctaagggaaaggcaaaccgcatctatcagctgggaatttctccccaaagtattcaagcaagaactttcttctgcaagttgtcagcacacaatagcgttcagcagcaagcaatgactccataatagctgttctttgtttttcctggtacattggagactcacatgttactaaaagaacagggataacttgtctccagaaaatatgcaagaagtcagcaacttcaatcagccaaactttttctgataaatacaaatacacatactgatttcacatctccacaataaaagtcacccttggcaaagtcacttcttgtgtagtatagccaacaaacagaagctataccatctctaccacatcgtccactttcctggtagtaggactctatactcttacggcaaccatagtgaatcacttgtctaatgttacgcttatctatgcccatg

SEQ ID NO: 67528 - DNA, 483 bp, Glycine max
  unsure (1)..(483): unsure at all n locations
agcttcctgcanattctgtattatctggttgaatctgcttatcatcttcatcattgataaacacatcaaatttcacaggtgtgtttctctcaaactcaatcccttcaatcaccaaaacctcttcctcctcttccttctccttcttgctcctcgacttgtttggccttttaaccattgtgctcacaactgaatccaacactagtgggaacttcacattccttgaagtctcagcagcatgtgctgcaccaacaccaaaattttgtgctaatgctaccttctgaacccttgacctacgcggcgtgggcttagaatttaaccatggaatgtcaacatcttggtaaacataccctagttttctagtgtcaagagaatccctgaccttcacacgcacaaggttcttgttctcatcgtagaagagaaacgcagaatctaaccaatctgaatcagtaaaattccttctttttccaccaagtgttttcatat

SEQ ID NO: 67529 - DNA, 384 bp, Glycine max
  unsure (1)..(384): unsure at all n locations
agcttcttagtctcactagatgaattcgtggctacttcatgcactcctctaatgacaatagcatcatttctggcactgaattgctaggagttggaatccatcttctcaattaaatttctggcttcaacaggggtcatgtctccaagggctccaccactggaagcatctatcatatttctctccatgttgctgagtccttcataaaaatattggagaagaagctgctctgaaatctggtggtgagggcaactggcacataattttttaaatctctcccattattcatataggctctctccactgagttgtctaatacctgaaatatcctttctgatggtcgtggtcctggaagtanaggaaattttttctaagaatactctcttg

SEQ ID NO: 67530 - DNA, 479 bp, Glycine max
  unsure (1)..(479): unsure at all n locations
agcttaatgagggaaccaaatngattgtgaagtctaaggataagtatgaagttgtgctcaaggctaagccatttgcttatgctcctgaanagtcatatgattgcgaaaagcccaagcccaagccttcccctactccttatcacaaaccatattattacaactctcccccacccccttcaccctcaccgcacccacaccctccttactactataagtcaccacctccaccaccaccaacatactattacaaatctcctcccccaccttcttattactacaagagccctcctccaccatcaccatcacctcctgcatattactataaatctcccccgccaccatcaccatcaccaccttcaccctactactataaatctccacctcctccccacaaagatccataccatnctccttactactacaagtnaccttcttcaccatgcccatcaccacctcctccctactactacaagtcacct

SEQ ID NO: 67531 - DNA, 456 bp, Glycine max
  unsure (1)..(456): unsure at all n locations
agcttcaagaatcaagattatagattcaagaatcaagtttcaagaatcaagaatcaagtttcacgaataatcaagatcaagtttcaagacacaagattcaacaatcaagagaagactcaatcaagataagtactaaaaaagtttttcaaaacattgattagcacaagaagttttcacaaaatcattaccaaagagttttactctctagtaatcgattaccagtgtttttaaaacgttagatttcaaatttcaacagttttaaatcattttaaacttgtgtaatcgattgcacaaaacttgaaatcgattaacagtgtttctgaatgtttcaattttcaaaattcaaaatgaagagtcacatctattgatgtgtaattgattacaccttaatggtaatcaattaccagtgaccgatttcgaanaatacatttccaaaagttacaattcttcaagtga

SEQ ID NO: 67532 - DNA, 437 bp, Glycine max
  unsure (1)..(437): unsure at all n locations
agctntgcatatctagggtttctagagagagaattgtccaagatccatagagttntgagagatnttgttgtgtgaagatctgcagagaccagagcttgaagtatgagctggtttgagagcttgagatgagtttgtgagtgattgtgagatcctagaggtgaaggatacatcctaaccacttgtatttttgcaatctttcatcttgttcttctctttgtagttaagaaggcttcctggtatggaaagctaaatcctctgttggatcttccttgtaggtacctgatgtaaatatatttatatctatttaatgatgttntgtgtgttctctgtgctattgcttttcattctagtatgcctttaccgtaatcacgtagatgcatgctttgttagggccattcaactgtggaaactggtctgactctaaagtccttgatagt

SEQ ID NO: 67533 - DNA, 486 bp, Glycine max
  unsure (1)..(486): unsure at all n locations
ttaagtcacctgcggcatgcaagctnngttaaaccagtactctatgtcgtaccattccattgttggctctaatataaattagaatatttttttgtttgtttgcacactaactaactttcatttgtcttacaaacagatatacaatcttagcacgtaatcttttctctcaagatattcaaagtgttttgagagttgttataaaatttacaagaatttatagaaagctttttatagaaagaatttgaataagagcactttagttagttcttcatgtcttcaaagcttttggtgtttataggccttctttaacaaatgtatgttgtctctaaatgaataattcttttctctctagcttgcatctgaaaaatgtggccattggagcatttaatatttgcattaaatgcatgtacttcttcatactagaaaaccacttttcttggctatggtgtcgaatactctagcaagaaactactttcttttgtgtca

SEQ ID NO: 67534 - DNA, 483 bp, Glycine max
  unsure (1)..(483): unsure at all n locations
agctntngtcgaaagaatgtcattcttcttgttgtttgtgtgtatgggtgttaagccgtttgtctgtagattcaagcttagggattccaagcagtgggggaaggttttttgggggaaaaaaccaagctgcaaggggaggccgcacttgaccgtgattggtgccgacaacactggcagaacaacagagaagatgaaaggaaggaggacgatgcattttattttattttattgatgtattctttttataaaaaaattatttcagtgtatgtatgccttgtaaattaaacaggcactgatctaaacatgcaaattaatttaaatggcatattcagatcaaacagcggaaactaaatattatgagcgtaccccaaccattgcagatcgaatgcgaagcagcacatacacgataatgaagacagttttgctcttctagacccttgctcactctgaatagatggtgtattttttgaatagagaagtggg

SEQ ID NO: 67535 - DNA, 486 bp, Glycine max
  unsure (1)..(486): unsure at all n locations
agcttgaccaggaattatgtgtatgggttggatgttgttttctggttgttcctggtgcggagatgatggtacagagggtgaaccangagctgaagtttcttttggtgaggtagccatggaaaagcagagcgtttggaatgatttcgtaaatttctgagagctgttggggaatgcagaaaacgagattaacacgaaaatataagtttgaatgaggaatgtagagggacgtgtgaagcaacggtcgaatttgctttggttcagtagtgaacgtgctattaatgttaagtgattcgtttgggcatgttcagatatcagtagttgctacaattcctctagcagacaaatgcccagcttgcccctcagtttttcaaactgttntgcatccaatgcctttgtganaatatctgctatttgttcctcagtgtcaacatgctccagtgtgataactttatcatcaacaagctctctaatatagtgatgtctaat

SEQ ID NO: 67536 - DNA, 451 bp, Glycine max
  unsure (1)..(451): unsure at all n locations
agctngttcttgattnttcctaagttctgtaacttgcttagaacaataaacttggccttctcttaattgtctttgggcttggcgaccacgatcaataaagtactttcggcacctactatatgttgacttcaccaacgctgttattggaatgctgcgacaatctttcaacaccttattcacacattctgataagttggttgtcatgtgaccatatcgtcgtccagatgtatcgtaagccatgctctcattttcctttgagattcgatcaatccatcttgctatagctggactcaattgacgaaatntttctaagttttgatcaaacacatgcttgcaaggagtgtacgctgcatcaaatttgttatcatcaacagttgtacgtagacatgaaactcaaattaaattaatgtataaaatacaccttacccaatttcttgaacattctcttttg

SEQ ID NO: 67537 - DNA, 469 bp, Glycine max
agcttctgttatggagttatataataatacttatatttcttgaattccattcgatgggaatatagattcttaaactaaatctaatacaaaacaccgccactaatcctattgctgttagttgcaacttgtttgttaaatactttagtttataaaacatgttcctagatagaaaaccgactttcctttatgtataaatcaatgcagatttatggttaaatgttttttatatccttattaattgtcaagttccagtcaaataaggacgtataatatttcttagaacatcaaatactctcttattatatgttggtgaatttaaaaaaactatctacgtgttgatgtttaaatagagaacttgctcacaaccattcgcgaaacccgatctaaatttttttatatttttcattgtgaaggttaaatgggaactaaaaattgaccttaaatgtgcggtcattactaatcttaggtt

SEQ ID NO: 67538 - DNA, 485 bp, Glycine max
  unsure (1)..(485): unsure at all n locations
agcttcaaccaaggggagatggaccatttcttgtgcttgaaagaatcaatgacaatgcttacaaagttgagctgcccggtgagtataatgttagttccaccttcaatgtctctgatttatctctttttgatgcagatggagaatccgatttgaggacaaatccttctcaagagggagagaatgatgaggacatgaccaagagcaagggcaaggatccacttgaaggacttggaggacctatgacaagggctagagcaaggaaagccaaggaagctcttcaacaagtgttgtccatactatttgaatacaagcccaagtttcaaggagaaaagtccaaggttgtgagttgtatcatggcccanatggaggaggactaaatgacaccactttatttcaattttagagtgtttagtttgtctaaataatggcccaatccttgtaaagttggctggccaaaaatatgtttgngtaatcaactaaaaggg

SEQ ID NO: 67539 - DNA, 486 bp, Glycine max
ggcagcaagcttaacttacagagagagttaggtttagtcttcaagcgcgctaagcgcacttcaaaaaacacttcaaagacagtaagggattggcgcttagcgcatcctacccgctaagcccaactcatgaagttcacttccagagaggatctggggcttacgttacgattatgcgcttagtgcaactataataaatgtttccagtgaagaagtggcgcttagcgcatcatctccgctaagctcactgcttgaagttcaattctagagatgaagtggggcttaccgcaatgatgtgtgcttagttgaactatctagccaactaatgaagggtcaaagcgcttagtgcgagtaagattatgcttagcgcatgaagacattgcgcttagcgtaggggttgcgcttatcagatggacaacttggtaagaatttctaactctttttctgttcatctcttaacacaagctgaaaacccttttctcaatacta

SEQ ID NO: 67540 - DNA, 450 bp, Glycine max
agcttcttagtctcactggatgaattcgtggcttcttcatgcactcctctaatgacaatagcatcatttctggcactgaattgctaggagttggaatccatcttctcaattaaatttctggcttcaacaggggtcatgtctccaagggctccaccactggaagcatctatcatatttctctccatgttgctgagtccttcataaaaatattggagaagaagctgctctgaaatctggtggtgagggcaactggcacataattttttaaatctctcccattattcatataggctctctccactgagttgtctaatacctgaaatatcctttctgatggtcgtggtcctggaagtagggaaatttttttctaagaatactctcttgaggtcattccagctcgtgatggaccttggagcaaggtaatatagtcagtcctctgccactccctct

SEQ ID NO: 67541 - DNA, 451 bp, Glycine max
  unsure (1)..(451): unsure at all n locations
agcttatgaatcttcagaactctatttagaaagagtcaagacctatcatgataaagagttgttgaagaaagacttcaaaccgggacaacaggtgctactttntaattcaagatttaaattatttcctagtaagctgaaatccaaaatggtctggaccctttgtcatcaacaaagttcgatcttatggtgcaatagagctatatgacccacaatctcaggaccctgatagagcatgggtagtaaatggccagtggttgaaactgtaacatggtgaagagtttaacaggcacacaacaccttacattttatcaaccattgaggtaaaagcatcaagctaatgacgttaaagaagcgcttcttgggaggcaacacagttctaatttcttttattctggttttaatacattccataatgtggaacttacttcataatcattacattgnggtatat

SEQ ID NO: 67542 - DNA, 503 bp, Glycine max
  unsure (1)..(503): unsure at all n locations
acctctaagcaccgcggctgcagctgacttgcagttgatttagccttatttcctttatttattagtcaattcaattaggaaagagaaattccaaagagaaacgtccgattgattgttttggtttattttactaaaagataatttttgattattatattattattttacctctttttggtttccaacgtggttacgacatgaccgaacggtcggatttcattntaacagaaattaacggatattacaaatcaaatgatcggtggaaatttatattatttttttattagacgagaaaatgacttaagtaaatgactaaagcacgtcaaaagggggtacagaaagtaaatgaaatgagaataaaagtacgcgaaacaaatggggaccaccacaggtacatagaatgaattgaaaagttcgatttctgaaacttactcgatgtagaccgaagaacgaacgatgaacgacgaagaactggtgaaaatctttacgatatcacccacggg

SEQ ID NO: 67543 - DNA, 453 bp, Glycine max
  unsure (1)..(453): unsure at all n locations
agctngcggactataccttcgaccagacacggttctttttctgtctcggcccggatttaaagcgggttgcagcactggctccgcttccttaaccgtactggaggcggatgccgtggctctgttctctatggttttctggagttttaacatgacctncgagatggaagccatttgatcttttaaggccgatagatcggccttcatctgttcctgcacgccctcttcattatccatttttctggattgagtgttataggggtgcctcggtgttttcttagttatgatgaaattcctaaagaaataaacaaaggtgagtatgccaccaaaacatgaatatgcaaatgaatgatcggagcacttggatccacccacaggttctttatgtaacgtgatgagtccagaacttctcatattataaaaagaacatagctctcatctagctcagattatatc

SEQ ID NO: 67544 - DNA, 427 bp, Glycine max
  unsure (1)..(427): unsure at all n locations
agcttatngtgtaaacactctgtgagtgattagtattctttttctatcaaacatatattgtttgtgaaagccaagagtggctcagtgacaaagaatacttgggtcttaatctcaggggaagattaagggtagtgctaggagtagcctagagagtgctcattgtagccagaagtggcatagagaatacttagttgtaaccaaagaattgattagtgggacccttcaaggtttgaaggagaattggacgtagccctagagttggggtgaactagtataaaaccttttatgttttctttactgcttttatataaactagttttttctataagtttcttctacacaactatatccaagtttcgtgaactggttttctaagcacaatgtgatttcgaaccccttagacaaaacctatcatccattgatatct

SEQ ID NO: 67545 - DNA, 493 bp, Glycine max
  unsure (1)..(493): unsure at all n locations
gtcacctgcggcatgcaagcttatntgtaatanaatgtgagatctgtntcttcagtttctagngactactcacaccttctatgtggagttctgtagtgtcctctagtccctgcacaaggaagataggagaagtaagcacaaaattggaaaattagctacaattctcaattaagctcaatcattttccttagactaaaactgagttatggtgataaaataagggtcaaatagatttcaattgagctaagaagaatagaataatattaaactacaaatgctcaatcaaattctgtggcgtccccaaaataatgactggtgtattagtaatgatttanataacaaaaaccatcgggaattttttttcttttccttattccgttcttccactcttcacaatagttaagttcagaaggaaaattatcactatagagtcctgaatggccagttcacaactctattcagagtcatttctttctgctcactcataacctct

SEQ ID NO: 67546 - DNA, 483 bp, Glycine max
  unsure (1)..(483): unsure at all n locations
gagcttctcgatatattatgcgtgtgaatcggacttttgtgtgagaagncatgaccatctgaatttctcgagagcatccattgtttaatttcaagcttctcgatatattntgcgcctgaatcagactcccgtttgaaaagctatgaccattttaatttctcgagagctttcgtagttcaatttcgagcgtcttggtatattatgcgcttgaatcggactatcgtgtgataagttatgaccattcgaatttcacgagagcttccactgtctaatttcaagcttctcgatatattatgcgccggaattagacttccgtatgataagttatgaccatattagtttctcgagagctcccggtgtcaatttcgagcgtcttgtatattatgcgcctgactaggactatcgtgtgatctgatattaccatttgaatttctctagagctgccattgtntaaatttaagcgtctcgatatattatccacct

SEQ ID NO: 67547 - DNA, 433 bp, Glycine max
  unsure (1)..(433): unsure at all n locations
ggatcattaagtcgacctgaggctgcagctgtacaattcgacgacaatactttttactcggaagnccgattgagtcccgtaatatatcgagacgctcgaactataaaaccgaagctcgtagcaaattcgaacgacaatgacatttcactcggaagtcctattgagtcccgtaatatatcgagacgctcgaaatttaaaatcgaagctcgtagaaaatacgaacaacaataacttttcactcggaagtccgattgagtcccgtaatatatcgagacactcaaatattaaaacccaagctctcagatacatttaacgacaataacttttcactcggaagtcctattgagtcccgtaatatatcgagacgctcgaaatatataaccgaagcccgcagcagattctaacgacaataacatntcactcggaagtctga

SEQ ID NO: 67548 - DNA, 386 bp, Glycine max
agctctacagcagattatagtaaggacccactatcttataattaaaataacttaatgccattaacctagggaattaaaagaaactcaatggctgagtgtaactgaaattgaggcaaccaaaagtcacccccaatagccaacaagtcagctcaccattaggtctaccaaaaggctgatgctctaagttgccaattgtgcccttattacaacatgaactaaacctaaataaagccctgtatgtgactaacccatgacatatttctgagcaaccaagctaacaaggattggtccattatttacacagactaaacactctaaaattgaaacagagcggtgtcattacctctcctccatttgtgcatgatacaactacaaccttggacttt

SEQ ID NO: 67549 - DNA, 411 bp, Glycine max
  unsure (1)..(411): unsure at all n locations
agcttgagctngccctccattatgagcatggagtagtttgacgcacaggtggcctggccaggagaccagtcttcttcctctagagggggtggggcctccacaacccangagcctgtgactaaggagcctgcagcagaggaagagaccactccagctcagactcctcagccatctccaccatctgaacctgctcctgacgagactcaaccatcatcagcactggatcttaatgaagaccagccacaggaggagcaggacgtttaattttttttttttgcattatgaacactttagttttatttcagttattttatgctntatgtcatttaaatttcagcttttatatatcagtagcatatgtgtttggttgcttgaacaaaaagctcgattgaacagtgaattgattgaaca

SEQ ID NO: 67550 - DNA, 371 bp, Glycine max
  unsure (1)..(371): unsure at all n locations
nngcttatttctagcactagcaactgcgcatctctcattcttgcaaaagtgttgtaaggatatctgatgatgctggagatataaagttgacattaagaatgaacgtctaagagtgaacgaaaacgtcacttatttgattctttttcactaactatcttaataaaattaataaattaatatttactgataaaaaagaaaaaaaaaaacatatcttatgcttttttccgttccaaaccaataaaataaaataaaatcactgtcccaactgtatgtccaacaactgccctcggtccgggccacaactcccatcaataattacttttaggaccccttttttgacgaattttagtacacctttttgccgattttta

SEQ ID NO: 67551 - DNA, 417 bp, Glycine max
cccgaagaaccattaacttctgactgtgccaaagatgagcataacatcaccagagccgcctaaacaactttaattttcttagctcttggttttagtaaactgcttctctccacaccaaatggttgttgtaactgcaattatcatgtctgtgttattgcagatgaggaatcccattatgagccaacactgcatgttacaatttattgccacattccacaacgacaaggtgatattcgacttctctcttactcacattggtttttccctgattctttctacctgatacataacacttaccattaccacatgtgttgggcagaactatataacaataccagccatctatcatgaacagtgggcaccgcactaccctgactttgtccgctttgactatgacggagcctcataccagatacg

SEQ ID NO: 67552 - DNA, 268 bp, Glycine max
  unsure (1)..(268): unsure at all n locations
ctgcaagctccgctgtcaattgcgggcgttgatatttatgcgcctgaatcggacctccgagataatagttatgactatntgaatatctcgagagcttccgttgttcaatttcgagcgtctctgtatgtgatgcgcctgatcggccctccgagtgtaaagaaatgacccttcgtaatactcaagagctctcgttggtcaaatttcggcgngnccatataatatgtttctgaatcggaccttcgagggaacaggtatgaccatttgaatt

SEQ ID NO: 67553 - DNA, 455 bp, Glycine max
  unsure (1)..(455): unsure at all n locations
agctngaagctgaggtatcctannagcttggacagccttatgctaaaatctatccnccatggttcttttttatctctgttaaaagtgtcatccgtcttttaaaaattattgaatcataaattnttttctaactttacccttaattaatatttatgagtgagagaagattgataaaatcataataatatttttaatattttaaggaagggtaattcagtcaaaggaacttgttttgcttataatcgaggctatctaatgacattcttatttcttgtgcaataaccttaaaatctagataatgaacggaaatcaaatccttgatgattgaagaaattttgttatatttgtataattcattntggttgatgtgcttntgttccatgttaccatcaaatgtgaatcacataaactnttgatggatgttntctttgagtgaagaagttttcaacanaatt

SEQ ID NO: 67554 - DNA, 505 bp, Glycine max
  unsure (1)..(505): unsure at all n locations
agtcacctgcggcatgcaagcttctatatagctgaaccatgttatcaatntagactagttgagttttattcagaaaattagagtttatctcttttatcttagtgagagtgattctcctaaattcttgagtgattcaagaacaccctgtctatatcaaaggactttcacaacctttgtgtgttgccctcgctggaaagagtgattctttccttcctatcatctccacccttgttctttcaaaccacaattccagaaaatccacctctgcccaaaattagctcgtgaccataactcccattttatacactcaaattaagtgattcttgagcctaaattgaatttcaaaacgagacctttcancctcgttttgaatcacctcatttggagccctgtagcttccgttattggcatttctatatttctgtccagccaccacttaacctacgttgtaccatcccattcatccattgtatgccagagaccaccttattaagacccacgaaat

SEQ ID NO: 67555 - DNA, 465 bp, Glycine max
  unsure (1)..(465): unsure at all n locations
agcttcancgaccattctctgctgatgcacatattatattctctatactgcaattngntttattcatttccaagccatgcttgataaaattcggattcttgagctgaattgaatgagggatggaggagtaagaagggagaagaatttctagttactcgaatttctaagtgggtcacaataaattaatgctggttgatggatcgtttaattttctttttatttaattgaatatggtctttcccttgcatcactgggtaagcatagtctaaaatgggtttgtttctatgacaagagaattgccaaataaanaagatgtatgtgcctctgatttacggaaagcatctattattaaacattctcctttgggccaaattaaacataagcttctcttcctatntgtgcaaaanatagaaagaagaatcaatgatcaacagagcctctacacttaattttattcatttttat

SEQ ID NO: 67556 - DNA, 479 bp, Glycine max
  unsure (1)..(479): unsure at all n locations
agcttgttggttataacaaactgtaaccaactatctactatctaataaaattaactaccatatgaattaactaatttcaacacttcctcttaattcatattggtacaagacattactcctagcctatctctcatttccttaaattcgatacacttcaaaggctgtgtcaacatgtttgctagttgatcttaagatctacaaaactcaagctcaaacttctccttattcacatgatctctcaaaaagtgaaacttggtctcaatatgtttacttctcccatgtgtcactgggtgttttgccaagtcaatagctaacctattattaattaacaatctcattggcttgaccatcttcaatataagttctttcatcacagcctcgagccacacaacttcacatgtngccatatctgcaacaatgtattctacttcacaagttgacaatgcaactacaccttgctttcttgaacaccaagaaat

SEQ ID NO: 67557 - DNA, 445 bp, Glycine max
  unsure (1)..(445): unsure at all n locations
agcttctatataagctgaaccagtttatcaatatacacttgttgagntttattcagaanattagagtttatctcttttatcttagtgagagtgattctcctaaattcttgagtgattcaagaacaccctgtctgtatcaaaggactttcacaacctctgtgtgttgccctcgctggaaagagtgattctttctttcctttcatcttcacccttgttctttcaaaccacaattccagaanatccacctctgcccagaattatctcgtggccataactcccgttttacgcactcaaattaagtgattcttgagcctaaattgaatatcaaaacgagacctttcacctcgtgttggaatcacctcatgtggagccctgtagctccatttattgccatatctatatttctgtcctgccaccacttaacctacatnttaccatcccattc

SEQ ID NO: 67558 - DNA, 485 bp, Glycine max
  unsure (1)..(485): unsure at all n locations
ggcagcaagctaataaggaaccttatttgcacgaattnntttaataacacaaatgcgtcatgagggctttcaatgggttgtaacgaggtcaaggcttaaacatttgagttaaagaattaaagggacgaaaattcaaaaggcttgatcattcaagacaaacttaatacccaatcaaaatatacattaagtaaaacaacttaacaagggtatatattaatcttaactttccttatgcttcttttcttcttttatgactattcaatcttttatcaccacctttcatctttcttttctttcctttctctttcaactttgtttttcttttcttataatttatccaaacttcacaactatatagagtacctcaaacataacacanagtttccacaatataatccataaggcactaagaagcatcataatttaaaaattggggtatagcaatgagaatttcacattaataactaaattagcgccttgatatt

SEQ ID NO: 67559 - DNA, 452 bp, Glycine max
  unsure (1)..(452): unsure at all n locations
agcttatactatntcggctgtaacacatcgctattcagcttcggaagggaaaatacgaacccagcgagaagagacttgatgtcttgtccacgggaagatacttagtaaatttatatttggaaaatttattagaacaatcttgattagtacatctatctagtaacgttctattttggtttcaatatgtaatggcttagttatgtgtttcttctttaactcctttcataaacaatggcaaattaaaaataaaaataaaaacaattattttttaatcaaaaaggtatggggggaaatagctagtacaagtgtacaatagggcagaaaagtgagatttcacaaatgctgaaaaccatgttcatgtctctaaaagggtgagttattatgaatctctcttttcttggtccttcaactaaatgaagtgttgtatctggctaactaanacttcttggttc

SEQ ID NO: 67560 - DNA, 473 bp, Glycine max
  unsure (1)..(473): unsure at all n locations
agcttaatacccaatatcacatctacaggaccattgtccttcatatcaaaatttctagacaagaaagacttcacatcatttatggaatgcatattattaccaaatatcaaaatgttatccacatacaaacataaaatgacacattcattatcatcaaattttttcacatacacacatttatcactattattaatttgaaaaatcatacgaaagaacaacttgatcaaaatttttgtgtcattgctttggagcatgtttcaaaccatataaagatttaacaagtttgcaaactttcttttccttacccggttctacaaagccttcaggttggctcatataaattntttttcttttaaatcaccatttaaaanaatagtttctacatccatttgatgaatntctaaattaaaaacacaagcaagtgaagataaaactctaatagtagtaactttagaaacaagagaatatgtatc

SEQ ID NO: 67561 - DNA, 460 bp, Glycine max
  unsure (1)..(460): unsure at all n locations
agcttctgaactaagtgacagattacatgtgtattntattacagcaaacacaaaatatgattcatcaacttaaatactagcatattcatttaagaacatcaatatgagttatattggtttgtttaacaatcatctagggcacacttagtttattttcacttttttttattaactcattcagacttcttaactcagtcaatcaaaaggtctaagagactaattaactaaccaacatattatataacttgccatcacaatcaagtgagaggctaatcatcaaaaccaactatatcaaactttcattatgttattcttcttcaaaataagctattatcttgtctaatgtttgtgtatccgatcgataatntgttaggttatacatatgttatcttatctcttactttatgtgaattagggagttagataatatgtcagagatggatataacttatgctaagct

SEQ ID NO: 67562 - DNA, 484 bp, Glycine max
  unsure (1)..(484): unsure at all n locations
atccttgagtcacctgcggcatgcaagcttgtagaatggctagacatgatacatgtcatgtgcttggttggttcaaggataaaagggatgccccacattatttccatgacacaaatgcaaaaatgatgatttggaaacttcatgcaaaacttgtcatgcatgcatctatgcggacactcaaatgtcaaatttttatggtcatgtgatgctagggctcaagattcatttcctctatttttaatcaacccaatgtttccaaaatatgttcttttatcaatttgtgcattcatccgagtccatttcgggcgtgcgggaaatatcacagcattcacccttcaggcgtagacacatttcccaaaaattggttatggtcaatgtaatttttcaaagaaaagttggaaatcgtctcttttcaaaagcatgtcanttttagctagacaacttattttctttttttctccttcttctttntttttatcattat

SEQ ID NO: 67563 - DNA, 445 bp, Glycine max
  unsure (1)..(445): unsure at all n locations
agcttcattntctttgcatgagatataatagatttcatcttctatcgnttctcctacttcgttccccccctttgtcactacgattttgatttttgggttgtgtattttaggaatcaaaacggttgagaggtgtgggtaagttgtttttggtgggttcttttttatttctctgtaaaataaatttacactattctcaagtttcttcctcacagatgtgtcgatataggatatctctcacacattgcatatttgttacaactatttcatatatatatatatattttaattctcttcatttttgttttttggggtataatggatttcttgatgtttttcatttaaggaatcaagatgttttctacgagcagcaagaagtcacgggtaagtgtctattctcatccatattatttttatgatttaaaatcttcacatattgtataataca

SEQ ID NO: 67564 - DNA, 477 bp, Glycine max
  unsure (1)..(477): unsure at all n locations
agcttatcagattagattgaatgtaagatatataaattcaaattcaactgaacccaagtctaatactttnttattttcaatttctacactttagactaaattcattttcgacacttcaagccaaaacatctattttgtcaactctagcaactagtaaataaaacaagaaaaacacaaacaaattattttgtcatctaagttgttggaaattgaaaatgagtgctgtgttgaatgaacaaattattgaatgttttgatatcatctaaataatcatcaccaaatttcagataagtcaaacattttctctctctcactattatatacatttggtataaatatgtcttgaaacagtgtatcagtatcgagcaaagtatgtctttggtgtccttttcaggggtcatccacttcaatttttntggtaaggcatccagaatcaattggtataatttcattaataattacgcaaacgaatattag

SEQ ID NO: 67565 - DNA, 417 bp, Glycine max
  unsure (1)..(417): unsure at all n locations
agcttcatgaatgcctaagtgtggaccctcaagtgcnatcctccattctccccttttttcggagccccatgaatgtcattgcctagcgctgttcatgtgtcctccaccttcgagtttggtgctatatttcatgattgcctaagtgcggaccctcaagggcaatcctccattctcccccttttttggagccccatgaatgttatttcctagcggtgttcatgtgtcctccaccttcgagttgggtgctatatttcatgattgcctaagtgcggaccctcaaggcaatactccattctcacactttttcggagccccatgaatgtcattgcctagcgctgttcatgtgtcctccaccttcgagtttggagctatgcttcatgattgcctaagtgcggaccctcacggcaatcctccatt

SEQ ID NO: 67566 - DNA, 475 bp, Glycine max
  unsure (1)..(475): unsure at all n locations
agcttatgcgcatatntccttacgaacattcactctcattagatattcttctaactaagaaaaatgcacccatgcacaatcaaggcactttcgttacctacattatttgtatgtacttccaaggtgtactacctacaccacatgcatttccttggctaaatttacatacatgcatgctcaaagcctcttggctaccaaaagttgcacacatgcaaaccttatgatgaatcttggctatctacacaataaggtgctacatttcatgctttattcaagtgtttttactacctaaagccgcatgcaaattcaagtatattttcttttgccgactaaaattgtattcaaattaaaaggtgtttttgtaaggtattttctttacataacatgcaacatatttatatattcttgggagacattttgactaccaaaaattatatgtacatacatccaagtatttagctaccacatccaaagt

SEQ ID NO: 67567 - DNA, 449 bp, Glycine max
  unsure (1)..(449): unsure at all n locations
agctgtgaaaagggaagcaagttanaaactcttttctaattaaaaacgttatttctacttcaaaaccccttanactacttcacattgacttatttggtccctctagaactatgagtttgggtggtaattattatggcttaattatagtaggtgattactcaaggttcacatgaactttgtttttgaaaaccaaaaatgaagcttttgatgcttttcgcaaacttgccaaggtgattcaaaatgaaaatggtcttcacatttgttcacttagaagtgatcttggaggtgaaattcaaatgagtctttgaagaattattattgtcaatatatgttgagatatatatctggtctactatgaaatttggtagaaatttccattgatgagaaagaattaagagtgatgtggagagtgaactttttctgactccagtagcaataacacaaacctc

SEQ ID NO: 67568 - DNA, 437 bp, Glycine max
  unsure (1)..(437): unsure at all n locations
ccaattagccctattgctatgggaatcttgatgatgctgcagcaacaataaatgactaatactaataccagctgcagctctgggaggacttcactacttaccgacctgtggttcgaggccaggatcaaaggaggctatataattaactcaataagcatgttaatttgtctatctaaaaatatttaagaacttggaatagattattccccagttattactacccgtttcatgattgaccttcaacaaggatcatatatcatatatcttcagcatggatggatgantactactacgggtgcttgtgaaatcttcaataatgagtgcatgcgaaccacgcgttgaatgacacaccataaataatgactgccatcggctgtgtgcgtggtaatgcactgcaagccttttctgtgccatttgatgctaatattcagcaccac

SEQ ID NO: 67569 - DNA, 371 bp, Glycine max
gaaatagctgcttcatgtgcagtttgatttatagtgctgtacaacaaactatgaagcttctagcactcggtggaggagatatctggcatgttgcaaatgtgagggaataccgaaccatgccttcctcgctgaagaagcttacactgacacaaataaaagaagatgagcctcaacgaatcatacgaacgcgtggttctgttaaatattaatattacaaatataaccgtctttaatgtttcttactttaaagaagattttataatactggaaacagtatttgggttaacactacggtttaaatagtttaaacacttattactccgctagaaaactctttttctataatgatcataggggtattggtgaacttc

SEQ ID NO: 67570 - DNA, 467 bp, Glycine max
  unsure (1)..(467): unsure at all n locations
agcttcatgatgatgaatcaagttgattcaagatgttntgatgataacaaaagatgatgacaaaaagcccaagagaatgatttcaagattgagtcaacaattcaagaatcaagagaagtttgatttcaagattcaagaaaagatgaattcaagttccaagagaagaaatcaagaagacttcacaagggaagtattgaaaatatttttcaaaaaacgaacatagcatagttttgtttttcaaaagagttttctcaaaattttctaagttaccagagtttttactctctggtaatcgattaccagtggcaaagtttgatttcaaaagttttcatctcaatttgcaacgttccaattaatttcaagatggtgtaatcgattacaagatattggtaatcgattaccagtgcatctgaacgttggaattcaaattcaattgtgaagagtcacatcctttcataaaatgcttt

SEQ ID NO: 67571 - DNA, 381 bp, Glycine max
  unsure (1)..(381): unsure at all n locations
agcttcagctctgtgtgccgactatgagttcnatttttcgtccaangtttggttacacttaaaagttccttgatctttccgaagaatctattatgcggngatcgaacccatgtctgttcccacaaatttagtgtgtgttgtcaactgagttgcattcattggtgatttttttgttaagctactaactcataacatttttgtttgtgttcaaaaataccaatatatttcacgatgacttttttcaatggtatctcactataaagattggtaaccttaccacccccttgattttncaggctaatgaaccttaactcactccccttccatcacaatatgaaaattatattactactcttaaagggaattcatctaaaggatgat

SEQ ID NO: 67572 - DNA, 406 bp, Glycine max
agctacctggtaatgcgactacatggctctagtaatcgattacccagagaggaaatatcatatttatgaaaagataattgttcttaaaaaacttttgtaaaatatttcctttagccaaacctgtgtagcatcaattaaggaattctttctaagatcctaactaagtacatcgttctttttgcatttatgaattcttgacttgaatcgcgctcatctttggcatcatcaaaactccatatcatatatgcttccacacacaatgctatggtttccaaactgttctagaagattcaactctctaaccatcaagttagatatatgtagggattttctactcaaggcgttagccactacatcaacttttgcatgatggtagcttagctcacaatcataatccttatgaaac

SEQ ID NO: 67573 - DNA, 330 bp, Glycine max
  unsure (1)..(330): unsure at all n locations
agctnggaagtgtggtcgagttacttatcatatggactcaacacannagaaaatgggttatactagaacgggaaggtacggtcaaaagagtattccttatgaaatatatctcgatatgagtcattcaaactatagagtattcagcttcgcttaaagccaaaaaataataaccaccttttctggcttttgcatttaaggcgaaccaacctcctccaggcttacctagaatattaagatttctataccaggtatatctgttccttataagaagtaagaattgaacagtcactaagagtgtatttaaggaatcacaagtttcaacaaccatgc

SEQ ID NO: 67574 - DNA, 387 bp, Glycine max
agcttgtatcgggctcagactaattttcttattttaattggagctctaagggtggaagataacggcttggaaagattttgcaacgttgatggattgccaattaatcaagctaccattgctttatcttggaatcctagttggagctaacccaaggaaaatggagacttggagaccgattgttgaaaaagcagctaaaaggttgaagtcatggaagcataaatcattgtcatttgcaagaagattatgtttgattaactcggtaacctcatccttccctctattgtatatgtctttattcaagattccttatgatgttgttaaccatattgaaaaattgcaaaaagtgtttctttggcgggaggatgagagtgggaggaaaacaaaatg

SEQ ID NO: 67575 - DNA, 439 bp, Glycine max
  unsure (1)..(439): unsure at all n locations
agcttcatggtgaatcaaagatgattcttatgtgtttngatgataacaatgatgataacaaaagacgatgacaaaggtgatgacaaaaagctcaaagatcaatcaaagaacaactcaagtgaatcaaagatcaatcaagaagaattcaagactcaagaagaaagtctagagacaaggatcaagattcaaggttgaagatctcaagaatcaagatcaagattcaagactcaagattcaagaatgaagagaagactcaatcaagataagtattaaaaaggttttcaaaactttgaatagcacatgagttttcgacaaaaccttttaccaaagagtttttactctctggtaatcgattaccagattgttgtaatcgattaccagcagcaaaatggttttgaaatagttttcaaattggaattacaacatttcaattattttc

SEQ ID NO: 67576 - DNA, 490 bp, Glycine max
  unsure (1)..(490): unsure at all n locations
agcttcttagtctcagatgatgcagctgagtntgtatctacctcatgcactcctctaatgactatggcattatttctggcgctaaactgctgagagttggaagccatcttctcaattaaatttctggcttcagcaggagtcatgtctccaagggctccaccactggcagcatctatcatacttctctccatattactgagtccttcataaaaatattggagaagaagctgctctgaaatctgatggtgagggcaactggcacatagttttttaaatcgctcccagtactcatacaggctctctccactgagttgtctaatacctgagatatctatcctgatggctatggtcctagaagcagggaaaattttttctaagaatactctcttaaggtcatcccagctcgtgatggaccttggagcaaggtaatacagccagtcctttgccactccctccagagaatgaggaaaggccttcagaaatatgtgat

SEQ ID NO: 67577 - DNA, 314 bp, Glycine max
gagctaaattgtgaccaccacatgcgagatgaaattttatgttcttatatctaccacacgctcagcgtctgtgtctgaaagaaacccaaatgtgataaggcttgccgctacctccctaatttcaactcccatcttggccttccaaacctatggaaaggttgataccacacccctattattcgtggcgtgtcctttcacaacccatccttatagaaaactctagatgacatcatcctgctctagctgcactacaactaattcctctcgttcgacagtaatatgcgtccaataaaagcaacgatcatcaacgaaag

SEQ ID NO: 67578 - DNA, 463 bp, Glycine max
  unsure (1)..(463): unsure at all n locations
agctgtgagcanattanaacgacaataactattttctcttatgtccgattgagtaccgtaatatatcgagacccttgaaattgaaaaggaaagcttgtaacaaattcaaacgaaaataacctttgactcggatgtccaattgagtttcgtaatatatcgagacgctcgaaattgaaaatagatgcttcgagcaaattcaaaccacaataagttttgactcggttgtccgattgggtcccataatatatcgagacgctcgaatttgggaagttaagcttagagcaaattcaaacgacaataacattttactcggatgtgcgattgagtcctgtaatatatcgagaccctctaaattgaaaaggaaagctcgttgcatattcaaacgacaataacccttgactcggatgtccaattgagtttcgaatatatcgagatgctcgaaattagaatagattgctcgagc

SEQ ID NO: 67579 - DNA, 394 bp, Glycine max
  unsure (1)..(394): unsure at all n locations
agctntatacagaacacataagaggagaataatgtatcttctgagtacggcccttctttgaggcaatgtgcaatgctgtatatcctttattatcttccagactcaaaactgctgggtcaggttttaccaatttcagcaaaatttcttcatttcgccctttcacagccatgtgtagtgcagtttgacctttcttatcagtcctaaatccagcgcttctatccttgttcaataaagctttcacaacttccaaatgccccattctagccgcagagtgaaggacagctttaccattattcctggctattctagcaagggtagaatctgattccagaagaagattaaccacatcaatatgaccttgagtcgcagctgtgtgtaaagcagttgagttgga

SEQ ID NO: 67580 - DNA, 451 bp, Glycine max
  unsure (1)..(451): unsure at all n locations
atccttaagcacctgangctgaagcttttgtgacttcagaccattatcttaactctcccatgaacatccaacttgtgtacagcgtgctctaactcgaatggtgtcaactcttatccatttcagcatggaaaatagtatagtctctcatggcttcaataaacattctgatggtatcaaactctatcccaacctccaaatgcacttgtccaaaactacttgtaggattgtattgaggatacaggaatttagaattggagtcaccttcatcatcactattggaaagagactaaaattcttcagactggtaactatctgccaatgtgtcacttgattgttcatcatcttctgaagacacatatacatagtttgggtcacttttagaatgataagaaaactcaacatccncatcatgttctttaacttcatcatcatctgcaccattgttaacttc

SEQ ID NO: 67581 - DNA, 452 bp, Glycine max
  unsure (1)..(452): unsure at all n locations
agctntccaanagccttgttgatgaagggctatttgtctaaacactttccaaaccatgttaaggacaggggggtctctgatccgggtttcaaatccgatgctagttggtcaattgatttggacatatgggatttaaatgcaagcagtgaggatgataactcctctggttgaaggtgtgtgatggcatggtggtgattctccancttgaagtaatgttttgtaagtttctctatcaaaagtaccatttgttattggaagctaactagaagacagagatgcttcatagctttaaaaagagggtgttgacaactaaaattcaaaggtgtgatagtttggttgcgtaataatatatcaagtttctgcgattaatttaatatatacactttgaggttgtggttggattgatcttanaaaagcgggctatatatacaacatgtatacttaacaccaca

SEQ ID NO: 67582 - DNA, 479 bp, Glycine max
agcttccatcagttagttgcagggtaaagagaattccagtttagacactgaaatcaagttatattgaaagctatgaatgtattaagattcttctaggtataaaaactgagtaatctggattctgcctacaaggattgtagtaagtgtatgaccattaagaagcttaaccattataggttttattttcttgcataaagaaaataaatgtgggaaggctgtggcatgatctttggctctagaatcaagaatccactcatcttggctagtcttgctaacactgcaagtaacagataatatactacctttgttagtagctgtaccaatctgatttatttgtgaattggtctggactagaggttgttgtggtaatgacatcaaggctttatattgttgagtagctaatcttacatctctcattcgtgtctcttgatttcgatctaagggtgaaccatcaccttcttctctatactactagcatt

SEQ ID NO: 67583 - DNA, 466 bp, Glycine max
  unsure (1)..(466): unsure at all n locations
gtcacctgcggcatgcaagctntaagcattcatgcgtgtaaatagatgattatcttgantaaagcattaatgagccaataagacattaagcagaatagctagttgacgcagttctttttttctatcagcaaaagtatatatattatatagaacattaaaattagtacaagcggtactgttgtatatacatcctagcatttgcaaggtgcagaactgtagttgacacagttctagtaagcctagatataatcataacaagattagtaaaataagcataaaagtctatcaaggaattcaacctgcaagagaatccaagcatgcagctgttacaaggcactccttcaaatataaaagggcaagcttctgttaccctggaatgaaccaagacaatgttgtacataaatgagacagatgaatatgaaatgatgagatttccttttaaccggtaagctggggcgtccataca

SEQ ID NO: 67584 - DNA, 365 bp, Glycine max
  unsure (1)..(365): unsure at all n locations
cagcttcacaggatgaggcggatcgaacatttctttaccgacatcatgcatattntggtcacggattgaatcgaaaactcacttgccgatatcggtcatgagatatccccaactgatatttttcacacgacatcgcgcaatttttttttaaaaacgctcgctggcagataatgtttttttttaccgctgaggaagttttcttgttttggcgttgcataaagaatttacaatgcacgtcgggtaggatattctgtgccagctcacccgacctattgttactgccaaaactggcatgtctccatttattcggctaggaaacatttccccacctcggcaaaaatactatttgcaaacgactctatgct

SEQ ID NO: 67585 - DNA, 445 bp, Glycine max
  unsure (1)..(445): unsure at all n locations
agcttcttagattcagatgatgcatatgggtttgtagctacctcatgcactcctctaatgactatggcatcattntcggcgctaaactgctgggagttggaggccatcttctcaattaaatctctggcttcagcaggagtcatgtctccaagggctccaccactggcagcatctatcatacttctctccatattactgagtccttcataaaaatattggagaagaagctgttctgaaatctgatggtgagggcaactggcacatattttcttaaatcgctcccagtactcatacaggctctctccactgagctgtctaatacctgagatatctttcctgatggctgtggtcctggaagcanggaaaaatttttctaagaatactctcttaaggtcattccagctcgtgatggaccttggagcaaggtaatacaaccagtcctttg

SEQ ID NO: 67586 - DNA, 458 bp, Glycine max
  unsure (1)..(458): unsure at all n locations
agcttgagatgaggaagtgctgaatggtgaaacttcctgctnttattgccgaccacagagtggtacctggagatatgtcgcgggggtcaggagaccttgnggacgtcaggtggggtgctattgcccaaaaccaagcttgaccaatcccgacccaacccgggcatagtcggtcagtgagaacctgtgatgtacctaagcaggcgagctcctggcagtcaacagataaaaggaaaacaagaccacaaagcaaggaggcttgtggcggctggccagctgtgaaacttgattgatatgtgagatatggtctctggtaatcgattaccaagggtgggtaatcgattacaaggcttataaatgaagacagggggctaagatggtctctggtaatcgattaccagaggatgtaatcgattaccangcttgaaaacgacggcaggaagctaaggagcctctggtat

SEQ ID NO: 67587 - DNA, 369 bp, Glycine max
  unsure (1)..(369): unsure at all n locations
agcnnaatgattgatgacgaaacttattataactcttcacgctgacaaanatgaaaataaccttagaatatggataggaatatattactaacgcttctctttctagccatggctaccaataatgtgattcttatgaagcgaagaagtcaagtggtccatttgcattattattatgcatcacttaatgaagagtacattgcagctataatattaagttctttgttgaatatctacacataatcctagttggctatcattaatgctactgacttaacattgttgctgtcgagctgctggatgcatatacacagcgcaatatcggtaatatgaatgaaacttgaccatccattgactgaactgtttaatgca

SEQ ID NO: 67588 - DNA, 221 bp, Glycine max
  unsure (1)..(221): unsure at all n locations
tttaacccactaacctcttctcgatcttatgcctatgcctaatgtttctgatntcaagcataaagaaggtcaagcaaaggcggactatgtgaagaaacttcatgagaggagtcaagatcttatcgcgaggaaaaataaaagctatgctacacaagccaacaaatggagaaagaacggtgtcttctaacccggagatatgngattgggtgcacattataaaa

SEQ ID NO: 67589 - DNA, 431 bp, Glycine max
  unsure (1)..(431): unsure at all n locations
ttttgggtttgtangcaagatctaacgagtcatgttatggaagtctctangtttgacaactctgcacttttctaaccattggagggtgcattgaagatagacgttacattatgtctgctactataggtgtgtatgacacatatgcagnactcttgcatacgtgtcactcatggagtaagcacatactggagtcatggtgtatgggtgagtggggctgcgtcatggtgtgaaattttanggcaccacttcattttctactagttaccaaagactctgtctcctcttcaaatagaggggatatntgatttcaggtcaccatcactgtgatttcctaccctcttaatcttctttgctgtcactcttaccattccttttcttcttcatacaccttctttgatccttcaaagtattctctatatgataatgtcttc

SEQ ID NO: 67590 - DNA, 486 bp, Glycine max
  unsure (1)..(486): unsure at all n locations
ctatgaaactaagcttaattgcgaccataaatgcgatcgatcnaacagaacaatgtattatatatcagagtgctntntgatacttaattaacatgggaaatattcgtgtatctgaccaagagaaggaagagattacatttatgcattagtcaaaagggaaggagatgaaatgacaaaagcaagggaaaaaaatatagagactttgtttaattatcatataaatcagtaattgtacttctagtttctgtttaaccatatataggtggtctatatcattcacatcaaattttgcgttaaaggaaattatcatgactataaggatatatatctcttgcatataaaggttaattaatatgcactntccacaaggaatctcatttagagctataagctaattaaaagattgttttataattngaatatcctacatattcttaattatgtatcatataatcaataaatntatgcaatttatagctgaagatg

SEQ ID NO: 67591 - DNA, 501 bp, Glycine max
  unsure (1)..(501): unsure at all n locations
acatcgttcgcgtgtatgatatccactctacaaggtttgaagtagaggagaccttcaatcttattacgcaacgtggcggacaaaaatgggcagttaacttgaatgaccattattgtcaatgcagaaggtattttgcgcttcactatccatgttcacacattattgcagcttgtggttacgtgagcatgaactactaccaatatatagatgttgtttacacgaatgagcacatcttaaaagcatactccgcacagtggtggcctcttgggaatgaagcggcaattcctccttctgatgaggcatggacactaatccctgacccaactacaattcgtgcgaaaggtcggccaaaatcaacaaggataacgaataagatggattgggtcgaaccatctgaccaccgacaaaaatgtagtagatgtggagcagaagggcacaatangcgctgatgtccaatgcaatctgaccgtgggagtaattcatttaattgatttatgtatg

SEQ ID NO: 67592 - DNA, 418 bp, Glycine max
  unsure (1)..(418): unsure at all n locations
atttataatggtctttttgtttatcacgatcgagataaagtgcagagtcttcaaatctttgtaaaatcgtacaatttctaactccttcactcaattaagtggttgtacttctataatacataactagtgtccaaacgtgagttatgccaagaaaatgcatgcaaaataacacaaaaactcacaaaataccactcagaaaggggttgatcaacaaccacattgctttttagaaatttcttaacctaaaccttctccttgtgttgcccgcattgcttcttgagaaactcatgagtggnggagaagggaacttgttgtgtgactcggattggaaatgggtttcgcagacaacttcatgngtgtggagaagagaggaatggaaagaatgtgtttttgtgtgagagaaaacatgagtgagtga

SEQ ID NO: 67593 - DNA, 391 bp, Glycine max
agatggaaagatcgacgacataatatttgggcttgaggttgaccttgctaatggcaggactgtatcgctcatcggcatactcgcttgctaagttcaaagatgtgaagaattatttcgcttctcctgatgtggtaaatatgaaggtaattgttgaacattctgattctgactcatattgacacgatgatgcttttaagaattaggactgtgctcggtacgacaagaaaattggttggtagaaaatacagataaaatgacaatgcatttgaatatcatataagtctaaatacatttccatatttcatctctccgctttccaccttcctattttcattccgagaagccgctcaaatatgacgaggcgaaaaatcacaacgtattagggcatata

SEQ ID NO: 67594 - DNA, 315 bp, Glycine max
  unsure (1)..(315): unsure at all n locations
ttctcggcgtcatgcattactttctatgcttgaaacaaaattgattggtcttgaatgcttgaaaagcctgtatgaaaattatgaaacttttggagaaatttttaaaaattgtgcaatttttttttcagaaaatggtttctttagacatgaaggctttcttttcaaagaaaacaaattgtgtgtgcctaaatgttctacacagaaattggttggttgtgaagcacatgcaggccggttaatggtgtattntggggttcaaaagactctagaaacattacaagaacattttattgacctcatatgaaaaaggatgta

SEQ ID NO: 67595 - DNA, 440 bp, Glycine max
  unsure (1)..(440): unsure at all n locations
atactaagctgatttggaccttgaagctctcagacaatcgaggggncataaattttatacatatgaccgatncggggaaataatatatctatactcacgatattgaacaacggaagctctcgagaaatttgaatggtcataacatttcactccgatgttcgatccggggacataatttatcgagacgctcgagatagagcaaccgatgctctagacatattagaatggtcgtaacttttcacgcgaatgttcgattcggggacataactcatctagacgctcgaaatagaacagcggaagctctccagaaatttgaatggtcataagcattcacacagatgtgcgattcgggaacatgatatatcaagactatcgaaattgaacaacnngagctctcgagacaatagaatggtcataacatttcacacaaatgtacgatt

SEQ ID NO: 67596 - DNA, 435 bp, Glycine max
  unsure (1)..(435): unsure at all n locations
atccagagaagacttaatcaagagtccagaatcaagaatcaagagaagacttaatccagatnagtatgaaaaggttttttcaaaaattgagtagcacatggatttttctcaaaaaatggttaccaaaagagttttactctctggtaatcgattaccatattcttgtaatcgattaccagctgcaaaatgaatttgaaaaagttttcaaatgaatttacaacgttccaattgattcaaaaaagctgtaattgattacaatgttntggtaatcgattactagtgcctttgaacgttgaaattcaaattcaaatgtgaaaagtcacatcctttcacataaaagccttgtgtaatcgattacactganttggtaatcgattaccagtgattggttatgaataaatcaaaagatgtaactcttcaaatgggttttgactt

SEQ ID NO: 67597 - DNA, 424 bp, Glycine max
accataagaattatgagcaacttctttcttaatatttctatgagggacttagcaacatggagaaaagtatgattgatgctgccagtggtggagctcttggtgatatgaaccctcgtgaggctaagaatttaattgagaagatggcttccaactcccaacaattcagtgcaagaaatgatgctattattcttagaggagtccatgaggtggccacagattcatcttcatctactgaaaataaacagctcgaaggacaacttgatgccttggtcaacctagtaacccaggttttcatgaataagaaatctacatctcgttgcaaagtttgtggtctatgttcttctgcagatcaccatatagatctctgcccttctttgcagccttctggagtcaatgagcaacctgaagcttatgctgcaaacat

SEQ ID NO: 67598 - DNA, 167 bp, Glycine max
atggatgctcttagcactgattctcattaagactgtgcatatgagtgtagatcttagtcactttgggtttcggaggcatgataacctgcacactctcatagatactgggtggccacactcgtgtgcctacgtgcggagggaagcaacccgcttgagagactcgctat

SEQ ID NO: 67599 - DNA, 261 bp, Glycine max
  unsure (1)..(261): unsure at all n locations
aagaacctactctataaatagagacatgtgtgacacttattgtaactttgatgaatgagagtcatgtgaaacatacttcaaaggttcacttctctccatcttttattacttcaatattgtgctcccccctctctctttctcttcctctttcttttcctccattgaaatatncttccaagctttttattcaaggctcatcttggtggtgaagctcctttcttcatggcttattccctagtggatggtgcctcctctcacctc

SEQ ID NO: 67600 - DNA, 412 bp, Glycine max
  unsure (1)..(412): unsure at all n locations
tgagacgatatggcgtattactttgggaaaagctatgctgtcactccccttgagccaattaatttgaacctctgggataactttggccaacgttgtatgtggaaagagtataatttatctgtccacagaattttcaattctggtacttataattgatcaggactgcctattgtcaaacaaattttcaggatagttggattttccgggacattaaagnttacagtgtctaagaatattgaggttagctagtggtgtgttgctagtgaggaggtggtacacgctgcctgccgataatgacagtagctgattcagaagcctcatcttctggtttatatctctttgatattttgtctatggatttaggaaaataattatttagggtatagttgtagctacagcagaaatttgtaca

SEQ ID NO: 67601 - DNA, 296 bp, Glycine max
  unsure (1)..(296): unsure at all n locations
aatctactgaacactttgattataaattttttattacaaaagagtaagcttatccaaacacactaattcacctcatccaaatggttcctacactgaatatatttagcacttntcttacaagnttgtgagataatgaacatggctagaacgaaaatctactctaggtatactggactctgaatgacgtgaagttgcagagcatttcttcanagtgccttgatgaatctgcatatagtgagaatatcaacactacaactcacgtgtatgtacatatcacaactgagttttatatagag

SEQ ID NO: 67602 - DNA, 437 bp, Glycine max
  unsure (1)..(437): unsure at all n locations
acacattcacctatgccanaaccaacacaagaagccgctccatctgctgctccagtgaagaccttggggattctgaaaccaaacggaatatctaggtacatagggaacacgatngaaccaaccatgcaccaacatttcacgacacactgngaatgaaaaaaagaagtgaaggtgtaccctntggtgaaggcctttacccttacactngtgtgtcaattctacttaggccttgatgaaccacaatgccagatagtttgaggacttgtattttgggatccattctgttcctgtgaattatacaggctgtatataccatanggcactctaggcttgcagctgcataaggaaaaaaatccaatttctgatgccaagacttgaaataagcaacatcatcatggtgttgatgaatttcagccacatgccaatagctattactc

SEQ ID NO: 67603 - DNA, 466 bp, Glycine max
  unsure (1)..(466): unsure at all n locations
tataatatcatgctttggtatcttcatgccttgnnttactcatgtttaatgatataaaagccaattaaatgtcgattgtcaaccctcttccttacaaagcaagggtaagatgatgaganataaaaaggtgctacagaaggaaaacatttgtctaaaataagttaagattgtggggagacagatggngtggtccaaatataatttcaatttcaactggtgttgcatagcaatgaataagccaagagattatatacttgttattntaatatagatttatgaaattggcttgacatcttatgaatttaatattatntctactatgaacntaactagtcaacctcaagagaatgcttcctatgaagatggtcaagcaacaatgaagtattttgtacatttatcctctatcttctataatctcaatngngatctatnnnttttactaattaaccacttagttctataactt

SEQ ID NO: 67604 - DNA, 484 bp, Glycine max
  unsure (1)..(484): unsure at all n locations
tctattgagagcgtttagagtacgcgaacacaaatgaaagctcgcgttaatataaatgttgaaagttataaacaaagggttgtaatttaaagcagttaatgaaaactgtaatgtaaaagataaaagacaaaaagataaaatattgagtaaaataaactngattatggattgattgtcctttctaaaattatgtacaagacccatttataggctacaaagctaaatcctctaataaaccacatatttctacttgataatttcctagaatgtggtttgggaatcatacaactatgtttgggagtcattcgactagttntacattgatttgggtaatattggtagttgaattcgaataacaacaatttcattcagctaactaagactgatttatctttnggcaattatttcaaaatttgaagatggcaaccactttctattttntaaggaacactatcattgataagttntaactactataagccat

SEQ ID NO: 67605 - DNA, 445 bp, Glycine max
  unsure (1)..(445): unsure at all n locations
ggcttaccttcgagaatgattgatatccctctcaatgcgccatgggttgtgtctggactgggccatgattatacaattgatacttatcccattaacactgcttcggtgctacactataatgggaaaatgacaccttggcttgatctaggaattcctcagtataaaagctattggaagaagtttctgaacaaagaagatcagctcttaagtgaatgcaatgtaaattcataataagttatagttcctgcataagcttgcatttttggaaaattctanggttcaactcttaaacaagaggatgcttgtgctttgggtgctcaattctctactctagttttcaaaggggttctgtgaaagaatcaatgatggaccagtggtgatgagtctaacacaccagttatcaaaattaatcagtgaatacgaacctggaaaattcatcatttct

SEQ ID NO: 67606 - DNA, 412 bp, Glycine max
  unsure (1)..(412): unsure at all n locations
gttcctgctatctcaaacacacatatctattcttacaagacaantatagcggctcgttgaatatctcacccactcaagtgtatcacacaattatggtttttctctaatgaaacactcttgccttttaccactctaaatcctcttgagttcttaggcaattcaagagagtatggtcacaacanagaacaattcacctatatgtgtaacgtaacgctagagagacaaggaacaggttaaccaagaaaaaggctaacaatgtttttatgcacaaatgaaggaaataaaattcagaatttatgaattcaagtaacaatccttcatgcaaccaatatattaccttacagagatttttttctaaagatcttaagcatgaaccattcagcccaatttattcttttttttaatttgctta

SEQ ID NO: 67607 - DNA, 117 bp, Glycine max
tgaagcccaaaaccagctagtgaactactgcacgtcaaccacctttttcattgactaacgctgccaatttaggttttatggagacagggggaaattatcaccaaatccccagaagcg

SEQ ID NO: 67608 - DNA, 437 bp, Glycine max
  unsure (1)..(437): unsure at all n locations
ttcataactttttggttattcacaaatagagttatcttattatcctagtgagagtgattctcctaaattcttgagtgattcaagaactccctggctgtatcaaaggactttcacaacctttgtgtgttgccctcactggaaagagtgagtctttccttcctttcatcttcactcttggtctttcaataccacaattcagaaaattcacctctgcccagaattatctcagggccataactcccattttacgcactcaaaataagtgattcttgagcataaattgaatttcaaaacgagacctctcacctcgttttggaatcacctcatttggagccttgtagcttcagttatagccatttctatatttctgtccagccaccacttaacctacgttnaccttcttatcatattntcttacgctgaccattgtaaagtta

SEQ ID NO: 67609 - DNA, 357 bp, Glycine max
  unsure (1)..(357): unsure at all n locations
tcaaagaagtattaatttgattacagaactcgattcttattctgaatgtaatggtttcggtgttagattctacatatgtatctggtatttagaatcaactaatttgcaacccgttcgtatgcacgggttgtttgattgttttattcaatcagaattgaatcttttaattgatggttcattgttctctttcttgtaggtattcattacttaagccatataagatngtttttttttacaataggtacataaacacatattagatnttgtccttgttggttgagaatagtatatgatggtttgtagttacatagtgaacaattatgactatgcgagagatatcttatattgcatgatgat

SEQ ID NO: 67610 - DNA, 277 bp, Glycine max
ttgatcaacgctttacagatgtggtcattgatagcatacctctttcaccagttagatcgtgatgctactaaagatatcatacgagctgaataaataaataccttgctatgtaatatctcaccgaagctacaactcacattgtacttatttgaccattctttttctgcctcatgtatagttcaaaagaaatgaggcatgttttgtcaacagaaaacattaaaaatatcgaattaaaaatgaaagattcctaaattaaactccagaaaaaatctgaaac

SEQ ID NO: 67611 - DNA, 416 bp, Glycine max
  unsure (1)..(416): unsure at all n locations
acataatggtacctggagatatgttgccgggatcaagagaccttggggaccatcggaggggtgctattggcctaaaccaaacttggctaattccgacccaacctatgcataatcagtcagtgagaacctgtgacgtacctaaacaggcgagctcctggcagtcaaccaataaaagaacaaagtccacgaagcaagggggcttgtgtggcggctggccagctatttattntgggtgttatctgcaaattcgcctctggtaatcgattaccattcgtgggtaatcgattacaggggttaaaaatggagaccaggatgtaagtagcttctggtaatcgattaccaattgtgtgtaatcggttacatactttggtaatcacataccagcgaggaaatcccttgaaaagacattttactat

SEQ ID NO: 67612 - DNA, 357 bp, Glycine max
  unsure (1)..(357): unsure at all n locations
tgtatttatctctagtaattaagattggtactctataaatataattattttaagttncgggggtatggaagtgtcggtgctgcatgattganaatctgtcaactctatatggactattatggtactgatttcatgcttcgattcagggagttaatttgtttcttgtgtattttgatgattgaaaactttctaaatcttactgtaagggtatgtgaccaaacttttcattttcaagtgcttataacatgtatctgtggcttttttctgcataattatccagagcagattacctgcatatatgtatctgttagcaagtttattattgcataagtgatgcttgacatgaccaacgagata

SEQ ID NO: 67613 - DNA, 336 bp, Glycine max
  unsure (1)..(336): unsure at all n locations
cctttcaaagcccggcctggcctattgccacccctaagtagagggcagaacaaggtaaacaaaatgcatgcataatgggtaaagtacctagagcaatttccatagttatcaaatacaaaaaggggaaaacaaatgtggtagttgataccctctctaggaggcacacattattttgctccctaggaactcatattttacgatttgataacattagggaattgtatgcttcagacgaacatttttctcctatttacgagagttgtgggcaaaaggcccaagatggattctatttggctgaggggtatttgttcaaagaggtaaagctntgcatacccc

SEQ ID NO: 67614 - DNA, 419 bp, Glycine max
  unsure (1)..(419): unsure at all n locations
tcagcttcactagttgtctcaggagttntcttataggtggaatattataccgggtagaaattccactagaaagaatcaggcgagcacgagcagtatccgcttccaccgcgcaaacctccaatccatttatcatagctggggcaacaataaaaggtgagacttttcagaatttagaaaacaagtttcctgaataaaagatatttacaattataaaagacatgctagtgatgatatagcacatcaagtcatcaagtatgcaaaagattttcagcatcaagatagcanaaaacttatattagataaatcaggtatttaggtttcaattacttggtggaaccaagtggcattctgctatatntaagaatatccactaagntaacattagagatacataatctattaaagtactggataatcat

SEQ ID NO: 67615 - DNA, 399 bp, Glycine max
  unsure (1)..(399): unsure at all n locations
ataaatcatattggatgaggaagtaatagtttccttttatgaggactttcatattctgctccaaaaatgatcatcaatccattttgtgaatcggtgtatgtcttgataggagatttcacggcaattcttttaatggctcaataccatcatcattttcatatttgagttctttaacagaattgtaagtatcaccattagtttatttggttattgttgacttatgaaagctaacatatcatgtatgaaataaatgtatgagaatcactggtctatctaatgggagtccttattggaatctttaggaatatgaaatcttngactatcctgtacgcctccacttactaatgacatcgctacactatctgtatattgaatatnacttgtttatcttccaatggt

SEQ ID NO: 67616 - DNA, 323 bp, Glycine max
  unsure (1)..(323): unsure at all n locations
catactaatgtagctganacacattagagggagaaaatatgtttatgcatacgattgaacgaacgaagacggaggggcacacggaggcagaggaaccgcaacggaagcgaggatcgacatgagccgnacaacgcatacggatgaagctgatacgtatgaggctgacgaaagaagaagatccgtaagacccttccttaattaaaaaaatgtaaaataggtcttccatctttgaaaaatgacctctatcagggcttagggctagtgttgagggcctagggcgaagtanaatatgaatgaataaagaaaggaattgcagagcacgg

SEQ ID NO: 67617 - DNA, 496 bp, Glycine max
  unsure (1)..(496): unsure at all n locations
tcaagctggttgaggcacttacccgttcaagatcgaagaacgatgaagatcttatgatagaacgtcgaagaacggttganaccttcgcgattttcctcacggaaacgttacggaaatgtttcggaagcgcctcggctnggattttcttcacggaaacaatttttccaagcaaattcgaaagagagagaagtgcctaaggggctgaaccctnttccacttcacttcctcccctatttatagcaaaataggggagatgcttgccgcccagctcgcccaggcgagcagggttgcttcctccagaagcaacatccttctggaggaatcttctagagggcccaagtgggcctggttgctatttgcacccncatttttactaagtacacccccctgcctttntttggtgattctcttttcgtaaagttacggaaacttacggatttcgtaacgatacttgttntctttccgtaatgttaccgaaccttgcggattacataat

SEQ ID NO: 67618 - DNA, 439 bp, Glycine max
  unsure (1)..(439): unsure at all n locations
atcatcaaaatcttcatgatttatattctccccctttntgatgatgacaaccacctgtatgtttngagcaacaacaaagaaaatatctatttgcatatagtttactcccccttggttttacaatgattgcttatatgtgacaattgaagatttcatacttttcatatataaaaagttgtctcataaaacaatagataattgttcttactactttatcttttatctttctctccccctttgtcaacatcaaaaacaaatcatgaatagagaggagaaagatgttccacttgtgcaatgatgagaataatgatccaaaaggcattaaacaatcattcatattaatcaagcaaaacagtacatacacttcatcaacacaatcaaccaatcatcatcaatattcaatcaattaataaataacaataactactataccaataat

SEQ ID NO: 67619 - DNA, 424 bp, Glycine max
  unsure (1)..(424): unsure at all n locations
ctgtctagggggaattgtttcagaaagactttttcagaataagtattganaagttnttcataattaccttatacacaacctaatgatagaagctctttcatattagtttttttcaaaagatatttttaaattatgtataaactaacattaacttatagataagtttatttaatcttttttctttttattttcctttcttactagtacttctaaatacatttatccaaatagacccttaatattaatatatatcaacaatacttacatccaaatgatcacttaatcaagacttgaaattattttatataaaataaccagattaattaaccaattacgtgcttgggtntcatttctaaaatcaatattagtaattatttagaagatttaaaacaattatcagncataagtcataatctattatgta

SEQ ID NO: 67620 - DNA, 453 bp, Glycine max
  unsure (1)..(453): unsure at all n locations
cccggtgagagtgtgaacttaattgttgagagaacgactagcatagagcaatgattttgtatcaatctctgaatnttagaatgaaatgcataaatatggatatgatgaaggccattattgttgtgaaagccacttgaccaaaaagcttacctgtttatcaatgatgatatcatttgcacccatctgttaactaaattgtaattgtcaaattgaaccttaagctttgaaattgtcatctctatttaccttgcttaggttttaggagagcacattggtttaagataatnttgccccaaatttgggggagtttgtttgatggataatntaaaaggtaagaaacagcaacacacacaacatattaataaaatgttttatgtgttaaacaaagagaaattcanataagtgtgtgctattaaaacaaagtcaagtgaaaggctagtgaatggactaagt

SEQ ID NO: 67621 - DNA, 427 bp, Glycine max
  unsure (1)..(427): unsure at all n locations
tgactatagcatcatttctggcgctaaaaatctgtgagttggaagccancnnnnnaattaaatttctggcttcagcaggagtcatgtctccaagggctccaccactggcagcatctatcatacttctctccatattactgagtccttcataaaaatattggagaagcagctgctctgaaatctgatggtgagggcaactggcacatagttntttaaatctctcccagtattcatacaggctctctccactgagttgtctaatacctgagatatccttcctgatggttgtggtcctggaagcacggaaatcttttactaagaatactctcttanagtcatcccagctcgtgatggaccttggagcaaggtaatacagccagtcctttgccactccctctaaagaatgaggaaaagccttcagatatat

SEQ ID NO: 67622 - DNA, 433 bp, Glycine max
  unsure (1)..(433): unsure at all n locations
tgagcatcgctgctntggtggattagtccaagtatagtagtttgcactatcactatcaaagaaatgaccactggtgataagtgcccagttcngtccaaccttatgaaatctagttggtccagtctcactcgaatcatcatcatacatcttatttccatcagaagttacaagctttccatcacaattaatatagagagaatacaaagctaggacaagtagaatttggttagaaactacttaaagaaataatcatcggtataaatcatatctgaaaatatactacactaagatttttgttgctaacattctaatagaactagattagaaaagatagaaagaatgaaaaaacttattaattacagaaccttaaattcccaatagataccaatgcaatatttcttctatgcaagggcagaaagaatcaagtgataac

SEQ ID NO: 67623 - DNA, 415 bp, Glycine max
  unsure (1)..(415): unsure at all n locations
gatgagcctctggaggttcgttgatgttgcaacctacccttcagtgggagggcgagttatactcgatggtgcatcttccaaaaaaggaaaacacaccggagtcgctaccaactnttattcgaggaaagcgttagaaaaaccaaatagacgaaagtctacgaattctgaaaatgagggtttgggagttgtttacgtgcggngaaggtattagcaccctacacgttcgtcacaaaggacaacaacctttaatcaagtgtgtaaaatcatgacntttaatattatttatttattttcccttttttatgttttatatcttttggggtcgacaagagcatggcccttgctcctacgtatcctcaagtgtgatgtggaacttagacctacgtagttctttaaaagcaagaaagttacgcgt

SEQ ID NO: 67624 - DNA, 432 bp, Glycine max
  unsure (1)..(432): unsure at all n locations
ctcctatatgggagaagagcctcaaatctctactttgagttacccctaaaagtaagctatggaacaatattacaacagggtgtgaaaatcttgtttatgccattggggatagtatgttatcattaaggaaattgaaaataagtgaacacaacttgaccagctgggaaagaatatgaaaatatatgcccagaaaattagagattatactgatttgctgtaagtgagtgggggaaattcatcacctattgattaatgagaaaagaaaatgagaaacaacggtacaaagaacaggatattgatatgttgtgtgcaaagaacaatacacttcataaaggcatgccatgtaccatcacanaggatattactattaagaagcttttttcatttacttatcattgcaacaaccaacacataaatagatccaaattatac

SEQ ID NO: 67625 - DNA, 250 bp, Glycine max
  unsure (1)..(250): unsure at all n locations
tagttgaaaccagcccatataaatttattggggcctattttttattttattatttgaattgacctagggtttgaatttgatctttgcttttgaaaaactcaatttgttttacaaaaatctggaactattgtctgatctgttctttaatttgaaaatatgatatatgttttcttaaggtttacttcattagataatatctttgctatattcaaaanagggtttaaagtaagtaaaaatcacaattcaactc

SEQ ID NO: 67626 - DNA, 383 bp, Glycine max
  unsure (1)..(383): unsure at all n locations
tcagcctcagatgcaacgggtgggcgctaagcgcttgagactcacggcatagtgcatgaacaaatatgagcttagcgcgaggctngcgcttagctaaaggactgattttttagaaaatattntctgagttaattttcagtcccttcctcaacaaatngaaacccttatatctaacattcaaagataggctgatatactcctatgtacagattatgtagcaagttcccaatgaattaatgcatganaacaaaaattatagaaattaaaactgggttgcctcccaggaagtgcttctntaatgtcattagcttgacgcttttacctcactgggcgatcttatgttttgggtcttactttcagaacctcttgatctccttccatta

SEQ ID NO: 67627 - DNA, 379 bp, Glycine max
atgggtggtctatctttataatcatgatttatcttgggtctgtgtatccacacgaaccagctatacacttatttcaatagctgcatctctaggacctctggcattatttcactataatatatatctattcttgctgagaaaaaaaaaagggggtgaggagtgttggtatcaaaagcatgttaacgtgcccgttgcttatcacagcaacaatcacggcagtttccaattgggttggttttagcaaggatatcacatatacgtagacagtatctgatgaaacagctccaacaattccacacattggttacttgcagttggatttgagaaactcagcatattaatccatccggaaagaaagagacaatatgttgtataatgc

SEQ ID NO: 67628 - DNA, 264 bp, Glycine max
tgggtgcacatgagaaaagaaaggctttcggaacaaatgaaatctaaacttcaaccaaagggagatggaccatttcaagtgcttgaaagaatcaatgacaatgcttacaaagttgagctgcccggagagtataacgttacttccaccttcaatgtctctgatttatctctatctgatgcagatggagaatccgatttgaggaccaatccttctcaagagggagagaatgatgaggacatgaccaagagcattggcaatgatcca

SEQ ID NO: 67629 - DNA, 351 bp, Glycine max
  unsure (1)..(351): unsure at all n locations
tctagatgagttatgtctgcgaatcggacatcctgtgagaaggtaataccatttgaatttctcgagcgctnccggtgattaatttcaagcgtctcgatatattatgtcctcaaagcagacatcggagcgaaatgttatgaccattcgaatttggcgagagctcgcggtgttcaattgcgagcgtctagatgagttatgacaccgacacagacctctgagtgaaatgttgagaccattcgaatgtgccgagagcttccgttgttcaatntctagccgctagatgagtttagtcaacgaatccgacatccgtggaaaaaggtatgaccgtccaggtttgtcgagagcctccgt

SEQ ID NO: 67630 - DNA, 407 bp, Glycine max
  unsure (1)..(407): unsure at all n locations
aagcttctntgaganaacttccttgagaagctagagcttagctacacacatctctctcataactaagctcacctccttgagaagcttccttaagaagattcctaaagaagctagagcttagctacacatacctctctaatagctaagctcacctccttgagatgagaagctagagcttagctacacaccccctataatagctaagctcacccccatgacaaataacatgataataataaaaaaaaagtccttattacatagacaactcanaatgccccgaaatacaaggctaaaaccctatactactagaatgggcaaaatacaaggcctagacgaaggagaaacctattctaatatttacaaagataagcgggctcatacttagcccatgggctcganatctaccc

SEQ ID NO: 67631 - DNA, 489 bp, Glycine max
  unsure (1)..(489): unsure at all n locations
tgaggagacaccatataatttatgccgatgtccatgctcaactatattatcttagaatcatccatcaagaacctagagatacatatgggacaatnagttcaacaagtggctaaaagacccactagcaactttggagccaacacagagaagaacccgaaggaagaatgcaggacagtgttaactagaagccagaggagagcataagaagaagaagataaagctgaaggagaccagtctgaggaaggaaggggcagataagaagatgagaaggaagaagaggagaagaagaagttaagaataaggtcttaaccactaagaccaaaactcaactagcccaagaggctaggaaagaagagccaccagcctctctaaaggagccctcataccctttagtggtgtcaaagaagaataatgagtgctacttcaaagcgttcttagagatattcaaggggctggagataaccatgtcattgggggaaagcttgcagt

SEQ ID NO: 67632 - DNA, 441 bp, Glycine max
  unsure (1)..(441): unsure at all n locations
tataagaaacatcttcttcgaccttgtttattcttgactccatctcattgaagcgcatgttttcttgtaattccaaagtatcaaacctttcaccaacaaaagtttgaagacgatcgaacctatccaaaatcttttgaagaagagaggaatcttcttcaccatgtccttcttcatcaataggtcgagcaccctttttcacccaagagccatcatgctctntntgataatcaaaggatgcaatgacagccgcgcctattagaaaggatctcttgattggaacataaggttcataatcaagagggatgttaaagtgttgaatgaagagggtgactagatgtggatatggcaatggagaatntaatngcaatgccttatgcatgcgatatcgaactaagtgtgcccaatcaatttgttggcctttatgaaaagcccacataacaa

SEQ ID NO: 67633 - DNA, 479 bp, Glycine max
  unsure (1)..(479): unsure at all n locations
tactcagcttgcttgactaccgtttctagacagagaaaggtccaagttctagagttttttgagaganttttctgtgngaagatctgcagagtatatagctggaagcggaagccattctgagagcttgagatgagtttgtgagtggttgtgagatcctanaggtgaaggagacatcctcaccacttgtatttttgcaatctttcatcttgttcttctcttttgtgtaaaggaggcttcccggttatggaatgctaaaatcctctgttggatcttccttgtaggtacttgatgtaaatatctttctatctatttaatgatgttttgtgtgttctttgtgctatcagcttttcattctagtatgtctttaccttgatcacgtagatgcatgctttgttagggtcattcaacagtggaaactggtctgattctgatgaccttgataggacagggctaagttgtcgtactatcacgaggaatag

SEQ ID NO: 67634 - DNA, 357 bp, Glycine max
ttgcttatgatgaatcaagaatgattcaaagaagtttttgatgataacaaaggtgatgacaaaaagctcaaatgtcaagaacacttcatgatcaccaagatgatgatctcaagaatcaaagaatgagttccagattgaatctagaacacttcaaggttcaatatgaaatttgatttcaagaatcaagaatcaagtttcacgattcaagcttccacgaattcagattatgactcacgactcaagattgcagaatcaagagaagacttaatcaagataagtatgaaaaagctttttcaaaaactgagtagcacatggattcttctcaaaacttgtttaccaaagagtctctactctctg

SEQ ID NO: 67635 - DNA, 413 bp, Glycine max
  unsure (1)..(413): unsure at all n locations
gcacattgttcgcgtgtttgatatccactcgacaaggttngaagtataggaaaccttctatcctataacgcaacgtggcggacaaaagtgggcagttaacttgaatgacctttattgtcaatgcggaaggtattctgcgcttcactatccatgttcacacattattgcaacttgtggttacgtgagcatgaactactaccaatatatagatgtttgttacacgaatgagcacatcttanaagcatactccgcacagtggtggcctcttgggaagtgaagcggcaatcctccttctgatgaggcatggacactaatccctgacccaactacaattcgtgcgaaaggtcggccaaaatcaacaaggataaggaatgagatggattgggtcgaaccatctgaccaccgacaaaaat

SEQ ID NO: 67636 - DNA, 248 bp, Glycine max
  unsure (1)..(248): unsure at all n locations
tgagagacttttctatgtgaagatctgcagagatgagagctcaaagcagaagcccgtctgagagctngagatgagtttgcgagtgattgtgagatcctataggtgaaggagacatcctcaccacttgtatntntgcaatccttcatcttgttcttctctttggtgaaaggaggtttccggactatgggaagctaaatcctctattggatctctccctgtagtacctgatgtnaaatatttctatctat

SEQ ID NO: 67637 - DNA, 440 bp, Glycine max
  unsure (1)..(440): unsure at all n locations
ggttcatcttgagataatattgatagcccctcgtcattcaagntgatgtttctacatatttcttggcctacaggaatccaatattttacagcttctaatgttatgaattggttgggtcacaccttccacatgtaaactcagccaatttcctctttagcttatgtcctgtgacnattgcctcatctacagatctccttctatttttctttggccttcctctcttgggccctttatgtggtggaacagggtgtgtatgctgtgtctgggcccaatattagtggccttggactggttcaataaaatgctggtatgtcttattataagcttctattgacaaccactcatgacacatgtcctcaagcttccctcctttgtgaagtattgttgcaatggcatgtcggcatggcattcctacacaaagttgtaaaatcgcacacatg

SEQ ID NO: 67638 - DNA, 295 bp, Glycine max
attatgagacaacttataattacttgattgatcactatgtaggggtatttgaaattagggatcataggttactagataaattggagtttatgtgcgcttatctaactagggttatgaatacttgactaattaaggtttagttttacttgatcgataattaggcggtatcgtacttgagtaattaaagttttggggtactcgacaaattatgatttacgattacttgaccaagtaacaaatatgggtatttgactaataatgtttaagagttctcaggtattagagatacatgact

SEQ ID NO: 67639 - DNA, 245 bp, Glycine max
gccaaaactcagctgtttctggggagttgctactaccatgtttgagcttgtgtgaacaggcttgactgagagacggctgaccgataagctaaaaacttttattagagaccagggactatctcacctgcatggaaagacctatctgagaatgccgtttccatttcatatagctactcttgcgccacaacagctccccgaagaataagatatagctagtagatatacggagagaatgtggcacaaga

SEQ ID NO: 67640 - DNA, 422 bp, Glycine max
  unsure (1)..(422): unsure at all n locations
tggaattaattgggggccattttggtctcaatccttggaattattaaaatggatgtaaaatggcccacaccaatcttattttaacacctatttccccttaaggggtgaaatcattgttccataaaataaaacacttatattaacatctcttttcccttgacttaggtaatggtgataattataagttccagaaccactccataattggcaagtaaatctagagaagaagtcgatactcccttttggaaattaagcaacaattctgaaaagctcataattttttatacaaataggtaaaaattggagctgagttgtgttggaccactggaagtaagaacttttctttagctaccagtttcaatgcaattaaagggcatacatcagtganttaagtgaaagtctattacanatgtgtactactc

SEQ ID NO: 67641 - DNA, 427 bp, Glycine max
  unsure (1)..(427): unsure at all n locations
ntgatgannttggtcttgccagtgaaaggatcgatgtgggtctattaaaagcaaattttatcatcctactangacgactgagaaaactggggcanataaagagggtgaggatgagggagaaacccatgctgtgactgccattcctgtacggccaagtttcccaccaacccaacaatatctttactcagccaataacaaactttctccttacccaccacccagttatccacaaaggccatccctaaatctaccacaaagtctgtctaccgcacttccaatgacgaacaccacctttagcacataccaaaaacaccaaccaagaagtgaattttgcagcgagaaagcctgtagaattcaccccaattccagtgtcctatgctgactttgctccatatttacttgataattcaatggtagccataaccct

SEQ ID NO: 67642 - DNA, 353 bp, Glycine max
acgcatcaacaagaagctttgcttaagctattgtgcacaccaacaatggggcaaattatagcaaatgattatcacgacggagggctcagattctcacaaaggaaaaatcatcactttccaaatgagctttcaaaactatcatgacgtgtagagaagaatcaaggatttcaagtcaccaaatagtcagcacttttattttcaaacaagacccattgaggaactatcccatattcaaagaaaacatcaaagtcgacgtgccacgaattgacctaatataactgatatcacgaacatcacattacatatacacactaccatgaccaaccacaaactgcaaacaagacactcccccc

SEQ ID NO: 67643 - DNA, 351 bp, Glycine max
gatgcactacgcattatagattatcaaagctcatttatacctttttatctttttctctacataactaacaaccttttgtgtctcttaatcaagtaattcaagatctatatattgattgataatctgatatgtaatataaaggaaaatattcattctatgggcatttataattctggtgaagatacgtcatcattttaaacaggaactgtcttatataataatatatatctatatatatatattgaacataaacgaatagtggatgaaaattgagacgcctatattggcaatataccatatgcttgagaggccaatccacaactgccgtctctaggccacaaattgattcat

SEQ ID NO: 67644 - DNA, 384 bp, Glycine max
  unsure (1)..(384): unsure at all n locations
acttaaaattactcaaaaaaaatattttcgtgaagaaaattccagccgaggcggttccgtaacgcttccgtgacattttccggggtgattttgcgaagatttacaacccgtcttcgtcgttcgtcgttcgtctttcgtccgtcgtcgttcgttcttcgtcgttcttcagtcttcaacaggtaagttcccgaaatcgaacttttcgattcattgtatgtacccttagtggtcctcatttggttcgcgtgcttntattttcanttcatttacttttcgtacccccttttgacgtgctnntagtcattatttaagtcattttctcgcctaatcnaaaataaaatatattntcaccgatcattcgtattgtaacatcctttaatttct

SEQ ID NO: 67645 - DNA, 462 bp, Glycine max
  unsure (1)..(462): unsure at all n locations
taagctgtcctaaccctatgtatggtgaatatttataataagaaaattatttgtcanaattaataaaatagttcacactggaattctatatacgagaagaatttgattattatagttaattattcgtacattttaatcccgtcaaagttttaaaactctccactagatcatagtttattcaaaaatgataagctgcaggctagagtaatttcgctactcatgtaatatctantttaaatattgagttctgttgtataaaattgagtataacgtcacanagccaaatagccaatgccaaaccgacaaacatacactataagaaacaaatttactaaaatagtgtgaatcctattatgtgatgtttcgaatatttccatccatatcactctggcactcacctgccggttgttccatcaacaatgcctatgctgtcctaataacttagaaattttcccatcttct

SEQ ID NO: 67646 - DNA, 503 bp, Glycine max
  unsure (1)..(503): unsure at all n locations
atccttaagcaccgtggctgcttctttaccaatggctacctgaataatttctttatatgccctttgagccttgtttcccttttcttgntttgaagctcactacaagccttaagtgaaaaaccatgatattaccatatccttaaggaattttggagctttggaattgttttgggaataagtgtggggagtttttgtttcattggacaacttgttttgttggctatgcttcatgatgtattttgggccatacttgatgtacattgtatattggttaaatgttggacatgctgaatgaaatgttgtntctcaaaggctaaaaaaaaaaaaaaaaaaaaaaaattcgaaaaaaaaaatttttgaaaaaaaaagaagaanaaaaccaccaataaaagaaaagcaataaagttgagtgaataagatcttaaatggcacaagaatgatgaaactctcggttctactcttcaggntaaaatttatccttacctcttttaatttctattttt

SEQ ID NO: 67647 - DNA, 469 bp, Glycine max
  unsure (1)..(469): unsure at all n locations
cgcttgtggngattctatggaggctgngatcttgagcttcaatgatgtcctttaatggtgactttccaccatggagatgcagcggaagacaaaggagaagaggtgagaggaggcgccatccactagggaataagccatagaagaaggagcttcaccaccaagatgagccttggataagaagcttggagaggatgcttcaatggaggaaaagaaagagggagagaaagagagagggggggatcacgaaattgaaggaagaaaaagggagagaagttgaactttgagttgtgtctcacaagactctcattcatcaaagttacaacaagtgttacacatgcttttatttatagactangtagcttccttgagaagatttcttgagaaaacttccttgagaagcttctttgagaaaacttccttgagatgctagagcttagctacacacacccctctcataactaagctcacc

SEQ ID NO: 67648 - DNA, 435 bp, Glycine max
tgaatgactagctgcgaagtatcaatcttgcatgaatctctgaagtctaaaatgaaatgtataaacgagaacatgatgaatgccatgtgtcatacccctatttcgttcggggacatttgcttggtggcaagcaactttcatttgaccatcttgaagtactcggcacccatctgtaggcaattcgtgaagtttcgtgacatgccggaactcaaaaagaagcatcgttgcacaattcgagagattccgtaacattccgtaagtcaaaaaggggatgattatgtaatccgcaaggttccgtaacattacggatagaaaacaagtatcgttacgagattcgtaagtttccgtaactctacggaaaaagaatcaccaaaaaatagggcagaggtgtatttagtaaaagtggcggtgcaaataagcaccacgcccacttgg

SEQ ID NO: 67649 - DNA, 294 bp, Glycine max
tggagagcgaatacgcacacccacctcaagtagaatcaacagcaacgaccggctccaacactaatgaaacactcttgccatttaccactctaatgacccttgagtacttaggcaacgcacgagatgatggccacagcaaagaacaagccaccaatatagggaacggaaggctagagagacaaggaaaaggttaaccaagacaaaggctaacaacgcgtataggcacaaacgaaggaaactaaactcaaagattacgaacgcaagtaacagctcatcatgcaaccgatatatgac

SEQ ID NO: 67650 - DNA, 365 bp, Glycine max
  unsure (1)..(365): unsure at all n locations
gggccaaacattcccaatgaatattatggaggatgggctaaattctcaccaagggtaaatcattactttcaaaatgagccttccaaactatcatgacatgttgagaagaatcaaggatttcaagtcacaaaatggcaagaacttctattntcaaaacaattacccattttttgaacatattctattattcaaaaaaaaacatgcataggcgtacgtgcacaccaaattgacccaaaatattaaactgaaaatccgacgaaacttacaacatttacaaatttacacaacttacaaattaaccaaaccaaccaaatcttgccaaaccacagaacactcccccccccccccatacttaaacaacacat

SEQ ID NO: 67651 - DNA, 499 bp, Glycine max
  unsure (1)..(499): unsure at all n locations
cttgaatctcaagctgggtagagtccgtggagaatcaagcttcacccatgagcccctttttattgtttcatgcagatgatgctcgcccaggcgagctatactctgttttttatgntggcaagaattctttgcaaaatttgactaacctccgagttttcgcttgtttattttaactcctaggattacgaacaaactaggcatattcaactatgccttaagaaaaatagatgaataaataacaagaagaaatttaaaaggtactaggctaccttccagtagcgcttctttaacgtcttgagtcggacgcaggatgatgatctgttgatcacgggcctagcacctgctcgtacctacccctaagtctctaaatacaggaaatggcactacgcagtaaaatatgactatgctaccacttacctttgttatctttgccttgaattcggcgtggtatcgaccaaacctttgctttatccttgactcataggatgaaanaatgcat

SEQ ID NO: 67652 - DNA, 416 bp, Glycine max
aaaactaagctccgctggcgcctctatgatggtgatattatacaagaatgtacttgtttactaaaaacagccaactgctttctattcgagaagaatggttattatggtatattcgacatttaatcccggaagtatataactcccactgatcatagtcattcaaaatgataagctgccgctacagtatctcgctactcatgtatatctatttgaacattgagttctgcgtcaaaatcggtatatcgttacacagcctatagccatgccaaccgactacatacactataagaacaaattactaaatagggaatctatatgtgcgttcgaatattccatctatactctggactacctgccgttgtcatcacatgccttgctgcctataactgaaaattgtcctctctaaggcacccgtc

SEQ ID NO: 67653 - DNA, 431 bp, Glycine max
  unsure (1)..(431): unsure at all n locations
acactataaaactcagctccttgtttaagttcttctaaactgcctaagcaagtttcctagtcctataacaacttctgttgcccatcggtttgtgggtgacaagtggctgaaaataacaatttagtgcncaacttgctccacaaagtcctcaaaaatggcttaagaacttagagtccctatcactaacaatgctccttggcaaaccatggagtctcacaatctccttgaaaaacaaatcagccacatgggaagcatcatcaacttttttacatggaataaaatgagccattttagaaaacctatcaacaaccacaaaaatggaatctctaccattactttgttttggcagccccaaaacacaatccatggatatatcaatccaaagatanctcggaattggcaatggagtatacaatccatgatgctttacc

SEQ ID NO: 67654 - DNA, 372 bp, Glycine max
tctcaagagtcacaattctttagaaactaactgtgtaatcgattacaacaatcatgtgatcgattactagtaatgacattttcaaaataactcccaatagtcacaactattcataaagattttgtatggttatcaaaggcctataattacgtgacttgtgacatgataatttttaagagagtttctctgaacaatatgtcttatcctctcaatacaaaattgtcgtataactctcaaaagacttcttgccaaaatacttgcaatctaacaaagaatcttgattgcacttcacttgtaatatccttctcttaaagagaatacttcttctcttcctctattcgaagaaatttgataagagaccgatgtctctta

SEQ ID NO: 67655 - DNA, 384 bp, Glycine max
atctaataaataattatcccaaggggtcttatacgaagatccatcacttattatagaacaacaagctcttttgataggaagattacaagaaatgctaatgcactctttttctgtgaaaactaattcacttcgtatgtacaagcttatgaccaagaagaatcttcacagtacgcttcttagatacacggcctgaaggccaagagatttttcaagcagagatcgctctttactgttgcattttttaccaacacttaatataattctttgttcttagaacaataccatctcaacttattatctttgctcaaacagtttgaattgatagttggtactctttgatacaaaatttatgtgtgatcgctattttgaaggaacttatatatt

SEQ ID NO: 67656 - DNA, 370 bp, Glycine max
  unsure (1)..(370): unsure at all n locations
cagcttcttctctctggtggacgatcgaattggtgaaatctggcacgtgttcattgaccntcttcaatacaagaagttgtgcgaatagccagactttaagatgaggttcttcatgagatgacccagaaattttctccaacataactaattcaagaagattcacaggccatgtattcaagaaactgggttgttacatcacaacatcatagaacgattccaattacaattttgcatcagcaacagactcgaaacccaacacatccaatcgattctaaggtatccactgccaacaataattccaggaaacaagttagtgacaagattgcgaaaggggtattgcgattctgtggtgaaaatgggatcgagatca

SEQ ID NO: 67657 - DNA, 218 bp, Glycine max
gaattggctcaaagcttcaacattcaatttcgagcgtctcgatatatgacaggactcaatcaaacatccgagataaaagttattgtcgtttgaatttgctcagaggttcaacattcaatttcgagcgtctcgttatattacaggactcaatcagacatccgagtaaaagatattgccacctgattggctcagagcttcaacattcaatttcgagcgtc

SEQ ID NO: 67658 - DNA, 51 bp, Glycine max
gaacgcacccctcaagggcttttccttaacgctcgcagccactttttttca

SEQ ID NO: 67659 - DNA, 413 bp, Glycine max
  unsure (1)..(413): unsure at all n locations
gtcaaaacctccagcagcctctgtgtctttccttacagatgatatgaatnnttgatggtccctacactttgttccaagggctgtccttgaaacaattgtagatactggtgtaagcacttctttggtgagatagatggctgacccttcttttgatgcaatccttttgatgaaattagtgagctcttcctctcggattggttggaaagattggacgcattttgagcttaatagctccgatgtacaaatcttccttagccatctccaataatcaccataaggtgcaaaagacatacccttagaatcataagacattatcttttaagctagtattggaggccttgatgaaaagatgagatcatgggtgtttaacacctctntagcatactcaggggatgaaaccacaatggtagaaa

SEQ ID NO: 67660 - DNA, 483 bp, Glycine max
actaagctatcactgactcactaatgcccaccctggtctaaatggtacgtgatatatacatgcataatcacatagaaggtggtttctagtattataaaaaatgtaatccaagtaagtgcaattggtttatctggagctacagaggggtggcactgaatcatgcagactgccttctgttatagcgattaattgaagttttctttcatgccctgaacgtgaaatacagtgggtcttataatacttttataatattatgccatgtgagtataatgacaaccttttcatatcctttcagtggtttcggtcatgtcatttaaagtcttatttgaaaagaaaatttataaaatcgtttttatagagaaggaactatattggaattatacattaatgtgggattttgtaattaccaaagatgaaatctatggagtttgtacttctaaattatatggcttattgatataacgatgctatgaaatatttata

SEQ ID NO: 67661 - DNA, 328 bp, Glycine max
  unsure (1)..(328): unsure at all n locations
ggctgagcataaattttatntatctaacaacaacggagtatgcggctcaatacatatcagagacaagttctaattatgtattagactaacgacgacaaccacatagacagagagagacttactgctctaagaatcacattcgcatgcaaatagaaaatgttatgattatgaaaatgctaaccttttgccacctatctatactctacaaaaccgaaaaagatacgaactcttgtgttgtcctttgacagaaatacatgaagaaaggatggatgaagaatattcctgcgcccaaatggagattctatgagcataanaattcactctctaa

SEQ ID NO: 67662 - DNA, 422 bp, Glycine max
  unsure (1)..(422): unsure at all n locations
aaatgttcaaaaataattntaaacaatatttgtttatttaatttaattataatatataaaaaatgaaaaaattatttaatatcatattagttgatgaaaatacttaaatattatgtacgtaattccttctttaagataaataaataattagttccaccatatcatgaatttttttttagtctcatagcattatatttggtaaactatactcgataacatttttngcccactaagatataaattcttttgtattgcttgaatacgtgccatcctgttatatatgattatctttgcatgttattatatctccaactctataacttttaggcataagcaagaagttatgttctttcttcgtgtttaaaatattttgaaatatgttgattattattgtttacaatattgtggcgctctatattaat

SEQ ID NO: 67663 - DNA, 392 bp, Glycine max
  unsure (1)..(392): unsure at all n locations
aaaggaagtcatatctagtcaaggtctcgatttatcatacaagcttcctaacgatttctaattatgtgggccaattngtctatcatatgctgacaatagccgagaagcccatgaatctcttcaggggcggagtatgtgactgccatcgtcttggccttggctaacaatcggagaagttcttgactcccgttcaaggtaagagcaaaccgatccatgcacatgggtgcctcttggtgtaaagagtcgatcacccttcctctagcctctatttccgcatatacttgagcatactcatacgcgattctatgctcgtgggccggggttagacccatctcttctaggtacttggcgatgatagctaacatgtcggtctctgtctcgcatagacgctg

SEQ ID NO: 67664 - DNA, 377 bp, Glycine max
  unsure (1)..(377): unsure at all n locations
atcgcttatgccataatgcttctgaggttggattaataattctacgcttaagaccacccaatttcacattaaaggattcaccataagaagctacaatatcaagttaatatagaatatcataagccaagagtgaaacagtttcaacaatatcttgattaaaagacaacctaaacacattgtttcgaaatgaacacaaataatccaatttgtccaaataagaaactgaaaccaaattccgtctaaatgacggtacaacaagagtgtctttcatatccaaataanaaccagtacataataataataatctaaaattccctatagcttccaccttcattaatttaccatctncaacatatatacatctttcagaaatcaat

SEQ ID NO: 67665 - DNA, 433 bp, Glycine max
  unsure (1)..(433): unsure at all n locations
cttgcggcgccatntccagcgaggacacatttgtgaagnnagnnttcatganatatcaattatcacaacaaaagccaatcaaactaaaatggtgcacacttctttctaccaaacgcaaatgtcgatgcataattagaaaatgctcacacactgatgaatgggttactttacacatatatttatacacatgcatatgcacatattttagtgaaagacattttatgacacatatccacacgtatatacgtacatttcatgctacacattntttctttaaaaggaattttttatgctgcctatccgacatacatacatattttgcaaggcattntttatgctacatatttacgtcttgaaaggcattttttttgctacctattcacatctngaaagggaatttctgtgctacctattcacatcttgaaaggcattt

SEQ ID NO: 67666 - DNA, 417 bp, Glycine max
  unsure (1)..(417): unsure at all n locations
tatagatataccgaagntttaactttttcttaaccattatttatggctaacttgagataaggaaattgggaaactaatcctaagagatcacctaagacattgtgaaatattctaaggaaattgataatttgattctatgagatgcttttcctatattctcaagagaaccattttggtgacaagggctatagattntcannatttatagtaagcttttgtattaatcccgctaagtataaatgtccaaacaaatgagtggaggttggagtattctggctttcaagtgtgtccatggtgttcgaatgagaaactataataaatttcttaaagaatctatgggtcaaaatcttctgtctaaattggtgtttagtaaagtaaactcaagtaaatgaaaggatctgtcactagttatctata

SEQ ID NO: 67667 - DNA, 439 bp, Glycine max
  unsure (1)..(439): unsure at all n locations
actcagctagaacttacaccccacaatgaatcagcattgttggaggtgtagatttgatccaaagagacatggnggtgagaagaggtggaaggcgacgccgatgtcaacacgatcgagggaggaactcggngagttgaagaaagaggaggcggcatctcangagcactcatggttgtcacataggcactaaacaagggtgtagtgacagtggacggaggaaccacgacatgattagccgaaacgggcagcgtaacaacttcagcaataggagcaaccttctgaacagacacacaaagaagagatggaggagaaggaacatcaatagcaacaggaacaacaaaagatgcttggacaaaaaaacagagctagaggcggatcctgcaaacttgaggggtgacccaaactgagcatcaaccttgcatgcctacctcatcacgtg

SEQ ID NO: 67668 - DNA, 175 bp, Glycine max
tcctcagcacaaatctaatcacattctacaagttgatagtgatggtgaaagtcaccaagatcaacttgagcacatgtctacatgccagtaatcccctctacgaggcaagacaataaatcccttgataacgaattctacgtgcataacacaaaccaattaacatttttattaatga

SEQ ID NO: 67669 - DNA, 450 bp, Glycine max
  unsure (1)..(450): unsure at all n locations
gtaatatcaggaagattttcattattggtattagggatttgatttgtatttaatattgacccccttcttactctaatatattactatatataagactcttggatagtacacatgtgcatacctctgagacgcacaacattaagttatagttcttctctatagaaacaataaagaagcactaaagcaaccagtaactgaaaatactagtcaacaagtaaaagtaacaaggaaagtacaagtggtagcattataccagatcattgagtagatntggttgttcctcanataaatcaggcaagtgcttcctcattactttttccaaggcttgagcatgggcttcaggtactccataccatacttttgggtcaccccagtgcanatagtntagtgaatagaggtgatggtcctcaacatgctgctccaagaagcagaaaatgatacaatgcgtta

SEQ ID NO: 67670 - DNA, 477 bp, Glycine max
  unsure (1)..(477): unsure at all n locations
tcacttatctggcaatagagttgatatctgttaggtacctagtactgttataatgttaatagtgtgacagcaggaacatctcacacttgtagcaccacgtgtgtacattagcaatgtcgtacagcctccacaataaagttgtgacatgtccattcctgcacgggcaacatgaaattaaaggttcccccagatgtaaccatttagttaaagtccaatacatgttaatgaatacttaatcaagctgaatgcatagtttcttatcagtttatctctgtctccagctctctccacacacacacacacagagtatcttttaaaataatatgccaatgttagctacacacacaatttcttgattntttntatcttaataaaagcatatagctaacatttctattgattgttcatcatcattgatcttcaatctcttgaagaatntattaaaaaagcataatctagtcaaacagaagaaaaatg

SEQ ID NO: 67671 - DNA, 467 bp, Glycine max
  unsure (1)..(467): unsure at all n locations
ctgcngtgaagctctatggaggcaggatcttagagcttcaatgatgtccttcaatggtgattntccaccatggagatgcagtgtattacaaaggagaagaggtgagaggaggcgccaaccactagggaataagccttggaagaaggagcttcaccaccaagaatgtgccttggataagaagcttggagaggatgcttcaatggaggaaaagaaagagagagagaaagagagggggggggggggagcacgaaattgaaggaacanaagaggaagagaagtcgaactttgaagttngtctcacaagactctcattcatcanagttacaacaagtgttacacatgcttctatttatagactaggtagcttccttgagaagctttcttgagaaaacttccttgagaaattaaagcttagctacacacactcctcttataactaagctcacctcctcgagaagattccttga

SEQ ID NO: 67672 - DNA, 346 bp, Glycine max
  unsure (1)..(346): unsure at all n locations
gccccctctctcactcgctggagactctctctctctctactcgctctcatatattcttcggttataagagtagactctcttctctctctcctttattcacgggattttttcaattccagctcagactcttagttctatcaataaaagttcattctctatttgataatggaaggctaagccgcagcgttgtttcccttgggatcagcacagntctcttgaggtctattatactgcaaatctggtaggtttcctctcactaatactttgaattgggctttaattcatgcatgctagagctgataattgctctgcgctaaatacgtcatgctacagacgttatgagaat

SEQ ID NO: 67673 - DNA, 367 bp, Glycine max
  unsure (1)..(367): unsure at all n locations
tacgctatgcttattatccgttntgttcatgattatttagggtatgtggttcttaatcacatattgattgccttatgttaaatttcgcttagtaatttaatttaaggttggattaagtggttgaactgataaaggataaattctcgtaacctaagataagagacttgcttgtgaatcaaggggaaacaacatgtttntaattatgttattttctaattcaaatttgcttgctatttaatttacaaaaacaaacaacccccccccccccccaaattattattgtttatactatctgtatgaacgttgtgtgacattactcgtgggaatacctagacactcctagaactgattttaatgttattgattc

SEQ ID NO: 67674 - DNA, 88 bp, Glycine max
ctatttgccgaacaccaaactcgaccaatccctacccaccatcggcatacgcggacagtgagaacctgtgatgtacctaaacaggcga

SEQ ID NO: 67675 - DNA, 207 bp, Glycine max
  unsure (1)..(207): unsure at all n locations
catcggagcgaaatgttatgaccattcgaatttgacgagagctgacgtttttcaatttcgagcgtntagatgaggtatgtgaccgaatcagacatctgagtgaaatgttatgaccattcgaaattgtcgagagcgtccgttgttcaatatcgagcgtctagatgagttatgtcaccgaatcggacattcgtgtaagaattatgacca

SEQ ID NO: 67676 - DNA, 308 bp, Glycine max
  unsure (1)..(308): unsure at all n locations
tctatatatntatgtctgcaatcatcactctgtcgaagtgatagttttctcctctaggctggagaaatgaagaacaccctgcctgtatcaaacgacttacacaacccttgtgagatgccctatatagaaagagcgattcatgacctcctatggtcgccacccgtcgtctaacaaaggagaattgccaaaagaccgccgaatgcccacaatgatttccggaccaggactcccatctcacacactcaaatgaagagacccttgaacctaaatcgaatataataacgagaccttacagctctttatggaat

SEQ ID NO: 67677 - DNA, 313 bp, Glycine max
  unsure (1)..(313): unsure at all n locations
ccttatcttaacaaagagaatcccactttgcaacagaaaggactcaaagtcccactaatattaaacttttccaaaagaaatcatgtccaccttccatccccattgcaccttatccccaaccatggcccatcacaagggtcattcncactccactcatcaaccaaaatccgaggataccccaacccttcaagaaactccaacaacaccatcacctcataaccacacataaccccgggtttggcacacaaattcattgttctaaagctcacttactcgctgcgaaatccggatcggaccccgaaatggtgtatta

SEQ ID NO: 67678 - DNA, 298 bp, Glycine max
atcataaaatatgcgctaatattatataaaaatatacatatgaataggtgtgactctttgaaaagattaaatctttacattaatagacatgaaatagtttagaaacataaccaattacatgcagaaaaacaattatatgacttcacaatcccttcattcaatcgctcctttctttcttagcataagacataaggaatcattatttgtaactacattgacatagcttatgtgggggcaaccattcaaaaactcatttatctaaaaaattgccataccctattgatcaattctatagcat

SEQ ID NO: 67679 - DNA, 387 bp, Glycine max
ttggacatgttctttttttcttcaatccttgatgtcatatctataggtagagagaagctcgtaattgtggagagtatcttcaacattgaataatatgacccgtttgcagattgatctttgttcttggaataaattgatcctgtgtgtttctgtctaatatgaatcaaaactttcatatctgtcattcataacttaaatatggtggtagactcataaaaggaaatataagattgattcacacatatattccttttaaacaaaatcatattaactagtataaatgaataattcaaataaaattctctattcaatcggtgtttggatggactagaatagtactttctgcttctaatagacaagttatccactaatggataagttcaactg

SEQ ID NO: 67680 - DNA, 444 bp, Glycine max
  unsure (1)..(444): unsure at all n locations
ngttattgtgaaattaattcaccccttcttaagatgtctaaggcctcatgtctaacatctagaaatagagagtgagtcactatcaatcttggtgttccatcttctcttgaattctatctctctcatagcattcttgatcaatattctaaggttaaaaatatttctttttgaagtgctttaacaaaaggatattgtgtgcgagtgattaattagatattggttttaaatagaaagtttgtgatacaatccttgtgagcaaagatttttcaaaactttgttttttatttcaatttgttttcaaaaccaattcacccccctcttggtttatgagttccatcattctttttcaaactagataagatgcattaagagcttacnttcaaattggatgccaaccattgattcaaaaatgaataagagtctcttcgctacaatgaatcacac

SEQ ID NO: 67681 - DNA, 403 bp, Glycine max
  unsure (1)..(403): unsure at all n locations
tggtccttaagtcctcttaaatacctaaataatggcctaaccacctttcaatattccttaccaagggttggttgatatcgacttagtacacctaatgccttaacgacatcaggatgtgtacaagcatggtgtacatgatagctcctactacactagcatatggtactctactcatgcgttctctttcttcaggagttatngaacaattctccctactaagagtaattccaacacctataggcaaacaagcctcgttggaattattcatgttatatctctttaagatagtatcaatgtacatagattgggagagtccaagcaaccttttagatttatctctataaatctttatacctagaatatagactgctttctccacatccctcatggagaaaatgtctga

SEQ ID NO: 67682 - DNA, 447 bp, Glycine max
  unsure (1)..(447): unsure at all n locations
actcagctccctatcgtgacactccatagaattagattccaacaatatttctggaggattagagcctaaaggaggtgccaaatttcgaattatatcaataatatgaggctataattcagacatgagacgctccacatcccactatcctttattgttaataaagaaacattcacgctcatcatgaccttgctgatttcctgaattacaaatactagacaactttcctactcctgacacccaattatcagaccagaaccgagttgatctaccattaccaataacccatctcacattaggtatcaacttatcccaacaaattaaccataccacgtcagaaattagaactcggtatgttggagctaatcactggaagtgtatcatacccacacttatattntgatctaatcacacgaacctataaatcatttggtttgtgcacaaatccat

SEQ ID NO: 67683 - DNA, 346 bp, Glycine max
  unsure (1)..(346): unsure at all n locations
nntaaaatcctaacgtgtcttccatccatttatattgatattggttatattggaccttaataggttcatgtcaacatgtgcattcagaatgctactgaagaaattgaaattcataaaagaagttgtagcaattattcataagatgaaacaagacaagtggtgctcttagaaatntgaagtttataaatactgtactcatgtcacaatcataaaatttgactatcagtgttagaaatctataaataaaggactcaagggccatttttcttaggtgtgatacatcactaccactcaaatcgtggtaacatcactcatgtcacacactaaatcatcaagatattgactt

SEQ ID NO: 67684 - DNA, 439 bp, Glycine max
  unsure (1)..(439): unsure at all n locations
tctgtatgggggtcancagatgattacataccacaaacccttgcgacaggtacaaatttctgattcaaggccagctgggttaccaagttaaccaatgcatccagtttgccttaagcttcttagtttcagatgatgcaaatgggtttgtagctacctcatgcactcctctaatgactatggcattcattttggcgctaaactgctgggagttggaggccatcttctcaattaaatttctggcttcagcaggagtcatgtctccaagggctccaccactggcagcatctatcatacttctctccatattactgagtccttcataaaaatattggagaagaagctgttctgaaatctgatggtgagggcaactggcacatagattcttaaatcgctcccagtactcatacaggctctcttcactgagctgtctaatacctga

SEQ ID NO: 67685 - DNA, 498 bp, Glycine max
  unsure (1)..(498): unsure at all n locations
cttagatactaagcttcggtgatacccttgacacgctacaccttgacccgggatgagatttttctcctcgcccttggaagaaaacaaaaaaagattttgatagttcctgatcaaagatcggaagagaacatataagaataaagttcccgatcaaagatcggaagaaaacaaaagatataaaagttcccggtcaaagttcagaagataacatagtgaaaaagaaaatccctgatcaaagatcggaagaaaatgaaagaattatgtagaagggtcttcggaccagacaaatatccaaacaatacataatagccataaccaaataaggaaataaaggaaaccacgacttgaagtagtcctctccctttggttaccaaccaaaatcctatgcgctaatgactttcttgccccgcactaaacaaaaacagaaaagggaaaggccaaaacacttagtagccaaattcccaccanaaacactattcccataaaggtcctattgat

SEQ ID NO: 67686 - DNA, 446 bp, Glycine max
tcatgtggatgcactcagcatgcatgctgtatgccaaagcccaagtgtttgattgaagattgattcaagacttcaacatcaagcatcaagaatccaatccaagattcaagattcaagagaagaaatcaagaagaaacaagtcaagacttcatatagaataagtattaaaagaattcttcataaaccaaatagcacaggtttgtttacaaaagaatgttctcaaattttctaaagttacagagtgattactctctggtaatcaattaccagttggtagtaatcaattaccagtgaccagattggttttcaaaatgttttcaaatgatttggaacgttccaaaatgatttttaaatagtgtaatcaatcgcactatattagtaatcgattacaagtgaatctgaacgttggaattcaaatccaattgtgaagaggcacaacttttcat

SEQ ID NO: 67687 - DNA, 503 bp, Glycine max
  unsure (1)..(503): unsure at all n locations
gctaaggacaagctngaagatgttgtgctttagtctctggatgaagcaacaacttaaagacttttggagtaaccttggttctaaaatgtggcaacataagtgttatcaatctaacaaaaaatcctatcatgcattctaggactaaacacatagaaataatgcatcattttcttagagatcatgtgttaaaaggtgactgctacattgagttcatagatagtgagcattaacttgcagacattttcactaaaccactcgctagagataggttctttntcattagaaatgaaataggcatattagatgcatccaacataaaataacttcctatttgcataatgtgtgatgcacattgctatttgagacgatgactaatttattctggagtctctacttttaatcaataccaagtagtntaatcgattacttctctctcgcttagttgttcagaagtaaacaagaacactctaatcgattactntgagtatttaattggatacatt

SEQ ID NO: 67688 - DNA, 475 bp, Glycine max
  unsure (1)..(475): unsure at all n locations
ggctttgacacacctgagaagaagatgcacggagaagaaggagagcttttatganaacgagagaagaagacaaaaaggctgggttgcgtgtttttattttaaatntaagacaaggggcaatttgcccattcagttaaatgctaggtgcaccagcaatagtgatgggtgcacctagcaacaccctaacatttgttaatcggggcatgacagtagagacttacttctccctaggttagatatgtctcaatccaattgtttggctggccacattatttactaggctaggcctaatggataacacttttccaagttttggttntgaatttcaactgttaattttccttcaatttccacaacacgttagaagcattaatatctttgacttgttcttttccatttccccgtgtttatgnttgggattnntaatggcatgattttaaataatttcttttttgtaactacctgccttgtacat

SEQ ID NO: 67689 - DNA, 251 bp, Glycine max
tttcccatcatgcagccttcggatagggagcttcccttttatctcatgtgcaatgcctccaacaatgcacttatggctattttggtccgaagagttgatagactatcacatgtcattgcttatgcctcacgcaccttggatgtagcctaagttaaatacactaccaccaaaaagaagcttctagctattggttgtgcatcagataaatgtagatcttatgtgctatgctcccatattactgtctttactga

SEQ ID NO: 67690 - DNA, 349 bp, Glycine max
ggatcacaatcaacatttcttacctaattatgaagctgatgtcgcaccaccacttccggcacatctaccaaatcattatgataaaagtcaatcattctcaacaattttttcacatcaaaagcttcatatgatgatgagggactcaaacatgaaacacattggaaaaagttcaatattatcttcatcaaacctatcattgagctcatgcaactgcaaatctaaaacactaaataaataatcatgcttataatgatgcaaatcagaaacactagaagtggtagcatgtcgtctagatttctttccttgcacatacagtgcatccaaatcaaacacatcaatattatgctta

SEQ ID NO: 67691 - DNA, 309 bp, Glycine max
aagtgtgacaacatatccaggaagacactttacaaaagagctcatttaaaggtcaagccaagatgcggccagttcattcatacatttaaattaaaacaatgtgtcctatgataacggtgacaaatgatcggatggaaagcactttacttgaaagctactaaagcatgaacgggttgtcattataaaatgattgccaccaccacccttattgaacaaaaggagaagtccttcttccctagagaattttcaatgcaggaagacaaccaacgtggccaccttctgaaaattcatattggagccatatctctt

SEQ ID NO: 67692 - DNA, 309 bp, Glycine max
gcgaatatgcccattcagataaatgctaggtgcaccagaaatactgaagggtgcacctatcaacaccctaacatttgttaagctaggcatgacattatagactcacttctccctacgttagatatgacacaatacaatagctaggctggccacattatccactaggctacgcctactggattacacctttacaagttgtggttatgaatctcgaacgacattcttcctgtaatcaacgcgacacgtcagagcattaaatatatttgacattgtcttcaccatttacccgcgtctatgtgtgcgattttt

SEQ ID NO: 67693 - DNA, 357 bp, Glycine max
aactaattggtgccacccgatgagttgtgtgaaccctaatttgtagagaacgactaacatcaagtactaaattctgcatgaatctttgaatactgaatggatgcatgaattggaaatgatgaacgccacattgaatttattttaaccacttagccaaatagctaccctaccttaatgaatgattgaatcccttgcacccctcttgagcctaaatgtgaatgaatgagtcattgaaccttgagctaaatgcaaattgctatcttggacaccctatcttatgctataagagagcattgctatgggtcaagaacaatttgttccatatttaagggagtggtttgggtaaaatatgttcca

SEQ ID NO: 67694 - DNA, 402 bp, Glycine max
ggctgggtgtgtgacatatattttaaatgtaacacaagggcaatgatgcccattcagttaaatgctaggtgcaccagcaatagtgatgggtgcacctagcaacaccctaacatttgttaatcggggcatgacacaagagacttacttctccctaagttagatatgtctcaatccaattgtttggctggccacattatttactaggctaagcctaatggataacacttttccaagatctgagttagaacttcaactgatatttttccttcaatatgcacaacacgttagagcattcaatatctatgacttgttcttttacatttccccgtgtttatgtatgggattatcaattggcatgattatcaaataattcctatcttgcactagctgacttagtacata

SEQ ID NO: 67695 - DNA, 256 bp, Glycine max
gctttgcaactatttcaaaaagatttttcttcggtttcgacacccaggacgaatcattaccaattctcaatgttttacaatagaaggttacacattgtgaacttgaatcttggtttaaaactgtgcaatcgatctcacaatggatgccattgattaccaagagattaaactatttcttacaaattttaacaaggtgaacttagactttgaacgcctggaatcgattacacaactgttgtgatcgacttctaggcac

SEQ ID NO: 67696 - DNA, 305 bp, Glycine max
cactgcagctgcagctatcatgaataatttgaataatataaaaattacccttactagacattcaaatgaaaaaaaaggattcatgcagtacagactacaatgcgtgtgttatttttctcttaagggatgcacacctgcagttattcattaatatggatctgagatcagttattttaatgctacgatgataagaataacaaatttttttagatactaatggtatttagtattcattctatactgaacaaaattaagatgttagtttttagagattattatctaaaaaaataattattttcaatact

SEQ ID NO: 67697 - DNA, 384 bp, Glycine max
  unsure (1)..(384): unsure at all n locations
gtctcttagccttggagccttgttcatgtgtcacttgcttgagttgagagaaggaatgatagtactgacaattgcatgtgcgtgattctctccggtgatgacaaccttgaagattattcctttgggttctcctattctctactattntgntcttgaaattcaaacgttaacattaaaaaataagagacaaatggattgaaaaatatggttggtgcagcattactcttttaactaacgcacacccagtacaagaggttggatgtcacttgcataatataaagtggttggttaagtgattaagtccaatggacacgtatgtaaaaggctaagtgtaaacacattggttttcataaggttggatgcttagttaattacgacacattg

SEQ ID NO: 67698 - DNA, 340 bp, Glycine max
  unsure (1)..(340): unsure at all n locations
tctaggaagtgatcctaggtcatnctccaacgagcaatggtcaaccaaacgttcataacagatagtaataaaacagtaatgaattgggggttggctgttttttgtaattaaacagccagtaatttgaatagaacatatagaataaaacatgttgtttccccttgattcacaagcaagtctcttatgctaggttacgagaatatatccttaatcagttcaaccacttactccaaccctaaattaaattactaagcaaaatataacatgaggctgtcattatgtgattaagcaacacatacaccaattaatcatgaacgaaacttatcattaagcatgaaca

SEQ ID NO: 67699 - DNA, 409 bp, Glycine max
  unsure (1)..(409): unsure at all n locations
acgacacactaacgacactgattcttctaaaccaatgtggtagaacaagcggcggccatactcaaaatataaaatgggaacacgaggacggtgatgtacaaacccatctttggattgctaaaacaattcttctacgatgtaagattggtgaacaccatggtggctggcgcggtattatagtcacgtgactctaacaacactcccatgacactanagactgagatgtgcgctctaggtacgtgaagactctaacaatagacaattgaccccttcgatactcaatttgcatagtcactcagctctccctacctcagtcatcgacactcgggtaagatattgtatcgcgactcacgccacaccttccgctgtggcgcaccactagtctattgtgaatcaggccacccattct

SEQ ID NO: 67700 - DNA, 280 bp, Glycine max
  unsure (1)..(280): unsure at all n locations
ggccaaaaacaccaatgatattatgagggaggctcaattcttaccaaggtaactcatactttcaaatgactttcaaacttctgactgtgagaaaacaggattcagtccaaatgcaaacttttttcaaaaataccattttgacatatctatattcaagaaaacantcaaagcgtcatgacatagattgaccaaatataactaaaattgcgaactacacattacaattacaaaccacaaacttcaaacaagacactccccccccccatctatacaacatttc

SEQ ID NO: 67701 - DNA, 461 bp, Glycine max
  unsure (1)..(461): unsure at all n locations
actctcctcacatatctgatcttaggcttatatttgtggctatgttcatgctcatgctcttagcataattctgaaccgcttatcgcgcatntatgaattatggcttatcgcggctnttctcgctcagcggatggactgaagcggtgcgcttagcgggatgaccattcgctcagtgaatatgcatagctcatcctccttccagattcttcctcatgctcagtcgagaagtgttgcgcttagcggatgtctccctaagccagaagataggcttagcgagagggtgaaaatcaacacttcanaacttgcctaattaacctgaaatggagagtaaaattattattaaacacacaaaaatggaagtactaagtatttattacctacctttaacaaagagtaattacaacactacaaaatacccataaaggacgagtttgatacaatttacacaagttttatacaca

SEQ ID NO: 67702 - DNA, 430 bp, Glycine max
  unsure (1)..(430): unsure at all n locations
tcatggagaacacaacactnttgatcttctccatagtaacataatttagaagagagtgataaaaatcattctcaatttgaggagtagtattgagaatcaaggaactagaagagcaatggctaggagcttaaaataaagtcttgaataaataaaacgcctcattttttattttttctgctatgaattgagcatgccttgtgtgaaccaaataggcatgggaaaggtgccataagcatggggcctcacatcattgtaggtgaagcacttcaaccaacacaattatgtttacggtttacaccaccttaccaatgtaaatatgcgctatggcatgtttggtatgtcaaactcttctgttatggtaagtgattgtttttacaactaaatgccatataattactatattcttatctgagttctaccccacatactg

SEQ ID NO: 67703 - DNA, 332 bp, Glycine max
accagcagcaatcggctgcagacacaccaccactgtcttcacattagccaccatctctagagtccatctcagctcatatgcagaagatggagctccagatgcatgcatacatgtagtatttggctgactagcaagcaacaaaccatatgggccaaatgcaattgaacgacagcttctatcaatatacacttcatcagcatcgtcaagaccctaacccttactcgtggcctactccctagcagtttagagccactgtcgcatggcctggggataggcctaattttcaggaggaggcaggtcctacagatgctcaatgagctacccaaggggat

SEQ ID NO: 67704 - DNA, 409 bp, Glycine max
  unsure (1)..(409): unsure at all n locations
atgccttatcacatttgataggataaattagatgaatcaaaaccaaaatcttcatgaagcccatgaaagctaggtcctgttttaatggtttctcctaacgctttcttatgtctttcactatttttaatcaaatgaatgccaaatatcttgtttctctgcatgtctaatgaggaaacacttgctacgtataaaagctgaacataataaaatgctgaaacaactcagtattatgactgtaacagacagtatacttctgtattcaaccttggcactggcattttaccctaaccanagacattcatgaatgcacaataataaaaatatataatatagagtccatcattcaacttctgagctccaaacatcaatattaataattcatcaactttaacacagttacaattcaaac

SEQ ID NO: 67705 - DNA, 252 bp, Glycine max
ctctccacctttgggcgtattctttagatagaatcgcgccctctttttgcacatgttctatagttgcatcctatccgaagacattatactgacactgcctaacgaatgcaaccactatgtcattacaagaatggactcgggaaggttccatgttagtgtaccaagttacagctaccccagtaagactttcttggaaggaatgtatcagcaattccttatcttttgtgtatgcccccatcttccgataatgca

SEQ ID NO: 67706 - DNA, 231 bp, Glycine max
  unsure (1)..(231): unsure at all n locations
gtaccgcggctgcagcttgagtacttttggatctggacattttgagcttgctttcttcttctcactgtgagtgccgtgatctccttgatgttctggatcgacatcctcacactgctcggaattgaagccctagacgccacaccgctcatactttctacacanaatcacaaactttgagagaaatagatatgtgggcgatgaacatcaacgggtcattgattgattgcgtca

SEQ ID NO: 67707 - DNA, 359 bp, Glycine max
  unsure (1)..(359): unsure at all n locations
ttagcgacctttatctcttctatacccttacagcgatttgtaaaacttttatggaagtcaaaagcatgagagtgtgtcgataccattaattggtcagctggttcttgagtgggtngaggacatcaatatgatatttggaaacacccaaaagaaggaaaaaaagtaaagctcggatatggaagacgaggtcgatattgtttgatcttccatattggtccgatctagatgtcaaacattgtattgatattatgcgtgtggagaanaatctgtttgatagagtcattggtatgcttcttaacattcaaggcaagataaaggatgtgttaaatactcatcaagatctagttgagatgagtata

SEQ ID NO: 67708 - DNA, 309 bp, Glycine max
gcggctcgatatattagggactcatcgactcacataaaagtattgttgttgaatattctcagagcttctgtattccatttctaagcatctcgatatattacgggactcaatcagacatccgagtaaaaagctattgtaggttcaatttgctcagagcttcggtattccatttcgagcgtctcgatgtattacgggactcaatcagacatccgagtaaaaagttattgtccgttgatatgctcagagctctacattcaattccagctttcgatatataccggactcaatcgacatcgagtaaaagtattg

SEQ ID NO: 67709 - DNA, 218 bp, Glycine max
gctcagagccaattcaaacgacaataactttttactcggatgtctgaatgagtcccgtaatatatctagatgctctaaatggataccgaagtttgagcaattcaacaaaatacttttactcgatgtcgatgagtccggattatcgaacgctgaatgatgtgagcctgacaatcaacgacatactttatcgatgctgatgggccgaaatatgaacctca

SEQ ID NO: 67710 - DNA, 433 bp, Glycine max
  unsure (1)..(433): unsure at all n locations
agctttcatcgatgtgacaaaatggaacttttcactttagtggtccttgcgactaacctatgcttctctccttcctttttagggagattctcctcatgttggcgcacataggctcgtatcccaacccgaacatccatgattctttgtgaactccaccaaacttgctatgccattcctgtttcggcccaaacccattccaggctcatatccgtgtcctaacatcactcgagccaccaccaaagcggcaccagatgagcgtggctgaactgggggagactccatgtaagcactactgacaacttccaatgcctggaaggatgtttccaatgactcctctacaacctccacatatggcatagaggatggacaacttacaagtatgtcttcttctcccgaaactantttcaagctgtcctgcaccacacaatttaac

SEQ ID NO: 67711 - DNA, 199 bp, Glycine max
  unsure (1)..(199): unsure at all n locations
tgtggtggggaaattcatgcatctcccctgtgtttaaaaacatgtgcatgatcagattgnggtggtggctctcaatgagtatggcagtggagttattgacattctcactgggagtgtacgccacattgggtggtgtatatttgggaggcaagccatatggcgggaacgcatgcttgctttgaattgcacataatggggg

SEQ ID NO: 67712 - DNA, 307 bp, Glycine max
  unsure (1)..(307): unsure at all n locations
tagctaacatacctctctaatagctaagctcacctccttgagatgagaagctagagcttagctacacacccnnctatataactaggctcacccccatgacaaaaaaaacatgaaaataacaaaaaaaagtcattattacaaatgaaaactcaaatgccccgaaatacaaggctgaaaccctatactactagaatgggcaaaatacaaggcctagacgaaggaaaaacctattctaatatntacaaagataagcgggctcatacttagcccatgggctcgaaatctaccctaaggctcatgagaaccc

SEQ ID NO: 67713 - DNA, 430 bp, Glycine max
  unsure (1)..(430): unsure at all n locations
tatgcgagacacagaccaacattatagccatcgttagcaagtaccaagaagaattaaatctagccacagcccacgagcataaagtggcggacgagtatgcccgagtgtacgcacaaaaggaggctagaggaagggtgatcgactcgttacatcaagaggcaacaatgtggatggaccgatttactcttaccttgaacaagagtcaagaacttccctgattgctagccaaggccaaagcaatggtggatacctactccacccctaaggagatccacagacttctcagctattgtcagcatatgatagacttaatggcccatataattagaaaccgctaggaagttngtattgtcactcagatcttgactagttataacgttctgaataaaatgagtttatcccatgtttttactccaaagatcaatgcgaa

SEQ ID NO: 67714 - DNA, 442 bp, Glycine max
  unsure (1)..(442): unsure at all n locations
gccgctgcagcttgtgaatggctagacatgatacatgtcagggtttgtgttggntcaaggataaaagggatgccccacattatttccatggcacaaatgcaaaaatgatgatttggaaactttatgcaaaactggtcatgcatgcacctatgcggacactcaagtgtcaaatttttatggtcatgtgatgctagggctcaagattcatattctctattttaatcaacccaatgtttccaaaatatgttctnttatcaatttgggcattcatccgagtccatttcgggcgtccggggaaatttcacagcattcacccttcaagtgtagacacattcttcaaaaattagttatgatcagttgaatttttcatagaaaagttggaaatcgtctcttttcaaaagcactgtcagttttagctagacaacttatnggtttcttcttc

SEQ ID NO: 67715 - DNA, 422 bp, Glycine max
  unsure (1)..(422): unsure at all n locations
atgaaattctctacccttaccaaggagatngccatcatcaatgctgaccaaaagcaagcacgacatcgctatgcatagagcctgaggtagcatcatatctctctacaagggagcctgccaagcctcaccctacagtggcttaagccactcaagttatgagcatcgacgaagagtctcaaattcacgagatgaattctacatatatccacaagatgacacctctaacagaggcctgaaacccatcgaagagcatgtcaagctgcaactcaaacctaaactcagacagtgcacacggcttattatggaccttaccaaccatgagcattggcacatcaccgacgtgctacacaaaaatgtatatntgtttgcctggaactgtctgacatgctggaatccatctatctaatctccacaaactttca

SEQ ID NO: 67716 - DNA, 117 bp, Glycine max
tgaccattcgaatttgtcgagagcttccgtctttcaatttcgagcgtctagatgagttatgtcaccgaatcagacatctgagtgaaatgtatgaccatactaatgtggcgagagctt

SEQ ID NO: 67717 - DNA, 120 bp, Glycine max
atttgggggctaacctcgtccaagatttattactacccttgtctgagctagaaagcattttcttttttttcaatcatttgagtcagctttcatgccctccattcaccaactatttttctg

SEQ ID NO: 67718 - DNA, 433 bp, Glycine max
  unsure (1)..(433): unsure at all n locations
gacccgcgatccttgagtcacctgcggcatgcaagcttctatagaaaggtcgttcctaatttctctacaattgcatcacctctcaatgagctggtgaagaagaatgtggcatttacctagggtgaaaaacaagagcaagcctttgctntgctcaaagaaaagcttactgaggcacctgttctagctcttcttgactnttctaaaacttttgagctagaatgtgatgcctctggagtgggagttggagctgtattgttacaatgtgggcaccctattgcttattttagtgaaaaacttcatagtgccacccttaactaccccacctatgataaagagctttatgccttatataagagccctccaaacttgggaacattacctttgttccaaggaatttgtcattcatagtgatcatcaatcacttaagtacatt

SEQ ID NO: 67719 - DNA, 367 bp, Glycine max
  unsure (1)..(367): unsure at all n locations
gtgtaacactngtngtaactatgatgaatgagagtctngtgagacacaactcanagttcaacttccctccctttttcttccttcaatttcgtgctcccccctctctctttctctccctctttattttcctccattgaagcatcctctccaagcttcttatccaaggctcatcttggtggtgaagctccttcttccatggcttattccctagtggatggtgcctcctctcacctcttctcctttgntatccgctgcatctccatggtggaaaatcaccattaaaggacctcattgaagctcaaagatctaacctccatagaagccccacaagcaagcttccatcactcanngtgatcaccatgggggg

SEQ ID NO: 67720 - DNA, 349 bp, Glycine max
  unsure (1)..(349): unsure at all n locations
gaacccaacacaacacattattctttcaagttcggggaccgaaaagccaagccaatatttaccaccccttggcatttcactgtcacacacataaaccactattggtgaaatattttcatgggttaataaagtgaaagataattntatnttctaataagcctggttgaatataaaaactaaaaagtgttttgactaccgaataaaatttatattttcaatggagaattctcanaagtacttcgatccaaataggcttaagagtttgattcctatgatttatttatattgaaaaaaatctattaanaaaagttaatctttaaatgaatcttatatctaataaagaataatt

SEQ ID NO: 67721 - DNA, 238 bp, Glycine max
attgtaccatattgaaacacattaggtacgttagttttaagcagaaactaactattagtactaagtaactcaactgtaccacggataccatgcacttgacatataggagaagatcgttggaatattaggaaatgttggatacacattatacaatcttacactttaacaactcataaagtgattttgaggaaaaattcaatttttactaaatctgcatgagcatgagaacatgtttaat

SEQ ID NO: 67722 - DNA, 279 bp, Glycine max
ctgcgctgcagaggttgttactacatatatatacttattttctatcttctatcaatttttcctcaatttttcgctaatttattcgtcagattttttatcatctattttttgtcaattttttattcttttgggctggactaaaaaattgtagcttgggctagacccatcatcatttttatagatgtctttatttctttgaatacttggtttacgactgatcatatgattgttataattatttggattgacattctattgaattttagtttttttagtaat

SEQ ID NO: 67723 - DNA, 452 bp, Glycine max
  unsure (1)..(452): unsure at all n locations
tggtttatggtgtgaaaactctatatggtgtgaacgctngccctgctaaaggattgcttgtaactagcatgcactggtgcatgtgcgcatcatatgctttggtttggtctgtgaaatgaaattttggatgagccatgttggttctctggtttangaagtgtcaaatgaaatttgctagtagttttctgctcacgtgttggagcttttatgcangctttggagcaatntctgctagcaatttcctttgcatctatacaattttcatgacagtaaggaactattgatatggactaggaccactgttaaatcttatagcacgttgtagaagtcngaaaataatcacatgaattaatgtcctgtttcttctctttctcnttataaattattnataaattacacatttgtttggagctggagtatcatgtatttgagcttcgaattagagagagaac

SEQ ID NO: 67724 - DNA, 403 bp, Glycine max
gtatggtataattccttaagtcttcctgaggtgaaaggtgtggctggctgttcacagggttggacatctatggtgcaaacctggaatcatatatttgcaggtggcacgtggattctaaataatggggagccaactatgttctgcgaggatacgtgagccttcaagtgttgctatagaagagcttgtccctaattctctttcgaggtatatgaaacataaacttgttgcattttttgcgtccgatggaggtctctagcataaacttgcatcattggttgctcttgaatatttcttttccggctcgcgttggggaggcaacaactaggccatctctgttcgtaatcttgtgatcaagttggaacacagaacaaggtgtcttccaggggaagatttccacatcctg

SEQ ID NO: 67725 - DNA, 379 bp, Glycine max
  unsure (1)..(379): unsure at all n locations
acattatgctcgtttcgtnaatgccggggcgtttctccactcgccaatttcccagcttgaaatcaggagggcatggtcgtaccaaatccaatgtactcggaacatcatcttcgcatatcgcgaccacttgacctttgtctcccagacccgcgcttataaagcttctacttatgtggcagggcgggcttccttcactttctcgtttccaacgcgagctttgaccaccgctcttccttcccgcgatgcttctcttcatatccgcctgagtgggcttatagcctaaaccatactttccacgatttcctttggcattaatcatgctagttatgccgtcgttgtctttgctaaacccattctgggtcgttaccgttcccaacat

SEQ ID NO: 67726 - DNA, 266 bp, Glycine max
  unsure (1)..(266): unsure at all n locations
gttcttcaaaaatcccacaaataaatccctcttattactacaatatttgaatactttagttcctcaatgtacaacctttcaaatgttgctcgttcccttcttctttttgaaaanagaaaatcanatgctgtgaaaacatggatgaatgtctaagaanatcaatatcaatgaaaaaatggatgagatcacaattaanaagcaccactacctatctntcagagtcctttggttaatttgtcttgcttcttatgcgcgggcgtttgtta

SEQ ID NO: 67727 - DNA, 425 bp, Glycine max
  unsure (1)..(425): unsure at all n locations
gcttctagctttcattggtgtattntgatctccttttggtgctctaaattgtgggagtatgctcaaatatatggggcaactcttggattgttttcttgcttgattacagtgaattaagggtttgtatgggatgggcctaagcctataatgcattttgaaacaatgggacatgccacattgtccccgttctcttgctattgacgcctaaacgcgcgcccaccaagtgttcggagaaatgcctcaatggcattagcgcgtgacttttgtaaggaaacaacccatggggcatgtttggttgacatatttctattattggagtatgattcattcccgaaaaggctaaatnattgccccgatattcctatgcctacagctaaaatttatgcaaaagacacaagagaggtgatattggtaagtaccctttt

SEQ ID NO: 67728 - DNA, 357 bp, Glycine max
  unsure (1)..(357): unsure at all n locations
cacattcttctacttccaccagaactttttaccattaccacggtggtcaaccacgtggtatactacacctttctaatgaaaccaacacattagagtttctttactacttcatctaccatttttcctctctcaggacctagtttccttcttctttgggccatggtttagccttcgggtacatggataactngggatagtggaagtttaggtcaattcccgacatatttgatgcagaccatgcaaataagttagtgttggttgctagcacttgggctactaactcttctacttctatacttatttgacacccacagttggtgcatggtgaagagtctttactgagttggaagggtttga

SEQ ID NO: 67729 - DNA, 349 bp, Glycine max
aagaagatcgttgttctattgttatagaatggctttgttcctcttatatattggtaaagaaacaccactaatttaactggtgttagcctcttcattctctttggcccattaatgtcttaattaatgtgtgacacacaatatatagctaactataataacgtgtacaaactatatttgaagtaacttttttgtatcagcaaaatagatatattgatgcatggtggtacaagggtaccacaattccatgattaaattgcaactaacccaaaccagaattacattatgccattagagtcagtaagtccactgattgatccgacaaaagttccaatattttaatatgtaatga

SEQ ID NO: 67730 - DNA, 369 bp, Glycine max
actccagcttctaaactctgtacaataatgaagctccgataccacttgttagacattttgcctcagatatcttaagaagggggggggatgaattaagatattccaaactttttcccctaataagaatctatcttactttttacttaagttatgaattcccttaatgaccatctttttaaatattaattccaatgaagcaacttggatatgaatataaagcaattataaataaaggagaataagggaagagagaatgcaaacttcattttatactggttcggccacacccttgtgcctacgttcatgtcccaagcaacccgcttgagagttccactaacttgtaaatttcctttaccaggttctaacaca

SEQ ID NO: 67731 - DNA, 287 bp, Glycine max
  unsure (1)..(287): unsure at all n locations
tcttacttactctataanacaactataaaaagagganaatgaagaatattatgttccagaatacttagagctgttattcttcttattcttgntgacagaaccacgaggtcttgccctgcgcttcacgataccagctgaggccgaattctaaagaggagccggtggaaatgccccaccggactggtcaaccggcacggcggcgccgccaggaggagtggtggtgttcaaagccaatgccatgccaccgtgaggcccatatttcctgngccttccnctctttctcttga

SEQ ID NO: 67732 - DNA, 408 bp, Glycine max
  unsure (1)..(408): unsure at all n locations
catgaatggtacatgattttggactaggattccatttgggccaaattggatgatggaaagagtgggtttcgaaatctgcactttatgccgaattgtgctgttgaaatgggcagcaaaattttttattaatgcagaaaaatgcttgtgtatggctggttgtgaaagggtagtacatatggggttctagatatttactagcagatcccaacggtcaaaatgtagacttatgtactagagactttccagtaaaaatttgagtcgatccaacggttaacgaattggaacgaaggaaatgttactanggtaatngtatgtgaaaagctgtgatttttgagttgtgtttgggcagagttttctgcctttgccctgntttgcttggttttgttagccatgatgaatggatgtgga

SEQ ID NO: 67733 - DNA, 370 bp, Glycine max
  unsure (1)..(370): unsure at all n locations
gaagcttgagcttagctacacacactccctctcataactaagctcacctccttgagaagctttcttaagaagattcctaaagaagctagagcttagctacacatacctctctaatagctaagctcaccttcttgagatgagaagctagagcttagctacacacccnctataatagctaagctcacccccatgacaaaaaacatgaaaataaccaaaaaagttcttattacaaagacaactcaaaattccccgaaatacaaggctaaaaccctatactactagaatggccaaaatacaaggcctagacgaaggaaaacctattctaatattacaagatagcggcttatactagcccatggctcaaatctac

SEQ ID NO: 67734 - DNA, 400 bp, Glycine max
  unsure (1)..(400): unsure at all n locations
cccctcaattagtggattttcagggttgagaagtgaaaatgagaatggggttattttggagccaactctcatcctcacacaagtctataacattaatctaaactcgctcaaactggttntacgacgaanactctaccgaatcaaaatttgactcctcaacacccaatttaccctagaaatggctcttgccctcactttggtcattcattntcctcctttgcacagcccaagctttcccacagtcctaattgacatttcaaactaggattaactcactttaatctccaattaccactaaatccagatttagctnttcaaatccttaaagcatcacacttttccactcatatcactacattctcactttttaaccctaggttaactctacccttcatctcta

SEQ ID NO: 67735 - DNA, 446 bp, Glycine max
  unsure (1)..(446): unsure at all n locations
aatatagaagtctctatatcggctgctttgagaagttctggatgagattggaaccaaagcctgtacttgtttgggtcaactttggatgaatgaaaccgtgtccaccattttacgaatgcatgccgtggtagtgatggaaattagtttgttctttcagtattactgtnacgatattgccatgaaaaattcatgatagagcacaactggagaaatatntaagatctcctagaattcgtgattcctgagaattgtattggtttttgaatcgagcaaagtccacgtgaatatgctctgggaagatctctggttttgggccaaagaaatcccaccattgaaanaaccagcttggaaagttatagactgtgttagtcctgaaatatatcagccatgagtgcttgaagcgggtgttttggngccaaaataccttggttcaagcatcaacataa

SEQ ID NO: 67736 - DNA, 387 bp, Glycine max
  unsure (1)..(387): unsure at all n locations
atttctcacaccaagattaagcatgagtttctctcggtggaatgcttcaacttgtcctcaagatgccccttgaatatccatntatagctccaaagatgaccattgaagtgaagcccactcaactgataggcttctggagcaagtaaatagtcatgatagctgtcatgaaatgatagcttgcagaaccattctaatgtagtaattttaagggactnttctaatgagcattccaaagtatcatcaaaatagtcattttgatgtttgttgagacaaaatccataattgtatagattcntttgatgaagttcaacttatatgcctttttgaagcaacacaacttcattaatcttaacgcatcttcatagcaccaaagcattctgaagaagt

SEQ ID NO: 67737 - DNA, 140 bp, Glycine max
  unsure (1)..(140): unsure at all n locations
aaaccttatgaactctgcctcttttgctttagtggcatttaaagtatctaaaaggaagaatgaaaatatgttcaattgcccatacaatctctttgaggatagaaatgatgtctacttcattactatcntgtgttttttga

SEQ ID NO: 67738 - DNA, 358 bp, Glycine max
  unsure (1)..(358): unsure at all n locations
ctcgtgcgcttagcgcaattctgaaccactcagcgcacattagtaaatnttggcttagtgcgtgcatctttcgctcaacggatggactgaagtggtgcgcttagcgagatgaagcggtgcgttcaacgaacctgtacagctcttcttcttccanattcttcctcgcacttagccaatgagtgttgcgcttagcgaacgctcgctaagccagcagatgggctntgtgagaaaggtgaaaacaacacttcanaacttgcctaattaacctaanattgagagaaaatgatattaaacacacaacacagaattactaagtattattacctcatcttactaanagaactatacactataaata

SEQ ID NO: 67739 - DNA, 434 bp, Glycine max
  unsure (1)..(434): unsure at all n locations
tattattggtatcatctctctgtccatcatcggggttgctacttgagctgccagatcccttcacctttggtcgtattctttgaaaggttcatgctcttttttacacatgttctgtagttgcgttttatctggagccatatcagaattgtactgatattgcctaacaaaggcaaccattatgatcttccaagaatggactcgggaaggttccaagttagtataccaggtgagggctgccccagtaaggctttattgaaagaaatgcatcaacagtttttcatctttcacgtacacactcatctttttgacatacattntcaaatgattcttggggaaagtaagccacttgtacttatagaaatccggcaccttgtacttttgagggatgacgacgtcatgcactatgtataactttgcattgtagcaagagcatg

SEQ ID NO: 67740 - DNA, 352 bp, Glycine max
  unsure (1)..(352): unsure at all n locations
caccatttggtggttagctactaataattttaagttctatttttaaaatcttctcttttgtgccatttttatagctaatgggaaagacattttaacaaccaatttgataggatattgtgacatangcaagccacttatccaatgtacatactgcagtgcaaacatgtggtatccggaaaggattcacangcatagagacattgtaaacccaaaattcaactatgtatggaatggaaaggttacaaacattgtgaaccaccccttttaatgctataaaacaattactttacactatctaaataccctacaatactacatgacttctacaagtatatttataaaaatagaatat

SEQ ID NO: 67741 - DNA, 420 bp, Glycine max
actaaacaactcggctgcacctgtaacacaatttttttcctttacttattccacaagagtgtgggatgaatttaatagtcgcacatctggcttgaatagcatgaaattaattttgcctttgtttgttgcattaatgatacatacagaataattcttacataatctcactatatttagggcatgtgtatttgtgcgttactgcttcgcgataaataataaagagttatgagttcaatatttattaacacactctttattttatgaaatagaggataaatgtcttatttaaaatggatgaccaaaatcccccctatttgtatagacatttgctgtctttaaaatattatgtgggattcaataatcattttattaatgatatatatatcaatcccaactaccaaatatttgtgtagtgattaa

SEQ ID NO: 67742 - DNA, 426 bp, Glycine max
taactgggcacatggatttttacatatgtaaaatggtttatttcttcaagactgatatataaaaatgcattgttcaagaaaacggctttagtcaagcaaatcattaacaaatcctccaaccaacaaatactggcgatttaatccatagaaatttttactgacgcttacgtccaaatatgatttcttaatgacatttttggccaatctaatcagcacgatcacgttggcaataaatttgtaacataatatgtcctctgtatacaactttttaacggtaagggaagaaagttaacgacaggatatatttgtcacacttttaacactttcgaggactaaatattgcatttaaatactttcacgacacatttatcaacgaaatacaactttaggaataaaaatgattatttaccccaaaaatagagataa

SEQ ID NO: 67743 - DNA, 303 bp, Glycine max
  unsure (1)..(303): unsure at all n locations
caggcagtccaatcctatcttggaatgctataataagctaggtatatggtcttcttcacacagattatgagtaaaggtatatgcacacacacatgcatcgacaaaatgaagatcatatttttgagcatgaacctaggatatgaagttctcatcactaatatataagctctacatttattacaactaatatgctccagacgtttgcttatgcacctacaaaatgaagttcagtcaaacgacttgtaatatctaacactatgacttatataacgaagcagagctactagngagcatacataatac

SEQ ID NO: 67744 - DNA, 335 bp, Glycine max
  unsure (1)..(335): unsure at all n locations
cacttttaaactttctttggctatctctaagactcaaagcatgatagcacgcagagaataacatcgtcttctgcgcctttagtcatccagaggcggcgggcccgatgacatgcgggaaccatttggtcccgcacattttaagctttcttttgctatctctaagactcaaagcatgatagcacgcagagactaatgtcgtcttctgcacctattgtcatccagaggcggcgggtccgatgacatgcangaaccatntggtcccgcatatntaaacattcttttgctatctctaagactcgaagcatgatagcacgcagagactaacgtcgtcttct

SEQ ID NO: 67745 - DNA, 325 bp, Glycine max
tagctactacccacctttatgctagtcactcttggatttatctgagctactaccacccctatatagctagctaccccatggacaaaactgaaatacaaaaaaagtcttatacaagaaactcaaatgcccgaatacaggctaaacctatctctaaatggcaaaacatgccaaacaagaaaagcatctatattacaagaaagtaatcacctgaccatggctaaaattacctaagtatgaaatctaggccttttatagttaccaacctttgagttttatcatacctgggggagatgataagaaacaccaattggctaatgagtaattg

SEQ ID NO: 67746 - DNA, 211 bp, Glycine max
  unsure (1)..(211): unsure at all n locations
tcttcctacctctacatgcatgatgtacatatgaaaaaatggagacttagatgcaacaatcaataaatattccactcaaagagttgggcatgtnaaaagacaaaacctcttcaagttccaaagcttagtcttcatgttgcttcccctatctctaacatccttaatttcaaaaaagtaaaactgatggtggcagtggaatcacacaaacatg

SEQ ID NO: 67747 - DNA, 396 bp, Glycine max
  unsure (1)..(396): unsure at all n locations
gaaatagttatacaaatttttgataaattgagaaaggatattaactcacaaatttaatccgaattggatatatttaattgagtttatttgggttaagtataaacttttttttttgttcattatagaagaatattatatatttttaagncctttatctttatttatgggcttttatataaacttttaattctatattaatatagggtcaaatatattttactcattaataatactcaaatatattttatttaatatttagttttttttgtgcttatcagtgttatcacattacatgtctcattnattttttaatccnaaatattataaaattattaccacacttatcagngttatcactttacatgtcttcttataaactaaactagagcaaattaa

SEQ ID NO: 67748 - DNA, 371 bp, Glycine max
ctatcaatagacctccaatctttaatggagagggttaccactactggaaaacccgaatgcgcaattttatcgaggcaatagatctaaatatctgggaagccattgaaatagggccttatatacccaccacagtagaaagaggttcaatagatgggagttcatcaagtgaaagcataaccataaaaaaacctatagatagatggtctgaagaggatagaaaacgagtacaatacaacctaaaagccaaaaacataataacatctgccctaggaatggatgaatatttcagagtttcatattgcaagagtgcctaggatatgtgggacactcttcgattaacacatgaaggaactacagatgttaaaagatct

SEQ ID NO: 67749 - DNA, 357 bp, Glycine max
atacaacacggatattgctcctgatccgaaccaacttctgagcatgaccaagcgggaacatgagtccattaaagaatatgctcaaaggtggagagacctatcaacccatgtcgtcccgcccatgactggaagtgagatgatcacgattatggtagataccgtgcctacgttctactactagaagctgatatgatatatgccggctaactttgcatacatcgtcttcgccagagaaagaatcgagtccggactaagataagggcaagtttgatatgcctccaacgttgcccctaacaacaatagagagctccaatggtggcacacggaaaaagaagagatcccacgcgtcaccaccgc

SEQ ID NO: 67750 - DNA, 301 bp, Glycine max
acccttggtacacacttttaccaaacccaagatacccccttggtcaacttactcgcaggaactatgacaaccatcgtccaaggtcttacttctacaaaatgaacttgcaccacactattcggcaagacccttaattaggtcaaaatcatacttacctctcataaccattagaggagtagctttgcatgtcaagacgaattaccaccagattgcatgacaagaccttcaatttggtacaactcacatttactccttataaccatcagataacgaagcatgtcaagcgacctacctccaaact

SEQ ID NO: 67751 - DNA, 410 bp, Glycine max
  unsure (1)..(410): unsure at all n locations
tggatatgcatgtatgtagccaaaaaatacttcacaaaatatatatatatgtatggttaggtagaaagataccttgaatatgcatgtatgtagcaaaaatacttcacaaaatatatatatgtatgattaggtagcaaagatacctttggatatgcatgtatatagcanaaatatctcacacaacatatatatgtatgtttagatatgcatatatatataataaagggtgtctagctaaaaaaacaacatgcttttgaaaagagatgacttccaacttttctttgaannaaattgctgatcataactagtttttgaaagaatgtgtatacacctgaagggtgaatgctgtgaaaactttcccggacgcncanaatggactcgaatgaatgcacaaattgataaaagaacgt

SEQ ID NO: 67752 - DNA, 250 bp, Glycine max
cttcttactcttatgttgtgcatgtatggggatgtcacatatgtcgattaatacatgagtcaggatcatgcattgtccaagacgacgcattcaatgcatctaaggacatatgcacccataatcgtcgggactccttgagagaccctagaactgtccagcgtgcttttccgctgaccacaattgcagatattatccaaggcattactgcaaccaacggggttaccctatcagcctctagccagcggccgac

SEQ ID NO: 67753 - DNA, 412 bp, Glycine max
  unsure (1)..(412): unsure at all n locations
gagttatgttggggaacgggtaccaacccggaatgggtttangctaagacaaccgcggcataactagccttgataatgcccaaggaaatcgtgggaagtatgggttaggctataagcccactcaagcagatataaaaaaaagcatcgcgggaaggaagagtggtagtcaaagctcgcggttgagacaaaaaggtgaaggaagcccaccctgccacataagtaggagctttataagcgcgggtctgggggatgaaggtcangtggtcgcgatatacgaagatgatgttccgagtacattgganttggtacgaccatgccctcctgatttccacctgggaaattgccgagtggatgaacgccccngcatttacgcaacgagcataatgtanacctttacnggtttaaaagctct

SEQ ID NO: 67754 - DNA, 425 bp, Glycine max
aagtacatgtgtgaataagatattgtcgtgcaccaggtggtaatctctaaaatgctttggcccaagtatccaaaatatattctcatattggtttgcattatccatgcttatgaaatttcaaaacggactactttaacctcaatttccttttaaataaactctggcctaaatgggtaacaatttaatatttgatcgtaacaaaaggatgcatatttatatggttgtgtggctaaacagcataatttagcgctaattaactaagtgttcatcatataagtaattatgcataagttgtttctgctaaagaagaggaaatatagaaataattctcatctaaggtgtaaatcgtatacataagtattctgaagagtttattgacataagcttataccagcttaagagtataagttcacataaactattcc

SEQ ID NO: 67755 - DNA, 318 bp, Glycine max
  unsure (1)..(318): unsure at all n locations
tagagagagagtaaaaattaaaaaatggtgatatatattatanaggttatgatataatacaagacaggataaacaaatagaatataatgaattttaaataaaataattatgatcatattctttttcttcttagattgtatttgaacgttaatgactctggtcattataaagtttcatcatatatatatacaaacgatgtcatttcaatatgaaccttgttatcaaaaaacagaactatctaatctcaccattacatagtttggacgtctatatttttgaaactgacatgtcaaaaagacactacgtttggatatgatt

SEQ ID NO: 67756 - DNA, 316 bp, Glycine max
aataaccaatcttatcaaagtcagttttataggaatcaccctcgaattataggggctgagtccgtcctcgacgccaagaaagccttgatcgtgggaacgccgttcaacaattgacggttgtaacatatcatatttgaggaaaaattgtcaaccattgagggacaacagaaatgaacgataataaaacaccatccctctccattaacatcaaacgaatccatctattcaacagaaaataataatcctattcgagaccaattatacatcatcagccttgtaacaaatagagaacctggtctaatgatataattcatat

SEQ ID NO: 67757 - DNA, 376 bp, Glycine max
tatattatgtctatattggggggggcggtgggtaaggtaacattatatgtcacataaatgcacaggaataaataatctacttggaggaattctatgctgaaagggtttaaatatcatataaaagtacaaatacatgcctgatagactaaacacctatttgaagcaatgaaccaccaacacaaaaacggttgattcttcactgtgcaacctgcattgccattctattcttttaacttttctggagacctacttttttatatataatatatatcatggagtttcaactccataattatttgctcactgaaggaacatatctttcatatctcaagatgctgaactaaccaaatgtgcatatggaactattcttccttta

SEQ ID NO: 67758 - DNA, 345 bp, Glycine max
  unsure (1)..(345): unsure at all n locations
actgactcccgtacattcttcttgtaaatcgatattaattaatatttccctattaaggcctggagaaatggtctattaatctccgatttaagttatctaataatatcaactcacataaaccctttccacaagataaattatttgataacatggagagattataattatattgataatacatcacacgttcgcctagctgtaagaaatagacattcctcttaattggtgtcgataaaattttgctctctctctatatgtccatntttttaaacttccatctactaatttaatagtttttattattatacactaaataaaattacaatacttctcgctcatatatta

SEQ ID NO: 67759 - DNA, 318 bp, Glycine max
tgatacgcagtgtcacatgaaggaaaacaaaatattatataattatgatgaaaatgcattattatatatcgaatatatgatgaaaatatgttggaattacggtttatagaataataaagtatagatggaaattagattttaaatagaatttcaagaacactgattattgaataaaaatgagattaacaaacatgggtataatataagcgtttatcatcttttttttaattttatcatcaatcatcttaattcttaagtgatattttattgaaaaatatatacctattcgagaagtataatattgaaactattagtgat

SEQ ID NO: 67760 - DNA, 359 bp, Glycine max
gaagcgaaaatgagaatggggtaaatttgagcatactctcacctcatataagtctatatcatcaatcttaacttgctctaactgtgtttacgaataaaactctaccgaatcaaaatatgactcctcaacacccaatatttaccctagaaatggctctcgcctatactttggtcatttgtttttctctcttgcactgcccaagctttctcataagttctagatgacatctcagactaggatttactcactttaacctctatgtaccactgaaatccattttagccttccaactctcaaagactcactctgttctactcatacactacattctcactttctacgctatgttaactctaccc

SEQ ID NO: 67761 - DNA, 297 bp, Glycine max
  unsure (1)..(297): unsure at all n locations
accacanaatttatgtagccttttgtctttttctttttatttccggatgtttaacttatttgtctagttcataacaatttgtttgtgtaccatgaatattcgatgaatgtgttgtatggactcttcagcaattgacatttatttgttttatttcagttctaaggttgaaaacaaaaactttcgaaatgacgctacaattgaaagcaatgttgtaaggatttgacaaaggaaaaaatgtttgatctttaatgggtgtcacccttttctgttgatgaaggtttgccatatgctctcaaa

SEQ ID NO: 67762 - DNA, 379 bp, Glycine max
  unsure (1)..(379): unsure at all n locations
ctttcctttgtttgaagctcactacaagccttaagtgaaaaaccatgatatttccatatccttaaggaattttggagctttggaattgttttgggaataagtgtgtggggtttttgtatcattggacaacttgttttggtggctatgcttcatgatgtatattgggccatacttgatgtacattgtatattggttaaatgttggacatgctgaatgaaatgttgtttctcanaggctaaagaggtaaaaaaaaaaaaaaataaaatctaataaaaaattcgacaaagaaaaagaaagcattaagttggtgaataaatcttaatgcccagaatgataaactctggtctctctcatgtaaattaatcttactctttatttc

SEQ ID NO: 67763 - DNA, 417 bp, Glycine max
  unsure (1)..(417): unsure at all n locations
gcttcaagaatcaactntcanagaatcatgantcaagaataatcacatttcaagaataatcaagatcaagattcaagaatcaagagaagactcaatccagataagttctaaaaaagcttttcaaaacattgagtagcacaataatttttcacaaaatcttttaccaaagagttttactctctggtaatcgattaccagaaggtagtaatcgattaccagtagccagcattgttttcaaaactgatttacaaagatgtaatcgattaccataatcatgtaatcgattactaatgttttaaaacattagatntcaaatttcaagagtcacaacttgtgatagaacattntcaaatcatttcaaacttgtgtaatcgattacacaatacttggtgatcgataccagtgtgtctaaacatt

SEQ ID NO: 67764 - DNA, 440 bp, Glycine max
agcttgacgtcgaacttgatccattcgctgtcctagatctcgcatgctggctagttctagattcttgacattgacatgatagaacctcttttcaaaggagggcgcttggtccgaccccatgtatgcgggaatgaaaattttgatgaccaatacttcaacaccctatcatagaggaggtatgatgaatgcatcaaggcatgtttatgctatgcatgacaaatgtgtttatctacggacacaagagctcggaagaccatctcttcttacccacaatgcattgggtatcatggtttgtttgcagtcattaccatagtacccaacgcatgcaattaagaaggcgatgcagactttccggcttctcgtgatgaagatgatgaaaacaaatgcaaggcatgagcaatgacacgacatgagtatgcatgcgtgaaagtatatactaa

SEQ ID NO: 67765 - DNA, 457 bp, Glycine max
  unsure (1)..(457): unsure at all n locations
gtcacctgcggcatgcaagctngaagaattgtaatcaacaatgtaggcagttatgttagtcaaagactttcccatataagatgtagatcgtataagctagattttgtacaatagtattcctactatcattgctccanatccaatgttgtatactcatttcttccatgcttcactctgagtagactccagcctttaaatatggtaaaggcaggtacatataaaaagcacgcaaccattcctctctgtccttatcttcataggaagaggcaattntcaatagtgggagcacgtaagatctaagaatcatgattttttttttagctcagcaaagaatgattataaggttattgngttcacattatgggtggagganggtaatacaagaatgacgtatngttatgggtaccccacaaattatataannaaaaatacaatattatacatcatatttatttga

SEQ ID NO: 67766 - DNA, 330 bp, Glycine max
  unsure (1)..(330): unsure at all n locations
tcttttatgacaggtgatcttatttggagtttgtaagatcattaattcattatgaataatanaccttatcttttgaatatttattcaactgtataatcttgttatcgagataatcttgttaacaaagaaagaacagagagtcaattcagccaagagaaaaaaacagaaaatcctaacgacccttattttttttccagtgaaataaagtttattattgtttaatttgaggctttgagtgagctacttattatattttttagtaatctctatattataaaatttctagtaatctatatagagttaggaacatgcctaaaatttcagaaaaaa

SEQ ID NO: 67767 - DNA, 172 bp, Glycine max
acttgataaactgaaggagtcatgggaaaaaaaggaaaaaaaagggggaccaataagaaaaaagaaaagtaacttgttggttccagattcttctaagtcacaggtccagctctttaaacagactcttaagtttgaaactctgaacttttaaactcttgagctactactcccc

SEQ ID NO: 67768 - DNA, 267 bp, Glycine max
cttctgagcatgaccaagcgggaacatgagtccattaaagaatattgctcaaggtggagagacctagcaacccaagtcgtcccgcccatgactgaaagtgagatgatcacgattatggtagatacgttgcctacgttctactacgagaagctgataggatatatgccggctaactttgcagacatcgtcttcgccagagaaagaatcgagtccggactaagaaaaggcaagtttgaatatgcctccaacgttgcccctaacaacaat

SEQ ID NO: 67769 - DNA, 368 bp, Glycine max
  unsure (1)..(368): unsure at all n locations
tcaaaatttgggactgagtaaccatcttccccatctgatttgtcagactctgaatggaggctcttgtctcttgcttgaaatgcatattctggatggtcatttgccttactaactcttctaaggaatgctgaggaggagcctcagttgcttgttgtctttgttgtgactgctactgttcctgctgctgtattggaggaggaacatatggcttgcttggactagcagcattctggaaaggagggacaggttgttgttgttgtggaggacttgcctatcntcaaattggatgatttctcaacctgggatgatctgttgcttgaagatcataatattttgctgtgtggntatgtgctgacgnggctatataa

SEQ ID NO: 67770 - DNA, 373 bp, Glycine max
atgactctttagtctggagaggaatttaatcagactatttaacatcatctacctatggagaaacaaatgcaccaatctgcatatatgccaaatctgatagaagaaatacaattttggaccctcttatagaatatttgaaagaccttgaaagattatatttatgtggcaggaagtaatccatgatatcttgagagtctcaactttgacacaaccatatttttacctctcaactcaatgtagagttggctgagcacatcatgtgcaatagttgtacgacttggtatggaaaaacattttagattacaaaagtttgattgttccttgtgactgttacaagaaagggttttacaatttagtatctttctaatcttta

SEQ ID NO: 67771 - DNA, 444 bp, Glycine max
  unsure (1)..(444): unsure at all n locations
tctacgcttaatttacgttcatgcttaatgatcgtntatgagtaaatggcgtatgtgtcgcttaatcacataatgaatgccttatgttaaatttcgcttagtaatttaatttacggttggattaagtggttaaactgataaaggataaattctcgcaacctaggataagagacttgcttgtgaatcaaggggaagcaatgtaatttaattctgatanttttctaattcaattttactcgctatntaatctacaaaagcagacaaccctccccccccgccccctcaattngatactatttcctactatctcgtatgaacatttggttgatcatttctcattgtgaaacgacctatatcacttcctagttactacnatttaatgtttatttgattccggaatggcctcgatcagccgccctcaagaaagggaagtcatcatcactc

SEQ ID NO: 67772 - DNA, 390 bp, Glycine max
  unsure (1)..(390): unsure at all n locations
gctacattcatttcagcgctcataaatacggactaatcagacatcgagcaaacatattgtctgttgaatagctcagagcttcagaattccatttccatcgtctcgatatattacgggtctcaatcagacatctgagtaaaaaaattattatcgttcgaatttgctgagagcttcaacattcaatttcgagcgtctcgatgtttatgggacttaatagacatccgagtaaaaagtattgccgtttgaattgctgagagcttcacatttaatttcgagcatctcgatatattacgggactcaatcagacatccgagtaaaagttatcgtcgtttgaatttgtcagagcttcacattcnatttggagcgatacatatattacgggactcaatc

SEQ ID NO: 67773 - DNA, 450 bp, Glycine max
  unsure (1)..(450): unsure at all n locations
gcttcaccttctgggtcctcctcatagttgtgcatgagataacatgctctatnttcatctcccactccacgtaggcctccggatcattctttcctttaaatggaggaatgttgagtttaatagcatcaattcggttttgtctaagaacaccatcattccctcttctcctcctttcttcttcattatgatctctattctccatttgatccaacctgtcatggagcgcatcatctcgttggttcattaacctctccaaatgttgcatcaaagcttgcatttggaattgcgaaagccccactccatcattaggattagtacctgacatctcaaacaaacaaatcaaacgtaacaagacaattatagttgctggttgaatacctcacccactcaagtgtatcacacaattatggcttttctctaatgaaacactctngccttttaccactctaa

SEQ ID NO: 67774 - DNA, 324 bp, Glycine max
cgcattatatatctagacacttgatattgaattacagaagctctcgagattatttaatggtcataacttttcacacggatgtccgaatcgggcgcataatatgtatagacgctctaaattaacaacggagctctcagaaattcaatggaataactttcactcgaggccgatcagcgcatatatatcaacctcaaatgaaaacggaactccgagaattcaatggcatatacttttactcagaggtccgaatcaggcgcataatatattcggacgctcgaaattgaacattcaaagctcttcagagattcaaatggtcataacttt

SEQ ID NO: 67775 - DNA, 352 bp, Glycine max
  unsure (1)..(352): unsure at all n locations
attcgttgaccacagagtggtacctggagatatgtcgcggnggtcaagagaccttggggacgtcaggtggggtgctattgcccaaaaccaagcttgaccaatcccgacccaacccgggcatagtcagtcagtgaaaacctgtgatgtacctaaacaggcgagctcctggcagtcaaccgatataagaacaaagaccacaaagcaagggggcttgtgtggtggctggcaaactgtgaatcttgtgtgatatatgggatatggcctctggtaatcgattaccaaaggtgggtaatctattacaaggcttataagtgaagacaggaagctacggtgacctctggttatcgattac

SEQ ID NO: 67776 - DNA, 105 bp, Glycine max
acgagcatagaatcgcggatgagtatgctcaagtatatgcggaaaaagaggctagaggaagggtgatcgactctttacaccaagaggcaaccatgtggatggatc

SEQ ID NO: 67777 - DNA, 337 bp, Glycine max
  unsure (1)..(337): unsure at all n locations
gcttgggatgagctataccctgaacgagcatctaatgcttatgacanagcatataccaacctctgttaacaaccactaagctagaaaaagtggaactatctatataccagtgggttgcaacattgatagctgtaattctatcttttntaaccttcatgctttgagcttagaaagaataaagtacaatggtctaggtcattgttttcttgtgattttgtcccttattatacctaactggaggatcatatcacttgcaagcattgagtntcatgtgaagcaagtgttacatgaagaatattaatgtatggctcattatagattaatagtgatcaaattt

SEQ ID NO: 67778 - DNA, 388 bp, Glycine max
  unsure (1)..(388): unsure at all n locations
ctccacaacttactatcttttattcaaaagctgaatcaatttgtttttgacatgcacatgntaattacatatacaactttatatttaattacaaatgaagtttattntatcagaaacaaataagaaattcgcttacttactgggattaaaaaaagtattgaagaccaaaaacaaaattcttatattattatgaactcaacacaacacaaaaatttattaagaaacaaatacaaaaatcatatatgcattcagaacaaaaacatccgntataaaataatcttttatccatctttgntttgggcatacataaactagataatctatatattttggtctctctcttaatggagntgacaatataaatatacancatggacaatgttgatga

SEQ ID NO: 67779 - DNA, 343 bp, Glycine max
  unsure (1)..(343): unsure at all n locations
catagcttccactctcacccaggtctttgatagcctcctgatgcattacatgaacatgtgttgcactcttgttatgcaaaagagtgcaaccaaccaagtggaagagataagcacgagctgctacaatccaccgtccggcctcgcgtctcctcagatagatatcctgtagccacgacaggcatacatatgccccatgtgcccatacaatctcaactctagcctcctcacctaagacctcaagcaactccatcaacaagacgactgcctcgtccacaagtagaggctcaaagctgtgganggacctatgatcggcatatggaggagtgatgccacatcatctagt

SEQ ID NO: 67780 - DNA, 336 bp, Glycine max
  unsure (1)..(336): unsure at all n locations
gtgatcatatattgtgggagcttgcaagttgatgacagtacaatgcgcgggatgtttgtcagattcttgagttgtgcttctctcatnttcaacgttgcctcttccattgttataatngtatgctagttatttcctagatatccatcatttaacagtttctgcatcttttgtccattgaatcatatattgctgaatttgtttacatattttngttatgtaacttctcagaaattggtgattcagacaaaaagtgttgagtttattgccgtttatctttcaatttccaccttcctgatgagcatctncttctttctttatggattcctcagtgatgat

SEQ ID NO: 67781 - DNA, 375 bp, Glycine max
  unsure (1)..(375): unsure at all n locations
agcttatttgtatgtattaaataaccagaatgaagttttaccatacatactttgtcatgaaggtttagtaaagaaaagtaatccaaaaatatcgaagaacatggtgttgaaagagcataacaagacttttctaatatgggttaaagatacaatctttggtgacaataatgcttctgaaatgttaagaaaggtaacagatgggcctaaaagaaatgttctaacttggcaaggatacaatataaacaagtattccttccatacaaagcataagacgaganaaatataatgcaaaatagtggggttaccctaagggatgaatctcaacacttcgctagtgtacatgatgacaatcccagtgtagcttccatcccttac

SEQ ID NO: 67782 - DNA, 330 bp, Glycine max
  unsure (1)..(330): unsure at all n locations
atccctgcggatatatgaagctcatgttggattagtggttctgagcccaaaatatcctcattcaatgatttcacagacaacgtttcccccctcatttctttgtgttggaaattgtaactaatcaattatacatatcttccatgtctatatatngtaatgggctccattgaattttacttttattatatgcacaatgcaggtgcttccttacattaangaagctggatacaatgccatccaattgattggaatttgtgacacaangattatttactgttgttacagagtagttaaatgtgtaattctaactattttttcactgtaatatat

SEQ ID NO: 67783 - DNA, 423 bp, Glycine max
  unsure (1)..(423): unsure at all n locations
agcttgaagaaagcaatcgtgtattcacgatgttgagtatttggctcatcagtgttgattgctatgggcatttcctgtatagctgaaatagtagtaccggacacgatatcgatcgatattcatcttcaaaatcacgtgatattgcaaaattatcttcttctattcatttgacgtgtgcaatgagttattattagaattgatattggtttgatgttgagttgagaacgtntgagagagagagagaaagagagagagttcgatgcgcaaagtggaggagatcgaagagttgaagttctgaagaaagtttgtaagagtaggaatggcagtgagtgtctccttatcttttgcagatgctcttttacaaatatctttccngtgggatctatagagtgactcttctatttttataggattaggactcac

SEQ ID NO: 67784 - DNA, 355 bp, Glycine max
  unsure (1)..(355): unsure at all n locations
tactaggtaaaaatgttggctgataacagctgtaatgcagaanatatattctacataatacgtaatatattataacatatctaanataacaagaccagacaacactgaagcgtcaatattcaaaaattacaaatgcatcaatagattaaaactagcaggttagacttaatacctgaaggaatagactggtcaattttggacactctaacttcaaaaattccaaagaggaacaattgctgaacagagaatntaagacattatcatatctgatatgagatggataaaaaccaacagacatttattcgagagtcaaccataccttaaattaagaaagcatatgttgagacatgtgaca

SEQ ID NO: 67785 - DNA, 268 bp, Glycine max
ctgaaatggattggaattatttcaaacgccggtatcatccataggaacgatacctaacgattactttcatttaatttgaaattaaacgttaaagctctggtatcgatacacagtttaaatgatttgaaatgatacacacaagtgtactctgaattaaatctacatttaaacactggtatcgatactacctctagtatcattacagagagtatactctttggtagatttgtgaaacttctgtgctctcatgtttagaaacttttagact

SEQ ID NO: 67786 - DNA, 373 bp, Glycine max
ctttcacagtccgctgccttttattattaaaacccactttcagaatatttcattaaagagtatgtcaaactgaaaattccatcaatcaaatctcaacaaactcgggttttttattgataaatattattatggcatttgactttctatatgaatacataaatgaaacaagcagcagagcactaattcatatatgaaaaatttaatgcaatgataatcttcagatttagaataaagacatgccataatcaattaaccacaaataatctacctcactcccgcatatgcttcgttctccctttgcactgacagagatgatgcgtaaactaatagtcatacaaatgtatatgcatgcaatatacattcaatggaatta

SEQ ID NO: 67787 - DNA, 454 bp, Glycine max
  unsure (1)..(454): unsure at all n locations
agcttctgcccaacanatccaggaatccacatccaacctacttggatcaattgcaaatcaatacttgcaacctattgtcatccaacaaccctttgttcaagctgcacctacctctataccagcaaccttcgaacaagttgaacatgatcaaccttaacatccacatccaaaatcaccacgaaatgaagatccacctcagcagccataaatgataatgatagtttatcattttccatctttcaaacctgtatttgttgattacataagagggagaaattggaattttgatgtatcatgagcttaaacttatctttcatctttatatgctntggtggaatatatatgttggaacatatggtatgttgcttttataaatgagatgggtggattattcaatttcgcctcttaactatgctntttacatatgtatgcatgtgcactctgatcttatata

SEQ ID NO: 67788 - DNA, 224 bp, Glycine max
  unsure (1)..(224): unsure at all n locations
gcaaagctggacggcatgtaacccactagcttctcatagtagaacactggcagagtgtctaccatcatggtgatcatctctctctcaaccatgggaggagctacttgtgccgccaaatccctccatcgctgcgcatattctntaaaggttcaccctctttcttgaacatnatctgcagttgagtacggtcaggagccatatcagaaatgtactgatactggctt

SEQ ID NO: 67789 - DNA, 256 bp, Glycine max
ctataacttgtgatatgatagactggattacttatgataaactcatcaaggttataatggtaagtatcttgcgacctgcgctgcacacccatgcacgagggggtgaagactttctctaccaatgtaaacagttttaaaagacctattatgcctaacatcttgtaccagtgcacaatatttgttctactaaaaatcttctccccattctttctgaagacttaagtaaggtacattcatgtatgttgtataccgcaca

SEQ ID NO: 67790 - DNA, 298 bp, Glycine max
tgtgctaaacctacgagcatactcctcatctacccttgatgttctaatacgtcgtaatttttctgaatcaccgccatcaaaaagtgcagaggcatcctactaactgctgcaaactaactaattctccacaaacacagaatccacaaagatataatgtgtataatctgaaatgcacgaaacaatatatgaattcagtttagcaaaagcaacaacatacagaactcaccagttggataagaagaaaactttgatgacatatttttttacagagaactctttttgttaagataaaataact

SEQ ID NO: 67791 - DNA, 348 bp, Glycine max
  unsure (1)..(348): unsure at all n locations
aaaaattatgtatgtattttaacaagataagtttagtcaactatttcactcctataatataaattgctacataatcaattaaaaagcaaagggtgtgtctaattatatattattaaaaatgctacaagtatttaagaatttagttagaaaaaaatttttgaaaataacttcttttttntttactgacttacataactccttctaaaggtaatacttggctgagaaaatgattgtcgttataacatactaatttctgctacaatccaccggtattaccgtggtaatatgccaaatcccgaggaacccccctaccaagatctacaccaaccaagttctataaaaaaaatc

SEQ ID NO: 67792 - DNA, 453 bp, Glycine max
  unsure (1)..(453): unsure at all n locations
gcttatatacaatgagtattgatgaactcgcttagtgcagcattatcgcttagcgagttcatcgcattttccagaaaacacagaaaacacaactcgttttctcgcacttttcaagcctctaaaagtcatattagacatgcaatgtgtgtgccatactcaattcagtatacaagcctacgtagccctcatcttaaactaattctaacaaaacataaaaaccttaaaaatctaaagttacagttaaaatcttctaccctaaagttaagacaagaaaaagagaaaaaggatcaaggaacatacttggacaatgtatgattgatgcttcaaagtcgaaaatgcacanagagagtacaaatgcaaaatgtgcaaattnttngagagagagaatgcagaggcgaggtttctgtaatctggaaaatgtgagtgtaactgcttgtacactcacttaagcag

SEQ ID NO: 67793 - DNA, 164 bp, Glycine max
ttaacaatggattacgaacctgtagtgcactaacgctatgtcacctacatcttgtttacaggacggtgccattggagagtttgaataggcagtatccctgagaaacctagaatcatattggaataacacgcaggttctcagagatttagcttcacaggtctata

SEQ ID NO: 67794 - DNA, 382 bp, Glycine max
  unsure (1)..(382): unsure at all n locations
tacctagattatttacacgtacctccaagatgtatacgttacttacatcacacacatctctttggctatattcacatacatgcatactcaaagcattntggggtaccaaaaattgcacatgtgcacatcttggcatttctaatacctattcatacgcaaacttcatgatgaatcttgactacccacacaataaggcgctacatttcatgctcttttttcaagttttgctacctaaagccgatgaaattcaagcatatttgctttgttgctaaattgcatcaaataaaacgctatattatgtgtatatgtttcttactacatgcaacacattataacatttttttggagacatttgacaccaaaatgttatcatacattaata

SEQ ID NO: 67795 - DNA, 464 bp, Glycine max
  unsure (1)..(464): unsure at all n locations
taccactgtccggntactccttgcactngctgctcttcataactggcaccttcgacaactggatgtaaacaatgctntccttcatggggatcttaatgaagagggttatatgaagctccctccacgacttgttgtggataatcccaaccttgtttgtcgccttcaacgttccttatatgggctcaaacaagccagtcgccaatggttcacacggctttcgtcatttcttctctcccagggatttcgtcaatcctcagttgatcactcgcttttattatattctgataatgataatgatataacagctattcttgtttatgttgacgacatcatcttgacaggaaataatctcgagactatagcacatgttaccaangcttctcgatcaaactttcaacatcaaggatcttggtattctgaagttcttctcggtctcgaagtgctcgttctaccattgatacact

SEQ ID NO: 67796 - DNA, 318 bp, Glycine max
gaacttctgcttttttgttgaccacagagtggtacctggagatatgttgctggggtcaagagaccttggggacgtcaggtggggtgctattgcccaaaaccaagcttgaccaatcccgacccaacccgggcatagtcggtcagtgagaacctgtgatgtacctaaacaggcgagctccttgcagtcaacagataaaaggaacaaagaccacaaagcaaggaggcttgtggtggctggccagctgtgaattttgtgtgatatgtggattatggcctctggtaatcgattaccaacggtgggtaatcgattacaaggctt

SEQ ID NO: 67797 - DNA, 172 bp, Glycine max
  unsure (1)..(172): unsure at all n locations
tacaacttcttatcataagttgaatagttaagggtaggaccacttaacttttcactaaaataagcaattggatggccttcttgcatcaacacagccccaatcccaacaatttgaagcatcacactcaatntcaaaagatttttgaaagtttggcaacgcatgtatgggggca

SEQ ID NO: 67798 - DNA, 391 bp, Glycine max
  unsure (1)..(391): unsure at all n locations
agcttatatagaagggtcgttcctaatttctctactattgcatcacctctcaatgagctggcgaagaagaatgtggcatttacctgtggtgataaacaagagctagcctttgctttgctcaaagaacagcttactaaggcacctgttctagctcttcctgacttttctaaaacttttgagctagaatgtgatgcctctggagtgggagtaggagctgtattgttacaaagagcgcaccctattgcttattttagtgaaaaacttcatagtgccaccctccactaccccacctatgataaagagctntatgccttaataagagcccttcagacgtgggaacattacctgtgtttcaaggaattagtcattcatagtgatcatcgatcactta

SEQ ID NO: 67799 - DNA, 210 bp, Glycine max
  unsure (1)..(210): unsure at all n locations
gagaagccttcttgagaaaacttccttgagaagcttctttgagagaacttccttgagaagctagagcttatctacacacacccctctcataactaagctcacctgcttgagaagcttccttnagaagattcctaaagaagctagagcttagctacacatacctctctaatagctaagctcacctccttgagatgagaagctagaactatc

SEQ ID NO: 67800 - DNA, 410 bp, Glycine max
  unsure (1)..(410): unsure at all n locations
cagcttctatgggttctagaataatcgaatatcaattgaggtgattaattatttagaaacatagagagctcctaaggttccagatgccatctaattgattaccataatgtggtaatcgattatatcaagctacaaagactttcttcttttgaaactagcttgggttatcgattaattcaataaaaattacccatatttgaagagaactaaattttggtgcttgttctaacactttgcaatngattacttaaacttagtaatctattacacatttgttgaacttatggcttcttagaaaccttgagaataatccatctatcttctcatgtttgataccactaagcatggataaagagaactaatctaaacactaacatgcctagttaaaatattgatcaaatgcatatctt

SEQ ID NO: 67801 - DNA, 353 bp, Glycine max
tttgcctcctccatcttttggtttggtccattcactttagaggagaatccaaaaaataaaccgaataaatcctagatctacacttgtcctgcatttcaatgggtcacaatttatagatctactctaaaaatcatgttttgtggtgaatttatgttctatcatttttcagtcataatgttcttgtgttgacccttagatctaaatttcttccaaatactgatagaactaagtgtaatcacttaaccatgttgtctagagtcatgttagtcatataattgcacatatgtctaagttgtgtaaatttttatttgtgatgaattctaaacattgtcatgattctgcattctaccatc

SEQ ID NO: 67802 - DNA, 189 bp, Glycine max
atgggcaaaatgatgagccatatgttcttctgcacatattagatatgagcctgtacttcattcacttgcaaaagtatgacctgtgaaactaatgatcaccctattgcgtaaatccaaacttactgtcatattccatgctcatctttatggtgatgtcgtgatcttctgaaaaaataaagactatatgtt

SEQ ID NO: 67803 - DNA, 418 bp, Glycine max
atagtagaatactggtgatgtgtctactatcattggtcatcgtttttcgtcattgaggtgccactttgagctgccaggttctccacctttgggtgtattctttgaaagatttgtgcccccccttttgcacttgttctgtagttgcatcctatccgaagacattatactgacactgcctaacgaaggccaccactaggtccttccaagaatggactcgggaaggttccaagttagtgtaccaggtaacagctacccagtaagactttcttggaatgaatgtatcagtaattccttatcttttgcgcatgcccccatcttccgataatacatctttagatggttcttggggcaagtagtccccttgtacttgtcaaagtccagcacctttgacttgggaggggtgatgatattgggttct

SEQ ID NO: 67804 - DNA, 277 bp, Glycine max
  unsure (1)..(277): unsure at all n locations
aagaaagaaggagagaaagagagaggggggagcacgaatttgaatgaagaaaaagggagagaaattgaactttgagttgtgtctcacaagactctcattcatcanagttacaacaagtgttacacatgcttctatttatagactangtagcttccttgagaagctttctttgaaaaacttccttgagaagcttctttgagaaaacttccttgagaagctagagcttagctacacacacccctctcataactaagctcaccctcttgagaagcttcct

SEQ ID NO: 67805 - DNA, 403 bp, Glycine max
  unsure (1)..(403): unsure at all n locations
ttacatgggttttatagaaatcctaatatggaatatcctacgaatatacaataccgtttaattgatagaattgctcagcaggatcacaattccaacaaggcgatctgggaaagggattgcagaaacttctgttttggcaggattcttcaaacgaagtcgtgaaggtaagtgggcctcttcaccttacgtgtgggctntacttcgttatgcaccccctgttttgtaattcccacctccgagctcatctaagagctcatctattgtgggaattgngaactggtcttggaccatgacagcattgagggccctgtagtccatacagaaccttcagctcccatcatgtttccttacaaggaggacgagtgangagaaagggcttgtactatgttggatcaatcctttt

SEQ ID NO: 67806 - DNA, 298 bp, Glycine max
agcattcctatatggctcaaccagccatcgctaatggtcacacggctctcgtcatttcttctcttccagggattacgtcaatcttcagctgatcactcgcttttctatactctgataatgatgatgataatgaatatacaactattctcgttaatggtgacgacatcatcttgacaagaaagtacctcgagactatacacatgtacccagcttctcgtcaaactttcagcatcaaggatctttgtattctgaagttctttctcagtctcgaagatgctcgttcaaccattgtttacac

SEQ ID NO: 67807 - DNA, 453 bp, Glycine max
  unsure (1)..(453): unsure at all n locations
tgcagcttntagcaattaaatggtcataaacgttcactcggatgtcngattcaagcgcataatatatcgagacgctcgaaattgaataatggaagctattgagcaattccaatggtcataacttttaactccgaagtccgattgaggcacataatatattgagacgctcgnaattgaacaacggaagctctcgagaaattcaaatggtcataacttttaactcggaagtcggattgagacgcataatatatcgagacgctcgaaattgaacaatggaagctcttgagcaattccaatgggcataacttttaactcggaggtccgattcaggcgcataatatatcgagacgttcgaaattgaacaatggaagctcttgagcaattcatattgtcataacttttcactcggaggtcggattcaggcacataatatatcgagacgctcgaaattga

SEQ ID NO: 67808 - DNA, 404 bp, Glycine max
  unsure (1)..(404): unsure at all n locations
tgctcagagcttctgttctgaatcttgagagtctcgatatactacggaacacaatcggacatctcaagtaaaagttattgtcgttgaaattgctcagagcttcttgtcttaattacgagagtctcgatatattacgggattcattccgacatccaagtaaaaaggtaatgccgtttgaatttgctcaaagcattcgttgtcaattacgagcgtctagatatattacgggattcattcggacatccgagtaaaagatatcgtctnttattatgctcagagcttcctgtttcaatttccagcatctttgaatattacaggactcaatcggacattccgagtcaaagttattggcgtttgaaattgctatgagctttcggttccattacgagcatctcaatatgcta

SEQ ID NO: 67809 - DNA, 441 bp, Glycine max
  unsure (1)..(441): unsure at all n locations
tgcagctntatggagctgatctttaacttaatgatgtcttcatggtgatttctatcatggaggtgctgcgaaagataaaggagaagaggtgatcggatgtgccatccactatggaataagccatggaagtacgagcttctccaccaagagtgtcttgtataagaagctttgagaggaagctttaatggatgaggagaatgagagataaagaggggggcgcgatattgaaagagaaaaaaagggagagaagttgaactttgaagtgagtctcataagtttcacattcatcatagttgtaacaagtgctacaatatttctattatagcctaggtcactaactaaatgaaatccactctcatttcatgtgaatctaagatgattattcaaagatatgcccaggcatatatcatattccacaatatgccaagacatcttacatat

SEQ ID NO: 67810 - DNA, 297 bp, Glycine max
actgagatgttttggacccatttgtccatctactttatagttagaaaaacactcttgtcatcaaatgacattgacaattcaataccgaataaattaatgggaaaagtgttttctgaattatcattggcatgacgagtgaatttgtatcttagtttaagctaaaaaaaattatgtaactacatttgcctatcacttttttattatatttaaagactaataaatttacataataatctttaaaactactaaactaccatcattcattttaaaaaaattaatatgctactcactattaaa

SEQ ID NO: 67811 - DNA, 304 bp, Glycine max
cttgggtcttgatgtcacactcatacactttcacacacgaacttctatttggaacattgggtaaaaaacgcgaaagtgcgtggataaataattagcaagttatgtctcgtttggtgtcctaaacccactacattagtatgctggactcggtgtatacaatgcctgcatatgcagaaacacaactatgcttgactgggtaccaaaaccatgaccgatcttcaagatttccactattgctacgaacatgtgaatgggatgatctaatggcttaatgtgagtgtaacctaattgaataactgcttgc

SEQ ID NO: 67812 - DNA, 261 bp, Glycine max
ctgcagcttgaatgacacttttgctttaaaattatggtataattttcacgatgtccatcgggaatatatatcagaccgcaattgacccggtgcttcaggaatggatggcgtaacatttactcggtgttcgtccgagcatcaatatcgcgcgctcgaaatgaccccgaactccgacaaacttatgtgctaactctcctcaatgtagatccggacatactattatacctcaaatgaacactgggcctggcaattcaaagtctt

SEQ ID NO: 67813 - DNA, 441 bp, Glycine max
  unsure (1)..(441): unsure at all n locations
cttgatgcaacattcggagaggttaatgaaacaacgagatgatgcgctccatgagaggttggatcaaatggagaatagagatcataatgaagaagaaaggaggagaagaaggaatgatagtgttcctagacaaaaccgaattgatggtattaaactcaacattcctccatttaaaggaaagaatgatccggaggcctacgttgagtgggagatgaaaatagagcatgttttctcatgcaacaactatgaggaggaccaaaaggtgaagcttgccgccacggagttttccgactatgctcttgtgtggtggaacaagctacaaaaggagagagcatgatatgaagagccaatggttgatacatggaccgagatgaanaaatcatgangagccgtatgttccggctagtactcaaggacttgaaatcaagctcaaaactaccc

SEQ ID NO: 67814 - DNA, 349 bp, Glycine max
  unsure (1)..(349): unsure at all n locations
tcgattacaaagcttggtgatcaattacatgagtaatagccttctgggtatcaatacaggctggctgctcatgtgtaatcgattacactcggatggtgatcgattaccagagcataaactatgctatgttctcaaanaaaatattacctatgtctatgcgaaaaacatctaatattggtaattatcactactaatgcacttaattcaatcattcaaacatcaaacacacagggattcataaatcctatcataataacacgaatttaacaaaatcaatcaaagaacattctatcatatacatcaatcatanaataaattangcatcaatccttattatctaatcactaca

SEQ ID NO: 67815 - DNA, 259 bp, Glycine max
  unsure (1)..(259): unsure at all n locations
ttctctctctgaaggtggtatctttctcttttctcttgctgtttcactcttacttatttcctcttctatattttttctacttttcttattctctcattgactcctcttatctttacctcatcattctttttattagtagtgtccttcaaaacacttgttcctttaaagcacaatatcctcatcctcagccgccacaagctttctgcttcttatcataacagctttgcactcttctttgngattcttctcaatatttgct

SEQ ID NO: 67816 - DNA, 380 bp, Glycine max
  unsure (1)..(380): unsure at all n locations
gcttaataacagagcacacaagacaatggtgaatttttttgcganagtgcttatatattttttatggcatcaaaggcctnctttaaacatccatgcccactgatgttcatagatcaaccaactaatatagaaaaaagaaaagcctacatcacattcataacataaattaggaatttaggataattgaccaatagaacaaataaaacggacaagtcgttgcaaaaacacaagcagagaatttgttgtcagaaaacaagatttaacacattgttcacatcttttcagatgcctcggacatcagaagtaaccaagctaccactatgattagtcaagacaaacaatacatcatanagcatttgaaaaggtagcttggatattat

SEQ ID NO: 67817 - DNA, 327 bp, Glycine max
  unsure (1)..(327): unsure at all n locations
tacgtcgctcctctcctatctttattttcttctgcgatataggtttggcccgngggaagatgcatattatgccaagaatgatccccggcatgtcagatggctgccaagcaaaataatctgtgtttctgcgtagcacgtcggcgatgcaccgatgctcatgactagtaagggccctactaagccgcatgcactggcccgatttaggtatgagttgcatctagacaagctcttcgatagggtttgagcctctttctaggtatcgtcttgcgaaactatgttcaaatcactacccacgttggattcatagatggtcaagggttggatttg

SEQ ID NO: 67818 - DNA, 250 bp, Glycine max
  unsure (1)..(250): unsure at all n locations
tttgaactttgatgatgaagtcatgtgagacaacttcaaagttccttctctccatctttatccttcaatttgtgctccccctctctctttctcttcctctttcttttcctccattggatcatccttcccaagcttctatccaaggctcattctggtgggggngctccttcttccatggcttattccctagtggatggtgcctnctctcacctcttcttctttgtcttctgctgcatcttcatggtggaaa

SEQ ID NO: 67819 - DNA, 157 bp, Glycine max
tatatgatagactgctatgcaacaatttagagttgatttgggcataagttcatgctaaaatgcgtacatgtggtgctggagagggcacctgctgcatatactactatcaaaccattttgtatattttaattgttaggatagaaaatattagttagtg

SEQ ID NO: 67820 - DNA, 306 bp, Glycine max
  unsure (1)..(306): unsure at all n locations
atccattccttccattgagcaatttctggagaggagtagctggcctgatgcccaaccttctcttcatagggaagatgaaggtgccataacccaggaaccccgacaggtacaggatgcttcctctgggaccaccattccagagctcattacttttcaacaggatgtaggtgaagagcaggttaaaccatagactactactactcctgagagatctctggagggcacatcagagccatctactccagtagcagacctctnctcaccacagcctgcggatgacccttccactcctgtacttaacatact

SEQ ID NO: 67821 - DNA, 355 bp, Glycine max
  unsure (1)..(355): unsure at all n locations
ctaaaagacgcaaatctgatcatcatgctctgataaatacaaaaaaactagggcaaatgaagatggtgagaatattggagaaacccatgttgtgactgccattcctatacagccaatgttcccaccaacccaacaatgtcatatctcagccaataacaaaccttcttcttacccaccacccagttatccatagaggccatccttaaatcaaccacaaagcctgtctaccgcactttcaatgacgaacaccacctttagcacanaccataacactaaccaagaaatgattttgcagcgaataagcctgtagaattaccgcattcccgtgcctatgctgactgctccatattacttg

SEQ ID NO: 67822 - DNA, 341 bp, Glycine max
acatagaacaaattctacgtcttaatgtgtgggaaatgtagacacctcccatataaatggtcgatgaaggtaatacactctcattggttggaggacaatttgttatgaatggttcacatatttatgtcatttaaggaataataatgataaagtattatataaaagtgacaggaaagtgattttatcctaaatatctattaataataacacgttgtaatttaaatatgagtttgccttccaccaacacaggttaattggatgttatcatattagttattgatcctctcttcctaattagtgcgtggggaccattactctcaacgaaaatatttctttataat

SEQ ID NO: 67823 - DNA, 137 bp, Glycine max
ctcatctctctctatctctaattaatatatatgatgatgtatattgataggacaaaactttggcattgttcttcgatcataattgaaactccatttatcttagtattctatatatggtgagctataatgccaattat

SEQ ID NO: 67824 - DNA, 336 bp, Glycine max
  unsure (1)..(336): unsure at all n locations
agctnggtggattatggggcacccgtcatatgtggtactatgtggcaatcgggcgatggtgcanatcaactctcccacatcctcaaatcaaacatgaacccaccatccccagttgcccaccttcaactgagctcacgtactcctacgtagcccttatcctcgttcctctcaacaccgggtccccatcaacccctccaagcttccacaatatccaagagattcaatttccaaatatcatgaactaccctaaaccaagaaaacagggcagaggccgaanactctgcccaaaacacattcacatattacaactnttcttactcaaataccccagtaaca

SEQ ID NO: 67825 - DNA, 423 bp, Glycine max
tctatataagctgaaccatatgatcaatgaagacgagttgagttttattatataattagagtttatctcttttatcttagtgagagtgattctcctaaattcttgagtgagtcatgaacaccctggctgtatcaaatgactttcacaacctttgtgtgttgccctccctggaaagagcgattcttttcttcctttcatcttcacccttgttctttctaaccacaattccagaaaatccatttctgcccagaattatctcgtggccataactcccgttttacgcactcaaattaagtgattcttgagcctaaattgaatttcaaaacgagacatttcacctcgttttggaatcacctcacttggagccctgtagcttcagttatcgccatttctatatttctgtccagccaccacttaacctaa

SEQ ID NO: 67826 - DNA, 421 bp, Glycine max
ttaagtcacctgcggctgcaagcttacagaatatatgaggctatgcgactggtatattatccctatgatcgaagttatatactttataacataggccttatccacacaagtaacggagaacatactaaagctttggaatattattttcgggcgctcgagcgaaacccattcttaccccaagcttttaataatatggccgcgatctgtcattacgtgcgactatctccactatagaaagaaaatagaaaagaacaagcaaatccacaaatactaatataatagatactagagatgatggctttctacatatacatatatacgccaaaacaacgagttttatcagctgtagcagagaatgaaacttcatagaagtcataatatgaagatagtcatatgtctagataccctcttttctatggat

SEQ ID NO: 67827 - DNA, 335 bp, Glycine max
  unsure (1)..(335): unsure at all n locations
agtatccatagaacattngacgtatcatagataatgaataaattctattatattacataccatatgctgntacaaaagttattattattttagtgattaatagatatatttggctagtaattattccatataagactatcaattctgcaacataaccgctcatgcccggcaatgcaagataagccatcgataagatagtgataaccgtgaatatttatgcattgggatatccattccacccatttcgtcgagataaagaagacgttatctatcataactcgttcccgccaagtaataaagcgcagcgccaattaatccgtgagatattattttgt

SEQ ID NO: 67828 - DNA, 398 bp, Glycine max
  unsure (1)..(398): unsure at all n locations
agcttcatccgcagatccctcttgtaagactaggcttagtctaaacaacattattgtaacaacataattaagaccaaagcttaatccgtagatccctcttgtaagacttgtgaatgtatgaatatatngaatttgatgatgccaaagataaatcaaacaaggccgcttcaaaggataagcatttgcttcaagattaattcaagattgcttcaacaaacaaagccttgnttaaagattcactaaagatcaagcctcgcctcattacaaatggtttttaagtcatgcaaggctctggtaatcgattaccaggaagttgaatcgattgccagaaaggaagaatgaaaaagagcttttgaatagggtttcaatatgaatttgaacatgttatcgataaccat

SEQ ID NO: 67829 - DNA, 404 bp, Glycine max
  unsure (1)..(404): unsure at all n locations
cttatctcagctnggaggatggatggagacccggtgtcgagacacacgaggatgtgggcttcttgggagtacgtgagctcagttggaggtgggcaacaggtgatggtgggtttatgcacgatttgtggatgtggaaaacttgttgtgcaccatcgtccgaccgccacctatgaccacatgtgatgggtaccccatatatcctacatgcttgagatgaggaagtgtttaacggtgaaacttcctggctttattcgttgaccacatagtggtacctggagatatgtcgcggtggtcaagagaccttgaggacgtcaggtggggtgctattgcccacaaccaagcttgaccaatctcgacccatctcgggcatatgtagtcagtgagaacctgtgatgtacctaatc

SEQ ID NO: 67830 - DNA, 275 bp, Glycine max
agtcccgtatatatcgagacgctccaaattgaaaacggaaactcttagaaaattccgacgacagtaactttttactcgaatgcccgacagagtgttctaatttatcgagggatgcttcaaatagagaacggaagctcgtaccataatccaacgacaattaacttttactaagatgtctgattgagttcccgtatatattgagacgctcataaattacatccggaacctctgagaaaattgaactcgctataactatatatatggatgcccggtga

SEQ ID NO: 67831 - DNA, 426 bp, Glycine max
  unsure (1)..(426): unsure at all n locations
ctggtgagagcgtgatcttattctgtgagtgaacgactagctntgagtaatagtctttgcatcaatctctgaantttagaatgaaatgtatgaatgatgacatgatgatagccatgattgtatatatactatccaattgaccaaaaagcttaccttgaatgataatngtatcctttgcaccctttgtaagctaaattacattttcaaaattgaaccctgaacttgaatgaatatctccagataccttgcttatattctatgagagcatatggttcatggcaaatttaccccatatttgggagagtggactttgatgggatgtaaaagtatacggtaagcatccgcacacacaacaaataagttttttttaaaaaaatatttacaaatataagagaaaagacagaaatcaagatatgtgtgttggta

SEQ ID NO: 67832 - DNA, 421 bp, Glycine max
ctatatataggtggagtagtgacgttatattagttctaccccttaagcacttctctctctatcggattagcttaagaagattggtaccgtgaataaaattcaagccgatgcacttaacgaacatctgcggttcaatttccgtgagtgatctctcgaaagtattctaccgttcttcgtcgatctacatcgttcttcagttctcatcggtgaagtacctcaaccaagcttttcaatcatactatgttcccacggtgaccacattgtgttcatgtaatttaatctcaaatacttttctactttaccgcttctgactgcttaagcattatatatgcacttctgcttaatcaataataaataaattacaccattcgtttatatgtcatccttatttcgttaaatgaatccaccgtcggtcggccta

SEQ ID NO: 67833 - DNA, 332 bp, Glycine max
  unsure (1)..(332): unsure at all n locations
agctataagggccactctctgctgtatgtttctttattaagntggtacaacgaatacttatgagcttatacggatcatattatacactacaaatcactcacttaaaaaggtacacccacaagatatatgtgattcgtataacactcatataaccgagggctagaaccaactagaggaatattatttcaacttatcaagagtgtctgaattcgagtccaaagcatatatgcaaacgtgtaatgcagcctacaatgtggttatctgatctctaaacaatcattattgtctactgtaaaaatacatgttatctataacagtacaatatactattg

SEQ ID NO: 67834 - DNA, 476 bp, Glycine max
  unsure (1)..(476): unsure at all n locations
agcttgaagaggatgctntaatggaggaaaaganatatagtaagggggagcacgaaattgaaggaataaaagagggaaagaagtggaactctgaagtgtatctcataagactttcattcatcanaggtacaacaagtgttacacatgcttctatttatagactangtagcttccttgagaagctctcttaagaaaacttccttgagaagtctctttgagaaaacttccttgagaagctagagtttagctacacacacccatctaaaaactaagctcacctccttgagaagcttccttgagaagctagagcttatctacacacacccatctnaaaaataagcacaccttcttgagatgctttcttgagaagctaaagcttatctacacacccctatattagctaagctcacccccatgacgaaaaaacatgagaatacataaaaattctactacaagactactcaatgccttaatac

SEQ ID NO: 67835 - DNA, 486 bp, Glycine max
  unsure (1)..(486): unsure at all n locations
ggccaccctactcgcccaggtgagcatggttgcttcctccgattctacagccttctgaaagaatcttctggagggcccaagtgggcctggttgctactttcaccctctattttactatgtacaccccctgccttttntatgagtgattcttctcttcgtaaaggtacggaaacttacgaatttcgtaacgatacttgttttctttccgtaatgttacagaaccctgcggattacataatcatccactgtttgacttacggaatgttactgaacctcactaattgtgcaacgatgcctccatttgattatcggtgtgtcacgataccttacagattgtgcatcaatattgtcttttgtgtccagcattgtctggaattcacatattgctaatgagggtgcaagcccttcaaggacaaacaaagtccatgtctcaacataggtcgcggacaaatatggatgacagtgccctcttactagctttattga

SEQ ID NO: 67836 - DNA, 375 bp, Glycine max
atccttaagtcacctgctgcatgcaagctatatgtggaatattattgagaatcttctattctgataagtatgtcggtatatcaataaatatgtttttaaacgtatattaatacacaattattttatttatttactacatataccaatatattacattgaaaatgataagcatatatatgaaaaattatatctacattctcatattttatacacttacataaactagttaatataataatatttacacaaatattataaaagtataactaaatttgcacaaaaaatattaattttgttaaatctttaaacatattagaatatatggattgtcaatccatataatttatatggagtgattgtccgtataatcatatg

SEQ ID NO: 67837 - DNA, 160 bp, Glycine max
actgagtatttcgcctgtattcggttgcgctagattgtgtactagctatgaatacaagagcactatctatagatactgtcttatcatattgcgcgctataatagaacgaatatagggtaccttcgagatatcaataggcttcggagctgaagcagcattc

SEQ ID NO: 67838 - DNA, 392 bp, Glycine max
aaaaaattatgacaacttggatgaataattatagaaacattagtgcaattgcaattcattggcacatatatactatcaattcgctatctaactcacaagtttaagtactattatttagatccaagacctgatagcttatagcctttcgttagaagcattttctagttaacaatcccctacgtactatttaggatacaggaagagtgcacgtagtatcattaatgggtgttaaagttcctttgactgaagcttctatctgtggctggaaaacgtgaaatgatatggcatggtcttataccaaaatcaaatggtgttgatatgaatctttctagataacttagcggtggtatatggaaagggatcgctgcgtatactttgtatctgtagcgata

SEQ ID NO: 67839 - DNA, 418 bp, Glycine max
  unsure (1)..(418): unsure at all n locations
agcanggntgaggaatggagcacgacttcctatattgttgcagcagcactatatctgacaacgaatgcaattgacgtcttgtcattctctgtccctgctgtagctaagtatattgacgactctaattacaagagatgcaaagcatagtcgtggcggactcacgtgagtccactctacttgtaatatatactccaacagtgcgttaacattgcagaaatgctggaccaatttactcattttacgatatttttatacaattaacatgacatatcctaagaatcactgcacgaaccactagtgcctgctcatcgctttaatgaaaccagaatattgntttctctcatcatctcagtcataatattatatcgacactataatttactgcatcaaagctcacttcggcacaactatcttttat

SEQ ID NO: 67840 - DNA, 339 bp, Glycine max
  unsure (1)..(339): unsure at all n locations
ctaattttaatcgaacggttcgtatacatccggcagttcccactctgaaaatataaagaagaaatattctatttattataaaatggtcaaaaaaaaaaagcttgacatttcaatccatatactatatagncttatcttaactataaatatgtatcttattattttttggcatttcaacgtgggaaaaaataaatagacataagctatcttatattagtcgataaatataaaaaataataattatacactataaaaaatgaaatatttccaaccatggctacccatgaaggcgtgaaaacgtcaaaggggccctcaagacacttgatgagtttacgagag

SEQ ID NO: 67841 - DNA, 259 bp, Glycine max
  unsure (1)..(259): unsure at all n locations
gagaacctgtgatgtacctcagcaggcgagctcctggcagtcaaccaataaaagaacaaaagtccacgaagtatggaggcttgtgtggcggctggccanctatcaatcttatgttntatctgaaaaattccctctggtaatcgattaccatttgngtgtaatcgattacagggtttaannaattgaaacagaacatttagtagctactggtaatcgattaccatttgtgtgtaatcgattacacaatgttatatgctac

SEQ ID NO: 67842 - DNA, 420 bp, Glycine max
  unsure (1)..(420): unsure at all n locations
ttgttgtttagaatacccttgacaactccatgattatttggcccttaaactatgatttgggtggaattactatggctaggatagtaatattactcatggtcacttgacttatttttgaaaaccataaatgaagcttttgatgctttcgcaacttacaaggtgatcataatgaaataggtctcaacattggttcaattaaaagtgatcatggaggtgaatttcanaatgagtctgttgaaactcttgtgatgataatggattcaccataatttttttgcccaagacacctcacataatggtgtgnagagaggaaaaattatcccttgaaaaggtgccagaaccctctaatgaacaagctacctatgacttttggttatggtgcatactattgtacacttgacaagtactattaactatttg

SEQ ID NO: 67843 - DNA, 493 bp, Glycine max
  unsure (1)..(493): unsure at all n locations
atcttaagtcacctgcngctgcagcttgttcagtagaagggaataagacacacaagacttgttatatataaataaagcttcgttatatgggagtgagattcattgatgaggaagtagattcattngcaaggagggcagaaatgtactataagaagcgcccgaaggtcatgaaattagtggaggagttctaccgagcataccatgctttagcttagagatacgatcatgcaatgggaaagctatgccatgcccacaaaacaattgtagaagcatttcccaaccaataaaaattacatgctgaccgatgattcgtcaccgtgtgtngaatcacacacactangagtgccttgtccgaattattgcgagtctaagcatgcagagaaagcagatagtgaagttcacaccttgangaaaggcctagccaaaatacagtctgacaatgatgctatatttcttcagtatcagaagagtatggacaagttatcagaaatgg

SEQ ID NO: 67844 - DNA, 454 bp, Glycine max
  unsure (1)..(454): unsure at all n locations
ctgtgaggccaagctaagcgccagcatgctgttcttatctccagtcctctactggttctaagattgtagacttatgctaagctcagcttggcgctaaacctattctgcagaataaatggtttctttctcttcgagctatgcgccagcttgctgtgcttagcgtttgagtaataattcataaggcgcgctaagctcagcatgttgtgctaagcgcccagtccaaatttcagttttatttntctggttttgtgaaaataacctctgctaatctcttgtgtttgtcttatatttgcatatggcatctcagaataagaaagtcctttgcttcttcatcttctcacattagatatgatagacacaaagtttcttcccctaaagcatgggatcgttacacaaacaatatcttcggcagaaagatcattcctaaatggaatgtgcacntatcattcaatga

SEQ ID NO: 67845 - DNA, 446 bp, Glycine max
  unsure (1)..(446): unsure at all n locations
agcttgtaactgcccctagttcctgagatatgtttgtttcttgtcctatanttacantttgctntatatgcaggtagatccattggagaagttggagccctgaagtgcagacattcttgtagatattgcagaantatttctagagtctgtgagtattttcattntgttttattttgttcactgggctgatgggattgttcactttttgcatgtcgantaaattatctttatnttggttgaatatatgtttttggaatcaaagttgttttactatctcattatttatttgaccatgagctactgtattaatgatnctaagctaatantttggtttcaatatcctcctaattgtgaatgcctttgnttgttatatatgcttttgtagcgcgctctagtggactgaagaaacattttgaagttctttgctctttgatgtgacatctttc

SEQ ID NO: 67846 - DNA, 395 bp, Glycine max
  unsure (1)..(395): unsure at all n locations
tggggtgctattgcccaataccaaacttgaccaatcccgacccaacccgggcatagtcggtcagtgagaacctgtgatgtacctaatcaggcgagctcctggcagtcaacagattaatggaatacaagaccacaaagcaaggaggcttgtggtagctggccagctgtgaattttgtgtaatatgtggatggtggcctctggtaatcgattaccaatggtgggtaatcgattacaaggcttaaaattgaggacaggaagctaagatggtctctggtaatcgtataccaaagggtgtaatcgattaccangcttgaaaacgaagtcaggatacttatggagcctctggtaatcgataccagcctgtgtatcgatacaccatgaatggtcactggtat

SEQ ID NO: 67847 - DNA, 171 bp, Glycine max
atatggaaaagcgcaaggtcggttaacaaaccgatctcgaggggaatgtaacctgcgatgtctgcatggttaaggtcaatcccagctacaacatcgatctttggatcatctaaggccttatcacacaaaactccgttataagagcaaacatttgagccctaccaatatgct

SEQ ID NO: 67848 - DNA, 342 bp, Glycine max
  unsure (1)..(342): unsure at all n locations
ttttgtgtaatgagagaccccactcatacaattntatgctaatatatttgacagtccttttatatatgatgaattttaatgtcttaatagacaataaaataccttaaaatgaaatgcctctagagatataaatgagaaaatgcttaattttaaattgtataaatactatctggtgatataaaaacaaaaggcagaaaaaagtattgtgaaattcatatgagagcgggaaaaaaatcatgaaacacacaatcttataaaatgttattattaatgttaattgcttaactaatactcaaagatacttattagtatggatctggattaaaatcttacatctagata

SEQ ID NO: 67849 - DNA, 349 bp, Glycine max
  unsure (1)..(349): unsure at all n locations
cctgcgactactcatatgatccatctggagatttgtaagatcctatacgtcctgcgcaaggcaaataaatcaggtaagcacaaaatccgaaaataagcaacaattatcaattaagcccaattatattactaaaaccaaaattgagttactggaagaaaataagagtcaaagaatggtcatataagctaagaagaatagaacaatattaaactaaaaatgctcaatcacataacccaagtggaaggttcattaatacctttcaaaacattcttatagagatccgacacaacactatntgacatcaaacttgaaaatgataagagaagtgaaaacaatctttccgaacacc

SEQ ID NO: 67850 - DNA, 332 bp, Glycine max
  unsure (1)..(332): unsure at all n locations
agctntgaaaagtgctatnttttcaccttctcgctattctcaatttctagcttagcgagcatctgctaagcgcaacactcatgggctaagcacgaggaagactctgagagaagatgagttgtacaggttcgctaagcgcaccacttcatctcactaagcgcattgctttagtccatctgctaagccgtccataattgcgctaagcgcaagagcacgaacaaggccacctatntaagcctgaaatcagatnttagagagcgagtttggactaggattcagagctttgcatgtctaaagattctagagagagaaaggtccaagttccaaagagt

SEQ ID NO: 67851 - DNA, 404 bp, Glycine max
  unsure (1)..(404): unsure at all n locations
acattgttatgcacactcatacttcattttaaccattgactctctatgttctatgcctcaacatctacatttgtctccgattgattgcattttccggattcttacataatttgtccattggtcttttgttattcccacactttgtctttgcacttgcagtagcattacaagagtccgcatactcatcttcactctcatcacatccaattggttcactaaattcaaaatctctcattttgccatataccattgtcataatattgaagtggcccacttctctggtatcataattcctcaactcttcactacattgtggagtttcttgcaactgcacgtctcaactcccaacaggtgttgtnggctctggtattcctccctttggattattcacaaaattacaacaa

SEQ ID NO: 67852 - DNA, 405 bp, Glycine max
  unsure (1)..(405): unsure at all n locations
agcttccaagaatcaagatcaagattcaagactctatattcaagaatcaagagaagacttaatcaaaataagtatgagaaggttttttcaaaaactgagtagcacatgtgattttctcanaacatgtttaccaaagagtttntactctctggtaatcgattaccagattattgtaatcgattaccagtagcanaatggatttgaaaaaatgacggacaaaagaaaagttttagaanatataacgaggaaacaagaagttattttacatnggaattggaaatggaacgtgtattggctgatgtacttagagatcaaaggannatgggcaacaagggtgacaaatggtggaanaggtcagcattngcagccgcaatgttatctactagcttcaatggtaatggcaca

SEQ ID NO: 67853 - DNA, 451 bp, Glycine max
  unsure (1)..(451): unsure at all n locations
aatgangntacaggaaacnntgggtgcatgttattatacctgaaaggaacactctggcgattaatataaactaataaaagttgagtagaagtaaccaagattggccttatagcctgactagatccacccatagttgaatgcctatgataacagtgacatataataagaataggggaactaaatagtaaaattcttatataaaggatattataaatacttacttattttgtacataatagaccttgactcgaagtaaatttgagaacccatgccaaattgtttcattcggtgtgccaagaattctgataatctgatagtaaattaataagatgttatatgcctacgccggttaatgaggcacactatgttgaaagtacaatgtgagagcaagtatctatccactacatagcttaaatggcgttaatgcataccttgtcaagttgttcaaatt

SEQ ID NO: 67854 - DNA, 411 bp, Glycine max
  unsure (1)..(411): unsure at all n locations
agctntgtntgctatgcgtgacagaacagattgtcttatgtgcgaaagatgacccacatgcatgagtttcgatcaatccttctgacgcgttgcctgagaccaatgtaagagggaagaatataaaatgaagaagatgaatgcgaggttcatcgactaagtaatccacctcattttggaagatatcagagaggaaactatttctcagcacatgaaaaaagatngaaacacttncctttgtatattctttcattaacaacatgtatgtcattaaatatttgttgtcattcgagactctctatctggggtaatccatcttacaccttataattgagtctatctttcattgtagatcttatatctacaatctcatactttaactcccaactaacaatctttcttattttatatttt

SEQ ID NO: 67855 - DNA, 264 bp, Glycine max
  unsure (1)..(264): unsure at all n locations
agcttctntgagaaaacttagagnctagctactctctcctatctaaaaactaagctcacctccttgacaaaatacatgagaatacaaaaaaaagtccctactacaaagactactcanaatgcccaaaatacaaggcttaaacctatactactagaatggccaaaaacaaggcctaaagaaaganaacctattctatattacnaagagagtgatccacctagaccatggctcaaaactacctaggtcatagaccctaggcctttt

SEQ ID NO: 67856 - DNA, 352 bp, Glycine max
  unsure (1)..(352): unsure at all n locations
agctttaagaattggcaggaacattatgttgttatgtacaaacactgggtagactttgggtagttgcataattcacatcatatttcagctagcaagttgatttggaataattattaattgacatacttgtggactttattttagtcaaagatgaaatttgacttgtttaaaaacttatctctcttcatcctgtagataaatgccttatgcatggcattttatgctcgatctgaagaagctcgtcaagtcatgctcacaaaattttgctgtggtatatatattctctgtcctgtcttcttgtgctgcttggatttgacctcngcaacagaggagcttaatgacaaaatgtggg

SEQ ID NO: 67857 - DNA, 456 bp, Glycine max
  unsure (1)..(456): unsure at all n locations
atccttaagtcacctgcggcatgcaagcttngtccccaattntctataaacaggtggagatgtgaagtaganaacggttcagccccttaggcacttctctctctttcngaattgcttaggaaaattgtttttgtgaagaaaatccaagccgaggcgcttccgtaacgtttccgtgagtgatttcgcgaaggttttcgaccgttcttcgacgttcttcatcgttcttcagtcttcaacgggtaagtacctcanaccaagcttttcaattcattctatgtacccgtggtggtccaannattggttcatgtattnttagtctcgttttcatttactttntatacccncttttgacgtgcttaagccatttatttaagtcatttctcgcttaacctaaaaataaaataaatttccaccgatcatttgaaatgatcatccgtaactttggttgaataaatc

SEQ ID NO: 67858 - DNA, 496 bp, Glycine max
  unsure (1)..(496): unsure at all n locations
cagcttgtggcgttggatcttcttcatcaatggagtcatttgcttcttgaagatcatggcagcggaatagagaatgatgaaagatgattggagaccccacttcaaggagatgatgagtcaagaagaagctcaccaccacaggaagccatggataagagcttgaaggaaggcgaagatgagtggagggagagggagagaatgggcacgaaattttatgcctcanatgaggtctgaactttgaagtgtaattctcaaatgatcaaagttcaaaaaatgcacacacatggcctctatttatagcctaagtgtcacacaaaattggagagataattgaatttctattcaaatttcacttgaatttgaaattgaatttgtggagccaaaatttcaataattatgattaatgagatttagatatggttcagcccactaatccaagatcaagtccaagaatcttcactaagtgtgcttaggtgtcatgagacatgtanacatg

SEQ ID NO: 67859 - DNA, 388 bp, Glycine max
  unsure (1)..(388): unsure at all n locations
atcctctaagcacctgcggctgcagctgaatgagaagtgtgaagagtcagtcttctactttatttgtgaccacatgttgacctggagaatgtcgcggggtcaggagacctgnggacgtaggtggtggccattgccaaaacaacttgacaatccgaccaacccggcatagtcagcagtggaacctgtgacgacctaacaggcgactcttgcagtcaccataaagaacaagacccaaagcaggaggctgtgggggctggcactatggatctgaggaactggatatggctcggtatcatactatgtggtaatcatacaggataaataaactgagtatatgctcggaatcatacaagggtgaacatacagctaaatgggcggagtgaaggct

SEQ ID NO: 67860 - DNA, 462 bp, Glycine max
  unsure (1)..(462): unsure at all n locations
ctccttgagaagctagatgctagatacaatctctcttcccataactaagctcaccttcttgagaagctgtcttaagaagattcctaaagaagctagagcttatctacgcatacctctctaatagctaagctcacctccttgagatgagaagctagagnctagccacacaccccctacaatagctaagctgacccgcatgacaaattacatgataatacaaaaaatatccctactacaaagactactcaaaatgcctcgtaacacaagactaatatcctattctactataatggccaatatacaatgcccatacgaaggaaatacctatcctaatatttacaaagataagcgggctcatacttatcccatgagctcgaaatctaccctatggctcatgagaacnctatgcattccctntgatctctagcccaatctactttgagtcttctatccaattccctt

SEQ ID NO: 67861 - DNA, 357 bp, Glycine max
  unsure (1)..(357): unsure at all n locations
ctgcagcttcagatcanaactaactggttgaagcttgtcatatgatgaagaacaaatgaagaacggtgaagaacgataaagaaactttcacggaatcgnatatggaaacgtctcggaagcgttaaggaagcgtcttggcttggatttttcttccttcgtcttctgctcactaattntaagtgatttctgagctatcaagttgttgaacccctaaaactcagtcctctcacgccattttataagataatggnggaggtggtggccgcccaactcacccangtgagctatggtgctttcacctgaagcattccttttttggaatatttcagatgggcccaaatgctangtacaccccat

SEQ ID NO: 67862 - DNA, 384 bp, Glycine max
ccatggagatgcagcggtagacatatgagaatatgtgagaggaggagccatccactaaggaataagccatggtagatggagcttctccaccaagatgatccttggataagatagctggagaggatgcttctctggtggaaaagatagatggagagaaggagagagggggggagcaccaaattgattgaagataaagggagagtatgtgaactttgagttgtgtatcacaagacctctcatcatcattagtacaacaagtgttacacatgcttctacttatagactaggtatcttcctcgagaagctttcttgagaaacctccttgagaagcctctttgagaagacttccttgaatagctgaccttactacacacacccctctta

SEQ ID NO: 67863 - DNA, 542 bp, Glycine max
  unsure (1)..(542): unsure at all n locations
atccttaagtcacctgcggcatgcaagctnttgagtganaggatgtgactcttcacatttatatttgagtttcaacgttcaagggcactggtaatcgattaccaaaacattgtagtcgattgctgtcttttgagaataattggaacattgtaaattcagtttgaaaacttttttaaaaaactcattntgctactggtaatcgattacaacaatatggtaatcgattaccagagagtaaaaactctttggtaaatgttttgtcaaaaactcaagtactattcaaagttttgaaattttttttaatacttatcttgattgagtcttttcttcattcttgaatcttgagtcttgaatcttgatcttgattcttgagaccttgaatcttgattctngattctaggcttcttcttgagtctcgaattctncttgattcttgaactcttgactntgtcttgattcactngagatgntctttgatctttgagcccttttgtcatcacctttgncatcatcttttgttgcatcatctgtatcatcaaaca

SEQ ID NO: 67864 - DNA, 417 bp, Glycine max
ctttgataataactgaggcagatgaagacgatgagaatgatggagaaacccatgctgtggttgccattcctatatattcaagtttgccaccaacccaacaatgtcattactcaaccaataacaacccatctccttacccaccacccatttatccataaatgccatgcctatattaaaccacaaaacccacctaccaatgcttaacaccacctttatcacagagcaatacacccgccaagatatgaagtttgtatgcgaataaataaacctgtgggattcacccaaattccggtgttctatgctgacttgctccataccactcgatattcaatggtagccttaccctaccgatgtcatcaacctcatttttcatgatactactcaaacaatgtggcttgtatgagaaccccgggcttt

SEQ ID NO: 67865 - DNA, 433 bp, Glycine max
  unsure (1)..(433): unsure at all n locations
agctgccacccagctcgcccaggcgagcagggttgtctttctccagaagcaacagccttctggaggaatcttctggagggcccaagtgggcctggttgctatttgcgccctctattttactaagtacacccnctggcctttttttggtaattctttnttcgtaaaggtacggaaacttactgaattcgtaacgatacttgttntctttctgtaatgggtacggaacctgcggattacataatcatcccctttttgacttacggaatgttacggaacctcactaattatgcaacgatgcttccatttgatttccggtgtgtcacggaaccttacggagtgtgcatcnaatatttcttttgttttcggcatgtcccggatntcacaaatggcctaatgatgggtgccaagcacctcacaaggaccaaatataagt

SEQ ID NO: 67866 - DNA, 405 bp, Glycine max
  unsure (1)..(405): unsure at all n locations
actacaactaatantctagataagtgagccattaattattatttcattcaaataaaactcttttgtttagtttaatcaaacaagatcttctcccattgccaaccccataagataagaaactcatatcttgtactagctagaagccaatgatggtatgcatagcaatgggtcctntttgcttcacatcttacagctatgtaatgaggtcatgatattagacttattcaatactaaccgatactagatatttagaaattagaattgagttcctttgttggtggggaaagcaatcgcgcgaagttcaaaacaggtgttagaaatggtttaaggctacagctcaattatagaaacaaaagtcactatgtgtaattgagtccacctaccatttggtttcctcccaataat

SEQ ID NO: 67867 - DNA, 303 bp, Glycine max
  unsure (1)..(303): unsure at all n locations
aatggttcaacacgcanaagttaaaatttttttaaaaaatgtagcttctaaatattaccaatatatgttttctatttttcgattccttagccatttccctcaaggaaatgttagagaaactgtacaaagtacaaccatattctatttgtgtcagtattcacaatacagggcttaatactataccccaaaataggtccaatcttagtttcatttcatgacattctggtggtattagtttgaatacatagctctttgaatattactggntaatgtttacagncatatcatgtgcaccatgaaagt

SEQ ID NO: 67868 - DNA, 397 bp, Glycine max
  unsure (1)..(397): unsure at all n locations
gtcggcaaaggagcataaaccacagagtcttacgacaggtacaaacttttgattcatggccagttgggttaccaagttaaccaaggcatctagtttaccttcaagcttcttagtttcagatgatgcagatgagtttgtgggtacctcatgcacccctctaatgactatagcatcatttctggcgctaaactgttgggagttggaagccatcttctcaattaaattcctggctttagcaggggtcatgtcttcaatggctccaccactggcagcatctatcatacctctctccatgttactgagtccttcataaaaatattggagaagaagctgctctgaaatctggtggtgagggcaacttgcacatattnntttanatctcntccagtattcatat

SEQ ID NO: 67869 - DNA, 311 bp, Glycine max
  unsure (1)..(311): unsure at all n locations
gcttgcatggatcgactataaattttgatatattcaggagttggttatactggtgtgaatgtgtctttctcgatctctgcctctctctcacaacagcaaactccaacttgtgtccaataactatgggatttggccactcaaccaggntggatttatcctgctntatttactgttgaagtaattacctcataatcttatctcgcacctaccatttttcatttttattaatcatcttgtgcttactgcatttgttttattgaaccatgttgtgcttatgtaaaaaatgtctaagttatatcatcaatattgaa

SEQ ID NO: 67870 - DNA, 440 bp, Glycine max
  unsure (1)..(440): unsure at all n locations
agctngcttgtggngcttctatggaggctggatcttttatcttcaatgaggtccttcaatggtgattntacaccatggagatgcagcggaagacaaaggaaaagaggtgagaggaggcgctatccactatggaataagccatggaagaaggagcttcaccaccaagataagtcttggataataagctcggagaggatgctctcatggagaaaaagacagacggagagaaagagagaggggggagcacgacattgaggaagaaaagggagagagtcgaacttgagttgcgctcacaagactctcatcatcaaagtaccacaagtgtacacatgcttctattatagactaggtacctccttgagaactttcttgagaaactttcttgagagcttctttgagagacttcttaagaacttgacctacttccataccttttataa

SEQ ID NO: 67871 - DNA, 405 bp, Glycine max
tacatgcttctagcggattctaaccttaatatcatttaactcagatgtccgaatagtgcccatgatatattgtgatgctctaattagataacttatggtctgcgcatatacgttcttcaataactgttttcttcagatggttcgtttgagtcccgtaatattatgatatgctccatatagaatacagaagcctctaacgaattcgaaacataattactctttactcggatgtccgatagagtcccgttgtatatattgacactcgtaattgaaaatagaagctctgtgcaaattcaaacgacattaatcttcttcttggatgtcatactatttcacttgtatatgtaaacgctcgcaacttagaactgaagctcttaacatagtcaacgacattgactttaactt

SEQ ID NO: 67872 - DNA, 394 bp, Glycine max
  unsure (1)..(394): unsure at all n locations
gcaccgcagctgcagcttgtgcttcagctgaggagtagcttatttttctcttaggagatgaaacaactgaactagccacaggacgatcaatcctatatggaaacttcctgtcaaacgcacctgattcttttagatgtctagatcctntcacatcctgagtagttgcagactatggcgaaagcattttcacttttgattcagttgcatttgaccgccccacacttgatgatatgaataatgttgatttccagtcacccgagcaggcatctgcatgttctttgaagtatgttcactacccctcttctgtttgtggtgaacaacctcatcaacaggtttgactcttggcttggaatntaagttggtggatgaagtagacttacacagcctacctatc

SEQ ID NO: 67873 - DNA, 307 bp, Glycine max
  unsure (1)..(307): unsure at all n locations
ctctcctttggtggcgctgctctccttaattctggagngctagacctcgaattctagcttccgatactagttccctaacactctnttagtacttcacctacaaaattgagttccttttaatatatggcatgtaagatntagagtgtctacaactctatattattttaaattcgaagcaatctattacaattgctatctatatgnttataattcaagagattagtaaaatcaaactgtcccatgtttgaatatggaaatgaagcaatctaccagaaagacaacatgatgaatctgcagtcatccatca

SEQ ID NO: 67874 - DNA, 228 bp, Glycine max
tagagattggacggataggtgtgtactgcgtgcattgttatatatagtagaaggggggtatcgtgggaccttggtggaagtggcaccgcaccagtgtttattaatttcctccctataagataatattataggattttaggatgagattatgtgttataatattgaaacgatcaccgttaagaattataggaatacatgaatacgccactgcctgttgttttatttcta

SEQ ID NO: 67875 - DNA, 296 bp, Glycine max
  unsure (1)..(296): unsure at all n locations
gaagagcaataagcatttaaatgatgtattgttgctgctgacagttctacaccatagcaaactgataattatgtctgtttcagttattcctaactaatctgaatattatatgtctgggagccttgccatatgtgctgtctggatcttgagtttagcacgattagtctattatgacccatgatgaaccagaatttcgagtggattngattatctacatcaatgaagactgattagactctagtcactagtcagggatgacatagactagcctatatgtgctagagtctgatctgtgt

SEQ ID NO: 67876 - DNA, 404 bp, Glycine max
  unsure (1)..(404): unsure at all n locations
actcttatcatggccaacccataggattgatatagtggtgcaagatcttgtgttcaattttntttctgttcgatatatgagtcaatattcataatataaataaacattttgcagtttaattacaaaacatattagtttaaacacatttgaatatagtatttcgaagtgttgaatctacactttggaaacttagtttctagacgtacaagcattgatcaaatacacaattagaggaccttactgaatctccatgctccattatgtatgtattccactcgtcactaaacctctgtggaccactgttctcacatcaagacaccattggattgaagactcatggaccacccacatgctngccatggaagcatcttttaaagcatcttatcaatttancgaaatcagag

SEQ ID NO: 67877 - DNA, 192 bp, Glycine max
  unsure (1)..(192): unsure at all n locations
ttatctcgctgtaccagcttaaaataaagagattttttttcannggtataagcaacaaatgttttttgtctaagcaacattgctaagagggggttattaaattgctctatattataaaaatattacattcttaactagtatctatggagtttaccccataaaaaaatattgttatagattgagatatactta

SEQ ID NO: 67878 - DNA, 469 bp, Glycine max
  unsure (1)..(469): unsure at all n locations
agcttgaacanatcttctacacttggagtgatcatctgtcttcctcttanacccttaccacccactctgtcatcatgccgagactcaggaagcccaacaggtttagccttctctaagtattctgaacaaaattcaatggcttcttctgcaatgtacctctcaacaatagatgcttctggaagatatagattctttgtatacncctttaagatcttcatgtatcgctcaaccgggtacatccaccgtagataacaggaccacaacatttgatttactgaccagatcacaatcaagtgaatcatgatgtcaagaagcaggnggaaatacatctcaactgcacagataattgcngctcattttcacttatcaacatgactgatcatgactttcttctatgaatggaaaaaagcacggcgagtattgtaactgctttgttggcagagttcgataccacgctacaatgtacata

SEQ ID NO: 67879 - DNA, 369 bp, Glycine max
gagggtcccacatgccacctactgtgtttattcctgcatgtgacctagatgtaccatcagggtggtggtcactttgatgttcctctcaattaccatatttatagctatgatctattgcgcttgttggtgcttgatggtgctacagggtgacacatctaccatgctgcgaccttctacagatctctatacaatgtgatcactccaatgaacagatggttgaggcactagggatgcttatataagctctgcgtctgaatttaatgactttaaaatcaacagacatatacatcatgcatgtgtccttctctaagcattttcatcggcttcacaatatataaagtgcttatcatctctataattcctaattat

SEQ ID NO: 67880 - DNA, 317 bp, Glycine max
  unsure (1)..(317): unsure at all n locations
attacaagtcatagagtgtgtagataaatctatattctattctataactntntntacttgcagttcaggagttagtccttgccttgtttagtttagaaaaaagaatacataaatcgaataagaaattgaaaaaatcactatcnattcanatgaagaaaanaaactggctcaaaaggatatcaattgttaagattcanagaaaaatattacttttatcaatacaccaggaacacttcaggtggaatatataatcggatttgaatcaatacccctaactataagaatgaatatttgaaaaaaatttttttttttaaata

SEQ ID NO: 67881 - DNA, 464 bp, Glycine max
  unsure (1)..(464): unsure at all n locations
gttttctcagatagcttctcatggaagctaccttgtctatatatagaagcatgtgtaacactcgttgtaactctgatgaatgagagtctcgcgagatatacttcatagttccacttctctccctctgttattccttcaatttcgtgctcccccctctttcttatcctccctctttcttttcctccattgaagcatccttccaagcttcttatccaaggctcatcttgatggtgaagctccttcctccatggcttattacataatggatggcgcctcctctcacctcttttcctttgtgcttcactgcatctccatggtggaatatcaccatttaaggatcccatcgaagctcaaagatccagcctccgtataagcnccacaagcgagccttcatcaagtggtatccaagcattatagcttcagtatgtgctcctaaacctccttaattttttgtcttacctctc

SEQ ID NO: 67882 - DNA, 425 bp, Glycine max
  unsure (1)..(425): unsure at all n locations
atccttaagtcacctgcggcatgcagctgattcctttagtagggaatctatcctttctattatggagccaaacccagtcaccctcattaagaactatgctctttcttcctctattggcctttgtcgcaacctacccttcaacgggagggcgacgcgagactcacgggtgcgtcttccaagataggaaaatgcgcggatttgccaccaacgtttattcgatgaanacgtcgggaaaaccaganaggcgtggtctacgaactntaagtgtgaaaggtttgggagttgatctacgcacggngaaggtgttagcaccccacacgttcgtcacaagggacgacatactctaatatagtgtgcaaatatgacttcaaaatggttcattntcccncttttttatgttatgtctttcttatgccctttatatc

SEQ ID NO: 67883 - DNA, 450 bp, Glycine max
  unsure (1)..(450): unsure at all n locations
ttcagctagtaagctagtgacttgagagttagtttgatctattacccttgtagggagtagtataagccaagatgtatctcatagtattgaccgtgggcattgtgaaattgaaagatcctccacgaggttgcaggatttgtcaagttgtctttatatacctgccattaaaatatgcaagtgaaattcatgtttctatattataccgtatgcagtcttctatcaattcttatgtgagcaacaactatctctgttcaataatgccttgctgtctgaaaaataaaatgatgttttattgagaactctagattgagtntgccctctgataattttgaatttgcttaagtcctaccccagattgtagattttgagacctctgaatgtattgctatattcaaatatattngtttgtgttagagttttgggggcttagttcctctgtcccacatcact

SEQ ID NO: 67884 - DNA, 397 bp, Glycine max
  unsure (1)..(397): unsure at all n locations
tgccatgacgccaaattgtgatcgagcctctttcacctctgattagtgattaccatcgattggtgatttagcgttgtgaaatggcgtgaagcgatttcagcattgtgtgaggtgtggttntctctgtgatgtcgcggactcgcggtacatgatggtgaagttggactggctcgtaccttgatcccgaccatgttggggttggtggcagtgaagatgtaagtggcgttcccggacgaagaagagaaagggaggaatgaatcctaaaagtggtgtagggatgtggggcatttttatccaaatcgaatgtttcaactttctatcggggtgagacatgggcgtcggaaccgtcatatatggaccaagcgggtagacatctgtttcctacattatccatatt

SEQ ID NO: 67885 - DNA, 499 bp, Glycine max
  unsure (1)..(499): unsure at all n locations
acatggttgaagcattctcgcataacaacatgttttatctggtctccctattaatttacctagtgaaagtgacttgacttaccactgtgtggtttgtcttgtcatgtactcctaagcgctcaactaatatttttactaatatggtaccacattgtatataagatngaatcttagtgtacctgttgcataatattngtgttatgatcattgtgagttattacatgatggtgggtaataaattgtgtgagtgttagatgctatgttgtacttgagatgtgttgttttaaacatgtgattaatgtgaaggtgtggaatgtgatcttgtgattaaaaccttgagacaagtgatgttacaaaatgagtagtanaatgatgcgaattgtgatactaagttgagcttggtatacttatatatgtagctttatttatctctaccttgttaggaatgtgataattcacttcctatgtattgtttgtgtttggatctcgtgatgatctc

SEQ ID NO: 67886 - DNA, 360 bp, Glycine max
  unsure (1)..(360): unsure at all n locations
cgcttctgngtcacttggattatntcttngggctaataattatatatcttcctaacagatctatcaatgactcaaagcatgtatgtgcgtgatttgcttcataagactcagatggctgaggcacaatctatctccactcctatggttacaaactgcaaatatctaaacatgggctgatttatctatgatccaaccctttagatcatgggtgcctgcagatgctatcctacagaccaaaacaacttgctgtaataaggttgcactatatgctaacccttgattctccttgctgtggtaaaagatgtgaatatctaaagtcactgttcatgtttcttttcacatctctgttcaaaccatgcc

SEQ ID NO: 67887 - DNA, 349 bp, Glycine max
  unsure (1)..(349): unsure at all n locations
atctggttccctaactgtactgnnnncggttgcccgggctctatcctctatggttntctggaagtttaacatgacctccgagatggaagccatttgatcttttatgggccgatgatcggccttcatctgtttctgcacccactcttaatatacatttttctggatcgagtgttataagggtgccttggtgttttcttnntatgatgaaattcctaaagaaataaacaacggtgagtatgccnncccaacatgagtatgcaaatggatgatcggagtactatgatccaccccaaggtttntagataatgtaatgagtccagaacttctattttatataaagaacaaagct

SEQ ID NO: 67888 - DNA, 345 bp, Glycine max
  unsure (1)..(345): unsure at all n locations
agcttatgcgcatacttctgtgcgagcgttatcttttcaagacattcttataactaagaaaaatgcacccatatacgatcaaggcaatttcgttacctagaatatntatatgtacttccaaggtgtatttgctacctacaccacatgcatttccttggtaaatttacatgcatactcanagcattctggctaccaaaaattgcacacgtgcacattctggtatntctaatacctatacatatacaaactttgtgatgaatcttggctatctacacaataaggtgctacaattcatgcctttttcaagtgtttttactacctanagccgcatgcaaattcatgtat

SEQ ID NO: 67889 - DNA, 266 bp, Glycine max
tttttctagcaacttgagatctaacagaaacactaggtaagctaccaacttagtagtctataggtctgatgcaatcctacaccgcaagggcattggatagaaaactccaagtggattgtgccaagatgctatatatagccctatggttcctatgagccttatgagttatttacggcccatggtcttaatacgagcccacttatctatgcaaatattagactaatgattcatttattttgggccatgtatctatggctccataatgt

SEQ ID NO: 67890 - DNA, 289 bp, Glycine max
  unsure (1)..(289): unsure at all n locations
agcttcaagaagattttgatgatgccaatagtcatgtatatccaagaccaactcaagaagattttgatttcaagatagattngtcttcatggataattcaagtaaacattaagcaatccaagatattcaagtatgattgactagatagattcttatgttagatttataagttagatttgaagcacaaagaattggccaagttacttttctttcaaacaaatgattttaaagtttcatctctggtaatcgattaccaaagattgtaatcgattaccagaagtacacaagc

SEQ ID NO: 67891 - DNA, 372 bp, Glycine max
  unsure (1)..(372): unsure at all n locations
tcgcncaggcgagcagggttgcttccttagtttcatcagccttctggatgaatcttctggagggcccaagtgggcctgtttgctatttgcacccccattattaccatatacacccgctgccttttattggtgactctttttttccgatagatacggaaacttacgaatttcgtaacgatacttattntattttcgtaatgttacggaacgttgcggattacataatcatctccttttatgacttacggaatgttacggaacctcactaattgtgcaacgatgctttcattttgattccggtgtggtccggatccttacggattgtgctcaatattttctgttattttccggcgtgtcccgatatttacaaat

SEQ ID NO: 67892 - DNA, 459 bp, Glycine max
  unsure (1)..(459): unsure at all n locations
atccttagagtcacctgcngctgcagcttacacctncacacgatgtttcaangtctattgtttggcataaaatgagggtatatatttctttattaagtgttatattcattcactgaatgactgtaatgatatccacgacctctgtaagccatgacatataataggcatagaaattatttaaagtaaaataaataaacacttaactcacagctaatattaaatgggaattagtacatttaaaaatatattagaattatacaatataacttacacttgggtaaatgttcaataatagatggatacgcaattnttgttcctaacatgagaatactntctatntaagctcacttccgcccataataggttttgtgcataagacagtataatagttatctcttctctatcaaaccgatacttaaagatatnngtgacaccgatgtatattaaaaaatggtatat

SEQ ID NO: 67893 - DNA, 407 bp, Glycine max
cgcgtgccggtgggtgatgacgttttctcatctaccctctgtactacactatgcggtctctttctgtattagactattaggtggagtttgactcttataattaagtatgtttctacagtacttgttgtaaaaatgttgttaccttatctctgttacatcatttatcacacttctttgtgtatttctctggtttcgcccactttctacaactacagtactacgtgtgcacctatattatctataacctaataatatatagcattaacatttttgtctacatgatatcacttattagtttatattgttgttatctcttgtccgttctcgtgattgagatgagctctagtatacaagggcgtagaataaaaggatagagtttaaactccctcttcctttatgtattccat

SEQ ID NO: 67894 - DNA, 471 bp, Glycine max
  unsure (1)..(471): unsure at all n locations
atccttagagtcacctgccgcatgcaagctatgctgcaatattacaatagacctcctctatctcagcagcaaaatcaaccacagcagagcaattatgacctttccagcaacagatacaaccctggatggaggaatcaccctaacctcagatggtccagccctcagcaacaacaacagcagcctgctccttccttccaaaatgctgctggcccaagcagaccatacattcctccaccaatccaacaacagcaacaaccccagatacgccaacagttgaggcccctcacaaccttcctcgaagaactnggaggcatatgatatgcnaacatgcagttcacaagagaccgagccccatcagagctaaccatcagagggacattactcccaattgaacacacagtccagaatctgacagctgcttctcagctgccaaaatccaatatgtcatgcctttcattgggtcggaagtat

SEQ ID NO: 67895 - DNA, 383 bp, Glycine max
tgcagctttctctttgggagaatcgtcgtatttttatgctatagcgcgcgaaaaaatatgacaacttgatgaatattatcaaacattagtcaattgaattcattggacatattactataactcgttattaactcaaattttttataattattagatccacgacctgatagctatacctttcgatgagcatttgttaacaagatcccctacttcttttgcataaggaaagtgcacgtatacattatgaggtcaagttcttgatagagctcttcttggtgaaaacggaaagttatgctggtttatacaaatcaatgtggtgatttatcttctaaaacttacaggtaattgaagaacccacatactttgatctgagcaatactaaa

SEQ ID NO: 67896 - DNA, 379 bp, Glycine max
  unsure (1)..(379): unsure at all n locations
agcttgtgcannatannatcagcttcctacatttcattctcttagcatgcatntnntctttcttnnntacccactcnnctcacgtntgtgttnntttagggggaaaaaacactcattatactaaacgccgccgcaaggggaatctcctatcgcaccagaatccaaatctagaaacgatggtgtgatcaagaaggagacgcantgaacagatganagccgacatgtcggctctgaaagaacanatggcctccatgatggaggccatgttaagtatgaagcagctcatagagaagaacgccgccaccgccgtcgctgtcagttcggctgccgaagcaaacccgactctcttggcaactacgcaccattctccctcaaacat

SEQ ID NO: 67897 - DNA, 286 bp, Glycine max
tttagaatgagaaatcccagattgaaaatgtccgtttgattctccgctttattgtactaaaagatgctggtttcattattatataatttgatacctctatttttgatttccaacgtgggtactgttgacgaacggtcggaattcattcttaccgaatgttacagattatacaattcaaacgttcgctggaaatttattctattattaggttaagcgagaaatgacttatgtcaaatggcttaagcacgtcacgagggggataaaaagtatatgatatgagaataat

SEQ ID NO: 67898 - DNA, 371 bp, Glycine max
  unsure (1)..(371): unsure at all n locations
agctntcacaatatccaataaattcaattccatgtgtcatgaaactaccctaaactaagaaaaacagagtggaggtagaaaactcaacacanaactcattcaaatcccacagtttttcctactcgcatacctcagtaacattctcttcgttccgattcgttaaccatgggatcgccttgaaactttaattgagggttcctgatatagaaatctaagttcgaccgttgggatcagctataaaatatctataacacgagatgtactacgtttcctgtgactagcactgcacaaccatttntcttgcataatggtaaaattggctgcacaaattgacagcttttgctgataatttggcagatntcgaattctag

SEQ ID NO: 67899 - DNA, 483 bp, Glycine max
  unsure (1)..(483): unsure at all n locations
atggaagctccaatatctcccacactttntggttgggcaattctaggatggcctagattntctcaaggtccacttggaccccatttcaaccaactacaaaacctaagaaaactatattatctacacaaaaggtacacttctctatattttcataaagggtatttttcctaaagactgaaagaactttgttgagatgtcctaagtgatcatctaagctcctactgtacactaaaatatcatcaaaataaacaactacaaatctacctatgacatcccttaatacatgatgcataagcctcataaaggtgcttggtgtattattgacaccaaaaggcatcactatccattcatacaaaccaaacttggtcttgaaagcggttntccactcatcacccttnttcatccttgattggtggaaccacttttaagatcatattttaatagatattggaccatgcaactcatcaagcanatcatcaagtc

SEQ ID NO: 67900 - DNA, 351 bp, Glycine max
  unsure (1)..(351): unsure at all n locations
gatgacgccntatgcccaagtgatggattgaagacttcacgatcaagcatcaagaatccaatccaagattcaagattcaagagaagaaatgaagaagcatcatatcaagacttcataaaggataagtattaaaagaattttcaaaaaccaaatagcacaagtttgtttacaaaataatnntctcaaattttctaagtactagagtgattactctctggaatcaattaccagttatcagtaatcgattaccagtgactaagtttgtttcaaaatgtntcaaatggtttgaacgttccaaatgaatttcnacagtgtatcgatacatatattagaatcgatacaagtgatatg

SEQ ID NO: 67901 - DNA, 402 bp, Glycine max
gcttaatggaggaaatatagagagatcattttagaggtgggagcatgataatgaaggatgaaaaggtggagaaaagttgaactttgagttgtgtctcacaagactctcattcatcaaagttacaacaagtgttacacatgcttctatgtatagactaggtatcttccttgagaagctagagcttagctacacacacccttctaataactaagctcacctccttgaaaagcttactagagaagattcctaaagaagctagagcttaactacacacacctctctaatagctaagctcacctccttgagatgaaaagctagagcgtagcttcacaccccctataatagctaagctcaccccattccaataatacatgaaaaatagccctactacatagactactc

SEQ ID NO: 67902 - DNA, 409 bp, Glycine max
  unsure (1)..(409): unsure at all n locations
gcttgtacgcctaggatcttcttcatcaatggatttctttgcttcttggaagatgaatggcagcggaatggatataagaagagagagaggagacgccacttcaaggacaagatgagtctagaagaagctcaccaccataggaggccatggataagagcttggaggaagaaggagatgaatgaagggagaggaagagaagagcacgatattttgtgctctaaattgagcttgaaatctgaagtttaatattcaaatgatncaaagtgaaaaaaatgcacacacatgacctctatttatagcctaagtgtcacacaaaatgtggagggaagatttgaatttcattcanattgcacttgaatttgaaattgaattgtggtgcaaacttggagccaaaattcactattatgat

SEQ ID NO: 67903 - DNA, 310 bp, Glycine max
aagtgtagaaaggtgatactttctgctttatttttttccacagagtggtacctggagatatgtcacggtggttatgagaccttggggacgtcttgtggtgtgctattgcccataacctagcttgtccaatcccgacccaacccgggcatagtcagttattgataacctgtgatgtacctaaacaggcgatctcctatcagtctacagattttaggatcatagaccacaaatctaagaggcttgtgttgtggctggccagctgtgaatctcgcgtgatatattggttgtggcctctggttatcgattacca

SEQ ID NO: 67904 - DNA, 275 bp, Glycine max
  unsure (1)..(275): unsure at all n locations
tcactcggattgccgagtcatgtgcataacatatcgagacgctcaaattgaacaactgatgctctcgagaaattcaaatggtcataagtattcacatggatatccgattctgtgttataatatatcgagacggtcgaaattgaacaacgactcgagaaattcagatggtcataacttttcactcggatgttcgattcaggcgcataacatattgagacactcggaattgaacaatggaagctctcgagaaatacaatggtcataactnttcactc

SEQ ID NO: 67905 - DNA, 379 bp, Glycine max
  unsure (1)..(379): unsure at all n locations
actccatcattaggatgagttcctgtcatctcaaacaaacaaatcaaacgtaacaagacaatnatagttgctgttagattacctcacccactcaagtgtatcacacaattatggcttttctctaatgaaacactcttagcctttaccactctaattccccttgagttcttatgcaattcaagagattatggccacaacaaagaacaattcaccaatatgtgtaaggtaaggctagacaaggaaaaggttaaccaagataaatgctaacaatgtgtttaggcacaaatgaaggaaataaaattcagaatttatgaattcaagtaacaatccttcatgcgaccaatatattaccttatagaggttnttttttaagttcttc

SEQ ID NO: 67906 - DNA, 312 bp, Glycine max
  unsure (1)..(312): unsure at all n locations
tgcagctgangatatggagaccatcacatggtactatgggcgcggcgatgggcacaacaagttntccacatcccaatgccgcataaacccacatcccttgtgccaccttcgactgagctcaccgacctcacacgtagcccatatgctcgtttctcttaacacgcgggtgcacatcaatccttgcgagcttgcacaatatccaaagcaaacaacattcacacagcacaagctatcacaggcaagcagaacagagcagaggcagataactctgtcataacaccaacctaaaatcacagcttttcccactcaaag

SEQ ID NO: 67907 - DNA, 502 bp, Glycine max
  unsure (1)..(502): unsure at all n locations
ataacggagaacacatgaacagtgctgggcaatgtcattcatggtgctccgaacaaaggtggagtatggaggattgccttgagggtccgcacttatgcaatcgtgatactcatctcctaactcgaaagtggaggacacatgaacaaccctaaacaataacattcatgtgactccggaacaggatgagaatggaggattgccttgagggtcctctcttatgaaatcatggaacacaactccaaactcgaaaatggaggtcacatgaacagccctaagcaataacattcatgtggctccggaacaggatgagaatggaggatngccttgagggtcctctcttatgcaatcatggaacacagctccaaactcgataatggatgacacatgaatgacaacacaattcattcacgtggcttcggaacaggatgagaatggaggattgccttgagggtcctctcttatgcaatcatggtacacagctccatactcaaaagtggagaca

SEQ ID NO: 67908 - DNA, 325 bp, Glycine max
gaccgggcactatttcttgaagctcgacctctcccccggatgaaccatatatccaagagaaaccatgaaccagaatagaagagcttgccccacccatgagtaaatatatcgaagtagcctcattagaccgtacatcttttctgggatatccagatagtagataggaacagtaactgaaacattctagagctacaaagatagttattatatcgttagcgccgcataaaaacattcctcctagagtagctgtgtatatgaataacagatactctggtatagccattattgtcattcaatgtactctacggatagaggaatacataga

SEQ ID NO: 67909 - DNA, 306 bp, Glycine max
  unsure (1)..(306): unsure at all n locations
agcttcncgtcccgagagcagtctgttatatattcttttcagcctntgctntcatgtagctgaagagaaacgtcatttcttcttctttctttcttccaaagccatttataaagttccaagaactttcttcatcacccacagccaccattagccaccacaaaccatcattgttctccattgaaaacccacaccgagaggaaccctctaaccgaagcggaatctttcaacttggcttgcggttccggtagagaacgaanaccctaatctgaccattcgttntctttcgagggaaccatggctctatgc

SEQ ID NO: 67910 - DNA, 368 bp, Glycine max
tgcaagcttctgacagaagacaaagaagaagattcttttattgtcggcgagcgctggaggcagtttaaatctgacttgactaggaaatggtcacttacagccgactaggacggtgcgaacgacattgtctgtgaaaaatatggcattagcaaggagaaatggacctcagtttgtcagacctcgagagacccctcatgggaggtatgtatcttgtcattttagttgattccacaaaaaatcacttctataatttaagtgaaatcattctcttcaatgttagattagcagatgtgcggatactggaccgcctcccaaaacaaacactgccccacgtttgctcgtggggtatgaatattaaacaaagttat

SEQ ID NO: 67911 - DNA, 394 bp, Glycine max
  unsure (1)..(394): unsure at all n locations
cccatcacatgtggtactaggtggctttctggcgaatgtgcacaacaagttgtgcacatgcacnaatatggcatatacccaccattctctgtatcccacacgctactgagctcacgtactcccacgataccgatatcctagtttatctcatcatcgggtgcccatcaatcctctcaagcttgcccaacatccatgtagatcaacattcatacagcacatactatcacaagccagataacagggctaaggctgaaactctgcccaatacaccgaccaaaatcacagatttgtctcactttatggccccagtaacaattgcttcgttgcaggtcgtaaaccggtgatcgactcgagaatttactggaagtctctagtcataagcctactttttacc

SEQ ID NO: 67912 - DNA, 285 bp, Glycine max
agcttttctcctagggtgtacaagcgttggatagtatatagagggattggagcctccatttcactgtctctatgtgatggacatttctctaaccaaagacattatttcataaatcccaatggtgaggatgtgagaaaatgaattccaaagttcggtggtcataattttatgatgatccatctgttaacaaggttgtgattgatttatattgacacagactgtggtgtttgtgagataaagatagctatgtgcgagggacatctccctcaccatagacattatttt

SEQ ID NO: 67913 - DNA, 427 bp, Glycine max
cttgactattgatagcattcttcaagttcacaaaaattcattatttgaaatttggcgaatagattgtacataagattcatgatcaacacatgtatgaaccacacatacatacatgtaagggtaatttacaaaacatgcatactaaaacaagatataacttataaatgtatacatgatccactatcatcacatattgaacataacatatagaaattatacataaagaataagtcttagaattttcataatagagcatctcatgattaatataagctcatgaaccatatcatatagattcaaccatcatacaccatcgtcatcatcagacatcagagcattccatgaatcatcatgtaacactatcataaaatcatagattatttatgcacattgtttattattatgttatgtcatattgactctttac

SEQ ID NO: 67914 - DNA, 353 bp, Glycine max
  unsure (1)..(353): unsure at all n locations
atgtttgaatgagttaattatatcccanntttgtttangggttttgtgatgatgttggtgatgnttacatgctgaaattgctgatnggaaatctgtagagacgaagggtagaactaacctaaggttagaaagtgagaatgtgatgttatgagtggaaaaagagtgagactttgagaagtggaaggctaaatctgaattctgtggtaaatggggggttaaagtgagttaatactagcttgatatgtcgtttatgacatgtgagatggttangctgagctanagagaaaactaatgaccatagtgaccaagagccatttctagggcataattgtgtggtgaaagtcaaatcttga

SEQ ID NO: 67915 - DNA, 424 bp, Glycine max
  unsure (1)..(424): unsure at all n locations
acccggcgtcgagaggaacgagtattatgtctacgtgggagtacgtgagctcagttggaggtgggcaacaagggatggtgggcttatatgtggagaattgtgttgcaccatcgcccgaccgccacctagtaccacatgtgatgggtaccccattatcctacaagcttgatatgaggaaatgtggataggtgagacttcctacttntattcgttgaccacagagtggtacctgtagatatttcttgggagtcaggagaccttggtgacgtcatgtgtggtgcttttgcccaaaaccaagcttgacctatcccgaccctaccacggcatatgcagttagtgataacctgtgatgtacctaatcatgcgatctcctggcagtcatcagataatatgatcatataccacctagcatggaggcttgtgt

SEQ ID NO: 67916 - DNA, 407 bp, Glycine max
  unsure (1)..(407): unsure at all n locations
atgcaagctttctgctgnacctatggagtgcgacgcactgtggattcattggctcnanctggactacacanggtctgatattcatgaaagtgaattaccaccgtacaagggaacaaatnttacaggaccatgatcactgtggtccacagaatgctatcatattgagtttagcacgttttgtgtcctcaagtgtaaaaaaaaactttgaataatttattatttttttggtgatcatcaaatccaaagtcctttttaaaaatattttttaaaaataaatggtcactaaaaaaaagttactttatctaactttgtaaaataacgaagattattaataattgttaaagaaccgatgataaaatataaaaccctgtttcttgaggagaaaacaatactaaaatatttttata

SEQ ID NO: 67917 - DNA, 318 bp, Glycine max
ctatccagtagtgatgacaatagaatctataccttcacctcatcctcaaatttaatctgcactgactccaactgggcacgagtagtattaaattcattaataagatcatgttacagagataccttctcccatcttgatgttgaacaaccgatgcttcaagtatactttggtggctgccgacgacttcttgttcatatctgataatgccttcattaagcctgcaatagtcgtctcggtgatgatgttgaacgcgatgttctcggctaatgtcaatctgatcacgccgagagtgcttcgatctagcaagttccattcttc

SEQ ID NO: 67918 - DNA, 260 bp, Glycine max
  unsure (1)..(260): unsure at all n locations
agctntgaacanaggaagtggcatcatgctatantattgaaacaataccacaaaacgcctgcattaccttcacttacccttgtctcaatatggtgtggtattgaccatcactcaaaatgactctttattcatcctncgattcacaggatgacaagatgcgaatgcatgcaagcttatgattggattttaagtgcaacaatcaaataggtgttatcgtgttcaatttacttaaacacttactgcaccccgttgatcgacca

SEQ ID NO: 67919 - DNA, 365 bp, Glycine max
  unsure (1)..(365): unsure at all n locations
ccttataaactcagcttgatcacgctttattatcaaatccatccttctccattaatgagctactggagacgggtagatgagacagacccaactacatgaatccactccctatctaatagcaagttaaaattagccttagactgtgtcaccaggaatagagtaggtcgatctatgctgcctacatcaacatctactagaatggctcccaaagaatagccagttgtaccctcattattcgaaagcacaatgttgtgaacagatagatcagtgtcatgtttcccgatcttatagagcataaatcgaggcatttaattgacaaccgctcctccatcaatgaacactctgntgattacaacattctcaac

SEQ ID NO: 67920 - DNA, 391 bp, Glycine max
  unsure (1)..(391): unsure at all n locations
agcttgtctcagcgtttatgcgagacagataccattatgttagctatcatcgccaagtaccaagaagagttatgtctagccacggcccacgagcatagaatcgcggatgagtatgcccaagtatacgcggaataagaggctagaggaagggtgatcgactctttacaccaagaggcaaccatgtggatggatcggtttgctcttaccttgaacgggagtcaagaacttccccgattgttagccaaggccaaggcgatggcagacacctactccgcccncgaagagaatcatgggcttctcggctatggtcagcatatgatagacttaatggcccacataattagaaatcgttaggagacttgtatggtctctcagaccttgacttgatatg

SEQ ID NO: 67921 - DNA, 414 bp, Glycine max
  unsure (1)..(414): unsure at all n locations
cgcatttgtagatacattaacggagttatatctagtcattatctattgtaactccaacactagtcgttcatgtagtaatagatcgtgcatataaccttgntacaaacaatggtgaaatatacaaaaccatggtcatggtatgttgtggaattcttagtaataagataagagagaattatatcaataccaactaaagaattgaatgatattgttctatctcttctcaccatgcctataaatagagaatattcagtcacttatttttcatcaacaaacataagaactagtttgcacttgtttcatagaattaggaaaaatggattccaaggctctgctcgttttgttatgctcttggcttttgtcctcactctttaagcagaagttgcatccaaagatgtatatatgatacttgat

SEQ ID NO: 67922 - DNA, 360 bp, Glycine max
  unsure (1)..(360): unsure at all n locations
tcgagctttacgaaactttttgacaaggtttcggtacgaagagtcttcgaaaaaattactgaagaataacttcttccatatgtaacagatctacacannanaacggtaaaatgcgtacctccggcgaaataaaaacaacaataacaacagcaaccgccaatanttaaccttcaccgaatgactacctcgaaaaaacttgtaanaaccacccagaatggcacanactanacgacagtgaaagaaagatagtgtaaaacttgtaaatattacacaggcgtcgtanattaaagaaaacgagacgangaaaaaatggattttatanaatgtgggtgcaccacatgttgtggtgcacctacactc

SEQ ID NO: 67923 - DNA, 478 bp, Glycine max
atgcagaaggaaacaaactatgagctacaggattctttattgccttgtaaggcgagtcatccaataacaatgtgtttgactcattatactctcacttctcccatggtagatcaggttctggcctttcccacaactttcttatttccttcaacacaagtggcttgtctatactctcaacagtactaaaccttggtttagtacagtgggactgattctacatatagcattatacagagattaatagtgtctaaattaattccaagcagtaatgaattgattacagaatacatctgcaagttgtaactgcatctataatgatgaaacaacaaattactttactataatgcaattatgatttacaaccatcatccattgccatttgtccaactgaatccatcccagccaccaccccatgccataccacaattcagcaatgacactagaatacaggctgttctgttggtgttgataataaaaa

SEQ ID NO: 67924 - DNA, 305 bp, Glycine max
  unsure (1)..(305): unsure at all n locations
tcttaatcacctgcggctgcagctacncattctgtttagggttatatgatgatgtttgtgatgtttgtgtgttgaaattgctgatgganaaactgatagagatgaagggtagagttaacctanggttgaaaagtgagaatgtagtgatatgagtggaaaagtgtgatgctttganggttngaaaagctaaatctggatttagtggtaattggagattaaagtgagttaatcctagtttgaaatgtcatttangacttatgggaaagcttgngctgagcaaatgangaaaatgagtgaccaaagtg

SEQ ID NO: 67925 - DNA, 483 bp, Glycine max
  unsure (1)..(483): unsure at all n locations
tctatgtatccataacccctcatttaatggattntctaggtttgagaagtgaaattgagaatgggacaaatntgaagcaaactctcacctcacacaagtttataacatcaatttaaacttgttcaaactggatttacgcctaatatttcactgaatcaaaatttgactcctcaacacccaatttaccctagaaatggctctttgttcactctggtcatttgtttttctctctagctcagcctaacctttctcacatgttctaaatggcatttcaagctaggattaactcattttaacctccatttaccacaggatccagatttaaccttccaactctcatagcctcactctgtgtccactcataacaccacattctcactttctaaccctatgttaactctacccttcatctctaacagntgtccataagcaatntcagcacataaacatcacaagcatcatcatatatacccctatacataa

SEQ ID NO: 67926 - DNA, 411 bp, Glycine max
  unsure (1)..(411): unsure at all n locations
gcttcgagaaagtgtaaagaatgataatggcgaatgctatacccgcatgggtcgtggcaatatagagggcaaagtgcacctagggatcgttggaaaatgtntttttccatctgggttagcattggatggcggataccgcggcgagtagggggagggggagggccaacttgggatggaggggcggaggaatggtggtcagagaaggctgattcaaacatgttctgtcatactgtggtggcaaaggatgggtcanagtatggaaaaagtccacgatgatggggtgagattcatttaacatgttgttgaaataagagagaatagaagataatatcgtttctgtctgagtgttcaatatgactgctgaaagagagaagagagagagatataaattgtttttgtggatgtctatta

SEQ ID NO: 67927 - DNA, 482 bp, Glycine max
  unsure (1)..(482): unsure at all n locations
agctcatgcctctctttctctctctctcatacaagccttatntaagattatacttgctntactttcctcactcatattcttacttgagtgtcggagtcctttctttagcaagtctcccctcttgtcaaaggcacatttccaggatgacgtgtgaagtttgggaccccactcaactgcgtccatcctaacatgtcacgtttccaaaatttggtaagaacaataataaatagttaaataataacaattcatacatatatttcacataccgatcattatttattntaaaaaatattttagaattaataatatttaaaaagttaaaatagaaatagtaattcaaacctatggactacccatggtgttaggtttagtggaaaactagtcccccacaacatactgaacatagcaaggggggatatatgtgttgagggtgagcaaatacacccctcattttatataaaatacatgtacttatctttaaa

SEQ ID NO: 67928 - DNA, 425 bp, Glycine max
  unsure (1)..(425): unsure at all n locations
ctgtcacaacctacccttcggcgggagggagacgcatgactcgcgggtgcgtgttccaagaaagatatacgcgcggagtcgccaccaacgttcatttaaggaaaatgtcggaaaaacctgancagacgtgatctacaaactctaagtgacaggtcttggagtatatctaccctcgtggaaggtattatcaccccacgcatccggcacaagagaccgtaaccttatatcaaatgtgcaaatatgactctcaattatattcttttcctttttacgcgcctatgtctctttattacttatatgatttatcttttggggcgacaaggcgttccttgctctactatcctcaatggatagaaatagactactagtctttgtgacaacgttttgtattttatctttttcagaatgtttgtgatgaaggcatt

SEQ ID NO: 67929 - DNA, 470 bp, Glycine max
  unsure (1)..(470): unsure at all n locations
cctctttggctagctgtctctccatgggtcctggcctttgttcttcctttccgagatatttttccttatgtctgctcgtgtaagtttatagcctaacccaaacttcccgcggttccctctggtgcttaccatgttggtcctgctgccgttgttcttgcccaaacccatcccgggctcgtatccgtgcctcagcataacctgggccaccatcaccgccgcatcagacaggcgaggctgccaagagagggaatctacggaggcgatgcttaccacttcaaaagattggatagccctttccaacgactcctccgctgcttccacgtatggcatagaggaaaggaaacttactaggatgtcttcctcacctgatactatgaccaaatgtncttccactacaatacttatcttttggtggagtgtggagggaacgatctccactgtgtgaatcacggacgccccataagacagct

SEQ ID NO: 67930 - DNA, 504 bp, Glycine max
  unsure (1)..(504): unsure at all n locations
ctgcagctaacaacttggttaagatgaatatanaaatcttaattattaatttaagnntttggtatgtcgatcatatgtatggaagggaattcacttactccaagagtaagtttaagaagttactctcattttgaaccccttattttaactttaaccgatagttcagattatatccctaaagatcacatgtgacctctcttcccaatatacactaatgctctatcttattcttgccagttcttcaccaccgaatagtatatagcattaagggtgatgccaaaatgagaaaagaataagagaagtccaattgctcgatgacacctggtaaatatggtccttgcacttggactcaaactacaagttatggttggaattgacaagaatatatgccggagatgaatctgataggaatagtcgaacacaatggaagctattaatntcatatccaanaagtgaaaatagtcatgaatcgacattttggttctataaacatgcattcatgtg

SEQ ID NO: 67931 - DNA, 489 bp, Glycine max
  unsure (1)..(489): unsure at all n locations
tcctccctaggaagggaccaatcactagaaccagttatcttatgctccaagaagatggggctagagctgctgaagaaggccctanggttctcatgaaattcagggtagatttctgagcccatgagccaagggtgagtccaattatctttgtacatattagactaggatgtcattatatttggtccttatatttagggcttcatattgtatgtaaggtaccctagaaatatatgattttttcagcccttgtcttttatggcacctatactagtttttgtattaagggtagctttgtcacttacatgcactaagtggatattcgatgagtgtggcctgaaataaactcaattgaattagtagaagcccaatccaattaaattntatagggggacgtgagcatttgcttactacacctcagtgtcccatcatatagtcacactctgtgcatgtncttgattgctttcatgcctcataacaccttatcacact

SEQ ID NO: 67932 - DNA, 420 bp, Glycine max
  unsure (1)..(420): unsure at all n locations
agctatagatcccatgatagtagctctaacagcatttagctcttccatattaagctatttatgactaatgtaagaatcgccttttgtggatacccttcggacataggatnntgtgctgagttgcttacaatttggaacaccattgtcatgacgttattctcttagaagtatcttgtgttggtgaagcataaaaatataagtgaaatctatttagtattttcattttctgatgcttctttcttgtaactgcaaaataataacactcacataanattttaagtgtaaaattcaactactatcctgaanagggcttaaaagccattttaagggggaaaattaagtaatattatgaatcttcttgtcttggtgaagatgaaagctaaacctggccatagcanggtctaatcctctgttgaagct

SEQ ID NO: 67933 - DNA, 455 bp, Glycine max
  unsure (1)..(455): unsure at all n locations
tgaaacttaattcaccctcctcttatgttataaggccacttgtccaacacataggtcaacttctctccctaatctccttcaattcccacgcccccctctctctcattctcttcctcaattgaagcttcctctctaagcttcttatccaagacactcttggtggtgaagcttctccttccatggcttattctctagtggatggctcctcctctcacctcttctcctttatcttccgctgcaactccatggctgaaaatcaccattgaaagaccttatcaaagctcaaagatccagtctccatagaagtttcgcaagcaagcttccatcaagtgataattacttctcttgttgaacaagataacaagtgtaatgaccttgttnggctaaataattatgctatatcatctgaanatttcccgctgaagaattgtattgtggacatacattttatgaat

SEQ ID NO: 67934 - DNA, 411 bp, Glycine max
  unsure (1)..(411): unsure at all n locations
tcacctgcggcatgcaagctngtgatgtatgcatctgatcagacacactctgttttactaaaagcttgccaggtacctccaatgacacataatattganaataacattatcatatatactcaatgacatggatttccctagtgcaccttctcactgtcaacgatactcttgaccattgttaactnttggtgacacgtgaaccatgccttctgacctaatttatatactcgacaattgtgaaacttttctttatattctcggatgagggtagtgttgagatccatattggtagagaatgccaatatatccttataagctagagtagcctcttcttacaagtcagtttgtagccaaatctaagggggactttactcttattttctattatcttgatctgactaataatattta

SEQ ID NO: 67935 - DNA, 426 bp, Glycine max
atgttgcctgatcatgatggtcatctatgtgttttggaactagtggtaagagatcatttgtatatattatatgctcaatgcagatataagtaaaattacactggtgtatgtggttcaattagtaaaattatgctttctagcgtgtgtgagtgcatcatatcccgcaccgtgcgtaaagatatttttcaccatcaaccggttgatttgatgcactcaacgttatgttagcacacaagattatatgaccgcaactccttgggtcgtgtatcctttgagccgcgaagccagcacatgtacatattctaatctcaaataaaacataatttatccctcacactgtgaaagatatgtggacccttatgttctttacactcacacatcacaccagaatgtgtgcggtatgagattttgccaactctgagcata

SEQ ID NO: 67936 - DNA, 72 bp, Glycine max
  unsure (1)..(72): unsure at all n locations
tatgactcagtctcatgggtttttttggattatatgctgcanagaatgggtttctgccacatatggagacac

SEQ ID NO: 67937 - DNA, 448 bp, Glycine max
  unsure (1)..(448): unsure at all n locations
attaatactcagcttgtaggatatggggtacncatcacatgtggtactaggtggctgtctgtcgatggtgcacaacaagttttccacgtccacaatgcgcgcataaacccaccatcctctgttgcccacctccaactgagctcacgtactcccacgtagcccatatgctcgtttctctcaacaccgggtccccatcaatcctcccaagcttccacaacatccaagataaacaacattcaaacagcacaagctatcacagccaagcataacagagcagaggcagaatactctgtcaaaacaccaaccaaatcacagcttttctcacttaaagaccccagtaacaattccttcgatccaattcgttaaccggtggatcgactccaaaattttactggaagtctatagtacataagcctacattttgaccggtgggatctactagcaaaca

SEQ ID NO: 67938 - DNA, 323 bp, Glycine max
  unsure (1)..(323): unsure at all n locations
agcttatgcgcatatttccttacgaacgttatcttgtcaagacattctattaactaagaaaaatgcacccatatacaatcaaggcaccttcgttacctagattatttatatgtacttccaaggtgtatttgctacctacatcacatgcacttccttggctaaatntacatacatgcatactcaaagcatttggggtaccaaaaattgcacatgtggacattccggtatntctaatatttatgcatatacaaacttcatgatgaatcttgactatctacacaataatgtgctacatttcatgctcttttcaagtttttgctacc

SEQ ID NO: 67939 - DNA, 467 bp, Glycine max
  unsure (1)..(467): unsure at all n locations
agcactatggtgtactagctcttgtattctatactgcttgcaaaaagtctctctgccctaattctgcataagataggctataaatatgctttgaattcatgacgtggcgcttatcgcctccctcgcgcttatcgcgagaatgtggatttgggcttggcgtcagtcttgcgctgagcctggcaagatacaaatgtctcgcttatcgagctgatctcgcgcttaatgcgcaaccatgttccttgtgctcttctatattcccttgcatgctaagcacgctgaatctgcacttatcggtggatgcacgctatcccaaatggttcgcttaatggactactnctctagcacttaagatttagcctctttgacctgaattgacagattcttcataattcaatggaaatatgttgatacgcttaacaataaacagattattacaaatctacaattactataattgggaacttaca

SEQ ID NO: 67940 - DNA, 466 bp, Glycine max
  unsure (1)..(466): unsure at all n locations
agcttctntagaagcacttctaannaaaaataagtatataaaaagatgagatgagttnttgtataaacaaaaataagttntccataagttaattnttaaaagctcgcaaatatagtttctctaaaagatgagatgacatctacaaattagctaatgaaaaactcattntagctaatggagaaactcattnttttttcttattttcttcttctagaagtgcttctagagaagcttacttcttagttgaatcccaagtattttaaagatgaattttggcgggagagaccatngaggacatngccactaggtgagttactttcagctagaaagtgtggccttnttngttcaagtccaagatatccccgaatagtatccccttagaccaatatgtcgtgagcaagtgatttgtcttgagaagtggtgaatcttccttgcatttgatctacatgatttcacgtcactcttt

SEQ ID NO: 67941 - DNA, 511 bp, Glycine max
tttaatctcagctgtgccttaatagcttctttcgaattagctgaaatacttcatctcgggtagtcatcatggtatcaacaacatcaaggttagaggttccggtgatgtatgtcagaaaatagaatggctttcggccaaatgtgacctcatacggtgtggtgcctgttgctgaattccgagacgtattatgggagtactctgcccatgcaagatacttgccccaagtcgatggccggtggtgaacaaaggactgcaaatattgttcaattacacggtttatgaccttagtctggccatcactctgagggtgttaggctgaactcatcattaattgtgtcccatttagacgataaagctcctgccagaacttgctgacgaataacaggtctctgtcggagaccaaactcttgggtaccccatggatcttcacaattagcttcaagaatagatcaactacaatgagaatgacagtgctgccgtgataatgtgtgagcctgatgtagtcatcatt

SEQ ID NO: 67942 - DNA, 500 bp, Glycine max
  unsure (1)..(500): unsure at all n locations
ctgcagcttctcgggccattcctggagaacaacattatatgttagttntacaagataatgcttatcttaacgcataaaatgtcatgctaatccctccggtttagaacgaactcatgcgcacgtttaaagtaacacatttatgcacatgcgtatgtgtggaatatcctactatcaacatagaggccatccaacacattctaattgtcatacatatatgcatttgaaaagaacatacattctcacgcccaaggcattgtgtcaaaactcacacttaatttatatcctaaacacttgctatttacaaactacctacatatgnnttgaaatatatatcatacaaattttattggttcactcacatntattcatatnggcaagctatttacattatgcacacacttgcattcnaaagggaattccgtgctatcatacattcatttangaaaacantcattaacacttttgtaggaanttcattgctcttatatttatatatatat

SEQ ID NO: 67943 - DNA, 406 bp, Glycine max
  unsure (1)..(406): unsure at all n locations
ctctcctcacanaatctgatttcaggcttacatagatggcctggttatgctcgtgcgcttagcgcacttatggaccgtttagcacatgttagtgattnttggcttagcgcgcctttctcgcttagcggatgaactgaagcagtgcgcttagagagatgaagcagtgcgcttagcgaacctgtatagctcatcttcttccagactcttcctcgtgcttagcccatgagtgttgcacttagtagatgctcgctaagccagcagattggctgatcgagaaggtgaataacaacactttgcatagctggcctaattaacctgagattgagagaaaatgatattaaacacacaaaatggaaatacttagtatttattacctatacttatcagagaatacttataacattac

SEQ ID NO: 67944 - DNA, 393 bp, Glycine max
  unsure (1)..(393): unsure at all n locations
gcgcanagatgaattatactctgcagaacaagatattctcttgcaggcagttcanatcattaagaatcatggggttgctcttggcagcacatggcaagacacgtcttctaaatgatgtgctctgcttgatgacaantttggatngcanatattgtgagccttaggtngtgtttggttgtattttcattttctggtttcatttcctgaanatggtttcatttcaaaagatagaatttgacacatgttggtttgcttttgtttctgtttaagaataaaacctgaaattagaatatgacttctgcttttgattttaattgttaaatcatccttgctccatttatttatcaaacaatcactanacgaatttatgttcattctgtgttctgttctttt

SEQ ID NO: 67945 - DNA, 433 bp, Glycine max
  unsure (1)..(433): unsure at all n locations
tctgctgattnggttgggctcatatgcgttttctttttggtctgttgcaataatgaacttctgtccatttttgtcttcttaaagaatcaagaattgaaacacccaccgcccatgatattgtttacccaattaataatgctaatttcatggttgcttttattcctaaattttctgaccatttgcttatatctgaaatacttgtccaaaattatttctggtggaaaaattgttaattaatgtatatgaaagttaaaaataaattcagagatatgtggaaatataggatatagctggacttgatatttaatttaggaacaaaagggtattatcttatgaaacttgaaaacattaatgttagaattaaatatatggaattcagttgtaaaaaataaagagagaaaatgttgtagaaatgatattttattgagatgga

SEQ ID NO: 67946 - DNA, 332 bp, Glycine max
  unsure (1)..(332): unsure at all n locations
agcttgccacccagctcgcccaggtgacctcaactctctcatgcgagcagggttgcttcctccagaagcaacagccttctggaggaatcttctggagggtccaagtgggcctggttgctattttgcaccccattnttactaagtacaccccctgcctctttttggtgattctttnttcgtaaagttacggaaacttacgaatatcgtaacgatacttgttntctttccgtaatgttacggaaccttgcggattacataatcatccccttcttgacttacggaatgttacgaaacctcactaattgtgcaacgatgcttncatttgatttccg

SEQ ID NO: 67947 - DNA, 497 bp, Glycine max
  unsure (1)..(497): unsure at all n locations
acctcttaatctcagcttatgatgaatcaagattgattcanagatgtgttgatgataacttagttgatgacaaaggtgatgacaaaaagctcanaggtcaatcaaagaatgagttcaagatgttcaagatagaatcaagaacacttcaagattcaagaggaaagttgaagaacacttcaagattcaagaggaaagttgaattcaagaatcaagaatcaagattcaaggatcaagtttcaagaatcaagatcaagattcaagactcaagattcaagaatccaaagaagacttaatcaagataagtatgaaaaggttttttcaaaaactgagtagcacatggatttttctcataacatgtttaccaaagagnttttactctctgataatcgattaccagattgttgtaatcgattaccagtagcaaaatgaatttgaagatagtttcanatgaatntacaacattccaattgatttcaaaaaagctgtaatcgattaca

SEQ ID NO: 67948 - DNA, 473 bp, Glycine max
  unsure (1)..(473): unsure at all n locations
atgttgcatttcaatatcacttcctctaatggaagttctgttttctcttctagcatagnatatgtgtgtgattgttgtacaactattggcatcgtgtgccttcaacgttagcaggatgtttcttggtttcaccatcaactttgtcatatcagcaataattgacttctcatccttagtcaatcgcccagcgtatagatgttcaactaatgacttgggcaagtcatgattatgaatcccacaaatcaacttgaccatccaaccttgccttctaataattggtttcccataaagctataagggacaaccacattatcgactcccaatgtatctttaacaaatactttttgctatacttatactgccactccttcacaccaattacacaatgaacatcttctctactccatatgtgtgtagactatatttctacccaattattttatgcagctgacgaccattgctaaatatctatg

SEQ ID NO: 67949 - DNA, 301 bp, Glycine max
  unsure (1)..(301): unsure at all n locations
agcctagatattttactatttattaattaatgagatacaacctcaccaattgtattagagagaaacaatttgaaactacctttcaatgtgcgagtgcgtaaatattagtattcatggcagaactacnttggtttcacgatgcatcttcaataataattgtgggataataaaacaaaaacttattaatagttgaatgcttgtgaacaggacacttgcctgtgacatggatatcttttcgtattgaacaggtaaccttgggaatttgtgcttctactgacacttgatgacgtcaataaacatc

SEQ ID NO: 67950 - DNA, 398 bp, Glycine max
  unsure (1)..(398): unsure at all n locations
agatcagcatcaatgtccatcgntgttttttattatttattngaaccctcttttcttgcaatgctttaattgctgctgttgccaaattttcaaaagcctttgcaacctctatctccttttgagctgcaagtaatctactttccaaggtacttactccagccttggcttgctctgcttttgcctttactttctatagctcttcccgagctgcttgagcaancangntggcttgattagtctcttcagttgttagttgtagtttcttgggaagctcgatcattttctctttaacatctttctccttcatctgaactaaacctatttctgatctggtattttccaattcagcttccatagatgccactacaacggaggccattccttctctttgctaatgg

SEQ ID NO: 67951 - DNA, 364 bp, Glycine max
  unsure (1)..(364): unsure at all n locations
agcttgcagtcattataagagaatgagcatgcgatttgttgtatgactgannaatgtagtcaatttgtcatattgattgtgaaggaatgcattaaccgtatcccggtgagagtgtgatccttaatatttgagagaaacgactatcatttagtacttaatttagcgtgaatctctgaagtatggactgaatgcatganattgaggatgatgaanggccatgttgattgtgatagccacttagccanaaatctgaccacgtgcttgaatgaattatatcccttgcacctagtttgagctgaatgaattgttgatttgttgacccctgacctatacagtgttatcttctactaccttgtcttaagtt

SEQ ID NO: 67952 - DNA, 486 bp, Glycine max
  unsure (1)..(486): unsure at all n locations
ataagtggatgtcttcaataggttctgtcttgcaaagaaccaagaatttaagtttttaactctatgaacacttatccaattcatgtagctcttatttcatagtaatatgtatctgtattatgcctaggcatctaggaaatttagatttaactgtcttattgtattttgtgattttgtctagactcattcatgattangttaaataattntttgtcaccaccagcttttcaacaaggtgagaaaaaagaatctcacctgaagttcctttcccaatgatattcatttcattcagatggttagtggccacatacacttccgtaataggaactctgggaaatgtagttntccttaacatgtctccaaatgttgttgtaaaaataaataattcatgacacatgaccataataaccttaatctatgatactatctagcatgagnttaaaataattgtggacttaagaatttttttctttggagggctgatct

SEQ ID NO: 67953 - DNA, 339 bp, Glycine max
tgcagctttttgtcggattggtaaaaccttgttatatatttcggctaggtttcttcgtgcgagctcaaccgaatttgtatttcggccgacaccggcatcttgtcggccaggaaaacattagcccacctcggcaaataaacatgattcaccgattctgacagaaaaataaaatactagccttattcggcccggatagatgaccgatcgatgtctaaaaaagaagcatgaccggattacgccgatcgaacatttcctaatatgtattctccaagtattattcatggattgagtatataaacaatagccgacatcgggagttaaatatccgtgactgatatt

SEQ ID NO: 67954 - DNA, 438 bp, Glycine max
  unsure (1)..(438): unsure at all n locations
actcaagccctacagcagatnttagtaatgacccactaacctagaatttatttattttaatgccatgaacctagggaattaaaaaataacttaatggctgagtgtaactgatatcgtggcaaccaaaagtcacccccaacagccaacatgtcagccaccatttggtctcccaaaaagctgatgcctaagttgccaattgagcccttattacaacttgaactaaacctaactatagcccttctagttgattaacccataacatatttttggtcagccaactttacaaggattgggccattatttaaacaaactaaacactctaaaattgaaacaaagtggtgtcatttagtcctcctccatttgggccatgatacaactcacaaccttggacttttctcctagaaacttgggcttgtattcaaatattatggacagcac

SEQ ID NO: 67955 - DNA, 274 bp, Glycine max
  unsure (1)..(274): unsure at all n locations
agctangggggattgatggcgacccggtgttgagatgatctatgataagggctacgtgggagtacgtgatctcagttgaaggtgggtaactggcgatggtggattcatgtgtgattngtggatctggatagtcgacttgcaccatcgcctgaccgccacctaataccacatgtgatgggtaccccataatcctacaagctngaagtgaggaagtggggaagggtgagacttcctacttttattctgtgaccacagagtggtacctggagatatg

SEQ ID NO: 67956 - DNA, 255 bp, Glycine max
gcatgcaagcttccatcaagtggtaatcagagcacattatcttttagtaggtgctccttacacctccatttatgtgttgctttaccttctcttccattgttgcatcttcatatttttctccatgtatctcctcacatttcttgtgctaaatgtatgtaacatgattcattagagtttccaccaattaaacttgctatagaagctagatttgattttctataggtcacatttcatattcttagtctagaaccatga

SEQ ID NO: 67957 - DNA, 413 bp, Glycine max
  unsure (1)..(413): unsure at all n locations
tactcagctttccttcctttcctataataggggaagtagggatgaacatttatgttctaccctcctggtatctgagaatcacttaaaattagtgagaagaactggttctgcgaaaaaaatccaagccgaagcgcttccgtgacgtttccgttggtgatttcgcaaagattttcaaccgttcttcaacgttctttgttcgttcttcggtcttgaaccggtaagttcccgaaatcaaactcttcaattcattctatgtacccttagtggtcctcatttgtttcgcgtgcttttttttattttatttcatttactttccgtacccactttagacgtgctttattcatttatttaagtcatntttctcgcctaatcacaaataatataaatttccaccgatcattcgtattggaaca

SEQ ID NO: 67958 - DNA, 448 bp, Glycine max
  unsure (1)..(448): unsure at all n locations
agcttcctcggngccattcctgcgaaagcaaacattttgtaaagttagtttacaagaaatataacaatcattacaaacaagggccaaacaacacttctcatggcacgagtgtcaacatgcactttataaaataatcatattggggtcgtgctattttatgacacatacgtatttgcacacataaaaattttgtatgaagcattttacgacacctatccatgtacatatttttttgacaaaccgtttcatgctacattctatatatatacacacacatttntttggaagggcttttttgttacctactcacaaatacacatatttttgaaaaacacttttacgctacccatccaacactntgaagggcacttatgctatatatattcatattatgcaagggcatttcatgctatacatattcatnatttgcaggcattttattcaactc

SEQ ID NO: 67959 - DNA, 437 bp, Glycine max
  unsure (1)..(437): unsure at all n locations
gaggatgctntaataaagganaaganagttagattgtgggagcacganatngaaggaataaaagagggagagaagtggaactttgaagtatgtctcataagactttcattcatcanagttacaacaagtgttacacatgcttctatttatagactaggtagcttccttgagaagctttcttgagaaaaccttcttgagaagcttctttgagaaaacttccttgagaagctagagcttagntacgcatacccctctaataactaagctcacctncttgagaagcttncttgagaagatcctaaagaacgtagagcttatctacacacacctctctaatagctaagctcaccttcttgagatgagaagctagaacttaattacacaccccctataatagcttagctcacccccattccagaatacatgaaaatactaaa

SEQ ID NO: 67960 - DNA, 487 bp, Glycine max
  unsure (1)..(487): unsure at all n locations
tgccacatgtctncatttgagtggagcataaagggcccactttccctttttgactgtgacccatactcagccacaaaagtgaggaatatctgacctttgaaacgctaaaatccaacctcggtntgcgtgtcgtttctcttgttccagttcctcgcgtttctctacgtccgtcggtgccagttttcgaaagtaggcaatatatatatcaaaacgctcagaataaaaccccgagcgtggttcagaaggttggtgttcgttaatattntaatagtcgcaccgcataagacgatgaatnntttagggctgagttacctttaagatattatacnccattaacnctccccagngtanntggatttcttctttccttaaattagcncctaacccgcattatctttggccccacttactcctatttctaccaagatcatatatgcatatacactcaataatacttatatatatatatattcattcataatacata

SEQ ID NO: 67961 - DNA, 389 bp, Glycine max
  unsure (1)..(389): unsure at all n locations
atattgcgcggtatcggctgatataattcattctaagctacttcacgaccgatgtcgcctattgagtgttctattcaatcccttaatgaaatatgcatgatgtcggtatggaaatgttcgatcggtgtcatgcggtgatgctttcttnttaacctcgatcggtcatctgttctggcccacggcgactgtcgaatttttcgatccatatcggagaaaattattctttggccgagatgggctaaatttctcgtggccgaataaatgggaacatgccagtttctgtcgaaataaaatgtctggtgagcttgcacaaaaaaacctatccgacctacattggaaattatttcatcacaccgacacacgaaaacttcctcttgcgtaaaaaaaac

SEQ ID NO: 67962 - DNA, 511 bp, Glycine max
  unsure (1)..(511): unsure at all n locations
aagcttcatatcagctggaaccatttattaataaacacaagttgagttttattcttatnattagagtntatctctcttatcttagtgagagtgattctcctaaattcttgagtgattcaagaacaccctggctgtatcaaaggactttcacaacctttgtgtgttgccctcgctggaaagagtgattctttccttcctttcatcttcacccttgttctttcaaaccacaattccagataatccacctctgcccaggattatctcgtggccataactcccattntacgcactccaattaagtgattcttgagcctaaattgactntcaaaacgagacctttcacctcgttttgcaatcacctcatttggagccatgtagcttcagttattgccatttctatatttctgtccagccaccacttaacctacattgtaccatcccattcattcatttgatgccaagaaccaccttattaagacccacgaattaaccacctttatttcatcctttc

SEQ ID NO: 67963 - DNA, 433 bp, Glycine max
  unsure (1)..(433): unsure at all n locations
tgagaagctagagcttagctacacacacccctctcataactaagctcacctncttgagaaacttccttanaaagattcctaaagaagcttgagcttagctacacatacctctctaatagctaagctcacctncttgagatgagaagctagagcttagctacacaccccctataatagctaagctcacccncatgacaaanaacatganaatacaaaaaaaaggtcttactacanagactatctcaaatgccccganatacaaggctaanaccctatactactagaatggccaaaatacaaggcccagacgaaagaaatacctattctaatatttacannagatagtgggctcatacttagcccattngcttgaaatctaccctaaggctcatgagaaccctanggtcttcctttgatctctagccatctactg

SEQ ID NO: 67964 - DNA, 359 bp, Glycine max
  unsure (1)..(359): unsure at all n locations
cttctatggaggttggatatttgagcttcaattttgtccttctatggtgactttcagccatggagttgcagcgaatgataaaggagaaaaggtgagaggaggcgccatccactatagaataagccatggaaggagaagcttcaccaccaagagagtgccttgaataagaagcttagagaggaagcatcaatggaggaagaacattagagagagagaggggaatgggaattgaaggagaatagggagagaagttgaactttgaagtgtgtctcacangtttctcattcatcaaagttatgacaagtgttacacatgtttctatttatagtctaacacatgggaagcttccttgagaagca

SEQ ID NO: 67965 - DNA, 423 bp, Glycine max
  unsure (1)..(423): unsure at all n locations
agtcacctgccgctgcaagcttatccctccaattgagtactggccctattgattctaatccctttagaggtggctaagaaagttgacttanngttttcttttgatcgttctaccaatgcttgtctttatttcattatgactcatatgaaggcgaccaccacttgtcttgggtgcaaaacacaatgtctctcttctatttccgatatgtaagtatattaattgctcttcttcaaagggtattgttnttgaatatcccccccatgtcactctactcanatcggataaccctaaagccatatgagtgctattctcgctactcctacaaaatatatgtgtcttttaaaagaataggactancataatcactatattcattttcctatgttgaactgagcacccaaatacactaatacttgatcatat

SEQ ID NO: 67966 - DNA, 453 bp, Glycine max
  unsure (1)..(453): unsure at all n locations
ctatgagttttatggcagaggcttgtnttgtaatatttattttttttatgaacctgtccaagactatgttcaggctgntgtttcaacaatactcttgatccatgagcaggtatgttatcttatatcaaaacaggataacttcaactaatgcattctatttgtgaggcattttaaatcattgcantgtactcttgatccaaaatatgagtgctcattttgatgcatactatattaactagtaacaaaatggatcgaaatggttggttggtctttcttgtctctccttaagagcctacaggagacgttctaatgttcccttctatcccttcttcattcttctcctctcccttactcgatatattttatgtctccaaggttaaattntcttccttgatgttgaatgtatgcctaatattattatttcttatgaaaattagtgactatgaagagtca

SEQ ID NO: 67967 - DNA, 482 bp, Glycine max
  unsure (1)..(482): unsure at all n locations
agcttgcttctacaaagggatggtccagccatctatctcataactgatgaagctngatnntgccttggttagtttcaacttgaagattatgaatagtgtctccgatggtaagacctgtcattttggatgcagagaagttactngtgtcattgatcagaacgtgtgcaagtgagattataaagaggggagagtcgcttgcatgaagagaacgtggcatgttcgtagctaccgatgtgattgtgttgttgcttacatgtcattcaactctcacactanttctcacctacacactactactattcaccttttgtacgttctcactcgttttgttattaaataaatttctacatttcttcttcctctaatatagtgatcctggatcatattatgaaattactctatanaagaaataaattcactatgattctatatcagatattatattattacagtatacgattaatataagtggacattttatc

SEQ ID NO: 67968 - DNA, 459 bp, Glycine max
  unsure (1)..(459): unsure at all n locations
ctgacatcattatagatagctatcctgcatatatatactctgttatcattatccgggatatagacggctatgttgcacttggagtagctagatntggttggacttggacttctctttattggttacctaattatagctagttagattcaaacagattgaagctggagttgtgtgccagtgtttgattttatcatgggatcaacaacattgttggtatatgctgaagaaaatcttaaatcaagggtagcagtctagaagtaactatccatatggctgttattagtatttaaggtagcagtcttacaggggataatattgattgcaatctagtatttcatgctggtaagtttgcctaacatagttccattaataagtctactgttcgcaaccggcaagtgtaccggatcgcacatgtagtataatacggtatgaaccgagtatcatactctcgagtaactt

SEQ ID NO: 67969 - DNA, 235 bp, Glycine max
  unsure (1)..(235): unsure at all n locations
gcaccgcggctgcagctgcataactgattaaaacntttgttattatataagtgnngaataagaattatgactngtactacatgcccttctatgnttctcctttagaatgcaaacacatttttcctttctgtgttggtnttgtattttagattggcatgaatcaactcgaagtccaagttgcaaaggagaacatacttttgttttattggngggagaaatactgtaaanaaatttg

SEQ ID NO: 67970 - DNA, 462 bp, Glycine max
  unsure (1)..(462): unsure at all n locations
tttaaactcagcttcctttgaatccgagcatgcatttctcacctcatcaatcatatctatctcanaagctcagctttcaatgttaagtgcttcttcaaagtgagctcttctagttgagggttcaccaacctcaactggaatcatgacattagtaccattagtcaatccaaaaaaagtatagtaccatttattgtggattgtggagtgcaatggtatatacccctataatatacaagacaacttctcaacccatagaccttntgctgtgtccatccttttattcatctttgtcaagatgaccttgttcgttgttgctgcttgtccattggtttggngatgttcaatagaagataccaaatgtttgatgttgaagctgtgtaggaattgctcatacccatttgtttgtaaactgcttactattatctataactatngggaaaagggaggttgtgtctacagatc

SEQ ID NO: 67971 - DNA, 273 bp, Glycine max
  unsure (1)..(273): unsure at all n locations
agctatacactactctatattcttatccagagattttgattagntgaattaattgngaattacctaagtttatctattaaatgtttgatctagtgtgtttattttaataaatattaaacaggcttgaactgactttaaacccaattataaattntaataacctaatttaagttttgaaaaatttctttatgcatcgtaatcactaatcangcattcacgtaccctgtctctctcacacgtgctgtgtgtaataaaaaaatcatattaaaaaat

SEQ ID NO: 67972 - DNA, 488 bp, Glycine max
  unsure (1)..(488): unsure at all n locations
gtatatgatgtatgctctctgcatgacttctatcgattattattgcctatgtttatggtgcaggaagccatttacaatataaagtacaatttacttgggtgaatcaagaggatgacaaagaggtaatcagattttctttttaaaatccatacatgtttctggatttgatgtgaaagttactttctatcctgaagaatgctgatttaattgttcccacaacttccatgatttatcgtatgccatgattggcactcttcacaggaaacaaccatgtttaatgcttggtatgaggtgttgtcagttntgcatttgatggcaatgctatcactatcacaggctaacttgttactgcttgcaagatcatcatcctctgatggtcatctgccaaaagtatcagaaagttggtataaaattttggtgatgtcaaccatttgttgccccatcctgatctctctattgctaatatataaacttgaaaaatacattgg

SEQ ID NO: 67973 - DNA, 342 bp, Glycine max
  unsure (1)..(342): unsure at all n locations
taattaaatgtgttatctttgtcttcatttcttggtagaggtccaatatggcagcttagttgtttatggatttattcatatagtaactgtgatcaggtgtcgagtagaattgcaccgggccaacaacaacaagtggaaaaacttgttacattccatattaaacaagtggagtatcatttaaagaattaattcttggtaaaatcagactgtttgccaattcaggaaacaaggaatgccctaagatgatgatttgnttggaaactggtattatntaacatcctttcttctcaatgtgactatgcaagtcattatgtcagcanataatcacacttttttaaaatc

SEQ ID NO: 67974 - DNA, 314 bp, Glycine max
  unsure (1)..(314): unsure at all n locations
tatcaaaaaatgcgaaaaatgaggaccctaaggctgcaaactcatctatcccgtgggtatggcttctgaaaagggggaaaagaagttcttgaatgcaaaaacgttccccctttcgtcattcttataatttggagcaagggtggctcgcctaagcaaactcatctctcccaagcgagctaacctgcatttattctttttgagaggaacatttaccatgtnccctccttccttataggatagcgtcttgcttaacttgaacttacttaagatagaaatatgcgttgataatcttattttaatacaaacacatagta

SEQ ID NO: 67975 - DNA, 320 bp, Glycine max
  unsure (1)..(320): unsure at all n locations
agccttaagctcaaaattaagatactgngttgtttctaacttcagaaattccaacactgaacaactntttcaacatatgcttattgcaaaaaaaaaagatgtggnggataaacctattccgcatgactagagatcttttcaatgatctattgtgtctttactgttggccccattacccaaagtggcaagcttcaaaacctcctcttcatcaatgtccagatcaaatactccacgatgcaggccataaaccaacttatcaagaagtaaaaaaaaaatatggctactcaatcaaaatgaagctccactcacaattttaatgc

SEQ ID NO: 67976 - DNA, 440 bp, Glycine max
  unsure (1)..(440): unsure at all n locations
tcatgtcttcattgtaactgacctgtgttggcatattgatttcttaagnctgnttcgggaactcgtggttaacccaaggaccttttttggtttatgctgcatggattgacgaactcctgacctgatgtaccatgtaagcttcatgtctttgtgtcattgtcactgatctcactgccaatcttgttgccattgtcactgttgggttcaaagtaagctttgtgcctacgcgtacgtgctaaatttgataacaatgctaccttgttctaactcatgagggatacatagacaataatatatctagaaatgttgcagacgtttgtttgttcactcgctcattctaattcaaataaatctctttagtaccatattactacactgtatttccatatgcttcaagcatacatatacaccaacttcttttatcaattatacttggaaac

SEQ ID NO: 67977 - DNA, 298 bp, Glycine max
  unsure (1)..(298): unsure at all n locations
gcggcgaatcaccttgttggtgcgacggngactccgaacgactggcagagtcctgtgatcaaggcgggaaatcccatggccctgttggacttatccgggtccagagggtgcctggtaggcgtcatacctgcaaatagatagatggcatcagcgattaactgagccacgtgaatgctcatccgtgtcaggatggcatacaccagcttgacacttggcagggggaggtcggaattatgatcgctgggcttggatgtgctgagcagcanagtcattcagatctgagtcagggtggtcatgt

SEQ ID NO: 67978 - DNA, 446 bp, Glycine max
  unsure (1)..(446): unsure at all n locations
tactcagcttataagcgcgggtctgggtgacgaaggtcaagtggtcgcgatatacgaagatgatgttccgagtacattggatttggtacgaccatgccctcctgatttccagctgggaaattggcgagtggaggaacgccccgacatttacacaacgagcataatgtaaacctttacggttttaaaagctctatagttgggcctaggctttaagaattttccttttgttaagggcttgtgtcttttggttttgaatttataatacaaggatctttcttcatctgttcctacgtctctacccgttctcattcattngcatgtttacttctttatttctgaaacggcagatctgatgacgagtctcccgaaggtactaatacttgggacccgcttatcaacttcgagcaagaaacgaatcatacggaagatgaatggaacgaggacgt

SEQ ID NO: 67979 - DNA, 269 bp, Glycine max
gcagctcacttgaaactataagaaaactacatgtttatgtgatagagatatatattgtctgcattctacaatgatatatgtgatagagataaacatatgtcaataaaatgacatagatatctcatataacaaataaagtctgatgtaaatagagataattttgtcattcttcaaaagaattttaaatcgtgttggatctcatttggagaaccatttatcttctctatccctgccacccatgaacgataaataattttttcaaaaatatt

SEQ ID NO: 67980 - DNA, 389 bp, Glycine max
  unsure (1)..(389): unsure at all n locations
gcctactaaccgtatgctagttgaagaaatggttgcaatgtttttaaacgaggttggcgtaacgccctgaaattntgctaactataaatcaatgtttaattgtatttatcgtgttatttaattatatgattaacttgaatgagtttagatatggtgtgaattagtcatgtgtgattngattgatgtggatgttgagttatgtggagttntattgacctaagttgaaattatgagatttcanaatttatctaaacctattatggtaaaaccgtgatcctggatttgtaaccattggattatgttcaaattttgactgtangttcccaacacatgtccncatggtttgactgttgggattttcaaaataacaatgttttaaaataaccaat

SEQ ID NO: 67981 - DNA, 370 bp, Glycine max
  unsure (1)..(370): unsure at all n locations
agctntccttgcncctngatatatatgagggacttatgttttttatgaatgacaaattccttgggataaaggtagtgttgccatgttttcaaagcccgtactaaggcatacaactccttatcataagttgaatagttaagggtaggaccacttaacttttcactaaaataagcaattggatggccttcttgcatcaacacagccccaatcccaacatttgaagcatcacactcaatttcaaaagatttttgaaagtttggcaacgcaagtatggcggcattaattagctntttcttaagaacattgaaagcttcttctttgttctctccccatttgaaaccaacatttttcttgagcacttcattgagag

SEQ ID NO: 67982 - DNA, 409 bp, Glycine max
gctctggatggactataccaagctctatgaaccagggacggagaattatcttatataggcttgctaagggtagagagaggaagactagagatttggatcaagtaaagtgtgttaaggatgaagaaggcaaagtcttagtgcatgaaaaagatatcaaggaaaggtggaaggcgtatttccacaacttatttaatgatggatatggatatgactctagcagtctaaacacaagagaagaggaccgaaactataagtactatcgtcggattcagaaacaggaagtaaaggaagcgttgaaaagaatgagtaatggtaaggcggtggggccagacaacatacctattgaagtgtggaaaactcttggagatagaggtcttgagtggctcaccgaactctttaacgaaattat

SEQ ID NO: 67983 - DNA, 292 bp, Glycine max
tatatgggcacgctccagagtgaacaatggatgctgtcgatcaatgtggatggacataagtagtgactcggaggtgcgattcatgcgcatatgttattgagacgctcgaaattgaacaacggacgctcatcggaaatactaatggcgataaattttatgtccgaggcccgattcggaccataataggtcgagatggtccatagctgacaacggaagctctcgatagatacaagcggtactaagcttttactcggaggttggatacgagcacttaacttcattgtgacgctcg

SEQ ID NO: 67984 - DNA, 475 bp, Glycine max
  unsure (1)..(475): unsure at all n locations
ttgaactagctttcaattatgcgctgatcgacctcgagtaaaagttttttatttaaatttcttgagagcttccgctgttcaattntgagcctctcgatatattatgcgcccgaatctgacctccgagttaaaagttatgagcatttgaattgctcaagagcatccattgttcaattttgtgcgtctcgatatattatgcgcctgaatcggacctccgagttaaaagttatgaccatttgaatttctcgagagcttccggtgttcaattttttgcgtctcgatatattatgcgcctgaatcggacctccgagttaaaagttatgaccatttgaatntctcgagagcttccgttgttcaatttcgagcgtctcaatatattatgcgcctgaatcggacctccgaggtaanagttatgaccatttgaatttctcgagagctatccgttgtcaatttcgagcgtctcgatatattatgc

SEQ ID NO: 67985 - DNA, 464 bp, Glycine max
  unsure (1)..(464): unsure at all n locations
tccaaagctgattgattttctaccttggcttccgagaactgctcagctntaataaggttgtacggcaaattggtagagaagatcccattaggttcagctccccacagtcaggtgtccttcagattgccacttattctgataactgcgatatgatcaataaaaattaaagctacccccatctcactgtcgaacaaatttcatctccaagagaaagtccattcccacccattttcagaaaaataacccatgtcttacacaatgtgtaatctttgggaagagaattggtataattatggaaattgctctttaagaggtaacccgccgtcaacccaagggtcttcccaaataagaatttggtctcccctacccaccttccaagagaactgcttggagacatcctncatgtgtgggtgctgattaacataccttatgtcagaccaccattgagagaagtatttctttga

SEQ ID NO: 67986 - DNA, 502 bp, Glycine max
  unsure (1)..(502): unsure at all n locations
ctaagcttgccctgattgatagttgatnnttttttttgtgctatagtttttttttttgtnaaaattcaatacagggcatatcatttccaattntctggttttaaaaccaatgtttaaaattgattntggaattagcaacaatacatgtctccacttgtatgaaatttgagaaggcaatttgatattatgaagtaggaatgcaatttgagaaggctagttgcttgagatgttaatgtgagaggtgactttgattgcaatacttaggcttatatagacaaggaaaactaggataattttatttattttttgtcaaattcaccttctaactttatgctggttaaaggagggttaagtttatcacttatgttaggtgaggaagaaagttagacttagttacttagattactacgtaactcccctaaaaaaagattactactacctaattaataataggtaatcgagtcttnaantattaacattaacacatggataattatataca

SEQ ID NO: 67987 - DNA, 491 bp, Glycine max
  unsure (1)..(491): unsure at all n locations
agcttggaaagggtgcaagagattattaagagctatcttcataatggcattactcaacaaaagctagctcgtatattntatgttggagtgtcctcaattaatagggtgagtttggatgttgcttgtatgggcaacctcatgttaaaaccccatgttggtgaaatcaaaatcattgaagacatgtgttctatgaaataacaacaatcacactagaagaggggttgaatagtgtgtcaatcaaagatcaaatatattttttgttcaactgtaatatcatagattcatatatatatatatacatatatatacacacacacactagaattgtgaaaaaaanaaacaaggttaatagtccaataaatatatgaagtaagaagtttagaagggttgtcaaatagacaccacacacgctaaagaaagctaagagaatacttagtagcaccacttcagagagacatagaaacatgtggttaatactggttcactcaaat

SEQ ID NO: 67988 - DNA, 435 bp, Glycine max
  unsure (1)..(435): unsure at all n locations
tgcatgtctagtgattctagagagagagatgtccatgtgctatagtgttttgtatagatttgctgtgcgaagatctgcagagactagagcttgaaaaggaagtcatctgagagctngagatgattctgtgagtggttgtgatatcctagaggtcaaggagacatcctcaccacttgtatttttgcaatctttcatcttgctcttctctttgatgtaaaggaggcttcctggatatggaaagctacaatcctttgttggatcttccttggaggtacttgatgctaatatctctctatctattaaatgatgttctgagtattccttgagctatcaactcttcattctagtatgcctttaccttgatcacgaagatgcatgctgtgatagggtcatttaacagcggattatggtctgattcttgtgagatgtcatact

SEQ ID NO: 67989 - DNA, 349 bp, Glycine max
  unsure (1)..(349): unsure at all n locations
gcaagcttctcacanattgaatggtatgacttttatacaatgtccgattanggacataactcatctagacgctcgaaattgaacaacgcaagctctcgagaaattcgaatggtcataacttttcacacggatgtccgattcggcgatataactcatctagacgctcgaaagtgaacaacggaagctctcgagaaattcgaatggtcataatatttcactcggatgtccgattcgaggacataatatatcgagatggtcaaaattgaacaacggaaactgtcgacatattcgaatgggcataacttttcacacagatgtccgattcggggacataactcatcttaatgct

SEQ ID NO: 67990 - DNA, 440 bp, Glycine max
  unsure (1)..(440): unsure at all n locations
ctcagcttcttacatagaccgcctttgctcgagcttctgtatgcttaattacagaaacattangcataggcaaaagatcaagaggagttagtgggttaaaaccataaacaacttcgaaatcatcaaaagtgttagtggtcaaaatctgattnttgcaaaacaagatatatagtgactgtttagcacgatacaacttcggattttttaaaaacgctcgctggcacacaatgtttttttacgcccgaggaagttttcttgttttggtgttgcataaaaaatttacaatgtaggtcggctaggtttttttgtgcgagctcaaccgacgtctggttacggccgaaactggcatgttcccaattattcggccaggagaacattagccctactcggcaaanaaatattattcgccgatattgataaaaaaaactgacagtcgatgt

SEQ ID NO: 67991 - DNA, 277 bp, Glycine max
gcttgtgatggattaacagagcgacactgtcgttttgtgtatcaccaccctgcttgtgctgaacttgccgtgaatggacattacattgttgggtctcgacaacatacagaccaccaaatgatttctttacttaggtccaacaccactccatgcctctaaatttttcttagagatggagactgtattttatccccacctgaacacaaatctttgttcataaatgatggtgattctcttaacgtccaacactaagcatattattggttcatactataaa

SEQ ID NO: 67992 - DNA, 402 bp, Glycine max
  unsure (1)..(402): unsure at all n locations
ctaagctctgctactattcctctcgattatataccttattttcctctattgctacccttctactaccaactacagtaacttcctagctaacttctaattctaaataatttgatttgtaaaatgaaaaaagtgatgcatttctctcttttatnttatgcctctggaatggttatttaaccttgaatttaacatgaaacaatcttattgtttctcctgctttatgtatatatacagttccccatttatattagaaaaattcaccaagcacataattttttgttgaacaggagttaaccatagaatgaaaaaacgtccattaagaagaatctacactttcttccccattattatatttaatacgggctcactggtaaataaataatactgatcctccgatggtct

SEQ ID NO: 67993 - DNA, 418 bp, Glycine max
ttaagcaccgcggctgcagcttcttttgtgcacatctcattttttttatgtttagaatgaagcttgacaggttcaggtgcatgtgctgctactagtggaggcacttgaatttggttgccagacctcaaggtgatggcacttacatttttcggattctgcatattctgtgaaggcaatttgtcagaattttgggactgagcttagttcaattgagtatccatctgccccatctgatttgtcagactctgaatggaggctcttgtctcttgctgaaattgcatattctggatggtcatttgccttactaactccactaaggaaggttggggaggagcctcagttgcttcgtgcctttgttgtgactgctgaacatatggcttgcttggaccaacaacattctggaaatgacggacatgct

SEQ ID NO: 67994 - DNA, 450 bp, Glycine max
  unsure (1)..(450): unsure at all n locations
ggcctgtccgatgcagtagtaatgatggcccgagttatgttgttgatacggttacgaacccggaatgggtttagggaaagacaacggcggcatgactaacctgataaatgccaaaggaaatcgtgggaagtatggtttaggctataaacccactcaggcggatataaagagaagcatcgtgggaagaaagagcggtggtcaaagctcgcggttgaggcaagaaagtgaaggaagcccgccctgccacataagtagaagctttataagcgcgggtctgggagacgaaggtcaagtggtcgcgatatacgaagatgatgttccgagtacattggatttggtacgaccatgccctcctgatttccagctgggaaattggcgagtggaggaacgccccggcatttacgcaacgagcataatgtaaacctttacggttntaaaagctctatagtt

SEQ ID NO: 67995 - DNA, 333 bp, Glycine max
  unsure (1)..(333): unsure at all n locations
agcttgaagctcaagagagagctngaagatgttttatatgatgttttggctctnagaagctattagcagcttctactacctcattcatcttgggcctgtatggcgcggaattatggtgttggatcctgaaatcctcacacatttccttcatcattttgatgttcagattggtggcattatttgagataatcttcttgggcaacccataccggcagattatctctttcttaatgaacttgaccaccacactccttgtcacactggcatatgaagcagcttcatcccatttgtggaagtagtcgatcgcaaccaatatgaagcgacgtctattcg

SEQ ID NO: 67996 - DNA, 448 bp, Glycine max
  unsure (1)..(448): unsure at all n locations
acacaagaaactcagcttcccacacatccaagtaattcaacattcaaacagcatatacatttacagccaagcaaacagggcanaggcagaaaactctgcccaaaacaccaaccaaaatcacagcttttctcacttaaagaccccagtaacaattccttcattccagttcgttaaccgttggatcgactcgcanattttactggaagtctctagtacataaacctacantttgaccgttgggatctgctagcaaacatccagaactcattctgcactaccctttccacagccaaccacacacaagcatttttctgcacaaagccaaaatcctgctgcacctatntgacagcaaaattctgcataagtgcagatttcgaaaatcacacttcccctcatccaatcttgcccaaatcaattcctacaagtcccaaatcatgtatcaatcatg

SEQ ID NO: 67997 - DNA, 445 bp, Glycine max
  unsure (1)..(445): unsure at all n locations
agcttgtanggttaaagtctcacgattgtttcgttctcatgcaataattggtagccgtggctatacgagacatcttgctaaacaaagtcaggttagcgataactcgcctatgctttttcttccatgctatatgtagcaaagtcattgatcctgtcaagtttgaggagttggaaaatgaagccgcaagtatactgtgccagttggagatgtattttccccctgctttctttgacatcatgattcacttgattgtgcatctggtcagagaaatcaaatgttgtggtcctgtttatctacagtggatgtacccgattgagcgatacatgaagatcttaacagggtatacaaagaatctatatcgtcccaaagcgtttattgttgagaggtacattgcagaagaagccattgaattttgttcataatacttagagaaggctaaagatac

SEQ ID NO: 67998 - DNA, 434 bp, Glycine max
cgcttgtggagcttctatggaggctagatctttgagcttcattgttgtccttcaatggtgattttccaccatggagatgcagtggaaggcaaaggagaagaggagagggtaggcaccatccataagggaataagccatggaagaaggagcttcaccaccaagaatgttccttggataagaagcttgaagaggatgctttaatggagaaaaagaaagagggagagaaagagagaggggggagcacgaaattgaaggaagaaaaagggagagaagttgaactttaagttgtgtctcacaagactctcattcatcaaagttacaacaagtgttacacatgctcttatttataaactaggtagcttccttgagatgcttctttgagaaaacttccttgagaagcttctttgagaaaattttcttgagaagctagagct

SEQ ID NO: 67999 - DNA, 251 bp, Glycine max
  unsure (1)..(251): unsure at all n locations
agtcacctgcggcatgcanagctttatccacacagttcaatccacttgttcacaaaccaatatagcatgtgggttttccgccctaggtctcactgtttaatctatatgagcaccaaactcacactcacttgaagtcatagttgcaagttcaactactaatatcatatcacaaaatagtggatgatcattaaggaagtttgagtagtgtgacactgcaccaatttattggaaaaaaaaacgagcttgcatag

SEQ ID NO: 68000 - DNA, 420 bp, Glycine max
  unsure (1)..(420): unsure at all n locations
ntaacctcatcgtctttacagtcttagattttgttttcattaatccttgngttcggactctcagccacttatgatagccgccgatgatcccattactgcttcccctaagctctctgtcctttcttcacgccgcatcccatgccttgcgaactccttggagtaccctcgcgttgtggtcactgaaaccccgtgcgatgaaaggcgtgatgctttcgtctgatggcactcctctcatggtgtagccaagctgtcttatggcaaggccgggattataattaatacaaccccttgttcccattaagggaacatttggaaatccttcgcatgaagatagaatcctgattcttccttccttctagcgagggaaccaattaacagacgcccctctatgctagccaagagttggtcccaattcgtctt

SEQ ID NO: 68001 - DNA, 473 bp, Glycine max
  unsure (1)..(473): unsure at all n locations
agctngtaggattatggggtacccgtcacatgttgtactaggtggcgattgggcgatggtgcaaaacaactcttcacatccacaaatcacgcataaacccaccacccctaattgcccaccttcaactgagctcacgtactcccacgtagcccttatcctcattcctctcaacacctggtccccatcaatctctccaagcttccacaacatccaagaaatacaacatccaaacatcatgaactatcataaccaagaaaacagggcaaagacagaaaactctgcccaaaaacacaaaccaataccgtagctttccttactcaaataccccagtaacattctcttcgtccaattcgtaaccgttgatcgactcgaaatttactggaggccctatacataaatctcattgtgaccatgtgatctgctaaanacatcagaaccaatcttactactctttcacaaccgcaaaacacata

SEQ ID NO: 68002 - DNA, 424 bp, Glycine max
  unsure (1)..(424): unsure at all n locations
tgcaatgcggtggtgcaatgaccaacgatgagcatgattatgattagaagggaagagcgtggtggtgtgaaaagcgtgagctgtgaagagaagtgactgagtgaggttttttagggttattctaaatgatgttgttttttagtgtttttttacgcaaaaaacccaatcagggtttcaaaaactatccaaatttgatcaaatcatcctaaaccaaatgtatggtcggtccaataaccaaatcagtatgttatatcactagatctcaattcgactgatccaacttgcggngttgaactgngtttttcaactacggtgtcaggtgaaaattaattgaaattataatacaaatgaccatttaataatttcattcaagataataaatgttagtataatttatgcaatcacacgaagaaaaaaaaagaga

SEQ ID NO: 68003 - DNA, 456 bp, Glycine max
  unsure (1)..(456): unsure at all n locations
gctatgagaacaaaattgcctaatcatttcttatatgcatgtgaattangaagcatcaacaagaatcaagccaaggctattgtgcaagaaatcaatggggcaaaacacaccaaatgattatgatgatggatggctcanattgtcacaaaggtaaactcatcactttcaattgagctttcaaaactatcatgacatgtagaggagaatcaaggatttcaagtcacaaaatgtcaagaacttttattttcaaaacaattacccatttcttgaacatatcctataattcanagaanaacatgcaaagtcgtacatgcacacagaattgacccanaatattaaactataaatccgacgaaactaacaacattaacaaattaacacaacttacaaattaacaaaaccaacataactagcanaaccaaagaacactccccccccatacttanacaacacatt

SEQ ID NO: 68004 - DNA, 450 bp, Glycine max
  unsure (1)..(450): unsure at all n locations
tattccgagggtagctgatgatggtatacaactagcagcaattatctcacaacaggccaataatatcaaggaacaatntctggacaaggtggccaggcctgaagcccagcttcctctggtaagagcccncgaggttgttcctcccagtcctattccaacaaggacagagcctgcactagctgagtggcaacctccagtagtagacccacctgcttctncggaggtngagatactatctcctccaccagctccaccgacaccacctttgatactcattcctgatgactcagatgctgaagctgctgctcatactgactcaccagcctactacctagaggatggttcgaattnttttgactggatggattagtgaggaagttgtggttcatcttgacaagaatgtggatatttctgaagaagttatgctacttttgtgctttttgatctatt

SEQ ID NO: 68005 - DNA, 449 bp, Glycine max
  unsure (1)..(449): unsure at all n locations
agcttcaagaataatggcccaatcaaactatntattttctgtanggaattcaataaataggcctcctattntcaatggagtgggttaccattactggaaaacccgtatgcaaatttttatagaggcaatagatttaaatgtctgggatgcaatagaagtagggccctatattcccactatggtggcaagaagtaaaaccatataaaagcctatggaagaatggagtgaagaagaaaagagattagtgcaatacaacttataagccaaaaatataattacatcttccttatgaatggatgagtactttagggtatcaaattgtaaaagtgcaaaagaaatgtgggataccctacaagtaacacatgaaggcacaacagatgtgaaaaggtctacgataaatacattaactcatgagtatgaattatttagaatgaattcanatgaaagta

SEQ ID NO: 68006 - DNA, 413 bp, Glycine max
  unsure (1)..(413): unsure at all n locations
tctgagagtgccttatngtgtgcttntnntttgggtaagaattctttgtgcttacaagcttctgagggtgccctattgtgtgctgtttttttttttagacaaattcccttagcaatcccccaaattaaggacttatcataacttgaaacccttatgctttcttagaaccctaaaacaaggtcaaggatatcaaaattaagctcaagggtttattcaaacaaatcattattacttttggctcaacaggggtgcaagggataaattcatcacaggttagctntttggctgagtggctaaaataaaaagaaacatggccttgatcatatccaccttatgtaaataatctaacagtctaagaatgatgcaaaattaataatttaaaaacagacgttctctcataattaagttcacac

SEQ ID NO: 68007 - DNA, 445 bp, Glycine max
  unsure (1)..(445): unsure at all n locations
atcttaagtcacctgcgggcatgcaagcttatgcacggaaatgtaattatganattgatatgtcctaanaaacaccatttcctagttaacaatgcattaagtaccatgttcaattattttgttnttaagtgaaacgggtttatgatcccaacatggttggctcgtggtgcctaacacatgaaactaagaatgtagtgtgaagtttcacgcttccnccttttttgtttttgttttgtagaggaaaacgcaaggatgagcaaacatgaaaacaaatggtatgcaattntgcagatcaaaaagattgttgaacgcatatgcatgatgatgccatgactcatgcaaaatgtgaggctggaatatgataacggacaaatgcaggatatgtccattatgatgttatgaagagatgcttatgcgatgcatgatatgaatgtcatttaccgac

SEQ ID NO: 68008 - DNA, 406 bp, Glycine max
  unsure (1)..(406): unsure at all n locations
tgagccanaatcctgactcaccataaaccttgacccaaggtgttaatgtcaatccttaccctcggaagcaaaananaagggagagaaggaaaatttccaatcaaaggaaaaaagagaggaaaggaaattcccaatcaaagggtgggagaaagcaaaaagaaaagaaaggaaattcccaatcaaagaatgggagatagaataaagagaaggagaagaatgaaagaaagctcctgatcaaggatcgaaagaaaacagaagatatgtgcagagaggtctctggaccagacaatatctgaacaaatacagaattgtcaccaaatgaacaaaagaaagaaatggaaaccataacctanaagtggttttctccctttgattaccaaccaaaatcctgtgcgttggtgacttg

SEQ ID NO: 68009 - DNA, 418 bp, Glycine max
  unsure (1)..(418): unsure at all n locations
agtcacctgccgcatgcaagctatgatgatgcanaagtagctgctgagttcattaggcttgctcanngcattgttgccggagctacttcacattgcccaatattaccccttacagctctggttgttcaggtggctgcccttcttctcccaagtttcttttgtaagacattgtattgtatgtcaagttctaatttttatacatgtgcatatctatgtaatataaattggaaggataaagatgtttctgctccagtgtttgctagatagtaattatgttattatccccctctttctctcccagcactagtaggttaggttccttaaataaaattccgttagcattaccatttattcgaatatcctcattttgcctgacacatcaaactatcaattctaatggcattntatgttgtagctt

SEQ ID NO: 68010 - DNA, 418 bp, Glycine max
  unsure (1)..(418): unsure at all n locations
catcaatcttcctgagcccaaagaggaacatagattggtcatggcattgaactgtgaagaggctccattggatgttgacattaagaatggtggaagggttgtggtgttgaacaccaagaaccttcccttggttggtgaggttggtctatgagcagaccttgtgaggctggatggaaatgccatgtgttctccaggattctcttgtgattctgcctttcaggttttttatcggcaaatgttaattgatagttntcgtaaacaggaggaatcaaatctaggatttttcctttttttctttctttcttacctatccaaacaaccgtatatctcttgcgtttcaggtcacctacatcgtcagaggaagtggtcgtgctcangttgttggtgctgatggttgcannggtttggagacaactgt

SEQ ID NO: 68011 - DNA, 408 bp, Glycine max
  unsure (1)..(408): unsure at all n locations
tgcaagctngttaaaagcataagagaaggagaccgaatgtgactagatgaagatgaaagcaagcacaacaagaaatgaattgaaagcctcggattcgagcacttaccggatgaagaccgaagaagggacgaagaacggtaaagaatgacgaataatcttcacggaatcacccacggaaacgtctcggaagcgttacggaggcacctcggcttggattttattcacggaaacacgttttttcacccaaaacagctgaaatgcatagcataggggtcagataccctttgaaacagttacggaagaattacggaagcgtagcagacttgattttcttattatttctcttcctcttcacgaatcctaaggtaaatatgctttcccagcgttacgggaatttcacgaaaacac

SEQ ID NO: 68012 - DNA, 452 bp, Glycine max
  unsure (1)..(452): unsure at all n locations
gctttactatgttgttaagtaaataaagagtagaaaagaaacttatcctttagttaaagcggaaattaaaatgcacaatggaaattaaaagagtagggaagaaggagacaaatacacaagggtttttatactggttcggcaacaacccgtacctacattcagtccccaagtaacctgcggtccttgagttttcttttcaaccttgtaaaaatccttttacaagcaaagatccataagggatgtaccgtcccttgttctctntgaacaacctaatggatgtaccctccactagaactgatccacaagagatgtaccctctcttgttctcagtcaaaccagagtagatgtaccctctacttgtaccacaaaggatgtaccctccaatgtgttaagacaaagttctcaggcggttaaacctttgaaactttgtgaatggngatacaaaagaattc

SEQ ID NO: 68013 - DNA, 292 bp, Glycine max
tccgttcacaataccccatgcaatgacactgtgagattaggtcttacttaagaaagcattaatacgattagcctctgcagcttgtggcttcagacaacatttgtggggcctactcgcattttccaccgaccatacagatgctctagatagggatgaaaaagatacagtgttgacgtggaaaagtgagcatgaccctgaactggaccgaagttatcatctcttgtgtaactcacaaaagcctgggcagacgaattgcttatcgacagaaattatcttgccgaaattcacactt

SEQ ID NO: 68014 - DNA, 386 bp, Glycine max
  unsure (1)..(386): unsure at all n locations
agcttncagaatggtataccatgctacagttgcctcggccaagctgtcttgaaagaaatggaccaacaatttttcgtccgcagaatacgcctccatctttcgataaatacatccgaagatgccccttcggacatgtcgtccctttgtacttatcaaagtccggtactttgaacttgggagggatgacgatgttgggaacgagacataaatccgctaaatccgagaatgggtaattgccgaggccctcgactgctctcaacctctctttaagcacctcaatcttttccttatcttncacgaagggaacagattcttttaccggtgtgggtgaagtccggatatggcggactatgttcggttggggtagttcatggggggacggatct

SEQ ID NO: 68015 - DNA, 418 bp, Glycine max
  unsure (1)..(418): unsure at all n locations
agctgttacaaacaattttaacttctagtaatcgattacatactgtgtgtaattgattacaacattntaaaatcaaattcaaaatttgtaaaagtgttccagaaatcaatttagccactggtaatcgattacatcctttggtaatcgattaccagagagaaaatatcatatttttgaaatttcaaaaagcttttgtaaaatatcctttacccaaacctatgcagcatcaattaaggaattctttctaagatcctaggaactaagtacatcattcttcttgaatttctggattcttgacttgaatcgcgctcatatttggcatcatcaaaactttatatcatatatgcttctacaatctcccccttntttatgatgacaataattngaaatcaagataagtgatatacanattgataat

SEQ ID NO: 68016 - DNA, 459 bp, Glycine max
  unsure (1)..(459): unsure at all n locations
agcttgtanggttaaagtctcacgattgtctcgtgctcatgncaacaatgttagccggggctatacgagacatcttgccaaacaaagtcaggttcacgataactcacctgtgctttttcttccatgctatatgtagcagagtgattgatcaagtaatgtttaatgagttggaaaatgaggccgcaattatactctgccagttggagatgtattttccccctgctttctntgacatcatgattcacttgattgtgcatctggtcagagaaatcaaatgttgtggtcctggttatctacggtggatgtacccgcgtgagcgatacatgaagatcttataagggtatacaaagaatctatatcgtccggaacatttattggtgagaggacattgtagataagcattgaatttgttcatatacttagagagagttaagttgtgggcttctgagtgtctgatga

SEQ ID NO: 68017 - DNA, 477 bp, Glycine max
  unsure (1)..(477): unsure at all n locations
tcctcgtggcttctntgagaagctgtctcaagaggctttttttataagctagatccttatctatccacacccctctattaactaaattaacctccttaaaaataattacggataaaaatagcacaacaaataatcaaacattaaacataattactaataatatatatatatatatatatatatatatatatatatatatatcagggtgttacacaagcgacttgcgcttctgagtttggacttccaagaccgttcaatcagaaattattcgtactacacatttggtgagggtgttgtaaaacgacaagtaaagcaaaaataagtttcaaaataaaaataaaaaagcatttgattgactgtgttttcaagtaaaaatatagacgttcatgtgacctcattntatcattctgganagttgtctttttagagagaaggagtatcaagaaaggagtatttgacttaaccatcaactaaaaa

SEQ ID NO: 68018 - DNA, 435 bp, Glycine max
agcttgccagaactggctaaggaacaatggctcactattagaagttaagcttcggtgcataccatggatcttcccgaccataaccataaaaagaacggcgactgtgtgcgaagatggtgtgttggcaacatgcctagatgaatacccttcgagaactggtctaccaccataaatatagttgtgtgtccatggaaatcaggaaacccaattatgaaatcgagggagagatccttccatggccgatatggtactgggagaggacagagcaagccaaccaccctcttagtctcatatttggcatgctgaccatcaacacaagaggcaacatatttcttaacatcatttcagagtccagaccacatgatgctctcgtgaatacgtgcttaacatttttagatgcctaaatgccccacaatgggtgaagaatgatactcc

SEQ ID NO: 68019 - DNA, 432 bp, Glycine max
  unsure (1)..(432): unsure at all n locations
tataagaacannaatgccttaatcatttccaaatatgcatgctatttatgacgcatcaacaagaatcaagccaaggctattgtttcatatgaggtcagcgttaccaagtttcacaacaaaggttgcatgtgtctgcatccctaaaaatcatgttaactgcatagatttcctacatctcgtgtccaatctttttggatgaccggctctctcgatgagtcgatctcttgctttctcataaaggtggacccttgggtactagtacctatcacctttagaggactgtatgtcctcgccatcagaggactgcacatcctcgcctgcagagggctgcacgccctcgcctttagaaggctacgcgtcctcgttttcagtgtgcttcatatccacaccttaagagaatataanggcctttgcccttagatgcttaaccga

SEQ ID NO: 68020 - DNA, 418 bp, Glycine max
  unsure (1)..(418): unsure at all n locations
gcaagcttaattgaatttagtaacattaagaattatttatttttaattagtaaaggctcattaataattaattcaaccccccttcttaattattccgaggccacttgatccaacaagtgaaaggtaatgcagacatcttgtagtattgtttcacatttgttgcatgatgccacttcctttgtttaagcttaggggcaggtacggactggtgataggcccatgatcgattgatcatcaacccgcgttcggctaaagacattaaagcagcgctcctaggaggcagcctantatctctaanttttctttctacaattctcgctctttacttgtttgttntcttgaaatatatcttgaattcaccttaagttatatgcaactataggattttagaaaaaatatatacataacaatgaacaaa

SEQ ID NO: 68021 - DNA, 413 bp, Glycine max
  unsure (1)..(413): unsure at all n locations
tatccttatggcctgcctccggacttcatcccccgtgctactctggaagatttaagccaagcccctactttngaagggcaactcccaccttatgaagactatcctggacaagacgatggagaaggagatacccaccttggccccctgctccacctcaaagatccatccccgcatgaactaccccacccgaacatagtccatcatatcccggcctcacccacacccgtaaaagaatctgttccctttgcggaagataagggaaagattgaggcgcttgaagagaggttaagagcagtcgagggcctcgataattaccctttctcgganttggcagatgtatgtcttgtgcccaacatagtcatcccttccaaattcaaagtaccagactntgataagtacaaagggacgacatg

SEQ ID NO: 68022 - DNA, 229 bp, Glycine max
  unsure (1)..(229): unsure at all n locations
agcttgtgcgaatcanatcactcctgcttttcatctctagcatgcattatttctttctttacccactcctcacgtttggttttttagggaaaaacaccataactaaacgccgccacaggcattcctattcgaccagatccaaatctataacgatgggtgatcaagatgagacacacgaacagatgaaagccgacatgtcngctctgaaagaacagatggcttccatgat

SEQ ID NO: 68023 - DNA, 387 bp, Glycine max
  unsure (1)..(387): unsure at all n locations
cgcanagcttacggtanaatctgggacctatccatggtatatatctccacagaggccattgcctccctcgcccagtattatgatcagccgttgaggtgcttcacttttggggacttccaactatcacccatggtggaagagtttgaagaaattctgggatgcccactgggaggaaggaagccatatctttcctctgggttctatccctccatgacaagagttccaaggtagtgaaaatctcagcacaagagtttgaccgtgtaaagcanaacaggaatggngtagtcggagtaccaaggaagtgtttggaggaaagggcaaagaccttgacaaatcaaggcgaatgggcttcttntattgacatcttggcgcttttgatctttggag

SEQ ID NO: 68024 - DNA, 459 bp, Glycine max
  unsure (1)..(459): unsure at all n locations
agctngagcaacttcttcttcgtccatcctctattcgtagcaaccttttcctagacttcgtccaactgatcgttccatttagtgttgagtccaaaattttgttaaagctcagcatgtatggagacaatcaccttgggaacttgttggaaggatccatcatcaagaagtttcatcttagagatgttttcttggttgaatgctttctgttntgggagatacacccaatcctgtagattttttcttgcatatctttaggtgtttcatacaaaatttttgttataactccttggatttcaaataccttagtgagaacaacactatggtatatattgtaacgacccgcctcgtcactacgatatcaccactctatatcgcaagaaattcaattttaaatgacaactccgtgatagtgactcaatcacatctacacataatggaagtaaatttgtcatcatataa

SEQ ID NO: 68025 - DNA, 453 bp, Glycine max
  unsure (1)..(453): unsure at all n locations
actaagcttcaagaaaagatggcctcagcaaattccttatttccagaaggtaattctatcaatagacctccaatctttaatggagagggttaccactactggaaaacccgaatgcaaatttttatcgaggcaatagatctaaatatctgggaagccatagaaatagggccttatatacccaccacagtagaaagagtttcaatagatggtagttcatcaagtgaaagcataaccatagaaaaacctagagatagatggtctgaagaggatagaaaacgagtacaatacaacttataagccaaaaacataataacatctgccctaggaatggatgaatatttcagggtttcaaattgtaagagtgctaaggaaatgtgggacactcttcgattaacacatgaaggaactacagatgttaaaagatctaggatanatgcactaactcatgagtat

SEQ ID NO: 68026 - DNA, 371 bp, Glycine max
  unsure (1)..(371): unsure at all n locations
ttaagtcacctgcggcatgcaagcttgccacccagctcgcccaggcgagcagggttgctttctccataagcaacagccttctggaggaatcttctagagggcccaagtgggcttggttgctatttgcacccccatttttactaagtacancctccttgcctttttttggtgattcttttctcgtaaagttacggaaacttacgaatttcgtaacgatacttgttttctttccgtaatgttacggaaccttgtggattacataatcatcccctttttgacttacggaatgttacggaacctcactaattgtgcaacgatgctttcattttgatttcggtgtgtcatggaaccttacggattgtgcatcaata

SEQ ID NO: 68027 - DNA, 466 bp, Glycine max
  unsure (1)..(466): unsure at all n locations
ctaagcttggtctctgcagatcttacacaacanaatctctcanactctctggaacttgtacctttcactctctagaattctctagacatgtagaagtttcaagaaaaggccaaactctcttccaaaatctgatttcaggcttaaataggtggttttgttcgtgctcgtgcacttagcgcaattctgaaccgcttagcgcgcattattaaatttcggcttagcatggcttttctcgctcagcgaatggaatgaagcggtgcacttagcgggatggcccttcactcagcgaacaaggggatggctcagtcgaggagtgttgcgcttagcagatggctcactaagccagtagattggcttagcgagagggtgaaaatcagcacttcacaaactcgcctaattaacctaaaattgagagaanattattattaaacacacaaaatggaagtattaagtattattacctatc

SEQ ID NO: 68028 - DNA, 411 bp, Glycine max
  unsure (1)..(411): unsure at all n locations
cacctgcngcatgcaagcttcaacccttgaccatcatttctgctccaaatcgctttatgagggcatcttcgggatcgtgaagcacatctctacgtgtgggacctcgaaatttcaggtttgggtggacttctttctctcttgaatttcgtgggtattgggttttgggaggtatgatgggtagttttgctaggtttctgcttcatgatagttatttgtgaagaaatttgttgaaagcatgttgaacttgccatgtttggatgggttaagcttacccattctgttgtagggtttttatgatgatgctngtgatgtttatgtgctgaaattgcttatggaaaactgttagagatgaacggtagagctaacctacggttagaacgtgagaatatggtgttatgagtggaaaagagt

SEQ ID NO: 68029 - DNA, 478 bp, Glycine max
  unsure (1)..(478): unsure at all n locations
gtggtattagagcacaagggcttcaaataggtgcttcttatacctccattaattnnttgctttaccttctcttccattgttgtttcttcatttttctccatgtatcccctcacatgtctagtgctaaatgttgttaacatgattctttagaatttccaccgattaaactagctatagaagctagatttgattttctatggttcaaatttcttgttcatgttcttgaaccatgagttgtgttgagtttaagtttctttgagttttgtcttgctattttttgtgtggctgaaacctaaaccataaaattcttacaaaaatattaaagtataagaaaacctcaaaaatctagagtgacttgttcacctattgtagttntgtcatagaagtcatgtctagtcatgaaacttgtcacataagatntcttatgtngngctgannatatattttcttggttctttgctaactcatatgttcatga

SEQ ID NO: 68030 - DNA, 440 bp, Glycine max
  unsure (1)..(440): unsure at all n locations
atcttaagtcacctgcngcatgcaagcttcctcggggccattcctgcgaaggcaatcattgtgaagttaatttaccagtgtgacactactcttaaaacagaagaggcatacaacctcctcccatacatacaaacatgaatgtaaatntagagcaagcttatgcgcatatttccttacgaacgttcacttgcacaagacattctattaactaagaaaaatgcacccatatacaatcaaggcagcttcgntacctagattatttacacgtacttccaaggtgtatttgttacttacatcacacacatctccttggctaaatttacaaacatgcatactcaaagctttntggggtaccaagaattgcacatgtgcacatcttggtatttctaatacctatacatacacaaacttcatgatgaatcttgactatctacacaata

SEQ ID NO: 68031 - DNA, 479 bp, Glycine max
  unsure (1)..(479): unsure at all n locations
ctgtcgagggcagatgacatggttcgcgcatgctacaatacttatgatattaagttcgatcgccgcgaactcgccaaaattatggtactggatggttgttttctgctagagcttctcatatgtggatcacccgaattagacgaacggttaaggtggaccttagatgaacctagtcccggagctgtttcataaaaagagagaaggtcttgtcggatttgacgatgatggaaaaccaaatccctctcatagttctcaaaaggatctctggaatactttttcccgaaatttttacagacggtggtacagacaaattgatacaaaatcttgcactttctatattgggctacaacgctccggattccgatttcaaagcctctcatttactcgagtttgttcaccaggattngaagagttctattagcagtggagaagttccanataccagacatggaanacaaaatctacagcgctgcgctact

SEQ ID NO: 68032 - DNA, 452 bp, Glycine max
  unsure (1)..(452): unsure at all n locations
agcttgaatcggacctcagtgtgaagagtgatgactcatttgaatntctcgagagctntcgttgttcaatgtcgagaatctcgacatattatgcgctcgaatcgaacatccgtgtgaaaagttatgaccgtttgagtttctcgagagcttccgtcgttcaattccgagcatctcgacatattatgtgcccgaatctgaccttcgtgtgaaaagttatgaccatttgaatttctcgagagctctcgatgtttaatctcgagcgtctcaatatattgtacgcctgaatcggagctcagtgcgaaaagtatgaccatttgtatttctcgatagcgttcttggttcaatttcgagcatctcgacatatgatgtgcccgaatctgaccttcgtgtgaaagtatgaccatttgatttctcgagagcttcgatgttaatttcgagcgtttcatttattg

SEQ ID NO: 68033 - DNA, 411 bp, Glycine max
  unsure (1)..(411): unsure at all n locations
ggtgaagctccttcttccttgtcttattccctagtggatggcgcctcccctatcctcttctcctttgccttccgctgcatctccatggtgaaaaatcaccattgaaggacctcattgaagctcaaagatccagcctccatagaagctccacaagcaagcttccatcacttttcacacagaggtcagattcgggcacataatatgtcgagatgctcggaattgaaccacggaagctctcgagtaattcaaatggtcataacttttcacacagatgtccgattcgggcgcataatatgtcgagtagctctaaattgaacaacggaagctgtcgagaaattcaaatggtcataattnttcacacggaggtcagattcgggcacataatatgttgagatgctcggaattgaacca

SEQ ID NO: 68034 - DNA, 329 bp, Glycine max
  unsure (1)..(329): unsure at all n locations
gtcacctgcngcatgcaagcttctccgaagggcatggttatttccagttttctgaatatatctattaatcttgcttatgtgccatcattttcttctattttctatacccttttagcaccattttaattactaattggtcttaattgtcaattaattaggcagttttattatttgggctcatttagctaattagatgtttttaatctaatttcaggaattaatgaaacattggacttaatccggattttggttgtggacttgaagagggcaaataaagccgccctaaccttatgtaattactaaataagaaatttcacactttactttat

SEQ ID NO: 68035 - DNA, 444 bp, Glycine max
  unsure (1)..(444): unsure at all n locations
ttttctatgattgcatcacctctcaatgagctagtaaagaagaatgtggcatttacctagggtgaaaaacaagagcaagcctttgctttgctcaaagaanagcttactaaggcacctgttctagctcttcctaacttttctaaaacttttgagctagaatgtgatgcctctagagtgggagttggagctgtattgttacaaggtgggcaccctattgcttattntagtgaaaaacttcatagtgccaccctcaactaccccacctatgataaagagctttatgccttaataagagccctccaaacttgggaacattaccttgtttccaaggaatntgtcattcatagtgatcatcaatcacttaagtacattagagggcaaagcaagttaaacaagaggcatgcaaaatgggtagagtacctagagcaatttccatatgttatc

SEQ ID NO: 68036 - DNA, 317 bp, Glycine max
  unsure (1)..(317): unsure at all n locations
agcttcttggatgcttactccagatacaactagattagtatgcaagctccaaaggaggcgaagatgacatttatcactaaagataccaacttttgctaaagggctatgccctntcaacctaaaaaatgtagacgctacataccaatgactgatggaccgagtctttaaacaacatataagacaaaacatcaaggtatatgtggacaacgttggcggcaagtctcgaagcatagaccaacatgtggccgatctgccagaagtcttgaaggagctttacaagtatgacatgcaaccgtgatcctgaataatgtactttg

SEQ ID NO: 68037 - DNA, 337 bp, Glycine max
  unsure (1)..(337): unsure at all n locations
tatgtaatttatattntaggatatctaagttattcgtttctttcccttntattgccttagtaccatccttttgcattatctcatattgttntcttttgtttcttcattctgtattagaattgacagtgactggaaaaaggttgaagcatttgttgtatcaaagacagtcatccacgtaatttcaaatgcaagttgtgactggaatattacattagctgctgttctgggttgatatccataaatgtagtggattgaattacgcatcttatattttttgaagtgcgtgtgattatgtcacataaagtatcttggcactcttcaaatacagaattggcta

SEQ ID NO: 68038 - DNA, 421 bp, Glycine max
  unsure (1)..(421): unsure at all n locations
agcttggcaacatagttgacacagaagggatatcttctctagatagaagcataatatcatctgcanaagccaaatgagatagctgaatacttgcacaattgggatgaaatataaaattggcatcatccttgaggctgctcatatctctggaaaagtactccaaacagagcacaaacagataaggggagagaggatccccttgtctaagaccccgctgccctttgaagtgaccataaatggatccattgactgccacactaaaggaagtggaagaaacacattccatgatccaagtacagaactgggctgggaagccaatggacttaagcatccaatccaagaattcccaggaaatggaatcataagctttatgcaagtcaattttcaggaggcatctcggagaggatcttttctgggcata

SEQ ID NO: 68039 - DNA, 450 bp, Glycine max
  unsure (1)..(450): unsure at all n locations
ggcttctatggagggctggatcttgagcttcaatgaggtcctttaatggtgattttccaccatggagatgcagcggaagacaaaggagaagaggtaagaggcagcgctatccactagggaataagccacggaagaatgagcttcaccaccaagatgagccttggataagaagcttggagaggatgcttcaatggaggaaaagaaagagggagagaaagagagaggggggagcacgaaattgaaggaagaaaaaagggagagaagttgaactttgagttgtgtctcacaagactctcattcatcaaagttacaataagtgttacacatgcttctatttatagactaggtagcttcctttagaagctntcttgagaaaactaccttgagaagcttctttgagaaaacttccttgagaagctagagcttagctacacatacccctctcataac

SEQ ID NO: 68040 - DNA, 456 bp, Glycine max
  unsure (1)..(456): unsure at all n locations
agcttaatctttntagcctagagtgacgtaataatattggttntgcagttatttccttttaaaaacaagtgtgatgtcttgtttatagtttcatttccctcatatataatgctaataatatgtgatgccttgatttatatccttgctaacaaattaaagagtataagatagttgttaataatcttctttactttaaattctattctattcttctcttttcttttctttntttggtattgttgcttgattntgagctacgacttgaaatttagattttatatttgattgcttgtgataattctattattntgataaattcagattgtggagtatgtatttttatgatanataaacaatggtgtctttctattacatcactactttgcaaagttttggtgttaagcgctggaagttggtcgatgattctgatatttttatggttttaactattaagtt

SEQ ID NO: 68041 - DNA, 513 bp, Glycine max
  unsure (1)..(513): unsure at all n locations
ctactaagacaccatgcagatatctactgttggtatatattcaagagttaatccatacgcatatgcatgcgaacgacaagaaacagtnatgaacatgcacaactaggatcacacgtcaattactagtaaagtcaggtaccctggcatcacatgtaagatacagagcagttagatagcctgcagttgacagtgagcagtgtcaaacattgagcatcaaggtgcagagaacaagctcgagattctcttgcccctcttctttcaagatcatgtatctggaccttgcttcactgggccccctgcctgctaacgtcagaacaccagaaacacgatttgacagttcacttatgagctagtagtctaagagtgcaacaccgtataagaatactccagtaggattaanagagacgactaacatgaaatcaatcaatcatcagtctaatcagaaaaatagatcatatttatgctcgattactgaatgattacacacctgtatcatgagtgatatggaacatc

SEQ ID NO: 68042 - DNA, 371 bp, Glycine max
  unsure (1)..(371): unsure at all n locations
agcttganagtccaagtttcttctgccatatccctgtgatttctttngatagataatagataacattttgatttgacagttcactaagattaatcttataaagatttccttttctcttagtggtgaaaagttgggtcccatttttgtcttggacgacacacccatcattgccaaaggaaatatcaagtcgactatcacaaaattgacttatactaagcagattgtgtttaagtcctttgaaaaatagtacattctccatgggaagatagggatcaatacttatctttcctactccatcaatcttccccttctaattccttccaaaagtgactgttccaccatgcatggnggtcaaacattggaacatacac

SEQ ID NO: 68043 - DNA, 459 bp, Glycine max
  unsure (1)..(459): unsure at all n locations
cacaggcaagtgtntcatcttaattccaaatcatatatttttcataaattgattntgcaagtcatttcccatcaaatcaaggataatatgcataatcatcatggatcaataggactttctaaggtcctactttgtaggaaattttggttttggttgctttggtctttcccccctcccctctttttgtgtgagtaggagcgcacgcacaaatatttggttagtaacttaaatgggcgactacttcctatcccctcatgtcttaaccaagttactattgtttgctttcctttttactctatacaacaactctgtacatggttcatacattgtttgttccaaagaacttgtttatcatttctattttccttttgctctgttctatttctgatagattgatttctcttctctttgttctattctttttccctcctttgaataagtgttatttttcctccctct

SEQ ID NO: 68044 - DNA, 442 bp, Glycine max
  unsure (1)..(442): unsure at all n locations
cttaagtcacctgcggctgcagcttatataaaatcataaattaatgtttgatctcacaccatacaagggttataattgtaatgatatgctctaaatttcctcaataatgttgacgaaacatttggatgaaggccacagatattacattgagttggaagtacacgttgttctcctttgttaaaggagaagaagtttcacctttcttatccttgaattgatcttcacaggtatggtctaggcagntccaaagtaggcacaattttaatccatatatatgctctctctacnttgcaattaattgaataaagcccaagattttaaactacaaaaaatgaggctgactgaggaaattaccaattaagccaagtgctgtcacagtcaccaatctgaaatttcttatgtttgcccctcttctatanaagatgataccttccctttggac

SEQ ID NO: 68045 - DNA, 420 bp, Glycine max
  unsure (1)..(420): unsure at all n locations
tgtatatgttacaatgttcttaaatttctaaattgttttaagaacaacctgtttaggtaaattttttcagaaagacttctaacaaaataagaaaagaaaagtttttcataattaccttataaaccagctaatgatagaagctctttcatattagttnttttcaaaagatatttttagattatgtataaactagcattaacttatagaaaagtttatntaatttttttctttttgttntcttnttttagtagtacttctaaatacatttatccagatagacccttaatattaatatatatcaacaatacttagaatcttatgagactgagcaggattattgtaggcaagtagtattggactcctacggttctcttnttgatctcttgcaatctgagctaacatgaccgtggagtaaatatt

SEQ ID NO: 68046 - DNA, 332 bp, Glycine max
  unsure (1)..(332): unsure at all n locations
ctcctcatgtgcatatagagggaattgtttacatttagcagctnctagtgtccgtaagatgttgaactttaagtatatgttccgaaaatttatnttacaaatgtaacccaaatgataatagtatcaagatatagatcaccaaagcaagagctgaaatttaaagcatcaacctccattgtcataaaactctactattcattaatctattgtaataataatctggatgtttatatattcgtgtctggtagggtagagtagtaattattactggcagagcacaaagtaatacgtctcttcacggtgttaattttagtataaataaagttcttaat

SEQ ID NO: 68047 - DNA, 436 bp, Glycine max
  unsure (1)..(436): unsure at all n locations
agctntagaatatgaataaattgttggtaatcaattaccatccatgtgtaatccattacacanttataaatttgaattcaaatttctagtgactgttataaacattttcagctgctggtaatcgattaccggagagcaaatctcaatttgaaatgatagaattctttggtcaaaccttttgttttttcaatttggaaacttcttccaaaagattctagaaatcaacttgatcatatatcttgactttcttggattcttgtcttgaataaaacttagaagcacttgatcctttagcatcatcaagacatcaaaacatcttgcttctacataggagtcattngacttaatccatcaagctgataaatcttcaattacttctcggccttggaaaattcttgtctgcacaaacaattgcgtctttactcttgctcactac

SEQ ID NO: 68048 - DNA, 369 bp, Glycine max
  unsure (1)..(369): unsure at all n locations
cgaccagcacccactctcctgttgngctgtaatgagcttctttctgagcactgcgaacactgcctcgtgactgaggaagaaatcatcaacagcatcaatgttcgaggtaccgacgaggtattgaggaatggaaggcgatttcttcccaaaggtagcttcatatggcgtgaccccagtggcagtatgaatggaagtgttgtacgaccattctgcccaaataagaaacttgccccatgatgaaggctgttgatgaacaaaggcccggagatattgttcgatcaccctgttcaatacttttgtttggtcgtccgattgtgggtgataagttaagctcatgcacagcctaatgcctgagagtttgaacaactc

SEQ ID NO: 68049 - DNA, 343 bp, Glycine max
  unsure (1)..(343): unsure at all n locations
agcttccttntagtgcgtcacatttaanaccaagttcattggtggttcgagccttcaacggtagtaggcgggaagtgatggnggaaatcgacatccccattcagataggcccncacacttgcaatgtggtttttcaagtaatggacataaatcccgcctacagctgcctcttgggaagaccttggattcatgcgctgggagtggtcccttcgacgcttcactaaaaattgaagttcgcggttggtggacttttggtgatagtgtcaggcgaagaggatatgttggtgagctgcccctccttccgaccatatgtagaagcagcggtagaatctttggaaacagc

SEQ ID NO: 68050 - DNA, 397 bp, Glycine max
  unsure (1)..(397): unsure at all n locations
attcatgggccttcttccanaattaacttcatgttntaaatgatctaagaatatccaaaatatctggctcaactgattgccataacacatcgcagagttgatagccaagcttctcccattcaggtcttttgtcatttggaatggaatcggaagctntctccaagtggtcatggtgtccttgactgagaaaccaaagttccacggaagcagaccacgaggggtaattnttccagtttagtttagcagtcgagatggttggagtcccaaagaaggagaaaacaggtccagaggaagccattntgacccacaagatgaaaccctaagggagtaaaaaggagaggagaatanggctgatacgttccangtgacaactganaactganggctggaacggact

SEQ ID NO: 68051 - DNA, 409 bp, Glycine max
  unsure (1)..(409): unsure at all n locations
tgctcctatgacgaacttcgactcgactcctgtgggaaggatcttatcccgagtaaatatgagaaattccaaccaatttccttgttttttttattactatttaatcatgctcagaattttgatccatctttactctcttgcaggcttcagcagatttgagtattctgaactttgatataccttattccatcacctttgtagtatctcgagcaattgatattgtggtgacgatttatatcatggttttagtaacatggccagtacttattggtgccatttctgcaatggttgcagtcaaatatgttcaggtttaccaactatcttatttttctgttcccgcccctgcttagatcacagagctagaactttcttaattcttttnttcccccctaaagggatatatcaagcc

SEQ ID NO: 68052 - DNA, 484 bp, Glycine max
  unsure (1)..(484): unsure at all n locations
tctcggtcacccacgtanaactcacgaattctgttctttggattgnctttataanattgaacttgtggatntagatcccattaggaaggcactagcttgtctctactaaataatctgtaatttgatgctaataagtatcttttgttagtcatataaactcttatatttggttgagatcaatacttcattaatatcactcttatttaatggtgggtttcaaggttgggctcactgctgtataccttntcgccattcagtatattaccaagattggtggcaaggtgtctgtcaaacttatcatgaatgaaaacaatgagaacacagaanaacgggctgatagcttggtctacaaggtaatgatggngattaatagaataccatgtngttttttcactttatcctaaacattgaacttanngggttactttctcccacangtgtntggtctgtactttatgcagacatacattggaatcttttatca

SEQ ID NO: 68053 - DNA, 372 bp, Glycine max
  unsure (1)..(372): unsure at all n locations
aaaataaccgccttcgtatggaatggatcgcatactcttatatacaaaaaatgccaccggtcatttgttaaggacggttttagtagaaccgtccttattcacgcgtcgtaaaaagcttttaatttagtagtgataataatgctatttcaaagaagaatgagagaatctagagttttcatcaccctcaccaatccatcccaccctagattgttgggccatttcttcaaagatctccaaaattctttagaaagaatcaacctccttccttcttcatcttcaaccctctcacacaaccttatgttcaccacttctagctcctccactgtggaatntatattagcacccaaaccatcaaatacctgcacatgccaa

SEQ ID NO: 68054 - DNA, 473 bp, Glycine max
  unsure (1)..(473): unsure at all n locations
tatgatgagatanaatggatggatggagctgtgcaagctactcatttctctttatcatcttagtaccgtttncaagttttctgctttagataagtctgggatctcaatcaaatctggggagtatttaaggtcaattttctttaaattcacaagattctgtaacaagaaaaaaccatcacaatgttcagaaattattaaattcataatcacggccttaactaaaagaaaaatctaatcattcagatgagaaagtggtgaatagttaaacatagaagaatcgtatatcgttcattagtttacacattgttagttgaattatacatttcctagggtacctattgatatagaccagaactccagaagggaacctgaaggaggttttcccgaacagttctggaaaccgcatatgttaatgatgaagtagtctgtaaatggaaaacaaaacaagcaagaataaatttgtcaaagtgctt

SEQ ID NO: 68055 - DNA, 402 bp, Glycine max
  unsure (1)..(402): unsure at all n locations
tatttttcaccttctcgctaagcttattntctagnctagcgagcatctgctaagcgcaacactcatgggctaagcacgaggaagactctgagagaagatgagttgtacaggttcgctaagcgcaccacttcatctcactaagcgcattgctntagtccatctgctaagccgtccataattgcgctaagcgcaagagcacgaacaaggccacctatttaagcctgaaatcagaatttagagagcgagtttggactaggattcagagctttgcatgtctaaagattctagagagagaaaggtccaagttccaaagagttttgagagaatttgttgtgtgaagattngcagagactatggcttgaagtaagagtcggtttgagaacttgagatgtagttgtgagt

SEQ ID NO: 68056 - DNA, 439 bp, Glycine max
  unsure (1)..(439): unsure at all n locations
ttaatgaggttgaatgacaaacctgcttggaccattagtttcaatatgttgatgcaccttcaatacttcattgttatccattgactctcttatgttcatttgcctcaacatctccattnttctccgattgattgcattntctggattcttacaaaatttgtccattggtctttttttagtcccacactatgtctttgcacttgcagtagcattacaagagtccgcaaactcatcttcacttccatcacatccaattggttcactaaattcaaaatctcttatatttgccatattaccattgtcagaagtattgtaagtggtcccactttttttggtagtcatatattccttcaactcttcgactacattaggtggagttttcttgcaagctgcaacgttctcgacttcccaatcaaggtgttgttggctctggttattc

SEQ ID NO: 68057 - DNA, 475 bp, Glycine max
ctgttgcatgcaagcttataagaacaaaattgccttaatcatttccaaatatgcatgttatttatgacgcatcaacaagaatcaagccaaggctattgtgcaagcaatcaatggggcaaaacacaccaaatgattataatgatggatggctcacattctcacaaaggtaaaatcatcactttcaaattgagctttcaaaactatcatgacatgtagagaagaatcaaggatttcaagtcacaaaatgtcaagaacttttattttcaaaagaattacccatttcttgaacatatcctataattcaaagaaaaacatgcaaaatcgtacgtgcacacaaaattgacccaaaatattaaacttgaaatgcgacgaaactaacaacattaacaaattaacacaacttacaaattaacaaaaccaacaatacttgcagaaccagagaacactccctcccccatacttaaacaacacattg

SEQ ID NO: 68058 - DNA, 446 bp, Glycine max
  unsure (1)..(446): unsure at all n locations
acctttgctaattcaattatgaattcccttcctaatattctagtgatcatcttgatgttgtgacttgtaatcttgaagtattgtcttgaattttaatcttgaaaagcccatttgcatcaattgcaacacatcatcatgatcatcatcaaaacatcaaagccaattgcatctacaatctccccctttntgatgatgacaatacaatacctgaaatcaagattcaagcaagcaacaaacaattgtatatagataaaatgtgcatccgttttctccccctatatttcggaatacatgatcacttgatttctaagtttggtaagctntttcttaagcttttgctacaacctttntctccccctttggcaacatcaaaaagccaaagaactcggaaatcaacacagttataacaatggagtagcaagatataagtatcagagtattaaatc

SEQ ID NO: 68059 - DNA, 388 bp, Glycine max
  unsure (1)..(388): unsure at all n locations
cacacccgcttgttaatcatggaggaggcgccgctcatgccatcgaagtgagtacgtcacatgggcccaagctttagaaagacgtaatgacccccacacaagttatctacatagccatgcaaaaggcgggcatgactccctacggtgggcgcatagaagaatcttgcttaatgcatctcggtgtactccatgacatggatacatgtttggcaagtagataactattagtacatatgatagactaatggtggnttgaagtctactgtaaaaggatgagagacaacatttattcctgcagtcagcatattaataatgactcctaaaacactaacctcttggtatacactttcacatggacaccatattccaaagactttacactcataac

SEQ ID NO: 68060 - DNA, 490 bp, Glycine max
  unsure (1)..(490): unsure at all n locations
tcctccaactcanacatggagagaagacaatatatacattgcattactctattgaataggagaataaatgtttccttatatattgttacaaaatattaccaattctttttcccatataggcatgcaataaccccaactgcttagtcaggcttgcctgaacttcatcttggaataattcctggattaggaggtagtaactggatccaagattctctccaagactgttggctaatntccctagcacaatcttgattttttctttgtaaaaatgaaaagaagttagaccgtgagtgagacactttaacagtgcatgtcttatgactatttgtccttattatgaaatgttccattagtattattaacttagaaagtaaattgtcttaggaactctacgacttcctcatcttgttggttgacaaaggctcttgagatgatgctggcattctacagnttatgcttccttttttataactattctatactgttcaat

SEQ ID NO: 68061 - DNA, 239 bp, Glycine max
  unsure (1)..(239): unsure at all n locations
cttaagcaccgcngctcagctgacctatgggagagcggttttttgtgtggacactactgcgataccttggtgcataatatctgaatggatggtgaaacgtagaatgaggacaccatgaacgccatgatcgtatatatactaccccaccgattcggaagctcacctggtgtgaccattgtatccattgcgccccttgttagctctagtacattttctaacttgagccctgttcttggatg

SEQ ID NO: 68062 - DNA, 260 bp, Glycine max
cctataaaactcagcttctccgcaactcatcgtcgggagaaggcgtttcttcgttcaccctcagcactcggtgtttcaattgcgacgaaaggtccggacagaccaccgggcacttgcacttgccaccaacgtagtaactcacagaaccacgcatctacttctaatcttctcaacctcaccgagaaacctctgtgccgcttaaaattaatactatatacatcgaatggaccagattgagaatcaagattgctcatcctcga

SEQ ID NO: 68063 - DNA, 486 bp, Glycine max
  unsure (1)..(486): unsure at all n locations
taagtcacctgcggcatgcaagcttgcccaggtgagctgatgcttagcccttattgaatgagctcgcctacgcaagctggntgcttangcatgaagctatntcatggcccaggcgagccacatgctatcctaagcgagctagggtctataaaaatccaaagaaagaccattttgcccccttccattgtatctttntgttttcttgatcaaaacactgagtgattccttgcttcgcactgtaactggcgccacatatagtaattcaactagcaagaatcaaaatatcataatgaacgatattcctcggacgaaattatggtctgacaacagactntagttnttctatgtgagaattagactntttctaatctcctctaactttatcacagaactcanacaactccttcatctggataaaactgactgcatgacgtcgcgactcatccatgctagcctacctcttcttgcacattctatctacaaatg

SEQ ID NO: 68064 - DNA, 438 bp, Glycine max
  unsure (1)..(438): unsure at all n locations
acacaagatactcagctgtggcgatatgttgggtgaattccgagctgtatatgtttgcaagcgaacgggtctgtgttcctgtgtaggacatcaacgatgtgtcaatgctcatggctggtgaggttcttgctgagctgtgtgcattacccgggtttatgtctaagctgcagcttgacaagttcttcgataggctttgggcatatatcaaaagtgttgtcgtgcagatctacattgtccaggcttgcctggtaggctatcggggctcagattggagaccctntgtccataatcatgacttgagtggtaccatttgttgtggggtgaggcttggcaagctccctggtgggaggatagggtgccactntcaagctntccatgtagcacttccatgtagcactatcgtgcctgcttttgatctgccttgacaattacgatctc

SEQ ID NO: 68065 - DNA, 390 bp, Glycine max
agcttctcatgcatgagagcaactctgcaattgcttgtcctatcatcataatgggctccgactaatgttccagattcaagaataccacgaagcgatagagaagacataccgttgattaagcacacaacaaaatatagctatgtcagaacataatttctcacacctgttaaaaaatataaaaatattaatgatattcctaataatatagtaatgtaagagatacttatttcttttaagtggatcacataaagcctcttaaaaattgtaagcgagccacttggttattaagtcatttctcatacacattctaagacaatgtatcatatacatcttcaaattaagataagaaatatcatatcacacaagttcctggttgtcaagccaatccta

SEQ ID NO: 68066 - DNA, 430 bp, Glycine max
  unsure (1)..(430): unsure at all n locations
actcagctgcttctacaatctctcccttttttatgatgacaaccctgaattttatatacacataaacattctttttcctagttcaattgccccttcttaattattccgagatcacttgttccaacaggttttagaaaaaccatcattggccaacgagtctcaaaaatagttgtccaaaaaccttggtagactaactaatgttaacaagtccaaacgacagttttttccaaaaccgtgtagcttcactaatcttaacaatggtttttccaaaattatcattgctcttttttaaagacgatttttgtataaccgtcgtagacccctcatcgtggaatacgttntttttagtagtgattgcaccaatgatagttgataacgaaagccatttatgtcagataatagcttaatttcatggggagtggggttagct

SEQ ID NO: 68067 - DNA, 489 bp, Glycine max
  unsure (1)..(489): unsure at all n locations
agcttgccatanacacagtgttcacaaaagtcatgtttctccaccttatctccacaaagcaagctgtatttttccagttcaatcaaccccctctcattcacatgtcccaaccttctgtgtcatagtttagtctttgacaaccttttgacagaaactgcagcaactgatcccattaccacttctccaattagagaatacatgccattctttngtatccctttcatgaatatcaaagagccatttagaactccattctcccctttgaacacataaccttgtttgtcaaaatcactcagagaaatcaaatttctcttcaaatctaggacaagccttacattcttgatgactctctcaacaccatcatgaagcttanacctcacagacccaactcaagtgatcttacaggacttgttgttccaagtaggaatgaaccaccaacttggtcatcatgctcccanactaagacttgttagagtcatatggaatgaa

SEQ ID NO: 68068 - DNA, 445 bp, Glycine max
  unsure (1)..(445): unsure at all n locations
cttganagagcatcaacataaacgcacccgtacttataataatctaattatcgaagctntagtgtgttcttcgagcttctctgcgaaaccaaaagtatgtgatgcaatcctaccccgcaagggcattggatagaaaactccaagtagattgggccagagatgcaagagaaggccctagggttcttatgagccttagggtagatttcgggcccatgggctaagtacgagcccacttatctttgtaaatattagattaaggtttcattatttttgggccttgtatttagggctccataatgtangtagggtaccctagaaatataagatttttcagcccttgtattttacggcacctagactagtttttgtattagggatagttntgtaatttcatatgccactaagtggatattgatgtgtgtggttggaaataaattaattgaat

SEQ ID NO: 68069 - DNA, 322 bp, Glycine max
  unsure (1)..(322): unsure at all n locations
ngcttgagatgaggaagtgttgttggtttaaactttctgcttttattggtgaccacagagtggtacctggagatatgtcgcggnggtcaggagaccttgtggacgtcaggtggggtgctattgcccaaaaccaagcttgaccaatcccgacccaacccgggcatagtcggtcagtgagaacatgtgacgtacctaagcaggcgagctcctggcagtcaacagataatatgaaaacaagaccacagagcatggaggcttgtggtggctggccagctgtgaattatgtgtaatatgtggatggtggcctctggtaatcnattac

SEQ ID NO: 68070 - DNA, 474 bp, Glycine max
  unsure (1)..(474): unsure at all n locations
tctacttatgtggcagggcgggcttccttcaccttcttgtctctaacgtngaacttgaccattgttcttccttcccgcgatgcttcttttcatgtccgcctgagtgggcttatagcctaaaccatacttcccacgatttccttgggtatttatcaggctagttatgccgccgttgttttttcctaaacccatcccgggttcataaccgttccccaacataactcgggccatcattaccgctgcatcggacagacaaggctgcccaaagagggagtccacggaggaaatgctgaccacctcanaagactggaaagcagtttctgacgattcttctgcggcttccacataaggcatggaggatgggcagcttaccaagatatcttcctcgcctgacacgatgaccaagtgccccttccactacgaattcagctnttggtggagtgtagaanggcacaactccactgagtggatcca

SEQ ID NO: 68071 - DNA, 426 bp, Glycine max
gcttggactatatcccaccatatgagaccgtgtttatgtaaacctcgattcgctatctatccgtacaatatatttcgttcacacaaatatgggagctatggaaagatattcacttagtatatgacagacaattaatccatttattttgaaacttccacggcaccaggagatgagatttgaaaatttgtgccaatgacaatgagtcacctttcaaccataattgatccggacctttgccttgtgctatttcaatagctaaaaatccaacttgcaactcagcatgaaaggcaattgatatatcctaagagtgagagaaacaacccaaaaagcacccctagaattacgaaaaattcccccactagctgaaagccctagacaacatatttgggcaccatcaatgttgcacttaatccatcccatttgagt

SEQ ID NO: 68072 - DNA, 500 bp, Glycine max
  unsure (1)..(500): unsure at all n locations
tcgtgatggngcctagggctgaaacaccccttaaatggatcttttcacccnctatttgagttnntgctcattttccttccgaaacgttgcgaaatcttatggatcacgcgacaattggcattaagcatctcaacatgaccagcaaaaatctgcatgtcgacaaacaattgtccacgaatgaaattagggtatgacanctaaatatcttccttaccacatagtctgatcacattgatagaagcctccatagaaccaatattctgagagttgaggaatggatgatgcaagtcatgtctagttgacatattgcttctaattggtagttgtttnttatcaaggcactgctttaaaatctttcttanattgtggttgcttgccttggctatttggaaagatacatcacaacaattagatccttccgttaaaagaatacattactattttggaaagatacatcacatgaaaggagtagatctaaaaagaattattatttataatgt

SEQ ID NO: 68073 - DNA, 344 bp, Glycine max
  unsure (1)..(344): unsure at all n locations
ctgcagcttgtcttttataaaaagaaggctgatcttatatgttatctaanaaacccttgnggtggatccaagtgttccgatcatttgcatattcatgttttggtggcatactcaccattgtttatctctttaggaatntcatcataactaagaaaacaccaaggcacccctataacactcgatccataaaaatggataatgaagagggcgtgcaagaacagatgaaggccgatctatcggctttaaaagatcaaatggcttccatctcggaggtcatgttaaaactccagaanactatagaggataaagccacggcaaccgcctccatcactattatggaagcg

SEQ ID NO: 68074 - DNA, 492 bp, Glycine max
  unsure (1)..(492): unsure at all n locations
ntatgattaagataaatgaaatgtctgatatataatattccttatacataattggcaaccattcataacaaatgaaatctttagtctatgtttattcaacaccaagaaagtaaaaatatacaaggaaaccagggataagagcatgaaaaggaggacacaagaattttaatatggcaaagataaagcaaaagaacaaattatgaaactgaatttctctcagggtaaaggttatggcttcaaaagtagaatccttttgtagcatgtggctggaaatttagttattgactatgaaataagataaaatcaatcatctggattcaatgattttaccaacagaattattaactatacctccatgtccttctgttgaaaccatttcccttttagcatgaactcgtgatccaataaatcacnttttggatcatatntagctctgcatgccaataacggatacaatcataacgtaatagcatataatagtttatgttaaat

SEQ ID NO: 68075 - DNA, 493 bp, Glycine max
  unsure (1)..(493): unsure at all n locations
gcttgttgaagtgataggcctcaaggaccgacnctcntatcagcatagagcatggctattgctgcttatggatagtggatttacgatcgaggtttgcaaagtgaaacctttgtagagatctacacaaatcattacaagttgcttaaaactactgcagatattgaagttcattgctctggcaaatttttcatcacgagaggaattcactttgatgaagttcgttattcatttacaagcattactcctggaaagaggaactgttctataccaaaaatgaactactctagactgaaagcgataggagccccgccagaagatagagtcaatgaactaatgacgtattggagcccatatcanaatacaatcattgctttatgctngcacttgctgattcttcattcaantaatctccttatcatgtcttaattaaatgtatgttaagagaggctaatcttgtgtaaataaaatctttgccattaatgataatgatagt

SEQ ID NO: 68076 - DNA, 496 bp, Glycine max
  unsure (1)..(496): unsure at all n locations
ntagccaatagaatcgtcggattcccaccctcctttctcctgttctgtttcgtctccgagctcgacctagagattcaccgggaagtccaggatatgcaaccattcactcttgtgcatgccgccgagcttgcatgccttcaggagaaaaaactctntgaatctcgcatgcaacctcgccctcgcccaccaattttcctccaccattacctgctctcgttcctacacctaaacccactctaccccttttaccttcactagccaagcccccacccattctcctcaaatgccttacccctgaggaccacagtgacaatcccacaagccctaatatagcccctcttttacctaatgttgatgactcgacccaacctaaaacctaacttaactcaccacttacccaaaatccacccgacccacctcaggcccaaattagccttcacgctctagcaggccacacagccccaaaaaccttacgcatggtgggtcggatctctca

SEQ ID NO: 68077 - DNA, 395 bp, Glycine max
  unsure (1)..(395): unsure at all n locations
aattcanactgaatctacatgaacacaaagtggtgttgctctagcatgaatttataaagtggtatatatatgtatggtgccatgtgtagtgtatagagttgaccttacctctataaagtacagtctatattgagaaggacatagaggggagaaagatctacgagatcttgtcaaggataactaataatgatggatgtggcaaatagagggtcaatcttatctcagattgagcatcttggaactaatttttcactttatgggtgtcttatctttcttatatcctctcagtgaaaaacctaatgattattctgttgctcgctctaggtgtcctattgacaaatattgaatgaaaactatttgagtacccaatgtgtctccaacttgctcatgctctt

SEQ ID NO: 68078 - DNA, 268 bp, Glycine max
gtagacctgcacgcgtgcaagcttctagccaaatggacttaccttgaattaatttctttgtatatccctttgagccttgcttgcctttccttgttatgaagctcactacaagccttaagtgaaaaaccatgatattaccatatccttaaggaattttggagctctggaattcgtttgggaataagtgtggtgggtttttgtttcattggacaactagtttagttgactatgcttcatgatgtattttgggccatacttgacgttcatt

SEQ ID NO: 68079 - DNA, 444 bp, Glycine max
  unsure (1)..(444): unsure at all n locations
ctaagcttgcctgtgcgagctgggcggaaccacctccctattttgctatttttggtgtgaggngctgaggaaaacaagttcaacatctttggcactcacgattcactaaaaataagtgaggaaaagaagaaagagggaaaaaatcccagctgagacgcttccataatgattccatgacatttttgtgatcaattacgctaatgttcttcaccattctctgcctttcttcgatcgttcttcatcgttcatcgatcttcaaccggttagttttcgatttcgaagctttgaattcattatatgcacccttaggggtccattcttgctttgtatgatgtcatcttcatctcgattactatcggcattcttttcttcggtttaaacgagtttcgactgatcgtttaagctgtaacctccatgaatgattaaatgaatttcaattgatca

SEQ ID NO: 68080 - DNA, 417 bp, Glycine max
  unsure (1)..(417): unsure at all n locations
gctgtggagctgctatggaggctgtatctttcagcttcaatgaggtccttcaatggtgattntccaccatggagatgcaacggaaggcaaaggagaagaggagaggggaggcaccatccactagggaataagccatggaagaagcagcttcaccaccaagaatgtgccttggattataaacttgaagaggatgctttaatggaggaaaataaagagagaaggggggagcacaaaattgaaggaataaaagaatgagagaagtggaactttgaagtgtatctcataagactttcaattaataaagatacaacaagtgttacacatgcttctatatatagactacgttgcttccttgagaagctctcttgagaaaacattcttgagaagcttctttgaacttccttgagaagctagagc

SEQ ID NO: 68081 - DNA, 481 bp, Glycine max
  unsure (1)..(481): unsure at all n locations
accatagaaactcagctcttggcatcctattccgcgatcagttggtctttgctttagctngaacaacggctcacaaatggcggtgagctgcgatatgaatctggcaatataattcaagcgtcccacgaagcctcggacttgcctctcagtacgaggttctggcatctcaaggatggccttcaccttttcggggtctacctctatccctttctggctcacgatgaaaccaagcaatttccctgatttaaccccaaaggtacactcggcggngttcaaccttaattgatatttcttaagcctttcgaacaacttccgcaggttgacaaggtgttcttcctcggatttagatntagcaattatgtcgtccacgtagacctcgatctcttgatgcatcatatcatggaacaaagctaccatggcctcgtgattagttgccccagcattcttgagtccgaaagacatcaccttgtaacagaacgtc

SEQ ID NO: 68082 - DNA, 362 bp, Glycine max
  unsure (1)..(362): unsure at all n locations
gcagctgcagcttgaccttcatagagtggacagaattgctatatctataaagacanaactaaagctgggctgatgttctaaggacactttacaatcctttgtaatcaactgagctacactcagtaagttttggtccgcgttaggaacataaagaacatctgatattgatatgacgcctgaacacgtcgagattgcaacaattccttttcctttacaggaatataggcaccattcccaattctaaccactgagacattatatggctgcatatccttgaatacgagcttatcatatgttatgttggttaaacaaccatgatgaatcgaccaactctcacttgatgcactactcaacaatcatgt

SEQ ID NO: 68083 - DNA, 404 bp, Glycine max
  unsure (1)..(404): unsure at all n locations
atattctactctcgcattagacatacacaaacatttgatgatcaactaaattaatgaaaatcaatactctagaacgattataataatctatatcatcttttatatatatatatatgtatctatatatatatatatatctaaatatagatatatataatgtcgcggatgcactcctattaagggagcgcacatgattctactaagctacttataaatatttgatatgtgcatattatattcactctatgtttatataattaacacacagctatatattcattctttgtttaatgagaataatctattacttatttctgagaaataaagtatccctcgacatagatcctagactcccaaatagctatgttgtatatatatntctgatatatatgtatattgcagat

SEQ ID NO: 68084 - DNA, 443 bp, Glycine max
  unsure (1)..(443): unsure at all n locations
ggattagaatgcaagaaaggaatgtttttgttgcccagaactttctaagaatcccaatggcaataatctcacctgataatccacaccagtcgtagtaacaagacgaagaaatcctaagatgatcagtggactagttgaaactattgcagtctttcagcttttagaacatgacataacaatgacactatcagaggaatgcagtatatctgagtaaattcattaaaaaagacatcaatgttattatatagagaagataacaacaagagaaaaggagaaacttacgtgacacttggtttgagtggtttctggtttcattttcnaagaaaacagaaaataagagtgaaaatacatttgcttagagttagaaaacatttttgggaaaatattctcaaacccaaacataaataacgatcagtgtttcatctttctgaaaatgaactatt

SEQ ID NO: 68085 - DNA, 409 bp, Glycine max
  unsure (1)..(409): unsure at all n locations
agccttgcagcatggttattagaatcttatgatttttatattgaatcctaggatntagacatctatcgatctgtatcacaagatgaatctcacatgctgtatattacaatacatgaatgaatctgtgcgattttgtgataagctgtatggatgagggatccatttctttgttgcttgttcgggccgcatgggtataattttcttatgaagggtttcatgggctattgtctgctgctggttgttggatcccatggttaatgcttatttctatcattctttatgatctaaatagctgttaacctttggtgaacacatgtttgtatgtttggattccgtactcctgttccaatcataatatatcttttatttggctgataagaaatctgtgcgattttgtcttatgatcaca

SEQ ID NO: 68086 - DNA, 431 bp, Glycine max
  unsure (1)..(431): unsure at all n locations
ntntggagtagaaacatgggaccaactcattntatttcataatggatgtcatatctagtcaaggtcggagagaccatacaagtttcctaacaatttctaattatgtgggccattaagtctatcatatgctgacaatagccgagaagcccatgaatctcttcgggggcggagtaggtgtctgccattgccttggccttggctaacaatcggggaagttcttgactcccgttcaaggtaagagcaaaccgatccatccacatggttgcctcttggtgtaaagagtcgatcacccttcctctagcctctttttccgcgtatacttgggcatactcatccgcgattctatgctcgtgggccgtggctaaacctaactcttcttggtacttggcgatgatagctaacatngtggtctctgtctcgcataaacgctg

SEQ ID NO: 68087 - DNA, 483 bp, Glycine max
  unsure (1)..(483): unsure at all n locations
gcttttatccaggctcatcttggtgttccatggcttatttcttttggatggcgcctcctctcacctcttttcctttgtcttctgctgcatctccatggtggaaaatcaccattaaaggaccccattgaagctcaaagatccagcctccatagaagccccacaagcaagcttccatcacattattcttgagttatttctagatattggtaataacactttaatcgattaaaaagataatataattgattacttcattgaattaatcaattactttgtagatctaatcgattatagatggttataattgttttatctataaataaccatcttgtgttcccctccatatacattaagataatactcaatatcttgaaaataacccatgggcctctaaatgagctaaagatctcgagctgtcattagtgaaaagagaagagaagaanagagctntatagtgactcacaacttcttaatcgtttatta

SEQ ID NO: 68088 - DNA, 466 bp, Glycine max
  unsure (1)..(466): unsure at all n locations
agctntacatatatcatctaattagtttatgaagtgtaaaaaaatacttcctttgaactaataagcaaaaataatgaatcacattcatcaagaaaattagttaacataatttaatattgataatctcaataaaaaaatcattttctaaaataccctttataacaaaaaaggagaaagttgttgaaaataaaactttaattaaatgaagggtattttagagatatatcatcacatatagaagagttagtctaaagttgcttatattttaatccatcacatgtttttttttattttttatatttcatccaataaagaactattttaaatggctaatgaactattagtcctctatttattttttggttagtttgacctttattattgtaaagttcagttattctttaactattttttcgtcatttctagccttatattttaaaaaatatttagctttatctatttttag

SEQ ID NO: 68089 - DNA, 429 bp, Glycine max
  unsure (1)..(429): unsure at all n locations
ngaagaggaagtcgtcctgagagctngagatgagtttgtgagttattgtgangttctagaggtggaggagacatcctcgccgctnttatntcttcacatccttcattttctcttctctttgttgtaaaggaagcttcccagttatggagagctaaatcctttgttggttcttccttgtaggtacttgatgtaaatacctgtatatctatntaatgatgttntatgtgttctctgtgctatcagtacgtcatttcagtgtgtttttgccttgatcacgtagatgcatgctttgttaggatcattcaacaatggaaactggtctgattcttagaacttgnatggacagggcaagtttatcgtattatcacgaaggatcggngtacggcaacctaagttgttgatgtttgtcgtatgcgggttggtcaagtt

SEQ ID NO: 68090 - DNA, 405 bp, Glycine max
  unsure (1)..(405): unsure at all n locations
agcttagcgtgaccttataaactctcatccaacaactcctttacttgaggaataaactcaagcctaagaggtctggcaatgctaacaagtgtcttttcacaaaggagaaaatgtggaggttgtctaagaggggaaataactntaatatttgtctttatttcaaaatgtctctccttcttagctaacctcttggaggagacacttgcctccttacactcctccttaaccattaacgtttgttcttcttcttgtgggtagatctcttcactagattcttccccttttgcttcttcactttcactagaggaaggaaaagtagtagcctcatcttggatactataaatgtcttggcccctcataattcatggtttcttggtggggcattgagaagtaatgtgtcttttt

SEQ ID NO: 68091 - DNA, 411 bp, Glycine max
  unsure (1)..(411): unsure at all n locations
ngagggtaaactagatgccttggttaacctggtaacccagctgtctcttgaatcagaaatctgtacctgttgcaagactctgtggtttatgctcctttgccgaccaccatacagacctttgcccttctatgaagcaatctggagcaatggaacagcttgaagcttatgctgcaaacatctacaatagacctcctcaacctcagcagcaaaatcaaccacaacagaacaattatgacctctccagcaacagatacaatcccagatggaggaatcatcctaatcaccctagaagcataatatatcaccctaggcaatntatcaattttctgagcaacgacagttcccgatgcataatttgatgcatcacacataagctcaaaaggggctgccaatcnggtgcctgatgatggg

SEQ ID NO: 68092 - DNA, 443 bp, Glycine max
  unsure (1)..(443): unsure at all n locations
tcatcatcacccacctctgtttatttacaacttacaacttgcttattagatctcacttcccatatgacgactttactccagattttgtgtggtgaccatcatatagttccttatctacggagattctccaaccactctagtacgtgtacattgttaaaatgtgatttcaaaggccaaaataccagtaattgcaacatttttttttcattatgccatatgcaaatatgataacagacacatgttaacagttaacacaaatggttaagaacaaaagactaactttcacattctcctctctatatgtatgggtttgatgacgacatttaacttgtttcatagataagcctcttcaaaaatctctagtgacttctaaacatttgaataatcgcgatctangggagattgtttgcatctcaaacatgtgtaatgatcctttaagtgag

SEQ ID NO: 68093 - DNA, 499 bp, Glycine max
  unsure (1)..(499): unsure at all n locations
nttctagcctggatagtttanaagtcagagttgcaaaaacaattaccattcgtagatattaacacaggtttgaactattataaataagtaacacaaacctacatctatacatctttataatcatcaacagcatgcatatttggacaataatcaagagtcaacatgtaacaccttgtgaaagaagtcacatacttatgaactgtctctatagtagccaattntgttagtagcaataaaattaaattgttgacaagcagaaatgagtctttaaataaaaggtggaatttaagagaatagacaaagatntaccaattcatgcttgtcttgaagagctacagcatccaattataattaatgaacagggaataggtgtcacgatagagagctaagatatcactctttgctcataaataatagcagaatccacaaattcaattntaacataacaataatagaagaatctctgattagaactgctaatcttgagacgatatagttc

SEQ ID NO: 68094 - DNA, 433 bp, Glycine max
  unsure (1)..(433): unsure at all n locations
gcttcatcacattggccacgcacgcaggagtgtttgttcctaaatccctcctctatggactatgcattggcgtagaactccatgattatttatggatcatacttagccatgggngntgcaagttgagtccactgcctcctggcaatgtcctcctagaattcagcatattctccttgccttaattggacccgcctctccttgagaatagaccaacccttgactgtctcaaaatggcgctagtgttcatcgctttagaactgtcattccctaatttcggccacggacgatcatttgcaaatgtttggatttttgccagccaaaatgagctgcttaacaccaattgtcatgcaatccataagggtttttgatattntggaaaagaatgcggaatatacccaaaaggagggcaanatggtcatttggtgaacttttc

SEQ ID NO: 68095 - DNA, 422 bp, Glycine max
  unsure (1)..(422): unsure at all n locations
gcaagctnttccttgtttaatcacgagcctaaagtatgtatcttttcttcctctctccatcattgacctagcgattcctgttctcttccatggatctagatcttcatggatccatttgaagtactctggacatgttgatgctgttgatgaatcttggtcttgctccaactntgtagggtaataatcctttgggcaggtataagtcatgcctccattgaagcagttcacagggtattgggtttgtcgccttctgaaggttgtgattgtattggaaacattagtgcttgttgctttgaactgaaagacaataaataaaagaattttgatcccctgctagatcaatactattgactgcatgagaaactatacgctgaataggattgatatgtagctcgtcaatttatttgggtatctattgatat

SEQ ID NO: 68096 - DNA, 484 bp, Glycine max
  unsure (1)..(484): unsure at all n locations
actcagctaacaaacctcctactcttttaactntacatcttctaaaatggatatggataatttangatgaagatgaattgttagattggctcttttatcaaaagtacttctaagactaatattgaatatcaagtatatcattttctcagaaaaaggatgtaagttttcatcatcacttcttcaaatgaaaatgtaactccaagacagagacttcccacttgagcccagagacaaaagcacataaaagagaatttccttattttcctttcacctaanaactttaatgctgaaaaaagaatgaaacaaatgctaaaccatccaagactatacaatgcttgatatgccaccacaaaagcattcaaagccaggcaactcggaaagcaattaccattaaagagaggtaggttagtaggaaaataaactattctgcttttcttatattagtgttagagagaaagaaaanaagaataatcaacaacaaaga

SEQ ID NO: 68097 - DNA, 477 bp, Glycine max
  unsure (1)..(477): unsure at all n locations
gcttaagactgatattgattgtgttagtatgctctctcatgtgttcatttccttcaactgagaaccccattggttggtccatacaaacattctcctctaaatctccattctgaaaggcggctttcacatctatatgatgtagctccaagtcataatgggctactaatgtcatgataatcctgaaagaatcctttcgtgagaccagtaaaatgtctctttataatcaatgtcatctttctgagtaaattccttagcaacaagtctagccttataacgttcaaggttgccatgagagtcacgtttagtcttgaagacccacttacaaccaactctcttacaactctttggtaattctacaaggtcccaaacaccattatgttccatggaatctatctcttctttcatggcatctaaccacttctcaaaaatatcacaacttatagcttgtgaaaaccaaactggatcantatcattaat

SEQ ID NO: 68098 - DNA, 423 bp, Glycine max
  unsure (1)..(423): unsure at all n locations
gagggagaataaaacaatccaaaatcaattgttcttttcaagtaacgaagaattctnnttgcggctnttagatgaggagaggtaggagcctccataaagcgacacataactcccaccgcatatagaatatcgggccttgtattggttagataccttaaactccccacaagactcttgaagatcgtggagtctaccttctctccttcatcaaactttgataacttcaagccaccttccataggtgtgttcacgggattgcaatcaagcatattaaatttcttcaacacttcttttgtgtacctttcttgtgagacaaagataccattctccgtttgcttcacttccattcccaagtaatatgacatgagtcccatatctgtcatatcaaattcacgagacatggactccttgaagtcttcaaac

SEQ ID NO: 68099 - DNA, 442 bp, Glycine max
  unsure (1)..(442): unsure at all n locations
agcttcagattcatatccataggactatcaacagttctacttttctgcatgcctgtctcctccaaaatgttaagggcgtacttcctttgagagatcacaataccatctcctgactgagccacctcagtaccaaggaagtacttcaaatatcccacgtctttggtctggaaacgactaaataagtgctcctttagctgaataatcttagaagcatcattccctgtaatcactatatcatcaacatatactatcaagtaaacactatttccaggggatgaatgacaataaaaaacagaatgatcagcctcactacgtttcaacccaaaaagttgaacaatatgactgaatttaccaaaccaagcccgaggtgattgctccaacccatagagagatcgacgcagcttacaaacaagactatactcccctgagcaacanacccaag

SEQ ID NO: 68100 - DNA, 470 bp, Glycine max
  unsure (1)..(470): unsure at all n locations
ctaagcttagcacttctgtanggtttcagggctntccatcagctctgattaatcttccatatactcagccggtattaggcctcatgagctntctcatattcaacagcttacttgggtgttccccttttatcatctagattaaatgtatgtcattatgctcccttgctttccaagattactggcctgattcanggatggagcaagaagtctttatcttatgcatgtcagttagagttgatcagagcagttattcaaggaattgtgaatttctggatggngattnttcctttgccgcaatctgttatggatcgaatcaatgcttcgtgccgtaattntctgtggggcaaagtggatattggcaaaaacaagcccttggttacttagtcagtagtttgttctctgaanaaagaagggggcttanngccttttaatctcaagggactgaaccttgcgcttctttcccgtatcct

SEQ ID NO: 68101 - DNA, 374 bp, Glycine max
  unsure (1)..(374): unsure at all n locations
catgcaagctcctatactttatacaagaatgaagcgttgtttccacttgntagacaagtggcctcagatatttataaaggcgggttgaattaatatattgcaaactatctccgcaattaaaattctatttcactttctatgcaagtcacaaattcccttaaatatgaactcttaaataaggattcaaataaaacactctgaatataaatataanncaatattaaataatagagtctaatggaagagaaagccgaacctcatatttatactggttcggccacacacttgtgcctacgttcagtctacaacaacccgcttgagagttccattatcttgtaaaatccttttacaagttctgaacacacaaggacaat

SEQ ID NO: 68102 - DNA, 462 bp, Glycine max
  unsure (1)..(462): unsure at all n locations
tgctgagggtctctattagggctgttatttgtcggtctacatctngttccgagctaaggttacatcttgagtggtgagttctagaaggcttctctttgttggtgcatatgtgcgatcacgaagaatggcgtgatcactagccgccatgctttctatgagttccattgcctcctccggtgtctttagcttgatcttccctcctgcggatgcatctagtaattgctttgattgtggtcgcagaccatctatgaagatgttcaattgtaccggttcactgtacccatgtgtaggcatcttcctgagtagtccgtggaaatgggtgagtgcctccctgagggattcgtcaggaaattgatggaatgaagagatttccatcttgccttcagtggtctctgattctgggatgtatttcttcatgaattcttcccacctcatccatgtgacatgctattcccttaacca

SEQ ID NO: 68103 - DNA, 420 bp, Glycine max
  unsure (1)..(420): unsure at all n locations
agctntcaactctaccttgagcttctcatctatgttgtctttcttcaaatcttcaaaagtatgctcccttgagggaatttcctttaatcagtctaagtcttctagacattctctgagatcattttcttcctcattagtcaagcaatcaacaacatttattaaggccttctctaatggggagtgaatggccaggtgttgcatagcgagatcgacttcttgatctattgactccaccttgaagcatgttttactatcactaggatgctttattgcttcaaacaggttgaaggttgactttttattctccacgctcatctccaagtattcattccctatgtccacaacatatattgcagtaagtatgaattgtcaacccaatatcaggggaataatagagttctattctatattcatgatcac

SEQ ID NO: 68104 - DNA, 486 bp, Glycine max
  unsure (1)..(486): unsure at all n locations
tatctattgtgtggctgggggataatntaactctacattcattatattctacnttgtatttaataagcaatcagcagacctttctatttctatttnttacacatttaaaactcaaacatataaaatatataacaaactaacaaagataaagacaaaaaaaaggaaatataaactcacctcacttgctgctgctgcccatcatttcactctcacaacaaataggaatcatgtaccttcatggacggatccacataaagctctaaggagatgattgctcccattaagatattttttgtacttaaatatatttaataaaaaatttactgtccaaattgggccatatgtctaattcaatcacccgcacacctttcttcagtgcatntatgatggngacgtcactgcagtcgctgctcagctgattcccagttaaataggaattatggtcagtatatatgaaataatgtgacaagggtaaagcatatcatg

SEQ ID NO: 68105 - DNA, 348 bp, Glycine max
  unsure (1)..(348): unsure at all n locations
ataactttcattcttatgttcgatncacgcacatcacttattgagacccttgaaatagaacaacggaagctctcgagaaattcaattggtcataactctagacaaggtggaccgattcacgcacatcacatgtcgagacgctcgaaattgaacaacggaagctttcgagaaatcaaaattgtcataacttttcacacggaggtccgattcaagcacatcacatatggagacgcctgaaatngaacccatgaagatctcgagaaattcaaatgggcataactctccacacagacgtccgattcacgagctatatatatcgagacgctcagaattgacaacggaagctct

SEQ ID NO: 68106 - DNA, 401 bp, Glycine max
cctgtagagagcatctatagttgatacacaggctttatgaccagcatatgaagctgaatgtccccaccaatctgagaagataaactctataggagagtaaacagatatagaagtgtgatgtggtaatctatgatattttttcatcctcaagaagaacatacatcagaaaagtatttaccatttgagggaaatattacattgattgaagactatcttcattacatgactattaagatgagctaacctagcatgccagagactagctatactaagagaagaaactacagaactggaaacgccagtatagttgtcattaaccgtatcagctgtcatagacaagccattatctgagattgaagtacacaacagcatgggagagatgtcttgaacttgatgtatga

SEQ ID NO: 68107 - DNA, 445 bp, Glycine max
  unsure (1)..(445): unsure at all n locations
agcttgttgatntacttaacagaagatgatactnatttgntattagagttaacccanaatattagaaaagatagcagaatattttggcaaaaattaaaactttcaaatccaatttcataaaacatcacttgatctttaagatgtgcataataaaacataataatcgcttaacgtgttaaaacattgaactggcgagtaaaatggaaacataaataaaccatacatgcttaaataaataatgggtgaaaataaacaagtgaacctccatggtcaccaaatataaataaataagtatcatgtgtcataaagagtagcaaaatgtaatgtgcctcggtgaaataagtgagtaacatatactgccccaagtaagtaaagtaatggtaagtagtaatgaaaggataagtacaaaaggtctgagcctacatctacccatcccaaaatacac

SEQ ID NO: 68108 - DNA, 473 bp, Glycine max
tcgacagagaactctaatgcatagtgtcccagtctctgatagttaccattaagctgaatacatatatgtaatgataatctgtagccaattaaaggttcctggatccagagcattgaataaacttttacattgcggcgtctttgtagcattatactattgtagaaccatgttcaagaaatcatataccagataacatagctgcaatacatcatatatttcaaagctcactaaggactggagtaatttgatgcattgtattctcctttctagtatatttgttttcataatttcaaaagatataagcacaaattattttatatttttattatttcagtatgtacaaagtttcatgtaaagatgaccaattgcaattcagaggcagagaaaatcctatccttatgacctgcataacccagctatgacaaattatagaatttaaatctattggggaaaaaataccaagcagtacactg

SEQ ID NO: 68109 - DNA, 434 bp, Glycine max
  unsure (1)..(434): unsure at all n locations
agcttgccacccatctcgcccaggcgagtttgttgtttccttcataacaacagccttctggagaaaccctctggatggcccaagtgggcctggttgctatttgcacccccattgttactaactacaccccctgcctttttcttggngattctttttttcgtaaagttacggaaacttacgaatttcgtaacgatacttgttttctttccgtaatgttacggaaccttgcggattacataatcatcccctttttgacttacggaatgttacggaacctcactaattgtgcaacgatgcttccatttgatttccggtgtgtcacagagccttactgattgtgcatcaatattatcttttgttttcggcatgcctagaattcacaaattgctaatgatgggtgccagccctcacaaggccaaacaaaagttcatgta

SEQ ID NO: 68110 - DNA, 443 bp, Glycine max
aagcttaggctgttcaatttctctagatagctgcacagaaggtcttatgtctgtatggtggtcgacaaaggaacataaaccacagagtattgcgacaggtatagatttttgattcaaggccagttgggttaccaggttaaccaaggcatctagtttaccctcaaacttcttagtttcagatgatgaagatgaattcgtggctacctcatgcactcctctaatgacaatagcatcatttctggcactaaattgctgggagttggaagccatcttctcaattaaattcctggcttcaacaggggtcatgtctccaagggctccaccactggcaacatctatgatacttctctccatgttactgagtccttcataaaaatattggagaagaagctgctcggaaatctggtggtgagggcaactggcgcatagtttttaaatctctc

SEQ ID NO: 68111 - DNA, 379 bp, Glycine max
  unsure (1)..(379): unsure at all n locations
agcttctagccagatggacttatcttgtattaattctnttgatagcccttttgagccttgtntccctttccttgttntgaagctcactacaagccttaaatgacaaaaaccatgatatcaccatatccttaagggaatttggagctntggaattgttttgggaataagtgtggcgggtttttgtttcataggataacttgttttgggccatacttgatgtacattgtatattggctaaatgttggacatgctgaatganatgttgcttctcacaggctataaataaaaaaaattctgacaaagaaaaagaaaaacaattaatgtgagtgaattagaatctaaatggcacaagagtgatgaaactcttgggtctactctt

SEQ ID NO: 68112 - DNA, 462 bp, Glycine max
  unsure (1)..(462): unsure at all n locations
tctntggagaaacttccttgacaagctagagcttagctacactcatccctctcataactaagctcacctccttgagaagcttccttaagaagattcctaaagaagctagagcttagctacacatacctctctaatagctaagctcatctccttgagatgagaagctagagcttagctacacaccccctataatagctaagctcacccccatgacaaanaaacatgaaaatacaaaaaaaagtccttactacaaagactactcaaaatgccccgaaatacaaggctaaaaccctatactactagaatggccaaaatacaaggcccggacgaaggaaaaacctattctaatatttacaaagataagcgggctcatacttagcccatgggctcgaaatctaccctaaggctcatgagaaccctatgggcttcccttggatctctagcccaatcttcttggagtct

SEQ ID NO: 68113 - DNA, 346 bp, Glycine max
  unsure (1)..(346): unsure at all n locations
agcttagccctagaggggatgtgttcttttatgtcatggagaggatcagtaataatgcctataggttggacctgtcagcaccacttttaatatttctgatttaattccttttgcaggtggagctgatatagaggaggaggaaccaacagaattgaggtcaaatcctcttcaagggggaggggatgatgcaatcctccctaggaaaggaccagttaccagagccatgagcaagaggctccaagaggattgtgctagagttgataaagaaggccttatggttctcatgaaccttanggtagaattttgagcccatgggccaaggttgggtccactcttctttgtaaat

SEQ ID NO: 68114 - DNA, 446 bp, Glycine max
  unsure (1)..(446): unsure at all n locations
tgcctgtccgatgcaacaataatgatggtccgagttatgttgttgaacggttacgaacccggaatgggtttaggcaaagacaacggcggcataactagcctgataaatgccaaaggaaatcgtgggaagtatgggttaggctataagcccactcaggcagatataaagagaagcattgcgggaaggaagagcggtagtcaaagcttgcggttgagacaagaaggtgaaggaagcccaccctgccacataagtaggagctntataagcgcgggtctgggggacgaaggtcaagtggtcgcgatatacgaagataatattccgagtacattggaattggtacgaccatgccctcctgatttccagctgggaaattggcgagtggaagaacgccccggcatttacgcgacgagcataatgtaaacctctacgatttaaaagctctatag

SEQ ID NO: 68115 - DNA, 429 bp, Glycine max
  unsure (1)..(429): unsure at all n locations
gcttataatactccatatcaaaatgaatttgattataattatacaaactaaaaagctcaagtgcttcactgttgttcaaggccccaacttggtatatatcatcaactntattagcgataagcacttgtttatctctggttgtaataataattctactacctcgtccaaaccaatcatggttttcaaataattnttctggtaaatttgaatcattcacatcatcaagcacaattaaaaccttcatacgaccaatctttctcttaatataatttgacaatctaggcatatgatccatttccacatcttctccaagtattgcagaaaatagttttctcttcaaataaattgttccttgtctgcttgattcttcctttacatttgccagaaaataataaccatcatattcggagcgtagtttgcaaatatttc

SEQ ID NO: 68116 - DNA, 461 bp, Glycine max
  unsure (1)..(461): unsure at all n locations
ctgctgttcaagtatattgatcacgggatatattacattttgaaggacacctaaatttcagctgttaatggaatatatttccagtttcatttgtgtttttttattagagatcatgagtatttcactcgtctacgtgattgtcattccaccaagaaaagtttacaaaaaaaaacatgtaaatgcagcagaacatacctaacaccaatacgtcattcattagttatttagttatgtatttaatagttatagtatgaaaaatgttatagaattcactgtgtataatggcttccttttatctatntagtgaatccttgttttataaattcanaatgttgcggaaactggatttgaactcctattttttactatttcatgtaaacattanatatataatccttntctaaagtngatcgatattcaaatcatcgactagtacgactaaccataaaaaagacaaaata

SEQ ID NO: 68117 - DNA, 398 bp, Glycine max
  unsure (1)..(398): unsure at all n locations
agctntatacaagcnantcgagactctaataaaggtccatttcttatctcgggtttctaactccacaccttcataccttgtgataggtgtggatgtgtccatggttcaggagaataaataatggaaggcgagttggctcaagccatggatgagttcaaatatgtatgaggtaggtgttggatcaagtggcctcaaaataattaagaaggaggggttgaattaattattcctaaacctttactaattaaaaatttannnntntaagggctttactatgttgttaagtaaatgaagaatagaaaagaaacttaaccaatagtaaaagcgagaattatagtgcacaacggatattataagagtanagatgaacgagacacacactccagagtttttatact

SEQ ID NO: 68118 - DNA, 439 bp, Glycine max
  unsure (1)..(439): unsure at all n locations
gcttctgngtactgttagtcgatgaatacgacatacttttgtgtaataaaattgngcaaattgtatctaactcctcccatttatggntattctttagtgctgtaattactttttgttaaatataggtaataagtacttagtacttccattttgtgtatttaataatcatttcctttcaatttcaggttaataaagcaagtttgtgaagtgctgatttttagcttctcgctaagccaatctgccggaattataaaatgatgttctttttgtagaatctgaaacttccttagccttttcatgtagtgacatgagtatttgactcaagaatatttgtgttaaccttatttctcanatccatagtaatttccttcgttttggcataatagagacctggttcggatcgacaagcgtgaacgaaagagagaacctatagtgacgt

SEQ ID NO: 68119 - DNA, 490 bp, Glycine max
  unsure (1)..(490): unsure at all n locations
tttcgcanagcttacggtagaatctgggacctagccatggttttagtctccacagaggccattgcctcccttgccctgtattatgatcagccattgaggtgcttcatctttgggggcttccagctatcacccatggtggaagaatttgaagagatcctaggatgtcctctagggggaaggagaccatacctcttctcagggttttatccctcattagctagaatttctaagatagtccaaatctcagcgcaggaattagaccacaaaaagcaagtcgaaaatggggtggttggaattctgagaaaatatttggaggcaaaagcaagaatcttggcaggtaaaggcgagtgggtcccgttcatagatattctcgcactgccgatcttcggaggagtcctctttccgaatgtggatgggttggtggacctagcagcgatcgacgcttttttcgcctatcataactacaaggaaagnnncggtgttctatgct

SEQ ID NO: 68120 - DNA, 323 bp, Glycine max
  unsure (1)..(323): unsure at all n locations
accatgccactgctgcnccgtcnaatctgtcttgaaagaaatgcatcaacagcttttcgtccgtagaatatgcccncatctttcggcaatacatccgatgatgtccttttggacatgtcgtccctttgtatttatcaaaatctggtactttgaacttgggagggatgacgatgtcaggtaccatacacagatccaccaaatccgagaacgggtagttgttgaggccttctaccagcctcagtctntcttcaagtaaagtaatctttcctttatttttagcacaaggaactgaatctttatctgcgctcgaagggacgggacat

SEQ ID NO: 68121 - DNA, 153 bp, Glycine max
  unsure (1)..(153): unsure at all n locations
tccatcatctagtgtcaagggacatcgtcttgtgttaanggatattgttctgtgtcgagggcggtaacctcgactagtgtagaagcagactgtttgagatgcatgtcaagctcccctagctcggacgactgccgtggacgcttcttctggcaa

SEQ ID NO: 68122 - DNA, 497 bp, Glycine max
  unsure (1)..(497): unsure at all n locations
aactaagctcgttctttgattttcctaagttctgtaacaagcttagaacaattatcttggccttctcttaattatctttgggcttggcaaccacgtcaacaaagtactttcggcacctactatatgttgacttgaccaacgctgttattggaatgttgcgacaatctttcaacaccttattcacacattctaataggttggttgtcatgtgaccatatcgtcgtccagatgtatcgtaagccatgcctccattttcctttgaaatgcgatcaatccatcttgctatggctggactcaattgacgaaatttttctaagttttgatcaaagacatgcttgcaaggagtgtacgctacatcaaatttgttatcatcaacagttgtatgtagacatganactcanattaaattaatgtataanataaaccttacccaatttcttgaacatctctttttgtatcgcgttgttgaaattgcgatcgaaaatgctggctatgtg

SEQ ID NO: 68123 - DNA, 282 bp, Glycine max
tggagggtatccccacatttgctgcttagtggattacgattccgtgcacgtctgtcaaaacttgttatgtagcactttcatgataaatattgaagagcaatattatgtctttttactattcctcttaatattgtatgaaaaggatgttaaatgacatagtaaattagtaatgtcatattttgacatctctatagctctcaatattttggttgtcgtctattaagtcagaaagatctagaattgtttaatacaactctatcctattattaagagataaaatag

SEQ ID NO: 68124 - DNA, 458 bp, Glycine max
  unsure (1)..(458): unsure at all n locations
cganataacaagattctccgttgttacatcaatggtatgtgattttgcctganacaagtttcattatgagccttttactgaggctnttcaaattcctgcatattgcataggtatagtagttgtcttattgtaataggatttagttataatgttatgatcaagttggtgatttaatttgtttaatattttatgtaatgaagacatggctgggtggatttcaacaatatcggtagtggaaaactttgtaaaaagaatggcaccactattcaaaggatatttgctcatgttactgatggagagtatnggtcacttttnttgaagttacattatgtataatacccaatgtctgatagtcaattgtatgtattattgtgtaggaacactattgagtgtgttgtttggatgaatatgtcaaagttgtaatagaattagtaagagatagtaatattcctgatcct

SEQ ID NO: 68125 - DNA, 408 bp, Glycine max
  unsure (1)..(408): unsure at all n locations
agcttangaatccaagttcttaacttcaatgctatgaagcatttcttatgcctaanaatctaaattttggttttgaaagtggaaaggcatgaaaattaggctgccccatgagggatactttgcatctaggtagcatggaaaataccttttaatggtatgtatatatgtgtgtgaatataggtagcgtggaagattagctttccaatgcgtatataggtgaaacaacaaaatttttatgttaaataaaatacttcaaatgtgtgtaggtggtntgtgataagcaaaacatttatgatatgaagtatgtgtaatttgacacaataccttgagcacgggaatgtgtattnctttcaaaatatatatatgtgtgcgaactaggatgatttaaatggtcttatatgttgacat

SEQ ID NO: 68126 - DNA, 478 bp, Glycine max
  unsure (1)..(478): unsure at all n locations
atacctaanaccatatctatgcctccgatgtctattatgaagaactgctgctgtaccggtacttcttgcactctcaggggaacttctctacatactcccttgcatttaattatgtgtccatctccaacttctaccacatatgatggagtgtcatccacctttaattgtaatttttccaccagttccttggaaatgaagttatgggtgacaccgcaatctatcaatactttaactttgtgatcatcaatattttcccaaacctttaaggatcgtcgagaagtaaatcccacaatactattcatggataattgnggtgtttctccaatttctggttcgggctccttttcggagtcttcaacatcatcttcatctgttactaacattatccgaagatgattatctttgcatacatgagaggtactccattctttgtcacagcgaanacattcgactttcttcctcttatctcgaagctctg

SEQ ID NO: 68127 - DNA, 419 bp, Glycine max
  unsure (1)..(419): unsure at all n locations
agcttctggtcatgaatgccaggganaatggtttcntnggtaacctggntcagcctcctataatctatgcagactctccaactattntgcacccgagtaggaatcaactccttctcgttntttatcacggtgaggctggttttcttcgggactacctagacgggactcatccattggctgtcagagataggataaatgattccagcttgcaaaagcttggttacctccttcttcactacatcaagaatcaccgagttgagtcttctctatggctgtcttactggtttagccccatcctctaaatntatccgatgcatacatgtggatgggctaataccaggaatgtccgccagggtccagcctatagccttcatatgcttctagagaactgataacaacttcttctctttgctcatagt

SEQ ID NO: 68128 - DNA, 473 bp, Glycine max
  unsure (1)..(473): unsure at all n locations
tgttaacaacacactggatgccttctagaaaaatatgatacattgggaaatgcatgagtagatagagtaagacatctattccatctactctaaatctcccaaggctacaatttttaaaagcttctaagaccaattttgagtcacactccaaccacaatttggaccacatagtgagcatgctcaatagctaggacaaatgataacaactccgcataaagggaaaatttcacaccaagagacaatgcaatacaacctctaaatgcaccaaacccatcgcaaaaatttgcaccataagcagcctgactaggggaacctctagaagcaccatctgtgttgcatttcatgtacccacaaattgggaaatgccaatctacctactttatctgaacactcttaggagcatgagcatcaacaagaaattntatggtgaaacaactaccanaaaatgaagctatangaagaaggaatatact

SEQ ID NO: 68129 - DNA, 464 bp, Glycine max
  unsure (1)..(464): unsure at all n locations
agtccaccgcggcatgcaagcttacatgtttagagaccttcgaccttttgttttgattgtttgcgtgctgagcgactagccacgcaaaccttcataactttattctcatttccatgttggcgattgtgcagatctgtttgactggatacatcacacaaccttagaccttatcatattctatccttattgtatcttttggcacagcatgtatatcatgtacttactttttttggtcttctgatttgccgctcacataggcttacattatttttgttaatcctgtgttgtatatcgatttggttaaattattatttgaagtctcagttatatttttgcttacataatgctgtccatcttagtgttcatgtcacttcttcatcataatgccacgtgtgcattaatttgtactcatatcttgcacagaaatccccatttggagactgtcatanttcacttctgaatga

SEQ ID NO: 68130 - DNA, 339 bp, Glycine max
  unsure (1)..(339): unsure at all n locations
ttccttaggcatgctgactgcggcttacacgcgtgcatatttgcactcatgcattaaaagacaagagcgacacagcatatcaacaccatggtntctctaattatctaccttaaccacctttcgttgtgcccgataaactatgtcttctcacacgtacactaatatagtactactactatgttgctcgattgcgaatctctttaatgattttacggctattcatggcagctattgcctcgttccactaacttgcccacgttccattttcataatattttactatatcatatatataaccttaataatggaagtaccccacctactcattaataatttatc

SEQ ID NO: 68131 - DNA, 427 bp, Glycine max
  unsure (1)..(427): unsure at all n locations
agctntggaaaggtgttattttcatctcctcgctaagccaatttgctagcttagcgagtgtccgctaagcactacacttctgggctaagcgcgaggaagactctggaagaagatgagttgtacatgttcgctaagcgcaccgcttcagttcatccgctaagggagaaaggcgcgctaagccaaaaatcactaatgtgcgctaagcggtccatacgtgcgctaagcgcacgagcacgaacaaggccacctatttaagcctaaaatcagatnttgtgaaggggagttggactgggattcanagctctgcatgtctagggtttctagattgagacagggccaagctccatagagttatgagagatcttgctgtgtgaagatctgcagagtccatagcttaaagcccgagccactttgagagcttgatatg

SEQ ID NO: 68132 - DNA, 353 bp, Glycine max
  unsure (1)..(353): unsure at all n locations
cgagatgaggaagtgtngaagggtgaaacttcctgcttttattgttgaccacagagtggtacctggagatatgtcgcgggggtcaggagaccttgnggacgtcaggtggggtgctattgcccaaaaccaagcttgaccaatcccgacccaacccgggcatagtcggtcagtgagaacctgtgatgtacctaagcaggcgagctcctggcagtcaacagataaaaggaaaacaagaccacaaagcaaggaggcttgtggtggctggccagctgtgaattttgtgtaatatgtgagatatggcctctggtaatcgattaccaagggtgggtaatcgattacaaggcttataaatg

SEQ ID NO: 68133 - DNA, 329 bp, Glycine max
  unsure (1)..(329): unsure at all n locations
taanaatagataactttttggaagcgatgttcctacaaataaaaatagttaactttgttacctacagcctgagatcatgtgattctaatctagtaaatcactttacaacaacggagagacttcaattaatgaacaagatataagcaagtggcattctcgttggcatcaaagggagaagatcacaattttgccatttgatttgcaaatcaatatatacacacgattgtctttcttttgcaatgcttgatacttatgtttttacttacagggcaaatgatgcataacctaattttcattggaaacactaaaattctttacctttattgcct

SEQ ID NO: 68134 - DNA, 490 bp, Glycine max
  unsure (1)..(490): unsure at all n locations
cgacatntcagtacaatagtttattntcaagcaatgatatncttaattcagaaccacaaacgaaacaccgttgagattctcaacgtgttcactcctgatcaagcagagatatcagagactaaaagttggcaaagttcttttctttcaaagtttccactgtctctctaagactcacttccaaaggaataaattcaatccccaaggtctttgccttttctttggaaacctgaaatgttggtacataatgcttatcgtctgcagacctacatgaatgagaaaatgctattagtcttagaaaaataaaaagatagtttttggcaaaaagaataataatctttaactataaatattgacatacaacaaanaaatgatcctttnttattcataaaatgatgtgccatntatgtttcaataaccaattaatcacccatgatttttataccttcagcgcgagtactcaacatctgtattatatagcctatnatatata

SEQ ID NO: 68135 - DNA, 336 bp, Glycine max
  unsure (1)..(336): unsure at all n locations
agcttattatacgacgcgtatgtatactcttganatttgaatnatagcagnnggggaaaagaatgaanatatccatttataaaaattccccatgccatcttttaactcattaataaggatctcattctctttctttcttcttcttttctcctgttgtacacgtcgttcttatggtgagtcgaaagtggcatgttgtgatacattgtantataactactgtctgaaaagagaaggatctgatcttaagtgacatgaaatgatcaatgacgagtagaaagacagttattagtaatgagaaagataggagagaatagtactcacatacgctgacatttg

SEQ ID NO: 68136 - DNA, 410 bp, Glycine max
  unsure (1)..(410): unsure at all n locations
actaagctaccaataaatgctctgccatataaatctgcaaattaatcacngagctaagatgctaaaatttctgatgctggaaaaggaagtgcccactaattgtgtgaaatatcaccatggaccgcttggggtaccatattgtggttttcatcctcctcatcaccatcatcatccaatatcccttgagtctgcatttcagataattgctggaaccttgcctctcttttattcttggtgaatagtttcttgccataaatggcaccagcagcagctcctcccactgaagaaactgccaagacaaccagtgccttctgcaattggcaatagcacatggttatcaaattgtatgatggaataataagaacaactagatctaaggaaaatctctatcatactcacattggaatcac

SEQ ID NO: 68137 - DNA, 495 bp, Glycine max
  unsure (1)..(495): unsure at all n locations
agctnttgaaatcaaaccttgtcactgttaatcgattacatgaaactggttatcgattaccagagagtaaaaactctggtaacttacaaaaatttgagaaaaacttttcttgtaaaacaaaactgtgctatgtttgatttttaaaaaattattttcaatacttcccttgtgaaatcatcttctcttgaatcttgattcttcttgatgtcattacttgaatcttgaaattaatcttgatttaatcttgatcttgaacttgttgactcaatcttgaaatcattctcttgggcttttttgtcatcatcaaaactacttgattcaacttgattcatcatcatgaagcttgcttctacaatctcccnctttttgatgatgacaaccctgaaatcaagaaacacatacacattctttttcctagtcgatcactcacttaattctccatatttctccctttatgtttgagtttaagctcacttgaaataattatttaattat

SEQ ID NO: 68138 - DNA, 510 bp, Glycine max
  unsure (1)..(510): unsure at all n locations
tactaagcttttatccaggctcatcttggtggtgaagctccttcttccatgtcttattctttaatggatggcgccttctctcacctcttttccttttcttccgctgcatctccatggtggaaaatcaccattaaaggaccccattgaagctcaaagatccagcctccatagaagcccccacaagcaagtttccatcaatatggataacatatagatatgacaataatcactgaaataaacttcatgaaacaggacctcaacatcgggcaacatgtcgagcacaatgttgatgaaacttaagtcacttgagcatttcagaaacaactgaattttatactttggttggaccttgattntaaaggcaagcacattacccaggaacttatcaagtgcttcagacgatgcanttatattgagatcaccatccttgaacaaagataatcaatttctgcatcannacagtgtgatgatagcagataacatacaaataaaacataatttcaacattca

SEQ ID NO: 68139 - DNA, 340 bp, Glycine max
cttaacactttggtgaacatgaactcgcgctgaatgtatgtgaagtatatatagttcatctgaaccttgatatcaaggaaaaagctgagtggttatttggtattaaaggagtatgtaatatttgaaggcatggatgacaccagcgaaaccttctcttcagaaagaggggtggaccctgcctaggggacgcttcagaaaggatctgtatattaagactgatacagattcctgccaaagatgacaacagttaagtcttatctcacccaccatgcatgtaactggtcggcgtaaattaagttactaatattacgaatcaacgttgaaaacttgtctcaatcac

SEQ ID NO: 68140 - DNA, 464 bp, Glycine max
  unsure (1)..(464): unsure at all n locations
agctgaaccttgcgtcttgaatggaagatccttgantgtgagaaataaacccaagattatcaaatataatttttctttntacctagtttgtctgatcagaagaaccagcaattcgctgcgttcgaatattcgctctcccagtcattctttaattcttgtcttgacattatgcgctacatcatcaccgcacattgctagtaccactgtaccagcacttatttgtggtgtttgaaagtcaatgaaacatcctaaagtgccttctctaatnttgaagtggatttagccattattgtaccattaattcaaagtagtttcggtattaaaagatcagttatcanatattttcttgaaattaaattttcattgttatttctaacaggataggtttgatggttgttggaggcataatattggcttctttcatgacatatgcttccgaacatcttgctatccgatcatttctc

SEQ ID NO: 68141 - DNA, 397 bp, Glycine max
atgatgacaaacaagctcaaaagtcataacatagatgatgacattcaagaatgagttcaagattgagtcaagaacacttcaagaggaaatttgatttcaagaatcaagtttcaagattcaagaatcaagacaagactcaatcaagataagaattaaaaatatttttttcaaaaactgagtagcacatgaatttttctcaaaaccttttaccaaagagtttttactctctggtaatcgattaccagattattgtaatcgattaccagtagcaaaatggttttcaaaaagctttcaactgaatttacaacgttccaattgatttcaaaatgttgtaatcgattacaatgatttggtaatcgattaccagtgtgtttgaacgttgaaattcaaatttaat

SEQ ID NO: 68142 - DNA, 489 bp, Glycine max
  unsure (1)..(489): unsure at all n locations
tatcataatcgattacatagttggttttgagacaacaactaatttattcangagtctctactntaatcaatatcgattgctcctctttctataagtgtttaagaagtatacaagaagactttaatcgattactttgaggatctaattgattacattgttcttgagttgtttcccaattttgggaagaatactttaatcaatggaaaagataatctaattgattagttcattgaaataatcaattacattgtagatttaatcgattacaggcagttataattattttctttataaataagttacctttgttctcttcaaaatacaatgaaatgaacttctgagtgagcttgagtcacgtgttgatattatntaaagaaataagagaagaaaaatgcttagaaataatgactcacaacttctaatcttttgattatgaagatgttntgtgataagtgagtngtgatactttcttgagttcaagaaaacacc

SEQ ID NO: 68143 - DNA, 475 bp, Glycine max
  unsure (1)..(475): unsure at all n locations
ttaagtcacctgcngcatgcaagctngctcaagctggattaagagttgngttntgtctgtttataaaatggagactactatcaatattgtgtataatacaatgattgtgtcgttttaacattggcttaagcatgataaatacttctcaagatgtctgacatcaatatacaatagtaggtttgcttatagtttactaagaaaaggaatgaagaacattatcattcattttggaaactctaaatattacagcattggagaaggttggcaacaagggtgctattgacaaggtaaaataaatttctatattttgtttttatctaagatgatgtagtttgcactctgcatactacgtgtagtttgcatgcaaacaaaatggttacttgttatgataaaccaatacaaacttcttacatggtgacttgatgcatgcattgtacttgctttacattgcanatggtntgaacttatatttctt

SEQ ID NO: 68144 - DNA, 511 bp, Glycine max
  unsure (1)..(511): unsure at all n locations
accttgaaactaagcttagatgccttaaagttttaaggctgaagttgagaaacaatgtggttaacanattaagatcgtgagatcagatagaggtggngagtactatggtagatacacagaggatggacaagcaccaggttcatttgcgaagtttcttcaagaacatgggattgttacccaatacactatgcctggttctcctgatcagaatggtgtggcagaacgaagaaatcgaaccttattagacatggtgagaagcatgaggagtaatgtaaagcttcctcaattnttgtggattgatgctcttaagatggttgcgtatatattaaaccgagttccaaccaaggctgtctcaaagacancctttgagttattcaagggttggaaaccaagtttgcgacatatacacgtttggggatgcccgtctaaagtaagaatttataatccacaagagaagaaactagaccctaagactattactgggtatttcattggatatgctgaaaggtct

SEQ ID NO: 68145 - DNA, 400 bp, Glycine max
  unsure (1)..(400): unsure at all n locations
agcttcttccatggccctcaataatgacaaanactctattaataatgtnggtagggtctaaattggcaatgtcaaccattattggtatggaagtgttgtcaacaaccaanaagtagcacatttgaaacatgataataggaatttgcttgttcaaatgttatccaacaaattcaatggaaaggtgtcaattactctgtacaatcgcataactgcactccaaatcaaaaccaccctcctcctcttcctcttcttcttcatcaccgnttccatgccctgcgccgttgtcctcgaattaaaattctatttctaataagagttagtcttcgaattactctcanattgatcagattacacgctctctcttctgtcaacttataatcaacctcttgaaactaacaag

SEQ ID NO: 68146 - DNA, 398 bp, Glycine max
  unsure (1)..(398): unsure at all n locations
cggttcgaggtacttacccgttgaagatcgattatcgttgattatcgaatgaagaacgaatgaagaacgtcgaagaacggttgaaatctctgcgaaattcctcacggaaaacgttacggaaacgtttcggaagcgcctcggcttatattttcttcacggaaacaatttttccaagcaaattccaaagagagagaagtgcctaaggggctggacccctttcttcttcatttcctcccctatttatagcaaaataggggaggtggttgccgcccagctcgcccaggcgagcagggttgcttcctccagaagcaaccgccttctggagggaatattcacagggcccaagtgggcctgggtgctatttgcaccccattntactaagtacacccccctctact

SEQ ID NO: 68147 - DNA, 440 bp, Glycine max
  unsure (1)..(440): unsure at all n locations
agcttcatgatgatgaatgcaagtgattctttgttttntgatgatgacaaaaatcccaagagaatgatttcaagattgagtcaacaagtttaagatcaagattaatttggagattcaagagatgacatctagaaagaatcaagattcaagagaagatgatttcacaagggaagtattgaaaagaatttttcaaaaacctaacatagcacaattttgttttagcaagaaacgttttctcataattttctaagttaccagagtttttactttctggtaattgattaccagtttcctggtattgattaccagtggcaaagttttatttcaaaagctcttaaatgaatttgccacgntcctattgattttaanatggcgaatcgattgaatatattggtactnattaccagtgacaagtttgaataacagtcagagatctactc

SEQ ID NO: 68148 - DNA, 478 bp, Glycine max
  unsure (1)..(478): unsure at all n locations
gttgactttgagtcatcaagagattataaatatgtgaccttggtatgaatttaaagatatgaaaaaaatctaagaatctatctttcaatcttctctctcaacatcattcaatatctttcaactccttctacaaaattntctaattcatttctcttcatctttctaaaagtttttgttcaaacaatttttttccaagaaaagttctttgtttaaaaacttgtgctattcatctgtttcattctcttcttcctttgccaaaagaacgaaggactaaccacctgaattcttttgtgtttctcttctcccttacaaaaaattcaaaggacttaccgcctgagatttcatttgattctttcctttcccttaagcaaaatatttcaaaggactaaccgcctaagatatcttttgtttcccttttacaaagattcagaggactaaccgcctgagaattctttgtcccaacacattggagggtaca

SEQ ID NO: 68149 - DNA, 380 bp, Glycine max
  unsure (1)..(380): unsure at all n locations
agctntntgccaaggaacanagatgttgttgtagctatcctggttgtgatagtgccaaagaatccaaaccgcatgaatggctccagcaatcaacatgtccttagcttaagggctaacaaacaatctactaacttctagaagatcaacatgagaggagaggttaaaagagtgacctgcaaaagaaagccaagaccatatatgcttgacaaaatcatagtggaagaaaatatggtcagaagtctctgcagtcttgtagcaaaggctacaaatagacaccatcacataaccttttgaacgaaggatctcatatgtggggagcttaccatgaatccatcaccaaaacacagacgatttagagggaggcacaatatgatgtcaaa

SEQ ID NO: 68150 - DNA, 494 bp, Glycine max
  unsure (1)..(494): unsure at all n locations
ntccacgctgagcaagccatctcgcgctaagctcgccttatgttcatatgggctaagcccaggcatcccattaagcaccactaccactgattggagggaagatcaagggactcgtgtccatcagatgctaagcgcgccctacacgttaagcgtcaacaccattaatgcagctgtaattgtcaggctacgcgctaagtgccacactcacgctaagcgcgtccctcgtaactattggaagttgaaaaaccacttgagactataaattctccttctccctgttactctntacacatttcttgtgcacacattgcatttctctgccctgttcacaattttcttacattcttgtctntgttgtgctaacattctgagtttatntggtaagaacaataatgttttcctgcatgcatcatactctgtcattgttgccttgataagctcgctaagcccatcacaatggtttagcgagatcttatgtttangcacacattgag

SEQ ID NO: 68151 - DNA, 470 bp, Glycine max
  unsure (1)..(470): unsure at all n locations
tctacttatgtggcagggcgggcttccttcactntcttgtctctaacgcgagctctgaccactgttcttccttcccgcgatgcttcttttcatatccgcctgagtgggcttatagcctaaaccatacttcccacgatttccttgggtttttatcaggctagttatgccgccattttctttgcctaaacccatcccgggttcataaccgttccccaacataactcgggccatcattaccgccgcatcggacagacaaggttgcccaaagagggagtccacggaggaaatgctgaccacctcaaaagactggaaagcggtttctaacgattcttctgcggcttccacataaggcatggaggatgggcagcttaccaagatatcttcctcgcctgacacgatgaccaagtgccccttcactacaaatttcaacttttggtggagtgtagaaggcacaactcccactgagtgga

SEQ ID NO: 68152 - DNA, 491 bp, Glycine max
  unsure (1)..(491): unsure at all n locations
agcttggtctctatagatcttcacacagcataatctctcataactctctggaacttggaccttctctctctagaaaccctagacacgcaaagctctgaatcccagtccaaactccccttctgaaatctgatttcaggcttaaataggtggccttgtttgtgctcgtgagcttagcacacttatggaccgcttagtgcacattagtgaatttcggcttagcgtgttcctttctcgcttagcaaatgaactgaagcggtgcacttagcgaacctgtacatcttatcttcttccagagtcttcctcgcgcttagcccatgagtgttgcgcttagcggaggctcgctaagccagcagattggcttagcgagaaggtgaanaatagcactttccacagctggcctaattaacctganattgagagaacatgataattaaacaaaccaaaaggaagtactaagtatttattacctatacttaacaaaaatacttata

SEQ ID NO: 68153 - DNA, 482 bp, Glycine max
  unsure (1)..(482): unsure at all n locations
tattacggaccttaaatctcagctgtccccaatttctataacagggggagaagtgaagtagattttctgttcagccccttaggcacttctctctctttcngaattgcttaggaaaattgtttttgtgaagaaaatccaagccgaggcgcttccgtaacgtttccgtgagtgatttcgcgaaggttttcgaccgttcttcgacgttcttcatcgttcttcagtcttcaacgggtaagtacctcanaccaagcttttcaattcattctatgtacccgtggtggtccaaatttggtttcatgtatttttagtctcgttttcatttactttntatacccccttttgacgtgcttaagccatttatttaagtcatttctcgcttaacctanaaataaaataaatntccaccgatcatttgaattgtatcattccgtaactntggttgaaataaattccgaccgatcggtcgtgccgcaaccacattg

SEQ ID NO: 68154 - DNA, 445 bp, Glycine max
  unsure (1)..(445): unsure at all n locations
agcttatccatccttgnttgagtaacgtaaatttctaggatgaaatttctaaaagagtgggagagttgtaacaccttgatatatatctatatattattagtaattatgtttgatgtttgattatatttgttgtgttatttttatccgtaattattttcaaggaggttaatttagttaatagaggggtgtgggtagataagctttagcttctcaaagaagcctcttaagaaagcttctcaaagaagccacgaggaagcttcttgaggaagcctcttaatgaagcttctcaaggaagctacatgaagttgcctcggtaaaaatgaccccccagccttcgttagctgttggatcttctcgaaacttggtttgcaacttcacaagacaagttgccacgatcttgaccgtgggaatcttgagaagatgtctggagtcttgtgcaacattt

SEQ ID NO: 68155 - DNA, 394 bp, Glycine max
  unsure (1)..(394): unsure at all n locations
ntaaacagacattgcttcatcttagtcgccattgactacttcttcaaatgggtcgaagcagcttcatacgctagtgtgactgggagcatggagattagattcatcagaaatgagataattttccgatatgggttgcccaggaaaattatcaccgataatgccaccaatctgaacaataagatgatgaagaagatgtgtgaggattacaaaatccaacaccataattctatgccttataggcctaagatgaatgggttagttaaggctgctaataaaaatatcaagaagatagttcagaagatgactgtgtcatacaaggattagcacgagatgctccccttttcattgcatggttatcgaacttcggtgcacatgtctattatggcaacccctt

SEQ ID NO: 68156 - DNA, 394 bp, Glycine max
agctatgcggatgtggtcttcttcggcttaaggatctaagcgggtctgaaaaagaggcaaatttgatcatcctactttgatgagtgagaaagttggtgcaaatgaagaggatgagaatggggaaggaacccatgtcgtggctgccattcctacatggccaaacttcccacgagcccaacaaggtcatcgcttagccaatatcagcccttctcattacccaccacccagtcatccacaaagtttgctggccgcacattccatgctaagtgcaaaccataacaccaaccaagaaatgaatttggtagtgaaagagcctattgaattcaccccaattccggtgtcctatgctgacttgctccatatcttgctcgatattcaatggttgctataaccc

SEQ ID NO: 68157 - DNA, 424 bp, Glycine max
  unsure (1)..(424): unsure at all n locations
catctattatgactntcttatgtctgttctacatacataaaatagccccaccatcccaattntgcaaaaatcatattcatatatcattggggcatttcaccgagcacttggtgggcgcacatttggacacaaattgcaagagaatggggacaatgtggcatgccccattgcttcagaatacaacataggcctaaggccttctcattcaaatccttaactcaagaaatcaagcatggattcagatgcaaattgcttcatgaattttgcaaaaaatgagcaactaaagcaccaaaacacatcaatggagtgccaaataaccaagggaaattgcacttacttgtggggagtgaattaaagcgtgaaaagggaagcaaaaactcaacaatggaagcttggagggctgtgttctcatagttaccgtgag

SEQ ID NO: 68158 - DNA, 294 bp, Glycine max
  unsure (1)..(294): unsure at all n locations
gatgtatctgggtgcatcacatgacatggaaacatgttngatggcggaggagctgttacatcaactgatggaccaaggccagtttgagatcagtgaagggaacaatggagaacaacacgtgtgcatgcagtcggtagataaagaaagccccgctaaacccaagcctttggtgatactcttcaccagggatacgggctcccagaaaccccgaggttctcgacctatctcaggtagcaaacttgtccctttctccttaccgaatgccaaggcgctcccgtggagatacgcccctca

SEQ ID NO: 68159 - DNA, 311 bp, Glycine max
tgagaatactatattatgaatctaaagatgatcaaacacacgcattcctaaaacaattatgatcatttattaaatttcttatacgacatatgaatgggattagaacccttagatttggaaaaagaaaaaaagaaaaaataaactacatggacggctagttaattttttgtggtcatattttatgtttattaataataaaattataaatgctgcaaatatatccatttgtttatgctgtaagatgtttcagagttattttttctgagtttagaaaatcgcgatcttgcatcaactatattaatcatgctcac

SEQ ID NO: 68160 - DNA, 216 bp, Glycine max
  unsure (1)..(216): unsure at all n locations
ngcacgatccgtganattccgtaatgaggcagaagtcgaaaagagtgttgttttgctcaatccgtgagtttccgtaacttcttggatagctaaaatagagtaaatacataatccgtaaggattcgtagccttgcggaagggaaataaatatcgttacgaaattcttaaagtttcctaacgttacgaacaagaattaccaataaaatagaagggggg

SEQ ID NO: 68161 - DNA, 473 bp, Glycine max
  unsure (1)..(473): unsure at all n locations
tacccatcacatgtggtactaggtggtggtttgtcgatggtgcacaacaagttttccacatccacaaatcgcacataaacccaccatcctctgttgcccacctccaactgagctcacgtactcccatgtagcccatatcctcgtttctctcaacaccgggtccccaacaatcctcccaagctttcccaacatccaagtaactcaacattcaaacaacacaaaccatcacagccaagaaaatagggcaaaggcagaaaactctgcccaaaacaccaaccaaaatcacagcttttctcacttaatgaccccagtaacaattccttcttttccaattcgtaaccgttggatcgactccaaaattttactggaggtctctagtacctaagcctacatttttgaccgtgggatctactagcaaacatncagaactcattctacattactctttccacaaccagcaaatacatagcatt

SEQ ID NO: 68162 - DNA, 476 bp, Glycine max
  unsure (1)..(476): unsure at all n locations
ggatgatgttctagcaagattaanattagtccattgcttacttcttatgttggttggtgttgagggatcaccaataaggtatactctaattaaaaattaagatatgtgattttttccctagaggaaagaagggtgttgcacaatgccgataatgaagaagacatattagaagaatgagataaggaggtatatataagtcactgtagtgggtgtaagatataattgtgaacatctaatggtggtgcatcgttatgagtggtccacgataaaattcatctataaaatgactattagtgagcataaagtattggaaaattntatttttactttttttttttcaataagcaaaagggattatatgtcttgtactcggtaccagaggtatttggtaccacgttgattataaccaagagaatactaagatcagaggcacaacggttacaatacatttacatgaatgaccggtaatatagtat

SEQ ID NO: 68163 - DNA, 335 bp, Glycine max
tgttacctgcagatacgacgcgagggtcatgagaccttgtggacgtcacgagggctgctattgctcaaaaccaagcttgaccaatactgacccaaccatggcatatatggtcagtgagaacatgtgacgtacctaatcatgcgagctcctgccagtcaacacattgaagggatacatgacctccgtgcagggaggcttgtggtggatggccaggtgcgaattcttgtgtatatgtggatcgtggcctctggtaatcgattaccaacggtgggtaatcgattacaaggcttaaaattgtagactggcggcttaaatagtatctcgtcatccattac

SEQ ID NO: 68164 - DNA, 369 bp, Glycine max
  unsure (1)..(369): unsure at all n locations
ccgaataagagnttactatttgcacagaatgtaaagcatcaacatattctcagtaagatggatcacgctntgttgatatttgtgttttggtcatcggtttcttctgtgcacctttagtgttgaccttttctggaggaggacacatagagttctgatcaaggtaggcaatttcctggaagttactctntagagttactttgccacaacatcaagctccttaaattgcttgaatatggtttccatctcttccgttatggtcacttagggctcagataacccttggtctgataaaattagccttcgccaaaacatacggattgaatcaagtgggatggaccacgaacatatttcgatagctcacatgcacat

SEQ ID NO: 68165 - DNA, 244 bp, Glycine max
ctgatgcatcattaggagagagtaatgaatcaacgagatgatctttccatgagatggtggatctaatggagaatagatatcataatgaataataaaggacgagatgagggattgatagtgttactagacaaaaccgaattgatggtattaaactcaacattccttcatttaaaggaaagaatgatccggaagcctacgttgagtgggagataaaaatagacatgttttctcctgcaacaactat

SEQ ID NO: 68166 - DNA, 262 bp, Glycine max
actcattcccgggatgctttggttgtctttttgaattgatcaaaattcaaaacgaaaggaaagtggatcaaagagaaagagccttactagtataacatgttagttcaaaagatcaaattctggtgaatatatattcaacaaaaaaaaatcacctactatagattgagagtcgaatgataagacatcatgattaaacatgaaaaacagacttttagtcactcaactgctttacatttgcttcatggttgcatgggagcctcat

SEQ ID NO: 68167 - DNA, 401 bp, Glycine max
  unsure (1)..(401): unsure at all n locations
ctagccttagntgttcatcatgttgctcatgttgatctccttatctctaacatccatgttttttaaccattacaataatcttccttgtagagtgtgctgatgtaatatataacgaggtgtctgtgtaatgttttcaaatgctaatgaagtgttagtgtaattttttcaaacataaaagtaagttagtgtatgaatagaaaaaagagtggtgttatgtgtaatttgaaaaaaactcatgacgtgcaagtgtaatttgctcaaaaaataactagatttttaagttttcaaattgaccaaaatgagacaaggtttgcatcttggatcagtanaaaaatacctaataataaaaaaaaaaattgattcataaggataatggttactcaaaattgagaaataaaagt

SEQ ID NO: 68168 - DNA, 336 bp, Glycine max
aaaccctttgagttcatgaaagccaaccatttttcactttgagcaagtcaacaagaccatcccaaataactttataaatatgcatgtcaagtaaaccaaaccaaacaaaccaaacatcagctatgtcaagttaagcaaatcctacacaaaacagaaacaggaacttaaaaaaagggtcaaaacatagacacaacgaatttgagttagacaagacaaacaaatatctcttccgaacacaatacccgttacagccaggatttttaacacaacagtttccattactctagaagcaattagcatctttcaacctctcaataagcaagcaaagtttatttt

SEQ ID NO: 68169 - DNA, 431 bp, Glycine max
  unsure (1)..(431): unsure at all n locations
taagcttctttccccatccaatagctaatcttgtagcataggctactccatgtgttgttgtctctnttgtaatggtttgaaaggcttcaaagcaccttactgcaatatggttttcacactatcaaatgtgagccctctctctttatctacaaaaggacataaatgtnggatatcttttggtgtttgtaatgatatcatcatcattggcagctccaatatctcatcatgtctctggtcagtcatctaaattccacctttgctctaaagcaacatcctcaactagattactttcttagcatagaagntcatcatacacctactggttctacgttactcactcaacaaatatatttgtgatctcctgcacaaaactaacatgggtgcggaaaaatacatttcttctcctatggttacatacttgaatactttga

SEQ ID NO: 68170 - DNA, 492 bp, Glycine max
  unsure (1)..(492): unsure at all n locations
agaaactaagctacgattaactatatntctcattcttagttgatctgcttcttgtatttaaacacaataataccacagcattattcttggaacaaaaataccagtgattcggacattttagaacaactataaatactatgagatagaattgtaaataacacataatttgaaataacttggaaattagaacttacgaatgcaaataaggtgctaaataatactatttttggcctagatataacctattttgcaaatagatctcaacatctattatcttattcccaatatttaatttgaatgaattatggatccatgaaatcataaatatgtcttccatattagtatataagtgatatagatacataagatattataataaaatgttaattataataaattgacatttaatttattaacaggtttacaaattaaatgtatgtacatcaagcacacttatataaccgtgatagtaagcatctctctctactcata

SEQ ID NO: 68171 - DNA, 451 bp, Glycine max
  unsure (1)..(451): unsure at all n locations
tcgatacacaagtcttgtaattgattacctaaggagaattttatattattatttccaagagtcacatctgttcaaatggttnttacatggccatcacacgtctatttatatgtgactaggaacacaaatttgctgagagtttttttaaagaacaaaaaggtattattctctcaaaaagaaaaatcttcttatcctcttaaaaattccatggccaatacacttgcaattcaataaggaattttttgagtgctcaattgttcaatctatctctttcaagagagatttcttcttctcttcatcttacttctaaaaagggattaagagaccgagggtctcttattgtaaagaaatctgaacacaaaggaagggttgtccttgtgtggttcanaacttgtaaagggattttacaagatagtggaactcttaaacaggttgcttggggactggacgt

SEQ ID NO: 68172 - DNA, 407 bp, Glycine max
  unsure (1)..(407): unsure at all n locations
acttgatgcctcggtcaacctagtaacacagttttgtantgtttattagatctacacctgcggcaagagtttgtggtctatgttcttctacagatcactatacagatctttggacttctttgcagcaatctggagtcaatgagcaacctgaagcttatgctgaaaacatatataatagaccccttcagctacaatacacacaatagcataataattatgagctttatagcaacagataccatccaagtgtgagtaatcattccaatttgagaagagcaagttctcctaacaacaacatgctgcccttttttccagaatgctggtggtccaatcaagccatatgtttctcctctcaaacagctgcaacaacatacaagacaacatgcaactgaggctcctcttaatct

SEQ ID NO: 68173 - DNA, 439 bp, Glycine max
  unsure (1)..(439): unsure at all n locations
cacgcgagttcatccagaaaacctagaaatatgaagataattcatgttctcgctatgcgcaggggtcaggcttaacgagttcattcagaaacccagaaaatatgaagaaaattcatgaactcgctaagcgcatgagttaggcttaatgagttcattaaaaacctagaaattgttacgaagatgacatgaactcgctaaacgcacgggtcaggcttagtgagttcatcaacacccataaaaaattctcagaaagacatcaactcactaagcgcacaggtcaggcttagcgagttcatcaaaacctagataacacaagataaattgtgaactcagaaagtgactttttgtaagactcgaaaggcacgagctngctaagccatgaaggtaggcttaacgggtcaataccaagccagaggatagcagtccccatgaagacaac

SEQ ID NO: 68174 - DNA, 276 bp, Glycine max
ttctcatgtatggcctgctgagttactatgttgaccaacgcattaagcattccctcttgcttttatttctcataaatgaagaggaatccatggccacttcatagactcatttgacgacactaacatcatatcggtgcctgaatcggtgggagttggaagccatctgctcaagcaaattcccagcctatcaggggtcatatgaccaatagctccaccactggcaggatcaatcatactcctctccatgtcgctacgtccctcatagatatattgaag

SEQ ID NO: 68175 - DNA, 419 bp, Glycine max
  unsure (1)..(419): unsure at all n locations
acccctaagtcaatatattttcatattctaaacgacactngtgttaaagctcgataatgttggaaagtttcaaggaaataaacaccgtgtacgtttacatctatcgatgaatgagttgacatcttatcgccttttgatctggttcttgtgggatatgtgacatgtcatgaatggtgagctntttacctacctctgacgtttaaacatggcttgaaacatttgcaataaaattgaatttaaaatcctatctagtgacgttagatgatatcatcttcatacatccttcctcgaccgagagtctgtgcaatttttgatgatctccttgtctccctcggcatgtnnttcatgccattactttctccattttaactgctannttgatntgctatgtggttactgaataactacgaccatgagat

SEQ ID NO: 68176 - DNA, 448 bp, Glycine max
  unsure (1)..(448): unsure at all n locations
ttcaagttgttttgatgataacttatatgatgacaaatagcccaagagaatgatttcaagattgagtcaagaacaattcatgaatcaagagaaacttgatttcaagattcaagataagatgaattcaagttccaagagaagaaatcaagaagacttcacaagggaagtattgaaaagatttttcataaaacaagcatagcacagttttggttttcaaaagaattttcacaaaatcttctaagttaccagagtttttactctctggtaatcgattaccagtttcctgtaatcgattaccagtggcaaagtttggattcaaaagcctttaactgaatntacaatgttccaattgatttcaaaatagtgtaattgattaccagtgcatctgaacgttgttattcaaattcaattgtgaagagtcacattctttcataaaaagctttgtgtg

SEQ ID NO: 68177 - DNA, 414 bp, Glycine max
  unsure (1)..(414): unsure at all n locations
ctaagctcctggtgggacatcttgactggctttccaatctgacattcaccacattatttgtcttcttctattntcagatggggaatgcctctaacagcaccttngtcaatgactttcttcatgcctcttaagtgcagatgtccaaatctttgatgccatattttgacttcatcttctttggagaatagacatgtggaggagtaactggtttcttgaggtgtccataggtaacagttgtcctttgatctgctgcccttcattaggacttcactcttctcatttgtcaccaagcattctgactttgttgaagttacattgaatccttcatcacacaactgactgatgctgatcaaagtcgcagtcagtcccttcaccagcagtactttgttcagactaagaagtccatcatggact

SEQ ID NO: 68178 - DNA, 72 bp, Glycine max
aatagcgacgcaggattacccaacagagtgttttactcctaaggacgtggaaacatgctcacgcaaccgaac

SEQ ID NO: 68179 - DNA, 463 bp, Glycine max
tggggtacccatcacatgtggtactaggtggcggtctgtcttattttcacaacaagtattccacatccacaaatcgctcataaacccaccatcccctgttgcccaccttcaactgagctcacgtactcccacgtagcccatatcctcttttctctcaacaccgggtccacatcaatcctcccaagcttccccaacatccaagtaattcaacattcaaacaacacatactatcacagccaagacaacatggcaaatgcagtaaactctgcccaaaacaccaaccataatcacagctgttcccacttaaagaccccagtaacatttccttacttccaattcgttaagcgttggagcgactcgaaatatttactggaagtctctattacatatgcatacattttgaccgttgggatctgcttgctacatccagaacaaatcttgcctactctttcatacccatcaa

SEQ ID NO: 68180 - DNA, 187 bp, Glycine max
gacgaggcggtcggattaggccaaatattatttatgatacgccaaagacccagagaattcgcattctgagactaggccacgtgctcagctgctaagcccacatgtacccggcagactaataaaagacccccacccccttaacataacatctcatgtcatcttggagaacacatagctgggataaagg

SEQ ID NO: 68181 - DNA, 439 bp, Glycine max
actaagctccgctatgctatgacggatgacactgcgcacagcgtcttttgttcgtctagctcgatctctgacaccaatcaatcatagcataaattcatgaattcattttacacgatacgcaacagaaaatcgaaatcccacgttagcataaaagtgtttaccagagataaacgcttaatctggaactccatttcatttcatcgttcagagttagaatgccatagcataagcttaagtatattggatatcctcccaattataaaatagatgcgtgcaccgatgctatatgttaatacgtctaaacaaagacaacacatgctggaacagcgcacgtgagctcggccccacacaatatacttttaaagagaacgatgaattctaagaatgaataaattcgaaatcaaggattattattaagagaatcaaactttgtggaagt

SEQ ID NO: 68182 - DNA, 423 bp, Glycine max
  unsure (1)..(423): unsure at all n locations
tttaagaacatntcagaaactactttgtccactggtaatcgattaccatagagtaaataccatatttttgaaatttcaaaaagctttttggaaaatgtcctttggccaaaccttttgcatcatcaagtaaagaatgttgtctaagaatctaagtactaacttcatcattgatcttgaatttccgagtcattaagttggataaaacttgagaagtgtttatcttgtggcatcatcaaaacttcatattaagtattgtcgcaacctacccttcagcgggagggcaacgcgagactcacaggtgtgtcttcgaagaaaggaaaatgcacggagtcgccaccaacgtttattcaaggaaaatgtcggaaaaaccggaaatggtgtggtctacgaactttaagtgtgaaaggttcgggagttgtattt

SEQ ID NO: 68183 - DNA, 471 bp, Glycine max
  unsure (1)..(471): unsure at all n locations
ccgtggganaccagtgattagaggggaaggttggatggtgaattttatctgtgggattcacaatcatgaattggccaagtccttagttggatatccatactctgggcgatngactaaggatgggaagaatattattgctaatatgacaaagtcgatggtgaaaccaagaaacatcctgctaacattgaaggagcacaatgccaacagttgcaccacaatcaacaaatatacaatgcaagaagtgcatatcgttcttccattagaggaactgatactgaaatgcaacatctaatgaagcttcttgaacgtgatcaatatattcattggcatagattaaaggatgaatttgtgatacgtgatctgttttagtgtcacccaaatgtagtgaagttatgcaatgcatgtcatttggtattattcatagacaatacctacaaagcaaacaggtatagactcccactacttgacttt

SEQ ID NO: 68184 - DNA, 382 bp, Glycine max
  unsure (1)..(382): unsure at all n locations
ctcacattgtgtgccgtgtatgtntctagtgattgatattttaactcggaaaattggagttattatgaatggcattatcacaatcatatctgtcttgtaaataacatatttatacccttgaagtacagctattttcttagaatctaaggaatttatgcttgttgtattatgacgaatccaactcatgcattcttaaaagttaattcctagtgtttactcttatcatgatcttgccacaactgtctgagcatgtgaatgatcttagcatgccccgaatgttatgaagaaccttttctcgtgacagaatattcttgagggganagagagagagagagagagattctaagctcagaaggagaatattattcatattttcctctca

SEQ ID NO: 68185 - DNA, 490 bp, Glycine max
  unsure (1)..(490): unsure at all n locations
ctaagctcgacgctgtacccttattggtgcacaacctattgtctccactgtttatagttntcatgtgtgtttggttgtagtcagcacacgttntgatgcatgcttagatcaatccaagaatcttgtgacattggattcaactagcgtttgagacttgttaatactaaaacaaacatacccttcctcatctaattntaggtttgggatgtaatagataagatactaggcagagttatgttngatcattcaagttctgataccataaagatatataagcagtaactaataaatgagagaaggaatatggatacattatacgctataatattcattgggttaatgtatatccatagtttttctatattaaaaaaaagttnttaatttgtacaagataacttcaatatagtggccatgttgcttcttgcagtctcactataagttgtttagggtctgcccttctgcactgcttgctatttgggattgatagcta

SEQ ID NO: 68186 - DNA, 373 bp, Glycine max
tctagcccctactttcgaggggcaactcccaccttatgacgactatcccgggccagacgaagaggaaggagatacccattttggtccctcgctccacctcaaagatccggccccccatgaactaacccaaccgaacatagaccgccatattccggcttctcccacaccagttaaagaatctgctcccttcgcggaagataacggaaagactgaggtgcatgaagagaggttaagagcagtcgacggcctcggcaattacccattctcggatttagcagacttatgtctcgtgcccaacattcgccacgctcccagttcaaagtaccagactatgataagtacaaagggacgactcgtccaacagggaatctcc

SEQ ID NO: 68187 - DNA, 451 bp, Glycine max
  unsure (1)..(451): unsure at all n locations
taagctccctcncatgaagaaagggcttagacatggagaggcatctccactttagtatatatatgtgttagacaaggatctaaaatntatataattgaactccccatccccttggtatgacaggattttttactaatcatgatttactacttgatcaggtaaagcaaggtttaagggtgagagtacgtcttattctgtctggagccgcacctttatctgcacatgtggaaggttactcaccggtgggtacttgggctcatgtcctacaaggatatgtgatactctttntaaatatgaaaatcagacttacaccatactatcattgtttaaaaatcatgtcattatacaacatgtaatacgtccatttatttatgcctataaacaaactatttgtnaacaactggtatttaatttcaaatcaaaaaagacgatttgatcgtatatgttatgt

SEQ ID NO: 68188 - DNA, 469 bp, Glycine max
  unsure (1)..(469): unsure at all n locations
agctagaagctatgctacacacacccctctaataacttatctcacctccttaggaagagaagctagagcttagctacacacncctataatagctaagctcacccccatgacaaaatacatgaaaatacaaaaaaatcctactacaaagactactcaaaatgccctgaaatacaaggctaaaaccctatactgttagaatggccaaaatacaaggcccaaaagaagaaaaaaaaacctattctaatatttacaaagaagagtggacccaaccttgacccatgggctcaaaaatctaccctaaggttcattagaaccctaaggccttctttatcagctctagcccaatcctcttggagcctcttgctcatggctctggtaactggtccttttctagggaggatagcatcacattatgacaagctcagtcttaactgtttcacaagccgggagctatgcgttcaatgataat

SEQ ID NO: 68189 - DNA, 471 bp, Glycine max
  unsure (1)..(471): unsure at all n locations
ctcaagtttctgaagtcaagggcgttatgatgtattatattgaaaaggcaagacttatatacaaaatggcattgcttagagttctttaactgagttgatgtcaccattcatcaaatatgtagtactatattggattaaatatttcattaactnttctcataggttcttgatcgtggagaaaagattgagatgcttgtggataagactgacaaccttcgctcacaagtctcattttcttctttatattttatttcttaaatatattcttaatctttaaaatatacatgattgtttatttactcttttntatttttgttaaaatagtatctacaatattttctcttggttaattagattcttgccaacgtcgtacctagctacttacttttaactactctattatcaataaaaatattggtttaatttgtcatgcgatgacatacttatttatataattgttgtacatactat

SEQ ID NO: 68190 - DNA, 300 bp, Glycine max
agcgatgctcattctattatttttgccgcatttcaagatcttgatttttaacttaatgcattaagatgatattgaagaagtcatattgtagatgataattgtgcttgataactagccatgagtcttgtctgtcttggacaatgcctcactctgtatatttttgtccgcatgcttatccataccccttgactaattaatgtgtggctgctgttaagtgatgtataaaaaaatctgatatgggaaaataatacatttaaggctaagaagaccttaataaacgatacattctttgcgtgtact

SEQ ID NO: 68191 - DNA, 435 bp, Glycine max
  unsure (1)..(435): unsure at all n locations
ctgctngtacgtgatcgtgcctccaaagcttctgatcttgcttgttattaacaacatccattcattcattcattattatgttcaatttccatctaagtaggtcaaatagaatgatcttattaatttattatgtttgtgtatttgatatgtgaagctaggcataagtggtggatggtatcgactgattttgtgctaagcagcatagcctttacagccatggctcataaacggtatggcccaacaaatattgaagttttccattgctgacattgaataggccgcaccaaaagttagggttagaattaggaagattaggaattaattaagaattaaagtatttcttaagatacgttaaattaaaaataagaatattaatttacaaaaaaaagtcacatgatattaaggatcttattaacattaaggatcttattaact

SEQ ID NO: 68192 - DNA, 361 bp, Glycine max
atagctaaatcttttttttttgttgctaacttagcgcaatggttactttttatcatactccattgacatctatgctaaaagaaaggaaattttatgtatataactggctatagttgtaatcttacctgagacagtaaaaatacacagccgagccatccatgaagacaacttttgttgaaataactctccagcgcaatataggaattctaaatccttcaaattttttctgctttctatctgcatctgaccacatcagaaccgatacagcatcttctcctagttgatgtcatttctatacatgatagccttccttctcttggtatttgccaaactgaattccgtatcaagtgaaagcatactc

SEQ ID NO: 68193 - DNA, 363 bp, Glycine max
  unsure (1)..(363): unsure at all n locations
tcttctctctcgaattgttatgaaaatgtttccgtgaagaaatccagccgaggcctttcgtaacgttttccgaacatttccgtgaagaaatacgcgaagattctcgaccgttcttcaagattcatcnngtcgtcttcgttttcttcagtcttcaacgggtaagtacctcanaccaagcttttcaattcatttctatgtacccgcgggggtccatatnttgttcatgtattttaatctcattttcatttgcttttatacccccttttgacgtgcttaagccatntatttaagncatttctcgcttaatctaaaaataaaataaatttccaccgcatcgttaaattgttcacccgataatttggg

SEQ ID NO: 68194 - DNA, 490 bp, Glycine max
  unsure (1)..(490): unsure at all n locations
ttcaatctaagctcagaacaatcaatctaacaataattgctctacaacccgaatcacttgttatattcataccaaatagaatgancccaaagttatcttccataatagtacaatgcccaagtcttcttgaatatgttttcagaaatcacctttatcatttcagagcacagaatcacatgcggcaagagctttcacacataattttcatagtaccatgcagaggcttcttccacattccataagcattgtggttgtcattgtcatcatttggtgtcaatatcatatggctgagcttgcttctacttatatcacgtacaccactccaaacactcagcaccatacctagagtgtttgtccacttattactgaagatgaattcatttcttctcgaccaaatacgatcaacaatagttccaaatatagtgcgtcacttcacctntccctctggtctcatgttgcanacattcatgataagtcaactatgcatatc

SEQ ID NO: 68195 - DNA, 241 bp, Glycine max
  unsure (1)..(241): unsure at all n locations
cagctagctcgtgctcgaagtagaactcttactatggaagatggtgnttaatacaagtcatggttggatgcttccaaactatttttaatgaattatgttgtcttaacaaaacttttgataactatgataacattgacaaaattctaagaagtttatccaggaagtagagaccacaggtgataaccttaagaactgtgaagaacatggactccatgtccattgaagagcttatgggatcctt

SEQ ID NO: 68196 - DNA, 381 bp, Glycine max
  unsure (1)..(381): unsure at all n locations
tataatggggtaattctacaacatctgttatctccttctttagacctccaatgatattggccatagttgtttcacggtcttcttcaacattggctctaatcatggctatttctatctccttgtagtactcctcctcatttatggaaccttgagttagagttcgcaattttctatgcaaatccatatggtaaaggctacgtgttagagatagggggaacaacatgaagacttatccttgaagcttgaagaagagcttgaagaagtnttgtcttttacatgtccaactctcttgagtggcatttgtattgattgttcaattatgttgtgcatcatactctcaatcatttcatatctgcatgatgcattatcatgtacgagtaa

SEQ ID NO: 68197 - DNA, 437 bp, Glycine max
  unsure (1)..(437): unsure at all n locations
ccatactngngtattatcacaaggtcatcatgctntaatatcttatttatcttaaggacataattggtatttggctaggtcaagtcgaataccatacaatataattagagtttaaaatattaatttaaataatttatttgagtaacttctattagaaacttaactaatctttattaaaggatccaaaataaatatttaaaataaatcacttataaaatgacattntnttgtcataggttagacaccataaatgtttctcaacttattgagttaaagactaatttcacttatggtgtatgattatcgttggttcaaggaaaataaatcattttaactctaaacaaatggtcttccacttaacatattggtttcactcatataaacacaattgagtcttatactactatgtcaaatcctttaaaatttnttaaatattt

SEQ ID NO: 68198 - DNA, 397 bp, Glycine max
  unsure (1)..(397): unsure at all n locations
tttttctcagtcttgatattcacgccctgccagattctctctcgtgctaagcgcgatgtgtagaaacaagcttcatgatgatgaatcaagttgattcaagtagntatgatgatgacaaagatgatgactaaaagcccaagagaatgatttcaagattgagtcaacaagttcaagatcaaggttaatttcaagtttcatgagaagatatcaagaagattcaagaatcaagagaaatttgatttcacgattctagagaagatgaattcaagattcaagagaagaaatcaagaagactttacaagggaagtattgaatagatttttcaataacaaacatagcacaattttggttttcaaaagaggttgtctcaaaatttctatggtaccagagtttttac

SEQ ID NO: 68199 - DNA, 226 bp, Glycine max
tactcaccatttatttatctatgtggcttatggcctgaaaaatgcgcctaaagtgacccttctgctctcctattgagaaatttgcacatttccttactaaacactcaagatcttacataatgtgcagcaatttgggttatgcagcccaataccgctggcacgaaaccatatgtttgcatatgaccatccccgaatgaaatttgggtatgacactatgtgatgcaat

SEQ ID NO: 68200 - DNA, 377 bp, Glycine max
tgcaaagaactgacaattgtaccctaaatgtgggatgccatttgtctaccactatcatctgctctacctaaatttgaccgttgcccagagggtggcagtaaaatgacgcctgatggaatattaacattcatttatctctttattttttgcattacaaatttgttggatcccacactcacaaggatagtgcgcattcatgactctttcaagcatacctgcaagaagaatgacgcttctgaagccattatatcagcgtacgaaagaatatcatactcagcactccttaatggcattgagacaagtgttgcaatgcatcattactacgccacttgatatgctctagacctatcattgcgtctgttcttcaccgcttatta

SEQ ID NO: 68201 - DNA, 472 bp, Glycine max
  unsure (1)..(472): unsure at all n locations
cgaaggcaaactggatgcattggttaacttggtaacccatctggctcttgaatcagaaattgtacctggtgcaagggttngtggtttgtgctcctctgctgaccaccatacagacctttgcccttccatgcagcaacctggagcaattgagcatcctgaagcttatgctgcaaatatttacaatagacctcctcaacctcagcaacaaaatcaaccacagcaaagcaattatgacctctccagcaatagatacaaccctggatggaggaatcaccctaacctcagatggtccagccctcagcaacaacaacagcagcctgctcctttcttccaaaatgctgctggcccaagcagaccatacattcctccaccaatccaacaacagcaacaaccccagatacaaccaacagttgaggcccgctcacaaccttccctcgaagaacttgtgaggcanatgactatgcagaacatg

SEQ ID NO: 68202 - DNA, 330 bp, Glycine max
  unsure (1)..(330): unsure at all n locations
cngcattgtagatacaataacggagttatatctagacattattatttgttactccaacactagtcgctaatgtagtaaagaacgtacatattaccctgttccaaacaagggtgaaatatatcaaaaccatgggcgatggaactgttctaggaaatcctagtaataagataagagagaattatatcaataccaactaaagaatagaatgatattgtactatcccttctcaccttgcctatagagagagaatattcagtcacttatttttcatcaacatacataagaactagtttgcacttgtttcatagagctaggaaaaatggattccaa

SEQ ID NO: 68203 - DNA, 367 bp, Glycine max
gacgaagacactgacacaacttattttcttctttctggacaaagtatggcaagctgtgggcaagtaaagtttcttcccatcagacgctgtatgcgactgtgatcgtatcctcatatcagctagatcttgacgggtattcaagccatccttcgtctggccttgaatgttaaggagcgtgccaatcacactgtgcatacattttctccactgctaacataatacatgctaacattaatcaaccagtcggagatcaagaatggcccttttcctagcactctacttatcatctctgggcttcaaacagataagtgtgaaccctattaccacttcagcacgatagtgatatggcttgattcataagctttta

SEQ ID NO: 68204 - DNA, 458 bp, Glycine max
  unsure (1)..(458): unsure at all n locations
taatcatgccgatgatatgaccgaagtgggcctgatatattttaatttgaccatcctgctttgacacanaaaaagcctgtggaaatattagagaatgagacagaggaaggaactcatgtcgtgactactattcctacatggtcaaattccccaccagctcaacaatatcattactcagccaatatcagcccttctcattacccaccatccaatcagctacagaggccacccctaaatcatccaatgccaaacaccacctttaacacaaaccacaacactaaccagggaaggaattttccagcgaagaagtctatagaattcacccatactccgatgtcatacgctaacttgctctcatatctacttgatcattcaatggtagccataaccccagctaaggtccctcaaccttcattattcgaggatacaacttgaacgcgacatgtgcgtatcatgga

SEQ ID NO: 68205 - DNA, 299 bp, Glycine max
aagtcagtgatggtacaaaaaaccataacacgcagaggcgaacgatggggtgcacaaacacattccacacacgaaccttctctgcccataattttctcaagacttaaccaagggagtgaaaaacacattaatatcattcccctggctttcttggaccaaactatcatcatacaaaacataatgtactttctgttgacgctcaacaaatgagggaggttgtcaatcatcagcctaataggccatgaactgtggttagtgctcaagctaccacaaggattcatttcatccaaagcaagacc

SEQ ID NO: 68206 - DNA, 277 bp, Glycine max
  unsure (1)..(277): unsure at all n locations
ataaaggaggaattatatctctaggtaacaccccatgtgcatggaattgctntaactacttcaataagtctccctttatcaactcccaaaattccttaagaaaaaagaaaactgaatccatccgagccaagactcttagtattaccacaatcctaaatggtatttttcaccttttnttctttgaatttcaaagtaagcatgatattagcttctctagatanttgttggaaccccacaccatcaagcttaggtctattccaactctcttccttgaatc

SEQ ID NO: 68207 - DNA, 328 bp, Glycine max
  unsure (1)..(328): unsure at all n locations
atagccttgccttaactcaaggtatgaaatttaattagtcaatttcaccattaagattgctcatattggtcgagacccgattgtccatattggcatttgattgatcaatgagaacgacgatcatgcaaaatatgcttcagttgttcaacaaatgttctttatcctaagttttttatttgttgccacttttatcgcgatgagataattcttgataatttcgtcaaaagaaattctttatccttaattaactgaatctcccaattactatcttanggtaattgaatcttccaatcatgataaggtcactgtgcatatatatagttatatg

SEQ ID NO: 68208 - DNA, 433 bp, Glycine max
gctattgattgagtttatttaatggtgtaattacatatctagaattgcttgagtcttgtgttaatttgtcaatctaatctagtgtcattctaggacttcctttgtgtccaccttggcttgtggtgttgtccttttgctatatttttccttgaatctcattgaattaatgtcatgttaaatttccatttgtttcatctttcatttcatcttttggtttcttgcttgtcttttttttttgtgtttaagtgttgcctacaataaagattcaaagaggaaattggtgcattgtttgaagaaagattattgagtcttggaggttaaccattctaagagcaccattggatttgaagcaaccaaagcctcaccaaattttgagggaaacactcgaataaatatacgagcattgaagatgaatttgaaaccttaattgttt

SEQ ID NO: 68209 - DNA, 478 bp, Glycine max
  unsure (1)..(478): unsure at all n locations
tgtcacccagctcgcccaggcgagctcagctcgcccaggtgagcaatgttgcttcctccagaagcaacagccttctggaggaaggatttggaaggcccaagtgggccagattgctatttgtacccccctttttactaaatgcacccccttctatttttttgtaattcttttttccgtaacgttacgaaactttacgaatttcataacgatacttattttccttccgcaaggttacgagtccttacagattatgtatttactctttttttgctttcgaagaagttacgaaaactcacggattggcgaaaatacctcctttcgatttccgtcacatcacggaattttcacggattgcgtaagcctgctacctttngattttcggcatgtctcgggacttcatttattgtgcaacaaaggacgccaagtatctcaaagcggctaaccaaagggtgcatgtcatcaagtaataatccccgac

SEQ ID NO: 68210 - DNA, 458 bp, Glycine max
tagcgaccttagatactaagctattgtcgaacctacccttggcggagggcgacgcgagactctttgtatgtcgtgtcacgataagatactcgcggagtcttcatcaacgtttatttgaggaataccgtcgataaaccggaaaaaacgcgatctacgaactttttaatgaaaggttcgggagttgtatttacgcacggggaatgtattattaaccccacacgctccgtcccaaggggacggcatgactttaatctgatagtgcaaacatgactttgatctttaagatcccttctatgttcttatatccttatacccttttacatttttcttttttgggtcgaaagggtggttcctttgctctacgattcctcaattgggatgagaaatcatacctcctatttcttcggaacaagagttggttaaatattttgcttctttggaaatatgtttattgacaa

SEQ ID NO: 68211 - DNA, 367 bp, Glycine max
attaaacgacaataactctttacgcggatgtctgtattgttttccgtcatatatcgagacgctcgacattgaatgttgaagctttgagcgaatttaaacgacaataactctgtactcggatgtctgattgagtcccgtaatatatcgagaccctcgaaattgaatgttgaaactctgagccaattcatacgacaattacgttttactccgatgtctgattgagtcccgtcatataccgagacactcgaaattgaatgttgattctcggagctcttttaaacgacaataacttctacctcgatgtctgattgagccccgcctatatcgagaccctcgtatatgaatgtggagactctggccattcaaa

SEQ ID NO: 68212 - DNA, 466 bp, Glycine max
  unsure (1)..(466): unsure at all n locations
cgagctagacctttatagtaaacaagtcaagttgagtcgagccttatataggccgagccataggccctagacaagcggctgagctcatttccatccctagttacttcacctgtataaagtttaattgtgattntataaagatattacaataacgtaattattgtttacactttacatgtatttatatttattntacattngtttttgtggttttgataaactagaattgacgtttgtttaaaaactaaattaatttagaattntatcccaactnntttaattgatacattttatcctaaattntntaaaaacttacgaattttatcccaatcatttatcaattaacaagcacacaatttggtgataaaaaattaccaaaaaataaaaaacttaggaataaaaaatgtgaatatgttaacaantaaagtgatagaagggataaatcataaatttntaaaaaatggaa

SEQ ID NO: 68213 - DNA, 338 bp, Glycine max
  unsure (1)..(338): unsure at all n locations
cggntntgggcactagcaccccacctgacatccccaatggtctcttgtctctccgcgacatatgttcagagtccactgtgtggtcaacgaataaaagtgtgaaagctcacccttacccacttactcatatgaagcttgtaggatgatgggggatccatcacatgtggtactaagtggcggtcgggcgatggtgccagtaacactccacatccacaaattacacatatacccaccattccaagtggccacctatactgagctcacatactcccacgtagcccttatcctcggtcctctcaacaccgggttcacatcaatcctcccacgctgtcacaaca

SEQ ID NO: 68214 - DNA, 485 bp, Glycine max
  unsure (1)..(485): unsure at all n locations
tactaagctctaacgattgtacagctgcttctgtataataagcctattttatgtttgaaggtccaatagcctaaaagaatggtagaacaatgatagtatcgaactcaagaaatctgtgaaaatccaaattgaataaaaagacaggcaaaacgagtattcatgtgtntgccatgaatcaaacataatgaggttccaacaanattttaatcaaatttaattntaattttaattatccttatgctagaaagtntaactntttttatttatttcatatacttgcancaaatttgggaaaacaagtgtaagaaactaagaacttatgtgaaacagtatcatgaacacttctaattgctttaccagagatctcatagcatttacaaaatcagggttttcttctaaaggatcaacagacagaacaagtcttcccagtgtggcntttttttaacanatataataatttattcagatagtctgattcataatat

SEQ ID NO: 68215 - DNA, 350 bp, Glycine max
  unsure (1)..(350): unsure at all n locations
agtacatcaaatagtccacagattacacaatagtatgaagcatcnttttcctgcttcatcccataagaacctctntctcttctgtgccttattttattattcttgcaagagccaagtagagaaggtttataaatccacggatgtaaactgatgcacccaattatacaactcaaaatggtagtaattgtgcaaaacaattttattnttagtatgccaaagaatagtacttggtgattcaattacaaagccctgatttgcaacacccgtacgttattggaatgaagacaagcttttgtcagtgtatgatggcgaaatacatagacttctaagcanaacgttctatgaagaaa

SEQ ID NO: 68216 - DNA, 468 bp, Glycine max
  unsure (1)..(468): unsure at all n locations
tggcactacacagtanaacaggactacgctaccacttacctccacttanccttgctntgaattcggtgtggcatcgaccaaatctctgcttatcctctgccttacaggatgataaaaatgcatatgcttgcatgctcatggtttaagtagttcaagtgcaaatgtttattatgttcgattntacttaaacacttgtggcaccccttatagattgagagcatgcattctaaagcaataatagatacaacataagggttgcaagctaaaccattaatccgatgtttattaaacgttgcaatcaaagcttacaaaggacaggaaaactttaagaagcctggattagaatcatgtattgaccccccttacctaccctaagtactaagcataataccgcttgacgatatacgcattctcgagtgaaggcaactcttcatcatccatgcttgcaagcaccagggatcctcctga

SEQ ID NO: 68217 - DNA, 274 bp, Glycine max
attctcttgctttatcgcaacatggccattcaaggataaacacacacaactcaccgctggcaaaatacgaagctgacttccataaaaatcagaacgaagagcaaaaccccgctattgtcgaccaccccaagagatcgctaatggtcctaacgccatagacgcatcttctcctttctaacaccatagagaacgctaaatggtccaaccacctaaacgtttctctcctttaaaacacaagaaaacggtaatggtccaacgccctaacgtttctctt

SEQ ID NO: 68218 - DNA, 114 bp, Glycine max
agagacagacaacccggccgccaacaaacacagagcagagaagcgcaggaacgaacaacaagagcgaggcgcaaaggcagcagagagacgggacaccgggggaaacccacaaca

SEQ ID NO: 68219 - DNA, 400 bp, Glycine max
  unsure (1)..(400): unsure at all n locations
agaggtgagtcttccagttttggtaaattaagtaattttttagaattatttaattggagtaataattttcttgttacaataaagtatcaatgtctagtttaagtttaatagagcaagcaaatagatttttttatttttatgattcacaaaatatttaattgaagtaataattgtattctttagaaaaaaattaatacatgaagttgacgcgtataaattgttggaattaggtcttttactttgaagntattttaattatgttgaattatttacaaagcgtacaaatatgtacccgattcccttctagtttgttgaagttagaatgaaaattgaatctgtagtttaaggttaagtcaggagatgaagcaagcanatacaattatttatatttaaactactc

SEQ ID NO: 68220 - DNA, 423 bp, Glycine max
  unsure (1)..(423): unsure at all n locations
tacttgtccttcattaattgtctttgggcttgactaccacgatcaacaaagtactttcgacacctactgtatgttgatatcaccaacgctgttatcggtatgttgcgacaatccttcataaccttatntatacattcagagaggttggttgtcatgtgaccatattgacgtccttctctatcataagccatggtctatntttcctttgaaatgcgatcaatccatgttgctatcgctggactcagttggcgaagattttctaaattntgataaaaaaaatatgcttgcaaggagtgtagcctgcatgaaattagttagcaacaacaattntaagtatatgtcaaacttaaattaaggtgagcatgatcaacgaaatgttacccaatttcttcacaattctttttgtttgcattattgaattgt

SEQ ID NO: 68221 - DNA, 422 bp, Glycine max
  unsure (1)..(422): unsure at all n locations
tactaagctcgaaattgaatatggaagctctcgagagatacanatggtcattacttttcactcngatagccgattcggggcctaacatatcgagacactcataattgtactacatgaagcttctcgagaaacctcaaactggtcatagaggcctcacattgatatccgagccagagccataatatatcgagacggtcgaaattgaacaacgactcgagaaattcaaatggtcataactatacactcggatgttccattcaagctctttacatatcttgacactcgaaattgaacagtggaagctctctagatatactaaaggtcataacttttcactcggagggccgatacaagcgcatcacatatctagacgctgaaaatagaacatctgaagctctccagaatttaaatgagagtaactt

SEQ ID NO: 68222 - DNA, 322 bp, Glycine max
  unsure (1)..(322): unsure at all n locations
gttctacgttacaccactatatgaacgatgtactattcgaatgtgataagtgattgatccttacaacaacagcaacaactacaaacaccttattccaacatgcatgtgttgaaccacatccctatatatgatccttacaccagttaaatatatccaaatgctattntccaatatgttagtttatatatataatacttagcactttggttgatctacattaacacgattagccacactcattctgactatcttaaatttctgcaaatatgtctctagagaaacaggcttattccaatcataaccattcctgctgttcatgtgt

SEQ ID NO: 68223 - DNA, 457 bp, Glycine max
  unsure (1)..(457): unsure at all n locations
cgtggatgtgggtggtagtggtggagatggccttcgtatgatcttgcataaacaccccaccatcaaagaagggatcaactntgacctacctgaagttgtggccaaagcccctcanatcccatgtgagcctctgttatgttttggtttatatgatctttggtgagatttggttgtgggggtcacatgtgatgaattattatgtgatttgtaggtgtaacccatgttggcggtgacatgttcaagtctattccccaaggagatgctatcttcatgaaggtcagtcattactccaaaatactctcttctttacgacatattataagatatatagtgttgaatcattttgcattataatctttagtcaattttatgtaatatgtatagcttgtgcttctacctcttcaagtaatttcaaaacacatgtctcatgtatttaattacaaaanaaattgttata

SEQ ID NO: 68224 - DNA, 394 bp, Glycine max
actccgctaactaccttaggttcatgccccttcaaactatgtgttcatctaatcaatgcattaaagacatgttaatttaattgaataataaatgccagtctttattacgaggtgtgattaattcatttaatataataaatgggcagattattcacggagtaggtgaagaattgaattattctagactattacttttttgtgggccaagtgacctccattaccttaaaaggggtgaaataattaaatttttaaaatttcccgcgtaccaaattttaccccctttttaatgaatccatgataacctcaaatgccgaagaagaagaagaaacaatccatctaattaatttcttttatatgcacaagacaaagtaaactgcaataaaataactgagat

SEQ ID NO: 68225 - DNA, 427 bp, Glycine max
  unsure (1)..(427): unsure at all n locations
tatacaaccaacactttctaatcactatcatcataacttctatgatctaatcangttgtgaccaacctgaattcctcacattctctataataagttttaacaaacattaattggaaacaacataagcccattactgattggccaatttcacagccgaatcagcataaattagctgaactcaacacacacccatgatgaaaaacgtgaaaatgttgcgaaaattgttggtctgtagttatggaattntttcttccttgcgaaataataaaatttttctatttcagttnttttctttgctcgctgcaaaaaaaatagaaactctaggggtaaaaatgttgaatctcaagtacccatanaagttgaaagtacaaacttttgttgttgtgcagaaatatgagtcaatgtcaatatattggctacttcctta

SEQ ID NO: 68226 - DNA, 467 bp, Glycine max
  unsure (1)..(467): unsure at all n locations
tctagccaaatggacttaccttgaattaattcctttgatagccattttgagccttgnttccctttccttgttntgaagctcactacaagccttaagtgaaaaaccatgatattaccatatccttaaggaatnttggagctttggaattgttttgggaataagtgtggggggtttttgtttcattggacaacttgttttgttggctatgcttcatgatgtattttgggccatacttgatgtacattgtatattggtttaatgttggacatgctgaatgaaatgttgtttctcanaggctaaaaaaaaaaaaaaaaaagcaataaagttgagtgaataagatcttaaatggcacaagaatgatgaaactcttggttctactcttcatgtttaattnttatccttctttttattttcttatttttttttcgtaatatgcactntattcccttngcttctctattcctttg

SEQ ID NO: 68227 - DNA, 357 bp, Glycine max
atattccccaatattccccgaaaaagaagcttgaggaagggtgatccactttttacacccaaaggccaccctgtggattgatcgggttgctcttaacttgaacgggagtcaagactttcccgattgttaccaaggccaggcgatggcagacacctactccgcccccgaagagattcatgggcttctcggctattgtcagcatatgatagacttaatggcccacataattagaaaatcgtaggaaacttgtatggtctctaagaccttgactagatacgacttcctttttgaaataaaatgagtggtcccatgttctactccaaaagcttggcaaataaatcactctacattcatctt

SEQ ID NO: 68228 - DNA, 374 bp, Glycine max
gcaatctttcatcttggtcttctctttgtacttaagaaggctttctggtatagaaaagctaatcctctgttggatcttccctgtaggtacctgatgtaaatatatgtttatctattcaatgatgttttgtgtgatctctgtgctatctgcttctcattccagtatgcctttaccttgatcacgtagatgcatgctttgttagggtcattcaacagtggaaactggtgtgactctaaagtccttgatagtgcagggatgagttatcgtgctttcatgaggaattggtgtgcaataagttagttgagtatgtgtgtcttaatgtggtcctggttgagttaagtcttacaagaggaatctgtgcatgatgcttcatc

SEQ ID NO: 68229 - DNA, 406 bp, Glycine max
  unsure (1)..(406): unsure at all n locations
actatgcttggagcccactgactactatccatatatttgctttctaattcttttaacttataaatcggtgatcagaactatataatatgattggattcttattaatctatgcgcaagtgaataaaatattagaccttgtatgctcaatgttttcttagttaaaaacgcagagatacaaaagaaacaatatatgtgccatatgctcacaagatcaaaaagagtttgttgaacgatgagttttttagtgaaataataaaacgccaggcttaagaagctctgaactcatatctgttactggattcacgaatttataggctgggatgaatacataagttgactctaattttgatattagatcccgacgatccttttggatgctcatataatngacttaattgatatacta

SEQ ID NO: 68230 - DNA, 465 bp, Glycine max
  unsure (1)..(465): unsure at all n locations
tactaagcntgttacatgatttggattttatgatcctcanaaccaggagggtgtaatatataacttcctcttcaatgtaactatttaggaaatcactattgacatccatttgttataactcgaaatccataacacaagcataatcaagtagcaatcttacggcctctagtctagctactagtgcatagggttcaccaaagtctataactttttgttggttatagcccttggctactagccttgtcttactcctagtgattaaacaatgttcatccaatttatttttaagcactcatttattggcaatgatgttcatgnttttagaataaggtgccaattcccatacatcatttcttttaaattgtgtcaactcctcatgaatggacattattcaaaacacatctttgagtgtatcttctatagacaagggtttctagttgaacacacatgcagtattgtcacatg

SEQ ID NO: 68231 - DNA, 362 bp, Glycine max
tgtagaggaactcgagataactctacgcacttgtggtgtcttttattatagagatcggattcgaacgggctaaatttgaatcaaatattataacacgctcttatgcgtcactttgtatttggacctttgtaaaccttattacttgttcggcctcttttggtgtgtgtgagtctttcatgagaggattagtataaataagtctatctttgactttgagaggagtaagactcactttattgtaagaattatgaactttgtgtgtgagaacctctcttggctcttgagagcacttctttgattcttatcttgagatgctaattcaagtgactaatcctcctcttaacgcatcaattcatcatgaa

SEQ ID NO: 68232 - DNA, 410 bp, Glycine max
ctatagaatactaagctcgcatggtagtgcttgcaattgaatatcaagttcatgcgtttgttattgcatcctaataaaaagctccgttatgaagcattataacccttgcctgctaatagaattatgatgtggcaaggaaaggtgaagggtgattgacccttgaaacctaacccgggtagttgattctagaagactaatcctgcccaaaagaaagctttgtactaggacgagtactaacctgagttaactgctaaatacggatgatgaatgcccggacctaactcttaccctaccctctgtttgaatgcatagaacatgaggggagacaaagtatctgacattgtatttcttgaagacaacttatcgctgtatatatatacccttctatgttctcttaaatctgacgaaag

SEQ ID NO: 68233 - DNA, 471 bp, Glycine max
  unsure (1)..(471): unsure at all n locations
cgcctctgcccttgatatattngagggactcatgggcactatgaatgacaaattccttgtgataaaggtagcgtagccatgatttcaaagcccgtactaatgcatacaactccttatcataagttgaataattaacggtaggaccacttaacttttcactaaaataagcaattggatggccttcttgcatcaacacagacccaatcccaacattcgaagcatcacactcaatttcaaaagatttttgaaagtatggcaacgcacgtatggaggcattatttagcttttgcttaagaacatagaaagcttcttcttgtgtctctccccatttgaaaccaacatttttcttgagcacttcattgagaggagctgccaatgtgctaaaatacttcacaaatcgtctataaaaacttgctaagccatgaaaactcctcacctcggtcacagacttatgtgtaagccattcttgaa

SEQ ID NO: 68234 - DNA, 423 bp, Glycine max
ctgcagatgtggtcttcgccagtgaaaggatcaatgtgggttctattatatgcaaacttgatcatcctactatgacgactgagacaactggggcaaataaagagggtgaggatgagggagaaacccatgctgtgactgccattcctgtacggccaaaattcccaccaacccaacaatatctttactcaaccaataacaaactttctgcttacccaccacccagttttccacaaaggccatccctaaatctaccacaaagtctgtctaccgcactttcaatgacgaacaccacctttagcacataccagaaacaccaaccaagaagtgaattttgcagcgagatagcctgtagaattcacaccaattccagtgtgctatgctgacttgctcccatatctacttgataattcaatggtagccata

SEQ ID NO: 68235 - DNA, 453 bp, Glycine max
  unsure (1)..(453): unsure at all n locations
attctggttttacctgatatcctaanaatattagatattttatactatacacgaggaactgtataaccagtatctcggaattcatcattataaagtgaataagacctaaacaaagataatttctgatacgctctatataattaatccttatttnccctagctgattacatcaccgaatccatggactnttctacgagtgttccatcatgatgtaatagtcttctagagactagagagaagaattatggattaaatcaaatcatttaagtgagagatcttccttaaaaccaagattagattagagaaagtgtcggaaaataattatactataggatgagggcatggtgataagaaagagatgtattatgtggaaatattgagttgaggaatatattgattcttgacaatatagattagaaaagagaggacccaccgccgtagcagtgcacatgc

SEQ ID NO: 68236 - DNA, 102 bp, Glycine max
  unsure (1)..(102): unsure at all n locations
agtcaccgccgctgcaagctttaattattacaaaatgggagtactttttgttcggattnntctcaggtgcgcacgtcgatattgcctggtgttttattatgc

SEQ ID NO: 68237 - DNA, 503 bp, Glycine max
  unsure (1)..(503): unsure at all n locations
ctaagctctcgttggtgggttgatgcactctatctcgcagaatggcatgatttctgctgatatattctcaatcaattcaggtgcctcttttgtgattatcaactctatcttccctcctgctgaagcatctaacaattgctnggtttgcagtctcaacccatctataaacatgttcaattgaattggctcagagaacccatgtgtggaagtctntcttaacaaaccctgaaacctctccaatgcttcactcaaggactcattacggaactagtgaaatgatgaaataacagctttcccttctgcagtctntgactcggggaagtatttcttcagaaagttctcaacaacttcctcccacatcttcaaattgttacctttgaatgaatgaagccacttcttggcttctccggccaaagaaaatgaaaataaatagagccttgatggcatcatttggcactctgcaatctntacagtgttacaaatctctatgtatgttgctaagt

SEQ ID NO: 68238 - DNA, 358 bp, Glycine max
  unsure (1)..(358): unsure at all n locations
ctaagctcgagatcgaccaaatcgatcggcagagagatattacggcnagtttcttttgtatgtgaatgacgcgaaaatgtgtgacacgtgtattgttgagatgtgatgccacacgactagtcatggaatgacgtgagatgtgtttcggtaagctgatgtagctccatgtatagcttgtacgccttggatcttcttcatcaatggagtcctttgcttcttgaacatgaatggcacccgaatggataaagaagatgattggagacgccacttcaaggagatgagtctagaagaagctcaccaccatatgaagccatggataatagcttgaaagtacgagaagatgaatggagggggaggg

SEQ ID NO: 68239 - DNA, 55 bp, Glycine max
ctaagttgaggcctgccgccgactctgaggatcccgggtccgagcgtgttttttt

SEQ ID NO: 68240 - DNA, 490 bp, Glycine max
  unsure (1)..(490): unsure at all n locations
agcttctgagaattccaagctttataagcaaaaattatttatttatcatgacaaanagctatcaaaaagaaattgtcagcctagtcaacaactattgttatttaattctcgattaagattgtttccaggtaagttgaaatccaagtggtctggaccattcatcatcaaagaagttatgccatatggagcagtgatactagaggacccaacaaccaaaaggacatggactgtgaatggtagcagaatcaaacactacctaggtggagatttcgagaggataatcactattgtccaactgcaagatctggaagcaaagctctccaagtttattttgatgatgccaaagactcaagtcaagaatcaagagtcaagcaagtttcaagaatcaaagagtcgttcaatcaagaatcaagattcaagtaaagattcaagagaagactcaagatatgcatgaacttcaagacagcatcaagataagtataaaaagatt

SEQ ID NO: 68241 - DNA, 472 bp, Glycine max
  unsure (1)..(472): unsure at all n locations
tatttaatttatctgaagatagaatttaatcttatattttatatttaagagataatatatgagagtatgaaaatataatagattaaaaaagaataaaatttaaattttaaattttaaattattttcacaaaaaaattatattaatattacattttgaaccagatattcaaatgagtacttgggtgtagtacttccttaagtatttttttagttcttatattttaagaaaatattggtcaactgtatagtctagccatcgcttaaaatttaactgtcaacggttaaaatcagttttggggactaagataatgtagtttgaaatataaaaatactcacatagtaaattaaaatatagggaaaccaatntagtgtaatagacaaaatagggggacagattctgaattaagcctatattaaataaaatgtnaaatattattccattaacccctgaaagtaaaataataacaataag

SEQ ID NO: 68242 - DNA, 463 bp, Glycine max
  unsure (1)..(463): unsure at all n locations
atctctgcctttcttataatattannacagttatttgtttttattnnttacatcacacgctgcagcatgaagtttcttaatctcatcttcaaaagaaccacaaagacgaccagttcttcgcctcatattaggttgaagaaaattctgcactggacctcctcaaaacctaataagaacttagattaggaaacccagctcctaacttattggcaatggctttacatgcatacagtagaaatttccaacagtctgaagctttgagccatactattccaaactagaacttctgtaccacatcgacgaaagggggtggaacttggatacatactgatgcttctggtattgcanaacaaaggaacatcttagaatgtggattttggtctaactcaaccncaaangctagctcttagggtgagggttgcgcttcacttatatactctatcttgtactatcgctagcaatg

SEQ ID NO: 68243 - DNA, 251 bp, Glycine max
tcacgagaaggctactacctggaatactgtttttgtgtattaatgactcctctgcggccgcgcacataaggcataaaggatgggcagctcaccaagatgtcttcctcacctgatacgatgaccatatgcccttgcactacaaatatcaacattgggagaagtgtagagggaacaactcccactgagtggatacacggtcgccccaacagacaactgtgtggggggtgaatatccatcatttggaaagtaac

SEQ ID NO: 68244 - DNA, 352 bp, Glycine max
  unsure (1)..(352): unsure at all n locations
agcttctacttatatggcagggcgggcttccttcttatacttgtctccaacgcgagctctgaccactgttcttccttcccgcgatgcctcttatcatgtccgcctgagtgggcttatagcctaaaccatacttcccacgatttccttgngtttttatcaggctagttatgccgccattgtctttgcctaaaccattcccgggttcgaaaccgttccccaccttaactcgggccatctttacggctgcttcggacagacaaggttgcccaaagagggagtccacggaggaaatgctgaccacctcataagactggaaagcggtttctaacaattcttctgcggtttccacata

SEQ ID NO: 68245 - DNA, 228 bp, Glycine max
agatatcaagacgcgcgacattgataacagaagcactgaacacattcacacgacgataactttttactcggatgggcgattgagtcccggaatatatcgagacgctcgctatgtagaatagaagctctgagcatattcgaacgaccatcacttttaactctggtgtccgactgaggctcgaattatatcgagacgctcgtaattgagaagggaagctttaagaaaaat

SEQ ID NO: 68246 - DNA, 198 bp, Glycine max
attgatcatcctactaggacgactgagaaaactggggcaaataaagagggtgagaaagagggagacaccatgctgtgactgcaattcctgtacggcccaaattcccaccaccccaacaatatctttactcagccattaacatactttttccttacccaccacccagttttccacaaaggccatccctatatctaccac

SEQ ID NO: 68247 - DNA, 488 bp, Glycine max
  unsure (1)..(488): unsure at all n locations
tgatactatatataccattttgactttagtgtatgatatgaagngcaaagaatggacctcttgctatntgttactaatgaatagcttaaacccttgtgcttgagtgaaacagcagccgcgagactgtggtttaagctactttccttaatatttgtcttatgattaacttcatctaatgatacagcttacattttattcttctctttgaaagctgcatattttgtgaaagacaagtgatgagtacataatgcttcattnttttatcatgcaatcagtaatttttgctgcatacacctttgttgatgatcactgcatgttattgtcacttgaggacaactaagttgttctctttttgcttgaggacaagcaaaattgttaatttggtggaagtgttagtcgatgaatacgactaactcttatgtataaaacctgtgtaaattgatgacacttccgcagttcatgggtattttgtagtgttacaagtactt

SEQ ID NO: 68248 - DNA, 478 bp, Glycine max
  unsure (1)..(478): unsure at all n locations
agcttattagggttgttgactaanacatccacttttcttgtgaagttcacatttacactcatgctaaacatgttcatgcccaagctcatgttctgaagccttattgaatccacattggtaatggggtgccttggtttgaacactgtcaatgctaagatcacccttaacaatacaagtgcaatcgctacacataatgctaccatcaggcacacaatgctttctttgaagctagattcctttttcactgtgcctagtggggatctacatcatcatgcaaataaaaaaaatattaaatgtgtagtaagtgcatattatatgagatatgcatgtatatatgtaaagcaacaaccttggaaacaagtaatatcagtttgtatcagttaattaaacatattcgttaatcaaatattttggtaaagaatattccgtacaaatatatatatcatggttaagagagaacgtgtatatgtacccaaac

SEQ ID NO: 68249 - DNA, 476 bp, Glycine max
  unsure (1)..(476): unsure at all n locations
ccctcggngccattcctgcgaaggcaaacatttggaatgttattttatcttgggacactattcttaaagcaaaaatggcatataacctcctctcataaatacaaacatcaatgttaatttagagcaagcttatgcgcatattttcttacgaacgttctcttgcacaagacattctattaactaagaaaaatgcacccatatacaatcaagacangcttcgtacctagattaattacacgtacttcccagggtgtatttgttacttacatcacacacatctccttggctaagattacatacatgcatactcaaagcatnttgtggtaccaaaaaatgcacatgtgcaccatctggtatttctaatgcctatacatacacaaacttcatgatgaatcttgactatctacacaataaggtgctacatntcatgctcttttcaaagttttgctcctaaagccgcatgcaaattcaagtat

SEQ ID NO: 68250 - DNA, 487 bp, Glycine max
  unsure (1)..(487): unsure at all n locations
agctngccacaatccaatgtagctntgcactaccgcgttttttacaattattntcaacccactgctgcaccaaacatacacctaaaatatttcttatttgaagaaaccaagcttgtgtttctctcctaatttgatggttatataccaggaaaagataaccttgtctaactcaaacaattcgccccaaaattagcatgtcacaacatactatgtctttggcatatcagtgtaataaataatcacaagacaataaaaagcacattcttaattcttccaaggacatgtgattcggaacgaggtgacactctcaaaaggcagtttcaaaccataggaagaaaaatgaataatagaaagcaacaaatcattntaactctcactttaattgtaagataaaagaaaaaaaaaatctagaanagaagacataaatgtccatgcgctggttaaacgtttcacttggaccatgaccagtcacccttcatatattaag

SEQ ID NO: 68251 - DNA, 482 bp, Glycine max
  unsure (1)..(482): unsure at all n locations
attattgttagttgcacttctggggattatgtgtacttgtcttgcccttattcttcctttgggggaataatcctagaaaattattttatgttaactattggacagtcttcttggcatatggatatgcccgcattttcttgtaatggtttctttaatattattttaaaatctagatttgctaactattttttccccagatatattaattgcccaatagtgaaatatgaggttaatagtaacttttaggtactggttaattagtttggatgacctggtatccaagacaaatgtctgtgttgcctcatttgaaatttgcaatgtataaatggtgtagtggctgaaaattacttctctatcttatgtccggcttcataatcaagttntttacataatcatattcaatagaaatcagagcangtttatttaatctaccatgtgtcatagtttcaaataggaatttaacaatntcaaatctgataaat

SEQ ID NO: 68252 - DNA, 469 bp, Glycine max
  unsure (1)..(469): unsure at all n locations
tgcaagcttcaccttctggtcactcctcatagtgttgctgatataacatgctctattntcatctcccactccacgtatgcctccggatcattctttcctttaaatggaggaatgttgagtttaataccatcaattcggttttgtctaggaacaccatcattccctcttctcctcctttcttcttcattatgatctctattctccatttgatccaacctctcatggagcgcatcatctcgttgtttcattaacctctccaaatgttgcatcaaagcttgcatttggaattgcgaaagccccactccatcattaagattagtacctgacatctcatacaaacaaatnanacgtaacaagacaattatagttgctgtttgaatacctcacccactcaagtgtatcacacaattatggcttttctctaatgaaacactcttgtcctttaccactctaattcnncctgagttct

SEQ ID NO: 68253 - DNA, 455 bp, Glycine max
  unsure (1)..(455): unsure at all n locations
aagacaaagcaatcaaagatattcaagatggatgatcattacagtctatagagtcttagaaagggtttattaaataggaagggaattccaattgaagtagcaaaaggtttggccaaaaattttaagttaaaatgtcttttacaagaaatttattctctggtaatcgattaccagaggatataatcgattaccagtggccaaaactgatttacaaacagcaattaaaatttgaattcaaaatttgccctgtgtaatcgattacacatatatggtaatcgattaccagcagtttctgaacgttttaattcaaattttaaagcttgtaatcgattacacaaatactgtaatcgattaccagagcagaatttcagaanatattctcaacagtcacatctntttatgtggttcttgaatggctatcanaggcctatatatatgtgacttgagacacgaat

SEQ ID NO: 68254 - DNA, 336 bp, Glycine max
gaccacacagtggtacctgtatatatgtcgcgcgggtcacgagaccttggggacatcacgtggggtgctattgtccataaccaatcttgaccaatcccgacccaacccgggcatagtctgtcagtgagaacctgtgatgtacctaaacaggcgagctcctggctgtcaacagattataggaacaaacaccacagagcattgaggcttgtggtaactggccacctgctaaacttgattgatatgtgacatatggtctctggtaatcgattaccaagggtgggtaatcgattacagagttaataatgaagacagggcgctaagatggtctctggtaat

SEQ ID NO: 68255 - DNA, 397 bp, Glycine max
tgagaagctagagctctatttactctttctctctctcataactaagctcacctcctagagaagctcccttaagaagattcctaaagaagctagagcttaactacacatacctctgtaatagctaagctcacctccttgagatgagaagctagagcttatctacacaccctctataatagctaagctcaccctcatgacgcaaagcacgaaaatacaaagcaaagtgcttactactaagactactcatggtgccccgtactacaaggctaaaaccctatactactagaatggccaaaatacaaggcccacacgatgggaaaacctattctaatatttacaaagatgagcggtctcatacttagcccatgggctcgaaatctaccctaaggctcatgag

SEQ ID NO: 68256 - DNA, 433 bp, Glycine max
  unsure (1)..(433): unsure at all n locations
atccttaagttacctgacgcatcgcaagcttctagctttcgttggtgtatgttgatcttctttttgtgctctaaagngtgggaatgtgctcaaatatngtgggccaatttggttcgtttcttgcttgatggggtnggaatggcnggttgtatgggatggccctaagcctataatgcatnttgaaacaatgggacatgccacattggccccgttctcttgctattgatacctaaatgcgcgcccaccaagtgttcggtgaaatgcctcaatggcattagcgcgtgacttttgtaaagaaacaacccatggcgcatntnggtttgcacatatntttctatttttgggacatgcattcaattcccaaaaaggctagagtaattgccccacatatattctangcctaagaactaaaattttatgcaaaaagaacaca

SEQ ID NO: 68257 - DNA, 472 bp, Glycine max
  unsure (1)..(472): unsure at all n locations
atatactaagctcggtcaaccctatatccaggaatggcattctgatgccaattcttaacaacatctcatanggatgaatgactcgggcatacttttagctatgcatggaaaatgtaattatgaaattgagatgcccgaagaaacaccattttctagttaaccatgcattaggtaccatgttcaattattttggtntggtggtgggtggtttttttttttagaaatgggtttatgatcccaacatggttggctcatggtgcctaacacatgcaactaagaatgtagtgtgaagtttcacgcttcccctnttttgttttgttttgtagaggaaaacgcaaggatgaaaacaaatggtatgcaattttgcagatcaaaaagtttgtgaacgcatatgcatgatgatgccatgactcatgcaaaatgtgaggctggaatatgataacggacaaatgcangatatgtccattatgat

SEQ ID NO: 68258 - DNA, 187 bp, Glycine max
gagatacgaagacaaataatttcataaaacaaagtgattcagccccaattgagtgacaccataaagacttgcctcaacattaaggccatgttgtaagggactgtggaataccagtgggggaatgaacttaccccattaaggatttaggtggttttgtaaaccaaccttaaattgaaaaaattttaac

SEQ ID NO: 68259 - DNA, 478 bp, Glycine max
gctcgaagctctgatataatattgtgcaacttcctgtcgcaacctacttttctgttggaggacgacggagggctcacgggtgcgtcttccaagggagaaaggcgtgcggagtcgccaccaacttttatttggggaaaacgtctgataaaccggaacgtttggtctatgaaatttaagtgtgaaaggttcggcgagttgttttatgcacgagtaatgtattagcaccccacgcatccgtcacaaaggacaacaacctttaatcaaatgtgtaaggtatgacgttcaaattatgtattttcccttcttttatgtttttaggctgtttatgggtgcatttatatatttttatctttttgtggtcgacaagggtgtttccctcgctcctacgtatcctcaattgcgatgaggaaatcagacctacgtagttctttcagaactaaacgttggttaaactggttttatctttttctcgcagata

SEQ ID NO: 68260 - DNA, 413 bp, Glycine max
  unsure (1)..(413): unsure at all n locations
ctaagcttctagaacgagccacgtcntcctaacctcttgtccgtgatggccttttctcttctactgcgttcacgctagcacctccatgactagctagcgggttggttttaacatttgggccttcttcctgaaacgctagccagccgacactaatcagatgctgcactntatacttgaacgggatgcaggagtcaatattgtgtccgggaactccactatggtacacacactnggcacccgaatcataccacttgtggtagggtggctggagaactttcccgggtatggccaccaccaagtgattctccaataatgaaggccataactcggaatatgccatgggaataggagggaagctgtctttcgggtgttgtgcatatttataggtcgcgctgggggctgtattattaact

SEQ ID NO: 68261 - DNA, 433 bp, Glycine max
  unsure (1)..(433): unsure at all n locations
agcttataggagcactcaaaccgagtgtatntaccctttaatcctgttcttcgaagagtccgtcagggcctctccctcctgattcaggtccaacccttaaaataagtntttgcatgcagacactgctcatgaattatacaatacccacaacctcacactcatgttttaaacacatttaacacattgcgttacaatttaacactggttcctaaataggaaatctacactttctctttaacactggttcctaaataggaaatctacactttttctttaacgctgcgcatcaacacttttgtcaagataacactaatcgggttattgtataatttacagctcacaacacaagtaatgtcacatcaagtgttaaccacacacttatttacaactaanactngttcaccgaaggtggagctggtggagtgtctggagt

SEQ ID NO: 68262 - DNA, 375 bp, Glycine max
acattctcttaaagatttatgcgataatatgggctttgtatctatgattgaacctaaaaatataaaagaagccatagtagatgataactggatcattgccatgcaagaagaactgaatcaatttgaaagaaacaatgtgtggaaactagtagaaaaacctgaaaattatcctgtcataggaacaaaatgggtttttagaaataaattagatgaacatggcataattattagaaataaggctaggttagtagcaaaagggtataatcaagaagagggaatagactatgaagaaacatatgctccagttgcataatcagaagccattagaatgctcttagcatatgcatccataatggagtttaagctctatcaaat

SEQ ID NO: 68263 - DNA, 428 bp, Glycine max
  unsure (1)..(428): unsure at all n locations
cagcttgagctgaacgtgatgactatattcaggctcttgttgtctatttgatgnnatcgcnacaaagggtcataaattgatgggcttctctacaggttaattccattttacttcccaagttctctttatctgagtctttggttttgtctattacatatttacatctagtagagatgcaagtaaagttcctcttgctgtaatgtaatctgttaattggcaaaaatatattttgtacactaaatgctacttcctgataaaaattaaatgcattagcttcttgaaaaatagaaaggggagagaataaaattagaaaggatgaacaataagttggctcaatggtgttttagaatttgcatgtagaaagttcatcgaacttcaacatttgttctaactatactgaataaattgacgttattttgaactatgct

SEQ ID NO: 68264 - DNA, 443 bp, Glycine max
  unsure (1)..(443): unsure at all n locations
tagtctcgcctgatgaaggatgaattgtggctacttcatgctctcctctatttacaatagcgtcacttctggaactaaattgctgggagttggaagccatcttctcaattaaatttctagctttagcaggggtcatgtctccaagggctccaccactggcagcatctatcatacttctctccatgttactaagtccttcataaaaatattggagaagaagctgctctgaaatctggtggtgagggcaactggcacataatttcttaaatctctcccagtattcatataggctctctccactgagttgtctaatacctganatatctnttttgatggccatggtcttggaagcaggggaaattttctctaagaatactctcttgaggtcatcccagctcgtgatggacctttgagcaaggtaatatgaccagtcctttgccact

SEQ ID NO: 68265 - DNA, 464 bp, Glycine max
ctatatccaggaatggaattctgacgccagattacttcatatcacaagggcgaaagactagccatactgtcacgtgcatcgaagaagaattatgaaattgatatgcccgaataaagaccacttcctaggtaaccatgcattatgtaccatgttcaatgattgtgattctggtggtgagtgttcacaactatctagaaatggcgttatgataccaacatagctgactcatggcgcctaacacatgctacatagaatgtagtgtgaagcaacacacttcctctatctgtgatctcttgaaaggataacgcatgcgagaaaacaaatggtgtgctattgtgcagatcaaaacggataggggacgcatatgcaagatgatgccatgactcatgcataatgtgaggctggaatatgataaccgacacatgcaagatatcgacattctgatcgcttgaagagatgcttat

SEQ ID NO: 68266 - DNA, 294 bp, Glycine max
  unsure (1)..(294): unsure at all n locations
agtcacctgccgcatgcagctngcactactataaattctgccctttattattcttngtcaaccctggctattttgtataaccttttggtacatcactattcatttcttcatcgctcccaagatcattatcataatcatgaatattagtatcaacttcattcatcttggtatcctcattccaattcatgcacacttncttnggtgtcaggtttccatcttgaacaatgaaaccaaagaattgaaatccttacaaatggtcttaccaagaataaaaatttataataattgaaaatt

SEQ ID NO: 68267 - DNA, 469 bp, Glycine max
  unsure (1)..(469): unsure at all n locations
tatactngcccttcatttaactgtctctgggcttggtgtgtctttctcaacanagtactttcgacacctattgtacgttgatttgaccaatgttgctatgggaatgttgcgacaatccttcaaaaccttattgatacattctgagaggttggttgtcatgtggccatatcgacgtccttctctatcataagccatcgtccatttttcctttgaaatgcgatcaattcatgttgctatggctggactcaattcacgaaatttttctacaatttgatcaaaaatgttcttgcaaggagtgtatgctgcataaaattagttatgaataacaattttaagtatatatgaaagttaaataaatgtgaccatcanatatgaaatcttacccaatntcttcaacatttctttttgttgncaatattgaattatcgattgaagttgctcgctatgtgtcgcacgcagtagacatgat

SEQ ID NO: 68268 - DNA, 489 bp, Glycine max
gctgaaccattttatcaataaacacaagttgttgtttattcataacattagagtttatctctcttatcttagtgagagtgattctcctaaattcttgagtgattcaagaacaccctggttgtatcaaaggactttcacaacctttgtgtgttgccctcgccggaaagagtgattctttccttcctttcatcttcaaccttgttctttcaaatcacaattccagaaaatccacttctgcccagaattatctcgtggccataactcccgttttacgcactcaaattaagtgattcttgagcctagattgaatttcaagacgagacctttcacctcattatggaatcacctcattcggagtcatgtagcttgagttttggccatttctatatttctgtccagccaccacttaacctacgttttctcatctcattattccattttatgccaagaaccaccttattaagaccgacaaaattaaccaccttattc

SEQ ID NO: 68269 - DNA, 486 bp, Glycine max
  unsure (1)..(486): unsure at all n locations
cgcaagctttgcagcttcataaagcgtttggactaattattttattactttcaaaattaaagataaatatttcatatatcatcatttttatatttttattattttaaaaatgaccataatatttttatgtaaattaaactagttttctaggtttttaaccataatatatgtatttttcaaaacttccatttcaaagaaaataatatttattattttaagttcaaaactcaaagaggaaaaaatgcatgcaaacaaattcaaataataagtattggctaaaatatttttattatgaaattaaattttttaaggataaataatttcattntttgtaatatttgatattttgattnttatttgatccttanaagtaacattgtaacaataaaataatatttttcanagtttatgaanaaataatatagaaaatgaaaataaaatatcatatgaattattattaatatagaatttaataataaaatgaat

SEQ ID NO: 68270 - DNA, 419 bp, Glycine max
gagtactatttgcacagaatgaaagcatttcattctttttttagatggcacacgccttgggggataatggtttttggtcatcggtgacttctgtgcaccatttagagttgacactttcttgatgaggacacatagagtgcttatcaggggaagcgattacctggagtgaactctatagagttactttggcacaacatcaagctacttaaattgctagaatatggttttctattcttacacttggacacgtagggctcatataacacctggcataaacgataacctgcgccaaacatactgatagaataagtgggacagaccaataactatcttatctctcacagcacatgaagaccttgagtgttctgatacacaccccaacgagaagattctagcagcttgaagacacactttactta

SEQ ID NO: 68271 - DNA, 384 bp, Glycine max
  unsure (1)..(384): unsure at all n locations
tgcaagcttaacactntgtcctagataacgttacatgttcttaatattaaganaatagcatgacatcacagaaaggtagctaatagctactcttgatcgaccatcananaaagctggaatgaatatttggcagatagatgaactacttaacagaanaacatcaaaagtctaaatacaatcctgtttgtccaaatagaaaaaagaataataaacagctagctatatcttctaagatccaacaataatatgataaaatgttcgagaaaatatagaaagaaaaaaaaatcttccacaattggtcaaaaaaggctggcggagtattctggtcctatcgatagataggaaggtcattccggggctgtggatatggacttgaactactga

SEQ ID NO: 68272 - DNA, 269 bp, Glycine max
  unsure (1)..(269): unsure at all n locations
atggagaacaaatcatcatttgatttagctaagcatcctgtggcacatggtatgagtaaacatattgtaaccaagtatcatgttctgcgtgatcaagtgagtaaggagaagcttgaataataactttgcacgtctgaagatcaagttgcagacatactaactaagccattgaagtctatcgagctcgagaaatngagagacaagttaggagcgacatccttgacaaatctgaatataagagggatgttgatgtatactataattcagat

SEQ ID NO: 68273 - DNA, 385 bp, Glycine max
  unsure (1)..(385): unsure at all n locations
gctgatgcgacgatcggaagaggcgatttttttggtcttgacacagagatcagagtctatatcttactctattaccacgtgacacagacgatcacttctctttctattagggaataacaagtgaacgagaccactctacctaagacctctgagtatctaatcgattacaacggcncttgagtagtgtctaagtgtatggaagagcactttaatcgattatgaagatcactcaacgagtactatattgaattaatcgattattggcgagtataactgttatctctataaatgatcagcttgtgttctcttctaaacaatctcagtatgtcgaaaatcacacaattggcctctgagagagctaagatcatgtgctgtcattacttaa

SEQ ID NO: 68274 - DNA, 337 bp, Glycine max
  unsure (1)..(337): unsure at all n locations
ttattgatattgattaagaccaaagttgatgtttgattgtttgttgaanaattatgatttatattatggaattgtaaaacctataaactctccaataaaatgatttacttaacccattattcatgaatggttcattagttgtgattttcaatatattatctttgaaaaggattattgcttggttggctacattagttattcattgccttaatcttcacggtcattgaatccaatactgggcacgcttcttctattggtaatgtcagctcttagttctatggaaatgacattatttcctcccccccctccctccgctctagtaagtgagggacgtatc

SEQ ID NO: 68275 - DNA, 408 bp, Glycine max
  unsure (1)..(408): unsure at all n locations
actaaatgcttataattgtcagataatctgcacaccacagttntgatttgaatagtattcaagatatatttagataaataacttataaacatttatttaatacgagtattttcttatgctcttaagaaaagtattttcttatgggaatgtccagtgtagggtactaaaatgagtgatctttcatggaccagtatcctagaacggaatatacggagtttttatgttttttattttttggatttttttaaggaaagtctggagtgacgagaataccattttattaatatattgaattaacaaagttgtccttttataaaattcttatatgaagttgcatcaggattcttgatatgcattcccttgatcaattgtaaaacggtgcattggtggtcgttaaaggtcgattcc

SEQ ID NO: 68276 - DNA, 459 bp, Glycine max
  unsure (1)..(459): unsure at all n locations
aaagtgtaaactaactgataaaaaaattatttattttttttaattnncatatattgtgggtgtaaatattcttatattaattttaaatctaattaactattaaaataattacttcatttattctttagtacaaaacagcatataaaatgaattgattattttttatgattataatttttataaagtagctaattctgttattatttatctaagtaattagtatttttttatttccaacactgtaaaatgttttttcactttaatattttcacatcactcgataacaagttaataattattaataagaataaatcttggacaatagtaataagtattcttaactaaaatgaagatctatataacttagatctaagtggaaataatacataaatataacacaaatagatttatatttgaaaataatctgttatctacaacattaganaatattaatataat

SEQ ID NO: 68277 - DNA, 423 bp, Glycine max
  unsure (1)..(423): unsure at all n locations
gattgcaatggagaaagtgtcgnttttcttgtgctttcatggccagagttctagtgtattattctccctctcattaatacaggtcacagattaattaattccttcaacttttggaatttctagttcatgaaccganattctatgaacacaggttattaaaaagaagaaaaaaacacctcttattattattattatattccaatataacttatttaattattaaatatgatcataattatgaaaatatttaaattatgacctactgggtttctgtaatataacaaagtaggcctcaagtatttaattcaagttttatgggctggtgggcaacgcacaaagcttgtgttatatgaagcttatggtgtatttaattccaggccgaaaatataaaatatttattatttttctacacggatatttctc

SEQ ID NO: 68278 - DNA, 504 bp, Glycine max
  unsure (1)..(504): unsure at all n locations
gctccggagagaggagagggaccaatcacgaggtagacagtttgatcttgaaggatgttttgaaggtttgcctaaggtccaagagaagcttgtctcagcgtttatgcgagacagagaccaacatatttgccatcgtcagcaagtaccaagaagaactaaatctagccacagcccatgagcacaaagtggtggacgagtatgcccgagtgtacgctgaaaaataggctagaggaagggtgatcaactcgttacatcaagaggcaacaatgtggatggaccgatttgctcttactctgaacgggattcaagaacttccccgattgctagccaaggctaaggcaatggtggacacctactccgcccncgaggagatgcacagacttctcggctattgtcagcatatgatagacttaatggcccatataattagaaaccactagggaagttgtattgcactcagatcttgactagttataactttctgaaaaaaatggagttatccca

SEQ ID NO: 68279 - DNA, 369 bp, Glycine max
  unsure (1)..(369): unsure at all n locations
ctaagctcttatcagacctactctnggtgactgttntcaagagaatgtcttcttggttgctaacactgaacacaaggaaccaacattccttgtgttcattgcaagaagcaggatttgcttcttggttgatcactggacacaatagaccaatgtcttttgggttcattgcaagaagtgggtacaacttcttggttattatcactggacacaagggaccaacgttccttggggttcattgcaagaagtgggcataacttcttggttgtaatcactgaacaaaaaggaggggattccttcgtagtttattgcttgtaaaggattntacaaggatagtggaaatctcaagcgggttgcttagggattggacat

SEQ ID NO: 68280 - DNA, 486 bp, Glycine max
  unsure (1)..(486): unsure at all n locations
gcaagcttgngatggtgggactgttttatatatataggggttgcttgaatgatttaaaatgagagtctgaatgcaattcccagcttaggaacccaaacttgtagcttcaatgcaagaaaacatgcttatggctaggaatccaagaattcggtgttagaattagaaaagaatgaaaatagggacttgtttgtaagaattggggctgccccatgattggtactttgcacctaagtaatgtgggaaatgctcttcaatggtgtgtagatatgtgtgtaaatataaagggcatgaaattctttgcagagggtgaaggaatattgaggtcacttcctaaatgaatgtatgatagcacgagattcccttttgaatgcaagtatgtgcataatgtaaatatcttgccaatatgcataatcgtgagtgatacaatgaaagtttgtatgggttatatatctcgagtgtgtgaggtagttcgtgtancaaatgtta

SEQ ID NO: 68281 - DNA, 377 bp, Glycine max
  unsure (1)..(377): unsure at all n locations
ataaatggttaatggtgttcttaggcgctactcactaagatgtggttctttgaagcataagtcttggctctttagaatttattttgaaacacctaagctctagttcttgaagctaggcattgtaagaattaaaaggagaaggtttgagtattcttttttataaaaatacatggaagataacttgtggntgttaaagtcatgaaggaagaactttgacacccatcactgaacctgtgcatcaacagacatggacataagtcaattcttgcgtgtacagttgctttcaatacttgaacgaagaactttgacacccatctatgaacccatggatcanatgacatggacatngcacttgactttgagtcttggtatacagt

SEQ ID NO: 68282 - DNA, 477 bp, Glycine max
  unsure (1)..(477): unsure at all n locations
gcttaaccaggggatatggaccatttaagcgcatgattattcattgtcattgtcttttgtcttatcacttacattcatcaaagtgttgaatatgttgtcaagaattttttctctatgtgcataacatcaagattgtgtcacaaaaaattatatttccaatacggaaaatccccatagatacttcttttgtccaatgatgtcacctaatatctgtgttgttggtggtgacagaaccagttttgtgacttctggcaaatccctaaccttatgtcaaacttgtgtaggtgtcaataaagatggtggctcatcccttactatttcccttatttgaaggaattattgttgttcctagatgcatgatcacttggtaacacccacgatgagagtcataccacgaacttnttcccccatttgccaactggaagggctttgtattctccatgcaatatgaacatgttaatctaccatgtgtccccc

SEQ ID NO: 68283 - DNA, 126 bp, Glycine max
gaatccgactgaaaaaaaaaaaagtgcaacgcaaccgttaaaaaagtgcaactaattgtgatatagagaataccacacaaaacaaaacatccagaaattgtgcattaaacaacgcgaaaacaaaaa

SEQ ID NO: 68284 - DNA, 469 bp, Glycine max
  unsure (1)..(469): unsure at all n locations
atcctcatagtcacctgccgcatgcaagcttgcttgagaaaattcctaaagaagctagagcttttctacacacacctctctaatagctaagctcacctccttgagatgagaagctagagcttagctacacaccccctataatagctaagctcacccccatgacaaaatacatgaaaatacaaaaaagtccctactacaaagactactcaaaatgcctcgaaatacaaggctaaaaccctatactactagaatggccgaaatacaaggcctaaacaaaggtaaaatctattctaatatttacaaagataagcaggctcatacttagcccatgggctcgaaatctaccttaaggctcatgagaaccctagggccttcccttggatctctggcccaatctacttggagtcttctatccaatgccctcgcgggatatgatngtatcattcctccctccttctcattctctcta

SEQ ID NO: 68285 - DNA, 385 bp, Glycine max
  unsure (1)..(385): unsure at all n locations
gctcttcgactcattctatgtactcgtggtggtccacatagngnnacgttcatttttattctcattncatttacttcttataccccattttgacgtgcttaagccatcttatttaagtcatttctcgcttaacctaaaaataaaataaatttccaccgaatgtctgaattgtattatccgttaacttccattaaaatgaattccgaccgttcggtcgcgctgtaaccacgttggaaatcaaaaagaggtaaaataataatataataatcaaaagacatcttttagtaatataaagcggaaaatcaatccgacgttttctctttgggatatctcattcttaatagaatcgactaataactaacgtgatactaacgctaaaaacaac

SEQ ID NO: 68286 - DNA, 302 bp, Glycine max
ctggccagagctctatgtgtattcctcctctatataccgtcccgataataattccttggcttaggaattctaggcatgaaccgaaatccttgaccacagtgatgaaaaagaagacaacaccgtctatataatatgatgtcaatatattattattataaattgacactattgaaaatgcaatatgactactggatctgtatatacagaggagctcaatttaccctgtctatggtgggggcacccaacttggtttagagcatgggttaatcaatgcataaaaaactatatttcacggattttat

SEQ ID NO: 68287 - DNA, 336 bp, Glycine max
aactactctgtcatatccattctatgagctcgcgactgggacctctctttccttcgtaacttgagtgcattattgctaccccatatagctccgcgaaatttgttccggccatactctttcttgcgagccctctaggtctcttgccaagggctctcgcggttattgtattctcttgccgcaacccggcacactccttcctaacgagtgtagcaggcaacttgaacttctccttggcgagttgtgccttatctaactcgcttttgagagcttggatttcttcgtcctcttacggtgcttcaaaattctcttcgctgacgactgttaacttcgcgagcc

SEQ ID NO: 68288 - DNA, 344 bp, Glycine max
  unsure (1)..(344): unsure at all n locations
atctntcatttctagcttttattcaatagagtcattcccctgcatagcctcacggaaacattctggctcaccaacatcagttaacaaaaataatgcaatgaatgggaatacctatctagtggtactaaaattctgctagattttcttggaggagttgatggatctggttctgactcaacctctacgcatgtactctggtttctattggctgcatcacattttgaaaaattgttaagtgttgctttctcaaaaatttctgacagcttacctgcacatgtagattctgcagaaaatatgtgcttatataataagttctcattaaaagtgacattcctgcttctgat

SEQ ID NO: 68289 - DNA, 299 bp, Glycine max
tcatggcatagaccctacgggagggtgtcacattatacatagtcacctctatcttccgcatgatctttatggtggaacatgacccttgaacgacctcattgaagctcaaagatccatactgcatatcagcttcacaagcaagctatcatccagtggtattatagcacacgagcttcaagtagagcgctccttaaacctctattaactcgcagcaatacctgtccctccactgatgcttattcaattttacccatgtagctgcccacaagtcttgagccaaatgcatctaacatgaatat

SEQ ID NO: 68290 - DNA, 361 bp, Glycine max
  unsure (1)..(361): unsure at all n locations
atgatgntccgagtactttggatgtggtactaccatgccctcctgatttccagctgggaaattggcgagtggaggaacgccccggcatttacgcaaatagcataatgtaaacctttacggttttaaaagctctatagttgggcctaggctttagagttattccttttgttaaggctctgtgtcttttgtttttgaatttataatacaaggatctttcttcatctgttcctggtctctacccattctcattcatttgcatgtttacttctttttctgaaacggcagatccgatgacgagtcccccgaaggtactaatacctgngacccgcctatcgacttcagcaagaaatgaatcatacgg

SEQ ID NO: 68291 - DNA, 491 bp, Glycine max
  unsure (1)..(491): unsure at all n locations
gcatgcaagcatgaagaggatgcttcaatggagganaagatgatagtattggtggagcacgaaattgaaggaataaaagatggaaagaagtggagctttgaagtgtatctcataagactttcattcatcaaagttacaacaagtgttacacatgcttctatttatagactaggtagcttccttgagaagctttcttaagaaaacttccttgagaagcttctttgagaaaacttccttgagaagctagagtttagctacacacacccatctaaaaactaagctcacctccttgagaagctagagctnatctacacacccctataatagctaagctcaccccatgacaaataaaacatgataatacaaaagaaattctactacaaagactactcataatgtccttgaatacaaggctaaactcctatactactagaatggccaatatacaagggctataagaagaaactacctattctactattatcaagaaa

SEQ ID NO: 68292 - DNA, 343 bp, Glycine max
ggatgccccacattatttccgtgacacatatgcaaaaatgatcgattcggaaattctatgcaaaactggtcatgcatgcacctatgcggacactcaagtgtcaaattattatggtcatgtgatgctagggctcatgattcatttcctctatattagatcaacccactgtttccaaaatatgttcttttatcaagtcgtgcatacatccgagtccattttgggtactcgggagaagtgtcacagcattgacccttcaggtgtgcacacatcttttcttcacgactagctatgatcagccaattctttcaaagaagagttggaagtgatctctttacgaaagcat

SEQ ID NO: 68293 - DNA, 320 bp, Glycine max
  unsure (1)..(320): unsure at all n locations
agtcacctgccgctgcaagctgtaccacatcgtcgcgtgatgatnctacttcacaggttngaagagaagagagcttagccttataacgcaatgtggcggacaaaagtgggcagtaaacttgaatgatcgtcattgtcaatgcggaaggtattctgcgcttcactatccatgttcacacattattgcagcttgtggttacgtgagcatgaactactaccaatatatagatgttggttatacaaatgagtgcattttaaaagcctacttcacacatattgggctctttggaatgaaacggctatttcctctttaagacgcat

SEQ ID NO: 68294 - DNA, 384 bp, Glycine max
  unsure (1)..(384): unsure at all n locations
atatgtntactacaaaaacaaatacgggtgaattacacaggtaaaatgatatcattgggctgtattaaggagaataaagaaagatattctttntttggcttcatgaacatcaaatacataacttttatatctaatgagtctcttatttnttgcttttgatatatattaaatgttctttatgtcaaaatatcttttgtagcatctatgatgttcaggtgaaagtgcattataattgcaggtggagacttgtggaaattgatgctgacttgtcagacttggtgttcgaaactagtcatngtatgtccctcataaatcctgccaacacctacatggtactaattaatgctctggatctgtaatttataatattattctatcatgcat

SEQ ID NO: 68295 - DNA, 417 bp, Glycine max
  unsure (1)..(417): unsure at all n locations
ctccagaaggctgttgcttctggaggaagcaacttggctcttttgtgcgagctgagctcgcctgagcgagctgggtcggaagcatctcccctattctgctataaataggggaggaagtgaagaagaaaagggttcagccccttatgcacttctctctctntcgaatttgcttggaaaaattgtttccgtgaagaatatctaagccgaggcgcttccganacgctttcgtaacgtttccgtgaagaatttctcataaggtttcaaccgctcttcggcgttcttcattcgttcttcatagttcttcgatcttcaacgggtgagtacctcacatcaagcttttcaattcattctatgaacccgtggtgggccacattgcgtttcatgtatattcattctcgctgtcattacttatatacc

SEQ ID NO: 68296 - DNA, 494 bp, Glycine max
  unsure (1)..(494): unsure at all n locations
catcagaccacttccagggtgctggaactacttcacatggatangttggngcctatgcaagttgaaagccttggaggaaagaggtatgcctatgttgttgtggatgatttctccagatttacctgcgtcaactttatcagagagaaatcagacacctttgaagtattcaaagagttgagtctaagacttcaaagagaaaaagactgtgtcatcaagagaattangagtgaccatggcagagagtttgaaaacggcaagtttactgaattctgcacatctgaaggcatcactcatgagttctctgcagccatcacaccacaacaaaatggcatagttgaaaggaaaaacaggactttgcaagaagctgccagggtcatgcttcatgccaaagaacttccctataatctctgggctgaagccatgaacacagcatgctatattcacaacagagtcacacttataagagggactccaaccacactgtatgaaatctg

SEQ ID NO: 68297 - DNA, 510 bp, Glycine max
  unsure (1)..(510): unsure at all n locations
gatcctttagtcacctgccgcatcgcaagcttgcatgtctagtgattctagagagagaaaggtctttttccaaagagntttgagagatnttgctgtgtgaagatctgtagagaccagagcttgaagaggaagttgttctgagagcttgagatgcgtttgtgagtggttgtgagatcctagaggtgaaggaaacatcctcaccacttgtatttttgcaatctttcatcttgttcttctctttgttgtaaaggaggcttcctggttatggaaagctaaaatcctctgttggatcttccctgtaggtacttgatgtaaatatctttttatctatttaatgatattttgtgtgttctctgtgctatcagcttttcattctagtatgcctttaccttgatcacgtagatgcatgctttgttagggtcattcaacagtggaaactggtctgattctaatgaccttgataggacaggactaagttgtcgtactatcacgagggaatcggtgcgataa

SEQ ID NO: 68298 - DNA, 467 bp, Glycine max
  unsure (1)..(467): unsure at all n locations
agctaactaatggccccatacttgcgttgcctatctttcaaaaatcttttgaaattgagtgtgatgcttcaaatgttgggattggggctgtgttgatgcaagaaggccatccaattgcttattttagtgaaaagttaagtggtcctacccttaactattcaacttatgacaaggagttgtatgccttantacgggctntgaaaacatggcaacactacctttatcccaaggaatntgtcattcatagtgaccatgagtccctcanatatatcaaggggaaaggcaagcttaacaaaaggcatgcgaagtgggtggaattcctagagcaattcccttatgttatcaaacataaaaagggaaaaggtaatattgtagccgatgctctttctcggcgtcatgcattactttctatgcttgaaacanaatntgatggtcttgaatgtttganaagcatgtatgaaaatgat

SEQ ID NO: 68299 - DNA, 464 bp, Glycine max
  unsure (1)..(464): unsure at all n locations
cagctttcggacctttctgcaggaaaactttggtttgtaatctacaaggaaatgctattgtaaagcataaatggcatactaatcttttcgacttagaacaaacttgtgcacacatttccctgaagaagaacatttatgaacgtgtgtggcgtccctaaattaatgactggtttgatagtaatgctttaaataacaaaaaccatggtaaattnttttttcttctttttctttntcatttctttctcttttcaccataactagggttagaaggaaaatcctcactatagagtcctaaatggccagttcacaactctattcggagtcatttctttcttaccgctcataatctctaaactatgttgctgttaaaaaaaaaaggaagaatgtaccagtcattactttatgtcgtcacgtgaaaataaaagaataaaatacggttgataaactcttttacaaataaattt

SEQ ID NO: 68300 - DNA, 465 bp, Glycine max
  unsure (1)..(465): unsure at all n locations
gacaggccaactccctcaaagttgattgaggctatttatgtttatctgttcgtgcttgtgcgcttagcgcaattctgaaccgcttagcgcgcattagtgaatttcgactaagcgcggcttttctcgctcagcggatggactaaagtggtgcgtttagcaggatgacccttcgctcagtgaacatgcacaactcatccatctttcagattcttcctcgcgcttagccgagcaatgttgcgctcagcggatggctcgctaagccagcagattggcttagcgagagggtgaaaatcaacacttcanaacttgtctaattaacctgaaattgagagaaaaatgattattaaacacacaagatggaagtactaagtatttattacctatctttaacaaaaagtaatttcaacactacataatacccatagagtggaggagttngatacaatntacataagttttatacac

SEQ ID NO: 68301 - DNA, 486 bp, Glycine max
  unsure (1)..(486): unsure at all n locations
ccgccgcagctgctgccaaagcattcanacctttgtcaatagtggttattactcgnacctgaccaaactcaccagctcaaaatgaacgagcagctacactcactagtaggctcagataacaaccaaggactattactcttctttcccttgtcaatctctgaccttcttactagttttcattctcatttactacaatctaaagcaaaaaccacatttatgtctgttgtaagaaaaattcattgttttttcttctcatcctcgtacccagatgcccttcctctccgtccaatgagatatggttctggggaggcgttctcactagacatattcagaccctgataagatcgatttgccaaaaattccactcctgatcttgcattccctttcattagagcattcgagttattctgcaactgcagtgcctnttctgttgcatttactagagcgagagtttccctttcttcttcagcattttctgatgaatac

SEQ ID NO: 68302 - DNA, 439 bp, Glycine max
  unsure (1)..(439): unsure at all n locations
tctaaacttctatgccacatcaataattgcactaggcataacatgttcaagagagctgtggataagcataacacgacttgttgaagaaagcatggaagttgaaatcctgaagcagccaaatatatagcagaattaattgtattatatatgagtggaaaggagagaagaggaagaccctctgagcttgctgtagataagcaatatcaacatttcaacatgatataaagataagatcaggatcagggacagtggggctgcattgcaatatgaaaggtgcagccaggcacagatcattcacaggtgtactgcaacatcggcccanaacttaaagtgtgcacgctattcttgtgagtgtcctaaaagggtggatcggattgatttcatgttaaagtgaagcaaccatcacaatctagattagagaacaacaactaagagtcgg

SEQ ID NO: 68303 - DNA, 441 bp, Glycine max
  unsure (1)..(441): unsure at all n locations
ttctaatgaatagcggatcccgatcgtgnattttctcctaggcatgtcgnggagttttccaacgagttccatgaaaagctgagcaacggtttgtgccgtgtgacaagaaggaagcataccgaggtgcagtccttttgaataacgatcaatgattacaagaatacaggtgttgccgcgatacgttggaagtcccacgataaagtccatggagagatcctcccatggctgccccggcactggtagcgggcataacaaacctcggggtttggcaggttcgtactttactaattgacaatccacgctttgtgccacatacttgtgaatgtcattactcatcgtttgccatgttgaagtttccgctattcgattcaagggtgttcgaaaacccatattaccccctgttggangttgatgaaattctgtgagcagagccttgatgat

SEQ ID NO: 68304 - DNA, 488 bp, Glycine max
  unsure (1)..(488): unsure at all n locations
tctagtaatcaatcagcttggatgaatatgaattgaattatttntcaattcaaatgccctttagtaaacatagagtatgatgtatgatactattactacccatttatgcttgctgaaaattagagttaaaactcattaaagcctactcattaaaactcattaaaaaaggactcaaaataattgggctcactcactccactactcattccatttctctgggaaaactcatgaaaacaaccaagcttggaattttaaccctccagcataaccaaacgtgatcctcacagacacccacatgcacgaatgcaagagaaactacttgttttctctttggtgaaagcatagganacaaaatgagcaaaaacgggtgtctataggtgagagtacgtcacacacaccttcatcgctgagaggtgaagcatatgaagagactaatagcacaagcactcgtgccacaacaagcagcagaaggtgccttctcatatata

SEQ ID NO: 68305 - DNA, 352 bp, Glycine max
  unsure (1)..(352): unsure at all n locations
agtcacctgccgcatgcaagcttgaggttaatctcatagctacaaaaacttaactctttaagaggactaccaagtatgtcatataagaatgatttattctatgaggcatgccaaaggggggaacaagttaaaacttcttttttctagtaaaaacattgtttccacctcaaggccattagaactattacatcttgatatgtttggaccaaccgggaatgcgttcattggtggaaaaaggtatggactantcgtagtggatgattactctaaatggacatgggttatgttcctagcccataagtgatggttggacaacgtccaacgttgtttattcttgaaggtgcaccaacta

SEQ ID NO: 68306 - DNA, 356 bp, Glycine max
ggcactaggttttggaaaagtctaaaagaaatgctcttgggtcatggctggaatagaactatccccacatttgtaataatatctggttgcagcttgaacacctacatgaagaaagaaatatgtctgagcttagtcctaacaaattagagtcattaattgtagttattattcaattgataccattgttaggaacagcatagtgttacgaacaacataatggtatgatgtaaagatggcaatgctggtgggtggctctaacttggtccacttggaagcttatgaacaacatagtgttctctaatgcaacctttaatgctaacaaactgtttgagatgcaatattcactctatggacgt

SEQ ID NO: 68307 - DNA, 501 bp, Glycine max
  unsure (1)..(501): unsure at all n locations
tagtcgtgtagtaaaagcaatcttggcggagttttattgttctcacacactggtgaataagaaaaggagccttacaatccattntcttggattctctgaacgtactctattgtgcttaccctgcatctttctcccattcttgaagtccaatcatgacaaactcaagaacatcctgcattccaaagatgactttcatttgaatgcaccatgtattgtagttcttcccatcaaggattggcaaatgcactggaaacttgttcccattcatctctgcaacaatgaagcttcgaggatcccacactgaaaccgatcaagactctcccaggatcgatgaaacctgaagctcgtgataccaatgtcaaactcgatggctcgctgtacaagcaaaccataaacgtgacgaaattggatgaagttgagtcttgaatgatgaaggcatgagatatagatagtgaacaagagagtaatacatgaagaactattcatgagactgaaaaattg

SEQ ID NO: 68308 - DNA, 470 bp, Glycine max
  unsure (1)..(470): unsure at all n locations
caccaacaccagcctttaagagtgttacaatttttattgtttggctcaccactaggcatacaccctactttcctcccttatcccattgttcgtgaacacaaactaaataaacaaaaataagtagtaaaggtggaattcttattccctatggcttcattcatataaatcaaacggggaagacctcaattgtcactcttcgtttttcccatggacaaaaggcagaagctctcccatcggtttcacgctgtcattgcactctatttccattatccactctttggcagggtttcaaaaaatggtccacgactgcaattgtgagggtaacaccaaggttntagaggtctgagcaaccgcataacaactgcaattgcagacacaattttcgataatatcggcaacctggctctttggcatcttagttaaattgctcanatcataaagtagcaacatctggataanaagaacttact

SEQ ID NO: 68309 - DNA, 477 bp, Glycine max
  unsure (1)..(477): unsure at all n locations
tgcaagctgatacaatctatgtactataatgtttttcttcaaggaggggacctatcaccagagccatggctaagagactccaagaagattgcgccaaagatgcaagagaaggccctagggttctcatgagccttagggtagattttaggcccatgggctaagtatgagctcacttatctttgtacatattagattagagtttcattattgttgggcattgtatatagagctccatagtgtagggagggtaccctagtaatgtaggatttttcaatccttgtattttagggcacctagactagtatttgtattatgggtagttttgtaatttcacatgcattaagtgcattatntgacgtgtgtgcgtgttgtgagagaaatttaattcgattgggagaagcataatccaattaaatcttggatcatcctataggggaggtgaacatttgcttgctacacctcattcgcacatcatat

SEQ ID NO: 68310 - DNA, 478 bp, Glycine max
  unsure (1)..(478): unsure at all n locations
caagctaagtacaagttttaaatttagttcatttatttaaatgaccaaaacttagcatcttctactcttgcagaccaagcatcaactntaaattcttggcttgactcgataatttgacaacacccttaacagtatacattactccaatttggttagtcaaaagccacgacaacaatatcaaattcccagttattattattacaaatattcaattatgaatagtccatcaacccgtttcaaccacttagaagggtcagtgccattagatcaaaaagttataaaagacagagaatatatgatcttattgataaaatttaaattatttaatatcctattaaaatattttatatttacacaacaattgtaaatttagagtaaacgcctgtgttggtcttcctacaatatgcatgatcacattggaccaccaaatatatgannaatgtgaaatgtataatgtgatatntttcccattcaaatg

SEQ ID NO: 68311 - DNA, 498 bp, Glycine max
  unsure (1)..(498): unsure at all n locations
agtcatctgccgcatgcacgcttcctcggtgccattcctgcgaaggcaaacatattgattgttatttttagtgggacattactcttaaagcaaaaatggcatgtaacctcctcccatcaatacaaacatcaatgtaaatttagagcaagcttatgcgcatatttccctacgaacgttcacttgcacaagacatcctattaactaagaaaaatgcacccacatacaatcaaggtagcttccttacctagattatttacatgtacttccaaagtgtatgtgttatttacatcatacacgccatcttgtcaaaatttacacacatgcatactcaaagcatttcggggtaccaaaaattgcacatgcgctcatcttggatntctaatatctatacatatacaaacttcatgatgaatcttgactatctacacaatanagtgctacatttcatgccttgttatcaagtttttctacctaaagccgcatgcaaatacaagcata

SEQ ID NO: 68312 - DNA, 473 bp, Glycine max
  unsure (1)..(473): unsure at all n locations
aatacaatcattatgcatatgcctattatttgtacagcgataacaacgttgcaataactatatcttagatttcagttcaacatgattggaccaatcgacaaagcatgtagaaattgacagaaaattactatatatctattattntatctactttctatttatctactattctactgtctatatatccactttctatatataaattctatagatgggtgaaattacatttaaaaccatttttcagttgtaatagttgtgtatttttaggatatgatagtctttcatcatacttctctttgtcctggctttttaaaaaagtaaaaaaaaaattgaatttcaaatttcaaattcaattgatacacaaatctctcatgcattcctttcttttctcttagggttttcttctatcaaagaagaaaaaatcagtttgccttatctctctccgtcgatcccacttccgcacaccataccac

SEQ ID NO: 68313 - DNA, 484 bp, Glycine max
  unsure (1)..(484): unsure at all n locations
tttggtcaaagtgagataacagtgtggatctatctattgtgtccacaatgactaatgcttatggttaataaataggaaggttaggtacctgttattgtcacgttattagttactctctactatttgtccattgaaaactctaaaatttagagagtgtaatcaggcaatggaaggtttagctctgaggtttctgtagtggcattgcacatcaacaattctcatcttcttgatcatgtcttcaacaagtaagtgccatgagagtgttttaaactcataaatttattcttggtagatttatttatgttacactacaagcatgaagaanataagttaaatatttggtacatttaatttttgaaatcaaatgaatcaagtaattgcttttattttctgtgaattcttttctctcttaacccanaaaatgcaagagattttctctttctctantaattcaacaggtaagtggtagctaagttaattaaat

SEQ ID NO: 68314 - DNA, 476 bp, Glycine max
  unsure (1)..(476): unsure at all n locations
agcttcacgtcacatttgctnaaagtttacttctngtgacaactgcggaattnatcagcaagtgcactaagtcatacaagtagtataaaacgataagaccgagtatcgtatccacagggagtttgtttcattcagaaaagcgtccattcaatcagtagacatctgtgttacatcatgaaatggaattaaaaacaggatataattgcaattctaaagataactacaaaattaactaatgaaatgcgagagataaacaaaagattaacatgttgggcctttctactgagtgacttgatgcaattaaagggtttctctatctaatggtgactctgtgtcctataatgaggaaaattattccaaatatcaatgtcttgcatgaatgggctaataataattaaacctcattcttggatccctcatcgaacttagcctaaccacacaacattaagaacatagcctatttaaaactatagccc

SEQ ID NO: 68315 - DNA, 402 bp, Glycine max
  unsure (1)..(402): unsure at all n locations
cataatatanaacttgtgcaagacccatgggaggaatcggtggatatgcattacagtatgccaacgtgggtcaatctcatgcatgtgatgtaacaccccagaaataacccaataattatctagataaggatatctaaatatatcttttagtgagagaaaatatagattaaattgttgtaaaatattagattgttattgttagtttgaaaagatgttagtataatatattagattgggtaaagataattacaattaacgataatagaaattagagataaagaaagatcggttaaataaatctaaaattacgtataattcttatataagggtaaacaatgtcttgtatagaaacacacacataaacggtccgaggaccaatttgtacatatgtgtgttatgttc

SEQ ID NO: 68316 - DNA, 439 bp, Glycine max
  unsure (1)..(439): unsure at all n locations
gcaagcttgactcaacactctgagcatntaatgtgtnnttttttttagaatgtatataggtgtatggcaattagaatatattagatgttcttgtatgttgacatgggtaataggatactttctacacatgcgcgtgtgcataaatggattacatgagtttggtctaaatcagaggggctagcacgacatttttgtgttaatataagcattatcttgtaaaactaacttctaaatgtttgttctcgcaagaaatggccccgaggaaacttgcctcaaagagatccaggaaggataaagcggccgaaggaactagttctgctctcgagtatgatagtcaccgctttaggagcgctgaacactatcagcgcttcgaggccatcaagggatggtcatttctccgggagcgacgcgtccagctcacggacgacgagtataccga

SEQ ID NO: 68317 - DNA, 481 bp, Glycine max
  unsure (1)..(481): unsure at all n locations
agatatgtggttaaattaaataagataccttttttgttcttgatgagtttcttcanaaattagttcaaaatgctagtatggcagtatctagtaaaagtttgaatccatgcacttagtcttgaagatttaaatctatgaactaacaggattttccatgaaaaagaggctatactgatgttgttgaaacaacaaaaaatgcatatttggactaacattaccgtagaatgctcttcaagaaaatatcatgaataaaatattgaatggagttatacctagcttggattgaaaatgaacaaacgaagagtaaaaacaaaatatgactatagaacatagacacagaatgaggtccacaaggccaaacattcatatganaaagactaatacattcaagctagaacagttaagagctacagaaacttaccttgatcttcttgccagtggttacattaataatanaatcacccttccgaatcacaccctc

SEQ ID NO: 68318 - DNA, 409 bp, Glycine max
  unsure (1)..(409): unsure at all n locations
gctgctataaatcatattntggtataactgttttttcatttagttgaatctatcacctaattatggaaatattaacttgtgtatccgtttctcacgtaatatttgaaattcaaaacatttttcaattttcaaaatatggaatttattgctatattataaattaagaatactttgtgaactaagatcaatctttttccttttcttttacgaagggccattaaccctaacactaaatattatgctcataaactaacaagaagtggaggaaaaaaaaagtcattggaagcttgttgtcgcgtgaataactgaccattagctgaacaaagttcgactgctccaacacaatttcataatttgaatatttgaatcaagtgatataattgccaagaatgaaaagttggctcttgat

SEQ ID NO: 68319 - DNA, 357 bp, Glycine max
  unsure (1)..(357): unsure at all n locations
acaagccaaagatccacaagggatgtaccctcttttgttctcttttaanaaccaagtggatgtaccctccacttgaactgatccacaagagatgtaccctctcttgttctcagtataacaacctaagtagatgtaccctctacttgtgccacaaaggatgtaccctccatagtgttatgacaaataattctcaggtggttagtcctttgaatcattgtgaggggaaacaaaagatatctcacgcggttagtccttagaaatattttgtttaaggggaagggaagaatcaaaataattctcaggcggttagtcctttgaattctcttggaaagagagaagggagacacaaaagaattc

SEQ ID NO: 68320 - DNA, 486 bp, Glycine max
  unsure (1)..(486): unsure at all n locations
agctntntgtanatattctgtatagatacaaagctctctttttaccttgtaaaccttaagagaaaagactaaagtgttgagcgaaatattcgtctataagatgatcacatcttagtgactatgcaaacttaaacaacaaatcttattnttgtttagagccagcagtagcatggtaggacaacgaatatggggttgtaagagctagaagtggcaatgaataatacttgtaacttttgttaaagttagtgaaaacttgatgggttgccaagaattggatgtagtcttggtggttgagcaaaccaatataaatccttatgtgttctttattactgctttccttagtgtttgactgacagtgtctgaatttgttctcagaatatatacatgttaagataactcttttctcatcgtctaatcgagctttcactaatatctcttatatgtcttagtaaaacccgtatgagacgataactagtggttttgttg

SEQ ID NO: 68321 - DNA, 104 bp, Glycine max
aagttaaatcatcagagcgggaaaagaacctacctagtatgttcatagaatcacgagtacacttggtgacacttagacgaatgagaagaatgttggacgccact

SEQ ID NO: 68322 - DNA, 460 bp, Glycine max
  unsure (1)..(460): unsure at all n locations
atgcatttaacatgtgtttaacatgggaccatgatcntgttgttattttaacactccccctcaagtcaaaacctcgaaagctttagctcgtcaatatgttttttgaagagaataatatgggatcactagactcgtttggaaaggcaacattgggctgcatttgagaccagaaaaggagaatttagtgctctgacaacagctagagtgtgctttatctgagtatgggatgccaactggagattaacacagctgagaggcagcagctggagatcaacacaactaataagtttaaacacctggagaatgatgttgccggaggattttgtgaagttgccaacaaagtcactgatatttgaagctcactgataaagatagatgatagtgtgcctgaaactcattaagtaggtatctttactagaatggtgaagaactcccaatttacagagactacacacacact

SEQ ID NO: 68323 - DNA, 334 bp, Glycine max
cataccagaagaactgctcatattctactagtgcgttattcccctaatgtgtacgactttttaggaggattggacattgcactactgtgctatctgaactatcatatactctacagtctattatagaagaagtgccgacaacataggtgtgtgttgatatacaatacggtcctatggagtggcaactagtgtctctatgaagtttgttctgtgagagttcttatctatacaaagtcttgaggctgagaatggttacaagctgacaactttgtagaggaaactcgcgtaaagatagacacattttgcgatcagtgtatatagatatgcactcttt

SEQ ID NO: 68324 - DNA, 346 bp, Glycine max
  unsure (1)..(346): unsure at all n locations
atagntnatcatttgataaatatgatgcttctttaattgataaatattatgaatttcttgtatgcgaatatgccttttaatttgattctcaaagtgcatattcatataacttgttttctgcccaaaaagaaaaanaatgttttgaactattttggtgagatcattcttcttgagaaactaaaacttcattggttttaagacttgttttaaaaacttattcatgggtttatgtatttgctgtataaacacaacccctagttctacatattcttatttaataagagaagtcatattctattnggaaacaattttttttttggtttgaaacatacacgttatgacatat

SEQ ID NO: 68325 - DNA, 483 bp, Glycine max
  unsure (1)..(483): unsure at all n locations
agtcacctgccgcatgcaagctnggcttcctcataccaagaaaagactatctgngatacatgccatngagnggnntggctatggcgctatatctccgcataaaccttctataatagcctgccaaaccctaaaatcctcacaactgcttgggggtctgaggaagaggacaattcctcactgcttccaccttagcaaggtcaatagagactccctctccagtgataaaatgtcctaagtattgtactcgagtaaccccaaagtagcatttagatttcttggccaacaaggcatttgctctcatggtagacaagactagttataaatgatgcaagtgatcctccatgctcttgctgtaaatcagaatgtcgtcaaaaaagaccaacaggaacctcctcaagtattctcgacacaccgaattcattaagccctgaaatgtggcaggcgcatttgttaaggcaaaaggcataaccaatactcataatg

SEQ ID NO: 68326 - DNA, 485 bp, Glycine max
  unsure (1)..(485): unsure at all n locations
tgccgctgcagcttgcttctacaacatgaagacatatacttcngtcntgctntatggngtacatgctgaggaacctgtntcttcccttaccctggttcctcccactgttcagccaccacccacaccagagttgaagcccttaccagcaaccctcanatatgcttacttggaggacaaggaaaaatttccagtgatcatctctgcctcccttgctgctgagcaagaggagaagttgttgctagttctcaagaagcacaagatagccattggatggaatttagcagacattcctggtattagcccatctacctgtatgcataggatactnttagaggatggagctaagccagtgaggcagccacaacggtgactcaaccncgtcattctagatgtggtgaataaggaggtgaccaagcttttacatgttggaatcatctaccccatttctgacagccagtgggtgagtccagtccaagtagttccta

SEQ ID NO: 68327 - DNA, 438 bp, Glycine max
  unsure (1)..(438): unsure at all n locations
atctacaatagacctgctcaacctcagtatcatttttatccacaacagaacaattatgacctctctagcaacacgtacaatctcgggtggaggaatcatcccaaccttagatggtcgaatccttcacaatagtagcaacaacaacaatagccttattttcagaatgctgctggccgaagtagaccatacgtttctccaccaatccagctgcaacaacaacaacaacaacaacaacaacaaccccagaaacaacaaacaattgaggctcctccgcaaccttccattgaagaacttgtgaggcanatgactatgcaaaacatgcagtttcaacaagagaccagagcctgcattcagagcataactaattatatgggacaattggctacacagttaaatcaagaacagtcccaanattctgacagaataccttctcaatct

SEQ ID NO: 68328 - DNA, 376 bp, Glycine max
  unsure (1)..(376): unsure at all n locations
tctatatcagaatataaactttggttctcatattttataaaatccataattttaatcctcatattttaaaaaaattataatattggtttaatatttaatatttcctatgatttattttaatcttttattttctaattaattaaatcttttcttgatgataccttcaatgaatatattatatttagaattcaattggaccaaatgtaattataagtttataataattgagacaaaattaataatttgaccaaaattgtaaattctctaaaataagaatattaaatgttgttattttaaacaagaggtctaaaatcatggattttttacaacaagatatccaaatatctcaatnttaagataaaatattatnatcacg

SEQ ID NO: 68329 - DNA, 389 bp, Glycine max
  unsure (1)..(389): unsure at all n locations
gcaagcttgcttctacaagtaaggccttgtcttcatttgttcttttaaggaaaaaggggaaaaggattcctccaagatagttgttaagaaggaaagtcattttgcaacaaaaggtggtattaatagagcattccttaaacaatctttctaccttctcctatcaagggaaacatcccttaaaattgccacaattcctacatttgagaccttacccccaaaggtccaagaacttttacatgaatttggtgatatatttcccaaagagataccccctgngctacctcctttaaggggaatagaacaccaaatagatttagtcccatgagcaagccttcctaataggccagcttatatgactaaccctcangagactaangagatagagtctt

SEQ ID NO: 68330 - DNA, 490 bp, Glycine max
  unsure (1)..(490): unsure at all n locations
cgcagcatggcacgcttagctcagcctcaccaaaatgacccttatgcttagcgcacatgtgttgttaggatcattcaatagtggaaactgggagtactaagtatttattacctatctttaacaaaaagtaattatgacactacaaaataaccataaattggagaagtttgatacaatttacacaagttttatacacaaaagttagtcatatgcatcgactaacaggtaccaaacacaattntgtcatgttggcgatagggtaatccccaaacccttcgacaacccttaatctctcttcaatgagatcaagtttctttctctcttccactgccggaggcggtcctcctactgagaaatgtagtggttgcaaagggcggtgttgaggagctcctgtggaattgggttgaggcatagcattacacanctgtccntcggtgatgaacgtgtgatatgggtcgaagtcaacttgagtctgatctcgtgggtcttc

SEQ ID NO: 68331 - DNA, 476 bp, Glycine max
  unsure (1)..(476): unsure at all n locations
agcttgcttggtggagctttatagaggttggatcttagatcttcaatgagggccttcaatggngatgttccaccatggagatgcagcggaaggaaaaggagaagaggagaaaggaggcaccatccactatggaataagccatggaagaaggagcttcgccaccaagaatgtgccttggataagatgcttggagaggatgattcaatggaggaaaagagggagagaaagagagagggggagcacataattgaagaacgaaaagggggagagaagttgaactctgagttgtgtctcacaagactctcattcatcaaagttacaacaagtgttacacatgcttctatttatagactaggtagcttcgttgagaagctttcttgagaaaactttcttgagaagctttcttgagaaaacttccttgagaagctagagcttatctacacacacccctctaataactaagctcacctgcttga

SEQ ID NO: 68332 - DNA, 414 bp, Glycine max
gtcttcgacattggaagtgcggtagacaaacattgtggttgatttacggatggcctttgtggataactgggtggtggggtaaggaggaggtttgttattggctgagtaatgacattgatgggttggagggaaacttggccgcataggaatggcagtcacagcatgggtttctccctcttatgtaccctcttcatatgccccagttttctcagtcgccctagtatgatgatcaaatttgcctcttttccgatacacttcgatctttttgctgctaagaccaaatctgtaaaacttgaatgtgtgtaacccaccatatttttatagtagaacaccggtcacgtgtctactatcaatgtgataatctatatttctgatattggggtgctacttgagttgccaagtctcttcatcttt

SEQ ID NO: 68333 - DNA, 409 bp, Glycine max
  unsure (1)..(409): unsure at all n locations
gcttctctagaagtacttctaggagaaganattaagtattcttcttatganaggggctccttcataagctataatgagtnttccattaactaattcgtagatgtcatctcatcctttatagaagctatttgagagaacttctacaaattagctaatgattaaataatggagaacttattttagcttatggagaagttcatctcattctcttcttactttcttgtcttagaagtgcttataaagaagctcacccaaacaagcctttatgatataaaggaaactagaaagatacggcggagagtaaaatctaaaattcccacatagattatccttgatcaatcaaacatgttacttatcgagcagaggtgagaagaatactactccctctaagatctaatatagggatctt

SEQ ID NO: 68334 - DNA, 313 bp, Glycine max
ccaccacatcaggagattgtacgtttattgggcagcatgctgatataccgaaaagattaatgttgcaaatgaataataatcacgtggtctagtgcatgtgagttttatataatcaaatcaatgcggtatccctcttagcatgttttgatgcgctagaaacagttgaattttaacagttgatccagagaaactaaccataccgtcatcactcttggtgctgactgataccagttcacaaacattcaggtgctgcttcgtgaccagagcagtggcccatattgaccccctgcattcacaaacactgcatgagaac

SEQ ID NO: 68335 - DNA, 331 bp, Glycine max
ggctgcgccaagcagatttaatccctcctacttagctcctcaatcgagtctactgaggcttctatgggtcaaaggaagtttcttcatgttatatgcgctcaggattgtgtatggcggacatcttttgtttgataaaacacgaaagcttgttagacaacaaacggcagaaaagtacataaaaacagaggacgaaaatagatagtaaagttcaaaaacatggctcgaacccttagcgatgcagatttggatgtgaaatcgaaagaaggaagcaagataaaatatgctatggctcctccataaagagaatatacccgaccctcttgcctatgat

SEQ ID NO: 68336 - DNA, 462 bp, Glycine max
agcttgtagagttgagtctcgtatctgtttattcaattatagtagtctcataatcaattacactattgtttgagacaatgactgatttattcaggagtctctgctttaatcgattaccaagtggattaatcgattacttctctctcatttagttgttcagaggtgaacaagaacactttaatcaattacttagagaatttaattgattacattgttcttgagttatttctagatgttgggaagaacactctaatcgataacttagataatctaatcgattacttcattgaattaatagattactttgtagatttaatcgattataggcggttataattgttttctctataaataaccagcttgtgttcactccaatacacacaatcaacacatccagagaatactcaatatctcaaaaatatcatcttagcctctaaatgagcaagatctcgagctgtcatt

SEQ ID NO: 68337 - DNA, 480 bp, Glycine max
  unsure (1)..(480): unsure at all n locations
gtatcggtcaagtgtatgtgaccatatcgtatccaatgttctcatcgataatggttccagtttaaacgtgatgcctaagagcancttggagaaattaccattcaatgcttcccacttaaagccgagttcaatggtggttcgtgccttcgacggcacccgccgagaggttaggtgagagatcgatctcccagtacaaataggccctcacacctgtcaagtcaccttccaaataatggatattaaccccccctacagctgtctgttggggcgcccgtggatccactcagtangagttgttccctctacactccaccaaaagttgaaattcgtagtggaagggcatctggtcatcgtatcatgcgaggaagacantttggtgagctgcccatcctctatgccttatgtggaagccgtagaggaatcgttagaaaccgctttccagtcttttgaggtggaagcatattctctgtggactccttc

SEQ ID NO: 68338 - DNA, 501 bp, Glycine max
  unsure (1)..(501): unsure at all n locations
gtcacctgcggcacgccagcttccatcaagtggtaatcagagcacaagagcttcttgtttgtgctccttanacctccattaattntcagctttaccttctcctccattattgtttcttcatttttctccatgtatctcctcacatgtcttgtgctaaatgttgttaacatgattctttagaatttccaccgattaaactagctatagaagctagatttgattttctttggttcatttcttgttcttgttcttgaaccatgaattgtgttgagtntaagttcctttaagtttgtcttgctattttttgtggctgaaacctanaccataaaattcttataaaaacattaaagtagaagaaaacctcaaaaatctagagtgactcgttcacctattgtagttntgtcatagaagtcatgtctagtcatgaaacttgtcagaggatntcttatgttgtgcctgaatttaattttctttgttctttgtctaactctgttcatgagt

SEQ ID NO: 68339 - DNA, 312 bp, Glycine max
  unsure (1)..(312): unsure at all n locations
tgtcccgggggccaatttgttatgtttttattctcgtncattcttttatcccctttgacggcttaaccttatttaagtcatttctcgctaattaaaataaaaaatttcccgatcgttaaatgatcatcgtaatttggttaaaatgaattccaccgtcggtcggccgaaccacttggaatcaaaagagtaaatatatatatataaaaaaatccttttataagaaaagcaaaatcatcggacgtttctttgggattctatctaatgaatgctatactagtgactaagctaataaatcgctagcagctgtcacaa

SEQ ID NO: 68340 - DNA, 462 bp, Glycine max
  unsure (1)..(462): unsure at all n locations
agcttctcttgggggttaatgtgacgtgtaaatcctctttctcnagtggtagngntcanaatattcgaaagtataattaatgaanataatattctttctatttataaatcactttagtttattttttctaaattaaaaaatgtaggatcgagttcaatttacatattttttttttacaaaagttcaatttacatattttttttacaaaagttcaatttacatttacaccatgaataaattaaagtggcaaaagtagtgcaattaaagaagaaatgtgacttttcacccaaaaaagagaggaaaagttacatttgacttctaagagagagtgagagaggacaatgtgtgtgagagagagagggagagagataaattatgagtaactcttctaattatttaatactttctttctcctttattgccggtcatgtgggtccccaaagagacagcgatgcaagatgt

SEQ ID NO: 68341 - DNA, 468 bp, Glycine max
  unsure (1)..(468): unsure at all n locations
ataggacatgcgccgatgtcctttacacttttatttcntctaatttccatatgctagaaagtcattaatggtacaaaaaaccatagcacgcaaggtgaacgtctgctgcacattcgcatcccacacacgaacctcctcttcccataattntctcaagtcttcaatcaagggagtaagatagacattaatatcattccctggcttccttggaccaactatcatcatacaaagcataatgtactctcgtttgatgctcaacaaatgagggaggttgtaaatcatcagcaaaataggccatgaactgtggttagtgcttaagctaccaaaaggattcattccatccaaagcaagaccaagcctaanggttcttgggtcgccaccaanatcaggatacaaataatcgattatcttccattgcacgagaatagctagatgtcggagaattccatcagttttctgtcatatgca

SEQ ID NO: 68342 - DNA, 507 bp, Glycine max
  unsure (1)..(507): unsure at all n locations
atcctcttagtcacctgccgcatgcaagcttagctacacaccctctataatatctaagctcactcnctattccataaaatacataaaaatacaaaaaaaacgttcctactacaaagactactcaaaatgccctgaaatacaaggctaaaaccctatactactagaatgaccaaaatacaaggcccaaaagaaggaaaaacctattctaatatttacaaagaagagtggatccaaccttgacctatgggctcaaaaatcaaccctaaggttcatgagaatcctagggccttctttagtagctctagcccaagcctcttggagtcttctatccaatacccttggggggtaggattgcatcacaaggttaaatgaacttccccttacctttgtttccatgttatcaagttcccacaacgaaaaatgcaaacaaccaattgtaaagcttgaactctatcacatattcaanaatgagcgaggaacaagaagattagaactatgaaaatctaa

SEQ ID NO: 68343 - DNA, 393 bp, Glycine max
  unsure (1)..(393): unsure at all n locations
ttgcttgaccttctntatgcttaanaacagaatctttttgcataggcaaaagatcaagaggagttagtgggttaaaaccataaacaacttcaaaaggagaacaattagtggtgctatgaacagatctattgtaagcaaattcaacatggggtaaagaagcttcccaagtttttaagttattcctcaaaactttcctaagcaaagtactccaagtcctattaacagcttccgttttgcccatcggtttatgggtgacaagtggttgaaaataacaatttattgcccaacttgctccacatagtcctccanaaatggcttatgaacttagagtccctatcactaacaatgctccttggcaaaccatggagtctcacaatcttcttgaaaaacaaa

SEQ ID NO: 68344 - DNA, 490 bp, Glycine max
  unsure (1)..(490): unsure at all n locations
agtcacctgccgcactgcaagcttgtgtaatcgattacactggtttggtaatctatttttttgattgtttctgaataaatcaaaagatgtaactcttcaaaaggttgttgactttctcaaattggttttaagtttttctaaaagttataactcttctaaatggtcctcttggccagacatgaagagtctataaaagcaagactttgatttgcttttcaatatacttttccaatcaatcttataaaatcctttacaagccttgaatctctatgaacttcttcttcttctttgtggcaaaatctttccaaagttntctagttttctaaaccttgaaaacttgtgctattcatcttttcattctcttctccctttgccaaanagaattcgccaaggactaaccgcctgaattcttttgtgtctctcttctccctttccaaaaaacaaaggacgtaaccgcctgaattctttgtgctcccttctcccttgtcaa

SEQ ID NO: 68345 - DNA, 431 bp, Glycine max
  unsure (1)..(431): unsure at all n locations
tcgtaagtaagaactctttactatggaagatggtgaagtatacaagtcatggttggatgcttccaaactanttttaatgaattatgttgtcttaacaaaacttttgataactatgataacattgacaaaattctaagaagtttatccaggaagtagagaccacaggtgataaccttaagaactgtgaagaacatggactccatgtccatngaagagcttattggatccttaaaggttcatgaganaaaacttcaacaagatgaaggattcaaaataggaanatccttatctctaatagcacanaaagtcgaagcatcttcaacatgcaaggaatcttcatccatagcaacgtccaaaagctcatccaaagtgtcaacattgatacaccttctgatgatgactccaataattaaggttcagataaagatgat

SEQ ID NO: 68346 - DNA, 455 bp, Glycine max
  unsure (1)..(455): unsure at all n locations
aagaagtttggcttttacatgcttaactcttttttgtttcatttgtatnggttggtatcttgattggtgcatcttagtacatctgatatctttctggattgtgcatcatcataatgcatgtgaagaaaattttctaagttagaaaaatttcttcagaggcaaaaactctatgtttaataaaataccaccttgttttaatccaataccgtttccaccagttggctgaagcttgtagaattaagtctcatatccggttaatcgaatattgatatctcataatccaatacactgttggttgaggcaatgactaatttagtcacgagtctctgctttaatcgattaccaagtggattaatcgattacttttctcttgttcacgtggttagaggtgaacaagaacactctantcatatacttacgtcatctaatcgattacatagttcttgaagtgtttc

SEQ ID NO: 68347 - DNA, 389 bp, Glycine max
  unsure (1)..(389): unsure at all n locations
gtatagagtcgtacagacaacgtaataagaacttgcaattcaacacacatggctgtagcaactttactaactcatcaggttctcttgcaagacgtgtgccatacctaatgttgcctgagaaacacatgtgtgtcaattcacataatctggcagattactcttaacttaatcaccatagtattgttgcagtatgaccaatataataagaactangcaaaggatagagtccagtgaatcagaaagaatagtatcatacactaataaatcaaaaactggaaaacataatcaaggcagttaaagctgagtactttgtcaaagtagaattctaactgttggactcaagaaatgagctcacagaaattatatanattgtactgaaataatataat

SEQ ID NO: 68348 - DNA, 497 bp, Glycine max
  unsure (1)..(497): unsure at all n locations
gtcacctgccgcatgcaagcttacatccgatgttgatataatgctctttttaatcatgtcaattgagaaacatatacttaacaatttgatgtatgaaactatatgagaacattatttcaatattataaataactatcataaattaaaattaatttcaatttttttataattatttaggtattttacagtcaaaattcctgttaagttcagtatagctcaaaatattctcaacttttcatagaaattttatttttatgtattttattaactaatgaattgacattgtcaatcttattaagttttaaagttaacctattttcctgacttttcaatagaataatctaagttagataattatcatttaaaagttgtccttaggaattccacaattacaaacaatcttgtaagtaatcgttgttttaaccattatagggctctagcccaaaataattattcaaaatcatgattaagtatttgcattntgatattccctctat

SEQ ID NO: 68349 - DNA, 390 bp, Glycine max
  unsure (1)..(390): unsure at all n locations
caacaaaagacgatgacaaaagtgatgaacataaagctcaagagaatcaaagaacatccatctcaagaaaatctagaacaagtcaaagagttcaagaatcaagaagaattcaagactcaagaagaaagcctacaaacaagaatcaagattcaagatcctaagaatcaagatcaagattcaagactcaagattcaagaatgaagaanagactcaatcaagataagtattaaaaagtttttcaaaactttgaatagcacatgagtttttcacagaacctttaccaaagagttgttactctctggtaatcgattaccatatcggtgtaatcaattaccagtagcaaaatgagttggaaaatggtttcaaactgaatatacaacgttccaaata

SEQ ID NO: 68350 - DNA, 491 bp, Glycine max
  unsure (1)..(491): unsure at all n locations
gcatgcaagctngactcacaccatatggcaagttcaacatgttttcaacttattccttcacaaataactaccacaatacataaacctagtaaaactacccatcatatctcccaaaacccaatacccacaaaaatttaggtgagaagaagtctacccaaacctgaaatttcgaagtcccacacgtagagatgcgcttcacgactccgaaaatgccttcctttcgcgatttggagcagaaatggtgaccaaaggttggagctntgctgggcaacaatggtgggtgagaaaggaagaagaaagctacgtgagagagagggagaaagcctctgaattntctgagtgaggagagagagagaacacaactntttggtttttaaaaaaaaggcttttctctcttcctattattatattttctaaagcacttgccactngtcccattttgagtggaacaaaaagggcccacctttttctctcgatgtgactcatgctca

SEQ ID NO: 68351 - DNA, 476 bp, Glycine max
  unsure (1)..(476): unsure at all n locations
atgacaataacttttgactcggatgtttcgattgnttcattttataattcgagacgctcaatattgaatgcaggagctcttaccaaattcaaatgccaataactttttactcggatgtccgattgagtcccgtaatatatctagatgctcaaaattgaaaacagtaactctaagcaaattcaaacgacaataacttctaactcggatgttcgattgagtcatttaataattcttgacgctagaaattgaatacagaagctctcaccagaattaaatgacaataactttttactcagaagtctgattgtgtcctgtaatttatctagacgctcaaaattgaaaacaaaagctcttatgagattcanacgaatgtaacttttgactcagatgtcccgatgagtcatntaataattcaagacgctcgaaattgaatatagaagctctcacaaaattcaaacgacaataacttnttactg

SEQ ID NO: 68352 - DNA, 476 bp, Glycine max
  unsure (1)..(476): unsure at all n locations
agctntctccactaagttgcttgatgcctgatattgtcttttctgatggcagtggtcctatatgcagggaagaatttctccaagaacaccctttcaaggtcatcccagctgaaaatagacctgggagcaaggtagtatagccaatcttttgccactccctccagagaatgagggaaagcctttagaaagatatgatcttcttggacatcaaggggcttcatggtggaacaaacaatatgaaactccttaagatgcttataaggatcttcacctgcaagaccatganacttgggcagcaaatgtattagtccagccttgagaacatatggaacacccttatcagaatattgaatgcacaagctttcataagtgaaatcaagtgcagccatctccctacgagtcctctcacaaggtgtaggttgagccatgttctcagtatgaaaattagtagtcgaatgctactaatcagaatattc

SEQ ID NO: 68353 - DNA, 477 bp, Glycine max
  unsure (1)..(477): unsure at all n locations
gacacctatggcgcttagcgcactggtcttgtgctttgctcccggncttgatattcacgccctgccagattcttcttcgtgctaagcgcgatgtgtagaaacaagcttcatgatgatgaatcaagttgattcaagtagttttgatgatgacaaagatgatgacaaaaagcccaagagaatgatttcaagattgagtcaacaagttcaagatcaagtttaatttcaagtttcatgagaagaaatcaagaagattcaagaatcaagagaaatttgatttcaagattcaagagaagatgaattcaagattcaagagaagaaatcaagaagacttcacaagggaagtattgaaaagattnttcaaaaaacaaacatagcacannatttgttttcaaaagagtatttctcannaatttctaagttaccagaagttntactctctagtaattgaatanccagttcctggtatcgattaccagt

SEQ ID NO: 68354 - DNA, 467 bp, Glycine max
  unsure (1)..(467): unsure at all n locations
tgtctaattntataatgacatttttatntcacattactagttgataaatggaatgaataacatttcacaaaaacataactagatatgatatcaaaatacaattaatgtctttaattctaacataaacatcaagactttaaaatgaaatttttctttaattaccattatttcttctccttttggaatgcaccaagttccattagatctcatgtgtgtggccttccaaactttcatagcatctagccactcaccagatattgaatcttttttctattaaaattaaatatagcaaaaaccaaattaaataatataaaaataatataatctaatgcataatgcctttacaaatttcaccaacctttcatatatcatataaaaacaatcacaaaataaaaaatgacgttattttatataacttanaannaataatataatatgttaaaagatgttactatntcaaatgtctt

SEQ ID NO: 68355 - DNA, 201 bp, Glycine max
ctcactcaagcaggcacaaacaaggtgagactaactatatgcacgacgcaaaaaacaagagttgggttgcctcccacgaaacactcgcttaacgtcactagcgcgacacaaactacctcatggatcttgaatccgaacgacgaaggacgacctctctatgctatcaccatgagaaagattcaacctctgaccataaactac

SEQ ID NO: 68356 - DNA, 276 bp, Glycine max
ggtttttttttttctggatcgctggctttcagcgagcaagggatgtctacacattgtgtgctttcttttaaatttagaaccgttcgaaaaagaggctaatattagttataccactctgtgcgcaagagacaacatattacgacatatggagtcgtggcaaaaatcatgcttccacactgctgtcaccactgatcaccaacatttttgactatattgtattatctgaagcgatgttcactctttgatatgcatggctctggtatgtaagatacgcag

SEQ ID NO: 68357 - DNA, 466 bp, Glycine max
  unsure (1)..(466): unsure at all n locations
agtcacctgccgcatgcaagctcgagaatggagaatngcactatgtaatttctattcttagcttcaaactcgaacgtggaggacacatgaacgaaaacgcaattcatgggtcttcgaanagagtgagaatggagaattgctctaagcaatcactacgcatagctccaaactcgatggtggaggacacatgaatgaaaacgcaattcatggggctccgaanagatggagaatggagaattgcactaagcaatcactacgcatagctccaaactcgaaggtggaggacacatgaacgataacgcaattcatggcgctccgaaaagatggagaatggagaatggcacttagcaatcactacgcatagcttcaaactcgaaggtggaggacacgtgaacgaatacgcattacatgggaatccgaacatatcgagaatggagaatngcactatgcaatcactacgcatagc

SEQ ID NO: 68358 - DNA, 401 bp, Glycine max
  unsure (1)..(401): unsure at all n locations
cttcatgtagacttgtcctananctgatgtgtaacctggatccctgtcagatacaagactataaggaattccatgcaaccttactacttccttgatatacaactccactagcttttccattctatacctcatattcactgtgataaaatgagcagatttggcgagtcgatctactatgacccacacggcatcatgcccacgacatgtcttgcgtaaactagatacaaaatccatatatatgctctgccatttacattccggaatctacgaaggcttcaattctcccgatggtcgctggtgctcaaccttagcctgtgacatgataaacatatgctacatattctgctacatctntcttcatgccatgccgaccaaaacttctcttcaaatcattgtacatc

SEQ ID NO: 68359 - DNA, 471 bp, Glycine max
  unsure (1)..(471): unsure at all n locations
cacctgccgcatgcaagcttgacaaagcttgatgaatagtgtatttatatttttcagtggttgattcttgattntggaattcagtgtttatgattggtttgaattgatcagttgtatgatgtgagtgaattgaaatgcgtaaaccatattctttgaataagcatgcagtcattagaagagaaggaacatggacttaggatcatgactgaaaatgttagttggtttgtcaggttgattatgaaggaacacgttagccacaacccggtgagactgtgatctttaattgtgagagaaggactagcattaagtaatggttnttgcatgaatctctgaatatgaaatgaatgcatgagtttgaagatgatgaaggccatgttntaattgaaagtagccacttatccaaaaaacttaccttgtgtatgaatgatttatcccttgtacccagtttgagctaaaagtatgattgttcga

SEQ ID NO: 68360 - DNA, 471 bp, Glycine max
  unsure (1)..(471): unsure at all n locations
atctaggtatctaagacccatttatttttggattntcaaggcttgagaagtgaaaatgataatggggtaattttggagtaaactctcatctcaaacaagtctataacattaatttaaacttgctcaaactggttttacggcgaaaactccaccgattcaaaatttgacccctcaacacccaatttaccctagaaatgactcttgcattcacatttatcactcatttttctcatttgctcttgcccaagctttcttacaagtcctaattgacattttaaactaggatcaactcactntagcctccaattaccactaaccccaaatttagctnttcaaaccctcaaaatctcacacttttccactcacatcactaccattctcacatttaaccctaggttaactctccccatcatctctaccagttttctaccaacaatttcagcacacagacatcacagagcatcatcatga

SEQ ID NO: 68361 - DNA, 504 bp, Glycine max
  unsure (1)..(504): unsure at all n locations
agtcacctgccgcatgaagcttgcacatgcgcgctaagcacgcgatctacatgttctgttcgaggcggngtcgcgctgagcgcgcctacgaaggcccaaagcccacttccgcagctataaatagagagccagtccaaggaagaatacaacagaacaccacggcagaactccctctcctaggggtttcatttacaccctttctttctttcacccccttctcattataaagccctcaatggctgagtggctaaacccttagttagggcctggcacgcctagaagccaacacgatgtatgatgtactcttcactatttatcaatgcaataccaggttttctttcctattttcttttctgtttttatcctgcatattcatctatctttatatcctgttaggagttagatgctcgggagaggataacttctaaataaaatttaaagaacgtatgcatgcatcagttttaggggttagacgctcgggagaagataacttctaataaaaca

SEQ ID NO: 68362 - DNA, 410 bp, Glycine max
  unsure (1)..(410): unsure at all n locations
atgagggctctgnngatggagctatgttcaatgtagattgnttgttgcctgaggtnttattgtcacagcaagctagaagtggcttttagtgttggtttggtcagcaagtttatgagtgatcctagacaaccacacttgattacagctaaaagaatcatgaggtatctaaaaggaacactcggatatggcattttgtttcctcatcacactaagggagatgatagcctacaccttgtanccnnacttgattctggctagtgtggtgatttggttgacaaaaggagcaccatgggacaagttttcctgctgtcagggtctcccatatcctgtagttctaagaagcagacagtagtagcattgttcactcgtgaagatgaatagatngcagactgtgcaactgcctgtcaagc

SEQ ID NO: 68363 - DNA, 490 bp, Glycine max
  unsure (1)..(490): unsure at all n locations
agtcaccgccgccgcagctatctaataccttgaaataagtngcagccttatttcaatcaaaattgcaactccaaggtggtcatcactgatgcaaaaacaatgataccatggcctacaataaataacaaataaagactaataataacaccactgctctgacttcttcagtgttcactagcatcaccactaagagcgaaacaatcacacaaagcaaagacattaaagttcaaagcttgaacattcaaaggaaaactggatttgcagaattcaacacatgcataataaccacagagaccaaaacagacccactacaaaaaataaatagagactntatcactttagaaatcaaagagtgagcaaagacacacactgaaattgcacaaaccaatatacattcactcacaataacaaaaccagacccatcaaaaagtccaaaaagaanaagagcangttacactaaccccaccctttntaaagcccacaatcctta

SEQ ID NO: 68364 - DNA, 396 bp, Glycine max
  unsure (1)..(396): unsure at all n locations
ctaagctatcctcaggctgcctccgacttactcccggccgccttttgattattctaagcccctactttcgaggggcaactcccaccttatgacgactatcccgggcaagacgatgaggaaggagatacccatcttggccccttgctccacctcanagatccgtccccccatgaactaccccaaccgaacatagtccgccatatcccggcttcacccacaccagtaaaagaatctgttcccttcgcggaagataagggaaagattgaggtgcttgaagagaggttaagagcagtcgagggccttggcaattacccattctcggatttagcagaattatgtctcgtgcccaacatcgtcatccctcccaagttcaaagtaccagactttgataagtac

SEQ ID NO: 68365 - DNA, 483 bp, Glycine max
  unsure (1)..(483): unsure at all n locations
gcttgtangattatanggtacccatcacatgtggttctatgtggctgtcgggcgatggtgcacaacaagttntccacatccacaaagcgcgcataaacccaccatcccctgttgcccacctccaactgagctcacgtactcccacgtagcccatatcctcgttcctctcaacactgggtccccatcaatcctcccaagctttcccaacatccaagtaatataacattcagacagcacaaattatcacagccaagcaaaatagggcaaaggcagaaaactctgcccaaaacaccaaccaaaatcacagctnttctcacttaaagaccccagtaataattccttcgttccaattcgttaaccgttggatcgactcgaaaattntactggaagtctctagtacttaagcctacattgtgaccgttgggatctactagcanacatccagaactcattctgtacttctctttccacagcccaccacac

SEQ ID NO: 68366 - DNA, 377 bp, Glycine max
  unsure (1)..(377): unsure at all n locations
accttctcgctaagccaatctgatggcttacttatctttcgctaagcgcaacactcctgggctgagcgtgatgaagaatccataagatgagttgtacaggttcgctaagtgcaccacttcatctctctaagcgtaccgcttcagttcatctgctaagcgagaaaggcgcgctaagccaaaaatcactaatgtgcgctaagcggtccatacgcgcgctaagcgcacgagcatgaacaaggccacctatctaagcctgaaatgagatattgtgaaaagagtttggattgggattcagagctntatatgtctagggtttctagagagagaaaggtccaaggtccatagagttatgagagaatttgctatgtgaagatcta

SEQ ID NO: 68367 - DNA, 492 bp, Glycine max
  unsure (1)..(492): unsure at all n locations
gtcacctgccgcatgcaagcttaaaggtccttcttgcatgcatcccatctagattatctgcacaaaagggaagccagagttgtggaatgttgcttacgaaaaaaaggtgtactttttccctctcaatgagagcacatatatccattgttttttgtacgttaatttactatatgtacgtgagatttggtttaatctaagaaaaataatcatcgtgtatcaattttggagttaattgaatagaaggaaaagagagatgaaaaaaaaatgatgttcagattgacataaaatcttatatcatttaagaattaacattaattaagaatcattcataaacattatcttctttcaatctattaaactcatctttataagaatggaaatatgacaccgagaacatgcacctaaatgaataatacatctattacggaaacatgacagtaaacttgagatcataacangtgatataattaattaatatggtaattaactgat

SEQ ID NO: 68368 - DNA, 428 bp, Glycine max
  unsure (1)..(428): unsure at all n locations
tcgtatattgtatntttttcttcacgcgctattaactgggttagatggtttgaaagctgcttgctatatctgagaactatcttttctaaatattgttgaaagttcaaacttgtgctcttggtcttgttttccttgtagcagatgctttcgttntgtggctgtctgattgctcctctcagaatcatatgttatttgacatgcagtttacaggaattatacctccattcttttccatggttcactgcttcatgttgtcttcaacatgatggctttagttcccctgtgctctgagctggagaggatcatgggctcaattcgcttgctttatgtcattattttggtggctacaagcaatgccatattccatgttctcatagcactgctggtggcgcacaatcctttacttacatatgattacctcatgaatg

SEQ ID NO: 68369 - DNA, 499 bp, Glycine max
  unsure (1)..(499): unsure at all n locations
agtcacctgccgcatgcaagctnggaagaatntggttcagagatagaaactatgttcttttagttcaagatagtgttaccttgcagtttgtaaaggccattctgccttgtacccttcattacttgtaatgaacctttgaatacctttaaagttccaccttctcctttgaatgaacatccagattaatctagcattcccaaagagagtaggttccttttaagctcaggaacatgcctcacatcagggagcagctntacagatccatcttgtatcttcaatttaatagttccaatgccaatgacattacatgccatattgtttcccatgagaacattccctccatctatctccttataagagctgaaccattccatattgggtgtcatatggaatgagcaacccgagtctagaatccattcctcattgtgcttttcagttgagatggagagcacttaatcactttcatatccatcagccaccactgctatatcagattcat

SEQ ID NO: 68370 - DNA, 345 bp, Glycine max
  unsure (1)..(345): unsure at all n locations
agtcattcattcctatgagatgttgcgaagtatgnctattatatatgccattccttggattatagggttgaaccaagctcatgctttacaaaaaggttcatcttgtcgagatgaaatatggaagttaccgtcttgcataattgggcgcaaaagatcgaattgtgtcacaatcacatgcatgtcgtctacttgcccaagacattatgatatgaattattggatgttctttgttacttacagattcaccttgacaaatatgtcatggaccatgttgaaaatcttaattgattcaacccactatcttgcgtagaagatgcaatacttaaactgtgcatcattctcatg

SEQ ID NO: 68371 - DNA, 494 bp, Glycine max
  unsure (1)..(494): unsure at all n locations
agtcacctgccgcatgcannagcttgaaagtgttgttattcaccttctctcaatgcattctgctggcttagcgagtgtccgctaagcgcatcactcatgggctaagcgcgaggaagactctggaagaagatgagttgtacaggttcgccaagcgcactgcttcatctcactaagcgcaccgcttcagttcatctgctaagggagaaaggcacacgctaagccaaaattcactaatgtgcgctaagcggtccataattgcgctaagcgcacgagcacgaacaaggccacctatntaagcttgaaatcagattttagagggagagtttggactgagattcatagctntgcatgtctagagtttctagagagagaaaggtccaagttccagagagttttgagagattctgctgtgtgaagatctgcagagaccagagcttgaagcagaagccggtttgagagctngagatgcagttgtgagtgattgtgtgatccta

SEQ ID NO: 68372 - DNA, 478 bp, Glycine max
  unsure (1)..(478): unsure at all n locations
tgacaaatcacataacanattttaagattctgatttcactgtagcagtatctaaagcaataatttctgcttccatggtagaatgggaaataatagtttgttcagcagatttccatgatattacaccaccagctaaagtaaagacataatcacttgtcgattntgtttcatcagaatcaaaaagtccaattgcatcactaaaccnctcaattacttcctaatctaccaactacatatgcaatgtcaggcctagagaagtttgtcaaatgcaacanagaaccaataatttgataatattatgtgaagaaattcctttacttcaaattttctttaacttaatggatgagtcataaggagtagaaacatgtttcacatcanaataattaaacttatttaataactttttaacataatgtggattaaataaaaccatgtcatcatctctcgctataangttaatatccaaaatcacatctaca

SEQ ID NO: 68373 - DNA, 326 bp, Glycine max
  unsure (1)..(326): unsure at all n locations
gcaagctngagatgaggaagcgangaagggcgaaatttctcttctnttattgttgaccacacagaggggcctgtatatatgtcgtgggggtcaggacacctcgtggactttaggtggggtgctattgcccaaaaccaagcttgaccagttcctacccaacccgggcatagtcggtcattgagaacctgtgatgtacctaagcacgcgagctcctggcagtcaacagatcatatgagcgaagacctcatagcaaagatgcttgttgtggctggccagctgtgaaactcgattgatttgtgagatatggtctcttgttatcttttacc

SEQ ID NO: 68374 - DNA, 424 bp, Glycine max
cctggagatatgtcgcatgggtcacgagaccatgtggacgtcacgtggagtgctattgcccaaaaccaagcttgaccaatcccgacccaacccgggcatagtcggtcagtgagaacctgtgatgtacctaagcacgcgagctcctggcagtcaacagataatatgaacacaagaccacaaagcaaggaggcttgtggtggctggccagctgtgaattatgtgtaatatgtggatggtggcctctggtaatcaattactaacggtgggtaatcgattacaaggcttaaaattgaagacaggaggctaagatggtctctggtaatcgattaccaaggggtgtaatcgattaccacgctttgaaacgacagtaggaaacttagggagcctctggtaatcgattaccagcctgtgtaatcgattacac

SEQ ID NO: 68375 - DNA, 167 bp, Glycine max
  unsure (1)..(167): unsure at all n locations
aaganagcggggcgagttagctacctaatctataaatagaagcctgtgcaacactagctgtaactttgatgaatgatagtcttgtgagacactactcacagttcatcattcctcctctttctttcttcaatatcgtgccgccccccccgcggcactctatgtgtgat

SEQ ID NO: 68376 - DNA, 305 bp, Glycine max
tttgtataggatggctttacgcctacgttgcgttctggaataatggggcacgccacattgtccccattctctttatattcatgcctaaaagcactcccgcgaagtgctcagtgaaatgtctcaatgacatttgagcacaattctttgagatccccttttggaaatgacttgtgcatatgtagctgccattgttaagtttatggacaacttggagcaactagggcaggtgctcaaatgcgtgcttaagtcaagagatccaaacttgggttttctgatgcaagagagaataaatgggagcatattgg

SEQ ID NO: 68377 - DNA, 429 bp, Glycine max
  unsure (1)..(429): unsure at all n locations
tgccgcatgcagctttacttatgtggcgggcggtctttcttattttttgncccaacgcgaacttgaccattgttcttcttccccaatgcttcttttatgttgcctgagggacttatagccttaccatacttcccacgatttcttgagtatttataggctagttatgccgccgttgttttttcctaaacccatcccgggttcaaaaccgttccccaacataactcgggccatcattaccgctgcatcggacagacaaagttgcccatagagggagtccacggatgaaatgctgaccacctcaaaagactgganagcaatttctaacgattcttctgcggcttcacataaggcatgaggatggccagcttaccaagatatcttcttgccttgaacgatgaccaagtgccctcactacaaatttaacttttg

SEQ ID NO: 68378 - DNA, 466 bp, Glycine max
  unsure (1)..(466): unsure at all n locations
gcgtagcccaccatcttttcatagtagagtatcgaatatgtgtctaccatcacgattatcgtctccctttccatcattgggggtaccacttgggccgccagatccctccaccttttaggcgtgttctttgaaagatccgtccccctttttgcaaatgttctatagttgcatcctatccggaaccatatcaaaattgtactgatactgcctaacaaaggcaaccattatgtccttccaagaatggactcgggaagattccaagttagtgtaccatgtaacagctaccccagtaagactttcttggaaggaatgtattagcaattcctcatcttttgcgtattcccccatcttctgacaatacatctttagatggttcttgggacangtagtccccttgtactcgtcaaggtcccagcaccttgaacttgggaggggtgatgatattgggttctangaacaactcttt

SEQ ID NO: 68379 - DNA, 459 bp, Glycine max
  unsure (1)..(459): unsure at all n locations
agctntaatcgagtgtgcaacgtgacttcaaattattttcttttcccttntatatatctttttatttttggggtcgacaagggtattgcccttgcttctacgtatcctcaggtgcgatgaggaattcagacctacgtagttctttaagttcaaatgtttgtgtgttaaattgattttatgtttttgaaagattccttttaattgcaaacaaaaagtcatttaaggcgttagaccttgaaacgatgtttntaaatttgaaaagcggagagaatcgttaaggtgttggaccttgaaacgatcttttaaatttgaaaagcggagagaatcattaaggcattggatcttgagacaatctcaagtgatatttgataaaaagaagttagttatgagtaggctttatcttggttttgtttattaactgtcaatctctttaaagacaaatttacaacactagtgatc

SEQ ID NO: 68380 - DNA, 331 bp, Glycine max
  unsure (1)..(331): unsure at all n locations
atcgattacacatatttggtaatcgagtaccagtgtttttttctgtaaaaactaaagatgtaactcttcacaaatgttttgactctntcaaatgggtcttaaggctttctaaaagatataactcttctgaatggctatcttgaccacacatgaagagtctataanagcaaggctttgttttgcagtttgaatcaattattcctagtctttctaacaatctcttacaatcctttacnagcctngaatctctttgaacttcttcttcttctttgtaccaaaagtattttgaagttttctggttcttccaaaccttgaaaacctgtgctattca

SEQ ID NO: 68381 - DNA, 474 bp, Glycine max
  unsure (1)..(474): unsure at all n locations
acctgccgcatgcaagcttaatgatttattgactgcaaaatatattttcattctcttttgtaatagcacgcgaccgaataaaacaattatatatattgtaaaataacttacatgactcgattagtctctctctatatctttcataataaaatatgtcgggtttttttataaagatagcaaaatgagtctatcaaaattgtccaataaaatataagatttcagcttaaattttttagttcaaattaaatgtaaaattgtagtccccaattatgatcgatgcgggttcagcccaaaagaccccttttcggttttattattatgttctttcaaggtttctacatagatataaggtttattattttntttcattcttactctacaatanatgcatatgtataaattaattaaagaataggtganaagaatataattgacaaanaaataaataatattatcttgaacttagaaacaaca

SEQ ID NO: 68382 - DNA, 473 bp, Glycine max
  unsure (1)..(473): unsure at all n locations
atagtatacgtattcgtatctctaggcacagagtttattgtttattatngnntgggggggcggtgtgttcttgaccatgtctttggtgatctctctctcccactattgaacattgaacaacgataataatataaaagcacgttagtaatgatgcacatgacagtgacatgatgactttcctactgttcatcatgttacgtgtgtcatgtcactacgcctctgtcgttaaccgtcaagagtacatgaagctagaggtgttcttgttctatggaggaacaaaaataatctcaattaattattcgagttatgttactttatctgattatgaatatatttctcttatataaactcgatgactcacattcaattaatctcgataagactatatcaacttttagtcttttacattaataatacatattaaaaaatggatacatatatgaagataagacaatagaaaccatagtagtgat

SEQ ID NO: 68383 - DNA, 481 bp, Glycine max
  unsure (1)..(481): unsure at all n locations
agctngttcgaagatcctcaagacgtcataagaggggcctatctttcttataagactttcaagaagtttttgaagatttctcttgatgaaaactataacctgcatccttttgagttcaaccattcccacttctgcaccatggggtttgttacctggtgggaaaaatattattcgacccgttcagttggagacactactatcatgatctccaggcttgagagtggttttacacaaccaacggtcgagaatattcgctcaaaccttcaagctcgaggtattaacttacttttgactttctaaattgatatgtgtttttgccttttctaatattattactttcaggcaaaacaatcatgacgaagaaaagtgctgaaacgtctcgagctgacgtgagacccaagaaacccactggggtgaaaatccaagaagggaaacaagaagaanaggtaactcttctgacttatcttntaatcttaacgtc

SEQ ID NO: 68384 - DNA, 472 bp, Glycine max
  unsure (1)..(472): unsure at all n locations
tggtttcctcccagagatgacttcaagtaagaatacttctttgcaaatacatcagacttctcatgcacaacttcatgcaagtagtactcaagtgctaaatgccttcaaaaaaacatgaataaagttcaatggacatccgagaccccttgaaacaccaaagagagtaaaatatataagtatggtagggtatatcatgtgataagaagagagagacaaagataaatgacagatgatagtggagtgtttaaaataatgaaatatntgtgtatcacgacccaaaatatataacactnttccatttaaaaacgaagtttatactccaatatactactactaatgtgtttggaaactcgttgagaatgagctagtaatgatatcatggtacattagaaaccacagaacgaaactggaaaaagagggtacccaaatgtgccttctattggagctattgaatggtgagtccactgagatg

SEQ ID NO: 68385 - DNA, 462 bp, Glycine max
  unsure (1)..(462): unsure at all n locations
atattgcatagtgtccaatgcatgcaattactatattgtnttttttctttgntgngaaagtgtctgatgtatgcaattactattctcaaaagaattattggtttagttgacgtttccactaagtggtgatgtgcttgctagtgtctgggtttatggttttgatcatggttattattacctatactatttattttgtcagtggtgtgttaacagttgctaggattggtgatttgtcaataacacaaactacaggttatattagcaaacaacatacaacttatatataatataatatataacactaatagtaacgcttggctaggggtagtaaataatcatagccctaaaaggtatagatattcgaatgcatatgtttgaatgatgtttgactttgctatcaagggacaatgacttatctgtggagtatattcattaattctatatataccatctttaaaacta

SEQ ID NO: 68386 - DNA, 464 bp, Glycine max
  unsure (1)..(464): unsure at all n locations
ttatgggtcttctcctcactaatataagcccaattttccttttctacccaacgtggaacttcacctcacacttgtactacaacaatctttccctcagacgtgagtctctttcacatgacagtcttcccctcaagcgaaagtcattttcatccacgagtagtggcccttggagcttaactgtggctgcctcaactcgcctagccattaccgctaacatgctctagtaccttgcaccactgcaacacttgtgatgcccactatctaaccttcatgtatgaactcacccactacgaagactattgatacaaaggatctncatgtctatggattcgttgtcgcaattatacttgtctaaacaggtcaccaagtcgaaccatcgattcttataccaattattgtgcaattgaccgaggataacaatgagaatatttttaccatggaccttgagctccacataagtgaaa

SEQ ID NO: 68387 - DNA, 419 bp, Glycine max
agcttatggtaaaatttgggacctaaccatggcagatgtcttcactgttgccattgcctccctcgcctaatattatgaccagcctttgaggtgcttcacctttggggactttccagttaacacccatggtggaagtgtttgaagagatcctgggatgccctttgggggcaaggaaaccatatctcttctcgggattctatccctccttagctagaatttctaaaatagtcaaaatctcgacacaggaattggaccgcaagaagtaagtcgaaaatggggtggttggggtaccaaggaaatgtttggaagcaaaggcgagagtcttggcaagtcaagacgaatgggccccgttcatggacatcctggcacttttgatcttcggggtggtcctctttccaaatgtggatgggttggtggat

SEQ ID NO: 68388 - DNA, 447 bp, Glycine max
  unsure (1)..(447): unsure at all n locations
accatcacatgggacttatgtggggtcgggctatttttgcacaacaagtttccacatccacaaatcgtacataaacccaccatcccctggtgcccacctacaactgagctcacgtactcccatgtagcccatatcctcgtttctctcaacaccgggtccncaacaatcctcccaagcttccgcaacatccaagtaactcaacattcaaacaacacataccatcacagccaagagaatatggcaaaggcagaaaactctgctcaaaacaccaaccaaaatcacagctnttctcacttaatgaccccagtaacaattccttctttccaattcgttaaccgttggatcgaactcaaaatattactggaggtctctagtacctaagccctacatttgacccgtgggatctactagcannacatcagaactcattctacattactctttcca

SEQ ID NO: 68389 - DNA, 472 bp, Glycine max
  unsure (1)..(472): unsure at all n locations
agctnttctttctcaatcaatctgtttacagactaacatttcnttttgcaagttcacattcttgttctttctttgtctaacatacacacttgctcaaactcatgaaaagaaacacaaactccatcaaaatcatgcactcaactcaaaataaaagcatacacccatttttcacaaaaagataaaagtgtttcattgccatgtcatcaaaaacaagtcaaactcttcaaaatgcttcaggatgagcaaactaactacccataaataaaactagcaaaaagggaatattgtactaaaaccataattataataataaaccaaaaagcaaaaaggtgtcatcaggaatcacaattcctgtgactggtcataggtatcctgtgtttgaacatcttcctcatctgtcagatgcaatactggagtagctggaggagaagtgtccatagccaggactaatgtagctaggtcctctggcatc

SEQ ID NO: 68390 - DNA, 400 bp, Glycine max
  unsure (1)..(400): unsure at all n locations
ggatcgatgtgggtctgataaaaataatgtcttattactcatcctgcttggacgaatgatataactggggcatatgaagagggtgaggatgaatgagaagcccgtgctgtgactgccattccaatacagccaagtttcccaccaacccaacaatgtcattacttagccaataacaaaccttgtccttacccaccgcccagttatcgacaaaggccatccctaaatcaaccataaagtctgtctaccgcacttccaatgacgaacatcacctttagcacaatccaaaaacaccaaccaagaaatgaattntgcagcgagaaagcctttgaattcaccccaattccagtgtcctatgctgactngcacccatatctacttgataattcaatggtagccataa

SEQ ID NO: 68391 - DNA, 287 bp, Glycine max
aatatgttgtttactcactcaagcaggcacaaacaagtggattcttactatatgcaaaagcaaaacaaaaagagttgggttgcctcccactaaacactcgcttaatgtcattagcttgacacaaattacctcatggatcttgtatttgaaggacgatggttgacctctctatgctctcaccatggtaaaacttcaacctctgaccatttactactcatgtcctatctggagtctctgactgaggatcgaacaatattactgctccatacggcttgacttccttgatt

SEQ ID NO: 68392 - DNA, 393 bp, Glycine max
  unsure (1)..(393): unsure at all n locations
gacactatataacactcacgctcgaaccagcagcagagaatgatcaataaagtatatctttttatattcctaagatatcatntttcttgagacaaacactggttaagagcatcttagattctagacaagccttaagaaaattaaaaacctgacaacctattaggaagggacaaaaagacatgatctgttatcacctatacaattattgaaagtgtagaagaagaattttcacacataaatatctccttgcattaactcatgaaggatcaacataattttctttaacattatcatcattcatctcttcaccatttctctagattcaagtgaaggtccatgcattcctcaaatgggaattcaagccgtagcagtactagcactccaccacaacac

SEQ ID NO: 68393 - DNA, 469 bp, Glycine max
  unsure (1)..(469): unsure at all n locations
gcagcttntaacaatgatttgtcagcctctgattgaatgatattcttaactatacaaaaagggtgagagatatgtatggaaatggaacgaccatcactcagcggataatgagtggctcccaatggctatcttcttattcctcaagctctagggttgtgtcttgtctccacaccaacaccttttcctattatgtttttcacttaaatcattatgagctaagattgttcgccatcctatgctaagtgcgtctgcgcgctaagcgcaagtaagtgactgggcgctaagcgcccattcgcatgacttcagaccctccacgcagctttttcactgctaggcggagaccttcccgctaagcaacaacagctcgctaagcgagcctagcgcgctaagcatgaatcctcaagcttgaactgcacttcttatccctggttagtgttctaccaaacaacaacatcataacatataaatt

SEQ ID NO: 68394 - DNA, 394 bp, Glycine max
atggaaacacacggagaggtgcgtgttttgtttacacttaaacaacgtgccatcgtggctatccaatgtccgtggacatgtagcgcaaagaagctctctggatttatcctaacctctatgctcgcttgagccacatataggttattaatataacatattgttgtggatatgtgtaggtatttttatgggaatctggaatcggtgactctaacttctattgtaatactatcttaatactcacccgtcggaaaaatgaaagttacataacaccacgaaggaaataatatatataattcttgctggaataagatgagaaaatctttactccttgttcttggccgaattttatactcatgcttacctttaacatgaatctcttatgttatcctctatc

SEQ ID NO: 68395 - DNA, 505 bp, Glycine max
  unsure (1)..(505): unsure at all n locations
atcctcttagtcacctgccgcatgcaagctnggtttgtgagttgattntagccttagtttctctttgttattatgtattcatttaaagtaaaatgtcctattgatttttttgattattttattattnttttccagagatattttgattattttattattattttacctttttttatttaaccgaggttacagcacgaatgaccggttggattttgttttaacagtgattaaacaagattacaacacaaatgattggttgaaattcattntatcaattattaaacgagataacaacttaaataaacggttgaaagctcgtgaaagcggaagaaaataataccgaaagtaaacaagatgaagaatgaaagtgaagaaaataagaatgaattgaaagcttcgggtttagaaacttactagttgaagactgaagaacgaacgaagaatgacgaagaatggcgaagaacttccatganatcgctcacggaaacgtcttggaagcgttaca

SEQ ID NO: 68396 - DNA, 425 bp, Glycine max
  unsure (1)..(425): unsure at all n locations
tagccttagtttcgacttggttattattctttttattcaacgaaacgttcaaagaagaacgtgcgattgattnttcttgattattttattcgaagatattttgagtattctattattattttgcctttattggtttaaccgtggttacagtgtgaacgatcgggtatattttattttaatggtgattaaacgagattacaacacaaatgatcaggtgaaattcattttatcatctattgggcgagaaaacggcttagataaacgggtaatagctcgttaaaaacgaaagactagataattgtatatgaacaaaatgaagatgaatgcttacataacaagaaatgaattgagagtctcggattcgaaaacttaccggttgaagaacgaagaacgaacgacgaacggatgaagaacagtgaagaacg

SEQ ID NO: 68397 - DNA, 440 bp, Glycine max
  unsure (1)..(440): unsure at all n locations
agtcacctgccgcatgcaagcttctagccaaatggacttaccttgaattaattctttgtattcccttntgagccttgtttccctttccttgttttgaagctcactacaagccttaagtgaaaaaccatgatatcaccatatccttaaggaattttggagctttggaattgttttgggaataagtgtggggggtttttgtttcattggacnaacttgtttgttggctatgcttcatgatgtattttgngccatacttgatgtacattgtatattggttaaatgttggacatgctgaatgaaatgttgtttctcataggctatagagtaaaaaaaaaaaaattcgaaataagaaaaaaaaaacaataaagttgagtgaataagatcttanatggcacaagaatgatgaaactctcggntctactcttcatgtgaaaaattat

SEQ ID NO: 68398 - DNA, 480 bp, Glycine max
  unsure (1)..(480): unsure at all n locations
agtgctactgatatgaatattgtgtggattntccttttttgtgtctacagcttatgaaattttatttcgttggcttcttatgttatattgtggatcacaatcaattaattatgagttactttcggaaatgtctttgtaccatttttctgttctgtttgaagtgattctcaacttttatgagatttagctttggttattggctaacgctatgtttggtttttggttttctaaattccctttcatgaatgattggttactctgcaagtatgttgtatattaaaaaatattctaaaactcaattctataaaatcaaaacttgatttatttttaaatttcaatttacaaacttaagtttaatccaactatgaacttagttagaaacatatttaaatatttgtagtgacgaaaaatagtctataatatcttcatagaanacatactatccattaagaattaagaggagtacacacttcgtgtaca

SEQ ID NO: 68399 - DNA, 425 bp, Glycine max
  unsure (1)..(425): unsure at all n locations
tgccttctcctccaagtgcttccttggtaaccctaccacccctattcctatttgcttcacttggtctaactcttgtgctgagatcttgaccacttttcctactcttgccatggaagggtagaatccggaaaaaagatatggcttctgtcataccctaatttcgtccggggacaattgttgtcggcgtgtggaccttggttggtcactttgagacgcttaacacccattgctgcataatccgtaaaggtccgcgatgtttaagaaagaaatcagccaaaaacacaaaaacagggttgcacttatcaaacttggaggtgtaactagcattgggaccatctagaacatcctggagggggttcactcatcanatngggggtgcactaaggaaacgtaatcactaaacaacctggaggggggtgcactca

SEQ ID NO: 68400 - DNA, 424 bp, Glycine max
  unsure (1)..(424): unsure at all n locations
agctntaagcagatttagaatgactattaacctttatataagataacttaatgccattaacctagggaattaaaaaaaacttaatggctgagtgtaactgatattgtggcaaccaaaagtcacccccaacagccaacaagtcagccaccatttggtctcccaaaaggctgatgcctaggttgccaattgggcccttattacaacttgaactaaacctaactaaagcccttttagttgattaacccaaaacatatttttggtcagccaactatacaaggattgtgccattatttagacaaactaaacactctaaaattgagacaaagtggtgtcatttagtcctcctccatttgggccatgatacaactcacaaccttggacttttctccttgaaacttgggcttgtattcatatagtatggaca

SEQ ID NO: 68401 - DNA, 391 bp, Glycine max
  unsure (1)..(391): unsure at all n locations
atatattgagggactcatggtcactatgatttacaaattccttgggataaagggagtgttgccatgttttcaaagcacgtactaaggcatacaactccttatcataagttgaatagttaagggtaggaccacttaacttttcactaaaataagcaattggatggccttcttgcatcaacacagccccaatcccaacatttgaagcatcacactcaatttcaaaagatttttgaaagtttggcaatgcaagtatggnggcattagttagcttttgcttaagaacattgaaagcttcttcttgtttctcttcccatttgaaaccaacatttttcttgagcacttcattgagaggtgctgccaatgtgctaaaatccttcacaaatcgtctata

SEQ ID NO: 68402 - DNA, 453 bp, Glycine max
  unsure (1)..(453): unsure at all n locations
agctttgctaacagattattgcatttgattatgcattngcatacgcatacacatgcatatttgttatcttgtgacagggactggatcgttttaagcaatagtcaaataccgagacaaatccaagatagagatgaatcgaggtaagcggtaacgcagccacggtttgctgcgcaatgtcatttcctgctttcaggtacttggggatgggcacgagtggaggcgaggcccatgatcaacagatcgtcgtcccacgtccagacaaacgagaagcgctactgggaggcagcctagtattctttaaattcctacttattattgttgttgtttccttaaggtgatggttggatgcctaatttaccctagcggcttcgagtaagcgaacgccgacccatagagagcacgtacctttgttttttttttttaaaaaaaaaaagaaatacagggtagctcgct

SEQ ID NO: 68403 - DNA, 471 bp, Glycine max
  unsure (1)..(471): unsure at all n locations
atgaagcaaccagctcgcctgggtgagcatgttgcttcttatctaatccaccagctcngctatttggctataaaagggcattggaggctaaggggaagcggttcancacccttggtattcagatttcacttaaaattagtgaggagaacaagaaagaaggagaaaatgaaggccgaggcgcttccgtgaccaattccatgaacattcttcgtcgttcttcgttcgttctttattgttcgtcgatcttcaaccaattagttttcgactttgaagctntgaattcattctatgcacccttaggggtccattcttgctttgtatgttttcatcttcatctcgtctactttcggtattctttntctttgtttttagcgagtttcgatcgattatttaagtcgtaatctcacttaatcaatggttaaatgaatttcaaccgatcgtttgtgtngtaatctcgtttaatcaccttta

SEQ ID NO: 68404 - DNA, 446 bp, Glycine max
  unsure (1)..(446): unsure at all n locations
atcttaagcgacgcggctgcagcttggtagnttactctcacacgcacgatatatcgagatgttgcagtacagaacactacgttgaatacaggatcgcttgtatgtagacaacatatatagtggcataaggcacaccgtaggatgaccaacacgtcgaccatctagcttggacccaccagtggcacgttgtattagctttgttaattagtgtacatacgtgcccatactacacacaatgcttttataacgggatgcgtatattttgagccattgctttaccaaggagaacatgagtccagagaagatgatacttggttcgtagccttgtatactactttcgcagactagggcactagacgaacgtcgaacagtgaaccattataaaccaagtgttcctacttctctttataacggtgtattaagcgtcctattagcactttgttact

SEQ ID NO: 68405 - DNA, 357 bp, Glycine max
  unsure (1)..(357): unsure at all n locations
catgcacctgcngcttgcggtcttactcatagtggatgtgtgagacaacattgtctatattcatctcccactccatgtaggcctccggatcattctttcctttaaatggaggaatgttgagtttaataccatcaattcggatgtgtctaggaacaccatcattccctcatctcctcctttcttcttcattatgaactgtattctccatttgatccaacctcttatggagccgaacatctcgttgtgtcattaacctctccaaatgttgcatcaaagcttgcatttggaattgcgaaagccccactccatcattaggattagtacctgacatctcatacaaacaaatcaaacgtaaca

SEQ ID NO: 68406 - DNA, 412 bp, Glycine max
gcgatccttaagtcacctgctgcatgcaagcttggccagagtggctgtggcatggtatactattctggaagctcttcagatccgatcatggaaagacttggtgactgccttcattaggcagtaccaatacaatacagatatggctctcgatcggaaccagctttagagtatgaccaagcgagaacatgagtccattaaggagtatgcccaaagatggaattgatctcgcagcccaagtcgtgccgcccatgatagagagggagatgatcacaattatggtagatacgttacccacgttctactatgaaaagttgataggctacatgccagcttactttgcggatctcgtcttcgccggagaaaggattgaatccggactacgaaaagggaagttcgaatatgcttgcaatat

SEQ ID NO: 68407 - DNA, 472 bp, Glycine max
  unsure (1)..(472): unsure at all n locations
ctaagctgagtgggctggctcacaattataggtgctcaggattttttgtttagattttaagagagcacacatcatagacttatcccaatgatcttgtatcatacaagtagctttctcactatcttttcctcttaagttgcttttgaccttattgtaacaacacaatttattctttttttttaacatacaacttatttgttgtgtgtgctgatgcttaacctttttcttttcattctaattgacttccctcccccaaatttagagtaactttgccttgaaccatatgctctcctataatctaaacaaggtattaggagataattatttaagtttacggttcaattcatgacaaaatcatttagcttatacagggagcataggatgcaattatcattcaaggtaagctntttggtcaaaaggctcgtgtatgtacaatcatggccttcatcnatgtctcatttataacattcat

SEQ ID NO: 68408 - DNA, 313 bp, Glycine max
cacctgcggcatgcaagctatgagacgtcagcggatgaagatgtctcattggcacccatggttactgatattagaacgaaggcaccacatgatgctccggatggtggggaagaggcccccatcacttgaatacccttcacaaactcagcacgcgtgctacacatgtccatgatgctagtgacatcatcgacatttagctcaaagagtcgctcattactttgtcgtgaacgcgctctccaagacgaagtgcagaatattgaccataaccactacacactctcatcactgaaaattctataggctgaaacgttct

SEQ ID NO: 68409 - DNA, 272 bp, Glycine max
  unsure (1)..(272): unsure at all n locations
tatgtactactcgatataagaagctatgatgtaatgatcattgattcttatcatacaaagggatcaatgtggatggaacgagttgctattactctgaacggtagtgatcatcttaacagaaagcanacctatgtcagagctatggcggacacctactacttcctctacgtagatacacgtactgctgaggtattgccagcatatgagaaacgtaatggcccatatgattaggaagccgctggaagacagtatcgtcactcagatcttgacta

SEQ ID NO: 68410 - DNA, 488 bp, Glycine max
  unsure (1)..(488): unsure at all n locations
agctntactatgcagagaatatccaaagaaaatactcttcatctgacttagcatcaaattttcctaagttatcttttccattattcaatacaaaacatttacaaccaaagatatgaagatgtgagatgtttggttttctgccattgaacaattcatatggagttttctttaaaatgggtcttattaaagccctatttaaaatgtagcatgcagtgttaatggcttcagcccaaaagtattttggaagaggagtatcatttaataaagttctagcaatctcttccaaagatctattgttcctttcaacaacaccattttgttgaggggttcttggtgcanaaaagttatgctcaatcccatgcttatcacaaaataattcaaattctttatttcaaactcacccctatgatcanctctaatagatataatcttgagatnttcttattttgatgatcttgcaagtntctaatgcttgaatgcatattcta

SEQ ID NO: 68411 - DNA, 454 bp, Glycine max
gctctgataccacttgttggacaagtggtctcagatatcttaagaaggggggttgaattaagatatcatagactattccccaattaaaaaaatctacttttaatttaacccaacaacccaagattccttttaaacaagaactcctagataataatgcaaattaatcttactaaatagaaataataagcaataagcaataaaggagtttaaaggaagagaaaatgcaaactcagatttatattggttcagccacacccttgtgcctacgtccagtccccaagcaacctgcttgagagttccactatcttgtaaaatccctttacaagttctgaaccacacaaggacaacccttcctttgtgttcagatttctttacaacaagagacccttggtctcttaatcccttttgagaaatagaaagaagagaagaagaaatctctcttgaaagagataga

SEQ ID NO: 68412 - DNA, 447 bp, Glycine max
  unsure (1)..(447): unsure at all n locations
cacctgccgcatgcaagctaagctcactgtactttctccagagcctctcggaatttgttccggccgtgttcttccctacgagccctcttggtctcttgttctaaggccttggtggtagctatatttacatctctcagttcggcattctcctttcggatcttaagagctgctgatttgaactcttctttgactgtgtgggcttgctcgagttctgctctaagggcctgcacctcttcgtcttcctccggtgcctcaacttcctcccctttagtggttctcaaaactcggagccaatccaaaccttgcatgtgggctntcaaccacttacggtagctaccgacgttgttactgcctctgagttctttgtccttcttttgcaccatcttccacgctttgcngaccttcggaagtgcctcacgttggtctattgaaacctcatgcaataat

SEQ ID NO: 68413 - DNA, 290 bp, Glycine max
accacagagagagacctggagatatgtcttggtggtcacgagaccttgcggacgtcacgtggggtgctattgcccaaaaccaagcttgaccaatcccgacccaacccaggcatagtcagtcagtgagaacctgtgatgtacctaaacaggcgagctcctggaagtcaacagataaaaggaactaagaccacaaagcaacgaggcttgtgtggtggctggccagctgtgaactttgtgtgatatatgggttattgcctctaggaatcgattaccaagggtgagtaatcgat

SEQ ID NO: 68414 - DNA, 343 bp, Glycine max
  unsure (1)..(343): unsure at all n locations
agccttgatgtaacatatgtataggttaatgatttatcgagatgatgcgctccatgagaggttggatcaaatggagaatagagaccatatgaattgctcaagagctttcattgntcaatgtcgagcgtctagatatataatgcgcctcaatcggacctccgagttaaaaggtatgaccatttgaaatgctcaagagcttccattgttcaatttcgagcgtcacgatatattatgcacctgaatcggacctgcgagtgacaacttatgaccattngaattgctcaagagcttccattgttcaattttgagccgcaccatataatatgcacctgaatcggacctg

SEQ ID NO: 68415 - DNA, 476 bp, Glycine max
  unsure (1)..(476): unsure at all n locations
agctataaccttggttttatacttcatatccttgcaagcaaaagcttgaaagataaatattgctaatttctgctagagtttgtctaaatttcctccaattagatgatcatcccagatccaactcagtatgagtatagttaaatgcccaaattgcagtcccattctgtgtcacttttataatgaacgcattctgtgtcacttttataatgaacgcattctgcctaatgtcaatacagtacaagagaatttatttgtttcataaacaaagaactggacgacaggtagaaaattatgattcaattcagaaatccattgcaagaaaatagccttgagattgaagaagttcagcatctgctacatgtttatatgactaacgaccaanaacagttactgtgtntctagcanatatgcagcatatgaatgtagcatcgataanataatcagattgaacattaaatactataacacaggatagg

SEQ ID NO: 68416 - DNA, 455 bp, Glycine max
  unsure (1)..(455): unsure at all n locations
ctattaaactaagcttcgttgaagccagtggttggaggagaaggctggatggtgaagtttatttgtggagtgcataatcatgaattggccaagtcattagttggacatccatatgcggggcgattgactaaagctgaaaaaacacttattgctgatatggcgaagtccatggtgaagccaagaaacattctgctaactctgaaggaacacaatgccaatagttgtacaactattaaacagatatacaatgcaagaagtgcattccgttcttccataagaggaagcgatcttgaaatgcaacatctgatgaagcttcttgaacgtgatcaatatatntattggcacagaataaaggatgaagatgtggttcgtgatatcttttggtgtcaccctgattcagtgaagttagtcaacgcatgtaattnggtggttttgatagacaagcacctacaaac

SEQ ID NO: 68417 - DNA, 477 bp, Glycine max
  unsure (1)..(477): unsure at all n locations
agcttcttttggaccttgcacaagcaatcaacttctctttcagaaccatgctatgtgctcgcgactggtccctttcttcccttcgcaacttgagttcactattgctaccccatagagctccgcgaaatttgttccggccatactcttccttgcgagccctcttggtctctcgttcaagggctcttgcggtaattgcattctcttcccgtaacccggcacactccttccgaacgtgtgtagcagccaacttgaacttctccttggcgagttttgcctttcctaactcgctattgagagcttggacttcctcgtcctcttccggggcttcaaaattctcttcgctgacgactnttaacttggcgagccaatctagacctcgtatgcgaactntcagccattcgtggtacccaccaatgatgccattacgaatgcctctaagctcttgatctttccttaacgggggttcccatgccttat

SEQ ID NO: 68418 - DNA, 473 bp, Glycine max
  unsure (1)..(473): unsure at all n locations
agcttattgtatgcatgcttgtggtttgatcactcattggtgtgtgctgttaggaactttagcattgacaaatgtactgtttccttggaacttggtagagcacgactagataaccgtagtgctagacatagtgtgcagggttctagtttttattatgttgtgcttataatgctgtttaaattaggctaagttcaataagagacatctgcgaatgaagaatagtttaaattagtccaaactcacgagacatcggtgttggtatttttgtccttaacatagaacacaagaataatttcaaatagagaaaaaccctaattgcatcaagtatctcggtggaaggacccaatgcttatactttatttgtttcacactcaattgttcacgtttactatntctttgattacaatagaatatacctttggtttcaattcatgatacttaattctttntacaaatnagtttattttgaatga

SEQ ID NO: 68419 - DNA, 464 bp, Glycine max
  unsure (1)..(464): unsure at all n locations
acactatttaaacataagcccgcctctnttgtgacttattgctacaatggcatgtcggcatggtatccctacatcaaagttgtaaaatcagcacacatgtatgttacaaatgaaaaaaagaaaaaatatacagaacacaacctgttagttgccaaactctacaagtgcatgtccattcagctaaattgacctcaactttttccccccacatgtggacctcatatctcacgcccatgttatcactacaccaaattggagtccattgattagcaaaatgaatctccttttctagtcttttgtattgaactggacataatggtccaggttttccagaaagtttaaccttgtgggcagccatggttctcgtgatgtaacatctaatttgttcaagcatggtgagaataggctngctcctatactgcaaaatctnggcattgaagacctcacatgtgtttctgcatatg

SEQ ID NO: 68420 - DNA, 355 bp, Glycine max
  unsure (1)..(355): unsure at all n locations
agctatgtcttcttgctatgggattngcaatatctaaaaaggatatggttgtgatttgaattgtgtggcggaaataattcagaaagagcatgtggaataactagtctccagtatgggttagcaaggcatctatcaagattcttatggatgtgttgaccattgtgaccatttctacaccaagtaaaggtacctccaatagtttccatattcatgaattgacatangtggagaacatgggcaaaggttgtcgcatgagatactangaaggtactcccaatgacttcaaaggaaatgagagtcttgttaagatcttctagcatgatctatgagcctaggatagactaatgaagattga

SEQ ID NO: 68421 - DNA, 248 bp, Glycine max
  unsure (1)..(248): unsure at all n locations
gtatgatngcagttcanagaaagtggtgatttatatngatgagcctgcttcagaattagttagtgactttgaaactgcagatcatgagacactggtccacattgaccagaacccagaggtgacaacagacaanaggcctaagagaaccaaggttccttcatcaagacttcaaggttttgaagtacacactgatgacactatcactgatgaggggtaacttctgcccagagaagtagagcatgttgcac

SEQ ID NO: 68422 - DNA, 379 bp, Glycine max
agcttgttagttactatagaatgttatgaataatgttgctgaaaaggaaaaggacatcggtggattgaagaggcttatataagtggagaagggaacggctgattctgagaggaagaacgctgctgaagcttgcaagttactacagaatgagaagaataacgctgttgataaggataaggaaatcagtggattgaagacgcttatataggcagagaagagaatggctgattccgagagcaagaaagctgctgaagcttgcaagatggtaggggatgagaaaaataatgctgcggaaaatgagaacgacatgagtagactgacggagcttatatatgtggagaacagataggatgattctgagaggaacgaagacactgat

SEQ ID NO: 68423 - DNA, 330 bp, Glycine max
  unsure (1)..(330): unsure at all n locations
cacatcgttcgcgtggatgacatccactctacatgggttgaagaagaggagaccttcactcctattacgcatcgaggcggacaaaagtaggcagaccacttgaatggtcattatcgtcaatgcggcaagctatctgcgcttcactatcacacgacacatattatatgatctcgtggatacttgagcctgatgcactaccactacatagatgaagacatactaatgagcacatcttagaagcagacatcacacactggcgacctcttgggaatgaagcggctatgcctccttctaatgacgcatggacactnaatcctgacccgcctacga

SEQ ID NO: 68424 - DNA, 304 bp, Glycine max
catgcaagctgcttatggactatagacacgcaactcacttctctttcatggtcttgctatatgctcgcgacgggtgctctttgttccttagcaacttgagttcactattgtcacacacataagctacgtgatatctcgtccggccatactctaccatgcaagccctctaggtatctcccacaagggctatggcggagactgaaatgtcttaccgtaacccggaacagtcgctacaagcgtgtggagcaacccactacaacttgacgctggcgagtggatgcgctgctatcttcctactgagaac

SEQ ID NO: 68425 - DNA, 204 bp, Glycine max
atacctgccgcaagagcctgcggcttatgcgactagagcgaccaccacacagatcatctctattctctgctgcacctctggagcaacctgagcaaccttgaagctgatgctgttcactggtcgacagacctattcaatctcactctcactatcagacccagcagagctattatgacctgctctacagcagataccattaccgat

SEQ ID NO: 68426 - DNA, 515 bp, Glycine max
  unsure (1)..(515): unsure at all n locations
atccttaagtcacctgcggcatgcaagcttttaaanagcctttatagataaaaaggctctgctcaaaccatataaaaaagcttgttaagtntgacacgacttgtttaactaataataataataataactntattttatcaaatcttatcttatccagattttattctatctagaatttattttattcagattttattctatctagattttatttcgtccagattttatttcattccatcttatcttatcttggccagattttattttatttcgtttatgggtttggacttaaaatagatttgtaagctttggggctgaagacctatataacagtacaaaggttttagtttaggggaatttttttcggagaggagaataattctacgattttagaattccagtttttattactggtcatgcgcactgttcacatagaataaaactcattttctgcanatcatctctaatccatacatattgtaatattatgctctctttattttctttatataagc

SEQ ID NO: 68427 - DNA, 399 bp, Glycine max
  unsure (1)..(399): unsure at all n locations
cctctatcctaacgtcacaggctatcggagcgtggagctcacgtgtcctctagcatgaggctctgcatcgcccttcacctattcatctgctatctgcaacacagttcacgatcatcacgggattcccacatgcactacacacacggagtgagctatcacattccttcaactagtggagagaaacaagataacatgcccgtataagtatcggtatgacaaaatatatacttacttaatcatcactcaccttatttctccactctgtcacagattgcatctcatcaccacacattctattcattttcacaacattgatgtactcacggatcaaagcacantatcatctactctatctctatcgatcacttcgccagcgttatgccacatatacactaagac

SEQ ID NO: 68428 - DNA, 456 bp, Glycine max
  unsure (1)..(456): unsure at all n locations
cacctgcngcatgcaagctnggttcccaacgctctgttcaagctctccttaatctagaggtttatctaggatctctatcagatactatgctagatggcacaccatgtaacctgacaacctcacttatatacaaggtggtcaacttttccaaggaaaatctgatattaatgggaatgaagtgagcagacttagtcaatctgtcaacaataacccagatagaatctaaacctctaggggttctaggtaatcctaccacaaaatccatggaaatattgtcccacttccactggggtatctctaagggttgtaacttcccttaaggtctccgatgttctatcttagccttctgacagactaggcatgcatacacaaactcactaacctctcttcatgttgggccaccaaaacatcatctttaaatcttgatacatcttggtagcaccaggatggatgctc

SEQ ID NO: 68429 - DNA, 478 bp, Glycine max
  unsure (1)..(478): unsure at all n locations
ctcatcttggtggtgaagctccttcttccatggcttattccctagtggatggcgcctcctctcatctcttctcctttgtcttccgctgcatctccatgttggaaaatcaccattaaaggacctcattgaggctcagagatccaacctccatagaagccccacaagcaagcttccatcaatacaactcctgaacctttcacttaaagttcgtagaccacgtctttttccggtttttccgatgttttccagaaataaacgttggtggcgactccgcacattntcctttcatggaagacgcacctttgagtctcgcgtcgccctccctccgaagggcaggttgcggcagttggcgactccactggagactattgntagagagttaggccagtcaaatcagtgtgctctccttactatgacttccctttntgtctttnttctttggctttnttttcttatggtcctggatatataaactctc

SEQ ID NO: 68430 - DNA, 441 bp, Glycine max
  unsure (1)..(441): unsure at all n locations
agcttccatcaggaagtgtgcctcattgttatctatgaaaaaccaatgtcaatatattacttaacatcggttntctaggaaaaccgatgttaatgttatagattaacatcagttttctatagaaaaccgatgttaacgaatatattaacatcgattttcctagaaaactgatgtcaatgtccatcatctatacacttattttgttgtagttagttatatataacatcagttatttataaataaccgatgttaacgttggtatgttaacatcggttatatataaataaccgatgttatgagaaataaccaacattggttttttgaaaaccgatgttaggtgcatgttgacatcngttttctattaaccgatgttgttactatattaacatcggttattatattaaccgatgttgtttcaagttttttatataaaagtttgtt

SEQ ID NO: 68431 - DNA, 433 bp, Glycine max
  unsure (1)..(433): unsure at all n locations
tctcactatntnntgagttntgtgcttaggctaagtgtgccctgtgtgctattcctaaaggtcattctactaaggctgagctaagcccagcatgctgcactaagcctaaaccctcttctggtttgataattgtagatttatgctaagcccaacatgctgcgctaagcctaatctgcagaaaaatattntttgtgtctttaggctaagtgtgagtctgctgcgcttagcccatgagtaaaattntataaggcacgctaagcccagccttctgagctaagcgcccaattcaatttttagttntatttttttgttntggtgaaaataaccctgactaatcttgttgttagatcttatattttcagatggcatcaaagaagagaaaggcacctgccacacctgtcccaagtcgatatggcccaatccaggtcacttc

SEQ ID NO: 68432 - DNA, 416 bp, Glycine max
  unsure (1)..(416): unsure at all n locations
agctataggagaaaccatatttactaaggtagtttctaaacaaaaatcaattgaggaagcttcgccaagtatccccattgaaaaacctttattcaaacctttcaaagttagtgagaaggctaaacgaaaaattatggaacttagaaaacctaaatccttaattgaaggcataggtgataaccatagtgaattacttaacaagattgngtagttacttaaggtcattccagatactccccaagcctcggaaaatacttccaaaatggtaacaagaagtacctccaaattaattaatgttattaatgaagatagtgacctanactcagacaacacaactgagataggatcagtgtcagaaaagaatataagtccaattaatttcaaacactggaaaacaccctccaaaattatatatc

SEQ ID NO: 68433 - DNA, 296 bp, Glycine max
  unsure (1)..(296): unsure at all n locations
atgcctnggtcaaccaagtaactcattttgtctgaatcagaaatctgcatctgcacctattacaagagtctgtggtctatgttcttctacagatcaccatacagatctatgtccttctttgcaacaatctggagtcaatgagcaacttgaagcttatgttgcaaacatttataatagaccccctcagcagcaaaaccaacaacagcagagtaattatgatctttcaagcaacagatacaatccaggttggaggaatcatccaaatctgagatgggcaagtcctccacaacaacaat

SEQ ID NO: 68434 - DNA, 479 bp, Glycine max
  unsure (1)..(479): unsure at all n locations
agctttttgagataaaaatgatagctttagaagtaacaatgaacatgctgtgaaaaaaatcgaaaaanaaaagcacatagagagggaaaacgaagcataacctttgagtttttcgttcggtatctccgtcatttccgtccggcatttggagaacaacggcaccaagccatcgtctttgaacgatggtaggaaaaaaaaaggtagctttagaagaaacaatgaacatgttgtgaaaaaaaacgaaaaacagcacatggagagnggaaaacgaagcataaccttgagtttttcgtccggcatttccctcatttctgtctggcattnggagaacaacagcaccaagacatcgtcttcgaacggtggtaggaaaaaaaaaagagagaatgagagagagaatgataatgagaaaaggtggtgagagtgaaatagagagaacagtgggaggaaaaaaaatgagantgagagagagaattggaatg

SEQ ID NO: 68435 - DNA, 360 bp, Glycine max
  unsure (1)..(360): unsure at all n locations
tgcactattcaatggagttgacaagaacatcttcatacttatcaacacttgcacagnggccaaagatgcatgggagatcctgannatcactcatgaaggaacctccaaagtgaagatgtccagattgcaactcttggctacaaaattcgaaaatctgaagatgaaggaggaagagtgtattcatgacttccacatgaacattcttgaaattgccaatgcttgcactgccttgggagagaggataacagatganaagctggtgagaaagatcatcagatccttgcctaagagaattgacatgaaagtcactgcaatagaggatgcccaagacatttgcaacatgagagtagatgaactcat

SEQ ID NO: 68436 - DNA, 456 bp, Glycine max
agctatcaatgttcttaagcttaagctaactaattcccccatacttgcgttgccaaactttcaaaaatcttttgaaattgagtgtgatgcttcaaatgttgggattggggctgtgttgatgcaagaaggccatccaattgcttattttagtgaaaagttaagtgtgcctacccttaactattcaacttatgataaggagttgtatgccttagtacgggctttgaaaacatggcaacactacctttatcccaaggaatttgtcattcatagtgaccatgagtccctcacatatatcaaggggcaaggcaagcttaacaaaaggcatgcgaagtgggtggaattcctatagcaatttccttatgttatcaaacatataaatgggaaaaggtaatattgtagccgatgctctttctccgcgtcatgccttactttctatgctcgaaacaaaactgattg

SEQ ID NO: 68437 - DNA, 446 bp, Glycine max
  unsure (1)..(446): unsure at all n locations
acactattaaactcagctanacacactccanaaggtatggattatcgtacctcaggctgaatatacacaaaaaactatgcataaaacataaaataaaaccatacatcacanaatagactgttgtacatcataaatttcaatgtctcaagaacatgtctttataaacgttacagtgttaatttctctagctccatatcaaacattntctgaatgaattgaacaatttagcagcaacaaaaaaaaaaaagtaaattatcataatttaaattgtggtctccatggtgtgcaacattttagttntactagtcgcgcaatctcaacctcagatgcaatatcattagaaaaaagagttgcccttctcttgtttctccaattgaaagacgntggatgtgagtgatgaaggaccagtactcaccacattgtggctcacatnttttacacaagtc

SEQ ID NO: 68438 - DNA, 477 bp, Glycine max
  unsure (1)..(477): unsure at all n locations
agctatacagcagaatttagtaatgacccactatctctagaattaaaataacttaatgccattaacctagggaattaaaaaaaacttaatggctgagtgtaactgaaattgtggcaaccaaaagtcacccccaacagccaataagtcagacaccatttggtctcccaaaaggctgatgcctatgttgccaattgggcccttattacaatttgaactaaacctactaaagcccttttagttgattaacccaaaacatatttttggtcagccaactttacaaggattgggccattatttagacaaactaaacactctaaaatngagacaaagtggtgccatttagtcctcctccatttgggccatgatacaactcacaaccttggacttttctccttgaaacttgtgcttgtattcaaatagtatggacagaacttgatgaagaacttccttggctttccttgctctagcccttgtcat

SEQ ID NO: 68439 - DNA, 369 bp, Glycine max
  unsure (1)..(369): unsure at all n locations
tctccatttaccttgctaaggttntaggagagttcatgggtttaagacnaatttgccccannattgggggattttgttggatggataaatttaacggtaagaaactacaacacacatagcaaattaataaaatgttatgtgttaaaaaaataaaaataaaaaagaagaagaaaaagagaaatttaaatgagtgtgtgctgttaaaacaaagtcaagtgaaaggctagtgaatgggctaagtggaatgaaaagacaaactgggttagtctaggaattgtgctctcttagaacttaagcttttgcatcctagaanaaccaatatttttgtagcccagcctcattacaagcaaataaaagtccttcttattc

SEQ ID NO: 68440 - DNA, 397 bp, Glycine max
  unsure (1)..(397): unsure at all n locations
agcttacacaaacattcattattccaacacacactcaacatatagtcatcatccgtccatagttccaatcaatcatgctcagtgtgatgcatgcagctgacctcaagtctcaaatgcaatgtggtaccatcccaagaaaatagcttaagcgtgtccacacgacacgctcacttangaaaactaggcagtaagtgttgaggtcatcttgtcgtgcataggcaactcccccccccccccccacggtgatcagcttgagtcttaagggagttccaaatcgagtgacatgcccccaaatagaagtattcttctcatgaaaaactacatgtacttactatacaaagttatactattntcatgtcatatgaagtatgaaacatggacaccatcaatgcactga

SEQ ID NO: 68441 - DNA, 424 bp, Glycine max
  unsure (1)..(424): unsure at all n locations
cctgtntccatattcagatcanatcaatgtttcataagttgttcttttatcaagtccatgcaaaaatatctgagtttatttggtatttgggaaagtccttcattgttttcattctcaatgttttccaagaaaatccttttgttgtgttctgatccaaaaataagtttaaaaaaatactggttgttaattctttccaaagcatgttatgttcaataaaaaatttctatttaagtcccaaaaagagttataatctataactatactaatgaaatatcaaagaacacataaattagtcaaaataaactcacgtatagttttttgaaaaattcaaaacaataaataaggtaataaagtattgaaatttaatacanagcaataaataaacatanagacaagttcattaagttttgaagtcatgtcttca

SEQ ID NO: 68442 - DNA, 363 bp, Glycine max
  unsure (1)..(363): unsure at all n locations
agctngaatcttacatccgtgtgataacttatgtccatttgaatttcacgagagcttccgttgttcaatctcgagtgtcactatatgtgatgcgccaaaattggatattcgaattaaatgttatgaccatttgaatttctcaacagcttccggtgttcaattccgagcgtctcgatatgtgatttccttgaatcggacatccgtgtgaaaagttatgaccatttgaatttctcaagagctatcgttgttcaatgtcgagcctctcgacatattaagcgcccgaatcggacatccgtgngaaaacttatgactatttgaaatcccgagagcttccgactgttaatttcgagcgtatcgatatat

SEQ ID NO: 68443 - DNA, 138 bp, Glycine max
agtgcacacgagggacacactcatgtgatttgatatgttcattgaaatcatatcgagacaaggcgctgagagaccatacagcgtttcctaactgatatctaattatagcgggacattaagtgtatcatgtgctgacca

SEQ ID NO: 68444 - DNA, 459 bp, Glycine max
  unsure (1)..(459): unsure at all n locations
agctntgatgatatggtcttcaccgacgaaaggatcaaagtgggtctaaaaagaggcanatctgatcatcatgctttgataaatgccaaaaaaatactagagcaaatgaagagggtgaggatgaatgagaagcccgtgctgtgactgccattccaatacagccaagtttcccaccaacccaacaatgtcattactcagccaataaacaaaccttctccttacccaccgcccagttatcgacaaaggccatccctaaatcaaccacatagtctgtctaccgcacttccaatgactaacatcactnttagcacaatccaaaaacaccaaccaagaaatgaattttgcagcgagaaagcctatatgaatcaccccaattccagtttcctatgctgacttgctcccatatctacttgataattcaatggtagccataaccccaaccagggtcatcaacctcca

SEQ ID NO: 68445 - DNA, 330 bp, Glycine max
  unsure (1)..(330): unsure at all n locations
tatccgtagttggtgaaagtcttctacacgtgtgcacgcgccgatttagaaggtaatctcttttctacagttaatggaatagaaatggttatcgatgttgatgtatggaaggaagtagctagactggacatgggtggagttcaacaatttgaagaaataactaatgggtacaacaagatgcagacctacagaggaatgcttctcgactgatcaaggtcgtacccgaatcanataaacattaaaaatgcagtatctangaactgatcctatgtcatctcccaacgagcaatggtcaaccaaacgttcataacatatagtaataaaaaagta

SEQ ID NO: 68446 - DNA, 353 bp, Glycine max
gcagctattgaactattgggatggaagatcttatcatgagctagtgaattttctcagccttggatacaacaagtgcactgctgcaaggaagctgaaggcatggtgaaagtgttggactttaatagagatgggtttgtggacttggatgagttcatgattgtcatgaatggcatggaataagaataataagagaaatttggaagtggcatggagcatgatggtggttacctcatggatgcttttcttatctttgacactgaacagaatggtctgatttcagccaacgaactgctaagagctctgatcaatctagggtgtgataactgtagcccttacagagtgcatgcgtatga

SEQ ID NO: 68447 - DNA, 370 bp, Glycine max
  unsure (1)..(370): unsure at all n locations
aatatccngggtatacttgcctgttgagtacttatcacagttggctttcagtatgtgttcgacatttcgcgggtctgcggtgtacaactcgctttgatccggagccagtagccgaaaagttggattagttttggccaagtgagcttggtagtcatggagtgtgtagaagtataatagctggttaaacactgtgccttttactggagcataatcacggtcccctattgatttcctataatatggtaacatgatgaacaaagactngaagatcccagaaagaaaggctatcaactcacaggggtgcaataatcatcttgtgtgtgcctgttctcttaaagtttgatcaaaacatgggagtactgtgtggagt

SEQ ID NO: 68448 - DNA, 423 bp, Glycine max
  unsure (1)..(423): unsure at all n locations
catgcaagccttctcggggccatntcctgcgaaggcaattatttggaaagttatttntaccagtgggacactactcttaaaacaaaaatggcatacaacctcctcccataaatacaaacatcaatgtaaatttagagcaagcttatgcgcatatttccttacgaacattcacttgcacaagacattctattaactaagaaaaatgcacccatatacaatcaaggcagcttcgttacctagattatntacatgtacttccaaggtggtattgttacttacatcacacccatctccttggctaaatttacatacatgcatacttcaaagcatgtggggtacaaaanaatgcacatgtgcacatnctggtatttctaatacctatacatacacaaacttcatgatgaatcttgactatctacacaa

SEQ ID NO: 68449 - DNA, 372 bp, Glycine max
  unsure (1)..(372): unsure at all n locations
gctctgcctattacttatcagaggtgaatctgcatttatctacaaaatgtattttcctctgtttcatcaggtatgttgngcggctntntgtgaagagtagtgggaagccagaagatatattggtaaaactaaatgaaatggctggatatgctcctgatcaagatatagacatgttcgaggttagtcaatctgcatctcatgtacaattatgttccattgttgcagtatcaataaagtgcaataatgctttcattctgttatgcatgctcangagataaaatttgtgcctaatgtcatgtgtgaacgggttgacaagaaatccacattctttgggagtcaggtatacattatgagtgactatcattatattgg

SEQ ID NO: 68450 - DNA, 494 bp, Glycine max
  unsure (1)..(494): unsure at all n locations
cgcgatcttaagtcacctgcggcatgcaagcttacaaatctgtnttatatccaagcccatattataaatcaaatcaaatctagataagataagatntagatgaaataatatctagatgagatcaaatctaaataatatctagataagataagatctaattttgtagaataaaatagtctgcccacttcaagtccaagcccaattctggattcaagcccaatgcttaattaattcctgaaattagattaaaaacatcaaattagttgaatgggcccaaataataaaactgcctaattgaattgacaattaagactaatcagtacttaaaatggttcanaaaggattaagaaatagaagaaaataatggcacatcaggcattgagaggcaatgtgacctctcccaagacatttgaagcatttaatggtgctagtcctttcttggaaactagtcttaggggtgtatttctctatangtctacccttatcttccttgg

SEQ ID NO: 68451 - DNA, 448 bp, Glycine max
  unsure (1)..(448): unsure at all n locations
agtctgttgaccaacccagttgtgtagagaatgtgattggaacttgatttggaagcttcatatcccacctcgggtaaagctatttctctggaagctgtgctgtgattgtctccatacaaagactaacctttgatctagaggagtggagtgctctatatatgttgtgttcacttagcgaaacaaaaatagagaatgcatttcacatgtttgcaacttgtcaggtgaatgagggttgttgggagaagcttaaccacaagcagcgtgttgatgattntgtgctcgaggttgatagccccatttttaagcttttgcagggtttgagagatcaacaaagaaggagagtagccatgcttctgtggagcatctggcgtcgacgaaatgagaagttatnggaacaaccaagctgagtagaatgtgctgctattcaaaggggtgatgacactactac

SEQ ID NO: 68452 - DNA, 407 bp, Glycine max
  unsure (1)..(407): unsure at all n locations
agctngaaggtgtgtaacccaccattttttcatattagaacactggttatgtgtctactatcattgntaccatctctntttccgtgtgcacatctgtcataccctaatttcgtccggagaccatccgttgttgggatgcgaccctcgtttgaccacttcgaggtatttggaacccattgttaggcaatttgtgaagttccgtgacatgtcggaagtcaaagaaggcattgcagcacaatctgtgaagttctgtgacatgccagaaattaaaaggaagtgttagtgtgtaatccatatagtttcgtaacgttccagaaggcaaaaaagggatgattacgtaatccgtaaggttccgcaacattacggaaagaatacaagtatcgttatgaaattcgtaagtttccgta

SEQ ID NO: 68453 - DNA, 485 bp, Glycine max
  unsure (1)..(485): unsure at all n locations
atcttatctctcaattttgttggatcaagtggacttataatatttaagaagggggggttgaattaattattaatgtgtcttgactaattaanaattatccttcttaatattactagattcaattaggcttttactactaggttaagaaagtaaagaacagaaacagaaacttaaccaaaagtaaaatcggcaaataaaagtacatagtggaaattaaagagtgtagggaagaagaagacaaacacgagatttatactggtttggccacaacccgtgcctacatctagtccccaagcaaccaacggttcttgagatttctttcaaccttgtaaaatcctttacaagccanagatccacaagggatgtaccctcccttggtctctntgaacaaccaagtggatgtacccttcacttgaactgatccacaagagaatgcaccctctctgttctncgtataacaacctaagttgatgtaccctctactt

SEQ ID NO: 68454 - DNA, 399 bp, Glycine max
  unsure (1)..(399): unsure at all n locations
catgcagctatacgnctaggatgtggttgtgactttttcaatttttacacaagtcttgcacttgccacattggtacaactccctccatcaatgatcatcatgcaaactttgccattgatcaaacatctagtgtggaaaatgttatctctttgactgtcctccatagacttcaattgatggccaagtaaccgcctaatcatcaacaattctccctccggtgatttctccactttttcttcatcatcctcactctcttctccctttctaacttcagaatcactaatgtactctccgtctctaagaatcatggctntcttgatagggcactcatatgcataatgtcccaagccttggcaccgaaagtacttcacatcccgacttttcttgacgattgttctt

SEQ ID NO: 68455 - DNA, 485 bp, Glycine max
  unsure (1)..(485): unsure at all n locations
taagcatcgtcatggtggcgagacaccatctttttcctttttattattggtttcgagtgggtgacgacgatgttttgaagtatcaatcatcgataacatcccttaagtgttgatgccttgtggattcaacttgagttggccaaaccgggtgacacccgcaagatgactttaatggcttgcaaagaggatgagtacccgttcatgcgtcctgcccctggcggtcccccttctatgtctactggtgtatgttcgaagtcttaaatctgattcttcctctgaataactttcaatgtgacctcccaactacaccccaatagctgggcaatggtgatggctttcgagattntatgccttttttttcaacattagacctagtgttcatgtgttcacacacttttttccaatgaagttgattangaagaatggctgggtgtcgntgaatagtactttcaagaagatgttcgagttcgactcanacacattat

SEQ ID NO: 68456 - DNA, 461 bp, Glycine max
  unsure (1)..(461): unsure at all n locations
tatctggtagtggaaggagagtccttctatatgatgagtactcatacaccgcatgtattattagaagagcactgcgacataaaattctgggaggatctagaagctttagtccatatggaataccattacgagaatatatatttcttaggatgggatctaaatggtcatgtttggagaacatctanaggatatgaggggtcatatagggtttaccatctacgataatgaaatgcagaacgtaaatcgatcctagattcttattagctcatgacttccaatatccaacacctatatcttctttttggtgttgctgtgtccgcttactgaactaatgaaattaattgtgtttttgctggtgctggctatacaatacagaactgcatgttttaatgggattcccaactatctttgttcctcagctatctattgggttggtttatgactctgcctccttttacatt

SEQ ID NO: 68457 - DNA, 355 bp, Glycine max
gtagaagctcatagaagctgtcctgtaatctgtctccataggctaggctgtagtcttcatcatgaactattttttgactatctgttaattctctctctctctctctctcacacacacacatatatacatctctcagcaaactaaggctgaggatcctttttgtgtgcatattttcatactcaaacatttctagtgtaactacagcacaaaactttattccattgtttggtgagaggggtccaattaaaggggaaagaaccccgacttatatcttctgatcattctactaataattatatctgctgatcattctactaataatactgctaaagccaatatctagaaacaattattt

SEQ ID NO: 68458 - DNA, 466 bp, Glycine max
  unsure (1)..(466): unsure at all n locations
agcttgtactatacacatatatgattcttcactctttctctntaagtgatgcttatagtgcttcttaattgtatctgtagaccattttcttcttcgtattagcattattatcattaattctcaaaaaggttttttatgtggcaactttagtgatgcgtttcccattgaacgaagcaattatgtgtgtcatatgccaagaatataattggttggcttatctttgagactccaccacaaaaggaaagaccttttccacatagttcaacacttaccaggttttggaggcccacaaatgtatacatgtatggaactttagatccatcccttgaagttcanaactgcacactacaccggaggtaacaacataattggatgttaagtgattttctcaacaagcnttcatatttacttcttacttttacgtatgtaaataacgtattcaaatattttaattttttgagtaaaa

SEQ ID NO: 68459 - DNA, 423 bp, Glycine max
agcttatcaacgtgtgttcatcaaataaaatattcaataaattatttaaatgaagaaagagaaaatcataaaaattacattcaaattaaaattattataataaaaaatataaatttatcataataattaagatattaatgcgattacggataaagtgttcatcctgtgaattaagtgaaaaaatttacttatttttatattaaaaaagatcatgactatgtgcaatatttcattagtaatttttattttgatatattgacgtatgcatatcaatgtctaaaagaaaattaatatttttccaggtagaaataaaatatgaataatttatttgcttaaaattaatctagacattaattctgtgcataatgattatgttgatttactttgcattttttatgtaattaaatatatattaattatata

SEQ ID NO: 68460 - DNA, 436 bp, Glycine max
  unsure (1)..(436): unsure at all n locations
cccttaagaagattcctaaagaagctagagcttagctacacatactctctctaatagctaagctcacctccttaagaatggaagctagagcttagctacacaccccctataatagctaagctcacccccatggcaaaatacatgaaaatacaaaaaaaatccctactacaaagactactcaaaattccccgaaatacaaggctaaaaccctatactacttgaatggccaaaatacaaggcccaaatgaaggaaaaacatattctagtattttcaaacataagagggctcatacttagcctatgggctcaaaatctaccctaaggctcatgagaaccctagggccttcccttggatctctgacccaatctacttggagtcttctatccaatgaccttgtggngtaggatngcatcattccctccaccttggaaagga

SEQ ID NO: 68461 - DNA, 450 bp, Glycine max
  unsure (1)..(450): unsure at all n locations
agctcgccacccagctcgcctaagcgagcaatgttgcttcctccagaagcaacaaccttctggaggaatcttctggagggcccaagtgggcctggttgctattttcacccccatttttactaaatacaccccctgcccttttttggtgattctnttttcgtaaagttacggaaacttacgaatttcgtaacgatacttgttttctttccgtaatgttacggaaccttgcagattacataatcatccctttntggacttacggaatgtgacggaacctcactaattgcgcaacgatgcttcctttagatttccagtgtgttacggaaccttacggattgtgcatcaatattttcttttgattctagcacgtcacggaatatcacacattgcctaatgatgggtgccangcaccttnaaatgaccatacacaagttgcatgccaccaagcac

SEQ ID NO: 68462 - DNA, 424 bp, Glycine max
actcctctctgcctgaaccaatgagctattgaaggagaatgtgatggttgtatttagactagtgatgaaggttctggaagttggaaccttgttggacccaagataacacgatgatgcatcaagctactaacattaaatgagtgcttactgggaggcaacccagttcatctctccgttttctctttttcagttcgtatctcttgcatgtagttaggataggagctggagagtgtgattaatttttcatcttgtttagtagagaacaagggggattttaagcctaggtgaagagacagacagattgattgatgccgtacccaagtcaaatacacattcaaaatgcagcatctaagatgtgatccacggtcgtttcccaacaagaaatggtcaaccacatgtttataacagatagtaatataacagt

SEQ ID NO: 68463 - DNA, 202 bp, Glycine max
taatgacaatcacagaatgcacgccactaaacggccgcgactaagacgccatcttctaacattaatagatggctgtctcaacacaacatggagagaagattacatcactgccatcatttgtcttaccaaaatccatagaactcttatcctctcaatactatagaagactaaactgtcctgaaacctgatggtggtggctgca

SEQ ID NO: 68464 - DNA, 441 bp, Glycine max
  unsure (1)..(441): unsure at all n locations
agcttatgattataagaaaaataggaaggaagatatcatggagcaatgactcaagacacaagttaatttgaccaatgaagaaagtagtcataataataaaagcaaacaaggacgaggtcgtggacaaggacaaggacgagggtggaggccctatgacgacaacaacaacttccaaagaagaggaagctcaacaagaggtcatgggcaaggcaactcaagatctangtatgacaagtcanatctacaatgttataattgtgagaagttnggccattatgcttctgaatgtaaaactcatagcaaanatagagttgaagaaagaagtaaggaaagtgacaccttattaatggcttgcatgggtaatgaaataagtgaagacaatagatggtaccaagacattggtgcaagcaatcatatgtgcagaaanagagcatgttcatg

SEQ ID NO: 68465 - DNA, 371 bp, Glycine max
  unsure (1)..(371): unsure at all n locations
agctngttaatgaactgaggaaaaatcaagaacatgcttgtacgcacatcgttcgcgtgtatgatatccagtccacaaggtttgaagttgaggagagcttctaccctataaagcaacgtggcggacaaaagtggacagtaaacatgaatggtcgtcattgtcaatgcggaaggaattctgcgcttcactatccatgtttacacattattgcagcttgtgtgtacgagagcatgaactactaccaatatatagatggtgtttatacanacgagcacatcttaaaagctacttcgcacaatggtggcctcttgaaatgaagcatctattccttcctctgatgacgcatggactcttatccctgacccaactac

SEQ ID NO: 68466 - DNA, 357 bp, Glycine max
  unsure (1)..(357): unsure at all n locations
agcttgccacccagctcgcccaggcgagcagggttgcttcctccagaagcaacagccttctggaggaatcttctggagggcccaagtgggcctggttgctatttacacccccatttttactaaatacaccccactgccttttntttggtgattcttttttcgtaaagttacggaaacttacgaatttcgtaacgatacttgttttctttccgtaatgttacggaaccttgcggattacataatcatcccctttttgacttacggaatgttacggaacctcactaattgtgcaacgatgctttcatttgatttccggtgtgtcacgtaaccttacggattggtgcatcaatatttctt

SEQ ID NO: 68467 - DNA, 311 bp, Glycine max
  unsure (1)..(311): unsure at all n locations
gagcaagagtgatgctctcanagctntatgccttccatctttngaaccttaccacaaatgttcgaatttggaaagccttgaagtcacagcttgagggtgcaagcttgagcatgatgaagaaagtgctgcaagctgatataaatgtaagaatcactaagtcaactcataacgagcttttttattatttgataacatactacttgagcattttttcttacttaagtatgaagtatcatttgtaacttcttaaacatgggtacttaaaatgttcatgtatttgttgtgcaagtggcatgatgccatatatgttc

SEQ ID NO: 68468 - DNA, 242 bp, Glycine max
tatcctgaagaaagacgacaagattgagattgccacggctgctatggaggctgatatcgtgtgtgaagcacaacgataaggcgacttgatgatatatataatatccgacctcggtaatcttcggattctgggggatacgatttgtgtttggccgctggatggatagacacgtggatggatgagacttaacttgggtacggtcgcgtggcgatctcttgcactgatccatgtgaaagtggtat

SEQ ID NO: 68469 - DNA, 323 bp, Glycine max
tgagagcgcttgatcgtggtgtaactgtcagccttgcgttccttcaacgttagcaagatgttgttcggtttcaccatcgactttgtcatatcagccataattttcttttcttcctgtagcaatcgcccggcgtatggatgtccaactaaggacttcggcaatccatgattatgaatcccacagagcaacttcaccatccaaccttacgcttcacgcactggttttccacgaagcctgaagggacaaccacatttcctactcccggtgttttttcttacgaattctttattctacactggtacgtaccacttcattcacaccca

SEQ ID NO: 68470 - DNA, 422 bp, Glycine max
  unsure (1)..(422): unsure at all n locations
atgcaagctacgggatctagtccatatgttgaacaactttctgtgtttgttgccctttagtggtaccaaagacatatttgctagtcaatgcggacttaaattgtcgtcatctcgacgcaaccgttgacataaccttcggcttcacctttgcggcttctgggatatcaaactttgcctgcatacatatattagttactttgcattctgtcaatgtaaagatggactctcaaaatataacatgaaaatatattanacacaaacatgaggacttactaatatgtcattccacactatctccttaagcgtttcatgtacatacttccaattggtgtggataatgggaaccttttctcgcgcgactacccctagatagctgtggaacctttcacgcataggttccgatgctctcccgatagcgggat

SEQ ID NO: 68471 - DNA, 429 bp, Glycine max
  unsure (1)..(429): unsure at all n locations
ctgcttctacatttactttgttcctcattagtcatcacttctttatatttgtcccacaatcattttctatacaatttattataggagattcaatagagaactacattttttactctaaaaatagcgactcaatactatttttagtgggttntgtaatgttggttgcgaattggtaatgtatgatctataatctatgtatgtatgtgtcagttttgtattagggatgtgaatatttaatcttttntttctcccaagatatgtgacctatttcaatactatngttttttataagaaatttttttataaagtttctactttttaggaaaataatcccttttagtctttgtacaagcccttttggaatctttttaaaatttcacttttggattctttgcaattatgtaatctcttttggccctactacaaatt

SEQ ID NO: 68472 - DNA, 437 bp, Glycine max
  unsure (1)..(437): unsure at all n locations
cctgcatgcatgcaagctataaccaaggggagatggaccatttcaagttcttgaaagaattattgacaatgcttacaaagttgagctgcccggtgagtataatgttagttccaccttcaatgtctctgatatatttcttnttgatgcagatggagaatccgatttgaggacaaatccttctcaagagggagagaatgatgaggacatgttcaagagcaagggcaaggatccacttgaaggacttggaggacctatgacaatggctagagcaaggaaagccaaggaagctcttcaacaagtgctgtccatactatttgaatacaagcccatgtttcaaggagaaaagtccactgttgtgagttgtatcatggcccanatggatgaggactaaatgacaccacttttgctcaattttagagtgtntagtttgtctaaat

SEQ ID NO: 68473 - DNA, 492 bp, Glycine max
  unsure (1)..(492): unsure at all n locations
ctgcgcgattggtcttcgccagtgaaaggatcgaagtggatctgattatatgcaatntaatcatcctgcttagacgaatgagataactgnggcaaataaagagggtgaggatgagggagaaacccatgatgtgactgccattcctatacggccaagtttcccaccaaacccaacaatgtcattactcagtcaataacaaaccacctccttacccaccacccagttatccacaaaggccatccctaaatcaaccacaaagcctgtctaccgcacttccaatgacgaagaccacctttagcacaaaccataaaaaacaccaaccaagaaatgaattttgcagcgaaaagcctgtangattcaccccanattccggtgtcatatgctaacttgctcccatatctacttgataacgcaatggtagccataacccctgctangttccctcanacccccatttttctgaagatatgactcgaacgcaacatgtgcata

SEQ ID NO: 68474 - DNA, 376 bp, Glycine max
  unsure (1)..(376): unsure at all n locations
agctagaaggtgtgcaacccactcatttttcatattagaacactggtaaggtgtctactatcattgntaccatctctttttccgtgtgcacatctgtcataccctaatttcgtccggagaccatccgttgttgggatgcgaccctcgtttgaccacttcgaggtatttggaacccattggtaggcaatctgtgaagttccgtgacatgtctgaagtcaaagaaggcatngcagcacaatctgtgaagttctgtgacatgccagaaaatagaaggaagtgttagtgtgtaatccatatagcttcgtaacgtttcagaagggcaaaaatggatgattacgtaatccgtaatggtccgcaacattaccgaaagaaaaca

SEQ ID NO: 68475 - DNA, 466 bp, Glycine max
  unsure (1)..(466): unsure at all n locations
aaatcttatctcttcattttgttggatcaagtggactcataataattaagataggggggttgaattaattattaatgtgtcttgactaattaaaaattatccttcttaatattactagattcaattaggcttttactactaggttaagaaagtaaagaacagaaacagaaacttaaccaaaagtaaaatcggcaaataaaagtacatagtggaaattaaagagtgtagggaagaagaagacaaacacgagatttatactggtttggccacaacccgtgcctacatctagtccccaagcaaccaacggttcttgagatttctttcaaccttggtaaatcctttacaagccaaagatccacaagggatgtacncctccttggtctctttgaacaaccaagtggatgtaccctncacttgaactgatccacaagagatgcaccctctcctggtctncgtataacaacct

SEQ ID NO: 68476 - DNA, 456 bp, Glycine max
  unsure (1)..(456): unsure at all n locations
aagcttggcctgcaaggtctattcattagtcttacaatacanaggataggaatctatgatgctgtgcaccaccaccattctcctgagcattgttgactggagtcaaagaaccactctttctggagccactatgacctgtgattgtccttcccatgaacttccctgccttgctcagtccactaccaacggctccaagaccgctctcgacaatgccaactccagcaccgatgccgtttccaaccagcccggctccagcaccaatgccactttccacatgaccggcacctgcaacaacaccagtaccaaccagtccaacaccagaccctaccactgatactgctccatctagtgcatccattgtgcttcctatcactcccgcttctttangattcgtcctttcttctagtatctacttttctgcatctaacgcaaccagctgctcttccttgttaactg

SEQ ID NO: 68477 - DNA, 413 bp, Glycine max
  unsure (1)..(413): unsure at all n locations
agatattaatatntcagctcaactgtgagagcanattatctctatactaaatctcataacctaatactatggtggtaaccggtcagagttggttgttacatgttacaagatctctccgaagcatatagatgcaaccataatgcttacaaacaggagtgctataactccattctgttttcctattagttattatgtataaaagacctgttatccactttcgtatgccctaaaagcttatcattntatgaggtgcttaagcccatcaccttctcaaccaagcttgagcattngatcaaccactttcaagctcaactgcaagaagcaataagcagtaagagttactaaccatatcggctctatcagaaaacttgtgagacgcataacatcttatttatcaattttatgatggactg

SEQ ID NO: 68478 - DNA, 390 bp, Glycine max
  unsure (1)..(390): unsure at all n locations
agctatgattcctagaaaaatcatgatntctttgttagcccatccacgttacaagcctaataaagtccttagtgatccacattatgcatgtatgatagcattgactgagatgatgtgcaaagttgaaaattttactatttagttgttataattcaaacacttttaccgagacacttgtaggattgagagaaacactagccttgcgaggatatgaagttggtgattattcctagtgatttgtcattcttgctaaccatttcattngaagtacatcttgttctactcctttcatgaacttatgacaattgtaaacttgagaatagaccaatgaagctttttggaatgtatgtagtcatctcatgaatggtgattggtaaactctaaactttt

SEQ ID NO: 68479 - DNA, 463 bp, Glycine max
  unsure (1)..(463): unsure at all n locations
ctcatctcttcattactttatgcacccgtagtggtccacattgtgtttctgtgcatttgattctcatnttgtttactttgtataccccctgttgacatgcttaagccattntacttaagccatttctcgcttaacttaaaaataaaataaatttccaccgaacgtttgaattgtattatctgttaacttcggttaaaataaattccgaccgttcggtcgtgccgtaaccacgttggaaatcaaaaaagaggtaaaaataatataataataaaaaaaaaacatcttttagtaaaataaaccgganaatcaatcggacgttttctctttgggatttctcattcttaatcgaattgagtaataactaaagtgaaactaaggctaaaatcaactcgcctagtcaagctcgtccacaaaaatagggtttttgaagttgtcatttcaatttctcactataagtaaaatg

SEQ ID NO: 68480 - DNA, 446 bp, Glycine max
  unsure (1)..(446): unsure at all n locations
agcttatgcgcatatttccttacgaacattcacttgcacaagacattcttataaatcagaaaaatgcacccatgtacaatcaaggcacatccattacccagattatttatatgtacttccaaggtgtatttgctacctacatcacatgcacttccttggttaaatttacatacatgcatactcacagcatttggggtaccaaaaattgcacatgtgcacattccggtatttctaatacttatgcatatacaaactttgtgatgaatcttggctatctacacaataaggtgatacatttcatgctttattcaagtgtttttgctacctaaagccgcatgcgaattcaagtatantttcctttgctgacataaattgtattcacaataaaaggtatatatatatatgttttttgaatggatttcattacataacatgcantatgtata

SEQ ID NO: 68481 - DNA, 481 bp, Glycine max
  unsure (1)..(481): unsure at all n locations
ctagccttaggttgttccatgttgttgctccccatatctctaagacaagagatngngcttaagtccattaacatatagaacattttttatttgaatcttttgcagacttccaatgtttccttctccaacaattattcccttatttttgtctccaaaagtgacaaatcttcttcctttgacacaaagtcagtaagtctggacttgtcacctgtcatgtgcctagagcagtcactatccaagtaccatagtaagtctcttgcttttaggcacacctacaagacaaaatcaattagaanaaggtggtacacaattgaggttgggtcaaatgggattaatttccacaattaaatctttaagaatccaaacacatttacctctaagaacttcanatctcctaaacatagcattataagatgcgtgtcctcttttcatgcaataataacaagtctttgcttaagcttagaatgactatgttttcttt

SEQ ID NO: 68482 - DNA, 79 bp, Glycine max
  unsure (1)..(79): unsure at all n locations
tatcnataataacatcatatattgtatgctnaacgaacttattaatcataagcttggacttccactgtttattttactc

SEQ ID NO: 68483 - DNA, 360 bp, Glycine max
  unsure (1)..(360): unsure at all n locations
agcttaagaagtatgtataatattctnttgaaactataccttggatacnaataatgatgtcttacttagagcattgtntaacttactttttagtgtgaacgatacagtaatatacagacatagattcattnttgctatctacttgactcanataatttatttgcggggatagaataccgagacaggttctgcacaaggagcttacaacactgctccatagtttagagggtatgccatactantacctttgggtaagaagcattgtgcttatagcttggtacattattctaatgtcctgttatatgaaagcaggagtgtgctttttgaattgaatatggacaatgggttgaagagcaagaa

SEQ ID NO: 68484 - DNA, 502 bp, Glycine max
  unsure (1)..(502): unsure at all n locations
ctctgactcctggattcttggaacttgcttaactctggattctttggcattatcaaaataatcttggaagtcattgcttccacatgatttaaaatgaatcaaattttacattttaaaatttaattttctttcttttttttataattnttttgtcaaatgcaagtagacccgctaagcccgtggactatagaagatgagtgtgagctcaaaaaaaataagcttattaggaatgtacgcttcatgaagtacggcctttgtggttgcgggctntgcagggcacacttactcgtatacccaactctaattgctagttagcacttctctctctctctccacaagagagaaagaaagaggaanaaaactttaaaaaaattattctctatccattttttataattagattaaaaaatgaagaattaagatgagaaataactaaatctaactcatgtattgaacctcttgtgatctaccctaatagcctactacaataatagatgccact

SEQ ID NO: 68485 - DNA, 198 bp, Glycine max
  unsure (1)..(198): unsure at all n locations
ccgatatagacgcctgcangcgcatggatgctcatcgcattgatggaaaatagctaacagattacaaccccctgatttccggaatacttactgacaaggtgcgagcgcgaatcgttatagatgcacggaacgtatctgaggacgatgccgattgtgccgtgtaatgatatatatacgatgaggttactatgaatctga

SEQ ID NO: 68486 - DNA, 405 bp, Glycine max
  unsure (1)..(405): unsure at all n locations
agctattatatatgtaagaccatggttacttattcttgttgtttagtgtctttatctttgncataccctaatttcgtccggcgaccattgtctgatgacatgtaacctttgctcgacctctttgaggtacttggcacccattgttgcacaatacgtaaagttccataacatgcataaagtcataaaagagcattgttacacgatccgtgaggttccataacattccgaaagccacaataggaatgattatgtaatccgtaaggttccataacattacggaaggaaaacaagtatcgttacggaattcataaattcttgtaacgctatggaaaaagaatcagcacaaaacgaagggggtgttttagtaaatatggggggcatatagcaaccagcccacttggcctt

SEQ ID NO: 68487 - DNA, 487 bp, Glycine max
  unsure (1)..(487): unsure at all n locations
ccgcgacacctanattcgatgtacggcaaatcctcatgcgggttcagttggaacatggatgccagagtggcaatggcatcggccatctaattctccactctggggatgtggtgaaaggatacgtcatcaaagtactctatcagttttctaatgtacgcctggtagggtatcaacttatgatccctggtctcctattctcctttcaattggtggattaccaaggctaagtccccatataccttgagcaacttgaccttgaagtcaatttccgcttggatcccaagggcatacgcctcatattcagccatgttgttcgtgcagtcaaagcccaacctagtcgtgaagggtatacattgatcgttgggagtaccaaaagcaccccaactcatggcctagtgcattagacgccaccgntaaccacacaatccattttgccctatcctcatcctccacctnnctctcaaacaaggtcatgaatgtctcattc

SEQ ID NO: 68488 - DNA, 380 bp, Glycine max
  unsure (1)..(380): unsure at all n locations
atgggggacactgaagtcagntgngttgcacaaccctcattgaatacatctggtggtatcttatgcatttagagtgagaaatcttttgtgctagagaggaaggtcattgggaatggattcatactgctgataggaatgtggcttcaagaggccgtgcgagttcacattgtcaacatttactcgccctgcgatattcagaataaaagattgttgtgggatagttntaagcagctgaaaagccccacatctgggggtctttggtgcatagtaggtgatttcaatagcattaggcagccaacagagagaatgggtgtatgccacagagctgtggaagacggtacctctatggagttcaatgattggattgcggagttggaggt

SEQ ID NO: 68489 - DNA, 405 bp, Glycine max
  unsure (1)..(405): unsure at all n locations
ggtcttcgccagtgaaaggatcaatgtgggtccgtattgaggcaaatttgatcatcctactaggatgactgagaaannactgggcaaataaagagggtgaggatgagggagaaacccatgctgtgactgccattcctgtacggccaagtttcccaccaacccaacaatatctttactcagccaataacaaactttctccttacccaccacccagttatccacaaaggccatccctaaatctaccacaaagtctgtctaccgcacttccaatgacgaacaccacctttagcacaaaccanaaacaccaaccaataagtgaattntgcagcgagaaagcctgtagaattcaccccaattncagtgtcctatgctgacttgctcccatatctacttgataattcaatg

SEQ ID NO: 68490 - DNA, 468 bp, Glycine max
tgcagcttcgaaggagagagagaccgtcacgatctttatcatggtcttgaatgaggagttagctgcttgctcaaggtcctagagaaacttgtctcagcgtttatgcgagaaagagaccaacatgttatccatcgtccgtcagtacctagaagatattaatctagccactacccacgagcaccaagtggtggacgagtttgcccgtgtgttcgcggaaaatgatgctagaggaagggtgatcgactcgttacattaataggcaacaatatggatggaccgattcgctcttactttgaacgggagttaagaatcttcccgattgctagccaaggtcaaagcaatggcggacacttacttcggccccgatgagatccatagacttctcagttattgtcagcatatgatagattttatgacccatataattagaaaccgcttggaagtttgtattgtcactcacatcttgac

SEQ ID NO: 68491 - DNA, 402 bp, Glycine max
  unsure (1)..(402): unsure at all n locations
tcatcttggctgctcattagtgctactaccccatcaattatcaagagcatatnttccccatgatcatgcacctagtatgaanagagttcttcctttgagtttcatctctatcctttcatgcactccccattaacctcctaaccatcaaaagattaccttccaggggttgtgcatcacattcactttcactctcactagaagaactagaagagctataagaagatgcactagtgatatccccattaccaagcacaaccatagtcctttgtttaggacattgggagacaatatgaccctttcccaaacacttaaaacatctaatagaatttgccttggaagaagtgggagtagggttagaattattttaaccaaaggcaacaccaacttcatgatatttgaatg

SEQ ID NO: 68492 - DNA, 510 bp, Glycine max
  unsure (1)..(510): unsure at all n locations
gcgatcttaagtcacctgcggcatgcaagctngaatcatctaccccatttctgacagcctgtgggtgagtccagtccaagtggttcctaagaagataggcctcacagtgatcaagaatgaaaaggatgagcttatccccacaagagtgcagaacagttggcgagtctgcattgattataggaggctgaattaggtaaccagaaaagatcattntcccttgcctttcattgatcaaatgcttgagcgcttggcaggtaagtctcattactgctttcttgatggtttttctggttatatacaaattcatattgctcttgaggatctaganaagaccacattcacctgtccctttggcacttctgcctatatgaggatgccctntagcctatgcaatgccgctggtaccttccagcggtgtatgtctagcattttcagtgactatttagagagttgcatagaggtggttatggatgatnttactggttatggattctctttngattacatgtt

SEQ ID NO: 68493 - DNA, 402 bp, Glycine max
  unsure (1)..(402): unsure at all n locations
tggatgagttagacatacccattctgttntatggttntgtgatgatgtttatatgctgaaattgcctatggaaactgttagagatgaagggtagagttaacctagggttagaaagtgagaatgtggtgttgtgagtggaaaaagagtgaggctttgagagttggaaggctaagtctgaattctgtggtaaatggaggttaaaatgagttaatcctagcttgaaatgtcatttanaacatgtgagaaaggttaggttgtgctagagggaaaaacaaatgaccaaagtgaacaaagagccatttctggngcaaaattgggtgttgaagagntcaaatttgattctgttggaatttaggtgtaaatccagtttgtgcaagtttagattggatgtatggactggtg

SEQ ID NO: 68494 - DNA, 313 bp, Glycine max
  unsure (1)..(313): unsure at all n locations
agcttcngattcttcttctattacacagaatatttcatgctaaagctatttttggagcgtatgaacctacctctacatcaagggaccttcaattccatgtgagggtggacttctcctcacttgaaatctgagggtgttgggttcttgggagctataatgggtagttctactaggtcattgcatttaggtcgttcgttgtgaaggaaattgttgtaaatcatgctaaaacttgatatgtttaatctaagcaaaactgccgatgttgattgatggttaaacaatgatgctttgatgtatatgtatgcctaaaatg

SEQ ID NO: 68495 - DNA, 424 bp, Glycine max
  unsure (1)..(424): unsure at all n locations
tatagntggggtctgagagaacatgctctaggttctatctccactccaagcaggcctccggagcattcttttctttaaagggaggaacgctgagtctaataccatcaattcggttttgtctaggaacaccctcattccctcttctcctcctttcttcttcattatgatctctattctccattagatccaacctctcatggagcgcataatctctctgtttcattaacctctccaaatgttgcatcatagcttgcatttggaatggcgaatgccccactccatcattacgattagtacctgacatctcaatcaaacaaatctaacgtaacaagacaattatagttgttgtttgaatacctcacccacttaagtgtatcacacatatatggcttatctcgtatgaaacactctcgcctttccactc

SEQ ID NO: 68496 - DNA, 273 bp, Glycine max
  unsure (1)..(273): unsure at all n locations
tgcttatgctacnagcaaatgtcgttgatgtcgtttgacagagcacatctatgtcatatatattcacatgaagagatgaaagtacagttccccatggaccaaaatatcgtaccggattggtgctccacatttaattctaactcacggctgtcttgatactcttacattactattgaactagtgtgtgcgcgaatatctcagagcccatattaaaaaattgaaacatggagagctttattatcgcacgtttattcataaatcatttctctactg

SEQ ID NO: 68497 - DNA, 295 bp, Glycine max
  unsure (1)..(295): unsure at all n locations
aaatcgctaacttggatcgggggccactactatgatattattccctatgtcgataatagcggtaactacagaaacactacggtgctacgaagcccttgataactactccccaagcatcatcagacagaatcattcgctaagggggacggaaatgttcattaacaagacaacaaaactgtgcacgccattgaaaatgacacataattgcntgaataccttttcttattgattgaaccttattaaaattgatcaaactttgcgggtttatatcatattcaacgaatccttatcttga

SEQ ID NO: 68498 - DNA, 383 bp, Glycine max
  unsure (1)..(383): unsure at all n locations
actcttgctcataganaatacanacaacaataactgataactccgatattcgattgagtctcttagtatatcaagacgctcgagattcataacagatgctcttagtacattcaaacgacaagaaatttctacccggatgtccgattgagtctcgatcgagatgctcgaaattgaaaacagaagctcgtatcagatgctaaccactagaacttttaactccaatatccgattgagtcccgtaatatatngagacgctcgaaattgataacagaagtcttgagcaaattcagacgactataactcgttactcggatgtccgaatgaatcccatactatatcgagatgctctatattgagacagaatctcgcggcnaatgcaacca

SEQ ID NO: 68499 - DNA, 499 bp, Glycine max
  unsure (1)..(499): unsure at all n locations
cggcgctnggctcgcggagaagaagaagaagctngacagataatatgaagcaagaacccggaagaaccaaaatggcaacagcaagtgcttcttccagaggaggaggcgctctntataattntttgttaaagggtaaaatggcccattcattaaaattgctaggtgcaccagcaatattgctgggtgcacctagcatttccctaaacatagctatgattcccaagtgtgagaggcccaaatccatacatgacttgcgaccaatagccctttgcaatgttttatacaatattttttttccaaagctttggcaaataggctgagaggcattattgngaagtatgttaaggatgagcaattcgctttcatcgaagggagatcgattctagacaatgtgctcattgctacataaatcattcactatttnaaatcaaagaccagaagggaataggacaattggctctatagattgatattaacaacgcctatgaccgtgttcact

SEQ ID NO: 68500 - DNA, 476 bp, Glycine max
  unsure (1)..(476): unsure at all n locations
gctcagagaaggagtccacggaggatatgcttaccacctcanatgactggatatcggttnctaacgactcctctgcggcctctacatattgcatagaggatggacaactcaccaagatgtcttcctcgcctgacacgatgaccagatgccctttcactacgaatttcaactcttggtggagtgtagagggaacaactcccactgagtggatccaccgacgttccaacagacagttgtatggggggttaatatccattatttggaaagtgactttacacgtgtgagggcctatctgcactgtgagatcaatctcttccctaacctcttggcgggtgccgatcaatgcacgaaccaccattgaactctgctttaagtgggaagcatttgatggatagttctccaaagtgctcttacgcatcacgtttaaactggaaccattatcgatgagcactttggctacgatattgatcatacac

SEQ ID NO: 68501 - DNA, 403 bp, Glycine max
  unsure (1)..(403): unsure at all n locations
agcttgcactttttgagtcactcangacagctctaagtntacttcaatnggtgtctttatagaacttgtcttttcttaatacacttaagcaaactcataaatagggattaattgaaaaggcttatgatttgtgtttagaaggcttgtaataattaaagcatcaagggttntggactcaacaaatttcccataaaataagatgtaaaaacaattatcaaagagacattggagaacattcaccatacaaggatagagagcacatatgaactaatcaaactgaatggtacacagattgaaatcataagggactaaacaataaatatctaaacttcatataaccggttaaaattacctgctacaacaagtcaattatggtgattcatcgtgcactgcccatttcaaa

SEQ ID NO: 68502 - DNA, 374 bp, Glycine max
  unsure (1)..(374): unsure at all n locations
tgatggggacccggtgttgagagggtctaggatattggctacgtgggagtgcgtgagctcaagttgaaggtgggcaactggggatggtacgttaatgtttgatttgtggaagtgggagagttgatttgcgccatcgcccggtcgccacctagtaccacatatgacgggtcccataatccaacaagcttgatgtgagaaagcgtggaagagtcagtcttcctacttnttgttgttgaccacagagtgatacctggagatatgtcgcggtggtcaggagaccttgtggacgtcaggtggggtgctattgcccaaaaccaagcttgaccaatcccgacccaacccgagcatagtcagtcagtgagaacctgtgacgt

SEQ ID NO: 68503 - DNA, 468 bp, Glycine max
  unsure (1)..(468): unsure at all n locations
agctntcataagtgaaatcaggtgcagccatcttctctaagagtcctctcacaaggtggaggttgagccatgttctcagtatgaaaattagtagtcgaatgctcaaaatcaaaatattcagaatcaccagcaacagaatgctcaaaatgctcacaatgctcaaaatgcatagaatgatcaggatgcacactatgcctaactaatctatgaaagggtttatctatttcaggatcaaagggttgtaaatcacctgaattgcccttagtcatgcactatatgcagcanataatgtgttctcaaacaagcactatgggagggttaaaactacaactatagtcaaatgatatccaaataagctgaaatgntgtgagcaacaccctaaaatcatgcanagatagcacaaaatatttcaaacaaaaattcaaagtctaactatgaaaactacttaagcaaagtttagaataatag

SEQ ID NO: 68504 - DNA, 456 bp, Glycine max
  unsure (1)..(456): unsure at all n locations
taagtgacctccattgtcaactctaagcttgattntcacttcattttcttgctctattctcactcgtagtttcaaaaccttattntgcactcttgaaggttgcaaacttgaatctaaacttccttattcctccttttaaattttgtggagcctataagaggtaagggggtctctccaactcttgaaccgtatgcttttgttgaacttccttagaaatgttgttgctctgaaaatattgagttgctgccatgtcttgaatttgagttctgagtttctttccttgagtttttgatgccaaaaatgagttctttgcatgtcgaaacgtaaagttagcctataatttcacacaaatcaagatttcctaacaaaagttacaaataaaacaaagttatagacctttaataaaatgaaaaatctgtcacaaatttggaatgggagttacagaagtatggacta

SEQ ID NO: 68505 - DNA, 432 bp, Glycine max
  unsure (1)..(432): unsure at all n locations
agctnntcgtattgtttcgtttcacatgtttcatttatcgattaatatatatttatataaatnttcacatatttaattcaagattgaaaaattaattttagatcaataattgattttgaagtagaataattttaaataatttttgtattgattaataaaatntattttaaattttactaaactgacttccataataaaaatatattcaaatataaattacctcatttcaaaataaattttaactaaataaaattaattntccaacataaaatccataagccatctgcgccttatcacgcccatcaacatccaatcagccacaacatcaaaacgacagccaactttctgaaacctcagacatcatagccatgccttcacttcacaatcacgctcgaacccatctctacgttgtaacattattgtatttcttac

SEQ ID NO: 68506 - DNA, 502 bp, Glycine max
  unsure (1)..(502): unsure at all n locations
cctttatactaactcgttgactacaagttatttagtagtttattttgttgtatattttgtttaagatatttcanaaggtaaatgtacaatntaagaattttaattatatattttaatgtgaattagtgtcatgttttaattgtaattattatttgttttaattatattaattagtcattatttccaattaattactatgaatatatatattgaagaaagtttagagaatggagaggaaaccctatcttccttctctgtgtgagttcctaggttttctcacaaaaagagtttcctagttctgttgccccaaattaatgttgggaagaacttgttatatctagggggacttgcatattacatagataagtccttgaggataatataattntacacgtcttangtttactntatttgtattattcatgatcgtaaatcggaggtcttaaataatcaatttgtgtttcatcattgatcattataatggatcctaaggacaacatat

SEQ ID NO: 68507 - DNA, 483 bp, Glycine max
  unsure (1)..(483): unsure at all n locations
agctatacttctacaatctcccnctntntgatgatgacaacttctgatttcaagaaacacacacacacacacacactttttcctagtcgatcactcacataaatgtccattctccccctttgttattgaatttgtacttctcttataattaagttgattactcatgtgagttcttgatttaatccctatttctctccccctttggcatcaacaaaaagccaaagtacgtaacaaatttgaagcatacacatataactaagcatccatataacattcatggaaaaatatcaaccaaatcatgaagcaagaaccatgaagcaacaatcatgaatatgatatatttaanatccacataggtcaaaaacatacttaatatttgttcaaacataccatgcaaataaggaaatactaaatngttcanatatcataataatgaagatatttggataagcactgacatctatagtcctattctcttctatg

SEQ ID NO: 68508 - DNA, 483 bp, Glycine max
  unsure (1)..(483): unsure at all n locations
gctcagagaggatgcttcaatggagganaagatagagggagagaaagagagatgngtggagcacgaaatgaaggaagaanaagggagagaagttgaactttgagttgtgtctcacaagactctcattcataaaagttacaacaagtgttacacatgcttctatttatagactaggtaacttacttgagaagctttcttaagaaaacttccttgagaagattctttgagaaaacttccatgagaagctagaacttagctacacacacccatctaaaaactaagctcacctccttgacaaaatacatganaatacaaaaaaaagtcccaactacaaagactatttaaaatgccctgaaatacaaggctaaaaccctatattactagaatgaccaaaatacaaggcccaaaagaaggaanaacatattctaatatttacaaagaagagtggatccaaccttgactcatgggatcanaatctaccct

SEQ ID NO: 68509 - DNA, 419 bp, Glycine max
  unsure (1)..(419): unsure at all n locations
agcttcttataaacgtgacattgtgcgcaaatacaatgcctggtataccacaatataatggagtatgaggaaggcgtaatagaaccttaatggatatgattaggatgtttgtaatcaatctgactttaccccgatctttgtgaatgtatgccttgaaaactgaaatgtatttgttgaatatggttnctagtaagatagtaccaaagacacctttgaattgtggacaaatatggacacctaagctcctgcatgtttggggttgtcaagcataattatggattcataatctgtcagatacataattgtatgcaagaacacatcatgattattccattgtgtaaccacacaatcaaagggtatatgctttattgtcttaatcattagatgagatattttgatactgaaatgcatggtcattg

SEQ ID NO: 68510 - DNA, 346 bp, Glycine max
catgctccttcaactgcacacagaccttaatagtcgaagagtatctctgtgtaaccttcaccctacgaggacactgacataacattatcttcttctttgaggacaaagtatggcaggctgtgggcacgtaaattgtctgcccatcatacctttgatgcaactgtgatcgaatgcccatatcaactagatcttgacaagtattcaagccatcctatatcttgcctctgacatgttagagagcgtcccaatcacactgtcacatacgatattctccacatgcattaacatcaatacactgtctaacttccagatcagaccaatgccgatgacatagaaaatggacctc

SEQ ID NO: 68511 - DNA, 493 bp, Glycine max
  unsure (1)..(493): unsure at all n locations
cctgctgcatgcaagcttcaagaaaaggccatactcccttccaatatctgatttcaagcttaaataggtggctctgttcgtgtttgcacgcttagcgcaactctaaaccgcttagcgtgcattagtgaatttcagcttagcacatgctttcctcgctcaacggatgggctgaagcggtgcgcttcgctggatgacccttcgcatagcgcaatttcacaactcatccttcttccagattcttcctcgcgcttagtcaaggggtgtttcgctcaacggatggctcgctaagccagaagattggcttagcaagagggtgataatcaacacttcacagacttgcctattaacctganattgagagaaaatgattattacacacacaaaatggacatactaagtatttattacctatctttaacagaaagtaattataacactacagaataaccctaaattggaggagttngatacacattacacatgttttatacac

SEQ ID NO: 68512 - DNA, 335 bp, Glycine max
  unsure (1)..(335): unsure at all n locations
gcataagatgaatcgagncacatcactgtttcgtctactgccaaacatatttaggattgttgatgtcctttgtacttccagtttcaccttgacaaagatgtcatggaccatgttgaaaatctaaattgattcaaccccatatcctgcgtaaaaattcgcaatacttcgactgtacatcattcgcatgcatccatgtctttcattggttgcattgctcattgcattctttccttgaaaaaaaaaaatataataatataaaatgaacttattaaaaagaaaaggacgacgcttacggcgcccttaccgaactcgtactagagctatagttatgggtg

SEQ ID NO: 68513 - DNA, 461 bp, Glycine max
  unsure (1)..(461): unsure at all n locations
cttaaccaccgcagctgcagcttctatataagctgaaccattttatcaatattcacaagttgagttttatttaganaattagagcttttctcttttatcttagtgagagtgattctcctaaattcttgagtgattcaagaacaccctggctgtatcaaaggactttcacaacctttggtgttccctcgctggaagaggattttcttctttatctcacccttgtctttcaaccacaattccagaaaatccacctctacccagaattatctcgtggccgtaactcccattttacgcactcaaattaagtgattcttgagcctaaattgactttcaaaacgagaccttccacctcgttttggaatcacctcatttggagccctggagcttcagttattgccatctctatatctctggtcagccaccacttaacctaacatttaccatccattcaatcttttatg

SEQ ID NO: 68514 - DNA, 479 bp, Glycine max
  unsure (1)..(479): unsure at all n locations
catcaagtcaagttgaaatatggaagtaaccatcctgcatannatgggcaaaagatgaatcgagtcacatcactgcttcgtctactgccaaacatatttaggattattgatgtccttgttacttccagtttcaccttgacaaagatgtcatggaccatgttgaaaatctaaattgattcaaccccatatcctgcgtaaaaattcgcaatacttcgactgtacatcattcgcatgcatccatgcttttcattggttgcattgctcattgcattctttccttgaaaaataaaataaaataaaatgaacttatcaaanagaaaaggaaacgctttacggcgtccttaccgaactcgtgctagagctagagtaatgggtgaagcagagaaggtgcaagagaagatgaaggccgaatatggaggccatataagagcaaatggccacaatgatgaaggccatgatgagcatgaagaagataatgg

SEQ ID NO: 68515 - DNA, 472 bp, Glycine max
  unsure (1)..(472): unsure at all n locations
agctattagaccagctgatctttgtaatagaagtgatatntgataataagcatgtgtttgtttagagagatcgccataaatgattaaagtgtgatatttacggtacataaaatattcagcctgagttattctagtataaggggcgaggtattgtaatgtagctggagattccattgttttagctactacaatagtgaatgacaaaacaacaaatagtttcttcaaccaatttttcacaatgagttatggtcaaaattgattacagtatctaattttgacaggtttctttttcttatctaaatctcacccaaccgggtcaggaacacctaggccctaacagcacccatttgtcatttcaagtttagagaaagtccatgctattgacactctaantttactcttcaccccacatgcttttacttaactctttttacaaaaatactctgtaaatatttccatactgattaaacgc

SEQ ID NO: 68516 - DNA, 377 bp, Glycine max
  unsure (1)..(377): unsure at all n locations
atttgtgtaaatacttacaaaaattcatattaaaaatttaatgaaaataaggaatatgctttcactgcccagttgcaatatcattgcccaggtcataaccattttcagttacaaggacactcaacagcaggagcaacgaccaataatgaagttcattgctctagtatccaatgaattggctcaagctagttcaaattntaaactcacaaataaaatattatttattattaatttttataaaataaaaaaatcacatacatcgataaaaataaaaaaaaagacacgtatatatgctagtaaaaaaatcgtctttgtatgatggaaaccaactaattgaacttatatggagtcattccaacaaagacatgtacatcttg

SEQ ID NO: 68517 - DNA, 438 bp, Glycine max
  unsure (1)..(438): unsure at all n locations
agcttatagttattggagggagaataatataatttctaagcaattgtacctttcaagtaacgaagaattctttgtgcggcttttagatgaggagaggtaggagcctctcgtaagcgacacacaactcccaccgcatatagaatatcgggccttgtattggttagataccttaaactccccacaagactctngaagatcgtggagtctaccttctcttcttcatcaaactttgataacttcaagccaccttccataggtgtgttcacgggattgcaatcaagcatattaaatttcttcaacccttcttgtgtgtagctttcttgagagacaaagatatcattctccatttgcttcactttcattcccaagtaatatgacatgagtcccatatctgtcatatcanattcacgagacatggactccttgaagtcttcaaca

SEQ ID NO: 68518 - DNA, 418 bp, Glycine max
  unsure (1)..(418): unsure at all n locations
ttaatctagttaataaatataaggagactganaacaganattttctcttctttnngcnnnngaaattcataccagtctcaagcagctntaagatacacattcttcaaatatgtcatatgaacaccttcccttttctttgatctttccatattgtgaagctcatcctttaacattgcctgctagagttagaatatttgaaattcatgagcctaggttagcacaagagaaaaacaacaaagtcttaactntttcctttgttaagggaatctatatcgaaatgtaaaatcacattagaaatttcagttttaaataaacctagaaaattagtccttgaattaaagaaacaatcattgaccttgtagagccacttgtgacattntttcagatggaaatacaattacaaaattttaacatgtat

SEQ ID NO: 68519 - DNA, 414 bp, Glycine max
agctaggactctctgtgatctgggaacctctccttcctcaggtgtacccaaacccaatcacctggttcaagcacgactttctttcagcttttgttggcttgccatgcatagctcacatttttctttataatttgagccttcacttgctcatgcagcttcttcacatactcagctctaacctgtgcgtccttatgcttatacatatcaatgttaggcatatggaacaaatcaagaggagtcaaaggattacatccatacactatctcaaatggtgaacaattagttgtgctatggacagcccgtatatagcaaactcatcatgaggcatacatgcttcccaagatttaagatttttcttaatacagtcctaagcagtgtgcctaaagtcctattgactacgtcagtttgaccatc

SEQ ID NO: 68520 - DNA, 451 bp, Glycine max
  unsure (1)..(451): unsure at all n locations
cgctctagatccttgaggtaatatgcgtcaagctagtgacgttctataagcgcttactgagaggcaacccaactctatttctgtgttttcttaatcattgcatatagttaggtttcaactggtctgggattgctagagtaagacatcaacatgttgtgtatgacaaaaaaaggagtgttaacgcttctgtgaagctgtggatgagaaataactntgaaaaatttttagtcattcactcgcatagcgctccctgtacgctaagcgaatcatccttcatgtgttgagcgagtcctcactcgcgctaagcgcaccaacccttacccattggctgaaggggtccatctatacgagacagttgtgccagcccataaacttctttggaattgcatttattggaattggctaagcaagtcaactcgctaagcgcacctatgcactaagcacatatatc

SEQ ID NO: 68521 - DNA, 440 bp, Glycine max
  unsure (1)..(440): unsure at all n locations
agcttaagcctaaattcatctacacttaagtctattatcaaccatccatatgttcttgacagacatgtttgcataagcaaaaataaatcttgacttaagtgtaaatgtctgcagaacttcaaatttcttgaatatgatctcaaatggcttctanatcaaacctaattaaattatatatcatataccatgcataccaatcattccacacccaataacaaaatttcaagcatctaccactcaaagaagcattcaatcaaatgataactttccttacctatcanacataatgaacttgctttgagatgaagaaaggaaggaaatgatgagatcttgggttcaacacgcatgttctccctcactcctacagtagtttatatcatccacactatccataccccataaggcaacatataacacatcataacctttgaaaagaacac

SEQ ID NO: 68522 - DNA, 478 bp, Glycine max
  unsure (1)..(478): unsure at all n locations
tctcattatatntgtgcacgccatggtgcattgtaaattaaactacgttcganagctacctatataaaggggtaatgaaagtccaccatatagttaaagttggcataaaatgtgcttattcagccacctgtatttgtatttgtagcataaatgaatcagttaagaaacagaacttaataaaatntattttgatcaacacctgtttattagttntgcttctgagtgtagcatttatattgatatttgtttttcggaatgatgattgatgtangtgttcattcagttatttctttgaatcttaactttattttggaccgtgctgcccatcatcacaggtacaaatgtttggtaccaatgaatatttttattatgtgttcactgtcattattgacaatngatatatgctatacaaattgtgttcatgatgagtgaaccttagaattcccgttgagattggatgcantgattcttgcggaca

SEQ ID NO: 68523 - DNA, 434 bp, Glycine max
  unsure (1)..(434): unsure at all n locations
gcatgcaagctgcgtgcatgctatcttaataaanaggattgattatatcacgacgttttgcaagaccatatgacgaacaaatgaaggggcttcactcactttcaccggaaaaaaaaacaacaaacaaagatgcttggaaaatgtcaatcaagcgatgtagctacacaagcatattaaattgatttaaattgctcctcagagctttaaaaatcgaccacaccaggatgcaattagattactactagcactaaacatagataaagatggtaggttgtttcgtgtgaggcatatttcccgtctaccattgctaactcccaatggaagcaccgaattatcttatgcaccaaattgcatatttacttgtgcgaatattaaatgtttgccaccgggtagaaaggaatggaaagtgtggttcacatatcgcaacatggcaa

SEQ ID NO: 68524 - DNA, 519 bp, Glycine max
  unsure (1)..(519): unsure at all n locations
ctcaagctgcgagtgatcanagcacatagagtcaggtcactagggtttgttatgagatcaatatcccccgagagcaaccctgtcataaccacaaaaaacacaaaataatcaatatgatacgaagaattgtgactgaaaacgtgaaaaagcataaatatctagaaattattattttttaaacaaaaatcaaggaaatggacatacccagaaaagaaagtgtacaaagaaacagatttgaaatacagaatgaacgaaaagcagaaaccttggcgaggagattntctgggtatacagtggagagaatgatgaaaacgttggatcagcgaaagaaacgcggaattgggtggaatggcaacaagtttttgcctctgtttctgatgcttgtcccactgcgcaaggaatggatagcgattcaagagaaagagtctcagatgtgtttttttggttttggttttgtatcaacaagaacctcacctaaaattcatggcacttctaattctaggtcacatgcatgtcttt

SEQ ID NO: 68525 - DNA, 446 bp, Glycine max
  unsure (1)..(446): unsure at all n locations
agctntaccgtgtgtctgatagcctcatcaatggtagagaaccactccctatttccacacatgtgattgctacaaccggagtcgagaaaccaagtctcttcttggtgcaagttgtcagcttcgacaagagacatgagcagcatctcttcttcttcataaatctcagcatagtttgcactctccttccatcttgggcattcgtattggaagtgtcctagtttgtggcacttaaagcactccactgtggctntgtttggagactgccttcctctgcctctgcctcgaccccgaccaaagcctctacctctgcctctacctccattctgttcttcatgtgagaccttcaatgcttgctcatcccttgtgtcactaccatgagaattcattctttgtcatgaaccaaaggctgctttaagctcattactgcagtgaatcaagtgttgact

SEQ ID NO: 68526 - DNA, 381 bp, Glycine max
  unsure (1)..(381): unsure at all n locations
gctaggatgcgcgtgagcacatgtagtttagcgatgtatagagtggacgcanaaatgaagagtcaagcgagggagaaatgaacagtcaaggataaggccaaatttaaaattaaaatacacacacacaaaaacaacaacattttcatataaaaaattggcgccgatttgtgttccactaggacattctaaggcggtttcaagaaactgtcttagaatgtgtgtcatanaaaaataattattcttaattacagaactgccaccgcataacattctaaggcggntatgtataatcgtcttagaatgcgcgtcgtaaaaaaatgattttttagtagcggngtttgcaaagtttgtatcgngtatgttctttgtgcttctttgttt

SEQ ID NO: 68527 - DNA, 443 bp, Glycine max
  unsure (1)..(443): unsure at all n locations
gcttccacaacaagaactaaattgttntttataaaatgaagtaattaaataactaacttccactaatatataaagtcattactcagaaggaagggatgggccatgattaggctcatccaatctatttaattaaactaattacacaaagcaaagcccaaattcgcagccaaattattcaagtgtggaggttctgccttccaagtcgaatttgacccttgaaatggtcgaattgtgatgcaatcctaccccccaatggcattggataggagactccaagaagattgtgtcagagatgcaagagaaggtcttatgattctcatgagccttanggtagattntggcccatgggctagtatgagccactaatctttgacatattagattaggattcatntattttgggccttgattagtgctccatatatangaaggtccctaaaatg

SEQ ID NO: 68528 - DNA, 493 bp, Glycine max
  unsure (1)..(493): unsure at all n locations
ctcagctctcagagtttctggttnttaaaccttgaacacttgtgctattcattcttttcatctcttgtgttgattccaccttaagcaaggaaatgcccagaatcctctataagggcccagatttgataattgctatttgcacccnncattttactaaatacaccccttttgtgtttntatatcgatttctttccaaaacatcatggaactttatggattacacaacaatactctttttgccctccagaatgttgcgggactttacgaattatgcaataatgctcttttggactttnggaatgttgtggaactttacagattgtgcaacaatgtttggttagactttcggaatggtgcgagactttacggattacacaacgatgggtgtaaacattntgaggtggcaagcgaangcncatgccaacaataatgtccccagacgaaatanggtatgacatagtatattagtaagtccattctgcatgtatagtca

SEQ ID NO: 68529 - DNA, 412 bp, Glycine max
  unsure (1)..(412): unsure at all n locations
agcttttgannaaatatttgctactggtaattgtttacaataatttggttatcgattactagagagtaaaaactctttgataaaaggttnttgagaaaaattcatgtgctacttagtttttgaaaaaactttttaatacttatcttgattgagtcttctcttgattcttgaatcttgagtcttgaatcttgatcttgattcttggagcttgaatcttgaaacttgattcttgattattgaattcaactttcctcttgatccttgaagtgtacttgattcaatcttgaactcattctttgattcttgagatcatcatctttgttatcatgaagtgttcttgacttttgagccctttgtcatcattcttgttatcatcacaactctttgaatcaatcttgattcatcatgaagc

SEQ ID NO: 68530 - DNA, 417 bp, Glycine max
  unsure (1)..(417): unsure at all n locations
ctcanaccagtcttctatatctnnttggagctgaatatggctcatcttgttcagccattaacttctgattcgggtccatgggactatcaatgcgtttacaattacccatgcatctttcttctaaaatataaagagcatatttcctttgtgagaacacaatgccttcctttgattgagctacctcaataccaagaaagtatttaaggcacccaaggtcattagtctaaaaatgagttgacaagtacactntgagttgggaaatcttagcaatatcatttcctatgataactatgtcatccatatagacaacaagatagacgcatttacctgaagatgtatgacaataaaaaattgaatgatctgcttcacttcgtttcagcccaaaggaataacatgctatctgtcacttagagatgt

SEQ ID NO: 68531 - DNA, 519 bp, Glycine max
  unsure (1)..(519): unsure at all n locations
gcgatcgttagagccacctgcggcatgcaagcttgtgagatgtctnttgtaatgaattaagatacacactcccttctctccgactnttacctagtgtatcaagtgggaaaaaacaaaaacacaaactatagagaaattgaaagagaaaattgatgaacttatataaatacttttttctttaatagacaagagaacatgacagtataaatactttcttttcattgtaagaaaaataattagagagacaaggataaagcataaagtcatggcatatatagtcaccgtccatttcttcatcattacgaacaccaaattttattaatctctaattattttatccctttntaatgatttntcatcctttatacacaaaaaaattacatttgacaaagttgatcccagaatctttaatttatttcttggtatggtggttcttaaattggagggtaatgggacatttatgttgtttttctctcttcttatttaaaantcaacaagtaggttagacccatgagcttt

SEQ ID NO: 68532 - DNA, 433 bp, Glycine max
  unsure (1)..(433): unsure at all n locations
tcgatgcaacatntggagaggttaatgaaacaacgagatgatgctctctatgagnaggtggatcaaatggagaatagagatcataatgaagaagataggaggagaagagggaatgatggtgttcctagacaaaaccaaattgatggtattaaactcaacattcctccatttaaaggaaagaatgatccggaggcctacttggagtgggagatgaaaatagagcatgttttctcatgcaacaactatgaggaggaccaaaaggtgaagcttgccgccacagagttttccgactatgctcttgtgtggtggaacaagctacaaaaggagagagcaagatatgaagagccaatggttgatacatggacggagatgaaaaagatcacgaggaagcggtatgtgccggctagttactcaagggacttgatattcaagc

SEQ ID NO: 68533 - DNA, 455 bp, Glycine max
  unsure (1)..(455): unsure at all n locations
gctcgtttgatgggagcctntctccttctccttagagttccactcagtttgtagtaatctttctctgnngaccttttagatgaaggaccagagaacatgccaccccattgtggaaagtagattaagcatattggcaggctgcatattatgatcatggctcccattagagtgattcctctttcttttgataacctggatccttcgaagaatattagttgggtgacaactgctcccacgttgcctcctcctcctgtcattccagatataactcctaatgacctgaaaatgcatattgttagaattaatcacaaaaaaattatttagataggaattggttggatagaattctctagatgtacttgtagganaagaantatataagataaaatagagatgaatctctccataatgtataatgaactctacattanataatttgtagatgtcctctcatc

SEQ ID NO: 68534 - DNA, 480 bp, Glycine max
  unsure (1)..(480): unsure at all n locations
cgcgatcttagagcacctgcaggctgcaagctatggacacttcctcatgggaacttgttgtcactctgtcaattcctcgtccagaagggcagaagcccacagacaaaagtggcagcaagaaatttgtcctgtccattgcatggagtcctgatgggaaacgacttgctngtggttcaatggatggcaccatttctgtttttgatgtgccccgtgccaaatttttacaccaccttgaaggtcactttatgcctgtgcgatctcttgtgtattctccttatgatccaaggctgctgtttactgcttcggatgatggtaacgtccacatgtatgatgctgagggaaaagctttatttgggaccatgtcaagtcatgctagttgtgtattgtgtgtggacgtgagcccagatggngcggccattgctacatggtcaagtgatagatctgtaatgctatgtgatcttaacatgatggcatctgtgc

SEQ ID NO: 68535 - DNA, 381 bp, Glycine max
catgcaagcttgtgtggatgtggtcaaggggtatttgcaacaacaattatgattgagcggggccacaagggaatatagaccaatccggatgtgattcttgggcagagtagcattgttctcagctgatgagaagggctggtttcaatgaagaatatgggctggtttctaacctttttaggcgcaattccaaataaaaacacatctgaagagtgataatcatttggtaattgttactggcataataatcaaatacttgggtcacctactttatttgatgacaatctattacttagagattctaccgtttattcccccaacggactttttcaaagtgttcttttcatcaaatttcccactatttttgtttgaagcaacataata

SEQ ID NO: 68536 - DNA, 504 bp, Glycine max
agctcgcctgcttgttcccaaggtctctccatggtcttagagcctgtttattaagaaaaaccgaactggagctatcttgaactatttgaacacattaaatactggataagctcatttattggattaaataagcaaattcaaactagaatcaagcttgattatttaaataagtcacatctaaattgtacaaactcgacaaaactattactacggccgtccttttaatctgtcttttaagggtgatttgtggaatcaagaaatacaataaattgtcgttattataataaaacaagctgtggtgtttcttatttcacccatttctctttccactccacggtgtaaactaattaaatataaagaaacatcatacacgtaagggtatagttgataaagaaaataattaatatgatcttgaactgtacagacgacagatgaactcgaacaaagattatgagaaatccacaatgagaaggaaagggatagtatctagactactactattat

SEQ ID NO: 68537 - DNA, 469 bp, Glycine max
  unsure (1)..(469): unsure at all n locations
agcttctanactntgtacaatattgaagctctgttaccactngntagacaagnggcctcagatatcttaagaagggggggttgaattaagatattccaaactgtttcccctaattaaaaatctatttcactttttactcaagttatgaattcccttaatgacaaacttcttaaatattaattcaaatgaagcaacttgaatatgaatataaagcaataataaataaaggagattaagggaagagaaaatgcaaactcagttntatactggttcggccacacccttgtgcctacgtccagtccccaagcaacccgcttgagagttccactatcttgtaaattccttttacaagttctaaacacacaaggacaatccttcctttgtgttagagatctttcaacaaagactacagtttcttatccctagagaatagaagaagagaggaaccatctctctaaaagtatggatt

SEQ ID NO: 68538 - DNA, 463 bp, Glycine max
  unsure (1)..(463): unsure at all n locations
cgagcttagctacacacccnctataatagctaagctcactttcattaaaaaatacatgaaaatacaaaanaagtccctactacaaagactactcaaaatgcctcgaaatacaaggctaaaaccctatactactagaatggccaaaatacaaggcccaaacgaaagaaaaacctattctaatatttacaaagataagtgggctcatacttagcccatgggctcgaaatctaccctcaggctcatgagaaccctagggccttcccttggatctttggcccaatctacttggagtcttctatctaatgcccttgcgaggtaggattgcatcatattttgtttgatcttccaaggtccaagaggggtaaggattcgatnttngtggttgtgataggttttccaagatggcacacttcattccatgtcacaaggtggacaatgctngtcatgtggtagatcttttctt

SEQ ID NO: 68539 - DNA, 438 bp, Glycine max
  unsure (1)..(438): unsure at all n locations
tatgccacggaaatgtaattatgaaattgagatgcccgaagaaacaccatttcctagttaaccatgcattaggtaccatgttcaattattttgtttttaagtgaaacgggtttatgatcccaacatggttggctcatggtgcctaacacatgcaactaagaatgtagcgtgaagttntacgcttcctctttttttgtttttgttttgtagaggaaaacgcaaggatgagcaaacatgaaaacaaatggtatgcaattttgcagatcaaaagttngttgaatgcatatgatgatgccatgactcatgcaaaatgtgaggctggaatatgataacggacaaatgcaggaacgatatgttcattatgaagagatgcttatgtgatgcatgatatgaacgcattntacggacacgagagtctggaanaatatctcttcttac

SEQ ID NO: 68540 - DNA, 503 bp, Glycine max
  unsure (1)..(503): unsure at all n locations
cgccacccagctcgcccaggcgagcagggttgcttcctctagaatcaacagccttctggaggaatcttctgtagggcccaagtgggcctagttgctatttgcacccccatttttactaagtacaccccctgccttttttttggtgattctttttcgtaaagttacggaaacttacaaatttcgtaacgatacttgttttctttccgtaatgttacggaaccttgcggattacataatcatcccctttttgacttacggaatgttacggaacctcactaattgtgcaatgatgcttccatttcatttccggtgtgtcacagaaccttacggattgtgcatcaatattttcttttgttttccggcatgtcccagaattcacanattgcctaatgatgggtgccaagcacctcacaaggaccaaacanaagtngcatgtcatcaagcanaggtccccggacgaaaatanggtatgacaacctgcanggccatgaaactttggaagc

SEQ ID NO: 68541 - DNA, 388 bp, Glycine max
gatccttaagtcacctgcggcatgcaagctcggcgcaatgatgtagaacctatattaccaaaccttagcgacggagaccgtcaatatagtacgcaacatttaatatcagctaatatataatttgaacagctactaggacaaaaattcttacgtggtccacgactggcgcatggatatgttcaaacattcgtcacctaaaattatctcacgcacattagcgtgtgtgatgaacaaacccactctgacgttaggtatcccaaaatctgccccatcccatggcatctcaatatgctgttggcaacatcatatatgatgttgaccgaaacaccttatggagcaactgctcgcgctgaagtgtccagttcttgagatggaaccctttttcgca

SEQ ID NO: 68542 - DNA, 348 bp, Glycine max
  unsure (1)..(348): unsure at all n locations
cgcttcgagcaacttactcctcactgaagaacttgatgatcttattaaccgctgtcacaaaccttgagaacacagctaaccctaccccctcaccatcatcttcctcagccacacctataccacaaattcagtcagtcaccccacacagatngaaactcgatgttcctagatttgatggctctaacccttcggggtgggtattcaaaattacacagttctttgaataccacgcaacccctgaggccgagaggctcacgatcacgtccttctacatggatggtccagccctcgcgttgtttcaatggatggcccgaaaccatcagctttccacctggtccggattcctgc

SEQ ID NO: 68543 - DNA, 453 bp, Glycine max
  unsure (1)..(453): unsure at all n locations
naagctttactgtaccaaaattcttatcctctcaatagtacaaattgtcttatcttctaaaaattccttgggcaaaacacttgtaattaaataagaaattatttgagtgcttcattgtacaatctgtctcttacaagagagatttcttcttctctttcttcttacttaataaaagtgattaagggaccgagggtcccttgttgtaaagatatctgaacacaaaggaagggttgtccttgtgtggttcagagattgtaaaagggatttacaagatagtggaaatctcaagcgggttgcttggtgactagacgtangcacagggcgtggctgaactagtaaaaaaccttgagttgactttctcttctctaaaattcttatttattggtgttatctttgcattaacgaagtttagttgaatatcttcaatattcatatagagtgattgaaattcat

SEQ ID NO: 68544 - DNA, 453 bp, Glycine max
  unsure (1)..(453): unsure at all n locations
ctatatttananaatgtttctggataaaaaatatttatatgtatttatcntaaatatntaatcttaaaataacagtatttttttataattttttaagaagcaaatcatgtatgtttcttaanaatcatttttcttagaaaagtatttttaaattatctttttagattaaaaaaaaatccttaattataaaagttaacaaatttattattcacgaaccatgtatgtttgttaaaaatttattttttggaaaattattttttaaattattttatttaagtttaaataaaatgattcgttataaaaagttaataaatttatcttataggatagtntatgatatagtgataatataaaaaaaataatatacttttagagtacatacatcatttcttggngtaaatatgtttagtcactttgatttgggtaaaatggcattagttctcatattttact

SEQ ID NO: 68545 - DNA, 454 bp, Glycine max
  unsure (1)..(454): unsure at all n locations
agctacaagatggactgcgtgcgttgacatgttttgatttggtgtgcaacccanaatctcaattgaacggaatgggggaaacttacttttctgagagtacatagtttngtcatgctcgtgtcacaatgtggtacacactgaccaaaagtaaaagccacgtggtaccatgtacgcatgttcacaccgacaaatattcgagttgatcaatattacattagagagaatgtcaagaaaatgatagttggtgcacgcacagtcaaaaaacgcccaagtatgtagtgtggtgtgtgaaagaaaacgatagagtggaacatcacacatgcaacgggcatggaatggaaacctcatacagtaattaattaaaacatctgctaatggagattatacaagtgattataaattatgacgaactttaatcntttttatgaatgcgggtataattctcctaacacta

SEQ ID NO: 68546 - DNA, 420 bp, Glycine max
  unsure (1)..(420): unsure at all n locations
cttagacatgaaanaaaaacattacattgtcactgtatacccctttaaagagttgtttaaaacatagttacatgtgctgttntttagaagttacatgtatgctaaacacatagtagacgcttaattttttaattgtttaaaacatattaaacactatatacccatttaaagagttttagtaaacgttaaaaaaggaatttatgtacaatttgaagaaatatcacaaaggattagtgtaatttacatttaaaatgcttgtacttcatgctgaacgtcattgacaattgacagaaaaataaatacactcttccggttttatgcccttctgatgcctaatacagctcgaaagttcattaatctttnttttttcaaaccaagagagactttgcattctctgatgtatgatctagtacagggaca

SEQ ID NO: 68547 - DNA, 248 bp, Glycine max
agctaatattttaattcacgacaatatgattatttatagatagataaaacaaactagcatggaatgcataggatttaattaaacataacaccaccatagttagaatgtattcaattaagcatatctttatttgctgaaagaaaatggagattacattatattaactcgctcttcaaatagaattagaacaaaccctgttatattagttgttgaacaagagtttagatgagaattcccaatcacagaat

SEQ ID NO: 68548 - DNA, 459 bp, Glycine max
  unsure (1)..(459): unsure at all n locations
cataactatntcatgttactatttatgaatttgtttactnttctttttcatgangaagntattatcatgtaaactgaacaactctcaacatatctataatgcattaagttattttgtagcaggaatttaaccgttttgttgtgtttagtgacacaccagaacatgacattgctaatcattaaaggaaatctcttctaaattgagtaactcactctagagggtaaagtgagaaatcatagttggtgatgaaaaaatcaacaatcagttaggtgcacatatatgacaaatcatggatctgttggaatattgaaaatgaatttttagtaaatgtctaattntatatntgtttcttaatagatttttgtntatgaagaatcttaataaaataataattnttnttatcttgaccttatttctagtctaataaataataatttgtgtgattcatgataatatttc

SEQ ID NO: 68549 - DNA, 486 bp, Glycine max
  unsure (1)..(486): unsure at all n locations
agctngcatcatggaaatcattactaacccatatatatgacctgacatgtctnaacattttggctagaaagtcattagatttaattactcttgtntgttggttcttatattttgattttcatagttttaaagctcaattttaaatattaatcattttcaaattcttccaattaagtccttcatcccatattttcacctaataattaaaaaggatgcaatagaattgtgacgtatatataattgtattgtgtagattcaaaaagaaaaaagtataaaataaaatcaaataatcaaagtgtataaaatgtagcgaaagntcatttttatccctacattttcnattatatatttgatattcttttatgaagttatacanatccaatatataccanacttatagctagttaaatttctattaattattggatgataaaacaatcatctaataattaanatttaaaaataaaactacgcataaatgaaagt

SEQ ID NO: 68550 - DNA, 499 bp, Glycine max
  unsure (1)..(499): unsure at all n locations
ntaacttctcanaagcaagttgtgcttcaggtgtccatngaaaatgttcgagggtcgttgctttgaccaggggtgctgcaagggtagcatacccttgtataaatctcctgtagaacccagccaaacccagaaaacttcgaactgccttagttgtgtgaggagtaggccattgctgaatagcagagatcttggaaggcagaggttcaacacccttatgcgagactaaatggccaaggtattccacctgaggctgagcaaaataacatttagaaagtttgagaacaaattgattcacaaacaatacctgaaaggtaatgtccaagtgccggaggtgatcatccatagagcgactgtagattagaatatcgtcgaagaagacgatgatgaaacggcgaagatatggttggaatatctggttcatcgtagcttgaaacgatgaaggggcattacagagtccaaacgacatcaccttgaactcgtaatgcccgtgatgagttct

SEQ ID NO: 68551 - DNA, 324 bp, Glycine max
catgcaagcttattggatatatgactccaagaggatcgtgttatatcggcttttaatgccctacggttctcatgaatcttatggtagatttctgagcccatgtcgccaaggctgggtccactcttttttgtaaatattagaatatgtcttcctctctatgggccttgtattttgatgcaatccttcctcccaatcttattggatagaagactccaataggatcgtgctatagcgactaaagatagccctatggttctcatgaacctcatggcatattttttagcccatggtgatgcaatcctaccctcacagggtattggatat

SEQ ID NO: 68552 - DNA, 400 bp, Glycine max
  unsure (1)..(400): unsure at all n locations
gctgctgtttagctatacacgattgtactgaaccatttgtatttgattgtgatgctagaggagttggcattgtggctgttctgatacaaaacataaagcctatagcttatttctcggagaaattgggaggagcctgattgaactattgcacctatgacaaagagttctatgccattgttatagctcttgatcattggaatcattatttgcgttctaatcactatatattgcattcagatcatgagtcattgaagtatatcaatgggcagcagaagttgagnccnnagcatgctaaatgggttgaatatcttcaatcttttaatttctcttcacaatacaaggatggtaagagtaatgtggtggctgatgcactcctatgaggtatgctctatattcaatt

SEQ ID NO: 68553 - DNA, 412 bp, Glycine max
  unsure (1)..(412): unsure at all n locations
ctcaagcttgaatcaatgcctgctagttgatgctcactatctatgaactcaatgtgtaatcacctttanaacatganctctaagaaaatgatgcattatttctatgtgtttagtcctacaatgcatgacagcgatttagttagatngatcgcacacctaaaggacattcaagttcaaaccataagtagctactagacccgccaagcctgagaattagaagaagcaacttagcatttccatatacttgttagtggatcttgttagggggaattacggagaatggtgagagaggagagataagcatatgtgacttatcgagtattaccacatgcatcaatcataaagtaccactagtatgtaagtatcatggcatcataattacaaccagaaggatctaatacaaacaagctac

SEQ ID NO: 68554 - DNA, 488 bp, Glycine max
gccacctgcatgcatgcaagcttgccccactataagtaatccgggaatccgtagtgttatctgtttccagagataaaacttgctatggtgctcctctaataaatcattctgattttcgaacttcgaaaaaagagtagtgtatgaaatacagattttatggtccaaaaagtgtagcatctctgtcaaaatggaactaaatatttctactgaaatgctactggcatgccatggcaagagctgcagcttcaagcagcctccgagcatcttctctgtcaggcaaatccgcaggggcctgtctaataaatattttagaaattaatgaagaatagagatgggtaattcatatttattctgttaagttgacaagacactttctacatccaataattataaatattgtacttacaaagcaataacaataaaatgctgtgatcatctcatacacaaatccttttaagtatatacaaagtcgaaacagattatatttt

SEQ ID NO: 68555 - DNA, 496 bp, Glycine max
  unsure (1)..(496): unsure at all n locations
tcattgtgtactattcacaatgcatatactatacctgttctgcattttgtctcccttcatggatatattgattggaagttatctgattttatgtgattgttgctctgtgacattgatgttgtgtggatntggtagacagaacaaaatgactgaatgtcttaataatggtagcagatgttactgaggttctttgtgagctagaacttactataaagaaagtgaaggtatctactacacctgatggcaaagtgatagatctgtttttcatcacagataccaggtttatatttgctttcctgtaattcttagtttatttctggtgaaacttcttgatctattgattaagactgcagatgaattggaatgcanattgattntgaatggaaatgtacagcgtctgagttgaaaaaacatgtagtcacttgtgaaattatgtgcagaactatngtcatctngatggtcatcctatnntgttcttgtaaaaaaatattttgag

SEQ ID NO: 68556 - DNA, 446 bp, Glycine max
  unsure (1)..(446): unsure at all n locations
gcatgcaagctngactctgctgctctccaactgttgtacatatgcctatttaaaaccaaaagacctanagatgaatcaaatgtgttccacttaatatcttgaacccactaaattaaaccttaaataatttgggtttaatatgtttaagatgcctgctaaatgattgaattttattcctgaattcatgatatataaaaacttttgttttgaatcttagtcgataattaagtgatgacgtgacatcatcaccaccatttataatattaagaagatcaatttgtaagataatattttatcacttaattgataataagaacttgaacaacaaatttaatatatcaaccattcaataagaatttatttttattagtaatccaaaataaaattgatcaattaatacggaccttaacatattaagcgtaatattttataaaaattatgggatt

SEQ ID NO: 68557 - DNA, 504 bp, Glycine max
  unsure (1)..(504): unsure at all n locations
gacctatgaaactaagcttcaggaaatgatagttatgcttcctattctatgcgatgttgtatcgnngctgntggagaagaagcagaanagagagatgcaaggggatttctgcttcatattatcagtggacctaacaaccgtatcttatgttttgaggtatatgatatgaagactgacaccgaccgacagactgaacacggacacggataagggaatatctgtgaacatttgtaacgttcaaaatataaaacgtagtataaatgtcatattaatgttaaacattgatatgaacgcctttcagacattaaacatgacaaggaattaaagtgttcgtgcatcatagaatatatggaagatggctaagtgggatgggtagatggaatgtgagggtgaggaatatggacagctgggtccacgaatagcttaatggatagtaatgtgtgacatctagtgtgatgcatcatatggtatgntgtataagtaaagaacatattanctgtgatc

SEQ ID NO: 68558 - DNA, 467 bp, Glycine max
agcttctgtggttcaatttctagcatctcgacatattatgagcccgaatctgaccttcgtgtgaaaagatatgaccattagaatttctcgagagcttccgatgtttaatttcgagcgtctcaatatattgtaagcctgaatcggagctcagtgtgaaaagttatgaccatttaatttctggagagcttccgttcattctttagcgtctctatatgtgatgcgcatgaatcggacatccgagttaaaagttatgaccagttgaatttctcaagagcttccgttgttcaatttctagcgccccgatatgttataagcctgaatcggacctcagtgtgaaaagttatgatcatttgaatttctcgaaaactttcgtctgtcaattctcgagcgtctctatatgtgatgcacctgcatcggacatccgtgtgaaaagttatgaccatttaatattctcgagagctttcgat

SEQ ID NO: 68559 - DNA, 426 bp, Glycine max
cgagtgcctgtatattgatgcgcctgaatcagacatacgagtgaaaagttatgaccatttgaatttctcgagagcttcctatgtttaattacgagcgtctcgatatattatacgcctgaatcgaacctcagtgtaagaagttatgaccatttgaatttcttgagagcatccgatgttcattgtcgagcgtctctatatgtgatgaacctgaatcggacctccgcgtgaaaagatatgaccatttgaatttctcgagagcttccgttgttcaatctcgagcgtctcgacatatgatgcgcccgaatcggacatccatgggaaaagctatgactatctgaatctctcgagagcttgcgttagtcaatctcgagcgtctctacatgtgatgcgcctgaatcggacatccatgggataagctatgaccat

SEQ ID NO: 68560 - DNA, 429 bp, Glycine max
  unsure (1)..(429): unsure at all n locations
agcttgctntcgcggaagatataagagaggagattaactttntcgcggaagagaagacagaatgcttccgaagagggaaaaagctttctatgtttttaaatgaagggcaaaattgacctttcaataaattgctgggtgcaccaacaatattgctgggtgcccctagcatatcccaaaaaaaattaaaaacaaaagaagacacggtcaaaaagttctaggataaattgggtcaaggtcaatccactttaaaaaatgacaatttgntagtgaaagtgaaatattaattctctaaaagatttgttgaaaatttaaaaagaagtaatatcatccaacccaacctctataaatgtgacctattaggagacatggtcacaaacacacaaatatctttctaatttcttactccaaaaacacaaatgatagcatgca

SEQ ID NO: 68561 - DNA, 435 bp, Glycine max
  unsure (1)..(435): unsure at all n locations
tcctcggggccatttcctgcgaaggcaaacattngaaaagttagttttaccagtgggacgctactcttaaaacaaaaatggcatacaacctcctcccataaatacaaacatcaatgtaaatttagagcaagcttatgcgcatatttccttacaaacgttcacttgcacaagacattctattaactaagaaaaatgcacccatatacaatcaaggcagcttcgttacctagattatttacatgtacttccaaggtgtatttgttacctacatcacacacatttcctttgctaaattcacatacatgcatactctaagcactntggctatcgaaaatngcatacgtgcacatcctggtatttctaatacctatacatacacaaactntatgataaatcttgactatctacacaataaggtgctacatttcatgcttt

SEQ ID NO: 68562 - DNA, 449 bp, Glycine max
  unsure (1)..(449): unsure at all n locations
agcttattcaagatatgggttgtcactctgcatatgtttgngaatggaagcttgaatggagaacacacctttttgacaatgaggtgcaagcggcaaccagattcttggatgatatcttgcggngtcatattgatcgttggacatcacactgctgggtttggaaaccagaacctaatggccagttgtctacaacgagcgcatactgtatgctactataaggagcagcatatcagactgtggatgaggctctataggacctatggcagctcataatccctttaaaaccaacaacatttgcttggcgaatgatcaaagatagaatcccaactaaagggaatctatggagaacacagctggagaaaggctttgcccacccctcaactattggtctagtaatttatcaacaactatttcttatatcggtagcagtgcagggttattgtattcta

SEQ ID NO: 68563 - DNA, 466 bp, Glycine max
  unsure (1)..(466): unsure at all n locations
tatccanattctgttntagatattcgtgaatacaacctgtcatcttggaagttntaattcagtgacaaaatctccctcccagtgataatagttggaaatctgtggctaaattacatgaggtttttccgacttatcaccttgatgacaaggtgagtcttttaggcgggggtattgataagcataagccacacatcaccaaggtgtacacccgcaaacaacgagcaagagaagcaataaccatggaccaccaccagcaacagggcgcacaacacccaaggtgtgcaaaccacccaacagttacgactcacccaaaggatgcaaggtcagaagatgtgaatcaaggggacatgatccttgggaacagttacaaccaaccgttatgatccgcccaagggggtgcaggttaggagatgtgaatcaaggggacatgacccttgngaacagtcacaaccaacccgtatgatcc

SEQ ID NO: 68564 - DNA, 469 bp, Glycine max
  unsure (1)..(469): unsure at all n locations
agctngcacacaagattcttcttgcctggcacttcaaaaccttttggttgggtcatatagatgtcttcctctaaatccccatgcaagaatgcagttataacatttaactgctcaaagagaagattctctacagctgctatactcagaataactctgatggtagtcatctttacaactggagagaagatctttgtgaaatcaattccttgtttctgctgaaaccctntcaccacaagtctctgcttgtatcttcttctaccgtcagattcttcctttagcctatagacccacctattctgtaacgctgtctttccttctggaaatttagataaagaccacgttctattcttctgaagggatgtcatctcatctttcatcgctacgctccacttaatagtgtcatcccctgtgtagcctcactgaaacattctggctcaccagcatcagttaacaacaaataatgcaatga

SEQ ID NO: 68565 - DNA, 335 bp, Glycine max
  unsure (1)..(335): unsure at all n locations
ctactcctctatctgnccataatgcaatggtagccatatccccagccaaaggtactcaacctccaatttgtcgaggatacaactccaacacaacatgtgcttatcatggaggagctccggcgcatttcattgagcatttgataaccctgaaacataaggtgcaaaacctgattgaagcgggcgtgctaaaatttgaggaggataatcgctcgtgaattatgacgttggccaacaacgctatgcatggggtaatgtgaatgttgtctgtagatgtctccaatgactccataggaatttcaagtgtatgtcattactggcaacaacagtcacaatgc

SEQ ID NO: 68566 - DNA, 469 bp, Glycine max
  unsure (1)..(469): unsure at all n locations
tctagaagccttcgactgcaaaatagacgatttggttcttcacattgtcgcgacaatggatcgaatcaacacgattntgatgttacattcaattcaaaaaaaaatatgtttaagaatgtagtgttgtggtttgatttgatttcgttctgtgaaagtagtggtgtggttttgaagttacattctattatttcgtgaaagaaagtagtgttgtcatttgatttgatgttgtatttgattntatttctatgtagattgttgacatcggagaaacgttgtcattgttcatggagcttcaaaccctaggtgacagaacgctcaagaagttggcgtttaatcatgttgttcatagtataagatgtatgaaccanaagcataagaatgaagctaagaacaaagtgctttagaatgttttggttgacttcagggttngcaatcttttngctttaatattatctatgatattttgcgt

SEQ ID NO: 68567 - DNA, 414 bp, Glycine max
agcttaatattatatacacctcattatagctcatttttatatttccaaatccgcatcatctataacgattattattatctgctattcttcccagtttttattaataattattatttagtgttaatctataaaggtttaagcgtactctaaggactgaagttgaagctatgtctagggctgataatcttaattatgtgcgaatattaatgaccagcaactgagcatccttcataactttaaatcatgaacattatgggttaatctctctatagaataagaataagatttatagcctgagactcctttgaatagttaatagacatacttgcatatggacactttactcttggttgtcacttacagtcattacttcaatagattcccttaccacatgtgtaagcttacttgattcat

SEQ ID NO: 68568 - DNA, 421 bp, Glycine max
  unsure (1)..(421): unsure at all n locations
tgtgtatgacacaatgancaattgaataagagatgtgtttgtactttaacgggtatcaatcatgcagatntatcgaaatactaatctctgttgaaaaatctaacttattttagtaaaaaaaattcttttcaatcacatttttttatcaacaagatttaaatctaagatcttatttaaagcatatatcaaacaaataagcaccatttaacagaagaattgtataccacanattaaacctccttgcttctttagtttggtaagtacgtaatcttagcttttaactatggttatataattggtcactttaggctaaactttatagaatntattgatataaaagatacagggataagttgaaaaaatgtaaaactaaagaaaagagtaanatatactttatcctatacgcaacgagaaaagaatt

SEQ ID NO: 68569 - DNA, 446 bp, Glycine max
  unsure (1)..(446): unsure at all n locations
agcttatgcgcatatttccttacaaacgttctcttgcacaagacatttaaccgaaaaaaatgcacccatatacaatcaaggcagcttcgttacctagattatttacacgtacctccaaggtgtatntgttacttacatcacacacatctctttggctaaattcacatacatgcatactcaaagcattttggggtaccaaaaattgcacatgtgcacatcttggcatttctaatacctattcatacgcaaacttcatgatgaatcttgactacccacacaataaggtgctacatttcatgctccttttttcaagtttttgctacctaaagccgcatgcaaattcaagcatattttccttttgctgactaaattgaattcaaaattaaaggatatattttcttttgtaatatgtttctcacataacatgcaacacattattacatttt

SEQ ID NO: 68570 - DNA, 494 bp, Glycine max
  unsure (1)..(494): unsure at all n locations
gttgaaagtatatatcttgatttctaanatacccattntctctgtctctttggcaacatcaaatagtgcaatgtgcgttgtaacatanaatcatacacaaatgaataaatatacaagaaatgtattcgtacaagacaaaggagaaacttataaaaaatcaaacaagataataaattatccacaaatcataataaaagcatatgtatcaaataagtcataaaacaaatcatgtgtctaagtcactaacatcttgaattctaatggtgtaacaagaaactttgagtagtggttctgtgaagatgtttgcgagttgctntttggtatctacaaattctagaacacagtcaccttttaggacacgatctctaagaaaatgatgtctaatttctatgtgcttggttctagagtggaggactgggttcttagatatatttatggcgcttgtgttgtcacattttatgggaatatggtctaatacaatcccataataagat

SEQ ID NO: 68571 - DNA, 227 bp, Glycine max
  unsure (1)..(227): unsure at all n locations
tngctaacattatcaatntcgaccatctcgatatatttccttactcatccggacatccatgtataaagttattgtcaattcaatttacccagggcctcggatcttaattatgagcgnctcgaaatattacaggactcattcatacatccgaataaaaagttattgtcagttgaattcgataccagcttccgttttcaatttggagcatctatcgacaaaataagaca

SEQ ID NO: 68572 - DNA, 438 bp, Glycine max
  unsure (1)..(438): unsure at all n locations
agcttcccacccagctcgcccaggcgagctcagctctcctatgcgagcaaggttgcttcctccagaagcaacagccttctggaggaaagatctggaaagcccaagtgggccaaattgctatttgtacccccctttatactaaatgcacccctactatttttttggtaattctttttccgtaacgttacgaaactctacgaatttcgtaacgatacttattctccttccgcaaggatacgaatccttacggattatgtatttactctttattagtattcgaagaagctacggaaactcacgaattgcgcanaaacacctctnttcgatttctgccacattacggaatttcacggatcgcgcaagcctgcttccttttgatttctgagacgtctcgtgacttcatttattgtgcaacanatgacgcctattatttcaaag

SEQ ID NO: 68573 - DNA, 487 bp, Glycine max
  unsure (1)..(487): unsure at all n locations
cgaagaggatgctntaatggaggacaaganagagagaaggggggttctctanatttaangaataaaagagggaaagaagnggaactntaaagtgtatctcataagactttcattcatcanagttacaacaagtgttacacatgcttctatttatagactaggtagcttccttgagaagctntcttgagaaaacttccttgaaaagcttctttgagaagacttccttgagaagctagagcttagctacacacacccctctcataactaagctcacctccttgagaagcttccttaagaagattcctaaagaagctagagcttagctacacatacctctctaatagctaagctcacctccttgagatgagaagctagaacttagctacacaccccctataatagcttagctcacccccatgacagagaatatgaaaataccaaaaaaaaagtccttcctacatagactactcataatgccccaaaatac

SEQ ID NO: 68574 - DNA, 395 bp, Glycine max
agcttgagaggattgatggcgacccggtgttgagatattctatgatatgggctacgtgggagtacgtgagctcagttggaggtgggcaacaagggatggtgggtttatgcgcgcattatggatgtggaaagcttgttgtgcaccatcgcccgaccgccacctagtaccacatgtgatgggtaccccataatcctacaagcttgagatgaagaagtgttgaagggggaaacttcctggttttattgttgaccacagagtggtacctggagatatgtcgcgggggtcaagagaccttggggacgtcatgtgtggtgctattgcccaaaaccaagcttgaccaatcccgacccaacccgggcatagtcggtcagtgagaacctgtgatgtatctaagc

SEQ ID NO: 68575 - DNA, 384 bp, Glycine max
agctcgcccaagcgagctaagttgcttcctccagaatgtaccgcccgtagtatgaactacttggaaggcccaagtgggcctgggtgctatttgcaccccccctatgtactaaatcacccactgcctttatttgctaattctttttccgttgcgttacgaaactttacgaagtccggaatgatacttgttttccttctatgatggtcagaaccttacggagtacataatcatcccttttttggctgtctgaatattacggaacttccggattgtgtacaaagctttcttttgattttcggcctgttacgaaacttcacggatcgtgcaacaatgctctattttacttctggacgttatggaactcacgtatcgtgcaacatgggg

SEQ ID NO: 68576 - DNA, 490 bp, Glycine max
  unsure (1)..(490): unsure at all n locations
cagcttgatctctactatgcntntgcnngngatgtggagcacaacattttgggtgatctttaggtgctatagaataatcgtggtgttgatattgttgaagctgcggctgatgatgatctaatacgcctcaacttttacaacccagatgacaccattgaagggaagtttgttccagagaagataaatggagtgcttactgtccaggtactatatataaccagatgggaaactcctatatatgtacgtgtagattaatataatataaatcttcgattctacatatatttttggactaaattaaaacagtactatacattttttcttcgttaaatcagctctaacaattgtaacgacggttaatgaaaacggtcatagaccttctacaatgtttacgggtataacccttaataagtgtattctcacctatatattatgtaatggtttataattacagtagtcaatatatgcatcttctgtccacttaatcagt

SEQ ID NO: 68577 - DNA, 447 bp, Glycine max
  unsure (1)..(447): unsure at all n locations
agcttcatataagctgaaccagtttatcaataattattagttgagtnttattcagaaaattagagtttatctcttttatcttagtgagagtgattctcctaaattcttgagtgattcaagaacaccctgtctgtatcaaaggactttcacaacctttgtgtgttgccctcgctggaaagagagattctttccttcctttcatcttcacccttgttctttcaaaccacaattncagaaaattcacctctgcccagaattatctcgtggccataactcccattctacgcactcaaattaagtgattcttgagcctaaattgaatttcaaaacgagacctttcacctcgttttggaatcacctcatttggagccttgtagcttcagttattgccatttctatatttctgtccagccaccacttaacctacattttaccatcccattcatt

SEQ ID NO: 68578 - DNA, 450 bp, Glycine max
  unsure (1)..(450): unsure at all n locations
agcttgccacccagctcgcccaggcgagcagggttgtttcctccataagcaacagccttctggaggaatcttctggagggcccaagtgggcctggttgctatttgcacccccatttttactaagtacaccccctggcctttttttggtgattctttnttcgtaaagttacggaaacttacgaatttcgtaacgatacttgttttctttccgtaatgttacggaaccttgcggattacataatcatccnctttttgacttacggaatgttacggaacctcattaattgtgcaatgatgcttctcattgatttccggggtgtcacggaaccttacggattgtgcatcaatattttcttttgttttccggcatgtcccggaatttcacaaattgcctaatgatgagtgccaagcaccttacaaggaccaaacaaaggtcgcatgtcatcaagc

SEQ ID NO: 68579 - DNA, 468 bp, Glycine max
  unsure (1)..(468): unsure at all n locations
agcttcaacttcaacatcttcttcaatctcactctcttttctagctacaggctctccagctattatccattcatgattagcaaacatcattccaagatttttgagatgtctttcggtaatctcactagaggctttggtaaaatccacaatctcattagagacatcacattgaagtagtcaatgaatcttgagataagcacgacataaggaaattcataatccaccaagtgatgacatttcaacataatgtttacattcaacaatacccagttgatcctgatacctaatgtcagatcgtaaactatttgtagatcacatctatnaccagagcatgatttcttgacttatgtgtgagaatgtaagtcaagaagcattcctttattggtctgcatcttgatgtacccatcaggtgtttcatcaaacttacgaactcctcctatgtgcagaccatctactttcttccataca

SEQ ID NO: 68580 - DNA, 449 bp, Glycine max
  unsure (1)..(449): unsure at all n locations
ctccatggagctacatcacgtggtcttacaagagttttattgcattcgctttaacatangagattagatgtagagaatgcttcttccattactttctttgattttgctagatcctctccttagtattattaaatactcaaccaataaggccaagttatgacacgaatcaatatatcaacaatcacactagaagggggctcgaatagaggagttataaaggatagaaacttatacctagtatagagttttatcccaagttcagaaagctatatgtactagagttgtccactgataagtaagataacacgtttgaacaaagtagaagttgatcgtccagtaaatataaagcgatatataagaagggttttatataaacacttggtgggaaacgtgacacagtaagataagagatacatcatanaacctcttagagagatgttgaacacttg

SEQ ID NO: 68581 - DNA, 429 bp, Glycine max
agcttgttgttctctatagcgcttacctcttcttctagcgtgtaccctgtgcatcctaaggcatgttccgtgtaggtttgtttcgggagtaagtattttggttccaaacccaccctctcattcttcttcttcagctgccctgacaactagagcaccaccgtgacctccgcagaagaaccctaggcgcacaactgtgatgtcctcaaacgaaccctaggtgcacctcccctgagctcgtgcctgacttattgaccaccgtcacctcaggctcgtgccctttagttgtcgggccttgcaagtgttcgccaaggtaagctttcatgtatttttctttcaaggaggcaatccttacctcttgagctaacttctggtgatgagttaggctaaacccaaattctaatagagtctcacatttataagtacaggata

SEQ ID NO: 68582 - DNA, 448 bp, Glycine max
  unsure (1)..(448): unsure at all n locations
agctntgactntgagtcatcaagagattatatatatgtgaccatgacatgagtttcaatcaattatctctttcaatctctntcaactctttctacagaatttctgattcatttctcttcatctttctaaaagtttttgttcaacactttctcttccaagaaaagttctttgataaaaaacttgtggtattcatctttttcattctcttttccctttgccaaaaagaattcaacaaggactaatcgcctgaattctttntgtgtctctcttctcccttttgtagaagcaagcttcatgatgttgaatccagattgattcaagttgttttgatgataacaaagatgatgacaaacatcccaagagaatgatttcaagattgagtcaagaacaattcaagaatcacagagagatttgtttcaagattcagataagatgaatccagtttcaa

SEQ ID NO: 68583 - DNA, 467 bp, Glycine max
  unsure (1)..(467): unsure at all n locations
caaaccaggcatatcctgttcagaccaaatgaatatgtcttggttgtctcgcaacagagccactaactcatctcgctcattagtggacacacaagtgctgatcttgacttcccttttctcttcactggtgccgaagttaacaacctcgatctcctcttgatgcggctttatctctctttcttcctgttccactattcttctcatatccggcggtgatgtgccattattntctcctatttcttaaccctttntgtaccattttaagtactgattaatcttaattgtcaaattaattacgtagttttattatttgggcccattcagctaaattcatgttnttaatctaattttaggaagtaatgaagcattgggcttgaatccagaattgggcttggacttgaagggccacactattntattctataagaatttatctattctaatattatttagattttatctcatct

SEQ ID NO: 68584 - DNA, 459 bp, Glycine max
  unsure (1)..(459): unsure at all n locations
agctngtctattctagaagacgaggtgtcacactttcacagccacttgagatccccacagtgcttctcatgtgtcctcagatcagagagcaccgagaactgcttctggttgcacctcttgcacacgtacattttggggcagaggcttctcttgtaatggttcttggcacaaatcatagacttcagtggctggaacttggcatgcctctggttccacctacacccctcttgaagacacgaatacctctttggctgcacactcattcaacactctagatctctttggttcttaatggggctactcacagcagcattggtcttgactcatccccgtgagccctcatgtgcattctcaaattcgcatcacgctcgaacccattgccacaaacttggcaatagggtgtgtacttaactaacagactcgcagcatctaactcaattaatatatcatcactattca

SEQ ID NO: 68585 - DNA, 360 bp, Glycine max
tatttcatgtgagggttgcaagacagattgggcctctacgtgtaactccttaatttcctttcttttaacagtaaaattcaactctgaagttagtggacctaattatgagctgagccaactaccccccttcattatgaatattatgacctacgatagaagagggggaggctcgaagcatttagttgacccctgtacaggcttaagtttcctaataagacctgatatttgtgttcaccctacataatacaactttggaccataaaaaatattcataataccctgaattcagtgatgggattcatatactcatgagttaggatggttgttataattgagggcatcctcatagcatttaattac

SEQ ID NO: 68586 - DNA, 446 bp, Glycine max
cagcttataagaacagaatagcctcaatcattttcattattgcatgtgaattaagacgcatcaacaagaatcaagccaaggctattgagcaagcaatcaatggggcaaaacacaccatatgattataatgattgatggctcaaattctcacaaaggtaaaatcatcactttcaaattgagctttcaaacactattcatgactatgtagaagaaagaatcataggatttcaagcccacaacaatgtcaataacttttattttcaaaacaattacccatttcttgaacatatcctataattcagagaaaaacatgcaaagtcttacgtgcacacaaaattgacccaaaatattaaactaaaattccgacgaaactaacaacattaacaaattatcactactaacaattaacaaaaccattcaaactatcataaccaaagaaccactcc

SEQ ID NO: 68587 - DNA, 230 bp, Glycine max
aaggggaccttgaagttctatatctccgtgtgaatttgagcggtcgaatatgatacgcctgaatccaacctcagtggtaaaagatatgaccatcttgatttcttcagaggttgcgcaggtccttttctagcgtctctatgtgtgatgcatcataatcggacctgcgtgtgataagttatgaccatttgaatttatagagagcttccgaggttcaattttgagcgtctcga

SEQ ID NO: 68588 - DNA, 416 bp, Glycine max
  unsure (1)..(416): unsure at all n locations
agctntacatctaaagcgaacacacaattgacatgtttcttatattcactagtcgatctcgcaagcaactcgattagactagcgattgtttaccaaatttcagcgtanacaaattggcacgcccagtgggaccggtcaattgtgtgtnttggttttaaattattattaaagttttgtttagtgcagntggtttattgcattcttaattgttttgatcttgtatgcatttaagaagtgggaaatctgttccacacttaacttgaattaaaactcgtacaaggatggctagaccacccccaagtaatcgaaacaatgaccttctcaatatggaggggcaaccaacgcagacatctgtcagtaatgccaatatatattctggcatatgagcaattcctgaccaaactggtggcacgata

SEQ ID NO: 68589 - DNA, 457 bp, Glycine max
  unsure (1)..(457): unsure at all n locations
agagtcaccagcggcatgcaagctntcccacagtcctaaatgacatgtgaaactatgattatctcactntaacctccaatttctactgaatccagatttagcctttcaaaccctcaaagcatcacacttttccactcataacactacattctcactttctaaccctaagttaactatacccttcatccctagcagttttccatcagcaatttcagcacataaacatcacaagcatcatcataaaaaccctanaacagaatgggtaagcttgactcacaccatatggcaagttcaacatgctttcaacaaattccttcacaaataactaccacaatacataaacctagtaaaactacccatcatatctcccacaacccaatacccacaaaaatttaggtgagaagaagtctacccaaacctgaaatttcgaagtcccacacgtagagatgcgcttcac

SEQ ID NO: 68590 - DNA, 428 bp, Glycine max
  unsure (1)..(428): unsure at all n locations
agcttgctctanatttacattgatgtttgtatntatgggatgaggttatatgccattnttgctttaagagtaatgtcccactggtaaaactaactttccaaatgtttgccttcgcaggaatggccccgaggaagcttgcctcaaagaggtccaggaaggacatggcggccgaaggaactatttccgccccggagtactacagtcaccgctttaggagcgatgtacaccatcatcgcttcgaagccatcaagggatggtcgtttctccgggagcgacgcgtccagctcaaggacgacgagtatactgatttccaagaagaaatatggcgccggcggtgggcaccactggttactcccatggccaagtttgatccagaaatagtccttgagttttatgccaatgcttggccaacagaagagggcgtgcgt

SEQ ID NO: 68591 - DNA, 368 bp, Glycine max
atctggagctccgtggtcaattcagtgcctgatatagatgcgcctgaatcggacatccgagtgaagagttatgaccatttgaatttctcgagagcttcctatgtttaattttgagcgtctcgatatattatacgcctgaatcgaacctcagtgtgaaaagttatgaccatttgaatttctttagagcatccgttgttcattttcgagcgtctctatatgtgatgcaccttaatcggacctccgtgtgaaaagttatgaccatttgaatttctcgagagcttccgttgttcaatttcgagcgtctcgacatattatgcgcccgaatcggacatccatgggaaaagctatgaccatttgaatttctcgag

SEQ ID NO: 68592 - DNA, 472 bp, Glycine max
  unsure (1)..(472): unsure at all n locations
aagtcaccgcagctgcaagctggggcaaagatactctatcaatgtttttgatggnngcacctccaagactccattaagattccttgggtgaggtgggacatagcctgcctacctaagagtaaaggtgggttagggatcaaagatttgattttattcaacgaggctctgcttgctaaatgggggtgggagtcggcaaataatcagaatcagttgtgggccacaattctattgtgtacatatggtggttggagggatttgatttctcataagaactgcagtttatactctccttggtggaaagacctcaaggttatcttcaagcagcaccaagcaacacaatttgttaaaatatccntattttggccataagtaaagactggccatggaatacataccaagttcttattgtctagacaacaaacaagacactcattggaaatatatatgtttacgcattaccttagactccctg

SEQ ID NO: 68593 - DNA, 366 bp, Glycine max
  unsure (1)..(366): unsure at all n locations
ctcacacataattaaccttctctgattatttccaatgggcatccctagataagtanaggaagctgaagagatccacaattaaggaactctgctgcagatcgacaccactgctgataatggccaattactccaaagtgactctttggcanaagttaattctaaggccgtaaccaactcgagacctctgagcatagcttttaaaacagagacattttccatataatgttccccagagaatatagtgtcatcagcaaattggagcatatttactgggaccttattcttccctacaagaaaactgtgataaagggttttagaaataacttctctcatcatttctgacagcccttcaactactatattaaa

SEQ ID NO: 68594 - DNA, 360 bp, Glycine max
agcttgcttgtccgatgcagcagtaatgatggccttatttatgtttatgaacggctacgaacccggaatgggtttaagcaaagacaacggcggcatgactaacctgatatatgccaaagggaatcgtgggaagtatgggttaagctttaagcccacttatgcagatataaagagaagcatcgcgggaaggaaaagcggtagtcaaagctcgcggcccagacaagatagtgaaggaagcccgccctgccacatatgtaaaatctttataagcgcgggtctgggggacgaaagtcaagtggtcgcgatatacgaagatgatgttccgagtacattggatatggtacgaccatgccctcttga

SEQ ID NO: 68595 - DNA, 474 bp, Glycine max
  unsure (1)..(474): unsure at all n locations
catgattgatacattgattgngacttgtatgattcaatttttgcatttttggatgaagggaagagtggntttcgaaatctgcactctatgcagaatattgctgttgaaatgtgcagcataattttgctgttgaaatgtgcagcataattttgtatatgtgcagaaaaatgcttgtgtatggctggttgcggaaagggtagtacatatggnggtctggacattttctagcagatcccaacggtcaaaatgtagacttatgtactataaacgtccagtaaaattttcgagtcgatccaacggttaacgaactggaacgaagagaatgttactgtggtattcgaatgtgaaaagctgtgatattggtttgtggtttgggcagaganttctgcctttgccctggtttcttggctgtgttagtttgtgatgattgaatgtngaattacttggatgttgtggaatcttgggaggattgat

SEQ ID NO: 68596 - DNA, 348 bp, Glycine max
gattcaggtccaaccccaataatcattttaccacacagacactgctagtgaattatacaatacccacgatctcatactcgagtgtttaacacgtacatcatattgcgctacaatgtaacactggttactaaataggaacctacactttctctttaacactcggtcctaataaagaaacctacactttcttcttaacacatgcgcattgacactttactcaagataacaccggtcaggcgattttataattcataggtcacgataatattaatgttacatcaggtgtgaaacactttcacttatctacaatcgattatcatgcacacactgtagcactctattacatca

SEQ ID NO: 68597 - DNA, 474 bp, Glycine max
  unsure (1)..(474): unsure at all n locations
tgacaataacttatgactcagatgtccgattgtttcatttattaatgctcgacgctagaaattgaatacagatgctctcaccaaatttaaatgacaataactttttactctaaagtcttgattgtgtcccgtaatatatctagatgctcaaaattgaaaacagatgctctgagcaaattcaaacaacaatagctattgactcggatatccgattgaggtcattaataattcgagacgctcaaaattgaatacagaagctctaagcaaattcaaatgacaataanctttgactcgaatgtccgattgagtcattttataattcgagacgctcaaaattgaatgcaggagctctcaccaaatttaaatgacaataactttttactcagaagtctaattgagtcctgtaatttatctagacgctcacaattgaaacaaaagctcttagaaaatcaaacgaatgtgaactttgactca

SEQ ID NO: 68598 - DNA, 351 bp, Glycine max
  unsure (1)..(351): unsure at all n locations
agctngtnaatatgacaaccaaggctggcgttctatattttactncgatccacccctgagataggcgagacgatgcctttatgtatacatacgaaggtcagcaatgccattgcaggcggtggcctaagaactaaacggcccaatgggacaaccttcgggctcataatcatgattcttggagctggctatcactaaatccttggcaccatttattcttcctgttagggacaacacagttaatgaatagattgcatacatagagaaaatgaacatgagtgacatttaccttcaacccttgcttgacattggactctattagaaccactaatccttcaatacgtcagcagagaa

SEQ ID NO: 68599 - DNA, 467 bp, Glycine max
  unsure (1)..(467): unsure at all n locations
agcttgcaatgaaagatattgtctatttaggtctcttgtgtcaatctaaacacacaaaccaaggccataatcgaaaataggtaaggtagaaatgatcatagtcattggcggaaatattgacttctataactgctactaagcttgcaatggaagacattgtatatatattgatgaattttgcattcactaacacaaanttgtttaatttgtatgctcaaatctattagctcatgtgttcaacttgaaatatgaagattctattttacatnctttatttggcattatgtaaccttgtctggcacatcacaaatttttctttgatttctcttggccatagattagacctgtgttatatagctctactttgctgtagttaaaaaccagattatagttgcgtaagccatcaatgagactgaaaattgcaattgaaatattgaacacatgatnttagcaaaacagcgatagct

SEQ ID NO: 68600 - DNA, 126 bp, Glycine max
ctaagccctcgatctgcaaccttgctagcggctgatctttcgcttttctcagcctgtgtcataaatagatgtgtagcggattgaaacatcagacacgcgcgcgtatcctctaagcgagacttgatg

SEQ ID NO: 68601 - DNA, 413 bp, Glycine max
gctttacacctgagatcttgctaacacatttgagtgtcatcctttgaggtacaagtagagagtacatctacttcggtttgactgacaacaagagagggtacatctcttgtggatcagttctagttggagggtacatccactagggtttcaaagagaacaagggagggtacatcccttgtggatctttgcttgtaaaatgatttttacaaggttgaaagatatctcaaggaccgcatgtcgcttggggactggatgaagtacgggttgttgctgaaccaacataaaaactcttgtgtgtgtgtttgcttcttccatactcttgtacttttcactgtgcatttaatatccgcttttactttctgttaagtttctcttctactcctcattctcttaacaatctaggaaaagcctta

SEQ ID NO: 68602 - DNA, 330 bp, Glycine max
  unsure (1)..(330): unsure at all n locations
cagcttgcaattaacgttttatttatcaaaagttggtctctttgattaacacactattcaacatgccctccccttatagagtgattgttgctattacattattgacaactgatggctaaatgtctaaccaatgtaaaatcactttataacgaatttgatcacatctaaattcatcatgtgtatcgagatataatcacgagtcatcatcttgtcctaactagctagctctgggaacaatagaacaatcattcaacagaccatcttatagcccagntacatgatggtaatcaaaacaaaaggaacatgaatgtccccaatttggcaatactt

SEQ ID NO: 68603 - DNA, 477 bp, Glycine max
gggagttccaagtaggttaattgtcaaatagtttttgtgaatatcaacatgatattctcagctgtaactaaagaaaatccatagggcataaaagaaagagatccataaatatgctatcacacgtcaagctagtgatgtgaaagaagcactaactatgaagaaacctaaggatttggtttgttttgatttttttcctttatcataccttctaatattgaaatttttgatgtatgaatgcaggaggaagaattgccccaacaaattgacaacttgttgaagtgatttgacctcccttgccttgatgtgttgagatttcacatatttgccctggtggaaatggatctctccttggagaatggatctctcagtctcaaggtacgcactgtaagtcatttagccatggcgaagatggatctcgccatattgaaactgaatcgtataggcaaagcactctctacctgtaagctcgctttggta

SEQ ID NO: 68604 - DNA, 449 bp, Glycine max
  unsure (1)..(449): unsure at all n locations
agcttatgctgcagacatctacaatatacctcctttatctcagcagcaaaatcaaccacaacagaataattatgacctctctagcaacagatacaatcccggatgcaggaatcaccctaatctcagatggtctagccctcaacaacaacaacaacagcctgctccttccttccaaaatgttgctagtccaagtagaccatacgttcctcttccattgcaacaacaacaacaacaatagcagcatcaacagagacaacaatccactactgaggcccctcctcaaccttcattggaagaaatagtgaggcatatgacaatacagaacatgcagttctaacaggagactagagccttaattcagagnttaacaaatcagatagggcacatggccactgatgtaccattattttctcctatatcttaaccctgtttgcaccattataattact

SEQ ID NO: 68605 - DNA, 463 bp, Glycine max
agctacaagttgctcaatagctccaggttgctgctttgaaaggcaaaggtctgtatggtggtcagcagaggagcacaaaccacaaacccttgcgacaggtacagatttctgattcaaggccagctgggttaccaagttgaccaacgcatccagtttgccttcaagcttcttagtttcagatgatgcagatgggtttgtagctacctcatgcactcctctaatgactatggcatcatttctggcgctaaactgctgggagttggaggccatcttctcaattaaatttctggcttcagcaggggtcatgtctccaagggctcaaccactggcagcatctatcatacttctctccatattactgagtccttcataaaaatattggagaagaagctgttctgaaatctgatggtgggggcaactagcacatagtttcttaattctctcccagtactcatacaggctc

SEQ ID NO: 68606 - DNA, 473 bp, Glycine max
  unsure (1)..(473): unsure at all n locations
cgcttctacatatatgatntttagttcaacatattataatgactttcaacatttaaatgaaatacctgaatatcctcccagatcacatccttttcagttgcagggacttgtttccaattatcatatgtgacatccaccttatcgcaagcaataatcctcaaatatggtcttaatttctatatgtggggaccatcggttattccaattacaggatcaacatgaaccacttggctctctaccccatctggtctagtatccaacgatatgagtcaggttgttttcttgtcttcttaacggagatggtgaatgtgtgctaactcataaagacgaggggagctgggttgtgtaaccatgtgcctattatataacatacttaattaaacaatgtatgagaactatattaagtcgtgtaattgaaatttacatagcaagtaaatatataataaaatacactatacgatataatttattct

SEQ ID NO: 68607 - DNA, 446 bp, Glycine max
  unsure (1)..(446): unsure at all n locations
agcttcttcataaacgtgacatgtgtgcgcaatacttattgcctgttacaccacaacaaaatggtgtatgaggaaggcgtaatagaacttcaatggatatgattaggaagtatgtaatcaatttgactttacccgtatctttgtgaatgtatgccttgaaaactgtcatgtatntgttgaatagggttcctagtaagatagttccaaagacacctttgaattgtggacaaatatgacacctacgcacctgcaggtgtggggttgccaggcagaaataatgagttataatctgcaagaaagaaaattggatgcaagaacaatcagtgaatattatattggttattcagaaaatcaaaggggtatatgtttaattgcttaatcatagtatgagaattcttgaaactgaaaatgcacggttcattgtaaatgatgaaatcaatgcgagt

SEQ ID NO: 68608 - DNA, 484 bp, Glycine max
ttaagtcacctgcggcatgcaagcttcaacacatttaagggttggctacattctgattttgccctcaagtttactgaccacccactgtctatttgcttgtttgtcgtcacttctctgcagcaattatggttatgcttaaatgtctttatctgaaaagagtttctaacttcattctttgcacagtagatttcccaatcacaaaatgccttcttgcattttgctctagccctctgtttatcattcttcttccacttgaactccctgcccatcaatatgctatactccctcaaggcagatttaaattcatctagagtaccaaactccatccctaattccaacttctgttcaccagctccactactttgactatattgaggataaacttcaacatcctcatcttcatcatcactactaatggggatattaagctcctctgaatgataaccatctgtctcaacttcagctttaacttcattcaacatac

SEQ ID NO: 68609 - DNA, 409 bp, Glycine max
  unsure (1)..(409): unsure at all n locations
taacggagaagaacttttaagcttgattataggtttagctcctataatttggaataaattcggccttggcatccaaattaaagagataaatatatattgttaatccttaagcactacatgtaagggactaaaatgaattttttaaaacaacttttagtctctaaacgataaatttgagaaactaaaactgtattttttctttcaaattccaaggagtaaaatgattttctctttttaaatttagaagaccaacatcgggcttctctttttaggagagaaaaataaacccagactaaccacactatatgatatgactatgtngatagttataacgttatcgtagtggaggggtaaagtactatagtgatccggaatgaggagatattgggtttcatacccacactaacgt

SEQ ID NO: 68610 - DNA, 490 bp, Glycine max
  unsure (1)..(490): unsure at all n locations
ttaagtcacctgccgcatgcaagcttgcttaagaccgnatattgatatctttaatttgtattccatgtgttcctttccttcaactgagaaccccatgggttggtccatataaacatttttttctaaatctccattaagaaagacactnttcacatccatctgatgtagctccaagtcataatggactactaataccatgataatcctaaaagaatccttccgtgagaccggtgaaaacgtctctttataatcaatgtcatctttctaagtaaaccccttagcaacaagtctagccttgtaacattcaaggttgccatgagagtcacatntagtcttgaagacccactaacaaccaactctcttacaaccctttggtaattctacaagatcctaaacaccattatgttccatggagattatctcttctgtcatggcacttaaccacttcttagaaatatcacagcttacagcttatgataatgaaactgga

SEQ ID NO: 68611 - DNA, 429 bp, Glycine max
  unsure (1)..(429): unsure at all n locations
agcttatccttatggcttgtctgcggacttcttttctcttgccancctggaagatctaagccaagcccctactttcgaggggcagctcccaccttatgacgactatctcggacaagacgatgaggaacgagatacccatctcggtcccctgctccacctcaaagattcgttcccccatgaagtaccccaaccaaacataatccggcatatcccaactttacccacacctcgtaaagaatctggtctcttcctggaagatacggaaagatgatgcgcttgagagacggtagagcaactagggcccgacaatacccattctcgaactaggggcttatgactctgaccaatatcgtcttccttctagttcaagtccggacttgataagactaagggcgaatgacgaaaggcattccgatggttgttaaaacg

SEQ ID NO: 68612 - DNA, 491 bp, Glycine max
  unsure (1)..(491): unsure at all n locations
gacactttaaactcagctcctatncagacactctctggtgggaagctctcttccttgtgattacttagtggatggcgcctcgtcttagctctagtcctatatcatttgctgcaactccatggtggaagatcaccattaaaggacctttatgtgactcagagaaccagcctccatataatgctctcaagcaagcgtcgcgtcaagattctactatacgcattgcatggttatcgaactatggtgcgtacttctactgaggcgaccctattctcctttgtggatgagatggatgtagggctccctcttaaagtagagagtccttcattgagaattctagcagaatcaagggttggagaagcataatggggcagacatgtgtatactagttgaatcttattcaaggaatagaaatggctgacatgaggtattgggggctatatcagagaagaatgagtaaagcatgtcacgaaagggttcacccatgtgaatgc

SEQ ID NO: 68613 - DNA, 442 bp, Glycine max
  unsure (1)..(442): unsure at all n locations
agcttataagtgcgggtctgggagacgaatgtcatgtgttttcgatatgtgaaaatgatgttccgagtacttcggatttggtccgaccatgccctcctgatttccagctggaaaatnggcgagtggaggaacgccccggcgtttacgcaacaagcataatgtaaacctttacggttttaaaagctctatagttgggcctaggctatagagtattctctttgttaaagctttgtgtcttttggtgttgaatttataatacaaggatctttcttcatctgttcctggactctacccattcttattcatttgcatgtttacttctttttctgaaacggcagattcgatgacgaggccccctaaggtactaatacctgtgacccgtttatcaacttcgagcatgaaatgaaccacacggaagatgaaggagatgaggatgtgggac

SEQ ID NO: 68614 - DNA, 363 bp, Glycine max
  unsure (1)..(363): unsure at all n locations
agcttcggtatncaatgtcgagcgtctcaatatatttcgggactcaatcagacatccgagctaaaagttattgtcgtgtgaattagcttacaacatcagaattcaatttcaatcgtctcgatgtattacgtgactcaatcaaacatctgagcaaaaagctattgttcgtcgaattagctcacagcttcagaattcaattttcatcgtctcgatatatttcgtgactcaatcagacatctgagttaaaaagtcatcgtcgttgaattatctctgaggttcagaactctattttcgaacgtctcaatatattacgggactcaatganacatcttagcaaaaacgtattgtcgtctgaattagctc

SEQ ID NO: 68615 - DNA, 391 bp, Glycine max
  unsure (1)..(391): unsure at all n locations
agcntttacanaanatgttcatcaagtcaagttgttttatttatttaaccatcctgcagaataggagcataagatgaatcgagtcacatcactgcttcgtctactgccaaacatatgtaggattattgatgtccttgatacttccagtttcaccttgacaaacatgtcatggaccaagttgaaaatcttaattgattcaaccccatatcctgcataaaaattctcaatacgtcagattgtacatcattcgcatgcattcatgcttatcattggttgcattgcatatngcattctttccttgaaaaataaaataatataaaatgaacttatcataaagataatgaaacgctttacggcgccttaccgaactcgtgctataactatagtaatg

SEQ ID NO: 68616 - DNA, 455 bp, Glycine max
  unsure (1)..(455): unsure at all n locations
agcttgaataagagtgtgtgggaagaagtagtcattataacatgctatattgggtttgacatgcaatcacgtaagtgaaggtaagttatagccaaaagccaataagagattctttatgggctatgaagatggagtcaaaggattatgagtctggtctctatctaaaagaaagtcattctgagtcaagatgttgactntgatgaaccctctatgctgcattctaaatatgatgaagatttggccaaggctaaggatgtcactaagcaagtgaagtttaagagctccacaatcaataacattattgatcaatagcagtttgaagcacctgatgagattgattaggatctttaaatgcatgcttaacatcaaaattcagcaccaattgatgagagtgactagacgagtcaaaaccattcaaagtagccaaanaccacaacaccctagaatgtcacaag

SEQ ID NO: 68617 - DNA, 344 bp, Glycine max
  unsure (1)..(344): unsure at all n locations
tcaccttctgggcctcctcatgagtggtgcgtgttatttcatgctctantttcatcacccactcccagcatgtctccggatcattctttcctttatatggaggaatgctgtagttaataccatcaactcggctttgtctaggaacaccatcattccctcttctcctcctttcttcttgattatgacctctatactccatttgatccaacctctcatggagcgcatcatctcgttgttcattaacctctccacatgtcgatcacagcttgcattcggaaaagcgacagccccactcgatcatcatgactagtacctgacatcttcaacaaccaaatccaacgtaa

SEQ ID NO: 68618 - DNA, 466 bp, Glycine max
  unsure (1)..(466): unsure at all n locations
agcttataagaacgaaattgcctatttcatttcctatatgcatgtgaattaagaagcatcaacaagaatcaagccaaggctattgtgcaagcaatcaatggggcataacacaccaaattgagctttcaaaagtatcatgacatgtagagggaaaacaaggatttcaaatcacaaaatgtcaagagacttttattttcagaacaattacccattacttgaacatatcctataatttaaagacaaacatgcaaatttaacacaacaaaactaacataattaaactaatttaacacaactaacaaaactatcaaaaccaaagaacacccccccatacttaaacaacacattgtcctcaatgtagcacaattaagaagataatatcaattacaccatcaaatagaatcggacaaatgntataaatagtaatgaggagatatgaaaagaaaaactcccaaagtcatggtgg

SEQ ID NO: 68619 - DNA, 460 bp, Glycine max
  unsure (1)..(460): unsure at all n locations
agctagngatttcttaatacatccttattttttgtttatttctcacttcntaaatttacgctatatacttgttataggaaccttataattctaagtatatatagctgtagtatggttttctgccttaattgcataaatagtatggttgtttgcgatttcttgttcttagtaatgctaatactctatagttggataactcatatcaagttatatttcataaggaatactcttttgatcgcaccttctaattctagcgcaacctattctttgtgttgcgtgcttaagtcaaataaattgattacactcgaaagcctgagtataattaattctctgtgtatgagactacatcaaacaattggattactgatgtttctatcacaatcaagcgaatgttaatgtcttcatatgggtgtacattgtggtcatgtttttgtactacaattcattgaaatattgttgt

SEQ ID NO: 68620 - DNA, 309 bp, Glycine max
  unsure (1)..(309): unsure at all n locations
tgtaatcgattacacacatattgctttctattactatatgagtttttcataaacattctcaacagtcacatctttttgtgtggttcttgaatggctatcatatgcctatatatatgtgacttgagacacgaatttcataagagtttttcagaacagaaagatcttatcctcttataaagcaaaatcggtttatactcttacaaattccttggccaaattacttgtgattcaataaagaatcatttgagtgctcaaaatattcgatctatctctttcaaagagaattcntctctttttcttcttcattct

SEQ ID NO: 68621 - DNA, 454 bp, Glycine max
agcttctatataagctgaaccatttatcaaaatttcatttgagttttattcagaaaattagagtttatctcttttatcttagtgagagtgattctcctaaattcttgagtgattcaagaacaccctggctgtatcaaaggactttcacaacctttgtgtgttgccctcgctggaaagagtgattctttccttccaatcatctccacccttgttctttcagaccacaattccagaaaatccacctctgcccaaaattatctcgtgaccataactcccattttacacactcaaattaagtgattcttgagcctaaattgaatttcaaaacgagacctttcacctcgttttggaatcacctcatttggagccctgtagcttccggtattgccatttctatatttctgtccagccaccacttaacctaacgtttaccatcccattcattcattttatg

SEQ ID NO: 68622 - DNA, 451 bp, Glycine max
agcttatagttattggagggagaataaaacaatcttttatttaattgtacccttcaagtaacgaagaattctttttgcggcttttagatgaggagaggtaggagcctccgtaaagcgacacacaacttccaccgcatatagaatatcgggccttgtattggttagataccttaaactccccacaagactcttgaagaccatggagtctaccttctctccttcatcaaactgtgataacttcaagccaccctccataggtgtgttcacgggattgcaatcaagcatactaaatttcttcaacacttcttttgtgtagctttcttgtgagacaaagataccattctccatttgcttcacttccattcccaagtaatatgacatgagtcccatatctatcatatcaaattcacgagacatggacttcttgaagtcttcaaacaaatttgggtta

SEQ ID NO: 68623 - DNA, 436 bp, Glycine max
ctacaaatgaacaatacttggagactcatgcctcttctgctcatattaagctatcggatggcgccggatttataatatcaaatatcgagccgatgggtccatatatagatacaaagcacgcctggttgccaatggttacactcaaacggaagggttggactaccttgacacctcttctacggttgcataactcacctccgtacgagttcttctaacttatgccgcgctcaacaaatggcacctgcggcaactggacagcaactacacgtttctccatggggaccttgtaaaagatgtatatatgcaagttcccccgggacttccagttgataacccgcagctggtctgtcgtcttcaacagtcactctactgccttaagcaagccacacggcaatggttcacaaagatgtcaaacttcctcacctaccatggcttc

SEQ ID NO: 68624 - DNA, 437 bp, Glycine max
agcttataccaaattcaaacgacaataactttattctcatatgtctgattctgtcccataatatatacagacgcaccaaattgaaaatggatgctcgtaacaaattcaaacgaccacaactttttactcgaatgtccgattgagtcccgtaatatatcgaggcactcctaattgaaaacaaaatctcgtataaaattcaaacgacaattaaattttactcgtatgtccgattgagtctcgtaatatattgagattctccaaattgaaaatggaagtttgcagcaaattcacatgacaataatttttactctgatgtctgattgagtaccatcatatatcaagacgctcaaaattgagaacccaagctctgatcaatttcaaacgatagtagctttatactcggatgttctatggagtcctgtaatatattgagatgc

SEQ ID NO: 68625 - DNA, 402 bp, Glycine max
  unsure (1)..(402): unsure at all n locations
tgacaataacattatacacggatgtcctgttgagtcccttaatatattgttacgcaccaaacngaacacggaaactcttagaaaattcaaacgacagtaactttatactcggatgcccgacagagtgtggctatttatcgagggatgcttcaaattgaaaacggaagctcgtatcatattcaaacgacaataaattcttactcaggatgtctggatgagtcccgtagtttatcgagacgctcaaaatttaatccgaagctttgagaaaattgaattgacaataacattatacatggatgtccggttgagtccttaaatattcgagacgcccaaattgaaacggaacttttgtaaattcaacgacaagtacttttactcggtgttcgattgatacggtatata

SEQ ID NO: 68626 - DNA, 467 bp, Glycine max
  unsure (1)..(467): unsure at all n locations
agcttgtgtcacaattcattgtgacagtcaaagtgtcatttatttagcaaatcatcaaatgtaccatgagaggacaaaacacatagatgtgaaactacacttcattagagatgtgattgaatctgagaaggtgaaggtggagaaagtttcaacagaagaaaaccctgttgatatgttcacaaagtccctctctagtgtcaagttcaagcacttcttggacttgataaattttgaagatgcctatagcagattggtagaagtgcagccctgaatcgcaagataaacactcgctgatttggagtcaaggtggagaattgtggtgtgtgactcaaaaatcacaaatggcacaagtgggaagactttaagaggtgctgtcataactaaattcagttatgataactgaattggtttttgcaccaaagcatagctagagnggatatatatatatatatatattcctgtacatg

SEQ ID NO: 68627 - DNA, 466 bp, Glycine max
  unsure (1)..(466): unsure at all n locations
actcagctttcattattctatgtcccgagggtcccattgggatcttgcatctctttttcgatctagggactctntataccccctattgacgtgcttaagccattgtacttaagtcatttctcgcttaacttagaaataaaataaatttccaccgaacgtttgaattgtattatccattaatttcggttaacataaattccgaccgttcggtcgtgccgtatccacgttggaaatcaaaaagagggtaaaaataatataataatcaaaaagacatcctttattaaaataaagcggaaaatcaatcggacgttntctctttgggatttctcattcttaatcgaactgattaataactaaagtgaaactaaaggctanaatcaattcggctagtcaagctcgtccataagaataagctcttgaaggttgtcatttcattctctcactaagtaaaatggatcatttttaa

SEQ ID NO: 68628 - DNA, 398 bp, Glycine max
ctgcagcatgcaagcttgaaggttagtacatgaccaaatctatagtttatcttctttacctaaagcagtctgtgtatgcgattataatgagtgaagatagatcagctgtagaacaattggatttgtttaataaactgattcttgatcttgaaaatattgatgttgctattgatgatgaggatcaagctctgttattgttgtgctctttgcctaagagttactctcatttcaaagagactttattgtttggaagagattctgtttctcttgatgaaatacaggctgctctgagttctaatgaattgaatgaaagagaggaaaagaagtcctcttctagtggtgaaggctgacagcaagaggtaagaccttcaatatagatatgtaatttgacaagaaga

SEQ ID NO: 68629 - DNA, 443 bp, Glycine max
caagctattatgtgaaggcacatgaatggttgtatactatattatatctttaacgtgccctctcatgaatggtttcatactatattaaagctagcatggtgcattttaaccacaaacacccatgctcctccgccatggcctagaccacaaccccaaaccccaatgctccttccgccacacctcaaacccaatgtcatcaacacccacactcactccgacctcaatagaattcaacaaagaagacatcaaaatgcaagagaggggttcataccttctaatgatgagagtaatgtggaggagttcaaactttgacgtcgacaggggcacgatggtcttcagaagacgacggtgaatgcaggttcaataagacgagggttaaagctaggtaaggcgtgagacttgtttagagacttgattataacgacgtgcaatcaccaaccata

SEQ ID NO: 68630 - DNA, 393 bp, Glycine max
agcttcgatcacattggtagaaagaccatattaatatgtttattaaggccaaattgatgagccatgatttgtgggttgtaaggctcgacataaaatttgatatacctggatccagggtgtaacacgctaaaggtattatcataattacacttttgattctaaaatatgaaaaataaaaatatttatacaacaatctcatgcgaaagctaacatatatacattacaacttgattccattgataatatcaatacaacttatttctcatagctttcacattatacaaaatataagaaaatacagacaaaattaaataactaagcttcatataccatgacgaggcttcatgctccaacaaattgcaccatcatctattttctgaaaaagaatgaaac

SEQ ID NO: 68631 - DNA, 297 bp, Glycine max
agctcgtaagctacatttacaaccatacattgtcttagaactttatgagaaaattcacacaaaatactgtattaatgagacatggagttacaagatttgctaccactttcttaactttgcaaataatgcataagcataatgccaatcttataaggatgtttacttcaaatgaatggattaagtctagggcatttatacaccccgtgtgtatctacgtacacttgctgatcttattctcttatattataatgaggttctatctggttctgttttgcccacttttaaatgttgtcaata

SEQ ID NO: 68632 - DNA, 458 bp, Glycine max
agcttcttatccaaagctcatcttggaggctaatcttcttcttccttggcttattcccttgaggatggtgtctcctctctcctcttctcctttgccttccgctgcatctccatgggggaaaatcaccattgaaggacctcattgaagcttaaagatccaacctccatagaagccccacaagcaagcttccatcaaacactctcacacatgaatatgaactcgtcaaactggttcaatatgagaccatagaagatatgcataagagatttactcgtatcgctaatcatcttgtatcattgggaaaaatatttcctagtgaagatcttatcaacaaagtgttgagatgtttgagcagacagtgtcaaccaaaagtaacatgcattgcagaatcaagagatctcactaatatctctcttgccactctctttggagaacttaagacatgaaattgaacttat

SEQ ID NO: 68633 - DNA, 457 bp, Glycine max
  unsure (1)..(457): unsure at all n locations
cgcattntcattattggtctgcanatcctaacagttnngnnttgtttttctttctttnttttgagtcatttcattttaaatgaataattgttcccaacatagaataatttttcgactgttcctgttaggatataagaagaaggaaaagttagttaagatagttagactattaatatgttagttattactgttaggatattgattagttagttaaggggttagttagttagggatatttcttttctttctcatttcaattgttggttcctaacagttcctaactcttggactctggttgtggtcatacctgaagtgactattatgaatgtaataaaatcaggacatggttattatctcgtcttatgtggcaataaatntagctaatctattattacttangaagatgaatggtagatatgacttatgagggagaatatttctcaatcagaatgtctct

SEQ ID NO: 68634 - DNA, 454 bp, Glycine max
agcttaagagcaaaaactacggctgctaactcatgatcgtgtgtgggataattcctttcatgtatcttaagctgtcgagaagcataagccactacctgtccccgttgcataagcactccacccaaacccatcttggacgcatcacaatacaccacaaaagattcactcagattaggtaacactaagactggtgcagtggtcaacctttccttaagggtacggaaactactctcacattgggcatccaacacaagaacttgacctttacgagtaagcttagtcaaaggtaaagctagcttagaaaaaccctctatgaatctacggtagtatcctgctaagccaagaaagctcttaatctcaacactaacttaggactctcccaactatcactgcctctaccttggaaggatctattgctatccctctctagatataacgtgccctaagaagctca

SEQ ID NO: 68635 - DNA, 398 bp, Glycine max
agcttgatggtacggtaagcctcacatctcatgctttgcgcatatagcagaaaaattttgtgttgtagaaagcgctaagcgtagcctgccgcgctaagccctagatgcttatgggactttacaacttcaagttgagcctggcgcgaggctaggctaagcgcttgtgttttaaattcaaatgtcacattggcacgctaagcgtagctgtgcgctaagcgcgccatacgaattttagttttaaaaataaaggctcccatgcatatcttttgaaccacatttaatttgtggtcaaaaagaatcttttaaaatgaaaggggatgaaatctacaatttgtggtcaagatattacataatatttttgaacccatttaaattggacctccccttctttttgattc

SEQ ID NO: 68636 - DNA, 386 bp, Glycine max
  unsure (1)..(386): unsure at all n locations
ctcatatgtgatatcaagtgcatcttattttccttagagtcctcttacgangnggagggtgngccatgttctcagaatgtgcaaaatcataatgctcagaatcagaatgctcacaattataatgctcaagatcaggatgttcaaaatcaccaataacagaatgcacaaattcaccagttattgaatgctcataatgatcaaaacgtataaaatgatgcctaactaatctatgaaatgtcctatctatcttaggatcaaagggttgtnagtcagatggattgcctctagtcatacactacattcagctatcacacaacttgttgccttgtcatgtaaataaaggtgtacgtatgaactacagctaccctcatatgatattcaaatga

SEQ ID NO: 68637 - DNA, 420 bp, Glycine max
  unsure (1)..(420): unsure at all n locations
actgcgctcagcttagtgcatccttgtggggttttttttgcagcgcaaagcggactttgtcattggaagtgcggtagacaggctttgtggctgatttagggatggcctttgtcgataactgagtggtggttaaagaggangtacgtcatcgactgattaatgacattgttgggatgagagggaaacttagccgtacatgatagtgagtcacagcatgggttactcccacaaacttactctttttattagtctatgtttatcagtctcctctcatgatgaatatattgcctctttcagatcactatcgatcctttgttgcaaagaccaatccgaaaacttgaggtgcgacccgccttctttctagtggatacgatatgtgatacatgcgatttcgtctccttcattattgtggaacacctg

SEQ ID NO: 68638 - DNA, 463 bp, Glycine max
  unsure (1)..(463): unsure at all n locations
agctncatgacgangaaccatgcagatgtgatgattcttttagcctaactangtgattcaagattgattcaagacttcagaatacaatccaagattcaagattcatgagaagacatcaagaaccaacaagtcaagacttcatataggataagtattaaaatattttttcaaaaaccaaatagcacaattgtgttttacaaaagaattctctcaaattttctaagttaccagagtgattactctttggttatcgattatctagttggcagtaaagtttggttttcaaaatgtgttcaaatggtatacaacgttccaaaatgatcttcatatagtcgtatcaattacactatattagtgatcgattacaagtggatctgaacgttggaattcaaatccaattgtgaagaatcactacttttcataaatgaattgtggtattgatacacccttgtggaatccaata

SEQ ID NO: 68639 - DNA, 429 bp, Glycine max
  unsure (1)..(429): unsure at all n locations
cagctttcatcgagcaaagcagaggcggagcgggagttctataccttatatacangccacattcctctacaccagcgtatagagaagagacgcatctggcgagaaatcacgaacgaaccttctatagaagtctgcttacccatggaagctcctaatatgttcgcacatcttctagggggggacacttcttggatggccttgattttctcaagggccacttggatcccatttatcccaactatatcacgctatgaagactataggatccacaacaagacgactctcctatatatctgcatagagggtgctttgactaaggacagaaagaactattctgagacgccctatgagatcatcgaggcgcactatgacacctacatatcatcaaagaaacacaacgaatctcctataaacccttaaaaatgatgc

SEQ ID NO: 68640 - DNA, 191 bp, Glycine max
  unsure (1)..(191): unsure at all n locations
gctcgagacgcgtcccaccattttctagtaaacactggngacttatctactattatcgtgatcacagcggaggtctggcattggacgtgccacttgagctgccagatgcatccacctctggtgctataccttgtatgattcatgatctgtatttgcaagtgttctattataggatgctctccgtagccatt

SEQ ID NO: 68641 - DNA, 400 bp, Glycine max
  unsure (1)..(400): unsure at all n locations
caagctaatatctttctcaaaagaagcagggaggcattntataacatgctaataacaagtaataacattactacaacagtactaatgaaaaataaacaaagcacaacattgctaataacaaggaataacaataatgatgccttatgtacgtgcgatatactaggattaacaacaacattacaggcgtgatatacttattctaattaccttatgcacgtgataaacacttactcgaatcatccgaaccactatatacaaataaaaaaagttatctctatgattctacatctaacaaaaatattcagtattcaaacgctcatgctcttctttatctttgggatcaatttaacaatgaataaaaaattaaagtgctttaatatatatccatacgggacattat

SEQ ID NO: 68642 - DNA, 444 bp, Glycine max
  unsure (1)..(444): unsure at all n locations
gcttctaaggaggtgagcttagttatgagaggtgtgggngagcttttctctagcttctcaaggangcnntctcaaagaagcttctcaaggaagttttctcaagaaatcttctcaaggaagctacctagtctataaatagaagcatgtgtaacactcgttgtaactctgatgaatgagagtcttatgagacatacttcaaaggttcacttctctccctctttagtccttcaatatcgtgctcccacctctctctatctctccctctatctattcctcattgaagcatcctctccaagcttcttatccaaggctcatcttggtggtgaagctccttcttccatggcttattccttaatggatggcgcctcctctcacctctttttctttgtcttccgctgcatcttcatggtggaaaattaccattataggaactcattgaagctc

SEQ ID NO: 68643 - DNA, 392 bp, Glycine max
  unsure (1)..(392): unsure at all n locations
gcaagctagccttgcccctcgatatatttgagggacgttgtttcctatgaatgacaaattcctcgggataaaggtagtagtggccatgtntntcaataccacgtactaagagcatacacactccttatcataaattgaatagtcaagggtacagaccacttatcttttcctaaaataatcaattgaatggccttcttgcatcaacacagcctcaatccctacatttgaagcatcacactcaattgcaaaagatattagaaagtatggcaacgcaagaatggcggcattagttaacttttgctaacaacattgatagcttcttcttgtatcttcccccattagaaaccaacatttagcttgagcactttattgcaaggtgctgccaatgtgct

SEQ ID NO: 68644 - DNA, 471 bp, Glycine max
  unsure (1)..(471): unsure at all n locations
atccttnagtcacctgcggcatgcagcttaaaacgcagcacccgaatcaggtgtttatacctctcaatntaaaggattctctaggcttgagaagtgaaattgagaatgaggtaaatttgaagcaaattctcacctcacataagtccataacatcaatttagacttttccaaactggatttacacctaatatctcaccgaatcaaaatttgactcctcaaccccaaaatttatcctagaaatggctctttggtcactctggtcatttgtttttctctctagctcaacctaacctttctcacatgttctaaatggcatttcaagctaggattaactcatattaacctccatttaccacagaaggcagattttacctttcaactcttaaagccttactctgtnttcactcataacaccacatttctactttctaaccctagttaactctaccctcatctctacagttcccataa

SEQ ID NO: 68645 - DNA, 439 bp, Glycine max
atatactcagcgtagcgcatcttgttacaaacagtactggctcataaattcttataacgaaaaagaaagcacccatatacgatcagtgcaccttctgtacctaatatatgtacatgagctatcaaggagtattcgttaacgacatctcacacatttactttgctgagatacatacatgcatactctaagcactatgagtatcaataattgcattcagagcacaatctggtgatatgtaataccaatacatacacaaacattgatgataaatattgactatctacacaatatagagctacattttatgcttcgtttaaggggtgttactacctataagcccatgcatagttatgcataatatcttgtgtcacataaattgtattattaattaaggtgattgttgtaaggttattctttacatatcatgcgacatatttat

SEQ ID NO: 68646 - DNA, 436 bp, Glycine max
  unsure (1)..(436): unsure at all n locations
agcaagcttccatgggccacacgaggagtgcaacttattcttgcttaangcaantctctcagtttctatacttagaagatattctatacatacctagctttcagtttaatgtgtattctatatctaagcttctttcttcattgccttgcaagctaattttcatgaatgataaatgttctatccaagttatgtagaacctgaagaggattggtatagatgatatggaggaaggtctttatatgctgaagatgcttccttttaagcctctaaagagtatgatcctaattctatcacagtttcgattcctgctactatgtgcctgctgttcttgctagtgttcaccttttcatgtataaaatgcctagactgtggtactttagcttggcattcattcttgaaaaaagttgagttaaaataattatctctttcacaactg

SEQ ID NO: 68647 - DNA, 267 bp, Glycine max
actaagctctatccagttatcgggggagagctgtcttcatggttaaccctagggaagggcctctctcacctatctcctttgcttccgctgttctcatggtggagataccttaaaggacctcattgaatctcatagatccagcctccatagaagccccacaagcagagattccatcataggtgttctaccattattgcaggaatttaagaatgtctttcctaagaagattcctcatggactacccaccttctagaggcatagaacatc

SEQ ID NO: 68648 - DNA, 409 bp, Glycine max
agcttgttccttggttggaatatccttggcatattatgtcatgcgccctaaacaatattctcatattattattgcatgttcaaatatttaaattatattaaatgatctcttcggacttggtagtggcttccatcattatatttcatgattcgcttacttttctactttaattatgccaagcggtctggatgtctagtattgtcataactaggggttactggcattacttttctctcttatcacagcatcacattgcatcattatcatattctaattcattagcttactctctctttcctccttgtctacatacattcatttaatttgacatattccaaacaagagtttaaatttgtatgcaatgctatgatgatcgtcacagcatcattgaaccaaatccttgagggcc

SEQ ID NO: 68649 - DNA, 422 bp, Glycine max
ctaagctaccaccgggagtttgcaccggccgggcggcttaaactatgccttcccaacacaagccataagcttttgagatagagacctgttgacaaggttatattgcactgcccaaaggaatccatttctctgataccttttctgcagcggccaagcataccactgtgacgagtttgctctgtgttgctgctgctagcaactggcgtcttctccacttagatgtggataatgctttcttgactagagattgtttagggagcgcatattgtacttgccagggatataagtcacaaattcttccgtgggatgcaagacgacaatcattgatggactatacacgctttatgcacggcttgatgtctcactaccttctgagcatggtccatggacgcacagatctcctatcccttggtctggaccct

SEQ ID NO: 68650 - DNA, 394 bp, Glycine max
  unsure (1)..(394): unsure at all n locations
agcttaccagctgtagagggaggaggcttgcctctttgaatgcctttacctaaagaaaacaaacattccatacaatcaaaacagagacagcaaaatgtcttaaagaaaataccaaaatgtagtagtatactaatataagcataccaattatactgtattgaaacacttctacaaggtggttangaagcaaagcccacacaaaaagaaaaaaaatatatctcagtaacttgcaaattcaatcttctaaagaccaaaacatgaattattaaaatcaagtattctaggttgtatgccttgcatacataaatccaattagtacttatattacatgcatataaatgtcaaatggcattctatttcccaactataagtaactcatctaaggaaacccaaa

SEQ ID NO: 68651 - DNA, 452 bp, Glycine max
  unsure (1)..(452): unsure at all n locations
agctngtaggtcccatcaaagttattaattatactttcaagttgattctgaagtgaaggtcaccaatgctagagtgttttacaaggatctgatcctccaggtggacagagacgggattgatgataatggcgatggtttctttgccgtcaacgttgattatgtgagttttggttaggagtattagtcatgcaattttaagttaaaattgatccaaattaaacaaaaaaattaagtgtgatatagtatagttcgttttacattatttatcaaattaaatcaatttttttgatttgattgagtttaatttttgcagtttaaaaattctctatntttatgtatatatttaaaaaatacttaaaaatttcgtattaatagtataaaatttgaataataattaattcgacaacccaactatatgaataataatagnttctacaattatacaacaatta

SEQ ID NO: 68652 - DNA, 401 bp, Glycine max
  unsure (1)..(401): unsure at all n locations
tctatcttcttcttcttcttcccttaatctcatcaaaccttnttcttctcttctccatcgatttgattccgccaaattctcatcaacgcgctggtccttcacctcaatttcttccaagcatgaaaccccaccccctccattatcgaagacctaccatcccttatcccatctccgtctccgctcactccgaatcattttcaaaaaccaccatagaattggagaaaaacgggatgtatcaactttcttattgctgctgcctgcttagataaggtctacatagaattctcttttttttctttaaaaaaaaaaaaaagagaagaacgatctctttgaggggcatgaggcaactgtatattctgtcttgtcttatcacaaggagagcattcagggtcaaatatgat

SEQ ID NO: 68653 - DNA, 456 bp, Glycine max
  unsure (1)..(456): unsure at all n locations
agcttgntcctttcttctctttcttctagaatctctatgtttggttctataaaggtaaaaatggaaaagaacaatgggactaaccaaaccaagaggagtggtgaattggtataaaatcaaatcgtcaaaaaacagaattttaaaactnttgtgtcccaaaggatcgtatcacaactttcttttaaatcaatgttgaatcaatcacccgaacatagtaccctttttgtcaaaatgcatcaatttgaaatatctttgaaacttagaanattgataaagaatgaaataaagagatatgagagttaaatagaggataaagaataagatttatactggttcatcctctacctagagaatataatctaattatctaattcaacccgaataaaattttactatgcaatgtgagttttacaagcaatcacaagcaatntcaaattctacctagaaaatgaaact

SEQ ID NO: 68654 - DNA, 473 bp, Glycine max
  unsure (1)..(473): unsure at all n locations
aacaactagtcttatatcttctacaagtttccttgttctttgagctataggttgggctttagaggagatagaatgtttgcgacacatgaaattaggattgacacctgacaagttaactgcactgtatgcgaacaaatcaacattttattttaacaggtcctctatttttcttccaagatctacatcagtttatttcccgatcttcatgcactatagaaaatgattctcgagttgaaaaaagttaaatcttcaattggtgacggccttctgtcttcatcatttgatcttaggataaaagccacccaatcaattaatttcaagtcttctatgtaatcaaagttagcatcctcgcatacttgttagagaatagggtggggcgttgactangatacttttggcataacatattcgcgcttccttcaaatgtgggttttatgaacactatatgtactaacaatgaactagttttatat

SEQ ID NO: 68655 - DNA, 431 bp, Glycine max
  unsure (1)..(431): unsure at all n locations
agctngcctgtccgatgcagcagtaatgatggccttagttatgttggggaacggttaccaacccggaattggtttatgcaaagacaacggcggcataactagcctgataaatgccaaaggaaatcgtgggaagtatggtttaggctataagcccactcacgcggatatgaagagaagcaccgcgggaaggaaaagaagtggccaaagctcgcagttgagacaagaaagtgaaggaagcccgccctgccacataagcagaaagcttataagcgcatgtttgggagacgaatgtcaagtggtcgcgatatacgaagatgatgttccgagtacattggatttggtacgaccatgccctcctgatttccagctgggaaattggtgagtggaggaacgccctcgcatttacgcaacgagcataatgtaaaccttta

SEQ ID NO: 68656 - DNA, 399 bp, Glycine max
acagaattcaatatgtactatgtggcctcctatatcgcttctttatacgtcttgagctggacgccttatgacatgtcgatcgcagacctaatactatgcttacctttggctttagacttgggcacctataggttggacatgtgccagtagcaacgctctatcctttttgtggatgagctgaggtgaactctagaagcggtggtggtgcgtctgctaccgcgcatacccatgctactgtggtgttacgccctgcgcctgcctatgggcgcagtacttcttgatgaagactctattagtagggacctgatgaccttagctggggcgacaagcacttcgtaatactacagacgcccgaattatagttggcacttccagacctattggtcttctcgggtcact

SEQ ID NO: 68657 - DNA, 304 bp, Glycine max
  unsure (1)..(304): unsure at all n locations
agctcaagaaatantcnctgacaagagagctcccatcttatcttgtanngcttgcttatgtggcaacaagaaccctcactgagtctggaccactcacctctgctgtgtaaccattctataaaacatgttgcagtacatgcataccacgttaacatttactatatgttggtgtgaaagtgtacgtaacaaaataaagttgggaaagtaattagcaatgagctgacatttccctttcccattattcacanagcaaagaggagctctacgtcctgaagacatggccactatgcaccccaccttttct

SEQ ID NO: 68658 - DNA, 426 bp, Glycine max
  unsure (1)..(426): unsure at all n locations
ctgagaatcattcacatgacatggtctagttgcaggatgtgtattcttcaacacaactccaaaatctgtctaacaagtaacattaccaattaccaaaaccttttaggcttattntcattgacgtgctgccatatatcaagttaacaagtctcagctatatacaacgagatacggagttcatataatataacaagcattatgaactcattattgtcttatctttgatggcaaactattcatggattattaccacagaactttacaaaccataactatacacagtaactcagatagatatcaatactctagtttatctccgtatagctattgctagaccaacggtttgatggacgaccaaccacagagatctgaacacgtaatacctcatgaacagcaccttggcgaagcactcccaaaacatgctca

SEQ ID NO: 68659 - DNA, 473 bp, Glycine max
  unsure (1)..(473): unsure at all n locations
tgatgcggctgagtttgtagctacctcatgctctcttctattgactatagcatcacttttggcgctaaactgctgggagtnggaagccatcttctcaattaaatttctggcttcagcaggagtcatgtctccaagggctccaccactggtagcatctatcatacttctctccatattactgagtccttcataaaaatattggagaagcagctgctctgaaatctgatggtgagggcaactggcacatagctctttaaatctctcccagtattcatataggctctctgcactgagctgtctaatacctgagatatccttcctgatggttgtggtcctggaagcacggaaatgattttctaagaatactctcttaaggtcatcccaactcgtgatggaccttggagcatngtaatgcaaccagtccttcgtcactccctctgaagaatgaggaatagccttcagaaatatgtgat

SEQ ID NO: 68660 - DNA, 385 bp, Glycine max
caagctttgagcaacacagagggagcaaactcttctttcggaggtccgattcacgcgcataatacatcgagacgctcgaaaacgaacactggaagctctcgagcgattcaaaaggacataacttcatacgcaaacgtcctactcaggcgaataatatatcgagacgctcaacactgaccaacaaaagctcacgagaaatgcaaatggtcataacattccaactcggaggtccgagagaggcgcatcaataaccaaacgcccaaattgaacaagaaagctctagacaactcacaaggactaacttttacatggagacccgtcaggacaaacattttagacgctcgaaatgaacatggaagctcttgagcaacaaaaaggcacaacc

SEQ ID NO: 68661 - DNA, 418 bp, Glycine max
  unsure (1)..(418): unsure at all n locations
agctntagcacaagaatattatgaatgaaatatgtattaactctaaatcaacacaaaaacatgattcaagagtagatctacaaaattcgaaccacagatatgcaagaacaagtgtagatctaagatttaatcagtttatttgtcttgaatctactctatacatcaacaaaccacaagacaatggagaatatacatggagaataagatcaagaacaaggaattaaagagaattcaccgaacataaagatagaggaagcataagaacatcacctagatgaagatgctcttgataccacatgatgtaagctccatcggagcttgtaggcctaggatcttctttatcaatggattcctttgcttcttggaagatgaatggcagcggaatggagaaggaagagagagaggacatgcctcttca

SEQ ID NO: 68662 - DNA, 465 bp, Glycine max
  unsure (1)..(465): unsure at all n locations
tgctntnggtacanagaagaagaagaagttctatgtgattctcggcttgtaaaggattgtatgaataagagttcaagatgcattgaaatgcaaaacaaagtcttgctcttatagactcttcatgtctggtcaagacaactcattataagagttattacttttagataaacttaataccaattggaataagcctaaaaccgtttgaagagacacttctcttgatttattcaataacagccactgtaatccattaccaaatcagtgaatttgatacacatagcttttatgtgaaaggatgtgatctcttacatttgaatttgaatctcaacgtgcataggcactgggtatcgaataccaaaacattgttatcgattacgactattcgaatgtaatcggaacggtgtaaattcaattagaaaactttttcaaaacaagtttgctataactaatcgatacaacaatcta

SEQ ID NO: 68663 - DNA, 169 bp, Glycine max
caaacaccacagcagacaaggtgagctttcagcacgataaaccctggagggggaacaccctaccacagatggccaaccctcacaacacaacagcagactgtccttccatcaaaaaggagaggcccagcataccaaacatccttcaccaaccacaacagcacagacctag

SEQ ID NO: 68664 - DNA, 353 bp, Glycine max
  unsure (1)..(353): unsure at all n locations
agctntaagcccagtgcggactgaggacatatccttgttattcatctacaatgaccagctaattgagtgagtgggggaacgagacactgccctgcacaagagatcacctcctcagagacgaaggcgggaggacacaggtaacaccacggcccctcttgcacgattaaaaggaaccttctttgtagacaccaataaatataacccacccattaccgggcggccaacaactgctttccaaatacgcgagtctctatcaaactctattaactctaaccccatcgtgagccaacgaccacagtattacctctcttcctaactgcacccaaggcaatgataaaccctaccggtgccct

SEQ ID NO: 68665 - DNA, 427 bp, Glycine max
agcttgcttgagaagctactatggaggtcttatctctgatcttcaatgaagcccttcaatggtgattttcaaccatggaaatgaagcataagataaaggagaagaggtgagaggagacaccatccacttgagaataatgcatggaaggaggagcttcaccaccaagagaatgtcttggataagaagcttagagagttagcttaatggaggaaaaatatgagagaaagagagaggtgggcacattattgaatgagaatatgagggagagaagttgaaatttgaagtgtgtctcacaatctccacattcattatagttatgacacgtgttacacatgtttctatttatatcctacgtcactaactatatgatagccttcgtgagaagctagagtataactacacacactccctcttatagctaagctca

SEQ ID NO: 68666 - DNA, 205 bp, Glycine max
tgtgttatgtccgcacaggactctcattcgtcaatatgacaacaagtgtaacacgtgcttctatatatagactaagtagcttccttgtaaagctttcttgagaaaactgtcttgagaaacttctgtgagaggaactccttgagaagcttgcttgataaaacttcattgaggaacttctttgagagaactttcttgagaagctaga

SEQ ID NO: 68667 - DNA, 466 bp, Glycine max
  unsure (1)..(466): unsure at all n locations
agctaataagaacaaaattgccttaatcatttctatatatgcacgngaattangacgcatcaacaagaatcaagccaaagctattgtgcatgcaatcaacggggcaaaacacactcaaatgactataatgatggattgctcaaattcttacaaaggtaatatcatcactttcaaatcgagctttcaaaactatcatgacttgtagagaagaatcaatgatttctagttccaaaaagtcaagaacttctatcttccaaaacaaattacccattttcttgaacatattctataattcaaagacaaacatgcaaagtcgtacgagcacacaaaattgacccataatattaaactgaaaatccgaccaaactaacaacattaacaaattaacacaactaacatattaacataaccaacaaaactagttaaccaangaacactcccccgtcccacccatcttaaacaaaca

SEQ ID NO: 68668 - DNA, 139 bp, Glycine max
tcattataatgacttcattgaagataatgtcacttggtcaaccctgacataacagatattagatatgacctactttattcatttgactaagtcactgcacaaacatagaaaatatcttaagctaaatttgtatgcaata

SEQ ID NO: 68669 - DNA, 443 bp, Glycine max
  unsure (1)..(443): unsure at all n locations
agcttangaacccaaacttgtagcttcaatgcaaggatacatgcttatggctaggaatccaaaatttggttttagaattagaaaaacatgaaaattaggacttgcttgtgagaatttttgctcaagtttgggctgccccatgtttgatactttacatagaggtagcgtggaaaaagccctgcaatagtatgtatacataggtaaatataaggagcatgatattcctagcanagtgtgaatgattgtcttcctaaatgaatgtatgatagcacggaattcccttttgaatgcaagtgtgtgcataatgtanatagcttgtcaatatggataaatgtgaatgacacaataaaaaaatttgtatgatatatatttcaaacatatgtaggtagtctgtaaatagaaaatgttcaagatatacattaagtgttaagattgatgcaaca

SEQ ID NO: 68670 - DNA, 256 bp, Glycine max
ctcctagtaagagcctatatctctaatttgtctttaaaatgcccttttacttgttgttccttgagtatagctcgattcacctgagttatatgcaactatgtaatgtacgagagggtacatacatagaataatccacattttgcgaaggggtttgcaataagataaaatagttagctcgcctatgcgagcgtgtctgacaaaattttaaagaggggggtgagcaattctttcactatatctcccctcattcaaaata

SEQ ID NO: 68671 - DNA, 443 bp, Glycine max
tagcttgacgtcgaactagatccattcgctgtcctatttctctcatgctggctagttctagtttcttgactgtgacatgatataacctctcttcaaaggagggcgcttggtccgaccccatgtctgcgggaatgaaaattttgatgaccaatacttcaacaccctatcatagaggaggtatgatgaatgcatcatggcatgtttatgctatgcatgacaaatgtggtttatctacggacacaagagctcggaagaccatctctttttacccacaatgcattgggtatcatggttttgttgcagtcattaccatagtacccaacgcatgcaatgtagaaggcgatgcagacttttcggcttcccgtgatgaagatgatgaatactaatgcaaggcgtgagcaatgacaccacatgagtatgcatgcgtgacagtaattactaat

SEQ ID NO: 68672 - DNA, 306 bp, Glycine max
gtcgactccaaaacaattcatatcggatgcgttgcgagaggccggtgtgattaactgtggcggttataaagaagattcatgcttgatacatccaagggtgttgcatgatgttgtaaagatgcccaatagctaaagagttactgcatggactaataagtaggggtcaaatggaattccacaatgcagataaagaggaaggagaggtattcatgcaatcaagtgacagaagcccaagttagcctatgactttggtgatccacttcaccagggatattaccactcatatacctcgatgttctagccctc

SEQ ID NO: 68673 - DNA, 470 bp, Glycine max
  unsure (1)..(470): unsure at all n locations
agcactgcagctgcaagcgtgtatgcaaagtcagctctctgttaactgttaattgttttataagaagaaaggcagatactactctgtttcgcaaagaatatggaagtcaattcctaatcgtctagatatatgtggacaatatcatatttggtgctactaacgactctctggatgatgatatttccaatcctatgcacgtagaatctgatatgagtatgatgggagaattgaagttcttcctacgacttcaaatcaagcaaacaaatgaaggctctatccttcatcaaaccatggatgtgaatgaactnctaaagaagttcaagatggatgatgcaatgcaaaggagaacccctatgtatccaaccactatacttagactggacgaagaatcaaagaatgtggatgaaaagacatactgaacaatgataggatctcttctatatctcactnggagaagcaattcctgatga

SEQ ID NO: 68674 - DNA, 502 bp, Glycine max
  unsure (1)..(502): unsure at all n locations
actcaagctctgcgtactcatcttgcgtcgtcccaatatgacgatcctatcagtgctctgnttattctcactcagaaaggcatcgtggttcagtaccttttcgagtctgaagatcttgccaaccgaatcattggttttccctcccccttcctccttagatgctttgtgtcaggcctcacaccggagatactgtgggaggtgtatgcccatcaaccaatgaccattgtacagatcgtcgatctggcctgcttctagcaagagaagaatttcgacaatcgtcgtttttctcgacctcgcccttcgattcaacccatgcacccaccccttacaatacccatcatactctgccagcctataccacccctcttatcgtcaccctcacgtgtgtcaccaccacccttgaagcgactatctcggaggagattgcttccaccgggaacggggtctatgcttcatatgcaggagaattccatataggacaccgttttgccttatgcttttt

SEQ ID NO: 68675 - DNA, 307 bp, Glycine max
catgtatttaaactaatgaaacaagatgagaaatacaaagtagagaccacataaacgtaaaattaataccaaatactaaagggagaaatacagatcaagttctaagaggaacactattaaaatttcgtattctgttcacagtcagagtcaaactcaacaacgttcacgggcttacaggctcacaaaaccttgcatgagggctcaaacataaagagctatcgtcttacctttcccgtggaatatgcattgataatcatattctgaaacctctgccctccactgacagaaaagtactgctgcatcatga

SEQ ID NO: 68676 - DNA, 449 bp, Glycine max
  unsure (1)..(449): unsure at all n locations
ctgtcctcagatccctcttgtgggactagacttagaccaaacaatagtattgttcttcatacttaanaccaaaacttaattcacagatccctcttgtatgactaaatttcaattctgcttcattcaagttctaaggcaacaatacatttcccaatgttaaaatcacctaactaggcacacaaatggttgatcacactaagagcatacaaaagttaagcactgaaaaagcattgaacacaagagaaaaaatcaattagatatgagaataatgacatcagttgttcattagaaatccccaacaagggtgtttatccagtcattacagacgaaaccctaacaataataagcttacaaaacctatgtatctttgcacaagttgctcctcttgctgcctcgagagctcatttcctaaaatangcactgcggtgtgctgcggaattctatgccct

SEQ ID NO: 68677 - DNA, 461 bp, Glycine max
agcttctttgagaagctagatacttatctattcattctcctctattaactaaattaacttccttaaaaataattacggatgagaataatgctacacattatcgaacatcatacataattactaataatatatatatcagggtgttacacattggatacttgagaccgtatagtaagcataaaattgagtataccaagaacaatgcctttttattgactacaaccaaaactattaaaggtcgccaatgataagctctaaattgtatgatcaatattactatacatgttgaatttcaagagttgaagtttctttctaacctatgaacaaaaaagaaaggataaaaacatgccacccctctaaatatcacaatcttttaatacaatatttgtaacctctagaatataagtatatcattttcgactataaactctttttttgcttaatccttcaaaatgatattt

SEQ ID NO: 68678 - DNA, 478 bp, Glycine max
gatccttaagtcacctgcggcatgcaagctcgagtgagccaccatagagagagtcatatttgtaatcttccttagaaccctactatcactttgtatagtggaagaatctccatattggagaattataatcggatgttctcattactaccttcaattattaagtgcctatcttaacttcacgaagcggaatagtccgagttttcccaacaaaaataattgataaatacctctctcccaaatcctgactctataactagagttaaaccaaacaatgcctcaaacttaatgatcttaacaatgtaacacacgggtactcgtaggccctctagctagtctcttagtctccattagagacctattatttccgatacaccaaaatagctttgcaaatagagtgatcttaactaaatttcgaactagcgaacttgaggtcataatattttttttttgaacaatactatttatactttgacaatac

SEQ ID NO: 68679 - DNA, 372 bp, Glycine max
  unsure (1)..(372): unsure at all n locations
agctnttgatctagataatataattttcgtggattcttatgatgangcacaatctaacgaagaccttgatgatgatgatggagatggtgatggtgatgaaagtgatgatattcatggagatgatccaattagaggattggacatgctcctttgaaaacatctgagcttttttaattatgtaaatgctttaattctgaacacttatgcattgttgtcaaactctaaaagtaactctgtaactcttacgagtgtacacaagttcactcctagaccactagtctgctccgagtctgctaaagaaggagttttgctttcgattctactctcgggacttgagtaaacaagataactttatgagtttataatttgaat

SEQ ID NO: 68680 - DNA, 430 bp, Glycine max
  unsure (1)..(430): unsure at all n locations
agcttgtagcaaatacgaacgacatttacttttctttctgaagtccgantgagtcctcgaatatatcgaaactctcgaaaattaaaaccgaaggtcgtagcaaattctatcgacaataacatttcactcggaagtccgattgagacccgtaatatatcgagacgctcataatttaaaaccaaagctctgtgctcattctaacgacnataacatttcactcggaagtgctattgagtcccgcaatatatcgagacgctcaaaatttaaaaccgaagctcgcagcaaatgctgacgactattacttttcactcggaagaccgattgaagtccgtaatatatcgagacgctccataattaatacctgatctctgatgcacattcgaacgacaataagcattcactcggaaggtcgattgagtctcgaatatat

SEQ ID NO: 68681 - DNA, 426 bp, Glycine max
  unsure (1)..(426): unsure at all n locations
tctaaactntctacaagaatgaagctctgatcgggcttccgagataaatgttatnntngnncgaatatgctacgagcttctgttataaaatacgagtgtcaccatatattaacggactcaatcggacttccgagggaaatgttattgtcgttcgaatatgctacgagcttctgttttaaattttgagcgtctcgatatattacgggactcaatcggacttcagagtgaaaagatattggcgttagcattcgctgcgagcttcggttttaaatattgagcgcctcgatatatttcgggactcaatcggacttccgagtgaaatgttattgtcgttccaatttgctaccagctttcgtgttaagatatcgagcgtctcgatatattacgggacttcatccgacttctcgaggaaaagttattgtcttc

SEQ ID NO: 68682 - DNA, 474 bp, Glycine max
  unsure (1)..(474): unsure at all n locations
agctntatgttctaacttctaaacataggtattttggtgtttgaatattacacagattctaactactaagagaatgtgaagttctcccaaatatgcaaaaaaagaaaaggagaaaaacttaggttatatattcttacttcttaagaattctatattttgctgtttgccagtctaaaactctaaatggctgtttgaaagaatagagtatgcgatagtgaagaacaattatggatgatttatacaaacttattgcttggtaatcttgaatttatatcataacttatcttgaaaaaaattatctttgatctttttaaaaaaaaatagttattgcgcaggattattgcagagtaccactttggagagtctaagatgcatctggttcaaccgtacagaggcaaaggatcgggaaatagtagcaaggaagtgagtataaataaagatgttagaaaatctattttggatctaattcattat

SEQ ID NO: 68683 - DNA, 218 bp, Glycine max
ctttaactcgctcgagttatcttgctatagtcaatcaatagatttgaccgagaagtgttcaaactctttataaaaaaaagagcacaaacttgtgctaactagcccttgcggggcatagctaatcaattgcagccttgaaattattatcctagatcaaataatttggcgggtggattcaccttctgttgttattaaagttttaatttggcactttgcga

SEQ ID NO: 68684 - DNA, 459 bp, Glycine max
  unsure (1)..(459): unsure at all n locations
ncgctgcaagctagacgtcgaacttgatccattcgctggcctagctctctcttgctggctaattctagtttcttgacttcgacatgatatatcctcttttcataggatggcgcttggtccgaccccatgtttgcgggaatgaaaatttctatgaccaatacttctacaccctatcatagaggatgtttgacgaaggcatcagggcatgtttatgctatgcatgacaaatgtagttatctacagacacaagaactcggaagaccttctcttcttacccactatgcattgngtatacatggttgttcgcagtcattaccatgagacccaacgcatgcaattaagaacgcgatgctgactttccggcttaccgcgatgaagatgatgaacactaatgctatgcttgagcaatgacactacatgagtatgcttgcttgaaagtcatttctaaccgcctcaaag

SEQ ID NO: 68685 - DNA, 473 bp, Glycine max
  unsure (1)..(473): unsure at all n locations
agctnaagaaagcctagtatagcctgaagtgagctcttattgcatgtgaataatctctttctaaagcaacaaaatgttctaaagtgacaagtgaatatggagtctatacttgagcatcacaatctattgatctattaattgggtgctcgaatggttatgaacttttaataataggaagcaatgaacgaaagatcaatgaattcaaaggatgtatgatggctgatattgaaatgtctgatttagggagcttacctacctactgggaaatgaaattattccaacaaataaaggaatgtgcatgcaccacaaaagggatgcaacaaatattaaatattcaagatgtgcgattgtaatgtgacatcaacttctattgaaactggtacaacgtagaccaaagaaggcgatgaagatcctatgaattccacacgatatagacaactaggtagattggttagatatctatgtaatactct

SEQ ID NO: 68686 - DNA, 436 bp, Glycine max
cacagtcctcaacatggtcatcttcatgggcctcattgttctcatcactctttctcttccactccacgggtgcttctccgcctttctcttcctcttcaactttgtcatcattggcgtccttagccgcaataaggagttgccgacattggtttatgacgtacgttcaacggtgaataacatgttaaaccacgccacagtgacaggggagtgtatttttctaagaagacatatttgaagaaaattgaaaaagagtggataggaaaagaagtgatgctggtgcaaagcaaacacctgctttatatgagaataaatagttatgaaagcaacatggctgcgataccttaagcccaacttgactctttacctaactaaatacactatacaccaaaccataaagtgtacatcactaaataaataaataataaaatatgatctc

SEQ ID NO: 68687 - DNA, 464 bp, Glycine max
  unsure (1)..(464): unsure at all n locations
agcttatntagagcacaaaagtgcgtgctcttctctccctctcccttcattcatctccttcttcctccaagctcttattcatggcctcctatggtggtgagcttcttctagactcatcttctccttgaagtggagtctgctctctctcttcctatctccattccgctgccattcatcttccaatatggacttaaatgaatagatgttagctttggcccattagaggataatgagaactctattaagctaacacgttataagaagactatggtccccaatatatcgaaccgccacatatagtttctcctctcccccatataaagagttacgaacgtcctattaacgaataaagaagttttggttgaggaagatccatgaagcccgatgtaccttctgattcagattttctgcgtctgttgatcaatcatatggattcatgattctaaaagcttcttgatatcaac

SEQ ID NO: 68688 - DNA, 498 bp, Glycine max
  unsure (1)..(498): unsure at all n locations
actcaagcttcntttggacctcgaacaagcaattaactcctctntcagaaccattctatgtgctctcgactggtctctttcttcccttcgcaactggagttcactattgctaccccatagagctccgcgaaatttgttctggccatactcttccttgcgagccctcttggtctcttgttcaagggctcttgcggtaattgcattctcctcccgtaacccggcacactccttccgaatgtgtgttgcggccaacttgaacttctccttggcaaatttcgcctttcctaactcgcttttgagagcttggacttcttcgtcctctttcggtgcttaaaactctcttcgctgacgacttttaacttggcgagccaatctaaacctcgtatatgaactntcagccattcgtggtacccaccaatgatgccattacgaatgcctctaagttcttgatctttcttaacggngtttccatgccttatggaatcttgtatagcttgg

SEQ ID NO: 68689 - DNA, 465 bp, Glycine max
  unsure (1)..(465): unsure at all n locations
atccttaagcacctgcagctgcaagcttcaaaaaaaatagcctcagcagatttcttatttccagaaggaaattctatcaatagacctccaatctttaatggagagggttaccactactgganaacccaaatgcaaatttttattgaggcaatagacttaagtatttgggaagccatataaatagggccatatatacccaccacagtagaaagaattactatagatgatagcacatcaagtgaaagcaaacaatagaaaaacctatagatagatggtctgaagaggatagaagacgagttcaatacaatctaaaagccaaaaacataataatgtctgccctgagaatggatgaatatttcatggtttcataatgtaagagtgctaacgaaatgtgggacactctacaattaacacatgaaggaactacagatcgttaaagatctangataaacactctaacccatg

SEQ ID NO: 68690 - DNA, 162 bp, Glycine max
  unsure (1)..(162): unsure at all n locations
ggaccctaagtcactgcagctgcactaaaacgcgtcgggaacaatgtttttgttctataacnaaatgagctccgagacattggatgtggtaccaccatgccctcctgatctccagctgggacactgcggagtggaggaacgccccggcatttacgcaacgag

SEQ ID NO: 68691 - DNA, 279 bp, Glycine max
ataaactagccgtaggcggttaagccaacaaggaatatagctattgtactgaaaaactcatcggaataaagttcgatacatatcgtgtatttgtaatagatacgtggcgtaaatttactccgattgtaatataacgtcagcgtattaaacaagattaacatttattgagaagttctgcgctcaatgattcacagaagtgactatttccattaaatagtcatttgtggtaaaccatatcgtcagagaaggctattgagagtttgtgccttgaccaatcac

SEQ ID NO: 68692 - DNA, 436 bp, Glycine max
  unsure (1)..(436): unsure at all n locations
agcttgctaaatgaccaggatcatagacttattttgattcttctaaagaatccacttattatgcagntgtaatgaatatggagtccataatttactctctaattgaacttatacttttattgatatatttctacggatatgtatcatgtataaaggaatctggatacttttcataaagaaaatgatattatgactcacaaatgaccatttattgttgtatattctttatactttaaaagggtattatttattagtttaacttggcatattttcagtataatcacattatatgtcataccttattaccattttaattagtcataattcttgttttaaattaggtttaatatctcatctaaacataacaactactcattattttaattaattatcttttattgcacattattatatagtttttttctctctataaaag

SEQ ID NO: 68693 - DNA, 477 bp, Glycine max
  unsure (1)..(477): unsure at all n locations
tagtccaagaggaacactctgtgtgttttaagaatctttgcntctatggcacctcaatgcatgagcgatattgaatgatgataaagaaagaacaagggtgagacaagaaggatgaaatagactaccaagctctagaacacatgtagactcttggaagaagaagcaaagtacgcctttcttcctctcaatatgtctcgtgcaaaatgggaaaatatgactaagttgtggcttttaaaaacaagcctaagataagattatggctttggacaataaaaaattggatgtgaaaatcttatatctttgttaagtgtaatatggaatgactaattgacataaaattaaatcatattccaatgtggctagcatgcttcaattgtgtagtttcgctttttgcaacactataataaaatggaacggataagatttgctaaatatgcgatattcactttgtaccataactagtaaatattatttatc

SEQ ID NO: 68694 - DNA, 458 bp, Glycine max
  unsure (1)..(458): unsure at all n locations
agctttctccacagtgatgaangcgtcttatgtcttattcttccaccaagggagacttttcgacctccgaggttatattattaactctctccataagcttttaaatctctaagcagaaccggtcttggtcttgttcgaaattgccacaactaatggctcatggtttataggggcctcattattattatttttgaataattactctgatgaactgatagaaactatttatttcatatgtattgttattcaaatataagtgcggcatatcactctatttgttgctggttttcacgatgtgttatactcataaattcatatatattataatttaaactccctatatcatatcctctagtaattgatcatgataattgattctaagtgtttgtttcttcacatgatatgaatatatatatatatatatatatattgatttatatatatgtaagggcatcaaa

SEQ ID NO: 68695 - DNA, 348 bp, Glycine max
  unsure (1)..(348): unsure at all n locations
caatcctataacgcaacatggcggaccaaagtgggcagntaactngaatggccattattgtcaatgcggaaggattctacgcttcactattccatgtcacacattattgcagcttggggttacgtgagcatgaactactaccaatatatatatgttgtttacacaaatgagcacatcttaaaagcatactctgcacagtggtggcctcttggaatgaagcgcaattcctactctgatgatgcatggacactttccttgacgcactataattgtgcgaaggtcggccaaacaacaagataangaatagaggatggctgaaccatctaccaccacaaaatgtatatatgt

SEQ ID NO: 68696 - DNA, 369 bp, Glycine max
  unsure (1)..(369): unsure at all n locations
atatggtacttccatatcttcattcacagcttttttcacttctactcttcttttcattctcattttttcatctttttcaaattctttattttctttttctttttctacttctttatctttttcttgggcattcaattactttttcttgaccattatttgntnttctttttccctgattttttcacctctcacctcatttttcttaccatcagtacctttcttttcaatagctttcttcctgagcccaacactctcctcttnctcatccctcacaaaccttttactccttgtcatcacagctttgtattcctccttggcattcttttctgtatttgccacaaaactcgtggatgacttgtcagctatctg

SEQ ID NO: 68697 - DNA, 402 bp, Glycine max
  unsure (1)..(402): unsure at all n locations
cacttaacgcttaacccttacatatgaagctgacttggtccgctaagcccatttcaattcgatctgaaatgggctaagcgaccgccttgctcctaagcgtgacatgtcgcgactaaactcatttccttgcggccagaatngggtttcattgagctaagctaaactcatgctagctaagcacaatttcttgcggcatagcagcactaagcgatccataattcactaagcgcctacccctctaaatcaagatgcattantttagctaagtcggcccagagccaggcttagtgagagtngcaggtattntgttctgtagaactcgctaagcggtcctattngcacgctaagccaagctctntctctgtgcanannataataataataataatacaacattgaaat

SEQ ID NO: 68698 - DNA, 163 bp, Glycine max
tatgttctaccaattggcggccaagattcaagccagaggtaagcacagtactaggtccgtgaccaacaagcctttatgcgttcagctcaagacgttaaagaagcgctactatgatgccacctagtaccttctaaatctctgcttggtattagatcacccttgt

SEQ ID NO: 68699 - DNA, 451 bp, Glycine max
  unsure (1)..(451): unsure at all n locations
agctttgaacanatgccactctacttgaaatttctgttatatatgtttacaaggaaaaacaggtacatccaccatgagaatattgttgcggaaggcaactgcagtgctataatatagataattcttccaccacaacataaagaccctggaagtgttactattccttgttcaatcggtgaagtcactgtgggaaaggctctcattgattngggagccagcatcaacctaatgctgctctccatgtgtagaaggtcggagagttggaaatcatgctcacaagaatgacttcacaacttgctgaccatcacacaaccttatggggtaattgaggatgttctaataagagagacacatatggtctttccagctaatgtgatggtcatggatgtggaggaagaccatgatgttccagtcatgttgggacgtgcctttatgtcaactacaagctgca

SEQ ID NO: 68700 - DNA, 473 bp, Glycine max
  unsure (1)..(473): unsure at all n locations
gctntgagaagtagtcgattgtctttctctcatagttattcatggcaagcgatattataatgaagatccaacatgataatcctgttgttgtgggtgatgcccgaaacacttgaataccctttacgatagctccacacttgcagtacatgtcaataattattgtgagaacaacgacattcaactcacaattcctcttttacataatcatgaacccactccccatngtgaagtgcacctaagtgagcataaacacttaacatactcatcactgtaaattcactaggctgaacccttcgtctctgcatcttgcggaaaagctccaatgcctccataagccttttattcctaacatatccactaatcactagaatctaagtaactntagttcttgtaggcatgttatcacacaacctcctagattatcaacctcccacacttagcaagcccatgatcatagaattgaagccccacat

SEQ ID NO: 68701 - DNA, 447 bp, Glycine max
ctcttaatgcttcaacattacaaagaaattaatatttgatcaccgatcagaacatgtaatctaccttaggaaagataatatcaatatcacttgcaacaatgatagtgttgttattctgcttaacaaccgtggtggatctgatgaaattatctaatttcgcatgagcttgtggcggcatgagtaaagacaatgaatatactgttatggactatacgtcatgtggtgatgtcgcatccatgatctgtaatcgttaacataaattgggaacgaccttttcatcagtgttttataattctaagatcaatggattgcaattgtgctacctactataacattttataagcgtattgaccctattgttgtaaaacagaactgctactatgtgtgtaataaacatctcatccatcaatacacaatatagttaatcgtgaaataaatttatattta

SEQ ID NO: 68702 - DNA, 446 bp, Glycine max
  unsure (1)..(446): unsure at all n locations
ttgcccctcgatatattngagggacttatggtcatctatgaatgaaaattccttgggataaaggtagtgttgccatgttttcaaagcccgtactaaggcatacaactccttatcataagttgaatagttaagggtaggacaacttaacttttcactaaaataagcaattggatgaccttcttgcatcaaaacagccctaatcccaatatttgaagcatcacactcaatttcaaaagattttttgaaagtttggcaacgcaagtatgggggcattagttagcttatgcttaagaacattgaaagcttcttcttgtttctcttcccatatgaaaccaacattnttcttgagcacttcattgagtggtgctgccaacgtgctaaaatccttcacaaatcatctataagaacttgctaagccaggaaaactcctcacctcagtcacagac

SEQ ID NO: 68703 - DNA, 344 bp, Glycine max
gtcattctgcttggacgaatgagaaaactggcgcatatgaagagggtgaggatgaacgagaagcccgtgctgtgactgccattcctatacagccaagtttcccaccaacccaacaatgttattactcatgcaataacaaaccttcttcttacgcaccgtccagttattcacaaaggccattcctaaaattaaccacaaagcctacctaccgcactttcaatgacaaacaccacctttagcacataccaaaaacatcaaccaagaaatgaatttgcagcgagaaacctgtaaattcacccattctggtgtctatgctgactgctccatatcacttgatattaatg

SEQ ID NO: 68704 - DNA, 362 bp, Glycine max
  unsure (1)..(362): unsure at all n locations
atgatgacaaaggtgatgatcaaaaagctcataagatcaaagaacaactcatgtgaatcaaagaacatctcaagtgaatcaagaacaagtcaagagttcacgaatcaaggagaattcaagactcatgaagaaagcctataatcaagaatcaagactcaagatctcaagtatcagggtcaagattcangactgaagaaaagactcaaacaagataagtattaaacagttttttcacaactttgaatagcacatgagtgtttgacaaaatctttaccaaagagtttctactctctggtaagtcgataccatatcgttgtaatcgattaccagtagcanaatgagtttgaataagttttcaaact

SEQ ID NO: 68705 - DNA, 422 bp, Glycine max
  unsure (1)..(422): unsure at all n locations
attatgccaattggcatccatatgaaggtcaagagtgccattagaggtgttggcctttgaactaaacggccctcatggaaaaatattgggcttagaagcattgttcttggtagtggctcacacttgatccttggcaccatgtatccttcctgtatgggaaacacaggtaatgaatagattggatacatgagacaaatgagcatgagtgacatcttcatttaattctcgctngaatttggatcttatttgaataattttctttataaatacttatgcgagagaataagagaataanataaactaaacttcttggtaagttacaattaatttatgtacttccagtttacaaaagagataagtaattctacactctctagtttgttgtttcataagtgttataaaacagttatctaatgacttat

SEQ ID NO: 68706 - DNA, 465 bp, Glycine max
  unsure (1)..(465): unsure at all n locations
agcttctcaaggaagttatctcaagaaagcttctctatgattgctcctantctataaatagaagcatgtgtaacacttgttgtaacttcgatgaatgagagtcttatgagacacaactcaaagatcaacttctctcccttagtttcttccttcaatatcattctccccctctctctttctctccctctttcttttactccattgaagcatactctccaagcttcttatccaacgctcatctngcgggtgaagctctttcttccatggctgattccctagaggatggcgcctcctctcacctcttctcctttgtcttccgctgcatctccatggtggaaaatcaccattcaaggacctcattgaagctcaaagatccagcctctatagaagccccataagcaagccttcatcatatattctatacgctntactattcatagaatagcccaggaaaataccttcatc

SEQ ID NO: 68707 - DNA, 358 bp, Glycine max
atataaaattatggatgcctctctaacaagaatgaagcaaatatatcggccatgagtgaatgtgaaaggaatataataacattacttgaataacagattgctcaagttgaactcaaaccattatggagaaaaatgcacctttccaccacacacaagttggcataattttatccactattggacgtagaaaacttctttgatgacgaccttgtaagatatgaaccctccaatacctaaaggggacagagcccattgggaaacccattacttttcttataatatatatcttagcagcaggaatactattagcataaaatcgacatttggtaaactaagaagctgacctaaaccctaaaat

SEQ ID NO: 68708 - DNA, 422 bp, Glycine max
  unsure (1)..(422): unsure at all n locations
tgaagagagttcttccacgccagcacgcacttagcgcgtatgcatcttgtctttcgaggcgattgactcttctgcgctaagcacaagattgacgctaagccaaatattacttacctgtgctaagcacgagaatggtgctaagcgcgccttctaggtcagaaagccctttntaagcctgatttgcacagaaaaaaagaaagagggtgacaacgtgaaaaaagtcagaattgactacgaattatgtgcagagaacacaggaaaagttgagcatggaagcaaaggccttaacttttatgtagattctaggctttaaagatattttctatgttcttagaggtggaggagacatacccactgctttgtaacctgatattttctctgaaacccttcctctatttgtgaaagctacccccttgtaatgg

SEQ ID NO: 68709 - DNA, 259 bp, Glycine max
aataaacaaagtttacttgaaaatttttaattaaaccccttctctaaccagtatgcatgatcaagcaagtcaagtcaaatgctgtaaatacaccatcaactcctcaagagagctgaaccaaatttcaactttaagtttctgactaacttacctagtgtcactgttattgtataatttgtatacttaccaggcccatatatgaaataaaaaaagaataatattgctaataaaactgatgaagaggcatgatgtaactatt

SEQ ID NO: 68710 - DNA, 411 bp, Glycine max
cgcgggagatcctgaaaaccactcatgaatgaacctcctaggtaaagatgtccagactgcatctattggctacaaaattcgaaaatctgaagatgaaggaggaagaatgcattcatgactaccacatgaacattcttgaaattgccaatgcttgcactgacttgtgagagaagatgacagatgataagctggtgagaaagatcctcagatccttgcctaagagaattgacatgaaagtcactgcaatagaggaggcccaagacatttgcaacatgagagtggatgaactcattgggtcccttcaaacctttgagctaggactctcggatagggctgaacagaagagcaagaacttggctctcgtgtcaaatgatgaaggagaagaaggtgagtatgacctggatactgatg

SEQ ID NO: 68711 - DNA, 100 bp, Glycine max
  unsure (1)..(100): unsure at all n locations
agcttggtctactcatgctagcnctcgtatattgttatgtctcaaggggtaacacgcaactgaatctgtggngaattaccttcttcttgggtttctagtt

SEQ ID NO: 68712 - DNA, 360 bp, Glycine max
  unsure (1)..(360): unsure at all n locations
cgntcattcacctactaccgtcgtacaaggcacattcacttattgttgtggtagtcattgaactcaaagcttggcccctctaccactatagatgtgtcttatttttcataagtgtaacatcatcgaagcttgttcatccacctactactatcgtacaaagcacaaccaccagttgttgtggtagtcattacactcaacgcttggcccctctaccactatagattgtctttatttttcataagtgtgactcttgatctaatttcaatttctcatgaataaaggcatttctttatgttatcngtgtttctttcatttactttgttgataggcttcaaaaaggaacacaatgacctagtgtct

SEQ ID NO: 68713 - DNA, 395 bp, Glycine max
  unsure (1)..(395): unsure at all n locations
tcttttcatctaagggagtagaactaagaaaacatttactaactgattgtaagtaatacctttgttatcggctaaatcttttatttccagctttgtttntattataaagccacaaaaagatcattttaaccttgattatgcacttgttcggatttaatctttacaaaatcgactaaagttattatntntattgctntcttgtaatatttggtagcttaagttgatatttacttgaaaaatattaatattgcataagtttctaggaaaatgatacatgacttttctattatacaacttgaacaatatggtatgcttaccaaagagatagtagcacataaagatgtnntgactaactgtattcctactncaattaaannttaattatatgacttata

SEQ ID NO: 68714 - DNA, 423 bp, Glycine max
  unsure (1)..(423): unsure at all n locations
acatttattaatgacaatggccaactatttattttcatttangaatgtaagtataattattaaaagactgactcatggacaccttctttctttatattatgtttggatgaggatttttatattttcaaagaatttaaagtcatagaaattcaattgcctatggttaccccataggcccaacactggcctatggagggaggcatccagctagaggggaacatattatttgaaagggatgtcactgggaagaatattgatgcatgttatcattttggaaggatggagagttggatatgaaccctgcctggcggtaataggcgaaggaattatcttacacatggttgggcaagcctgctggcttgagggagaggtctttcctatcctatgttatgtcatttctactggtttatcattctgtttcct

SEQ ID NO: 68715 - DNA, 101 bp, Glycine max
ttttaaaatatttatctcccaaatcttatgtttgtgaaattcagtgaatctatttaaaaaaaacaaatgaaaaaatatttgttcttatcttaaaaacagtt

SEQ ID NO: 68716 - DNA, 366 bp, Glycine max
  unsure (1)..(366): unsure at all n locations
gctngcctattaacctgagattagagaaatgattatttatctctcaaatggaagcactaagtattgattacctatacataacgcgaaatacttataacactacaaaataaccatatattggaagagtttgatacactttacacatgttgtatacaacaaagctcgccatattcaccgactaacagtgtgctatatacttgctatagaaaccttataatcctatatatgcttgcagcatggtgttatgccttacatgcatagataatatggttgctcgtgattattgttcttagcgatgctcataccttttagttcgatgacccatatcgggatatatctcataaggaatactattttgactatacc

SEQ ID NO: 68717 - DNA, 462 bp, Glycine max
  unsure (1)..(462): unsure at all n locations
taagctcgagatgtttgtctttacattcctaactcccttgagtggcatatgttatggttgttatattggaggangcanaccnagnacatatcatatcttttatgcatcatgcatcatcatgagtaagtgaaaagaagagtttctaagttagaaaagtttcttcaggaggaagaactctctattntaatcgattacaattctatcgtaattgattacacaagttgtctgaagcttgcaaagtatgtctcgtatctattaatcganacaaccttatcgtaatcgatacacaattgtatcaaggcaatgactaatatattaggtgtctctgcttaatcgataccatgtggataatcaattatttcttttctttaagaatcagatgggacaaaacacttaatcgatactntcagantaatcaatacattgtcttgagttgttccagatttgggaagaaacttaatc

SEQ ID NO: 68718 - DNA, 251 bp, Glycine max
  unsure (1)..(251): unsure at all n locations
aagctacaattcattcacacacctttgattctaatatcaactctctatctagagaaaatcagctccaaagtaggttacttgatcatgaanaatgctctaagtcctacattgggtaaaataacctcatgaacccctttcttttcctatatatagaggagatcaataagccttatattcaccaaagaattaaatgggcttaacattaagcgcgatgcccctcaatctatttttaatatttcctttaaagtttc

SEQ ID NO: 68719 - DNA, 371 bp, Glycine max
  unsure (1)..(371): unsure at all n locations
aacagagcaaggcagaaactctgctaacactcaaccaaaatcacagcttttctcacttaaagaccccagtaacaattccttcgatccaattcgttaaccgttggatcgactccaaacttttactggaagtctatagtgcataagcctacattgtgacccgtgggatcgactagcaaacatccagaactcattctgtactactctttccacagccaaccacacacaagcattntctgcaccaagctaaaattctgctgcacctatattgacagcaaaattctgcacaagtgcagatttcgaaaatcacactttcnctcatccaatcttgctcaaatcaaatgctacaagtcccaaatcatgtaacacacatg

SEQ ID NO: 68720 - DNA, 343 bp, Glycine max
cacaaaaactaagctaccttcattcagtacctatgtaaactgacttctcttatttttaactactttactatgtgtgggtaatataaaatgtgttcctaaatctatactgttgtaaagtaatatcttgatcttcggctcatatggtaaggccttaatagaatgaactgatcctattacctgatgctgaataatctgacataatatcatgactttaatgtgtgcccaaagttatacctgtgcacatggctatgtaatacacaactgcttctacaaaaatatgttaccgattggataagtaacaattagagcttataacatatttttcctgaccatgaattgtgat

SEQ ID NO: 68721 - DNA, 374 bp, Glycine max
cgacataccttttattctttgtcggatcgaccacgtcatagctcgagacgctagtaattgaataccgcagctctgaagcaattcaaacgacgattaacttttactcggatgtaggatagagtcacgtaatatgtaaagacgctcgaaatacaataccgcagctctgagcaaatacaacgaaatacctattgactcggatgccagattgaggcacgtatatgtcgagacgctcgaaattgaataccgaagctctgagggaattacaacgacaagaccttttactcgtatgttcgaatgaggcgcataatatgtcgagacactcggaatcgataaccgaagtctgagacaaatcatcgacataaatttttctcggt

SEQ ID NO: 68722 - DNA, 419 bp, Glycine max
ctaagcttaacattcaatttcgagcgttcggatatattacgggacacaatcagtcatcctatataaaagttattggcgatagaatcagctcagtgcttcggtattccttttcgagcgtctcgatatgttacgggactcaatcagacatccgagtaaaaagttattgtcgtttgaatttgctcagagcttcggtattctatttcgagcgtctcgatatattacaggactcaatcagacatcctagtaaaaagttattgtcgtttgaatattctcagagcttcgatattccatttcgagcgtctcgatatattacgggactcaatcagacatccgagtaaaaagtaatagtcgttgaattcgctcacagcttcgcatacacattcgagcggtccgatatattacgggactcaatccgacat

SEQ ID NO: 68723 - DNA, 413 bp, Glycine max
  unsure (1)..(413): unsure at all n locations
gctttgagcanattcatacgacaataaccgtttatttggatgtctgattgagacccctaatagatcgagacgctcaaaattggatgttgaagctctgaacaaattcatacgacaataactttttactcggatgtgcgattgagtccctgtatatatcgagacgcacgaaatggaataccgaagctttgagcaaattcaaacgacaataacttnttactctgatgtccgatagaggcccttaatatatcaagactctcgaaaaggaataccgaagctctgagcaaattcaaacgacaataacactttacttggatgtgcgattgagtcccgtaatatattcgaacgctctaaattgaatgatgaagctctgagcagatataaacgacaattaccttttatctcggaggccggat

SEQ ID NO: 68724 - DNA, 464 bp, Glycine max
  unsure (1)..(464): unsure at all n locations
gatgcanataatcaaaactggtgggaatactttatgggaccactggaaaggacataagaccctaattatgatgataccttacttaggtccaacatatattttaggtaatgataatattgaaaaattattcatcaaacttaaggaatattgcaaactanatcaagatattgaaaataacaannattaattaggatagaattgattcattaatcatatcaaaatttcttgtaacatgcataataatactagaacatatgtagatactagaacatatgtagatattatatcttactagatcttttattcaagtataaaaaaagcaataattatttaatntaatttgatattgaanaataattnnttgaagaattgataattgngatatatttgaaataatatttgtaatttgaggaaatcaattaaattacggtaatattgacaaataaatngattcatcaattata

SEQ ID NO: 68725 - DNA, 494 bp, Glycine max
  unsure (1)..(494): unsure at all n locations
ggtctttggatatggaaaataaacttcaatattagaacacatattatgttatatattagacgatccatcactagatgactcggacatctcttaaggtgttaattaaaacaaaaantataaattgtgttaatcattctcttatatgtaagtccaacatgtttggtgactcgaagtaataccagatgagacttatctaataatggattcctcgtccaatgaaaacaagaagtacttgtctagttcacctgtaacatcccatttttttttataaaataaattaaaaatgagtttatttaaaataaatagaattttaagaaaataataagctttttgtaattaaataattaagagaaatagttttattaattaaaataatagtttttagataaataaaataaatatatgtntttagaanaagagaatttatttattcatttgacagggagtaaaatagattttctttatataaaatgataaaataaggaanaatagag

SEQ ID NO: 68726 - DNA, 474 bp, Glycine max
  unsure (1)..(474): unsure at all n locations
cttgagagagaaaaatatagttntaaaagacagtgttctctctcaatatgtagatagaannnnactacctccactgtctcaattcaatgattatctttcgaagaaaatcgtgttccgggaattattagatattaaacgcaaatattgtttataatagagtttaaactttgattcatcacattgtaaataattgttttctttcataaatctaactccccgttaattagatgttatcaatattatattcgttgtgtcatttgagtttgtattntacacgctactcaagtagcanaaactctattcttccattgtcttgaactaccatatntntaactttatgtgggtacctctctttctttggaaaaagcatctcattaaagaatcatattaaatataacccatgtttagcatgataaatggataaaaataagaaaggtacttacctatacacgataatcgtgtaacgatccctat

SEQ ID NO: 68727 - DNA, 413 bp, Glycine max
  unsure (1)..(413): unsure at all n locations
ctatgccaatgaaaggatcgatgtgngtctgtatatttgctaatatagtcatcctgcttggacgaatgagaaaactggggcatatgaacatggtgagaaagagggagaaacccatgctgtgactgccattcctatacgaccaagtttgccaccaacccaacaatgtcattactcagccaataacatacctcttccttacccaccgcccagttattcacataggccattcctaatataaccacaatgcctgtctaccgcacttccaatgacgcagaccacctttagcacataccataatacaccaacaaaaaggaatattgcagcaaaaagcctgtagggatcaccccaaattacgttgtcatatgctaaactngatcccatattcactcaataattcaatggtagccatatcc

SEQ ID NO: 68728 - DNA, 490 bp, Glycine max
  unsure (1)..(490): unsure at all n locations
acacacacatgtatcttatcacgaaattctatgattaanaacatataacttctgaatataaattcatacatgcatatatgtcacaacacanagtttccttngttaatctgagttgtaattntttagggtgttacaactctaacttattttaattctacatcatataattagagactttaattagtcaccaactaattaaactaaaattctacttttaaaccagttatatagttatttacaaaaatggtctccactttaaactcttatgagttcattaccccttttctaattcaatggaatctagatcaccattaatcaaccttaattatcctcagttaatttctaagnttacttacatntaattataattttctttcaagcttctaatntctatttctagaccanaatccaattattaacatctangtcattaatgggttgaccattatntgaccaaagaaatttattngaatatccttattcttataga

SEQ ID NO: 68729 - DNA, 367 bp, Glycine max
  unsure (1)..(367): unsure at all n locations
aaacttccaaagaaaaatgtccgattgattttttgattattctattcacagatattttgattattttattattttttttgctcttttttggtttaaccgaggttacaacgtgaacgatcggttagattttgttttaacagtgattaaacgatattacaacacatatgatcgattgacattcattttattatttattaggtgagaaaacgacttaaggatcggnntaagctcgtttataacggaagaaaagaaaccaaacttgaatgaaataaagatgaaagccataaaacacgagatggattaatagtctcggattcggaaacttacccatcgaagaacgaagaacggatgaagaactgtgaagaac

SEQ ID NO: 68730 - DNA, 436 bp, Glycine max
  unsure (1)..(436): unsure at all n locations
tcaagaaacacacacacacattntttcctagtcgatcactcacattacattccattctccccctttgttttgaatttatgcttcacttaaaataatatatgcttcacttaatttaaatatttgttttatcttcattctatctatttgtagcctccccatcaaacacaacccaagataaggatatgtccgttaacttggtctatttaggcgtgatttgagttataagttataactaaatagattggaataagttggacacaattttctctctctctcacacacacacatataaatagaanaatataatcctcacagaaaacatgtcctggttgcanatcatgttcatgtcctttcatattcttctgacctcanagaaacagggaacactgagtttgatgatcctatagaagaggggttggtcangtganaacaaaca

SEQ ID NO: 68731 - DNA, 476 bp, Glycine max
  unsure (1)..(476): unsure at all n locations
actaagcttacattccagcttctaaatctccttttcgggaatctgagcccaccttattgcttgttcaataatggcctcaagagaatttcagaatgacaagcataccctcctcattcttctgaaccctaaaattttctctcgttcctgagaacttgccgtgctatgccttcctcgaaatttttctctcatgcttctgatctccttcgtcacctcttccgatcatccttcgtcattttttttcttcctttgatagcatcacangtgtttttcttcgncattctttttcttcttccttcgacactttttcttcttcctttgtatgctgttgttcggttcattaagcttgtgaaatgtctctcaatcaagttcctgtgaaaagaaagaaagcacaatggtgtgataaaaatactgagattatgttgaaagtgtgcatataagaggtgaatgctggaaatatacctcacaaccacttcact

SEQ ID NO: 68732 - DNA, 296 bp, Glycine max
ctgctataaagagttggttctgcatcctcattagaatatacacgtgtcccttacatatgagggttctcctattgatagtgcgcgaactgttgcatgatcatcctaggagaatacttacctagagcggcgtatgcgtgtcttcttatgaatgtaatctttctaccttcacgcttagcaacgagctatccttgtaacatcctcagctgtatgagagtgacatttacacttgaggacgcgccatccttcaactgtcttacattggtctggtactgtacaagatcctaacccgccttatg

SEQ ID NO: 68733 - DNA, 285 bp, Glycine max
gaaagaagaagaagatacggaaaaagaacgaaagaaaacaaggagggaagggcacaaatgaaaggagaaagagaaggaacagatgggactaaaggaaagggagagagagaggtagaagaaaagaaaaaaacgacacgaaggagagggaaagaaggaagaagaggtggaagggagaaaggtcagaagagaaggaagaagtagaagagtggatcagtagagaagggaaggaagaaaaaaaagaagaagagagggagtagaacaaaaaaggaacagaaaagagggaag

SEQ ID NO: 68734 - DNA, 469 bp, Glycine max
  unsure (1)..(469): unsure at all n locations
tcctcattgtgctcatcatatatcatgttcttttcattattacggcctttccatctaaacaataaaatgttcgcttgatttctattggatgtacatcttgctgcatgggaatgtttctaagttgtgtcttgatgactggttggtcatgggtttgaatatggaaacaacctctttgtatatgcaaggataagggtgcgtaaatgacccttccncggaccttctcattagctgaattgaatggttttgacttctattctcctgttcaattggtttaattttagagctttgtatcattgcattggtcattcaaacatctcaaaatgttcatgcaaggggcatagtctgttgcactatacaaacctacatagcaaatgctatgcccattggaaacatccgggattgtgcttatgggaaccatgtttagttactaactnttaaactcatttagctttaccttctcagatatccc

SEQ ID NO: 68735 - DNA, 465 bp, Glycine max
  unsure (1)..(465): unsure at all n locations
tacaacaacctagcacacatactacatactacgcttaaaaatcttcacgcttcatgacactaaattcatgaaaagttcacaaggtaaaaaggcccttattgctcgtttattttaccacagaataaaaaaatattacactcattcctacaataaacagctcacaaattaaaatgtgcaacttaacagtacatttgacaaataaattgtggatacttaaatgtaagtctttttctgccacttgcatctataatngcatccacccacaactatttctgcactccaaccaacagacatgtagataataatacattcacatttcatactaacatcctctgtatataccagaaaaacaataaaaactatggaaatatgatactgcaacacatcttttatcatttacaataacaatcaatatcaataatcctttccttgaagcaagaacaataaaagacaaatctatcatgt

SEQ ID NO: 68736 - DNA, 246 bp, Glycine max
aaaaaagatgataggaagaaagaaagaaaggaggaaacgtaagaaggaaggaacaaaaagaagagaaaaacgggagaaggaaagaagacggtaagaaagaaggagaaaaaaggggagtaaagagtaagggaagccggagaaagggagggagagagaaaaagaaaagcaggaagaagaaaaaaaaagaaaggagggaggaaatatggtagaaaagcatataagaaggataggggagaagtggaagaa

SEQ ID NO: 68737 - DNA, 271 bp, Glycine max
acgaccacgagaagaagaggaggaagaaaacccaggagaaccaccggcacacgcatcacaacaacaagaagagacggagtagccagacagaaaaagaggcaccaggagcgcgtctgaagaagacaaagctcaacaccgagggcaccaaacagaaacacaaggcgaggccacgagcgaagcggaacgaacagcgacccggacaggacacaatgagacatcagcaccagagcccgccagacaccaaacagcgctagagctacggagcacacaa

SEQ ID NO: 68738 - DNA, 470 bp, Glycine max
  unsure (1)..(470): unsure at all n locations
gcttcttncttagccatngtagtttactattgtaattctatgggttgtcttattctatctcctattggatttggattatggtgtttgtaatcattcagctagtaatccttcccttttctcgaaattattatcccccacaacacgacatcatacaattctcattgacatccaatggctttaaggtattccctattgacattgataagcttcacctctccatcattgcctttatattttgaaactagtatatgaatgtacattcaattcattttaattagtcaaactattctctaaatngttttataaccttttgttacggnatgtcaaatagtcccacatcgcttatgatttgagaccgagaatattttatanacacncttctcccttaatgcattgaggcaccttttaatgaanaaaaccatgacagagcaatcatgcatcatatcaaacaatacctcagatgtgttatc

SEQ ID NO: 68739 - DNA, 471 bp, Glycine max
  unsure (1)..(471): unsure at all n locations
atactaagctggcngtgattgactgatatcgaggatactntattggtgagnactatatttttctgtcaggggagtttcactaggtcccatgtcaaccctctaacatggcaactaacaaatatgagttacgtaaggataggtcattcaagtctattctctaattgaatccagctagtatcactttcgtacagtatacttcttatcacggtaatgcgaagtgatgaataaattaagagggttttggtttcttacataggtgactaaatcgaatgagtctataataaactaaatatgattatattaattttgttttggagatgacttcatgtatgcacttaacttctatcatacaaaaagataaaggtcgtataaatacagttatgtgtgtatttataatatagggtaaaatataataatgaaggcttttgaaattggacctatattttttttcattttaaggctataataata

SEQ ID NO: 68740 - DNA, 462 bp, Glycine max
  unsure (1)..(462): unsure at all n locations
agcttatcgtaatcaatataactccgtttatggtttatcttgtagggcaagctctcanaagaaatggaagccccagaaactttcttcccattgggagtatagtaaccgcgactagtgttccctccagaaggagtattcaacctcatgatacgatcaccgggcagcaacaaccccgtgtaaacagcaaaattagctgatgtgcacgaatatggctgcacgttcactccccaacacttgtggtcgagaccgaacgcgttcaaagcacgttcgcaacagagcgtttcgatttcgtcgatgtactggttcccgccgtagtatcgcgcaccgggcattccctcagagtacttgttcgtcaagtggcttcccaacgctttcatcacggctctgcacacgaaattctcggatgctatgagntcaatcccgcgaaattgacgtttcttctcttattcattatctcgtgga

SEQ ID NO: 68741 - DNA, 452 bp, Glycine max
  unsure (1)..(452): unsure at all n locations
tatgtgagagatatctaacaggagaagcacatgatagtttctctcaatttatccanggagcnggtgatgtcctgttcgtcataaagcatgtcttgctgaccttgacaaagtcagacaaaaggagcatgaaaatggccttggtggcgtaggtcatgaaaacactgcctctgaaggtggttttctcgagaaaatagggcaatgaagcatcatgatccaagtgaaagtgagtgatgagaagaacattgactatggaagggtcaatctcgtcgaaatagggcatagcatccatgccagagttagccgggtgtattccacaatcgaacaagactcaacttcatttccagcgcctaatggagtcactatcagatgatctttctctctactgcttctcgcatatctacgtctctatgctatacaattattcatctctgtctctctattctacacgactc

SEQ ID NO: 68742 - DNA, 456 bp, Glycine max
  unsure (1)..(456): unsure at all n locations
tagatgcatgttatagtttgttatttcagtangtatatattattgaactcatcacctcacgaacgaattctattaattattttagtacggctaattctttggacataaaacataataacatgcatttgaaggatcatatcactataaagtaaaataaaggaggtaaataaggagaaattgtntttctttgaaggacataatgagaaattgttaagaaaataatcaaatactactgcccagttagatactttgacttggtgcccaacagcaattagagtgcaacgacaatttctattntgacttagtgcgcatgtgcaacagcaattatatagctttcaacggtcaatgttctcactaccacattaactatngctgcccaagtggcacttatatatctacaatagtattacacaatataaaaggagtaacgatgacatnctaatgaagtgaacatgt

SEQ ID NO: 68743 - DNA, 450 bp, Glycine max
  unsure (1)..(450): unsure at all n locations
acatgcctaaatagtagaaaggggtatccttctgtctattgttcangaattgngctgcttgctgagcccaattggcttgaaaaccgacaaccccaaattggctttttgcatagttgattctcaagcccgataccatttcaaatcctctaagcatggatttcaacacaagaatattatcccaagaggcctctccaacgaagaccgtgtcgtcagcatattgcaaaatgtttataggctcatattgcttcccactcaagaaacttctgtaaaggttnntattaacagcctctctcatcatgccggtaaggccctcagccactatattaaatagcatangagccaaaggatctccttgtcgcaatcctctagaggggactatatcctcggtagggctcccatntactanaattgagatagtagctgaatgaagacatgcagatatccattgtc

SEQ ID NO: 68744 - DNA, 403 bp, Glycine max
  unsure (1)..(403): unsure at all n locations
catctgacgggacttttaaatacaccangttttttccattccagagaacaaaaggcttttattataaccacaattcaaaactcgaataccctaatgctggaatgttacatcaattncaaaagcaagtaaattaaaataattctaactacttgacaacataaaggttacggatattttcgcactaagtcctaagtcctatttgtacnccccttcttctgtctnagagtcttgcagaccaacaaatagtgctattntgaccaacccaccacaatctacggaataacatgtacggtttagatattcttaaattatttctctgtttttcataacttatccgaattacccttttccttttccttcctctctctttcttctttcccgncgttgaccaccatcgctacca

SEQ ID NO: 68745 - DNA, 486 bp, Glycine max
  unsure (1)..(486): unsure at all n locations
tcttagtctcagctgatgaagatgaattcgtggctacttcattctctttctaatgaaaataacatcatatctggcactaaattgctgggagtttgaagccatcttctcaattaaatttctggcttcagcaggggtcatgtctccaatggctccaccactggcagcatcaatcatacatagttttttaaaatctctcctagtattcatataggctctttccactgagttgcctaatgcatgaaatatcctatctgatggccgtggtcctggaaagcagggaaatctttttctaagaatactctcttgaggtcatcccagctcgtgatgaaccgtggagcatggtaataaagccagtcctttgccactccctctatagaatgaggagaggccttcagaaatatgtgatcctcctggacatcangggggttcatggtggagcagacaatatggaattctttcagatgtttgtgcggttcctcacctaca

SEQ ID NO: 68746 - DNA, 489 bp, Glycine max
  unsure (1)..(489): unsure at all n locations
tgcagctaatccatgcagcataaatccagcacctttatgttgatggagccaaaatgagcatgattcatatcacaccaacatagtagaaaattataaaagtagggacacaatgatctctatcagaaacagaaatttagctaggtcccatcactgcccatccaaataacatgtatattgacataatgcttagcaaatctataatgaanaactcactgtgcggccatcaattatgtgcttatccataatgactctctccgcagcagaaggatcagcaaagacaacaaatccgaaaccacgagcacggcctgttgtccgatctctcatgatcactgcctctatcacctctccatatntcccaaaatattctttgagacgttcgtcatcggtgtcccaggaaattcccccaatgaagagcttgccaagatccgattccatcagttctgtcatcaaccatgcncagntaaccatcaatcactcatttcatcaaac

SEQ ID NO: 68747 - DNA, 483 bp, Glycine max
  unsure (1)..(483): unsure at all n locations
atgatatggactctctgaatatggagaacaaaattatatcattctaatgaattcttcattatactngnattccgtgtgagcctgtccttgttgtaaacgataatcggccagatccttcttggccttcatatggcgaggttgatatacaagattngaaggtagtttgagctattatatgtttatgggtttgtgcttttgtattctttcatttttcggtcaattgaattatgaagttcatatcaagggtatcctttccgtaatggcaagaaattagcttctgaaacagaggaatcatgccaacatatttcatagcataagttttaccagatgtttgtgcgacgtatgtaatgatgtcttgcccatgatgaaggttcgttatgctccacatctcccacttgtcttgcgcggtcttacatgcaaatttcgtggaggactgaaaactggcatcgttgggagaacatgaagtggtaaatacactctcat

SEQ ID NO: 68748 - DNA, 480 bp, Glycine max
  unsure (1)..(480): unsure at all n locations
gtcacctgcngctgcagcttgttagttcccaattatggtatttggagtatatttgtgaataatcttcttttatggttaatgctatctctagaatatttccattaaatttaagtgttgaaaatttgtgccattttcaaggtgaacaaagatggctaaagtttgaattgccaaaagtaacagttgggctaagctcaatagttgggctaagcgcaacttcagcgcgcttagcacaaatgagaatntggcagagtgtcaacatctaagccgcacgctaagcgngagatcagtgtgctaagcgcagcaggtgccttcagccatgctcagcgcacggctggcgcttagcccgaatccacttacttgcgctaagtgcgagggtggcgcttagcgcaacgttgcatatttagagactatttanacccttgtttgtgcagaattagggtagagctgataatnggcatagattggcacagtatccacggt

SEQ ID NO: 68749 - DNA, 410 bp, Glycine max
  unsure (1)..(410): unsure at all n locations
atttattnatatatatangacggggtagagggggtcacatgagcaagatctcagtcaccaattcatttcccaaaactcaatatcacaatagacacaatcataaggaaacctaaaagttcaagaaaaggttcacaatcaaagactctctatgaattttgaatgaacatgtttaggactaattaacatgcatcattgactcaaatcaaataatatgttaaaagaatttcatacactcatgaacaaatgagttagacatagaaacaagaaatataaattagcacaacttaagaaatcttatgtgacaacgttcatgactagacatgacttctatgaataaactacaataggtgaacaagtcactctagaatattgagaatttattctactttaatgttcttgtaagaatttat

SEQ ID NO: 68750 - DNA, 351 bp, Glycine max
  unsure (1)..(351): unsure at all n locations
ccaggatgttgtagagaagtttaggggattttgcttgttttatttgtgtggagcgatacaagctatacttaatcgctggagtcattgtagaaaacgcctcctgatcaatacacattgtctataaatctctatgaggcgcaaaagactttatgtcctataggaatagagtattggaagatccttgcctgcccgtatgatattatattatataaaaatcagattgcagaactgccgtattgtcccacttagggggtatcatgattcaaagtccagcgtgatgaattcacggatgatgcangcagcaagaacagtcatccctcaatagtctgctcgtatcttccaataatacca

SEQ ID NO: 68751 - DNA, 460 bp, Glycine max
  unsure (1)..(460): unsure at all n locations
gtacatggagtagagacagtgtgtcataattaatattctattgcatgggtggaaactcatatgtgctgagattgtgtaatgtgtgtgtgtctatctatagctatatattctcaatttacactccaataccncgtgcttttttatccctatactaaatgttatttgctgtttgaaaaacgttattcgtacatccctatgctttacattggcatccccattgttatctaagaagtgcattccactatgtatcctacagaagaggttgttataaatgactaaacgttaaagggcataagtcatgtacgactttaaaaattccaacaaaatagtgtaaaacgtttaatagcaagaagtattattaaaaaaagtgtgagaagatatttagtagaatttaatctttatacagttttaagtcttaatacttgcttaagaactatttagagactagtcgatagccgaa

SEQ ID NO: 68752 - DNA, 308 bp, Glycine max
tggatcatatcatcatacaagtggttacttgagtattataaagcctaacatgtttatatttactatcgtggcataatttgagtaatcgcgaggtgattttaaatacgtctatttagaacaagatggatcacatatatatatataaaaagatatcacgtaaaaatacgtcgtagacacgttaactaagtgatagtaaaagttttaagaagctcataccatacctatgcaaatattgtgacagataactcagtcatacatcctaagtatcactatatatagcagttgcatatgagacaactaggctatta

SEQ ID NO: 68753 - DNA, 504 bp, Glycine max
  unsure (1)..(504): unsure at all n locations
gcttgtcaacgttaagtacactacatattatataattctttgcattaagaacacgacatagactgatttatgaacatgcttatacataatacatgaggaagtcaaggatatgcagtctcttgccaataaatgttttcagtatgattgactccctctaatttccaaaagatgctcgtaacangtcgcatctttaaaaattgaaattctttgatacattcatgaattctgaaattattatcaatcagtctaaatctttcacatgaacaaactgcatgaaaccttgtgaaaaaataataaatggttgcatccttatgcacaaagccgttctatctttgaagatactgttgaacccgctttttcttcaccttcttcctcactactacaaagcgtgcttttacatcggtcaaaatgacattctacatcggtggcaaccaatgtagaatacgatagtcgttttagtggtatctttcaacatcgttccaaaattcaccgtgtagaatacta

SEQ ID NO: 68754 - DNA, 488 bp, Glycine max
  unsure (1)..(488): unsure at all n locations
cgtaacgacacctattntcttttttttatgttacgaatcctcacggatcatttatttactcttttttagctttcgaagaagttacggaaactcacgaattgcgcaaaaactcctccttttggttttcgccacattacggaacttcatggatcgcgtaagcctgcttccttttgatttccggtatgtctcgagacttcacatattgtgaaacaaaggatgccaagtatctcaaaacggctgatcaaaggttgcatatcatcaagtaataatccccggacgaaattanggtatgacaataggcataacactaacaaaagctcctaaatctagcatggcattgtcaaacttattgttccctataacacaaggtatgcagaatgtacctggatccttacanttttcaaggatgtggggaacagatttaccaatcaatgtagagacatttctgcccatgctaattctttcacttactttaanggttcacttat

SEQ ID NO: 68755 - DNA, 429 bp, Glycine max
attcgtcccaaatcttctaaatcaggttttatctcctttcacaactacttgataaacctgaaggttagaccatctggccccggacatttatcaccatcactacttcaaatagctatctttgatttctgcatctgagaaaggggcgaccagcccctcactttgagtatgatctatcatacgaaaatttaccccatccacggtaggtctacatggattctgttcagagaatctttcatgaaagaaaataagcactgcattcttgacaagatgaggctgctggacccatgcaccatcaatgaaaattccatgaacagcatttgagcatcttctgaaattaatcaccttgtgaaaatatgctgaattactattcccctacttgatccacttggacctggacttctgtctattagggattatatgcatttgcag

SEQ ID NO: 68756 - DNA, 341 bp, Glycine max
ctaagcttgattgtattattggtctgctaatcctaaccagatcgtttgttcttctttcttttatatgaatcatgtcattgtagaagaggaatcgttatcaacatataatactcctattactgttcctgttctgatattcgcaaaaggacaagtctatttgaacacttagactattaatatggtagccattactggactgatattgaatagttaattaacgggttaatgactaaaggacattcactatcttactcatttcaaatgataggtcctaacaatttctaactctctgaccctgggagtggtactacctgacgtgactattaagaatgtcacaacat

SEQ ID NO: 68757 - DNA, 496 bp, Glycine max
  unsure (1)..(496): unsure at all n locations
gtcacctgcngcatgcaagcttcttatccaaggctcatcttggtggcgaagcttcttcttccttggcttattcccttgtggatggtgtctcctctctcctcttctcctttgccttccgctgcatctccatggtggagaatcaccattgaaggacctcattgaagcttaaagatccaacctccatagaagccccacaagcaagcttccatcaaacactctcacacatgaatatgaactgttcaaacttgtttaatatgagaccatagaagatatgcataagagatgtactcgtatcgctaatcatctggtatcattgggaaatatatttcctagtgaagatcttatcaacaaagtgttgagatgtttgagcagacagtgtcaaccataagtaacagcaattgcagaatcaagagatctcactaatatctctcttgccactctctttggaaactntaagaacatgagatcgaacttatgagactncatcaacatgaag

SEQ ID NO: 68758 - DNA, 482 bp, Glycine max
  unsure (1)..(482): unsure at all n locations
tgataccagatgatgtgaaccttacggggcggaagcgatgatacatgctattgtaatttggatgacgccacttccagtgaaggaaaataagtcagagtagacgccacaaggattaccttgataagtttgagattggttcaacaaggaacctagagagaagctctcaccaaattttatcaaaatgccgaatgtgccctttattgaaaacaaaaaccaatacttatagtgcatctgaacaaaaagataaaaatagacatgggctttcaaaacagtttgggccaaaaaaaattataaataataaaaagaaatagaacatatttattatgggccttcaaattaatctgcctctgggccttcatacttctccacttgggccttcatacttctccactcgggggctntgtccttctccacttgggcctttagcctgtatttggtcagttttaggattctcatcaacttgngtatcttcgcatgtcatt

SEQ ID NO: 68759 - DNA, 434 bp, Glycine max
  unsure (1)..(434): unsure at all n locations
agcttgatcaannacaatatntaatcattctatatctattcatatcatacaatatctcattcaaattattctctaacactcattttataccaaacaatccactacatatcattttcaatcaattcattcttcaaacatgcttttggtacaagaaaacaactcaaagtgctgaaatttaaagaactaaaacataaaccaaactaaatacttgataactaaaatgttcatgctgtgcagaaattaaactaaacacaatttagacatcttgctcatcctaaggctgatcttcattaagatctagtgctggagctgctgatgaatcttggataggctactcaagctctgtgactagtgtagctggttgggtctccttacgaataggtgcaggagatgaatcangtatctaatctgcggaagcccctcctgctgaccat

SEQ ID NO: 68760 - DNA, 440 bp, Glycine max
  unsure (1)..(440): unsure at all n locations
actatcatgaagcagaaacctagctaaactacccatcatatctccctaaacccaatacccacgaaaatcaagtgaataagaagtctacccaaacctgaaatttcgaagtcccacacgtagagatgcgcttcacgacttcgaaaatgccttcctttcgcgatatggagcagaaatggtgacccaagggtggagctttgttgggcaacaatggtgggtgagaaaaaaaggagaaagctacgtgagagagggaagaaaagctntctgaaattttctgctgagtgagtgaagggagagagttgctctttggtttaaaaaggcttttctctttcctattattttatcttaagctatgccacatgtctcaatttgagtggagccaaaaagggcctcacatttctttgatgtgacccatacacagccacaggaagtgagaaaaatct

SEQ ID NO: 68761 - DNA, 273 bp, Glycine max
ggagaaaaaaggaagaattttaaaatttatgaaaagggggaagaggaaaggaaagaaaatagaaggaaggatggggaataagagaagaaagtataaggaagaaaagaaagaggaaaagagggagaaggaaagaaaagggggaaaaaagggaagataaataaaaagaaagagggaagagagaaaatgaaaggaagggaaaagaaaagaaagaagaaaaaaaggaaggatagagaagagggggaagaaaagaagataaagtagaaagaaggaaaa

SEQ ID NO: 68762 - DNA, 512 bp, Glycine max
  unsure (1)..(512): unsure at all n locations
agcttctattgacagccactcatgacacatgtnccatgcttctctcctttgtgagttatgggtgcaatggcatgtcaacatggcatcccttcatcaaagttgtaaaatcagcacacatgtaggttaggaatgaaaataaaaaactataaagaacacaacctgttagttgccatactccacaagtgcatgtccattcagctaaatggacctcaaccttattcccccacatgtggacctcatatctcaggcccatgttatcaccacaccaaataggagtccattgattagcaaaatgaaattctttttctagtcttttatactgcactggacataatggtccaggctttccagaaagtttaatcttgcgggcagccatggttctcatgatataacttctaatttcttcaagcattgtgataataagcttgcatctatactgcagaattctggaatngaatacctcacaagtgttgttgcatatattttccacctcgggattgtactgaagtggg

SEQ ID NO: 68763 - DNA, 395 bp, Glycine max
tactatgacttgagagacaagaggtgatcaaataactagcagaaatttaaaaggtactacggtgcctcctaatagcgcttctttaacgtcttgaactggacgcgtgatgacttgtcagccaccgacctagtactctgctacctttggctttggactcggccgccatatgtcggtcatgagtcgtagcacactctactcttttgtggtgagctgagtgaactcttatgtggggtgtgtcctgttgccgctgtcaccatccccagctgtgtgtgtcttccctaccctgcctgggcgtatacttctgatgaagcccgtaattggggcctaagaccttgtaggcacacctctcttaactgcaaggccatatcaactaaaccccagacctgtggactttc

SEQ ID NO: 68764 - DNA, 411 bp, Glycine max
  unsure (1)..(411): unsure at all n locations
actatanaaactcaagctcggcatcctctgaccaaattacatgcactggccttccatacattgtatctgactggatcaacgatggttgggtgatttatactcctaacttggaagacaccctatgtcacagcgttaacatcagcttgacccacatttggattaccagctcccgtctctattcacagccatataaagttaatatgttgcatccttgcatttatacaacatgtgcatgcagccttttcttatagcaaaagaactatacatatgccttatggttaacatacccgcctggcccaccccagccttcgccatatttcaaatcataatgatttagtgtatcttatatccaccaaccaatctggacgatatatgaataccctcagtcacacattgcaccctctcgagtac

SEQ ID NO: 68765 - DNA, 400 bp, Glycine max
  unsure (1)..(400): unsure at all n locations
atatccgtggatgtattctttcgaggggtattaaatgaagtatcatttatacaccattggtttatatatataagcatattntataaaatcctattcataataaatttaaggttctacactcccttcaaaataaagcaacaattaggctatagtganggatcgatttgtgaaacgactattggagagacatctacctttgcctcgttaactatcctaatcaaattgcgacgagaaacactaggatgccttggaatgttgatgcaaatgaaggttcttcatcttctcctcttatatcaatnttcaattacccaggaagagcgagtggtaaatccttgtatttggcaattctaccatttttttattgttagagggtgcattgaagaagggtgtttcttttcct

SEQ ID NO: 68766 - DNA, 477 bp, Glycine max
  unsure (1)..(477): unsure at all n locations
agtccactgaggatatgcttaccacctcanaagtctgtatagtcttntctaatgactcctttgcggcctccacataaggcatagaggatgggcagctcaccaagaggtcttcctcgcctgatacgatgaccatatgcccttccactactaatttcaactcttggtggagtgtataaggaacaactcccactgagtggatccacggccgcctcaacatacagctgtaaggggggttaatatccattatttggaaggtaacttgacaggtgtgaatgcctatctgtaccgggagatcgatctacaccctaacctctctactggtgccgtcgaaggcactaaccaccattgaacttggctttaggtgggaagcattgaatggtaattactccaaagtgctcttaggcatcacgtttaaactagaaccattatcgatgagcactttggctacgatatggtccatacacttgactgacacgt

SEQ ID NO: 68767 - DNA, 405 bp, Glycine max
  unsure (1)..(405): unsure at all n locations
tacaccacaacacaaatggtgtatcaagaaagcatatattaactttaatggatattgtaagagtatggttatcaattcaaactttacgatatctttgtagatgtatgcccttgagaaactgcatgtatttgttgaataatgttctaagaaagtatttcttagacacttttgacttgggacgaataatacacctagtatatgcacctgcattgttgggttgtacgcataaatacgattataatcgaaaaagaaattaatacagacaattagggatattcattggtatccgaaaatcaaagngtataatttattgtctatcatatatagattgcaactggatgcacgtattgaaaggtaaatagcggagatattcacaaatggaataagagtaaggcaatctttact

SEQ ID NO: 68768 - DNA, 468 bp, Glycine max
  unsure (1)..(468): unsure at all n locations
gctttcagatgggtaaaaggctcacattcactntcttctacancagattttatcttgtctctatnaatacaaaagncatctcgacacaaagaaggccatctaagtttcatacaattgatatggaacctatatcctaatgtcacatcctatgagagcgtggtattcccgtgtcctctagcatgagggtcttcatagacattcacctattcatgtgctcccccgaacaccatgttcaagatcgtcacaggatccatacgcatacagctgattaggagtgagttatcacattgctagaatctagagagatactacacatcatatggttgtcaaatacgatctacttagcatatctcacattattatatcactctgtcattcatcaatcacactattcatccatcacatacacctttcaatgatgtatcgcaaaacacatgattcacactctccgatcaagacataataaca

SEQ ID NO: 68769 - DNA, 490 bp, Glycine max
  unsure (1)..(490): unsure at all n locations
tcaccgcngctgcagctnccgcatcgacttggaggatctgattacttgtctttttatgctatatcagtacaaatccgatatggcttccgatcgcactcagctacataacatggttaagaatgacagggagacccttaaagagtacgcacagtggtggaaagacctggcagcacaagtgcttccttccatggtcgagagggagattatngctatgatggtagacaccttactggtgttttactatgagaagttggacgctatatgccctccagcttcgcggacttggtatttgcctgggagagaatctaagtaagttcgatgagatggaagttccattacgtctcctccacatgtaccaatactaggaggatcgaagcatctgtngctaaaagaacggaaggagatacccatgccgtcacttcggtgcccgcatgggtcaagccaccatagacctctcatggtacccatcattacgcgcaacatcacttga

SEQ ID NO: 68770 - DNA, 451 bp, Glycine max
ttgacatcaacaatatgggtgatactgggccaacatgggcatcatcttttctttattcagttgcacagaggatgatgcagtacgcctcaccgacgaattgctattttgcatagatacaaaggcatctacatactcccagtataatggatcgcgctttgctgaccttgggttcctgctcatagctatctatggtgcccccttcgagttaacctttgctggaggaggacacatccaattctgatcagggtatgcaaattcccaaaggttagtcttccaagtagacttaccacaaacatcaagttcttcgaatctattaaatattggttgcattacttgcttgatgcacacctcgggctcagataacccttggtctgaaaaacttagactcctccagaacatatggattgaatccagtggaatgcaaccactaacatatttggatagcttacaa

SEQ ID NO: 68771 - DNA, 438 bp, Glycine max
gcgcgggtctgggagacgaaggtcaagtggcctctattatgattatgatgttgcgagtacattggagttggtacgaccatgccctcctgattgacagctgggaaaatggcgagtggaggaacgccccagcatttacgcaacgagcataatgtatacctttacggctttaaaagctctatagttgggcctatgcattaaagattaaccttatgtaaggctatgtgcttttgtattgaatttatacccaaggatcttattcatctgtgcctacctcttacccagtctattcattagatgttcactttttatctgaacggcagatccgatgtcgagacaccgaatgacttatacctggacccgccttatgattctagcaagaatgaattaacggaatatgatagatatgggatgtgggacttccccataattaaaagatgg

SEQ ID NO: 68772 - DNA, 149 bp, Glycine max
cactgctgacatgcccacccatgacgcgtgcgtcatccatgtgacaagcgtggagaaaaatcctatattctaacacgagcggaggtcacagcctacattagggacgcaaatgcttggtcaccctacaaagtgcattcataacgatccct

SEQ ID NO: 68773 - DNA, 233 bp, Glycine max
tattcgagcccctgttatacaggtgatttttgggtgcttgtaaagggtctgtaatcttcaagtgttcagatgcccagactgctaaagcaaagcagaccagacatcctcgattatgacgtaatctgaccccacttagctagatggttcgacacctcctcgcaaatctatcaaaatgcccgggctattatcatgcttacaaatctgtttctgtgcaaaagctctctaacagagga

SEQ ID NO: 68774 - DNA, 419 bp, Glycine max
  unsure (1)..(419): unsure at all n locations
gctatggtcctgcaattcaggtgagacatgtgatgcatatagctcctgatgccataatagaaatatgcactcttaccaactatgtgcnggcntcaaataatcctaccacaaccatctgtattccctgccctctccaagcccagatgctcaaggaaaaactcgtgatgaatattaatcaagctcatttcatagtacacatatagtcaagatgtgcagtgcattggctttcataaatatggcaaatatgcatgacttataaaacaggtatcgttcaaatcaaattaccattnttnnntttggagaggcatatataattatgtgtaattgaataatatngaataacttgtctacattaatagtgaatatattaattggtatatctatataggagcaatggcactaatacaatttcttttgac

SEQ ID NO: 68775 - DNA, 484 bp, Glycine max
  unsure (1)..(484): unsure at all n locations
agcttctgccaccatggctctcagtctagtattctttctgtttgtatttctcaatcaacttatgttggatcttggatcctagactctggtgcttctgatcacatagctggtaatccctcactcgtcacaaactaaattctctcaccacacccctttcctatctgtaaaatatgtccctatagcacccgtgtctctcttctttcttcaagcttaaattggctttagcagtgtcattgaatgatgtgattnttctcatcactacgtccttttgtacgtctggttatttttattcaagtgcttgttggtttattgaactcgcttcaaaatcaatcggaaaacaaatactatacaccatatggaagacaatgatataaaaagatgcttctctgtatttggctatttgccacaaccactggtattacttattagtagtctaactaattacatcgaatcaattatcctaaatgaattcacagaatcaatt

SEQ ID NO: 68776 - DNA, 499 bp, Glycine max
  unsure (1)..(499): unsure at all n locations
tactaagcttgnggatgtagaganagatctcctctctctccttcttcctttctctatatganttgttgggcctcgaataccaaacgctatcagttcatttggagagaacggttcacttggtgaagtggaacacaattactatgaaaagaaagaatggtggtcttggtgttcgagtggctcggttccaaaatgtggctatgttgactaagctganttgggatattttacatcacccanacaagctttgggttcaagttagcggctccaaatacccttgggatgactttgatgatattttcgattataagagatcctatcttgttacctctttaagccatgcgtacaacttgataaatggaggatttcagctgcaagttgggaagggtgaatgcagtttttggcacgacccctgtaagggtgtgactcttatggccaatgatgtggatattgtcgatatatagatgtagacctcaaagtgaacgatgtgtacaactcggct

SEQ ID NO: 68777 - DNA, 281 bp, Glycine max
tgaaactttctgctttattcgttgaccacagagtggtacctggagatatgtcgcgggggtcatgagaccttggtgacgtcaggtggggtgctattgcccataaccaagcttgaccaatcccgaccccacccgggcatagtcagtcagtgagaacctgtgatgtacctaagcaggcgagctcctggcagtctacatgatatatgaacatacaccacacagcacggtggcttgtggtggctggccaactgtgaaaatcgattgatatgtgagatatggcctct

SEQ ID NO: 68778 - DNA, 501 bp, Glycine max
  unsure (1)..(501): unsure at all n locations
actaagcttctatgaaggttcattcctaatntctctacaattgcatcatctctattgagtagatgaagaagaacgtggcatttacctgtggtgaaaaacaagagcaagcctttgctttgctcatagaaaagcttactaaggcacctattctagctcttcctgacttttctaaaacttttgagctagaatgtgatgcctctggagtgggagttggagttgtattgttacaaggtgggcaccctattgcttatnttagtgaaaaacttcatagtgcctccctcaactaccccacctatgatacagagttttatgccgtaataagagtcctccaaacttgggaacattaccttatttccaaggaaattgtcattcatagtgatcatcaatcacttaagtacattagagggcanagcaagttaaacaagaggcatgcagaataggtagagtacctagagaaatttccatatgttatcaaatacaaaaagggataaacaaatgtgg

SEQ ID NO: 68779 - DNA, 437 bp, Glycine max
gacttacctagaattaagttctttgatatctctctatgagtctatgtctcccttggctttgttgtgaagctcattacatgccttaagtgaataaccatgatatcacctcactcttaaggaatatcggagctttggaattgtttagggaataagtgatgggggggatgtttcattggaatatatgatttatggccttgcttaatggtttattatggtcatgcttgatgtatttgtatatagcctaagttcttgttctattcttcatattcttattgttcaacaaaaaacagaagtgaagtttaattaatgaggtcttgttatgcagacatgatttgagagcattggttgattttgttgatatagacggttgctatactacttgtgctaaatttcacttattgccactgttcttttttctatggattatctactattca

SEQ ID NO: 68780 - DNA, 467 bp, Glycine max
  unsure (1)..(467): unsure at all n locations
cttctaaggaagtttctaagaagcttatcagggagctctcttttcttatatagacgcatgtgtaacacttgtggtaactatgatgagtgagagtctcgagagacacaactcatagntcaacttctctccctttttcttccttcaattatgtgctcccccctctctatctctccttctttcttttcctccattgaagcatcctttccaagcttcttatccaaggctcatcttggtggtgaagctctttcattaatggcttattcctagtggatgacgcctcctctcacctattctcccttatcttctgctgcatctacatggtggaaaatcacctatcaaggacctcatttgagcgtatagatccagcctccgtataagctccacacgcaagcttcattatgtggtattcaagcacacgacttcaagacgtgctcttaaccctcatagtattttgcttacctcctctt

SEQ ID NO: 68781 - DNA, 421 bp, Glycine max
  unsure (1)..(421): unsure at all n locations
aactcaaaccttcataagtaaaaacaatatatcctacaatttattcgcaaagtcgctaccagtaaagaaacaattggcactaattggaaaagcggttttgcaacttcaaaaattcaatcgattccggagcatagaaacaacccacgccgaattgtcanaaatcaaactacaacactcgataaagcgggaaaatagagaatgcanaatctcagctttgatacttcaaattgatagttggagcaatagaggacgaacctgaatgcgcgaaattgttgatcaagaatcgaatactctctcagagcacccaataacactaaagcgggatataaagaatagaaaaggaatacgatgtgagcggtgagaatgcgacaccttgaatttgaattgagagtgtgaagaggacgtttctaattgcaatcag

SEQ ID NO: 68782 - DNA, 490 bp, Glycine max
gctgagagttctctctctatgttggaaataactaactcgggggccttaattatatttctttagttcgacaaatgatcatgaaaccaaaacacgtactatgattaatggaaaaccaagaaaatgattgaatatggaataagtgatcaaaattagtagtatctgtttcaaagattttcggaaagcgatcgaaatgaatccactctttctgtcagggccctagaataggtgtgcctaattaggggattaaattttatattctaattattatttccttaaaaattagacatgtattcttatattgtcaaattaattataatttatcttatgttatttaattctaagcaccagtgaatggaacatgtctccttctctcctgcatcgactaaatatctcagtctctttcaggcctgtatcgtttcatgtagacagtgtttcataagtgtttattttcttaacactaagatattgacagaaatatatgtactacatg

SEQ ID NO: 68783 - DNA, 492 bp, Glycine max
  unsure (1)..(492): unsure at all n locations
ggctcacaaaatntcaagtcatttggacatcatntgatggtagctcatgctcttacctacattgctacttgcataagaagacaactaattgtgcatgctgaatttagtgtatgactagaggaaatccatttgacttaaaaccctttgatcctgagatagataggacatttcatagattaattagacatcatttagtaccttntgagcatcctgagcattctgttattggtgattttgagcattatagttttgagcattctgattatgaatattctgagaacatggcacaccctccaccctgtgagaggactctaagggaattggctgcacctgatttcacctacaaaagctggtgcatccaataccctgatgaggatgtcccatatgttcttaaaactggactgatccatttgcttccaaagtatcatggtcttgcaggtgaagacccacacaagcatctgaaagaattccatattgtttgctccaccatga

SEQ ID NO: 68784 - DNA, 408 bp, Glycine max
  unsure (1)..(408): unsure at all n locations
tgtattcttcatcggattcaatagatcctatgagagtgtctctgcttaatacatttccaacacagtgtctaatgaagacttatatgtcatcgtttatgtcatatcaaatcatgattcaatttgttatcgtctaaaacacaagatgcatactttaacctttgtatctgtttatatctaatcaaaataattaagagtcttgattcatttcaagacatanatgtctcttgactttataatattccccctctttatgatgtcaaacaaacacaaatttaaaagttgaacataaagtgttagctaatcttattagatgtaaatagtatatcataaacatgtcataatgcatcatataactttgagataaactctcaacagataatgaaacaacatctcattttattcatataa

SEQ ID NO: 68785 - DNA, 405 bp, Glycine max
  unsure (1)..(405): unsure at all n locations
ttattagctctgcgtgcgtctgggctcgaaannnnaaaacaaattccttattactatgctatttgaattctttagatcctgaatgtacaaccttcaaactgttgctcgttcccctctttcttttctgcaaaaaagacaatcaaatgctgtgaaaacatggatgaagtcctaagaaaatcaatatcaaagaaaacatggatgaaatcacaatgtataagcacaaccacctatctttcagagtcctttggttaatttgtcttgtctccttatgtggtggggttttgtttaataatattatacttttgccttccaaaaaaaacttatgactgatcctctttccattaatccaattttgtatgttattgtataaaagatcatgggttctacacctgccttcactactcc

SEQ ID NO: 68786 - DNA, 339 bp, Glycine max
cgaccacgatcggtagcagatgacagtgatttagcgcactgtctagaatcatgacgaaaccgtgtgagtgagaccacaagatatgacctcggactatatatataacactatatatatcacgtcgccacagacattttgaacaatgagaatttgatccataaacgacgaagagaacaagaccgggtaattataatagaatgaataaatgagggtcactaatcacttataggtgtcacaaaccgcttccacaggcttgggtgatcaagtgaattctcacaaatgtgcatatcatgaatgctataataaatgttcatagaccatgagtttggctgcaacata

SEQ ID NO: 68787 - DNA, 479 bp, Glycine max
  unsure (1)..(479): unsure at all n locations
cgtcccggatccttaagtcacctgcggcatgcaagcttctccnctatntntctataaatagggggaggagtgtatgagatagatgttcaaccctcctggtatctgagattcacttaatattagtaagaaaaattgtttccgtgaagaanatccaagccgaggcgctttcgtaacgtttccatgggtgatttcgcgaagattttcaaccgttcttcgacgttcttcggttgttcttcgtcgttcttcagtcttcaatcggtaagttcccaacatcaaacttttcaattcattctatgtacccttagtggtcctcatttgttttcacgtgctcttatttacatatcatgtacttttcgtaccctcttttgacgtgctttagtcatttacttaagtcattntctcccctantcaaaaattaaataaatttccaccgatcatttgaattgtagcatccgttaatttctgttaaaatgaaattc

SEQ ID NO: 68788 - DNA, 406 bp, Glycine max
  unsure (1)..(406): unsure at all n locations
atgctttagattcattctatgtacccgtagtggtcttctttgtgtntcgtgcatattcatactcggtatgtttactttgtatacccacctgttgacgagctaaagccattttacttaagtcatttctcgcttaacttaaacataaaataaatttccaccgaacgtttgaattgtattattcattaacttcgggtaaaataaattccgaccgtacggtctcgccgcatccacgttggaaatcacaaagaggtataacataatataataatcacgaagacatcttttagtataataaagcggaatatcaatcggacggcttctctttgggagtactcattctttatcaaattgattaataacaaaagggaaactaatggctataatcaattcgcctagtcaagctcgt

SEQ ID NO: 68789 - DNA, 238 bp, Glycine max
  unsure (1)..(238): unsure at all n locations
accacaaacctagtgaaagaagaaagataaaaaaaaaaaagggacgagccgagccanaaaannggggagggagaaaagaaaaaagagcctcaaaaccagaagcaggaagcagcaaacgcgggcacggagacagaacgcggagagaaggggagagacaaacggcaaaagaacacggcacagggcccgacccacgggccaaacagggaggaccgagaaaggaagcgacaaaaaccacaaa

SEQ ID NO: 68790 - DNA, 407 bp, Glycine max
  unsure (1)..(407): unsure at all n locations
agcgacactatgatactaagcttgagcctgcattggattgctagtgcaattctcatccttatcttttattgagccccatcacattgagtgtgcgtgcaagcgttctgcacccacgagctaggaaccatgcgtagtgattgcttaatgcaattctctatcctcaaccctttttcggagccccatgaatagcgttttcgttcatgcgtcctccacccacaagtttggagccatgcgccgnaatgtgcttagtacaattctccattctcaatccttttttggagccacatgaattgcgattacgttaatgcgtcctccacccacgagtttggagccattctgagtgattgcttaatgcaattctccaatcctaaccctttttcggagccccatgaattgcgtttttgttc

SEQ ID NO: 68791 - DNA, 356 bp, Glycine max
  unsure (1)..(356): unsure at all n locations
caacattcgtcaacatgttttcttcatgcccaaccctacgtgtaacttagttcttactaattaatttcatccaagctatnactataatcttgctcttaaaaaaataaccctccctaaaaatctttaaaaaaattaacctcacctctaactctgaaagacgttgactaactgccttccccggctatgtatacactactaagacattctatcattctttactcttttttcagcacgacactcctacctgacgtggccttgctctcccgatattataaatattcggctttgacctcttgggaatctgtcaacttcttacatcacattcaaatttgtcatctttatcatcaataagtctc

SEQ ID NO: 68792 - DNA, 490 bp, Glycine max
  unsure (1)..(490): unsure at all n locations
agcttcaaaccaaagcaactcaaaatctatgtatctatatactcctcaatttagtggattttcaaagtttgagaagtgaaaatgagaatggggtatatttggagcaaactctcacctcacacaagtctataaccataatctaaacttgctcaaactggttttacgcctaaaattccaccaaatcaaaatttgactcctcaacacccacattttaccctagaaatggctcttgccttcactttgggtcttttgtatttctctttagcacagcccaagcttcctcataagtcctaaatgacatttcaaactatgactaactcactttaacctgcaatatttactgaatacagatatagccctttcaaccctcanagcatcacacattntccactcataacactacattctcactttctaccctgggtgactctaccctcatcctaccagtttcatcgcgatttcaccataacatacaagctatataaaacct

SEQ ID NO: 68793 - DNA, 286 bp, Glycine max
  unsure (1)..(286): unsure at all n locations
tgtgctacttattccttcattaaagntcagctttaccttctcctccattggtgtttcttcatttttctctatgtatctcctcacatgtcttgtgctgaatgttgttaacatgatattttagaatttccaccacttaaacttgctatagaagctagatttgattttcaatggttcaaatttcttggtcttgttcttgaaccatgaattgtgttgagtttaggttcctttgagttttgtattgctatatttgtggcttgagaatgaaccattaaactcttacaaaaac

SEQ ID NO: 68794 - DNA, 345 bp, Glycine max
  unsure (1)..(345): unsure at all n locations
tctgcactntgtgcagaattttgctgtgaaattgtgcaacagaattttgcacaagtgcagaaaaatgcttgttgtgtgattggctatggaaattgtagtgcagaatgagttctggatgtttgctagtagatcccaacggtcacaatgtacgcttaagtactagagacttccagtaatattttcgagtcgatcccacgggttaacgaatggaacgaaggatatgttttggggtattttatgtaaaagctgtgatttggttggtgttgggcgagtttctgctttgcctgtttgcttactgtgaagctcggctgtggatgttgatacttgatgtgggaacttggagat

SEQ ID NO: 68795 - DNA, 398 bp, Glycine max
  unsure (1)..(398): unsure at all n locations
cgatcgcactcagctacagaaccatggttaagagtgaaagggagacctttaaagagtacgcacagtggtggagagaccttgcagcacaagtgcttctctcatggtcgagagggagatgattgctatgatggtagacaccttactggtgttttactatgagaagatggtaggctatatgccctccagcttcgcggacttggtatttgccggggagagaatcgaagttggtntgaagagagggaagttcgatacgtctcctcacaagtaccaatactangaggatcgaagcaactgntgcaataagaaaggaaagagatacccatgccgtcacttctgtgcccgcatgggtcaagccaccatatacctctcatggtacccatcattacgcgcaacatcac

SEQ ID NO: 68796 - DNA, 445 bp, Glycine max
actaagcttgaggttgatcagtgtgacatggatgcacataacacactatcttgtgttatataacatgagttagaattggatgaagctacatgcatgttaaccacgtgtatatttataatcaagggcacaggagttatttttcatacacattgtattataaaaatagatatcaaaacaagctaattatttactggactcaaattgccctattctaaacacgttaattgctttgaaaataataataaatgtcaatgactttaatatcactaaatttatttcacttatacagacagttgcaacaaagtataattgtgtgaacattttaatataattattttctgagagatctgaatatataatgatttcttttcttgacattataacccgttgaatagacttatgtcatgttctgataccctaaaacttatcttctcataataaatgc

SEQ ID NO: 68797 - DNA, 397 bp, Glycine max
  unsure (1)..(397): unsure at all n locations
gcactcgctgcactaccgatacgccatcgacattnctacttacgtctgcaaattcgtcaggattgaatgaaactcgtatgcgcatctgcgtgaagaacaccgatttnttcaccgacatgcacattcttttaaataactcgtggtcgatatggtcttttacggcagataaagtttttggtttgtgtgcataaaaagttacatgacttcgctagtttttctgcgagtcaccgactttgttcggccggaaaacatacccacctctgcaaaaaaaatttctaccgtcttatgcttttattcacatgataaaactataccacaacgcggaatatccacgtattttaccgattgcattttttaaaaacctctggaatattttttacatgagagttctgatgta

SEQ ID NO: 68798 - DNA, 396 bp, Glycine max
cctcagcttcttgttagacctcgatcggtcatctatccaggccgagggcgaccgtcatttcttactatccatttcggtgaataatatttatttgccgagatgggctaatggtttcctggccgaataaatgggaaaatgccagtttcggccgaaacgaagagtcagttgatctcgcacaaaaaaacctagccgacctacattttaaatttttcatgctaccccaaaacaagaaaacttcctgtgccgtataaaaaaaaaaataacattacatgacagcgagtcgtttgataacaaaattgcgcaacgtcggctgaataatatcagtaggtgcttcttcacgaccgatgtcggctattgagttttcaattaaatccgagaacgatatttgcttgatgt

SEQ ID NO: 68799 - DNA, 212 bp, Glycine max
ataaggcatgatcccattttccttgtaatgcgatcattcatgttggtatgtacatacagataaatgaattccaactcgttgagaatcactgcaatcatgtcattggtactggtacaaattccatggaataagcatatgtccactttatatataaagcttcatgacatatcatgtgatgttgaatactggttgggttataaaatttataccta

SEQ ID NO: 68800 - DNA, 483 bp, Glycine max
  unsure (1)..(483): unsure at all n locations
agcttgctcggggccatttcctgcgaaagccaacatatggaagtnagttctactatattatgcttatcttaacgcacaaaatgtcatgcttatacctctgattatagaacaaactcatgttatctatttatgcacacgcgtatgtgtggaatatcctaccatttatatcaacatagaggccatccaacacattctaattgtcacacacatatatgcatatgaaaagaacatacattcttacgctcgaggctantgcgtcaaaattcacacctaatttatatcttaaacatatgctattacaaactacctacatatatatgaaatatatatcatacgaatttttattgtttcactcacatttattcatatcggccagctatttacattatgcacacacttgattcaaaagggaattccgtgctatcatacattcatttaggaagcgacctcaatattcattcaccctttgcaaagaatatcatg

SEQ ID NO: 68801 - DNA, 369 bp, Glycine max
tgttcaaccctcctggtgtctggcgatcacttaatattagtcgagaaaatggtttcccgaaagaatatccaagccgagacgcttctgaatcgcttctgagacgtttccgtgggtgattacgcgaagatattcgtcgtcttatcgtcttcgtcgttttcgtcgtttctgtcttcaccgtgaagttcccgaaatcaaacttgttcattcattctatgtatccttagtggtccccactttgttcgcgtgcttatatttttatatcatttactttccgactcctgttcgacctgctttataatttatttaagtcatcttctccgctaataaaaactaatatatatttccaccgatcatctgaattgtaacgtc

SEQ ID NO: 68802 - DNA, 422 bp, Glycine max
  unsure (1)..(422): unsure at all n locations
ctcgcacaaaagagatatatgtatccattgatgatgaacatggagggctaaacaaacaatcaatccaacgatccactccatgcaagggtgagtatgagttctgattcggtatctctaatctacgagaatgatcatctatctcttccatcctattttggagtatcacgaatactattatgcctatgcatgatcatggataaggctatggattcatctcctaattctgaaatttaatcacagattgtttagaagatcctccaacataatctgggagtccaaacaattcatagagtgactcaatcgaactttctctaatgcaattgactcaacattcacactaagcatcactcgtattaatggagacaatttgcattgcatcggattggtgaatnggatcgatgccaatcaactcgacttgaatt

SEQ ID NO: 68803 - DNA, 365 bp, Glycine max
gtgatgacaattaaggcgactttccaacaaattgtgttgtatggctttcttgacctgcacatgatatctgaattattaaactagattacggaactatacctgaacttatagctgcttatgcattccctcattctgttggatatcaagttatcagctgatgctctcctatgtgagcttcttttgtttaaaaatgctgttataatacaattatctgtctggttttgcaggttgtatgcaactcaaagtccttatttcttgctgcagcaaatgataatggcgaggtgaaggtatgccttgtatttatacaacaatgcttattctgattacccttagtattatctcctatatcagctctaatgaatata

SEQ ID NO: 68804 - DNA, 486 bp, Glycine max
tactaagcttttgaaatgtagtaaaggctcacattcactttcttctacatcatacctaatcttgtccaaagaaacaataaagtcatctcgtctcatagaaagtcatataagtctcatacaatcaatatagaacctatatccttatgtcacatcttatcttagcgtggtgattccgtgtcctctataatgaggttcttcatagtcatccacctattcatctgctcctccgatcacaaagttcaagatcttctcatgatccaaacacatgcagtgaaccgggagtgagttattacattgctaactactatagagaaacaacactacgtatagtagcgcgatacaatatacttagcatatctcacattatttcatcactttgtcattcatcaatcacacttttcatacatcaataacacctttcaatcattcatacatatacacaggaatcacacacttctatcaaacataattacacattagttttat

SEQ ID NO: 68805 - DNA, 263 bp, Glycine max
aattattatttttcaacagaaagattcttaataaaaacacgtaccacatcgtcctttgtactttgcttcggtgatgacacccattttgctccaatcccaggatgcacgtgtatggtcgcaagaaattgctccttcttctctatgtacttgttggccatgttgatgtgcagagacacatccttgggtcttgcaagttattttgctgaactcttaggtgtgattcaacaactattcaacccaaacgtgggagtggggcatttctg

SEQ ID NO: 68806 - DNA, 383 bp, Glycine max
tgagaacttctaatctgtccctaggttcactggacgctcatgcacaatgcccctcattgccccagtgtaaggctttgaggaaccaaacgttgtcttgttctcatagcctcgtattgaggaagaattgaagaaggattttattcttgcaaaagaatttttcaaggacgagaaatatggaaggattttcgatggataactaaaggactcctattgaaccaagaggttaatgtttgattatccaaggatcagtgctccaattttattctaacagattcaaattccagaaatcaaattgtgacagtgctctctaatcttggagaattccaattaaaacatctgttgccaagattctttaatatttaattgaattctcttgtatcata

SEQ ID NO: 68807 - DNA, 211 bp, Glycine max
taagctgaggtgaactataactgctacctggaacacaactgtgctgtatctacattttgcacctgtcgaccgactctgtggtctatgctcctctgtcgaccaccacacagacctttgtccttctgtgcaacaatctaaagcaattgagcaacctgaagttaatgcttcaaacactctacaatagacctcctaaacctcagcgcaaagtcag

SEQ ID NO: 68808 - DNA, 98 bp, Glycine max
agaggggggacaaagcgccagcgggtcacaattagagcaaaagaggagggcaacaaaagagaccaacgcaaccaagaggcaagacccgccaagcggga

SEQ ID NO: 68809 - DNA, 449 bp, Glycine max
  unsure (1)..(449): unsure at all n locations
ctgccgctgcagtagaaattcaatatagtttaaagatctccatttctattatagnttgagcatttatggctatacctgctttaagaactnggttcacacgatctttctgatattggacanacctttgtcctgcatcagataataagagtcacgggaacctatgtgtagccatccaccacttggatcatattttattgcatctctgcatctttgatacataaattggccatttggtctttagagatagttgtttgtcgtgttgtcataacctattcaataattagagattagtttcaatcataatgatcttacaataagcattgtatcaagcttttttgctgcattctcggtaagaaaagaatgagagaaactaacantannattatttanacatttctgctgtcaatctcttcttgaaatggacggaacaacacaatggtttgacatga

SEQ ID NO: 68810 - DNA, 431 bp, Glycine max
tgtatccatggcttcctatggtggtgagcttgttcttgactcatcttctccttgaagtggcatctccaatcacctttccttcttttccattccgttgtcattgatcttcaagaagcaaagggctctattgatgaagaagatccaatgcttacaagctctatatggagctacatcagtttatgagatataggctgaagttgtgtataatatttgattgatatcattttttgggggatcaacgatatcatgcatatgttacaatttagatgcatacaaaatttgcatagactaaccacccaatttgggtgttgcaacaacattatgaactaatagagaaaaatgtccaacaataaaaattacctctgaagtaagggtcgaaccaattatgctgataaaatttgcaccacttcagttgcaagtgccttggctag

SEQ ID NO: 68811 - DNA, 412 bp, Glycine max
cgtgtgcctcatccataggagatgcattataggtgtcttcggtctatatcacacaatacccacatttgttgcggttaagccaataatgtgttagaataaaagctgtgaaaagaaggttgtacacttgaacaaactatgtatgtataatggattgtttggtctcttgaaaaggatgtgtaccactgaaaaacaatttaagggtcactgtcctgggtttataatgtgagctatctgagaagtgtcaatctctcccttatttttgtgcagtcacccttaatattataacgaacattgtttcaatatatagcaattttgttatggacatgtacttttttctgtaaaaaaaatgcttttaatatgttagtatcttctgagatatattcgcaaattgttatgaatttttgacataatt

SEQ ID NO: 68812 - DNA, 327 bp, Glycine max
ccccggtatagtctcaagcattatggctatgctggttgacccggaattttacacacaatcttgtataacaaattacagccagatatgggtctaaatggataactgtgagccgatatgcttggaataaccaaaatagcaggtgactgcttaaattttacagtgtaaaaattattaccgtccatatatttcataaccatgatttcacagccttcttgatgaataagcattgataccatctggcccaggagctttattggtatccatcacagaaataatgatacaaacctcttgcttagaagcatgacacagaaaggctgctaagcaatc

SEQ ID NO: 68813 - DNA, 375 bp, Glycine max
cccctccaagtgttttgcatgggtataccaccaactgcttgccctttagtggcatatcctatgtaaggctcgaaatccgctagattgcggcggggaatttgatgtgtctccccaatggtttgagagacatgtgcatgatcagtttgaggatggcagcttttcaatgagatgggttcaaagttattaacatcctcactgggagtgtatgccacatttggtggtgtataattgggaggcatgccatatggtgagaaagcatgtttgtttttgcactgatgagggccgcccatacctccactctttgcttcccacctaccatatcggtgtggagattatttattgcgcctatggggggtcagtcacctacatggtgct

SEQ ID NO: 68814 - DNA, 261 bp, Glycine max
  unsure (1)..(261): unsure at all n locations
ctgccgcttatgagataagatgattccagtgttttatgtttcancgatgatgactaaacgcgcattagtatctagcacttcatcgatccatatgatgatgatctcaacaatgctagagtgagttcaagattgagtccacaacacctctaggttctaacggacatctgatttccagaatcaagaatcaatgttccagattctagtttcgataatcaagatcaagattctcgactcttgattcatgaatcgatagaagacttc

SEQ ID NO: 68815 - DNA, 223 bp, Glycine max
gacaccttgcggacgtcacgagaggcgctattgtccataacctaacttgaccaatacctacccaaccctggcgtggtctgtagtgagaacctggatgtactaacagcggctctgcagtcactattaatgacaagacccaaatcaacgcttgtggaggctggccagctgtgaaaattgattgatatgtgagatataatctctggtaatcgattaccaatggtgg

SEQ ID NO: 68816 - DNA, 376 bp, Glycine max
  unsure (1)..(376): unsure at all n locations
actaagctatgcgatatgtacatatgagaccttaagatgtgttcttattatgcatccaactcatataagagaccagttgctcccttacatgtatcccataatttccttccacaatgaagcatgtggtgaaaacttagacatacacaatatcatatatctacatatacattttccttgcgaacaaagttctccacatacaaaatgtataggagaaatctcattattaatcacacaagtcgacataatggtcactatattcaagtctcaaggatattatgacattaccccaagcaaaatcatcacaacataaacattatcaaaccatagtgtacaccttgattgattgaatacacagaatagagagatcanaggctgt

SEQ ID NO: 68817 - DNA, 356 bp, Glycine max
atgatattcctcatgagattgtattaaatgctcattattgtcttacttcaaacaaagattattcatgtcataacatatattataagcttgtgaataagtctatgaacaccattgtcaccgcaaatcctcaaataataataaatatcatcaatttaattcaagatcaagccatataaatccagaataatcattagacaggcaacatcaatcataaaaatattcatagtaaaatttaaacttaaaacaacaataatccaccacgataatataattagaggctggcaagatagaaagaactaattatactatggagatttgtgggacaaatcttcttctacaaacatttgctcaatgaa

SEQ ID NO: 68818 - DNA, 468 bp, Glycine max
  unsure (1)..(468): unsure at all n locations
acaaagctccacgataattgacacgtacttctctttcttgcaagccctcttggcttcttgttcaagggctcttgcggtagctgcattttcttctcgtaactcggcacactctttctagacgtctgtagtgaccaacttgaattattccttggcaagtcttgcttttcctagttctgttattagagctcggacttattcatcctcttccggagcttcaaagttatcttcgttgataatctctaacttggagagccattctaacccttgtgtacgaactttcagccattcatgataaccactgatgatgccattatgaatgcccctaagttctttatctttccttaacgaggcttcccacgccttatgaactctatgtgtaatcttgaaactttgcgcaccgaaatctctcacaagagaaggagagaggctctattttcgtcggtgctcccctcatggngtaccctaact

SEQ ID NO: 68819 - DNA, 404 bp, Glycine max
gctttaaaaccactgacaccttgatagaattacttttgttgagaatgatatcccttgtagatgattagagtagtattgtcaaacaaacacaaatttttgattttgttagccacagggcttatagaacaaaaatactggttgaataagctggtgtaaacttgattgaaaaatcaaagggtaggactatactgtacttgttaattggggaactattgtaaccataactgacatagctatttcttgacttatatgcttcatttctttttgcttaaggatacctttgattgattttgttgaaactccgtgttcatttgccattgttctggtgaatttaacatattctatgatatctgcatagtataacgtttattatataaattctaattaaagttatagatttaatt

SEQ ID NO: 68820 - DNA, 335 bp, Glycine max
agtctttggggcaacaagagcacaaaccacaaccttgcgaaggtaagattttgattagggagctggttacaattgaccaatgcatcagttgcttaagcttttagtttcaatgatgcatatgggtttgtactcctatgcactccttaataatatggatcattttggactaactgatggagtgaggccattttaataaatgttggttagaggatatgttcaaggctcaccatggacatcttcatacttttcattactggtcttataaatatggaaaaactgtctaaattgaggggggaacggcatagttttaatttccaactaacggtcttcatgag

SEQ ID NO: 68821 - DNA, 438 bp, Glycine max
  unsure (1)..(438): unsure at all n locations
gcacgagctcagctataacataccagcgcgcgccactcccctactagaaaatttatgataaacatatacttgaaataaattctactgcacaatgacaaacacaaagtttttctgcaatcggattgaattttcagggtttacagctctaacttattttaattattctacatcatataattatacactctaattagtcaccaattaattaaactaaaattctatttttaaactagntatatagtcatttatgaaaatgccctccactttaaactcttatggcttaattatccctttctaattctatggaatctagatcaccattaatcaaccttatatatcctcacttaatttctaactttactaacagagaatactaattttctttcaagcttctaatcctatttctagacaaaatccaatattacatctggtcataat

SEQ ID NO: 68822 - DNA, 308 bp, Glycine max
  unsure (1)..(308): unsure at all n locations
acccatgtaatgaacgattagtctagtagtagaatacaacattaatctaggaggcaactaatatacttaatctctctcagcaagtttcagagcttaagggacatttgtactactcgaacttggaacaccaccaatagggcgaccgatcaagtatatctcttcccaagtcgataaaagacttaataaaacaggagaatgagaaagtctatctttaccacctaanagattaagatgaaaaaagatcatataagtttatgtaagaagagatagataaactntctatctttatctattggatcttcttatat

SEQ ID NO: 68823 - DNA, 247 bp, Glycine max
cttaaaggtagctattgagataactattgttcaagcttgtgcatgatctttatgagatacttgcgtttgagagtactatcttaaaatgtgctggacaatcatttgtaacaagtctattctccaagtgcttcatcataacttctttcaaaaggctttctctttgataaaaaaaaggttatattttatttatacactattcaattctcttttaatgcggtctatttactctcattacatgcatattttc

SEQ ID NO: 68824 - DNA, 452 bp, Glycine max
  unsure (1)..(452): unsure at all n locations
atcctcacagtcacctgcggcatgcaagctgatttctcttcattttatagagttttccataatttagaaggttggtgatngatagcctctatagtatttggcgactgtagatatatctcgtggatacttgcataaacgattatcagcaacaatggagttcattgttgaaagtgataaaggtatgattgtgttatgtccaaatttttattctttatttntatatgtgaatcaataaagtactgaactactagtctttcttttgtggaaaattgaggtggatcttaacaaagaccactttctcagagatggctttctttaattatgacagatctcaaagcattcttctttctgaattaaatcgttctcgattatcttaattgttaagggtaacttcctcttgggtgctatttctacaacaaatatataatatgtatgtttctcttatattacat

SEQ ID NO: 68825 - DNA, 253 bp, Glycine max
  unsure (1)..(253): unsure at all n locations
ccgtgatctcacagtcacctgaggcatgcaagcttgtcatcgtgagacatcagaggctagtatgttattaaatgtgtgtaggaataattcaccacagtgatagagagaaatctaaaatcatacatcttaagcaaataaggcatgctatcccccaacattatagcattntgatctcatctttggacattgtgattttgaatattagaacacccaaagtttattacggcatataatcaatcataccactcccaac

SEQ ID NO: 68826 - DNA, 364 bp, Glycine max
  unsure (1)..(364): unsure at all n locations
agatcgattatgtgtctaccatcacgatcatcgtctgcctttccatcattgtgggtaccacctgngccgccagatccctccaccttatgggcgtgttctttgaaagatccgtccccctctttgcaaatgttctgtagtngcatcctatccggaaccatatcanaattgtactgatactgcctaacanaggcaaccattaggtccttccaagaatggactcgagaagattccaagttagtgtaccaggtaacagctatcccagtaagactttctttgaaggaatgttttatgcattcttannntttgcgattccccatcttctgacatacatctttatatggttcttgggacatgtagtcccttg

SEQ ID NO: 68827 - DNA, 464 bp, Glycine max
  unsure (1)..(464): unsure at all n locations
agcttgttcttgantttntctaagttctttaacaatctntgaacaatatacttgcccttcatttaactgtctttgtgcttgacggtcacgctcaacaaagtactttcgacacctactgtacgttgatttgaccaatgctgttatgggaatgttgcgacaatccttcanaaccttattgatacattctgagaggttggttgtcatgtggccatatcgacgtccttctctatcataagccatcgtccattnttcctttgaaatgcgatcaattcatggngctatggctggacttagttcacgaaatttttctaattttgataaaaaacatgtgcttgcaaggagtgtaggctgcatataattagttatgaataacaatcttacgtatatatgaaagttaaataaacgtgaccatcanatatgaaatcttacccaatntcttcaacatttcttttnntgttgcatta

SEQ ID NO: 68828 - DNA, 291 bp, Glycine max
  unsure (1)..(291): unsure at all n locations
catatgcaacaacaaacaatggtcattcatagacaactcacccaacatatttagtgccctggctacatcagatgattgtgctcacctctctcggccgaattgattatatatatatatttcataacaaatcctaccttctcataaccacctgctactaaatttgcaagttccccaaacatttgtagaggtcaaatgccagccttctgatagttctgaatttacaacatatcaacttcactaattnattatgacctggtatcaaaccagacaaatgtggctgccacaacatat

SEQ ID NO: 68829 - DNA, 445 bp, Glycine max
  unsure (1)..(445): unsure at all n locations
agctntattagttntcttttctattatagtngcaaactttangatagaggacttagtagtttgtaggttgaatttctatttaggtttagtgttattaggttagttatggttagaataaaattatggtttcattgtaagagtaatgtagtttggtttacgagcctaatagaggccttagtcgaaaggggtgaaaaacccttgggttnttctagaaatcgtgataaacgcgttaagcgccgtgctacgctaagcgagttcatcacttctgatgaagattctgatttccaaatgatcgtgctaagtccgaccctgtcgcgctaagcgcgttcatcttctctgttagattcaatgttgaactcgctaagtgcattcgtgcgctaagcgagagtagtgtttcacacacttatgattttttttatttatttaaacgccaggtctggctatt

SEQ ID NO: 68830 - DNA, 293 bp, Glycine max
tgcagagatccacgtacattcagcataccttgtattatagggaatatgtaagtttgacaatgccatgctagacttaggagcatctattagtgttatgcccttggctattgttaattctctatctctaagccccctgcacccataagaatgtcttcttttcattgtgtcttggataggcttgcattttccttgaaattgacccaatccactgtgctgcgataattcagctccttatcatcatccgggagtaagatatttattgtagacttgataatcctctgatcctcccttat

SEQ ID NO: 68831 - DNA, 307 bp, Glycine max
  unsure (1)..(307): unsure at all n locations
agctnggcttctactatgagaatgagttgatgatgctctttacaattaagaggacccctaaaggtccatgaatcatgttcaaatcctgaaagacacacactaactgaataaagaatgaagaatgtacagagaacgacgtacaagtcgagtcctgcaaaattcggatgcgcctcagccttgtgtctctcttcttatttgctctcctctctgattactctcactcctttcatagatgaaggaagaaccctttgctcagccccctatgcctattataggaaatgagggactggttgatagcatcatgcca

SEQ ID NO: 68832 - DNA, 399 bp, Glycine max
  unsure (1)..(399): unsure at all n locations
atgttttatgacatatgagcacttagtatttcttttaaatatttgattagaatgactgaacatgatgattatatatacttgctcttggtggttatggctatgactcttaaacttaattatattgatgatatatgactagtgcgatgtatctttatttgcgtattatgaatgactatctggattatatgacattctatgaagtattatccttctacttngatggatggctaagttatcttgtctgattgctatctattctcttggatgattagtcatttatgtatggctttatatttcttacgcactctgcgctttttgttgatgccaaaggaggagagaaaatagggactaaatcatgacccacataattaataactaatttcacgtgagcttaactca

SEQ ID NO: 68833 - DNA, 454 bp, Glycine max
  unsure (1)..(454): unsure at all n locations
agcttcctcggngccatttgctgcttangcaaactttnggagagtntagtttaccaagaaatgctgtgcttaatacgaaaatggcatacgacctccctcaataacacaaacatcaatgtaaatgtagagcgaactcatgcgcatacttcctttcgaacattcactcgcaccagatattcttctaactaagaaaaatgcacccaggcacaatcaaggcaccttcgttacctagatcacttatatgtacttccaaggtgtatgtgctacctacatcacatgcacttcctttgctaaatacatacatgcatactcnagcattttgctaccaaaattgcatacgtgccatctggattctaaacctaacatatacaacttttgatgaacttgctactacacaataggtgctacttcatgcttattcaaggttatgtactaagccgatgcaatcaatata

SEQ ID NO: 68834 - DNA, 359 bp, Glycine max
  unsure (1)..(359): unsure at all n locations
cttgactaaagaaaagtgatctgactgtagtaattctagatcagaanaagatgtaaaaaanaagccaaattgtcccatacaatgctctctcaagtaggatcaatatctgaaaaatgaaatgttaaatttagaaatctaagtaaatattgattcctaattttttaaatgttggaaagacttggaagacaaaaattgcattaaaatagaaaatgcanaacatatagtgngactgagacacattagcagcgttttctcaactcataaattataagaatcagaagtaaagagtatgttaagagtgtggtaacatactctaacaagcttngatcaaatgactaanattaattggcaaaaagata

SEQ ID NO: 68835 - DNA, 309 bp, Glycine max
  unsure (1)..(309): unsure at all n locations
gaaccactataagaggcctctctataggtttttgtgttgacaatcttgagccccatggaataggggtcacttagttcaggatgagaaaaaaaagtgcgaccgggctcctacagactatggtaggaggctccctacgaacctactcgctccagtagaaactgaaaaattgcagctgctgcccgcggctcgtcgcaaaagtattgtttctgggtaagtgacagagctaattctaaaaggggtggtaagaacccccaacccccaaatatttcnttttcagttaattctttntattcttatttggcacccacc

SEQ ID NO: 68836 - DNA, 366 bp, Glycine max
  unsure (1)..(366): unsure at all n locations
taccaaatctaatttaaggaacctctgccagcatccatgtatgtgacactactaaattcatagtaacagcattttctaactgttcttgattattatttggatgagtagaaaatctgggtctacaagtcataattacatagcagccaaggcattgaaaaatgcacatgagagctgtgacataaaaatcatctgcgaaggaagagaagtgatcgaccagatgagtgattgcacttcaccacgctccatacacgtaanagggagtttgagactcttacacgcataagatgaatcccgtggatttgccaacttaacatttatgcccacttcgtatcggtattattgtcatcacacgatagatgagtaata

SEQ ID NO: 68837 - DNA, 455 bp, Glycine max
  unsure (1)..(455): unsure at all n locations
gtgacctctaagcaccgcagctgcagctagagaatatggggtacccatcacatgtggttctaggtggcggtcgggcgatggtgcacaacaagttttccacatccacaatgcgcgcataaacccaccatcccctgttgcccacctccaactgagctcacgtactcccacgtagcccatatcctcgtttctctcaacaccgggtccccatcaatcctcccaagcttccccaacatcaaagtaatacaacattcacacagcacaagctaccacagccaagcaaaacagagcaaaggcagataactctgccaaaacaccaaccaaaaatcacagcttttcccactcaaagaccccagtaacaattccttcgatccaattcgttaaccggtagatcgactctncaaatttactggaagtctatagtgcataagcctacattttgaccggtgggatctact

SEQ ID NO: 68838 - DNA, 372 bp, Glycine max
  unsure (1)..(372): unsure at all n locations
taaagaagtggatacatattttattatcgtctatgattgtgcctgatttctgtgagtcacatcggttattgttgcatcttgagtgaataagatatcaaggaaatctctcatgaatttggacccttcatccattctttgattcgctgctcatgatngatcatgatacttgccacagttctatggccttttcaccttgcctcatgaccattaagtcaagcccctcaacaagggacatagtcagaaactctanagtcataaatgtatttaagcatcgtgaaaatggcatcaagatgttccacttnctcactaccaggcccttcattcttcnttaccttccccaagtaccctctactaaangtcaattcttcatca

SEQ ID NO: 68839 - DNA, 255 bp, Glycine max
  unsure (1)..(255): unsure at all n locations
cgatgcagtctggaacttatgtggctggacttactcanaatcgatgaatgtgctaccgcgaacaagatggataattgcgtacaacggattcccanatgtcttgcaatggactataatggtgttatgaagtgaaagatccccacataccagtaccttgtgaatagaagcaatacttgcggcagngaaaatagtccttatgtaagtgccaatgtcaagagcanggtggtcatcaacactggngacagcatgactatc

SEQ ID NO: 68840 - DNA, 480 bp, Glycine max
  unsure (1)..(480): unsure at all n locations
ctctaagtcacctgcggcatgcaagcttgtactctnggcaatttctttaaaactagtttcttaataagttgtgactttngaananatctctagaaacaagtcacttgaagaattgtgacttttggaaatgtatttttcgaaatcagtcactggtaatcgattaaatgtgactcttcattttgtaatttgaanattaaaacgtttagaatgtctggtaatcgattacaagtgttgtgtaatcgattacacccagttataatgatttaaaactgtaaacacaagttgtacctttgaaatttgaaatctgaacatttaaactctttggaatgaatttggaaacttcttgggtatcaatgtttgaaagcttttaatactatctgatgagctctcttgtcttgatcttgatcttgaacttgactgatattctgatctgatctgaactgatctgatctcgatttgctgacttatctgaacttgatt

SEQ ID NO: 68841 - DNA, 402 bp, Glycine max
  unsure (1)..(402): unsure at all n locations
ctcgctaagagtcctatttcgaagtggaggctgagccatgttctcagtatacaaattagtaatggaatgctcacaatcagaatattcagaatcactagcaacataatactcacaatgctcacaatgcaccgaatgaccaggatgcacactatgtctaactaatctatgagaggttctatctatttcaggatcaaagggtttgtaatcacctagatggcccctagtcattcactatatgcagcaaataatgtgtttctcaacaagcacctaacaaggggggtaaactaccactatactcaaacgatatcanaatgagctgaaattntgtgagggacaccctcaaatatttgaaagatagcacanaannatttcaaccaaaattcaaagtctaactatgaaaac

SEQ ID NO: 68842 - DNA, 358 bp, Glycine max
  unsure (1)..(358): unsure at all n locations
agctngcacaacaagtaacaaaatcntattttatactttatgaagtatctaactaactaattaacttccactaaaatatacaattactacttaggaggaagggatggaccttgatcaggctcatctaatctacctaattatactaattacacaacgcanagaccaaattcacagtccgaatattgaagtgcagagattctgactttcaagtccagattaacccttaaaatggcagaattgacccaagtgtatttttgacgaaactgaagatcattntcttagcttcccaagaactactcacatgctccanttggagttttgtagtgtcctataggttctgcacaagacaaataggtta

SEQ ID NO: 68843 - DNA, 386 bp, Glycine max
  unsure (1)..(386): unsure at all n locations
tacctcgatacagntacctgatatttcttaacaacttatatacctcgtgtccaaagctntatgtgcataattgttcttaacattctgtanagcttgttgcctaacatgctagtgtattcttctcaattaactcttaacacatcccaacttttaaatcacaccagcaagctcacaaaacaaaaatacaatcttttgtattttctattagtaaatataatatatttataattatcaagagaatcttgtaagttnnnananaacanaaaactaaaccaatcatatattttacaagtgttaatagaaatatttttagaatttatatttcataattagcaagaagaaattcagaacataaccacacactagtagataaaataggatcaaaa

SEQ ID NO: 68844 - DNA, 392 bp, Glycine max
  unsure (1)..(392): unsure at all n locations
agctnggaagattccgctccgagtgaagggctcctcttagtgtggtgtttcaactgagaacaatggcggtccgtggcggctactggtggttatgggtggtgaagaagaagcttgggacattggggaagggttttggaagatagaaggagaaagaaatggctgttttccaaggctacacgaaaaaataaggcttgcaacactcaagtgtttctgctctcgggaaaagaagcatttctcacacaccagaagacatatcgcagatcgaacggtcagatcatggacatttgtcctatgaacgtccagatcaaatttcgagaagatccaatggtaaatgaatgtaggagggcgctnttaccgagacagctcagacaacttccttgagaaagcttctc

SEQ ID NO: 68845 - DNA, 375 bp, Glycine max
  unsure (1)..(375): unsure at all n locations
tctcttatttatcttctccaaaagtgtgtntaacttgtatataaactaagatctaactcagagaagaagtgtaattcattttatcttattaatattttttcttaccagtgtttgttggaaaaacttccaagcataaccatttctttttttcttcttatacttatagataagcttatccaaacaacgcattaggtctcttataagtaagtctatccaaacaaggtctaacgcatgctaagagaaaggttatcaactgacaccaattaactataaacgtgctacatcaagggtgattctatatacagaacttaacccccgcttaaagataagaataaagataaccagtagtttggtaaccatgtattacaacaaccc

SEQ ID NO: 68846 - DNA, 274 bp, Glycine max
tgcagctgcagcttgaaggccgcacactgtatatttatatgtatgcgcgcgtaggagcagaggatgccttatatatgcatgtatgtaaacaaagaatatactctacaataatatatatatgtgtatgggtaagaagaaagataccttggatatgcatgtatatagcataaataccttactaaacatatatatgtatgtttaggtaactagataccttggatatgcgtgtatatagcaaatatctctcacaaaaatatacacatgtttaggtagc

SEQ ID NO: 68847 - DNA, 300 bp, Glycine max
aactatttccgctccggagtatgacactcaccgctttatgagcgttgtacaccagcagcgcttctaggccatcaagggatggtcgtttctccgggagcgacacgtccagctcacggacgacgagtatactgatttccataatgaaatatggcgccgacggtgggcatcactgtgtactcccatggccaagtttgatccagacatagtccttgagttttatgccaatgcttggccaacagaagatggcgtgcgtgacatgagatcctatgtaaggggtcagtggatcccgattgatgccga

SEQ ID NO: 68848 - DNA, 485 bp, Glycine max
  unsure (1)..(485): unsure at all n locations
gaccgagatccttagagcacctgcagcatgcagctttaatcacttatgaccttggggttccatttgtttcatgattttattctcgtattcatttactgtttatacccncttttgacgtgcttaagccatttatttaagtcatttctcgcttaatctananataaaataaatttccaccgatcgtttgaattgcatcatccgctaatnttggttaaaatgaattccgaccgttcggtcgtgccgtaaccatgttggaaatataaaaagagggtaaataataatataataatcanaagataccttttagtaaagataaagcgaaagatcaatccgacgtgttctctttgggatctctcattcttaatngaattgagtaaataactatagtgagataaggctaaaatcaactcgcctagtcaagctcgtccacatanatgggattttgaaagttatcattttagttcttacaagtaaatggatcattt

SEQ ID NO: 68849 - DNA, 374 bp, Glycine max
  unsure (1)..(374): unsure at all n locations
taagctccttcactgcacaaggctcttaatattngaagagtattcttgtggaaccttcacccgacgaagacactgacaaaaacttatcttctncttcttggacaaagtatggcaggctgggggcaagtaaattntcttcccatcagaccttggatgcaactgtgatcttatacccatatcaactagatcttgacgggtattcaagccatccttcgtcttgccttgaatgttaagggagcgtccaatcacactgtcacaaacatttttctcacatgcctaacatcaatacaatgtctaacgtcaagatcacaccagtacggaagatcatagaaatggacctttctttatattgaanttgactttattcttttttg

SEQ ID NO: 68850 - DNA, 453 bp, Glycine max
  unsure (1)..(453): unsure at all n locations
agctngaagaggatgataaagctctcttgcttctgtattccttaccacaatcctntgaacatttcaaggatgcaattctttatggcaaagatcaagacattaccctagaagaagtccatacctcaataaggaccagggagatgcaaaaacagaaagactccaaatctgaggataatggtgaaagcctgaatatttcacggggaaggatatgaaagacaggaacatgaggagagaagtccatattcaggtcaagggattcatagaatggccagaaaacaaagttcaaatgctttaatttgcacacaactggtcatttcaagacagactgcacaggccagttcaagagaggatctttggactcttgtgacatagttgaacctctgaaagtatgaagtgcatgtgttttatactttaatccaaacacaacagaaggatatgaatttggatctcata

SEQ ID NO: 68851 - DNA, 371 bp, Glycine max
  unsure (1)..(371): unsure at all n locations
actctgtagatatcatcaacctcatcatcatcttaggaacagaagctttacttctcgaggtgaagctttcatatatacctaaccatttgccaaaagcaaaaacaccgtcaataacaaaagtataattctagtttggtgtaacgtgatatcaatatcattttctcttaaacttttcttcaatccttcccatgtatcacatgtntcttaacatgatatcatagtgatggcatccactataaaaggaaaatttacttttgctttgaagagctccatgagctcatatccttaattatctttcgtatttttctttttgaaatacacaatctctaactttctcatcaacctcaatttgaatggttcaagaaaatgat

SEQ ID NO: 68852 - DNA, 307 bp, Glycine max
agcgagaggaagagataacgtggatgattgttgctgtcgcaagcgataacagcaagcaagagaaactgtttcaagtgtttctgccttagataagtctgtgatctccaccagctcgtctgaaaatgaaaggtcaattgaccttaatttgctaagattctgcaaaaagacgcatcacactggtgtgaagattccaaaatcattattgtgaaccttaacctaaagaagaaactgagcaaatgtattatgcttagccatattttatacctgaacttcgttcgagagcttttaacatttgtaaaactcatgc

SEQ ID NO: 68853 - DNA, 411 bp, Glycine max
  unsure (1)..(411): unsure at all n locations
ctcattctcaacttcattcatcttgtagtatgtatctcgatcaagtgagtgctctgctgcatcaaacaatntgaatgtgatcttctaatcatctatacccatttccaggttactgttcctcatatccactacacaattggcagttagcatgaaggaacgacccanaatcagtgggatttccgcatccttttcactatcaatgacaacaaagtccgcatggaaggtaaattgctgcaccctgactagaacatcttctatcatgccataaggcctcgtaatagaacgatctgccaactgcaatgtgtcatttcttttggcataatttctagctctctaatcctcctgcacatggagagaggcatcatacttatgttggccctaagtcatgagggcttaccaacttgcactgac

SEQ ID NO: 68854 - DNA, 357 bp, Glycine max
  unsure (1)..(357): unsure at all n locations
ggaaccctatcgaagacgaagctacaaatgtctaccctgaccctctccaggcccaaataagctnttatgctntatcgggtcacctggctccaaagaccctgagaatggtgggccgggtcgtaaatcaacccgtggttatgctaatcgatggtgggagcacgcacaatttcgtgcanacccatctcgtccgtccattgggtctcacggcacaacccactcagccccttcgtgtggtggtcggaaatggcaacgaggtgctctgccaacaactttgcgtangagtcacaattacaattcagaaccaggacttcaccatggatcttcacgcattgccattatgcggtgccgacatttgtc

SEQ ID NO: 68855 - DNA, 325 bp, Glycine max
  unsure (1)..(325): unsure at all n locations
agctagtctcagcgtctatgcgagactacaccacttgttagctatcatcgccaagtaccaagaggagttgngtctagcctcggcccacgagcatataatcgcggatgagtatgcccaagtatatgctgaaaaagaggctagaagatggtgatcgactctttacactcagatgcacccatgtggatggatcagttcgctcctaccttgaaagaagataagaacttcctcgattgttagccaacgccaaggcgatggcagacacctactccgcccccgaagagatcatgggcttctcggctattgtcatatatgatagacttaatgg

SEQ ID NO: 68856 - DNA, 390 bp, Glycine max
ctcaagctcgatagcacgcagagactaacatctgtttctgggcccttgtgtatcgtggccgacacagcccgtgacacgcggagatttacgtcatcttccgcgctcacaagacctgtcatactgacatttgagtcacgctgactggcagaaatacccgagttgttatccgtataaacattcttttttgctgtctgtaagacgaacagcctgatagcacgcagagactaacgtcgtcttctgcgccaatcgtcaatcgcggccgacatgcccgtagacacgcggagatctacatgatctttcacgctgacaagatctgtcatactgacatttgagtcacgctgacgggcggaaatactctagtggtatccaaataacaatcttttttgtgtc

SEQ ID NO: 68857 - DNA, 347 bp, Glycine max
  unsure (1)..(347): unsure at all n locations
agctngtacanatatatntagctggagacccgctatatgatgatttgcggacatattagctagntgatcattggaaatgacaaaaccagttgtagtttctcctgcaagaacctttttctctaacaaagtgacaatcaatctgtgtttgattcttccatgaaaaactatgttggaagcaacgtgaaaagcatccatgtgctactctaatttcaactacatgtgttattttctaatattcttcctcaagtttgagaatatatacaccaagcttggtacanatatatttagcttgagaccgactattagagantttgcggacatattagctagttgatcattggaaatga

SEQ ID NO: 68858 - DNA, 350 bp, Glycine max
  unsure (1)..(350): unsure at all n locations
aataaatctctcaattttgaaacagagagagagagaggcatctgatttggatatttgtgatgaaagggagagggcattgagaatcccaatgctaaagctcagagacacagacagctgaggttactgttgtcactccctggccctgttttgtttttgtgaccaattaaactaaaaaatccccactctctctctctctctctctctctctctctcatctcagtatatcaccctcctcactctctccttcattctcctcttctcccatttccaactnttcttctcttctcccattccttctcaaatattccattcttttgaatccaaagccacagttancaaaataaaatccc

SEQ ID NO: 68859 - DNA, 436 bp, Glycine max
  unsure (1)..(436): unsure at all n locations
gatcctctcagncacctgcggcatgcaagctntcaacanatgtcttcacaaataatcatcactcagcagaaccctagcaagattacccatcatatctccccaaaaccccatacccacgaaatttaagagagagagaagtccacccaaacctggattntcaaagtcccactcgtagccacgcacttcacgaccccgaaaatgctctcctttcacgaattggggcagaaatgggcaccaaaggttgaagctntgtttggagcttcaatggagaatgagggagaagaaaggcaacgtgagggagagggagagacaaggcttctgcaatgttttctgctgagtgaagagagagagagttgctntctggtattaaaacgctttttcctcttttcttaattatttattcaagctctgccacatgtccctatttgattggagc

SEQ ID NO: 68860 - DNA, 340 bp, Glycine max
  unsure (1)..(340): unsure at all n locations
gctctgatactcacacacatggatggcgaggttctgtcctcgcctctgaactccgatgtagttaaacgatattacgcttgaagtctgggggtgctctgatactcacccacatggatggcgaggaccgtcgcatgtttttatttctgagttctttctcgttcttcttggtttcctctaagattcccattcactgtatttgtctcgtttctttgaaaaggagaaatgggcgaggtttcagtcctccctctggtttcaactttgtgtttaatttgttataactgagccctcttctctcggggtatggngtgcccccaaacacttatttaaaatngaatctaac

SEQ ID NO: 68861 - DNA, 397 bp, Glycine max
  unsure (1)..(397): unsure at all n locations
tgcttctgccttcgcctccaggcgcttccttggtatttctaccaccctattnttattttgcttcactcagtctaactcttgtgccaagatcttgaccactcttgctactttagccatggaagggtagaatccagcaaaatgatatggcttccttccttctgcgagcatcccaagattccttctaactcttctatggttggtaccaattgaaagtccctatacatgaagcatctgagcgactgctcatattattgtgcgagggatgtgatggtttcaacacacacttctatcatggccanatcccatatttttctaattgcttactacaggcttgtcgatgaactgatccatccggtgccctacttttgaagctggtactctaggtcttgactataca

SEQ ID NO: 68862 - DNA, 412 bp, Glycine max
  unsure (1)..(412): unsure at all n locations
gtatatgcccaacattcataggtgccgtatcacataataattncatccttgtatttactgacggaaaatagaaaccaacacttgcttggtcacccttatgtctccaanatcattcaaccactgaagtctatatggattacggtgctttaatgagggcaaacccaatttctcaactaacatagtgctagcaacattagtacaacttcaactattaatgatcaaattgcataccttgtcttttatgtggcatcttgtatgaaaaatatgctcatgttgctcctcatcacctnctatagtangctcgcatgtaagagcacgcctaataacaaacacatctccatttacaggttcaacaacatcaacattactgtcaatctccaatagtggcatttatcatcacttgagctctcac

SEQ ID NO: 68863 - DNA, 432 bp, Glycine max
  unsure (1)..(432): unsure at all n locations
agctatatgttngagtgcccacgtagatgtgtgctatgatcagntttgcatgaatttctaatcatcatcatcatatgcgtgtcacggaaatgatttanggcattcccttattccctaggaagagaggacaagaggatcttccaagagaagcttcctttaccttgggttataaatgttcgtgatgtgccattattttctcctatatcttaaacctttgcgcaccattttaattactaattagtcttaatcttcaaattaattaggcaattttatatttgcgctcatttagctacattgatatttttaatctaatttcaggaattaatgaagcattgagcttaatctggattttggttgtggacttaaagagggaaaataaagcaaccgttaccttatgtaatttctaagtaggagattgcaatctcattttat

SEQ ID NO: 68864 - DNA, 458 bp, Glycine max
  unsure (1)..(458): unsure at all n locations
gataaaaggtatgccccacattatttccatgacacanatgcaaaaatgatgatttggaaattntatgcanaactggtcatgcatgcacctatgtggacactcaagtgtcaaatntttacggtcatgtgatgctagggctcaggattcatttcctctattttaatcaacccaatgtttccaaaatatgttctnttatcaatttgtgcattcatccgagtccattttcggcgtccgggaaaatttcacagcattcacccttcaggtgtacacacatttttttcacaaactaggtatgatcagtgaatnttcanagaaagttggagtcatctctttcaaagcatgttggtnttagcttacaactattttctttttctctcttttcttttacatctgttattcttctcttgttgtgttgtctttccccctttttatgagatttgtactaacatggtattttg

SEQ ID NO: 68865 - DNA, 234 bp, Glycine max
tcagctatggtctacaccataataagatccctacgcctagatggataaaattatgttcatcatgaacatgtatgtgtagaatatgtagcaaaatacctttaacaatttacacctttggatatggtaacaagatcctaggatgtgtgtacatgtaatttctggtagtcagaaaggctcacaacaatatattgtgtcgcctgttaggttaagaataccttacaagataccttttaa

SEQ ID NO: 68866 - DNA, 431 bp, Glycine max
  unsure (1)..(431): unsure at all n locations
tagactaagcttgagccnaatccaacttaccgtaatctcttgacccagagtgtgaatgtcaatccttgccctcggaagaagacaaagaaaagaaagttcccgacccaatactcggacgaaaacaaagagacaattcccaatcaaaagagtggaagatagcacataaaaacgaaagaaaattctctatcaatgatcgtaagataacagaagaaatatgtataacattatctaaacaacacagagttgtcaccaagtcctaaaaacaaataaagaaaggataacacgatctaaagtggtcctcttcctttgattgcccaccaanaatcttgtgcgctagcgactntcttgccccgactaaacaaaaanaaaaggaaaggcatanantnaagccttattctcacttaaaacaccattccaacaaaaatcctatg

SEQ ID NO: 68867 - DNA, 111 bp, Glycine max
cattgtatcttaagaaataggaagtagctctctttccgaaggagctctattgaaatagcagtagttatttattatctttggaatcactattagtataataaatagatcact

SEQ ID NO: 68868 - DNA, 304 bp, Glycine max
  unsure (1)..(304): unsure at all n locations
tatgcaagaatacttcttttgctttgggttcctgacaaagaaaatagaacggaaaaagaacaaaaaaatcattttcccacgaccaaaataagtagaggaaaataacaaaattgtcaattcatttatgactgataaacgatgaaatgccaccttgtgagatagcacagtgtgagttttggtctttttcatttgtgttcaagccttaatccttatcatntctaccttgtcttgggttgagcagagaaaaaagctgacccctttggaaatggtttccaggcttcactaggatttggagacgtcactt

SEQ ID NO: 68869 - DNA, 462 bp, Glycine max
  unsure (1)..(462): unsure at all n locations
agcttccaagaggtatgactcaggattcatgaatcatgagaagactcactcacgataagtatgataaggtgttttcgagaactgagtagcacatggattcttctcacaacatgtttaccatagagattatactctctcgtaatcgactaccagattattggaatcgcatacgcagcgcccagtgaattggaagattnttacagatgaatgtacaactgtccaattgatttcaaaaataagctgtaatcgaatacaatgttttgataatcgatacccaggcctttgaacgttgaaattaaattctaatgggagagtcacatactctcacatatagctttgtgtaatgatacactgattgggatcgacaccgtgatgtttctgacaatcaaggagttccctaaatgttttaattttcaatagtttagattttaaaagctaactcttaatggcctttgaccaatg

SEQ ID NO: 68870 - DNA, 284 bp, Glycine max
  unsure (1)..(284): unsure at all n locations
cgatggtgcacaacaagatttccacatccacatagcgcgcataaacccaccatcctctgctggccacctncaactgagcttacgtactcccacgtagcacatatactggtttgtctcaacaccgagtccccatcaatcctcccaagcttccgcaacatcctagctaaacaacattctaacagcacaagctatcacagccaagcaaaactgagcaaaggcagaatactctgctcaaacaccaaccaagatcacagctnttctcacttatagacccactaacaatt

SEQ ID NO: 68871 - DNA, 79 bp, Glycine max
  unsure (1)..(79): unsure at all n locations
tgcagcttcatacatgcagagagcgatggacatctttcttatactgganagccaaggaaacttctgctttcttgcgaga

SEQ ID NO: 68872 - DNA, 327 bp, Glycine max
  unsure (1)..(327): unsure at all n locations
actaagctcgcgcgacccgcgagagttccgantgtggttgaagtcgnaaagttgtgtttttggcaatccgtaagtttccgtgacttcttctatagctgaaaaagagtaactacataatccgtacggattcgtaaccttgcggaagatagataagtatcgttacgacatgtcgagagtttcgtaacattacgatataagaatcacaaataataggcaggtggcggatttagtaaaagtgggggtgcgaatagaaaccaggcccacttgggccctccagaagaatcctccacaaggctgttgcttctggaggaacaaccttgctcgcct

SEQ ID NO: 68873 - DNA, 319 bp, Glycine max
  unsure (1)..(319): unsure at all n locations
caagcttgatctatttataaaaggatatattctggttctcattacttatctnaaaaccttggggtggatccaagagctccgatcatccatatgcatactcatgtnttggtggcatacacaccgttgtgtatttctgtaagaatttcatcataactaagaaaacacctatgctctcctataacactcgatccaggaatatggataatgaagagggcgtgcangaatagatgaaggccgatctatcagatctaaaagatcaaatggctttcatctcggacgtcatgttataacttcatataaccatagaggataaagccac

SEQ ID NO: 68874 - DNA, 441 bp, Glycine max
  unsure (1)..(441): unsure at all n locations
tggaaatttaaactagaagagaccaaagttggtaaattgtcactgagtatgtgaaccctatatttataagatggaaagtagagcaatggaatagccaaatacaatgtatagaatgagtgagtgaccatgcgaaactntgtctttataagaatgaagatagaacatctngaaaatctgatatggtgcgtttagcagtgcccctttagcccctttnttaatcattcaagattntcaaactnttcaatttctttgataagaatggtaaaaacaatgtnaaaagaanattgaattggcaattcatatcaatgatatgagatagtgggtagtcaaatcacattccgaattggtgtatttcgaatcgtgaatagtaagattcctaatataatatagttacaacataatcttgatttgacatcttatagagcagaatttattgatact

SEQ ID NO: 68875 - DNA, 211 bp, Glycine max
gatctctcgcatatcaaacaaggtcatacatccattttaggtccaatcacattacagggaatggggtaaaacaagcaaaattaaacatactgcaaacttttttgacaaccgaccaaaattcaaactgaccaacaaaccgacaacccccttacaaaaaattgaaaaggttctttaaagagtttctgacctcaaaactgaccgacgcataaaa

SEQ ID NO: 68876 - DNA, 243 bp, Glycine max
  unsure (1)..(243): unsure at all n locations
ctctcagtcacctgcggcatgaagcnttgtgtatcgaatacactagattggaatctattaccagtgactatntctgaataaaacagaagatgttactcttcataagagtttttgacttcttcaaattggttttaacgttttgtaaaagtataacctcttctaatgggcttcttgaccccacatgaaaagtcttataaagccaggctttgttttgcatttcatcatcttgatactttatttttc

SEQ ID NO: 68877 - DNA, 290 bp, Glycine max
  unsure (1)..(290): unsure at all n locations
atcctgcaagtgtaggtattggatgtagccaacgttagggtgtgtgttgtatctttatctactgctctcatttagttttagcagtttacatattattcttaactctgaataacctttgtttcacaaaagctttactcttatatttcatcacaagatttttacaaagtagttttaatgtncagaagcaacatccaccttggtaaagaaaagtgaaaatcaaaatatgtgagataacataattggtgatntgaagagtagtttctaaagtagtagtagtatctagtcttact

SEQ ID NO: 68878 - DNA, 175 bp, Glycine max
  unsure (1)..(175): unsure at all n locations
tgctttgagccaannatcctgactcaccatagacctttgtccagtgtgagaatgncaatccttaccctcggaagcaaagataaaatgagagaacgaatatttcctatcatagtgaaaaaggagaggaaaggacattccctatccaagagtgggagaaagcaataagaagagaaag

SEQ ID NO: 68879 - DNA, 343 bp, Glycine max
  unsure (1)..(343): unsure at all n locations
aatatgcatgtgatttatgacgcatctacaagaatcaagccaaggctattgtgcaagcaatcaatggggcanaacacaccaaatgattatgatgatggatggctcanattctcacaaagggtaactcatcactttcaaattaagctttcaaaactatcatgacatgtagaggagaatcaaggatttcaagtcacaaaatgtcaaaaacttttattttcaaacaattacccatttcttgaacatatcctattattcaaagaaaaacatgcaaagtcgtacatgcacacaaaattgacccaaaatattaaactaacaatccgacgatactaacaacatttaacaa

SEQ ID NO: 68880 - DNA, 263 bp, Glycine max
atgtttgctcatatagtgaagcttatttagaagatttcggctggatatgcattctgttcacatacacacagatcaaatctgatatctaatgtatcctcagagatataaactcggatcgtgtcgaatatgagtgaagaaatgtctttgtcaaatgctttctttgttcgaacagaataattattcgttccatgcttgtattatatattcatattagtgtatgctcatttatcattatactttcaggcacatatttagatatcact

SEQ ID NO: 68881 - DNA, 456 bp, Glycine max
  unsure (1)..(456): unsure at all n locations
acctgcaagcatgcaagctngtaagaattgcaagatcatcttccttgacatttccatganatttattgccatcaatataaagagatgacaatttagagagtgatccaagactttcaaatggatttccactgaatttattaatagacagattgagatatcttaatgatgaaangtttccaaatgatctatgaagagcaccaccaattgagttgttggaaaaatctagcagcacacatattttaaatgccccaatatgatctgtcagatagcctgaaagctgtgaactctgaactgcaagtcttgtgagtccatgggatatacaacgagcaagaatttctaaaatgtcattaacctgttggttgagtgtgagatatgatacacctatcacccttatagtgcagacattacccaaagacgtggaattgttccttcagttgactatttgacaatcaagtc

SEQ ID NO: 68882 - DNA, 396 bp, Glycine max
  unsure (1)..(396): unsure at all n locations
tcacaaggtatataacaatgaatagtagctctagttgtctccatgaggcttctctagattgatcaatgccttatgcagattntacttattactatattacttgattgtattcttttaccatacttctctgactaaatcttttgntactcttcacattctgcttgagttatacagctagacaaacatatcttgtatcgatattaaaatcgatcttctctctatatgtgcattatatttgtcttgcgacattttttctattttcttatctaggaaaaagtgttttgagaaacaaacgacattatgattatgtatgtttctcgtagncttaagacttgattccagatgaatcgcagntacttgattacttggctgtggcatgctcgcatacttttctat

SEQ ID NO: 68883 - DNA, 473 bp, Glycine max
  unsure (1)..(473): unsure at all n locations
gctagcactagtcccagaacccgatgttcgtgcttccaagtgtcatgattcttatattacccatntngctagctgctaatagtgacttatagtcttggtccctcatctgccatttctttcatcttctaaatgaattccatgtgctggacattataaaaaaacccatctcttacttgattcaaagtagatcttcaatttaacttataactcactgaactctatcattacccattntcatcatgcagaactaccaacatgcaaagaggtctaatatacagaatatctttcaagtcaagcttagccccagtcccagaagccgacgcttgtgcaaccaagtgtcatgattcgtatattacccatttngctagctattaatatttgaatatagtctttggtccctcatctgccatntctttcatcttctanatgaattagatgtgctggacattanaaaaaacctatctcttacttga

SEQ ID NO: 68884 - DNA, 295 bp, Glycine max
  unsure (1)..(295): unsure at all n locations
tctaaacanaggactagaattctatttctgatgaaatgaatatcaactctagaaaagatattatagttacttgtagttatttaattagagatattgtgagatactatgacnttgtgtttgtggaaaccccctttacatagtaacaaggatcaaaggatggatcacacatatattataactattaatagcgaaagacacaaatataatacgatttgacacttcttgcttagatctatatatgggaaccatttaacaacgtatttccatcttagataaaattataagtgttgcatac

SEQ ID NO: 68885 - DNA, 206 bp, Glycine max
agcctaatccttatgagctagtctctgttacttcactctctctgtgccgttccagaagatgtgagccatgctcctaccttcgaagggcatctctcctcttatgccgattactccctgcaagaatactaagaaagagatgcccatctaagtcctctacttatcctcatagatccatctccccatgaattacgtcaaccaaacatagt

SEQ ID NO: 68886 - DNA, 441 bp, Glycine max
  unsure (1)..(441): unsure at all n locations
actatttagactcaagctcattatgaatatttgaatgattctcatctttgtcgggattgttagttagtcttgagaaatctaggagttttgcttcttctggtttgtcgagacacagagagataaatacaatagttactcgcatgaattatacttttcagctggggaaatacccacggtttaatatttttcatggcagatcgaggagacgagattatatggatatcatgggcgtaattaattctaatatggcagcttggaaaggcaggcttcttaatcagccgcggtaaatgagtatggcaaatgtcgngatgtcttttattccttcttggtatgcgggtggataggtagtctgaatatatttgtgatgcttnngataagttagtcaaaagtgtaattanaacggggactcgggtaaagggattcgcatttgatgaatttgga

SEQ ID NO: 68887 - DNA, 473 bp, Glycine max
  unsure (1)..(473): unsure at all n locations
gctttcttcgtattaggtgatacactcgttgacagnggtaacaatgatttcttggtaaccacagccagagcagacgctccaccctatggcattgactacccaacacacatacccactggacgcttgtctaatggcctaaacattcctgacttaattagtatgagtttctttgtcatatattgtcaaataaaatcaacatcatgttactaatgaatgatgatatatactattttcatccgcgcctatatatttgtattatatataattgtgcatgcatggccataactaagcatgcattagctcttgagaataaattattcatgtacggagttgtcaaatcatgtttatacaaagttggagcttggcttagagcctacactaccctatttgagcccctactatttggagagaccttcttattggcgcaattatgcatcgctggattgcattctcaatgatctgaattcaattga

SEQ ID NO: 68888 - DNA, 401 bp, Glycine max
  unsure (1)..(401): unsure at all n locations
gcgtctaatatattattggcctgaatcagacatccgaatcanaagttatggctggttgaatatgccatgtgcttccatgttcaattntgagcatctcgatatattatgcacctgaatcgggcatctgagtgaaaagttatgtcatatgagttagccgagagcttccttgttcgatttctagcgtctcgacatattattggcctgaatcggacatccgagtcaaaaggtatggcagtttaaactctccatgtgcttccatgtttaattttgagcatctcgatatattatgcacctgaatcggacatctgagagaaaagctatgccatatgagatagctgagagctttctgtgttcattttcgagcgactcgattattattgggcctgatcgacatccgagtc

SEQ ID NO: 68889 - DNA, 479 bp, Glycine max
  unsure (1)..(479): unsure at all n locations
agctactttgttagacctcgatcgatcatctntctctggncgaagtctactgtcattcttttcgatccatatcggagaataatatatttctgccgagatgggcaaatgttatcctatccgaataaatgggaaaatgctcagtttggccgatacaaaacagttgattgagctctcacanataaacctatccgacctacattgtttaatttttatgcatcaccaaatcaagaaaacttcctgcgccgtaaatataacactatctgccagcgagggctaataaatataaattgcgcacagtctggttgaaaatactatccgttgctatttcacgaccgatgtcagctatagagttcttcattcaatccgagaacgaactagcatgatgtcgtttcgacatgtctcatcggcagcttccatgattcattattttacaaccccataggtctcttttctgccgtcatcactgtatttttcttata

SEQ ID NO: 68890 - DNA, 412 bp, Glycine max
  unsure (1)..(412): unsure at all n locations
tttatcaataaagacacgtngagttttattcatataantagagtgtatctcttttatcttagtgagagtgattctcctaaattcttgagtgattcaagaacaccctggctgaatcaaaggactttcacaacctctgtgtgttgccctcgctggaaagagtgattctttccttcctttcatcttcacccttgttctttcagaccacaattccagaagatccacctctgcccagaattatctcgtggccataactcccatcttacgcactcaaattaagtgattcttgagcctaaattgactttcaaaacgatacctttcacctcgttttggaatcacctacattggagccctgtagcttcagtattgccattctatatttctgtccagccaccacttaacctacatttacaat

SEQ ID NO: 68891 - DNA, 427 bp, Glycine max
  unsure (1)..(427): unsure at all n locations
gctangtantngtttgatttattatctaatttatttatgaagacattgtctgtgcagtatactttgtgaagtcaagtcagttagagactcaacatgacatccacaatgatgtattcacagcttattgagacaccgcctaacaaatcatagatctatcatggtatgcgtggatcgagaaatacgagaatagagtgattatctattcaagaattataccttggttttggggaatcggtataaactcagaagggcgaaaccctcatgactttatcaaatttactcttatgttttgataccctcaagcgagttgagacctacataagtgcgcgacgaagcctgtctaaaaaatactatgtgatcacaagaataatatatttgctacaaatcaataatagatggaatgaatacctagtattatgatgcaatt

SEQ ID NO: 68892 - DNA, 351 bp, Glycine max
  unsure (1)..(351): unsure at all n locations
tcgcgtctatagaacaattgactgatctaatatgttaaaaaactcatatgaaagattttcagtgaatgtggatctcttactaatattttttatcaaatgaggcttctataatttacgtttcatagatttggctttatcattcgatgcatttttttgggatctaaaccatgcaaccgtttctatatgtttaatatgatagacctttaatgactatacacagtatatgcttttttgatgaaattgctacaaatgacgcaacaaaatatccaatattatcctataaaaatcaatttagtcatagtgcaaaacaggctcctttaattagatctacagtttgtattagtaanattt

SEQ ID NO: 68893 - DNA, 301 bp, Glycine max
  unsure (1)..(301): unsure at all n locations
agctatnnaaagagctgtaactcagctttgtaagttgtatatgacatgactatagctgcggacagagaaagatgaagagtatgctatgatcgtagctcatctcgatagcattcttcaagttccacagttcttttataattgaccaacgaatatgaaatgatgaagctctgatactccgaatattcttgtatggatcagctggctatgttgatagtccagataatgtcatttggaacctagtggtgggaccatataattcttttgaccttttgggccataaacactcaatttgtgattctgt

SEQ ID NO: 68894 - DNA, 454 bp, Glycine max
gatgataacattgatgatgacaaacagctcagaagtcaagatcactctatgtttacaaatatgacgacttccagactcaaagaatgagttcaagattctatgaagaatacttcaaggttcacaaggaaaattgatttctagactcaaggtaatttgctttcagaatcatcaatcaagattcaagattcaagttccaagaatcatgatcaacattcaagacttctcaaccaagataagtattaaactctttatcaaaactgagtagcacattaatttttctcatagaacctcttaccaaagagtttttactctctggtaatcgattaccaaattattgtcatcgataccagtccaaaatggtttcaaaagcttaactgattacacgtccatgatcaaatgtgtattatacctgacgtgaattaatcaataacagcacatctcacaaaacttttga

SEQ ID NO: 68895 - DNA, 473 bp, Glycine max
  unsure (1)..(473): unsure at all n locations
gcaccgagctgcagcttaaattgaatagatgctggaatcaacttccttttctgtttcatngattacacactatanactttgaattcataattctagtgactgatataaacattttcaactgctggtaatcgatcaccggagagcaaatctcaatttgaaatgatataattctttggtcaaaccttttgtcttttcaatgtggaaacttctttcaaaagattctagatatcaacttgatcatatatcttgactttcttggattctggtcttgaataaaacttataagcactggatcctttagcattcacaagacatcaaaacatcttgttttacataggatcattagacttttcatcactgaacaatcttcactatttctctcctggaaattctttgcaagatcaatggtcttattcttcttatacagtataaacagaaacattgtcccttaccctacctgggaagaaggccct

SEQ ID NO: 68896 - DNA, 393 bp, Glycine max
  unsure (1)..(393): unsure at all n locations
ctggaggaatcttctggagggcccaagtgggcctggttgcttattgcacttcccattttactaagtacacccnctggcctttttntggtgaattctttttcgtaaagttacggaaacttacgaatttcgtaacgatacttgttttctttccgtaatgttacggaaccttgcggattacataatcatccnctttttgacttacggaatggtacggaacctcactaattgtgcaacgatgcttccatttgatntctggtgtgtcacggaaccttacggatngtgcatcaatattttcttttgtttccggcatgntccggaattcacanattgcctatgatgggtgccagcacctcacaaggaccatnacaaagtgcatgtcataatcaaggctcc

SEQ ID NO: 68897 - DNA, 118 bp, Glycine max
  unsure (1)..(118): unsure at all n locations
agctngcttgcggtctcggatctgtgggcagcacttagatctcttttgagcanaatatcatcagagctccactagtaagagctattgtggaacgaacaacacacctctcggtatgtat

SEQ ID NO: 68898 - DNA, 242 bp, Glycine max
  unsure (1)..(242): unsure at all n locations
acctataatctaatgcagaatnttccctggaggcgccatcgtgtgccacattgcacaataagaacaactccttatatcatcacacagcctcaatcttcatacaacaatcacagtatcacaccatatgttatcaacccatgtattagctaacacctctatcatacacaccctctactatacattctgataaagcgtgaaagtcacaagcttcgtgaatatcaaatctgaaagataggggatat

SEQ ID NO: 68899 - DNA, 292 bp, Glycine max
  unsure (1)..(292): unsure at all n locations
agcttgggtcgagggacttacccgtttatatatcgattaacgangaagaacgaggaagaacggacgataaccttcacggatctgcttacggaatacatctcggaagcgtcacggaagcacctctgcttggattttcttcacagaaacaatttttctcacccaaaacagctgaaatacatagccagggggcttatggatccttataacagcccccttcagcctatttatatgaaaaagggggaggaggttgtcgaccaagtcgcccatgcgatcttagctcgaccaggcgagc

SEQ ID NO: 68900 - DNA, 347 bp, Glycine max
  unsure (1)..(347): unsure at all n locations
agagaagttgtgatactcatcacgttgtctaaaaaggccgtgaggtggatccaagtgctctgatcattcattagcatattcatgtnttggtggcatactcaccactgtttgtttctttatggaactcaccataactaaaaaagcgcaatggaacccctataacacccgatccacaagtaatatggaaaacgaaaaatgagtgcaagaacatatgaaagccgacctatcggccttaaaagatcaaatggcttctatcacggaggccatgctaaggcttcaaaaaactatataagataatgctacgaaggccgctttcaatacagctagggaaagcggaccggtgctac

SEQ ID NO: 68901 - DNA, 335 bp, Glycine max
  unsure (1)..(335): unsure at all n locations
catatntacatcattctcttggcttggattgtctggctcctttaaaaccttgcataattgagtatcttcctgttcaaaggtttnttattaactctacaaggtgcataagtctttatagaaacatgtttggatttgcgattggctctttgtgctccaccagaaatgtgtcttgttcgaaatgtatctagcatattgtgttaggatccaattgcaaagtatgggacgtgagtcccacattgaagtataagattctagtgtggcgttataagtcctacgcttttcgaactaaaatagctatctcttgtattgcggccttatcatattgccaatttatt

SEQ ID NO: 68902 - DNA, 117 bp, Glycine max
gggtgctataaaaaatatgtggatttgtctatggcattaaggaaacatcgttatatagaacttgacgcttatcagcacatcttgggcgtagcgattatcctgactggtatctgggtt

SEQ ID NO: 68903 - DNA, 395 bp, Glycine max
  unsure (1)..(395): unsure at all n locations
actcaagctcgcccantatctcgatgggaagtcgaatgtcattgctgtcgattaatggcttacacaacgcgangaaatatgtgcaagctgggcatagaagctagcccaagcccagctacgaatgaatgatattgcagaccaatggcgccaggatgtaagctacgaacaaagagacactgtcgtggtcaaactaccaactcgccgccaacgtcagcacaggaggcactattccaagctcgcaaaaaatactatggaccattcaacattgtaagaagatagcactgtgggttaccattgaatttgccatcaacttcctaaaattattcaatttttcactattcactacataagccatatcatccttctgatattgagggccacctaacccactaaca

SEQ ID NO: 68904 - DNA, 444 bp, Glycine max
  unsure (1)..(444): unsure at all n locations
agctaggagatggaggctctgtggtgtgaaagaattatgganaganagagagaggcgggagcacgagantgaaggaagacaatgggagataagtcgaactctgagttatgtctcacaagactctcattcatcagagtgacaacaagtgctacacatgcttctatttattgactaggcagcttccttgagaagctgtcttgagacacctttcttgagaagcttcattgagataacttncttgggaagctcaagcttatctacacacacccctttcataactacactcacgcttctgagaagcttccttgagaagatccaaaataagctagagcttatctactcacacctgtctaatagctaagctctcctgcttgagatgagaggctagagcttagcttcacacttcctattatagctgaagtcaccctcatgacaaatacatga

SEQ ID NO: 68905 - DNA, 312 bp, Glycine max
tcttcttcacgcttatctagctcagatccattttcttttcttctccacactacatgacaacttgaaacaaagctgcatagagattctcttccgcgtcgacgtggttcttcttacttcgtgatgggtatgcaagccatcttcaacggcgccttcttctcgacgacggattcttcttcaacagctctcttcattggcagatctgcaagtactcttgttgtcgccattctcgtcatcatcggttccatcagagtgttttagccactcttgcaagcactcattgtgtcgtcgattctcgtcatcatcaggtatgca

SEQ ID NO: 68906 - DNA, 380 bp, Glycine max
  unsure (1)..(380): unsure at all n locations
agctangcttgtgggcttctatggaggctggatctttgagcttcaatgggatcctttaatggtgattntccaccatggagatgcagtggaagacaaagganaagaggtgagaggaggcgccatccattatgtaataagccatggaggaaggagcttcaccatcaagatgagccttggataagaagcttggaaggatgcttcaatggaggaaaagaaagagggagggaaagaaagaggggggagcacgatattgaaggaataaaagagggagagaagtggaactttgaagtatatctcacaagactctcattcatcaaaantacaacaagtgttacacatgcttctatttatagactaggtagctttcttgagaagctttc

SEQ ID NO: 68907 - DNA, 330 bp, Glycine max
  unsure (1)..(330): unsure at all n locations
gctttgtgcacgaacctcattcgcatgttatatcctcacaagcttctttattgccaccctataaaagatgtgaacaaagcatcagacatcttcatagagcanacattggttatttaaacttaaactntgtcaattcattagtaaattttaacaatagtgaagttatgttntaaataataatatagttctagtaagatatgggtgtttgcgtgtgtcggtaagtgtaccgattcgcacaagtagtataaaacggtaagaccgactatcgtatcttcagagaatttgtttcacctagaccatgtacattcgatatgcangcacttatacgga

SEQ ID NO: 68908 - DNA, 321 bp, Glycine max
  unsure (1)..(321): unsure at all n locations
gatcctctcagncacctgcangctgcagcttgcaacananataagtttttgaagtgtgtcttttcaatttctcactaagtaaaatggatcattntcaaagtccaacgccttataatgatcacctcttaaagtaaaaaagaatcacttgataagaaagaactacgtaggtctgatttcctcttcgcaattgaggaatacgtatgagcaaagggaaacacccttgtcgacgacaaaaagagaaaaantataaaagggtataaaagatataaagacataaaaagggaacataaaaatcaaagtcatgtttgcacattcgatcaa

SEQ ID NO: 68909 - DNA, 386 bp, Glycine max
  unsure (1)..(386): unsure at all n locations
acattcattattctttctataananacattgtgtattcttggtaagttagaaaaagctcttataacaccttgaacatattgaanaaaaaactaagtgttgattgtaaattcatctatatgatgatcattgatttagtcattgtgcaaccacaaccaacaaatctcttttgattttttcagagccaatagtggcttggtataaacaaagattatcgaacttggggtagagcttgatttgtaaagtcagaagtgaccttgacataatacttgtaacttgtgaagttagtggaacttttgctaagaactggacatagtcttagtggtagagacanactagtataactcccttgtgttgatcttnttttttttttttttgcttaattgac

SEQ ID NO: 68910 - DNA, 442 bp, Glycine max
  unsure (1)..(442): unsure at all n locations
gatcctaagcaccgcggctgcagctactccgacaatggaggcctttggaatgtatctgtattctctcctttaaggacgcanggacacttatccctgacccaactacaattcgtgcgagaggtcgtccaaaatcaacaaggataaggaatgagatggattgggtcgaaccatctgagcacagacaaaaatgcagtataataaatttgttagttaacaacattacttattttggttagtgtacattagctatttgtggcgttcaatgaatactgtacttaaaaacataaccattaaccctaaccctaaaccctaaccctcacacctaaaccctatcaatgaatttgttactgagaaacataaccattaaccctaatcctcacacctaaaccctaaccctacaggacctagatcctaacctcacaacatctaaacactaacccca

SEQ ID NO: 68911 - DNA, 298 bp, Glycine max
  unsure (1)..(298): unsure at all n locations
tcttttcatctcttcttccttngccagaaagaattcgccaaggactaacccgctgaattctctttgtgtctctcttctcccttttccaaaagaatgaaggactaaccgcctcgatntttttgtgtctcccttctcccttgtcaaagaattcaaaatgacacagtctgagaaatcttttgaatcttcccatttccttatacaaaagtgttcataggactaaccgcctgagaattcttntgtatccccattcacagagtatcaaagctttaaccgcctgagatcttcgtcttaacacatt

SEQ ID NO: 68912 - DNA, 343 bp, Glycine max
  unsure (1)..(343): unsure at all n locations
gcacctgangctgcagcttcaatatgatatgagcagataaccagagctattaactnntttatgaatttattagccagaggcattcatgtatattagtttgggaaaacagagcagtggtttaatggtgaaaaaacgatacccttaaaaagaagaaattttctcctgttcattttcaatccagcaataaaaatagatttctctttttccctatntccttttgaagatactaaaaggaatgggttctggatatcatacttctagatttggtccttgggtttattcattaggaatagatatcttgattagtataataggggttagtgctttgcattntctatcacat

SEQ ID NO: 68913 - DNA, 345 bp, Glycine max
  unsure (1)..(345): unsure at all n locations
gagacatgaatggtttaagattggagtttcaaatgcttggaagcattcaaaattctcatttgagaagaactccatatctatngaatttgggtctataatggaacgagaggaaaagaggtttgtgtatcgtatacgctgttcctctgatgagaataatgatccatagggaatggangaaggaattggtgcttcctgtgaccctgaatgccgctgactccgactcgaagttcctttccgcttttttgatggttctgccatttgaggagtntttctgagatttcaaatggttcanatgacatacatttgaaaaagatgaagtttgggctttgtatggagtgatttgga

SEQ ID NO: 68914 - DNA, 372 bp, Glycine max
acgtgatcccagcacctgagctgcagctgctaagagactaaagatcagttgaacgactatgtgtttaattagatctacttaagaatatcgtatctgatggaattcgtttaattgttttgcatagatcatacactgcataaactccattataaagcttattagaagaatgtgtagaagtttcaccattggcttatatagatatagccattttttgcagtttctcgaaactatcatacaaactttgcgatcatatattcatgttttcttgtaaccacatgcaaactttctgcatattgaaagctatacaaattcttgtggttcactaaagttacaaagagatagcatctgttatatatatagtccgagattgct

SEQ ID NO: 68915 - DNA, 325 bp, Glycine max
  unsure (1)..(325): unsure at all n locations
atatccatcatatgtggcatgatataatngncaacggcgagcctggaattagaatatggtttgcgcttctgtcattttatttccttcttccttcaaaatattatgtgctttaacttctcctttttctaacccatcctgtaagattgcagaaaagattcagtagtacagaagttatatatgaaagatacatatgtatgcatgtgtgtctaactgtctataatactaacaattggatcatgcacgtngccacatcatgtgcactggcagcacaganattacatgccccagttagaatgtatctaaatcgatagacagatatgataat

SEQ ID NO: 68916 - DNA, 244 bp, Glycine max
  unsure (1)..(244): unsure at all n locations
cagctcattctcgcccaggacgaacctatgtccactaganatatttgctacatcgtcgcctacccaatagcgtaacgcatgtcatgctgccacgtggtgtttcactcgcagtgaagacataactgcttgataacacagacaccctccaanaatatcttgaaaacaaacccgtttataaaataatttctaaactaacccaattagatcaattctgctcgagatacatgactctaacgttaggact

SEQ ID NO: 68917 - DNA, 199 bp, Glycine max
aaggttcttttttaaggagacttccatctggagcttcgcttcattccctacagaacaagtattccttttttcttcttttatggattctaccttcctctactttcattacctacctctcagatattttctcaaatatatctgtctcatctattgttatctagcggcgaacaacactttaatgtaacttgttcattttcac

SEQ ID NO: 68918 - DNA, 431 bp, Glycine max
  unsure (1)..(431): unsure at all n locations
agctngntatatgatcccaggagacttattaantttattctagaagtacaatgagatttggttgggtgggatgcacttatgggccacagtccaaaaagttggagaaactgctcaaggttctatatgcggtctcctgataccataaatatctaacgattctatgttggcttcgtgttctagtctacttggtcctttgacacttgtaatcaagattaatcttgcaccacttaacttttctaaaggtgattattgtaattctagcggaagacatatgaacatactatattctctagttttagtttctgctttgcattcttgtagagaagctaggtcgaaatttcattatattggacgctactaaaataacctataatcatgtgcagatcaactttagcagttcttcggcttgcgaatgatactcatgagcaaca

SEQ ID NO: 68919 - DNA, 369 bp, Glycine max
  unsure (1)..(369): unsure at all n locations
agctaggaaggatgcttcaatggaggaataganagtgtggagagattgagagaggcgggagcacgtaattgaatgaagatataaagggagagaagtctgaacttgagtagtgtctcacaagactctcattcatcaaagntacaacaagtggtacacatgcttctatttatagactacgtagcttccttgagaagctntcttgagaatacttccttgagaagctcgtttgataacactttcttgagaagcttgagctttatctacacacacccctctcataagctaacttaccttcttgagaagcttcctcangaagattcctaaagacgctagagcttggctacacatacctctctgatagctaagctc

SEQ ID NO: 68920 - DNA, 347 bp, Glycine max
  unsure (1)..(347): unsure at all n locations
caagaatcaaagagtcggtcggtcaataatcaagattaatgtgaacattcangataagactcaagatgtacatgaacttcaagagaagcatcacgataagtatattaaagatcttttcaaacgaaaagattgaatagcacaattttgttcttgagaatacttcacagaaaaatctcttaccaagagttgtactctctagttatctagtaccagaaagcaataatcgagtaccagtagctaacattctggttcaactgatttacaaagcagtaatctgataccatgagcatgtaatcgattaccaatgtttaaaacgttagatttctgatttcaagagacacaacttg

SEQ ID NO: 68921 - DNA, 365 bp, Glycine max
agctaggaggagtttgtgtgagaggtttctcacttttacactccacctcctacagattgcttatgctgtagccattgtgttctctaatcaatcaccacataagggtatacatggaggaacataattctctgagtggcatgaagcagagaagctattgccacattttagcaaaccggcaagttacaatgaggcaatggactctctctcattaaaggggccttatggctatgtatgtattgattctattgtagtccttctctcttgcttccgtagaatgtattaataaacaaagatgttctttctttgagaagctacataccaactttgtgttgtccataacactcaatatgcagatgactagaatc

SEQ ID NO: 68922 - DNA, 379 bp, Glycine max
  unsure (1)..(379): unsure at all n locations
ccattccttgttcgggctcatatggaatgaacatccagagtccaagatccattctttatgagagttttgatttgtaattgacaaagcttcaacactacatttcccatgntgcttgtttgctcatttgagcgatctttgntgtttggacaatccttcttgaagtttccttccttatcacaaatgaagaagcacctaattntcttgcctctggacttcgatcttaatgatttcttgggcttgaaatccttcttctcttgtctacctcgtgtgaatagaccttcatcaatcttgtctctctttgagtcaccgnttctttggattccttnncagttattgatccttaacttctgtcatcgtaagagaatgtttccatacaaca

SEQ ID NO: 68923 - DNA, 479 bp, Glycine max
  unsure (1)..(479): unsure at all n locations
agctatgcgagattcctcacggacaactgtacngtatcttttcggaagcgcctctgcttagatcttcttcacggaaacaattcttccaagcaatttccatagagagagaagtgtctaaggagctgggatcccttccatcttgctttcctcccctatttatagncaaataggggaggtggttgcccgccagctcgcccaggcgagctcagctcgcccaagcgagcagggttgcttcctccagaagcaactctcttctggaggaatcttcttgtaggcccaagtgggcctgggtgctatttgcacctccattattactaagtacaccctcttctgtagtattttggtgattcttttttcgtaaaggtacggatactcacatatttacgaacgattcttgtttctttcgtaatgtaccgaacttgccgatacatatcatccctttttgctacggaatgttcggacctcactaatatgcatga

SEQ ID NO: 68924 - DNA, 438 bp, Glycine max
  unsure (1)..(438): unsure at all n locations
agcttctaaggaagttttttatgatatctngcttgcgatgctccnaggctactaatagaagcgtgggccacacttgttgtaacttcgacgaatgagagtcttgtgagacacaactcacagctcaactcttctctgttattcttgcttcaatttcgtgctcacccctctgtctttgtctccgtctttcttgttctcaattgaagcatactctccatgcctcgtatccaaggctcatccttggaggtgaagctctctattccatggcttattcttaccggatggtgcccttcttacctcttttctttgtcttgcgcgcatctcctatgggggaaaccccattaatggccctcttgagctcaagatccttcttcttgagccccacagccagttctatactattgtggcactttacttcttgttttctggtgtccatcgacg

SEQ ID NO: 68925 - DNA, 254 bp, Glycine max
  unsure (1)..(254): unsure at all n locations
actcaagattttcggggtaagtgtgagtgtactactattgcacttcacttaaccatgntttgagtaactcgcttagcgagatgatccgctaagcgagagagacatttggctttccgcttcctctcttggcaggccaacatgggcccatttaaaattctttggcttaacaagccatccgctaagcggtagcgagagacgtntggtttctcaacatgctcgcttagcgggcccgtctaccgagcccaagcccaaat

SEQ ID NO: 68926 - DNA, 314 bp, Glycine max
  unsure (1)..(314): unsure at all n locations
agctataccccgcccnnccttttaacgtctctggttcatacatgctcgcccaggcgagctaacctagaccatttttatgttttgcaaaaatttaaatatcctctggttatgcttgtatatttacttaattcctaggagtgcanataaactaggcatattcgaatataacttaagaaaatagacgagtgaataaaaagcagaaatttaaaaggtactaggctgcctcctagtagcgcttctttaacgtcttgagtcggacacaggatgatggntgattgaccatgggcctatcacctgcacgtacctgcccctat

SEQ ID NO: 68927 - DNA, 380 bp, Glycine max
  unsure (1)..(380): unsure at all n locations
agctataagtcannaagcctagttgaagggtctggtttatctatatctttccctgnaatcgaatacattagaacacaaaggttgtaatctattaccagaaggcttcaatagttacaggatactcctgtaattgattacaatggtatgtaatcgattacacattgtccctgtctataaatatcgtgtttacacataaccctcttatgctaaacctttccccacttgagtgacggcacatgctcttcctataacttcatattcttgtatcttcctcaattcttcaccacatcactttatacaatatccaatcttcatcatnttcaattctctttaaacccactgatcaaaatctgttgtagcatctttcaatggcacagcca

SEQ ID NO: 68928 - DNA, 341 bp, Glycine max
  unsure (1)..(341): unsure at all n locations
ctactttggcactgngttatcattaccatagagcgaataccatattttgtgataatttcaaacaagctgtttcggaaaatgtcctttggccaaaccttttgcatcatcaagtaaagaatgttgtctaagaatctaagtactaacttcatcattgactcttgaattccgagtcattaagttggataaaacttgagaagtgttatcttgtggcatatcaaaacttcatattaagtattgtcgcaacctacccttcatcgggagggcaacgcgagactcacatgtgtgttttctaagaaaggaaaatgcacggagtctccaccaaccgttattcatgaaaatgt

SEQ ID NO: 68929 - DNA, 273 bp, Glycine max
agcactgagctcagctaagatgccgaggcttctcccttattgttgtgatattatggctttagaattccattcttggatacggggtggaaccaagctcaagcttttacaaatggggtcatcaagtcaagatgaaatatggcagtaaccatcctgcataattggtgccaaagatgaatcgagtcacatcactgcttcgtctactgacgagcatatataggattgttgatgtccttgttactttcagttgctccttgacagagatgtcatggacca

SEQ ID NO: 68930 - DNA, 417 bp, Glycine max
  unsure (1)..(417): unsure at all n locations
ctcgaggccgattatgcgcatatatatattacgctcgtatagaactatggaagcgtgtgagcaattcacatggtcataactcttcactcagaggtccgattcatgcgcataatatatagagatgctcgatattgaacaaccaaagctctcgataaagttaaatggtcataactctcaacttcgaggtccgattctggtgcatactatatcgagattcacgaaattgaacaaccgaagctctctagaaatccaaatgatcataacttctctcacagaggtcagatcttggcgcataatatatagagacgctcgaaattgtcaaccgaagctcttgataattcaatggtcatacttttactggaggtcgatcatgncatatatatcgaacctcatttgacatggagcttgacattcaat

SEQ ID NO: 68931 - DNA, 80 bp, Glycine max
agctagcatgcatgttgccatgagaccacgtctctgtttattgtgaattctgcatgtgagaatcggaacacagcttcaca

SEQ ID NO: 68932 - DNA, 413 bp, Glycine max
  unsure (1)..(413): unsure at all n locations
gcttaactgaacactcgtaagttgccactcaatagctgctagtcaaccttacctttatctgntttgcaagttacaggttgcacactntatggtggagctcatgggtcaggcttgtgtattcccactgaagaaacatctcacgaagttaattacatgggaaaccagcctagacataaatttaatgcaggtggattntctggatttctacatggccaaccttaccagcagcataatcaatggagaactcaccctggtaatcagttcaataaagaccagngtgggctacctaacacgccacagcaacaagggcctcgcttatctgagagaacaacatagttggaagaaactcttgctcagtttatgcaggtgtcattgactaatcataagagcatagaatcagccataataaatct

SEQ ID NO: 68933 - DNA, 279 bp, Glycine max
  unsure (1)..(279): unsure at all n locations
cgatggttgcgcttatcgcattctttcccgctaagctgaacttacataatgaatctgtggcttggcgcatgatggcgcgcttatcgcagctataataagatctcacatagaggaagtggcacttagcgcattattcacnctaancccactgcataatgtgcaacttacagtgaagatattgggcttaacgtagcgatgtgtgcttagcttgaccattcacccaatcaatcaggggtctttgcgcttagcgagagcaagctctgcttactgcatgaacag

SEQ ID NO: 68934 - DNA, 185 bp, Glycine max
aaggcttccggctgaatagaggggatatatactgttcatgtgatggaacgatctttttataggggtgttcttgccaaaattgggcatccttaaaacgagatatgggaggttaaaccaatgcatgtcaaaggaaaaaaccgctcttatgttggaacattaattgtgggtgtttaatgacttaatta

SEQ ID NO: 68935 - DNA, 323 bp, Glycine max
  unsure (1)..(323): unsure at all n locations
agctaccattgttcaattacgagcgtttcgatattttgtgcgncctgaacggacctcgcgtggataatttatgaccatttgaatttctcgagagcttccattgttcaacttcgagcgtctcgatagatgatgcgccagaatcggaccaccgtgagacaaattaagaccatctgaatttctcgagagacttcgttgtttaatttcgagcggctngaaatatgatctgcctgaattgtacctcccggtgaaaagttataactattcgaatttctcaagatcttccgtgggttaattgctagcatccccatatgtgatgtgcctga

SEQ ID NO: 68936 - DNA, 460 bp, Glycine max
  unsure (1)..(460): unsure at all n locations
atcacatgtggtactaggtggcggtcgggctatggtgcacaacaagcttttctcatccacaatgcgcgcataaacccaccatccnctgttgcccacctccaactgagctcacgtactcccacgtagcccatatactcgtttctctcaacaccgggtccccatcaatcctctcaagcttccacaacatccaagataaacaacattcaaacagcacaagctatcacagccaagctaaacagagcaaaggcagaatactctgctcaacacatcaaccaaaatcacagcttttctcacttaaagaccacagtaacaattcctttgatccaattcgttaacccgtgggatcgactccaaattctactggaagtctatagtgcataagcctacattttgaccgctgggactactagcanacatcagaactcattctgtactactctntccacagccaaccacacac

SEQ ID NO: 68937 - DNA, 489 bp, Glycine max
  unsure (1)..(489): unsure at all n locations
ctatgcgcatacttccttacgaacgttcactttcacaagacatcctatcaactaaganaaatgcacccatatacaatcaaggtagcttcattacctagattatgtacttccaacgtgtatttgatatatacatcacacacgcctccttggctgaatttacatacatgcatactcaaagcattttgtggtaccaaaaactgcacatgcgctcatcttggtatttctaatacccatacatatacaaacttcacgatgaatcttgactacctacacaataaggtgctacctttcatggtttttgttcaagtttttgctacctaaagccacatgcaaagtcaagcatattttcctttgctgactaaaaattgattcacattagaaggtatatatctttttgtaatatgtcttctcacataacatgcaacatattatatatattttgtgagacatntgcttcaaaattattatcatacatcagatttgcttcta

SEQ ID NO: 68938 - DNA, 245 bp, Glycine max
gcctttgctttgctcacagaaaagcttactaaggcacctgttctatctcttcctgactcttctagaactattgagctataatgtgatgcctctggagtgggagttggagctgcatggtatcaggtgggcaccctattgcttattttagtgaaaaacttcatagtgccaccctcaactaccccacctatgataaagagctttatagcctgactatagcactccaaacttgggaacattaccttgtt

SEQ ID NO: 68939 - DNA, 362 bp, Glycine max
tttcttatattgctggcaatagtttgggtcaggatcatatgaatactttgcactcaattagatttagataacagcattcttatatatttggcaaatctatggccgtaaagaattaaattgctattggctgtttgtgtggtgaagtgaagaagaaagacctgatgttttcttagcctaattggattttttgagtttataataaaaaaaatcaaattgatgggcttgacacataattttccaagatttcagaaaatgtgttagaatattgtactattaatattacttgtcagaaagctttatactcttatatcattgttggaagagaattcaagactaacttagtactttgctcaaggcacacg

SEQ ID NO: 68940 - DNA, 405 bp, Glycine max
  unsure (1)..(405): unsure at all n locations
gctgttcatcttgagataataagaggtcatcctctattgaagttgatggngcaacatatntctttggcctaacaggaactccaatattnttacagcttctaatgttatgaatggnttggccacaccttccacatgtaaactcagccaatttcctctatagcttgtcctgtgacattgtcctcatctacagatctccttctatttttctttggccttcctctttggacctttttatgtggtggaacagggtgtgtatactgtgtctgggcccaatattgtggtccttggacttgttcaataaaatgctgggatgtcttattataagcttctatagacagccactcatgacacatgtnctcaagcttcccttctttgtgagttattggtgcaatggcatgtcggcat

SEQ ID NO: 68941 - DNA, 324 bp, Glycine max
cattagttagacgtgcatatgttaggcgattgactaaagctgagaagacagttattgctgatatgatgaagtcaatggtcaaaccaagaaatattctactaactctaaaagagcacattgccaatacatgtacgaccctgccacatatatacaatgcaagaagtgcataccattctttcataataggaagtgatagcccaatgcaaaatctaatgaatcttcttgaaccagaatcatttattcattggcacatattaaaggacgaaaacgtggtttgtgatatcttttggtgtcccctgatgctctgagttattcaatgcatgt

SEQ ID NO: 68942 - DNA, 150 bp, Glycine max
  unsure (1)..(150): unsure at all n locations
agcacctgccgctgcagctttaccnagaagtnttactctctggagatctattaccagtttactgggaacgattaccagagcacagttgtgttcaatagctttctaactgaattacaacgttcaataatttcagagggggaatcgatacaa

SEQ ID NO: 68943 - DNA, 296 bp, Glycine max
  unsure (1)..(296): unsure at all n locations
ctcacaagcaagcctccatcaagnggcaatcagagcacaagagcttctattacgtgcttttgatacctccattaatggtcagtcttaccttcttctccattgatgactctgcatctctgtccatggatcttctctcatgacttgtgctaaagtgatgttaattctatcagaagtttcaccaaataaactcgctatagaagctagatttgatttctatggggcaaacatcttgctcttgttctcgaaccaccaattgcgtggagtataaggtccttcgagttctctgtagctacttt

SEQ ID NO: 68944 - DNA, 374 bp, Glycine max
  unsure (1)..(374): unsure at all n locations
catgcatgctctgggggtggctggctattatagaaagtttattgacggatnttccacattggcattgcccctaactaaggtgactcgtgagaacgaatagtttgtctggaatgagaagtgtgatcaaacgttccaagaagtgaagaggcggttgacgacagctccggtgtaattttgtccgaccctaagagaccattttgagtgtattgcgatgctagcgggataagttggggtgtgtgttgatgccagagggaagagtggtggcttatgcctcacgtcatatactttctcatgaagttatctatacgatccatgacttggtactagcacatgtggtcattgctttaatgattggacgtctacttatactgtac

SEQ ID NO: 68945 - DNA, 240 bp, Glycine max
  unsure (1)..(240): unsure at all n locations
atgactcatgccaccatcagggatgcacgctgataacgaggntgcacctgatgagcctacacataagcatntgtcacaattactagtgcttgaaaatatgttatcaatgacttcttctcgaacttccatatagggtggtgaggatggacaactcactagtatatctttttcacccgacactataaccagatgaccttcctcctcacacttcaattactagtgcaacattgactggaccac

SEQ ID NO: 68946 - DNA, 344 bp, Glycine max
  unsure (1)..(344): unsure at all n locations
ctgcagctgcagcttagatctaacaccaaagtcgaaatactatgtatatttaatttattatttntgaaacaatcacaatattaatgaatcagaacacaaaaggaaaaaggaaattattgcgtacatcggcaaccgtgtctccatctatgttgacaatctgaaatgttgttttgccaccgattttctttatgcagtacttttggcactccactggaatctggcacgttatttttcttgtgaccatcttataacatcttttaactagaaaccacggcttctcctgggtntngaagttagaattatcactacctctatagacatcccaacgtccaaaagcaagtagt

SEQ ID NO: 68947 - DNA, 338 bp, Glycine max
  unsure (1)..(338): unsure at all n locations
ttctacccctacactatactcccgttgattgctngaaanacattacaccgacactccttatagattacacttacctcccttaactgtnntgaaaacattacaccatgttcccctattagagaagttactgtaaatgttaaaaaagcacggggagtttgtgtaacttcacaaacccttatgggtggttagggtaatttactatnttattnntccccttctttncctgtgtctctaactgaaggtagcactgtctctgtacccagggagtcattgttctttctaagtgaatgggactntatacacaggaacatgcttaagattccaatccatttatgtat

SEQ ID NO: 68948 - DNA, 326 bp, Glycine max
  unsure (1)..(326): unsure at all n locations
agcttgcatatgtgctctgcgcgcacatgcaaagttctagtngtcttaagtgaccatgcgctaagacttcaagcgcgcgcctagcatccatgctcaatacaactggcttccagcttggatttacatgctgagcatgcactggcgtgtgaacgcactgttctaattcttaacatcttctcaacctctattttatgttgaactctataataaaaactacccaaaccatgacatccctacttaggcttctcagataacaacttaaagagctaatttctttttttaggtagaagaactttaaagaaagaatagataattctatgttatta

SEQ ID NO: 68949 - DNA, 260 bp, Glycine max
gcacttgtcgccagactctgtgatttatgctcctctgccgaccaccacacagacctttgcccttctatgcaacaatctgaagcaattgaacagcctgaagcttatgttgcaaacatctacaatagacctcctcaacctcagcagcaaaatcaaccacaacagaacaattatgacctctccagcaacatgtacaatctagggaggaggatagataccaaccttagatgggcgagtcgttcacaacaccagcaacaacaaca

SEQ ID NO: 68950 - DNA, 291 bp, Glycine max
  unsure (1)..(291): unsure at all n locations
agctntagcagatggacctgagagctgttcantntcttcatatcttccgcaatactcatcacctctatcatatgtaataatcttcacatctatgtataattgcccttttacttcattgtagtaaatgtctaagacattcattgtctaagaaatctcgggcagtaagtagacataaccgttacatgaattatcatcagtatgggtgataagtattattccttttcgaaagatctaacatcaagatgtccacaaatatcagtatgtgttggatcgagtgacctcagaataact

SEQ ID NO: 68951 - DNA, 430 bp, Glycine max
  unsure (1)..(430): unsure at all n locations
ctcaagctcgagatgaggaagtgttgaagggtgaaacttcctgcttttattgttgaccacagagcggtacctggagatatgtggcggtggtcaagagaccttgcggacgtcatgtggtgtgctattgcccaaatccaagcttgaccaatcccgactcaacccgggcatattcggtcagtgagaacctgtgatgtacctaagcaagcgagctcctggcagtcaatagataaaaggaacaaagaccacaaatcatggaggcttgtggtggctggcccgctgtgaaacttgatngatatgtgagatatggtctctggtaatcgataaccaagggtgggtaatcgattacaacggctaaatatgaaaacacgaggctcagatggtctctggtaatccattaccacggcgtgtaatcgataccacgcttgaaaca

SEQ ID NO: 68952 - DNA, 175 bp, Glycine max
taagcactgggcgtgcagctccgggcaaatggtttatacttacccaacggatcaacaagctagggttatctaggctgaactcatattcgtggtgtgtttgaaagggaataagtcttatgctcacgtctccccttttatcttttatggtcagggtggtcttcagcgacaaccgctt

SEQ ID NO: 68953 - DNA, 353 bp, Glycine max
cccgaaccactccagaggagcatacgaagtggggactatccaccccaggagatccaagaatacctgcgccctaaaagcaacagaacacatccataaaaagacggtaactgccacccgagacagaggtggaacccccagagaacgcaccatatcttgctcaacaagctcgcgctaatgaacccgatgtacgcacgagacacctcaactatacagactatcagggaaaccctcacctggctaatccaagagggccccctacacctacaaaccaccgactccggggaagaccccagacatataccaaacaaccataaccacacaggaatcatgtgcacactcatcagagacaccca

SEQ ID NO: 68954 - DNA, 316 bp, Glycine max
  unsure (1)..(316): unsure at all n locations
agctattggagtagaaacatgggacttactcattttatttcaatatganagccgnatctagtcaaggtctgagagaccatactagtttcctaacgacttctaattatgtgcgccgttaagtctatcatatgctgacaattaccgagaagcccatgaatctcttctggggcagagtaggtgtttgccacagcttggtcttggctacaagcggcgaagttctcgactccgttcatgtaagagcaaatgatcatccacatggtggcttttggtgtaagaagtcatcatcttcctctagcctattttccgcgtatacttg

SEQ ID NO: 68955 - DNA, 61 bp, Glycine max
atctttaaagatagcctaaacacaaaaacatatcttaaaagagggaaacctgataaattaa

SEQ ID NO: 68956 - DNA, 310 bp, Glycine max
  unsure (1)..(310): unsure at all n locations
tcagatatcttaagaagggggggttgaattaagatattgatgcaagctccatgggagcttgtangcctaagatcttcttcatcaatggattcctttgcttcttggaagataaatggcagcggaatggggaaagaagagagagatgagacgccacttccaggagaagatgagtctataagaagctcaccaccatatgaggccatggtaatagcttggtgaagaagagaataatgatgaaagggagagaaaacacgaaatttgtctctaatgactttgaatctgaattaatatcaatgtcaaagtgaaaaaa

SEQ ID NO: 68957 - DNA, 444 bp, Glycine max
  unsure (1)..(444): unsure at all n locations
agctacttgagatgcctttcgggtatctcactantttctntggngananctactatctcattagagacattgaaatagtcgatgaatctctacgctggcacaacatatggaaacttataatccactaactgatgactcttgaacatgatgtctntaatcaaaagtgtccaattcatctagatatcagattgtagaccatacacaatttgtagaacatcgttagttacttgtgcatggctactagaccttggtgtgagaatatatgtcatcaagtacacgggcatnttctcttagctgttaaaccacctacacctatgtgattccttaagttccttgctagggcaaagagcttacctatgtaattttgcatcttggtgtacccataagcagagtcttcagacttgcggactccactcatgtccagcccggctataggcttccaac

SEQ ID NO: 68958 - DNA, 415 bp, Glycine max
  unsure (1)..(415): unsure at all n locations
tatcataagcgantacatagttatttttgagacaatgactganttattcangagtctctggcttaatcaattaccatgtgatataatcgattacttctctctctataagtgtttcagaagtaaacaagaacactctaatcgactactttgagtatctaatcaattatattgctcttgagctggttctatgttcttggaagaacactctaatcgattaaaagataatctaatcgattaccttgtagatttaatcgattacaagcgcgtataaatggtttctctatatataaccacctcgtgttctctctaataacaccacactttgagcttctgaatgagctacgatcacgtgctgctattagttcaacatagagaagaaaaaagtgcttanaaactgtgactcacaacttctatg

SEQ ID NO: 68959 - DNA, 363 bp, Glycine max
  unsure (1)..(363): unsure at all n locations
gatccttaagcacctgcaggctgcagcttcttcttgctttccaagaattctacctttttgcttctcagagaagctccccattgtatagtcatgtnatttggcatgggggtgagcttatctatttgaggggtgtgaatatccccccctctacttctcaaggaagctattttactctaacttaccaacgaagcttccttccttgcttctacagcaagcatcacatgggnatagctataaatagaaacatgtgaaccactcgcataactttgaagaaaggtgaacttgtgaaaacacttcaaaatcagttctcctaattccttcattcccaccccatctcttttctgatcactcctctctagcctc

SEQ ID NO: 68960 - DNA, 228 bp, Glycine max
  unsure (1)..(228): unsure at all n locations
tgtctcagcgtttatgcgagactgttaccaacatgctatctatcatcgccaagaccaagaagaagtatgtctagccgcggcccacgagcatatgattgcngacgaatatgcccaagtatacgcggaaaaagaggctagatgaagggtgatcgactctttacaccaagaggcaaccatgtggatggatcggtttgctcttacctcganagggagtcaagaacttccccg
